United States Patent Application Publication US 2014/0004565 A1 - sequence listing, part 41

SEQ ID NO: 939334 - RNA, 19 nt, Artificial Sequence
  Description of Artificial Sequence: Synthetic oligonucleotide
uagccaagucgcacaaaga

SEQ ID NO: 939335 - RNA, 19 nt, Artificial Sequence
  Description of Artificial Sequence: Synthetic oligonucleotide
cucauagccaagucgcaca

SEQ ID NO: 939336 - RNA, 19 nt, Artificial Sequence
  Description of Artificial Sequence: Synthetic oligonucleotide
ugcgaucacucgugcagag

SEQ ID NO: 939337 - RNA, 19 nt, Artificial Sequence
  Description of Artificial Sequence: Synthetic oligonucleotide
gaacagcacaacgucugcc

SEQ ID NO: 939338 - RNA, 19 nt, Artificial Sequence
  Description of Artificial Sequence: Synthetic oligonucleotide
uacaccgugaugcgccgcu

SEQ ID NO: 939339 - RNA, 19 nt, Artificial Sequence
  Description of Artificial Sequence: Synthetic oligonucleotide
uaaaagguguaggcagcug

SEQ ID NO: 939340 - RNA, 19 nt, Artificial Sequence
  Description of Artificial Sequence: Synthetic oligonucleotide
uggcacgaacuugucaugc

SEQ ID NO: 939341 - RNA, 19 nt, Artificial Sequence
  Description of Artificial Sequence: Synthetic oligonucleotide
aggaaacuccaggccaggc

SEQ ID NO: 939342 - RNA, 19 nt, Artificial Sequence
  Description of Artificial Sequence: Synthetic oligonucleotide
auuagcgcgggcaggcgcg

SEQ ID NO: 939343 - RNA, 19 nt, Artificial Sequence
  Description of Artificial Sequence: Synthetic oligonucleotide
uggacucgacgcuuuccag

SEQ ID NO: 939344 - RNA, 19 nt, Artificial Sequence
  Description of Artificial Sequence: Synthetic oligonucleotide
uccagauggcgagcgagcc

SEQ ID NO: 939345 - RNA, 19 nt, Artificial Sequence
  Description of Artificial Sequence: Synthetic oligonucleotide
acagucgauguggaugguc

SEQ ID NO: 939346 - RNA, 19 nt, Artificial Sequence
  Description of Artificial Sequence: Synthetic oligonucleotide
ucccaaacuaugggugcgg

SEQ ID NO: 939347 - RNA, 19 nt, Artificial Sequence
  Description of Artificial Sequence: Synthetic oligonucleotide
cauuagcgcgggcaggcgc

SEQ ID NO: 939348 - RNA, 19 nt, Artificial Sequence
  Description of Artificial Sequence: Synthetic oligonucleotide
ugcgcgccuuugcagcugg

SEQ ID NO: 939349 - RNA, 19 nt, Artificial Sequence
  Description of Artificial Sequence: Synthetic oligonucleotide
aacucgugcagcagagugu

SEQ ID NO: 939350 - RNA, 19 nt, Artificial Sequence
  Description of Artificial Sequence: Synthetic oligonucleotide
ggaucggccgcauuagcgc

SEQ ID NO: 939351 - RNA, 19 nt, Artificial Sequence
  Description of Artificial Sequence: Synthetic oligonucleotide
gucacccucaggccaauac

SEQ ID NO: 939352 - RNA, 19 nt, Artificial Sequence
  Description of Artificial Sequence: Synthetic oligonucleotide
accgagugggguggcagcc

SEQ ID NO: 939353 - RNA, 19 nt, Artificial Sequence
  Description of Artificial Sequence: Synthetic oligonucleotide
uggcgugggaauuggcgca

SEQ ID NO: 939354 - RNA, 19 nt, Artificial Sequence
  Description of Artificial Sequence: Synthetic oligonucleotide
aagccggccuugaggaaac

SEQ ID NO: 939355 - RNA, 19 nt, Artificial Sequence
  Description of Artificial Sequence: Synthetic oligonucleotide
ggugccgcuuacauggugg

SEQ ID NO: 939356 - RNA, 19 nt, Artificial Sequence
  Description of Artificial Sequence: Synthetic oligonucleotide
gaauuggcgcaggaccugc

SEQ ID NO: 939357 - RNA, 19 nt, Artificial Sequence
  Description of Artificial Sequence: Synthetic oligonucleotide
gucuauccaagccccgccc

SEQ ID NO: 939358 - RNA, 19 nt, Artificial Sequence
  Description of Artificial Sequence: Synthetic oligonucleotide
uucgucacccucaggccaa

SEQ ID NO: 939359 - RNA, 19 nt, Artificial Sequence
  Description of Artificial Sequence: Synthetic oligonucleotide
ugacgggcaaagccggccu

SEQ ID NO: 939360 - RNA, 19 nt, Artificial Sequence
  Description of Artificial Sequence: Synthetic oligonucleotide
gguggcgugggaauuggcg

SEQ ID NO: 939361 - RNA, 19 nt, Artificial Sequence
  Description of Artificial Sequence: Synthetic oligonucleotide
acacacgugggcauguuga

SEQ ID NO: 939362 - RNA, 19 nt, Artificial Sequence
  Description of Artificial Sequence: Synthetic oligonucleotide
cuggccgcucaucauggcc

SEQ ID NO: 939363 - RNA, 19 nt, Artificial Sequence
  Description of Artificial Sequence: Synthetic oligonucleotide
cauagcgcgugaagauggc

SEQ ID NO: 939364 - RNA, 19 nt, Artificial Sequence
  Description of Artificial Sequence: Synthetic oligonucleotide
aucacucgugcagaggaca

SEQ ID NO: 939365 - RNA, 19 nt, Artificial Sequence
  Description of Artificial Sequence: Synthetic oligonucleotide
gcaugguagacuucgucac

SEQ ID NO: 939366 - RNA, 19 nt, Artificial Sequence
  Description of Artificial Sequence: Synthetic oligonucleotide
agccaugcguugguccucc

SEQ ID NO: 939367 - RNA, 19 nt, Artificial Sequence
  Description of Artificial Sequence: Synthetic oligonucleotide
uccgaccccucucuccuug

SEQ ID NO: 939368 - RNA, 19 nt, Artificial Sequence
  Description of Artificial Sequence: Synthetic oligonucleotide
cuuuggggcuucccagugc

SEQ ID NO: 939369 - RNA, 19 nt, Artificial Sequence
  Description of Artificial Sequence: Synthetic oligonucleotide
gacgcuuuccagaggucgc

SEQ ID NO: 939370 - RNA, 19 nt, Artificial Sequence
  Description of Artificial Sequence: Synthetic oligonucleotide
gucccaaacuaugggugcg

SEQ ID NO: 939371 - RNA, 19 nt, Artificial Sequence
  Description of Artificial Sequence: Synthetic oligonucleotide
guguugacugucuccggac

SEQ ID NO: 939372 - RNA, 19 nt, Artificial Sequence
  Description of Artificial Sequence: Synthetic oligonucleotide
ccugcgaucacucgugcag

SEQ ID NO: 939373 - RNA, 19 nt, Artificial Sequence
  Description of Artificial Sequence: Synthetic oligonucleotide
cauggcccgcagcacaaag

SEQ ID NO: 939374 - RNA, 19 nt, Artificial Sequence
  Description of Artificial Sequence: Synthetic oligonucleotide
aacuaugggugcgguucag

SEQ ID NO: 939375 - RNA, 19 nt, Artificial Sequence
  Description of Artificial Sequence: Synthetic oligonucleotide
uucagcgggucuccccuga

SEQ ID NO: 939376 - RNA, 19 nt, Artificial Sequence
  Description of Artificial Sequence: Synthetic oligonucleotide
agaggucgcacggcguugg

SEQ ID NO: 939377 - RNA, 19 nt, Artificial Sequence
  Description of Artificial Sequence: Synthetic oligonucleotide
aggaacucgugcagcagag

SEQ ID NO: 939378 - RNA, 19 nt, Artificial Sequence
  Description of Artificial Sequence: Synthetic oligonucleotide
aggaccugcgugcuucacu

SEQ ID NO: 939379 - RNA, 19 nt, Artificial Sequence
  Description of Artificial Sequence: Synthetic oligonucleotide
ugggauaacucgggcguca

SEQ ID NO: 939380 - RNA, 19 nt, Artificial Sequence
  Description of Artificial Sequence: Synthetic oligonucleotide
cgauacaccgugaugcgcc

SEQ ID NO: 939381 - RNA, 19 nt, Artificial Sequence
  Description of Artificial Sequence: Synthetic oligonucleotide
cagggcgacagacagugca

SEQ ID NO: 939382 - RNA, 19 nt, Artificial Sequence
  Description of Artificial Sequence: Synthetic oligonucleotide
gcugccugggauaacucgg

SEQ ID NO: 939383 - RNA, 19 nt, Artificial Sequence
  Description of Artificial Sequence: Synthetic oligonucleotide
ggcacugagucuccaacac

SEQ ID NO: 939384 - RNA, 19 nt, Artificial Sequence
  Description of Artificial Sequence: Synthetic oligonucleotide
gaaggucggcacguggcgc

SEQ ID NO: 939385 - RNA, 19 nt, Artificial Sequence
  Description of Artificial Sequence: Synthetic oligonucleotide
agcgggaucggccgcauua

SEQ ID NO: 939386 - RNA, 19 nt, Artificial Sequence
  Description of Artificial Sequence: Synthetic oligonucleotide
cuugacgggcaaagccggc

SEQ ID NO: 939387 - RNA, 19 nt, Artificial Sequence
  Description of Artificial Sequence: Synthetic oligonucleotide
ccgccguugaucaugauca

SEQ ID NO: 939388 - RNA, 19 nt, Artificial Sequence
  Description of Artificial Sequence: Synthetic oligonucleotide
ggaagaccgaguggggugg

SEQ ID NO: 939389 - RNA, 19 nt, Artificial Sequence
  Description of Artificial Sequence: Synthetic oligonucleotide
agacagugcaggacacacg

SEQ ID NO: 939390 - RNA, 19 nt, Artificial Sequence
  Description of Artificial Sequence: Synthetic oligonucleotide
augcgcugcucacagucga

SEQ ID NO: 939391 - RNA, 19 nt, Artificial Sequence
  Description of Artificial Sequence: Synthetic oligonucleotide
gggaucggccgcauuagcg

SEQ ID NO: 939392 - RNA, 19 nt, Artificial Sequence
  Description of Artificial Sequence: Synthetic oligonucleotide
gaccugcgugcuucacucg

SEQ ID NO: 939393 - RNA, 19 nt, Artificial Sequence
  Description of Artificial Sequence: Synthetic oligonucleotide
gaccgagugggguggcagc

SEQ ID NO: 939394 - RNA, 19 nt, Artificial Sequence
  Description of Artificial Sequence: Synthetic oligonucleotide
gcacauugcgcuucuuggc

SEQ ID NO: 939395 - RNA, 19 nt, Artificial Sequence
  Description of Artificial Sequence: Synthetic oligonucleotide
uggcgugaggccccgccca

SEQ ID NO: 939396 - RNA, 19 nt, Artificial Sequence
  Description of Artificial Sequence: Synthetic oligonucleotide
ucccguugcgauacaccgu

SEQ ID NO: 939397 - RNA, 19 nt, Artificial Sequence
  Description of Artificial Sequence: Synthetic oligonucleotide
gcgcguaaaagguguaggc

SEQ ID NO: 939398 - RNA, 19 nt, Artificial Sequence
  Description of Artificial Sequence: Synthetic oligonucleotide
agaccccauaagagugucc

SEQ ID NO: 939399 - RNA, 19 nt, Artificial Sequence
  Description of Artificial Sequence: Synthetic oligonucleotide
caucgaggggcccgggccc

SEQ ID NO: 939400 - RNA, 19 nt, Artificial Sequence
  Description of Artificial Sequence: Synthetic oligonucleotide
ggucuauccaagccccgcc

SEQ ID NO: 939401 - RNA, 19 nt, Artificial Sequence
  Description of Artificial Sequence: Synthetic oligonucleotide
acaccugcgaucacucgug

SEQ ID NO: 939402 - RNA, 19 nt, Artificial Sequence
  Description of Artificial Sequence: Synthetic oligonucleotide
cuggcacgaacuugucaug

SEQ ID NO: 939403 - RNA, 19 nt, Artificial Sequence
  Description of Artificial Sequence: Synthetic oligonucleotide
cugucuccggacacucgag

SEQ ID NO: 939404 - RNA, 19 nt, Artificial Sequence
  Description of Artificial Sequence: Synthetic oligonucleotide
ggaaacuccaggccaggca

SEQ ID NO: 939405 - RNA, 19 nt, Artificial Sequence
  Description of Artificial Sequence: Synthetic oligonucleotide
ggaccugcgugcuucacuc

SEQ ID NO: 939406 - RNA, 19 nt, Artificial Sequence
  Description of Artificial Sequence: Synthetic oligonucleotide
gacgccgagggcgccgucg

SEQ ID NO: 939407 - RNA, 19 nt, Artificial Sequence
  Description of Artificial Sequence: Synthetic oligonucleotide
gccgcuuacaugguggagc

SEQ ID NO: 939408 - RNA, 19 nt, Artificial Sequence
  Description of Artificial Sequence: Synthetic oligonucleotide
caccguggaugaagaacag

SEQ ID NO: 939409 - RNA, 19 nt, Artificial Sequence
  Description of Artificial Sequence: Synthetic oligonucleotide
accgcugccugggauaacu

SEQ ID NO: 939410 - RNA, 19 nt, Artificial Sequence
  Description of Artificial Sequence: Synthetic oligonucleotide
ugacuuccacaaacgugua

SEQ ID NO: 939411 - RNA, 19 nt, Artificial Sequence
  Description of Artificial Sequence: Synthetic oligonucleotide
agaccgagugggguggcag

SEQ ID NO: 939412 - RNA, 19 nt, Artificial Sequence
  Description of Artificial Sequence: Synthetic oligonucleotide
acucgugcagcagaguguu

SEQ ID NO: 939413 - RNA, 19 nt, Artificial Sequence
  Description of Artificial Sequence: Synthetic oligonucleotide
cugcgugcuucacucgcag

SEQ ID NO: 939414 - RNA, 19 nt, Artificial Sequence
  Description of Artificial Sequence: Synthetic oligonucleotide
ccgcuuacaugguggagcg

SEQ ID NO: 939415 - RNA, 19 nt, Artificial Sequence
  Description of Artificial Sequence: Synthetic oligonucleotide
uuacaugguggagcgggau

SEQ ID NO: 939416 - RNA, 19 nt, Artificial Sequence
  Description of Artificial Sequence: Synthetic oligonucleotide
ccaagucgcacaaagaagu

SEQ ID NO: 939417 - RNA, 19 nt, Artificial Sequence
  Description of Artificial Sequence: Synthetic oligonucleotide
cacaaacguguagccgucg

SEQ ID NO: 939418 - RNA, 19 nt, Artificial Sequence
  Description of Artificial Sequence: Synthetic oligonucleotide
agacuucgucacccucagg

SEQ ID NO: 939419 - RNA, 19 nt, Artificial Sequence
  Description of Artificial Sequence: Synthetic oligonucleotide
aacgucugccugcgcgccu

SEQ ID NO: 939420 - RNA, 19 nt, Artificial Sequence
  Description of Artificial Sequence: Synthetic oligonucleotide
ugcguugguccuccuccac

SEQ ID NO: 939421 - RNA, 19 nt, Artificial Sequence
  Description of Artificial Sequence: Synthetic oligonucleotide
cuuacaugguggagcggga

SEQ ID NO: 939422 - RNA, 19 nt, Artificial Sequence
  Description of Artificial Sequence: Synthetic oligonucleotide
ugcggggauuuguggcucc

SEQ ID NO: 939423 - RNA, 19 nt, Artificial Sequence
  Description of Artificial Sequence: Synthetic oligonucleotide
ccauaagaguguccgauca

SEQ ID NO: 939424 - RNA, 19 nt, Artificial Sequence
  Description of Artificial Sequence: Synthetic oligonucleotide
ugcgguucagcgggucucc

SEQ ID NO: 939425 - RNA, 19 nt, Artificial Sequence
  Description of Artificial Sequence: Synthetic oligonucleotide
cugcaagcgcguaaaaggu

SEQ ID NO: 939426 - RNA, 19 nt, Artificial Sequence
  Description of Artificial Sequence: Synthetic oligonucleotide
cccguugcgauacaccgug

SEQ ID NO: 939427 - RNA, 19 nt, Artificial Sequence
  Description of Artificial Sequence: Synthetic oligonucleotide
aaggccggucuugacccca

SEQ ID NO: 939428 - RNA, 19 nt, Artificial Sequence
  Description of Artificial Sequence: Synthetic oligonucleotide
gucaucgaggggcccgggc

SEQ ID NO: 939429 - RNA, 19 nt, Artificial Sequence
  Description of Artificial Sequence: Synthetic oligonucleotide
ucggccgcauuagcgcggg

SEQ ID NO: 939430 - RNA, 19 nt, Artificial Sequence
  Description of Artificial Sequence: Synthetic oligonucleotide
augcguugguccuccucca

SEQ ID NO: 939431 - RNA, 19 nt, Artificial Sequence
  Description of Artificial Sequence: Synthetic oligonucleotide
ggacucgacgcuuuccaga

SEQ ID NO: 939432 - RNA, 19 nt, Artificial Sequence
  Description of Artificial Sequence: Synthetic oligonucleotide
ugguggcgugggaauuggc

SEQ ID NO: 939433 - RNA, 19 nt, Artificial Sequence
  Description of Artificial Sequence: Synthetic oligonucleotide
aggucaucgaggggcccgg

SEQ ID NO: 939434 - RNA, 19 nt, Artificial Sequence
  Description of Artificial Sequence: Synthetic oligonucleotide
gaggucgcacggcguuggg

SEQ ID NO: 939435 - RNA, 19 nt, Artificial Sequence
  Description of Artificial Sequence: Synthetic oligonucleotide
ggggauuuguggcuccgac

SEQ ID NO: 939436 - RNA, 19 nt, Artificial Sequence
  Description of Artificial Sequence: Synthetic oligonucleotide
caugguggagcgggaucgg

SEQ ID NO: 939437 - RNA, 19 nt, Artificial Sequence
  Description of Artificial Sequence: Synthetic oligonucleotide
aggucgcacggcguugggg

SEQ ID NO: 939438 - RNA, 19 nt, Artificial Sequence
  Description of Artificial Sequence: Synthetic oligonucleotide
ugccgcuuacaugguggag

SEQ ID NO: 939439 - RNA, 19 nt, Artificial Sequence
  Description of Artificial Sequence: Synthetic oligonucleotide
aaguugccaugugcgggga

SEQ ID NO: 939440 - RNA, 19 nt, Artificial Sequence
  Description of Artificial Sequence: Synthetic oligonucleotide
acguguagccgucgcugga

SEQ ID NO: 939441 - RNA, 19 nt, Artificial Sequence
  Description of Artificial Sequence: Synthetic oligonucleotide
ucagcgggucuccccugac

SEQ ID NO: 939442 - RNA, 19 nt, Artificial Sequence
  Description of Artificial Sequence: Synthetic oligonucleotide
guaaaagguguaggcagcu

SEQ ID NO: 939443 - RNA, 19 nt, Artificial Sequence
  Description of Artificial Sequence: Synthetic oligonucleotide
accccauaagaguguccga

SEQ ID NO: 939444 - RNA, 19 nt, Artificial Sequence
  Description of Artificial Sequence: Synthetic oligonucleotide
cagccucccguugcgauac

SEQ ID NO: 939445 - RNA, 19 nt, Artificial Sequence
  Description of Artificial Sequence: Synthetic oligonucleotide
gggcggagaagccagcauc

SEQ ID NO: 939446 - RNA, 19 nt, Artificial Sequence
  Description of Artificial Sequence: Synthetic oligonucleotide
caggaucgucuucgggaag

SEQ ID NO: 939447 - RNA, 19 nt, Artificial Sequence
  Description of Artificial Sequence: Synthetic oligonucleotide
aggucaggugccaccaccu

SEQ ID NO: 939448 - RNA, 19 nt, Artificial Sequence
  Description of Artificial Sequence: Synthetic oligonucleotide
ccgcauguccucugcaagc

SEQ ID NO: 939449 - RNA, 19 nt, Artificial Sequence
  Description of Artificial Sequence: Synthetic oligonucleotide
ggagagggcucuguacaag

SEQ ID NO: 939450 - RNA, 19 nt, Artificial Sequence
  Description of Artificial Sequence: Synthetic oligonucleotide
caacgucugccugcgcgcc

SEQ ID NO: 939451 - RNA, 19 nt, Artificial Sequence
  Description of Artificial Sequence: Synthetic oligonucleotide
caccugcgaucacucgugc

SEQ ID NO: 939452 - RNA, 19 nt, Artificial Sequence
  Description of Artificial Sequence: Synthetic oligonucleotide
cacccgcugcagcauuggg

SEQ ID NO: 939453 - RNA, 19 nt, Artificial Sequence
  Description of Artificial Sequence: Synthetic oligonucleotide
aagaccgagugggguggca

SEQ ID NO: 939454 - RNA, 19 nt, Artificial Sequence
  Description of Artificial Sequence: Synthetic oligonucleotide
ggauaacucgggcgucacc

SEQ ID NO: 939455 - RNA, 19 nt, Artificial Sequence
  Description of Artificial Sequence: Synthetic oligonucleotide
acucgugggccaggaaugu

SEQ ID NO: 939456 - RNA, 19 nt, Artificial Sequence
  Description of Artificial Sequence: Synthetic oligonucleotide
aucggccgcauuagcgcgg

SEQ ID NO: 939457 - RNA, 19 nt, Artificial Sequence
  Description of Artificial Sequence: Synthetic oligonucleotide
ccucccguugcgauacacc

SEQ ID NO: 939458 - RNA, 19 nt, Artificial Sequence
  Description of Artificial Sequence: Synthetic oligonucleotide
agccccgcccauuggcgug

SEQ ID NO: 939459 - RNA, 19 nt, Artificial Sequence
  Description of Artificial Sequence: Synthetic oligonucleotide
cacaccugcgaucacucgu

SEQ ID NO: 939460 - RNA, 19 nt, Artificial Sequence
  Description of Artificial Sequence: Synthetic oligonucleotide
ccgcccauuggcgugaggc

SEQ ID NO: 939461 - RNA, 19 nt, Artificial Sequence
  Description of Artificial Sequence: Synthetic oligonucleotide
guucagcgggucuccccug

SEQ ID NO: 939462 - RNA, 19 nt, Artificial Sequence
  Description of Artificial Sequence: Synthetic oligonucleotide
ccgcuggcagcgcacaagg

SEQ ID NO: 939463 - RNA, 19 nt, Artificial Sequence
  Description of Artificial Sequence: Synthetic oligonucleotide
ggcccgccaggucaggugc

SEQ ID NO: 939464 - RNA, 19 nt, Artificial Sequence
  Description of Artificial Sequence: Synthetic oligonucleotide
augguccucuugggacgcc

SEQ ID NO: 939465 - RNA, 19 nt, Artificial Sequence
  Description of Artificial Sequence: Synthetic oligonucleotide
uggagcgggaucggccgca

SEQ ID NO: 939466 - RNA, 19 nt, Artificial Sequence
  Description of Artificial Sequence: Synthetic oligonucleotide
cccgcugcagcauugggga

SEQ ID NO: 939467 - RNA, 19 nt, Artificial Sequence
  Description of Artificial Sequence: Synthetic oligonucleotide
acgcuuuccagaggucgca

SEQ ID NO: 939468 - RNA, 19 nt, Artificial Sequence
  Description of Artificial Sequence: Synthetic oligonucleotide
cgugaugcgccgcuggcag

SEQ ID NO: 939469 - RNA, 19 nt, Artificial Sequence
  Description of Artificial Sequence: Synthetic oligonucleotide
gggcacugagucuccaaca

SEQ ID NO: 939470 - RNA, 19 nt, Artificial Sequence
  Description of Artificial Sequence: Synthetic oligonucleotide
cgcaugguagacuucguca

SEQ ID NO: 939471 - RNA, 19 nt, Artificial Sequence
  Description of Artificial Sequence: Synthetic oligonucleotide
ggcacgaacuugucaugca

SEQ ID NO: 939472 - RNA, 19 nt, Artificial Sequence
  Description of Artificial Sequence: Synthetic oligonucleotide
ggcuccgaccccucucucc

SEQ ID NO: 939473 - RNA, 19 nt, Artificial Sequence
  Description of Artificial Sequence: Synthetic oligonucleotide
uugcgcuucuuggcauagc

SEQ ID NO: 939474 - RNA, 19 nt, Artificial Sequence
  Description of Artificial Sequence: Synthetic oligonucleotide
agauggcgagcgagccgcc

SEQ ID NO: 939475 - RNA, 19 nt, Artificial Sequence
  Description of Artificial Sequence: Synthetic oligonucleotide
gugccgcuuacauggugga

SEQ ID NO: 939476 - RNA, 19 nt, Artificial Sequence
  Description of Artificial Sequence: Synthetic oligonucleotide
acacgugggcauguugaaa

SEQ ID NO: 939477 - RNA, 19 nt, Artificial Sequence
  Description of Artificial Sequence: Synthetic oligonucleotide
cacacgugggcauguugaa

SEQ ID NO: 939478 - RNA, 19 nt, Artificial Sequence
  Description of Artificial Sequence: Synthetic oligonucleotide
gucggcacguggcgcccgg

SEQ ID NO: 939479 - RNA, 19 nt, Artificial Sequence
  Description of Artificial Sequence: Synthetic oligonucleotide
gggucuauccaagccccgc

SEQ ID NO: 939480 - RNA, 19 nt, Artificial Sequence
  Description of Artificial Sequence: Synthetic oligonucleotide
gcccauuggcgugaggccc

SEQ ID NO: 939481 - RNA, 19 nt, Artificial Sequence
  Description of Artificial Sequence: Synthetic oligonucleotide
cucgcagcacccggccagg

SEQ ID NO: 939482 - RNA, 19 nt, Artificial Sequence
  Description of Artificial Sequence: Synthetic oligonucleotide
gcgccuuugcagcugguga

SEQ ID NO: 939483 - RNA, 19 nt, Artificial Sequence
  Description of Artificial Sequence: Synthetic oligonucleotide
ccucauagccaagucgcac

SEQ ID NO: 939484 - RNA, 19 nt, Artificial Sequence
  Description of Artificial Sequence: Synthetic oligonucleotide
gaggccccgcccauccagc

SEQ ID NO: 939485 - RNA, 19 nt, Artificial Sequence
  Description of Artificial Sequence: Synthetic oligonucleotide
uagccgucgcuggacucga

SEQ ID NO: 939486 - RNA, 19 nt, Artificial Sequence
  Description of Artificial Sequence: Synthetic oligonucleotide
gggcggucagcgaaggggc

SEQ ID NO: 939487 - RNA, 19 nt, Artificial Sequence
  Description of Artificial Sequence: Synthetic oligonucleotide
cugggauaacucgggcguc

SEQ ID NO: 939488 - RNA, 19 nt, Artificial Sequence
  Description of Artificial Sequence: Synthetic oligonucleotide
gguucagcgggucuccccu

SEQ ID NO: 939489 - RNA, 19 nt, Artificial Sequence
  Description of Artificial Sequence: Synthetic oligonucleotide
caaacguguagccgucgcu

SEQ ID NO: 939490 - RNA, 19 nt, Artificial Sequence
  Description of Artificial Sequence: Synthetic oligonucleotide
cucgugcagcagaguguug

SEQ ID NO: 939491 - RNA, 19 nt, Artificial Sequence
  Description of Artificial Sequence: Synthetic oligonucleotide
gcaagcgcguaaaaggugu

SEQ ID NO: 939492 - RNA, 19 nt, Artificial Sequence
  Description of Artificial Sequence: Synthetic oligonucleotide
gcgaucacucgugcagagg

SEQ ID NO: 939493 - RNA, 19 nt, Artificial Sequence
  Description of Artificial Sequence: Synthetic oligonucleotide
gucagcgaaggggcauccc

SEQ ID NO: 939494 - RNA, 19 nt, Artificial Sequence
  Description of Artificial Sequence: Synthetic oligonucleotide
cugccugcgcgccuuugca

SEQ ID NO: 939495 - RNA, 19 nt, Artificial Sequence
  Description of Artificial Sequence: Synthetic oligonucleotide
cugcgaucacucgugcaga

SEQ ID NO: 939496 - RNA, 19 nt, Artificial Sequence
  Description of Artificial Sequence: Synthetic oligonucleotide
cgacagacagugcaggaca

SEQ ID NO: 939497 - RNA, 19 nt, Artificial Sequence
  Description of Artificial Sequence: Synthetic oligonucleotide
ccacaaacguguagccguc

SEQ ID NO: 939498 - RNA, 19 nt, Artificial Sequence
  Description of Artificial Sequence: Synthetic oligonucleotide
accgucagcuccgcauggu

SEQ ID NO: 939499 - RNA, 19 nt, Artificial Sequence
  Description of Artificial Sequence: Synthetic oligonucleotide
ugggugcgguucagcgggu

SEQ ID NO: 939500 - RNA, 19 nt, Artificial Sequence
  Description of Artificial Sequence: Synthetic oligonucleotide
gggacucggggaggcaggg

SEQ ID NO: 939501 - RNA, 19 nt, Artificial Sequence
  Description of Artificial Sequence: Synthetic oligonucleotide
agcgcacaaggccggucuu

SEQ ID NO: 939502 - RNA, 19 nt, Artificial Sequence
  Description of Artificial Sequence: Synthetic oligonucleotide
gugcgguucagcgggucuc

SEQ ID NO: 939503 - RNA, 19 nt, Artificial Sequence
  Description of Artificial Sequence: Synthetic oligonucleotide
caagcgcguaaaaggugua

SEQ ID NO: 939504 - RNA, 19 nt, Artificial Sequence
  Description of Artificial Sequence: Synthetic oligonucleotide
ccaggaucgucuucgggaa

SEQ ID NO: 939505 - RNA, 19 nt, Artificial Sequence
  Description of Artificial Sequence: Synthetic oligonucleotide
cccgcccuggggucuaucc

SEQ ID NO: 939506 - RNA, 19 nt, Artificial Sequence
  Description of Artificial Sequence: Synthetic oligonucleotide
ggcgugggaauuggcgcag

SEQ ID NO: 939507 - RNA, 19 nt, Artificial Sequence
  Description of Artificial Sequence: Synthetic oligonucleotide
gggagagggcucuguacaa

SEQ ID NO: 939508 - RNA, 19 nt, Artificial Sequence
  Description of Artificial Sequence: Synthetic oligonucleotide
ccggccaggcuugacuucc

SEQ ID NO: 939509 - RNA, 19 nt, Artificial Sequence
  Description of Artificial Sequence: Synthetic oligonucleotide
cugcggccuugaaggucgg

SEQ ID NO: 939510 - RNA, 19 nt, Artificial Sequence
  Description of Artificial Sequence: Synthetic oligonucleotide
ccccugacaggacgggagc

SEQ ID NO: 939511 - RNA, 19 nt, Artificial Sequence
  Description of Artificial Sequence: Synthetic oligonucleotide
ggucagcgaaggggcaucc

SEQ ID NO: 939512 - RNA, 19 nt, Artificial Sequence
  Description of Artificial Sequence: Synthetic oligonucleotide
ggucaggugccaccaccuc

SEQ ID NO: 939513 - RNA, 19 nt, Artificial Sequence
  Description of Artificial Sequence: Synthetic oligonucleotide
ggcaccgucagcuccgcau

SEQ ID NO: 939514 - RNA, 19 nt, Artificial Sequence
  Description of Artificial Sequence: Synthetic oligonucleotide
guguagccgucgcuggacu

SEQ ID NO: 939515 - RNA, 19 nt, Artificial Sequence
  Description of Artificial Sequence: Synthetic oligonucleotide
cauggcccgccaggucagg

SEQ ID NO: 939516 - RNA, 19 nt, Artificial Sequence
  Description of Artificial Sequence: Synthetic oligonucleotide
ggaagcggcggugguggug

SEQ ID NO: 939517 - RNA, 19 nt, Artificial Sequence
  Description of Artificial Sequence: Synthetic oligonucleotide
ggccgcauuagcgcgggca

SEQ ID NO: 939518 - RNA, 19 nt, Artificial Sequence
  Description of Artificial Sequence: Synthetic oligonucleotide
gcgggaucggccgcauuag

SEQ ID NO: 939519 - RNA, 19 nt, Artificial Sequence
  Description of Artificial Sequence: Synthetic oligonucleotide
ccggucagcaugguguguc

SEQ ID NO: 939520 - RNA, 19 nt, Artificial Sequence
  Description of Artificial Sequence: Synthetic oligonucleotide
cccgcagcacaaaggagga

SEQ ID NO: 939521 - RNA, 19 nt, Artificial Sequence
  Description of Artificial Sequence: Synthetic oligonucleotide
gccggucuugaccccagga

SEQ ID NO: 939522 - RNA, 19 nt, Artificial Sequence
  Description of Artificial Sequence: Synthetic oligonucleotide
gggauaacucgggcgucac

SEQ ID NO: 939523 - RNA, 19 nt, Artificial Sequence
  Description of Artificial Sequence: Synthetic oligonucleotide
gucccgggcggagaagcca

SEQ ID NO: 939524 - RNA, 19 nt, Artificial Sequence
  Description of Artificial Sequence: Synthetic oligonucleotide
cacucgugcagaggacaca

SEQ ID NO: 939525 - RNA, 19 nt, Artificial Sequence
  Description of Artificial Sequence: Synthetic oligonucleotide
ucgcagcacccggccaggc

SEQ ID NO: 939526 - RNA, 19 nt, Artificial Sequence
  Description of Artificial Sequence: Synthetic oligonucleotide
ccagcacaugcccagucaa

SEQ ID NO: 939527 - RNA, 19 nt, Artificial Sequence
  Description of Artificial Sequence: Synthetic oligonucleotide
gcgcugcucacagucgaug

SEQ ID NO: 939528 - RNA, 19 nt, Artificial Sequence
  Description of Artificial Sequence: Synthetic oligonucleotide
cccugacaggacgggagcc

SEQ ID NO: 939529 - RNA, 19 nt, Artificial Sequence
  Description of Artificial Sequence: Synthetic oligonucleotide
cgcguaaaagguguaggca

SEQ ID NO: 939530 - RNA, 19 nt, Artificial Sequence
  Description of Artificial Sequence: Synthetic oligonucleotide
gcggggauuuguggcuccg

SEQ ID NO: 939531 - RNA, 19 nt, Artificial Sequence
  Description of Artificial Sequence: Synthetic oligonucleotide
ccaugcguugguccuccuc

SEQ ID NO: 939532 - RNA, 19 nt, Artificial Sequence
  Description of Artificial Sequence: Synthetic oligonucleotide
gcacaaggccggucuugac

SEQ ID NO: 939533 - RNA, 19 nt, Artificial Sequence
  Description of Artificial Sequence: Synthetic oligonucleotide
ccccggucagcauggugug

SEQ ID NO: 939534 - RNA, 19 nt, Artificial Sequence
  Description of Artificial Sequence: Synthetic oligonucleotide
ccgaccccucucuccuugg

SEQ ID NO: 939535 - RNA, 19 nt, Artificial Sequence
  Description of Artificial Sequence: Synthetic oligonucleotide
gcgagcgagccgcccacac

SEQ ID NO: 939536 - RNA, 19 nt, Artificial Sequence
  Description of Artificial Sequence: Synthetic oligonucleotide
ucggcacguggcgcccggc

SEQ ID NO: 939537 - RNA, 19 nt, Artificial Sequence
  Description of Artificial Sequence: Synthetic oligonucleotide
cugcgcgccuuugcagcug

SEQ ID NO: 939538 - RNA, 19 nt, Artificial Sequence
  Description of Artificial Sequence: Synthetic oligonucleotide
ggucaucgaggggcccggg

SEQ ID NO: 939539 - RNA, 19 nt, Artificial Sequence
  Description of Artificial Sequence: Synthetic oligonucleotide
cuccccugacaggacggga

SEQ ID NO: 939540 - RNA, 19 nt, Artificial Sequence
  Description of Artificial Sequence: Synthetic oligonucleotide
gcacguggcgcccggccca

SEQ ID NO: 939541 - RNA, 19 nt, Artificial Sequence
  Description of Artificial Sequence: Synthetic oligonucleotide
cauuggcgugaggccccgc

SEQ ID NO: 939542 - RNA, 19 nt, Artificial Sequence
  Description of Artificial Sequence: Synthetic oligonucleotide
ccugcgugcuucacucgca

SEQ ID NO: 939543 - RNA, 19 nt, Artificial Sequence
  Description of Artificial Sequence: Synthetic oligonucleotide
ccgcauuagcgcgggcagg

SEQ ID NO: 939544 - RNA, 19 nt, Artificial Sequence
  Description of Artificial Sequence: Synthetic oligonucleotide
cgguucagcgggucucccc

SEQ ID NO: 939545 - RNA, 19 nt, Artificial Sequence
  Description of Artificial Sequence: Synthetic oligonucleotide
ccacccgcugcagcauugg

SEQ ID NO: 939546 - RNA, 19 nt, Artificial Sequence
  Description of Artificial Sequence: Synthetic oligonucleotide
ucgucacccucaggccaau

SEQ ID NO: 939547 - RNA, 19 nt, Artificial Sequence
  Description of Artificial Sequence: Synthetic oligonucleotide
cccugcgggauccgccagc

SEQ ID NO: 939548 - RNA, 19 nt, Artificial Sequence
  Description of Artificial Sequence: Synthetic oligonucleotide
gcgugggaauuggcgcagg

SEQ ID NO: 939549 - RNA, 19 nt, Artificial Sequence
  Description of Artificial Sequence: Synthetic oligonucleotide
gacgggcaaagccggccuu

SEQ ID NO: 939550 - RNA, 19 nt, Artificial Sequence
  Description of Artificial Sequence: Synthetic oligonucleotide
cugcagcauuggggacucg

SEQ ID NO: 939551 - RNA, 19 nt, Artificial Sequence
  Description of Artificial Sequence: Synthetic oligonucleotide
gucgcuggacucgacgcuu

SEQ ID NO: 939552 - RNA, 19 nt, Artificial Sequence
  Description of Artificial Sequence: Synthetic oligonucleotide
ccacuggcacgaacuuguc

SEQ ID NO: 939553 - RNA, 19 nt, Artificial Sequence
  Description of Artificial Sequence: Synthetic oligonucleotide
gccguugaucaugaucacu

SEQ ID NO: 939554 - RNA, 19 nt, Artificial Sequence
  Description of Artificial Sequence: Synthetic oligonucleotide
gccccuugacgggcaaagc

SEQ ID NO: 939555 - RNA, 19 nt, Artificial Sequence
  Description of Artificial Sequence: Synthetic oligonucleotide
cugcgggauccgccagcuc

SEQ ID NO: 939556 - RNA, 19 nt, Artificial Sequence
  Description of Artificial Sequence: Synthetic oligonucleotide
ccgagacagggcgcagggg

SEQ ID NO: 939557 - RNA, 19 nt, Artificial Sequence
  Description of Artificial Sequence: Synthetic oligonucleotide
agcgagccgcccacaccgu

SEQ ID NO: 939558 - RNA, 19 nt, Artificial Sequence
  Description of Artificial Sequence: Synthetic oligonucleotide
gaccgcugccugggauaac

SEQ ID NO: 939559 - RNA, 19 nt, Artificial Sequence
  Description of Artificial Sequence: Synthetic oligonucleotide
gccucccguugcgauacac

SEQ ID NO: 939560 - RNA, 19 nt, Artificial Sequence
  Description of Artificial Sequence: Synthetic oligonucleotide
cgggaucggccgcauuagc

SEQ ID NO: 939561 - RNA, 19 nt, Artificial Sequence
  Description of Artificial Sequence: Synthetic oligonucleotide
ccgagugggguggcagccc

SEQ ID NO: 939562 - RNA, 19 nt, Artificial Sequence
  Description of Artificial Sequence: Synthetic oligonucleotide
cucgugggccaggaaugua

SEQ ID NO: 939563 - RNA, 19 nt, Artificial Sequence
  Description of Artificial Sequence: Synthetic oligonucleotide
ccgcugccugggauaacuc

SEQ ID NO: 939564 - RNA, 19 nt, Artificial Sequence
  Description of Artificial Sequence: Synthetic oligonucleotide
cgccguugaucaugaucac

SEQ ID NO: 939565 - RNA, 19 nt, Artificial Sequence
  Description of Artificial Sequence: Synthetic oligonucleotide
agccggccuugaggaaacu

SEQ ID NO: 939566 - RNA, 19 nt, Artificial Sequence
  Description of Artificial Sequence: Synthetic oligonucleotide
ggaacucgugcagcagagu

SEQ ID NO: 939567 - RNA, 19 nt, Artificial Sequence
  Description of Artificial Sequence: Synthetic oligonucleotide
ccccauaagaguguccgau

SEQ ID NO: 939568 - RNA, 19 nt, Artificial Sequence
  Description of Artificial Sequence: Synthetic oligonucleotide
gcgguucagcgggucuccc

SEQ ID NO: 939569 - RNA, 19 nt, Artificial Sequence
  Description of Artificial Sequence: Synthetic oligonucleotide
gcagcgcacaaggccgguc

SEQ ID NO: 939570 - RNA, 19 nt, Artificial Sequence
  Description of Artificial Sequence: Synthetic oligonucleotide
ccggggcggucagcgaagg

SEQ ID NO: 939571 - RNA, 19 nt, Artificial Sequence
  Description of Artificial Sequence: Synthetic oligonucleotide
acguggcgcccggcccagg

SEQ ID NO: 939572 - RNA, 19 nt, Artificial Sequence
  Description of Artificial Sequence: Synthetic oligonucleotide
cgcuuacaugguggagcgg

SEQ ID NO: 939573 - RNA, 19 nt, Artificial Sequence
  Description of Artificial Sequence: Synthetic oligonucleotide
ccggacacucgagcaucac

SEQ ID NO: 939574 - RNA, 19 nt, Artificial Sequence
  Description of Artificial Sequence: Synthetic oligonucleotide
cgcacaaggccggucuuga

SEQ ID NO: 939575 - RNA, 19 nt, Artificial Sequence
  Description of Artificial Sequence: Synthetic oligonucleotide
caggugccaccaccucaua

SEQ ID NO: 939576 - RNA, 19 nt, Artificial Sequence
  Description of Artificial Sequence: Synthetic oligonucleotide
gggugcgguucagcggguc

SEQ ID NO: 939577 - RNA, 19 nt, Artificial Sequence
  Description of Artificial Sequence: Synthetic oligonucleotide
ccaaacuaugggugcgguu

SEQ ID NO: 939578 - RNA, 19 nt, Artificial Sequence
  Description of Artificial Sequence: Synthetic oligonucleotide
gcccgccaggucaggugcc

SEQ ID NO: 939579 - RNA, 19 nt, Artificial Sequence
  Description of Artificial Sequence: Synthetic oligonucleotide
ccgcagcacaaaggaggac

SEQ ID NO: 939580 - RNA, 19 nt, Artificial Sequence
  Description of Artificial Sequence: Synthetic oligonucleotide
gcuccgcaugguagacuuc

SEQ ID NO: 939581 - RNA, 19 nt, Artificial Sequence
  Description of Artificial Sequence: Synthetic oligonucleotide
ccgugaugcgccgcuggca

SEQ ID NO: 939582 - RNA, 19 nt, Artificial Sequence
  Description of Artificial Sequence: Synthetic oligonucleotide
ccguugcgauacaccguga

SEQ ID NO: 939583 - RNA, 19 nt, Artificial Sequence
  Description of Artificial Sequence: Synthetic oligonucleotide
ggcgcaggaccugcgugcu

SEQ ID NO: 939584 - RNA, 19 nt, Artificial Sequence
  Description of Artificial Sequence: Synthetic oligonucleotide
cguugcgauacaccgugau

SEQ ID NO: 939585 - RNA, 19 nt, Artificial Sequence
  Description of Artificial Sequence: Synthetic oligonucleotide
cggucagcgaaggggcauc

SEQ ID NO: 939586 - RNA, 19 nt, Artificial Sequence
  Description of Artificial Sequence: Synthetic oligonucleotide
cggggcggucagcgaaggg

SEQ ID NO: 939587 - RNA, 19 nt, Artificial Sequence
  Description of Artificial Sequence: Synthetic oligonucleotide
cacagucgauguggauggu

SEQ ID NO: 939588 - RNA, 19 nt, Artificial Sequence
  Description of Artificial Sequence: Synthetic oligonucleotide
cccgcccauuggcgugagg

SEQ ID NO: 939589 - RNA, 19 nt, Artificial Sequence
  Description of Artificial Sequence: Synthetic oligonucleotide
ccugcgcgccuuugcagcu

SEQ ID NO: 939590 - RNA, 19 nt, Artificial Sequence
  Description of Artificial Sequence: Synthetic oligonucleotide
cccaaacuaugggugcggu

SEQ ID NO: 939591 - RNA, 19 nt, Artificial Sequence
  Description of Artificial Sequence: Synthetic oligonucleotide
gagcgggaucggccgcauu

SEQ ID NO: 939592 - RNA, 19 nt, Artificial Sequence
  Description of Artificial Sequence: Synthetic oligonucleotide
gcgugaagauggcccgcau

SEQ ID NO: 939593 - RNA, 19 nt, Artificial Sequence
  Description of Artificial Sequence: Synthetic oligonucleotide
gcgccgcuggcagcgcaca

SEQ ID NO: 939594 - RNA, 19 nt, Artificial Sequence
  Description of Artificial Sequence: Synthetic oligonucleotide
cccgccaggucaggugcca

SEQ ID NO: 939595 - RNA, 19 nt, Artificial Sequence
  Description of Artificial Sequence: Synthetic oligonucleotide
cuccgaccccucucuccuu

SEQ ID NO: 939596 - RNA, 19 nt, Artificial Sequence
  Description of Artificial Sequence: Synthetic oligonucleotide
cgucgcuggacucgacgcu

SEQ ID NO: 939597 - RNA, 19 nt, Artificial Sequence
  Description of Artificial Sequence: Synthetic oligonucleotide
ggacacacgugggcauguu

SEQ ID NO: 939598 - RNA, 19 nt, Artificial Sequence
  Description of Artificial Sequence: Synthetic oligonucleotide
cggggauuuguggcuccga

SEQ ID NO: 939599 - RNA, 19 nt, Artificial Sequence
  Description of Artificial Sequence: Synthetic oligonucleotide
gccaugcguugguccuccu

SEQ ID NO: 939600 - RNA, 19 nt, Artificial Sequence
  Description of Artificial Sequence: Synthetic oligonucleotide
ggagcgggaucggccgcau

SEQ ID NO: 939601 - RNA, 19 nt, Artificial Sequence
  Description of Artificial Sequence: Synthetic oligonucleotide
gggcgccgucgccgaccgc

SEQ ID NO: 939602 - RNA, 19 nt, Artificial Sequence
  Description of Artificial Sequence: Synthetic oligonucleotide
cggccgcauuagcgcgggc

SEQ ID NO: 939603 - RNA, 19 nt, Artificial Sequence
  Description of Artificial Sequence: Synthetic oligonucleotide
cccggucagcauggugugu

SEQ ID NO: 939604 - RNA, 19 nt, Artificial Sequence
  Description of Artificial Sequence: Synthetic oligonucleotide
gcgcaggaccugcgugcuu

SEQ ID NO: 939605 - RNA, 19 nt, Artificial Sequence
  Description of Artificial Sequence: Synthetic oligonucleotide
cgucacccucaggccaaua

SEQ ID NO: 939606 - RNA, 19 nt, Artificial Sequence
  Description of Artificial Sequence: Synthetic oligonucleotide
ccggcccgcccuggggucu

SEQ ID NO: 939607 - RNA, 19 nt, Artificial Sequence
  Description of Artificial Sequence: Synthetic oligonucleotide
ccccgccguugaucaugau

SEQ ID NO: 939608 - RNA, 19 nt, Artificial Sequence
  Description of Artificial Sequence: Synthetic oligonucleotide
cuaucaaacauuaagcagg

SEQ ID NO: 939609 - RNA, 19 nt, Artificial Sequence
  Description of Artificial Sequence: Synthetic oligonucleotide
auagugagaagcuaaggac

SEQ ID NO: 939610 - RNA, 19 nt, Artificial Sequence
  Description of Artificial Sequence: Synthetic oligonucleotide
aaaucagccggugacaggc

SEQ ID NO: 939611 - RNA, 19 nt, Artificial Sequence
  Description of Artificial Sequence: Synthetic oligonucleotide
acugagaacacacugaaga

SEQ ID NO: 939612 - RNA, 19 nt, Artificial Sequence
  Description of Artificial Sequence: Synthetic oligonucleotide
uucugcagaaaucagccgg

SEQ ID NO: 939613 - RNA, 19 nt, Artificial Sequence
  Description of Artificial Sequence: Synthetic oligonucleotide
ucuucugcagaaaucagcc

SEQ ID NO: 939614 - RNA, 19 nt, Artificial Sequence
  Description of Artificial Sequence: Synthetic oligonucleotide
agaagcuaaggacagcagc

SEQ ID NO: 939615 - RNA, 19 nt, Artificial Sequence
  Description of Artificial Sequence: Synthetic oligonucleotide
ugugccuugguuaaggaga

SEQ ID NO: 939616 - RNA, 19 nt, Artificial Sequence
  Description of Artificial Sequence: Synthetic oligonucleotide
ucacggguaacugugaugg

SEQ ID NO: 939617 - RNA, 19 nt, Artificial Sequence
  Description of Artificial Sequence: Synthetic oligonucleotide
uaauccacgaugugggugg

SEQ ID NO: 939618 - RNA, 19 nt, Artificial Sequence
  Description of Artificial Sequence: Synthetic oligonucleotide
cucggcaacaccuucaggg

SEQ ID NO: 939619 - RNA, 19 nt, Artificial Sequence
  Description of Artificial Sequence: Synthetic oligonucleotide
ucuagguaggucaccaggg

SEQ ID NO: 939620 - RNA, 19 nt, Artificial Sequence
  Description of Artificial Sequence: Synthetic oligonucleotide
uguauaugguagcacagug

SEQ ID NO: 939621 - RNA, 19 nt, Artificial Sequence
  Description of Artificial Sequence: Synthetic oligonucleotide
uucugaguaauccacgaug

SEQ ID NO: 939622 - RNA, 19 nt, Artificial Sequence
  Description of Artificial Sequence: Synthetic oligonucleotide
acuacauuggccuugugga

SEQ ID NO: 939623 - RNA, 19 nt, Artificial Sequence
  Description of Artificial Sequence: Synthetic oligonucleotide
gaagucuugaccgaccugg

SEQ ID NO: 939624 - RNA, 19 nt, Artificial Sequence
  Description of Artificial Sequence: Synthetic oligonucleotide
ugauccgagagccugaaga

SEQ ID NO: 939625 - RNA, 19 nt, Artificial Sequence
  Description of Artificial Sequence: Synthetic oligonucleotide
uguauagugagaagcuaag

SEQ ID NO: 939626 - RNA, 19 nt, Artificial Sequence
  Description of Artificial Sequence: Synthetic oligonucleotide
ugcuaucaaacauuaagca

SEQ ID NO: 939627 - RNA, 19 nt, Artificial Sequence
  Description of Artificial Sequence: Synthetic oligonucleotide
uauaugguagcacagugua

SEQ ID NO: 939628 - RNA, 19 nt, Artificial Sequence
  Description of Artificial Sequence: Synthetic oligonucleotide
cauggguccuuuaucaucg

SEQ ID NO: 939629 - RNA, 19 nt, Artificial Sequence
  Description of Artificial Sequence: Synthetic oligonucleotide
cauuacaccaccaagcuga

SEQ ID NO: 939630 - RNA, 19 nt, Artificial Sequence
  Description of Artificial Sequence: Synthetic oligonucleotide
acauuaagcaggcaacauc

SEQ ID NO: 939631 - RNA, 19 nt, Artificial Sequence
  Description of Artificial Sequence: Synthetic oligonucleotide
gaagaugcgugugagagcc

SEQ ID NO: 939632 - RNA, 19 nt, Artificial Sequence
  Description of Artificial Sequence: Synthetic oligonucleotide
uaucaaacauuaagcaggc

SEQ ID NO: 939633 - RNA, 19 nt, Artificial Sequence
  Description of Artificial Sequence: Synthetic oligonucleotide
auuccucggagccaaaagg

SEQ ID NO: 939634 - RNA, 19 nt, Artificial Sequence
  Description of Artificial Sequence: Synthetic oligonucleotide
aaggcuuguaagaaggcgg

SEQ ID NO: 939635 - RNA, 19 nt, Artificial Sequence
  Description of Artificial Sequence: Synthetic oligonucleotide
ucugaguaauccacgaugu

SEQ ID NO: 939636 - RNA, 19 nt, Artificial Sequence
  Description of Artificial Sequence: Synthetic oligonucleotide
uugcauacuacccucuuca

SEQ ID NO: 939637 - RNA, 19 nt, Artificial Sequence
  Description of Artificial Sequence: Synthetic oligonucleotide
caaacauuaagcaggcaac

SEQ ID NO: 939638 - RNA, 19 nt, Artificial Sequence
  Description of Artificial Sequence: Synthetic oligonucleotide
gaaaacucauacuucucug

SEQ ID NO: 939639 - RNA, 19 nt, Artificial Sequence
  Description of Artificial Sequence: Synthetic oligonucleotide
uccgagagccugaagaugc

SEQ ID NO: 939640 - RNA, 19 nt, Artificial Sequence
  Description of Artificial Sequence: Synthetic oligonucleotide
uuaucaucggcucuucacu

SEQ ID NO: 939641 - RNA, 19 nt, Artificial Sequence
  Description of Artificial Sequence: Synthetic oligonucleotide
acuguaaccaaagcgccgc

SEQ ID NO: 939642 - RNA, 19 nt, Artificial Sequence
  Description of Artificial Sequence: Synthetic oligonucleotide
guucggaucuucucaaugg

SEQ ID NO: 939643 - RNA, 19 nt, Artificial Sequence
  Description of Artificial Sequence: Synthetic oligonucleotide
ucguacaccacacacacua

SEQ ID NO: 939644 - RNA, 19 nt, Artificial Sequence
  Description of Artificial Sequence: Synthetic oligonucleotide
cauuaagcaggcaacauca

SEQ ID NO: 939645 - RNA, 19 nt, Artificial Sequence
  Description of Artificial Sequence: Synthetic oligonucleotide
uccacguggucucaugacg

SEQ ID NO: 939646 - RNA, 19 nt, Artificial Sequence
  Description of Artificial Sequence: Synthetic oligonucleotide
aucuagguaggucaccagg

SEQ ID NO: 939647 - RNA, 19 nt, Artificial Sequence
  Description of Artificial Sequence: Synthetic oligonucleotide
agucccgacagccaccagc

SEQ ID NO: 939648 - RNA, 19 nt, Artificial Sequence
  Description of Artificial Sequence: Synthetic oligonucleotide
cuuuucacggguaacugug

SEQ ID NO: 939649 - RNA, 19 nt, Artificial Sequence
  Description of Artificial Sequence: Synthetic oligonucleotide
gguagcacaguguacaaag

SEQ ID NO: 939650 - RNA, 19 nt, Artificial Sequence
  Description of Artificial Sequence: Synthetic oligonucleotide
agcaaguuggguaaagacg

SEQ ID NO: 939651 - RNA, 19 nt, Artificial Sequence
  Description of Artificial Sequence: Synthetic oligonucleotide
agccauuacaccaccaagc

SEQ ID NO: 939652 - RNA, 19 nt, Artificial Sequence
  Description of Artificial Sequence: Synthetic oligonucleotide
uguaauggugcuuguauau

SEQ ID NO: 939653 - RNA, 19 nt, Artificial Sequence
  Description of Artificial Sequence: Synthetic oligonucleotide
cuuguauaugguagcacag

SEQ ID NO: 939654 - RNA, 19 nt, Artificial Sequence
  Description of Artificial Sequence: Synthetic oligonucleotide
cucggagccaaaaggaggg

SEQ ID NO: 939655 - RNA, 19 nt, Artificial Sequence
  Description of Artificial Sequence: Synthetic oligonucleotide
gagauagccauguaagguc

SEQ ID NO: 939656 - RNA, 19 nt, Artificial Sequence
  Description of Artificial Sequence: Synthetic oligonucleotide
acauucuugcauacuaccc

SEQ ID NO: 939657 - RNA, 19 nt, Artificial Sequence
  Description of Artificial Sequence: Synthetic oligonucleotide
gaaggcuuguaagaaggcg

SEQ ID NO: 939658 - RNA, 19 nt, Artificial Sequence
  Description of Artificial Sequence: Synthetic oligonucleotide
uuugcacauaaggacauug

SEQ ID NO: 939659 - RNA, 19 nt, Artificial Sequence
  Description of Artificial Sequence: Synthetic oligonucleotide
uguaugggagcuccgggcc

SEQ ID NO: 939660 - RNA, 19 nt, Artificial Sequence
  Description of Artificial Sequence: Synthetic oligonucleotide
caggcaacaucacagguag

SEQ ID NO: 939661 - RNA, 19 nt, Artificial Sequence
  Description of Artificial Sequence: Synthetic oligonucleotide
agcuccguggaugagaggg

SEQ ID NO: 939662 - RNA, 19 nt, Artificial Sequence
  Description of Artificial Sequence: Synthetic oligonucleotide
aacugugauggccugugcu

SEQ ID NO: 939663 - RNA, 19 nt, Artificial Sequence
  Description of Artificial Sequence: Synthetic oligonucleotide
caucguacaccacacacac

SEQ ID NO: 939664 - RNA, 19 nt, Artificial Sequence
  Description of Artificial Sequence: Synthetic oligonucleotide
uguguucaggaagaggaag

SEQ ID NO: 939665 - RNA, 19 nt, Artificial Sequence
  Description of Artificial Sequence: Synthetic oligonucleotide
ucaucggcucuucacuagg

SEQ ID NO: 939666 - RNA, 19 nt, Artificial Sequence
  Description of Artificial Sequence: Synthetic oligonucleotide
caaacugguagccacggug

SEQ ID NO: 939667 - RNA, 19 nt, Artificial Sequence
  Description of Artificial Sequence: Synthetic oligonucleotide
uugguuaaggagaggcuca

SEQ ID NO: 939668 - RNA, 19 nt, Artificial Sequence
  Description of Artificial Sequence: Synthetic oligonucleotide
uugcacauaaggacauugc

SEQ ID NO: 939669 - RNA, 19 nt, Artificial Sequence
  Description of Artificial Sequence: Synthetic oligonucleotide
gagugccuggucuaggucc

SEQ ID NO: 939670 - RNA, 19 nt, Artificial Sequence
  Description of Artificial Sequence: Synthetic oligonucleotide
ugggcauagaccugggccc

SEQ ID NO: 939671 - RNA, 19 nt, Artificial Sequence
  Description of Artificial Sequence: Synthetic oligonucleotide
acggguaacugugauggcc

SEQ ID NO: 939672 - RNA, 19 nt, Artificial Sequence
  Description of Artificial Sequence: Synthetic oligonucleotide
guaaagacggcugggcugg

SEQ ID NO: 939673 - RNA, 19 nt, Artificial Sequence
  Description of Artificial Sequence: Synthetic oligonucleotide
gucuugaccgaccugggcc

SEQ ID NO: 939674 - RNA, 19 nt, Artificial Sequence
  Description of Artificial Sequence: Synthetic oligonucleotide
uuagcuguuuggccucagg

SEQ ID NO: 939675 - RNA, 19 nt, Artificial Sequence
  Description of Artificial Sequence: Synthetic oligonucleotide
aguguacaaaggucuuggg

SEQ ID NO: 939676 - RNA, 19 nt, Artificial Sequence
  Description of Artificial Sequence: Synthetic oligonucleotide
uugcccguccauguaaugg

SEQ ID NO: 939677 - RNA, 19 nt, Artificial Sequence
  Description of Artificial Sequence: Synthetic oligonucleotide
guauagugagaagcuaagg

SEQ ID NO: 939678 - RNA, 19 nt, Artificial Sequence
  Description of Artificial Sequence: Synthetic oligonucleotide
gaaaucagccggugacagg

SEQ ID NO: 939679 - RNA, 19 nt, Artificial Sequence
  Description of Artificial Sequence: Synthetic oligonucleotide
ucuguagcuccguggauga

SEQ ID NO: 939680 - RNA, 19 nt, Artificial Sequence
  Description of Artificial Sequence: Synthetic oligonucleotide
ugguuaucuccucggcgcg

SEQ ID NO: 939681 - RNA, 19 nt, Artificial Sequence
  Description of Artificial Sequence: Synthetic oligonucleotide
ugaguggggacuguguaug

SEQ ID NO: 939682 - RNA, 19 nt, Artificial Sequence
  Description of Artificial Sequence: Synthetic oligonucleotide
uggucuagguccugauccg

SEQ ID NO: 939683 - RNA, 19 nt, Artificial Sequence
  Description of Artificial Sequence: Synthetic oligonucleotide
cuugguuaaggagaggcuc

SEQ ID NO: 939684 - RNA, 19 nt, Artificial Sequence
  Description of Artificial Sequence: Synthetic oligonucleotide
ucucuuguccgcugacccg

SEQ ID NO: 939685 - RNA, 19 nt, Artificial Sequence
  Description of Artificial Sequence: Synthetic oligonucleotide
ugaagaugcgugugagagc

SEQ ID NO: 939686 - RNA, 19 nt, Artificial Sequence
  Description of Artificial Sequence: Synthetic oligonucleotide
ucacugcuaucaaacauua

SEQ ID NO: 939687 - RNA, 19 nt, Artificial Sequence
  Description of Artificial Sequence: Synthetic oligonucleotide
ucauggguccuuuaucauc

SEQ ID NO: 939688 - RNA, 19 nt, Artificial Sequence
  Description of Artificial Sequence: Synthetic oligonucleotide
agagaagucuugaccgacc

SEQ ID NO: 939689 - RNA, 19 nt, Artificial Sequence
  Description of Artificial Sequence: Synthetic oligonucleotide
ugagcucugugcugcagcc

SEQ ID NO: 939690 - RNA, 19 nt, Artificial Sequence
  Description of Artificial Sequence: Synthetic oligonucleotide
acaucaguccccggggacc

SEQ ID NO: 939691 - RNA, 19 nt, Artificial Sequence
  Description of Artificial Sequence: Synthetic oligonucleotide
aucggcucuucacuaggac

SEQ ID NO: 939692 - RNA, 19 nt, Artificial Sequence
  Description of Artificial Sequence: Synthetic oligonucleotide
uccgcuucugaguaaucca

SEQ ID NO: 939693 - RNA, 19 nt, Artificial Sequence
  Description of Artificial Sequence: Synthetic oligonucleotide
augguagcaaguuggguaa

SEQ ID NO: 939694 - RNA, 19 nt, Artificial Sequence
  Description of Artificial Sequence: Synthetic oligonucleotide
aagacggcugggcugggcu

SEQ ID NO: 939695 - RNA, 19 nt, Artificial Sequence
  Description of Artificial Sequence: Synthetic oligonucleotide
caugguagcaaguugggua

SEQ ID NO: 939696 - RNA, 19 nt, Artificial Sequence
  Description of Artificial Sequence: Synthetic oligonucleotide
ucagagaagucuugaccga

SEQ ID NO: 939697 - RNA, 19 nt, Artificial Sequence
  Description of Artificial Sequence: Synthetic oligonucleotide
cacuuugcacauaaggaca

SEQ ID NO: 939698 - RNA, 19 nt, Artificial Sequence
  Description of Artificial Sequence: Synthetic oligonucleotide
uuuucacggguaacuguga

SEQ ID NO: 939699 - RNA, 19 nt, Artificial Sequence
  Description of Artificial Sequence: Synthetic oligonucleotide
uccucggggaguucucugg

SEQ ID NO: 939700 - RNA, 19 nt, Artificial Sequence
  Description of Artificial Sequence: Synthetic oligonucleotide
cacuguaaccaaagcgccg

SEQ ID NO: 939701 - RNA, 19 nt, Artificial Sequence
  Description of Artificial Sequence: Synthetic oligonucleotide
aacauuaagcaggcaacau

SEQ ID NO: 939702 - RNA, 19 nt, Artificial Sequence
  Description of Artificial Sequence: Synthetic oligonucleotide
cuucugcagaaaucagccg

SEQ ID NO: 939703 - RNA, 19 nt, Artificial Sequence
  Description of Artificial Sequence: Synthetic oligonucleotide
ugcaguccugccauucacc

SEQ ID NO: 939704 - RNA, 19 nt, Artificial Sequence
  Description of Artificial Sequence: Synthetic oligonucleotide
uacccgcugcacaaacugg

SEQ ID NO: 939705 - RNA, 19 nt, Artificial Sequence
  Description of Artificial Sequence: Synthetic oligonucleotide
gacaggaucagagaagucu

SEQ ID NO: 939706 - RNA, 19 nt, Artificial Sequence
  Description of Artificial Sequence: Synthetic oligonucleotide
auacuucucugccgugugg

SEQ ID NO: 939707 - RNA, 19 nt, Artificial Sequence
  Description of Artificial Sequence: Synthetic oligonucleotide
ucuugaccgaccugggccu

SEQ ID NO: 939708 - RNA, 19 nt, Artificial Sequence
  Description of Artificial Sequence: Synthetic oligonucleotide
cucgggaaacuccucgccg

SEQ ID NO: 939709 - RNA, 19 nt, Artificial Sequence
  Description of Artificial Sequence: Synthetic oligonucleotide
cauuccucggagccaaaag

SEQ ID NO: 939710 - RNA, 19 nt, Artificial Sequence
  Description of Artificial Sequence: Synthetic oligonucleotide
gagucacuguaaccaaagc

SEQ ID NO: 939711 - RNA, 19 nt, Artificial Sequence
  Description of Artificial Sequence: Synthetic oligonucleotide
gaguguguucaggaagagg

SEQ ID NO: 939712 - RNA, 19 nt, Artificial Sequence
  Description of Artificial Sequence: Synthetic oligonucleotide
cuguauagugagaagcuaa

SEQ ID NO: 939713 - RNA, 19 nt, Artificial Sequence
  Description of Artificial Sequence: Synthetic oligonucleotide
agagccugaagaugcgugu

SEQ ID NO: 939714 - RNA, 19 nt, Artificial Sequence
  Description of Artificial Sequence: Synthetic oligonucleotide
aggugugcaaggcauugcu

SEQ ID NO: 939715 - RNA, 19 nt, Artificial Sequence
  Description of Artificial Sequence: Synthetic oligonucleotide
ucggcaacaccuucaggga

SEQ ID NO: 939716 - RNA, 19 nt, Artificial Sequence
  Description of Artificial Sequence: Synthetic oligonucleotide
guguaugggagcuccgggc

SEQ ID NO: 939717 - RNA, 19 nt, Artificial Sequence
  Description of Artificial Sequence: Synthetic oligonucleotide
gcgugugagagccugggcg

SEQ ID NO: 939718 - RNA, 19 nt, Artificial Sequence
  Description of Artificial Sequence: Synthetic oligonucleotide
augagagggcaccaucaug

SEQ ID NO: 939719 - RNA, 19 nt, Artificial Sequence
  Description of Artificial Sequence: Synthetic oligonucleotide
uuucacggguaacugugau

SEQ ID NO: 939720 - RNA, 19 nt, Artificial Sequence
  Description of Artificial Sequence: Synthetic oligonucleotide
ucgggcucccaacacuuug

SEQ ID NO: 939721 - RNA, 19 nt, Artificial Sequence
  Description of Artificial Sequence: Synthetic oligonucleotide
ggacccuguagccacacag

SEQ ID NO: 939722 - RNA, 19 nt, Artificial Sequence
  Description of Artificial Sequence: Synthetic oligonucleotide
uacaucaguccccggggac

SEQ ID NO: 939723 - RNA, 19 nt, Artificial Sequence
  Description of Artificial Sequence: Synthetic oligonucleotide
uccccggggacccuguagc

SEQ ID NO: 939724 - RNA, 19 nt, Artificial Sequence
  Description of Artificial Sequence: Synthetic oligonucleotide
acauaaggacauugcgcug

SEQ ID NO: 939725 - RNA, 19 nt, Artificial Sequence
  Description of Artificial Sequence: Synthetic oligonucleotide
guaauggugcuuguauaug

SEQ ID NO: 939726 - RNA, 19 nt, Artificial Sequence
  Description of Artificial Sequence: Synthetic oligonucleotide
uacauuggccuuguggauc

SEQ ID NO: 939727 - RNA, 19 nt, Artificial Sequence
  Description of Artificial Sequence: Synthetic oligonucleotide
acaucuagguaggucacca

SEQ ID NO: 939728 - RNA, 19 nt, Artificial Sequence
  Description of Artificial Sequence: Synthetic oligonucleotide
guaacugugauggccugug

SEQ ID NO: 939729 - RNA, 19 nt, Artificial Sequence
  Description of Artificial Sequence: Synthetic oligonucleotide
auaugguagcacaguguac

SEQ ID NO: 939730 - RNA, 19 nt, Artificial Sequence
  Description of Artificial Sequence: Synthetic oligonucleotide
uucuugcauacuacccucu

SEQ ID NO: 939731 - RNA, 19 nt, Artificial Sequence
  Description of Artificial Sequence: Synthetic oligonucleotide
uaucaucggcucuucacua

SEQ ID NO: 939732 - RNA, 19 nt, Artificial Sequence
  Description of Artificial Sequence: Synthetic oligonucleotide
ugcccguccauguaauggu

SEQ ID NO: 939733 - RNA, 19 nt, Artificial Sequence
  Description of Artificial Sequence: Synthetic oligonucleotide
agugagucacuguaaccaa

SEQ ID NO: 939734 - RNA, 19 nt, Artificial Sequence
  Description of Artificial Sequence: Synthetic oligonucleotide
cacaaacugguagccacgg

SEQ ID NO: 939735 - RNA, 19 nt, Artificial Sequence
  Description of Artificial Sequence: Synthetic oligonucleotide
gacauugcgcugugucugc

SEQ ID NO: 939736 - RNA, 19 nt, Artificial Sequence
  Description of Artificial Sequence: Synthetic oligonucleotide
guagcuccguggaugagag

SEQ ID NO: 939737 - RNA, 19 nt, Artificial Sequence
  Description of Artificial Sequence: Synthetic oligonucleotide
cugugccuugguuaaggag

SEQ ID NO: 939738 - RNA, 19 nt, Artificial Sequence
  Description of Artificial Sequence: Synthetic oligonucleotide
auugcgcugugucugcccu

SEQ ID NO: 939739 - RNA, 19 nt, Artificial Sequence
  Description of Artificial Sequence: Synthetic oligonucleotide
auacuacccucuucacauc

SEQ ID NO: 939740 - RNA, 19 nt, Artificial Sequence
  Description of Artificial Sequence: Synthetic oligonucleotide
cuugcauacuacccucuuc

SEQ ID NO: 939741 - RNA, 19 nt, Artificial Sequence
  Description of Artificial Sequence: Synthetic oligonucleotide
cugggcugguccuaagcag

SEQ ID NO: 939742 - RNA, 19 nt, Artificial Sequence
  Description of Artificial Sequence: Synthetic oligonucleotide
gagagccugaagaugcgug

SEQ ID NO: 939743 - RNA, 19 nt, Artificial Sequence
  Description of Artificial Sequence: Synthetic oligonucleotide
cucaaauacccgcugcaca

SEQ ID NO: 939744 - RNA, 19 nt, Artificial Sequence
  Description of Artificial Sequence: Synthetic oligonucleotide
caaguuggguaaagacggc

SEQ ID NO: 939745 - RNA, 19 nt, Artificial Sequence
  Description of Artificial Sequence: Synthetic oligonucleotide
agauagccauguaagguca

SEQ ID NO: 939746 - RNA, 19 nt, Artificial Sequence
  Description of Artificial Sequence: Synthetic oligonucleotide
ggagauaaagaggcagggg

SEQ ID NO: 939747 - RNA, 19 nt, Artificial Sequence
  Description of Artificial Sequence: Synthetic oligonucleotide
aagucuugaccgaccuggg

SEQ ID NO: 939748 - RNA, 19 nt, Artificial Sequence
  Description of Artificial Sequence: Synthetic oligonucleotide
acguggucucaugacggcc

SEQ ID NO: 939749 - RNA, 19 nt, Artificial Sequence
  Description of Artificial Sequence: Synthetic oligonucleotide
cagccuucugggcauagac

SEQ ID NO: 939750 - RNA, 19 nt, Artificial Sequence
  Description of Artificial Sequence: Synthetic oligonucleotide
gugacgucggcggggaugg

SEQ ID NO: 939751 - RNA, 19 nt, Artificial Sequence
  Description of Artificial Sequence: Synthetic oligonucleotide
cauguaaggucagccggcc

SEQ ID NO: 939752 - RNA, 19 nt, Artificial Sequence
  Description of Artificial Sequence: Synthetic oligonucleotide
agaagucuugaccgaccug

SEQ ID NO: 939753 - RNA, 19 nt, Artificial Sequence
  Description of Artificial Sequence: Synthetic oligonucleotide
uggucaugcuucucaaaua

SEQ ID NO: 939754 - RNA, 19 nt, Artificial Sequence
  Description of Artificial Sequence: Synthetic oligonucleotide
ugcauacuacccucuucac

SEQ ID NO: 939755 - RNA, 19 nt, Artificial Sequence
  Description of Artificial Sequence: Synthetic oligonucleotide
ugcuuguauaugguagcac

SEQ ID NO: 939756 - RNA, 19 nt, Artificial Sequence
  Description of Artificial Sequence: Synthetic oligonucleotide
ccuaagcaggagaaugagg

SEQ ID NO: 939757 - RNA, 19 nt, Artificial Sequence
  Description of Artificial Sequence: Synthetic oligonucleotide
agaugcgugugagagccug

SEQ ID NO: 939758 - RNA, 19 nt, Artificial Sequence
  Description of Artificial Sequence: Synthetic oligonucleotide
uuugcccguccauguaaug

SEQ ID NO: 939759 - RNA, 19 nt, Artificial Sequence
  Description of Artificial Sequence: Synthetic oligonucleotide
agcgacaggaucagagaag

SEQ ID NO: 939760 - RNA, 19 nt, Artificial Sequence
  Description of Artificial Sequence: Synthetic oligonucleotide
acaucguacaccacacaca

SEQ ID NO: 939761 - RNA, 19 nt, Artificial Sequence
  Description of Artificial Sequence: Synthetic oligonucleotide
cugaguaauccacgaugug

SEQ ID NO: 939762 - RNA, 19 nt, Artificial Sequence
  Description of Artificial Sequence: Synthetic oligonucleotide
uccucgggcucccaacacu

SEQ ID NO: 939763 - RNA, 19 nt, Artificial Sequence
  Description of Artificial Sequence: Synthetic oligonucleotide
gaugcgugugagagccugg

SEQ ID NO: 939764 - RNA, 19 nt, Artificial Sequence
  Description of Artificial Sequence: Synthetic oligonucleotide
gacccuguagccacacagc

SEQ ID NO: 939765 - RNA, 19 nt, Artificial Sequence
  Description of Artificial Sequence: Synthetic oligonucleotide
agaucagcuuuggaggaga

SEQ ID NO: 939766 - RNA, 19 nt, Artificial Sequence
  Description of Artificial Sequence: Synthetic oligonucleotide
ugacaggccuggcucggca

SEQ ID NO: 939767 - RNA, 19 nt, Artificial Sequence
  Description of Artificial Sequence: Synthetic oligonucleotide
cauugcgcugugucugccc

SEQ ID NO: 939768 - RNA, 19 nt, Artificial Sequence
  Description of Artificial Sequence: Synthetic oligonucleotide
ugagugccuggucuagguc

SEQ ID NO: 939769 - RNA, 19 nt, Artificial Sequence
  Description of Artificial Sequence: Synthetic oligonucleotide
ucggcggggaugguuaucu

SEQ ID NO: 939770 - RNA, 19 nt, Artificial Sequence
  Description of Artificial Sequence: Synthetic oligonucleotide
caggaucagagaagucuug

SEQ ID NO: 939771 - RNA, 19 nt, Artificial Sequence
  Description of Artificial Sequence: Synthetic oligonucleotide
ugugugcaucagguguggg

SEQ ID NO: 939772 - RNA, 19 nt, Artificial Sequence
  Description of Artificial Sequence: Synthetic oligonucleotide
uccugauccgagagccuga

SEQ ID NO: 939773 - RNA, 19 nt, Artificial Sequence
  Description of Artificial Sequence: Synthetic oligonucleotide
uuguccgcugacccgcacu

SEQ ID NO: 939774 - RNA, 19 nt, Artificial Sequence
  Description of Artificial Sequence: Synthetic oligonucleotide
gcaggucuuagcuguuugg

SEQ ID NO: 939775 - RNA, 19 nt, Artificial Sequence
  Description of Artificial Sequence: Synthetic oligonucleotide
cacgaugugggugggcacc

SEQ ID NO: 939776 - RNA, 19 nt, Artificial Sequence
  Description of Artificial Sequence: Synthetic oligonucleotide
cauugcuggacaucuaggu

SEQ ID NO: 939777 - RNA, 19 nt, Artificial Sequence
  Description of Artificial Sequence: Synthetic oligonucleotide
acauugcgcugugucugcc

SEQ ID NO: 939778 - RNA, 19 nt, Artificial Sequence
  Description of Artificial Sequence: Synthetic oligonucleotide
agccugaagaugcguguga

SEQ ID NO: 939779 - RNA, 19 nt, Artificial Sequence
  Description of Artificial Sequence: Synthetic oligonucleotide
gagaagucuugaccgaccu

SEQ ID NO: 939780 - RNA, 19 nt, Artificial Sequence
  Description of Artificial Sequence: Synthetic oligonucleotide
ggaaacuccucgccgacca

SEQ ID NO: 939781 - RNA, 19 nt, Artificial Sequence
  Description of Artificial Sequence: Synthetic oligonucleotide
ccacguggucucaugacgg

SEQ ID NO: 939782 - RNA, 19 nt, Artificial Sequence
  Description of Artificial Sequence: Synthetic oligonucleotide
uccugcacgccaccugcca

SEQ ID NO: 939783 - RNA, 19 nt, Artificial Sequence
  Description of Artificial Sequence: Synthetic oligonucleotide
ggaugaagaguguguucag

SEQ ID NO: 939784 - RNA, 19 nt, Artificial Sequence
  Description of Artificial Sequence: Synthetic oligonucleotide
gugugcaucagguguggga

SEQ ID NO: 939785 - RNA, 19 nt, Artificial Sequence
  Description of Artificial Sequence: Synthetic oligonucleotide
cguggggugcaaaacagcc

SEQ ID NO: 939786 - RNA, 19 nt, Artificial Sequence
  Description of Artificial Sequence: Synthetic oligonucleotide
uccuggucaugcuucucaa

SEQ ID NO: 939787 - RNA, 19 nt, Artificial Sequence
  Description of Artificial Sequence: Synthetic oligonucleotide
cccuacaucaguccccggg

SEQ ID NO: 939788 - RNA, 19 nt, Artificial Sequence
  Description of Artificial Sequence: Synthetic oligonucleotide
ggggucacugcuaucaaac

SEQ ID NO: 939789 - RNA, 19 nt, Artificial Sequence
  Description of Artificial Sequence: Synthetic oligonucleotide
acaggaucagagaagucuu

SEQ ID NO: 939790 - RNA, 19 nt, Artificial Sequence
  Description of Artificial Sequence: Synthetic oligonucleotide
caaggaaggcuuguaagaa

SEQ ID NO: 939791 - RNA, 19 nt, Artificial Sequence
  Description of Artificial Sequence: Synthetic oligonucleotide
ggaugguuaucuccucggc

SEQ ID NO: 939792 - RNA, 19 nt, Artificial Sequence
  Description of Artificial Sequence: Synthetic oligonucleotide
uccucuuuucacggguaac

SEQ ID NO: 939793 - RNA, 19 nt, Artificial Sequence
  Description of Artificial Sequence: Synthetic oligonucleotide
ggcggggaugguuaucucc

SEQ ID NO: 939794 - RNA, 19 nt, Artificial Sequence
  Description of Artificial Sequence: Synthetic oligonucleotide
cuggacaucuagguagguc

SEQ ID NO: 939795 - RNA, 19 nt, Artificial Sequence
  Description of Artificial Sequence: Synthetic oligonucleotide
ugagagccugggcgcacgc

SEQ ID NO: 939796 - RNA, 19 nt, Artificial Sequence
  Description of Artificial Sequence: Synthetic oligonucleotide
uaaggucagccggccagcc

SEQ ID NO: 939797 - RNA, 19 nt, Artificial Sequence
  Description of Artificial Sequence: Synthetic oligonucleotide
cugguccuaagcaggagaa

SEQ ID NO: 939798 - RNA, 19 nt, Artificial Sequence
  Description of Artificial Sequence: Synthetic oligonucleotide
gcuucugaguaauccacga

SEQ ID NO: 939799 - RNA, 19 nt, Artificial Sequence
  Description of Artificial Sequence: Synthetic oligonucleotide
ugacccgcacuguauugau

SEQ ID NO: 939800 - RNA, 19 nt, Artificial Sequence
  Description of Artificial Sequence: Synthetic oligonucleotide
ucuagggccuguggggcca

SEQ ID NO: 939801 - RNA, 19 nt, Artificial Sequence
  Description of Artificial Sequence: Synthetic oligonucleotide
ggucuuagcuguuuggccu

SEQ ID NO: 939802 - RNA, 19 nt, Artificial Sequence
  Description of Artificial Sequence: Synthetic oligonucleotide
guacuucucuuguccgcug

SEQ ID NO: 939803 - RNA, 19 nt, Artificial Sequence
  Description of Artificial Sequence: Synthetic oligonucleotide
uccucaucgcugagugccu

SEQ ID NO: 939804 - RNA, 19 nt, Artificial Sequence
  Description of Artificial Sequence: Synthetic oligonucleotide
gguagcaaguuggguaaag

SEQ ID NO: 939805 - RNA, 19 nt, Artificial Sequence
  Description of Artificial Sequence: Synthetic oligonucleotide
cauuaagcuccucaucgcu

SEQ ID NO: 939806 - RNA, 19 nt, Artificial Sequence
  Description of Artificial Sequence: Synthetic oligonucleotide
caucaguccccggggaccc

SEQ ID NO: 939807 - RNA, 19 nt, Artificial Sequence
  Description of Artificial Sequence: Synthetic oligonucleotide
cucggcgcgggcagggacc

SEQ ID NO: 939808 - RNA, 19 nt, Artificial Sequence
  Description of Artificial Sequence: Synthetic oligonucleotide
cugccacauucuugcauac

SEQ ID NO: 939809 - RNA, 19 nt, Artificial Sequence
  Description of Artificial Sequence: Synthetic oligonucleotide
aggcuuguaagaaggcgga

SEQ ID NO: 939810 - RNA, 19 nt, Artificial Sequence
  Description of Artificial Sequence: Synthetic oligonucleotide
agagguagucaggcgucag

SEQ ID NO: 939811 - RNA, 19 nt, Artificial Sequence
  Description of Artificial Sequence: Synthetic oligonucleotide
ggugcaaaacagccuucug

SEQ ID NO: 939812 - RNA, 19 nt, Artificial Sequence
  Description of Artificial Sequence: Synthetic oligonucleotide
ggaagguggccaugguagc

SEQ ID NO: 939813 - RNA, 19 nt, Artificial Sequence
  Description of Artificial Sequence: Synthetic oligonucleotide
guaaggucagccggccagc

SEQ ID NO: 939814 - RNA, 19 nt, Artificial Sequence
  Description of Artificial Sequence: Synthetic oligonucleotide
auguaaggucagccggcca

SEQ ID NO: 939815 - RNA, 19 nt, Artificial Sequence
  Description of Artificial Sequence: Synthetic oligonucleotide
ucuuagcuguuuggccuca

SEQ ID NO: 939816 - RNA, 19 nt, Artificial Sequence
  Description of Artificial Sequence: Synthetic oligonucleotide
guauaugguagcacagugu

SEQ ID NO: 939817 - RNA, 19 nt, Artificial Sequence
  Description of Artificial Sequence: Synthetic oligonucleotide
ucuuguccgcugacccgca

SEQ ID NO: 939818 - RNA, 19 nt, Artificial Sequence
  Description of Artificial Sequence: Synthetic oligonucleotide
cagcacucacuucacacaa

SEQ ID NO: 939819 - RNA, 19 nt, Artificial Sequence
  Description of Artificial Sequence: Synthetic oligonucleotide
ugcuccgcuucugaguaau

SEQ ID NO: 939820 - RNA, 19 nt, Artificial Sequence
  Description of Artificial Sequence: Synthetic oligonucleotide
agccacggugguugagcuc

SEQ ID NO: 939821 - RNA, 19 nt, Artificial Sequence
  Description of Artificial Sequence: Synthetic oligonucleotide
gcgggcagggaccuccucg

SEQ ID NO: 939822 - RNA, 19 nt, Artificial Sequence
  Description of Artificial Sequence: Synthetic oligonucleotide
agacggcugggcugggcug

SEQ ID NO: 939823 - RNA, 19 nt, Artificial Sequence
  Description of Artificial Sequence: Synthetic oligonucleotide
caaggcauugcuggacauc

SEQ ID NO: 939824 - RNA, 19 nt, Artificial Sequence
  Description of Artificial Sequence: Synthetic oligonucleotide
acgcuggaugaagagugug

SEQ ID NO: 939825 - RNA, 19 nt, Artificial Sequence
  Description of Artificial Sequence: Synthetic oligonucleotide
ugguuaaggagaggcucau

SEQ ID NO: 939826 - RNA, 19 nt, Artificial Sequence
  Description of Artificial Sequence: Synthetic oligonucleotide
gugcuuguauaugguagca

SEQ ID NO: 939827 - RNA, 19 nt, Artificial Sequence
  Description of Artificial Sequence: Synthetic oligonucleotide
uggucucaugacggccacg

SEQ ID NO: 939828 - RNA, 19 nt, Artificial Sequence
  Description of Artificial Sequence: Synthetic oligonucleotide
ggcucggcaacaccuucag

SEQ ID NO: 939829 - RNA, 19 nt, Artificial Sequence
  Description of Artificial Sequence: Synthetic oligonucleotide
caccagcauuccucggagc

SEQ ID NO: 939830 - RNA, 19 nt, Artificial Sequence
  Description of Artificial Sequence: Synthetic oligonucleotide
cagaaaucagccggugaca

SEQ ID NO: 939831 - RNA, 19 nt, Artificial Sequence
  Description of Artificial Sequence: Synthetic oligonucleotide
ugccuugguuaaggagagg

SEQ ID NO: 939832 - RNA, 19 nt, Artificial Sequence
  Description of Artificial Sequence: Synthetic oligonucleotide
cacggguaacugugauggc

SEQ ID NO: 939833 - RNA, 19 nt, Artificial Sequence
  Description of Artificial Sequence: Synthetic oligonucleotide
gucccgacagccaccagca

SEQ ID NO: 939834 - RNA, 19 nt, Artificial Sequence
  Description of Artificial Sequence: Synthetic oligonucleotide
ggugggcaccuucuccggg

SEQ ID NO: 939835 - RNA, 19 nt, Artificial Sequence
  Description of Artificial Sequence: Synthetic oligonucleotide
uagcuccguggaugagagg

SEQ ID NO: 939836 - RNA, 19 nt, Artificial Sequence
  Description of Artificial Sequence: Synthetic oligonucleotide
gccaugguagcaaguuggg

SEQ ID NO: 939837 - RNA, 19 nt, Artificial Sequence
  Description of Artificial Sequence: Synthetic oligonucleotide
cuacaucaguccccgggga

SEQ ID NO: 939838 - RNA, 19 nt, Artificial Sequence
  Description of Artificial Sequence: Synthetic oligonucleotide
ccgcuucugaguaauccac

SEQ ID NO: 939839 - RNA, 19 nt, Artificial Sequence
  Description of Artificial Sequence: Synthetic oligonucleotide
caucggcucuucacuagga

SEQ ID NO: 939840 - RNA, 19 nt, Artificial Sequence
  Description of Artificial Sequence: Synthetic oligonucleotide
cuggcucggcaacaccuuc

SEQ ID NO: 939841 - RNA, 19 nt, Artificial Sequence
  Description of Artificial Sequence: Synthetic oligonucleotide
ccgaccagcgacaggauca

SEQ ID NO: 939842 - RNA, 19 nt, Artificial Sequence
  Description of Artificial Sequence: Synthetic oligonucleotide
gccauuacaccaccaagcu

SEQ ID NO: 939843 - RNA, 19 nt, Artificial Sequence
  Description of Artificial Sequence: Synthetic oligonucleotide
cagacacaucguacaccac

SEQ ID NO: 939844 - RNA, 19 nt, Artificial Sequence
  Description of Artificial Sequence: Synthetic oligonucleotide
ccauuacaccaccaagcug

SEQ ID NO: 939845 - RNA, 19 nt, Artificial Sequence
  Description of Artificial Sequence: Synthetic oligonucleotide
cgcuucugaguaauccacg

SEQ ID NO: 939846 - RNA, 19 nt, Artificial Sequence
  Description of Artificial Sequence: Synthetic oligonucleotide
gacccgcacuguauugaug

SEQ ID NO: 939847 - RNA, 19 nt, Artificial Sequence
  Description of Artificial Sequence: Synthetic oligonucleotide
ugugagagccugggcgcac

SEQ ID NO: 939848 - RNA, 19 nt, Artificial Sequence
  Description of Artificial Sequence: Synthetic oligonucleotide
cugauccgagagccugaag

SEQ ID NO: 939849 - RNA, 19 nt, Artificial Sequence
  Description of Artificial Sequence: Synthetic oligonucleotide
ggugacgucggcggggaug

SEQ ID NO: 939850 - RNA, 19 nt, Artificial Sequence
  Description of Artificial Sequence: Synthetic oligonucleotide
cuucagggagaucagcuuu

SEQ ID NO: 939851 - RNA, 19 nt, Artificial Sequence
  Description of Artificial Sequence: Synthetic oligonucleotide
cugacccgcacuguauuga

SEQ ID NO: 939852 - RNA, 19 nt, Artificial Sequence
  Description of Artificial Sequence: Synthetic oligonucleotide
ugguccuaagcaggagaau

SEQ ID NO: 939853 - RNA, 19 nt, Artificial Sequence
  Description of Artificial Sequence: Synthetic oligonucleotide
ggccucagggucaguaaag

SEQ ID NO: 939854 - RNA, 19 nt, Artificial Sequence
  Description of Artificial Sequence: Synthetic oligonucleotide
cuagguaggucaccagggu

SEQ ID NO: 939855 - RNA, 19 nt, Artificial Sequence
  Description of Artificial Sequence: Synthetic oligonucleotide
gccguggggugcaaaacag

SEQ ID NO: 939856 - RNA, 19 nt, Artificial Sequence
  Description of Artificial Sequence: Synthetic oligonucleotide
cugcacgccaccugccaca

SEQ ID NO: 939857 - RNA, 19 nt, Artificial Sequence
  Description of Artificial Sequence: Synthetic oligonucleotide
ccucgggaaacuccucgcc

SEQ ID NO: 939858 - RNA, 19 nt, Artificial Sequence
  Description of Artificial Sequence: Synthetic oligonucleotide
ucugccgugugggcaccca

SEQ ID NO: 939859 - RNA, 19 nt, Artificial Sequence
  Description of Artificial Sequence: Synthetic oligonucleotide
cucgccgaccagcgacagg

SEQ ID NO: 939860 - RNA, 19 nt, Artificial Sequence
  Description of Artificial Sequence: Synthetic oligonucleotide
gauggccaaagcaggacuu

SEQ ID NO: 939861 - RNA, 19 nt, Artificial Sequence
  Description of Artificial Sequence: Synthetic oligonucleotide
agccaccgcagucccgaca

SEQ ID NO: 939862 - RNA, 19 nt, Artificial Sequence
  Description of Artificial Sequence: Synthetic oligonucleotide
ggauggccaaagcaggacu

SEQ ID NO: 939863 - RNA, 19 nt, Artificial Sequence
  Description of Artificial Sequence: Synthetic oligonucleotide
ugguagcaaguuggguaaa

SEQ ID NO: 939864 - RNA, 19 nt, Artificial Sequence
  Description of Artificial Sequence: Synthetic oligonucleotide
cugagugccuggucuaggu

SEQ ID NO: 939865 - RNA, 19 nt, Artificial Sequence
  Description of Artificial Sequence: Synthetic oligonucleotide
gcugagugccuggucuagg

SEQ ID NO: 939866 - RNA, 19 nt, Artificial Sequence
  Description of Artificial Sequence: Synthetic oligonucleotide
gcacuguauugauggugug

SEQ ID NO: 939867 - RNA, 19 nt, Artificial Sequence
  Description of Artificial Sequence: Synthetic oligonucleotide
aggcaacaucacagguagg

SEQ ID NO: 939868 - RNA, 19 nt, Artificial Sequence
  Description of Artificial Sequence: Synthetic oligonucleotide
cuuguccgcugacccgcac

SEQ ID NO: 939869 - RNA, 19 nt, Artificial Sequence
  Description of Artificial Sequence: Synthetic oligonucleotide
ugaccgaccugggccucgc

SEQ ID NO: 939870 - RNA, 19 nt, Artificial Sequence
  Description of Artificial Sequence: Synthetic oligonucleotide
gcacgcaggucuuagcugu

SEQ ID NO: 939871 - RNA, 19 nt, Artificial Sequence
  Description of Artificial Sequence: Synthetic oligonucleotide
cuccguggaugagagggca

SEQ ID NO: 939872 - RNA, 19 nt, Artificial Sequence
  Description of Artificial Sequence: Synthetic oligonucleotide
aagaugcgugugagagccu

SEQ ID NO: 939873 - RNA, 19 nt, Artificial Sequence
  Description of Artificial Sequence: Synthetic oligonucleotide
ggguccuuuaucaucggcu

SEQ ID NO: 939874 - RNA, 19 nt, Artificial Sequence
  Description of Artificial Sequence: Synthetic oligonucleotide
cuucugaguaauccacgau

SEQ ID NO: 939875 - RNA, 19 nt, Artificial Sequence
  Description of Artificial Sequence: Synthetic oligonucleotide
gcucggcaacaccuucagg

SEQ ID NO: 939876 - RNA, 19 nt, Artificial Sequence
  Description of Artificial Sequence: Synthetic oligonucleotide
uggccaaggaaggcuugua

SEQ ID NO: 939877 - RNA, 19 nt, Artificial Sequence
  Description of Artificial Sequence: Synthetic oligonucleotide
ccguggggugcaaaacagc

SEQ ID NO: 939878 - RNA, 19 nt, Artificial Sequence
  Description of Artificial Sequence: Synthetic oligonucleotide
gggguacauggagcggugg

SEQ ID NO: 939879 - RNA, 19 nt, Artificial Sequence
  Description of Artificial Sequence: Synthetic oligonucleotide
gguacuucucuuguccgcu

SEQ ID NO: 939880 - RNA, 19 nt, Artificial Sequence
  Description of Artificial Sequence: Synthetic oligonucleotide
cacugcuaucaaacauuaa

SEQ ID NO: 939881 - RNA, 19 nt, Artificial Sequence
  Description of Artificial Sequence: Synthetic oligonucleotide
ugcacgccaccugccacau

SEQ ID NO: 939882 - RNA, 19 nt, Artificial Sequence
  Description of Artificial Sequence: Synthetic oligonucleotide
aucguacaccacacacacu

SEQ ID NO: 939883 - RNA, 19 nt, Artificial Sequence
  Description of Artificial Sequence: Synthetic oligonucleotide
ccguggaugagagggcacc

SEQ ID NO: 939884 - RNA, 19 nt, Artificial Sequence
  Description of Artificial Sequence: Synthetic oligonucleotide
ccggggacccuguagccac

SEQ ID NO: 939885 - RNA, 19 nt, Artificial Sequence
  Description of Artificial Sequence: Synthetic oligonucleotide
gccggugucuucugcagaa

SEQ ID NO: 939886 - RNA, 19 nt, Artificial Sequence
  Description of Artificial Sequence: Synthetic oligonucleotide
agaacacacugaagagauu

SEQ ID NO: 939887 - RNA, 19 nt, Artificial Sequence
  Description of Artificial Sequence: Synthetic oligonucleotide
cagcauuccucggagccaa

SEQ ID NO: 939888 - RNA, 19 nt, Artificial Sequence
  Description of Artificial Sequence: Synthetic oligonucleotide
gcugugccuugguuaagga

SEQ ID NO: 939889 - RNA, 19 nt, Artificial Sequence
  Description of Artificial Sequence: Synthetic oligonucleotide
cagggagaucagcuuugga

SEQ ID NO: 939890 - RNA, 19 nt, Artificial Sequence
  Description of Artificial Sequence: Synthetic oligonucleotide
gggaaacuccucgccgacc

SEQ ID NO: 939891 - RNA, 19 nt, Artificial Sequence
  Description of Artificial Sequence: Synthetic oligonucleotide
ggcagccggugucuucugc

SEQ ID NO: 939892 - RNA, 19 nt, Artificial Sequence
  Description of Artificial Sequence: Synthetic oligonucleotide
agcacucacuucacacaaa

SEQ ID NO: 939893 - RNA, 19 nt, Artificial Sequence
  Description of Artificial Sequence: Synthetic oligonucleotide
cuugggaguccugcucaca

SEQ ID NO: 939894 - RNA, 19 nt, Artificial Sequence
  Description of Artificial Sequence: Synthetic oligonucleotide
acgucggcggggaugguua

SEQ ID NO: 939895 - RNA, 19 nt, Artificial Sequence
  Description of Artificial Sequence: Synthetic oligonucleotide
ggcgcacgcaggucuuagc

SEQ ID NO: 939896 - RNA, 19 nt, Artificial Sequence
  Description of Artificial Sequence: Synthetic oligonucleotide
cagagguagucaggcguca

SEQ ID NO: 939897 - RNA, 19 nt, Artificial Sequence
  Description of Artificial Sequence: Synthetic oligonucleotide
gugugagagccugggcgca

SEQ ID NO: 939898 - RNA, 19 nt, Artificial Sequence
  Description of Artificial Sequence: Synthetic oligonucleotide
agccggugacaggccuggc

SEQ ID NO: 939899 - RNA, 19 nt, Artificial Sequence
  Description of Artificial Sequence: Synthetic oligonucleotide
cguacaccacacacacuac

SEQ ID NO: 939900 - RNA, 19 nt, Artificial Sequence
  Description of Artificial Sequence: Synthetic oligonucleotide
gaccgaccugggccucgcc

SEQ ID NO: 939901 - RNA, 19 nt, Artificial Sequence
  Description of Artificial Sequence: Synthetic oligonucleotide
gcauagaccugggcccugc

SEQ ID NO: 939902 - RNA, 19 nt, Artificial Sequence
  Description of Artificial Sequence: Synthetic oligonucleotide
ggcuuguaagaaggcggac

SEQ ID NO: 939903 - RNA, 19 nt, Artificial Sequence
  Description of Artificial Sequence: Synthetic oligonucleotide
ccugcacgccaccugccac

SEQ ID NO: 939904 - RNA, 19 nt, Artificial Sequence
  Description of Artificial Sequence: Synthetic oligonucleotide
gguaggguccagagaggca

SEQ ID NO: 939905 - RNA, 19 nt, Artificial Sequence
  Description of Artificial Sequence: Synthetic oligonucleotide
ggucuagguccugauccga

SEQ ID NO: 939906 - RNA, 19 nt, Artificial Sequence
  Description of Artificial Sequence: Synthetic oligonucleotide
uugcgcugugucugcccuu

SEQ ID NO: 939907 - RNA, 19 nt, Artificial Sequence
  Description of Artificial Sequence: Synthetic oligonucleotide
ggauccacuugguucggau

SEQ ID NO: 939908 - RNA, 19 nt, Artificial Sequence
  Description of Artificial Sequence: Synthetic oligonucleotide
cacgcuggaugaagagugu

SEQ ID NO: 939909 - RNA, 19 nt, Artificial Sequence
  Description of Artificial Sequence: Synthetic oligonucleotide
guuugcccguccauguaau

SEQ ID NO: 939910 - RNA, 19 nt, Artificial Sequence
  Description of Artificial Sequence: Synthetic oligonucleotide
cgcaggucuuagcuguuug

SEQ ID NO: 939911 - RNA, 19 nt, Artificial Sequence
  Description of Artificial Sequence: Synthetic oligonucleotide
gcgcacgcaggucuuagcu

SEQ ID NO: 939912 - RNA, 19 nt, Artificial Sequence
  Description of Artificial Sequence: Synthetic oligonucleotide
gcagucccgacagccacca

SEQ ID NO: 939913 - RNA, 19 nt, Artificial Sequence
  Description of Artificial Sequence: Synthetic oligonucleotide
ccuuuaucaucggcucuuc

SEQ ID NO: 939914 - RNA, 19 nt, Artificial Sequence
  Description of Artificial Sequence: Synthetic oligonucleotide
ccuucagacuguggccaag

SEQ ID NO: 939915 - RNA, 19 nt, Artificial Sequence
  Description of Artificial Sequence: Synthetic oligonucleotide
ggccuggcucggcaacacc

SEQ ID NO: 939916 - RNA, 19 nt, Artificial Sequence
  Description of Artificial Sequence: Synthetic oligonucleotide
gggugcaaaacagccuucu

SEQ ID NO: 939917 - RNA, 19 nt, Artificial Sequence
  Description of Artificial Sequence: Synthetic oligonucleotide
ccacgaugugggugggcac

SEQ ID NO: 939918 - RNA, 19 nt, Artificial Sequence
  Description of Artificial Sequence: Synthetic oligonucleotide
gcccguccauguaauggug

SEQ ID NO: 939919 - RNA, 19 nt, Artificial Sequence
  Description of Artificial Sequence: Synthetic oligonucleotide
ccucuuuucacggguaacu

SEQ ID NO: 939920 - RNA, 19 nt, Artificial Sequence
  Description of Artificial Sequence: Synthetic oligonucleotide
guuccucggggaguucucu

SEQ ID NO: 939921 - RNA, 19 nt, Artificial Sequence
  Description of Artificial Sequence: Synthetic oligonucleotide
ccuguauagugagaagcua

SEQ ID NO: 939922 - RNA, 19 nt, Artificial Sequence
  Description of Artificial Sequence: Synthetic oligonucleotide
ccggccagccugagugggg

SEQ ID NO: 939923 - RNA, 19 nt, Artificial Sequence
  Description of Artificial Sequence: Synthetic oligonucleotide
gggcgcacgcaggucuuag

SEQ ID NO: 939924 - RNA, 19 nt, Artificial Sequence
  Description of Artificial Sequence: Synthetic oligonucleotide
gcggggaugguuaucuccu

SEQ ID NO: 939925 - RNA, 19 nt, Artificial Sequence
  Description of Artificial Sequence: Synthetic oligonucleotide
gguaacugugauggccugu

SEQ ID NO: 939926 - RNA, 19 nt, Artificial Sequence
  Description of Artificial Sequence: Synthetic oligonucleotide
gaccagcgacaggaucaga

SEQ ID NO: 939927 - RNA, 19 nt, Artificial Sequence
  Description of Artificial Sequence: Synthetic oligonucleotide
gaaggcggacuugcccacu

SEQ ID NO: 939928 - RNA, 19 nt, Artificial Sequence
  Description of Artificial Sequence: Synthetic oligonucleotide
gucucaugacggccacgcu

SEQ ID NO: 939929 - RNA, 19 nt, Artificial Sequence
  Description of Artificial Sequence: Synthetic oligonucleotide
cagucccgacagccaccag

SEQ ID NO: 939930 - RNA, 19 nt, Artificial Sequence
  Description of Artificial Sequence: Synthetic oligonucleotide
ggggugcaaaacagccuuc

SEQ ID NO: 939931 - RNA, 19 nt, Artificial Sequence
  Description of Artificial Sequence: Synthetic oligonucleotide
cgcagucccgacagccacc

SEQ ID NO: 939932 - RNA, 19 nt, Artificial Sequence
  Description of Artificial Sequence: Synthetic oligonucleotide
ugggcgcacgcaggucuua

SEQ ID NO: 939933 - RNA, 19 nt, Artificial Sequence
  Description of Artificial Sequence: Synthetic oligonucleotide
ggguccauuggcagagaua

SEQ ID NO: 939934 - RNA, 19 nt, Artificial Sequence
  Description of Artificial Sequence: Synthetic oligonucleotide
gucggcggggaugguuauc

SEQ ID NO: 939935 - RNA, 19 nt, Artificial Sequence
  Description of Artificial Sequence: Synthetic oligonucleotide
ccucaucgcugagugccug

SEQ ID NO: 939936 - RNA, 19 nt, Artificial Sequence
  Description of Artificial Sequence: Synthetic oligonucleotide
cauagaccugggcccugcu

SEQ ID NO: 939937 - RNA, 19 nt, Artificial Sequence
  Description of Artificial Sequence: Synthetic oligonucleotide
gacggccacgcuggaugaa

SEQ ID NO: 939938 - RNA, 19 nt, Artificial Sequence
  Description of Artificial Sequence: Synthetic oligonucleotide
caacaccuucagggagauc

SEQ ID NO: 939939 - RNA, 19 nt, Artificial Sequence
  Description of Artificial Sequence: Synthetic oligonucleotide
ccgugugggcacccacaag

SEQ ID NO: 939940 - RNA, 19 nt, Artificial Sequence
  Description of Artificial Sequence: Synthetic oligonucleotide
cggguaacugugauggccu

SEQ ID NO: 939941 - RNA, 19 nt, Artificial Sequence
  Description of Artificial Sequence: Synthetic oligonucleotide
cgggaaacuccucgccgac

SEQ ID NO: 939942 - RNA, 19 nt, Artificial Sequence
  Description of Artificial Sequence: Synthetic oligonucleotide
gacgucggcggggaugguu

SEQ ID NO: 939943 - RNA, 19 nt, Artificial Sequence
  Description of Artificial Sequence: Synthetic oligonucleotide
ggacuguguaugggagcuc

SEQ ID NO: 939944 - RNA, 19 nt, Artificial Sequence
  Description of Artificial Sequence: Synthetic oligonucleotide
cagggaccuccucgggaaa

SEQ ID NO: 939945 - RNA, 19 nt, Artificial Sequence
  Description of Artificial Sequence: Synthetic oligonucleotide
ggugugcugugccuugguu

SEQ ID NO: 939946 - RNA, 19 nt, Artificial Sequence
  Description of Artificial Sequence: Synthetic oligonucleotide
gccacgcuggaugaagagu

SEQ ID NO: 939947 - RNA, 19 nt, Artificial Sequence
  Description of Artificial Sequence: Synthetic oligonucleotide
cgaccagcgacaggaucag

SEQ ID NO: 939948 - RNA, 19 nt, Artificial Sequence
  Description of Artificial Sequence: Synthetic oligonucleotide
ccucggcgcgggcagggac

SEQ ID NO: 939949 - RNA, 19 nt, Artificial Sequence
  Description of Artificial Sequence: Synthetic oligonucleotide
cgacaggaucagagaaguc

SEQ ID NO: 939950 - RNA, 19 nt, Artificial Sequence
  Description of Artificial Sequence: Synthetic oligonucleotide
ggggugacgucggcgggga

SEQ ID NO: 939951 - RNA, 19 nt, Artificial Sequence
  Description of Artificial Sequence: Synthetic oligonucleotide
ccugggcgcacgcaggucu

SEQ ID NO: 939952 - RNA, 19 nt, Artificial Sequence
  Description of Artificial Sequence: Synthetic oligonucleotide
cuuugcacauaaggacauu

SEQ ID NO: 939953 - RNA, 19 nt, Artificial Sequence
  Description of Artificial Sequence: Synthetic oligonucleotide
agcauuccucggagccaaa

SEQ ID NO: 939954 - RNA, 19 nt, Artificial Sequence
  Description of Artificial Sequence: Synthetic oligonucleotide
ugacgucggcggggauggu

SEQ ID NO: 939955 - RNA, 19 nt, Artificial Sequence
  Description of Artificial Sequence: Synthetic oligonucleotide
ccccuacaucaguccccgg

SEQ ID NO: 939956 - RNA, 19 nt, Artificial Sequence
  Description of Artificial Sequence: Synthetic oligonucleotide
ccucgccgaccagcgacag

SEQ ID NO: 939957 - RNA, 19 nt, Artificial Sequence
  Description of Artificial Sequence: Synthetic oligonucleotide
ggcgucagcuccagugagu

SEQ ID NO: 939958 - RNA, 19 nt, Artificial Sequence
  Description of Artificial Sequence: Synthetic oligonucleotide
gggguguuccucggggagu

SEQ ID NO: 939959 - RNA, 19 nt, Artificial Sequence
  Description of Artificial Sequence: Synthetic oligonucleotide
ccacggugguugagcucug

SEQ ID NO: 939960 - RNA, 19 nt, Artificial Sequence
  Description of Artificial Sequence: Synthetic oligonucleotide
caaaggucuuggggucacu

SEQ ID NO: 939961 - RNA, 19 nt, Artificial Sequence
  Description of Artificial Sequence: Synthetic oligonucleotide
cguggaugagagggcacca

SEQ ID NO: 939962 - RNA, 19 nt, Artificial Sequence
  Description of Artificial Sequence: Synthetic oligonucleotide
cucgggcucccaacacuuu

SEQ ID NO: 939963 - RNA, 19 nt, Artificial Sequence
  Description of Artificial Sequence: Synthetic oligonucleotide
ccaugguagcaaguugggu

SEQ ID NO: 939964 - RNA, 19 nt, Artificial Sequence
  Description of Artificial Sequence: Synthetic oligonucleotide
ccucgggcucccaacacuu

SEQ ID NO: 939965 - RNA, 19 nt, Artificial Sequence
  Description of Artificial Sequence: Synthetic oligonucleotide
cugggcgcacgcaggucuu

SEQ ID NO: 939966 - RNA, 19 nt, Artificial Sequence
  Description of Artificial Sequence: Synthetic oligonucleotide
cacggugguugagcucugu

SEQ ID NO: 939967 - RNA, 19 nt, Artificial Sequence
  Description of Artificial Sequence: Synthetic oligonucleotide
gggaguucucuggcuuccu

SEQ ID NO: 939968 - RNA, 19 nt, Artificial Sequence
  Description of Artificial Sequence: Synthetic oligonucleotide
gcgcugugucugcccuuuc

SEQ ID NO: 939969 - RNA, 19 nt, Artificial Sequence
  Description of Artificial Sequence: Synthetic oligonucleotide
ccacuccucgggcucccaa

SEQ ID NO: 939970 - RNA, 19 nt, Artificial Sequence
  Description of Artificial Sequence: Synthetic oligonucleotide
cccgcacuguauugauggu

SEQ ID NO: 939971 - RNA, 19 nt, Artificial Sequence
  Description of Artificial Sequence: Synthetic oligonucleotide
ccggugucuucugcagaaa

SEQ ID NO: 939972 - RNA, 19 nt, Artificial Sequence
  Description of Artificial Sequence: Synthetic oligonucleotide
gggugacgucggcggggau

SEQ ID NO: 939973 - RNA, 19 nt, Artificial Sequence
  Description of Artificial Sequence: Synthetic oligonucleotide
gcgcgggcagggaccuccu

SEQ ID NO: 939974 - RNA, 19 nt, Artificial Sequence
  Description of Artificial Sequence: Synthetic oligonucleotide
cgucggcggggaugguuau

SEQ ID NO: 939975 - RNA, 19 nt, Artificial Sequence
  Description of Artificial Sequence: Synthetic oligonucleotide
cgaugugggugggcaccuu

SEQ ID NO: 939976 - RNA, 19 nt, Artificial Sequence
  Description of Artificial Sequence: Synthetic oligonucleotide
auaguagccaauuagcucc

SEQ ID NO: 939977 - RNA, 19 nt, Artificial Sequence
  Description of Artificial Sequence: Synthetic oligonucleotide
aaucuaauaucucagucac

SEQ ID NO: 939978 - RNA, 19 nt, Artificial Sequence
  Description of Artificial Sequence: Synthetic oligonucleotide
ugauuaaacagcuuggugc

SEQ ID NO: 939979 - RNA, 19 nt, Artificial Sequence
  Description of Artificial Sequence: Synthetic oligonucleotide
auuuguuggacacagcagc

SEQ ID NO: 939980 - RNA, 19 nt, Artificial Sequence
  Description of Artificial Sequence: Synthetic oligonucleotide
ucuagauugaggauuguag

SEQ ID NO: 939981 - RNA, 19 nt, Artificial Sequence
  Description of Artificial Sequence: Synthetic oligonucleotide
ucaauaggcaguuauugag

SEQ ID NO: 939982 - RNA, 19 nt, Artificial Sequence
  Description of Artificial Sequence: Synthetic oligonucleotide
acuacggaagucuaugcgc

SEQ ID NO: 939983 - RNA, 19 nt, Artificial Sequence
  Description of Artificial Sequence: Synthetic oligonucleotide
uacuauggauuuaagacgc

SEQ ID NO: 939984 - RNA, 19 nt, Artificial Sequence
  Description of Artificial Sequence: Synthetic oligonucleotide
cuacuauggauuuaagacg

SEQ ID NO: 939985 - RNA, 19 nt, Artificial Sequence
  Description of Artificial Sequence: Synthetic oligonucleotide
ucuagcauucaucagggug

SEQ ID NO: 939986 - RNA, 19 nt, Artificial Sequence
  Description of Artificial Sequence: Synthetic oligonucleotide
uaaucuaauaucucaguca

SEQ ID NO: 939987 - RNA, 19 nt, Artificial Sequence
  Description of Artificial Sequence: Synthetic oligonucleotide
agugggaauaucuugaaga

SEQ ID NO: 939988 - RNA, 19 nt, Artificial Sequence
  Description of Artificial Sequence: Synthetic oligonucleotide
agaucucgaaauuuguugg

SEQ ID NO: 939989 - RNA, 19 nt, Artificial Sequence
  Description of Artificial Sequence: Synthetic oligonucleotide
uggaugucuuguaaggugg

SEQ ID NO: 939990 - RNA, 19 nt, Artificial Sequence
  Description of Artificial Sequence: Synthetic oligonucleotide
agacaaucgaugcuagagc

SEQ ID NO: 939991 - RNA, 19 nt, Artificial Sequence
  Description of Artificial Sequence: Synthetic oligonucleotide
uauggauuuaagacgcugc

SEQ ID NO: 939992 - RNA, 19 nt, Artificial Sequence
  Description of Artificial Sequence: Synthetic oligonucleotide
gagaucucgaaauuuguug

SEQ ID NO: 939993 - RNA, 19 nt, Artificial Sequence
  Description of Artificial Sequence: Synthetic oligonucleotide
uuuaagacgcugcucagcu

SEQ ID NO: 939994 - RNA, 19 nt, Artificial Sequence
  Description of Artificial Sequence: Synthetic oligonucleotide
ucucggaugguccagguug

SEQ ID NO: 939995 - RNA, 19 nt, Artificial Sequence
  Description of Artificial Sequence: Synthetic oligonucleotide
uucuacuugaagauauuug

SEQ ID NO: 939996 - RNA, 19 nt, Artificial Sequence
  Description of Artificial Sequence: Synthetic oligonucleotide
cuagauugaggauuguagc

SEQ ID NO: 939997 - RNA, 19 nt, Artificial Sequence
  Description of Artificial Sequence: Synthetic oligonucleotide
ugcacuugcggcuugacug

SEQ ID NO: 939998 - RNA, 19 nt, Artificial Sequence
  Description of Artificial Sequence: Synthetic oligonucleotide
uguagaagacaucaucuac

SEQ ID NO: 939999 - RNA, 19 nt, Artificial Sequence
  Description of Artificial Sequence: Synthetic oligonucleotide
gcuacuauggauuuaagac

SEQ ID NO: 940000 - RNA, 19 nt, Artificial Sequence
  Description of Artificial Sequence: Synthetic oligonucleotide
aguacagcucacuucuagc

SEQ ID NO: 940001 - RNA, 19 nt, Artificial Sequence
  Description of Artificial Sequence: Synthetic oligonucleotide
auguaaaccuagcaguggg

SEQ ID NO: 940002 - RNA, 19 nt, Artificial Sequence
  Description of Artificial Sequence: Synthetic oligonucleotide
uagauugaggauuguagcc

SEQ ID NO: 940003 - RNA, 19 nt, Artificial Sequence
  Description of Artificial Sequence: Synthetic oligonucleotide
ucauguaaaccuagcagug

SEQ ID NO: 940004 - RNA, 19 nt, Artificial Sequence
  Description of Artificial Sequence: Synthetic oligonucleotide
ugagacgccaugucaaagg

SEQ ID NO: 940005 - RNA, 19 nt, Artificial Sequence
  Description of Artificial Sequence: Synthetic oligonucleotide
guuuacaagguauuccgag

SEQ ID NO: 940006 - RNA, 19 nt, Artificial Sequence
  Description of Artificial Sequence: Synthetic oligonucleotide
aguuacucuggacaagccg

SEQ ID NO: 940007 - RNA, 19 nt, Artificial Sequence
  Description of Artificial Sequence: Synthetic oligonucleotide
gauuaaacagcuuggugca

SEQ ID NO: 940008 - RNA, 19 nt, Artificial Sequence
  Description of Artificial Sequence: Synthetic oligonucleotide
ucacuucuagcauucauca

SEQ ID NO: 940009 - RNA, 19 nt, Artificial Sequence
  Description of Artificial Sequence: Synthetic oligonucleotide
caaugagugaccuuaguuc

SEQ ID NO: 940010 - RNA, 19 nt, Artificial Sequence
  Description of Artificial Sequence: Synthetic oligonucleotide
acgaugaacugcuguaccc

SEQ ID NO: 940011 - RNA, 19 nt, Artificial Sequence
  Description of Artificial Sequence: Synthetic oligonucleotide
auaauaagucuccacuaug

SEQ ID NO: 940012 - RNA, 19 nt, Artificial Sequence
  Description of Artificial Sequence: Synthetic oligonucleotide
uauaguagccaauuagcuc

SEQ ID NO: 940013 - RNA, 19 nt, Artificial Sequence
  Description of Artificial Sequence: Synthetic oligonucleotide
caaacugcagaccaccuag

SEQ ID NO: 940014 - RNA, 19 nt, Artificial Sequence
  Description of Artificial Sequence: Synthetic oligonucleotide
accccaguaaucuaauauc

SEQ ID NO: 940015 - RNA, 19 nt, Artificial Sequence
  Description of Artificial Sequence: Synthetic oligonucleotide
acucauaucugaccccagc

SEQ ID NO: 940016 - RNA, 19 nt, Artificial Sequence
  Description of Artificial Sequence: Synthetic oligonucleotide
acauuauucagagucacca

SEQ ID NO: 940017 - RNA, 19 nt, Artificial Sequence
  Description of Artificial Sequence: Synthetic oligonucleotide
cauggcacagagacaaucg

SEQ ID NO: 940018 - RNA, 19 nt, Artificial Sequence
  Description of Artificial Sequence: Synthetic oligonucleotide
ugaagguagacuucagaac

SEQ ID NO: 940019 - RNA, 19 nt, Artificial Sequence
  Description of Artificial Sequence: Synthetic oligonucleotide
uggguuuccacaaguucgg

SEQ ID NO: 940020 - RNA, 19 nt, Artificial Sequence
  Description of Artificial Sequence: Synthetic oligonucleotide
gaagcguaaguacagcuca

SEQ ID NO: 940021 - RNA, 19 nt, Artificial Sequence
  Description of Artificial Sequence: Synthetic oligonucleotide
aauuuguuggacacagcag

SEQ ID NO: 940022 - RNA, 19 nt, Artificial Sequence
  Description of Artificial Sequence: Synthetic oligonucleotide
aguaaucuaauaucucagu

SEQ ID NO: 940023 - RNA, 19 nt, Artificial Sequence
  Description of Artificial Sequence: Synthetic oligonucleotide
guaaucuaauaucucaguc

SEQ ID NO: 940024 - RNA, 19 nt, Artificial Sequence
  Description of Artificial Sequence: Synthetic oligonucleotide
cucgaaauuuguuggacac

SEQ ID NO: 940025 - RNA, 19 nt, Artificial Sequence
  Description of Artificial Sequence: Synthetic oligonucleotide
acugcuguacccaaggguc

SEQ ID NO: 940026 - RNA, 19 nt, Artificial Sequence
  Description of Artificial Sequence: Synthetic oligonucleotide
gaaucgcuccaccugaggc

SEQ ID NO: 940027 - RNA, 19 nt, Artificial Sequence
  Description of Artificial Sequence: Synthetic oligonucleotide
cuuauuacacagaacaucu

SEQ ID NO: 940028 - RNA, 19 nt, Artificial Sequence
  Description of Artificial Sequence: Synthetic oligonucleotide
guagaagacaucaucuacc

SEQ ID NO: 940029 - RNA, 19 nt, Artificial Sequence
  Description of Artificial Sequence: Synthetic oligonucleotide
uauuugaucaggguauaga

SEQ ID NO: 940030 - RNA, 19 nt, Artificial Sequence
  Description of Artificial Sequence: Synthetic oligonucleotide
agguauuccgagaacuugc

SEQ ID NO: 940031 - RNA, 19 nt, Artificial Sequence
  Description of Artificial Sequence: Synthetic oligonucleotide
cuagcauucaucaggguga

SEQ ID NO: 940032 - RNA, 19 nt, Artificial Sequence
  Description of Artificial Sequence: Synthetic oligonucleotide
ugguaagguaugcaaugag

SEQ ID NO: 940033 - RNA, 19 nt, Artificial Sequence
  Description of Artificial Sequence: Synthetic oligonucleotide
uuuuaacaauguagaagac

SEQ ID NO: 940034 - RNA, 19 nt, Artificial Sequence
  Description of Artificial Sequence: Synthetic oligonucleotide
aaucgcuccaccugaggca

SEQ ID NO: 940035 - RNA, 19 nt, Artificial Sequence
  Description of Artificial Sequence: Synthetic oligonucleotide
gacaagccggaacugcugg

SEQ ID NO: 940036 - RNA, 19 nt, Artificial Sequence
  Description of Artificial Sequence: Synthetic oligonucleotide
gaucauggcacagagacaa

SEQ ID NO: 940037 - RNA, 19 nt, Artificial Sequence
  Description of Artificial Sequence: Synthetic oligonucleotide
ucuuguaaggugguggcug

SEQ ID NO: 940038 - RNA, 19 nt, Artificial Sequence
  Description of Artificial Sequence: Synthetic oligonucleotide
gucaagcugucauagauga

SEQ ID NO: 940039 - RNA, 19 nt, Artificial Sequence
  Description of Artificial Sequence: Synthetic oligonucleotide
ucuaccaugcuggauguca

SEQ ID NO: 940040 - RNA, 19 nt, Artificial Sequence
  Description of Artificial Sequence: Synthetic oligonucleotide
ucucgaaauuuguuggaca

SEQ ID NO: 940041 - RNA, 19 nt, Artificial Sequence
  Description of Artificial Sequence: Synthetic oligonucleotide
guaaguacagcucacuucu

SEQ ID NO: 940042 - RNA, 19 nt, Artificial Sequence
  Description of Artificial Sequence: Synthetic oligonucleotide
uccuccaugguaauauagu

SEQ ID NO: 940043 - RNA, 19 nt, Artificial Sequence
  Description of Artificial Sequence: Synthetic oligonucleotide
uguuuacaagguauuccga

SEQ ID NO: 940044 - RNA, 19 nt, Artificial Sequence
  Description of Artificial Sequence: Synthetic oligonucleotide
gauccaagguugcacuugc

SEQ ID NO: 940045 - RNA, 19 nt, Artificial Sequence
  Description of Artificial Sequence: Synthetic oligonucleotide
uccaauucaacagcaacaa

SEQ ID NO: 940046 - RNA, 19 nt, Artificial Sequence
  Description of Artificial Sequence: Synthetic oligonucleotide
cauuauucagagucaccag

SEQ ID NO: 940047 - RNA, 19 nt, Artificial Sequence
  Description of Artificial Sequence: Synthetic oligonucleotide
gaauaucuugaagaaucgc

SEQ ID NO: 940048 - RNA, 19 nt, Artificial Sequence
  Description of Artificial Sequence: Synthetic oligonucleotide
guagccauuugggagagcc

SEQ ID NO: 940049 - RNA, 19 nt, Artificial Sequence
  Description of Artificial Sequence: Synthetic oligonucleotide
aaaccuagcagugggaaua

SEQ ID NO: 940050 - RNA, 19 nt, Artificial Sequence
  Description of Artificial Sequence: Synthetic oligonucleotide
gacgaugaacugcuguacc

SEQ ID NO: 940051 - RNA, 19 nt, Artificial Sequence
  Description of Artificial Sequence: Synthetic oligonucleotide
cuuguaaggugguggcugg

SEQ ID NO: 940052 - RNA, 19 nt, Artificial Sequence
  Description of Artificial Sequence: Synthetic oligonucleotide
acugcagacuuccacauua

SEQ ID NO: 940053 - RNA, 19 nt, Artificial Sequence
  Description of Artificial Sequence: Synthetic oligonucleotide
uguaaaccuagcaguggga

SEQ ID NO: 940054 - RNA, 19 nt, Artificial Sequence
  Description of Artificial Sequence: Synthetic oligonucleotide
uguugcagaauuucuuauc

SEQ ID NO: 940055 - RNA, 19 nt, Artificial Sequence
  Description of Artificial Sequence: Synthetic oligonucleotide
aucucgaaauuuguuggac

SEQ ID NO: 940056 - RNA, 19 nt, Artificial Sequence
  Description of Artificial Sequence: Synthetic oligonucleotide
cugauuaaacagcuuggug

SEQ ID NO: 940057 - RNA, 19 nt, Artificial Sequence
  Description of Artificial Sequence: Synthetic oligonucleotide
cuaauaucucagucacccg

SEQ ID NO: 940058 - RNA, 19 nt, Artificial Sequence
  Description of Artificial Sequence: Synthetic oligonucleotide
uugauguccucacuacgga

SEQ ID NO: 940059 - RNA, 19 nt, Artificial Sequence
  Description of Artificial Sequence: Synthetic oligonucleotide
uagguauccagagccacag

SEQ ID NO: 940060 - RNA, 19 nt, Artificial Sequence
  Description of Artificial Sequence: Synthetic oligonucleotide
acucuggacaagccggaac

SEQ ID NO: 940061 - RNA, 19 nt, Artificial Sequence
  Description of Artificial Sequence: Synthetic oligonucleotide
guggcaagauugaucaugg

SEQ ID NO: 940062 - RNA, 19 nt, Artificial Sequence
  Description of Artificial Sequence: Synthetic oligonucleotide
ucgauguugugggagacug

SEQ ID NO: 940063 - RNA, 19 nt, Artificial Sequence
  Description of Artificial Sequence: Synthetic oligonucleotide
cacaaguucgggcaauccc

SEQ ID NO: 940064 - RNA, 19 nt, Artificial Sequence
  Description of Artificial Sequence: Synthetic oligonucleotide
ugggaaacccauccgcagc

SEQ ID NO: 940065 - RNA, 19 nt, Artificial Sequence
  Description of Artificial Sequence: Synthetic oligonucleotide
agaguuugcaccccaguaa

SEQ ID NO: 940066 - RNA, 19 nt, Artificial Sequence
  Description of Artificial Sequence: Synthetic oligonucleotide
aauaucucagucacccgcu

SEQ ID NO: 940067 - RNA, 19 nt, Artificial Sequence
  Description of Artificial Sequence: Synthetic oligonucleotide
gggaauaucuugaagaauc

SEQ ID NO: 940068 - RNA, 19 nt, Artificial Sequence
  Description of Artificial Sequence: Synthetic oligonucleotide
agagaaaaguguugaucca

SEQ ID NO: 940069 - RNA, 19 nt, Artificial Sequence
  Description of Artificial Sequence: Synthetic oligonucleotide
cauguaaaccuagcagugg

SEQ ID NO: 940070 - RNA, 19 nt, Artificial Sequence
  Description of Artificial Sequence: Synthetic oligonucleotide
aacuguugagcuccgucaa

SEQ ID NO: 940071 - RNA, 19 nt, Artificial Sequence
  Description of Artificial Sequence: Synthetic oligonucleotide
caccugucgcacuucagcg

SEQ ID NO: 940072 - RNA, 19 nt, Artificial Sequence
  Description of Artificial Sequence: Synthetic oligonucleotide
agauugaggauuguagcca

SEQ ID NO: 940073 - RNA, 19 nt, Artificial Sequence
  Description of Artificial Sequence: Synthetic oligonucleotide
agccgggcaaacuugucuc

SEQ ID NO: 940074 - RNA, 19 nt, Artificial Sequence
  Description of Artificial Sequence: Synthetic oligonucleotide
agcuaagucagaaaggcaa

SEQ ID NO: 940075 - RNA, 19 nt, Artificial Sequence
  Description of Artificial Sequence: Synthetic oligonucleotide
gugguagucccucugcuug

SEQ ID NO: 940076 - RNA, 19 nt, Artificial Sequence
  Description of Artificial Sequence: Synthetic oligonucleotide
gacaaucgaugcuagagcu

SEQ ID NO: 940077 - RNA, 19 nt, Artificial Sequence
  Description of Artificial Sequence: Synthetic oligonucleotide
aaguacuccuccaugguaa

SEQ ID NO: 940078 - RNA, 19 nt, Artificial Sequence
  Description of Artificial Sequence: Synthetic oligonucleotide
aggaagcguaaguacagcu

SEQ ID NO: 940079 - RNA, 19 nt, Artificial Sequence
  Description of Artificial Sequence: Synthetic oligonucleotide
ucacucauaucugacccca

SEQ ID NO: 940080 - RNA, 19 nt, Artificial Sequence
  Description of Artificial Sequence: Synthetic oligonucleotide
acccgcucuagauugagga

SEQ ID NO: 940081 - RNA, 19 nt, Artificial Sequence
  Description of Artificial Sequence: Synthetic oligonucleotide
acuguugagcuccgucaac

SEQ ID NO: 940082 - RNA, 19 nt, Artificial Sequence
  Description of Artificial Sequence: Synthetic oligonucleotide
ucgaugcuagagcuggaca

SEQ ID NO: 940083 - RNA, 19 nt, Artificial Sequence
  Description of Artificial Sequence: Synthetic oligonucleotide
uguugagcuccgucaaccc

SEQ ID NO: 940084 - RNA, 19 nt, Artificial Sequence
  Description of Artificial Sequence: Synthetic oligonucleotide
acauucuacuugaagauau

SEQ ID NO: 940085 - RNA, 19 nt, Artificial Sequence
  Description of Artificial Sequence: Synthetic oligonucleotide
ggaauaucuugaagaaucg

SEQ ID NO: 940086 - RNA, 19 nt, Artificial Sequence
  Description of Artificial Sequence: Synthetic oligonucleotide
agaaucgcuccaccugagg

SEQ ID NO: 940087 - RNA, 19 nt, Artificial Sequence
  Description of Artificial Sequence: Synthetic oligonucleotide
gaagauauuugaucagggu

SEQ ID NO: 940088 - RNA, 19 nt, Artificial Sequence
  Description of Artificial Sequence: Synthetic oligonucleotide
uguugacagcacuugucac

SEQ ID NO: 940089 - RNA, 19 nt, Artificial Sequence
  Description of Artificial Sequence: Synthetic oligonucleotide
gacugcugaacuguugagc

SEQ ID NO: 940090 - RNA, 19 nt, Artificial Sequence
  Description of Artificial Sequence: Synthetic oligonucleotide
cuccuccaugguaauauag

SEQ ID NO: 940091 - RNA, 19 nt, Artificial Sequence
  Description of Artificial Sequence: Synthetic oligonucleotide
uugaggaguuuguccaggc

SEQ ID NO: 940092 - RNA, 19 nt, Artificial Sequence
  Description of Artificial Sequence: Synthetic oligonucleotide
ucagucacccgcucuagau

SEQ ID NO: 940093 - RNA, 19 nt, Artificial Sequence
  Description of Artificial Sequence: Synthetic oligonucleotide
gaucucgaaauuuguugga

SEQ ID NO: 940094 - RNA, 19 nt, Artificial Sequence
  Description of Artificial Sequence: Synthetic oligonucleotide
acagagcucgcccaaugca

SEQ ID NO: 940095 - RNA, 19 nt, Artificial Sequence
  Description of Artificial Sequence: Synthetic oligonucleotide
gcagcuaagucagaaaggc

SEQ ID NO: 940096 - RNA, 19 nt, Artificial Sequence
  Description of Artificial Sequence: Synthetic oligonucleotide
acaaguucgggcaaucccu

SEQ ID NO: 940097 - RNA, 19 nt, Artificial Sequence
  Description of Artificial Sequence: Synthetic oligonucleotide
cucacuacggaagucuaug

SEQ ID NO: 940098 - RNA, 19 nt, Artificial Sequence
  Description of Artificial Sequence: Synthetic oligonucleotide
cucaauaggcaguuauuga

SEQ ID NO: 940099 - RNA, 19 nt, Artificial Sequence
  Description of Artificial Sequence: Synthetic oligonucleotide
cuauggauuuaagacgcug

SEQ ID NO: 940100 - RNA, 19 nt, Artificial Sequence
  Description of Artificial Sequence: Synthetic oligonucleotide
ugauccaagguugcacuug

SEQ ID NO: 940101 - RNA, 19 nt, Artificial Sequence
  Description of Artificial Sequence: Synthetic oligonucleotide
uuacaucuucugaagccau

SEQ ID NO: 940102 - RNA, 19 nt, Artificial Sequence
  Description of Artificial Sequence: Synthetic oligonucleotide
aucgaugcuagagcuggac

SEQ ID NO: 940103 - RNA, 19 nt, Artificial Sequence
  Description of Artificial Sequence: Synthetic oligonucleotide
uacagcucacuucuagcau

SEQ ID NO: 940104 - RNA, 19 nt, Artificial Sequence
  Description of Artificial Sequence: Synthetic oligonucleotide
uugguagccagagcaaacu

SEQ ID NO: 940105 - RNA, 19 nt, Artificial Sequence
  Description of Artificial Sequence: Synthetic oligonucleotide
ugucaaagggccagaguuu

SEQ ID NO: 940106 - RNA, 19 nt, Artificial Sequence
  Description of Artificial Sequence: Synthetic oligonucleotide
ugguaauauaguagccaau

SEQ ID NO: 940107 - RNA, 19 nt, Artificial Sequence
  Description of Artificial Sequence: Synthetic oligonucleotide
auauuugaucaggguauag

SEQ ID NO: 940108 - RNA, 19 nt, Artificial Sequence
  Description of Artificial Sequence: Synthetic oligonucleotide
accgugguaagguaugcaa

SEQ ID NO: 940109 - RNA, 19 nt, Artificial Sequence
  Description of Artificial Sequence: Synthetic oligonucleotide
gucaugaggccagucaagc

SEQ ID NO: 940110 - RNA, 19 nt, Artificial Sequence
  Description of Artificial Sequence: Synthetic oligonucleotide
uggcacagagacaaucgau

SEQ ID NO: 940111 - RNA, 19 nt, Artificial Sequence
  Description of Artificial Sequence: Synthetic oligonucleotide
cagagacaaucgaugcuag

SEQ ID NO: 940112 - RNA, 19 nt, Artificial Sequence
  Description of Artificial Sequence: Synthetic oligonucleotide
cuacggaagucuaugcgca

SEQ ID NO: 940113 - RNA, 19 nt, Artificial Sequence
  Description of Artificial Sequence: Synthetic oligonucleotide
gaccuuaguuccuugucaa

SEQ ID NO: 940114 - RNA, 19 nt, Artificial Sequence
  Description of Artificial Sequence: Synthetic oligonucleotide
ucgaaauuuguuggacaca

SEQ ID NO: 940115 - RNA, 19 nt, Artificial Sequence
  Description of Artificial Sequence: Synthetic oligonucleotide
ugacgaugaacugcuguac

SEQ ID NO: 940116 - RNA, 19 nt, Artificial Sequence
  Description of Artificial Sequence: Synthetic oligonucleotide
ugucaccccgcgcuggaug

SEQ ID NO: 940117 - RNA, 19 nt, Artificial Sequence
  Description of Artificial Sequence: Synthetic oligonucleotide
gaucaggguauagagucuc

SEQ ID NO: 940118 - RNA, 19 nt, Artificial Sequence
  Description of Artificial Sequence: Synthetic oligonucleotide
ccaguaaucuaauaucuca

SEQ ID NO: 940119 - RNA, 19 nt, Artificial Sequence
  Description of Artificial Sequence: Synthetic oligonucleotide
uccgucaacccuuccugca

SEQ ID NO: 940120 - RNA, 19 nt, Artificial Sequence
  Description of Artificial Sequence: Synthetic oligonucleotide
uacggaagucuaugcgcag

SEQ ID NO: 940121 - RNA, 19 nt, Artificial Sequence
  Description of Artificial Sequence: Synthetic oligonucleotide
caagauugaucauggcaca

SEQ ID NO: 940122 - RNA, 19 nt, Artificial Sequence
  Description of Artificial Sequence: Synthetic oligonucleotide
ggcaaucccuucaaaacag

SEQ ID NO: 940123 - RNA, 19 nt, Artificial Sequence
  Description of Artificial Sequence: Synthetic oligonucleotide
ucuaugcgcagagccagca

SEQ ID NO: 940124 - RNA, 19 nt, Artificial Sequence
  Description of Artificial Sequence: Synthetic oligonucleotide
cauagaugacuggggacag

SEQ ID NO: 940125 - RNA, 19 nt, Artificial Sequence
  Description of Artificial Sequence: Synthetic oligonucleotide
uugaggauuguagccauuu

SEQ ID NO: 940126 - RNA, 19 nt, Artificial Sequence
  Description of Artificial Sequence: Synthetic oligonucleotide
gccaauuagcuccugcaug

SEQ ID NO: 940127 - RNA, 19 nt, Artificial Sequence
  Description of Artificial Sequence: Synthetic oligonucleotide
uggacacagcagcuaaguc

SEQ ID NO: 940128 - RNA, 19 nt, Artificial Sequence
  Description of Artificial Sequence: Synthetic oligonucleotide
ggcacagagacaaucgaug

SEQ ID NO: 940129 - RNA, 19 nt, Artificial Sequence
  Description of Artificial Sequence: Synthetic oligonucleotide
acccaagggucauuggccu

SEQ ID NO: 940130 - RNA, 19 nt, Artificial Sequence
  Description of Artificial Sequence: Synthetic oligonucleotide
ucaagcugucauagaugac

SEQ ID NO: 940131 - RNA, 19 nt, Artificial Sequence
  Description of Artificial Sequence: Synthetic oligonucleotide
aagaaucgcuccaccugag

SEQ ID NO: 940132 - RNA, 19 nt, Artificial Sequence
  Description of Artificial Sequence: Synthetic oligonucleotide
agccaauuagcuccugcau

SEQ ID NO: 940133 - RNA, 19 nt, Artificial Sequence
  Description of Artificial Sequence: Synthetic oligonucleotide
auuaaacagcuuggugcag

SEQ ID NO: 940134 - RNA, 19 nt, Artificial Sequence
  Description of Artificial Sequence: Synthetic oligonucleotide
agagacaaucgaugcuaga

SEQ ID NO: 940135 - RNA, 19 nt, Artificial Sequence
  Description of Artificial Sequence: Synthetic oligonucleotide
ugcuuucgaugccuuuugu

SEQ ID NO: 940136 - RNA, 19 nt, Artificial Sequence
  Description of Artificial Sequence: Synthetic oligonucleotide
ugggaauaucuugaagaau

SEQ ID NO: 940137 - RNA, 19 nt, Artificial Sequence
  Description of Artificial Sequence: Synthetic oligonucleotide
cuggacaagccggaacugc

SEQ ID NO: 940138 - RNA, 19 nt, Artificial Sequence
  Description of Artificial Sequence: Synthetic oligonucleotide
guugacgaugaacugcugu

SEQ ID NO: 940139 - RNA, 19 nt, Artificial Sequence
  Description of Artificial Sequence: Synthetic oligonucleotide
guaaaccuagcagugggaa

SEQ ID NO: 940140 - RNA, 19 nt, Artificial Sequence
  Description of Artificial Sequence: Synthetic oligonucleotide
ugcggcuugacugcugaac

SEQ ID NO: 940141 - RNA, 19 nt, Artificial Sequence
  Description of Artificial Sequence: Synthetic oligonucleotide
auccgcagcuuauuacaca

SEQ ID NO: 940142 - RNA, 19 nt, Artificial Sequence
  Description of Artificial Sequence: Synthetic oligonucleotide
cauaauaagucuccacuau

SEQ ID NO: 940143 - RNA, 19 nt, Artificial Sequence
  Description of Artificial Sequence: Synthetic oligonucleotide
uuguaaggugguggcuggg

SEQ ID NO: 940144 - RNA, 19 nt, Artificial Sequence
  Description of Artificial Sequence: Synthetic oligonucleotide
gggcaaucccuucaaaaca

SEQ ID NO: 940145 - RNA, 19 nt, Artificial Sequence
  Description of Artificial Sequence: Synthetic oligonucleotide
aaggacaucuuggcuucgu

SEQ ID NO: 940146 - RNA, 19 nt, Artificial Sequence
  Description of Artificial Sequence: Synthetic oligonucleotide
ugcagacuuccacauuauu

SEQ ID NO: 940147 - RNA, 19 nt, Artificial Sequence
  Description of Artificial Sequence: Synthetic oligonucleotide
gauauuugaucaggguaua

SEQ ID NO: 940148 - RNA, 19 nt, Artificial Sequence
  Description of Artificial Sequence: Synthetic oligonucleotide
gauugaggauuguagccau

SEQ ID NO: 940149 - RNA, 19 nt, Artificial Sequence
  Description of Artificial Sequence: Synthetic oligonucleotide
ugcaccccaguaaucuaau

SEQ ID NO: 940150 - RNA, 19 nt, Artificial Sequence
  Description of Artificial Sequence: Synthetic oligonucleotide
ccugucgcacuucagcggg

SEQ ID NO: 940151 - RNA, 19 nt, Artificial Sequence
  Description of Artificial Sequence: Synthetic oligonucleotide
ucagccuuacuggccaccu

SEQ ID NO: 940152 - RNA, 19 nt, Artificial Sequence
  Description of Artificial Sequence: Synthetic oligonucleotide
gcaccugucgcacuucagc

SEQ ID NO: 940153 - RNA, 19 nt, Artificial Sequence
  Description of Artificial Sequence: Synthetic oligonucleotide
acaaucgaugcuagagcug

SEQ ID NO: 940154 - RNA, 19 nt, Artificial Sequence
  Description of Artificial Sequence: Synthetic oligonucleotide
uuugggagagccgggcaaa

SEQ ID NO: 940155 - RNA, 19 nt, Artificial Sequence
  Description of Artificial Sequence: Synthetic oligonucleotide
ccuuaguuccuugucaaac

SEQ ID NO: 940156 - RNA, 19 nt, Artificial Sequence
  Description of Artificial Sequence: Synthetic oligonucleotide
cuggaugucaacuggcccu

SEQ ID NO: 940157 - RNA, 19 nt, Artificial Sequence
  Description of Artificial Sequence: Synthetic oligonucleotide
ucuccgcuacuauggauuu

SEQ ID NO: 940158 - RNA, 19 nt, Artificial Sequence
  Description of Artificial Sequence: Synthetic oligonucleotide
gacgcugcucagcuuccug

SEQ ID NO: 940159 - RNA, 19 nt, Artificial Sequence
  Description of Artificial Sequence: Synthetic oligonucleotide
guagccagagcaaacuucu

SEQ ID NO: 940160 - RNA, 19 nt, Artificial Sequence
  Description of Artificial Sequence: Synthetic oligonucleotide
guauagagucucccagguc

SEQ ID NO: 940161 - RNA, 19 nt, Artificial Sequence
  Description of Artificial Sequence: Synthetic oligonucleotide
ucaccgugguaagguaugc

SEQ ID NO: 940162 - RNA, 19 nt, Artificial Sequence
  Description of Artificial Sequence: Synthetic oligonucleotide
agagaucucgaaauuuguu

SEQ ID NO: 940163 - RNA, 19 nt, Artificial Sequence
  Description of Artificial Sequence: Synthetic oligonucleotide
ccgagaacuugcuuagccc

SEQ ID NO: 940164 - RNA, 19 nt, Artificial Sequence
  Description of Artificial Sequence: Synthetic oligonucleotide
auagguauccagagccaca

SEQ ID NO: 940165 - RNA, 19 nt, Artificial Sequence
  Description of Artificial Sequence: Synthetic oligonucleotide
ugagcuccgucaacccuuc

SEQ ID NO: 940166 - RNA, 19 nt, Artificial Sequence
  Description of Artificial Sequence: Synthetic oligonucleotide
gccagucaagcugucauag

SEQ ID NO: 940167 - RNA, 19 nt, Artificial Sequence
  Description of Artificial Sequence: Synthetic oligonucleotide
ucacccgcucuagauugag

SEQ ID NO: 940168 - RNA, 19 nt, Artificial Sequence
  Description of Artificial Sequence: Synthetic oligonucleotide
agccuguugaagguagacu

SEQ ID NO: 940169 - RNA, 19 nt, Artificial Sequence
  Description of Artificial Sequence: Synthetic oligonucleotide
cagaccaccuagccuguug

SEQ ID NO: 940170 - RNA, 19 nt, Artificial Sequence
  Description of Artificial Sequence: Synthetic oligonucleotide
ggcuucgucagugcuuucg

SEQ ID NO: 940171 - RNA, 19 nt, Artificial Sequence
  Description of Artificial Sequence: Synthetic oligonucleotide
ugucucggaugguccaggu

SEQ ID NO: 940172 - RNA, 19 nt, Artificial Sequence
  Description of Artificial Sequence: Synthetic oligonucleotide
ugagugaccuuaguuccuu

SEQ ID NO: 940173 - RNA, 19 nt, Artificial Sequence
  Description of Artificial Sequence: Synthetic oligonucleotide
aaccuagcagugggaauau

SEQ ID NO: 940174 - RNA, 19 nt, Artificial Sequence
  Description of Artificial Sequence: Synthetic oligonucleotide
ucagugcuuucgaugccuu

SEQ ID NO: 940175 - RNA, 19 nt, Artificial Sequence
  Description of Artificial Sequence: Synthetic oligonucleotide
uagcauucaucagggugac

SEQ ID NO: 940176 - RNA, 19 nt, Artificial Sequence
  Description of Artificial Sequence: Synthetic oligonucleotide
auugaucauggcacagaga

SEQ ID NO: 940177 - RNA, 19 nt, Artificial Sequence
  Description of Artificial Sequence: Synthetic oligonucleotide
cuugcggcuugacugcuga

SEQ ID NO: 940178 - RNA, 19 nt, Artificial Sequence
  Description of Artificial Sequence: Synthetic oligonucleotide
caauuucagguuggcauca

SEQ ID NO: 940179 - RNA, 19 nt, Artificial Sequence
  Description of Artificial Sequence: Synthetic oligonucleotide
cacucauaucugaccccag

SEQ ID NO: 940180 - RNA, 19 nt, Artificial Sequence
  Description of Artificial Sequence: Synthetic oligonucleotide
accuuaguuccuugucaaa

SEQ ID NO: 940181 - RNA, 19 nt, Artificial Sequence
  Description of Artificial Sequence: Synthetic oligonucleotide
gguauagagucucccaggu

SEQ ID NO: 940182 - RNA, 19 nt, Artificial Sequence
  Description of Artificial Sequence: Synthetic oligonucleotide
ggaagcguaaguacagcuc

SEQ ID NO: 940183 - RNA, 19 nt, Artificial Sequence
  Description of Artificial Sequence: Synthetic oligonucleotide
agcucccuugguucaauuu

SEQ ID NO: 940184 - RNA, 19 nt, Artificial Sequence
  Description of Artificial Sequence: Synthetic oligonucleotide
uuaagacgcugcucagcuu

SEQ ID NO: 940185 - RNA, 19 nt, Artificial Sequence
  Description of Artificial Sequence: Synthetic oligonucleotide
gaugucaacuggcccuucu

SEQ ID NO: 940186 - RNA, 19 nt, Artificial Sequence
  Description of Artificial Sequence: Synthetic oligonucleotide
cagaguuugcaccccagua

SEQ ID NO: 940187 - RNA, 19 nt, Artificial Sequence
  Description of Artificial Sequence: Synthetic oligonucleotide
caugauguugacagcacuu

SEQ ID NO: 940188 - RNA, 19 nt, Artificial Sequence
  Description of Artificial Sequence: Synthetic oligonucleotide
cagcuaagucagaaaggca

SEQ ID NO: 940189 - RNA, 19 nt, Artificial Sequence
  Description of Artificial Sequence: Synthetic oligonucleotide
cucuccuaucacucauauc

SEQ ID NO: 940190 - RNA, 19 nt, Artificial Sequence
  Description of Artificial Sequence: Synthetic oligonucleotide
acggaagucuaugcgcaga

SEQ ID NO: 940191 - RNA, 19 nt, Artificial Sequence
  Description of Artificial Sequence: Synthetic oligonucleotide
accugucugucacauucua

SEQ ID NO: 940192 - RNA, 19 nt, Artificial Sequence
  Description of Artificial Sequence: Synthetic oligonucleotide
gcacuugcggcuugacugc

SEQ ID NO: 940193 - RNA, 19 nt, Artificial Sequence
  Description of Artificial Sequence: Synthetic oligonucleotide
cccaguaaucuaauaucuc

SEQ ID NO: 940194 - RNA, 19 nt, Artificial Sequence
  Description of Artificial Sequence: Synthetic oligonucleotide
aaucgaugcuagagcugga

SEQ ID NO: 940195 - RNA, 19 nt, Artificial Sequence
  Description of Artificial Sequence: Synthetic oligonucleotide
acuauggguugguggguuu

SEQ ID NO: 940196 - RNA, 19 nt, Artificial Sequence
  Description of Artificial Sequence: Synthetic oligonucleotide
cugucgcacuucagcgggg

SEQ ID NO: 940197 - RNA, 19 nt, Artificial Sequence
  Description of Artificial Sequence: Synthetic oligonucleotide
aucgcuccaccugaggcaa

SEQ ID NO: 940198 - RNA, 19 nt, Artificial Sequence
  Description of Artificial Sequence: Synthetic oligonucleotide
caccccaguaaucuaauau

SEQ ID NO: 940199 - RNA, 19 nt, Artificial Sequence
  Description of Artificial Sequence: Synthetic oligonucleotide
uuccgagaacuugcuuagc

SEQ ID NO: 940200 - RNA, 19 nt, Artificial Sequence
  Description of Artificial Sequence: Synthetic oligonucleotide
guagucccucugcuugaug

SEQ ID NO: 940201 - RNA, 19 nt, Artificial Sequence
  Description of Artificial Sequence: Synthetic oligonucleotide
acuauggauuuaagacgcu

SEQ ID NO: 940202 - RNA, 19 nt, Artificial Sequence
  Description of Artificial Sequence: Synthetic oligonucleotide
gcgcuggaugucuuguaag

SEQ ID NO: 940203 - RNA, 19 nt, Artificial Sequence
  Description of Artificial Sequence: Synthetic oligonucleotide
uggaugucaacuggcccuu

SEQ ID NO: 940204 - RNA, 19 nt, Artificial Sequence
  Description of Artificial Sequence: Synthetic oligonucleotide
cuagcagugggaauaucuu

SEQ ID NO: 940205 - RNA, 19 nt, Artificial Sequence
  Description of Artificial Sequence: Synthetic oligonucleotide
ugcuguacccaagggucau

SEQ ID NO: 940206 - RNA, 19 nt, Artificial Sequence
  Description of Artificial Sequence: Synthetic oligonucleotide
cugcuguacccaaggguca

SEQ ID NO: 940207 - RNA, 19 nt, Artificial Sequence
  Description of Artificial Sequence: Synthetic oligonucleotide
acuccuccaugguaauaua

SEQ ID NO: 940208 - RNA, 19 nt, Artificial Sequence
  Description of Artificial Sequence: Synthetic oligonucleotide
agcucaauaggcaguuauu

SEQ ID NO: 940209 - RNA, 19 nt, Artificial Sequence
  Description of Artificial Sequence: Synthetic oligonucleotide
cuagccuguugaagguaga

SEQ ID NO: 940210 - RNA, 19 nt, Artificial Sequence
  Description of Artificial Sequence: Synthetic oligonucleotide
uuccacaaguucgggcaau

SEQ ID NO: 940211 - RNA, 19 nt, Artificial Sequence
  Description of Artificial Sequence: Synthetic oligonucleotide
cacuugucaccccgcgcug

SEQ ID NO: 940212 - RNA, 19 nt, Artificial Sequence
  Description of Artificial Sequence: Synthetic oligonucleotide
aucuaccaugcuggauguc

SEQ ID NO: 940213 - RNA, 19 nt, Artificial Sequence
  Description of Artificial Sequence: Synthetic oligonucleotide
cgagaacuugcuuagccca

SEQ ID NO: 940214 - RNA, 19 nt, Artificial Sequence
  Description of Artificial Sequence: Synthetic oligonucleotide
ucgaugccuuuugugucaa

SEQ ID NO: 940215 - RNA, 19 nt, Artificial Sequence
  Description of Artificial Sequence: Synthetic oligonucleotide
uacucuggacaagccggaa

SEQ ID NO: 940216 - RNA, 19 nt, Artificial Sequence
  Description of Artificial Sequence: Synthetic oligonucleotide
caucuaccaugcuggaugu

SEQ ID NO: 940217 - RNA, 19 nt, Artificial Sequence
  Description of Artificial Sequence: Synthetic oligonucleotide
cuacaggcgcagccucuug

SEQ ID NO: 940218 - RNA, 19 nt, Artificial Sequence
  Description of Artificial Sequence: Synthetic oligonucleotide
gaccaccuagccuguugaa

SEQ ID NO: 940219 - RNA, 19 nt, Artificial Sequence
  Description of Artificial Sequence: Synthetic oligonucleotide
gcacuugucaccccgcgcu

SEQ ID NO: 940220 - RNA, 19 nt, Artificial Sequence
  Description of Artificial Sequence: Synthetic oligonucleotide
gucuaugcgcagagccagc

SEQ ID NO: 940221 - RNA, 19 nt, Artificial Sequence
  Description of Artificial Sequence: Synthetic oligonucleotide
ugguggcaagauugaucau

SEQ ID NO: 940222 - RNA, 19 nt, Artificial Sequence
  Description of Artificial Sequence: Synthetic oligonucleotide
auguugugggagacugaga

SEQ ID NO: 940223 - RNA, 19 nt, Artificial Sequence
  Description of Artificial Sequence: Synthetic oligonucleotide
cucagucacccgcucuaga

SEQ ID NO: 940224 - RNA, 19 nt, Artificial Sequence
  Description of Artificial Sequence: Synthetic oligonucleotide
cgcuacuauggauuuaaga

SEQ ID NO: 940225 - RNA, 19 nt, Artificial Sequence
  Description of Artificial Sequence: Synthetic oligonucleotide
ccccaguaaucuaauaucu

SEQ ID NO: 940226 - RNA, 19 nt, Artificial Sequence
  Description of Artificial Sequence: Synthetic oligonucleotide
guugcacuugcggcuugac

SEQ ID NO: 940227 - RNA, 19 nt, Artificial Sequence
  Description of Artificial Sequence: Synthetic oligonucleotide
aggcaguuauugaggaguu

SEQ ID NO: 940228 - RNA, 19 nt, Artificial Sequence
  Description of Artificial Sequence: Synthetic oligonucleotide
gguaugcaaugagugaccu

SEQ ID NO: 940229 - RNA, 19 nt, Artificial Sequence
  Description of Artificial Sequence: Synthetic oligonucleotide
cagccuuacuggccaccug

SEQ ID NO: 940230 - RNA, 19 nt, Artificial Sequence
  Description of Artificial Sequence: Synthetic oligonucleotide
gggugagacgccaugucaa

SEQ ID NO: 940231 - RNA, 19 nt, Artificial Sequence
  Description of Artificial Sequence: Synthetic oligonucleotide
agagucucccagguccaua

SEQ ID NO: 940232 - RNA, 19 nt, Artificial Sequence
  Description of Artificial Sequence: Synthetic oligonucleotide
aagggucauuggccucaua

SEQ ID NO: 940233 - RNA, 19 nt, Artificial Sequence
  Description of Artificial Sequence: Synthetic oligonucleotide
uugcggcuugacugcugaa

SEQ ID NO: 940234 - RNA, 19 nt, Artificial Sequence
  Description of Artificial Sequence: Synthetic oligonucleotide
gucaccccgcgcuggaugu

SEQ ID NO: 940235 - RNA, 19 nt, Artificial Sequence
  Description of Artificial Sequence: Synthetic oligonucleotide
auugaggauuguagccauu

SEQ ID NO: 940236 - RNA, 19 nt, Artificial Sequence
  Description of Artificial Sequence: Synthetic oligonucleotide
agcucacuucuagcauuca

SEQ ID NO: 940237 - RNA, 19 nt, Artificial Sequence
  Description of Artificial Sequence: Synthetic oligonucleotide
cgcagcuuauuacacagaa

SEQ ID NO: 940238 - RNA, 19 nt, Artificial Sequence
  Description of Artificial Sequence: Synthetic oligonucleotide
ccacaaguucgggcaaucc

SEQ ID NO: 940239 - RNA, 19 nt, Artificial Sequence
  Description of Artificial Sequence: Synthetic oligonucleotide
cucggaugguccagguugu

SEQ ID NO: 940240 - RNA, 19 nt, Artificial Sequence
  Description of Artificial Sequence: Synthetic oligonucleotide
cgucaacccuuccugcaag

SEQ ID NO: 940241 - RNA, 19 nt, Artificial Sequence
  Description of Artificial Sequence: Synthetic oligonucleotide
gcaagagaucucgaaauuu

SEQ ID NO: 940242 - RNA, 19 nt, Artificial Sequence
  Description of Artificial Sequence: Synthetic oligonucleotide
caccgugguaagguaugca

SEQ ID NO: 940243 - RNA, 19 nt, Artificial Sequence
  Description of Artificial Sequence: Synthetic oligonucleotide
guaugcaaugagugaccuu

SEQ ID NO: 940244 - RNA, 19 nt, Artificial Sequence
  Description of Artificial Sequence: Synthetic oligonucleotide
ccaagggucauuggccuca

SEQ ID NO: 940245 - RNA, 19 nt, Artificial Sequence
  Description of Artificial Sequence: Synthetic oligonucleotide
gguugacgaugaacugcug

SEQ ID NO: 940246 - RNA, 19 nt, Artificial Sequence
  Description of Artificial Sequence: Synthetic oligonucleotide
gcucuccuaucacucauau

SEQ ID NO: 940247 - RNA, 19 nt, Artificial Sequence
  Description of Artificial Sequence: Synthetic oligonucleotide
ccgcuacuauggauuuaag

SEQ ID NO: 940248 - RNA, 19 nt, Artificial Sequence
  Description of Artificial Sequence: Synthetic oligonucleotide
caccugucugucacauucu

SEQ ID NO: 940249 - RNA, 19 nt, Artificial Sequence
  Description of Artificial Sequence: Synthetic oligonucleotide
uugucaccccgcgcuggau

SEQ ID NO: 940250 - RNA, 19 nt, Artificial Sequence
  Description of Artificial Sequence: Synthetic oligonucleotide
ccugauuaaacagcuuggu

SEQ ID NO: 940251 - RNA, 19 nt, Artificial Sequence
  Description of Artificial Sequence: Synthetic oligonucleotide
gucacccgcucuagauuga

SEQ ID NO: 940252 - RNA, 19 nt, Artificial Sequence
  Description of Artificial Sequence: Synthetic oligonucleotide
ggccagucaagcugucaua

SEQ ID NO: 940253 - RNA, 19 nt, Artificial Sequence
  Description of Artificial Sequence: Synthetic oligonucleotide
cugcagacuuccacauuau

SEQ ID NO: 940254 - RNA, 19 nt, Artificial Sequence
  Description of Artificial Sequence: Synthetic oligonucleotide
gcguaaguacagcucacuu

SEQ ID NO: 940255 - RNA, 19 nt, Artificial Sequence
  Description of Artificial Sequence: Synthetic oligonucleotide
gagcucgcccaaugcacuu

SEQ ID NO: 940256 - RNA, 19 nt, Artificial Sequence
  Description of Artificial Sequence: Synthetic oligonucleotide
cgaugaacugcuguaccca

SEQ ID NO: 940257 - RNA, 19 nt, Artificial Sequence
  Description of Artificial Sequence: Synthetic oligonucleotide
cccaagggucauuggccuc

SEQ ID NO: 940258 - RNA, 19 nt, Artificial Sequence
  Description of Artificial Sequence: Synthetic oligonucleotide
cagucacccgcucuagauu

SEQ ID NO: 940259 - RNA, 19 nt, Artificial Sequence
  Description of Artificial Sequence: Synthetic oligonucleotide
ucaccccgcgcuggauguc

SEQ ID NO: 940260 - RNA, 19 nt, Artificial Sequence
  Description of Artificial Sequence: Synthetic oligonucleotide
gucucggaugguccagguu

SEQ ID NO: 940261 - RNA, 19 nt, Artificial Sequence
  Description of Artificial Sequence: Synthetic oligonucleotide
ccuuauugacagucucccu

SEQ ID NO: 940262 - RNA, 19 nt, Artificial Sequence
  Description of Artificial Sequence: Synthetic oligonucleotide
cacuauggguugguggguu

SEQ ID NO: 940263 - RNA, 19 nt, Artificial Sequence
  Description of Artificial Sequence: Synthetic oligonucleotide
ccgucaacccuuccugcaa

SEQ ID NO: 940264 - RNA, 19 nt, Artificial Sequence
  Description of Artificial Sequence: Synthetic oligonucleotide
ccgugguaagguaugcaau

SEQ ID NO: 940265 - RNA, 19 nt, Artificial Sequence
  Description of Artificial Sequence: Synthetic oligonucleotide
cagcaacaaggcuggucau

SEQ ID NO: 940266 - RNA, 19 nt, Artificial Sequence
  Description of Artificial Sequence: Synthetic oligonucleotide
gcuguuccagguugacgau

SEQ ID NO: 940267 - RNA, 19 nt, Artificial Sequence
  Description of Artificial Sequence: Synthetic oligonucleotide
ggaugucaacuggcccuuc

SEQ ID NO: 940268 - RNA, 19 nt, Artificial Sequence
  Description of Artificial Sequence: Synthetic oligonucleotide
cagugcuuucgaugccuuu

SEQ ID NO: 940269 - RNA, 19 nt, Artificial Sequence
  Description of Artificial Sequence: Synthetic oligonucleotide
cgauguugugggagacuga

SEQ ID NO: 940270 - RNA, 19 nt, Artificial Sequence
  Description of Artificial Sequence: Synthetic oligonucleotide
ccccgcgcuggaugucuug

SEQ ID NO: 940271 - RNA, 19 nt, Artificial Sequence
  Description of Artificial Sequence: Synthetic oligonucleotide
caccccgcgcuggaugucu

SEQ ID NO: 940272 - RNA, 19 nt, Artificial Sequence
  Description of Artificial Sequence: Synthetic oligonucleotide
cauuggccucauagucauu

SEQ ID NO: 940273 - RNA, 19 nt, Artificial Sequence
  Description of Artificial Sequence: Synthetic oligonucleotide
cagcucccuugguucaauu

SEQ ID NO: 940274 - RNA, 19 nt, Artificial Sequence
  Description of Artificial Sequence: Synthetic oligonucleotide
cccgcucuagauugaggau

SEQ ID NO: 940275 - RNA, 19 nt, Artificial Sequence
  Description of Artificial Sequence: Synthetic oligonucleotide
caagggucauuggccucau

SEQ ID NO: 940276 - RNA, 19 nt, Artificial Sequence
  Description of Artificial Sequence: Synthetic oligonucleotide
ccacuauggguuggugggu

SEQ ID NO: 940277 - RNA, 19 nt, Artificial Sequence
  Description of Artificial Sequence: Synthetic oligonucleotide
ccgcgcuggaugucuugua

SEQ ID NO: 940278 - RNA, 19 nt, Artificial Sequence
  Description of Artificial Sequence: Synthetic oligonucleotide
gcuguacccaagggucauu

SEQ ID NO: 940279 - RNA, 19 nt, Artificial Sequence
  Description of Artificial Sequence: Synthetic oligonucleotide
cccgcgcuggaugucuugu

SEQ ID NO: 940280 - RNA, 19 nt, Artificial Sequence
  Description of Artificial Sequence: Synthetic oligonucleotide
uacaaauuacuauacagcg

SEQ ID NO: 940281 - RNA, 19 nt, Artificial Sequence
  Description of Artificial Sequence: Synthetic oligonucleotide
uuuuaggagacacugaaag

SEQ ID NO: 940282 - RNA, 19 nt, Artificial Sequence
  Description of Artificial Sequence: Synthetic oligonucleotide
uuuaauagggcuuaguaca

SEQ ID NO: 940283 - RNA, 19 nt, Artificial Sequence
  Description of Artificial Sequence: Synthetic oligonucleotide
uuauggaaggugcagaugg

SEQ ID NO: 940284 - RNA, 19 nt, Artificial Sequence
  Description of Artificial Sequence: Synthetic oligonucleotide
ucuuuaagcauaaauacca

SEQ ID NO: 940285 - RNA, 19 nt, Artificial Sequence
  Description of Artificial Sequence: Synthetic oligonucleotide
aaagccaguacguuguggc

SEQ ID NO: 940286 - RNA, 19 nt, Artificial Sequence
  Description of Artificial Sequence: Synthetic oligonucleotide
aaaacagagguauaggugu

SEQ ID NO: 940287 - RNA, 19 nt, Artificial Sequence
  Description of Artificial Sequence: Synthetic oligonucleotide
aggaugauaaauaaaauac

SEQ ID NO: 940288 - RNA, 19 nt, Artificial Sequence
  Description of Artificial Sequence: Synthetic oligonucleotide
ugagaggucauuuaaagug

SEQ ID NO: 940289 - RNA, 19 nt, Artificial Sequence
  Description of Artificial Sequence: Synthetic oligonucleotide
auuuaauagggcuuaguac

SEQ ID NO: 940290 - RNA, 19 nt, Artificial Sequence
  Description of Artificial Sequence: Synthetic oligonucleotide
uuacaaauuacuauacagc

SEQ ID NO: 940291 - RNA, 19 nt, Artificial Sequence
  Description of Artificial Sequence: Synthetic oligonucleotide
uuaagcauaaauaccaggu

SEQ ID NO: 940292 - RNA, 19 nt, Artificial Sequence
  Description of Artificial Sequence: Synthetic oligonucleotide
aaaccagcuggguaggucc

SEQ ID NO: 940293 - RNA, 19 nt, Artificial Sequence
  Description of Artificial Sequence: Synthetic oligonucleotide
uccggauugggcaagaagg

SEQ ID NO: 940294 - RNA, 19 nt, Artificial Sequence
  Description of Artificial Sequence: Synthetic oligonucleotide
gauuccacaaugcugaggc

SEQ ID NO: 940295 - RNA, 19 nt, Artificial Sequence
  Description of Artificial Sequence: Synthetic oligonucleotide
ugauguagaaacaugauuu

SEQ ID NO: 940296 - RNA, 19 nt, Artificial Sequence
  Description of Artificial Sequence: Synthetic oligonucleotide
uguucuuuaagcauaaaua

SEQ ID NO: 940297 - RNA, 19 nt, Artificial Sequence
  Description of Artificial Sequence: Synthetic oligonucleotide
aauucauccggauugggca

SEQ ID NO: 940298 - RNA, 19 nt, Artificial Sequence
  Description of Artificial Sequence: Synthetic oligonucleotide
uuuaagcauaaauaccagg

SEQ ID NO: 940299 - RNA, 19 nt, Artificial Sequence
  Description of Artificial Sequence: Synthetic oligonucleotide
aaaccugagacaaaccagc

SEQ ID NO: 940300 - RNA, 19 nt, Artificial Sequence
  Description of Artificial Sequence: Synthetic oligonucleotide
gaugagaggucauuuaaag

SEQ ID NO: 940301 - RNA, 19 nt, Artificial Sequence
  Description of Artificial Sequence: Synthetic oligonucleotide
gagacacucuucuagaaag

SEQ ID NO: 940302 - RNA, 19 nt, Artificial Sequence
  Description of Artificial Sequence: Synthetic oligonucleotide
uacguuguggcaaauuucc

SEQ ID NO: 940303 - RNA, 19 nt, Artificial Sequence
  Description of Artificial Sequence: Synthetic oligonucleotide
uauuuaauagggcuuagua

SEQ ID NO: 940304 - RNA, 19 nt, Artificial Sequence
  Description of Artificial Sequence: Synthetic oligonucleotide
uacaguucaaaacuguuuc

SEQ ID NO: 940305 - RNA, 19 nt, Artificial Sequence
  Description of Artificial Sequence: Synthetic oligonucleotide
uucucguucucuuagcucc

SEQ ID NO: 940306 - RNA, 19 nt, Artificial Sequence
  Description of Artificial Sequence: Synthetic oligonucleotide
cagucaacagguuugauug

SEQ ID NO: 940307 - RNA, 19 nt, Artificial Sequence
  Description of Artificial Sequence: Synthetic oligonucleotide
ucuaaaccuggccagcagg

SEQ ID NO: 940308 - RNA, 19 nt, Artificial Sequence
  Description of Artificial Sequence: Synthetic oligonucleotide
ugguauguuuauuugagac

SEQ ID NO: 940309 - RNA, 19 nt, Artificial Sequence
  Description of Artificial Sequence: Synthetic oligonucleotide
uuucagaccacuauccgac

SEQ ID NO: 940310 - RNA, 19 nt, Artificial Sequence
  Description of Artificial Sequence: Synthetic oligonucleotide
uguugaacucaguauauga

SEQ ID NO: 940311 - RNA, 19 nt, Artificial Sequence
  Description of Artificial Sequence: Synthetic oligonucleotide
cuuguuguagcacaacacc

SEQ ID NO: 940312 - RNA, 19 nt, Artificial Sequence
  Description of Artificial Sequence: Synthetic oligonucleotide
auuacuauacagcgcuugg

SEQ ID NO: 940313 - RNA, 19 nt, Artificial Sequence
  Description of Artificial Sequence: Synthetic oligonucleotide
agacaaaccagcuggguag

SEQ ID NO: 940314 - RNA, 19 nt, Artificial Sequence
  Description of Artificial Sequence: Synthetic oligonucleotide
acgacaacuacugagauga

SEQ ID NO: 940315 - RNA, 19 nt, Artificial Sequence
  Description of Artificial Sequence: Synthetic oligonucleotide
caguauaugaaaaggcccc

SEQ ID NO: 940316 - RNA, 19 nt, Artificial Sequence
  Description of Artificial Sequence: Synthetic oligonucleotide
uuguuguagcacaacaccc

SEQ ID NO: 940317 - RNA, 19 nt, Artificial Sequence
  Description of Artificial Sequence: Synthetic oligonucleotide
uauagguguauccugccca

SEQ ID NO: 940318 - RNA, 19 nt, Artificial Sequence
  Description of Artificial Sequence: Synthetic oligonucleotide
augcuagagggucuaaggc

SEQ ID NO: 940319 - RNA, 19 nt, Artificial Sequence
  Description of Artificial Sequence: Synthetic oligonucleotide
ugaacucaguauaugaaaa

SEQ ID NO: 940320 - RNA, 19 nt, Artificial Sequence
  Description of Artificial Sequence: Synthetic oligonucleotide
aagccaguaacuacaaagg

SEQ ID NO: 940321 - RNA, 19 nt, Artificial Sequence
  Description of Artificial Sequence: Synthetic oligonucleotide
uuaauagggcuuaguacag

SEQ ID NO: 940322 - RNA, 19 nt, Artificial Sequence
  Description of Artificial Sequence: Synthetic oligonucleotide
uuauuugagaccuggcaga

SEQ ID NO: 940323 - RNA, 19 nt, Artificial Sequence
  Description of Artificial Sequence: Synthetic oligonucleotide
guagcuaucuuguuguagc

SEQ ID NO: 940324 - RNA, 19 nt, Artificial Sequence
  Description of Artificial Sequence: Synthetic oligonucleotide
uuccuuuuggcuuagcuaa

SEQ ID NO: 940325 - RNA, 19 nt, Artificial Sequence
  Description of Artificial Sequence: Synthetic oligonucleotide
gaugcuguuccuuuuagga

SEQ ID NO: 940326 - RNA, 19 nt, Artificial Sequence
  Description of Artificial Sequence: Synthetic oligonucleotide
cagguuagcauuuccaccc

SEQ ID NO: 940327 - RNA, 19 nt, Artificial Sequence
  Description of Artificial Sequence: Synthetic oligonucleotide
aguucugaguccaaugacc

SEQ ID NO: 940328 - RNA, 19 nt, Artificial Sequence
  Description of Artificial Sequence: Synthetic oligonucleotide
uguucuccuaagaucuugg

SEQ ID NO: 940329 - RNA, 19 nt, Artificial Sequence
  Description of Artificial Sequence: Synthetic oligonucleotide
caugcuaaggagcucgugg

SEQ ID NO: 940330 - RNA, 19 nt, Artificial Sequence
  Description of Artificial Sequence: Synthetic oligonucleotide
uucaaagcagggcacaccu

SEQ ID NO: 940331 - RNA, 19 nt, Artificial Sequence
  Description of Artificial Sequence: Synthetic oligonucleotide
aauuacuauacagcgcuug

SEQ ID NO: 940332 - RNA, 19 nt, Artificial Sequence
  Description of Artificial Sequence: Synthetic oligonucleotide
auuagaauacuuugcauuu

SEQ ID NO: 940333 - RNA, 19 nt, Artificial Sequence
  Description of Artificial Sequence: Synthetic oligonucleotide
gaacucaguauaugaaaag

SEQ ID NO: 940334 - RNA, 19 nt, Artificial Sequence
  Description of Artificial Sequence: Synthetic oligonucleotide
acaaauuacuauacagcgc

SEQ ID NO: 940335 - RNA, 19 nt, Artificial Sequence
  Description of Artificial Sequence: Synthetic oligonucleotide
ggagaauucauccggauug

SEQ ID NO: 940336 - RNA, 19 nt, Artificial Sequence
  Description of Artificial Sequence: Synthetic oligonucleotide
uuuggcuuagcuaacccaa

SEQ ID NO: 940337 - RNA, 19 nt, Artificial Sequence
  Description of Artificial Sequence: Synthetic oligonucleotide
aauagggcuuaguacagaa

SEQ ID NO: 940338 - RNA, 19 nt, Artificial Sequence
  Description of Artificial Sequence: Synthetic oligonucleotide
uguagcacaacacccugca

SEQ ID NO: 940339 - RNA, 19 nt, Artificial Sequence
  Description of Artificial Sequence: Synthetic oligonucleotide
aaauacaaagccaguacgu

SEQ ID NO: 940340 - RNA, 19 nt, Artificial Sequence
  Description of Artificial Sequence: Synthetic oligonucleotide
uuuucagaccacuauccga

SEQ ID NO: 940341 - RNA, 19 nt, Artificial Sequence
  Description of Artificial Sequence: Synthetic oligonucleotide
guaugcuuuuaucucaacc

SEQ ID NO: 940342 - RNA, 19 nt, Artificial Sequence
  Description of Artificial Sequence: Synthetic oligonucleotide
uuccagaaaacacauugaa

SEQ ID NO: 940343 - RNA, 19 nt, Artificial Sequence
  Description of Artificial Sequence: Synthetic oligonucleotide
uuuuacaccuuagugagau

SEQ ID NO: 940344 - RNA, 19 nt, Artificial Sequence
  Description of Artificial Sequence: Synthetic oligonucleotide
uacaagagucugaagccag

SEQ ID NO: 940345 - RNA, 19 nt, Artificial Sequence
  Description of Artificial Sequence: Synthetic oligonucleotide
uuuauggcagcauuagaau

SEQ ID NO: 940346 - RNA, 19 nt, Artificial Sequence
  Description of Artificial Sequence: Synthetic oligonucleotide
gauugguuauggaaggugc

SEQ ID NO: 940347 - RNA, 19 nt, Artificial Sequence
  Description of Artificial Sequence: Synthetic oligonucleotide
ugaguacuuucucugucag

SEQ ID NO: 940348 - RNA, 19 nt, Artificial Sequence
  Description of Artificial Sequence: Synthetic oligonucleotide
uuggguuuaacccaacauu

SEQ ID NO: 940349 - RNA, 19 nt, Artificial Sequence
  Description of Artificial Sequence: Synthetic oligonucleotide
auacaaagccaguacguug

SEQ ID NO: 940350 - RNA, 19 nt, Artificial Sequence
  Description of Artificial Sequence: Synthetic oligonucleotide
acagcgcuuggguuuaacc

SEQ ID NO: 940351 - RNA, 19 nt, Artificial Sequence
  Description of Artificial Sequence: Synthetic oligonucleotide
gauguagaaacaugauuuc

SEQ ID NO: 940352 - RNA, 19 nt, Artificial Sequence
  Description of Artificial Sequence: Synthetic oligonucleotide
gaaaccugagacaaaccag

SEQ ID NO: 940353 - RNA, 19 nt, Artificial Sequence
  Description of Artificial Sequence: Synthetic oligonucleotide
acgucugcgcuuuuccucc

SEQ ID NO: 940354 - RNA, 19 nt, Artificial Sequence
  Description of Artificial Sequence: Synthetic oligonucleotide
uggguuuaacccaacauuu

SEQ ID NO: 940355 - RNA, 19 nt, Artificial Sequence
  Description of Artificial Sequence: Synthetic oligonucleotide
gaugggacgacaacuacug

SEQ ID NO: 940356 - RNA, 19 nt, Artificial Sequence
  Description of Artificial Sequence: Synthetic oligonucleotide
acuguuucacuuuuauaca

SEQ ID NO: 940357 - RNA, 19 nt, Artificial Sequence
  Description of Artificial Sequence: Synthetic oligonucleotide
auguuuauuugagaccugg

SEQ ID NO: 940358 - RNA, 19 nt, Artificial Sequence
  Description of Artificial Sequence: Synthetic oligonucleotide
uguuuauuugagaccuggc

SEQ ID NO: 940359 - RNA, 19 nt, Artificial Sequence
  Description of Artificial Sequence: Synthetic oligonucleotide
auaccagguuagcauuucc

SEQ ID NO: 940360 - RNA, 19 nt, Artificial Sequence
  Description of Artificial Sequence: Synthetic oligonucleotide
auagguguauccugcccac

SEQ ID NO: 940361 - RNA, 19 nt, Artificial Sequence
  Description of Artificial Sequence: Synthetic oligonucleotide
agcauaaauaccagguuag

SEQ ID NO: 940362 - RNA, 19 nt, Artificial Sequence
  Description of Artificial Sequence: Synthetic oligonucleotide
acucgcaucagccugguau

SEQ ID NO: 940363 - RNA, 19 nt, Artificial Sequence
  Description of Artificial Sequence: Synthetic oligonucleotide
caaauuacuauacagcgcu

SEQ ID NO: 940364 - RNA, 19 nt, Artificial Sequence
  Description of Artificial Sequence: Synthetic oligonucleotide
ugauaagcgcccuucuucu

SEQ ID NO: 940365 - RNA, 19 nt, Artificial Sequence
  Description of Artificial Sequence: Synthetic oligonucleotide
gaaguaacucaggaccugg

SEQ ID NO: 940366 - RNA, 19 nt, Artificial Sequence
  Description of Artificial Sequence: Synthetic oligonucleotide
gcaggcaacagacuggugg

SEQ ID NO: 940367 - RNA, 19 nt, Artificial Sequence
  Description of Artificial Sequence: Synthetic oligonucleotide
acuccuugugaguacuuuc

SEQ ID NO: 940368 - RNA, 19 nt, Artificial Sequence
  Description of Artificial Sequence: Synthetic oligonucleotide
gguauguuuauuugagacc

SEQ ID NO: 940369 - RNA, 19 nt, Artificial Sequence
  Description of Artificial Sequence: Synthetic oligonucleotide
aguacguuguggcaaauuu

SEQ ID NO: 940370 - RNA, 19 nt, Artificial Sequence
  Description of Artificial Sequence: Synthetic oligonucleotide
ucuagaaaguucacuggau

SEQ ID NO: 940371 - RNA, 19 nt, Artificial Sequence
  Description of Artificial Sequence: Synthetic oligonucleotide
cccaacauuuauuuaauag

SEQ ID NO: 940372 - RNA, 19 nt, Artificial Sequence
  Description of Artificial Sequence: Synthetic oligonucleotide
ggaagcauucaucugauga

SEQ ID NO: 940373 - RNA, 19 nt, Artificial Sequence
  Description of Artificial Sequence: Synthetic oligonucleotide
accuuagugagauggagaa

SEQ ID NO: 940374 - RNA, 19 nt, Artificial Sequence
  Description of Artificial Sequence: Synthetic oligonucleotide
ugaugagaggucauuuaaa

SEQ ID NO: 940375 - RNA, 19 nt, Artificial Sequence
  Description of Artificial Sequence: Synthetic oligonucleotide
ugugucccgcuucaguugc

SEQ ID NO: 940376 - RNA, 19 nt, Artificial Sequence
  Description of Artificial Sequence: Synthetic oligonucleotide
ugauugguuauggaaggug

SEQ ID NO: 940377 - RNA, 19 nt, Artificial Sequence
  Description of Artificial Sequence: Synthetic oligonucleotide
augcuuuuaucucaacccu

SEQ ID NO: 940378 - RNA, 19 nt, Artificial Sequence
  Description of Artificial Sequence: Synthetic oligonucleotide
aagcauucaucugaugaca

SEQ ID NO: 940379 - RNA, 19 nt, Artificial Sequence
  Description of Artificial Sequence: Synthetic oligonucleotide
uugcauuucuaaaccuggc

SEQ ID NO: 940380 - RNA, 19 nt, Artificial Sequence
  Description of Artificial Sequence: Synthetic oligonucleotide
caugucacccagaugggac

SEQ ID NO: 940381 - RNA, 19 nt, Artificial Sequence
  Description of Artificial Sequence: Synthetic oligonucleotide
augagaggucauuuaaagu

SEQ ID NO: 940382 - RNA, 19 nt, Artificial Sequence
  Description of Artificial Sequence: Synthetic oligonucleotide
cagcgcuuggguuuaaccc

SEQ ID NO: 940383 - RNA, 19 nt, Artificial Sequence
  Description of Artificial Sequence: Synthetic oligonucleotide
agaaggaugggacucgcau

SEQ ID NO: 940384 - RNA, 19 nt, Artificial Sequence
  Description of Artificial Sequence: Synthetic oligonucleotide
cagagguauagguguaucc

SEQ ID NO: 940385 - RNA, 19 nt, Artificial Sequence
  Description of Artificial Sequence: Synthetic oligonucleotide
guuguggcaaauuuccaga

SEQ ID NO: 940386 - RNA, 19 nt, Artificial Sequence
  Description of Artificial Sequence: Synthetic oligonucleotide
uggacgaugcucuggacaa

SEQ ID NO: 940387 - RNA, 19 nt, Artificial Sequence
  Description of Artificial Sequence: Synthetic oligonucleotide
aaaaggcggguggaagugg

SEQ ID NO: 940388 - RNA, 19 nt, Artificial Sequence
  Description of Artificial Sequence: Synthetic oligonucleotide
aacuacaaaggaugauaaa

SEQ ID NO: 940389 - RNA, 19 nt, Artificial Sequence
  Description of Artificial Sequence: Synthetic oligonucleotide
uucuaaaccuggccagcag

SEQ ID NO: 940390 - RNA, 19 nt, Artificial Sequence
  Description of Artificial Sequence: Synthetic oligonucleotide
cugguuucaaagcagggca

SEQ ID NO: 940391 - RNA, 19 nt, Artificial Sequence
  Description of Artificial Sequence: Synthetic oligonucleotide
cugauaagcgcccuucuuc

SEQ ID NO: 940392 - RNA, 19 nt, Artificial Sequence
  Description of Artificial Sequence: Synthetic oligonucleotide
uaucucaacccucuccauc

SEQ ID NO: 940393 - RNA, 19 nt, Artificial Sequence
  Description of Artificial Sequence: Synthetic oligonucleotide
aaaguucacuggauuccac

SEQ ID NO: 940394 - RNA, 19 nt, Artificial Sequence
  Description of Artificial Sequence: Synthetic oligonucleotide
guauguuuauuugagaccu

SEQ ID NO: 940395 - RNA, 19 nt, Artificial Sequence
  Description of Artificial Sequence: Synthetic oligonucleotide
agagguauagguguauccu

SEQ ID NO: 940396 - RNA, 19 nt, Artificial Sequence
  Description of Artificial Sequence: Synthetic oligonucleotide
uucuguuggagcuccucgc

SEQ ID NO: 940397 - RNA, 19 nt, Artificial Sequence
  Description of Artificial Sequence: Synthetic oligonucleotide
acagucaacagguuugauu

SEQ ID NO: 940398 - RNA, 19 nt, Artificial Sequence
  Description of Artificial Sequence: Synthetic oligonucleotide
cacugaaaguucugagucc

SEQ ID NO: 940399 - RNA, 19 nt, Artificial Sequence
  Description of Artificial Sequence: Synthetic oligonucleotide
uauguuuauuugagaccug

SEQ ID NO: 940400 - RNA, 19 nt, Artificial Sequence
  Description of Artificial Sequence: Synthetic oligonucleotide
augaccugauugguuaugg

SEQ ID NO: 940401 - RNA, 19 nt, Artificial Sequence
  Description of Artificial Sequence: Synthetic oligonucleotide
acggcggacugucucuucc

SEQ ID NO: 940402 - RNA, 19 nt, Artificial Sequence
  Description of Artificial Sequence: Synthetic oligonucleotide
uccugcucaaucagagagc

SEQ ID NO: 940403 - RNA, 19 nt, Artificial Sequence
  Description of Artificial Sequence: Synthetic oligonucleotide
gacgacaacuacugagaug

SEQ ID NO: 940404 - RNA, 19 nt, Artificial Sequence
  Description of Artificial Sequence: Synthetic oligonucleotide
uuguagcacaacacccugc

SEQ ID NO: 940405 - RNA, 19 nt, Artificial Sequence
  Description of Artificial Sequence: Synthetic oligonucleotide
auaagcgcccuucuucugu

SEQ ID NO: 940406 - RNA, 19 nt, Artificial Sequence
  Description of Artificial Sequence: Synthetic oligonucleotide
cacaccugaagcagugggg

SEQ ID NO: 940407 - RNA, 19 nt, Artificial Sequence
  Description of Artificial Sequence: Synthetic oligonucleotide
cuuguguggagcccaggcc

SEQ ID NO: 940408 - RNA, 19 nt, Artificial Sequence
  Description of Artificial Sequence: Synthetic oligonucleotide
aguucacuggauuccacaa

SEQ ID NO: 940409 - RNA, 19 nt, Artificial Sequence
  Description of Artificial Sequence: Synthetic oligonucleotide
guauagguguauccugccc

SEQ ID NO: 940410 - RNA, 19 nt, Artificial Sequence
  Description of Artificial Sequence: Synthetic oligonucleotide
auggaaggugcagauggcg

SEQ ID NO: 940411 - RNA, 19 nt, Artificial Sequence
  Description of Artificial Sequence: Synthetic oligonucleotide
augcuaaggagcucgugga

SEQ ID NO: 940412 - RNA, 19 nt, Artificial Sequence
  Description of Artificial Sequence: Synthetic oligonucleotide
ugaugcuagagggucuaag

SEQ ID NO: 940413 - RNA, 19 nt, Artificial Sequence
  Description of Artificial Sequence: Synthetic oligonucleotide
caguucaaaacuguuucac

SEQ ID NO: 940414 - RNA, 19 nt, Artificial Sequence
  Description of Artificial Sequence: Synthetic oligonucleotide
uugagagaagagacacucu

SEQ ID NO: 940415 - RNA, 19 nt, Artificial Sequence
  Description of Artificial Sequence: Synthetic oligonucleotide
gcgaggagaauucauccgg

SEQ ID NO: 940416 - RNA, 19 nt, Artificial Sequence
  Description of Artificial Sequence: Synthetic oligonucleotide
cuuagugagauggagaagu

SEQ ID NO: 940417 - RNA, 19 nt, Artificial Sequence
  Description of Artificial Sequence: Synthetic oligonucleotide
gaaggaugggacucgcauc

SEQ ID NO: 940418 - RNA, 19 nt, Artificial Sequence
  Description of Artificial Sequence: Synthetic oligonucleotide
cacaacacccugcagcaug

SEQ ID NO: 940419 - RNA, 19 nt, Artificial Sequence
  Description of Artificial Sequence: Synthetic oligonucleotide
agagacacucuucuagaaa

SEQ ID NO: 940420 - RNA, 19 nt, Artificial Sequence
  Description of Artificial Sequence: Synthetic oligonucleotide
cuuuggaagcauucaucug

SEQ ID NO: 940421 - RNA, 19 nt, Artificial Sequence
  Description of Artificial Sequence: Synthetic oligonucleotide
uuucaaagcagggcacacc

SEQ ID NO: 940422 - RNA, 19 nt, Artificial Sequence
  Description of Artificial Sequence: Synthetic oligonucleotide
auccggauugggcaagaag

SEQ ID NO: 940423 - RNA, 19 nt, Artificial Sequence
  Description of Artificial Sequence: Synthetic oligonucleotide
ugguuucaaagcagggcac

SEQ ID NO: 940424 - RNA, 19 nt, Artificial Sequence
  Description of Artificial Sequence: Synthetic oligonucleotide
gucauuuaaagugcacaug

SEQ ID NO: 940425 - RNA, 19 nt, Artificial Sequence
  Description of Artificial Sequence: Synthetic oligonucleotide
ucuacggcggacugucucu

SEQ ID NO: 940426 - RNA, 19 nt, Artificial Sequence
  Description of Artificial Sequence: Synthetic oligonucleotide
guaacucaggaccuggaaa

SEQ ID NO: 940427 - RNA, 19 nt, Artificial Sequence
  Description of Artificial Sequence: Synthetic oligonucleotide
gacuuuacaagagucugaa

SEQ ID NO: 940428 - RNA, 19 nt, Artificial Sequence
  Description of Artificial Sequence: Synthetic oligonucleotide
agguuugauugucucaaaa

SEQ ID NO: 940429 - RNA, 19 nt, Artificial Sequence
  Description of Artificial Sequence: Synthetic oligonucleotide
cucacgucugcgcuuuucc

SEQ ID NO: 940430 - RNA, 19 nt, Artificial Sequence
  Description of Artificial Sequence: Synthetic oligonucleotide
uguacuccuugugaguacu

SEQ ID NO: 940431 - RNA, 19 nt, Artificial Sequence
  Description of Artificial Sequence: Synthetic oligonucleotide
ugguaugcuuuuaucucaa

SEQ ID NO: 940432 - RNA, 19 nt, Artificial Sequence
  Description of Artificial Sequence: Synthetic oligonucleotide
ucagaccacuauccgacuc

SEQ ID NO: 940433 - RNA, 19 nt, Artificial Sequence
  Description of Artificial Sequence: Synthetic oligonucleotide
cauuagaauacuuugcauu

SEQ ID NO: 940434 - RNA, 19 nt, Artificial Sequence
  Description of Artificial Sequence: Synthetic oligonucleotide
uagagggucuaaggcauag

SEQ ID NO: 940435 - RNA, 19 nt, Artificial Sequence
  Description of Artificial Sequence: Synthetic oligonucleotide
uaucuuuguguguccgaga

SEQ ID NO: 940436 - RNA, 19 nt, Artificial Sequence
  Description of Artificial Sequence: Synthetic oligonucleotide
gacaaaccagcuggguagg

SEQ ID NO: 940437 - RNA, 19 nt, Artificial Sequence
  Description of Artificial Sequence: Synthetic oligonucleotide
agcgcccuucuucuguugg

SEQ ID NO: 940438 - RNA, 19 nt, Artificial Sequence
  Description of Artificial Sequence: Synthetic oligonucleotide
cuauccgacucuguucucc

SEQ ID NO: 940439 - RNA, 19 nt, Artificial Sequence
  Description of Artificial Sequence: Synthetic oligonucleotide
gagacaaaccagcugggua

SEQ ID NO: 940440 - RNA, 19 nt, Artificial Sequence
  Description of Artificial Sequence: Synthetic oligonucleotide
uccaaugaccugauugguu

SEQ ID NO: 940441 - RNA, 19 nt, Artificial Sequence
  Description of Artificial Sequence: Synthetic oligonucleotide
acaccuuagugagauggag

SEQ ID NO: 940442 - RNA, 19 nt, Artificial Sequence
  Description of Artificial Sequence: Synthetic oligonucleotide
guagaaacaugauuuccua

SEQ ID NO: 940443 - RNA, 19 nt, Artificial Sequence
  Description of Artificial Sequence: Synthetic oligonucleotide
uuagugagauggagaagua

SEQ ID NO: 940444 - RNA, 19 nt, Artificial Sequence
  Description of Artificial Sequence: Synthetic oligonucleotide
uccacaaugcugaggccaa

SEQ ID NO: 940445 - RNA, 19 nt, Artificial Sequence
  Description of Artificial Sequence: Synthetic oligonucleotide
aggaaaccugagacaaacc

SEQ ID NO: 940446 - RNA, 19 nt, Artificial Sequence
  Description of Artificial Sequence: Synthetic oligonucleotide
uguauccugcccaccuugu

SEQ ID NO: 940447 - RNA, 19 nt, Artificial Sequence
  Description of Artificial Sequence: Synthetic oligonucleotide
cucgcaucagccugguaug

SEQ ID NO: 940448 - RNA, 19 nt, Artificial Sequence
  Description of Artificial Sequence: Synthetic oligonucleotide
uuaguacagaaauguccau

SEQ ID NO: 940449 - RNA, 19 nt, Artificial Sequence
  Description of Artificial Sequence: Synthetic oligonucleotide
ugguacuuuucgucuggcc

SEQ ID NO: 940450 - RNA, 19 nt, Artificial Sequence
  Description of Artificial Sequence: Synthetic oligonucleotide
accacuauccgacucuguu

SEQ ID NO: 940451 - RNA, 19 nt, Artificial Sequence
  Description of Artificial Sequence: Synthetic oligonucleotide
ugaaaguucugaguccaau

SEQ ID NO: 940452 - RNA, 19 nt, Artificial Sequence
  Description of Artificial Sequence: Synthetic oligonucleotide
caucccaacaggaggcaac

SEQ ID NO: 940453 - RNA, 19 nt, Artificial Sequence
  Description of Artificial Sequence: Synthetic oligonucleotide
gcuaucuuguuguagcaca

SEQ ID NO: 940454 - RNA, 19 nt, Artificial Sequence
  Description of Artificial Sequence: Synthetic oligonucleotide
gauaagcgcccuucuucug

SEQ ID NO: 940455 - RNA, 19 nt, Artificial Sequence
  Description of Artificial Sequence: Synthetic oligonucleotide
ccaauuuacacccgucccc

SEQ ID NO: 940456 - RNA, 19 nt, Artificial Sequence
  Description of Artificial Sequence: Synthetic oligonucleotide
agcauucaucugaugacag

SEQ ID NO: 940457 - RNA, 19 nt, Artificial Sequence
  Description of Artificial Sequence: Synthetic oligonucleotide
guucuccuaagaucuuggc

SEQ ID NO: 940458 - RNA, 19 nt, Artificial Sequence
  Description of Artificial Sequence: Synthetic oligonucleotide
ggcgaggagaauucauccg

SEQ ID NO: 940459 - RNA, 19 nt, Artificial Sequence
  Description of Artificial Sequence: Synthetic oligonucleotide
uccuugugaguacuuucuc

SEQ ID NO: 940460 - RNA, 19 nt, Artificial Sequence
  Description of Artificial Sequence: Synthetic oligonucleotide
uauccgacucuguucuccu

SEQ ID NO: 940461 - RNA, 19 nt, Artificial Sequence
  Description of Artificial Sequence: Synthetic oligonucleotide
ucguucucuuagcuccugc

SEQ ID NO: 940462 - RNA, 19 nt, Artificial Sequence
  Description of Artificial Sequence: Synthetic oligonucleotide
guguauccugcccaccuug

SEQ ID NO: 940463 - RNA, 19 nt, Artificial Sequence
  Description of Artificial Sequence: Synthetic oligonucleotide
cagauggcgaggagaauuc

SEQ ID NO: 940464 - RNA, 19 nt, Artificial Sequence
  Description of Artificial Sequence: Synthetic oligonucleotide
ccacuuuuacaccuuagug

SEQ ID NO: 940465 - RNA, 19 nt, Artificial Sequence
  Description of Artificial Sequence: Synthetic oligonucleotide
gagggucuaaggcauaggu

SEQ ID NO: 940466 - RNA, 19 nt, Artificial Sequence
  Description of Artificial Sequence: Synthetic oligonucleotide
aguaacuacaaaggaugau

SEQ ID NO: 940467 - RNA, 19 nt, Artificial Sequence
  Description of Artificial Sequence: Synthetic oligonucleotide
cugaugagaggucauuuaa

SEQ ID NO: 940468 - RNA, 19 nt, Artificial Sequence
  Description of Artificial Sequence: Synthetic oligonucleotide
agcucguggagguggacga

SEQ ID NO: 940469 - RNA, 19 nt, Artificial Sequence
  Description of Artificial Sequence: Synthetic oligonucleotide
ggccaauuuacacccgucc

SEQ ID NO: 940470 - RNA, 19 nt, Artificial Sequence
  Description of Artificial Sequence: Synthetic oligonucleotide
gcgcuuuuccuccaggugc

SEQ ID NO: 940471 - RNA, 19 nt, Artificial Sequence
  Description of Artificial Sequence: Synthetic oligonucleotide
aaggccccuuaucuuugug

SEQ ID NO: 940472 - RNA, 19 nt, Artificial Sequence
  Description of Artificial Sequence: Synthetic oligonucleotide
gccaauuuacacccguccc

SEQ ID NO: 940473 - RNA, 19 nt, Artificial Sequence
  Description of Artificial Sequence: Synthetic oligonucleotide
uaauagggcuuaguacaga

SEQ ID NO: 940474 - RNA, 19 nt, Artificial Sequence
  Description of Artificial Sequence: Synthetic oligonucleotide
agcuugauguagaaacaug

SEQ ID NO: 940475 - RNA, 19 nt, Artificial Sequence
  Description of Artificial Sequence: Synthetic oligonucleotide
auucauccggauugggcaa

SEQ ID NO: 940476 - RNA, 19 nt, Artificial Sequence
  Description of Artificial Sequence: Synthetic oligonucleotide
auugguuauggaaggugca

SEQ ID NO: 940477 - RNA, 19 nt, Artificial Sequence
  Description of Artificial Sequence: Synthetic oligonucleotide
uaucuuguuguagcacaac

SEQ ID NO: 940478 - RNA, 19 nt, Artificial Sequence
  Description of Artificial Sequence: Synthetic oligonucleotide
aaccugagacaaaccagcu

SEQ ID NO: 940479 - RNA, 19 nt, Artificial Sequence
  Description of Artificial Sequence: Synthetic oligonucleotide
agaugggacgacaacuacu

SEQ ID NO: 940480 - RNA, 19 nt, Artificial Sequence
  Description of Artificial Sequence: Synthetic oligonucleotide
aacagagguauagguguau

SEQ ID NO: 940481 - RNA, 19 nt, Artificial Sequence
  Description of Artificial Sequence: Synthetic oligonucleotide
ccagguuagcauuuccacc

SEQ ID NO: 940482 - RNA, 19 nt, Artificial Sequence
  Description of Artificial Sequence: Synthetic oligonucleotide
cacgucugcgcuuuuccuc

SEQ ID NO: 940483 - RNA, 19 nt, Artificial Sequence
  Description of Artificial Sequence: Synthetic oligonucleotide
acugauaagcgcccuucuu

SEQ ID NO: 940484 - RNA, 19 nt, Artificial Sequence
  Description of Artificial Sequence: Synthetic oligonucleotide
uauacagcgcuuggguuua

SEQ ID NO: 940485 - RNA, 19 nt, Artificial Sequence
  Description of Artificial Sequence: Synthetic oligonucleotide
uugagaccuggcagaaguc

SEQ ID NO: 940486 - RNA, 19 nt, Artificial Sequence
  Description of Artificial Sequence: Synthetic oligonucleotide
uucauccggauugggcaag

SEQ ID NO: 940487 - RNA, 19 nt, Artificial Sequence
  Description of Artificial Sequence: Synthetic oligonucleotide
ucacgucugcgcuuuuccu

SEQ ID NO: 940488 - RNA, 19 nt, Artificial Sequence
  Description of Artificial Sequence: Synthetic oligonucleotide
cucgcggucccucuccaag

SEQ ID NO: 940489 - RNA, 19 nt, Artificial Sequence
  Description of Artificial Sequence: Synthetic oligonucleotide
uuucgucuggccuguugaa

SEQ ID NO: 940490 - RNA, 19 nt, Artificial Sequence
  Description of Artificial Sequence: Synthetic oligonucleotide
ucucguucucuuagcuccu

SEQ ID NO: 940491 - RNA, 19 nt, Artificial Sequence
  Description of Artificial Sequence: Synthetic oligonucleotide
acuauccgacucuguucuc

SEQ ID NO: 940492 - RNA, 19 nt, Artificial Sequence
  Description of Artificial Sequence: Synthetic oligonucleotide
cuguugaacucaguauaug

SEQ ID NO: 940493 - RNA, 19 nt, Artificial Sequence
  Description of Artificial Sequence: Synthetic oligonucleotide
caccuuagugagauggaga

SEQ ID NO: 940494 - RNA, 19 nt, Artificial Sequence
  Description of Artificial Sequence: Synthetic oligonucleotide
cagaugggacgacaacuac

SEQ ID NO: 940495 - RNA, 19 nt, Artificial Sequence
  Description of Artificial Sequence: Synthetic oligonucleotide
agggcuuaguacagaaaug

SEQ ID NO: 940496 - RNA, 19 nt, Artificial Sequence
  Description of Artificial Sequence: Synthetic oligonucleotide
agaggucauuuaaagugca

SEQ ID NO: 940497 - RNA, 19 nt, Artificial Sequence
  Description of Artificial Sequence: Synthetic oligonucleotide
cugguauguuuauuugaga

SEQ ID NO: 940498 - RNA, 19 nt, Artificial Sequence
  Description of Artificial Sequence: Synthetic oligonucleotide
uucagaccacuauccgacu

SEQ ID NO: 940499 - RNA, 19 nt, Artificial Sequence
  Description of Artificial Sequence: Synthetic oligonucleotide
uggaagcauucaucugaug

SEQ ID NO: 940500 - RNA, 19 nt, Artificial Sequence
  Description of Artificial Sequence: Synthetic oligonucleotide
agcacuuggagacgacuua

SEQ ID NO: 940501 - RNA, 19 nt, Artificial Sequence
  Description of Artificial Sequence: Synthetic oligonucleotide
agagggucuaaggcauagg

SEQ ID NO: 940502 - RNA, 19 nt, Artificial Sequence
  Description of Artificial Sequence: Synthetic oligonucleotide
guagcacaacacccugcag

SEQ ID NO: 940503 - RNA, 19 nt, Artificial Sequence
  Description of Artificial Sequence: Synthetic oligonucleotide
guacguuguggcaaauuuc

SEQ ID NO: 940504 - RNA, 19 nt, Artificial Sequence
  Description of Artificial Sequence: Synthetic oligonucleotide
uucgucuggccuguugaac

SEQ ID NO: 940505 - RNA, 19 nt, Artificial Sequence
  Description of Artificial Sequence: Synthetic oligonucleotide
cugucuacggcggacuguc

SEQ ID NO: 940506 - RNA, 19 nt, Artificial Sequence
  Description of Artificial Sequence: Synthetic oligonucleotide
aaacagagguauaggugua

SEQ ID NO: 940507 - RNA, 19 nt, Artificial Sequence
  Description of Artificial Sequence: Synthetic oligonucleotide
cguuguggcaaauuuccag

SEQ ID NO: 940508 - RNA, 19 nt, Artificial Sequence
  Description of Artificial Sequence: Synthetic oligonucleotide
uacuuuucgucuggccugu

SEQ ID NO: 940509 - RNA, 19 nt, Artificial Sequence
  Description of Artificial Sequence: Synthetic oligonucleotide
cacuauccgacucuguucu

SEQ ID NO: 940510 - RNA, 19 nt, Artificial Sequence
  Description of Artificial Sequence: Synthetic oligonucleotide
cagcugaugcuagaggguc

SEQ ID NO: 940511 - RNA, 19 nt, Artificial Sequence
  Description of Artificial Sequence: Synthetic oligonucleotide
aaauuacuauacagcgcuu

SEQ ID NO: 940512 - RNA, 19 nt, Artificial Sequence
  Description of Artificial Sequence: Synthetic oligonucleotide
gcucacuguucuuuaagca

SEQ ID NO: 940513 - RNA, 19 nt, Artificial Sequence
  Description of Artificial Sequence: Synthetic oligonucleotide
uacagcacuuggagacgac

SEQ ID NO: 940514 - RNA, 19 nt, Artificial Sequence
  Description of Artificial Sequence: Synthetic oligonucleotide
aagcgcccuucuucuguug

SEQ ID NO: 940515 - RNA, 19 nt, Artificial Sequence
  Description of Artificial Sequence: Synthetic oligonucleotide
gucuacggcggacugucuc

SEQ ID NO: 940516 - RNA, 19 nt, Artificial Sequence
  Description of Artificial Sequence: Synthetic oligonucleotide
guguguccgagagaugcug

SEQ ID NO: 940517 - RNA, 19 nt, Artificial Sequence
  Description of Artificial Sequence: Synthetic oligonucleotide
aagaaggaugggacucgca

SEQ ID NO: 940518 - RNA, 19 nt, Artificial Sequence
  Description of Artificial Sequence: Synthetic oligonucleotide
gguuuaacccaacauuuau

SEQ ID NO: 940519 - RNA, 19 nt, Artificial Sequence
  Description of Artificial Sequence: Synthetic oligonucleotide
cuuuuacaccuuagugaga

SEQ ID NO: 940520 - RNA, 19 nt, Artificial Sequence
  Description of Artificial Sequence: Synthetic oligonucleotide
ccuuuuaggagacacugaa

SEQ ID NO: 940521 - RNA, 19 nt, Artificial Sequence
  Description of Artificial Sequence: Synthetic oligonucleotide
cucaacccucuccaucuuc

SEQ ID NO: 940522 - RNA, 19 nt, Artificial Sequence
  Description of Artificial Sequence: Synthetic oligonucleotide
gccuguugaacucaguaua

SEQ ID NO: 940523 - RNA, 19 nt, Artificial Sequence
  Description of Artificial Sequence: Synthetic oligonucleotide
agacacucuucuagaaagu

SEQ ID NO: 940524 - RNA, 19 nt, Artificial Sequence
  Description of Artificial Sequence: Synthetic oligonucleotide
ggaggcaaccaaggcaggg

SEQ ID NO: 940525 - RNA, 19 nt, Artificial Sequence
  Description of Artificial Sequence: Synthetic oligonucleotide
aggccaauuuacacccguc

SEQ ID NO: 940526 - RNA, 19 nt, Artificial Sequence
  Description of Artificial Sequence: Synthetic oligonucleotide
uaagcgcccuucuucuguu

SEQ ID NO: 940527 - RNA, 19 nt, Artificial Sequence
  Description of Artificial Sequence: Synthetic oligonucleotide
cagcccguagucucuccag

SEQ ID NO: 940528 - RNA, 19 nt, Artificial Sequence
  Description of Artificial Sequence: Synthetic oligonucleotide
gcauaaauaccagguuagc

SEQ ID NO: 940529 - RNA, 19 nt, Artificial Sequence
  Description of Artificial Sequence: Synthetic oligonucleotide
cuagaaaguucacuggauu

SEQ ID NO: 940530 - RNA, 19 nt, Artificial Sequence
  Description of Artificial Sequence: Synthetic oligonucleotide
aacagucaacagguuugau

SEQ ID NO: 940531 - RNA, 19 nt, Artificial Sequence
  Description of Artificial Sequence: Synthetic oligonucleotide
agccaguacguuguggcaa

SEQ ID NO: 940532 - RNA, 19 nt, Artificial Sequence
  Description of Artificial Sequence: Synthetic oligonucleotide
cuccuugugaguacuuucu

SEQ ID NO: 940533 - RNA, 19 nt, Artificial Sequence
  Description of Artificial Sequence: Synthetic oligonucleotide
uacuccuugugaguacuuu

SEQ ID NO: 940534 - RNA, 19 nt, Artificial Sequence
  Description of Artificial Sequence: Synthetic oligonucleotide
gaggccaauuuacacccgu

SEQ ID NO: 940535 - RNA, 19 nt, Artificial Sequence
  Description of Artificial Sequence: Synthetic oligonucleotide
ucgcggucccucuccaagu

SEQ ID NO: 940536 - RNA, 19 nt, Artificial Sequence
  Description of Artificial Sequence: Synthetic oligonucleotide
agcugaugagaggucauuu

SEQ ID NO: 940537 - RNA, 19 nt, Artificial Sequence
  Description of Artificial Sequence: Synthetic oligonucleotide
ucccgggccucccacucac

SEQ ID NO: 940538 - RNA, 19 nt, Artificial Sequence
  Description of Artificial Sequence: Synthetic oligonucleotide
augggacgacaacuacuga

SEQ ID NO: 940539 - RNA, 19 nt, Artificial Sequence
  Description of Artificial Sequence: Synthetic oligonucleotide
uagguguauccugcccacc

SEQ ID NO: 940540 - RNA, 19 nt, Artificial Sequence
  Description of Artificial Sequence: Synthetic oligonucleotide
cuggguagguccaucccaa

SEQ ID NO: 940541 - RNA, 19 nt, Artificial Sequence
  Description of Artificial Sequence: Synthetic oligonucleotide
acaagagucugaagccagu

SEQ ID NO: 940542 - RNA, 19 nt, Artificial Sequence
  Description of Artificial Sequence: Synthetic oligonucleotide
gcuggguagguccauccca

SEQ ID NO: 940543 - RNA, 19 nt, Artificial Sequence
  Description of Artificial Sequence: Synthetic oligonucleotide
cccucugguacuuuucguc

SEQ ID NO: 940544 - RNA, 19 nt, Artificial Sequence
  Description of Artificial Sequence: Synthetic oligonucleotide
agauggcgaggagaauuca

SEQ ID NO: 940545 - RNA, 19 nt, Artificial Sequence
  Description of Artificial Sequence: Synthetic oligonucleotide
ucauccggauugggcaaga

SEQ ID NO: 940546 - RNA, 19 nt, Artificial Sequence
  Description of Artificial Sequence: Synthetic oligonucleotide
uccugcugucuacggcgga

SEQ ID NO: 940547 - RNA, 19 nt, Artificial Sequence
  Description of Artificial Sequence: Synthetic oligonucleotide
gguaugcuuuuaucucaac

SEQ ID NO: 940548 - RNA, 19 nt, Artificial Sequence
  Description of Artificial Sequence: Synthetic oligonucleotide
gguuucaaagcagggcaca

SEQ ID NO: 940549 - RNA, 19 nt, Artificial Sequence
  Description of Artificial Sequence: Synthetic oligonucleotide
ccguagucucuccagauca

SEQ ID NO: 940550 - RNA, 19 nt, Artificial Sequence
  Description of Artificial Sequence: Synthetic oligonucleotide
ggcuucucguucucuuagc

SEQ ID NO: 940551 - RNA, 19 nt, Artificial Sequence
  Description of Artificial Sequence: Synthetic oligonucleotide
ccacuauccgacucuguuc

SEQ ID NO: 940552 - RNA, 19 nt, Artificial Sequence
  Description of Artificial Sequence: Synthetic oligonucleotide
ucucaacccucuccaucuu

SEQ ID NO: 940553 - RNA, 19 nt, Artificial Sequence
  Description of Artificial Sequence: Synthetic oligonucleotide
ggguagguccaucccaaca

SEQ ID NO: 940554 - RNA, 19 nt, Artificial Sequence
  Description of Artificial Sequence: Synthetic oligonucleotide
aggccucaggaggaaaccu

SEQ ID NO: 940555 - RNA, 19 nt, Artificial Sequence
  Description of Artificial Sequence: Synthetic oligonucleotide
agggucuaaggcauagguu

SEQ ID NO: 940556 - RNA, 19 nt, Artificial Sequence
  Description of Artificial Sequence: Synthetic oligonucleotide
ggggccacccacuuuuaca

SEQ ID NO: 940557 - RNA, 19 nt, Artificial Sequence
  Description of Artificial Sequence: Synthetic oligonucleotide
gguuauggaaggugcagau

SEQ ID NO: 940558 - RNA, 19 nt, Artificial Sequence
  Description of Artificial Sequence: Synthetic oligonucleotide
ugcccaccuuguguggagc

SEQ ID NO: 940559 - RNA, 19 nt, Artificial Sequence
  Description of Artificial Sequence: Synthetic oligonucleotide
gacaacuacugagaugauu

SEQ ID NO: 940560 - RNA, 19 nt, Artificial Sequence
  Description of Artificial Sequence: Synthetic oligonucleotide
ucgcaucagccugguaugu

SEQ ID NO: 940561 - RNA, 19 nt, Artificial Sequence
  Description of Artificial Sequence: Synthetic oligonucleotide
caucagccugguauguuua

SEQ ID NO: 940562 - RNA, 19 nt, Artificial Sequence
  Description of Artificial Sequence: Synthetic oligonucleotide
gcauagguucugugcuucc

SEQ ID NO: 940563 - RNA, 19 nt, Artificial Sequence
  Description of Artificial Sequence: Synthetic oligonucleotide
ggacuuuacaagagucuga

SEQ ID NO: 940564 - RNA, 19 nt, Artificial Sequence
  Description of Artificial Sequence: Synthetic oligonucleotide
gcuuggguuuaacccaaca

SEQ ID NO: 940565 - RNA, 19 nt, Artificial Sequence
  Description of Artificial Sequence: Synthetic oligonucleotide
ggcuuaguacagaaauguc

SEQ ID NO: 940566 - RNA, 19 nt, Artificial Sequence
  Description of Artificial Sequence: Synthetic oligonucleotide
uacagcgcuuggguuuaac

SEQ ID NO: 940567 - RNA, 19 nt, Artificial Sequence
  Description of Artificial Sequence: Synthetic oligonucleotide
acguuguggcaaauuucca

SEQ ID NO: 940568 - RNA, 19 nt, Artificial Sequence
  Description of Artificial Sequence: Synthetic oligonucleotide
agcugaugcuagagggucu

SEQ ID NO: 940569 - RNA, 19 nt, Artificial Sequence
  Description of Artificial Sequence: Synthetic oligonucleotide
guucacuggauuccacaau

SEQ ID NO: 940570 - RNA, 19 nt, Artificial Sequence
  Description of Artificial Sequence: Synthetic oligonucleotide
ccccuuaucuuuguguguc

SEQ ID NO: 940571 - RNA, 19 nt, Artificial Sequence
  Description of Artificial Sequence: Synthetic oligonucleotide
cacucacgcucacgucugc

SEQ ID NO: 940572 - RNA, 19 nt, Artificial Sequence
  Description of Artificial Sequence: Synthetic oligonucleotide
gcgggauguacuccuugug

SEQ ID NO: 940573 - RNA, 19 nt, Artificial Sequence
  Description of Artificial Sequence: Synthetic oligonucleotide
gcauuagaauacuuugcau

SEQ ID NO: 940574 - RNA, 19 nt, Artificial Sequence
  Description of Artificial Sequence: Synthetic oligonucleotide
cuggggcgggauguacucc

SEQ ID NO: 940575 - RNA, 19 nt, Artificial Sequence
  Description of Artificial Sequence: Synthetic oligonucleotide
guggcaguggcaccugccu

SEQ ID NO: 940576 - RNA, 19 nt, Artificial Sequence
  Description of Artificial Sequence: Synthetic oligonucleotide
cagccugguauguuuauuu

SEQ ID NO: 940577 - RNA, 19 nt, Artificial Sequence
  Description of Artificial Sequence: Synthetic oligonucleotide
cacccagaugggacgacaa

SEQ ID NO: 940578 - RNA, 19 nt, Artificial Sequence
  Description of Artificial Sequence: Synthetic oligonucleotide
ggcacaccugaagcagugg

SEQ ID NO: 940579 - RNA, 19 nt, Artificial Sequence
  Description of Artificial Sequence: Synthetic oligonucleotide
uacggcggacugucucuuc

SEQ ID NO: 940580 - RNA, 19 nt, Artificial Sequence
  Description of Artificial Sequence: Synthetic oligonucleotide
cucguucucuuagcuccug

SEQ ID NO: 940581 - RNA, 19 nt, Artificial Sequence
  Description of Artificial Sequence: Synthetic oligonucleotide
ccuuagugagauggagaag

SEQ ID NO: 940582 - RNA, 19 nt, Artificial Sequence
  Description of Artificial Sequence: Synthetic oligonucleotide
agcuggggcgggauguacu

SEQ ID NO: 940583 - RNA, 19 nt, Artificial Sequence
  Description of Artificial Sequence: Synthetic oligonucleotide
ccacucacgcucacgucug

SEQ ID NO: 940584 - RNA, 19 nt, Artificial Sequence
  Description of Artificial Sequence: Synthetic oligonucleotide
agcaugcuaaggagcucgu

SEQ ID NO: 940585 - RNA, 19 nt, Artificial Sequence
  Description of Artificial Sequence: Synthetic oligonucleotide
ccggauugggcaagaagga

SEQ ID NO: 940586 - RNA, 19 nt, Artificial Sequence
  Description of Artificial Sequence: Synthetic oligonucleotide
ccagaugggacgacaacua

SEQ ID NO: 940587 - RNA, 19 nt, Artificial Sequence
  Description of Artificial Sequence: Synthetic oligonucleotide
cugguccucaauguagcua

SEQ ID NO: 940588 - RNA, 19 nt, Artificial Sequence
  Description of Artificial Sequence: Synthetic oligonucleotide
gcuggggcgggauguacuc

SEQ ID NO: 940589 - RNA, 19 nt, Artificial Sequence
  Description of Artificial Sequence: Synthetic oligonucleotide
gucuggccuguugaacuca

SEQ ID NO: 940590 - RNA, 19 nt, Artificial Sequence
  Description of Artificial Sequence: Synthetic oligonucleotide
gagcuggggcgggauguac

SEQ ID NO: 940591 - RNA, 19 nt, Artificial Sequence
  Description of Artificial Sequence: Synthetic oligonucleotide
ccuugugaguacuuucucu

SEQ ID NO: 940592 - RNA, 19 nt, Artificial Sequence
  Description of Artificial Sequence: Synthetic oligonucleotide
cuagagggucuaaggcaua

SEQ ID NO: 940593 - RNA, 19 nt, Artificial Sequence
  Description of Artificial Sequence: Synthetic oligonucleotide
gcuagagggucuaaggcau

SEQ ID NO: 940594 - RNA, 19 nt, Artificial Sequence
  Description of Artificial Sequence: Synthetic oligonucleotide
ggccuguugaacucaguau

SEQ ID NO: 940595 - RNA, 19 nt, Artificial Sequence
  Description of Artificial Sequence: Synthetic oligonucleotide
gggcgggauguacuccuug

SEQ ID NO: 940596 - RNA, 19 nt, Artificial Sequence
  Description of Artificial Sequence: Synthetic oligonucleotide
caaugaccugauugguuau

SEQ ID NO: 940597 - RNA, 19 nt, Artificial Sequence
  Description of Artificial Sequence: Synthetic oligonucleotide
gccaguacguuguggcaaa

SEQ ID NO: 940598 - RNA, 19 nt, Artificial Sequence
  Description of Artificial Sequence: Synthetic oligonucleotide
ggguuuaacccaacauuua

SEQ ID NO: 940599 - RNA, 19 nt, Artificial Sequence
  Description of Artificial Sequence: Synthetic oligonucleotide
cccguagucucuccagauc

SEQ ID NO: 940600 - RNA, 19 nt, Artificial Sequence
  Description of Artificial Sequence: Synthetic oligonucleotide
cguagucucuccagaucac

SEQ ID NO: 940601 - RNA, 19 nt, Artificial Sequence
  Description of Artificial Sequence: Synthetic oligonucleotide
gcacuuggagacgacuuaa

SEQ ID NO: 940602 - RNA, 19 nt, Artificial Sequence
  Description of Artificial Sequence: Synthetic oligonucleotide
ggacugucucuucccuuuc

SEQ ID NO: 940603 - RNA, 19 nt, Artificial Sequence
  Description of Artificial Sequence: Synthetic oligonucleotide
caacuacugagaugauuuu

SEQ ID NO: 940604 - RNA, 19 nt, Artificial Sequence
  Description of Artificial Sequence: Synthetic oligonucleotide
ggacgacaacuacugagau

SEQ ID NO: 940605 - RNA, 19 nt, Artificial Sequence
  Description of Artificial Sequence: Synthetic oligonucleotide
cugauugguuauggaaggu

SEQ ID NO: 940606 - RNA, 19 nt, Artificial Sequence
  Description of Artificial Sequence: Synthetic oligonucleotide
gcaugcuaaggagcucgug

SEQ ID NO: 940607 - RNA, 19 nt, Artificial Sequence
  Description of Artificial Sequence: Synthetic oligonucleotide
acgcucacgucugcgcuuu

SEQ ID NO: 940608 - RNA, 19 nt, Artificial Sequence
  Description of Artificial Sequence: Synthetic oligonucleotide
gucacccagaugggacgac

SEQ ID NO: 940609 - RNA, 19 nt, Artificial Sequence
  Description of Artificial Sequence: Synthetic oligonucleotide
ccugcucaaucagagagcu

SEQ ID NO: 940610 - RNA, 19 nt, Artificial Sequence
  Description of Artificial Sequence: Synthetic oligonucleotide
cgaggagaauucauccgga

SEQ ID NO: 940611 - RNA, 19 nt, Artificial Sequence
  Description of Artificial Sequence: Synthetic oligonucleotide
cuccuaagaucuuggccuu

SEQ ID NO: 940612 - RNA, 19 nt, Artificial Sequence
  Description of Artificial Sequence: Synthetic oligonucleotide
cugaguccaaugaccugau

SEQ ID NO: 940613 - RNA, 19 nt, Artificial Sequence
  Description of Artificial Sequence: Synthetic oligonucleotide
ggugcugggcggggccugg

SEQ ID NO: 940614 - RNA, 19 nt, Artificial Sequence
  Description of Artificial Sequence: Synthetic oligonucleotide
cuguuucugggcagcccgu

SEQ ID NO: 940615 - RNA, 19 nt, Artificial Sequence
  Description of Artificial Sequence: Synthetic oligonucleotide
cgucuggccuguugaacuc

SEQ ID NO: 940616 - RNA, 19 nt, Artificial Sequence
  Description of Artificial Sequence: Synthetic oligonucleotide
cacaaugcugaggccaauu

SEQ ID NO: 940617 - RNA, 19 nt, Artificial Sequence
  Description of Artificial Sequence: Synthetic oligonucleotide
gaccacuauccgacucugu

SEQ ID NO: 940618 - RNA, 19 nt, Artificial Sequence
  Description of Artificial Sequence: Synthetic oligonucleotide
gcgcccuucuucuguugga

SEQ ID NO: 940619 - RNA, 19 nt, Artificial Sequence
  Description of Artificial Sequence: Synthetic oligonucleotide
gcucacgucugcgcuuuuc

SEQ ID NO: 940620 - RNA, 19 nt, Artificial Sequence
  Description of Artificial Sequence: Synthetic oligonucleotide
cugaugcuagagggucuaa

SEQ ID NO: 940621 - RNA, 19 nt, Artificial Sequence
  Description of Artificial Sequence: Synthetic oligonucleotide
cauccggauugggcaagaa

SEQ ID NO: 940622 - RNA, 19 nt, Artificial Sequence
  Description of Artificial Sequence: Synthetic oligonucleotide
gacucgcaucagccuggua

SEQ ID NO: 940623 - RNA, 19 nt, Artificial Sequence
  Description of Artificial Sequence: Synthetic oligonucleotide
gguguauccugcccaccuu

SEQ ID NO: 940624 - RNA, 19 nt, Artificial Sequence
  Description of Artificial Sequence: Synthetic oligonucleotide
gccccuuaucuuugugugu

SEQ ID NO: 940625 - RNA, 19 nt, Artificial Sequence
  Description of Artificial Sequence: Synthetic oligonucleotide
cuggccuguugaacucagu

SEQ ID NO: 940626 - RNA, 19 nt, Artificial Sequence
  Description of Artificial Sequence: Synthetic oligonucleotide
auacagcgcuuggguuuaa

SEQ ID NO: 940627 - RNA, 19 nt, Artificial Sequence
  Description of Artificial Sequence: Synthetic oligonucleotide
gcccguagucucuccagau

SEQ ID NO: 940628 - RNA, 19 nt, Artificial Sequence
  Description of Artificial Sequence: Synthetic oligonucleotide
caguacguuguggcaaauu

SEQ ID NO: 940629 - RNA, 19 nt, Artificial Sequence
  Description of Artificial Sequence: Synthetic oligonucleotide
gcaugcugguaugcuuuua

SEQ ID NO: 940630 - RNA, 19 nt, Artificial Sequence
  Description of Artificial Sequence: Synthetic oligonucleotide
cgcuuggguuuaacccaac

SEQ ID NO: 940631 - RNA, 19 nt, Artificial Sequence
  Description of Artificial Sequence: Synthetic oligonucleotide
cuacggcggacugucucuu

SEQ ID NO: 940632 - RNA, 19 nt, Artificial Sequence
  Description of Artificial Sequence: Synthetic oligonucleotide
caacacccugcagcaugcu

SEQ ID NO: 940633 - RNA, 19 nt, Artificial Sequence
  Description of Artificial Sequence: Synthetic oligonucleotide
ccccucugguacuuuucgu

SEQ ID NO: 940634 - RNA, 19 nt, Artificial Sequence
  Description of Artificial Sequence: Synthetic oligonucleotide
ggacucgcaucagccuggu

SEQ ID NO: 940635 - RNA, 19 nt, Artificial Sequence
  Description of Artificial Sequence: Synthetic oligonucleotide
ccgagagaugcuguuccuu

SEQ ID NO: 940636 - RNA, 19 nt, Artificial Sequence
  Description of Artificial Sequence: Synthetic oligonucleotide
cggauugggcaagaaggau

SEQ ID NO: 940637 - RNA, 19 nt, Artificial Sequence
  Description of Artificial Sequence: Synthetic oligonucleotide
cgggccucccacucacgcu

SEQ ID NO: 940638 - RNA, 19 nt, Artificial Sequence
  Description of Artificial Sequence: Synthetic oligonucleotide
ccaguacguuguggcaaau

SEQ ID NO: 940639 - RNA, 19 nt, Artificial Sequence
  Description of Artificial Sequence: Synthetic oligonucleotide
ggggcgggauguacuccuu

SEQ ID NO: 940640 - RNA, 19 nt, Artificial Sequence
  Description of Artificial Sequence: Synthetic oligonucleotide
cgacaacuacugagaugau

SEQ ID NO: 940641 - RNA, 19 nt, Artificial Sequence
  Description of Artificial Sequence: Synthetic oligonucleotide
cgcucacgucugcgcuuuu

SEQ ID NO: 940642 - RNA, 19 nt, Artificial Sequence
  Description of Artificial Sequence: Synthetic oligonucleotide
aaugccgccguccacauag

SEQ ID NO: 940643 - RNA, 19 nt, Artificial Sequence
  Description of Artificial Sequence: Synthetic oligonucleotide
auuggugcagaagagaccc

SEQ ID NO: 940644 - RNA, 19 nt, Artificial Sequence
  Description of Artificial Sequence: Synthetic oligonucleotide
aauagacaaccacggaugg

SEQ ID NO: 940645 - RNA, 19 nt, Artificial Sequence
  Description of Artificial Sequence: Synthetic oligonucleotide
acugggauaaaagugcugc

SEQ ID NO: 940646 - RNA, 19 nt, Artificial Sequence
  Description of Artificial Sequence: Synthetic oligonucleotide
uguuucguacccaauuggg

SEQ ID NO: 940647 - RNA, 19 nt, Artificial Sequence
  Description of Artificial Sequence: Synthetic oligonucleotide
ucaauagacaaccacggau

SEQ ID NO: 940648 - RNA, 19 nt, Artificial Sequence
  Description of Artificial Sequence: Synthetic oligonucleotide
aguauacugggauaaaagu

SEQ ID NO: 940649 - RNA, 19 nt, Artificial Sequence
  Description of Artificial Sequence: Synthetic oligonucleotide
uguaagggagccaagggac

SEQ ID NO: 940650 - RNA, 19 nt, Artificial Sequence
  Description of Artificial Sequence: Synthetic oligonucleotide
ucugaaacacgagucaggg

SEQ ID NO: 940651 - RNA, 19 nt, Artificial Sequence
  Description of Artificial Sequence: Synthetic oligonucleotide
aacaucguggcuccguauc

SEQ ID NO: 940652 - RNA, 19 nt, Artificial Sequence
  Description of Artificial Sequence: Synthetic oligonucleotide
ugugaugguauucuucagc

SEQ ID NO: 940653 - RNA, 19 nt, Artificial Sequence
  Description of Artificial Sequence: Synthetic oligonucleotide
ucuaaguccgucucuguag

SEQ ID NO: 940654 - RNA, 19 nt, Artificial Sequence
  Description of Artificial Sequence: Synthetic oligonucleotide
uuucguacccaauugggca

SEQ ID NO: 940655 - RNA, 19 nt, Artificial Sequence
  Description of Artificial Sequence: Synthetic oligonucleotide
cauuccacagcauguaagg

SEQ ID NO: 940656 - RNA, 19 nt, Artificial Sequence
  Description of Artificial Sequence: Synthetic oligonucleotide
gguaaaagguuuuacauca

SEQ ID NO: 940657 - RNA, 19 nt, Artificial Sequence
  Description of Artificial Sequence: Synthetic oligonucleotide
gcuaaagugagauaugaug

SEQ ID NO: 940658 - RNA, 19 nt, Artificial Sequence
  Description of Artificial Sequence: Synthetic oligonucleotide
aacaucaggcagccacucc

SEQ ID NO: 940659 - RNA, 19 nt, Artificial Sequence
  Description of Artificial Sequence: Synthetic oligonucleotide
gacaccucaauaauguuug

SEQ ID NO: 940660 - RNA, 19 nt, Artificial Sequence
  Description of Artificial Sequence: Synthetic oligonucleotide
uuugagaggcgguagagau

SEQ ID NO: 940661 - RNA, 19 nt, Artificial Sequence
  Description of Artificial Sequence: Synthetic oligonucleotide
aguaacaugcagaagugag

SEQ ID NO: 940662 - RNA, 19 nt, Artificial Sequence
  Description of Artificial Sequence: Synthetic oligonucleotide
uaacaugcagaagugagga

SEQ ID NO: 940663 - RNA, 19 nt, Artificial Sequence
  Description of Artificial Sequence: Synthetic oligonucleotide
ugagaauggggacacugug

SEQ ID NO: 940664 - RNA, 19 nt, Artificial Sequence
  Description of Artificial Sequence: Synthetic oligonucleotide
aaggaaucuaaguccgucu

SEQ ID NO: 940665 - RNA, 19 nt, Artificial Sequence
  Description of Artificial Sequence: Synthetic oligonucleotide
uguagagggcccaggaacc

SEQ ID NO: 940666 - RNA, 19 nt, Artificial Sequence
  Description of Artificial Sequence: Synthetic oligonucleotide
guauacugggauaaaagug

SEQ ID NO: 940667 - RNA, 19 nt, Artificial Sequence
  Description of Artificial Sequence: Synthetic oligonucleotide
uggagcuaaagugagauau

SEQ ID NO: 940668 - RNA, 19 nt, Artificial Sequence
  Description of Artificial Sequence: Synthetic oligonucleotide
uagaguggcaaguugucug

SEQ ID NO: 940669 - RNA, 19 nt, Artificial Sequence
  Description of Artificial Sequence: Synthetic oligonucleotide
ugguaaccaaggaaauggg

SEQ ID NO: 940670 - RNA, 19 nt, Artificial Sequence
  Description of Artificial Sequence: Synthetic oligonucleotide
uacccaauugggcagugcc

SEQ ID NO: 940671 - RNA, 19 nt, Artificial Sequence
  Description of Artificial Sequence: Synthetic oligonucleotide
aggaaucuaaguccgucuc

SEQ ID NO: 940672 - RNA, 19 nt, Artificial Sequence
  Description of Artificial Sequence: Synthetic oligonucleotide
uccaacaagcggaugguga

SEQ ID NO: 940673 - RNA, 19 nt, Artificial Sequence
  Description of Artificial Sequence: Synthetic oligonucleotide
acaucguggcuccguaucc

SEQ ID NO: 940674 - RNA, 19 nt, Artificial Sequence
  Description of Artificial Sequence: Synthetic oligonucleotide
acgcaaggcaucuggaggg

SEQ ID NO: 940675 - RNA, 19 nt, Artificial Sequence
  Description of Artificial Sequence: Synthetic oligonucleotide
cuccuaaggaaucuaaguc

SEQ ID NO: 940676 - RNA, 19 nt, Artificial Sequence
  Description of Artificial Sequence: Synthetic oligonucleotide
uguacgcauacgcaaggca

SEQ ID NO: 940677 - RNA, 19 nt, Artificial Sequence
  Description of Artificial Sequence: Synthetic oligonucleotide
uguggcuuuuauuguaucu

SEQ ID NO: 940678 - RNA, 19 nt, Artificial Sequence
  Description of Artificial Sequence: Synthetic oligonucleotide
uucaauagacaaccacgga

SEQ ID NO: 940679 - RNA, 19 nt, Artificial Sequence
  Description of Artificial Sequence: Synthetic oligonucleotide
aauaauguuugcaccugcu

SEQ ID NO: 940680 - RNA, 19 nt, Artificial Sequence
  Description of Artificial Sequence: Synthetic oligonucleotide
ucacccaguuuccucuugg

SEQ ID NO: 940681 - RNA, 19 nt, Artificial Sequence
  Description of Artificial Sequence: Synthetic oligonucleotide
uucguacccaauugggcag

SEQ ID NO: 940682 - RNA, 19 nt, Artificial Sequence
  Description of Artificial Sequence: Synthetic oligonucleotide
uggagcggcugguaaaagg

SEQ ID NO: 940683 - RNA, 19 nt, Artificial Sequence
  Description of Artificial Sequence: Synthetic oligonucleotide
ucaauaauguuugcaccug

SEQ ID NO: 940684 - RNA, 19 nt, Artificial Sequence
  Description of Artificial Sequence: Synthetic oligonucleotide
gaugguucucagcaaggug

SEQ ID NO: 940685 - RNA, 19 nt, Artificial Sequence
  Description of Artificial Sequence: Synthetic oligonucleotide
agaauggggacacugugau

SEQ ID NO: 940686 - RNA, 19 nt, Artificial Sequence
  Description of Artificial Sequence: Synthetic oligonucleotide
uagacaaccacggaugguc

SEQ ID NO: 940687 - RNA, 19 nt, Artificial Sequence
  Description of Artificial Sequence: Synthetic oligonucleotide
gguggcacaagacaguggc

SEQ ID NO: 940688 - RNA, 19 nt, Artificial Sequence
  Description of Artificial Sequence: Synthetic oligonucleotide
gauugcgcagguugaacug

SEQ ID NO: 940689 - RNA, 19 nt, Artificial Sequence
  Description of Artificial Sequence: Synthetic oligonucleotide
agauugcgcagguugaacu

SEQ ID NO: 940690 - RNA, 19 nt, Artificial Sequence
  Description of Artificial Sequence: Synthetic oligonucleotide
ucguccuuggagcuaaagu

SEQ ID NO: 940691 - RNA, 19 nt, Artificial Sequence
  Description of Artificial Sequence: Synthetic oligonucleotide
uagagauugcgcagguuga

SEQ ID NO: 940692 - RNA, 19 nt, Artificial Sequence
  Description of Artificial Sequence: Synthetic oligonucleotide
auacgcaaggcaucuggag

SEQ ID NO: 940693 - RNA, 19 nt, Artificial Sequence
  Description of Artificial Sequence: Synthetic oligonucleotide
uagcgcacuccuuggaggg

SEQ ID NO: 940694 - RNA, 19 nt, Artificial Sequence
  Description of Artificial Sequence: Synthetic oligonucleotide
caauaauguuugcaccugc

SEQ ID NO: 940695 - RNA, 19 nt, Artificial Sequence
  Description of Artificial Sequence: Synthetic oligonucleotide
cugggcucgacgcaguucc

SEQ ID NO: 940696 - RNA, 19 nt, Artificial Sequence
  Description of Artificial Sequence: Synthetic oligonucleotide
auauugguggagcuauccu

SEQ ID NO: 940697 - RNA, 19 nt, Artificial Sequence
  Description of Artificial Sequence: Synthetic oligonucleotide
gguauucuucagcucauag

SEQ ID NO: 940698 - RNA, 19 nt, Artificial Sequence
  Description of Artificial Sequence: Synthetic oligonucleotide
guauccugcgggcuguggg

SEQ ID NO: 940699 - RNA, 19 nt, Artificial Sequence
  Description of Artificial Sequence: Synthetic oligonucleotide
uauagggcaccaucauggc

SEQ ID NO: 940700 - RNA, 19 nt, Artificial Sequence
  Description of Artificial Sequence: Synthetic oligonucleotide
cauuggugcagaagagacc

SEQ ID NO: 940701 - RNA, 19 nt, Artificial Sequence
  Description of Artificial Sequence: Synthetic oligonucleotide
uuggaggguaggaggaaug

SEQ ID NO: 940702 - RNA, 19 nt, Artificial Sequence
  Description of Artificial Sequence: Synthetic oligonucleotide
cagagacugggcucgacgc

SEQ ID NO: 940703 - RNA, 19 nt, Artificial Sequence
  Description of Artificial Sequence: Synthetic oligonucleotide
uaaggaaucuaaguccguc

SEQ ID NO: 940704 - RNA, 19 nt, Artificial Sequence
  Description of Artificial Sequence: Synthetic oligonucleotide
cagaguauagggcaccauc

SEQ ID NO: 940705 - RNA, 19 nt, Artificial Sequence
  Description of Artificial Sequence: Synthetic oligonucleotide
agaguauagggcaccauca

SEQ ID NO: 940706 - RNA, 19 nt, Artificial Sequence
  Description of Artificial Sequence: Synthetic oligonucleotide
auugcgcagguugaacugg

SEQ ID NO: 940707 - RNA, 19 nt, Artificial Sequence
  Description of Artificial Sequence: Synthetic oligonucleotide
cauagcgcacuccuuggag

SEQ ID NO: 940708 - RNA, 19 nt, Artificial Sequence
  Description of Artificial Sequence: Synthetic oligonucleotide
gagcuaaagugagauauga

SEQ ID NO: 940709 - RNA, 19 nt, Artificial Sequence
  Description of Artificial Sequence: Synthetic oligonucleotide
cuaggcguccacuggcacg

SEQ ID NO: 940710 - RNA, 19 nt, Artificial Sequence
  Description of Artificial Sequence: Synthetic oligonucleotide
ucucucggagaaccauggg

SEQ ID NO: 940711 - RNA, 19 nt, Artificial Sequence
  Description of Artificial Sequence: Synthetic oligonucleotide
acuugaaaggcugggagaa

SEQ ID NO: 940712 - RNA, 19 nt, Artificial Sequence
  Description of Artificial Sequence: Synthetic oligonucleotide
gaagggcgcgugcucacgg

SEQ ID NO: 940713 - RNA, 19 nt, Artificial Sequence
  Description of Artificial Sequence: Synthetic oligonucleotide
uacgcauacgcaaggcauc

SEQ ID NO: 940714 - RNA, 19 nt, Artificial Sequence
  Description of Artificial Sequence: Synthetic oligonucleotide
aucugaaacacgagucagg

SEQ ID NO: 940715 - RNA, 19 nt, Artificial Sequence
  Description of Artificial Sequence: Synthetic oligonucleotide
agcaacucggagcuuggcu

SEQ ID NO: 940716 - RNA, 19 nt, Artificial Sequence
  Description of Artificial Sequence: Synthetic oligonucleotide
cuauguccucauuccacag

SEQ ID NO: 940717 - RNA, 19 nt, Artificial Sequence
  Description of Artificial Sequence: Synthetic oligonucleotide
ugccuaggcguccacuggc

SEQ ID NO: 940718 - RNA, 19 nt, Artificial Sequence
  Description of Artificial Sequence: Synthetic oligonucleotide
acaaccacggauggucuuc

SEQ ID NO: 940719 - RNA, 19 nt, Artificial Sequence
  Description of Artificial Sequence: Synthetic oligonucleotide
gaggcggagacgcucugcc

SEQ ID NO: 940720 - RNA, 19 nt, Artificial Sequence
  Description of Artificial Sequence: Synthetic oligonucleotide
uggcaauccgcaggcaagg

SEQ ID NO: 940721 - RNA, 19 nt, Artificial Sequence
  Description of Artificial Sequence: Synthetic oligonucleotide
ucgggaacaucguggcucc

SEQ ID NO: 940722 - RNA, 19 nt, Artificial Sequence
  Description of Artificial Sequence: Synthetic oligonucleotide
gccaaugugguagacgccg

SEQ ID NO: 940723 - RNA, 19 nt, Artificial Sequence
  Description of Artificial Sequence: Synthetic oligonucleotide
uuccuccuaaggaaucuaa

SEQ ID NO: 940724 - RNA, 19 nt, Artificial Sequence
  Description of Artificial Sequence: Synthetic oligonucleotide
ccagcgaacgagauguucc

SEQ ID NO: 940725 - RNA, 19 nt, Artificial Sequence
  Description of Artificial Sequence: Synthetic oligonucleotide
gguguacgcauacgcaagg

SEQ ID NO: 940726 - RNA, 19 nt, Artificial Sequence
  Description of Artificial Sequence: Synthetic oligonucleotide
augaugguucucagcaagg

SEQ ID NO: 940727 - RNA, 19 nt, Artificial Sequence
  Description of Artificial Sequence: Synthetic oligonucleotide
ggcagguguacgcauacgc

SEQ ID NO: 940728 - RNA, 19 nt, Artificial Sequence
  Description of Artificial Sequence: Synthetic oligonucleotide
uuccgggccuccuuggaca

SEQ ID NO: 940729 - RNA, 19 nt, Artificial Sequence
  Description of Artificial Sequence: Synthetic oligonucleotide
cugguaaaagguuuuacau

SEQ ID NO: 940730 - RNA, 19 nt, Artificial Sequence
  Description of Artificial Sequence: Synthetic oligonucleotide
gagagccuuugagaggcgg

SEQ ID NO: 940731 - RNA, 19 nt, Artificial Sequence
  Description of Artificial Sequence: Synthetic oligonucleotide
guagcuugggguccccgcc

SEQ ID NO: 940732 - RNA, 19 nt, Artificial Sequence
  Description of Artificial Sequence: Synthetic oligonucleotide
gugagagguuguuucguac

SEQ ID NO: 940733 - RNA, 19 nt, Artificial Sequence
  Description of Artificial Sequence: Synthetic oligonucleotide
aaacacgagucagggagau

SEQ ID NO: 940734 - RNA, 19 nt, Artificial Sequence
  Description of Artificial Sequence: Synthetic oligonucleotide
auagaguggcaaguugucu

SEQ ID NO: 940735 - RNA, 19 nt, Artificial Sequence
  Description of Artificial Sequence: Synthetic oligonucleotide
cacgcucauggcaauccgc

SEQ ID NO: 940736 - RNA, 19 nt, Artificial Sequence
  Description of Artificial Sequence: Synthetic oligonucleotide
aguccgucucuguagcccu

SEQ ID NO: 940737 - RNA, 19 nt, Artificial Sequence
  Description of Artificial Sequence: Synthetic oligonucleotide
gacacugugaugguauucu

SEQ ID NO: 940738 - RNA, 19 nt, Artificial Sequence
  Description of Artificial Sequence: Synthetic oligonucleotide
gagguuguuucguacccaa

SEQ ID NO: 940739 - RNA, 19 nt, Artificial Sequence
  Description of Artificial Sequence: Synthetic oligonucleotide
gaauggggacacugugaug

SEQ ID NO: 940740 - RNA, 19 nt, Artificial Sequence
  Description of Artificial Sequence: Synthetic oligonucleotide
cugugaugguauucuucag

SEQ ID NO: 940741 - RNA, 19 nt, Artificial Sequence
  Description of Artificial Sequence: Synthetic oligonucleotide
agugagagguuguuucgua

SEQ ID NO: 940742 - RNA, 19 nt, Artificial Sequence
  Description of Artificial Sequence: Synthetic oligonucleotide
caauccgcaggcaaggucu

SEQ ID NO: 940743 - RNA, 19 nt, Artificial Sequence
  Description of Artificial Sequence: Synthetic oligonucleotide
ggagguuacuccucauccc

SEQ ID NO: 940744 - RNA, 19 nt, Artificial Sequence
  Description of Artificial Sequence: Synthetic oligonucleotide
gaagcucauggauauuggu

SEQ ID NO: 940745 - RNA, 19 nt, Artificial Sequence
  Description of Artificial Sequence: Synthetic oligonucleotide
caaugugguagacgccgag

SEQ ID NO: 940746 - RNA, 19 nt, Artificial Sequence
  Description of Artificial Sequence: Synthetic oligonucleotide
cucgccugagaauggggac

SEQ ID NO: 940747 - RNA, 19 nt, Artificial Sequence
  Description of Artificial Sequence: Synthetic oligonucleotide
agguguacgcauacgcaag

SEQ ID NO: 940748 - RNA, 19 nt, Artificial Sequence
  Description of Artificial Sequence: Synthetic oligonucleotide
aucagaggcaugaguaaca

SEQ ID NO: 940749 - RNA, 19 nt, Artificial Sequence
  Description of Artificial Sequence: Synthetic oligonucleotide
ggcccuauguccucauucc

SEQ ID NO: 940750 - RNA, 19 nt, Artificial Sequence
  Description of Artificial Sequence: Synthetic oligonucleotide
cacuguagguggcacaaga

SEQ ID NO: 940751 - RNA, 19 nt, Artificial Sequence
  Description of Artificial Sequence: Synthetic oligonucleotide
guagaugugcguggcguug

SEQ ID NO: 940752 - RNA, 19 nt, Artificial Sequence
  Description of Artificial Sequence: Synthetic oligonucleotide
cucaggacugacccugcac

SEQ ID NO: 940753 - RNA, 19 nt, Artificial Sequence
  Description of Artificial Sequence: Synthetic oligonucleotide
uguuccacuuggucucccu

SEQ ID NO: 940754 - RNA, 19 nt, Artificial Sequence
  Description of Artificial Sequence: Synthetic oligonucleotide
ccuuaggcuccacacaggc

SEQ ID NO: 940755 - RNA, 19 nt, Artificial Sequence
  Description of Artificial Sequence: Synthetic oligonucleotide
ucgccugagaauggggaca

SEQ ID NO: 940756 - RNA, 19 nt, Artificial Sequence
  Description of Artificial Sequence: Synthetic oligonucleotide
ugagcgcaccggccgaggc

SEQ ID NO: 940757 - RNA, 19 nt, Artificial Sequence
  Description of Artificial Sequence: Synthetic oligonucleotide
gagcgcaccggccgaggcg

SEQ ID NO: 940758 - RNA, 19 nt, Artificial Sequence
  Description of Artificial Sequence: Synthetic oligonucleotide
agcgaacgagauguuccac

SEQ ID NO: 940759 - RNA, 19 nt, Artificial Sequence
  Description of Artificial Sequence: Synthetic oligonucleotide
aucguggcuccguauccug

SEQ ID NO: 940760 - RNA, 19 nt, Artificial Sequence
  Description of Artificial Sequence: Synthetic oligonucleotide
aguggcaaguugucugaaa

SEQ ID NO: 940761 - RNA, 19 nt, Artificial Sequence
  Description of Artificial Sequence: Synthetic oligonucleotide
cagguguacgcauacgcaa

SEQ ID NO: 940762 - RNA, 19 nt, Artificial Sequence
  Description of Artificial Sequence: Synthetic oligonucleotide
ucucccucgggaacaucgu

SEQ ID NO: 940763 - RNA, 19 nt, Artificial Sequence
  Description of Artificial Sequence: Synthetic oligonucleotide
cauacgcaaggcaucugga

SEQ ID NO: 940764 - RNA, 19 nt, Artificial Sequence
  Description of Artificial Sequence: Synthetic oligonucleotide
auuggagcggcugguaaaa

SEQ ID NO: 940765 - RNA, 19 nt, Artificial Sequence
  Description of Artificial Sequence: Synthetic oligonucleotide
ugugcguggcguuggccac

SEQ ID NO: 940766 - RNA, 19 nt, Artificial Sequence
  Description of Artificial Sequence: Synthetic oligonucleotide
cacucucgccugagaaugg

SEQ ID NO: 940767 - RNA, 19 nt, Artificial Sequence
  Description of Artificial Sequence: Synthetic oligonucleotide
ggaggccacgccaaugugg

SEQ ID NO: 940768 - RNA, 19 nt, Artificial Sequence
  Description of Artificial Sequence: Synthetic oligonucleotide
cacggauggucuucaccag

SEQ ID NO: 940769 - RNA, 19 nt, Artificial Sequence
  Description of Artificial Sequence: Synthetic oligonucleotide
aggaaugaggccacaguau

SEQ ID NO: 940770 - RNA, 19 nt, Artificial Sequence
  Description of Artificial Sequence: Synthetic oligonucleotide
agcuuggcugguaaccaag

SEQ ID NO: 940771 - RNA, 19 nt, Artificial Sequence
  Description of Artificial Sequence: Synthetic oligonucleotide
uugagaggcgguagagauu

SEQ ID NO: 940772 - RNA, 19 nt, Artificial Sequence
  Description of Artificial Sequence: Synthetic oligonucleotide
ggccacgccaaugugguag

SEQ ID NO: 940773 - RNA, 19 nt, Artificial Sequence
  Description of Artificial Sequence: Synthetic oligonucleotide
ggaaugaggccacaguaua

SEQ ID NO: 940774 - RNA, 19 nt, Artificial Sequence
  Description of Artificial Sequence: Synthetic oligonucleotide
ucggagaaccaugggcucu

SEQ ID NO: 940775 - RNA, 19 nt, Artificial Sequence
  Description of Artificial Sequence: Synthetic oligonucleotide
auagacaaccacggauggu

SEQ ID NO: 940776 - RNA, 19 nt, Artificial Sequence
  Description of Artificial Sequence: Synthetic oligonucleotide
acuggcacgcucauggcaa

SEQ ID NO: 940777 - RNA, 19 nt, Artificial Sequence
  Description of Artificial Sequence: Synthetic oligonucleotide
cuggagggcagaugaucac

SEQ ID NO: 940778 - RNA, 19 nt, Artificial Sequence
  Description of Artificial Sequence: Synthetic oligonucleotide
cauccaccggauauccuca

SEQ ID NO: 940779 - RNA, 19 nt, Artificial Sequence
  Description of Artificial Sequence: Synthetic oligonucleotide
uuggagcuaaagugagaua

SEQ ID NO: 940780 - RNA, 19 nt, Artificial Sequence
  Description of Artificial Sequence: Synthetic oligonucleotide
cauggcaauccgcaggcaa

SEQ ID NO: 940781 - RNA, 19 nt, Artificial Sequence
  Description of Artificial Sequence: Synthetic oligonucleotide
cucggagaaccaugggcuc

SEQ ID NO: 940782 - RNA, 19 nt, Artificial Sequence
  Description of Artificial Sequence: Synthetic oligonucleotide
gaagccgcagccagcgaac

SEQ ID NO: 940783 - RNA, 19 nt, Artificial Sequence
  Description of Artificial Sequence: Synthetic oligonucleotide
cuguggcuuuuauuguauc

SEQ ID NO: 940784 - RNA, 19 nt, Artificial Sequence
  Description of Artificial Sequence: Synthetic oligonucleotide
gugggucccgcagucgugg

SEQ ID NO: 940785 - RNA, 19 nt, Artificial Sequence
  Description of Artificial Sequence: Synthetic oligonucleotide
guggcggggucuguggagg

SEQ ID NO: 940786 - RNA, 19 nt, Artificial Sequence
  Description of Artificial Sequence: Synthetic oligonucleotide
uggcggugagcgcaccggc

SEQ ID NO: 940787 - RNA, 19 nt, Artificial Sequence
  Description of Artificial Sequence: Synthetic oligonucleotide
aagggcgcgugcucacgga

SEQ ID NO: 940788 - RNA, 19 nt, Artificial Sequence
  Description of Artificial Sequence: Synthetic oligonucleotide
gaugugcguggcguuggcc

SEQ ID NO: 940789 - RNA, 19 nt, Artificial Sequence
  Description of Artificial Sequence: Synthetic oligonucleotide
auccaccggauauccucag

SEQ ID NO: 940790 - RNA, 19 nt, Artificial Sequence
  Description of Artificial Sequence: Synthetic oligonucleotide
ucgugguagcuuggggucc

SEQ ID NO: 940791 - RNA, 19 nt, Artificial Sequence
  Description of Artificial Sequence: Synthetic oligonucleotide
agggcgcgugcucacggag

SEQ ID NO: 940792 - RNA, 19 nt, Artificial Sequence
  Description of Artificial Sequence: Synthetic oligonucleotide
uggacaccucaauaauguu

SEQ ID NO: 940793 - RNA, 19 nt, Artificial Sequence
  Description of Artificial Sequence: Synthetic oligonucleotide
agagguuguuucguaccca

SEQ ID NO: 940794 - RNA, 19 nt, Artificial Sequence
  Description of Artificial Sequence: Synthetic oligonucleotide
guguacgcauacgcaaggc

SEQ ID NO: 940795 - RNA, 19 nt, Artificial Sequence
  Description of Artificial Sequence: Synthetic oligonucleotide
ccggauauccucaggaaca

SEQ ID NO: 940796 - RNA, 19 nt, Artificial Sequence
  Description of Artificial Sequence: Synthetic oligonucleotide
gguagcuugggguccccgc

SEQ ID NO: 940797 - RNA, 19 nt, Artificial Sequence
  Description of Artificial Sequence: Synthetic oligonucleotide
acgcucauggcaauccgca

SEQ ID NO: 940798 - RNA, 19 nt, Artificial Sequence
  Description of Artificial Sequence: Synthetic oligonucleotide
ccacggauggucuucacca

SEQ ID NO: 940799 - RNA, 19 nt, Artificial Sequence
  Description of Artificial Sequence: Synthetic oligonucleotide
acgcauacgcaaggcaucu

SEQ ID NO: 940800 - RNA, 19 nt, Artificial Sequence
  Description of Artificial Sequence: Synthetic oligonucleotide
guaggaggaaugaggccac

SEQ ID NO: 940801 - RNA, 19 nt, Artificial Sequence
  Description of Artificial Sequence: Synthetic oligonucleotide
gcacaagacaguggcacag

SEQ ID NO: 940802 - RNA, 19 nt, Artificial Sequence
  Description of Artificial Sequence: Synthetic oligonucleotide
caccucaauaauguuugca

SEQ ID NO: 940803 - RNA, 19 nt, Artificial Sequence
  Description of Artificial Sequence: Synthetic oligonucleotide
guggagcuauccugugggc

SEQ ID NO: 940804 - RNA, 19 nt, Artificial Sequence
  Description of Artificial Sequence: Synthetic oligonucleotide
agcuaaagugagauaugau

SEQ ID NO: 940805 - RNA, 19 nt, Artificial Sequence
  Description of Artificial Sequence: Synthetic oligonucleotide
ggagcuaaagugagauaug

SEQ ID NO: 940806 - RNA, 19 nt, Artificial Sequence
  Description of Artificial Sequence: Synthetic oligonucleotide
cugaaaugccgccguccac

SEQ ID NO: 940807 - RNA, 19 nt, Artificial Sequence
  Description of Artificial Sequence: Synthetic oligonucleotide
cuuugagaggcgguagaga

SEQ ID NO: 940808 - RNA, 19 nt, Artificial Sequence
  Description of Artificial Sequence: Synthetic oligonucleotide
auggauauugguggagcua

SEQ ID NO: 940809 - RNA, 19 nt, Artificial Sequence
  Description of Artificial Sequence: Synthetic oligonucleotide
gcugguaaccaaggaaaug

SEQ ID NO: 940810 - RNA, 19 nt, Artificial Sequence
  Description of Artificial Sequence: Synthetic oligonucleotide
ugguagcuugggguccccg

SEQ ID NO: 940811 - RNA, 19 nt, Artificial Sequence
  Description of Artificial Sequence: Synthetic oligonucleotide
ccagugaccagagccgugg

SEQ ID NO: 940812 - RNA, 19 nt, Artificial Sequence
  Description of Artificial Sequence: Synthetic oligonucleotide
guggcggugagcgcaccgg

SEQ ID NO: 940813 - RNA, 19 nt, Artificial Sequence
  Description of Artificial Sequence: Synthetic oligonucleotide
cucacggaggcaggaggcc

SEQ ID NO: 940814 - RNA, 19 nt, Artificial Sequence
  Description of Artificial Sequence: Synthetic oligonucleotide
guaagggagccaagggaca

SEQ ID NO: 940815 - RNA, 19 nt, Artificial Sequence
  Description of Artificial Sequence: Synthetic oligonucleotide
gcggugagcgcaccggccg

SEQ ID NO: 940816 - RNA, 19 nt, Artificial Sequence
  Description of Artificial Sequence: Synthetic oligonucleotide
uccgucucuguagcccugc

SEQ ID NO: 940817 - RNA, 19 nt, Artificial Sequence
  Description of Artificial Sequence: Synthetic oligonucleotide
cagcgaacgagauguucca

SEQ ID NO: 940818 - RNA, 19 nt, Artificial Sequence
  Description of Artificial Sequence: Synthetic oligonucleotide
uccguauccugcgggcugu

SEQ ID NO: 940819 - RNA, 19 nt, Artificial Sequence
  Description of Artificial Sequence: Synthetic oligonucleotide
agacaaccacggauggucu

SEQ ID NO: 940820 - RNA, 19 nt, Artificial Sequence
  Description of Artificial Sequence: Synthetic oligonucleotide
cauuagccuggaugagcuc

SEQ ID NO: 940821 - RNA, 19 nt, Artificial Sequence
  Description of Artificial Sequence: Synthetic oligonucleotide
ccuauguccucauuccaca

SEQ ID NO: 940822 - RNA, 19 nt, Artificial Sequence
  Description of Artificial Sequence: Synthetic oligonucleotide
gaaggguguagagggccca

SEQ ID NO: 940823 - RNA, 19 nt, Artificial Sequence
  Description of Artificial Sequence: Synthetic oligonucleotide
agcauguaagggagccaag

SEQ ID NO: 940824 - RNA, 19 nt, Artificial Sequence
  Description of Artificial Sequence: Synthetic oligonucleotide
cagcauguaagggagccaa

SEQ ID NO: 940825 - RNA, 19 nt, Artificial Sequence
  Description of Artificial Sequence: Synthetic oligonucleotide
agagccuuugagaggcggu

SEQ ID NO: 940826 - RNA, 19 nt, Artificial Sequence
  Description of Artificial Sequence: Synthetic oligonucleotide
cugagaauggggacacugu

SEQ ID NO: 940827 - RNA, 19 nt, Artificial Sequence
  Description of Artificial Sequence: Synthetic oligonucleotide
gggcccuauguccucauuc

SEQ ID NO: 940828 - RNA, 19 nt, Artificial Sequence
  Description of Artificial Sequence: Synthetic oligonucleotide
caccaucauggcagucgcc

SEQ ID NO: 940829 - RNA, 19 nt, Artificial Sequence
  Description of Artificial Sequence: Synthetic oligonucleotide
ucguacccaauugggcagu

SEQ ID NO: 940830 - RNA, 19 nt, Artificial Sequence
  Description of Artificial Sequence: Synthetic oligonucleotide
cucguccuuggagcuaaag

SEQ ID NO: 940831 - RNA, 19 nt, Artificial Sequence
  Description of Artificial Sequence: Synthetic oligonucleotide
ggcacgcucauggcaaucc

SEQ ID NO: 940832 - RNA, 19 nt, Artificial Sequence
  Description of Artificial Sequence: Synthetic oligonucleotide
guacgcauacgcaaggcau

SEQ ID NO: 940833 - RNA, 19 nt, Artificial Sequence
  Description of Artificial Sequence: Synthetic oligonucleotide
cacuggcacgcucauggca

SEQ ID NO: 940834 - RNA, 19 nt, Artificial Sequence
  Description of Artificial Sequence: Synthetic oligonucleotide
gguuguuucguacccaauu

SEQ ID NO: 940835 - RNA, 19 nt, Artificial Sequence
  Description of Artificial Sequence: Synthetic oligonucleotide
ugcgcagguugaacuggau

SEQ ID NO: 940836 - RNA, 19 nt, Artificial Sequence
  Description of Artificial Sequence: Synthetic oligonucleotide
gaggccacgccaauguggu

SEQ ID NO: 940837 - RNA, 19 nt, Artificial Sequence
  Description of Artificial Sequence: Synthetic oligonucleotide
agcggcugguaaaagguuu

SEQ ID NO: 940838 - RNA, 19 nt, Artificial Sequence
  Description of Artificial Sequence: Synthetic oligonucleotide
ggcgccguagaugugcgug

SEQ ID NO: 940839 - RNA, 19 nt, Artificial Sequence
  Description of Artificial Sequence: Synthetic oligonucleotide
uggugacucgaagcucaug

SEQ ID NO: 940840 - RNA, 19 nt, Artificial Sequence
  Description of Artificial Sequence: Synthetic oligonucleotide
ggcgcgugcucacggaggc

SEQ ID NO: 940841 - RNA, 19 nt, Artificial Sequence
  Description of Artificial Sequence: Synthetic oligonucleotide
cagugaccagagccguggc

SEQ ID NO: 940842 - RNA, 19 nt, Artificial Sequence
  Description of Artificial Sequence: Synthetic oligonucleotide
ggaaggguguagagggccc

SEQ ID NO: 940843 - RNA, 19 nt, Artificial Sequence
  Description of Artificial Sequence: Synthetic oligonucleotide
caggggagguuacuccuca

SEQ ID NO: 940844 - RNA, 19 nt, Artificial Sequence
  Description of Artificial Sequence: Synthetic oligonucleotide
gcgccguagaugugcgugg

SEQ ID NO: 940845 - RNA, 19 nt, Artificial Sequence
  Description of Artificial Sequence: Synthetic oligonucleotide
guacccaauugggcagugc

SEQ ID NO: 940846 - RNA, 19 nt, Artificial Sequence
  Description of Artificial Sequence: Synthetic oligonucleotide
aaaugccgccguccacaua

SEQ ID NO: 940847 - RNA, 19 nt, Artificial Sequence
  Description of Artificial Sequence: Synthetic oligonucleotide
ggggagguuacuccucauc

SEQ ID NO: 940848 - RNA, 19 nt, Artificial Sequence
  Description of Artificial Sequence: Synthetic oligonucleotide
gcaauccgcaggcaagguc

SEQ ID NO: 940849 - RNA, 19 nt, Artificial Sequence
  Description of Artificial Sequence: Synthetic oligonucleotide
gcagcugacgcuggcauuc

SEQ ID NO: 940850 - RNA, 19 nt, Artificial Sequence
  Description of Artificial Sequence: Synthetic oligonucleotide
gaaaugccgccguccacau

SEQ ID NO: 940851 - RNA, 19 nt, Artificial Sequence
  Description of Artificial Sequence: Synthetic oligonucleotide
ugcguggcguuggccacca

SEQ ID NO: 940852 - RNA, 19 nt, Artificial Sequence
  Description of Artificial Sequence: Synthetic oligonucleotide
gccguagaugugcguggcg

SEQ ID NO: 940853 - RNA, 19 nt, Artificial Sequence
  Description of Artificial Sequence: Synthetic oligonucleotide
ccuccuaaggaaucuaagu

SEQ ID NO: 940854 - RNA, 19 nt, Artificial Sequence
  Description of Artificial Sequence: Synthetic oligonucleotide
cccaauugggcagugccuc

SEQ ID NO: 940855 - RNA, 19 nt, Artificial Sequence
  Description of Artificial Sequence: Synthetic oligonucleotide
aauccgcaggcaaggucuu

SEQ ID NO: 940856 - RNA, 19 nt, Artificial Sequence
  Description of Artificial Sequence: Synthetic oligonucleotide
gcagguguacgcauacgca

SEQ ID NO: 940857 - RNA, 19 nt, Artificial Sequence
  Description of Artificial Sequence: Synthetic oligonucleotide
acgagauguuccacuuggu

SEQ ID NO: 940858 - RNA, 19 nt, Artificial Sequence
  Description of Artificial Sequence: Synthetic oligonucleotide
ggagcggcugguaaaaggu

SEQ ID NO: 940859 - RNA, 19 nt, Artificial Sequence
  Description of Artificial Sequence: Synthetic oligonucleotide
guagguggcacaagacagu

SEQ ID NO: 940860 - RNA, 19 nt, Artificial Sequence
  Description of Artificial Sequence: Synthetic oligonucleotide
gagcuauccugugggcaga

SEQ ID NO: 940861 - RNA, 19 nt, Artificial Sequence
  Description of Artificial Sequence: Synthetic oligonucleotide
cauuccuccuaaggaaucu

SEQ ID NO: 940862 - RNA, 19 nt, Artificial Sequence
  Description of Artificial Sequence: Synthetic oligonucleotide
ggaacaucguggcuccgua

SEQ ID NO: 940863 - RNA, 19 nt, Artificial Sequence
  Description of Artificial Sequence: Synthetic oligonucleotide
auccgcaggcaaggucuuc

SEQ ID NO: 940864 - RNA, 19 nt, Artificial Sequence
  Description of Artificial Sequence: Synthetic oligonucleotide
gaacaucguggcuccguau

SEQ ID NO: 940865 - RNA, 19 nt, Artificial Sequence
  Description of Artificial Sequence: Synthetic oligonucleotide
ggaagggcgcgugcucacg

SEQ ID NO: 940866 - RNA, 19 nt, Artificial Sequence
  Description of Artificial Sequence: Synthetic oligonucleotide
gccgaggcgccguagaugu

SEQ ID NO: 940867 - RNA, 19 nt, Artificial Sequence
  Description of Artificial Sequence: Synthetic oligonucleotide
gcgaacgagauguuccacu

SEQ ID NO: 940868 - RNA, 19 nt, Artificial Sequence
  Description of Artificial Sequence: Synthetic oligonucleotide
ggacugacccugcacugaa

SEQ ID NO: 940869 - RNA, 19 nt, Artificial Sequence
  Description of Artificial Sequence: Synthetic oligonucleotide
gagccguggcggugagcgc

SEQ ID NO: 940870 - RNA, 19 nt, Artificial Sequence
  Description of Artificial Sequence: Synthetic oligonucleotide
ugggucccgcagucguggu

SEQ ID NO: 940871 - RNA, 19 nt, Artificial Sequence
  Description of Artificial Sequence: Synthetic oligonucleotide
gaguggcaaguugucugaa

SEQ ID NO: 940872 - RNA, 19 nt, Artificial Sequence
  Description of Artificial Sequence: Synthetic oligonucleotide
caaccacggauggucuuca

SEQ ID NO: 940873 - RNA, 19 nt, Artificial Sequence
  Description of Artificial Sequence: Synthetic oligonucleotide
ggacaccucaauaauguuu

SEQ ID NO: 940874 - RNA, 19 nt, Artificial Sequence
  Description of Artificial Sequence: Synthetic oligonucleotide
guggcacaagacaguggca

SEQ ID NO: 940875 - RNA, 19 nt, Artificial Sequence
  Description of Artificial Sequence: Synthetic oligonucleotide
caaggaaauggggaaugau

SEQ ID NO: 940876 - RNA, 19 nt, Artificial Sequence
  Description of Artificial Sequence: Synthetic oligonucleotide
gacaaccacggauggucuu

SEQ ID NO: 940877 - RNA, 19 nt, Artificial Sequence
  Description of Artificial Sequence: Synthetic oligonucleotide
cgaggcgccguagaugugc

SEQ ID NO: 940878 - RNA, 19 nt, Artificial Sequence
  Description of Artificial Sequence: Synthetic oligonucleotide
agguuguuucguacccaau

SEQ ID NO: 940879 - RNA, 19 nt, Artificial Sequence
  Description of Artificial Sequence: Synthetic oligonucleotide
uggcacgcucauggcaauc

SEQ ID NO: 940880 - RNA, 19 nt, Artificial Sequence
  Description of Artificial Sequence: Synthetic oligonucleotide
gcuaugcagggcccuaugu

SEQ ID NO: 940881 - RNA, 19 nt, Artificial Sequence
  Description of Artificial Sequence: Synthetic oligonucleotide
cugugggucccgcagucgu

SEQ ID NO: 940882 - RNA, 19 nt, Artificial Sequence
  Description of Artificial Sequence: Synthetic oligonucleotide
gcugacgcuggcauuccuc

SEQ ID NO: 940883 - RNA, 19 nt, Artificial Sequence
  Description of Artificial Sequence: Synthetic oligonucleotide
gucgccaggcgcacuggca

SEQ ID NO: 940884 - RNA, 19 nt, Artificial Sequence
  Description of Artificial Sequence: Synthetic oligonucleotide
ccuaggcguccacuggcac

SEQ ID NO: 940885 - RNA, 19 nt, Artificial Sequence
  Description of Artificial Sequence: Synthetic oligonucleotide
uggucucccucgggaacau

SEQ ID NO: 940886 - RNA, 19 nt, Artificial Sequence
  Description of Artificial Sequence: Synthetic oligonucleotide
ggaggcggagacgcucugc

SEQ ID NO: 940887 - RNA, 19 nt, Artificial Sequence
  Description of Artificial Sequence: Synthetic oligonucleotide
ggauauugguggagcuauc

SEQ ID NO: 940888 - RNA, 19 nt, Artificial Sequence
  Description of Artificial Sequence: Synthetic oligonucleotide
uggcagucgccaggcgcac

SEQ ID NO: 940889 - RNA, 19 nt, Artificial Sequence
  Description of Artificial Sequence: Synthetic oligonucleotide
aggcgccguagaugugcgu

SEQ ID NO: 940890 - RNA, 19 nt, Artificial Sequence
  Description of Artificial Sequence: Synthetic oligonucleotide
ggccgaggcgccguagaug

SEQ ID NO: 940891 - RNA, 19 nt, Artificial Sequence
  Description of Artificial Sequence: Synthetic oligonucleotide
ccaaugugguagacgccga

SEQ ID NO: 940892 - RNA, 19 nt, Artificial Sequence
  Description of Artificial Sequence: Synthetic oligonucleotide
ggcggugagcgcaccggcc

SEQ ID NO: 940893 - RNA, 19 nt, Artificial Sequence
  Description of Artificial Sequence: Synthetic oligonucleotide
gcggcagaguauagggcac

SEQ ID NO: 940894 - RNA, 19 nt, Artificial Sequence
  Description of Artificial Sequence: Synthetic oligonucleotide
gccacgccaaugugguaga

SEQ ID NO: 940895 - RNA, 19 nt, Artificial Sequence
  Description of Artificial Sequence: Synthetic oligonucleotide
gcguccacuggcacgcuca

SEQ ID NO: 940896 - RNA, 19 nt, Artificial Sequence
  Description of Artificial Sequence: Synthetic oligonucleotide
gugguagcuuggggucccc

SEQ ID NO: 940897 - RNA, 19 nt, Artificial Sequence
  Description of Artificial Sequence: Synthetic oligonucleotide
ucccuaccaggagcagcau

SEQ ID NO: 940898 - RNA, 19 nt, Artificial Sequence
  Description of Artificial Sequence: Synthetic oligonucleotide
ccuuggacaccucaauaau

SEQ ID NO: 940899 - RNA, 19 nt, Artificial Sequence
  Description of Artificial Sequence: Synthetic oligonucleotide
caucguggcuccguauccu

SEQ ID NO: 940900 - RNA, 19 nt, Artificial Sequence
  Description of Artificial Sequence: Synthetic oligonucleotide
cccagugaccagagccgug

SEQ ID NO: 940901 - RNA, 19 nt, Artificial Sequence
  Description of Artificial Sequence: Synthetic oligonucleotide
cguggcggugagcgcaccg

SEQ ID NO: 940902 - RNA, 19 nt, Artificial Sequence
  Description of Artificial Sequence: Synthetic oligonucleotide
cagagccguggcggugagc

SEQ ID NO: 940903 - RNA, 19 nt, Artificial Sequence
  Description of Artificial Sequence: Synthetic oligonucleotide
gagcucguccuuggagcua

SEQ ID NO: 940904 - RNA, 19 nt, Artificial Sequence
  Description of Artificial Sequence: Synthetic oligonucleotide
gccauuccuccuaaggaau

SEQ ID NO: 940905 - RNA, 19 nt, Artificial Sequence
  Description of Artificial Sequence: Synthetic oligonucleotide
ggcguccacuggcacgcuc

SEQ ID NO: 940906 - RNA, 19 nt, Artificial Sequence
  Description of Artificial Sequence: Synthetic oligonucleotide
aggccacgccaauguggua

SEQ ID NO: 940907 - RNA, 19 nt, Artificial Sequence
  Description of Artificial Sequence: Synthetic oligonucleotide
gggaacaucguggcuccgu

SEQ ID NO: 940908 - RNA, 19 nt, Artificial Sequence
  Description of Artificial Sequence: Synthetic oligonucleotide
gccuaggcguccacuggca

SEQ ID NO: 940909 - RNA, 19 nt, Artificial Sequence
  Description of Artificial Sequence: Synthetic oligonucleotide
ccugcgggcuguggguccc

SEQ ID NO: 940910 - RNA, 19 nt, Artificial Sequence
  Description of Artificial Sequence: Synthetic oligonucleotide
cguauccugcgggcugugg

SEQ ID NO: 940911 - RNA, 19 nt, Artificial Sequence
  Description of Artificial Sequence: Synthetic oligonucleotide
gcucuuucauccaccggau

SEQ ID NO: 940912 - RNA, 19 nt, Artificial Sequence
  Description of Artificial Sequence: Synthetic oligonucleotide
gccggcggaggcggagacg

SEQ ID NO: 940913 - RNA, 19 nt, Artificial Sequence
  Description of Artificial Sequence: Synthetic oligonucleotide
ccguagaugugcguggcgu

SEQ ID NO: 940914 - RNA, 19 nt, Artificial Sequence
  Description of Artificial Sequence: Synthetic oligonucleotide
cgccguagaugugcguggc

SEQ ID NO: 940915 - RNA, 19 nt, Artificial Sequence
  Description of Artificial Sequence: Synthetic oligonucleotide
ccacuccaacaagcggaug

SEQ ID NO: 940916 - RNA, 19 nt, Artificial Sequence
  Description of Artificial Sequence: Synthetic oligonucleotide
cguacccaauugggcagug

SEQ ID NO: 940917 - RNA, 19 nt, Artificial Sequence
  Description of Artificial Sequence: Synthetic oligonucleotide
gcgcacuccuuggagggua

SEQ ID NO: 940918 - RNA, 19 nt, Artificial Sequence
  Description of Artificial Sequence: Synthetic oligonucleotide
ccacgccaaugugguagac

SEQ ID NO: 940919 - RNA, 19 nt, Artificial Sequence
  Description of Artificial Sequence: Synthetic oligonucleotide
gggucccgcagucguggua

SEQ ID NO: 940920 - RNA, 19 nt, Artificial Sequence
  Description of Artificial Sequence: Synthetic oligonucleotide
aggcguccacuggcacgcu

SEQ ID NO: 940921 - RNA, 19 nt, Artificial Sequence
  Description of Artificial Sequence: Synthetic oligonucleotide
gcggcugguaaaagguuuu

SEQ ID NO: 940922 - RNA, 19 nt, Artificial Sequence
  Description of Artificial Sequence: Synthetic oligonucleotide
gcgggcugugggucccgca

SEQ ID NO: 940923 - RNA, 19 nt, Artificial Sequence
  Description of Artificial Sequence: Synthetic oligonucleotide
gcagaguauagggcaccau

SEQ ID NO: 940924 - RNA, 19 nt, Artificial Sequence
  Description of Artificial Sequence: Synthetic oligonucleotide
cgcauacgcaaggcaucug

SEQ ID NO: 940925 - RNA, 19 nt, Artificial Sequence
  Description of Artificial Sequence: Synthetic oligonucleotide
ccgaggcgccguagaugug

SEQ ID NO: 940926 - RNA, 19 nt, Artificial Sequence
  Description of Artificial Sequence: Synthetic oligonucleotide
cccucccuaccaggagcag

SEQ ID NO: 940927 - RNA, 19 nt, Artificial Sequence
  Description of Artificial Sequence: Synthetic oligonucleotide
cagggcccuauguccucau

SEQ ID NO: 940928 - RNA, 19 nt, Artificial Sequence
  Description of Artificial Sequence: Synthetic oligonucleotide
gcggaggcggagacgcucu

SEQ ID NO: 940929 - RNA, 19 nt, Artificial Sequence
  Description of Artificial Sequence: Synthetic oligonucleotide
cguagaugugcguggcguu

SEQ ID NO: 940930 - RNA, 19 nt, Artificial Sequence
  Description of Artificial Sequence: Synthetic oligonucleotide
ccguauccugcgggcugug

SEQ ID NO: 940931 - RNA, 19 nt, Artificial Sequence
  Description of Artificial Sequence: Synthetic oligonucleotide
cgggaacaucguggcuccg

SEQ ID NO: 940932 - RNA, 19 nt, Artificial Sequence
  Description of Artificial Sequence: Synthetic oligonucleotide
cggaggcggagacgcucug

SEQ ID NO: 940933 - RNA, 19 nt, Artificial Sequence
  Description of Artificial Sequence: Synthetic oligonucleotide
gcguggcguuggccaccag

SEQ ID NO: 940934 - RNA, 19 nt, Artificial Sequence
  Description of Artificial Sequence: Synthetic oligonucleotide
cggugagcgcaccggccga

SEQ ID NO: 940935 - RNA, 19 nt, Artificial Sequence
  Description of Artificial Sequence: Synthetic oligonucleotide
ccguggcggugagcgcacc

SEQ ID NO: 940936 - RNA, 19 nt, Artificial Sequence
  Description of Artificial Sequence: Synthetic oligonucleotide
caccggccgaggcgccgua

SEQ ID NO: 940937 - RNA, 19 nt, Artificial Sequence
  Description of Artificial Sequence: Synthetic oligonucleotide
ccgucucuguagcccugcu

SEQ ID NO: 940938 - RNA, 19 nt, Artificial Sequence
  Description of Artificial Sequence: Synthetic oligonucleotide
gcaccggccgaggcgccgu

SEQ ID NO: 940939 - RNA, 19 nt, Artificial Sequence
  Description of Artificial Sequence: Synthetic oligonucleotide
gcucguccuuggagcuaaa

SEQ ID NO: 940940 - RNA, 19 nt, Artificial Sequence
  Description of Artificial Sequence: Synthetic oligonucleotide
cggccgaggcgccguagau

SEQ ID NO: 940941 - RNA, 19 nt, Artificial Sequence
  Description of Artificial Sequence: Synthetic oligonucleotide
aaaugcugaaauuuaaugc

SEQ ID NO: 940942 - RNA, 19 nt, Artificial Sequence
  Description of Artificial Sequence: Synthetic oligonucleotide
aauuaguuaaagcauauag

SEQ ID NO: 940943 - RNA, 19 nt, Artificial Sequence
  Description of Artificial Sequence: Synthetic oligonucleotide
ugcauaagaaaacaguugg

SEQ ID NO: 940944 - RNA, 19 nt, Artificial Sequence
  Description of Artificial Sequence: Synthetic oligonucleotide
auaguacuaaauuaaauag

SEQ ID NO: 940945 - RNA, 19 nt, Artificial Sequence
  Description of Artificial Sequence: Synthetic oligonucleotide
aaucaauucagccgaauuc

SEQ ID NO: 940946 - RNA, 19 nt, Artificial Sequence
  Description of Artificial Sequence: Synthetic oligonucleotide
uuacauauauuaaauuagg

SEQ ID NO: 940947 - RNA, 19 nt, Artificial Sequence
  Description of Artificial Sequence: Synthetic oligonucleotide
auugauaaccaggagaucc

SEQ ID NO: 940948 - RNA, 19 nt, Artificial Sequence
  Description of Artificial Sequence: Synthetic oligonucleotide
agaucuuugugccacaccc

SEQ ID NO: 940949 - RNA, 19 nt, Artificial Sequence
  Description of Artificial Sequence: Synthetic oligonucleotide
aaagaaucuauuucauggg

SEQ ID NO: 940950 - RNA, 19 nt, Artificial Sequence
  Description of Artificial Sequence: Synthetic oligonucleotide
aggaagaugcaccaaagcc

SEQ ID NO: 940951 - RNA, 19 nt, Artificial Sequence
  Description of Artificial Sequence: Synthetic oligonucleotide
uuaaauuaggcauaaaaua

SEQ ID NO: 940952 - RNA, 19 nt, Artificial Sequence
  Description of Artificial Sequence: Synthetic oligonucleotide
aacaagaggaucauuuucc

SEQ ID NO: 940953 - RNA, 19 nt, Artificial Sequence
  Description of Artificial Sequence: Synthetic oligonucleotide
aagcauauagaaaauauag

SEQ ID NO: 940954 - RNA, 19 nt, Artificial Sequence
  Description of Artificial Sequence: Synthetic oligonucleotide
caaaacgucaaauaccugg

SEQ ID NO: 940955 - RNA, 19 nt, Artificial Sequence
  Description of Artificial Sequence: Synthetic oligonucleotide
ugcaauauaagcaaguaau

SEQ ID NO: 940956 - RNA, 19 nt, Artificial Sequence
  Description of Artificial Sequence: Synthetic oligonucleotide
uguguuuaagucaaagaag

SEQ ID NO: 940957 - RNA, 19 nt, Artificial Sequence
  Description of Artificial Sequence: Synthetic oligonucleotide
agauugaugucccaaauag

SEQ ID NO: 940958 - RNA, 19 nt, Artificial Sequence
  Description of Artificial Sequence: Synthetic oligonucleotide
uucaaaacgucaaauaccu

SEQ ID NO: 940959 - RNA, 19 nt, Artificial Sequence
  Description of Artificial Sequence: Synthetic oligonucleotide
acugacaucaccuaugugu

SEQ ID NO: 940960 - RNA, 19 nt, Artificial Sequence
  Description of Artificial Sequence: Synthetic oligonucleotide
agacaaaucaauucagccg

SEQ ID NO: 940961 - RNA, 19 nt, Artificial Sequence
  Description of Artificial Sequence: Synthetic oligonucleotide
uuaauuaacuucucaacca

SEQ ID NO: 940962 - RNA, 19 nt, Artificial Sequence
  Description of Artificial Sequence: Synthetic oligonucleotide
ucauuuggaaaccucaagc

SEQ ID NO: 940963 - RNA, 19 nt, Artificial Sequence
  Description of Artificial Sequence: Synthetic oligonucleotide
agaaaauuacuuugcuugc

SEQ ID NO: 940964 - RNA, 19 nt, Artificial Sequence
  Description of Artificial Sequence: Synthetic oligonucleotide
uuaguauaaaugcugaaau

SEQ ID NO: 940965 - RNA, 19 nt, Artificial Sequence
  Description of Artificial Sequence: Synthetic oligonucleotide
ucccaaauagauaagcaag

SEQ ID NO: 940966 - RNA, 19 nt, Artificial Sequence
  Description of Artificial Sequence: Synthetic oligonucleotide
uaaaauguggccuccuccg

SEQ ID NO: 940967 - RNA, 19 nt, Artificial Sequence
  Description of Artificial Sequence: Synthetic oligonucleotide
uagguauuaaaaugugucg

SEQ ID NO: 940968 - RNA, 19 nt, Artificial Sequence
  Description of Artificial Sequence: Synthetic oligonucleotide
aggagaagaucuuugugcc

SEQ ID NO: 940969 - RNA, 19 nt, Artificial Sequence
  Description of Artificial Sequence: Synthetic oligonucleotide
uacuucauguggaagauug

SEQ ID NO: 940970 - RNA, 19 nt, Artificial Sequence
  Description of Artificial Sequence: Synthetic oligonucleotide
uguguagugucuucaaggg

SEQ ID NO: 940971 - RNA, 19 nt, Artificial Sequence
  Description of Artificial Sequence: Synthetic oligonucleotide
aaagccaagcauaguaucc

SEQ ID NO: 940972 - RNA, 19 nt, Artificial Sequence
  Description of Artificial Sequence: Synthetic oligonucleotide
aaucuauuucaugggaagc

SEQ ID NO: 940973 - RNA, 19 nt, Artificial Sequence
  Description of Artificial Sequence: Synthetic oligonucleotide
uucagccgaauucaaaacg

SEQ ID NO: 940974 - RNA, 19 nt, Artificial Sequence
  Description of Artificial Sequence: Synthetic oligonucleotide
cacuaaauucccaucagcg

SEQ ID NO: 940975 - RNA, 19 nt, Artificial Sequence
  Description of Artificial Sequence: Synthetic oligonucleotide
auaagaaaacaguugguug

SEQ ID NO: 940976 - RNA, 19 nt, Artificial Sequence
  Description of Artificial Sequence: Synthetic oligonucleotide
aauaccugggcagaagugg

SEQ ID NO: 940977 - RNA, 19 nt, Artificial Sequence
  Description of Artificial Sequence: Synthetic oligonucleotide
aaacaaguaacauccacau

SEQ ID NO: 940978 - RNA, 19 nt, Artificial Sequence
  Description of Artificial Sequence: Synthetic oligonucleotide
auaagcaaguaauggaguc

SEQ ID NO: 940979 - RNA, 19 nt, Artificial Sequence
  Description of Artificial Sequence: Synthetic oligonucleotide
agaggaucauuuuccaacc

SEQ ID NO: 940980 - RNA, 19 nt, Artificial Sequence
  Description of Artificial Sequence: Synthetic oligonucleotide
acacucuuuaauuaacuuc

SEQ ID NO: 940981 - RNA, 19 nt, Artificial Sequence
  Description of Artificial Sequence: Synthetic oligonucleotide
agguauuaaaaugugucgc

SEQ ID NO: 940982 - RNA, 19 nt, Artificial Sequence
  Description of Artificial Sequence: Synthetic oligonucleotide
uuaucuucauaaugcauag

SEQ ID NO: 940983 - RNA, 19 nt, Artificial Sequence
  Description of Artificial Sequence: Synthetic oligonucleotide
ccuacuaucaguaacuucc

SEQ ID NO: 940984 - RNA, 19 nt, Artificial Sequence
  Description of Artificial Sequence: Synthetic oligonucleotide
auguguagugucuucaagg

SEQ ID NO: 940985 - RNA, 19 nt, Artificial Sequence
  Description of Artificial Sequence: Synthetic oligonucleotide
gaaucuauuucaugggaag

SEQ ID NO: 940986 - RNA, 19 nt, Artificial Sequence
  Description of Artificial Sequence: Synthetic oligonucleotide
uucagaugaauucauggac

SEQ ID NO: 940987 - RNA, 19 nt, Artificial Sequence
  Description of Artificial Sequence: Synthetic oligonucleotide
auaacuguaucuuucugug

SEQ ID NO: 940988 - RNA, 19 nt, Artificial Sequence
  Description of Artificial Sequence: Synthetic oligonucleotide
gacaaaucaauucagccga

SEQ ID NO: 940989 - RNA, 19 nt, Artificial Sequence
  Description of Artificial Sequence: Synthetic oligonucleotide
uuuggaaaccucaagcccu

SEQ ID NO: 940990 - RNA, 19 nt, Artificial Sequence
  Description of Artificial Sequence: Synthetic oligonucleotide
acuaaauucccaucagcgg

SEQ ID NO: 940991 - RNA, 19 nt, Artificial Sequence
  Description of Artificial Sequence: Synthetic oligonucleotide
guucuuagguauuaaaaug

SEQ ID NO: 940992 - RNA, 19 nt, Artificial Sequence
  Description of Artificial Sequence: Synthetic oligonucleotide
aaacgucaaauaccugggc

SEQ ID NO: 940993 - RNA, 19 nt, Artificial Sequence
  Description of Artificial Sequence: Synthetic oligonucleotide
uuguauugcuaauucauca

SEQ ID NO: 940994 - RNA, 19 nt, Artificial Sequence
  Description of Artificial Sequence: Synthetic oligonucleotide
ugcauagacaaaacaaaca

SEQ ID NO: 940995 - RNA, 19 nt, Artificial Sequence
  Description of Artificial Sequence: Synthetic oligonucleotide
uguucuuagguauuaaaau

SEQ ID NO: 940996 - RNA, 19 nt, Artificial Sequence
  Description of Artificial Sequence: Synthetic oligonucleotide
ucuaugauucuauucccag

SEQ ID NO: 940997 - RNA, 19 nt, Artificial Sequence
  Description of Artificial Sequence: Synthetic oligonucleotide
uaguacuaaauuaaauagu

SEQ ID NO: 940998 - RNA, 19 nt, Artificial Sequence
  Description of Artificial Sequence: Synthetic oligonucleotide
uuuaaugcuuuguagacuu

SEQ ID NO: 940999 - RNA, 19 nt, Artificial Sequence
  Description of Artificial Sequence: Synthetic oligonucleotide
acaaacaugaaugccuuac

SEQ ID NO: 941000 - RNA, 19 nt, Artificial Sequence
  Description of Artificial Sequence: Synthetic oligonucleotide
uuuaguauaaaugcugaaa

SEQ ID NO: 941001 - RNA, 19 nt, Artificial Sequence
  Description of Artificial Sequence: Synthetic oligonucleotide
ucuuagguauuaaaaugug

SEQ ID NO: 941002 - RNA, 19 nt, Artificial Sequence
  Description of Artificial Sequence: Synthetic oligonucleotide
aacgucaaauaccugggca

SEQ ID NO: 941003 - RNA, 19 nt, Artificial Sequence
  Description of Artificial Sequence: Synthetic oligonucleotide
cuaaauuuuguacuucaug

SEQ ID NO: 941004 - RNA, 19 nt, Artificial Sequence
  Description of Artificial Sequence: Synthetic oligonucleotide
uuaacuucucaaccauagg

SEQ ID NO: 941005 - RNA, 19 nt, Artificial Sequence
  Description of Artificial Sequence: Synthetic oligonucleotide
uaucagcuaacucuguucu

SEQ ID NO: 941006 - RNA, 19 nt, Artificial Sequence
  Description of Artificial Sequence: Synthetic oligonucleotide
agagcuuugacccucccug

SEQ ID NO: 941007 - RNA, 19 nt, Artificial Sequence
  Description of Artificial Sequence: Synthetic oligonucleotide
auuggaucuggcaauuucc

SEQ ID NO: 941008 - RNA, 19 nt, Artificial Sequence
  Description of Artificial Sequence: Synthetic oligonucleotide
uuguacuucauguggaaga

SEQ ID NO: 941009 - RNA, 19 nt, Artificial Sequence
  Description of Artificial Sequence: Synthetic oligonucleotide
auaaugcauagacaaaaca

SEQ ID NO: 941010 - RNA, 19 nt, Artificial Sequence
  Description of Artificial Sequence: Synthetic oligonucleotide
aucuuucuguguuuaaguc

SEQ ID NO: 941011 - RNA, 19 nt, Artificial Sequence
  Description of Artificial Sequence: Synthetic oligonucleotide
ucuuuugauuauuccauca

SEQ ID NO: 941012 - RNA, 19 nt, Artificial Sequence
  Description of Artificial Sequence: Synthetic oligonucleotide
aauguucuuagguauuaaa

SEQ ID NO: 941013 - RNA, 19 nt, Artificial Sequence
  Description of Artificial Sequence: Synthetic oligonucleotide
aauggugaaaucacuggag

SEQ ID NO: 941014 - RNA, 19 nt, Artificial Sequence
  Description of Artificial Sequence: Synthetic oligonucleotide
aaugccuuacacauuuuag

SEQ ID NO: 941015 - RNA, 19 nt, Artificial Sequence
  Description of Artificial Sequence: Synthetic oligonucleotide
agcuccuuuacacuuaaug

SEQ ID NO: 941016 - RNA, 19 nt, Artificial Sequence
  Description of Artificial Sequence: Synthetic oligonucleotide
aucaguaacuuccucauaa

SEQ ID NO: 941017 - RNA, 19 nt, Artificial Sequence
  Description of Artificial Sequence: Synthetic oligonucleotide
auucagccgaauucaaaac

SEQ ID NO: 941018 - RNA, 19 nt, Artificial Sequence
  Description of Artificial Sequence: Synthetic oligonucleotide
cauuuuccaacccaagggc

SEQ ID NO: 941019 - RNA, 19 nt, Artificial Sequence
  Description of Artificial Sequence: Synthetic oligonucleotide
aaaauguggccuccuccgg

SEQ ID NO: 941020 - RNA, 19 nt, Artificial Sequence
  Description of Artificial Sequence: Synthetic oligonucleotide
agaugcaccaaagccaagc

SEQ ID NO: 941021 - RNA, 19 nt, Artificial Sequence
  Description of Artificial Sequence: Synthetic oligonucleotide
ucuguguuuaagucaaaga

SEQ ID NO: 941022 - RNA, 19 nt, Artificial Sequence
  Description of Artificial Sequence: Synthetic oligonucleotide
ucucacagaaucacagaag

SEQ ID NO: 941023 - RNA, 19 nt, Artificial Sequence
  Description of Artificial Sequence: Synthetic oligonucleotide
aucaccuauguguaguguc

SEQ ID NO: 941024 - RNA, 19 nt, Artificial Sequence
  Description of Artificial Sequence: Synthetic oligonucleotide
acgucgaguggaaagaucc

SEQ ID NO: 941025 - RNA, 19 nt, Artificial Sequence
  Description of Artificial Sequence: Synthetic oligonucleotide
aauaggacagcuuguguuu

SEQ ID NO: 941026 - RNA, 19 nt, Artificial Sequence
  Description of Artificial Sequence: Synthetic oligonucleotide
ugauucuauucccaguugu

SEQ ID NO: 941027 - RNA, 19 nt, Artificial Sequence
  Description of Artificial Sequence: Synthetic oligonucleotide
ugaaggcugcauaagaaaa

SEQ ID NO: 941028 - RNA, 19 nt, Artificial Sequence
  Description of Artificial Sequence: Synthetic oligonucleotide
uaucuuucuguguuuaagu

SEQ ID NO: 941029 - RNA, 19 nt, Artificial Sequence
  Description of Artificial Sequence: Synthetic oligonucleotide
uucccaguuguccaaaugu

SEQ ID NO: 941030 - RNA, 19 nt, Artificial Sequence
  Description of Artificial Sequence: Synthetic oligonucleotide
agaauagacauacacuuuu

SEQ ID NO: 941031 - RNA, 19 nt, Artificial Sequence
  Description of Artificial Sequence: Synthetic oligonucleotide
uucugaauggugaaaucac

SEQ ID NO: 941032 - RNA, 19 nt, Artificial Sequence
  Description of Artificial Sequence: Synthetic oligonucleotide
ucuacugccaccgcuauga

SEQ ID NO: 941033 - RNA, 19 nt, Artificial Sequence
  Description of Artificial Sequence: Synthetic oligonucleotide
aggaguaaaauguggccuc

SEQ ID NO: 941034 - RNA, 19 nt, Artificial Sequence
  Description of Artificial Sequence: Synthetic oligonucleotide
gauguuagaaucgcugaag

SEQ ID NO: 941035 - RNA, 19 nt, Artificial Sequence
  Description of Artificial Sequence: Synthetic oligonucleotide
aauugugccguggccaugg

SEQ ID NO: 941036 - RNA, 19 nt, Artificial Sequence
  Description of Artificial Sequence: Synthetic oligonucleotide
acaauaauguucuuaggua

SEQ ID NO: 941037 - RNA, 19 nt, Artificial Sequence
  Description of Artificial Sequence: Synthetic oligonucleotide
uuucaugggaagcugccca

SEQ ID NO: 941038 - RNA, 19 nt, Artificial Sequence
  Description of Artificial Sequence: Synthetic oligonucleotide
caaccauaggccauggagc

SEQ ID NO: 941039 - RNA, 19 nt, Artificial Sequence
  Description of Artificial Sequence: Synthetic oligonucleotide
uguagacuucuuuugauua

SEQ ID NO: 941040 - RNA, 19 nt, Artificial Sequence
  Description of Artificial Sequence: Synthetic oligonucleotide
uauucuacucugcauaauu

SEQ ID NO: 941041 - RNA, 19 nt, Artificial Sequence
  Description of Artificial Sequence: Synthetic oligonucleotide
ucagccgaauucaaaacgu

SEQ ID NO: 941042 - RNA, 19 nt, Artificial Sequence
  Description of Artificial Sequence: Synthetic oligonucleotide
ugaauucauggacacacuc

SEQ ID NO: 941043 - RNA, 19 nt, Artificial Sequence
  Description of Artificial Sequence: Synthetic oligonucleotide
uaacacgucgaguggaaag

SEQ ID NO: 941044 - RNA, 19 nt, Artificial Sequence
  Description of Artificial Sequence: Synthetic oligonucleotide
aauugcaauauaagcaagu

SEQ ID NO: 941045 - RNA, 19 nt, Artificial Sequence
  Description of Artificial Sequence: Synthetic oligonucleotide
auuaguuaaagcauauaga

SEQ ID NO: 941046 - RNA, 19 nt, Artificial Sequence
  Description of Artificial Sequence: Synthetic oligonucleotide
uaagcaagacuguauuucu

SEQ ID NO: 941047 - RNA, 19 nt, Artificial Sequence
  Description of Artificial Sequence: Synthetic oligonucleotide
ucaacggauguucuuuuca

SEQ ID NO: 941048 - RNA, 19 nt, Artificial Sequence
  Description of Artificial Sequence: Synthetic oligonucleotide
uccuuuaagaagugcacac

SEQ ID NO: 941049 - RNA, 19 nt, Artificial Sequence
  Description of Artificial Sequence: Synthetic oligonucleotide
uguuucgauuccuuguuca

SEQ ID NO: 941050 - RNA, 19 nt, Artificial Sequence
  Description of Artificial Sequence: Synthetic oligonucleotide
auaaccaggagauccccag

SEQ ID NO: 941051 - RNA, 19 nt, Artificial Sequence
  Description of Artificial Sequence: Synthetic oligonucleotide
aaguuaaugaaagaaucua

SEQ ID NO: 941052 - RNA, 19 nt, Artificial Sequence
  Description of Artificial Sequence: Synthetic oligonucleotide
aguaaaauguggccuccuc

SEQ ID NO: 941053 - RNA, 19 nt, Artificial Sequence
  Description of Artificial Sequence: Synthetic oligonucleotide
aacauguuugcugauagua

SEQ ID NO: 941054 - RNA, 19 nt, Artificial Sequence
  Description of Artificial Sequence: Synthetic oligonucleotide
uguuagaaucgcugaaggc

SEQ ID NO: 941055 - RNA, 19 nt, Artificial Sequence
  Description of Artificial Sequence: Synthetic oligonucleotide
uggucuuaucuucaaauau

SEQ ID NO: 941056 - RNA, 19 nt, Artificial Sequence
  Description of Artificial Sequence: Synthetic oligonucleotide
uguauugcuaauucaucaa

SEQ ID NO: 941057 - RNA, 19 nt, Artificial Sequence
  Description of Artificial Sequence: Synthetic oligonucleotide
gaaaacaguugguugguuc

SEQ ID NO: 941058 - RNA, 19 nt, Artificial Sequence
  Description of Artificial Sequence: Synthetic oligonucleotide
ugcaccaaagccaagcaua

SEQ ID NO: 941059 - RNA, 19 nt, Artificial Sequence
  Description of Artificial Sequence: Synthetic oligonucleotide
guaaaauguggccuccucc

SEQ ID NO: 941060 - RNA, 19 nt, Artificial Sequence
  Description of Artificial Sequence: Synthetic oligonucleotide
aagagagccgugucuacug

SEQ ID NO: 941061 - RNA, 19 nt, Artificial Sequence
  Description of Artificial Sequence: Synthetic oligonucleotide
uaguuaaagcauauagaaa

SEQ ID NO: 941062 - RNA, 19 nt, Artificial Sequence
  Description of Artificial Sequence: Synthetic oligonucleotide
acgucaaauaccugggcag

SEQ ID NO: 941063 - RNA, 19 nt, Artificial Sequence
  Description of Artificial Sequence: Synthetic oligonucleotide
aacauccacaucuuagcaa

SEQ ID NO: 941064 - RNA, 19 nt, Artificial Sequence
  Description of Artificial Sequence: Synthetic oligonucleotide
uucuuuaauuggaucuggc

SEQ ID NO: 941065 - RNA, 19 nt, Artificial Sequence
  Description of Artificial Sequence: Synthetic oligonucleotide
uugcaauauaagcaaguaa

SEQ ID NO: 941066 - RNA, 19 nt, Artificial Sequence
  Description of Artificial Sequence: Synthetic oligonucleotide
uuaucagcuaacucuguuc

SEQ ID NO: 941067 - RNA, 19 nt, Artificial Sequence
  Description of Artificial Sequence: Synthetic oligonucleotide
uggagcacagccauauucu

SEQ ID NO: 941068 - RNA, 19 nt, Artificial Sequence
  Description of Artificial Sequence: Synthetic oligonucleotide
augaaugccuuacacauuu

SEQ ID NO: 941069 - RNA, 19 nt, Artificial Sequence
  Description of Artificial Sequence: Synthetic oligonucleotide
uugcugauaguauuuuaca

SEQ ID NO: 941070 - RNA, 19 nt, Artificial Sequence
  Description of Artificial Sequence: Synthetic oligonucleotide
gaauucaaaacgucaaaua

SEQ ID NO: 941071 - RNA, 19 nt, Artificial Sequence
  Description of Artificial Sequence: Synthetic oligonucleotide
cugcauaagaaaacaguug

SEQ ID NO: 941072 - RNA, 19 nt, Artificial Sequence
  Description of Artificial Sequence: Synthetic oligonucleotide
ucauaacuguaucuuucug

SEQ ID NO: 941073 - RNA, 19 nt, Artificial Sequence
  Description of Artificial Sequence: Synthetic oligonucleotide
aucacuaaauucccaucag

SEQ ID NO: 941074 - RNA, 19 nt, Artificial Sequence
  Description of Artificial Sequence: Synthetic oligonucleotide
augauguuagaaucgcuga

SEQ ID NO: 941075 - RNA, 19 nt, Artificial Sequence
  Description of Artificial Sequence: Synthetic oligonucleotide
guugguucuugucucaaug

SEQ ID NO: 941076 - RNA, 19 nt, Artificial Sequence
  Description of Artificial Sequence: Synthetic oligonucleotide
aauagauaagcaagacugu

SEQ ID NO: 941077 - RNA, 19 nt, Artificial Sequence
  Description of Artificial Sequence: Synthetic oligonucleotide
aucaauucagccgaauuca

SEQ ID NO: 941078 - RNA, 19 nt, Artificial Sequence
  Description of Artificial Sequence: Synthetic oligonucleotide
aaaccucaagcccucuaug

SEQ ID NO: 941079 - RNA, 19 nt, Artificial Sequence
  Description of Artificial Sequence: Synthetic oligonucleotide
gaggauuuucuuucaaaca

SEQ ID NO: 941080 - RNA, 19 nt, Artificial Sequence
  Description of Artificial Sequence: Synthetic oligonucleotide
caugugaugugucuuucag

SEQ ID NO: 941081 - RNA, 19 nt, Artificial Sequence
  Description of Artificial Sequence: Synthetic oligonucleotide
augccuuacacauuuuagu

SEQ ID NO: 941082 - RNA, 19 nt, Artificial Sequence
  Description of Artificial Sequence: Synthetic oligonucleotide
aaaucacuggagaaggaga

SEQ ID NO: 941083 - RNA, 19 nt, Artificial Sequence
  Description of Artificial Sequence: Synthetic oligonucleotide
accgcuaugauguuagaau

SEQ ID NO: 941084 - RNA, 19 nt, Artificial Sequence
  Description of Artificial Sequence: Synthetic oligonucleotide
guauccuacuaucaguaac

SEQ ID NO: 941085 - RNA, 19 nt, Artificial Sequence
  Description of Artificial Sequence: Synthetic oligonucleotide
aauucccaucagcgguucc

SEQ ID NO: 941086 - RNA, 19 nt, Artificial Sequence
  Description of Artificial Sequence: Synthetic oligonucleotide
ucuuuaaaacauguuugcu

SEQ ID NO: 941087 - RNA, 19 nt, Artificial Sequence
  Description of Artificial Sequence: Synthetic oligonucleotide
ugugucuuucagaugaauu

SEQ ID NO: 941088 - RNA, 19 nt, Artificial Sequence
  Description of Artificial Sequence: Synthetic oligonucleotide
acuucucaaccauaggcca

SEQ ID NO: 941089 - RNA, 19 nt, Artificial Sequence
  Description of Artificial Sequence: Synthetic oligonucleotide
uucauaaugcauagacaaa

SEQ ID NO: 941090 - RNA, 19 nt, Artificial Sequence
  Description of Artificial Sequence: Synthetic oligonucleotide
ugauguuagaaucgcugaa

SEQ ID NO: 941091 - RNA, 19 nt, Artificial Sequence
  Description of Artificial Sequence: Synthetic oligonucleotide
aaacacucuuuaauuaacu

SEQ ID NO: 941092 - RNA, 19 nt, Artificial Sequence
  Description of Artificial Sequence: Synthetic oligonucleotide
gaaguuguggauggugcgg

SEQ ID NO: 941093 - RNA, 19 nt, Artificial Sequence
  Description of Artificial Sequence: Synthetic oligonucleotide
auuucaugggaagcugccc

SEQ ID NO: 941094 - RNA, 19 nt, Artificial Sequence
  Description of Artificial Sequence: Synthetic oligonucleotide
ugcugauaguauuuuacau

SEQ ID NO: 941095 - RNA, 19 nt, Artificial Sequence
  Description of Artificial Sequence: Synthetic oligonucleotide
ugccuuacacauuuuagua

SEQ ID NO: 941096 - RNA, 19 nt, Artificial Sequence
  Description of Artificial Sequence: Synthetic oligonucleotide
uccgcuuguaccccaaaac

SEQ ID NO: 941097 - RNA, 19 nt, Artificial Sequence
  Description of Artificial Sequence: Synthetic oligonucleotide
ucuaccacgggacuauuuu

SEQ ID NO: 941098 - RNA, 19 nt, Artificial Sequence
  Description of Artificial Sequence: Synthetic oligonucleotide
uggugcggauaacacgucg

SEQ ID NO: 941099 - RNA, 19 nt, Artificial Sequence
  Description of Artificial Sequence: Synthetic oligonucleotide
aaauguggccuccuccggu

SEQ ID NO: 941100 - RNA, 19 nt, Artificial Sequence
  Description of Artificial Sequence: Synthetic oligonucleotide
gagaagaucuuugugccac

SEQ ID NO: 941101 - RNA, 19 nt, Artificial Sequence
  Description of Artificial Sequence: Synthetic oligonucleotide
uguguuucgauuccuuguu

SEQ ID NO: 941102 - RNA, 19 nt, Artificial Sequence
  Description of Artificial Sequence: Synthetic oligonucleotide
cacacagucuauuaauuca

SEQ ID NO: 941103 - RNA, 19 nt, Artificial Sequence
  Description of Artificial Sequence: Synthetic oligonucleotide
ucgcaugagacaaaucaau

SEQ ID NO: 941104 - RNA, 19 nt, Artificial Sequence
  Description of Artificial Sequence: Synthetic oligonucleotide
ucuagucaacggauguucu

SEQ ID NO: 941105 - RNA, 19 nt, Artificial Sequence
  Description of Artificial Sequence: Synthetic oligonucleotide
aaagauccaggaguaaaau

SEQ ID NO: 941106 - RNA, 19 nt, Artificial Sequence
  Description of Artificial Sequence: Synthetic oligonucleotide
ugacccucccugaauagga

SEQ ID NO: 941107 - RNA, 19 nt, Artificial Sequence
  Description of Artificial Sequence: Synthetic oligonucleotide
cuuugugccacacccuccc

SEQ ID NO: 941108 - RNA, 19 nt, Artificial Sequence
  Description of Artificial Sequence: Synthetic oligonucleotide
caagacuguauuucuuuug

SEQ ID NO: 941109 - RNA, 19 nt, Artificial Sequence
  Description of Artificial Sequence: Synthetic oligonucleotide
agagagccgugucuacugc

SEQ ID NO: 941110 - RNA, 19 nt, Artificial Sequence
  Description of Artificial Sequence: Synthetic oligonucleotide
cccucuaugauucuauucc

SEQ ID NO: 941111 - RNA, 19 nt, Artificial Sequence
  Description of Artificial Sequence: Synthetic oligonucleotide
uccucuagucaacggaugu

SEQ ID NO: 941112 - RNA, 19 nt, Artificial Sequence
  Description of Artificial Sequence: Synthetic oligonucleotide
aacacgucgaguggaaaga

SEQ ID NO: 941113 - RNA, 19 nt, Artificial Sequence
  Description of Artificial Sequence: Synthetic oligonucleotide
agauccccagacugugugc

SEQ ID NO: 941114 - RNA, 19 nt, Artificial Sequence
  Description of Artificial Sequence: Synthetic oligonucleotide
ugugugccacacacaaucc

SEQ ID NO: 941115 - RNA, 19 nt, Artificial Sequence
  Description of Artificial Sequence: Synthetic oligonucleotide
uugggcaccaucuguacuc

SEQ ID NO: 941116 - RNA, 19 nt, Artificial Sequence
  Description of Artificial Sequence: Synthetic oligonucleotide
uguccucuagucaacggau

SEQ ID NO: 941117 - RNA, 19 nt, Artificial Sequence
  Description of Artificial Sequence: Synthetic oligonucleotide
gcggauaacacgucgagug

SEQ ID NO: 941118 - RNA, 19 nt, Artificial Sequence
  Description of Artificial Sequence: Synthetic oligonucleotide
uccuaauugugccguggcc

SEQ ID NO: 941119 - RNA, 19 nt, Artificial Sequence
  Description of Artificial Sequence: Synthetic oligonucleotide
aguuaaugaaagaaucuau

SEQ ID NO: 941120 - RNA, 19 nt, Artificial Sequence
  Description of Artificial Sequence: Synthetic oligonucleotide
guuagaaucgcugaaggcu

SEQ ID NO: 941121 - RNA, 19 nt, Artificial Sequence
  Description of Artificial Sequence: Synthetic oligonucleotide
uucuuuugauuauuccauc

SEQ ID NO: 941122 - RNA, 19 nt, Artificial Sequence
  Description of Artificial Sequence: Synthetic oligonucleotide
uggauggugcggauaacac

SEQ ID NO: 941123 - RNA, 19 nt, Artificial Sequence
  Description of Artificial Sequence: Synthetic oligonucleotide
agagucgcacucuugcugu

SEQ ID NO: 941124 - RNA, 19 nt, Artificial Sequence
  Description of Artificial Sequence: Synthetic oligonucleotide
ucagcgguucccaccaaca

SEQ ID NO: 941125 - RNA, 19 nt, Artificial Sequence
  Description of Artificial Sequence: Synthetic oligonucleotide
guagccaccaugcauucca

SEQ ID NO: 941126 - RNA, 19 nt, Artificial Sequence
  Description of Artificial Sequence: Synthetic oligonucleotide
auauaguacuaaauuaaau

SEQ ID NO: 941127 - RNA, 19 nt, Artificial Sequence
  Description of Artificial Sequence: Synthetic oligonucleotide
ucaaaacgucaaauaccug

SEQ ID NO: 941128 - RNA, 19 nt, Artificial Sequence
  Description of Artificial Sequence: Synthetic oligonucleotide
gcauaauucauaguaaaca

SEQ ID NO: 941129 - RNA, 19 nt, Artificial Sequence
  Description of Artificial Sequence: Synthetic oligonucleotide
aaagagagccgugucuacu

SEQ ID NO: 941130 - RNA, 19 nt, Artificial Sequence
  Description of Artificial Sequence: Synthetic oligonucleotide
caaagaaggagagcugccc

SEQ ID NO: 941131 - RNA, 19 nt, Artificial Sequence
  Description of Artificial Sequence: Synthetic oligonucleotide
aaacaaacaugaaugccuu

SEQ ID NO: 941132 - RNA, 19 nt, Artificial Sequence
  Description of Artificial Sequence: Synthetic oligonucleotide
cuguucuuacuucaaugug

SEQ ID NO: 941133 - RNA, 19 nt, Artificial Sequence
  Description of Artificial Sequence: Synthetic oligonucleotide
gguauuaaaaugugucgca

SEQ ID NO: 941134 - RNA, 19 nt, Artificial Sequence
  Description of Artificial Sequence: Synthetic oligonucleotide
uuacuuugcuugcucugcu

SEQ ID NO: 941135 - RNA, 19 nt, Artificial Sequence
  Description of Artificial Sequence: Synthetic oligonucleotide
aucuguacucuuccgcuug

SEQ ID NO: 941136 - RNA, 19 nt, Artificial Sequence
  Description of Artificial Sequence: Synthetic oligonucleotide
gaucauuuuccaacccaag

SEQ ID NO: 941137 - RNA, 19 nt, Artificial Sequence
  Description of Artificial Sequence: Synthetic oligonucleotide
uggcaauaaagagagccgu

SEQ ID NO: 941138 - RNA, 19 nt, Artificial Sequence
  Description of Artificial Sequence: Synthetic oligonucleotide
uaggacagcuuguguuucg

SEQ ID NO: 941139 - RNA, 19 nt, Artificial Sequence
  Description of Artificial Sequence: Synthetic oligonucleotide
ccaucaaauuaguuaaagc

SEQ ID NO: 941140 - RNA, 19 nt, Artificial Sequence
  Description of Artificial Sequence: Synthetic oligonucleotide
cagucuauuaauucacaga

SEQ ID NO: 941141 - RNA, 19 nt, Artificial Sequence
  Description of Artificial Sequence: Synthetic oligonucleotide
cuaaauucccaucagcggu

SEQ ID NO: 941142 - RNA, 19 nt, Artificial Sequence
  Description of Artificial Sequence: Synthetic oligonucleotide
uuguagacuucuuuugauu

SEQ ID NO: 941143 - RNA, 19 nt, Artificial Sequence
  Description of Artificial Sequence: Synthetic oligonucleotide
uugacccucccugaauagg

SEQ ID NO: 941144 - RNA, 19 nt, Artificial Sequence
  Description of Artificial Sequence: Synthetic oligonucleotide
gauggugcggauaacacgu

SEQ ID NO: 941145 - RNA, 19 nt, Artificial Sequence
  Description of Artificial Sequence: Synthetic oligonucleotide
ggauggugcggauaacacg

SEQ ID NO: 941146 - RNA, 19 nt, Artificial Sequence
  Description of Artificial Sequence: Synthetic oligonucleotide
ucuuuuguucuugggcacc

SEQ ID NO: 941147 - RNA, 19 nt, Artificial Sequence
  Description of Artificial Sequence: Synthetic oligonucleotide
uccaaagaauagacauaca

SEQ ID NO: 941148 - RNA, 19 nt, Artificial Sequence
  Description of Artificial Sequence: Synthetic oligonucleotide
acauacacuuuucaaugua

SEQ ID NO: 941149 - RNA, 19 nt, Artificial Sequence
  Description of Artificial Sequence: Synthetic oligonucleotide
gaggaucauuuuccaaccc

SEQ ID NO: 941150 - RNA, 19 nt, Artificial Sequence
  Description of Artificial Sequence: Synthetic oligonucleotide
auguucuuagguauuaaaa

SEQ ID NO: 941151 - RNA, 19 nt, Artificial Sequence
  Description of Artificial Sequence: Synthetic oligonucleotide
gaaagauccaggaguaaaa

SEQ ID NO: 941152 - RNA, 19 nt, Artificial Sequence
  Description of Artificial Sequence: Synthetic oligonucleotide
uuauuccaucaaauuaguu

SEQ ID NO: 941153 - RNA, 19 nt, Artificial Sequence
  Description of Artificial Sequence: Synthetic oligonucleotide
auugcaauauaagcaagua

SEQ ID NO: 941154 - RNA, 19 nt, Artificial Sequence
  Description of Artificial Sequence: Synthetic oligonucleotide
caauaaagagagccguguc

SEQ ID NO: 941155 - RNA, 19 nt, Artificial Sequence
  Description of Artificial Sequence: Synthetic oligonucleotide
gucccaaauagauaagcaa

SEQ ID NO: 941156 - RNA, 19 nt, Artificial Sequence
  Description of Artificial Sequence: Synthetic oligonucleotide
aucgcugaaggcugcauaa

SEQ ID NO: 941157 - RNA, 19 nt, Artificial Sequence
  Description of Artificial Sequence: Synthetic oligonucleotide
agccgugucuacugccacc

SEQ ID NO: 941158 - RNA, 19 nt, Artificial Sequence
  Description of Artificial Sequence: Synthetic oligonucleotide
cccaccaacagaaaauuac

SEQ ID NO: 941159 - RNA, 19 nt, Artificial Sequence
  Description of Artificial Sequence: Synthetic oligonucleotide
auggucuuaucuucaaaua

SEQ ID NO: 941160 - RNA, 19 nt, Artificial Sequence
  Description of Artificial Sequence: Synthetic oligonucleotide
ugacaucaccuauguguag

SEQ ID NO: 941161 - RNA, 19 nt, Artificial Sequence
  Description of Artificial Sequence: Synthetic oligonucleotide
gauccccagacugugugcc

SEQ ID NO: 941162 - RNA, 19 nt, Artificial Sequence
  Description of Artificial Sequence: Synthetic oligonucleotide
uagaaucgcugaaggcugc

SEQ ID NO: 941163 - RNA, 19 nt, Artificial Sequence
  Description of Artificial Sequence: Synthetic oligonucleotide
uaacuguaucuuucugugu

SEQ ID NO: 941164 - RNA, 19 nt, Artificial Sequence
  Description of Artificial Sequence: Synthetic oligonucleotide
aagaaggagagcugcccuu

SEQ ID NO: 941165 - RNA, 19 nt, Artificial Sequence
  Description of Artificial Sequence: Synthetic oligonucleotide
gucgcacucuugcuguugg

SEQ ID NO: 941166 - RNA, 19 nt, Artificial Sequence
  Description of Artificial Sequence: Synthetic oligonucleotide
auaggacagcuuguguuuc

SEQ ID NO: 941167 - RNA, 19 nt, Artificial Sequence
  Description of Artificial Sequence: Synthetic oligonucleotide
gcaugagacaaaucaauuc

SEQ ID NO: 941168 - RNA, 19 nt, Artificial Sequence
  Description of Artificial Sequence: Synthetic oligonucleotide
cacaauccagcucucuuuc

SEQ ID NO: 941169 - RNA, 19 nt, Artificial Sequence
  Description of Artificial Sequence: Synthetic oligonucleotide
agaaucuauuucaugggaa

SEQ ID NO: 941170 - RNA, 19 nt, Artificial Sequence
  Description of Artificial Sequence: Synthetic oligonucleotide
cucuagucaacggauguuc

SEQ ID NO: 941171 - RNA, 19 nt, Artificial Sequence
  Description of Artificial Sequence: Synthetic oligonucleotide
gcaauauaagcaaguaaug

SEQ ID NO: 941172 - RNA, 19 nt, Artificial Sequence
  Description of Artificial Sequence: Synthetic oligonucleotide
cucucacagaaucacagaa

SEQ ID NO: 941173 - RNA, 19 nt, Artificial Sequence
  Description of Artificial Sequence: Synthetic oligonucleotide
uguaccccaaaaccagcau

SEQ ID NO: 941174 - RNA, 19 nt, Artificial Sequence
  Description of Artificial Sequence: Synthetic oligonucleotide
aggcuuccuaauugugccg

SEQ ID NO: 941175 - RNA, 19 nt, Artificial Sequence
  Description of Artificial Sequence: Synthetic oligonucleotide
uccgguuccuauccagaga

SEQ ID NO: 941176 - RNA, 19 nt, Artificial Sequence
  Description of Artificial Sequence: Synthetic oligonucleotide
acacaauccagcucucuuu

SEQ ID NO: 941177 - RNA, 19 nt, Artificial Sequence
  Description of Artificial Sequence: Synthetic oligonucleotide
uuaauuggaucuggcaauu

SEQ ID NO: 941178 - RNA, 19 nt, Artificial Sequence
  Description of Artificial Sequence: Synthetic oligonucleotide
uccuacuaucaguaacuuc

SEQ ID NO: 941179 - RNA, 19 nt, Artificial Sequence
  Description of Artificial Sequence: Synthetic oligonucleotide
ugugucgcaugagacaaau

SEQ ID NO: 941180 - RNA, 19 nt, Artificial Sequence
  Description of Artificial Sequence: Synthetic oligonucleotide
aacaaacaugaaugccuua

SEQ ID NO: 941181 - RNA, 19 nt, Artificial Sequence
  Description of Artificial Sequence: Synthetic oligonucleotide
auuaggcauaaaauauaca

SEQ ID NO: 941182 - RNA, 19 nt, Artificial Sequence
  Description of Artificial Sequence: Synthetic oligonucleotide
gcuaugauguuagaaucgc

SEQ ID NO: 941183 - RNA, 19 nt, Artificial Sequence
  Description of Artificial Sequence: Synthetic oligonucleotide
caaccagagagucgcacuc

SEQ ID NO: 941184 - RNA, 19 nt, Artificial Sequence
  Description of Artificial Sequence: Synthetic oligonucleotide
gagagccgugucuacugcc

SEQ ID NO: 941185 - RNA, 19 nt, Artificial Sequence
  Description of Artificial Sequence: Synthetic oligonucleotide
aguauccuacuaucaguaa

SEQ ID NO: 941186 - RNA, 19 nt, Artificial Sequence
  Description of Artificial Sequence: Synthetic oligonucleotide
cccaguuguccaaaugucg

SEQ ID NO: 941187 - RNA, 19 nt, Artificial Sequence
  Description of Artificial Sequence: Synthetic oligonucleotide
ugggaagcugcccaauauu

SEQ ID NO: 941188 - RNA, 19 nt, Artificial Sequence
  Description of Artificial Sequence: Synthetic oligonucleotide
ucuguacucuuccgcuugu

SEQ ID NO: 941189 - RNA, 19 nt, Artificial Sequence
  Description of Artificial Sequence: Synthetic oligonucleotide
ccaggaguaaaauguggcc

SEQ ID NO: 941190 - RNA, 19 nt, Artificial Sequence
  Description of Artificial Sequence: Synthetic oligonucleotide
cuccgguuccuauccagag

SEQ ID NO: 941191 - RNA, 19 nt, Artificial Sequence
  Description of Artificial Sequence: Synthetic oligonucleotide
ugguguccucuagucaacg

SEQ ID NO: 941192 - RNA, 19 nt, Artificial Sequence
  Description of Artificial Sequence: Synthetic oligonucleotide
gugcggauaacacgucgag

SEQ ID NO: 941193 - RNA, 19 nt, Artificial Sequence
  Description of Artificial Sequence: Synthetic oligonucleotide
uagucaacggauguucuuu

SEQ ID NO: 941194 - RNA, 19 nt, Artificial Sequence
  Description of Artificial Sequence: Synthetic oligonucleotide
gacauacacuuuucaaugu

SEQ ID NO: 941195 - RNA, 19 nt, Artificial Sequence
  Description of Artificial Sequence: Synthetic oligonucleotide
gaagaucuuugugccacac

SEQ ID NO: 941196 - RNA, 19 nt, Artificial Sequence
  Description of Artificial Sequence: Synthetic oligonucleotide
augggaagcugcccaauau

SEQ ID NO: 941197 - RNA, 19 nt, Artificial Sequence
  Description of Artificial Sequence: Synthetic oligonucleotide
guguccucuagucaacgga

SEQ ID NO: 941198 - RNA, 19 nt, Artificial Sequence
  Description of Artificial Sequence: Synthetic oligonucleotide
uuccgcuuguaccccaaaa

SEQ ID NO: 941199 - RNA, 19 nt, Artificial Sequence
  Description of Artificial Sequence: Synthetic oligonucleotide
uacugacaucaccuaugug

SEQ ID NO: 941200 - RNA, 19 nt, Artificial Sequence
  Description of Artificial Sequence: Synthetic oligonucleotide
uaucaguaacuuccucaua

SEQ ID NO: 941201 - RNA, 19 nt, Artificial Sequence
  Description of Artificial Sequence: Synthetic oligonucleotide
agccgaauucaaaacguca

SEQ ID NO: 941202 - RNA, 19 nt, Artificial Sequence
  Description of Artificial Sequence: Synthetic oligonucleotide
agaagaucuuugugccaca

SEQ ID NO: 941203 - RNA, 19 nt, Artificial Sequence
  Description of Artificial Sequence: Synthetic oligonucleotide
gaaaccucaagcccucuau

SEQ ID NO: 941204 - RNA, 19 nt, Artificial Sequence
  Description of Artificial Sequence: Synthetic oligonucleotide
auugugccguggccauggc

SEQ ID NO: 941205 - RNA, 19 nt, Artificial Sequence
  Description of Artificial Sequence: Synthetic oligonucleotide
agagagcuguguucuucug

SEQ ID NO: 941206 - RNA, 19 nt, Artificial Sequence
  Description of Artificial Sequence: Synthetic oligonucleotide
ucuggcaauuucccuugua

SEQ ID NO: 941207 - RNA, 19 nt, Artificial Sequence
  Description of Artificial Sequence: Synthetic oligonucleotide
gauaaccaggagaucccca

SEQ ID NO: 941208 - RNA, 19 nt, Artificial Sequence
  Description of Artificial Sequence: Synthetic oligonucleotide
ugccugguguccucuaguc

SEQ ID NO: 941209 - RNA, 19 nt, Artificial Sequence
  Description of Artificial Sequence: Synthetic oligonucleotide
uuauucuacucugcauaau

SEQ ID NO: 941210 - RNA, 19 nt, Artificial Sequence
  Description of Artificial Sequence: Synthetic oligonucleotide
cuaucaguaacuuccucau

SEQ ID NO: 941211 - RNA, 19 nt, Artificial Sequence
  Description of Artificial Sequence: Synthetic oligonucleotide
cagggguguacugacauca

SEQ ID NO: 941212 - RNA, 19 nt, Artificial Sequence
  Description of Artificial Sequence: Synthetic oligonucleotide
ugucuacugccaccgcuau

SEQ ID NO: 941213 - RNA, 19 nt, Artificial Sequence
  Description of Artificial Sequence: Synthetic oligonucleotide
gauaacacgucgaguggaa

SEQ ID NO: 941214 - RNA, 19 nt, Artificial Sequence
  Description of Artificial Sequence: Synthetic oligonucleotide
agucaacggauguucuuuu

SEQ ID NO: 941215 - RNA, 19 nt, Artificial Sequence
  Description of Artificial Sequence: Synthetic oligonucleotide
cugcuuggcaaaggaauug

SEQ ID NO: 941216 - RNA, 19 nt, Artificial Sequence
  Description of Artificial Sequence: Synthetic oligonucleotide
ggaagauugaugucccaaa

SEQ ID NO: 941217 - RNA, 19 nt, Artificial Sequence
  Description of Artificial Sequence: Synthetic oligonucleotide
ugcggauaacacgucgagu

SEQ ID NO: 941218 - RNA, 19 nt, Artificial Sequence
  Description of Artificial Sequence: Synthetic oligonucleotide
cccaaauagauaagcaaga

SEQ ID NO: 941219 - RNA, 19 nt, Artificial Sequence
  Description of Artificial Sequence: Synthetic oligonucleotide
uuccguuuucuugucccac

SEQ ID NO: 941220 - RNA, 19 nt, Artificial Sequence
  Description of Artificial Sequence: Synthetic oligonucleotide
caagcauaguauccuacua

SEQ ID NO: 941221 - RNA, 19 nt, Artificial Sequence
  Description of Artificial Sequence: Synthetic oligonucleotide
cuauguguagugucuucaa

SEQ ID NO: 941222 - RNA, 19 nt, Artificial Sequence
  Description of Artificial Sequence: Synthetic oligonucleotide
ucgcugaaggcugcauaag

SEQ ID NO: 941223 - RNA, 19 nt, Artificial Sequence
  Description of Artificial Sequence: Synthetic oligonucleotide
aagcccucuaugauucuau

SEQ ID NO: 941224 - RNA, 19 nt, Artificial Sequence
  Description of Artificial Sequence: Synthetic oligonucleotide
guacugacaucaccuaugu

SEQ ID NO: 941225 - RNA, 19 nt, Artificial Sequence
  Description of Artificial Sequence: Synthetic oligonucleotide
uguagccaccaugcauucc

SEQ ID NO: 941226 - RNA, 19 nt, Artificial Sequence
  Description of Artificial Sequence: Synthetic oligonucleotide
aucuuagcaacaacuuaaa

SEQ ID NO: 941227 - RNA, 19 nt, Artificial Sequence
  Description of Artificial Sequence: Synthetic oligonucleotide
ccgcuaugauguuagaauc

SEQ ID NO: 941228 - RNA, 19 nt, Artificial Sequence
  Description of Artificial Sequence: Synthetic oligonucleotide
uugugccguggccauggcu

SEQ ID NO: 941229 - RNA, 19 nt, Artificial Sequence
  Description of Artificial Sequence: Synthetic oligonucleotide
gucaacggauguucuuuuc

SEQ ID NO: 941230 - RNA, 19 nt, Artificial Sequence
  Description of Artificial Sequence: Synthetic oligonucleotide
ugggccuuucuugaggauu

SEQ ID NO: 941231 - RNA, 19 nt, Artificial Sequence
  Description of Artificial Sequence: Synthetic oligonucleotide
caagaggaucauuuuccaa

SEQ ID NO: 941232 - RNA, 19 nt, Artificial Sequence
  Description of Artificial Sequence: Synthetic oligonucleotide
cuaugauucuauucccagu

SEQ ID NO: 941233 - RNA, 19 nt, Artificial Sequence
  Description of Artificial Sequence: Synthetic oligonucleotide
ucuuccgcuuguaccccaa

SEQ ID NO: 941234 - RNA, 19 nt, Artificial Sequence
  Description of Artificial Sequence: Synthetic oligonucleotide
gggguguacugacaucacc

SEQ ID NO: 941235 - RNA, 19 nt, Artificial Sequence
  Description of Artificial Sequence: Synthetic oligonucleotide
auccacaucuuagcaacaa

SEQ ID NO: 941236 - RNA, 19 nt, Artificial Sequence
  Description of Artificial Sequence: Synthetic oligonucleotide
ggaguaaaauguggccucc

SEQ ID NO: 941237 - RNA, 19 nt, Artificial Sequence
  Description of Artificial Sequence: Synthetic oligonucleotide
ugaaugccuuacacauuuu

SEQ ID NO: 941238 - RNA, 19 nt, Artificial Sequence
  Description of Artificial Sequence: Synthetic oligonucleotide
aagaugcaccaaagccaag

SEQ ID NO: 941239 - RNA, 19 nt, Artificial Sequence
  Description of Artificial Sequence: Synthetic oligonucleotide
ugugccucuuugucucauc

SEQ ID NO: 941240 - RNA, 19 nt, Artificial Sequence
  Description of Artificial Sequence: Synthetic oligonucleotide
uucuuacuucaauguguuu

SEQ ID NO: 941241 - RNA, 19 nt, Artificial Sequence
  Description of Artificial Sequence: Synthetic oligonucleotide
gucgcaugagacaaaucaa

SEQ ID NO: 941242 - RNA, 19 nt, Artificial Sequence
  Description of Artificial Sequence: Synthetic oligonucleotide
ucaagcccucuaugauucu

SEQ ID NO: 941243 - RNA, 19 nt, Artificial Sequence
  Description of Artificial Sequence: Synthetic oligonucleotide
gggugugccucuuugucuc

SEQ ID NO: 941244 - RNA, 19 nt, Artificial Sequence
  Description of Artificial Sequence: Synthetic oligonucleotide
auggagucagucaucuuuu

SEQ ID NO: 941245 - RNA, 19 nt, Artificial Sequence
  Description of Artificial Sequence: Synthetic oligonucleotide
auaggccauggagcacagc

SEQ ID NO: 941246 - RNA, 19 nt, Artificial Sequence
  Description of Artificial Sequence: Synthetic oligonucleotide
agagccgugucuacugcca

SEQ ID NO: 941247 - RNA, 19 nt, Artificial Sequence
  Description of Artificial Sequence: Synthetic oligonucleotide
cacaucagggguguacuga

SEQ ID NO: 941248 - RNA, 19 nt, Artificial Sequence
  Description of Artificial Sequence: Synthetic oligonucleotide
cuuuuguucuugggcacca

SEQ ID NO: 941249 - RNA, 19 nt, Artificial Sequence
  Description of Artificial Sequence: Synthetic oligonucleotide
gagccgugucuacugccac

SEQ ID NO: 941250 - RNA, 19 nt, Artificial Sequence
  Description of Artificial Sequence: Synthetic oligonucleotide
ggauaacacgucgagugga

SEQ ID NO: 941251 - RNA, 19 nt, Artificial Sequence
  Description of Artificial Sequence: Synthetic oligonucleotide
aucagcuaacucuguucuu

SEQ ID NO: 941252 - RNA, 19 nt, Artificial Sequence
  Description of Artificial Sequence: Synthetic oligonucleotide
uccccagacugugugccac

SEQ ID NO: 941253 - RNA, 19 nt, Artificial Sequence
  Description of Artificial Sequence: Synthetic oligonucleotide
uaauuggaucuggcaauuu

SEQ ID NO: 941254 - RNA, 19 nt, Artificial Sequence
  Description of Artificial Sequence: Synthetic oligonucleotide
auaacacgucgaguggaaa

SEQ ID NO: 941255 - RNA, 19 nt, Artificial Sequence
  Description of Artificial Sequence: Synthetic oligonucleotide
gcauaguauccuacuauca

SEQ ID NO: 941256 - RNA, 19 nt, Artificial Sequence
  Description of Artificial Sequence: Synthetic oligonucleotide
agucgcacucuugcuguug

SEQ ID NO: 941257 - RNA, 19 nt, Artificial Sequence
  Description of Artificial Sequence: Synthetic oligonucleotide
agaaucgcugaaggcugca

SEQ ID NO: 941258 - RNA, 19 nt, Artificial Sequence
  Description of Artificial Sequence: Synthetic oligonucleotide
ugguugguucuugucucaa

SEQ ID NO: 941259 - RNA, 19 nt, Artificial Sequence
  Description of Artificial Sequence: Synthetic oligonucleotide
gcuaacucuguucuuacuu

SEQ ID NO: 941260 - RNA, 19 nt, Artificial Sequence
  Description of Artificial Sequence: Synthetic oligonucleotide
guucuuacuucaauguguu

SEQ ID NO: 941261 - RNA, 19 nt, Artificial Sequence
  Description of Artificial Sequence: Synthetic oligonucleotide
acacacaauccagcucucu

SEQ ID NO: 941262 - RNA, 19 nt, Artificial Sequence
  Description of Artificial Sequence: Synthetic oligonucleotide
gucuacugccaccgcuaug

SEQ ID NO: 941263 - RNA, 19 nt, Artificial Sequence
  Description of Artificial Sequence: Synthetic oligonucleotide
cuucauguggaagauugau

SEQ ID NO: 941264 - RNA, 19 nt, Artificial Sequence
  Description of Artificial Sequence: Synthetic oligonucleotide
gacccucccugaauaggac

SEQ ID NO: 941265 - RNA, 19 nt, Artificial Sequence
  Description of Artificial Sequence: Synthetic oligonucleotide
agcccucuaugauucuauu

SEQ ID NO: 941266 - RNA, 19 nt, Artificial Sequence
  Description of Artificial Sequence: Synthetic oligonucleotide
gccgaauucaaaacgucaa

SEQ ID NO: 941267 - RNA, 19 nt, Artificial Sequence
  Description of Artificial Sequence: Synthetic oligonucleotide
auggugcggauaacacguc

SEQ ID NO: 941268 - RNA, 19 nt, Artificial Sequence
  Description of Artificial Sequence: Synthetic oligonucleotide
gcccucuaugauucuauuc

SEQ ID NO: 941269 - RNA, 19 nt, Artificial Sequence
  Description of Artificial Sequence: Synthetic oligonucleotide
gcuuuccaaagaauagaca

SEQ ID NO: 941270 - RNA, 19 nt, Artificial Sequence
  Description of Artificial Sequence: Synthetic oligonucleotide
acaaaucaauucagccgaa

SEQ ID NO: 941271 - RNA, 19 nt, Artificial Sequence
  Description of Artificial Sequence: Synthetic oligonucleotide
ggaucuggcaauuucccuu

SEQ ID NO: 941272 - RNA, 19 nt, Artificial Sequence
  Description of Artificial Sequence: Synthetic oligonucleotide
gcugaaggcugcauaagaa

SEQ ID NO: 941273 - RNA, 19 nt, Artificial Sequence
  Description of Artificial Sequence: Synthetic oligonucleotide
caucagggguguacugaca

SEQ ID NO: 941274 - RNA, 19 nt, Artificial Sequence
  Description of Artificial Sequence: Synthetic oligonucleotide
ggugcggauaacacgucga

SEQ ID NO: 941275 - RNA, 19 nt, Artificial Sequence
  Description of Artificial Sequence: Synthetic oligonucleotide
ggcaccaucuguacucuuc

SEQ ID NO: 941276 - RNA, 19 nt, Artificial Sequence
  Description of Artificial Sequence: Synthetic oligonucleotide
cuauccagagagcuguguu

SEQ ID NO: 941277 - RNA, 19 nt, Artificial Sequence
  Description of Artificial Sequence: Synthetic oligonucleotide
gccaagcauaguauccuac

SEQ ID NO: 941278 - RNA, 19 nt, Artificial Sequence
  Description of Artificial Sequence: Synthetic oligonucleotide
gcaaaggaauugcaauaua

SEQ ID NO: 941279 - RNA, 19 nt, Artificial Sequence
  Description of Artificial Sequence: Synthetic oligonucleotide
ccuauguguagugucuuca

SEQ ID NO: 941280 - RNA, 19 nt, Artificial Sequence
  Description of Artificial Sequence: Synthetic oligonucleotide
gugucuacugccaccgcua

SEQ ID NO: 941281 - RNA, 19 nt, Artificial Sequence
  Description of Artificial Sequence: Synthetic oligonucleotide
agcaaguaauggagucagu

SEQ ID NO: 941282 - RNA, 19 nt, Artificial Sequence
  Description of Artificial Sequence: Synthetic oligonucleotide
cuucucaaccauaggccau

SEQ ID NO: 941283 - RNA, 19 nt, Artificial Sequence
  Description of Artificial Sequence: Synthetic oligonucleotide
caccgcuaugauguuagaa

SEQ ID NO: 941284 - RNA, 19 nt, Artificial Sequence
  Description of Artificial Sequence: Synthetic oligonucleotide
acccuccccaugugaugug

SEQ ID NO: 941285 - RNA, 19 nt, Artificial Sequence
  Description of Artificial Sequence: Synthetic oligonucleotide
guuguggauggugcggaua

SEQ ID NO: 941286 - RNA, 19 nt, Artificial Sequence
  Description of Artificial Sequence: Synthetic oligonucleotide
cuagucaacggauguucuu

SEQ ID NO: 941287 - RNA, 19 nt, Artificial Sequence
  Description of Artificial Sequence: Synthetic oligonucleotide
cucaaccauaggccaugga

SEQ ID NO: 941288 - RNA, 19 nt, Artificial Sequence
  Description of Artificial Sequence: Synthetic oligonucleotide
cacacaauccagcucucuu

SEQ ID NO: 941289 - RNA, 19 nt, Artificial Sequence
  Description of Artificial Sequence: Synthetic oligonucleotide
ccaagcauaguauccuacu

SEQ ID NO: 941290 - RNA, 19 nt, Artificial Sequence
  Description of Artificial Sequence: Synthetic oligonucleotide
ugccaccgcuaugauguua

SEQ ID NO: 941291 - RNA, 19 nt, Artificial Sequence
  Description of Artificial Sequence: Synthetic oligonucleotide
gcauaagaaaacaguuggu

SEQ ID NO: 941292 - RNA, 19 nt, Artificial Sequence
  Description of Artificial Sequence: Synthetic oligonucleotide
ccgaauucaaaacgucaaa

SEQ ID NO: 941293 - RNA, 19 nt, Artificial Sequence
  Description of Artificial Sequence: Synthetic oligonucleotide
ggaaaccucaagcccucua

SEQ ID NO: 941294 - RNA, 19 nt, Artificial Sequence
  Description of Artificial Sequence: Synthetic oligonucleotide
cacacccuccccaugugau

SEQ ID NO: 941295 - RNA, 19 nt, Artificial Sequence
  Description of Artificial Sequence: Synthetic oligonucleotide
ccccaaaaccagcaugaca

SEQ ID NO: 941296 - RNA, 19 nt, Artificial Sequence
  Description of Artificial Sequence: Synthetic oligonucleotide
caagcccucuaugauucua

SEQ ID NO: 941297 - RNA, 19 nt, Artificial Sequence
  Description of Artificial Sequence: Synthetic oligonucleotide
gcaagacuguauuucuuuu

SEQ ID NO: 941298 - RNA, 19 nt, Artificial Sequence
  Description of Artificial Sequence: Synthetic oligonucleotide
gccugguguccucuaguca

SEQ ID NO: 941299 - RNA, 19 nt, Artificial Sequence
  Description of Artificial Sequence: Synthetic oligonucleotide
caaaucaauucagccgaau

SEQ ID NO: 941300 - RNA, 19 nt, Artificial Sequence
  Description of Artificial Sequence: Synthetic oligonucleotide
gugucgcaugagacaaauc

SEQ ID NO: 941301 - RNA, 19 nt, Artificial Sequence
  Description of Artificial Sequence: Synthetic oligonucleotide
gaaggagagcugcccuuuu

SEQ ID NO: 941302 - RNA, 19 nt, Artificial Sequence
  Description of Artificial Sequence: Synthetic oligonucleotide
caucaccuauguguagugu

SEQ ID NO: 941303 - RNA, 19 nt, Artificial Sequence
  Description of Artificial Sequence: Synthetic oligonucleotide
ggugugccucuuugucuca

SEQ ID NO: 941304 - RNA, 19 nt, Artificial Sequence
  Description of Artificial Sequence: Synthetic oligonucleotide
gggaagcugcccaauauuu

SEQ ID NO: 941305 - RNA, 19 nt, Artificial Sequence
  Description of Artificial Sequence: Synthetic oligonucleotide
cacccuccccaugugaugu

SEQ ID NO: 941306 - RNA, 19 nt, Artificial Sequence
  Description of Artificial Sequence: Synthetic oligonucleotide
ggcuuccuaauugugccgu

SEQ ID NO: 941307 - RNA, 19 nt, Artificial Sequence
  Description of Artificial Sequence: Synthetic oligonucleotide
caaggaugccugguguccu

SEQ ID NO: 941308 - RNA, 19 nt, Artificial Sequence
  Description of Artificial Sequence: Synthetic oligonucleotide
ccucccugaauaggacagc

SEQ ID NO: 941309 - RNA, 19 nt, Artificial Sequence
  Description of Artificial Sequence: Synthetic oligonucleotide
ccuccgguuccuauccaga

SEQ ID NO: 941310 - RNA, 19 nt, Artificial Sequence
  Description of Artificial Sequence: Synthetic oligonucleotide
cccaugugaugugucuuuc

SEQ ID NO: 941311 - RNA, 19 nt, Artificial Sequence
  Description of Artificial Sequence: Synthetic oligonucleotide
augugucgcaugagacaaa

SEQ ID NO: 941312 - RNA, 19 nt, Artificial Sequence
  Description of Artificial Sequence: Synthetic oligonucleotide
cuuccgcuuguaccccaaa

SEQ ID NO: 941313 - RNA, 19 nt, Artificial Sequence
  Description of Artificial Sequence: Synthetic oligonucleotide
ccaaccagagagucgcacu

SEQ ID NO: 941314 - RNA, 19 nt, Artificial Sequence
  Description of Artificial Sequence: Synthetic oligonucleotide
gguugguucuugucucaau

SEQ ID NO: 941315 - RNA, 19 nt, Artificial Sequence
  Description of Artificial Sequence: Synthetic oligonucleotide
cgguuccuauccagagagc

SEQ ID NO: 941316 - RNA, 19 nt, Artificial Sequence
  Description of Artificial Sequence: Synthetic oligonucleotide
cuguacucuuccgcuugua

SEQ ID NO: 941317 - RNA, 19 nt, Artificial Sequence
  Description of Artificial Sequence: Synthetic oligonucleotide
cgucgaguggaaagaucca

SEQ ID NO: 941318 - RNA, 19 nt, Artificial Sequence
  Description of Artificial Sequence: Synthetic oligonucleotide
gagucgcacucuugcuguu

SEQ ID NO: 941319 - RNA, 19 nt, Artificial Sequence
  Description of Artificial Sequence: Synthetic oligonucleotide
ggacagcuuguguuucgau

SEQ ID NO: 941320 - RNA, 19 nt, Artificial Sequence
  Description of Artificial Sequence: Synthetic oligonucleotide
cgcaugagacaaaucaauu

SEQ ID NO: 941321 - RNA, 19 nt, Artificial Sequence
  Description of Artificial Sequence: Synthetic oligonucleotide
ccgugucuacugccaccgc

SEQ ID NO: 941322 - RNA, 19 nt, Artificial Sequence
  Description of Artificial Sequence: Synthetic oligonucleotide
cgugucuacugccaccgcu

SEQ ID NO: 941323 - RNA, 19 nt, Artificial Sequence
  Description of Artificial Sequence: Synthetic oligonucleotide
caagcacaucaggggugua

SEQ ID NO: 941324 - RNA, 19 nt, Artificial Sequence
  Description of Artificial Sequence: Synthetic oligonucleotide
ccucuagucaacggauguu

SEQ ID NO: 941325 - RNA, 19 nt, Artificial Sequence
  Description of Artificial Sequence: Synthetic oligonucleotide
cugccaccgcuaugauguu

SEQ ID NO: 941326 - RNA, 19 nt, Artificial Sequence
  Description of Artificial Sequence: Synthetic oligonucleotide
aauacuuggaaguuccucc

SEQ ID NO: 941327 - RNA, 19 nt, Artificial Sequence
  Description of Artificial Sequence: Synthetic oligonucleotide
aagaauagcaaccacuggg

SEQ ID NO: 941328 - RNA, 19 nt, Artificial Sequence
  Description of Artificial Sequence: Synthetic oligonucleotide
ugauccaucgaaaagaaag

SEQ ID NO: 941329 - RNA, 19 nt, Artificial Sequence
  Description of Artificial Sequence: Synthetic oligonucleotide
aagagaugaauacugguac

SEQ ID NO: 941330 - RNA, 19 nt, Artificial Sequence
  Description of Artificial Sequence: Synthetic oligonucleotide
aaaguuguguugcugaagg

SEQ ID NO: 941331 - RNA, 19 nt, Artificial Sequence
  Description of Artificial Sequence: Synthetic oligonucleotide
uaucacuacacuaugcagg

SEQ ID NO: 941332 - RNA, 19 nt, Artificial Sequence
  Description of Artificial Sequence: Synthetic oligonucleotide
uauuauuacuucuaguuug

SEQ ID NO: 941333 - RNA, 19 nt, Artificial Sequence
  Description of Artificial Sequence: Synthetic oligonucleotide
uuugcuacacacuugacug

SEQ ID NO: 941334 - RNA, 19 nt, Artificial Sequence
  Description of Artificial Sequence: Synthetic oligonucleotide
aauaucacuacacuaugca

SEQ ID NO: 941335 - RNA, 19 nt, Artificial Sequence
  Description of Artificial Sequence: Synthetic oligonucleotide
gauaucaaaagucaaguca

SEQ ID NO: 941336 - RNA, 19 nt, Artificial Sequence
  Description of Artificial Sequence: Synthetic oligonucleotide
ucaucuuaaagacacggag

SEQ ID NO: 941337 - RNA, 19 nt, Artificial Sequence
  Description of Artificial Sequence: Synthetic oligonucleotide
uuuauugagagcuuaccca

SEQ ID NO: 941338 - RNA, 19 nt, Artificial Sequence
  Description of Artificial Sequence: Synthetic oligonucleotide
guuaccaaggacugaaucg

SEQ ID NO: 941339 - RNA, 19 nt, Artificial Sequence
  Description of Artificial Sequence: Synthetic oligonucleotide
guugcugcaaccuuuggcg

SEQ ID NO: 941340 - RNA, 19 nt, Artificial Sequence
  Description of Artificial Sequence: Synthetic oligonucleotide
agagcuuacccacugugcc

SEQ ID NO: 941341 - RNA, 19 nt, Artificial Sequence
  Description of Artificial Sequence: Synthetic oligonucleotide
aauacauagccaaacaaga

SEQ ID NO: 941342 - RNA, 19 nt, Artificial Sequence
  Description of Artificial Sequence: Synthetic oligonucleotide
agucaagucagcaauacac

SEQ ID NO: 941343 - RNA, 19 nt, Artificial Sequence
  Description of Artificial Sequence: Synthetic oligonucleotide
aaauaucacuacacuaugc

SEQ ID NO: 941344 - RNA, 19 nt, Artificial Sequence
  Description of Artificial Sequence: Synthetic oligonucleotide
aaugcuugcagcaaacaag

SEQ ID NO: 941345 - RNA, 19 nt, Artificial Sequence
  Description of Artificial Sequence: Synthetic oligonucleotide
uaaauaucacuacacuaug

SEQ ID NO: 941346 - RNA, 19 nt, Artificial Sequence
  Description of Artificial Sequence: Synthetic oligonucleotide
ucgaaaagaaagaccacag

SEQ ID NO: 941347 - RNA, 19 nt, Artificial Sequence
  Description of Artificial Sequence: Synthetic oligonucleotide
aguuauauuuccacuaugg

SEQ ID NO: 941348 - RNA, 19 nt, Artificial Sequence
  Description of Artificial Sequence: Synthetic oligonucleotide
aaagucaagucagcaauac

SEQ ID NO: 941349 - RNA, 19 nt, Artificial Sequence
  Description of Artificial Sequence: Synthetic oligonucleotide
gagacagagagagagagag

SEQ ID NO: 941350 - RNA, 19 nt, Artificial Sequence
  Description of Artificial Sequence: Synthetic oligonucleotide
ucuaaguaugcaagaacag

SEQ ID NO: 941351 - RNA, 19 nt, Artificial Sequence
  Description of Artificial Sequence: Synthetic oligonucleotide
acaauaaaggcucugcagu

SEQ ID NO: 941352 - RNA, 19 nt, Artificial Sequence
  Description of Artificial Sequence: Synthetic oligonucleotide
agagaugaauacugguacc

SEQ ID NO: 941353 - RNA, 19 nt, Artificial Sequence
  Description of Artificial Sequence: Synthetic oligonucleotide
ucuaguuugagcucuauuu

SEQ ID NO: 941354 - RNA, 19 nt, Artificial Sequence
  Description of Artificial Sequence: Synthetic oligonucleotide
uugagcucuauuuauugag

SEQ ID NO: 941355 - RNA, 19 nt, Artificial Sequence
  Description of Artificial Sequence: Synthetic oligonucleotide
uuuugcuacacacuugacu

SEQ ID NO: 941356 - RNA, 19 nt, Artificial Sequence
  Description of Artificial Sequence: Synthetic oligonucleotide
auaucaaaagucaagucag

SEQ ID NO: 941357 - RNA, 19 nt, Artificial Sequence
  Description of Artificial Sequence: Synthetic oligonucleotide
ucuuuggugcuccagauuc

SEQ ID NO: 941358 - RNA, 19 nt, Artificial Sequence
  Description of Artificial Sequence: Synthetic oligonucleotide
uuaggaaaguccucagggg

SEQ ID NO: 941359 - RNA, 19 nt, Artificial Sequence
  Description of Artificial Sequence: Synthetic oligonucleotide
agccaaacaagauuauuuc

SEQ ID NO: 941360 - RNA, 19 nt, Artificial Sequence
  Description of Artificial Sequence: Synthetic oligonucleotide
gacugaaucgcauugacaa

SEQ ID NO: 941361 - RNA, 19 nt, Artificial Sequence
  Description of Artificial Sequence: Synthetic oligonucleotide
uacauggggagauaacagg

SEQ ID NO: 941362 - RNA, 19 nt, Artificial Sequence
  Description of Artificial Sequence: Synthetic oligonucleotide
acauucgaagcacuccucc

SEQ ID NO: 941363 - RNA, 19 nt, Artificial Sequence
  Description of Artificial Sequence: Synthetic oligonucleotide
aaagggcuacuucggaugg

SEQ ID NO: 941364 - RNA, 19 nt, Artificial Sequence
  Description of Artificial Sequence: Synthetic oligonucleotide
aggaagaauacuuggaagu

SEQ ID NO: 941365 - RNA, 19 nt, Artificial Sequence
  Description of Artificial Sequence: Synthetic oligonucleotide
aaaagucggggccaccagg

SEQ ID NO: 941366 - RNA, 19 nt, Artificial Sequence
  Description of Artificial Sequence: Synthetic oligonucleotide
aaggcauggugcuugcuuc

SEQ ID NO: 941367 - RNA, 19 nt, Artificial Sequence
  Description of Artificial Sequence: Synthetic oligonucleotide
uccaucgaaaagaaagacc

SEQ ID NO: 941368 - RNA, 19 nt, Artificial Sequence
  Description of Artificial Sequence: Synthetic oligonucleotide
agucaaaguuaccaaggac

SEQ ID NO: 941369 - RNA, 19 nt, Artificial Sequence
  Description of Artificial Sequence: Synthetic oligonucleotide
agcucuauuuauugagagc

SEQ ID NO: 941370 - RNA, 19 nt, Artificial Sequence
  Description of Artificial Sequence: Synthetic oligonucleotide
cuagugaaacguaaagccc

SEQ ID NO: 941371 - RNA, 19 nt, Artificial Sequence
  Description of Artificial Sequence: Synthetic oligonucleotide
augcaaguuauauuuccac

SEQ ID NO: 941372 - RNA, 19 nt, Artificial Sequence
  Description of Artificial Sequence: Synthetic oligonucleotide
ucuuuagugcugcagccag

SEQ ID NO: 941373 - RNA, 19 nt, Artificial Sequence
  Description of Artificial Sequence: Synthetic oligonucleotide
agcaaauacauagccaaac

SEQ ID NO: 941374 - RNA, 19 nt, Artificial Sequence
  Description of Artificial Sequence: Synthetic oligonucleotide
aaguuguguugcugaaggc

SEQ ID NO: 941375 - RNA, 19 nt, Artificial Sequence
  Description of Artificial Sequence: Synthetic oligonucleotide
agaaaaucuuuggugcucc

SEQ ID NO: 941376 - RNA, 19 nt, Artificial Sequence
  Description of Artificial Sequence: Synthetic oligonucleotide
aaaccaccaagucauacaa

SEQ ID NO: 941377 - RNA, 19 nt, Artificial Sequence
  Description of Artificial Sequence: Synthetic oligonucleotide
cuuaaagacacggagggug

SEQ ID NO: 941378 - RNA, 19 nt, Artificial Sequence
  Description of Artificial Sequence: Synthetic oligonucleotide
aagaaaaucuuuggugcuc

SEQ ID NO: 941379 - RNA, 19 nt, Artificial Sequence
  Description of Artificial Sequence: Synthetic oligonucleotide
gaauacugguaccaguagc

SEQ ID NO: 941380 - RNA, 19 nt, Artificial Sequence
  Description of Artificial Sequence: Synthetic oligonucleotide
aaaucggccuguccuuagc

SEQ ID NO: 941381 - RNA, 19 nt, Artificial Sequence
  Description of Artificial Sequence: Synthetic oligonucleotide
agucauacaaaagaaagaa

SEQ ID NO: 941382 - RNA, 19 nt, Artificial Sequence
  Description of Artificial Sequence: Synthetic oligonucleotide
auaacaggacaguuguguc

SEQ ID NO: 941383 - RNA, 19 nt, Artificial Sequence
  Description of Artificial Sequence: Synthetic oligonucleotide
auaucacuacacuaugcag

SEQ ID NO: 941384 - RNA, 19 nt, Artificial Sequence
  Description of Artificial Sequence: Synthetic oligonucleotide
gauggaguguuugaagagg

SEQ ID NO: 941385 - RNA, 19 nt, Artificial Sequence
  Description of Artificial Sequence: Synthetic oligonucleotide
gaaagggcuacuucggaug

SEQ ID NO: 941386 - RNA, 19 nt, Artificial Sequence
  Description of Artificial Sequence: Synthetic oligonucleotide
uccacauuggcucgcauac

SEQ ID NO: 941387 - RNA, 19 nt, Artificial Sequence
  Description of Artificial Sequence: Synthetic oligonucleotide
gguggaaagggcuacuucg

SEQ ID NO: 941388 - RNA, 19 nt, Artificial Sequence
  Description of Artificial Sequence: Synthetic oligonucleotide
agggagccaaaauccaucc

SEQ ID NO: 941389 - RNA, 19 nt, Artificial Sequence
  Description of Artificial Sequence: Synthetic oligonucleotide
ugaauacugguaccaguag

SEQ ID NO: 941390 - RNA, 19 nt, Artificial Sequence
  Description of Artificial Sequence: Synthetic oligonucleotide
gaucuaaguaugcaagaac

SEQ ID NO: 941391 - RNA, 19 nt, Artificial Sequence
  Description of Artificial Sequence: Synthetic oligonucleotide
agugauaucaaaagucaag

SEQ ID NO: 941392 - RNA, 19 nt, Artificial Sequence
  Description of Artificial Sequence: Synthetic oligonucleotide
uccagauucggacggugcg

SEQ ID NO: 941393 - RNA, 19 nt, Artificial Sequence
  Description of Artificial Sequence: Synthetic oligonucleotide
uuaccaaggacugaaucgc

SEQ ID NO: 941394 - RNA, 19 nt, Artificial Sequence
  Description of Artificial Sequence: Synthetic oligonucleotide
acaggauugguggaaaggg

SEQ ID NO: 941395 - RNA, 19 nt, Artificial Sequence
  Description of Artificial Sequence: Synthetic oligonucleotide
gagcucuauuuauugagag

SEQ ID NO: 941396 - RNA, 19 nt, Artificial Sequence
  Description of Artificial Sequence: Synthetic oligonucleotide
uggggagauaacaggacag

SEQ ID NO: 941397 - RNA, 19 nt, Artificial Sequence
  Description of Artificial Sequence: Synthetic oligonucleotide
uagccaaacaagauuauuu

SEQ ID NO: 941398 - RNA, 19 nt, Artificial Sequence
  Description of Artificial Sequence: Synthetic oligonucleotide
acaaaccugcuacaugggg

SEQ ID NO: 941399 - RNA, 19 nt, Artificial Sequence
  Description of Artificial Sequence: Synthetic oligonucleotide
agagaucuaaguaugcaag

SEQ ID NO: 941400 - RNA, 19 nt, Artificial Sequence
  Description of Artificial Sequence: Synthetic oligonucleotide
aacugauaggacaggauug

SEQ ID NO: 941401 - RNA, 19 nt, Artificial Sequence
  Description of Artificial Sequence: Synthetic oligonucleotide
agaauagcaaccacugggg

SEQ ID NO: 941402 - RNA, 19 nt, Artificial Sequence
  Description of Artificial Sequence: Synthetic oligonucleotide
uggcuagugaaacguaaag

SEQ ID NO: 941403 - RNA, 19 nt, Artificial Sequence
  Description of Artificial Sequence: Synthetic oligonucleotide
aucuaaguaugcaagaaca

SEQ ID NO: 941404 - RNA, 19 nt, Artificial Sequence
  Description of Artificial Sequence: Synthetic oligonucleotide
ugagcucuauuuauugaga

SEQ ID NO: 941405 - RNA, 19 nt, Artificial Sequence
  Description of Artificial Sequence: Synthetic oligonucleotide
agucucuaccauucccucc

SEQ ID NO: 941406 - RNA, 19 nt, Artificial Sequence
  Description of Artificial Sequence: Synthetic oligonucleotide
uuaaagacacggagggugu

SEQ ID NO: 941407 - RNA, 19 nt, Artificial Sequence
  Description of Artificial Sequence: Synthetic oligonucleotide
acuuggaaguuccuccagg

SEQ ID NO: 941408 - RNA, 19 nt, Artificial Sequence
  Description of Artificial Sequence: Synthetic oligonucleotide
uucuucccgaagcagaccu

SEQ ID NO: 941409 - RNA, 19 nt, Artificial Sequence
  Description of Artificial Sequence: Synthetic oligonucleotide
auugcuacuaaaguccaug

SEQ ID NO: 941410 - RNA, 19 nt, Artificial Sequence
  Description of Artificial Sequence: Synthetic oligonucleotide
acugauaggacaggauugg

SEQ ID NO: 941411 - RNA, 19 nt, Artificial Sequence
  Description of Artificial Sequence: Synthetic oligonucleotide
cuacauggggagauaacag

SEQ ID NO: 941412 - RNA, 19 nt, Artificial Sequence
  Description of Artificial Sequence: Synthetic oligonucleotide
ugauaucaaaagucaaguc

SEQ ID NO: 941413 - RNA, 19 nt, Artificial Sequence
  Description of Artificial Sequence: Synthetic oligonucleotide
gaagcagaccucccaaacc

SEQ ID NO: 941414 - RNA, 19 nt, Artificial Sequence
  Description of Artificial Sequence: Synthetic oligonucleotide
agagagagagaucuaagua

SEQ ID NO: 941415 - RNA, 19 nt, Artificial Sequence
  Description of Artificial Sequence: Synthetic oligonucleotide
cauuggcucgcauacugcg

SEQ ID NO: 941416 - RNA, 19 nt, Artificial Sequence
  Description of Artificial Sequence: Synthetic oligonucleotide
gaaaccaccaagucauaca

SEQ ID NO: 941417 - RNA, 19 nt, Artificial Sequence
  Description of Artificial Sequence: Synthetic oligonucleotide
aagacacggaggguguccc

SEQ ID NO: 941418 - RNA, 19 nt, Artificial Sequence
  Description of Artificial Sequence: Synthetic oligonucleotide
ugauugggucagcaaacag

SEQ ID NO: 941419 - RNA, 19 nt, Artificial Sequence
  Description of Artificial Sequence: Synthetic oligonucleotide
auccaucgaaaagaaagac

SEQ ID NO: 941420 - RNA, 19 nt, Artificial Sequence
  Description of Artificial Sequence: Synthetic oligonucleotide
cuaaauaucacuacacuau

SEQ ID NO: 941421 - RNA, 19 nt, Artificial Sequence
  Description of Artificial Sequence: Synthetic oligonucleotide
aauaaaggcucugcaguca

SEQ ID NO: 941422 - RNA, 19 nt, Artificial Sequence
  Description of Artificial Sequence: Synthetic oligonucleotide
guguugaagagaugaauac

SEQ ID NO: 941423 - RNA, 19 nt, Artificial Sequence
  Description of Artificial Sequence: Synthetic oligonucleotide
aggggcuaaauaucacuac

SEQ ID NO: 941424 - RNA, 19 nt, Artificial Sequence
  Description of Artificial Sequence: Synthetic oligonucleotide
ggagccaaaauccauccag

SEQ ID NO: 941425 - RNA, 19 nt, Artificial Sequence
  Description of Artificial Sequence: Synthetic oligonucleotide
uuccaugugccauccuugg

SEQ ID NO: 941426 - RNA, 19 nt, Artificial Sequence
  Description of Artificial Sequence: Synthetic oligonucleotide
caggacaugggugucaggg

SEQ ID NO: 941427 - RNA, 19 nt, Artificial Sequence
  Description of Artificial Sequence: Synthetic oligonucleotide
agcaaugccaauguugaug

SEQ ID NO: 941428 - RNA, 19 nt, Artificial Sequence
  Description of Artificial Sequence: Synthetic oligonucleotide
ugccauugcuacuaaaguc

SEQ ID NO: 941429 - RNA, 19 nt, Artificial Sequence
  Description of Artificial Sequence: Synthetic oligonucleotide
ucucucuuggucaucuuaa

SEQ ID NO: 941430 - RNA, 19 nt, Artificial Sequence
  Description of Artificial Sequence: Synthetic oligonucleotide
ugucccagagcuuccaugu

SEQ ID NO: 941431 - RNA, 19 nt, Artificial Sequence
  Description of Artificial Sequence: Synthetic oligonucleotide
cacgaacccacaaaccugc

SEQ ID NO: 941432 - RNA, 19 nt, Artificial Sequence
  Description of Artificial Sequence: Synthetic oligonucleotide
acugauugggucagcaaac

SEQ ID NO: 941433 - RNA, 19 nt, Artificial Sequence
  Description of Artificial Sequence: Synthetic oligonucleotide
uugcuacuaaaguccaugc

SEQ ID NO: 941434 - RNA, 19 nt, Artificial Sequence
  Description of Artificial Sequence: Synthetic oligonucleotide
gacaggauugguggaaagg

SEQ ID NO: 941435 - RNA, 19 nt, Artificial Sequence
  Description of Artificial Sequence: Synthetic oligonucleotide
agacagaugccauccuccg

SEQ ID NO: 941436 - RNA, 19 nt, Artificial Sequence
  Description of Artificial Sequence: Synthetic oligonucleotide
uuuggugcuccagauucgg

SEQ ID NO: 941437 - RNA, 19 nt, Artificial Sequence
  Description of Artificial Sequence: Synthetic oligonucleotide
uuugaagaggcaacuguuu

SEQ ID NO: 941438 - RNA, 19 nt, Artificial Sequence
  Description of Artificial Sequence: Synthetic oligonucleotide
aaaauccauccagagccag

SEQ ID NO: 941439 - RNA, 19 nt, Artificial Sequence
  Description of Artificial Sequence: Synthetic oligonucleotide
aagaacaguuucaauggga

SEQ ID NO: 941440 - RNA, 19 nt, Artificial Sequence
  Description of Artificial Sequence: Synthetic oligonucleotide
aauugggccaacaaacaau

SEQ ID NO: 941441 - RNA, 19 nt, Artificial Sequence
  Description of Artificial Sequence: Synthetic oligonucleotide
aagucaagucagcaauaca

SEQ ID NO: 941442 - RNA, 19 nt, Artificial Sequence
  Description of Artificial Sequence: Synthetic oligonucleotide
agagagagaucuaaguaug

SEQ ID NO: 941443 - RNA, 19 nt, Artificial Sequence
  Description of Artificial Sequence: Synthetic oligonucleotide
ucggauggaguguuugaag

SEQ ID NO: 941444 - RNA, 19 nt, Artificial Sequence
  Description of Artificial Sequence: Synthetic oligonucleotide
cugcagucaggacugaagc

SEQ ID NO: 941445 - RNA, 19 nt, Artificial Sequence
  Description of Artificial Sequence: Synthetic oligonucleotide
gagagaucuaaguaugcaa

SEQ ID NO: 941446 - RNA, 19 nt, Artificial Sequence
  Description of Artificial Sequence: Synthetic oligonucleotide
uugacugcccuugucacug

SEQ ID NO: 941447 - RNA, 19 nt, Artificial Sequence
  Description of Artificial Sequence: Synthetic oligonucleotide
gaauuccccuuucuucccg

SEQ ID NO: 941448 - RNA, 19 nt, Artificial Sequence
  Description of Artificial Sequence: Synthetic oligonucleotide
guggguaaaguuguguugc

SEQ ID NO: 941449 - RNA, 19 nt, Artificial Sequence
  Description of Artificial Sequence: Synthetic oligonucleotide
uaguuugagcucuauuuau

SEQ ID NO: 941450 - RNA, 19 nt, Artificial Sequence
  Description of Artificial Sequence: Synthetic oligonucleotide
caauaaaggcucugcaguc

SEQ ID NO: 941451 - RNA, 19 nt, Artificial Sequence
  Description of Artificial Sequence: Synthetic oligonucleotide
gauaacaggacaguugugu

SEQ ID NO: 941452 - RNA, 19 nt, Artificial Sequence
  Description of Artificial Sequence: Synthetic oligonucleotide
agaguggcccuucagcuca

SEQ ID NO: 941453 - RNA, 19 nt, Artificial Sequence
  Description of Artificial Sequence: Synthetic oligonucleotide
auucccucccaucucaggu

SEQ ID NO: 941454 - RNA, 19 nt, Artificial Sequence
  Description of Artificial Sequence: Synthetic oligonucleotide
uccccauggacacauucga

SEQ ID NO: 941455 - RNA, 19 nt, Artificial Sequence
  Description of Artificial Sequence: Synthetic oligonucleotide
ucuuuagggcccuccucgg

SEQ ID NO: 941456 - RNA, 19 nt, Artificial Sequence
  Description of Artificial Sequence: Synthetic oligonucleotide
aaucggccuguccuuagca

SEQ ID NO: 941457 - RNA, 19 nt, Artificial Sequence
  Description of Artificial Sequence: Synthetic oligonucleotide
gagagagagaucuaaguau

SEQ ID NO: 941458 - RNA, 19 nt, Artificial Sequence
  Description of Artificial Sequence: Synthetic oligonucleotide
gacacauucgaagcacucc

SEQ ID NO: 941459 - RNA, 19 nt, Artificial Sequence
  Description of Artificial Sequence: Synthetic oligonucleotide
gguaaaguuguguugcuga

SEQ ID NO: 941460 - RNA, 19 nt, Artificial Sequence
  Description of Artificial Sequence: Synthetic oligonucleotide
uccuuagcaaguagggguc

SEQ ID NO: 941461 - RNA, 19 nt, Artificial Sequence
  Description of Artificial Sequence: Synthetic oligonucleotide
gacaagucugccaacagaa

SEQ ID NO: 941462 - RNA, 19 nt, Artificial Sequence
  Description of Artificial Sequence: Synthetic oligonucleotide
ugaacugauugggucagca

SEQ ID NO: 941463 - RNA, 19 nt, Artificial Sequence
  Description of Artificial Sequence: Synthetic oligonucleotide
gaggcaacuguuugcaguc

SEQ ID NO: 941464 - RNA, 19 nt, Artificial Sequence
  Description of Artificial Sequence: Synthetic oligonucleotide
uacuucuaguuugagcucu

SEQ ID NO: 941465 - RNA, 19 nt, Artificial Sequence
  Description of Artificial Sequence: Synthetic oligonucleotide
auggggagauaacaggaca

SEQ ID NO: 941466 - RNA, 19 nt, Artificial Sequence
  Description of Artificial Sequence: Synthetic oligonucleotide
cacauuggcucgcauacug

SEQ ID NO: 941467 - RNA, 19 nt, Artificial Sequence
  Description of Artificial Sequence: Synthetic oligonucleotide
caauguugaugaugggcgc

SEQ ID NO: 941468 - RNA, 19 nt, Artificial Sequence
  Description of Artificial Sequence: Synthetic oligonucleotide
auuauuacuucuaguuuga

SEQ ID NO: 941469 - RNA, 19 nt, Artificial Sequence
  Description of Artificial Sequence: Synthetic oligonucleotide
auugacaagucugccaaca

SEQ ID NO: 941470 - RNA, 19 nt, Artificial Sequence
  Description of Artificial Sequence: Synthetic oligonucleotide
gauccaucgaaaagaaaga

SEQ ID NO: 941471 - RNA, 19 nt, Artificial Sequence
  Description of Artificial Sequence: Synthetic oligonucleotide
caacuguuugcagucaaag

SEQ ID NO: 941472 - RNA, 19 nt, Artificial Sequence
  Description of Artificial Sequence: Synthetic oligonucleotide
ugaaucgcauugacaaguc

SEQ ID NO: 941473 - RNA, 19 nt, Artificial Sequence
  Description of Artificial Sequence: Synthetic oligonucleotide
uacuuggaaguuccuccag

SEQ ID NO: 941474 - RNA, 19 nt, Artificial Sequence
  Description of Artificial Sequence: Synthetic oligonucleotide
uuggcucgcauacugcggu

SEQ ID NO: 941475 - RNA, 19 nt, Artificial Sequence
  Description of Artificial Sequence: Synthetic oligonucleotide
uauugagagcuuacccacu

SEQ ID NO: 941476 - RNA, 19 nt, Artificial Sequence
  Description of Artificial Sequence: Synthetic oligonucleotide
ugcuacacacuugacugcc

SEQ ID NO: 941477 - RNA, 19 nt, Artificial Sequence
  Description of Artificial Sequence: Synthetic oligonucleotide
ucuaccauucccucccauc

SEQ ID NO: 941478 - RNA, 19 nt, Artificial Sequence
  Description of Artificial Sequence: Synthetic oligonucleotide
uuuagugcugcagccagaa

SEQ ID NO: 941479 - RNA, 19 nt, Artificial Sequence
  Description of Artificial Sequence: Synthetic oligonucleotide
gccauugcuacuaaagucc

SEQ ID NO: 941480 - RNA, 19 nt, Artificial Sequence
  Description of Artificial Sequence: Synthetic oligonucleotide
uuauuacuucuaguuugag

SEQ ID NO: 941481 - RNA, 19 nt, Artificial Sequence
  Description of Artificial Sequence: Synthetic oligonucleotide
guaccaguagccaaggcca

SEQ ID NO: 941482 - RNA, 19 nt, Artificial Sequence
  Description of Artificial Sequence: Synthetic oligonucleotide
caaaccugcuacaugggga

SEQ ID NO: 941483 - RNA, 19 nt, Artificial Sequence
  Description of Artificial Sequence: Synthetic oligonucleotide
uggguugauccaucgaaaa

SEQ ID NO: 941484 - RNA, 19 nt, Artificial Sequence
  Description of Artificial Sequence: Synthetic oligonucleotide
agaccucccaaaccuucac

SEQ ID NO: 941485 - RNA, 19 nt, Artificial Sequence
  Description of Artificial Sequence: Synthetic oligonucleotide
ugaccugccuauuucccac

SEQ ID NO: 941486 - RNA, 19 nt, Artificial Sequence
  Description of Artificial Sequence: Synthetic oligonucleotide
agugaacugauugggucag

SEQ ID NO: 941487 - RNA, 19 nt, Artificial Sequence
  Description of Artificial Sequence: Synthetic oligonucleotide
gguugauccaucgaaaaga

SEQ ID NO: 941488 - RNA, 19 nt, Artificial Sequence
  Description of Artificial Sequence: Synthetic oligonucleotide
agaacaguuucaaugggaa

SEQ ID NO: 941489 - RNA, 19 nt, Artificial Sequence
  Description of Artificial Sequence: Synthetic oligonucleotide
agaugaauacugguaccag

SEQ ID NO: 941490 - RNA, 19 nt, Artificial Sequence
  Description of Artificial Sequence: Synthetic oligonucleotide
uggaaagggcuacuucgga

SEQ ID NO: 941491 - RNA, 19 nt, Artificial Sequence
  Description of Artificial Sequence: Synthetic oligonucleotide
ugcaacugauaggacagga

SEQ ID NO: 941492 - RNA, 19 nt, Artificial Sequence
  Description of Artificial Sequence: Synthetic oligonucleotide
gagagagagagaucuaagu

SEQ ID NO: 941493 - RNA, 19 nt, Artificial Sequence
  Description of Artificial Sequence: Synthetic oligonucleotide
caugcaaguuauauuucca

SEQ ID NO: 941494 - RNA, 19 nt, Artificial Sequence
  Description of Artificial Sequence: Synthetic oligonucleotide
uugcuacacacuugacugc

SEQ ID NO: 941495 - RNA, 19 nt, Artificial Sequence
  Description of Artificial Sequence: Synthetic oligonucleotide
ucaaaggcucgcugcaccu

SEQ ID NO: 941496 - RNA, 19 nt, Artificial Sequence
  Description of Artificial Sequence: Synthetic oligonucleotide
aaagucggggccaccagga

SEQ ID NO: 941497 - RNA, 19 nt, Artificial Sequence
  Description of Artificial Sequence: Synthetic oligonucleotide
agagagagagagaucuaag

SEQ ID NO: 941498 - RNA, 19 nt, Artificial Sequence
  Description of Artificial Sequence: Synthetic oligonucleotide
cacaaaccugcuacauggg

SEQ ID NO: 941499 - RNA, 19 nt, Artificial Sequence
  Description of Artificial Sequence: Synthetic oligonucleotide
cuauuucccacuuuugcua

SEQ ID NO: 941500 - RNA, 19 nt, Artificial Sequence
  Description of Artificial Sequence: Synthetic oligonucleotide
gacagagagagagagagau

SEQ ID NO: 941501 - RNA, 19 nt, Artificial Sequence
  Description of Artificial Sequence: Synthetic oligonucleotide
aacccacaaaccugcuaca

SEQ ID NO: 941502 - RNA, 19 nt, Artificial Sequence
  Description of Artificial Sequence: Synthetic oligonucleotide
agcuuacccacugugccuc

SEQ ID NO: 941503 - RNA, 19 nt, Artificial Sequence
  Description of Artificial Sequence: Synthetic oligonucleotide
acauuggcucgcauacugc

SEQ ID NO: 941504 - RNA, 19 nt, Artificial Sequence
  Description of Artificial Sequence: Synthetic oligonucleotide
ucucaggugaccugccuau

SEQ ID NO: 941505 - RNA, 19 nt, Artificial Sequence
  Description of Artificial Sequence: Synthetic oligonucleotide
gagagcuuacccacugugc

SEQ ID NO: 941506 - RNA, 19 nt, Artificial Sequence
  Description of Artificial Sequence: Synthetic oligonucleotide
guggaaagggcuacuucgg

SEQ ID NO: 941507 - RNA, 19 nt, Artificial Sequence
  Description of Artificial Sequence: Synthetic oligonucleotide
uggaguguuugaagaggca

SEQ ID NO: 941508 - RNA, 19 nt, Artificial Sequence
  Description of Artificial Sequence: Synthetic oligonucleotide
uacacuaugcaggccacaa

SEQ ID NO: 941509 - RNA, 19 nt, Artificial Sequence
  Description of Artificial Sequence: Synthetic oligonucleotide
ggcuacuucggauggagug

SEQ ID NO: 941510 - RNA, 19 nt, Artificial Sequence
  Description of Artificial Sequence: Synthetic oligonucleotide
gacggugcggucaucagca

SEQ ID NO: 941511 - RNA, 19 nt, Artificial Sequence
  Description of Artificial Sequence: Synthetic oligonucleotide
ugcuacauggggagauaac

SEQ ID NO: 941512 - RNA, 19 nt, Artificial Sequence
  Description of Artificial Sequence: Synthetic oligonucleotide
uaccaaggacugaaucgca

SEQ ID NO: 941513 - RNA, 19 nt, Artificial Sequence
  Description of Artificial Sequence: Synthetic oligonucleotide
uucuaguuugagcucuauu

SEQ ID NO: 941514 - RNA, 19 nt, Artificial Sequence
  Description of Artificial Sequence: Synthetic oligonucleotide
agucugccaacagaaagga

SEQ ID NO: 941515 - RNA, 19 nt, Artificial Sequence
  Description of Artificial Sequence: Synthetic oligonucleotide
cauccuccgagagucauug

SEQ ID NO: 941516 - RNA, 19 nt, Artificial Sequence
  Description of Artificial Sequence: Synthetic oligonucleotide
cuaguuugagcucuauuua

SEQ ID NO: 941517 - RNA, 19 nt, Artificial Sequence
  Description of Artificial Sequence: Synthetic oligonucleotide
gggagacagagagagagag

SEQ ID NO: 941518 - RNA, 19 nt, Artificial Sequence
  Description of Artificial Sequence: Synthetic oligonucleotide
gauugguggaaagggcuac

SEQ ID NO: 941519 - RNA, 19 nt, Artificial Sequence
  Description of Artificial Sequence: Synthetic oligonucleotide
augaauacugguaccagua

SEQ ID NO: 941520 - RNA, 19 nt, Artificial Sequence
  Description of Artificial Sequence: Synthetic oligonucleotide
gagagagagagagaucuaa

SEQ ID NO: 941521 - RNA, 19 nt, Artificial Sequence
  Description of Artificial Sequence: Synthetic oligonucleotide
gugguggguugauccaucg

SEQ ID NO: 941522 - RNA, 19 nt, Artificial Sequence
  Description of Artificial Sequence: Synthetic oligonucleotide
agccgcacugcacgguccc

SEQ ID NO: 941523 - RNA, 19 nt, Artificial Sequence
  Description of Artificial Sequence: Synthetic oligonucleotide
acacuaugcaggccacaag

SEQ ID NO: 941524 - RNA, 19 nt, Artificial Sequence
  Description of Artificial Sequence: Synthetic oligonucleotide
guaugcaagaacaguuuca

SEQ ID NO: 941525 - RNA, 19 nt, Artificial Sequence
  Description of Artificial Sequence: Synthetic oligonucleotide
uuagugcugcagccagaag

SEQ ID NO: 941526 - RNA, 19 nt, Artificial Sequence
  Description of Artificial Sequence: Synthetic oligonucleotide
ggcuagugaaacguaaagc

SEQ ID NO: 941527 - RNA, 19 nt, Artificial Sequence
  Description of Artificial Sequence: Synthetic oligonucleotide
ucccucccaucucagguga

SEQ ID NO: 941528 - RNA, 19 nt, Artificial Sequence
  Description of Artificial Sequence: Synthetic oligonucleotide
acuacacuaugcaggccac

SEQ ID NO: 941529 - RNA, 19 nt, Artificial Sequence
  Description of Artificial Sequence: Synthetic oligonucleotide
uuagggcccuccucgggcc

SEQ ID NO: 941530 - RNA, 19 nt, Artificial Sequence
  Description of Artificial Sequence: Synthetic oligonucleotide
cuuuagggcccuccucggg

SEQ ID NO: 941531 - RNA, 19 nt, Artificial Sequence
  Description of Artificial Sequence: Synthetic oligonucleotide
uugauccaucgaaaagaaa

SEQ ID NO: 941532 - RNA, 19 nt, Artificial Sequence
  Description of Artificial Sequence: Synthetic oligonucleotide
gcuugcuucuucaaaucgg

SEQ ID NO: 941533 - RNA, 19 nt, Artificial Sequence
  Description of Artificial Sequence: Synthetic oligonucleotide
ggguugauccaucgaaaag

SEQ ID NO: 941534 - RNA, 19 nt, Artificial Sequence
  Description of Artificial Sequence: Synthetic oligonucleotide
cagcaauacacuccccaug

SEQ ID NO: 941535 - RNA, 19 nt, Artificial Sequence
  Description of Artificial Sequence: Synthetic oligonucleotide
uugagagcuuacccacugu

SEQ ID NO: 941536 - RNA, 19 nt, Artificial Sequence
  Description of Artificial Sequence: Synthetic oligonucleotide
uucggauggaguguuugaa

SEQ ID NO: 941537 - RNA, 19 nt, Artificial Sequence
  Description of Artificial Sequence: Synthetic oligonucleotide
agaaugugguggguugauc

SEQ ID NO: 941538 - RNA, 19 nt, Artificial Sequence
  Description of Artificial Sequence: Synthetic oligonucleotide
cagagagagagagagaucu

SEQ ID NO: 941539 - RNA, 19 nt, Artificial Sequence
  Description of Artificial Sequence: Synthetic oligonucleotide
auugggccaacaaacaaua

SEQ ID NO: 941540 - RNA, 19 nt, Artificial Sequence
  Description of Artificial Sequence: Synthetic oligonucleotide
ccaugugccauccuuggag

SEQ ID NO: 941541 - RNA, 19 nt, Artificial Sequence
  Description of Artificial Sequence: Synthetic oligonucleotide
cacgccucguguugaagag

SEQ ID NO: 941542 - RNA, 19 nt, Artificial Sequence
  Description of Artificial Sequence: Synthetic oligonucleotide
aaauccauccagagccaga

SEQ ID NO: 941543 - RNA, 19 nt, Artificial Sequence
  Description of Artificial Sequence: Synthetic oligonucleotide
gccagugauaucaaaaguc

SEQ ID NO: 941544 - RNA, 19 nt, Artificial Sequence
  Description of Artificial Sequence: Synthetic oligonucleotide
agacacggagggugucccc

SEQ ID NO: 941545 - RNA, 19 nt, Artificial Sequence
  Description of Artificial Sequence: Synthetic oligonucleotide
aagcgcaccaagguggcau

SEQ ID NO: 941546 - RNA, 19 nt, Artificial Sequence
  Description of Artificial Sequence: Synthetic oligonucleotide
agggcuacuucggauggag

SEQ ID NO: 941547 - RNA, 19 nt, Artificial Sequence
  Description of Artificial Sequence: Synthetic oligonucleotide
uccaugugccauccuugga

SEQ ID NO: 941548 - RNA, 19 nt, Artificial Sequence
  Description of Artificial Sequence: Synthetic oligonucleotide
gcucuauuuauugagagcu

SEQ ID NO: 941549 - RNA, 19 nt, Artificial Sequence
  Description of Artificial Sequence: Synthetic oligonucleotide
ucccgaagcagaccuccca

SEQ ID NO: 941550 - RNA, 19 nt, Artificial Sequence
  Description of Artificial Sequence: Synthetic oligonucleotide
cuuuugcuacacacuugac

SEQ ID NO: 941551 - RNA, 19 nt, Artificial Sequence
  Description of Artificial Sequence: Synthetic oligonucleotide
gauucggacggugcgguca

SEQ ID NO: 941552 - RNA, 19 nt, Artificial Sequence
  Description of Artificial Sequence: Synthetic oligonucleotide
caaaucggccuguccuuag

SEQ ID NO: 941553 - RNA, 19 nt, Artificial Sequence
  Description of Artificial Sequence: Synthetic oligonucleotide
cuaugcaggccacaaggga

SEQ ID NO: 941554 - RNA, 19 nt, Artificial Sequence
  Description of Artificial Sequence: Synthetic oligonucleotide
augggcgccuugugcuucc

SEQ ID NO: 941555 - RNA, 19 nt, Artificial Sequence
  Description of Artificial Sequence: Synthetic oligonucleotide
gguggguugauccaucgaa

SEQ ID NO: 941556 - RNA, 19 nt, Artificial Sequence
  Description of Artificial Sequence: Synthetic oligonucleotide
acacgaacccacaaaccug

SEQ ID NO: 941557 - RNA, 19 nt, Artificial Sequence
  Description of Artificial Sequence: Synthetic oligonucleotide
guugauccaucgaaaagaa

SEQ ID NO: 941558 - RNA, 19 nt, Artificial Sequence
  Description of Artificial Sequence: Synthetic oligonucleotide
aagaaugugguggguugau

SEQ ID NO: 941559 - RNA, 19 nt, Artificial Sequence
  Description of Artificial Sequence: Synthetic oligonucleotide
uuucuucccgaagcagacc

SEQ ID NO: 941560 - RNA, 19 nt, Artificial Sequence
  Description of Artificial Sequence: Synthetic oligonucleotide
gacugaagcgcaccaaggu

SEQ ID NO: 941561 - RNA, 19 nt, Artificial Sequence
  Description of Artificial Sequence: Synthetic oligonucleotide
acagagagagagagagauc

SEQ ID NO: 941562 - RNA, 19 nt, Artificial Sequence
  Description of Artificial Sequence: Synthetic oligonucleotide
ggaugcccgcuucaggagg

SEQ ID NO: 941563 - RNA, 19 nt, Artificial Sequence
  Description of Artificial Sequence: Synthetic oligonucleotide
cuaaguaugcaagaacagu

SEQ ID NO: 941564 - RNA, 19 nt, Artificial Sequence
  Description of Artificial Sequence: Synthetic oligonucleotide
gcuacauggggagauaaca

SEQ ID NO: 941565 - RNA, 19 nt, Artificial Sequence
  Description of Artificial Sequence: Synthetic oligonucleotide
uuuccacuauggcucuuua

SEQ ID NO: 941566 - RNA, 19 nt, Artificial Sequence
  Description of Artificial Sequence: Synthetic oligonucleotide
gagccaaaauccauccaga

SEQ ID NO: 941567 - RNA, 19 nt, Artificial Sequence
  Description of Artificial Sequence: Synthetic oligonucleotide
ugcaaccuuuggcgggugc

SEQ ID NO: 941568 - RNA, 19 nt, Artificial Sequence
  Description of Artificial Sequence: Synthetic oligonucleotide
cacaggaggggcuaaauau

SEQ ID NO: 941569 - RNA, 19 nt, Artificial Sequence
  Description of Artificial Sequence: Synthetic oligonucleotide
aaccuuuggcgggugcucu

SEQ ID NO: 941570 - RNA, 19 nt, Artificial Sequence
  Description of Artificial Sequence: Synthetic oligonucleotide
gaacugauugggucagcaa

SEQ ID NO: 941571 - RNA, 19 nt, Artificial Sequence
  Description of Artificial Sequence: Synthetic oligonucleotide
ccagugaacugauuggguc

SEQ ID NO: 941572 - RNA, 19 nt, Artificial Sequence
  Description of Artificial Sequence: Synthetic oligonucleotide
caggcggcaaggcauggug

SEQ ID NO: 941573 - RNA, 19 nt, Artificial Sequence
  Description of Artificial Sequence: Synthetic oligonucleotide
ccuuaggaaaguccucagg

SEQ ID NO: 941574 - RNA, 19 nt, Artificial Sequence
  Description of Artificial Sequence: Synthetic oligonucleotide
ugguggguugauccaucga

SEQ ID NO: 941575 - RNA, 19 nt, Artificial Sequence
  Description of Artificial Sequence: Synthetic oligonucleotide
guagggguccugcugcuuc

SEQ ID NO: 941576 - RNA, 19 nt, Artificial Sequence
  Description of Artificial Sequence: Synthetic oligonucleotide
gcaaguagggguccugcug

SEQ ID NO: 941577 - RNA, 19 nt, Artificial Sequence
  Description of Artificial Sequence: Synthetic oligonucleotide
guucccgcugaagaaaauc

SEQ ID NO: 941578 - RNA, 19 nt, Artificial Sequence
  Description of Artificial Sequence: Synthetic oligonucleotide
cacauucgaagcacuccuc

SEQ ID NO: 941579 - RNA, 19 nt, Artificial Sequence
  Description of Artificial Sequence: Synthetic oligonucleotide
agauucggacggugcgguc

SEQ ID NO: 941580 - RNA, 19 nt, Artificial Sequence
  Description of Artificial Sequence: Synthetic oligonucleotide
cuccgagagucauuggaga

SEQ ID NO: 941581 - RNA, 19 nt, Artificial Sequence
  Description of Artificial Sequence: Synthetic oligonucleotide
aggcggcaaggcauggugc

SEQ ID NO: 941582 - RNA, 19 nt, Artificial Sequence
  Description of Artificial Sequence: Synthetic oligonucleotide
cuauggcucuuuagugcug

SEQ ID NO: 941583 - RNA, 19 nt, Artificial Sequence
  Description of Artificial Sequence: Synthetic oligonucleotide
agcaagaaugugguggguu

SEQ ID NO: 941584 - RNA, 19 nt, Artificial Sequence
  Description of Artificial Sequence: Synthetic oligonucleotide
ucggacggugcggucauca

SEQ ID NO: 941585 - RNA, 19 nt, Artificial Sequence
  Description of Artificial Sequence: Synthetic oligonucleotide
agccacacgaacccacaaa

SEQ ID NO: 941586 - RNA, 19 nt, Artificial Sequence
  Description of Artificial Sequence: Synthetic oligonucleotide
ggacugaagcgcaccaagg

SEQ ID NO: 941587 - RNA, 19 nt, Artificial Sequence
  Description of Artificial Sequence: Synthetic oligonucleotide
ccaaaccuucacaucuggg

SEQ ID NO: 941588 - RNA, 19 nt, Artificial Sequence
  Description of Artificial Sequence: Synthetic oligonucleotide
uuuggcgggugcucucgcu

SEQ ID NO: 941589 - RNA, 19 nt, Artificial Sequence
  Description of Artificial Sequence: Synthetic oligonucleotide
ucaaaucggccuguccuua

SEQ ID NO: 941590 - RNA, 19 nt, Artificial Sequence
  Description of Artificial Sequence: Synthetic oligonucleotide
ccuccgagagucauuggag

SEQ ID NO: 941591 - RNA, 19 nt, Artificial Sequence
  Description of Artificial Sequence: Synthetic oligonucleotide
accuuuggcgggugcucuc

SEQ ID NO: 941592 - RNA, 19 nt, Artificial Sequence
  Description of Artificial Sequence: Synthetic oligonucleotide
cugaaucgcauugacaagu

SEQ ID NO: 941593 - RNA, 19 nt, Artificial Sequence
  Description of Artificial Sequence: Synthetic oligonucleotide
agucagcaauacacucccc

SEQ ID NO: 941594 - RNA, 19 nt, Artificial Sequence
  Description of Artificial Sequence: Synthetic oligonucleotide
ggagacagaugccauccuc

SEQ ID NO: 941595 - RNA, 19 nt, Artificial Sequence
  Description of Artificial Sequence: Synthetic oligonucleotide
ugcgguguucccgcugaag

SEQ ID NO: 941596 - RNA, 19 nt, Artificial Sequence
  Description of Artificial Sequence: Synthetic oligonucleotide
aggcauggugcuugcuucu

SEQ ID NO: 941597 - RNA, 19 nt, Artificial Sequence
  Description of Artificial Sequence: Synthetic oligonucleotide
guggaagagccgcacugca

SEQ ID NO: 941598 - RNA, 19 nt, Artificial Sequence
  Description of Artificial Sequence: Synthetic oligonucleotide
ggggugaagccacacgaac

SEQ ID NO: 941599 - RNA, 19 nt, Artificial Sequence
  Description of Artificial Sequence: Synthetic oligonucleotide
caacugauaggacaggauu

SEQ ID NO: 941600 - RNA, 19 nt, Artificial Sequence
  Description of Artificial Sequence: Synthetic oligonucleotide
gaaucgcauugacaagucu

SEQ ID NO: 941601 - RNA, 19 nt, Artificial Sequence
  Description of Artificial Sequence: Synthetic oligonucleotide
agcgcaccaagguggcaug

SEQ ID NO: 941602 - RNA, 19 nt, Artificial Sequence
  Description of Artificial Sequence: Synthetic oligonucleotide
agauaacaggacaguugug

SEQ ID NO: 941603 - RNA, 19 nt, Artificial Sequence
  Description of Artificial Sequence: Synthetic oligonucleotide
gagggaccagccauaccug

SEQ ID NO: 941604 - RNA, 19 nt, Artificial Sequence
  Description of Artificial Sequence: Synthetic oligonucleotide
gagcuuccaugugccaucc

SEQ ID NO: 941605 - RNA, 19 nt, Artificial Sequence
  Description of Artificial Sequence: Synthetic oligonucleotide
ggacaggauugguggaaag

SEQ ID NO: 941606 - RNA, 19 nt, Artificial Sequence
  Description of Artificial Sequence: Synthetic oligonucleotide
agucaggacugaagcgcac

SEQ ID NO: 941607 - RNA, 19 nt, Artificial Sequence
  Description of Artificial Sequence: Synthetic oligonucleotide
cagauacuugccauugcua

SEQ ID NO: 941608 - RNA, 19 nt, Artificial Sequence
  Description of Artificial Sequence: Synthetic oligonucleotide
auccuccgagagucauugg

SEQ ID NO: 941609 - RNA, 19 nt, Artificial Sequence
  Description of Artificial Sequence: Synthetic oligonucleotide
gucaagucagcaauacacu

SEQ ID NO: 941610 - RNA, 19 nt, Artificial Sequence
  Description of Artificial Sequence: Synthetic oligonucleotide
ccacacgaacccacaaacc

SEQ ID NO: 941611 - RNA, 19 nt, Artificial Sequence
  Description of Artificial Sequence: Synthetic oligonucleotide
cagaaggcgguggguaaag

SEQ ID NO: 941612 - RNA, 19 nt, Artificial Sequence
  Description of Artificial Sequence: Synthetic oligonucleotide
auucggacggugcggucau

SEQ ID NO: 941613 - RNA, 19 nt, Artificial Sequence
  Description of Artificial Sequence: Synthetic oligonucleotide
aagagccgcacugcacggu

SEQ ID NO: 941614 - RNA, 19 nt, Artificial Sequence
  Description of Artificial Sequence: Synthetic oligonucleotide
cuuuggcgggugcucucgc

SEQ ID NO: 941615 - RNA, 19 nt, Artificial Sequence
  Description of Artificial Sequence: Synthetic oligonucleotide
aggaagcggccagugauau

SEQ ID NO: 941616 - RNA, 19 nt, Artificial Sequence
  Description of Artificial Sequence: Synthetic oligonucleotide
cuuuagugcugcagccaga

SEQ ID NO: 941617 - RNA, 19 nt, Artificial Sequence
  Description of Artificial Sequence: Synthetic oligonucleotide
ccucguguugaagagauga

SEQ ID NO: 941618 - RNA, 19 nt, Artificial Sequence
  Description of Artificial Sequence: Synthetic oligonucleotide
acggugcggucaucagcac

SEQ ID NO: 941619 - RNA, 19 nt, Artificial Sequence
  Description of Artificial Sequence: Synthetic oligonucleotide
ggcacccagguuucuuuag

SEQ ID NO: 941620 - RNA, 19 nt, Artificial Sequence
  Description of Artificial Sequence: Synthetic oligonucleotide
accugcuacauggggagau

SEQ ID NO: 941621 - RNA, 19 nt, Artificial Sequence
  Description of Artificial Sequence: Synthetic oligonucleotide
caagaaugugguggguuga

SEQ ID NO: 941622 - RNA, 19 nt, Artificial Sequence
  Description of Artificial Sequence: Synthetic oligonucleotide
cucgcuggaugcccgcuuc

SEQ ID NO: 941623 - RNA, 19 nt, Artificial Sequence
  Description of Artificial Sequence: Synthetic oligonucleotide
cgagagucauuggagaaag

SEQ ID NO: 941624 - RNA, 19 nt, Artificial Sequence
  Description of Artificial Sequence: Synthetic oligonucleotide
gagcuuacccacugugccu

SEQ ID NO: 941625 - RNA, 19 nt, Artificial Sequence
  Description of Artificial Sequence: Synthetic oligonucleotide
aagggcuacuucggaugga

SEQ ID NO: 941626 - RNA, 19 nt, Artificial Sequence
  Description of Artificial Sequence: Synthetic oligonucleotide
caugggugucaggggagag

SEQ ID NO: 941627 - RNA, 19 nt, Artificial Sequence
  Description of Artificial Sequence: Synthetic oligonucleotide
gcggucaucagcacaggug

SEQ ID NO: 941628 - RNA, 19 nt, Artificial Sequence
  Description of Artificial Sequence: Synthetic oligonucleotide
cccaucucaggugaccugc

SEQ ID NO: 941629 - RNA, 19 nt, Artificial Sequence
  Description of Artificial Sequence: Synthetic oligonucleotide
aaccugcuacauggggaga

SEQ ID NO: 941630 - RNA, 19 nt, Artificial Sequence
  Description of Artificial Sequence: Synthetic oligonucleotide
augugguggguugauccau

SEQ ID NO: 941631 - RNA, 19 nt, Artificial Sequence
  Description of Artificial Sequence: Synthetic oligonucleotide
gaugggcgccuugugcuuc

SEQ ID NO: 941632 - RNA, 19 nt, Artificial Sequence
  Description of Artificial Sequence: Synthetic oligonucleotide
guggcuagugaaacguaaa

SEQ ID NO: 941633 - RNA, 19 nt, Artificial Sequence
  Description of Artificial Sequence: Synthetic oligonucleotide
cauucgaagcacuccuccu

SEQ ID NO: 941634 - RNA, 19 nt, Artificial Sequence
  Description of Artificial Sequence: Synthetic oligonucleotide
agacagagagagagagaga

SEQ ID NO: 941635 - RNA, 19 nt, Artificial Sequence
  Description of Artificial Sequence: Synthetic oligonucleotide
guuguguugcugaaggcuu

SEQ ID NO: 941636 - RNA, 19 nt, Artificial Sequence
  Description of Artificial Sequence: Synthetic oligonucleotide
caaccuuuggcgggugcuc

SEQ ID NO: 941637 - RNA, 19 nt, Artificial Sequence
  Description of Artificial Sequence: Synthetic oligonucleotide
gcagaguggcccuucagcu

SEQ ID NO: 941638 - RNA, 19 nt, Artificial Sequence
  Description of Artificial Sequence: Synthetic oligonucleotide
agcggccagugauaucaaa

SEQ ID NO: 941639 - RNA, 19 nt, Artificial Sequence
  Description of Artificial Sequence: Synthetic oligonucleotide
gguggcuagugaaacguaa

SEQ ID NO: 941640 - RNA, 19 nt, Artificial Sequence
  Description of Artificial Sequence: Synthetic oligonucleotide
cucgcauacugcgguguuc

SEQ ID NO: 941641 - RNA, 19 nt, Artificial Sequence
  Description of Artificial Sequence: Synthetic oligonucleotide
uacuucggauggaguguuu

SEQ ID NO: 941642 - RNA, 19 nt, Artificial Sequence
  Description of Artificial Sequence: Synthetic oligonucleotide
caaaggcucgcugcaccuc

SEQ ID NO: 941643 - RNA, 19 nt, Artificial Sequence
  Description of Artificial Sequence: Synthetic oligonucleotide
gagccgcacugcacggucc

SEQ ID NO: 941644 - RNA, 19 nt, Artificial Sequence
  Description of Artificial Sequence: Synthetic oligonucleotide
ugcccgcuucaggaggccc

SEQ ID NO: 941645 - RNA, 19 nt, Artificial Sequence
  Description of Artificial Sequence: Synthetic oligonucleotide
gcaccaagguggcaugguc

SEQ ID NO: 941646 - RNA, 19 nt, Artificial Sequence
  Description of Artificial Sequence: Synthetic oligonucleotide
uccccacgccucguguuga

SEQ ID NO: 941647 - RNA, 19 nt, Artificial Sequence
  Description of Artificial Sequence: Synthetic oligonucleotide
ggcaugguccagcuccaca

SEQ ID NO: 941648 - RNA, 19 nt, Artificial Sequence
  Description of Artificial Sequence: Synthetic oligonucleotide
aggcaacuguuugcaguca

SEQ ID NO: 941649 - RNA, 19 nt, Artificial Sequence
  Description of Artificial Sequence: Synthetic oligonucleotide
gugaacugauugggucagc

SEQ ID NO: 941650 - RNA, 19 nt, Artificial Sequence
  Description of Artificial Sequence: Synthetic oligonucleotide
agagagagagagagaucua

SEQ ID NO: 941651 - RNA, 19 nt, Artificial Sequence
  Description of Artificial Sequence: Synthetic oligonucleotide
ccaucucaggugaccugcc

SEQ ID NO: 941652 - RNA, 19 nt, Artificial Sequence
  Description of Artificial Sequence: Synthetic oligonucleotide
cugcuacauggggagauaa

SEQ ID NO: 941653 - RNA, 19 nt, Artificial Sequence
  Description of Artificial Sequence: Synthetic oligonucleotide
uggagccagugaacugauu

SEQ ID NO: 941654 - RNA, 19 nt, Artificial Sequence
  Description of Artificial Sequence: Synthetic oligonucleotide
ggaagaauacuuggaaguu

SEQ ID NO: 941655 - RNA, 19 nt, Artificial Sequence
  Description of Artificial Sequence: Synthetic oligonucleotide
gugcggucaucagcacagg

SEQ ID NO: 941656 - RNA, 19 nt, Artificial Sequence
  Description of Artificial Sequence: Synthetic oligonucleotide
gcaauacacuccccaugga

SEQ ID NO: 941657 - RNA, 19 nt, Artificial Sequence
  Description of Artificial Sequence: Synthetic oligonucleotide
ccuuuggcgggugcucucg

SEQ ID NO: 941658 - RNA, 19 nt, Artificial Sequence
  Description of Artificial Sequence: Synthetic oligonucleotide
ggagacagagagagagaga

SEQ ID NO: 941659 - RNA, 19 nt, Artificial Sequence
  Description of Artificial Sequence: Synthetic oligonucleotide
ggcgccuugugcuuccuua

SEQ ID NO: 941660 - RNA, 19 nt, Artificial Sequence
  Description of Artificial Sequence: Synthetic oligonucleotide
acgccucguguugaagaga

SEQ ID NO: 941661 - RNA, 19 nt, Artificial Sequence
  Description of Artificial Sequence: Synthetic oligonucleotide
gggagccaaaauccaucca

SEQ ID NO: 941662 - RNA, 19 nt, Artificial Sequence
  Description of Artificial Sequence: Synthetic oligonucleotide
gcuacacacuugacugccc

SEQ ID NO: 941663 - RNA, 19 nt, Artificial Sequence
  Description of Artificial Sequence: Synthetic oligonucleotide
gcggccagugauaucaaaa

SEQ ID NO: 941664 - RNA, 19 nt, Artificial Sequence
  Description of Artificial Sequence: Synthetic oligonucleotide
agguuucuuuagggcccuc

SEQ ID NO: 941665 - RNA, 19 nt, Artificial Sequence
  Description of Artificial Sequence: Synthetic oligonucleotide
ccacgccucguguugaaga

SEQ ID NO: 941666 - RNA, 19 nt, Artificial Sequence
  Description of Artificial Sequence: Synthetic oligonucleotide
gaccugccuauuucccacu

SEQ ID NO: 941667 - RNA, 19 nt, Artificial Sequence
  Description of Artificial Sequence: Synthetic oligonucleotide
ccucccaucucaggugacc

SEQ ID NO: 941668 - RNA, 19 nt, Artificial Sequence
  Description of Artificial Sequence: Synthetic oligonucleotide
gaagcgcaccaagguggca

SEQ ID NO: 941669 - RNA, 19 nt, Artificial Sequence
  Description of Artificial Sequence: Synthetic oligonucleotide
agccauaccuggagccagu

SEQ ID NO: 941670 - RNA, 19 nt, Artificial Sequence
  Description of Artificial Sequence: Synthetic oligonucleotide
gcuacuucggauggagugu

SEQ ID NO: 941671 - RNA, 19 nt, Artificial Sequence
  Description of Artificial Sequence: Synthetic oligonucleotide
gggguggcuagugaaacgu

SEQ ID NO: 941672 - RNA, 19 nt, Artificial Sequence
  Description of Artificial Sequence: Synthetic oligonucleotide
gcuuacccacugugccucc

SEQ ID NO: 941673 - RNA, 19 nt, Artificial Sequence
  Description of Artificial Sequence: Synthetic oligonucleotide
cuuacccacugugccucca

SEQ ID NO: 941674 - RNA, 19 nt, Artificial Sequence
  Description of Artificial Sequence: Synthetic oligonucleotide
ccccaauugggccaacaaa

SEQ ID NO: 941675 - RNA, 19 nt, Artificial Sequence
  Description of Artificial Sequence: Synthetic oligonucleotide
cagaaaccaccaagucaua

SEQ ID NO: 941676 - RNA, 19 nt, Artificial Sequence
  Description of Artificial Sequence: Synthetic oligonucleotide
gaccacaggaggggcuaaa

SEQ ID NO: 941677 - RNA, 19 nt, Artificial Sequence
  Description of Artificial Sequence: Synthetic oligonucleotide
cugauaggacaggauuggu

SEQ ID NO: 941678 - RNA, 19 nt, Artificial Sequence
  Description of Artificial Sequence: Synthetic oligonucleotide
caucucaggugaccugccu

SEQ ID NO: 941679 - RNA, 19 nt, Artificial Sequence
  Description of Artificial Sequence: Synthetic oligonucleotide
ggaagcggccagugauauc

SEQ ID NO: 941680 - RNA, 19 nt, Artificial Sequence
  Description of Artificial Sequence: Synthetic oligonucleotide
ggggagauaacaggacagu

SEQ ID NO: 941681 - RNA, 19 nt, Artificial Sequence
  Description of Artificial Sequence: Synthetic oligonucleotide
gccauaccuggagccagug

SEQ ID NO: 941682 - RNA, 19 nt, Artificial Sequence
  Description of Artificial Sequence: Synthetic oligonucleotide
caggacugaagcgcaccaa

SEQ ID NO: 941683 - RNA, 19 nt, Artificial Sequence
  Description of Artificial Sequence: Synthetic oligonucleotide
cuacuucggauggaguguu

SEQ ID NO: 941684 - RNA, 19 nt, Artificial Sequence
  Description of Artificial Sequence: Synthetic oligonucleotide
acgggcacccagguuucuu

SEQ ID NO: 941685 - RNA, 19 nt, Artificial Sequence
  Description of Artificial Sequence: Synthetic oligonucleotide
gcaacugauaggacaggau

SEQ ID NO: 941686 - RNA, 19 nt, Artificial Sequence
  Description of Artificial Sequence: Synthetic oligonucleotide
ccacaggaggggcuaaaua

SEQ ID NO: 941687 - RNA, 19 nt, Artificial Sequence
  Description of Artificial Sequence: Synthetic oligonucleotide
ccgagagucauuggagaaa

SEQ ID NO: 941688 - RNA, 19 nt, Artificial Sequence
  Description of Artificial Sequence: Synthetic oligonucleotide
ccauaccuggagccaguga

SEQ ID NO: 941689 - RNA, 19 nt, Artificial Sequence
  Description of Artificial Sequence: Synthetic oligonucleotide
cuucuaguuugagcucuau

SEQ ID NO: 941690 - RNA, 19 nt, Artificial Sequence
  Description of Artificial Sequence: Synthetic oligonucleotide
gccagugaacugauugggu

SEQ ID NO: 941691 - RNA, 19 nt, Artificial Sequence
  Description of Artificial Sequence: Synthetic oligonucleotide
aguggcccuucagcucaaa

SEQ ID NO: 941692 - RNA, 19 nt, Artificial Sequence
  Description of Artificial Sequence: Synthetic oligonucleotide
uucggacggugcggucauc

SEQ ID NO: 941693 - RNA, 19 nt, Artificial Sequence
  Description of Artificial Sequence: Synthetic oligonucleotide
ugggcgccuugugcuuccu

SEQ ID NO: 941694 - RNA, 19 nt, Artificial Sequence
  Description of Artificial Sequence: Synthetic oligonucleotide
agggcccuccucgggccgu

SEQ ID NO: 941695 - RNA, 19 nt, Artificial Sequence
  Description of Artificial Sequence: Synthetic oligonucleotide
ccccauggacacauucgaa

SEQ ID NO: 941696 - RNA, 19 nt, Artificial Sequence
  Description of Artificial Sequence: Synthetic oligonucleotide
gcagggagccaaaauccau

SEQ ID NO: 941697 - RNA, 19 nt, Artificial Sequence
  Description of Artificial Sequence: Synthetic oligonucleotide
cggacggugcggucaucag

SEQ ID NO: 941698 - RNA, 19 nt, Artificial Sequence
  Description of Artificial Sequence: Synthetic oligonucleotide
gccucguguugaagagaug

SEQ ID NO: 941699 - RNA, 19 nt, Artificial Sequence
  Description of Artificial Sequence: Synthetic oligonucleotide
gcgguggguaaaguugugu

SEQ ID NO: 941700 - RNA, 19 nt, Artificial Sequence
  Description of Artificial Sequence: Synthetic oligonucleotide
ggcucgcauacugcggugu

SEQ ID NO: 941701 - RNA, 19 nt, Artificial Sequence
  Description of Artificial Sequence: Synthetic oligonucleotide
ggguggcuagugaaacgua

SEQ ID NO: 941702 - RNA, 19 nt, Artificial Sequence
  Description of Artificial Sequence: Synthetic oligonucleotide
cgccucguguugaagagau

SEQ ID NO: 941703 - RNA, 19 nt, Artificial Sequence
  Description of Artificial Sequence: Synthetic oligonucleotide
cugcgguguucccgcugaa

SEQ ID NO: 941704 - RNA, 19 nt, Artificial Sequence
  Description of Artificial Sequence: Synthetic oligonucleotide
gccgcacugcacggucccc

SEQ ID NO: 941705 - RNA, 19 nt, Artificial Sequence
  Description of Artificial Sequence: Synthetic oligonucleotide
gcucgcauacugcgguguu

SEQ ID NO: 941706 - RNA, 19 nt, Artificial Sequence
  Description of Artificial Sequence: Synthetic oligonucleotide
ggcccuccucgggccgugg

SEQ ID NO: 941707 - RNA, 19 nt, Artificial Sequence
  Description of Artificial Sequence: Synthetic oligonucleotide
ccugcuacauggggagaua

SEQ ID NO: 941708 - RNA, 19 nt, Artificial Sequence
  Description of Artificial Sequence: Synthetic oligonucleotide
gggcuacuucggauggagu

SEQ ID NO: 941709 - RNA, 19 nt, Artificial Sequence
  Description of Artificial Sequence: Synthetic oligonucleotide
cucaggugaccugccuauu

SEQ ID NO: 941710 - RNA, 19 nt, Artificial Sequence
  Description of Artificial Sequence: Synthetic oligonucleotide
ccgcacugcacggucccca

SEQ ID NO: 941711 - RNA, 19 nt, Artificial Sequence
  Description of Artificial Sequence: Synthetic oligonucleotide
ccacauuggcucgcauacu

SEQ ID NO: 941712 - RNA, 19 nt, Artificial Sequence
  Description of Artificial Sequence: Synthetic oligonucleotide
cacgggcacccagguuucu

SEQ ID NO: 941713 - RNA, 19 nt, Artificial Sequence
  Description of Artificial Sequence: Synthetic oligonucleotide
gcggcaaggcauggugcuu

SEQ ID NO: 941714 - RNA, 19 nt, Artificial Sequence
  Description of Artificial Sequence: Synthetic oligonucleotide
gggcgccuugugcuuccuu

SEQ ID NO: 941715 - RNA, 19 nt, Artificial Sequence
  Description of Artificial Sequence: Synthetic oligonucleotide
cccgguggccagggguguu

SEQ ID NO: 941716 - RNA, 19 nt, Artificial Sequence
  Description of Artificial Sequence: Synthetic oligonucleotide
cggggccaccaggaagaau

SEQ ID NO: 941717 - RNA, 19 nt, Artificial Sequence
  Description of Artificial Sequence: Synthetic oligonucleotide
aauuaaaagaccguuuggc

SEQ ID NO: 941718 - RNA, 19 nt, Artificial Sequence
  Description of Artificial Sequence: Synthetic oligonucleotide
auaccaugaggcuugaacc

SEQ ID NO: 941719 - RNA, 19 nt, Artificial Sequence
  Description of Artificial Sequence: Synthetic oligonucleotide
agucuaaagaguuuauucg

SEQ ID NO: 941720 - RNA, 19 nt, Artificial Sequence
  Description of Artificial Sequence: Synthetic oligonucleotide
agauccauagguccgaccc

SEQ ID NO: 941721 - RNA, 19 nt, Artificial Sequence
  Description of Artificial Sequence: Synthetic oligonucleotide
uaaaagaccguuuggcugg

SEQ ID NO: 941722 - RNA, 19 nt, Artificial Sequence
  Description of Artificial Sequence: Synthetic oligonucleotide
uuccucaauuaaaagaccg

SEQ ID NO: 941723 - RNA, 19 nt, Artificial Sequence
  Description of Artificial Sequence: Synthetic oligonucleotide
cugacuaggacugagaugc

SEQ ID NO: 941724 - RNA, 19 nt, Artificial Sequence
  Description of Artificial Sequence: Synthetic oligonucleotide
uuugugcucagcaaugagg

SEQ ID NO: 941725 - RNA, 19 nt, Artificial Sequence
  Description of Artificial Sequence: Synthetic oligonucleotide
aguuuauucggaaaaggcc

SEQ ID NO: 941726 - RNA, 19 nt, Artificial Sequence
  Description of Artificial Sequence: Synthetic oligonucleotide
uucagugaccaccagggcg

SEQ ID NO: 941727 - RNA, 19 nt, Artificial Sequence
  Description of Artificial Sequence: Synthetic oligonucleotide
uuuuaaaugccucaaccuc

SEQ ID NO: 941728 - RNA, 19 nt, Artificial Sequence
  Description of Artificial Sequence: Synthetic oligonucleotide
uuaggguuuguucacaaac

SEQ ID NO: 941729 - RNA, 19 nt, Artificial Sequence
  Description of Artificial Sequence: Synthetic oligonucleotide
ugagaugcaccucuaaggc

SEQ ID NO: 941730 - RNA, 19 nt, Artificial Sequence
  Description of Artificial Sequence: Synthetic oligonucleotide
gucuaaagaguuuauucgg

SEQ ID NO: 941731 - RNA, 19 nt, Artificial Sequence
  Description of Artificial Sequence: Synthetic oligonucleotide
ucuaaagaguuuauucgga

SEQ ID NO: 941732 - RNA, 19 nt, Artificial Sequence
  Description of Artificial Sequence: Synthetic oligonucleotide
cucagagucauccacuggg

SEQ ID NO: 941733 - RNA, 19 nt, Artificial Sequence
  Description of Artificial Sequence: Synthetic oligonucleotide
aaugccucaaccuccuuga

SEQ ID NO: 941734 - RNA, 19 nt, Artificial Sequence
  Description of Artificial Sequence: Synthetic oligonucleotide
cugagaugcaccucuaagg

SEQ ID NO: 941735 - RNA, 19 nt, Artificial Sequence
  Description of Artificial Sequence: Synthetic oligonucleotide
ucuaggguaccucuggccc

SEQ ID NO: 941736 - RNA, 19 nt, Artificial Sequence
  Description of Artificial Sequence: Synthetic oligonucleotide
auaggagugauucucuuca

SEQ ID NO: 941737 - RNA, 19 nt, Artificial Sequence
  Description of Artificial Sequence: Synthetic oligonucleotide
accgagaagagccaacaac

SEQ ID NO: 941738 - RNA, 19 nt, Artificial Sequence
  Description of Artificial Sequence: Synthetic oligonucleotide
ugaggaugcguguaaugcg

SEQ ID NO: 941739 - RNA, 19 nt, Artificial Sequence
  Description of Artificial Sequence: Synthetic oligonucleotide
acuggaacacgccuggccg

SEQ ID NO: 941740 - RNA, 19 nt, Artificial Sequence
  Description of Artificial Sequence: Synthetic oligonucleotide
uacccugucauccuggacu

SEQ ID NO: 941741 - RNA, 19 nt, Artificial Sequence
  Description of Artificial Sequence: Synthetic oligonucleotide
agaggaaacagccacugga

SEQ ID NO: 941742 - RNA, 19 nt, Artificial Sequence
  Description of Artificial Sequence: Synthetic oligonucleotide
cuggauauaggagugauuc

SEQ ID NO: 941743 - RNA, 19 nt, Artificial Sequence
  Description of Artificial Sequence: Synthetic oligonucleotide
gaguuuauucggaaaaggc

SEQ ID NO: 941744 - RNA, 19 nt, Artificial Sequence
  Description of Artificial Sequence: Synthetic oligonucleotide
ggagugauucucuucaagg

SEQ ID NO: 941745 - RNA, 19 nt, Artificial Sequence
  Description of Artificial Sequence: Synthetic oligonucleotide
agaguuuauucggaaaagg

SEQ ID NO: 941746 - RNA, 19 nt, Artificial Sequence
  Description of Artificial Sequence: Synthetic oligonucleotide
uuuccucaauuaaaagacc

SEQ ID NO: 941747 - RNA, 19 nt, Artificial Sequence
  Description of Artificial Sequence: Synthetic oligonucleotide
acugagaugcaccucuaag

SEQ ID NO: 941748 - RNA, 19 nt, Artificial Sequence
  Description of Artificial Sequence: Synthetic oligonucleotide
ucagguuagacaugucgcc

SEQ ID NO: 941749 - RNA, 19 nt, Artificial Sequence
  Description of Artificial Sequence: Synthetic oligonucleotide
uugaggaugcguguaaugc

SEQ ID NO: 941750 - RNA, 19 nt, Artificial Sequence
  Description of Artificial Sequence: Synthetic oligonucleotide
uccggguaguccaugcucg

SEQ ID NO: 941751 - RNA, 19 nt, Artificial Sequence
  Description of Artificial Sequence: Synthetic oligonucleotide
ugacuguucagguugugga

SEQ ID NO: 941752 - RNA, 19 nt, Artificial Sequence
  Description of Artificial Sequence: Synthetic oligonucleotide
uuagacaugucgccauugc

SEQ ID NO: 941753 - RNA, 19 nt, Artificial Sequence
  Description of Artificial Sequence: Synthetic oligonucleotide
acuggcuacuccaucaccc

SEQ ID NO: 941754 - RNA, 19 nt, Artificial Sequence
  Description of Artificial Sequence: Synthetic oligonucleotide
aagaccguuuggcuggaag

SEQ ID NO: 941755 - RNA, 19 nt, Artificial Sequence
  Description of Artificial Sequence: Synthetic oligonucleotide
ccagacuaagaaaagaggc

SEQ ID NO: 941756 - RNA, 19 nt, Artificial Sequence
  Description of Artificial Sequence: Synthetic oligonucleotide
agagcuuuuaaaugccuca

SEQ ID NO: 941757 - RNA, 19 nt, Artificial Sequence
  Description of Artificial Sequence: Synthetic oligonucleotide
agacccuuaggguuuguuc

SEQ ID NO: 941758 - RNA, 19 nt, Artificial Sequence
  Description of Artificial Sequence: Synthetic oligonucleotide
gaugguuacuggcuacucc

SEQ ID NO: 941759 - RNA, 19 nt, Artificial Sequence
  Description of Artificial Sequence: Synthetic oligonucleotide
ugaucugccaaauccgggu

SEQ ID NO: 941760 - RNA, 19 nt, Artificial Sequence
  Description of Artificial Sequence: Synthetic oligonucleotide
gaggcuugaaccuccgcag

SEQ ID NO: 941761 - RNA, 19 nt, Artificial Sequence
  Description of Artificial Sequence: Synthetic oligonucleotide
uggcaccagacuaagaaaa

SEQ ID NO: 941762 - RNA, 19 nt, Artificial Sequence
  Description of Artificial Sequence: Synthetic oligonucleotide
aguaccaucaguggccggg

SEQ ID NO: 941763 - RNA, 19 nt, Artificial Sequence
  Description of Artificial Sequence: Synthetic oligonucleotide
uucggaaaaggccucacuu

SEQ ID NO: 941764 - RNA, 19 nt, Artificial Sequence
  Description of Artificial Sequence: Synthetic oligonucleotide
ucagugugaugguuacugg

SEQ ID NO: 941765 - RNA, 19 nt, Artificial Sequence
  Description of Artificial Sequence: Synthetic oligonucleotide
ucaaguuggaucccauaaa

SEQ ID NO: 941766 - RNA, 19 nt, Artificial Sequence
  Description of Artificial Sequence: Synthetic oligonucleotide
ucggaaaaggccucacuug

SEQ ID NO: 941767 - RNA, 19 nt, Artificial Sequence
  Description of Artificial Sequence: Synthetic oligonucleotide
uuuauucggaaaaggccuc

SEQ ID NO: 941768 - RNA, 19 nt, Artificial Sequence
  Description of Artificial Sequence: Synthetic oligonucleotide
agugcucuaagcccagcuc

SEQ ID NO: 941769 - RNA, 19 nt, Artificial Sequence
  Description of Artificial Sequence: Synthetic oligonucleotide
ugguagugcucuaagccca

SEQ ID NO: 941770 - RNA, 19 nt, Artificial Sequence
  Description of Artificial Sequence: Synthetic oligonucleotide
uuaucugacuccccuggga

SEQ ID NO: 941771 - RNA, 19 nt, Artificial Sequence
  Description of Artificial Sequence: Synthetic oligonucleotide
uuucgguacccugucaucc

SEQ ID NO: 941772 - RNA, 19 nt, Artificial Sequence
  Description of Artificial Sequence: Synthetic oligonucleotide
ugaagugcucccaugcaaa

SEQ ID NO: 941773 - RNA, 19 nt, Artificial Sequence
  Description of Artificial Sequence: Synthetic oligonucleotide
uccguuaucugacuccccu

SEQ ID NO: 941774 - RNA, 19 nt, Artificial Sequence
  Description of Artificial Sequence: Synthetic oligonucleotide
gacccuuaggguuuguuca

SEQ ID NO: 941775 - RNA, 19 nt, Artificial Sequence
  Description of Artificial Sequence: Synthetic oligonucleotide
uccgcagcuugucacgggg

SEQ ID NO: 941776 - RNA, 19 nt, Artificial Sequence
  Description of Artificial Sequence: Synthetic oligonucleotide
auccuuaucugccugcccu

SEQ ID NO: 941777 - RNA, 19 nt, Artificial Sequence
  Description of Artificial Sequence: Synthetic oligonucleotide
cagacaaacuggcagcgag

SEQ ID NO: 941778 - RNA, 19 nt, Artificial Sequence
  Description of Artificial Sequence: Synthetic oligonucleotide
agacaugucgccauugcag

SEQ ID NO: 941779 - RNA, 19 nt, Artificial Sequence
  Description of Artificial Sequence: Synthetic oligonucleotide
gaugcguguaaugcgcagg

SEQ ID NO: 941780 - RNA, 19 nt, Artificial Sequence
  Description of Artificial Sequence: Synthetic oligonucleotide
agugugaggggcuuggcau

SEQ ID NO: 941781 - RNA, 19 nt, Artificial Sequence
  Description of Artificial Sequence: Synthetic oligonucleotide
uagacaugucgccauugca

SEQ ID NO: 941782 - RNA, 19 nt, Artificial Sequence
  Description of Artificial Sequence: Synthetic oligonucleotide
ucagcaaugagggauccuc

SEQ ID NO: 941783 - RNA, 19 nt, Artificial Sequence
  Description of Artificial Sequence: Synthetic oligonucleotide
aaagucuaaagaguuuauu

SEQ ID NO: 941784 - RNA, 19 nt, Artificial Sequence
  Description of Artificial Sequence: Synthetic oligonucleotide
uugugaagaauuuccucaa

SEQ ID NO: 941785 - RNA, 19 nt, Artificial Sequence
  Description of Artificial Sequence: Synthetic oligonucleotide
gugucggcaacgcacggcg

SEQ ID NO: 941786 - RNA, 19 nt, Artificial Sequence
  Description of Artificial Sequence: Synthetic oligonucleotide
cuuggcaccagacuaagaa

SEQ ID NO: 941787 - RNA, 19 nt, Artificial Sequence
  Description of Artificial Sequence: Synthetic oligonucleotide
gcugugacuguucagguug

SEQ ID NO: 941788 - RNA, 19 nt, Artificial Sequence
  Description of Artificial Sequence: Synthetic oligonucleotide
cauaggcccggacaagacg

SEQ ID NO: 941789 - RNA, 19 nt, Artificial Sequence
  Description of Artificial Sequence: Synthetic oligonucleotide
ccuaguaccaucaguggcc

SEQ ID NO: 941790 - RNA, 19 nt, Artificial Sequence
  Description of Artificial Sequence: Synthetic oligonucleotide
caccucuaaggcuuugggg

SEQ ID NO: 941791 - RNA, 19 nt, Artificial Sequence
  Description of Artificial Sequence: Synthetic oligonucleotide
agugcucccaugcaaagua

SEQ ID NO: 941792 - RNA, 19 nt, Artificial Sequence
  Description of Artificial Sequence: Synthetic oligonucleotide
gacuggaacacgccuggcc

SEQ ID NO: 941793 - RNA, 19 nt, Artificial Sequence
  Description of Artificial Sequence: Synthetic oligonucleotide
guuuauucggaaaaggccu

SEQ ID NO: 941794 - RNA, 19 nt, Artificial Sequence
  Description of Artificial Sequence: Synthetic oligonucleotide
uacacaagcucccggcgcu

SEQ ID NO: 941795 - RNA, 19 nt, Artificial Sequence
  Description of Artificial Sequence: Synthetic oligonucleotide
gaggaugcguguaaugcgc

SEQ ID NO: 941796 - RNA, 19 nt, Artificial Sequence
  Description of Artificial Sequence: Synthetic oligonucleotide
ugggauuccuguaguguca

SEQ ID NO: 941797 - RNA, 19 nt, Artificial Sequence
  Description of Artificial Sequence: Synthetic oligonucleotide
acuguucagguuguggaag

SEQ ID NO: 941798 - RNA, 19 nt, Artificial Sequence
  Description of Artificial Sequence: Synthetic oligonucleotide
ugaaggcguaaggaggcgg

SEQ ID NO: 941799 - RNA, 19 nt, Artificial Sequence
  Description of Artificial Sequence: Synthetic oligonucleotide
uccuccguuaucugacucc

SEQ ID NO: 941800 - RNA, 19 nt, Artificial Sequence
  Description of Artificial Sequence: Synthetic oligonucleotide
aucccauaaaagcccagca

SEQ ID NO: 941801 - RNA, 19 nt, Artificial Sequence
  Description of Artificial Sequence: Synthetic oligonucleotide
ucccauaaaagcccagcau

SEQ ID NO: 941802 - RNA, 19 nt, Artificial Sequence
  Description of Artificial Sequence: Synthetic oligonucleotide
aguuucgguacccugucau

SEQ ID NO: 941803 - RNA, 19 nt, Artificial Sequence
  Description of Artificial Sequence: Synthetic oligonucleotide
auuugugcuguaccagugu

SEQ ID NO: 941804 - RNA, 19 nt, Artificial Sequence
  Description of Artificial Sequence: Synthetic oligonucleotide
gaaggcguaaggaggcggg

SEQ ID NO: 941805 - RNA, 19 nt, Artificial Sequence
  Description of Artificial Sequence: Synthetic oligonucleotide
gaagaagcggaccagcggu

SEQ ID NO: 941806 - RNA, 19 nt, Artificial Sequence
  Description of Artificial Sequence: Synthetic oligonucleotide
caaaguacacaagcucccg

SEQ ID NO: 941807 - RNA, 19 nt, Artificial Sequence
  Description of Artificial Sequence: Synthetic oligonucleotide
agcucgccaguuucgguac

SEQ ID NO: 941808 - RNA, 19 nt, Artificial Sequence
  Description of Artificial Sequence: Synthetic oligonucleotide
aguccaggacacucugacg

SEQ ID NO: 941809 - RNA, 19 nt, Artificial Sequence
  Description of Artificial Sequence: Synthetic oligonucleotide
cuugaggaugcguguaaug

SEQ ID NO: 941810 - RNA, 19 nt, Artificial Sequence
  Description of Artificial Sequence: Synthetic oligonucleotide
uggauauaggagugauucu

SEQ ID NO: 941811 - RNA, 19 nt, Artificial Sequence
  Description of Artificial Sequence: Synthetic oligonucleotide
agacaaccccugcaguggg

SEQ ID NO: 941812 - RNA, 19 nt, Artificial Sequence
  Description of Artificial Sequence: Synthetic oligonucleotide
cuggugucggcaacgcacg

SEQ ID NO: 941813 - RNA, 19 nt, Artificial Sequence
  Description of Artificial Sequence: Synthetic oligonucleotide
uuggcaugccaguuuacuc

SEQ ID NO: 941814 - RNA, 19 nt, Artificial Sequence
  Description of Artificial Sequence: Synthetic oligonucleotide
ugugcuguaccagugucuc

SEQ ID NO: 941815 - RNA, 19 nt, Artificial Sequence
  Description of Artificial Sequence: Synthetic oligonucleotide
ugugaagaauuuccucaau

SEQ ID NO: 941816 - RNA, 19 nt, Artificial Sequence
  Description of Artificial Sequence: Synthetic oligonucleotide
cuaguaccaucaguggccg

SEQ ID NO: 941817 - RNA, 19 nt, Artificial Sequence
  Description of Artificial Sequence: Synthetic oligonucleotide
caaguuggaucccauaaaa

SEQ ID NO: 941818 - RNA, 19 nt, Artificial Sequence
  Description of Artificial Sequence: Synthetic oligonucleotide
gacaagacgcucuuugacu

SEQ ID NO: 941819 - RNA, 19 nt, Artificial Sequence
  Description of Artificial Sequence: Synthetic oligonucleotide
ucaucgcccguaucauccg

SEQ ID NO: 941820 - RNA, 19 nt, Artificial Sequence
  Description of Artificial Sequence: Synthetic oligonucleotide
cagagcuuuuaaaugccuc

SEQ ID NO: 941821 - RNA, 19 nt, Artificial Sequence
  Description of Artificial Sequence: Synthetic oligonucleotide
aauccggguaguggugccg

SEQ ID NO: 941822 - RNA, 19 nt, Artificial Sequence
  Description of Artificial Sequence: Synthetic oligonucleotide
auccuggacuggaacacgc

SEQ ID NO: 941823 - RNA, 19 nt, Artificial Sequence
  Description of Artificial Sequence: Synthetic oligonucleotide
acuaagaaaagaggccccu

SEQ ID NO: 941824 - RNA, 19 nt, Artificial Sequence
  Description of Artificial Sequence: Synthetic oligonucleotide
uuacuccugguucccucag

SEQ ID NO: 941825 - RNA, 19 nt, Artificial Sequence
  Description of Artificial Sequence: Synthetic oligonucleotide
ucauaggcccggacaagac

SEQ ID NO: 941826 - RNA, 19 nt, Artificial Sequence
  Description of Artificial Sequence: Synthetic oligonucleotide
cuuuugggccucagggccc

SEQ ID NO: 941827 - RNA, 19 nt, Artificial Sequence
  Description of Artificial Sequence: Synthetic oligonucleotide
ggauauaggagugauucuc

SEQ ID NO: 941828 - RNA, 19 nt, Artificial Sequence
  Description of Artificial Sequence: Synthetic oligonucleotide
cauagcucgccaguuucgg

SEQ ID NO: 941829 - RNA, 19 nt, Artificial Sequence
  Description of Artificial Sequence: Synthetic oligonucleotide
agcgacuugaggaugcgug

SEQ ID NO: 941830 - RNA, 19 nt, Artificial Sequence
  Description of Artificial Sequence: Synthetic oligonucleotide
ugcacggcagacggcaccg

SEQ ID NO: 941831 - RNA, 19 nt, Artificial Sequence
  Description of Artificial Sequence: Synthetic oligonucleotide
uuauucggaaaaggccuca

SEQ ID NO: 941832 - RNA, 19 nt, Artificial Sequence
  Description of Artificial Sequence: Synthetic oligonucleotide
augcguguaaugcgcaggu

SEQ ID NO: 941833 - RNA, 19 nt, Artificial Sequence
  Description of Artificial Sequence: Synthetic oligonucleotide
caacgcacggcgaacagga

SEQ ID NO: 941834 - RNA, 19 nt, Artificial Sequence
  Description of Artificial Sequence: Synthetic oligonucleotide
cugucagugugaugguuac

SEQ ID NO: 941835 - RNA, 19 nt, Artificial Sequence
  Description of Artificial Sequence: Synthetic oligonucleotide
uccugcauagcucgccagu

SEQ ID NO: 941836 - RNA, 19 nt, Artificial Sequence
  Description of Artificial Sequence: Synthetic oligonucleotide
acucaggucccuuccagau

SEQ ID NO: 941837 - RNA, 19 nt, Artificial Sequence
  Description of Artificial Sequence: Synthetic oligonucleotide
auucggaaaaggccucacu

SEQ ID NO: 941838 - RNA, 19 nt, Artificial Sequence
  Description of Artificial Sequence: Synthetic oligonucleotide
cuugaaccuccgcagcuug

SEQ ID NO: 941839 - RNA, 19 nt, Artificial Sequence
  Description of Artificial Sequence: Synthetic oligonucleotide
guaccucuggcccucuggc

SEQ ID NO: 941840 - RNA, 19 nt, Artificial Sequence
  Description of Artificial Sequence: Synthetic oligonucleotide
cccagcaugaguucauagg

SEQ ID NO: 941841 - RNA, 19 nt, Artificial Sequence
  Description of Artificial Sequence: Synthetic oligonucleotide
agacaaacuggcagcgagg

SEQ ID NO: 941842 - RNA, 19 nt, Artificial Sequence
  Description of Artificial Sequence: Synthetic oligonucleotide
uccaucguuccuccguuau

SEQ ID NO: 941843 - RNA, 19 nt, Artificial Sequence
  Description of Artificial Sequence: Synthetic oligonucleotide
auauaggagugauucucuu

SEQ ID NO: 941844 - RNA, 19 nt, Artificial Sequence
  Description of Artificial Sequence: Synthetic oligonucleotide
ggcaauuugugcuguacca

SEQ ID NO: 941845 - RNA, 19 nt, Artificial Sequence
  Description of Artificial Sequence: Synthetic oligonucleotide
caugaggcuugaaccuccg

SEQ ID NO: 941846 - RNA, 19 nt, Artificial Sequence
  Description of Artificial Sequence: Synthetic oligonucleotide
gcguguaaugcgcagguug

SEQ ID NO: 941847 - RNA, 19 nt, Artificial Sequence
  Description of Artificial Sequence: Synthetic oligonucleotide
gacggcaccggugucccgg

SEQ ID NO: 941848 - RNA, 19 nt, Artificial Sequence
  Description of Artificial Sequence: Synthetic oligonucleotide
agcggugccugguagugcu

SEQ ID NO: 941849 - RNA, 19 nt, Artificial Sequence
  Description of Artificial Sequence: Synthetic oligonucleotide
caaacuggcagcgaggucu

SEQ ID NO: 941850 - RNA, 19 nt, Artificial Sequence
  Description of Artificial Sequence: Synthetic oligonucleotide
gcgaacaggaaguagucca

SEQ ID NO: 941851 - RNA, 19 nt, Artificial Sequence
  Description of Artificial Sequence: Synthetic oligonucleotide
uagcucgccaguuucggua

SEQ ID NO: 941852 - RNA, 19 nt, Artificial Sequence
  Description of Artificial Sequence: Synthetic oligonucleotide
gauauaggagugauucucu

SEQ ID NO: 941853 - RNA, 19 nt, Artificial Sequence
  Description of Artificial Sequence: Synthetic oligonucleotide
guuagacaugucgccauug

SEQ ID NO: 941854 - RNA, 19 nt, Artificial Sequence
  Description of Artificial Sequence: Synthetic oligonucleotide
gugccgguaccuuugcaug

SEQ ID NO: 941855 - RNA, 19 nt, Artificial Sequence
  Description of Artificial Sequence: Synthetic oligonucleotide
cuggcagcgaggucugaag

SEQ ID NO: 941856 - RNA, 19 nt, Artificial Sequence
  Description of Artificial Sequence: Synthetic oligonucleotide
ucgguacccugucauccug

SEQ ID NO: 941857 - RNA, 19 nt, Artificial Sequence
  Description of Artificial Sequence: Synthetic oligonucleotide
acggcgaacaggaaguagu

SEQ ID NO: 941858 - RNA, 19 nt, Artificial Sequence
  Description of Artificial Sequence: Synthetic oligonucleotide
ugccaguuuacuccugguu

SEQ ID NO: 941859 - RNA, 19 nt, Artificial Sequence
  Description of Artificial Sequence: Synthetic oligonucleotide
gccaguuuacuccugguuc

SEQ ID NO: 941860 - RNA, 19 nt, Artificial Sequence
  Description of Artificial Sequence: Synthetic oligonucleotide
acucugacgcacgcugggc

SEQ ID NO: 941861 - RNA, 19 nt, Artificial Sequence
  Description of Artificial Sequence: Synthetic oligonucleotide
uucgguacccugucauccu

SEQ ID NO: 941862 - RNA, 19 nt, Artificial Sequence
  Description of Artificial Sequence: Synthetic oligonucleotide
cacucugacgcacgcuggg

SEQ ID NO: 941863 - RNA, 19 nt, Artificial Sequence
  Description of Artificial Sequence: Synthetic oligonucleotide
caaugagggauccucagcu

SEQ ID NO: 941864 - RNA, 19 nt, Artificial Sequence
  Description of Artificial Sequence: Synthetic oligonucleotide
ugugaggggcuuggcaugc

SEQ ID NO: 941865 - RNA, 19 nt, Artificial Sequence
  Description of Artificial Sequence: Synthetic oligonucleotide
cagaggaaacagccacugg

SEQ ID NO: 941866 - RNA, 19 nt, Artificial Sequence
  Description of Artificial Sequence: Synthetic oligonucleotide
cuuuggggcucagugacuc

SEQ ID NO: 941867 - RNA, 19 nt, Artificial Sequence
  Description of Artificial Sequence: Synthetic oligonucleotide
gguaccuuugcauguccug

SEQ ID NO: 941868 - RNA, 19 nt, Artificial Sequence
  Description of Artificial Sequence: Synthetic oligonucleotide
ggacaagacgcucuuugac

SEQ ID NO: 941869 - RNA, 19 nt, Artificial Sequence
  Description of Artificial Sequence: Synthetic oligonucleotide
ugggcugacuaggacugag

SEQ ID NO: 941870 - RNA, 19 nt, Artificial Sequence
  Description of Artificial Sequence: Synthetic oligonucleotide
aucgcccguaucauccgcc

SEQ ID NO: 941871 - RNA, 19 nt, Artificial Sequence
  Description of Artificial Sequence: Synthetic oligonucleotide
uggugucggcaacgcacgg

SEQ ID NO: 941872 - RNA, 19 nt, Artificial Sequence
  Description of Artificial Sequence: Synthetic oligonucleotide
ugggcaauuugugcuguac

SEQ ID NO: 941873 - RNA, 19 nt, Artificial Sequence
  Description of Artificial Sequence: Synthetic oligonucleotide
gcaauuugugcuguaccag

SEQ ID NO: 941874 - RNA, 19 nt, Artificial Sequence
  Description of Artificial Sequence: Synthetic oligonucleotide
gcccguaucauccgccugg

SEQ ID NO: 941875 - RNA, 19 nt, Artificial Sequence
  Description of Artificial Sequence: Synthetic oligonucleotide
uggaagcguggcuggaagu

SEQ ID NO: 941876 - RNA, 19 nt, Artificial Sequence
  Description of Artificial Sequence: Synthetic oligonucleotide
aacacgccuggccgugucu

SEQ ID NO: 941877 - RNA, 19 nt, Artificial Sequence
  Description of Artificial Sequence: Synthetic oligonucleotide
guggccgggguauaccaug

SEQ ID NO: 941878 - RNA, 19 nt, Artificial Sequence
  Description of Artificial Sequence: Synthetic oligonucleotide
cauccuuaucugccugccc

SEQ ID NO: 941879 - RNA, 19 nt, Artificial Sequence
  Description of Artificial Sequence: Synthetic oligonucleotide
uugaaccuccgcagcuugu

SEQ ID NO: 941880 - RNA, 19 nt, Artificial Sequence
  Description of Artificial Sequence: Synthetic oligonucleotide
auagcucgccaguuucggu

SEQ ID NO: 941881 - RNA, 19 nt, Artificial Sequence
  Description of Artificial Sequence: Synthetic oligonucleotide
aaacuggcagcgaggucug

SEQ ID NO: 941882 - RNA, 19 nt, Artificial Sequence
  Description of Artificial Sequence: Synthetic oligonucleotide
cagauccauagguccgacc

SEQ ID NO: 941883 - RNA, 19 nt, Artificial Sequence
  Description of Artificial Sequence: Synthetic oligonucleotide
cgguccucaaguuggaucc

SEQ ID NO: 941884 - RNA, 19 nt, Artificial Sequence
  Description of Artificial Sequence: Synthetic oligonucleotide
gcaaugagggauccucagc

SEQ ID NO: 941885 - RNA, 19 nt, Artificial Sequence
  Description of Artificial Sequence: Synthetic oligonucleotide
uggccgggguauaccauga

SEQ ID NO: 941886 - RNA, 19 nt, Artificial Sequence
  Description of Artificial Sequence: Synthetic oligonucleotide
guuucgguacccugucauc

SEQ ID NO: 941887 - RNA, 19 nt, Artificial Sequence
  Description of Artificial Sequence: Synthetic oligonucleotide
ugguuacuggcuacuccau

SEQ ID NO: 941888 - RNA, 19 nt, Artificial Sequence
  Description of Artificial Sequence: Synthetic oligonucleotide
gccgggguauaccaugagg

SEQ ID NO: 941889 - RNA, 19 nt, Artificial Sequence
  Description of Artificial Sequence: Synthetic oligonucleotide
aggaggucauaguugucuu

SEQ ID NO: 941890 - RNA, 19 nt, Artificial Sequence
  Description of Artificial Sequence: Synthetic oligonucleotide
gcugacuaggacugagaug

SEQ ID NO: 941891 - RNA, 19 nt, Artificial Sequence
  Description of Artificial Sequence: Synthetic oligonucleotide
ugaugguuacuggcuacuc

SEQ ID NO: 941892 - RNA, 19 nt, Artificial Sequence
  Description of Artificial Sequence: Synthetic oligonucleotide
aaaagaccguuuggcugga

SEQ ID NO: 941893 - RNA, 19 nt, Artificial Sequence
  Description of Artificial Sequence: Synthetic oligonucleotide
uaguaccaucaguggccgg

SEQ ID NO: 941894 - RNA, 19 nt, Artificial Sequence
  Description of Artificial Sequence: Synthetic oligonucleotide
gacgacaucucagagucau

SEQ ID NO: 941895 - RNA, 19 nt, Artificial Sequence
  Description of Artificial Sequence: Synthetic oligonucleotide
accguuuggcuggaagcag

SEQ ID NO: 941896 - RNA, 19 nt, Artificial Sequence
  Description of Artificial Sequence: Synthetic oligonucleotide
gaucugccaaauccgggua

SEQ ID NO: 941897 - RNA, 19 nt, Artificial Sequence
  Description of Artificial Sequence: Synthetic oligonucleotide
cauccuggggcuuugugcu

SEQ ID NO: 941898 - RNA, 19 nt, Artificial Sequence
  Description of Artificial Sequence: Synthetic oligonucleotide
agguccgacccugggugcc

SEQ ID NO: 941899 - RNA, 19 nt, Artificial Sequence
  Description of Artificial Sequence: Synthetic oligonucleotide
gagaugcaccucuaaggcu

SEQ ID NO: 941900 - RNA, 19 nt, Artificial Sequence
  Description of Artificial Sequence: Synthetic oligonucleotide
ugacuaggacugagaugca

SEQ ID NO: 941901 - RNA, 19 nt, Artificial Sequence
  Description of Artificial Sequence: Synthetic oligonucleotide
gucgccauugcagucuuga

SEQ ID NO: 941902 - RNA, 19 nt, Artificial Sequence
  Description of Artificial Sequence: Synthetic oligonucleotide
guccggguaguccaugcuc

SEQ ID NO: 941903 - RNA, 19 nt, Artificial Sequence
  Description of Artificial Sequence: Synthetic oligonucleotide
ugacgacaucucagaguca

SEQ ID NO: 941904 - RNA, 19 nt, Artificial Sequence
  Description of Artificial Sequence: Synthetic oligonucleotide
caguuuacuccugguuccc

SEQ ID NO: 941905 - RNA, 19 nt, Artificial Sequence
  Description of Artificial Sequence: Synthetic oligonucleotide
aguccggguaguccaugcu

SEQ ID NO: 941906 - RNA, 19 nt, Artificial Sequence
  Description of Artificial Sequence: Synthetic oligonucleotide
augccaguuuacuccuggu

SEQ ID NO: 941907 - RNA, 19 nt, Artificial Sequence
  Description of Artificial Sequence: Synthetic oligonucleotide
acacucugacgcacgcugg

SEQ ID NO: 941908 - RNA, 19 nt, Artificial Sequence
  Description of Artificial Sequence: Synthetic oligonucleotide
uccuuaucugccugcccua

SEQ ID NO: 941909 - RNA, 19 nt, Artificial Sequence
  Description of Artificial Sequence: Synthetic oligonucleotide
ggaugcguguaaugcgcag

SEQ ID NO: 941910 - RNA, 19 nt, Artificial Sequence
  Description of Artificial Sequence: Synthetic oligonucleotide
caucgcccguaucauccgc

SEQ ID NO: 941911 - RNA, 19 nt, Artificial Sequence
  Description of Artificial Sequence: Synthetic oligonucleotide
cuuaggguuuguucacaaa

SEQ ID NO: 941912 - RNA, 19 nt, Artificial Sequence
  Description of Artificial Sequence: Synthetic oligonucleotide
gacugagaugcaccucuaa

SEQ ID NO: 941913 - RNA, 19 nt, Artificial Sequence
  Description of Artificial Sequence: Synthetic oligonucleotide
ccaugaggcuugaaccucc

SEQ ID NO: 941914 - RNA, 19 nt, Artificial Sequence
  Description of Artificial Sequence: Synthetic oligonucleotide
acgcacgcugggcaauuug

SEQ ID NO: 941915 - RNA, 19 nt, Artificial Sequence
  Description of Artificial Sequence: Synthetic oligonucleotide
cagcuugucacggggcccc

SEQ ID NO: 941916 - RNA, 19 nt, Artificial Sequence
  Description of Artificial Sequence: Synthetic oligonucleotide
ggcaccagacuaagaaaag

SEQ ID NO: 941917 - RNA, 19 nt, Artificial Sequence
  Description of Artificial Sequence: Synthetic oligonucleotide
ucucguccucccaggugga

SEQ ID NO: 941918 - RNA, 19 nt, Artificial Sequence
  Description of Artificial Sequence: Synthetic oligonucleotide
cuggccgugucuccuccgc

SEQ ID NO: 941919 - RNA, 19 nt, Artificial Sequence
  Description of Artificial Sequence: Synthetic oligonucleotide
cuugcucucuuuggggcuc

SEQ ID NO: 941920 - RNA, 19 nt, Artificial Sequence
  Description of Artificial Sequence: Synthetic oligonucleotide
acuugaggaugcguguaau

SEQ ID NO: 941921 - RNA, 19 nt, Artificial Sequence
  Description of Artificial Sequence: Synthetic oligonucleotide
ggggcucagugacucagcc

SEQ ID NO: 941922 - RNA, 19 nt, Artificial Sequence
  Description of Artificial Sequence: Synthetic oligonucleotide
cucgccaguuucgguaccc

SEQ ID NO: 941923 - RNA, 19 nt, Artificial Sequence
  Description of Artificial Sequence: Synthetic oligonucleotide
ucgcccguaucauccgccu

SEQ ID NO: 941924 - RNA, 19 nt, Artificial Sequence
  Description of Artificial Sequence: Synthetic oligonucleotide
ccggacaagacgcucuuug

SEQ ID NO: 941925 - RNA, 19 nt, Artificial Sequence
  Description of Artificial Sequence: Synthetic oligonucleotide
cagguuagacaugucgcca

SEQ ID NO: 941926 - RNA, 19 nt, Artificial Sequence
  Description of Artificial Sequence: Synthetic oligonucleotide
cuccguuaucugacucccc

SEQ ID NO: 941927 - RNA, 19 nt, Artificial Sequence
  Description of Artificial Sequence: Synthetic oligonucleotide
ggaaaaggccucacuuggc

SEQ ID NO: 941928 - RNA, 19 nt, Artificial Sequence
  Description of Artificial Sequence: Synthetic oligonucleotide
ugucggcaacgcacggcga

SEQ ID NO: 941929 - RNA, 19 nt, Artificial Sequence
  Description of Artificial Sequence: Synthetic oligonucleotide
ggguaguccaugcucgaga

SEQ ID NO: 941930 - RNA, 19 nt, Artificial Sequence
  Description of Artificial Sequence: Synthetic oligonucleotide
accaucaguggccggggua

SEQ ID NO: 941931 - RNA, 19 nt, Artificial Sequence
  Description of Artificial Sequence: Synthetic oligonucleotide
gccacuggauauaggagug

SEQ ID NO: 941932 - RNA, 19 nt, Artificial Sequence
  Description of Artificial Sequence: Synthetic oligonucleotide
ugguucccucagaggaaac

SEQ ID NO: 941933 - RNA, 19 nt, Artificial Sequence
  Description of Artificial Sequence: Synthetic oligonucleotide
caucguuccuccguuaucu

SEQ ID NO: 941934 - RNA, 19 nt, Artificial Sequence
  Description of Artificial Sequence: Synthetic oligonucleotide
gauccauagguccgacccu

SEQ ID NO: 941935 - RNA, 19 nt, Artificial Sequence
  Description of Artificial Sequence: Synthetic oligonucleotide
cucugacgcacgcugggca

SEQ ID NO: 941936 - RNA, 19 nt, Artificial Sequence
  Description of Artificial Sequence: Synthetic oligonucleotide
uccucaucgcccguaucau

SEQ ID NO: 941937 - RNA, 19 nt, Artificial Sequence
  Description of Artificial Sequence: Synthetic oligonucleotide
caaggaggucauaguuguc

SEQ ID NO: 941938 - RNA, 19 nt, Artificial Sequence
  Description of Artificial Sequence: Synthetic oligonucleotide
cacggcgaacaggaaguag

SEQ ID NO: 941939 - RNA, 19 nt, Artificial Sequence
  Description of Artificial Sequence: Synthetic oligonucleotide
uggugccgguaccuuugca

SEQ ID NO: 941940 - RNA, 19 nt, Artificial Sequence
  Description of Artificial Sequence: Synthetic oligonucleotide
cguuccuccguuaucugac

SEQ ID NO: 941941 - RNA, 19 nt, Artificial Sequence
  Description of Artificial Sequence: Synthetic oligonucleotide
gucgccguccucgucgccc

SEQ ID NO: 941942 - RNA, 19 nt, Artificial Sequence
  Description of Artificial Sequence: Synthetic oligonucleotide
caaccuccuugagugugag

SEQ ID NO: 941943 - RNA, 19 nt, Artificial Sequence
  Description of Artificial Sequence: Synthetic oligonucleotide
gccugguagugcucuaagc

SEQ ID NO: 941944 - RNA, 19 nt, Artificial Sequence
  Description of Artificial Sequence: Synthetic oligonucleotide
gaacacgccuggccguguc

SEQ ID NO: 941945 - RNA, 19 nt, Artificial Sequence
  Description of Artificial Sequence: Synthetic oligonucleotide
gccuugacgacaucucaga

SEQ ID NO: 941946 - RNA, 19 nt, Artificial Sequence
  Description of Artificial Sequence: Synthetic oligonucleotide
ggcaccggugucccggucc

SEQ ID NO: 941947 - RNA, 19 nt, Artificial Sequence
  Description of Artificial Sequence: Synthetic oligonucleotide
gacaaccccugcagugggc

SEQ ID NO: 941948 - RNA, 19 nt, Artificial Sequence
  Description of Artificial Sequence: Synthetic oligonucleotide
ucccgguccucaaguugga

SEQ ID NO: 941949 - RNA, 19 nt, Artificial Sequence
  Description of Artificial Sequence: Synthetic oligonucleotide
cagugggcugacuaggacu

SEQ ID NO: 941950 - RNA, 19 nt, Artificial Sequence
  Description of Artificial Sequence: Synthetic oligonucleotide
gcaacgcacggcgaacagg

SEQ ID NO: 941951 - RNA, 19 nt, Artificial Sequence
  Description of Artificial Sequence: Synthetic oligonucleotide
cccagacaaacuggcagcg

SEQ ID NO: 941952 - RNA, 19 nt, Artificial Sequence
  Description of Artificial Sequence: Synthetic oligonucleotide
ccaggguucccacauccug

SEQ ID NO: 941953 - RNA, 19 nt, Artificial Sequence
  Description of Artificial Sequence: Synthetic oligonucleotide
cacucaggucccuuccaga

SEQ ID NO: 941954 - RNA, 19 nt, Artificial Sequence
  Description of Artificial Sequence: Synthetic oligonucleotide
ccuccguuaucugacuccc

SEQ ID NO: 941955 - RNA, 19 nt, Artificial Sequence
  Description of Artificial Sequence: Synthetic oligonucleotide
caguggccgggguauacca

SEQ ID NO: 941956 - RNA, 19 nt, Artificial Sequence
  Description of Artificial Sequence: Synthetic oligonucleotide
gugcucagcaaugagggau

SEQ ID NO: 941957 - RNA, 19 nt, Artificial Sequence
  Description of Artificial Sequence: Synthetic oligonucleotide
ucggcaacgcacggcgaac

SEQ ID NO: 941958 - RNA, 19 nt, Artificial Sequence
  Description of Artificial Sequence: Synthetic oligonucleotide
gcaccagacuaagaaaaga

SEQ ID NO: 941959 - RNA, 19 nt, Artificial Sequence
  Description of Artificial Sequence: Synthetic oligonucleotide
gucggcaacgcacggcgaa

SEQ ID NO: 941960 - RNA, 19 nt, Artificial Sequence
  Description of Artificial Sequence: Synthetic oligonucleotide
cuggccguccucgccgucc

SEQ ID NO: 941961 - RNA, 19 nt, Artificial Sequence
  Description of Artificial Sequence: Synthetic oligonucleotide
ucguccucccagguggaau

SEQ ID NO: 941962 - RNA, 19 nt, Artificial Sequence
  Description of Artificial Sequence: Synthetic oligonucleotide
acuggcagcgaggucugaa

SEQ ID NO: 941963 - RNA, 19 nt, Artificial Sequence
  Description of Artificial Sequence: Synthetic oligonucleotide
aggaugcguguaaugcgca

SEQ ID NO: 941964 - RNA, 19 nt, Artificial Sequence
  Description of Artificial Sequence: Synthetic oligonucleotide
gcgaggucugaagugcucc

SEQ ID NO: 941965 - RNA, 19 nt, Artificial Sequence
  Description of Artificial Sequence: Synthetic oligonucleotide
ggcaacgcacggcgaacag

SEQ ID NO: 941966 - RNA, 19 nt, Artificial Sequence
  Description of Artificial Sequence: Synthetic oligonucleotide
cuuggcaugccaguuuacu

SEQ ID NO: 941967 - RNA, 19 nt, Artificial Sequence
  Description of Artificial Sequence: Synthetic oligonucleotide
cauagguccgacccugggu

SEQ ID NO: 941968 - RNA, 19 nt, Artificial Sequence
  Description of Artificial Sequence: Synthetic oligonucleotide
ccauagguccgacccuggg

SEQ ID NO: 941969 - RNA, 19 nt, Artificial Sequence
  Description of Artificial Sequence: Synthetic oligonucleotide
caccuggcuuucuagggua

SEQ ID NO: 941970 - RNA, 19 nt, Artificial Sequence
  Description of Artificial Sequence: Synthetic oligonucleotide
guaguccaggacacucuga

SEQ ID NO: 941971 - RNA, 19 nt, Artificial Sequence
  Description of Artificial Sequence: Synthetic oligonucleotide
ccacucaggucccuuccag

SEQ ID NO: 941972 - RNA, 19 nt, Artificial Sequence
  Description of Artificial Sequence: Synthetic oligonucleotide
ucgccaguuucgguacccu

SEQ ID NO: 941973 - RNA, 19 nt, Artificial Sequence
  Description of Artificial Sequence: Synthetic oligonucleotide
uccgcgucgccguccucgu

SEQ ID NO: 941974 - RNA, 19 nt, Artificial Sequence
  Description of Artificial Sequence: Synthetic oligonucleotide
uugcucucuuuggggcuca

SEQ ID NO: 941975 - RNA, 19 nt, Artificial Sequence
  Description of Artificial Sequence: Synthetic oligonucleotide
ggugccgguaccuuugcau

SEQ ID NO: 941976 - RNA, 19 nt, Artificial Sequence
  Description of Artificial Sequence: Synthetic oligonucleotide
agacggcaccggugucccg

SEQ ID NO: 941977 - RNA, 19 nt, Artificial Sequence
  Description of Artificial Sequence: Synthetic oligonucleotide
ggcugacuaggacugagau

SEQ ID NO: 941978 - RNA, 19 nt, Artificial Sequence
  Description of Artificial Sequence: Synthetic oligonucleotide
gcucucguccucccaggug

SEQ ID NO: 941979 - RNA, 19 nt, Artificial Sequence
  Description of Artificial Sequence: Synthetic oligonucleotide
cucccggcgcuggugucgg

SEQ ID NO: 941980 - RNA, 19 nt, Artificial Sequence
  Description of Artificial Sequence: Synthetic oligonucleotide
cgcgucgccguccucgucg

SEQ ID NO: 941981 - RNA, 19 nt, Artificial Sequence
  Description of Artificial Sequence: Synthetic oligonucleotide
uaucauccgccuggccguc

SEQ ID NO: 941982 - RNA, 19 nt, Artificial Sequence
  Description of Artificial Sequence: Synthetic oligonucleotide
cuggcuacuccaucacccu

SEQ ID NO: 941983 - RNA, 19 nt, Artificial Sequence
  Description of Artificial Sequence: Synthetic oligonucleotide
acacaagcucccggcgcug

SEQ ID NO: 941984 - RNA, 19 nt, Artificial Sequence
  Description of Artificial Sequence: Synthetic oligonucleotide
gcaccgagaagagccaaca

SEQ ID NO: 941985 - RNA, 19 nt, Artificial Sequence
  Description of Artificial Sequence: Synthetic oligonucleotide
aaagaccguuuggcuggaa

SEQ ID NO: 941986 - RNA, 19 nt, Artificial Sequence
  Description of Artificial Sequence: Synthetic oligonucleotide
guuccuccguuaucugacu

SEQ ID NO: 941987 - RNA, 19 nt, Artificial Sequence
  Description of Artificial Sequence: Synthetic oligonucleotide
guggaaucgcaguccgggu

SEQ ID NO: 941988 - RNA, 19 nt, Artificial Sequence
  Description of Artificial Sequence: Synthetic oligonucleotide
cagcggugccugguagugc

SEQ ID NO: 941989 - RNA, 19 nt, Artificial Sequence
  Description of Artificial Sequence: Synthetic oligonucleotide
ugacgcacgcugggcaauu

SEQ ID NO: 941990 - RNA, 19 nt, Artificial Sequence
  Description of Artificial Sequence: Synthetic oligonucleotide
aacgcacggcgaacaggaa

SEQ ID NO: 941991 - RNA, 19 nt, Artificial Sequence
  Description of Artificial Sequence: Synthetic oligonucleotide
gcagcuugucacggggccc

SEQ ID NO: 941992 - RNA, 19 nt, Artificial Sequence
  Description of Artificial Sequence: Synthetic oligonucleotide
ccgguaccuuugcaugucc

SEQ ID NO: 941993 - RNA, 19 nt, Artificial Sequence
  Description of Artificial Sequence: Synthetic oligonucleotide
acggcaccggugucccggu

SEQ ID NO: 941994 - RNA, 19 nt, Artificial Sequence
  Description of Artificial Sequence: Synthetic oligonucleotide
ggcuugaaccuccgcagcu

SEQ ID NO: 941995 - RNA, 19 nt, Artificial Sequence
  Description of Artificial Sequence: Synthetic oligonucleotide
aacuggcagcgaggucuga

SEQ ID NO: 941996 - RNA, 19 nt, Artificial Sequence
  Description of Artificial Sequence: Synthetic oligonucleotide
ccuuaggguuuguucacaa

SEQ ID NO: 941997 - RNA, 19 nt, Artificial Sequence
  Description of Artificial Sequence: Synthetic oligonucleotide
cucgucgcccguguccuca

SEQ ID NO: 941998 - RNA, 19 nt, Artificial Sequence
  Description of Artificial Sequence: Synthetic oligonucleotide
ggcccucugaaggcguaag

SEQ ID NO: 941999 - RNA, 19 nt, Artificial Sequence
  Description of Artificial Sequence: Synthetic oligonucleotide
agggcgaggccagcacugu

SEQ ID NO: 942000 - RNA, 19 nt, Artificial Sequence
  Description of Artificial Sequence: Synthetic oligonucleotide
gguccucaaguuggauccc

SEQ ID NO: 942001 - RNA, 19 nt, Artificial Sequence
  Description of Artificial Sequence: Synthetic oligonucleotide
cuuaucugccugcccuagu

SEQ ID NO: 942002 - RNA, 19 nt, Artificial Sequence
  Description of Artificial Sequence: Synthetic oligonucleotide
agcguggcuggaaguucug

SEQ ID NO: 942003 - RNA, 19 nt, Artificial Sequence
  Description of Artificial Sequence: Synthetic oligonucleotide
ggccgggguauaccaugag

SEQ ID NO: 942004 - RNA, 19 nt, Artificial Sequence
  Description of Artificial Sequence: Synthetic oligonucleotide
ccaucguuccuccguuauc

SEQ ID NO: 942005 - RNA, 19 nt, Artificial Sequence
  Description of Artificial Sequence: Synthetic oligonucleotide
ggcaccgagaagagccaac

SEQ ID NO: 942006 - RNA, 19 nt, Artificial Sequence
  Description of Artificial Sequence: Synthetic oligonucleotide
gggacucaagacaaccccu

SEQ ID NO: 942007 - RNA, 19 nt, Artificial Sequence
  Description of Artificial Sequence: Synthetic oligonucleotide
gguaguggugccgguaccu

SEQ ID NO: 942008 - RNA, 19 nt, Artificial Sequence
  Description of Artificial Sequence: Synthetic oligonucleotide
ccguuuggcuggaagcaga

SEQ ID NO: 942009 - RNA, 19 nt, Artificial Sequence
  Description of Artificial Sequence: Synthetic oligonucleotide
gcgacuugaggaugcgugu

SEQ ID NO: 942010 - RNA, 19 nt, Artificial Sequence
  Description of Artificial Sequence: Synthetic oligonucleotide
ucgucgcccguguccucau

SEQ ID NO: 942011 - RNA, 19 nt, Artificial Sequence
  Description of Artificial Sequence: Synthetic oligonucleotide
ccgcagcuugucacggggc

SEQ ID NO: 942012 - RNA, 19 nt, Artificial Sequence
  Description of Artificial Sequence: Synthetic oligonucleotide
agcccagcaugaguucaua

SEQ ID NO: 942013 - RNA, 19 nt, Artificial Sequence
  Description of Artificial Sequence: Synthetic oligonucleotide
cggcgaacaggaaguaguc

SEQ ID NO: 942014 - RNA, 19 nt, Artificial Sequence
  Description of Artificial Sequence: Synthetic oligonucleotide
ggcccucuggccccaccug

SEQ ID NO: 942015 - RNA, 19 nt, Artificial Sequence
  Description of Artificial Sequence: Synthetic oligonucleotide
guccgacccugggugccag

SEQ ID NO: 942016 - RNA, 19 nt, Artificial Sequence
  Description of Artificial Sequence: Synthetic oligonucleotide
gcucgccaguuucgguacc

SEQ ID NO: 942017 - RNA, 19 nt, Artificial Sequence
  Description of Artificial Sequence: Synthetic oligonucleotide
ccucaauuaaaagaccguu

SEQ ID NO: 942018 - RNA, 19 nt, Artificial Sequence
  Description of Artificial Sequence: Synthetic oligonucleotide
cguguaaugcgcagguugu

SEQ ID NO: 942019 - RNA, 19 nt, Artificial Sequence
  Description of Artificial Sequence: Synthetic oligonucleotide
gaaucgcaguccggguagu

SEQ ID NO: 942020 - RNA, 19 nt, Artificial Sequence
  Description of Artificial Sequence: Synthetic oligonucleotide
ccgacccugggugccagcc

SEQ ID NO: 942021 - RNA, 19 nt, Artificial Sequence
  Description of Artificial Sequence: Synthetic oligonucleotide
gggguauaccaugaggcuu

SEQ ID NO: 942022 - RNA, 19 nt, Artificial Sequence
  Description of Artificial Sequence: Synthetic oligonucleotide
guauaccaugaggcuugaa

SEQ ID NO: 942023 - RNA, 19 nt, Artificial Sequence
  Description of Artificial Sequence: Synthetic oligonucleotide
gccgguaccuuugcauguc

SEQ ID NO: 942024 - RNA, 19 nt, Artificial Sequence
  Description of Artificial Sequence: Synthetic oligonucleotide
gguuagacaugucgccauu

SEQ ID NO: 942025 - RNA, 19 nt, Artificial Sequence
  Description of Artificial Sequence: Synthetic oligonucleotide
gcaguccggguaguccaug

SEQ ID NO: 942026 - RNA, 19 nt, Artificial Sequence
  Description of Artificial Sequence: Synthetic oligonucleotide
ccguaucauccgccuggcc

SEQ ID NO: 942027 - RNA, 19 nt, Artificial Sequence
  Description of Artificial Sequence: Synthetic oligonucleotide
cgcacggcgaacaggaagu

SEQ ID NO: 942028 - RNA, 19 nt, Artificial Sequence
  Description of Artificial Sequence: Synthetic oligonucleotide
cugcauagcucgccaguuu

SEQ ID NO: 942029 - RNA, 19 nt, Artificial Sequence
  Description of Artificial Sequence: Synthetic oligonucleotide
gcaugccaguuuacuccug

SEQ ID NO: 942030 - RNA, 19 nt, Artificial Sequence
  Description of Artificial Sequence: Synthetic oligonucleotide
gugggcugacuaggacuga

SEQ ID NO: 942031 - RNA, 19 nt, Artificial Sequence
  Description of Artificial Sequence: Synthetic oligonucleotide
cacggcagacggcaccggu

SEQ ID NO: 942032 - RNA, 19 nt, Artificial Sequence
  Description of Artificial Sequence: Synthetic oligonucleotide
ccucacuuggcaccagacu

SEQ ID NO: 942033 - RNA, 19 nt, Artificial Sequence
  Description of Artificial Sequence: Synthetic oligonucleotide
gggcucagugacucagccu

SEQ ID NO: 942034 - RNA, 19 nt, Artificial Sequence
  Description of Artificial Sequence: Synthetic oligonucleotide
gcggaccagcggugccugg

SEQ ID NO: 942035 - RNA, 19 nt, Artificial Sequence
  Description of Artificial Sequence: Synthetic oligonucleotide
ggggcaccgagaagagcca

SEQ ID NO: 942036 - RNA, 19 nt, Artificial Sequence
  Description of Artificial Sequence: Synthetic oligonucleotide
guguaaugcgcagguuguu

SEQ ID NO: 942037 - RNA, 19 nt, Artificial Sequence
  Description of Artificial Sequence: Synthetic oligonucleotide
gcgcuggugucggcaacgc

SEQ ID NO: 942038 - RNA, 19 nt, Artificial Sequence
  Description of Artificial Sequence: Synthetic oligonucleotide
cccacucaggucccuucca

SEQ ID NO: 942039 - RNA, 19 nt, Artificial Sequence
  Description of Artificial Sequence: Synthetic oligonucleotide
gcacggcagacggcaccgg

SEQ ID NO: 942040 - RNA, 19 nt, Artificial Sequence
  Description of Artificial Sequence: Synthetic oligonucleotide
cccuuaggguuuguucaca

SEQ ID NO: 942041 - RNA, 19 nt, Artificial Sequence
  Description of Artificial Sequence: Synthetic oligonucleotide
gggguucagcagagucccc

SEQ ID NO: 942042 - RNA, 19 nt, Artificial Sequence
  Description of Artificial Sequence: Synthetic oligonucleotide
ccagacaaacuggcagcga

SEQ ID NO: 942043 - RNA, 19 nt, Artificial Sequence
  Description of Artificial Sequence: Synthetic oligonucleotide
agggcccucugaaggcgua

SEQ ID NO: 942044 - RNA, 19 nt, Artificial Sequence
  Description of Artificial Sequence: Synthetic oligonucleotide
ccggguaguccaugcucga

SEQ ID NO: 942045 - RNA, 19 nt, Artificial Sequence
  Description of Artificial Sequence: Synthetic oligonucleotide
gguccgacccugggugcca

SEQ ID NO: 942046 - RNA, 19 nt, Artificial Sequence
  Description of Artificial Sequence: Synthetic oligonucleotide
caucaguggccgggguaua

SEQ ID NO: 942047 - RNA, 19 nt, Artificial Sequence
  Description of Artificial Sequence: Synthetic oligonucleotide
cucguccucccagguggaa

SEQ ID NO: 942048 - RNA, 19 nt, Artificial Sequence
  Description of Artificial Sequence: Synthetic oligonucleotide
ggcccggacaagacgcucu

SEQ ID NO: 942049 - RNA, 19 nt, Artificial Sequence
  Description of Artificial Sequence: Synthetic oligonucleotide
ccgagacccuuaggguuug

SEQ ID NO: 942050 - RNA, 19 nt, Artificial Sequence
  Description of Artificial Sequence: Synthetic oligonucleotide
cgggguauaccaugaggcu

SEQ ID NO: 942051 - RNA, 19 nt, Artificial Sequence
  Description of Artificial Sequence: Synthetic oligonucleotide
cagcgacuugaggaugcgu

SEQ ID NO: 942052 - RNA, 19 nt, Artificial Sequence
  Description of Artificial Sequence: Synthetic oligonucleotide
cccgagacccuuaggguuu

SEQ ID NO: 942053 - RNA, 19 nt, Artificial Sequence
  Description of Artificial Sequence: Synthetic oligonucleotide
gacgcacgcugggcaauuu

SEQ ID NO: 942054 - RNA, 19 nt, Artificial Sequence
  Description of Artificial Sequence: Synthetic oligonucleotide
cugccugcccuaguaccau

SEQ ID NO: 942055 - RNA, 19 nt, Artificial Sequence
  Description of Artificial Sequence: Synthetic oligonucleotide
cugacgcacgcugggcaau

SEQ ID NO: 942056 - RNA, 19 nt, Artificial Sequence
  Description of Artificial Sequence: Synthetic oligonucleotide
cgcccguaucauccgccug

SEQ ID NO: 942057 - RNA, 19 nt, Artificial Sequence
  Description of Artificial Sequence: Synthetic oligonucleotide
ccuccaucguuccuccguu

SEQ ID NO: 942058 - RNA, 19 nt, Artificial Sequence
  Description of Artificial Sequence: Synthetic oligonucleotide
cgacuugaggaugcgugua

SEQ ID NO: 942059 - RNA, 19 nt, Artificial Sequence
  Description of Artificial Sequence: Synthetic oligonucleotide
ccugcauagcucgccaguu

SEQ ID NO: 942060 - RNA, 19 nt, Artificial Sequence
  Description of Artificial Sequence: Synthetic oligonucleotide
ggaacacgccuggccgugu

SEQ ID NO: 942061 - RNA, 19 nt, Artificial Sequence
  Description of Artificial Sequence: Synthetic oligonucleotide
ccggguaguggugccggua

SEQ ID NO: 942062 - RNA, 19 nt, Artificial Sequence
  Description of Artificial Sequence: Synthetic oligonucleotide
cgucgccguccucgucgcc

SEQ ID NO: 942063 - RNA, 19 nt, Artificial Sequence
  Description of Artificial Sequence: Synthetic oligonucleotide
ccguccucgucgcccgugu

SEQ ID NO: 942064 - RNA, 19 nt, Artificial Sequence
  Description of Artificial Sequence: Synthetic oligonucleotide
ccgcgucgccguccucguc

SEQ ID NO: 942065 - RNA, 19 nt, Artificial Sequence
  Description of Artificial Sequence: Synthetic oligonucleotide
ccggagcccucauccuuau

SEQ ID NO: 942066 - RNA, 19 nt, Artificial Sequence
  Description of Artificial Sequence: Synthetic oligonucleotide
cgcucucguccucccaggu

SEQ ID NO: 942067 - RNA, 19 nt, Artificial Sequence
  Description of Artificial Sequence: Synthetic oligonucleotide
cgcaguccggguaguccau

SEQ ID NO: 942068 - RNA, 19 nt, Artificial Sequence
  Description of Artificial Sequence: Synthetic oligonucleotide
cggcaccggugucccgguc

SEQ ID NO: 942069 - RNA, 19 nt, Artificial Sequence
  Description of Artificial Sequence: Synthetic oligonucleotide
cccgguccucaaguuggau

SEQ ID NO: 942070 - RNA, 19 nt, Artificial Sequence
  Description of Artificial Sequence: Synthetic oligonucleotide
ccucgccguccuccucgcu

SEQ ID NO: 942071 - RNA, 19 nt, Artificial Sequence
  Description of Artificial Sequence: Synthetic oligonucleotide
cccggacaagacgcucuuu

SEQ ID NO: 942072 - RNA, 19 nt, Artificial Sequence
  Description of Artificial Sequence: Synthetic oligonucleotide
ugaauaaccauccuggugg

SEQ ID NO: 942073 - RNA, 19 nt, Artificial Sequence
  Description of Artificial Sequence: Synthetic oligonucleotide
acuaauuuaucugugagcc

SEQ ID NO: 942074 - RNA, 19 nt, Artificial Sequence
  Description of Artificial Sequence: Synthetic oligonucleotide
ucaaauguuuauuaguggc

SEQ ID NO: 942075 - RNA, 19 nt, Artificial Sequence
  Description of Artificial Sequence: Synthetic oligonucleotide
uauucuuugcccaugguug

SEQ ID NO: 942076 - RNA, 19 nt, Artificial Sequence
  Description of Artificial Sequence: Synthetic oligonucleotide
uuugacacgaagaacgcag

SEQ ID NO: 942077 - RNA, 19 nt, Artificial Sequence
  Description of Artificial Sequence: Synthetic oligonucleotide
  modified_base (2)..(2): a, c, u, g, unknown or other
anagcgcugaaugaugucc

SEQ ID NO: 942078 - RNA, 19 nt, Artificial Sequence
  Description of Artificial Sequence: Synthetic oligonucleotide
  modified_base (8)..(8): a, c, u, g, unknown or other
ucuuccanagcgcugaaug

SEQ ID NO: 942079 - RNA, 19 nt, Artificial Sequence
  Description of Artificial Sequence: Synthetic oligonucleotide
aaaacguccuucuuguuga

SEQ ID NO: 942080 - RNA, 19 nt, Artificial Sequence
  Description of Artificial Sequence: Synthetic oligonucleotide
uucaauacaccacaccuug

SEQ ID NO: 942081 - RNA, 19 nt, Artificial Sequence
  Description of Artificial Sequence: Synthetic oligonucleotide
agaguguugccauagauga

SEQ ID NO: 942082 - RNA, 19 nt, Artificial Sequence
  Description of Artificial Sequence: Synthetic oligonucleotide
auugaauacagguaucuca

SEQ ID NO: 942083 - RNA, 19 nt, Artificial Sequence
  Description of Artificial Sequence: Synthetic oligonucleotide
ucacuaauuuaucugugag

SEQ ID NO: 942084 - RNA, 19 nt, Artificial Sequence
  Description of Artificial Sequence: Synthetic oligonucleotide
aggaaggggcccuacaucc

SEQ ID NO: 942085 - RNA, 19 nt, Artificial Sequence
  Description of Artificial Sequence: Synthetic oligonucleotide
gucaaaugcagguagcagg

SEQ ID NO: 942086 - RNA, 19 nt, Artificial Sequence
  Description of Artificial Sequence: Synthetic oligonucleotide
acagguaucucagaagagc

SEQ ID NO: 942087 - RNA, 19 nt, Artificial Sequence
  Description of Artificial Sequence: Synthetic oligonucleotide
acaugggauauucuuugcc

SEQ ID NO: 942088 - RNA, 19 nt, Artificial Sequence
  Description of Artificial Sequence: Synthetic oligonucleotide
ugaucgauagaguuggacu

SEQ ID NO: 942089 - RNA, 19 nt, Artificial Sequence
  Description of Artificial Sequence: Synthetic oligonucleotide
acacgaagaacgcagcacg

SEQ ID NO: 942090 - RNA, 19 nt, Artificial Sequence
  Description of Artificial Sequence: Synthetic oligonucleotide
ugagcgucgucauagcccg

SEQ ID NO: 942091 - RNA, 19 nt, Artificial Sequence
  Description of Artificial Sequence: Synthetic oligonucleotide
uuaagcucgaggaacugca

SEQ ID NO: 942092 - RNA, 19 nt, Artificial Sequence
  Description of Artificial Sequence: Synthetic oligonucleotide
uuaucugugagccuacuua

SEQ ID NO: 942093 - RNA, 19 nt, Artificial Sequence
  Description of Artificial Sequence: Synthetic oligonucleotide
gauagaguuggacucugcc

SEQ ID NO: 942094 - RNA, 19 nt, Artificial Sequence
  Description of Artificial Sequence: Synthetic oligonucleotide
cucaaagcaagcuuggauc

SEQ ID NO: 942095 - RNA, 19 nt, Artificial Sequence
  Description of Artificial Sequence: Synthetic oligonucleotide
caugggauauucuuugccc

SEQ ID NO: 942096 - RNA, 19 nt, Artificial Sequence
  Description of Artificial Sequence: Synthetic oligonucleotide
ugaauguugagcgucguca

SEQ ID NO: 942097 - RNA, 19 nt, Artificial Sequence
  Description of Artificial Sequence: Synthetic oligonucleotide
ugauuauuggucagagcug

SEQ ID NO: 942098 - RNA, 19 nt, Artificial Sequence
  Description of Artificial Sequence: Synthetic oligonucleotide
gaucgauagaguuggacuc

SEQ ID NO: 942099 - RNA, 19 nt, Artificial Sequence
  Description of Artificial Sequence: Synthetic oligonucleotide
gaauagaucuccuucacgu

SEQ ID NO: 942100 - RNA, 19 nt, Artificial Sequence
  Description of Artificial Sequence: Synthetic oligonucleotide
cauccgauucacuucgucg

SEQ ID NO: 942101 - RNA, 19 nt, Artificial Sequence
  Description of Artificial Sequence: Synthetic oligonucleotide
ucugugagccuacuuagac

SEQ ID NO: 942102 - RNA, 19 nt, Artificial Sequence
  Description of Artificial Sequence: Synthetic oligonucleotide
ugaaccgagaucugccagg

SEQ ID NO: 942103 - RNA, 19 nt, Artificial Sequence
  Description of Artificial Sequence: Synthetic oligonucleotide
accuugaucagccagcccu

SEQ ID NO: 942104 - RNA, 19 nt, Artificial Sequence
  Description of Artificial Sequence: Synthetic oligonucleotide
agucacauggagucgacug

SEQ ID NO: 942105 - RNA, 19 nt, Artificial Sequence
  Description of Artificial Sequence: Synthetic oligonucleotide
uugagcgucgucauagccc

SEQ ID NO: 942106 - RNA, 19 nt, Artificial Sequence
  Description of Artificial Sequence: Synthetic oligonucleotide
ucguaaucgggaaagcaga

SEQ ID NO: 942107 - RNA, 19 nt, Artificial Sequence
  Description of Artificial Sequence: Synthetic oligonucleotide
uucaugaaagcuggggagg

SEQ ID NO: 942108 - RNA, 19 nt, Artificial Sequence
  Description of Artificial Sequence: Synthetic oligonucleotide
uacugaauguugagcgucg

SEQ ID NO: 942109 - RNA, 19 nt, Artificial Sequence
  Description of Artificial Sequence: Synthetic oligonucleotide
uguccauacugaauguuga

SEQ ID NO: 942110 - RNA, 19 nt, Artificial Sequence
  Description of Artificial Sequence: Synthetic oligonucleotide
uaauugaauacagguaucu

SEQ ID NO: 942111 - RNA, 19 nt, Artificial Sequence
  Description of Artificial Sequence: Synthetic oligonucleotide
gaaagggacggggagaugc

SEQ ID NO: 942112 - RNA, 19 nt, Artificial Sequence
  Description of Artificial Sequence: Synthetic oligonucleotide
uaauuuaucugugagccua

SEQ ID NO: 942113 - RNA, 19 nt, Artificial Sequence
  Description of Artificial Sequence: Synthetic oligonucleotide
uccaucguaaucgggaaag

SEQ ID NO: 942114 - RNA, 19 nt, Artificial Sequence
  Description of Artificial Sequence: Synthetic oligonucleotide
agaagaccgggucacuugg

SEQ ID NO: 942115 - RNA, 19 nt, Artificial Sequence
  Description of Artificial Sequence: Synthetic oligonucleotide
gguugaucgauagaguugg

SEQ ID NO: 942116 - RNA, 19 nt, Artificial Sequence
  Description of Artificial Sequence: Synthetic oligonucleotide
ugguugaucgauagaguug

SEQ ID NO: 942117 - RNA, 19 nt, Artificial Sequence
  Description of Artificial Sequence: Synthetic oligonucleotide
ugcgucucgaugaugccag

SEQ ID NO: 942118 - RNA, 19 nt, Artificial Sequence
  Description of Artificial Sequence: Synthetic oligonucleotide
gagaacugcgucucgauga

SEQ ID NO: 942119 - RNA, 19 nt, Artificial Sequence
  Description of Artificial Sequence: Synthetic oligonucleotide
guagcuugauuauugguca

SEQ ID NO: 942120 - RNA, 19 nt, Artificial Sequence
  Description of Artificial Sequence: Synthetic oligonucleotide
  modified_base (5)..(5): a, c, u, g, unknown or other
uccanagcgcugaaugaug

SEQ ID NO: 942121 - RNA, 19 nt, Artificial Sequence
  Description of Artificial Sequence: Synthetic oligonucleotide
cauaauugaauacagguau

SEQ ID NO: 942122 - RNA, 19 nt, Artificial Sequence
  Description of Artificial Sequence: Synthetic oligonucleotide
cucaagcccuucaugaaag

SEQ ID NO: 942123 - RNA, 19 nt, Artificial Sequence
  Description of Artificial Sequence: Synthetic oligonucleotide
acuacagggcuacagggca

SEQ ID NO: 942124 - RNA, 19 nt, Artificial Sequence
  Description of Artificial Sequence: Synthetic oligonucleotide
acaccuucgaagcagugga

SEQ ID NO: 942125 - RNA, 19 nt, Artificial Sequence
  Description of Artificial Sequence: Synthetic oligonucleotide
gauuauuggucagagcuga

SEQ ID NO: 942126 - RNA, 19 nt, Artificial Sequence
  Description of Artificial Sequence: Synthetic oligonucleotide
ugcugaaccgagaucugcc

SEQ ID NO: 942127 - RNA, 19 nt, Artificial Sequence
  Description of Artificial Sequence: Synthetic oligonucleotide
agaagggcgucagaagacc

SEQ ID NO: 942128 - RNA, 19 nt, Artificial Sequence
  Description of Artificial Sequence: Synthetic oligonucleotide
auauucuuugcccaugguu

SEQ ID NO: 942129 - RNA, 19 nt, Artificial Sequence
  Description of Artificial Sequence: Synthetic oligonucleotide
uccauacugaauguugagc

SEQ ID NO: 942130 - RNA, 19 nt, Artificial Sequence
  Description of Artificial Sequence: Synthetic oligonucleotide
ucaugaaagcuggggaggg

SEQ ID NO: 942131 - RNA, 19 nt, Artificial Sequence
  Description of Artificial Sequence: Synthetic oligonucleotide
auaauugaauacagguauc

SEQ ID NO: 942132 - RNA, 19 nt, Artificial Sequence
  Description of Artificial Sequence: Synthetic oligonucleotide
aacuugacguucugugugu

SEQ ID NO: 942133 - RNA, 19 nt, Artificial Sequence
  Description of Artificial Sequence: Synthetic oligonucleotide
uaauggcucaggcaugacu

SEQ ID NO: 942134 - RNA, 19 nt, Artificial Sequence
  Description of Artificial Sequence: Synthetic oligonucleotide
agcacgauggacgugguug

SEQ ID NO: 942135 - RNA, 19 nt, Artificial Sequence
  Description of Artificial Sequence: Synthetic oligonucleotide
gugaauaaccauccuggug

SEQ ID NO: 942136 - RNA, 19 nt, Artificial Sequence
  Description of Artificial Sequence: Synthetic oligonucleotide
ugaugcacgucacaccuuc

SEQ ID NO: 942137 - RNA, 19 nt, Artificial Sequence
  Description of Artificial Sequence: Synthetic oligonucleotide
gagcaagggacauaauuga

SEQ ID NO: 942138 - RNA, 19 nt, Artificial Sequence
  Description of Artificial Sequence: Synthetic oligonucleotide
gucacauggagucgacugg

SEQ ID NO: 942139 - RNA, 19 nt, Artificial Sequence
  Description of Artificial Sequence: Synthetic oligonucleotide
ugucaaaugcagguagcag

SEQ ID NO: 942140 - RNA, 19 nt, Artificial Sequence
  Description of Artificial Sequence: Synthetic oligonucleotide
gucauagcccgaacgaugg

SEQ ID NO: 942141 - RNA, 19 nt, Artificial Sequence
  Description of Artificial Sequence: Synthetic oligonucleotide
gucaauagugcucuccuuc

SEQ ID NO: 942142 - RNA, 19 nt, Artificial Sequence
  Description of Artificial Sequence: Synthetic oligonucleotide
agcguagcuugauuauugg

SEQ ID NO: 942143 - RNA, 19 nt, Artificial Sequence
  Description of Artificial Sequence: Synthetic oligonucleotide
ucuucucggagaaaacguc

SEQ ID NO: 942144 - RNA, 19 nt, Artificial Sequence
  Description of Artificial Sequence: Synthetic oligonucleotide
caugugggaauagaucucc

SEQ ID NO: 942145 - RNA, 19 nt, Artificial Sequence
  Description of Artificial Sequence: Synthetic oligonucleotide
augguugaucgauagaguu

SEQ ID NO: 942146 - RNA, 19 nt, Artificial Sequence
  Description of Artificial Sequence: Synthetic oligonucleotide
guuggcgaaguagcgaugg

SEQ ID NO: 942147 - RNA, 19 nt, Artificial Sequence
  Description of Artificial Sequence: Synthetic oligonucleotide
acucgaggcauucuuccag

SEQ ID NO: 942148 - RNA, 19 nt, Artificial Sequence
  Description of Artificial Sequence: Synthetic oligonucleotide
uuugcgcucggaacgcugc

SEQ ID NO: 942149 - RNA, 19 nt, Artificial Sequence
  Description of Artificial Sequence: Synthetic oligonucleotide
ucgggaaagcagaugcuga

SEQ ID NO: 942150 - RNA, 19 nt, Artificial Sequence
  Description of Artificial Sequence: Synthetic oligonucleotide
augggauauucuuugccca

SEQ ID NO: 942151 - RNA, 19 nt, Artificial Sequence
  Description of Artificial Sequence: Synthetic oligonucleotide
ucucgaugaugccaguggu

SEQ ID NO: 942152 - RNA, 19 nt, Artificial Sequence
  Description of Artificial Sequence: Synthetic oligonucleotide
gagaaaacguccuucuugu

SEQ ID NO: 942153 - RNA, 19 nt, Artificial Sequence
  Description of Artificial Sequence: Synthetic oligonucleotide
ugguaccuaccucaaaguc

SEQ ID NO: 942154 - RNA, 19 nt, Artificial Sequence
  Description of Artificial Sequence: Synthetic oligonucleotide
agugaauaaccauccuggu

SEQ ID NO: 942155 - RNA, 19 nt, Artificial Sequence
  Description of Artificial Sequence: Synthetic oligonucleotide
gucggugacagcgucaaag

SEQ ID NO: 942156 - RNA, 19 nt, Artificial Sequence
  Description of Artificial Sequence: Synthetic oligonucleotide
guaccuaccucaaagucac

SEQ ID NO: 942157 - RNA, 19 nt, Artificial Sequence
  Description of Artificial Sequence: Synthetic oligonucleotide
cugugagccuacuuagacc

SEQ ID NO: 942158 - RNA, 19 nt, Artificial Sequence
  Description of Artificial Sequence: Synthetic oligonucleotide
uacuuagaccagagcuugg

SEQ ID NO: 942159 - RNA, 19 nt, Artificial Sequence
  Description of Artificial Sequence: Synthetic oligonucleotide
gcuugucaaaugcagguag

SEQ ID NO: 942160 - RNA, 19 nt, Artificial Sequence
  Description of Artificial Sequence: Synthetic oligonucleotide
uggggcuaguugcuguggg

SEQ ID NO: 942161 - RNA, 19 nt, Artificial Sequence
  Description of Artificial Sequence: Synthetic oligonucleotide
ggagggauaccucaagccc

SEQ ID NO: 942162 - RNA, 19 nt, Artificial Sequence
  Description of Artificial Sequence: Synthetic oligonucleotide
ucguaagcgcucagugccg

SEQ ID NO: 942163 - RNA, 19 nt, Artificial Sequence
  Description of Artificial Sequence: Synthetic oligonucleotide
auucuuugcccaugguuga

SEQ ID NO: 942164 - RNA, 19 nt, Artificial Sequence
  Description of Artificial Sequence: Synthetic oligonucleotide
aagggacggggagaugccc

SEQ ID NO: 942165 - RNA, 19 nt, Artificial Sequence
  Description of Artificial Sequence: Synthetic oligonucleotide
aacucgaggcauucuucca

SEQ ID NO: 942166 - RNA, 19 nt, Artificial Sequence
  Description of Artificial Sequence: Synthetic oligonucleotide
gugguuuugacacgaagaa

SEQ ID NO: 942167 - RNA, 19 nt, Artificial Sequence
  Description of Artificial Sequence: Synthetic oligonucleotide
ugauguccauacugaaugu

SEQ ID NO: 942168 - RNA, 19 nt, Artificial Sequence
  Description of Artificial Sequence: Synthetic oligonucleotide
gucacuaauuuaucuguga

SEQ ID NO: 942169 - RNA, 19 nt, Artificial Sequence
  Description of Artificial Sequence: Synthetic oligonucleotide
agcugaugucaauagugcu

SEQ ID NO: 942170 - RNA, 19 nt, Artificial Sequence
  Description of Artificial Sequence: Synthetic oligonucleotide
acugcgucucgaugaugcc

SEQ ID NO: 942171 - RNA, 19 nt, Artificial Sequence
  Description of Artificial Sequence: Synthetic oligonucleotide
uuuugacacgaagaacgca

SEQ ID NO: 942172 - RNA, 19 nt, Artificial Sequence
  Description of Artificial Sequence: Synthetic oligonucleotide
  modified_base (16)..(16): a, c, u, g, unknown or other
gaucccgaucuuccanagc

SEQ ID NO: 942173 - RNA, 19 nt, Artificial Sequence
  Description of Artificial Sequence: Synthetic oligonucleotide
gacgugguuggcgaaguag

SEQ ID NO: 942174 - RNA, 19 nt, Artificial Sequence
  Description of Artificial Sequence: Synthetic oligonucleotide
uagguccaucguaaucggg

SEQ ID NO: 942175 - RNA, 19 nt, Artificial Sequence
  Description of Artificial Sequence: Synthetic oligonucleotide
ggcgcucuaggucugaaag

SEQ ID NO: 942176 - RNA, 19 nt, Artificial Sequence
  Description of Artificial Sequence: Synthetic oligonucleotide
uugaucgauagaguuggac

SEQ ID NO: 942177 - RNA, 19 nt, Artificial Sequence
  Description of Artificial Sequence: Synthetic oligonucleotide
cauagcccgaacgauggcc

SEQ ID NO: 942178 - RNA, 19 nt, Artificial Sequence
  Description of Artificial Sequence: Synthetic oligonucleotide
cagcguagcuugauuauug

SEQ ID NO: 942179 - RNA, 19 nt, Artificial Sequence
  Description of Artificial Sequence: Synthetic oligonucleotide
ugguuggcgaaguagcgau

SEQ ID NO: 942180 - RNA, 19 nt, Artificial Sequence
  Description of Artificial Sequence: Synthetic oligonucleotide
ggcguugaagggcagggcg

SEQ ID NO: 942181 - RNA, 19 nt, Artificial Sequence
  Description of Artificial Sequence: Synthetic oligonucleotide
guugagcgucgucauagcc

SEQ ID NO: 942182 - RNA, 19 nt, Artificial Sequence
  Description of Artificial Sequence: Synthetic oligonucleotide
ucuaggucugaaagauagu

SEQ ID NO: 942183 - RNA, 19 nt, Artificial Sequence
  Description of Artificial Sequence: Synthetic oligonucleotide
auccucguaaguguuaggu

SEQ ID NO: 942184 - RNA, 19 nt, Artificial Sequence
  Description of Artificial Sequence: Synthetic oligonucleotide
cuugacguucugugugucc

SEQ ID NO: 942185 - RNA, 19 nt, Artificial Sequence
  Description of Artificial Sequence: Synthetic oligonucleotide
  modified_base (7)..(7): a, c, u, g, unknown or other
cuuccanagcgcugaauga

SEQ ID NO: 942186 - RNA, 19 nt, Artificial Sequence
  Description of Artificial Sequence: Synthetic oligonucleotide
gaagggcgucagaagaccg

SEQ ID NO: 942187 - RNA, 19 nt, Artificial Sequence
  Description of Artificial Sequence: Synthetic oligonucleotide
  modified_base (19)..(19): a, c, u, g, unknown or other
uuggaucccgaucuuccan

SEQ ID NO: 942188 - RNA, 19 nt, Artificial Sequence
  Description of Artificial Sequence: Synthetic oligonucleotide
gggacuacagggcuacagg

SEQ ID NO: 942189 - RNA, 19 nt, Artificial Sequence
  Description of Artificial Sequence: Synthetic oligonucleotide
ucgugcauccgauucacuu

SEQ ID NO: 942190 - RNA, 19 nt, Artificial Sequence
  Description of Artificial Sequence: Synthetic oligonucleotide
aguagcgaugguugcagau

SEQ ID NO: 942191 - RNA, 19 nt, Artificial Sequence
  Description of Artificial Sequence: Synthetic oligonucleotide
gacuacagggcuacagggc

SEQ ID NO: 942192 - RNA, 19 nt, Artificial Sequence
  Description of Artificial Sequence: Synthetic oligonucleotide
cuuagaccagagcuuggac

SEQ ID NO: 942193 - RNA, 19 nt, Artificial Sequence
  Description of Artificial Sequence: Synthetic oligonucleotide
caagcuuggaucccgaucu

SEQ ID NO: 942194 - RNA, 19 nt, Artificial Sequence
  Description of Artificial Sequence: Synthetic oligonucleotide
  modified_base (6)..(6): a, c, u, g, unknown or other
uuccanagcgcugaaugau

SEQ ID NO: 942195 - RNA, 19 nt, Artificial Sequence
  Description of Artificial Sequence: Synthetic oligonucleotide
aauguugagcgucgucaua

SEQ ID NO: 942196 - RNA, 19 nt, Artificial Sequence
  Description of Artificial Sequence: Synthetic oligonucleotide
gaccgggucacuugggcac

SEQ ID NO: 942197 - RNA, 19 nt, Artificial Sequence
  Description of Artificial Sequence: Synthetic oligonucleotide
agucguugagcugguacuc

SEQ ID NO: 942198 - RNA, 19 nt, Artificial Sequence
  Description of Artificial Sequence: Synthetic oligonucleotide
ggacauaauugaauacagg

SEQ ID NO: 942199 - RNA, 19 nt, Artificial Sequence
  Description of Artificial Sequence: Synthetic oligonucleotide
ucaagcccuucaugaaagc

SEQ ID NO: 942200 - RNA, 19 nt, Artificial Sequence
  Description of Artificial Sequence: Synthetic oligonucleotide
uggaaccucacaugggaua

SEQ ID NO: 942201 - RNA, 19 nt, Artificial Sequence
  Description of Artificial Sequence: Synthetic oligonucleotide
aguggagcggagguugagg

SEQ ID NO: 942202 - RNA, 19 nt, Artificial Sequence
  Description of Artificial Sequence: Synthetic oligonucleotide
gucgucauagcccgaacga

SEQ ID NO: 942203 - RNA, 19 nt, Artificial Sequence
  Description of Artificial Sequence: Synthetic oligonucleotide
aucuucucggagaaaacgu

SEQ ID NO: 942204 - RNA, 19 nt, Artificial Sequence
  Description of Artificial Sequence: Synthetic oligonucleotide
uccagugaauaaccauccu

SEQ ID NO: 942205 - RNA, 19 nt, Artificial Sequence
  Description of Artificial Sequence: Synthetic oligonucleotide
uccucguaaguguuagguc

SEQ ID NO: 942206 - RNA, 19 nt, Artificial Sequence
  Description of Artificial Sequence: Synthetic oligonucleotide
uguugagcgucgucauagc

SEQ ID NO: 942207 - RNA, 19 nt, Artificial Sequence
  Description of Artificial Sequence: Synthetic oligonucleotide
ugagccuacuuagaccaga

SEQ ID NO: 942208 - RNA, 19 nt, Artificial Sequence
  Description of Artificial Sequence: Synthetic oligonucleotide
auaaccauccugguggaua

SEQ ID NO: 942209 - RNA, 19 nt, Artificial Sequence
  Description of Artificial Sequence: Synthetic oligonucleotide
cagugguuuugacacgaag

SEQ ID NO: 942210 - RNA, 19 nt, Artificial Sequence
  Description of Artificial Sequence: Synthetic oligonucleotide
cugaaccgagaucugccag

SEQ ID NO: 942211 - RNA, 19 nt, Artificial Sequence
  Description of Artificial Sequence: Synthetic oligonucleotide
uacauccggagggacagca

SEQ ID NO: 942212 - RNA, 19 nt, Artificial Sequence
  Description of Artificial Sequence: Synthetic oligonucleotide
ugugggaauagaucuccuu

SEQ ID NO: 942213 - RNA, 19 nt, Artificial Sequence
  Description of Artificial Sequence: Synthetic oligonucleotide
uaagcucgaggaacugcac

SEQ ID NO: 942214 - RNA, 19 nt, Artificial Sequence
  Description of Artificial Sequence: Synthetic oligonucleotide
aacugcacuuugauguagu

SEQ ID NO: 942215 - RNA, 19 nt, Artificial Sequence
  Description of Artificial Sequence: Synthetic oligonucleotide
acuuagaccagagcuugga

SEQ ID NO: 942216 - RNA, 19 nt, Artificial Sequence
  Description of Artificial Sequence: Synthetic oligonucleotide
cguagcuugauuauugguc

SEQ ID NO: 942217 - RNA, 19 nt, Artificial Sequence
  Description of Artificial Sequence: Synthetic oligonucleotide
ugggauauucuuugcccau

SEQ ID NO: 942218 - RNA, 19 nt, Artificial Sequence
  Description of Artificial Sequence: Synthetic oligonucleotide
agcucgaggaacugcacuu

SEQ ID NO: 942219 - RNA, 19 nt, Artificial Sequence
  Description of Artificial Sequence: Synthetic oligonucleotide
agguccaucguaaucggga

SEQ ID NO: 942220 - RNA, 19 nt, Artificial Sequence
  Description of Artificial Sequence: Synthetic oligonucleotide
guucuguguguccguggcg

SEQ ID NO: 942221 - RNA, 19 nt, Artificial Sequence
  Description of Artificial Sequence: Synthetic oligonucleotide
guaaucgggaaagcagaug

SEQ ID NO: 942222 - RNA, 19 nt, Artificial Sequence
  Description of Artificial Sequence: Synthetic oligonucleotide
gagccuacuuagaccagag

SEQ ID NO: 942223 - RNA, 19 nt, Artificial Sequence
  Description of Artificial Sequence: Synthetic oligonucleotide
guguccaaggacagagggg

SEQ ID NO: 942224 - RNA, 19 nt, Artificial Sequence
  Description of Artificial Sequence: Synthetic oligonucleotide
agggcgucagaagaccggg

SEQ ID NO: 942225 - RNA, 19 nt, Artificial Sequence
  Description of Artificial Sequence: Synthetic oligonucleotide
cucggaggcucgcucaaag

SEQ ID NO: 942226 - RNA, 19 nt, Artificial Sequence
  Description of Artificial Sequence: Synthetic oligonucleotide
cacauauccuggagucacc

SEQ ID NO: 942227 - RNA, 19 nt, Artificial Sequence
  Description of Artificial Sequence: Synthetic oligonucleotide
acauauccuggagucacca

SEQ ID NO: 942228 - RNA, 19 nt, Artificial Sequence
  Description of Artificial Sequence: Synthetic oligonucleotide
ucgauagaguuggacucug

SEQ ID NO: 942229 - RNA, 19 nt, Artificial Sequence
  Description of Artificial Sequence: Synthetic oligonucleotide
agaacugcgucucgaugau

SEQ ID NO: 942230 - RNA, 19 nt, Artificial Sequence
  Description of Artificial Sequence: Synthetic oligonucleotide
ggcgaaguagcgaugguug

SEQ ID NO: 942231 - RNA, 19 nt, Artificial Sequence
  Description of Artificial Sequence: Synthetic oligonucleotide
uugccggcauccucguaag

SEQ ID NO: 942232 - RNA, 19 nt, Artificial Sequence
  Description of Artificial Sequence: Synthetic oligonucleotide
guuggggcuaguugcugug

SEQ ID NO: 942233 - RNA, 19 nt, Artificial Sequence
  Description of Artificial Sequence: Synthetic oligonucleotide
augcacgucacaccuucga

SEQ ID NO: 942234 - RNA, 19 nt, Artificial Sequence
  Description of Artificial Sequence: Synthetic oligonucleotide
auguuaagcucgaggaacu

SEQ ID NO: 942235 - RNA, 19 nt, Artificial Sequence
  Description of Artificial Sequence: Synthetic oligonucleotide
gguaccuaccucaaaguca

SEQ ID NO: 942236 - RNA, 19 nt, Artificial Sequence
  Description of Artificial Sequence: Synthetic oligonucleotide
uugcccaugguugaucgau

SEQ ID NO: 942237 - RNA, 19 nt, Artificial Sequence
  Description of Artificial Sequence: Synthetic oligonucleotide
aucgauagaguuggacucu

SEQ ID NO: 942238 - RNA, 19 nt, Artificial Sequence
  Description of Artificial Sequence: Synthetic oligonucleotide
ucgaggcauucuuccagug

SEQ ID NO: 942239 - RNA, 19 nt, Artificial Sequence
  Description of Artificial Sequence: Synthetic oligonucleotide
cugaccacuggguggaaca

SEQ ID NO: 942240 - RNA, 19 nt, Artificial Sequence
  Description of Artificial Sequence: Synthetic oligonucleotide
cucggagaaaacguccuuc

SEQ ID NO: 942241 - RNA, 19 nt, Artificial Sequence
  Description of Artificial Sequence: Synthetic oligonucleotide
agaccgggucacuugggca

SEQ ID NO: 942242 - RNA, 19 nt, Artificial Sequence
  Description of Artificial Sequence: Synthetic oligonucleotide
uuggggcuaguugcugugg

SEQ ID NO: 942243 - RNA, 19 nt, Artificial Sequence
  Description of Artificial Sequence: Synthetic oligonucleotide
agugggcacauauccugga

SEQ ID NO: 942244 - RNA, 19 nt, Artificial Sequence
  Description of Artificial Sequence: Synthetic oligonucleotide
uuaagccucggggcuuggg

SEQ ID NO: 942245 - RNA, 19 nt, Artificial Sequence
  Description of Artificial Sequence: Synthetic oligonucleotide
uacuuggggauggguuugg

SEQ ID NO: 942246 - RNA, 19 nt, Artificial Sequence
  Description of Artificial Sequence: Synthetic oligonucleotide
gaugcacgucacaccuucg

SEQ ID NO: 942247 - RNA, 19 nt, Artificial Sequence
  Description of Artificial Sequence: Synthetic oligonucleotide
acugaccacuggguggaac

SEQ ID NO: 942248 - RNA, 19 nt, Artificial Sequence
  Description of Artificial Sequence: Synthetic oligonucleotide
gaagaccgggucacuuggg

SEQ ID NO: 942249 - RNA, 19 nt, Artificial Sequence
  Description of Artificial Sequence: Synthetic oligonucleotide
gagacugguacuuggggau

SEQ ID NO: 942250 - RNA, 19 nt, Artificial Sequence
  Description of Artificial Sequence: Synthetic oligonucleotide
gauaccucaagcccuucau

SEQ ID NO: 942251 - RNA, 19 nt, Artificial Sequence
  Description of Artificial Sequence: Synthetic oligonucleotide
gcgucaaagacaaacuuga

SEQ ID NO: 942252 - RNA, 19 nt, Artificial Sequence
  Description of Artificial Sequence: Synthetic oligonucleotide
gacggggagaugcccugag

SEQ ID NO: 942253 - RNA, 19 nt, Artificial Sequence
  Description of Artificial Sequence: Synthetic oligonucleotide
  modified_base (3)..(3): a, c, u, g, unknown or other
canagcgcugaaugauguc

SEQ ID NO: 942254 - RNA, 19 nt, Artificial Sequence
  Description of Artificial Sequence: Synthetic oligonucleotide
acuugacguucuguguguc

SEQ ID NO: 942255 - RNA, 19 nt, Artificial Sequence
  Description of Artificial Sequence: Synthetic oligonucleotide
cuccuucaauacaccacac

SEQ ID NO: 942256 - RNA, 19 nt, Artificial Sequence
  Description of Artificial Sequence: Synthetic oligonucleotide
agcuugauuauuggucaga

SEQ ID NO: 942257 - RNA, 19 nt, Artificial Sequence
  Description of Artificial Sequence: Synthetic oligonucleotide
cuaugaacucgaggcauuc

SEQ ID NO: 942258 - RNA, 19 nt, Artificial Sequence
  Description of Artificial Sequence: Synthetic oligonucleotide
ugucaauagugcucuccuu

SEQ ID NO: 942259 - RNA, 19 nt, Artificial Sequence
  Description of Artificial Sequence: Synthetic oligonucleotide
uaagcgcucagugccgcga

SEQ ID NO: 942260 - RNA, 19 nt, Artificial Sequence
  Description of Artificial Sequence: Synthetic oligonucleotide
guaagcgcucagugccgcg

SEQ ID NO: 942261 - RNA, 19 nt, Artificial Sequence
  Description of Artificial Sequence: Synthetic oligonucleotide
cgcugaaugauguccauac

SEQ ID NO: 942262 - RNA, 19 nt, Artificial Sequence
  Description of Artificial Sequence: Synthetic oligonucleotide
gcuuggguguggcuagugg

SEQ ID NO: 942263 - RNA, 19 nt, Artificial Sequence
  Description of Artificial Sequence: Synthetic oligonucleotide
auagcccgaacgauggcca

SEQ ID NO: 942264 - RNA, 19 nt, Artificial Sequence
  Description of Artificial Sequence: Synthetic oligonucleotide
agagucacauggagucgac

SEQ ID NO: 942265 - RNA, 19 nt, Artificial Sequence
  Description of Artificial Sequence: Synthetic oligonucleotide
cugaauguugagcgucguc

SEQ ID NO: 942266 - RNA, 19 nt, Artificial Sequence
  Description of Artificial Sequence: Synthetic oligonucleotide
ucccgccgcauguuaagcu

SEQ ID NO: 942267 - RNA, 19 nt, Artificial Sequence
  Description of Artificial Sequence: Synthetic oligonucleotide
cgaagaacgcagcacgucc

SEQ ID NO: 942268 - RNA, 19 nt, Artificial Sequence
  Description of Artificial Sequence: Synthetic oligonucleotide
guggaacagauguugggcu

SEQ ID NO: 942269 - RNA, 19 nt, Artificial Sequence
  Description of Artificial Sequence: Synthetic oligonucleotide
ucagcguagcuugauuauu

SEQ ID NO: 942270 - RNA, 19 nt, Artificial Sequence
  Description of Artificial Sequence: Synthetic oligonucleotide
gucgacuggaaccucacau

SEQ ID NO: 942271 - RNA, 19 nt, Artificial Sequence
  Description of Artificial Sequence: Synthetic oligonucleotide
gacguucuguguguccgug

SEQ ID NO: 942272 - RNA, 19 nt, Artificial Sequence
  Description of Artificial Sequence: Synthetic oligonucleotide
cuuuaagccucggggcuug

SEQ ID NO: 942273 - RNA, 19 nt, Artificial Sequence
  Description of Artificial Sequence: Synthetic oligonucleotide
  modified_base (17)..(17): a, c, u, g, unknown or other
ggaucccgaucuuccanag

SEQ ID NO: 942274 - RNA, 19 nt, Artificial Sequence
  Description of Artificial Sequence: Synthetic oligonucleotide
uuggcgaaguagcgauggu

SEQ ID NO: 942275 - RNA, 19 nt, Artificial Sequence
  Description of Artificial Sequence: Synthetic oligonucleotide
gggcuacugagucucggag

SEQ ID NO: 942276 - RNA, 19 nt, Artificial Sequence
  Description of Artificial Sequence: Synthetic oligonucleotide
guacuuggggauggguuug

SEQ ID NO: 942277 - RNA, 19 nt, Artificial Sequence
  Description of Artificial Sequence: Synthetic oligonucleotide
ucgucauagcccgaacgau

SEQ ID NO: 942278 - RNA, 19 nt, Artificial Sequence
  Description of Artificial Sequence: Synthetic oligonucleotide
gaauguugagcgucgucau

SEQ ID NO: 942279 - RNA, 19 nt, Artificial Sequence
  Description of Artificial Sequence: Synthetic oligonucleotide
cuuggaucccgaucuucca

SEQ ID NO: 942280 - RNA, 19 nt, Artificial Sequence
  Description of Artificial Sequence: Synthetic oligonucleotide
guuggacucugcccucagc

SEQ ID NO: 942281 - RNA, 19 nt, Artificial Sequence
  Description of Artificial Sequence: Synthetic oligonucleotide
uugcgcucggaacgcugcc

SEQ ID NO: 942282 - RNA, 19 nt, Artificial Sequence
  Description of Artificial Sequence: Synthetic oligonucleotide
auuuaucugugagccuacu

SEQ ID NO: 942283 - RNA, 19 nt, Artificial Sequence
  Description of Artificial Sequence: Synthetic oligonucleotide
accuaccucaaagucacua

SEQ ID NO: 942284 - RNA, 19 nt, Artificial Sequence
  Description of Artificial Sequence: Synthetic oligonucleotide
ugaacaggugcaggcuacu

SEQ ID NO: 942285 - RNA, 19 nt, Artificial Sequence
  Description of Artificial Sequence: Synthetic oligonucleotide
ugacguucuguguguccgu

SEQ ID NO: 942286 - RNA, 19 nt, Artificial Sequence
  Description of Artificial Sequence: Synthetic oligonucleotide
gauauucuuugcccauggu

SEQ ID NO: 942287 - RNA, 19 nt, Artificial Sequence
  Description of Artificial Sequence: Synthetic oligonucleotide
uacucggaggcucgcucaa

SEQ ID NO: 942288 - RNA, 19 nt, Artificial Sequence
  Description of Artificial Sequence: Synthetic oligonucleotide
ccuucaauacaccacaccu

SEQ ID NO: 942289 - RNA, 19 nt, Artificial Sequence
  Description of Artificial Sequence: Synthetic oligonucleotide
ugggguccagaagugucca

SEQ ID NO: 942290 - RNA, 19 nt, Artificial Sequence
  Description of Artificial Sequence: Synthetic oligonucleotide
ccgcauguuaagcucgagg

SEQ ID NO: 942291 - RNA, 19 nt, Artificial Sequence
  Description of Artificial Sequence: Synthetic oligonucleotide
gucucucccugguaccuac

SEQ ID NO: 942292 - RNA, 19 nt, Artificial Sequence
  Description of Artificial Sequence: Synthetic oligonucleotide
cucggagcaagggacauaa

SEQ ID NO: 942293 - RNA, 19 nt, Artificial Sequence
  Description of Artificial Sequence: Synthetic oligonucleotide
guacucggaggcucgcuca

SEQ ID NO: 942294 - RNA, 19 nt, Artificial Sequence
  Description of Artificial Sequence: Synthetic oligonucleotide
gagggauaccucaagcccu

SEQ ID NO: 942295 - RNA, 19 nt, Artificial Sequence
  Description of Artificial Sequence: Synthetic oligonucleotide
guaucucagaagagcccgc

SEQ ID NO: 942296 - RNA, 19 nt, Artificial Sequence
  Description of Artificial Sequence: Synthetic oligonucleotide
cgcauguuaagcucgagga

SEQ ID NO: 942297 - RNA, 19 nt, Artificial Sequence
  Description of Artificial Sequence: Synthetic oligonucleotide
gcccaugguugaucgauag

SEQ ID NO: 942298 - RNA, 19 nt, Artificial Sequence
  Description of Artificial Sequence: Synthetic oligonucleotide
uaguuggggcuaguugcug

SEQ ID NO: 942299 - RNA, 19 nt, Artificial Sequence
  Description of Artificial Sequence: Synthetic oligonucleotide
gaugguugcagaugcuguu

SEQ ID NO: 942300 - RNA, 19 nt, Artificial Sequence
  Description of Artificial Sequence: Synthetic oligonucleotide
uggcgaaguagcgaugguu

SEQ ID NO: 942301 - RNA, 19 nt, Artificial Sequence
  Description of Artificial Sequence: Synthetic oligonucleotide
caggcuacucgugcauccg

SEQ ID NO: 942302 - RNA, 19 nt, Artificial Sequence
  Description of Artificial Sequence: Synthetic oligonucleotide
agaaaacguccuucuuguu

SEQ ID NO: 942303 - RNA, 19 nt, Artificial Sequence
  Description of Artificial Sequence: Synthetic oligonucleotide
cucggaacgcugcccgccc

SEQ ID NO: 942304 - RNA, 19 nt, Artificial Sequence
  Description of Artificial Sequence: Synthetic oligonucleotide
aagcgcucagugccgcgau

SEQ ID NO: 942305 - RNA, 19 nt, Artificial Sequence
  Description of Artificial Sequence: Synthetic oligonucleotide
aggcuacucgugcauccga

SEQ ID NO: 942306 - RNA, 19 nt, Artificial Sequence
  Description of Artificial Sequence: Synthetic oligonucleotide
uaguggagcggagguugag

SEQ ID NO: 942307 - RNA, 19 nt, Artificial Sequence
  Description of Artificial Sequence: Synthetic oligonucleotide
cuaauuuaucugugagccu

SEQ ID NO: 942308 - RNA, 19 nt, Artificial Sequence
  Description of Artificial Sequence: Synthetic oligonucleotide
caugguugaucgauagagu

SEQ ID NO: 942309 - RNA, 19 nt, Artificial Sequence
  Description of Artificial Sequence: Synthetic oligonucleotide
ugcccaugguugaucgaua

SEQ ID NO: 942310 - RNA, 19 nt, Artificial Sequence
  Description of Artificial Sequence: Synthetic oligonucleotide
acugaauguugagcgucgu

SEQ ID NO: 942311 - RNA, 19 nt, Artificial Sequence
  Description of Artificial Sequence: Synthetic oligonucleotide
gcaagcuuggaucccgauc

SEQ ID NO: 942312 - RNA, 19 nt, Artificial Sequence
  Description of Artificial Sequence: Synthetic oligonucleotide
gagucgacuggaaccucac

SEQ ID NO: 942313 - RNA, 19 nt, Artificial Sequence
  Description of Artificial Sequence: Synthetic oligonucleotide
cucacaugggauauucuuu

SEQ ID NO: 942314 - RNA, 19 nt, Artificial Sequence
  Description of Artificial Sequence: Synthetic oligonucleotide
ugcgcucggaacgcugccc

SEQ ID NO: 942315 - RNA, 19 nt, Artificial Sequence
  Description of Artificial Sequence: Synthetic oligonucleotide
ugcauccgauucacuucgu

SEQ ID NO: 942316 - RNA, 19 nt, Artificial Sequence
  Description of Artificial Sequence: Synthetic oligonucleotide
cuucaauacaccacaccuu

SEQ ID NO: 942317 - RNA, 19 nt, Artificial Sequence
  Description of Artificial Sequence: Synthetic oligonucleotide
aagcuuggaucccgaucuu

SEQ ID NO: 942318 - RNA, 19 nt, Artificial Sequence
  Description of Artificial Sequence: Synthetic oligonucleotide
ggcgucagaagaccggguc

SEQ ID NO: 942319 - RNA, 19 nt, Artificial Sequence
  Description of Artificial Sequence: Synthetic oligonucleotide
acguccugcucagugggca

SEQ ID NO: 942320 - RNA, 19 nt, Artificial Sequence
  Description of Artificial Sequence: Synthetic oligonucleotide
gaagaacgcagcacguccu

SEQ ID NO: 942321 - RNA, 19 nt, Artificial Sequence
  Description of Artificial Sequence: Synthetic oligonucleotide
cacugcugagucacuguga

SEQ ID NO: 942322 - RNA, 19 nt, Artificial Sequence
  Description of Artificial Sequence: Synthetic oligonucleotide
acuuuaagccucggggcuu

SEQ ID NO: 942323 - RNA, 19 nt, Artificial Sequence
  Description of Artificial Sequence: Synthetic oligonucleotide
agcgcugaaugauguccau

SEQ ID NO: 942324 - RNA, 19 nt, Artificial Sequence
  Description of Artificial Sequence: Synthetic oligonucleotide
ggggacuacagggcuacag

SEQ ID NO: 942325 - RNA, 19 nt, Artificial Sequence
  Description of Artificial Sequence: Synthetic oligonucleotide
cacguccugcucagugggc

SEQ ID NO: 942326 - RNA, 19 nt, Artificial Sequence
  Description of Artificial Sequence: Synthetic oligonucleotide
agcaagcuuggaucccgau

SEQ ID NO: 942327 - RNA, 19 nt, Artificial Sequence
  Description of Artificial Sequence: Synthetic oligonucleotide
cugugagcgccagcugucc

SEQ ID NO: 942328 - RNA, 19 nt, Artificial Sequence
  Description of Artificial Sequence: Synthetic oligonucleotide
ucggaacgcugcccgccca

SEQ ID NO: 942329 - RNA, 19 nt, Artificial Sequence
  Description of Artificial Sequence: Synthetic oligonucleotide
cuucgaagcaguggaucca

SEQ ID NO: 942330 - RNA, 19 nt, Artificial Sequence
  Description of Artificial Sequence: Synthetic oligonucleotide
cuaguuggggcuaguugcu

SEQ ID NO: 942331 - RNA, 19 nt, Artificial Sequence
  Description of Artificial Sequence: Synthetic oligonucleotide
cgucauagcccgaacgaug

SEQ ID NO: 942332 - RNA, 19 nt, Artificial Sequence
  Description of Artificial Sequence: Synthetic oligonucleotide
cgucgucauagcccgaacg

SEQ ID NO: 942333 - RNA, 19 nt, Artificial Sequence
  Description of Artificial Sequence: Synthetic oligonucleotide
gaacugcgucucgaugaug

SEQ ID NO: 942334 - RNA, 19 nt, Artificial Sequence
  Description of Artificial Sequence: Synthetic oligonucleotide
cugguaccuaccucaaagu

SEQ ID NO: 942335 - RNA, 19 nt, Artificial Sequence
  Description of Artificial Sequence: Synthetic oligonucleotide
ggauaccucaagcccuuca

SEQ ID NO: 942336 - RNA, 19 nt, Artificial Sequence
  Description of Artificial Sequence: Synthetic oligonucleotide
gcgaugguugcagaugcug

SEQ ID NO: 942337 - RNA, 19 nt, Artificial Sequence
  Description of Artificial Sequence: Synthetic oligonucleotide
cuaguggagcggagguuga

SEQ ID NO: 942338 - RNA, 19 nt, Artificial Sequence
  Description of Artificial Sequence: Synthetic oligonucleotide
gcugaaccgagaucugcca

SEQ ID NO: 942339 - RNA, 19 nt, Artificial Sequence
  Description of Artificial Sequence: Synthetic oligonucleotide
ggaaggggcccuacauccg

SEQ ID NO: 942340 - RNA, 19 nt, Artificial Sequence
  Description of Artificial Sequence: Synthetic oligonucleotide
gguccaucguaaucgggaa

SEQ ID NO: 942341 - RNA, 19 nt, Artificial Sequence
  Description of Artificial Sequence: Synthetic oligonucleotide
caggugcaggcuacucgug

SEQ ID NO: 942342 - RNA, 19 nt, Artificial Sequence
  Description of Artificial Sequence: Synthetic oligonucleotide
cguggcgcacgucaugugg

SEQ ID NO: 942343 - RNA, 19 nt, Artificial Sequence
  Description of Artificial Sequence: Synthetic oligonucleotide
acggggagaugcccugaga

SEQ ID NO: 942344 - RNA, 19 nt, Artificial Sequence
  Description of Artificial Sequence: Synthetic oligonucleotide
gcgggguuggggaauuggg

SEQ ID NO: 942345 - RNA, 19 nt, Artificial Sequence
  Description of Artificial Sequence: Synthetic oligonucleotide
gaaccgagaucugccaggu

SEQ ID NO: 942346 - RNA, 19 nt, Artificial Sequence
  Description of Artificial Sequence: Synthetic oligonucleotide
ggggcccuacauccggagg

SEQ ID NO: 942347 - RNA, 19 nt, Artificial Sequence
  Description of Artificial Sequence: Synthetic oligonucleotide
ccgccgcauguuaagcucg

SEQ ID NO: 942348 - RNA, 19 nt, Artificial Sequence
  Description of Artificial Sequence: Synthetic oligonucleotide
agccaccccucagcguagc

SEQ ID NO: 942349 - RNA, 19 nt, Artificial Sequence
  Description of Artificial Sequence: Synthetic oligonucleotide
uaccuaccucaaagucacu

SEQ ID NO: 942350 - RNA, 19 nt, Artificial Sequence
  Description of Artificial Sequence: Synthetic oligonucleotide
augugggaauagaucuccu

SEQ ID NO: 942351 - RNA, 19 nt, Artificial Sequence
  Description of Artificial Sequence: Synthetic oligonucleotide
guccaucguaaucgggaaa

SEQ ID NO: 942352 - RNA, 19 nt, Artificial Sequence
  Description of Artificial Sequence: Synthetic oligonucleotide
ggcgggguuggggaauugg

SEQ ID NO: 942353 - RNA, 19 nt, Artificial Sequence
  Description of Artificial Sequence: Synthetic oligonucleotide
agggacggggagaugcccu

SEQ ID NO: 942354 - RNA, 19 nt, Artificial Sequence
  Description of Artificial Sequence: Synthetic oligonucleotide
cugcgucucgaugaugcca

SEQ ID NO: 942355 - RNA, 19 nt, Artificial Sequence
  Description of Artificial Sequence: Synthetic oligonucleotide
  modified_base (9)..(9): a, c, u, g, unknown or other
aucuuccanagcgcugaau

SEQ ID NO: 942356 - RNA, 19 nt, Artificial Sequence
  Description of Artificial Sequence: Synthetic oligonucleotide
cucagcguagcuugauuau

SEQ ID NO: 942357 - RNA, 19 nt, Artificial Sequence
  Description of Artificial Sequence: Synthetic oligonucleotide
gcgucagaagaccggguca

SEQ ID NO: 942358 - RNA, 19 nt, Artificial Sequence
  Description of Artificial Sequence: Synthetic oligonucleotide
cuucgucguccuccaccag

SEQ ID NO: 942359 - RNA, 19 nt, Artificial Sequence
  Description of Artificial Sequence: Synthetic oligonucleotide
gugagccuacuuagaccag

SEQ ID NO: 942360 - RNA, 19 nt, Artificial Sequence
  Description of Artificial Sequence: Synthetic oligonucleotide
cuguguguccguggcgcac

SEQ ID NO: 942361 - RNA, 19 nt, Artificial Sequence
  Description of Artificial Sequence: Synthetic oligonucleotide
  modified_base (12)..(12): a, c, u, g, unknown or other
ccgaucuuccanagcgcug

SEQ ID NO: 942362 - RNA, 19 nt, Artificial Sequence
  Description of Artificial Sequence: Synthetic oligonucleotide
guccguggcgcacgucaug

SEQ ID NO: 942363 - RNA, 19 nt, Artificial Sequence
  Description of Artificial Sequence: Synthetic oligonucleotide
ggcauucuuccagugaaua

SEQ ID NO: 942364 - RNA, 19 nt, Artificial Sequence
  Description of Artificial Sequence: Synthetic oligonucleotide
aggcgcucuaggucugaaa

SEQ ID NO: 942365 - RNA, 19 nt, Artificial Sequence
  Description of Artificial Sequence: Synthetic oligonucleotide
gucccgccgcauguuaagc

SEQ ID NO: 942366 - RNA, 19 nt, Artificial Sequence
  Description of Artificial Sequence: Synthetic oligonucleotide
ugccggcauccucguaagu

SEQ ID NO: 942367 - RNA, 19 nt, Artificial Sequence
  Description of Artificial Sequence: Synthetic oligonucleotide
gccagugguuuugacacga

SEQ ID NO: 942368 - RNA, 19 nt, Artificial Sequence
  Description of Artificial Sequence: Synthetic oligonucleotide
ccgauucacuucgucgucc

SEQ ID NO: 942369 - RNA, 19 nt, Artificial Sequence
  Description of Artificial Sequence: Synthetic oligonucleotide
uguccuaguuggggcuagu

SEQ ID NO: 942370 - RNA, 19 nt, Artificial Sequence
  Description of Artificial Sequence: Synthetic oligonucleotide
guugaggcacaggaguuau

SEQ ID NO: 942371 - RNA, 19 nt, Artificial Sequence
  Description of Artificial Sequence: Synthetic oligonucleotide
cacgaagaacgcagcacgu

SEQ ID NO: 942372 - RNA, 19 nt, Artificial Sequence
  Description of Artificial Sequence: Synthetic oligonucleotide
ggagucgacuggaaccuca

SEQ ID NO: 942373 - RNA, 19 nt, Artificial Sequence
  Description of Artificial Sequence: Synthetic oligonucleotide
ucggagcaagggacauaau

SEQ ID NO: 942374 - RNA, 19 nt, Artificial Sequence
  Description of Artificial Sequence: Synthetic oligonucleotide
cugguacucggaggcucgc

SEQ ID NO: 942375 - RNA, 19 nt, Artificial Sequence
  Description of Artificial Sequence: Synthetic oligonucleotide
gggacggggagaugcccug

SEQ ID NO: 942376 - RNA, 19 nt, Artificial Sequence
  Description of Artificial Sequence: Synthetic oligonucleotide
cgucacaccuucgaagcag

SEQ ID NO: 942377 - RNA, 19 nt, Artificial Sequence
  Description of Artificial Sequence: Synthetic oligonucleotide
gaacagauguugggcuugu

SEQ ID NO: 942378 - RNA, 19 nt, Artificial Sequence
  Description of Artificial Sequence: Synthetic oligonucleotide
  modified_base (4)..(4): a, c, u, g, unknown or other
ccanagcgcugaaugaugu

SEQ ID NO: 942379 - RNA, 19 nt, Artificial Sequence
  Description of Artificial Sequence: Synthetic oligonucleotide
uggagucgacuggaaccuc

SEQ ID NO: 942380 - RNA, 19 nt, Artificial Sequence
  Description of Artificial Sequence: Synthetic oligonucleotide
gaacgauggccaggaugga

SEQ ID NO: 942381 - RNA, 19 nt, Artificial Sequence
  Description of Artificial Sequence: Synthetic oligonucleotide
caugucguaagcgcucagu

SEQ ID NO: 942382 - RNA, 19 nt, Artificial Sequence
  Description of Artificial Sequence: Synthetic oligonucleotide
ccucagcguagcuugauua

SEQ ID NO: 942383 - RNA, 19 nt, Artificial Sequence
  Description of Artificial Sequence: Synthetic oligonucleotide
ccaucguaaucgggaaagc

SEQ ID NO: 942384 - RNA, 19 nt, Artificial Sequence
  Description of Artificial Sequence: Synthetic oligonucleotide
ggaggcucgcucaaagcaa

SEQ ID NO: 942385 - RNA, 19 nt, Artificial Sequence
  Description of Artificial Sequence: Synthetic oligonucleotide
gcuugagggagggauaccu

SEQ ID NO: 942386 - RNA, 19 nt, Artificial Sequence
  Description of Artificial Sequence: Synthetic oligonucleotide
guugaucgauagaguugga

SEQ ID NO: 942387 - RNA, 19 nt, Artificial Sequence
  Description of Artificial Sequence: Synthetic oligonucleotide
cccgccgcauguuaagcuc

SEQ ID NO: 942388 - RNA, 19 nt, Artificial Sequence
  Description of Artificial Sequence: Synthetic oligonucleotide
ggaaccucacaugggauau

SEQ ID NO: 942389 - RNA, 19 nt, Artificial Sequence
  Description of Artificial Sequence: Synthetic oligonucleotide
  modified_base (11)..(11): a, c, u, g, unknown or other
cgaucuuccanagcgcuga

SEQ ID NO: 942390 - RNA, 19 nt, Artificial Sequence
  Description of Artificial Sequence: Synthetic oligonucleotide
gguuggcgaaguagcgaug

SEQ ID NO: 942391 - RNA, 19 nt, Artificial Sequence
  Description of Artificial Sequence: Synthetic oligonucleotide
cgauagaguuggacucugc

SEQ ID NO: 942392 - RNA, 19 nt, Artificial Sequence
  Description of Artificial Sequence: Synthetic oligonucleotide
cuuguccuaguuggggcua

SEQ ID NO: 942393 - RNA, 19 nt, Artificial Sequence
  Description of Artificial Sequence: Synthetic oligonucleotide
gcuaguugcugugggucca

SEQ ID NO: 942394 - RNA, 19 nt, Artificial Sequence
  Description of Artificial Sequence: Synthetic oligonucleotide
gggcuguuugcugaaccga

SEQ ID NO: 942395 - RNA, 19 nt, Artificial Sequence
  Description of Artificial Sequence: Synthetic oligonucleotide
gagucacauggagucgacu

SEQ ID NO: 942396 - RNA, 19 nt, Artificial Sequence
  Description of Artificial Sequence: Synthetic oligonucleotide
gcucggaacgcugcccgcc

SEQ ID NO: 942397 - RNA, 19 nt, Artificial Sequence
  Description of Artificial Sequence: Synthetic oligonucleotide
guguuagguccaucguaau

SEQ ID NO: 942398 - RNA, 19 nt, Artificial Sequence
  Description of Artificial Sequence: Synthetic oligonucleotide
agagcacgauggacguggu

SEQ ID NO: 942399 - RNA, 19 nt, Artificial Sequence
  Description of Artificial Sequence: Synthetic oligonucleotide
cggaggcucgcucaaagca

SEQ ID NO: 942400 - RNA, 19 nt, Artificial Sequence
  Description of Artificial Sequence: Synthetic oligonucleotide
gcguagcuugauuauuggu

SEQ ID NO: 942401 - RNA, 19 nt, Artificial Sequence
  Description of Artificial Sequence: Synthetic oligonucleotide
gguugaggcacaggaguua

SEQ ID NO: 942402 - RNA, 19 nt, Artificial Sequence
  Description of Artificial Sequence: Synthetic oligonucleotide
ccucacaugggauauucuu

SEQ ID NO: 942403 - RNA, 19 nt, Artificial Sequence
  Description of Artificial Sequence: Synthetic oligonucleotide
ggcuugucaaaugcaggua

SEQ ID NO: 942404 - RNA, 19 nt, Artificial Sequence
  Description of Artificial Sequence: Synthetic oligonucleotide
cgauggacgugguuggcga

SEQ ID NO: 942405 - RNA, 19 nt, Artificial Sequence
  Description of Artificial Sequence: Synthetic oligonucleotide
gaacgcugcccgcccacau

SEQ ID NO: 942406 - RNA, 19 nt, Artificial Sequence
  Description of Artificial Sequence: Synthetic oligonucleotide
cccuacauccggagggaca

SEQ ID NO: 942407 - RNA, 19 nt, Artificial Sequence
  Description of Artificial Sequence: Synthetic oligonucleotide
uguguccguggcgcacguc

SEQ ID NO: 942408 - RNA, 19 nt, Artificial Sequence
  Description of Artificial Sequence: Synthetic oligonucleotide
cuaguugcuguggguccaa

SEQ ID NO: 942409 - RNA, 19 nt, Artificial Sequence
  Description of Artificial Sequence: Synthetic oligonucleotide
acucggaggcucgcucaaa

SEQ ID NO: 942410 - RNA, 19 nt, Artificial Sequence
  Description of Artificial Sequence: Synthetic oligonucleotide
gcccgaacgauggccagga

SEQ ID NO: 942411 - RNA, 19 nt, Artificial Sequence
  Description of Artificial Sequence: Synthetic oligonucleotide
cguaagcgcucagugccgc

SEQ ID NO: 942412 - RNA, 19 nt, Artificial Sequence
  Description of Artificial Sequence: Synthetic oligonucleotide
  modified_base (13)..(13): a, c, u, g, unknown or other
cccgaucuuccanagcgcu

SEQ ID NO: 942413 - RNA, 19 nt, Artificial Sequence
  Description of Artificial Sequence: Synthetic oligonucleotide
acgucccgccgcauguuaa

SEQ ID NO: 942414 - RNA, 19 nt, Artificial Sequence
  Description of Artificial Sequence: Synthetic oligonucleotide
ccaugucguaagcgcucag

SEQ ID NO: 942415 - RNA, 19 nt, Artificial Sequence
  Description of Artificial Sequence: Synthetic oligonucleotide
cgucccgccgcauguuaag

SEQ ID NO: 942416 - RNA, 19 nt, Artificial Sequence
  Description of Artificial Sequence: Synthetic oligonucleotide
cccaugguugaucgauaga

SEQ ID NO: 942417 - RNA, 19 nt, Artificial Sequence
  Description of Artificial Sequence: Synthetic oligonucleotide
ccggcauccucguaagugu

SEQ ID NO: 942418 - RNA, 19 nt, Artificial Sequence
  Description of Artificial Sequence: Synthetic oligonucleotide
gccgcauguuaagcucgag

SEQ ID NO: 942419 - RNA, 19 nt, Artificial Sequence
  Description of Artificial Sequence: Synthetic oligonucleotide
gggagggucugcacuuuaa

SEQ ID NO: 942420 - RNA, 19 nt, Artificial Sequence
  Description of Artificial Sequence: Synthetic oligonucleotide
cgucucgaugaugccagug

SEQ ID NO: 942421 - RNA, 19 nt, Artificial Sequence
  Description of Artificial Sequence: Synthetic oligonucleotide
gucagaagaccgggucacu

SEQ ID NO: 942422 - RNA, 19 nt, Artificial Sequence
  Description of Artificial Sequence: Synthetic oligonucleotide
gcccugagacugguacuug

SEQ ID NO: 942423 - RNA, 19 nt, Artificial Sequence
  Description of Artificial Sequence: Synthetic oligonucleotide
cguaaguguuagguccauc

SEQ ID NO: 942424 - RNA, 19 nt, Artificial Sequence
  Description of Artificial Sequence: Synthetic oligonucleotide
ggaacgcugcccgcccaca

SEQ ID NO: 942425 - RNA, 19 nt, Artificial Sequence
  Description of Artificial Sequence: Synthetic oligonucleotide
cggagcaagggacauaauu

SEQ ID NO: 942426 - RNA, 19 nt, Artificial Sequence
  Description of Artificial Sequence: Synthetic oligonucleotide
gcuaugaacucgaggcauu

SEQ ID NO: 942427 - RNA, 19 nt, Artificial Sequence
  Description of Artificial Sequence: Synthetic oligonucleotide
gcuacucgugcauccgauu

SEQ ID NO: 942428 - RNA, 19 nt, Artificial Sequence
  Description of Artificial Sequence: Synthetic oligonucleotide
guguguccguggcgcacgu

SEQ ID NO: 942429 - RNA, 19 nt, Artificial Sequence
  Description of Artificial Sequence: Synthetic oligonucleotide
gcccuacauccggagggac

SEQ ID NO: 942430 - RNA, 19 nt, Artificial Sequence
  Description of Artificial Sequence: Synthetic oligonucleotide
ggacggggagaugcccuga

SEQ ID NO: 942431 - RNA, 19 nt, Artificial Sequence
  Description of Artificial Sequence: Synthetic oligonucleotide
ccagugguuuugacacgaa

SEQ ID NO: 942432 - RNA, 19 nt, Artificial Sequence
  Description of Artificial Sequence: Synthetic oligonucleotide
gagcgucgucauagcccga

SEQ ID NO: 942433 - RNA, 19 nt, Artificial Sequence
  Description of Artificial Sequence: Synthetic oligonucleotide
gcgcugaaugauguccaua

SEQ ID NO: 942434 - RNA, 19 nt, Artificial Sequence
  Description of Artificial Sequence: Synthetic oligonucleotide
ggcuacucgugcauccgau

SEQ ID NO: 942435 - RNA, 19 nt, Artificial Sequence
  Description of Artificial Sequence: Synthetic oligonucleotide
cgcucuaggucugaaagau

SEQ ID NO: 942436 - RNA, 19 nt, Artificial Sequence
  Description of Artificial Sequence: Synthetic oligonucleotide
ccguggcgcacgucaugug

SEQ ID NO: 942437 - RNA, 19 nt, Artificial Sequence
  Description of Artificial Sequence: Synthetic oligonucleotide
cgcucggaacgcugcccgc

SEQ ID NO: 942438 - RNA, 19 nt, Artificial Sequence
  Description of Artificial Sequence: Synthetic oligonucleotide
cggaacgcugcccgcccac

SEQ ID NO: 942439 - RNA, 19 nt, Artificial Sequence
  Description of Artificial Sequence: Synthetic oligonucleotide
cgcucaaagcaagcuugga

SEQ ID NO: 942440 - RNA, 19 nt, Artificial Sequence
  Description of Artificial Sequence: Synthetic oligonucleotide
cccugguaccuaccucaaa

SEQ ID NO: 942441 - RNA, 19 nt, Artificial Sequence
  Description of Artificial Sequence: Synthetic oligonucleotide
gggcgggguuggggaauug

SEQ ID NO: 942442 - RNA, 19 nt, Artificial Sequence
  Description of Artificial Sequence: Synthetic oligonucleotide
ccgggucacuugggcacug

SEQ ID NO: 942443 - RNA, 19 nt, Artificial Sequence
  Description of Artificial Sequence: Synthetic oligonucleotide
gggcgucagaagaccgggu

SEQ ID NO: 942444 - RNA, 19 nt, Artificial Sequence
  Description of Artificial Sequence: Synthetic oligonucleotide
gccaccccucagcguagcu

SEQ ID NO: 942445 - RNA, 19 nt, Artificial Sequence
  Description of Artificial Sequence: Synthetic oligonucleotide
gcgucucgaugaugccagu

SEQ ID NO: 942446 - RNA, 19 nt, Artificial Sequence
  Description of Artificial Sequence: Synthetic oligonucleotide
cccucagcguagcuugauu

SEQ ID NO: 942447 - RNA, 19 nt, Artificial Sequence
  Description of Artificial Sequence: Synthetic oligonucleotide
ccaccccucagcguagcuu

SEQ ID NO: 942448 - RNA, 19 nt, Artificial Sequence
  Description of Artificial Sequence: Synthetic oligonucleotide
uggaaagucagccacacag

SEQ ID NO: 942449 - RNA, 19 nt, Artificial Sequence
  Description of Artificial Sequence: Synthetic oligonucleotide
aaggcaaguagccaugguc

SEQ ID NO: 942450 - RNA, 19 nt, Artificial Sequence
  Description of Artificial Sequence: Synthetic oligonucleotide
ucucgaacaaggaagagac

SEQ ID NO: 942451 - RNA, 19 nt, Artificial Sequence
  Description of Artificial Sequence: Synthetic oligonucleotide
uguaaauuuccucuggggu

SEQ ID NO: 942452 - RNA, 19 nt, Artificial Sequence
  Description of Artificial Sequence: Synthetic oligonucleotide
uuccguacaaaagaaaagg

SEQ ID NO: 942453 - RNA, 19 nt, Artificial Sequence
  Description of Artificial Sequence: Synthetic oligonucleotide
aaagacuccgcuaacuugg

SEQ ID NO: 942454 - RNA, 19 nt, Artificial Sequence
  Description of Artificial Sequence: Synthetic oligonucleotide
ugguaaccgauacauaagg

SEQ ID NO: 942455 - RNA, 19 nt, Artificial Sequence
  Description of Artificial Sequence: Synthetic oligonucleotide
aguuuaaugaguggggagc

SEQ ID NO: 942456 - RNA, 19 nt, Artificial Sequence
  Description of Artificial Sequence: Synthetic oligonucleotide
uuuacuugagaguuugacc

SEQ ID NO: 942457 - RNA, 19 nt, Artificial Sequence
  Description of Artificial Sequence: Synthetic oligonucleotide
aaacuauuaaaggucucac

SEQ ID NO: 942458 - RNA, 19 nt, Artificial Sequence
  Description of Artificial Sequence: Synthetic oligonucleotide
aaaagacuccgcuaacuug

SEQ ID NO: 942459 - RNA, 19 nt, Artificial Sequence
  Description of Artificial Sequence: Synthetic oligonucleotide
auacucaugauuccgaaga

SEQ ID NO: 942460 - RNA, 19 nt, Artificial Sequence
  Description of Artificial Sequence: Synthetic oligonucleotide
aaaacuauuaaaggucuca

SEQ ID NO: 942461 - RNA, 19 nt, Artificial Sequence
  Description of Artificial Sequence: Synthetic oligonucleotide
uacuaaaugcuaauuuggc

SEQ ID NO: 942462 - RNA, 19 nt, Artificial Sequence
  Description of Artificial Sequence: Synthetic oligonucleotide
caagcaaugggucuugccg

SEQ ID NO: 942463 - RNA, 19 nt, Artificial Sequence
  Description of Artificial Sequence: Synthetic oligonucleotide
aagagacuaaaauacccga

SEQ ID NO: 942464 - RNA, 19 nt, Artificial Sequence
  Description of Artificial Sequence: Synthetic oligonucleotide
ugagcauaaagcagguuca

SEQ ID NO: 942465 - RNA, 19 nt, Artificial Sequence
  Description of Artificial Sequence: Synthetic oligonucleotide
auuccgaagacugguaacc

SEQ ID NO: 942466 - RNA, 19 nt, Artificial Sequence
  Description of Artificial Sequence: Synthetic oligonucleotide
uguuauaggccacguaggc

SEQ ID NO: 942467 - RNA, 19 nt, Artificial Sequence
  Description of Artificial Sequence: Synthetic oligonucleotide
cucaugauuccgaagacug

SEQ ID NO: 942468 - RNA, 19 nt, Artificial Sequence
  Description of Artificial Sequence: Synthetic oligonucleotide
acguagaaaacuauuaaag

SEQ ID NO: 942469 - RNA, 19 nt, Artificial Sequence
  Description of Artificial Sequence: Synthetic oligonucleotide
acugguaaccgauacauaa

SEQ ID NO: 942470 - RNA, 19 nt, Artificial Sequence
  Description of Artificial Sequence: Synthetic oligonucleotide
aucagaaguuaguacauug

SEQ ID NO: 942471 - RNA, 19 nt, Artificial Sequence
  Description of Artificial Sequence: Synthetic oligonucleotide
uuaaugaguggggagcugg

SEQ ID NO: 942472 - RNA, 19 nt, Artificial Sequence
  Description of Artificial Sequence: Synthetic oligonucleotide
uaggaaaagacuccgcuaa

SEQ ID NO: 942473 - RNA, 19 nt, Artificial Sequence
  Description of Artificial Sequence: Synthetic oligonucleotide
gaagucagaagggaguagg

SEQ ID NO: 942474 - RNA, 19 nt, Artificial Sequence
  Description of Artificial Sequence: Synthetic oligonucleotide
gaaauugccauggacagca

SEQ ID NO: 942475 - RNA, 19 nt, Artificial Sequence
  Description of Artificial Sequence: Synthetic oligonucleotide
aacuauuaaaggucucacu

SEQ ID NO: 942476 - RNA, 19 nt, Artificial Sequence
  Description of Artificial Sequence: Synthetic oligonucleotide
cauaaggcagcucaaacuc

SEQ ID NO: 942477 - RNA, 19 nt, Artificial Sequence
  Description of Artificial Sequence: Synthetic oligonucleotide
cacucaguuuacuugagag

SEQ ID NO: 942478 - RNA, 19 nt, Artificial Sequence
  Description of Artificial Sequence: Synthetic oligonucleotide
ucucaugcgggucacccgg

SEQ ID NO: 942479 - RNA, 19 nt, Artificial Sequence
  Description of Artificial Sequence: Synthetic oligonucleotide
cugagcauaaagcagguuc

SEQ ID NO: 942480 - RNA, 19 nt, Artificial Sequence
  Description of Artificial Sequence: Synthetic oligonucleotide
ucaguuucgggaauggaaa

SEQ ID NO: 942481 - RNA, 19 nt, Artificial Sequence
  Description of Artificial Sequence: Synthetic oligonucleotide
aguaggaaaagacuccgcu

SEQ ID NO: 942482 - RNA, 19 nt, Artificial Sequence
  Description of Artificial Sequence: Synthetic oligonucleotide
uucgggaauggaaaagugc

SEQ ID NO: 942483 - RNA, 19 nt, Artificial Sequence
  Description of Artificial Sequence: Synthetic oligonucleotide
agacuaaaauacccgauca

SEQ ID NO: 942484 - RNA, 19 nt, Artificial Sequence
  Description of Artificial Sequence: Synthetic oligonucleotide
ucaauaucggacaccgucu

SEQ ID NO: 942485 - RNA, 19 nt, Artificial Sequence
  Description of Artificial Sequence: Synthetic oligonucleotide
gacuccgcuaacuugggag

SEQ ID NO: 942486 - RNA, 19 nt, Artificial Sequence
  Description of Artificial Sequence: Synthetic oligonucleotide
acuccggacuaccagggcc

SEQ ID NO: 942487 - RNA, 19 nt, Artificial Sequence
  Description of Artificial Sequence: Synthetic oligonucleotide
cacacaggcaucaaagcgc

SEQ ID NO: 942488 - RNA, 19 nt, Artificial Sequence
  Description of Artificial Sequence: Synthetic oligonucleotide
cugaguuuaaugagugggg

SEQ ID NO: 942489 - RNA, 19 nt, Artificial Sequence
  Description of Artificial Sequence: Synthetic oligonucleotide
gaaggcgaaauugccaugg

SEQ ID NO: 942490 - RNA, 19 nt, Artificial Sequence
  Description of Artificial Sequence: Synthetic oligonucleotide
uccguacaaaagaaaagga

SEQ ID NO: 942491 - RNA, 19 nt, Artificial Sequence
  Description of Artificial Sequence: Synthetic oligonucleotide
cucaauaucggacaccguc

SEQ ID NO: 942492 - RNA, 19 nt, Artificial Sequence
  Description of Artificial Sequence: Synthetic oligonucleotide
guaaccgauacauaaggca

SEQ ID NO: 942493 - RNA, 19 nt, Artificial Sequence
  Description of Artificial Sequence: Synthetic oligonucleotide
guguaaauuuccucugggg

SEQ ID NO: 942494 - RNA, 19 nt, Artificial Sequence
  Description of Artificial Sequence: Synthetic oligonucleotide
gagauuacaaauccucauc

SEQ ID NO: 942495 - RNA, 19 nt, Artificial Sequence
  Description of Artificial Sequence: Synthetic oligonucleotide
ugagaguuugaccauggau

SEQ ID NO: 942496 - RNA, 19 nt, Artificial Sequence
  Description of Artificial Sequence: Synthetic oligonucleotide
acuccgcuaacuugggagc

SEQ ID NO: 942497 - RNA, 19 nt, Artificial Sequence
  Description of Artificial Sequence: Synthetic oligonucleotide
agagauuugaguugccggu

SEQ ID NO: 942498 - RNA, 19 nt, Artificial Sequence
  Description of Artificial Sequence: Synthetic oligonucleotide
gagacuaaaauacccgauc

SEQ ID NO: 942499 - RNA, 19 nt, Artificial Sequence
  Description of Artificial Sequence: Synthetic oligonucleotide
agggaguaggaaaagacuc

SEQ ID NO: 942500 - RNA, 19 nt, Artificial Sequence
  Description of Artificial Sequence: Synthetic oligonucleotide
ccagccaugcucaauaucg

SEQ ID NO: 942501 - RNA, 19 nt, Artificial Sequence
  Description of Artificial Sequence: Synthetic oligonucleotide
ugagcacaaucuuauacuc

SEQ ID NO: 942502 - RNA, 19 nt, Artificial Sequence
  Description of Artificial Sequence: Synthetic oligonucleotide
agaaaacuauuaaaggucu

SEQ ID NO: 942503 - RNA, 19 nt, Artificial Sequence
  Description of Artificial Sequence: Synthetic oligonucleotide
uccaaugcccucgaaggcg

SEQ ID NO: 942504 - RNA, 19 nt, Artificial Sequence
  Description of Artificial Sequence: Synthetic oligonucleotide
uucucuaacuguucucgcc

SEQ ID NO: 942505 - RNA, 19 nt, Artificial Sequence
  Description of Artificial Sequence: Synthetic oligonucleotide
gacguagaaaacuauuaaa

SEQ ID NO: 942506 - RNA, 19 nt, Artificial Sequence
  Description of Artificial Sequence: Synthetic oligonucleotide
acccgaucaagucaucagg

SEQ ID NO: 942507 - RNA, 19 nt, Artificial Sequence
  Description of Artificial Sequence: Synthetic oligonucleotide
ucgaacaaggaagagacua

SEQ ID NO: 942508 - RNA, 19 nt, Artificial Sequence
  Description of Artificial Sequence: Synthetic oligonucleotide
gaagggaguaggaaaagac

SEQ ID NO: 942509 - RNA, 19 nt, Artificial Sequence
  Description of Artificial Sequence: Synthetic oligonucleotide
accgucugagcauaaagca

SEQ ID NO: 942510 - RNA, 19 nt, Artificial Sequence
  Description of Artificial Sequence: Synthetic oligonucleotide
agcacuuccaaggaaaccu

SEQ ID NO: 942511 - RNA, 19 nt, Artificial Sequence
  Description of Artificial Sequence: Synthetic oligonucleotide
aauugccauggacagcacu

SEQ ID NO: 942512 - RNA, 19 nt, Artificial Sequence
  Description of Artificial Sequence: Synthetic oligonucleotide
acguggauguuauaggcca

SEQ ID NO: 942513 - RNA, 19 nt, Artificial Sequence
  Description of Artificial Sequence: Synthetic oligonucleotide
gacuagaacuuucugucca

SEQ ID NO: 942514 - RNA, 19 nt, Artificial Sequence
  Description of Artificial Sequence: Synthetic oligonucleotide
acaucuucgguuugaucag

SEQ ID NO: 942515 - RNA, 19 nt, Artificial Sequence
  Description of Artificial Sequence: Synthetic oligonucleotide
guagagggcagacauccag

SEQ ID NO: 942516 - RNA, 19 nt, Artificial Sequence
  Description of Artificial Sequence: Synthetic oligonucleotide
ugacucaagcaacgguggg

SEQ ID NO: 942517 - RNA, 19 nt, Artificial Sequence
  Description of Artificial Sequence: Synthetic oligonucleotide
aacuccggacuaccagggc

SEQ ID NO: 942518 - RNA, 19 nt, Artificial Sequence
  Description of Artificial Sequence: Synthetic oligonucleotide
uuauacucaugauuccgaa

SEQ ID NO: 942519 - RNA, 19 nt, Artificial Sequence
  Description of Artificial Sequence: Synthetic oligonucleotide
agaccauucacagaccucu

SEQ ID NO: 942520 - RNA, 19 nt, Artificial Sequence
  Description of Artificial Sequence: Synthetic oligonucleotide
caccgucugagcauaaagc

SEQ ID NO: 942521 - RNA, 19 nt, Artificial Sequence
  Description of Artificial Sequence: Synthetic oligonucleotide
ucgaaggcgaaauugccau

SEQ ID NO: 942522 - RNA, 19 nt, Artificial Sequence
  Description of Artificial Sequence: Synthetic oligonucleotide
acaccgucugagcauaaag

SEQ ID NO: 942523 - RNA, 19 nt, Artificial Sequence
  Description of Artificial Sequence: Synthetic oligonucleotide
cuguccauugcugaguagc

SEQ ID NO: 942524 - RNA, 19 nt, Artificial Sequence
  Description of Artificial Sequence: Synthetic oligonucleotide
guuuacuugagaguuugac

SEQ ID NO: 942525 - RNA, 19 nt, Artificial Sequence
  Description of Artificial Sequence: Synthetic oligonucleotide
cugguaaccgauacauaag

SEQ ID NO: 942526 - RNA, 19 nt, Artificial Sequence
  Description of Artificial Sequence: Synthetic oligonucleotide
acucaguuuacuugagagu

SEQ ID NO: 942527 - RNA, 19 nt, Artificial Sequence
  Description of Artificial Sequence: Synthetic oligonucleotide
agucaggcugaguuuaaug

SEQ ID NO: 942528 - RNA, 19 nt, Artificial Sequence
  Description of Artificial Sequence: Synthetic oligonucleotide
aggaaaagacuccgcuaac

SEQ ID NO: 942529 - RNA, 19 nt, Artificial Sequence
  Description of Artificial Sequence: Synthetic oligonucleotide
gauuccgaagacugguaac

SEQ ID NO: 942530 - RNA, 19 nt, Artificial Sequence
  Description of Artificial Sequence: Synthetic oligonucleotide
ugugucuccuguugggccc

SEQ ID NO: 942531 - RNA, 19 nt, Artificial Sequence
  Description of Artificial Sequence: Synthetic oligonucleotide
uacccgaucaagucaucag

SEQ ID NO: 942532 - RNA, 19 nt, Artificial Sequence
  Description of Artificial Sequence: Synthetic oligonucleotide
ucauaauggccugugggcu

SEQ ID NO: 942533 - RNA, 19 nt, Artificial Sequence
  Description of Artificial Sequence: Synthetic oligonucleotide
auaucggacaccgucugag

SEQ ID NO: 942534 - RNA, 19 nt, Artificial Sequence
  Description of Artificial Sequence: Synthetic oligonucleotide
aauaucggacaccgucuga

SEQ ID NO: 942535 - RNA, 19 nt, Artificial Sequence
  Description of Artificial Sequence: Synthetic oligonucleotide
aaagugcauguucccuaag

SEQ ID NO: 942536 - RNA, 19 nt, Artificial Sequence
  Description of Artificial Sequence: Synthetic oligonucleotide
uucacggaguugcuggcca

SEQ ID NO: 942537 - RNA, 19 nt, Artificial Sequence
  Description of Artificial Sequence: Synthetic oligonucleotide
ugccgaacagcuugcaugu

SEQ ID NO: 942538 - RNA, 19 nt, Artificial Sequence
  Description of Artificial Sequence: Synthetic oligonucleotide
cacagaggagguaacccgc

SEQ ID NO: 942539 - RNA, 19 nt, Artificial Sequence
  Description of Artificial Sequence: Synthetic oligonucleotide
ugggacugccaauuccccg

SEQ ID NO: 942540 - RNA, 19 nt, Artificial Sequence
  Description of Artificial Sequence: Synthetic oligonucleotide
uugggcccgacguagaaaa

SEQ ID NO: 942541 - RNA, 19 nt, Artificial Sequence
  Description of Artificial Sequence: Synthetic oligonucleotide
cacguggauguuauaggcc

SEQ ID NO: 942542 - RNA, 19 nt, Artificial Sequence
  Description of Artificial Sequence: Synthetic oligonucleotide
uuaguacauugacuagaac

SEQ ID NO: 942543 - RNA, 19 nt, Artificial Sequence
  Description of Artificial Sequence: Synthetic oligonucleotide
uacucaugauuccgaagac

SEQ ID NO: 942544 - RNA, 19 nt, Artificial Sequence
  Description of Artificial Sequence: Synthetic oligonucleotide
uuccgaagacugguaaccg

SEQ ID NO: 942545 - RNA, 19 nt, Artificial Sequence
  Description of Artificial Sequence: Synthetic oligonucleotide
gcgaaauugccauggacag

SEQ ID NO: 942546 - RNA, 19 nt, Artificial Sequence
  Description of Artificial Sequence: Synthetic oligonucleotide
aguuucgggaauggaaaag

SEQ ID NO: 942547 - RNA, 19 nt, Artificial Sequence
  Description of Artificial Sequence: Synthetic oligonucleotide
aacccgguucuccaugaca

SEQ ID NO: 942548 - RNA, 19 nt, Artificial Sequence
  Description of Artificial Sequence: Synthetic oligonucleotide
acaaucuuauacucaugau

SEQ ID NO: 942549 - RNA, 19 nt, Artificial Sequence
  Description of Artificial Sequence: Synthetic oligonucleotide
ucuaacuguucucgccucu

SEQ ID NO: 942550 - RNA, 19 nt, Artificial Sequence
  Description of Artificial Sequence: Synthetic oligonucleotide
gaacuccggacuaccaggg

SEQ ID NO: 942551 - RNA, 19 nt, Artificial Sequence
  Description of Artificial Sequence: Synthetic oligonucleotide
ggaguaggaaaagacuccg

SEQ ID NO: 942552 - RNA, 19 nt, Artificial Sequence
  Description of Artificial Sequence: Synthetic oligonucleotide
gcugucugaacguuucagg

SEQ ID NO: 942553 - RNA, 19 nt, Artificial Sequence
  Description of Artificial Sequence: Synthetic oligonucleotide
gugacucaagcaacggugg

SEQ ID NO: 942554 - RNA, 19 nt, Artificial Sequence
  Description of Artificial Sequence: Synthetic oligonucleotide
acuguaagcagaugcucau

SEQ ID NO: 942555 - RNA, 19 nt, Artificial Sequence
  Description of Artificial Sequence: Synthetic oligonucleotide
acccgccaacaucucaugc

SEQ ID NO: 942556 - RNA, 19 nt, Artificial Sequence
  Description of Artificial Sequence: Synthetic oligonucleotide
gagguaacccgccaacauc

SEQ ID NO: 942557 - RNA, 19 nt, Artificial Sequence
  Description of Artificial Sequence: Synthetic oligonucleotide
ggugacucaagcaacggug

SEQ ID NO: 942558 - RNA, 19 nt, Artificial Sequence
  Description of Artificial Sequence: Synthetic oligonucleotide
caugcucaauaucggacac

SEQ ID NO: 942559 - RNA, 19 nt, Artificial Sequence
  Description of Artificial Sequence: Synthetic oligonucleotide
gacuaccagggccguagcg

SEQ ID NO: 942560 - RNA, 19 nt, Artificial Sequence
  Description of Artificial Sequence: Synthetic oligonucleotide
ucaagcaacgguggggacu

SEQ ID NO: 942561 - RNA, 19 nt, Artificial Sequence
  Description of Artificial Sequence: Synthetic oligonucleotide
agguuaggaggccccuggc

SEQ ID NO: 942562 - RNA, 19 nt, Artificial Sequence
  Description of Artificial Sequence: Synthetic oligonucleotide
auaauggccugugggcugg

SEQ ID NO: 942563 - RNA, 19 nt, Artificial Sequence
  Description of Artificial Sequence: Synthetic oligonucleotide
uccccgcaagcucacagca

SEQ ID NO: 942564 - RNA, 19 nt, Artificial Sequence
  Description of Artificial Sequence: Synthetic oligonucleotide
caauaucggacaccgucug

SEQ ID NO: 942565 - RNA, 19 nt, Artificial Sequence
  Description of Artificial Sequence: Synthetic oligonucleotide
uccgaagacugguaaccga

SEQ ID NO: 942566 - RNA, 19 nt, Artificial Sequence
  Description of Artificial Sequence: Synthetic oligonucleotide
accauggauucccggcugg

SEQ ID NO: 942567 - RNA, 19 nt, Artificial Sequence
  Description of Artificial Sequence: Synthetic oligonucleotide
uugagaguuugaccaugga

SEQ ID NO: 942568 - RNA, 19 nt, Artificial Sequence
  Description of Artificial Sequence: Synthetic oligonucleotide
uuuaaugaguggggagcug

SEQ ID NO: 942569 - RNA, 19 nt, Artificial Sequence
  Description of Artificial Sequence: Synthetic oligonucleotide
acucaagcaacggugggga

SEQ ID NO: 942570 - RNA, 19 nt, Artificial Sequence
  Description of Artificial Sequence: Synthetic oligonucleotide
gccguagcggcucuguucg

SEQ ID NO: 942571 - RNA, 19 nt, Artificial Sequence
  Description of Artificial Sequence: Synthetic oligonucleotide
agguaacccgccaacaucu

SEQ ID NO: 942572 - RNA, 19 nt, Artificial Sequence
  Description of Artificial Sequence: Synthetic oligonucleotide
cuucgguuugaucagaagu

SEQ ID NO: 942573 - RNA, 19 nt, Artificial Sequence
  Description of Artificial Sequence: Synthetic oligonucleotide
uaaugaguggggagcuggu

SEQ ID NO: 942574 - RNA, 19 nt, Artificial Sequence
  Description of Artificial Sequence: Synthetic oligonucleotide
uaucggacaccgucugagc

SEQ ID NO: 942575 - RNA, 19 nt, Artificial Sequence
  Description of Artificial Sequence: Synthetic oligonucleotide
cagccaugcucaauaucgg

SEQ ID NO: 942576 - RNA, 19 nt, Artificial Sequence
  Description of Artificial Sequence: Synthetic oligonucleotide
aaggcgaaauugccaugga

SEQ ID NO: 942577 - RNA, 19 nt, Artificial Sequence
  Description of Artificial Sequence: Synthetic oligonucleotide
guuaguacauugacuagaa

SEQ ID NO: 942578 - RNA, 19 nt, Artificial Sequence
  Description of Artificial Sequence: Synthetic oligonucleotide
acuugagaguuugaccaug

SEQ ID NO: 942579 - RNA, 19 nt, Artificial Sequence
  Description of Artificial Sequence: Synthetic oligonucleotide
ugcucccaagcaauggguc

SEQ ID NO: 942580 - RNA, 19 nt, Artificial Sequence
  Description of Artificial Sequence: Synthetic oligonucleotide
gagcauaaagcagguucag

SEQ ID NO: 942581 - RNA, 19 nt, Artificial Sequence
  Description of Artificial Sequence: Synthetic oligonucleotide
ggaaagggaagguagguua

SEQ ID NO: 942582 - RNA, 19 nt, Artificial Sequence
  Description of Artificial Sequence: Synthetic oligonucleotide
cagugaucuuuuguguugc

SEQ ID NO: 942583 - RNA, 19 nt, Artificial Sequence
  Description of Artificial Sequence: Synthetic oligonucleotide
aacccgccaacaucucaug

SEQ ID NO: 942584 - RNA, 19 nt, Artificial Sequence
  Description of Artificial Sequence: Synthetic oligonucleotide
guuugaucagaaguuagua

SEQ ID NO: 942585 - RNA, 19 nt, Artificial Sequence
  Description of Artificial Sequence: Synthetic oligonucleotide
aagacuccgcuaacuuggg

SEQ ID NO: 942586 - RNA, 19 nt, Artificial Sequence
  Description of Artificial Sequence: Synthetic oligonucleotide
ugccauggacagcacuggc

SEQ ID NO: 942587 - RNA, 19 nt, Artificial Sequence
  Description of Artificial Sequence: Synthetic oligonucleotide
ggcgaaauugccauggaca

SEQ ID NO: 942588 - RNA, 19 nt, Artificial Sequence
  Description of Artificial Sequence: Synthetic oligonucleotide
uagccguagugccgcagag

SEQ ID NO: 942589 - RNA, 19 nt, Artificial Sequence
  Description of Artificial Sequence: Synthetic oligonucleotide
gaaaagacuccgcuaacuu

SEQ ID NO: 942590 - RNA, 19 nt, Artificial Sequence
  Description of Artificial Sequence: Synthetic oligonucleotide
cuccaaugcccucgaaggc

SEQ ID NO: 942591 - RNA, 19 nt, Artificial Sequence
  Description of Artificial Sequence: Synthetic oligonucleotide
agccaugcucaauaucgga

SEQ ID NO: 942592 - RNA, 19 nt, Artificial Sequence
  Description of Artificial Sequence: Synthetic oligonucleotide
aauacccgaucaagucauc

SEQ ID NO: 942593 - RNA, 19 nt, Artificial Sequence
  Description of Artificial Sequence: Synthetic oligonucleotide
uggcacuggcaucugugcu

SEQ ID NO: 942594 - RNA, 19 nt, Artificial Sequence
  Description of Artificial Sequence: Synthetic oligonucleotide
guaggaaaagacuccgcua

SEQ ID NO: 942595 - RNA, 19 nt, Artificial Sequence
  Description of Artificial Sequence: Synthetic oligonucleotide
ucgccucuguucuaccucu

SEQ ID NO: 942596 - RNA, 19 nt, Artificial Sequence
  Description of Artificial Sequence: Synthetic oligonucleotide
guugugucuccuguugggc

SEQ ID NO: 942597 - RNA, 19 nt, Artificial Sequence
  Description of Artificial Sequence: Synthetic oligonucleotide
cucgaaggcgaaauugcca

SEQ ID NO: 942598 - RNA, 19 nt, Artificial Sequence
  Description of Artificial Sequence: Synthetic oligonucleotide
uauaggccacguaggcgga

SEQ ID NO: 942599 - RNA, 19 nt, Artificial Sequence
  Description of Artificial Sequence: Synthetic oligonucleotide
uuccccgcaagcucacagc

SEQ ID NO: 942600 - RNA, 19 nt, Artificial Sequence
  Description of Artificial Sequence: Synthetic oligonucleotide
gggacugccaauuccccgc

SEQ ID NO: 942601 - RNA, 19 nt, Artificial Sequence
  Description of Artificial Sequence: Synthetic oligonucleotide
aaauugccauggacagcac

SEQ ID NO: 942602 - RNA, 19 nt, Artificial Sequence
  Description of Artificial Sequence: Synthetic oligonucleotide
agagacuaaaauacccgau

SEQ ID NO: 942603 - RNA, 19 nt, Artificial Sequence
  Description of Artificial Sequence: Synthetic oligonucleotide
gguaaccgauacauaaggc

SEQ ID NO: 942604 - RNA, 19 nt, Artificial Sequence
  Description of Artificial Sequence: Synthetic oligonucleotide
ucgguuugaucagaaguua

SEQ ID NO: 942605 - RNA, 19 nt, Artificial Sequence
  Description of Artificial Sequence: Synthetic oligonucleotide
cugggacugccaauucccc

SEQ ID NO: 942606 - RNA, 19 nt, Artificial Sequence
  Description of Artificial Sequence: Synthetic oligonucleotide
auacccgaucaagucauca

SEQ ID NO: 942607 - RNA, 19 nt, Artificial Sequence
  Description of Artificial Sequence: Synthetic oligonucleotide
agucugagccagccgcaag

SEQ ID NO: 942608 - RNA, 19 nt, Artificial Sequence
  Description of Artificial Sequence: Synthetic oligonucleotide
ggcugaguuuaaugagugg

SEQ ID NO: 942609 - RNA, 19 nt, Artificial Sequence
  Description of Artificial Sequence: Synthetic oligonucleotide
aucgcagcuggagacugag

SEQ ID NO: 942610 - RNA, 19 nt, Artificial Sequence
  Description of Artificial Sequence: Synthetic oligonucleotide
gagcacaaucuuauacuca

SEQ ID NO: 942611 - RNA, 19 nt, Artificial Sequence
  Description of Artificial Sequence: Synthetic oligonucleotide
ugaccaggauccagccaug

SEQ ID NO: 942612 - RNA, 19 nt, Artificial Sequence
  Description of Artificial Sequence: Synthetic oligonucleotide
cacuguagccgguccuugc

SEQ ID NO: 942613 - RNA, 19 nt, Artificial Sequence
  Description of Artificial Sequence: Synthetic oligonucleotide
cccgccaacaucucaugcg

SEQ ID NO: 942614 - RNA, 19 nt, Artificial Sequence
  Description of Artificial Sequence: Synthetic oligonucleotide
cucuaacuguucucgccuc

SEQ ID NO: 942615 - RNA, 19 nt, Artificial Sequence
  Description of Artificial Sequence: Synthetic oligonucleotide
ccaguaacucuuucugagc

SEQ ID NO: 942616 - RNA, 19 nt, Artificial Sequence
  Description of Artificial Sequence: Synthetic oligonucleotide
gacuuguugugucuccugu

SEQ ID NO: 942617 - RNA, 19 nt, Artificial Sequence
  Description of Artificial Sequence: Synthetic oligonucleotide
guuugaccauggauucccg

SEQ ID NO: 942618 - RNA, 19 nt, Artificial Sequence
  Description of Artificial Sequence: Synthetic oligonucleotide
cuaacuguucucgccucug

SEQ ID NO: 942619 - RNA, 19 nt, Artificial Sequence
  Description of Artificial Sequence: Synthetic oligonucleotide
caaugggucuugccgaaca

SEQ ID NO: 942620 - RNA, 19 nt, Artificial Sequence
  Description of Artificial Sequence: Synthetic oligonucleotide
gaccucuguucuucccaag

SEQ ID NO: 942621 - RNA, 19 nt, Artificial Sequence
  Description of Artificial Sequence: Synthetic oligonucleotide
cccucgaaggcgaaauugc

SEQ ID NO: 942622 - RNA, 19 nt, Artificial Sequence
  Description of Artificial Sequence: Synthetic oligonucleotide
cucagcgcgucuccgcagc

SEQ ID NO: 942623 - RNA, 19 nt, Artificial Sequence
  Description of Artificial Sequence: Synthetic oligonucleotide
cucgccuccggcacucagc

SEQ ID NO: 942624 - RNA, 19 nt, Artificial Sequence
  Description of Artificial Sequence: Synthetic oligonucleotide
guaacccgccaacaucuca

SEQ ID NO: 942625 - RNA, 19 nt, Artificial Sequence
  Description of Artificial Sequence: Synthetic oligonucleotide
agcagaugcucaucauaau

SEQ ID NO: 942626 - RNA, 19 nt, Artificial Sequence
  Description of Artificial Sequence: Synthetic oligonucleotide
gcuaacuugggagcacagg

SEQ ID NO: 942627 - RNA, 19 nt, Artificial Sequence
  Description of Artificial Sequence: Synthetic oligonucleotide
gcuuccguacaaaagaaaa

SEQ ID NO: 942628 - RNA, 19 nt, Artificial Sequence
  Description of Artificial Sequence: Synthetic oligonucleotide
agcaaugggucuugccgaa

SEQ ID NO: 942629 - RNA, 19 nt, Artificial Sequence
  Description of Artificial Sequence: Synthetic oligonucleotide
agccgguccuugcucauga

SEQ ID NO: 942630 - RNA, 19 nt, Artificial Sequence
  Description of Artificial Sequence: Synthetic oligonucleotide
ugaguugccggugcugcuc

SEQ ID NO: 942631 - RNA, 19 nt, Artificial Sequence
  Description of Artificial Sequence: Synthetic oligonucleotide
caaucgcagcuggagacug

SEQ ID NO: 942632 - RNA, 19 nt, Artificial Sequence
  Description of Artificial Sequence: Synthetic oligonucleotide
ccgucugagcauaaagcag

SEQ ID NO: 942633 - RNA, 19 nt, Artificial Sequence
  Description of Artificial Sequence: Synthetic oligonucleotide
caugcgggucacccggaag

SEQ ID NO: 942634 - RNA, 19 nt, Artificial Sequence
  Description of Artificial Sequence: Synthetic oligonucleotide
ccgccaacaucucaugcgg

SEQ ID NO: 942635 - RNA, 19 nt, Artificial Sequence
  Description of Artificial Sequence: Synthetic oligonucleotide
guagccguagugccgcaga

SEQ ID NO: 942636 - RNA, 19 nt, Artificial Sequence
  Description of Artificial Sequence: Synthetic oligonucleotide
agcugagauuacaaauccu

SEQ ID NO: 942637 - RNA, 19 nt, Artificial Sequence
  Description of Artificial Sequence: Synthetic oligonucleotide
ccgguucuccaugacaucg

SEQ ID NO: 942638 - RNA, 19 nt, Artificial Sequence
  Description of Artificial Sequence: Synthetic oligonucleotide
aggcagaacuccggacuac

SEQ ID NO: 942639 - RNA, 19 nt, Artificial Sequence
  Description of Artificial Sequence: Synthetic oligonucleotide
acccgguucuccaugacau

SEQ ID NO: 942640 - RNA, 19 nt, Artificial Sequence
  Description of Artificial Sequence: Synthetic oligonucleotide
uagugccgcagagucugag

SEQ ID NO: 942641 - RNA, 19 nt, Artificial Sequence
  Description of Artificial Sequence: Synthetic oligonucleotide
aggagguaacccgccaaca

SEQ ID NO: 942642 - RNA, 19 nt, Artificial Sequence
  Description of Artificial Sequence: Synthetic oligonucleotide
agcacucaguuuacuugag

SEQ ID NO: 942643 - RNA, 19 nt, Artificial Sequence
  Description of Artificial Sequence: Synthetic oligonucleotide
cucuguucgcucgccuccg

SEQ ID NO: 942644 - RNA, 19 nt, Artificial Sequence
  Description of Artificial Sequence: Synthetic oligonucleotide
ucccaagcaaugggucuug

SEQ ID NO: 942645 - RNA, 19 nt, Artificial Sequence
  Description of Artificial Sequence: Synthetic oligonucleotide
ggcugucugaacguuucag

SEQ ID NO: 942646 - RNA, 19 nt, Artificial Sequence
  Description of Artificial Sequence: Synthetic oligonucleotide
ccaagcaaugggucuugcc

SEQ ID NO: 942647 - RNA, 19 nt, Artificial Sequence
  Description of Artificial Sequence: Synthetic oligonucleotide
gaccauucacagaccucug

SEQ ID NO: 942648 - RNA, 19 nt, Artificial Sequence
  Description of Artificial Sequence: Synthetic oligonucleotide
agacuccgcuaacuuggga

SEQ ID NO: 942649 - RNA, 19 nt, Artificial Sequence
  Description of Artificial Sequence: Synthetic oligonucleotide
uggggacuuguugugucuc

SEQ ID NO: 942650 - RNA, 19 nt, Artificial Sequence
  Description of Artificial Sequence: Synthetic oligonucleotide
cucaagcaacgguggggac

SEQ ID NO: 942651 - RNA, 19 nt, Artificial Sequence
  Description of Artificial Sequence: Synthetic oligonucleotide
cccuaaggcagaacuccgg

SEQ ID NO: 942652 - RNA, 19 nt, Artificial Sequence
  Description of Artificial Sequence: Synthetic oligonucleotide
gccaugcucaauaucggac

SEQ ID NO: 942653 - RNA, 19 nt, Artificial Sequence
  Description of Artificial Sequence: Synthetic oligonucleotide
guagguuaggaggccccug

SEQ ID NO: 942654 - RNA, 19 nt, Artificial Sequence
  Description of Artificial Sequence: Synthetic oligonucleotide
acucaguuucgggaaugga

SEQ ID NO: 942655 - RNA, 19 nt, Artificial Sequence
  Description of Artificial Sequence: Synthetic oligonucleotide
caguuucgggaauggaaaa

SEQ ID NO: 942656 - RNA, 19 nt, Artificial Sequence
  Description of Artificial Sequence: Synthetic oligonucleotide
ccgaacagcuugcauguac

SEQ ID NO: 942657 - RNA, 19 nt, Artificial Sequence
  Description of Artificial Sequence: Synthetic oligonucleotide
cacggaguugcuggccagg

SEQ ID NO: 942658 - RNA, 19 nt, Artificial Sequence
  Description of Artificial Sequence: Synthetic oligonucleotide
cuguagccgguccuugcuc

SEQ ID NO: 942659 - RNA, 19 nt, Artificial Sequence
  Description of Artificial Sequence: Synthetic oligonucleotide
gccaggcaaucgcagcugg

SEQ ID NO: 942660 - RNA, 19 nt, Artificial Sequence
  Description of Artificial Sequence: Synthetic oligonucleotide
uccgcuaacuugggagcac

SEQ ID NO: 942661 - RNA, 19 nt, Artificial Sequence
  Description of Artificial Sequence: Synthetic oligonucleotide
gcaucaaagcgcagguagc

SEQ ID NO: 942662 - RNA, 19 nt, Artificial Sequence
  Description of Artificial Sequence: Synthetic oligonucleotide
aauuccccgcaagcucaca

SEQ ID NO: 942663 - RNA, 19 nt, Artificial Sequence
  Description of Artificial Sequence: Synthetic oligonucleotide
agcaacgguggggacuuca

SEQ ID NO: 942664 - RNA, 19 nt, Artificial Sequence
  Description of Artificial Sequence: Synthetic oligonucleotide
cauugcugaguagcacuuc

SEQ ID NO: 942665 - RNA, 19 nt, Artificial Sequence
  Description of Artificial Sequence: Synthetic oligonucleotide
augcccucgaaggcgaaau

SEQ ID NO: 942666 - RNA, 19 nt, Artificial Sequence
  Description of Artificial Sequence: Synthetic oligonucleotide
uccggcacucagcgcgucu

SEQ ID NO: 942667 - RNA, 19 nt, Artificial Sequence
  Description of Artificial Sequence: Synthetic oligonucleotide
ggcagaacuccggacuacc

SEQ ID NO: 942668 - RNA, 19 nt, Artificial Sequence
  Description of Artificial Sequence: Synthetic oligonucleotide
gucuugccgaacagcuugc

SEQ ID NO: 942669 - RNA, 19 nt, Artificial Sequence
  Description of Artificial Sequence: Synthetic oligonucleotide
ugggcccgacguagaaaac

SEQ ID NO: 942670 - RNA, 19 nt, Artificial Sequence
  Description of Artificial Sequence: Synthetic oligonucleotide
cguagugccgcagagucug

SEQ ID NO: 942671 - RNA, 19 nt, Artificial Sequence
  Description of Artificial Sequence: Synthetic oligonucleotide
uggcuguagcgcacccgac

SEQ ID NO: 942672 - RNA, 19 nt, Artificial Sequence
  Description of Artificial Sequence: Synthetic oligonucleotide
cugcgggacucaguuucgg

SEQ ID NO: 942673 - RNA, 19 nt, Artificial Sequence
  Description of Artificial Sequence: Synthetic oligonucleotide
cccgaucaagucaucagga

SEQ ID NO: 942674 - RNA, 19 nt, Artificial Sequence
  Description of Artificial Sequence: Synthetic oligonucleotide
auaggccacguaggcggag

SEQ ID NO: 942675 - RNA, 19 nt, Artificial Sequence
  Description of Artificial Sequence: Synthetic oligonucleotide
gguuugaucagaaguuagu

SEQ ID NO: 942676 - RNA, 19 nt, Artificial Sequence
  Description of Artificial Sequence: Synthetic oligonucleotide
ggaaaagacuccgcuaacu

SEQ ID NO: 942677 - RNA, 19 nt, Artificial Sequence
  Description of Artificial Sequence: Synthetic oligonucleotide
ccgacccuggcuuggacug

SEQ ID NO: 942678 - RNA, 19 nt, Artificial Sequence
  Description of Artificial Sequence: Synthetic oligonucleotide
cacucagcgcgucuccgca

SEQ ID NO: 942679 - RNA, 19 nt, Artificial Sequence
  Description of Artificial Sequence: Synthetic oligonucleotide
guaagcagaugcucaucau

SEQ ID NO: 942680 - RNA, 19 nt, Artificial Sequence
  Description of Artificial Sequence: Synthetic oligonucleotide
ccgacguagaaaacuauua

SEQ ID NO: 942681 - RNA, 19 nt, Artificial Sequence
  Description of Artificial Sequence: Synthetic oligonucleotide
ggacucaguuucgggaaug

SEQ ID NO: 942682 - RNA, 19 nt, Artificial Sequence
  Description of Artificial Sequence: Synthetic oligonucleotide
caagcucacagcacucagu

SEQ ID NO: 942683 - RNA, 19 nt, Artificial Sequence
  Description of Artificial Sequence: Synthetic oligonucleotide
cccaaggcaaguagccaug

SEQ ID NO: 942684 - RNA, 19 nt, Artificial Sequence
  Description of Artificial Sequence: Synthetic oligonucleotide
ccuaaggcagaacuccgga

SEQ ID NO: 942685 - RNA, 19 nt, Artificial Sequence
  Description of Artificial Sequence: Synthetic oligonucleotide
cacccgccgacgcagcauc

SEQ ID NO: 942686 - RNA, 19 nt, Artificial Sequence
  Description of Artificial Sequence: Synthetic oligonucleotide
cauggauucccggcuggca

SEQ ID NO: 942687 - RNA, 19 nt, Artificial Sequence
  Description of Artificial Sequence: Synthetic oligonucleotide
gaucagaaguuaguacauu

SEQ ID NO: 942688 - RNA, 19 nt, Artificial Sequence
  Description of Artificial Sequence: Synthetic oligonucleotide
gacgcagcaucuuccugau

SEQ ID NO: 942689 - RNA, 19 nt, Artificial Sequence
  Description of Artificial Sequence: Synthetic oligonucleotide
cagggcaagucuguguaaa

SEQ ID NO: 942690 - RNA, 19 nt, Artificial Sequence
  Description of Artificial Sequence: Synthetic oligonucleotide
cacccgacagugcaggacu

SEQ ID NO: 942691 - RNA, 19 nt, Artificial Sequence
  Description of Artificial Sequence: Synthetic oligonucleotide
caacccgguucuccaugac

SEQ ID NO: 942692 - RNA, 19 nt, Artificial Sequence
  Description of Artificial Sequence: Synthetic oligonucleotide
gccaacccgguucuccaug

SEQ ID NO: 942693 - RNA, 19 nt, Artificial Sequence
  Description of Artificial Sequence: Synthetic oligonucleotide
cuuggacugcuugggccuc

SEQ ID NO: 942694 - RNA, 19 nt, Artificial Sequence
  Description of Artificial Sequence: Synthetic oligonucleotide
acccgacagugcaggacuc

SEQ ID NO: 942695 - RNA, 19 nt, Artificial Sequence
  Description of Artificial Sequence: Synthetic oligonucleotide
ggcacucagcgcgucuccg

SEQ ID NO: 942696 - RNA, 19 nt, Artificial Sequence
  Description of Artificial Sequence: Synthetic oligonucleotide
aagcaacgguggggacuuc

SEQ ID NO: 942697 - RNA, 19 nt, Artificial Sequence
  Description of Artificial Sequence: Synthetic oligonucleotide
cgcugcgggacucaguuuc

SEQ ID NO: 942698 - RNA, 19 nt, Artificial Sequence
  Description of Artificial Sequence: Synthetic oligonucleotide
cgacguagaaaacuauuaa

SEQ ID NO: 942699 - RNA, 19 nt, Artificial Sequence
  Description of Artificial Sequence: Synthetic oligonucleotide
ggacuaccagggccguagc

SEQ ID NO: 942700 - RNA, 19 nt, Artificial Sequence
  Description of Artificial Sequence: Synthetic oligonucleotide
ccucuguucuaccucugca

SEQ ID NO: 942701 - RNA, 19 nt, Artificial Sequence
  Description of Artificial Sequence: Synthetic oligonucleotide
guugggcccgacguagaaa

SEQ ID NO: 942702 - RNA, 19 nt, Artificial Sequence
  Description of Artificial Sequence: Synthetic oligonucleotide
gguagccguagugccgcag

SEQ ID NO: 942703 - RNA, 19 nt, Artificial Sequence
  Description of Artificial Sequence: Synthetic oligonucleotide
uccggacuaccagggccgu

SEQ ID NO: 942704 - RNA, 19 nt, Artificial Sequence
  Description of Artificial Sequence: Synthetic oligonucleotide
cucaugcgggucacccgga

SEQ ID NO: 942705 - RNA, 19 nt, Artificial Sequence
  Description of Artificial Sequence: Synthetic oligonucleotide
cgaaauugccauggacagc

SEQ ID NO: 942706 - RNA, 19 nt, Artificial Sequence
  Description of Artificial Sequence: Synthetic oligonucleotide
cggacuaccagggccguag

SEQ ID NO: 942707 - RNA, 19 nt, Artificial Sequence
  Description of Artificial Sequence: Synthetic oligonucleotide
cucgaacaaggaagagacu

SEQ ID NO: 942708 - RNA, 19 nt, Artificial Sequence
  Description of Artificial Sequence: Synthetic oligonucleotide
gcucccaagcaaugggucu

SEQ ID NO: 942709 - RNA, 19 nt, Artificial Sequence
  Description of Artificial Sequence: Synthetic oligonucleotide
ggacugccaauuccccgca

SEQ ID NO: 942710 - RNA, 19 nt, Artificial Sequence
  Description of Artificial Sequence: Synthetic oligonucleotide
caagcaacgguggggacuu

SEQ ID NO: 942711 - RNA, 19 nt, Artificial Sequence
  Description of Artificial Sequence: Synthetic oligonucleotide
ccgaucaagucaucaggaa

SEQ ID NO: 942712 - RNA, 19 nt, Artificial Sequence
  Description of Artificial Sequence: Synthetic oligonucleotide
cgccaacaucucaugcggg

SEQ ID NO: 942713 - RNA, 19 nt, Artificial Sequence
  Description of Artificial Sequence: Synthetic oligonucleotide
cauucacguggauguuaua

SEQ ID NO: 942714 - RNA, 19 nt, Artificial Sequence
  Description of Artificial Sequence: Synthetic oligonucleotide
gauucccggcuggcaucug

SEQ ID NO: 942715 - RNA, 19 nt, Artificial Sequence
  Description of Artificial Sequence: Synthetic oligonucleotide
ccaacccgguucuccauga

SEQ ID NO: 942716 - RNA, 19 nt, Artificial Sequence
  Description of Artificial Sequence: Synthetic oligonucleotide
cgaaggcgaaauugccaug

SEQ ID NO: 942717 - RNA, 19 nt, Artificial Sequence
  Description of Artificial Sequence: Synthetic oligonucleotide
gguaacccgccaacaucuc

SEQ ID NO: 942718 - RNA, 19 nt, Artificial Sequence
  Description of Artificial Sequence: Synthetic oligonucleotide
ccgaagacugguaaccgau

SEQ ID NO: 942719 - RNA, 19 nt, Artificial Sequence
  Description of Artificial Sequence: Synthetic oligonucleotide
ccacguaggcggagccgcc

SEQ ID NO: 942720 - RNA, 19 nt, Artificial Sequence
  Description of Artificial Sequence: Synthetic oligonucleotide
gcaaugggucuugccgaac

SEQ ID NO: 942721 - RNA, 19 nt, Artificial Sequence
  Description of Artificial Sequence: Synthetic oligonucleotide
gggcccgacguagaaaacu

SEQ ID NO: 942722 - RNA, 19 nt, Artificial Sequence
  Description of Artificial Sequence: Synthetic oligonucleotide
caaugcccucgaaggcgaa

SEQ ID NO: 942723 - RNA, 19 nt, Artificial Sequence
  Description of Artificial Sequence: Synthetic oligonucleotide
guagugccgcagagucuga

SEQ ID NO: 942724 - RNA, 19 nt, Artificial Sequence
  Description of Artificial Sequence: Synthetic oligonucleotide
cccgguucuccaugacauc

SEQ ID NO: 942725 - RNA, 19 nt, Artificial Sequence
  Description of Artificial Sequence: Synthetic oligonucleotide
guagccgguccuugcucau

SEQ ID NO: 942726 - RNA, 19 nt, Artificial Sequence
  Description of Artificial Sequence: Synthetic oligonucleotide
cccaagcaaugggucuugc

SEQ ID NO: 942727 - RNA, 19 nt, Artificial Sequence
  Description of Artificial Sequence: Synthetic oligonucleotide
ccgccgacgcagcaucuuc

SEQ ID NO: 942728 - RNA, 19 nt, Artificial Sequence
  Description of Artificial Sequence: Synthetic oligonucleotide
gcaaucgcagcuggagacu

SEQ ID NO: 942729 - RNA, 19 nt, Artificial Sequence
  Description of Artificial Sequence: Synthetic oligonucleotide
cccgacguagaaaacuauu

SEQ ID NO: 942730 - RNA, 19 nt, Artificial Sequence
  Description of Artificial Sequence: Synthetic oligonucleotide
gccgacgcagcaucuuccu

SEQ ID NO: 942731 - RNA, 19 nt, Artificial Sequence
  Description of Artificial Sequence: Synthetic oligonucleotide
acccgccgacgcagcaucu

SEQ ID NO: 942732 - RNA, 19 nt, Artificial Sequence
  Description of Artificial Sequence: Synthetic oligonucleotide
cccuuggacuuugugcaaa

SEQ ID NO: 942733 - RNA, 19 nt, Artificial Sequence
  Description of Artificial Sequence: Synthetic oligonucleotide
ccguagcggcucuguucgc

SEQ ID NO: 942734 - RNA, 19 nt, Artificial Sequence
  Description of Artificial Sequence: Synthetic oligonucleotide
cccgcugcgggacucaguu

SEQ ID NO: 942735 - RNA, 19 nt, Artificial Sequence
  Description of Artificial Sequence: Synthetic oligonucleotide
ccccgacccuggcuuggac

SEQ ID NO: 942736 - RNA, 19 nt, Artificial Sequence
  Description of Artificial Sequence: Synthetic oligonucleotide
gguggggacuucacugcuu

SEQ ID NO: 942737 - RNA, 19 nt, Artificial Sequence
  Description of Artificial Sequence: Synthetic oligonucleotide
gcucaauaucggacaccgu

SEQ ID NO: 942738 - RNA, 19 nt, Artificial Sequence
  Description of Artificial Sequence: Synthetic oligonucleotide
cuguccccgcugcgggacu

SEQ ID NO: 942739 - RNA, 19 nt, Artificial Sequence
  Description of Artificial Sequence: Synthetic oligonucleotide
ccguagugccgcagagucu

SEQ ID NO: 942740 - RNA, 19 nt, Artificial Sequence
  Description of Artificial Sequence: Synthetic oligonucleotide
gcccgacguagaaaacuau

SEQ ID NO: 942741 - RNA, 19 nt, Artificial Sequence
  Description of Artificial Sequence: Synthetic oligonucleotide
cggacaccgucugagcaua

SEQ ID NO: 942742 - RNA, 19 nt, Artificial Sequence
  Description of Artificial Sequence: Synthetic oligonucleotide
ggucacccggaaggagccu

SEQ ID NO: 942743 - RNA, 19 nt, Artificial Sequence
  Description of Artificial Sequence: Synthetic oligonucleotide
gccgaacagcuugcaugua

SEQ ID NO: 942744 - RNA, 19 nt, Artificial Sequence
  Description of Artificial Sequence: Synthetic oligonucleotide
gggccguagcggcucuguu

SEQ ID NO: 942745 - RNA, 19 nt, Artificial Sequence
  Description of Artificial Sequence: Synthetic oligonucleotide
cccacuguagccgguccuu

SEQ ID NO: 942746 - RNA, 19 nt, Artificial Sequence
  Description of Artificial Sequence: Synthetic oligonucleotide
ccccggacuucuucaccau

SEQ ID NO: 942747 - RNA, 19 nt, Artificial Sequence
  Description of Artificial Sequence: Synthetic oligonucleotide
ccccgcugcgggacucagu

SEQ ID NO: 942748 - RNA, 19 nt, Artificial Sequence
  Description of Artificial Sequence: Synthetic oligonucleotide
ccggacuaccagggccgua

SEQ ID NO: 942749 - RNA, 19 nt, Artificial Sequence
  Description of Artificial Sequence: Synthetic oligonucleotide
ccgcugcgggacucaguuu

SEQ ID NO: 942750 - RNA, 19 nt, Artificial Sequence
  Description of Artificial Sequence: Synthetic oligonucleotide
  modified_base (2)..(2): a, c, u, g, unknown or other
ancuuuagagaccauaggg

SEQ ID NO: 942751 - RNA, 19 nt, Artificial Sequence
  Description of Artificial Sequence: Synthetic oligonucleotide
aaugagcugacauuagugc

SEQ ID NO: 942752 - RNA, 19 nt, Artificial Sequence
  Description of Artificial Sequence: Synthetic oligonucleotide
aauagaugcauccccugcc

SEQ ID NO: 942753 - RNA, 19 nt, Artificial Sequence
  Description of Artificial Sequence: Synthetic oligonucleotide
aaugaacccaauucucucc

SEQ ID NO: 942754 - RNA, 19 nt, Artificial Sequence
  Description of Artificial Sequence: Synthetic oligonucleotide
ucaauucucagucacagga

SEQ ID NO: 942755 - RNA, 19 nt, Artificial Sequence
  Description of Artificial Sequence: Synthetic oligonucleotide
gauauagcaagguuguucc

SEQ ID NO: 942756 - RNA, 19 nt, Artificial Sequence
  Description of Artificial Sequence: Synthetic oligonucleotide
uguccuaugaccaucgaug

SEQ ID NO: 942757 - RNA, 19 nt, Artificial Sequence
  Description of Artificial Sequence: Synthetic oligonucleotide
acaauaacaauuauaauca

SEQ ID NO: 942758 - RNA, 19 nt, Artificial Sequence
  Description of Artificial Sequence: Synthetic oligonucleotide
accaaauucccucagugac

SEQ ID NO: 942759 - RNA, 19 nt, Artificial Sequence
  Description of Artificial Sequence: Synthetic oligonucleotide
aauauggccccaaagcagc

SEQ ID NO: 942760 - RNA, 19 nt, Artificial Sequence
  Description of Artificial Sequence: Synthetic oligonucleotide
uuugaaacgcucauauuug

SEQ ID NO: 942761 - RNA, 19 nt, Artificial Sequence
  Description of Artificial Sequence: Synthetic oligonucleotide
uauccaaccaggcugaggu

SEQ ID NO: 942762 - RNA, 19 nt, Artificial Sequence
  Description of Artificial Sequence: Synthetic oligonucleotide
auucauuuacccuucccgg

SEQ ID NO: 942763 - RNA, 19 nt, Artificial Sequence
  Description of Artificial Sequence: Synthetic oligonucleotide
aacgggaaagucuugauua

SEQ ID NO: 942764 - RNA, 19 nt, Artificial Sequence
  Description of Artificial Sequence: Synthetic oligonucleotide
  modified_base (7)..(7): a, c, u, g, unknown or other
uuugaunuggggccuccag

SEQ ID NO: 942765 - RNA, 19 nt, Artificial Sequence
  Description of Artificial Sequence: Synthetic oligonucleotide
ccuuaauugagccagauug

SEQ ID NO: 942766 - RNA, 19 nt, Artificial Sequence
  Description of Artificial Sequence: Synthetic oligonucleotide
aaaauagaugcauccccug

SEQ ID NO: 942767 - RNA, 19 nt, Artificial Sequence
  Description of Artificial Sequence: Synthetic oligonucleotide
uaaucaccuuaauugagcc

SEQ ID NO: 942768 - RNA, 19 nt, Artificial Sequence
  Description of Artificial Sequence: Synthetic oligonucleotide
ugugguuucagggugacac

SEQ ID NO: 942769 - RNA, 19 nt, Artificial Sequence
  Description of Artificial Sequence: Synthetic oligonucleotide
cugccuaggauccuuaggg

SEQ ID NO: 942770 - RNA, 19 nt, Artificial Sequence
  Description of Artificial Sequence: Synthetic oligonucleotide
uucucgacacucaaagcag

SEQ ID NO: 942771 - RNA, 19 nt, Artificial Sequence
  Description of Artificial Sequence: Synthetic oligonucleotide
ucuuuauucccugcggacg

SEQ ID NO: 942772 - RNA, 19 nt, Artificial Sequence
  Description of Artificial Sequence: Synthetic oligonucleotide
cuuagugacaccaugccca

SEQ ID NO: 942773 - RNA, 19 nt, Artificial Sequence
  Description of Artificial Sequence: Synthetic oligonucleotide
cuguuauccaaccaggcug

SEQ ID NO: 942774 - RNA, 19 nt, Artificial Sequence
  Description of Artificial Sequence: Synthetic oligonucleotide
  modified_base (5)..(5): a, c, u, g, unknown or other
ugaunuggggccuccagca

SEQ ID NO: 942775 - RNA, 19 nt, Artificial Sequence
  Description of Artificial Sequence: Synthetic oligonucleotide
ggcuaugugagacaguggg

SEQ ID NO: 942776 - RNA, 19 nt, Artificial Sequence
  Description of Artificial Sequence: Synthetic oligonucleotide
aggacugguuaaaugaacc

SEQ ID NO: 942777 - RNA, 19 nt, Artificial Sequence
  Description of Artificial Sequence: Synthetic oligonucleotide
ucuacaauccugagacugc

SEQ ID NO: 942778 - RNA, 19 nt, Artificial Sequence
  Description of Artificial Sequence: Synthetic oligonucleotide
agucagacgaguugcggcg

SEQ ID NO: 942779 - RNA, 19 nt, Artificial Sequence
  Description of Artificial Sequence: Synthetic oligonucleotide
uguuauccaaccaggcuga

SEQ ID NO: 942780 - RNA, 19 nt, Artificial Sequence
  Description of Artificial Sequence: Synthetic oligonucleotide
  modified_base (11)..(11): a, c, u, g, unknown or other
uggugacgcancuuuagag

SEQ ID NO: 942781 - RNA, 19 nt, Artificial Sequence
  Description of Artificial Sequence: Synthetic oligonucleotide
cuaucuuuauucccugcgg

SEQ ID NO: 942782 - RNA, 19 nt, Artificial Sequence
  Description of Artificial Sequence: Synthetic oligonucleotide
gauauauuuugaaacgcuc

SEQ ID NO: 942783 - RNA, 19 nt, Artificial Sequence
  Description of Artificial Sequence: Synthetic oligonucleotide
acaugagggauaaaauuac

SEQ ID NO: 942784 - RNA, 19 nt, Artificial Sequence
  Description of Artificial Sequence: Synthetic oligonucleotide
aacccaauucucuccuuag

SEQ ID NO: 942785 - RNA, 19 nt, Artificial Sequence
  Description of Artificial Sequence: Synthetic oligonucleotide
gguuguuccaaucaccaag

SEQ ID NO: 942786 - RNA, 19 nt, Artificial Sequence
  Description of Artificial Sequence: Synthetic oligonucleotide
ucauuuacccuucccggug

SEQ ID NO: 942787 - RNA, 19 nt, Artificial Sequence
  Description of Artificial Sequence: Synthetic oligonucleotide
ucugccuaggauccuuagg

SEQ ID NO: 942788 - RNA, 19 nt, Artificial Sequence
  Description of Artificial Sequence: Synthetic oligonucleotide
acuucucgacacucaaagc

SEQ ID NO: 942789 - RNA, 19 nt, Artificial Sequence
  Description of Artificial Sequence: Synthetic oligonucleotide
ugagggauaaaauuacauu

SEQ ID NO: 942790 - RNA, 19 nt, Artificial Sequence
  Description of Artificial Sequence: Synthetic oligonucleotide
  modified_base (6)..(6): a, c, u, g, unknown or other
uugaunuggggccuccagc

SEQ ID NO: 942791 - RNA, 19 nt, Artificial Sequence
  Description of Artificial Sequence: Synthetic oligonucleotide
aacugagggcguugagacc

SEQ ID NO: 942792 - RNA, 19 nt, Artificial Sequence
  Description of Artificial Sequence: Synthetic oligonucleotide
uuagggacgcuguaauuug

SEQ ID NO: 942793 - RNA, 19 nt, Artificial Sequence
  Description of Artificial Sequence: Synthetic oligonucleotide
gucccgauccuuuggaugg

SEQ ID NO: 942794 - RNA, 19 nt, Artificial Sequence
  Description of Artificial Sequence: Synthetic oligonucleotide
uacugcaccccaaagguuc

SEQ ID NO: 942795 - RNA, 19 nt, Artificial Sequence
  Description of Artificial Sequence: Synthetic oligonucleotide
cuucucgacacucaaagca

SEQ ID NO: 942796 - RNA, 19 nt, Artificial Sequence
  Description of Artificial Sequence: Synthetic oligonucleotide
ugugccgcaucuccugucg

SEQ ID NO: 942797 - RNA, 19 nt, Artificial Sequence
  Description of Artificial Sequence: Synthetic oligonucleotide
cuuuauucccugcggacgc

SEQ ID NO: 942798 - RNA, 19 nt, Artificial Sequence
  Description of Artificial Sequence: Synthetic oligonucleotide
acaauccugagacugcugu

SEQ ID NO: 942799 - RNA, 19 nt, Artificial Sequence
  Description of Artificial Sequence: Synthetic oligonucleotide
uccaaccaggcugaggugg

SEQ ID NO: 942800 - RNA, 19 nt, Artificial Sequence
  Description of Artificial Sequence: Synthetic oligonucleotide
  modified_base (3)..(3): a, c, u, g, unknown or other
cancuuuagagaccauagg

SEQ ID NO: 942801 - RNA, 19 nt, Artificial Sequence
  Description of Artificial Sequence: Synthetic oligonucleotide
auugagccagauugguaac

SEQ ID NO: 942802 - RNA, 19 nt, Artificial Sequence
  Description of Artificial Sequence: Synthetic oligonucleotide
uuaauugagccagauuggu

SEQ ID NO: 942803 - RNA, 19 nt, Artificial Sequence
  Description of Artificial Sequence: Synthetic oligonucleotide
aaucaccuuaauugagcca

SEQ ID NO: 942804 - RNA, 19 nt, Artificial Sequence
  Description of Artificial Sequence: Synthetic oligonucleotide
caagguuguuccaaucacc

SEQ ID NO: 942805 - RNA, 19 nt, Artificial Sequence
  Description of Artificial Sequence: Synthetic oligonucleotide
guccuaugaccaucgaugg

SEQ ID NO: 942806 - RNA, 19 nt, Artificial Sequence
  Description of Artificial Sequence: Synthetic oligonucleotide
ucuucaauucucagucaca

SEQ ID NO: 942807 - RNA, 19 nt, Artificial Sequence
  Description of Artificial Sequence: Synthetic oligonucleotide
ggauacugcaccccaaagg

SEQ ID NO: 942808 - RNA, 19 nt, Artificial Sequence
  Description of Artificial Sequence: Synthetic oligonucleotide
aagguuguuccaaucacca

SEQ ID NO: 942809 - RNA, 19 nt, Artificial Sequence
  Description of Artificial Sequence: Synthetic oligonucleotide
  modified_base (3)..(3): a, c, u, g, unknown or other
aunuggggccuccagcauc

SEQ ID NO: 942810 - RNA, 19 nt, Artificial Sequence
  Description of Artificial Sequence: Synthetic oligonucleotide
aauguacaggaaaacggga

SEQ ID NO: 942811 - RNA, 19 nt, Artificial Sequence
  Description of Artificial Sequence: Synthetic oligonucleotide
gaaacgcucauauuugucu

SEQ ID NO: 942812 - RNA, 19 nt, Artificial Sequence
  Description of Artificial Sequence: Synthetic oligonucleotide
gcaaguaaggcuaugugag

SEQ ID NO: 942813 - RNA, 19 nt, Artificial Sequence
  Description of Artificial Sequence: Synthetic oligonucleotide
uuuagagaccauagggaua

SEQ ID NO: 942814 - RNA, 19 nt, Artificial Sequence
  Description of Artificial Sequence: Synthetic oligonucleotide
caaagguucacaugggcca

SEQ ID NO: 942815 - RNA, 19 nt, Artificial Sequence
  Description of Artificial Sequence: Synthetic oligonucleotide
guaaggcuaugugagacag

SEQ ID NO: 942816 - RNA, 19 nt, Artificial Sequence
  Description of Artificial Sequence: Synthetic oligonucleotide
uagagaucagggcacucca

SEQ ID NO: 942817 - RNA, 19 nt, Artificial Sequence
  Description of Artificial Sequence: Synthetic oligonucleotide
aaacgggaaagucuugauu

SEQ ID NO: 942818 - RNA, 19 nt, Artificial Sequence
  Description of Artificial Sequence: Synthetic oligonucleotide
  modified_base (9)..(9): a, c, u, g, unknown or other
gugacgcancuuuagagac

SEQ ID NO: 942819 - RNA, 19 nt, Artificial Sequence
  Description of Artificial Sequence: Synthetic oligonucleotide
aucgauggcagcuguuauc

SEQ ID NO: 942820 - RNA, 19 nt, Artificial Sequence
  Description of Artificial Sequence: Synthetic oligonucleotide
gguaacacgacugaaggac

SEQ ID NO: 942821 - RNA, 19 nt, Artificial Sequence
  Description of Artificial Sequence: Synthetic oligonucleotide
uucauuuacccuucccggu

SEQ ID NO: 942822 - RNA, 19 nt, Artificial Sequence
  Description of Artificial Sequence: Synthetic oligonucleotide
  modified_base (7)..(7): a, c, u, g, unknown or other
gacgcancuuuagagacca

SEQ ID NO: 942823 - RNA, 19 nt, Artificial Sequence
  Description of Artificial Sequence: Synthetic oligonucleotide
auagauucauuuacccuuc

SEQ ID NO: 942824 - RNA, 19 nt, Artificial Sequence
  Description of Artificial Sequence: Synthetic oligonucleotide
ugagaccaaauucccucag

SEQ ID NO: 942825 - RNA, 19 nt, Artificial Sequence
  Description of Artificial Sequence: Synthetic oligonucleotide
gacagcaaaugauuagcca

SEQ ID NO: 942826 - RNA, 19 nt, Artificial Sequence
  Description of Artificial Sequence: Synthetic oligonucleotide
uugaaacgcucauauuugu

SEQ ID NO: 942827 - RNA, 19 nt, Artificial Sequence
  Description of Artificial Sequence: Synthetic oligonucleotide
ugaaacgcucauauuuguc

SEQ ID NO: 942828 - RNA, 19 nt, Artificial Sequence
  Description of Artificial Sequence: Synthetic oligonucleotide
aacacgacugaaggacugg

SEQ ID NO: 942829 - RNA, 19 nt, Artificial Sequence
  Description of Artificial Sequence: Synthetic oligonucleotide
uuagugcuaucuuuagaaa

SEQ ID NO: 942830 - RNA, 19 nt, Artificial Sequence
  Description of Artificial Sequence: Synthetic oligonucleotide
uauagcaagguuguuccaa

SEQ ID NO: 942831 - RNA, 19 nt, Artificial Sequence
  Description of Artificial Sequence: Synthetic oligonucleotide
ugacauuagugcuaucuuu

SEQ ID NO: 942832 - RNA, 19 nt, Artificial Sequence
  Description of Artificial Sequence: Synthetic oligonucleotide
acaagcaguggcaaguaag

SEQ ID NO: 942833 - RNA, 19 nt, Artificial Sequence
  Description of Artificial Sequence: Synthetic oligonucleotide
agauugguaacacgacuga

SEQ ID NO: 942834 - RNA, 19 nt, Artificial Sequence
  Description of Artificial Sequence: Synthetic oligonucleotide
  modified_base (2)..(2): a, c, u, g, unknown or other
unuggggccuccagcaucu

SEQ ID NO: 942835 - RNA, 19 nt, Artificial Sequence
  Description of Artificial Sequence: Synthetic oligonucleotide
uugagaccaaauucccuca

SEQ ID NO: 942836 - RNA, 19 nt, Artificial Sequence
  Description of Artificial Sequence: Synthetic oligonucleotide
acugagggcguugagacca

SEQ ID NO: 942837 - RNA, 19 nt, Artificial Sequence
  Description of Artificial Sequence: Synthetic oligonucleotide
acgaguugcggcgaggccg

SEQ ID NO: 942838 - RNA, 19 nt, Artificial Sequence
  Description of Artificial Sequence: Synthetic oligonucleotide
  modified_base (8)..(8): a, c, u, g, unknown or other
ugacgcancuuuagagacc

SEQ ID NO: 942839 - RNA, 19 nt, Artificial Sequence
  Description of Artificial Sequence: Synthetic oligonucleotide
ugauuagccacugguugcc

SEQ ID NO: 942840 - RNA, 19 nt, Artificial Sequence
  Description of Artificial Sequence: Synthetic oligonucleotide
  modified_base (4)..(4): a, c, u, g, unknown or other
gcancuuuagagaccauag

SEQ ID NO: 942841 - RNA, 19 nt, Artificial Sequence
  Description of Artificial Sequence: Synthetic oligonucleotide
aaacauuccucuaucuuua

SEQ ID NO: 942842 - RNA, 19 nt, Artificial Sequence
  Description of Artificial Sequence: Synthetic oligonucleotide
gaaaacgggaaagucuuga

SEQ ID NO: 942843 - RNA, 19 nt, Artificial Sequence
  Description of Artificial Sequence: Synthetic oligonucleotide
cagucagacgaguugcggc

SEQ ID NO: 942844 - RNA, 19 nt, Artificial Sequence
  Description of Artificial Sequence: Synthetic oligonucleotide
aaaugauuagccacugguu

SEQ ID NO: 942845 - RNA, 19 nt, Artificial Sequence
  Description of Artificial Sequence: Synthetic oligonucleotide
ccagagagcaguuacgcag

SEQ ID NO: 942846 - RNA, 19 nt, Artificial Sequence
  Description of Artificial Sequence: Synthetic oligonucleotide
uucccggugcauuaaacau

SEQ ID NO: 942847 - RNA, 19 nt, Artificial Sequence
  Description of Artificial Sequence: Synthetic oligonucleotide
  modified_base (18)..(18): a, c, u, g, unknown or other
acgaagauggugacgcanc

SEQ ID NO: 942848 - RNA, 19 nt, Artificial Sequence
  Description of Artificial Sequence: Synthetic oligonucleotide
uaauugagccagauuggua

SEQ ID NO: 942849 - RNA, 19 nt, Artificial Sequence
  Description of Artificial Sequence: Synthetic oligonucleotide
  modified_base (10)..(10): a, c, u, g, unknown or other
ggugacgcancuuuagaga

SEQ ID NO: 942850 - RNA, 19 nt, Artificial Sequence
  Description of Artificial Sequence: Synthetic oligonucleotide
agugcuaucuuuagaaaau

SEQ ID NO: 942851 - RNA, 19 nt, Artificial Sequence
  Description of Artificial Sequence: Synthetic oligonucleotide
caauggagcgcagugcggg

SEQ ID NO: 942852 - RNA, 19 nt, Artificial Sequence
  Description of Artificial Sequence: Synthetic oligonucleotide
uuauccaaccaggcugagg

SEQ ID NO: 942853 - RNA, 19 nt, Artificial Sequence
  Description of Artificial Sequence: Synthetic oligonucleotide
acgacugaaggacugguua

SEQ ID NO: 942854 - RNA, 19 nt, Artificial Sequence
  Description of Artificial Sequence: Synthetic oligonucleotide
uccuuagggacgcuguaau

SEQ ID NO: 942855 - RNA, 19 nt, Artificial Sequence
  Description of Artificial Sequence: Synthetic oligonucleotide
cuaugaccaucgauggcag

SEQ ID NO: 942856 - RNA, 19 nt, Artificial Sequence
  Description of Artificial Sequence: Synthetic oligonucleotide
gaccaaauucccucaguga

SEQ ID NO: 942857 - RNA, 19 nt, Artificial Sequence
  Description of Artificial Sequence: Synthetic oligonucleotide
uccugucguguguaugggg

SEQ ID NO: 942858 - RNA, 19 nt, Artificial Sequence
  Description of Artificial Sequence: Synthetic oligonucleotide
ucccagagagcaguuacgc

SEQ ID NO: 942859 - RNA, 19 nt, Artificial Sequence
  Description of Artificial Sequence: Synthetic oligonucleotide
ugguaacacgacugaagga

SEQ ID NO: 942860 - RNA, 19 nt, Artificial Sequence
  Description of Artificial Sequence: Synthetic oligonucleotide
uuagugacaccaugcccac

SEQ ID NO: 942861 - RNA, 19 nt, Artificial Sequence
  Description of Artificial Sequence: Synthetic oligonucleotide
uccuaugaccaucgauggc

SEQ ID NO: 942862 - RNA, 19 nt, Artificial Sequence
  Description of Artificial Sequence: Synthetic oligonucleotide
auccaguuuacaugaggga

SEQ ID NO: 942863 - RNA, 19 nt, Artificial Sequence
  Description of Artificial Sequence: Synthetic oligonucleotide
ccuaggauccuuagggacg

SEQ ID NO: 942864 - RNA, 19 nt, Artificial Sequence
  Description of Artificial Sequence: Synthetic oligonucleotide
uggcuagagaucagggcac

SEQ ID NO: 942865 - RNA, 19 nt, Artificial Sequence
  Description of Artificial Sequence: Synthetic oligonucleotide
ucacgagucuucagccucc

SEQ ID NO: 942866 - RNA, 19 nt, Artificial Sequence
  Description of Artificial Sequence: Synthetic oligonucleotide
agccagauugguaacacga

SEQ ID NO: 942867 - RNA, 19 nt, Artificial Sequence
  Description of Artificial Sequence: Synthetic oligonucleotide
cagcgucugagccacaaug

SEQ ID NO: 942868 - RNA, 19 nt, Artificial Sequence
  Description of Artificial Sequence: Synthetic oligonucleotide
cauuuacccuucccggugc

SEQ ID NO: 942869 - RNA, 19 nt, Artificial Sequence
  Description of Artificial Sequence: Synthetic oligonucleotide
gggaaagucuugauuaaag

SEQ ID NO: 942870 - RNA, 19 nt, Artificial Sequence
  Description of Artificial Sequence: Synthetic oligonucleotide
ggcaaguaaggcuauguga

SEQ ID NO: 942871 - RNA, 19 nt, Artificial Sequence
  Description of Artificial Sequence: Synthetic oligonucleotide
gcuguaauuuggaaaacug

SEQ ID NO: 942872 - RNA, 19 nt, Artificial Sequence
  Description of Artificial Sequence: Synthetic oligonucleotide
gugcauuaaacauuccucu

SEQ ID NO: 942873 - RNA, 19 nt, Artificial Sequence
  Description of Artificial Sequence: Synthetic oligonucleotide
  modified_base (12)..(12): a, c, u, g, unknown or other
auggugacgcancuuuaga

SEQ ID NO: 942874 - RNA, 19 nt, Artificial Sequence
  Description of Artificial Sequence: Synthetic oligonucleotide
ucgccaaucugccuaggau

SEQ ID NO: 942875 - RNA, 19 nt, Artificial Sequence
  Description of Artificial Sequence: Synthetic oligonucleotide
aggaaaacgggaaagucuu

SEQ ID NO: 942876 - RNA, 19 nt, Artificial Sequence
  Description of Artificial Sequence: Synthetic oligonucleotide
uuauucccugcggacgcgg

SEQ ID NO: 942877 - RNA, 19 nt, Artificial Sequence
  Description of Artificial Sequence: Synthetic oligonucleotide
ucacaugucccgauccuuu

SEQ ID NO: 942878 - RNA, 19 nt, Artificial Sequence
  Description of Artificial Sequence: Synthetic oligonucleotide
augagggauaaaauuacau

SEQ ID NO: 942879 - RNA, 19 nt, Artificial Sequence
  Description of Artificial Sequence: Synthetic oligonucleotide
aacauuccucuaucuuuau

SEQ ID NO: 942880 - RNA, 19 nt, Artificial Sequence
  Description of Artificial Sequence: Synthetic oligonucleotide
acgcagggaagucauuuca

SEQ ID NO: 942881 - RNA, 19 nt, Artificial Sequence
  Description of Artificial Sequence: Synthetic oligonucleotide
guuguuccaaucaccaaga

SEQ ID NO: 942882 - RNA, 19 nt, Artificial Sequence
  Description of Artificial Sequence: Synthetic oligonucleotide
auuuugaaacgcucauauu

SEQ ID NO: 942883 - RNA, 19 nt, Artificial Sequence
  Description of Artificial Sequence: Synthetic oligonucleotide
cuaugaugacaagcagugg

SEQ ID NO: 942884 - RNA, 19 nt, Artificial Sequence
  Description of Artificial Sequence: Synthetic oligonucleotide
cuuuagagaccauagggau

SEQ ID NO: 942885 - RNA, 19 nt, Artificial Sequence
  Description of Artificial Sequence: Synthetic oligonucleotide
caugagggauaaaauuaca

SEQ ID NO: 942886 - RNA, 19 nt, Artificial Sequence
  Description of Artificial Sequence: Synthetic oligonucleotide
ugucguguguauggggacc

SEQ ID NO: 942887 - RNA, 19 nt, Artificial Sequence
  Description of Artificial Sequence: Synthetic oligonucleotide
ggauauagcaagguuguuc

SEQ ID NO: 942888 - RNA, 19 nt, Artificial Sequence
  Description of Artificial Sequence: Synthetic oligonucleotide
ugccuaggauccuuaggga

SEQ ID NO: 942889 - RNA, 19 nt, Artificial Sequence
  Description of Artificial Sequence: Synthetic oligonucleotide
auguccuaugaccaucgau

SEQ ID NO: 942890 - RNA, 19 nt, Artificial Sequence
  Description of Artificial Sequence: Synthetic oligonucleotide
aggguggcuaaugagcuga

SEQ ID NO: 942891 - RNA, 19 nt, Artificial Sequence
  Description of Artificial Sequence: Synthetic oligonucleotide
aguggccgcgcaucccagc

SEQ ID NO: 942892 - RNA, 19 nt, Artificial Sequence
  Description of Artificial Sequence: Synthetic oligonucleotide
auauagcaagguuguucca

SEQ ID NO: 942893 - RNA, 19 nt, Artificial Sequence
  Description of Artificial Sequence: Synthetic oligonucleotide
ugaugacaagcaguggcaa

SEQ ID NO: 942894 - RNA, 19 nt, Artificial Sequence
  Description of Artificial Sequence: Synthetic oligonucleotide
ucaccggggagucuaugau

SEQ ID NO: 942895 - RNA, 19 nt, Artificial Sequence
  Description of Artificial Sequence: Synthetic oligonucleotide
uugagccagauugguaaca

SEQ ID NO: 942896 - RNA, 19 nt, Artificial Sequence
  Description of Artificial Sequence: Synthetic oligonucleotide
cauuagugcuaucuuuaga

SEQ ID NO: 942897 - RNA, 19 nt, Artificial Sequence
  Description of Artificial Sequence: Synthetic oligonucleotide
cccaauggagcgcagugcg

SEQ ID NO: 942898 - RNA, 19 nt, Artificial Sequence
  Description of Artificial Sequence: Synthetic oligonucleotide
uacgcagggaagucauuuc

SEQ ID NO: 942899 - RNA, 19 nt, Artificial Sequence
  Description of Artificial Sequence: Synthetic oligonucleotide
ucccggugcauuaaacauu

SEQ ID NO: 942900 - RNA, 19 nt, Artificial Sequence
  Description of Artificial Sequence: Synthetic oligonucleotide
aucugccuaggauccuuag

SEQ ID NO: 942901 - RNA, 19 nt, Artificial Sequence
  Description of Artificial Sequence: Synthetic oligonucleotide
uauucccugcggacgcggc

SEQ ID NO: 942902 - RNA, 19 nt, Artificial Sequence
  Description of Artificial Sequence: Synthetic oligonucleotide
uggagcgcagugcgggcag

SEQ ID NO: 942903 - RNA, 19 nt, Artificial Sequence
  Description of Artificial Sequence: Synthetic oligonucleotide
auauuuugaaacgcucaua

SEQ ID NO: 942904 - RNA, 19 nt, Artificial Sequence
  Description of Artificial Sequence: Synthetic oligonucleotide
uuguuccaaucaccaagaa

SEQ ID NO: 942905 - RNA, 19 nt, Artificial Sequence
  Description of Artificial Sequence: Synthetic oligonucleotide
uaaggcuaugugagacagu

SEQ ID NO: 942906 - RNA, 19 nt, Artificial Sequence
  Description of Artificial Sequence: Synthetic oligonucleotide
gcaagguuguuccaaucac

SEQ ID NO: 942907 - RNA, 19 nt, Artificial Sequence
  Description of Artificial Sequence: Synthetic oligonucleotide
acccaauucucuccuuagu

SEQ ID NO: 942908 - RNA, 19 nt, Artificial Sequence
  Description of Artificial Sequence: Synthetic oligonucleotide
gagcaguuacgcagggaag

SEQ ID NO: 942909 - RNA, 19 nt, Artificial Sequence
  Description of Artificial Sequence: Synthetic oligonucleotide
guggcuaaugagcugacau

SEQ ID NO: 942910 - RNA, 19 nt, Artificial Sequence
  Description of Artificial Sequence: Synthetic oligonucleotide
ugguuguggcccucccucc

SEQ ID NO: 942911 - RNA, 19 nt, Artificial Sequence
  Description of Artificial Sequence: Synthetic oligonucleotide
gagcccgacuuccccacag

SEQ ID NO: 942912 - RNA, 19 nt, Artificial Sequence
  Description of Artificial Sequence: Synthetic oligonucleotide
uccgggugucccaacacuu

SEQ ID NO: 942913 - RNA, 19 nt, Artificial Sequence
  Description of Artificial Sequence: Synthetic oligonucleotide
acgggaaagucuugauuaa

SEQ ID NO: 942914 - RNA, 19 nt, Artificial Sequence
  Description of Artificial Sequence: Synthetic oligonucleotide
ggacagcaaaugauuagcc

SEQ ID NO: 942915 - RNA, 19 nt, Artificial Sequence
  Description of Artificial Sequence: Synthetic oligonucleotide
ccuuagugacaccaugccc

SEQ ID NO: 942916 - RNA, 19 nt, Artificial Sequence
  Description of Artificial Sequence: Synthetic oligonucleotide
aguuacgcagggaagucau

SEQ ID NO: 942917 - RNA, 19 nt, Artificial Sequence
  Description of Artificial Sequence: Synthetic oligonucleotide
cugucguguguauggggac

SEQ ID NO: 942918 - RNA, 19 nt, Artificial Sequence
  Description of Artificial Sequence: Synthetic oligonucleotide
ugccgcaucuccugucgug

SEQ ID NO: 942919 - RNA, 19 nt, Artificial Sequence
  Description of Artificial Sequence: Synthetic oligonucleotide
gggauaaaauuacauuugu

SEQ ID NO: 942920 - RNA, 19 nt, Artificial Sequence
  Description of Artificial Sequence: Synthetic oligonucleotide
cuaaugagcugacauuagu

SEQ ID NO: 942921 - RNA, 19 nt, Artificial Sequence
  Description of Artificial Sequence: Synthetic oligonucleotide
agggcacgggaccagcaca

SEQ ID NO: 942922 - RNA, 19 nt, Artificial Sequence
  Description of Artificial Sequence: Synthetic oligonucleotide
augugagacaguggggcca

SEQ ID NO: 942923 - RNA, 19 nt, Artificial Sequence
  Description of Artificial Sequence: Synthetic oligonucleotide
gacgaguugcggcgaggcc

SEQ ID NO: 942924 - RNA, 19 nt, Artificial Sequence
  Description of Artificial Sequence: Synthetic oligonucleotide
caccggggagucuaugaug

SEQ ID NO: 942925 - RNA, 19 nt, Artificial Sequence
  Description of Artificial Sequence: Synthetic oligonucleotide
cuugagcccaauggagcgc

SEQ ID NO: 942926 - RNA, 19 nt, Artificial Sequence
  Description of Artificial Sequence: Synthetic oligonucleotide
ucgacacucaaagcagaaa

SEQ ID NO: 942927 - RNA, 19 nt, Artificial Sequence
  Description of Artificial Sequence: Synthetic oligonucleotide
ccuaugaccaucgauggca

SEQ ID NO: 942928 - RNA, 19 nt, Artificial Sequence
  Description of Artificial Sequence: Synthetic oligonucleotide
uagggauacugcaccccaa

SEQ ID NO: 942929 - RNA, 19 nt, Artificial Sequence
  Description of Artificial Sequence: Synthetic oligonucleotide
gcuaugugagacagugggg

SEQ ID NO: 942930 - RNA, 19 nt, Artificial Sequence
  Description of Artificial Sequence: Synthetic oligonucleotide
agcgucugagccacaaugu

SEQ ID NO: 942931 - RNA, 19 nt, Artificial Sequence
  Description of Artificial Sequence: Synthetic oligonucleotide
accgaggauauagcaaggu

SEQ ID NO: 942932 - RNA, 19 nt, Artificial Sequence
  Description of Artificial Sequence: Synthetic oligonucleotide
ugcuccggccagaucuucu

SEQ ID NO: 942933 - RNA, 19 nt, Artificial Sequence
  Description of Artificial Sequence: Synthetic oligonucleotide
gccuaggauccuuagggac

SEQ ID NO: 942934 - RNA, 19 nt, Artificial Sequence
  Description of Artificial Sequence: Synthetic oligonucleotide
aaugucugucugugcuguu

SEQ ID NO: 942935 - RNA, 19 nt, Artificial Sequence
  Description of Artificial Sequence: Synthetic oligonucleotide
cccggugcauuaaacauuc

SEQ ID NO: 942936 - RNA, 19 nt, Artificial Sequence
  Description of Artificial Sequence: Synthetic oligonucleotide
gacaagcaguggcaaguaa

SEQ ID NO: 942937 - RNA, 19 nt, Artificial Sequence
  Description of Artificial Sequence: Synthetic oligonucleotide
cucaccggggagucuauga

SEQ ID NO: 942938 - RNA, 19 nt, Artificial Sequence
  Description of Artificial Sequence: Synthetic oligonucleotide
agguuguuccaaucaccaa

SEQ ID NO: 942939 - RNA, 19 nt, Artificial Sequence
  Description of Artificial Sequence: Synthetic oligonucleotide
aucucagcguccggguguc

SEQ ID NO: 942940 - RNA, 19 nt, Artificial Sequence
  Description of Artificial Sequence: Synthetic oligonucleotide
aggauccuuagggacgcug

SEQ ID NO: 942941 - RNA, 19 nt, Artificial Sequence
  Description of Artificial Sequence: Synthetic oligonucleotide
cagagcccgacuuccccac

SEQ ID NO: 942942 - RNA, 19 nt, Artificial Sequence
  Description of Artificial Sequence: Synthetic oligonucleotide
  modified_base (10)..(10): a, c, u, g, unknown or other
ugguuugaunuggggccuc

SEQ ID NO: 942943 - RNA, 19 nt, Artificial Sequence
  Description of Artificial Sequence: Synthetic oligonucleotide
ucccgauccuuuggauggg

SEQ ID NO: 942944 - RNA, 19 nt, Artificial Sequence
  Description of Artificial Sequence: Synthetic oligonucleotide
acacgacugaaggacuggu

SEQ ID NO: 942945 - RNA, 19 nt, Artificial Sequence
  Description of Artificial Sequence: Synthetic oligonucleotide
aguggcaaguaaggcuaug

SEQ ID NO: 942946 - RNA, 19 nt, Artificial Sequence
  Description of Artificial Sequence: Synthetic oligonucleotide
caggucacaugucccgauc

SEQ ID NO: 942947 - RNA, 19 nt, Artificial Sequence
  Description of Artificial Sequence: Synthetic oligonucleotide
aggcuaugugagacagugg

SEQ ID NO: 942948 - RNA, 19 nt, Artificial Sequence
  Description of Artificial Sequence: Synthetic oligonucleotide
cuuagggacgcuguaauuu

SEQ ID NO: 942949 - RNA, 19 nt, Artificial Sequence
  Description of Artificial Sequence: Synthetic oligonucleotide
auccuuagggacgcuguaa

SEQ ID NO: 942950 - RNA, 19 nt, Artificial Sequence
  Description of Artificial Sequence: Synthetic oligonucleotide
gacugugguuucaggguga

SEQ ID NO: 942951 - RNA, 19 nt, Artificial Sequence
  Description of Artificial Sequence: Synthetic oligonucleotide
caggguggcuaaugagcug

SEQ ID NO: 942952 - RNA, 19 nt, Artificial Sequence
  Description of Artificial Sequence: Synthetic oligonucleotide
gucgccaaucugccuagga

SEQ ID NO: 942953 - RNA, 19 nt, Artificial Sequence
  Description of Artificial Sequence: Synthetic oligonucleotide
accaguaacugugccgcau

SEQ ID NO: 942954 - RNA, 19 nt, Artificial Sequence
  Description of Artificial Sequence: Synthetic oligonucleotide
  modified_base (14)..(14): a, c, u, g, unknown or other
agauggugacgcancuuua

SEQ ID NO: 942955 - RNA, 19 nt, Artificial Sequence
  Description of Artificial Sequence: Synthetic oligonucleotide
ccugucguguguaugggga

SEQ ID NO: 942956 - RNA, 19 nt, Artificial Sequence
  Description of Artificial Sequence: Synthetic oligonucleotide
ugucgccaaucugccuagg

SEQ ID NO: 942957 - RNA, 19 nt, Artificial Sequence
  Description of Artificial Sequence: Synthetic oligonucleotide
guuauccaaccaggcugag

SEQ ID NO: 942958 - RNA, 19 nt, Artificial Sequence
  Description of Artificial Sequence: Synthetic oligonucleotide
ggaaaacugagggcguuga

SEQ ID NO: 942959 - RNA, 19 nt, Artificial Sequence
  Description of Artificial Sequence: Synthetic oligonucleotide
  modified_base (9)..(9): a, c, u, g, unknown or other
gguuugaunuggggccucc

SEQ ID NO: 942960 - RNA, 19 nt, Artificial Sequence
  Description of Artificial Sequence: Synthetic oligonucleotide
  modified_base (4)..(4): a, c, u, g, unknown or other
gaunuggggccuccagcau

SEQ ID NO: 942961 - RNA, 19 nt, Artificial Sequence
  Description of Artificial Sequence: Synthetic oligonucleotide
agcugacauuagugcuauc

SEQ ID NO: 942962 - RNA, 19 nt, Artificial Sequence
  Description of Artificial Sequence: Synthetic oligonucleotide
gcguugagaccaaauuccc

SEQ ID NO: 942963 - RNA, 19 nt, Artificial Sequence
  Description of Artificial Sequence: Synthetic oligonucleotide
gcuguuauccaaccaggcu

SEQ ID NO: 942964 - RNA, 19 nt, Artificial Sequence
  Description of Artificial Sequence: Synthetic oligonucleotide
ccaauggagcgcagugcgg

SEQ ID NO: 942965 - RNA, 19 nt, Artificial Sequence
  Description of Artificial Sequence: Synthetic oligonucleotide
guaacacgacugaaggacu

SEQ ID NO: 942966 - RNA, 19 nt, Artificial Sequence
  Description of Artificial Sequence: Synthetic oligonucleotide
agcguccgggugucccaac

SEQ ID NO: 942967 - RNA, 19 nt, Artificial Sequence
  Description of Artificial Sequence: Synthetic oligonucleotide
ucguguguauggggaccag

SEQ ID NO: 942968 - RNA, 19 nt, Artificial Sequence
  Description of Artificial Sequence: Synthetic oligonucleotide
  modified_base (16)..(16): a, c, u, g, unknown or other
gaagauggugacgcancuu

SEQ ID NO: 942969 - RNA, 19 nt, Artificial Sequence
  Description of Artificial Sequence: Synthetic oligonucleotide
cgccaaucugccuaggauc

SEQ ID NO: 942970 - RNA, 19 nt, Artificial Sequence
  Description of Artificial Sequence: Synthetic oligonucleotide
ggaccaggucacauguccc

SEQ ID NO: 942971 - RNA, 19 nt, Artificial Sequence
  Description of Artificial Sequence: Synthetic oligonucleotide
gucccaccaaaauaauaau

SEQ ID NO: 942972 - RNA, 19 nt, Artificial Sequence
  Description of Artificial Sequence: Synthetic oligonucleotide
gugcgggcaggcgaagcag

SEQ ID NO: 942973 - RNA, 19 nt, Artificial Sequence
  Description of Artificial Sequence: Synthetic oligonucleotide
  modified_base (8)..(8): a, c, u, g, unknown or other
guuugaunuggggccucca

SEQ ID NO: 942974 - RNA, 19 nt, Artificial Sequence
  Description of Artificial Sequence: Synthetic oligonucleotide
ggggaccucagguccuugc

SEQ ID NO: 942975 - RNA, 19 nt, Artificial Sequence
  Description of Artificial Sequence: Synthetic oligonucleotide
caguuacgcagggaaguca

SEQ ID NO: 942976 - RNA, 19 nt, Artificial Sequence
  Description of Artificial Sequence: Synthetic oligonucleotide
gcgucugagccacaauguc

SEQ ID NO: 942977 - RNA, 19 nt, Artificial Sequence
  Description of Artificial Sequence: Synthetic oligonucleotide
cgauccuuuggauggggac

SEQ ID NO: 942978 - RNA, 19 nt, Artificial Sequence
  Description of Artificial Sequence: Synthetic oligonucleotide
ggcagcuguuauccaacca

SEQ ID NO: 942979 - RNA, 19 nt, Artificial Sequence
  Description of Artificial Sequence: Synthetic oligonucleotide
cuacaauccugagacugcu

SEQ ID NO: 942980 - RNA, 19 nt, Artificial Sequence
  Description of Artificial Sequence: Synthetic oligonucleotide
ggcgcaggguggcuaauga

SEQ ID NO: 942981 - RNA, 19 nt, Artificial Sequence
  Description of Artificial Sequence: Synthetic oligonucleotide
auacugcaccccaaagguu

SEQ ID NO: 942982 - RNA, 19 nt, Artificial Sequence
  Description of Artificial Sequence: Synthetic oligonucleotide
gaccaucgauggcagcugu

SEQ ID NO: 942983 - RNA, 19 nt, Artificial Sequence
  Description of Artificial Sequence: Synthetic oligonucleotide
caguggccgcgcaucccag

SEQ ID NO: 942984 - RNA, 19 nt, Artificial Sequence
  Description of Artificial Sequence: Synthetic oligonucleotide
cuguacacacaaugauggu

SEQ ID NO: 942985 - RNA, 19 nt, Artificial Sequence
  Description of Artificial Sequence: Synthetic oligonucleotide
cgaguugcggcgaggccgg

SEQ ID NO: 942986 - RNA, 19 nt, Artificial Sequence
  Description of Artificial Sequence: Synthetic oligonucleotide
aggauauagcaagguuguu

SEQ ID NO: 942987 - RNA, 19 nt, Artificial Sequence
  Description of Artificial Sequence: Synthetic oligonucleotide
ggacgcggcauccucccca

SEQ ID NO: 942988 - RNA, 19 nt, Artificial Sequence
  Description of Artificial Sequence: Synthetic oligonucleotide
ggcgaagcagcagcuuggc

SEQ ID NO: 942989 - RNA, 19 nt, Artificial Sequence
  Description of Artificial Sequence: Synthetic oligonucleotide
gaugggcgcaggguggcua

SEQ ID NO: 942990 - RNA, 19 nt, Artificial Sequence
  Description of Artificial Sequence: Synthetic oligonucleotide
gcaguuacgcagggaaguc

SEQ ID NO: 942991 - RNA, 19 nt, Artificial Sequence
  Description of Artificial Sequence: Synthetic oligonucleotide
gucagacgaguugcggcga

SEQ ID NO: 942992 - RNA, 19 nt, Artificial Sequence
  Description of Artificial Sequence: Synthetic oligonucleotide
aguugcggcgaggccggca

SEQ ID NO: 942993 - RNA, 19 nt, Artificial Sequence
  Description of Artificial Sequence: Synthetic oligonucleotide
  modified_base (11)..(11): a, c, u, g, unknown or other
gugguuugaunuggggccu

SEQ ID NO: 942994 - RNA, 19 nt, Artificial Sequence
  Description of Artificial Sequence: Synthetic oligonucleotide
gguuucagggugacacaga

SEQ ID NO: 942995 - RNA, 19 nt, Artificial Sequence
  Description of Artificial Sequence: Synthetic oligonucleotide
ccacaguggccgcgcaucc

SEQ ID NO: 942996 - RNA, 19 nt, Artificial Sequence
  Description of Artificial Sequence: Synthetic oligonucleotide
ggucacaugucccgauccu

SEQ ID NO: 942997 - RNA, 19 nt, Artificial Sequence
  Description of Artificial Sequence: Synthetic oligonucleotide
uggccgcgcaucccagcua

SEQ ID NO: 942998 - RNA, 19 nt, Artificial Sequence
  Description of Artificial Sequence: Synthetic oligonucleotide
caucgauggcagcuguuau

SEQ ID NO: 942999 - RNA, 19 nt, Artificial Sequence
  Description of Artificial Sequence: Synthetic oligonucleotide
ggcgaaccugccaggcugc

SEQ ID NO: 943000 - RNA, 19 nt, Artificial Sequence
  Description of Artificial Sequence: Synthetic oligonucleotide
ccgcgcaucccagcuaagg

SEQ ID NO: 943001 - RNA, 19 nt, Artificial Sequence
  Description of Artificial Sequence: Synthetic oligonucleotide
guggccgcgcaucccagcu

SEQ ID NO: 943002 - RNA, 19 nt, Artificial Sequence
  Description of Artificial Sequence: Synthetic oligonucleotide
ggcacgggaccagcacacg

SEQ ID NO: 943003 - RNA, 19 nt, Artificial Sequence
  Description of Artificial Sequence: Synthetic oligonucleotide
ccgggugucccaacacuuc

SEQ ID NO: 943004 - RNA, 19 nt, Artificial Sequence
  Description of Artificial Sequence: Synthetic oligonucleotide
ggauccuuagggacgcugu

SEQ ID NO: 943005 - RNA, 19 nt, Artificial Sequence
  Description of Artificial Sequence: Synthetic oligonucleotide
ggccgcgcaucccagcuaa

SEQ ID NO: 943006 - RNA, 19 nt, Artificial Sequence
  Description of Artificial Sequence: Synthetic oligonucleotide
cugcaccccaaagguucac

SEQ ID NO: 943007 - RNA, 19 nt, Artificial Sequence
  Description of Artificial Sequence: Synthetic oligonucleotide
ccucagugacugugguuuc

SEQ ID NO: 943008 - RNA, 19 nt, Artificial Sequence
  Description of Artificial Sequence: Synthetic oligonucleotide
cccgauccuuuggaugggg

SEQ ID NO: 943009 - RNA, 19 nt, Artificial Sequence
  Description of Artificial Sequence: Synthetic oligonucleotide
aggggaccucagguccuug

SEQ ID NO: 943010 - RNA, 19 nt, Artificial Sequence
  Description of Artificial Sequence: Synthetic oligonucleotide
gcuagagaucagggcacuc

SEQ ID NO: 943011 - RNA, 19 nt, Artificial Sequence
  Description of Artificial Sequence: Synthetic oligonucleotide
accaucgauggcagcuguu

SEQ ID NO: 943012 - RNA, 19 nt, Artificial Sequence
  Description of Artificial Sequence: Synthetic oligonucleotide
cgacugaaggacugguuaa

SEQ ID NO: 943013 - RNA, 19 nt, Artificial Sequence
  Description of Artificial Sequence: Synthetic oligonucleotide
gucacaugucccgauccuu

SEQ ID NO: 943014 - RNA, 19 nt, Artificial Sequence
  Description of Artificial Sequence: Synthetic oligonucleotide
gcccgacuuccccacagaa

SEQ ID NO: 943015 - RNA, 19 nt, Artificial Sequence
  Description of Artificial Sequence: Synthetic oligonucleotide
cacgacugaaggacugguu

SEQ ID NO: 943016 - RNA, 19 nt, Artificial Sequence
  Description of Artificial Sequence: Synthetic oligonucleotide
cccacagaaggggaccuca

SEQ ID NO: 943017 - RNA, 19 nt, Artificial Sequence
  Description of Artificial Sequence: Synthetic oligonucleotide
caaucugccuaggauccuu

SEQ ID NO: 943018 - RNA, 19 nt, Artificial Sequence
  Description of Artificial Sequence: Synthetic oligonucleotide
ccggccagaucuucuggga

SEQ ID NO: 943019 - RNA, 19 nt, Artificial Sequence
  Description of Artificial Sequence: Synthetic oligonucleotide
gcguccgggugucccaaca

SEQ ID NO: 943020 - RNA, 19 nt, Artificial Sequence
  Description of Artificial Sequence: Synthetic oligonucleotide
ccgcaucuccugucgugug

SEQ ID NO: 943021 - RNA, 19 nt, Artificial Sequence
  Description of Artificial Sequence: Synthetic oligonucleotide
  modified_base (5)..(5): a, c, u, g, unknown or other
cgcancuuuagagaccaua

SEQ ID NO: 943022 - RNA, 19 nt, Artificial Sequence
  Description of Artificial Sequence: Synthetic oligonucleotide
cguccgggugucccaacac

SEQ ID NO: 943023 - RNA, 19 nt, Artificial Sequence
  Description of Artificial Sequence: Synthetic oligonucleotide
acgcggcauccuccccaca

SEQ ID NO: 943024 - RNA, 19 nt, Artificial Sequence
  Description of Artificial Sequence: Synthetic oligonucleotide
cauccccugccuccagagu

SEQ ID NO: 943025 - RNA, 19 nt, Artificial Sequence
  Description of Artificial Sequence: Synthetic oligonucleotide
ccggggagucuaugaugac

SEQ ID NO: 943026 - RNA, 19 nt, Artificial Sequence
  Description of Artificial Sequence: Synthetic oligonucleotide
caguggcaaguaaggcuau

SEQ ID NO: 943027 - RNA, 19 nt, Artificial Sequence
  Description of Artificial Sequence: Synthetic oligonucleotide
gcucaccggggagucuaug

SEQ ID NO: 943028 - RNA, 19 nt, Artificial Sequence
  Description of Artificial Sequence: Synthetic oligonucleotide
cggggagucuaugaugaca

SEQ ID NO: 943029 - RNA, 19 nt, Artificial Sequence
  Description of Artificial Sequence: Synthetic oligonucleotide
agcucaccggggagucuau

SEQ ID NO: 943030 - RNA, 19 nt, Artificial Sequence
  Description of Artificial Sequence: Synthetic oligonucleotide
gugccgcaucuccugucgu

SEQ ID NO: 943031 - RNA, 19 nt, Artificial Sequence
  Description of Artificial Sequence: Synthetic oligonucleotide
guuacgcagggaagucauu

SEQ ID NO: 943032 - RNA, 19 nt, Artificial Sequence
  Description of Artificial Sequence: Synthetic oligonucleotide
gccgcaucuccugucgugu

SEQ ID NO: 943033 - RNA, 19 nt, Artificial Sequence
  Description of Artificial Sequence: Synthetic oligonucleotide
ggggaccaggucacauguc

SEQ ID NO: 943034 - RNA, 19 nt, Artificial Sequence
  Description of Artificial Sequence: Synthetic oligonucleotide
ggcuagagaucagggcacu

SEQ ID NO: 943035 - RNA, 19 nt, Artificial Sequence
  Description of Artificial Sequence: Synthetic oligonucleotide
ccgaggauauagcaagguu

SEQ ID NO: 943036 - RNA, 19 nt, Artificial Sequence
  Description of Artificial Sequence: Synthetic oligonucleotide
cccugcggacgcggcaucc

SEQ ID NO: 943037 - RNA, 19 nt, Artificial Sequence
  Description of Artificial Sequence: Synthetic oligonucleotide
  modified_base (6)..(6): a, c, u, g, unknown or other
acgcancuuuagagaccau

SEQ ID NO: 943038 - RNA, 19 nt, Artificial Sequence
  Description of Artificial Sequence: Synthetic oligonucleotide
cacgagucuucagccuccu

SEQ ID NO: 943039 - RNA, 19 nt, Artificial Sequence
  Description of Artificial Sequence: Synthetic oligonucleotide
cccaacacuucucgacacu

SEQ ID NO: 943040 - RNA, 19 nt, Artificial Sequence
  Description of Artificial Sequence: Synthetic oligonucleotide
cagcguccgggugucccaa

SEQ ID NO: 943041 - RNA, 19 nt, Artificial Sequence
  Description of Artificial Sequence: Synthetic oligonucleotide
ccuuagggacgcuguaauu

SEQ ID NO: 943042 - RNA, 19 nt, Artificial Sequence
  Description of Artificial Sequence: Synthetic oligonucleotide
gccgcgcaucccagcuaag

SEQ ID NO: 943043 - RNA, 19 nt, Artificial Sequence
  Description of Artificial Sequence: Synthetic oligonucleotide
ccccacagaaggggaccuc

SEQ ID NO: 943044 - RNA, 19 nt, Artificial Sequence
  Description of Artificial Sequence: Synthetic oligonucleotide
ccugcuccggccagaucuu

SEQ ID NO: 943045 - RNA, 19 nt, Artificial Sequence
  Description of Artificial Sequence: Synthetic oligonucleotide
gccggcaggcaggcaccga

SEQ ID NO: 943046 - RNA, 19 nt, Artificial Sequence
  Description of Artificial Sequence: Synthetic oligonucleotide
gcgaaccugccaggcugcu

SEQ ID NO: 943047 - RNA, 19 nt, Artificial Sequence
  Description of Artificial Sequence: Synthetic oligonucleotide
ccugcggacgcggcauccu

SEQ ID NO: 943048 - RNA, 19 nt, Artificial Sequence
  Description of Artificial Sequence: Synthetic oligonucleotide
gcguguccccgaugagcuu

SEQ ID NO: 943049 - RNA, 19 nt, Artificial Sequence
  Description of Artificial Sequence: Synthetic oligonucleotide
ccgccaugccauccaguuu

SEQ ID NO: 943050 - RNA, 19 nt, Artificial Sequence
  Description of Artificial Sequence: Synthetic oligonucleotide
ccccagcgucugagccaca

SEQ ID NO: 943051 - RNA, 19 nt, Artificial Sequence
  Description of Artificial Sequence: Synthetic oligonucleotide
  modified_base (1)..(1): a, c, u, g, unknown or other
ncuuuagagaccauaggga

SEQ ID NO: 943052 - RNA, 19 nt, Artificial Sequence
  Description of Artificial Sequence: Synthetic oligonucleotide
uguguuauugugaagacag

SEQ ID NO: 943053 - RNA, 19 nt, Artificial Sequence
  Description of Artificial Sequence: Synthetic oligonucleotide
uaagguaucaggcagacca

SEQ ID NO: 943054 - RNA, 19 nt, Artificial Sequence
  Description of Artificial Sequence: Synthetic oligonucleotide
gaaguggagaucuaggacg

SEQ ID NO: 943055 - RNA, 19 nt, Artificial Sequence
  Description of Artificial Sequence: Synthetic oligonucleotide
ucguuuuccaaacagaaga

SEQ ID NO: 943056 - RNA, 19 nt, Artificial Sequence
  Description of Artificial Sequence: Synthetic oligonucleotide
agaucuaggacgucgaaac

SEQ ID NO: 943057 - RNA, 19 nt, Artificial Sequence
  Description of Artificial Sequence: Synthetic oligonucleotide
aauggacaagaauaccucg

SEQ ID NO: 943058 - RNA, 19 nt, Artificial Sequence
  Description of Artificial Sequence: Synthetic oligonucleotide
acaagagucuggcaaaacc

SEQ ID NO: 943059 - RNA, 19 nt, Artificial Sequence
  Description of Artificial Sequence: Synthetic oligonucleotide
aacgucugccacuuuacgc

SEQ ID NO: 943060 - RNA, 19 nt, Artificial Sequence
  Description of Artificial Sequence: Synthetic oligonucleotide
aacagcuaagguaucaggc

SEQ ID NO: 943061 - RNA, 19 nt, Artificial Sequence
  Description of Artificial Sequence: Synthetic oligonucleotide
ugcauguuggucccaaugg

SEQ ID NO: 943062 - RNA, 19 nt, Artificial Sequence
  Description of Artificial Sequence: Synthetic oligonucleotide
aacacaucguggcuugccc

SEQ ID NO: 943063 - RNA, 19 nt, Artificial Sequence
  Description of Artificial Sequence: Synthetic oligonucleotide
aaaaugaccacgaacuugu

SEQ ID NO: 943064 - RNA, 19 nt, Artificial Sequence
  Description of Artificial Sequence: Synthetic oligonucleotide
agggaaaagacaugggagg

SEQ ID NO: 943065 - RNA, 19 nt, Artificial Sequence
  Description of Artificial Sequence: Synthetic oligonucleotide
aauucauaggguggaaagg

SEQ ID NO: 943066 - RNA, 19 nt, Artificial Sequence
  Description of Artificial Sequence: Synthetic oligonucleotide
aaaccugguccauucguac

SEQ ID NO: 943067 - RNA, 19 nt, Artificial Sequence
  Description of Artificial Sequence: Synthetic oligonucleotide
aguagaagcgcacaaggug

SEQ ID NO: 943068 - RNA, 19 nt, Artificial Sequence
  Description of Artificial Sequence: Synthetic oligonucleotide
cuucaagacguccucaagg

SEQ ID NO: 943069 - RNA, 19 nt, Artificial Sequence
  Description of Artificial Sequence: Synthetic oligonucleotide
agguacucggaguaaacac

SEQ ID NO: 943070 - RNA, 19 nt, Artificial Sequence
  Description of Artificial Sequence: Synthetic oligonucleotide
agaaguaagugugagaggu

SEQ ID NO: 943071 - RNA, 19 nt, Artificial Sequence
  Description of Artificial Sequence: Synthetic oligonucleotide
gaccagacccuucagagcc

SEQ ID NO: 943072 - RNA, 19 nt, Artificial Sequence
  Description of Artificial Sequence: Synthetic oligonucleotide
aaugaccacgaacuuguug

SEQ ID NO: 943073 - RNA, 19 nt, Artificial Sequence
  Description of Artificial Sequence: Synthetic oligonucleotide
ucuagucccaaccuaagau

SEQ ID NO: 943074 - RNA, 19 nt, Artificial Sequence
  Description of Artificial Sequence: Synthetic oligonucleotide
aaguggguagggaaaagac

SEQ ID NO: 943075 - RNA, 19 nt, Artificial Sequence
  Description of Artificial Sequence: Synthetic oligonucleotide
ucucguuuuccaaacagaa

SEQ ID NO: 943076 - RNA, 19 nt, Artificial Sequence
  Description of Artificial Sequence: Synthetic oligonucleotide
guagaagcgcacaaggugg

SEQ ID NO: 943077 - RNA, 19 nt, Artificial Sequence
  Description of Artificial Sequence: Synthetic oligonucleotide
caagacguccucaagguac

SEQ ID NO: 943078 - RNA, 19 nt, Artificial Sequence
  Description of Artificial Sequence: Synthetic oligonucleotide
aagcgcacaaggugguggc

SEQ ID NO: 943079 - RNA, 19 nt, Artificial Sequence
  Description of Artificial Sequence: Synthetic oligonucleotide
ucuauccaggccauguccc

SEQ ID NO: 943080 - RNA, 19 nt, Artificial Sequence
  Description of Artificial Sequence: Synthetic oligonucleotide
uaggacgucgaaacagugg

SEQ ID NO: 943081 - RNA, 19 nt, Artificial Sequence
  Description of Artificial Sequence: Synthetic oligonucleotide
ugauccuguucaaagcuca

SEQ ID NO: 943082 - RNA, 19 nt, Artificial Sequence
  Description of Artificial Sequence: Synthetic oligonucleotide
aucagucugucugagugcc

SEQ ID NO: 943083 - RNA, 19 nt, Artificial Sequence
  Description of Artificial Sequence: Synthetic oligonucleotide
uucaagacguccucaaggu

SEQ ID NO: 943084 - RNA, 19 nt, Artificial Sequence
  Description of Artificial Sequence: Synthetic oligonucleotide
agaaaaguguuuucauuga

SEQ ID NO: 943085 - RNA, 19 nt, Artificial Sequence
  Description of Artificial Sequence: Synthetic oligonucleotide
uacggcaugccggaaaugg

SEQ ID NO: 943086 - RNA, 19 nt, Artificial Sequence
  Description of Artificial Sequence: Synthetic oligonucleotide
uggacaagaauaccucggc

SEQ ID NO: 943087 - RNA, 19 nt, Artificial Sequence
  Description of Artificial Sequence: Synthetic oligonucleotide
uguuauugugaagacagaa

SEQ ID NO: 943088 - RNA, 19 nt, Artificial Sequence
  Description of Artificial Sequence: Synthetic oligonucleotide
ucgaugacggugacguacg

SEQ ID NO: 943089 - RNA, 19 nt, Artificial Sequence
  Description of Artificial Sequence: Synthetic oligonucleotide
augacggugacguacggca

SEQ ID NO: 943090 - RNA, 19 nt, Artificial Sequence
  Description of Artificial Sequence: Synthetic oligonucleotide
ucauaggguggaaagggcu

SEQ ID NO: 943091 - RNA, 19 nt, Artificial Sequence
  Description of Artificial Sequence: Synthetic oligonucleotide
aggacgucgaaacaguggu

SEQ ID NO: 943092 - RNA, 19 nt, Artificial Sequence
  Description of Artificial Sequence: Synthetic oligonucleotide
uuuccauugggcagcggcc

SEQ ID NO: 943093 - RNA, 19 nt, Artificial Sequence
  Description of Artificial Sequence: Synthetic oligonucleotide
uuuacgcacagucgccuag

SEQ ID NO: 943094 - RNA, 19 nt, Artificial Sequence
  Description of Artificial Sequence: Synthetic oligonucleotide
uauguguuauugugaagac

SEQ ID NO: 943095 - RNA, 19 nt, Artificial Sequence
  Description of Artificial Sequence: Synthetic oligonucleotide
agcaauggacaagaauacc

SEQ ID NO: 943096 - RNA, 19 nt, Artificial Sequence
  Description of Artificial Sequence: Synthetic oligonucleotide
uaaggccacgguuugggag

SEQ ID NO: 943097 - RNA, 19 nt, Artificial Sequence
  Description of Artificial Sequence: Synthetic oligonucleotide
ucuaggacgucgaaacagu

SEQ ID NO: 943098 - RNA, 19 nt, Artificial Sequence
  Description of Artificial Sequence: Synthetic oligonucleotide
ucguacaaacacucguucc

SEQ ID NO: 943099 - RNA, 19 nt, Artificial Sequence
  Description of Artificial Sequence: Synthetic oligonucleotide
ucggaguaaacacggguga

SEQ ID NO: 943100 - RNA, 19 nt, Artificial Sequence
  Description of Artificial Sequence: Synthetic oligonucleotide
gacuucggaggcuuggaag

SEQ ID NO: 943101 - RNA, 19 nt, Artificial Sequence
  Description of Artificial Sequence: Synthetic oligonucleotide
uucguacaaacacucguuc

SEQ ID NO: 943102 - RNA, 19 nt, Artificial Sequence
  Description of Artificial Sequence: Synthetic oligonucleotide
acacaucguggcuugcccc

SEQ ID NO: 943103 - RNA, 19 nt, Artificial Sequence
  Description of Artificial Sequence: Synthetic oligonucleotide
guaagugugagagguggcg

SEQ ID NO: 943104 - RNA, 19 nt, Artificial Sequence
  Description of Artificial Sequence: Synthetic oligonucleotide
ggaguugaugaucacuagg

SEQ ID NO: 943105 - RNA, 19 nt, Artificial Sequence
  Description of Artificial Sequence: Synthetic oligonucleotide
acguccucaagguacucgg

SEQ ID NO: 943106 - RNA, 19 nt, Artificial Sequence
  Description of Artificial Sequence: Synthetic oligonucleotide
caauggacaagaauaccuc

SEQ ID NO: 943107 - RNA, 19 nt, Artificial Sequence
  Description of Artificial Sequence: Synthetic oligonucleotide
uuauuuaguguauguguua

SEQ ID NO: 943108 - RNA, 19 nt, Artificial Sequence
  Description of Artificial Sequence: Synthetic oligonucleotide
cauugcacuguguuugaag

SEQ ID NO: 943109 - RNA, 19 nt, Artificial Sequence
  Description of Artificial Sequence: Synthetic oligonucleotide
acuucggaggcuuggaagu

SEQ ID NO: 943110 - RNA, 19 nt, Artificial Sequence
  Description of Artificial Sequence: Synthetic oligonucleotide
acgucgaaacagugguucc

SEQ ID NO: 943111 - RNA, 19 nt, Artificial Sequence
  Description of Artificial Sequence: Synthetic oligonucleotide
gguccauucguacaaacac

SEQ ID NO: 943112 - RNA, 19 nt, Artificial Sequence
  Description of Artificial Sequence: Synthetic oligonucleotide
guacucggaguaaacacgg

SEQ ID NO: 943113 - RNA, 19 nt, Artificial Sequence
  Description of Artificial Sequence: Synthetic oligonucleotide
auccugucuauccaggcca

SEQ ID NO: 943114 - RNA, 19 nt, Artificial Sequence
  Description of Artificial Sequence: Synthetic oligonucleotide
uguuuggguagcuccacac

SEQ ID NO: 943115 - RNA, 19 nt, Artificial Sequence
  Description of Artificial Sequence: Synthetic oligonucleotide
gaacgucugccacuuuacg

SEQ ID NO: 943116 - RNA, 19 nt, Artificial Sequence
  Description of Artificial Sequence: Synthetic oligonucleotide
gucgcagagagacugccag

SEQ ID NO: 943117 - RNA, 19 nt, Artificial Sequence
  Description of Artificial Sequence: Synthetic oligonucleotide
aaagacaugggaggaggca

SEQ ID NO: 943118 - RNA, 19 nt, Artificial Sequence
  Description of Artificial Sequence: Synthetic oligonucleotide
uccuguuuauaugugugca

SEQ ID NO: 943119 - RNA, 19 nt, Artificial Sequence
  Description of Artificial Sequence: Synthetic oligonucleotide
gaacuggcggaccucucgg

SEQ ID NO: 943120 - RNA, 19 nt, Artificial Sequence
  Description of Artificial Sequence: Synthetic oligonucleotide
auggacaagaauaccucgg

SEQ ID NO: 943121 - RNA, 19 nt, Artificial Sequence
  Description of Artificial Sequence: Synthetic oligonucleotide
ccuaagauccugucuaucc

SEQ ID NO: 943122 - RNA, 19 nt, Artificial Sequence
  Description of Artificial Sequence: Synthetic oligonucleotide
uccccggaauggaugaucc

SEQ ID NO: 943123 - RNA, 19 nt, Artificial Sequence
  Description of Artificial Sequence: Synthetic oligonucleotide
cagcuaagguaucaggcag

SEQ ID NO: 943124 - RNA, 19 nt, Artificial Sequence
  Description of Artificial Sequence: Synthetic oligonucleotide
cauaggguggaaagggcug

SEQ ID NO: 943125 - RNA, 19 nt, Artificial Sequence
  Description of Artificial Sequence: Synthetic oligonucleotide
acucggaguaaacacgggu

SEQ ID NO: 943126 - RNA, 19 nt, Artificial Sequence
  Description of Artificial Sequence: Synthetic oligonucleotide
ugauaacaagggauucacu

SEQ ID NO: 943127 - RNA, 19 nt, Artificial Sequence
  Description of Artificial Sequence: Synthetic oligonucleotide
cagaaguaagugugagagg

SEQ ID NO: 943128 - RNA, 19 nt, Artificial Sequence
  Description of Artificial Sequence: Synthetic oligonucleotide
gguacucggaguaaacacg

SEQ ID NO: 943129 - RNA, 19 nt, Artificial Sequence
  Description of Artificial Sequence: Synthetic oligonucleotide
ggaugauccaucucuggcc

SEQ ID NO: 943130 - RNA, 19 nt, Artificial Sequence
  Description of Artificial Sequence: Synthetic oligonucleotide
aaccugguccauucguaca

SEQ ID NO: 943131 - RNA, 19 nt, Artificial Sequence
  Description of Artificial Sequence: Synthetic oligonucleotide
uuauggcuuccccggaaug

SEQ ID NO: 943132 - RNA, 19 nt, Artificial Sequence
  Description of Artificial Sequence: Synthetic oligonucleotide
aacacgggugaggaaguag

SEQ ID NO: 943133 - RNA, 19 nt, Artificial Sequence
  Description of Artificial Sequence: Synthetic oligonucleotide
uccugucgcagagagacug

SEQ ID NO: 943134 - RNA, 19 nt, Artificial Sequence
  Description of Artificial Sequence: Synthetic oligonucleotide
gcuuccccaacccuuaagg

SEQ ID NO: 943135 - RNA, 19 nt, Artificial Sequence
  Description of Artificial Sequence: Synthetic oligonucleotide
gacgucgaaacagugguuc

SEQ ID NO: 943136 - RNA, 19 nt, Artificial Sequence
  Description of Artificial Sequence: Synthetic oligonucleotide
uggagaucuaggacgucga

SEQ ID NO: 943137 - RNA, 19 nt, Artificial Sequence
  Description of Artificial Sequence: Synthetic oligonucleotide
ucgagaaguccuccauugc

SEQ ID NO: 943138 - RNA, 19 nt, Artificial Sequence
  Description of Artificial Sequence: Synthetic oligonucleotide
gaucaagggaggcggugag

SEQ ID NO: 943139 - RNA, 19 nt, Artificial Sequence
  Description of Artificial Sequence: Synthetic oligonucleotide
cacaucguggcuugccccg

SEQ ID NO: 943140 - RNA, 19 nt, Artificial Sequence
  Description of Artificial Sequence: Synthetic oligonucleotide
uccccgaaugggcaugucc

SEQ ID NO: 943141 - RNA, 19 nt, Artificial Sequence
  Description of Artificial Sequence: Synthetic oligonucleotide
uacucggaguaaacacggg

SEQ ID NO: 943142 - RNA, 19 nt, Artificial Sequence
  Description of Artificial Sequence: Synthetic oligonucleotide
aggaguugaugaucacuag

SEQ ID NO: 943143 - RNA, 19 nt, Artificial Sequence
  Description of Artificial Sequence: Synthetic oligonucleotide
acgaacuuguuguguagca

SEQ ID NO: 943144 - RNA, 19 nt, Artificial Sequence
  Description of Artificial Sequence: Synthetic oligonucleotide
cucgaugacggugacguac

SEQ ID NO: 943145 - RNA, 19 nt, Artificial Sequence
  Description of Artificial Sequence: Synthetic oligonucleotide
uccuugguacaugguaggg

SEQ ID NO: 943146 - RNA, 19 nt, Artificial Sequence
  Description of Artificial Sequence: Synthetic oligonucleotide
aaguggagaucuaggacgu

SEQ ID NO: 943147 - RNA, 19 nt, Artificial Sequence
  Description of Artificial Sequence: Synthetic oligonucleotide
cacuuuacgcacagucgcc

SEQ ID NO: 943148 - RNA, 19 nt, Artificial Sequence
  Description of Artificial Sequence: Synthetic oligonucleotide
acuguguuagaaaaguguu

SEQ ID NO: 943149 - RNA, 19 nt, Artificial Sequence
  Description of Artificial Sequence: Synthetic oligonucleotide
gcuaguguagcacuguaga

SEQ ID NO: 943150 - RNA, 19 nt, Artificial Sequence
  Description of Artificial Sequence: Synthetic oligonucleotide
cuaagauccugucuaucca

SEQ ID NO: 943151 - RNA, 19 nt, Artificial Sequence
  Description of Artificial Sequence: Synthetic oligonucleotide
ggaaaggugggaguagggg

SEQ ID NO: 943152 - RNA, 19 nt, Artificial Sequence
  Description of Artificial Sequence: Synthetic oligonucleotide
ugccggaaauggaagugga

SEQ ID NO: 943153 - RNA, 19 nt, Artificial Sequence
  Description of Artificial Sequence: Synthetic oligonucleotide
ggugacguacggcaugccg

SEQ ID NO: 943154 - RNA, 19 nt, Artificial Sequence
  Description of Artificial Sequence: Synthetic oligonucleotide
uuacgcacagucgccuagg

SEQ ID NO: 943155 - RNA, 19 nt, Artificial Sequence
  Description of Artificial Sequence: Synthetic oligonucleotide
ugagucuuucuggagcaga

SEQ ID NO: 943156 - RNA, 19 nt, Artificial Sequence
  Description of Artificial Sequence: Synthetic oligonucleotide
acggugacguacggcaugc

SEQ ID NO: 943157 - RNA, 19 nt, Artificial Sequence
  Description of Artificial Sequence: Synthetic oligonucleotide
uccauaugacagcuccuuc

SEQ ID NO: 943158 - RNA, 19 nt, Artificial Sequence
  Description of Artificial Sequence: Synthetic oligonucleotide
gaaguggguagggaaaaga

SEQ ID NO: 943159 - RNA, 19 nt, Artificial Sequence
  Description of Artificial Sequence: Synthetic oligonucleotide
acuacgggugcuggcgucc

SEQ ID NO: 943160 - RNA, 19 nt, Artificial Sequence
  Description of Artificial Sequence: Synthetic oligonucleotide
aguccucaauccauggguc

SEQ ID NO: 943161 - RNA, 19 nt, Artificial Sequence
  Description of Artificial Sequence: Synthetic oligonucleotide
aagguaucaggcagaccag

SEQ ID NO: 943162 - RNA, 19 nt, Artificial Sequence
  Description of Artificial Sequence: Synthetic oligonucleotide
cuugguacaugguaggggu

SEQ ID NO: 943163 - RNA, 19 nt, Artificial Sequence
  Description of Artificial Sequence: Synthetic oligonucleotide
cuauccaggccaugucccc

SEQ ID NO: 943164 - RNA, 19 nt, Artificial Sequence
  Description of Artificial Sequence: Synthetic oligonucleotide
gaaguaagugugagaggug

SEQ ID NO: 943165 - RNA, 19 nt, Artificial Sequence
  Description of Artificial Sequence: Synthetic oligonucleotide
aggaccccgguguugacca

SEQ ID NO: 943166 - RNA, 19 nt, Artificial Sequence
  Description of Artificial Sequence: Synthetic oligonucleotide
cugauccuguucaaagcuc

SEQ ID NO: 943167 - RNA, 19 nt, Artificial Sequence
  Description of Artificial Sequence: Synthetic oligonucleotide
gaacacaucguggcuugcc

SEQ ID NO: 943168 - RNA, 19 nt, Artificial Sequence
  Description of Artificial Sequence: Synthetic oligonucleotide
gacggugacguacggcaug

SEQ ID NO: 943169 - RNA, 19 nt, Artificial Sequence
  Description of Artificial Sequence: Synthetic oligonucleotide
ugcugucacugacaccggc

SEQ ID NO: 943170 - RNA, 19 nt, Artificial Sequence
  Description of Artificial Sequence: Synthetic oligonucleotide
ugaccacgaacuuguugug

SEQ ID NO: 943171 - RNA, 19 nt, Artificial Sequence
  Description of Artificial Sequence: Synthetic oligonucleotide
uuaaggccacgguuuggga

SEQ ID NO: 943172 - RNA, 19 nt, Artificial Sequence
  Description of Artificial Sequence: Synthetic oligonucleotide
accacgaacuuguugugua

SEQ ID NO: 943173 - RNA, 19 nt, Artificial Sequence
  Description of Artificial Sequence: Synthetic oligonucleotide
ucaagacguccucaaggua

SEQ ID NO: 943174 - RNA, 19 nt, Artificial Sequence
  Description of Artificial Sequence: Synthetic oligonucleotide
uccauugcacuguguuuga

SEQ ID NO: 943175 - RNA, 19 nt, Artificial Sequence
  Description of Artificial Sequence: Synthetic oligonucleotide
gguccuuauacacagcucu

SEQ ID NO: 943176 - RNA, 19 nt, Artificial Sequence
  Description of Artificial Sequence: Synthetic oligonucleotide
gaucuaggacgucgaaaca

SEQ ID NO: 943177 - RNA, 19 nt, Artificial Sequence
  Description of Artificial Sequence: Synthetic oligonucleotide
auguguuauugugaagaca

SEQ ID NO: 943178 - RNA, 19 nt, Artificial Sequence
  Description of Artificial Sequence: Synthetic oligonucleotide
cacgaacuuguuguguagc

SEQ ID NO: 943179 - RNA, 19 nt, Artificial Sequence
  Description of Artificial Sequence: Synthetic oligonucleotide
ugucgcagagagacugcca

SEQ ID NO: 943180 - RNA, 19 nt, Artificial Sequence
  Description of Artificial Sequence: Synthetic oligonucleotide
aagacguccucaagguacu

SEQ ID NO: 943181 - RNA, 19 nt, Artificial Sequence
  Description of Artificial Sequence: Synthetic oligonucleotide
gaccucucgguacuguguc

SEQ ID NO: 943182 - RNA, 19 nt, Artificial Sequence
  Description of Artificial Sequence: Synthetic oligonucleotide
ucggaggcuuggaagugga

SEQ ID NO: 943183 - RNA, 19 nt, Artificial Sequence
  Description of Artificial Sequence: Synthetic oligonucleotide
cccaaaaugaccacgaacu

SEQ ID NO: 943184 - RNA, 19 nt, Artificial Sequence
  Description of Artificial Sequence: Synthetic oligonucleotide
ucccagcuaguguagcacu

SEQ ID NO: 943185 - RNA, 19 nt, Artificial Sequence
  Description of Artificial Sequence: Synthetic oligonucleotide
gucagaaguaagugugaga

SEQ ID NO: 943186 - RNA, 19 nt, Artificial Sequence
  Description of Artificial Sequence: Synthetic oligonucleotide
ucgcugucuacauguuccc

SEQ ID NO: 943187 - RNA, 19 nt, Artificial Sequence
  Description of Artificial Sequence: Synthetic oligonucleotide
cauucguacaaacacucgu

SEQ ID NO: 943188 - RNA, 19 nt, Artificial Sequence
  Description of Artificial Sequence: Synthetic oligonucleotide
gcggugugcauguuggucc

SEQ ID NO: 943189 - RNA, 19 nt, Artificial Sequence
  Description of Artificial Sequence: Synthetic oligonucleotide
accuaagauccugucuauc

SEQ ID NO: 943190 - RNA, 19 nt, Artificial Sequence
  Description of Artificial Sequence: Synthetic oligonucleotide
cccaauggacaccaucucg

SEQ ID NO: 943191 - RNA, 19 nt, Artificial Sequence
  Description of Artificial Sequence: Synthetic oligonucleotide
ucgccuaggggcagcaauc

SEQ ID NO: 943192 - RNA, 19 nt, Artificial Sequence
  Description of Artificial Sequence: Synthetic oligonucleotide
acuuuacgcacagucgccu

SEQ ID NO: 943193 - RNA, 19 nt, Artificial Sequence
  Description of Artificial Sequence: Synthetic oligonucleotide
aacuggcggaccucucggu

SEQ ID NO: 943194 - RNA, 19 nt, Artificial Sequence
  Description of Artificial Sequence: Synthetic oligonucleotide
ucgguacugugucccguug

SEQ ID NO: 943195 - RNA, 19 nt, Artificial Sequence
  Description of Artificial Sequence: Synthetic oligonucleotide
agcuaguguagcacuguag

SEQ ID NO: 943196 - RNA, 19 nt, Artificial Sequence
  Description of Artificial Sequence: Synthetic oligonucleotide
uuccauugggcagcggcca

SEQ ID NO: 943197 - RNA, 19 nt, Artificial Sequence
  Description of Artificial Sequence: Synthetic oligonucleotide
cuaguguagcacuguagaa

SEQ ID NO: 943198 - RNA, 19 nt, Artificial Sequence
  Description of Artificial Sequence: Synthetic oligonucleotide
auucguacaaacacucguu

SEQ ID NO: 943199 - RNA, 19 nt, Artificial Sequence
  Description of Artificial Sequence: Synthetic oligonucleotide
agcuuccccaacccuuaag

SEQ ID NO: 943200 - RNA, 19 nt, Artificial Sequence
  Description of Artificial Sequence: Synthetic oligonucleotide
gccacuuuacgcacagucg

SEQ ID NO: 943201 - RNA, 19 nt, Artificial Sequence
  Description of Artificial Sequence: Synthetic oligonucleotide
guuugcacaagggcccaag

SEQ ID NO: 943202 - RNA, 19 nt, Artificial Sequence
  Description of Artificial Sequence: Synthetic oligonucleotide
gggcagguccauaugacag

SEQ ID NO: 943203 - RNA, 19 nt, Artificial Sequence
  Description of Artificial Sequence: Synthetic oligonucleotide
acacgggugaggaaguaga

SEQ ID NO: 943204 - RNA, 19 nt, Artificial Sequence
  Description of Artificial Sequence: Synthetic oligonucleotide
uccccgucuguccuguuua

SEQ ID NO: 943205 - RNA, 19 nt, Artificial Sequence
  Description of Artificial Sequence: Synthetic oligonucleotide
cuggcggaccucucgguac

SEQ ID NO: 943206 - RNA, 19 nt, Artificial Sequence
  Description of Artificial Sequence: Synthetic oligonucleotide
cuggcaucgagaaguccuc

SEQ ID NO: 943207 - RNA, 19 nt, Artificial Sequence
  Description of Artificial Sequence: Synthetic oligonucleotide
acgggugcuggcguccgcc

SEQ ID NO: 943208 - RNA, 19 nt, Artificial Sequence
  Description of Artificial Sequence: Synthetic oligonucleotide
augauccaucucuggccag

SEQ ID NO: 943209 - RNA, 19 nt, Artificial Sequence
  Description of Artificial Sequence: Synthetic oligonucleotide
agagacugccagaggcugg

SEQ ID NO: 943210 - RNA, 19 nt, Artificial Sequence
  Description of Artificial Sequence: Synthetic oligonucleotide
acuaggucaggggcagguc

SEQ ID NO: 943211 - RNA, 19 nt, Artificial Sequence
  Description of Artificial Sequence: Synthetic oligonucleotide
aggcggugagggcugaaga

SEQ ID NO: 943212 - RNA, 19 nt, Artificial Sequence
  Description of Artificial Sequence: Synthetic oligonucleotide
cucucgguacugugucccg

SEQ ID NO: 943213 - RNA, 19 nt, Artificial Sequence
  Description of Artificial Sequence: Synthetic oligonucleotide
cucggcccaacagcuaagg

SEQ ID NO: 943214 - RNA, 19 nt, Artificial Sequence
  Description of Artificial Sequence: Synthetic oligonucleotide
ccuuccaugcuuuuauuga

SEQ ID NO: 943215 - RNA, 19 nt, Artificial Sequence
  Description of Artificial Sequence: Synthetic oligonucleotide
ggcccacucccucacacag

SEQ ID NO: 943216 - RNA, 19 nt, Artificial Sequence
  Description of Artificial Sequence: Synthetic oligonucleotide
ucgcagagagacugccaga

SEQ ID NO: 943217 - RNA, 19 nt, Artificial Sequence
  Description of Artificial Sequence: Synthetic oligonucleotide
ucggcccaacagcuaaggu

SEQ ID NO: 943218 - RNA, 19 nt, Artificial Sequence
  Description of Artificial Sequence: Synthetic oligonucleotide
cugucgcagagagacugcc

SEQ ID NO: 943219 - RNA, 19 nt, Artificial Sequence
  Description of Artificial Sequence: Synthetic oligonucleotide
cuaagguaucaggcagacc

SEQ ID NO: 943220 - RNA, 19 nt, Artificial Sequence
  Description of Artificial Sequence: Synthetic oligonucleotide
uggcggaccucucgguacu

SEQ ID NO: 943221 - RNA, 19 nt, Artificial Sequence
  Description of Artificial Sequence: Synthetic oligonucleotide
gucgaaacagugguuccca

SEQ ID NO: 943222 - RNA, 19 nt, Artificial Sequence
  Description of Artificial Sequence: Synthetic oligonucleotide
agcgcacaaggugguggcc

SEQ ID NO: 943223 - RNA, 19 nt, Artificial Sequence
  Description of Artificial Sequence: Synthetic oligonucleotide
uggcuugccccgguggacc

SEQ ID NO: 943224 - RNA, 19 nt, Artificial Sequence
  Description of Artificial Sequence: Synthetic oligonucleotide
ccauaugacagcuccuuca

SEQ ID NO: 943225 - RNA, 19 nt, Artificial Sequence
  Description of Artificial Sequence: Synthetic oligonucleotide
auggugcuucgcagcaggc

SEQ ID NO: 943226 - RNA, 19 nt, Artificial Sequence
  Description of Artificial Sequence: Synthetic oligonucleotide
ccuugguacaugguagggg

SEQ ID NO: 943227 - RNA, 19 nt, Artificial Sequence
  Description of Artificial Sequence: Synthetic oligonucleotide
auuggcaccucuaguccca

SEQ ID NO: 943228 - RNA, 19 nt, Artificial Sequence
  Description of Artificial Sequence: Synthetic oligonucleotide
accucuagucccaaccuaa

SEQ ID NO: 943229 - RNA, 19 nt, Artificial Sequence
  Description of Artificial Sequence: Synthetic oligonucleotide
ugggaucaagggaggcggu

SEQ ID NO: 943230 - RNA, 19 nt, Artificial Sequence
  Description of Artificial Sequence: Synthetic oligonucleotide
ugacggugacguacggcau

SEQ ID NO: 943231 - RNA, 19 nt, Artificial Sequence
  Description of Artificial Sequence: Synthetic oligonucleotide
agcuaagguaucaggcaga

SEQ ID NO: 943232 - RNA, 19 nt, Artificial Sequence
  Description of Artificial Sequence: Synthetic oligonucleotide
uggcaucgagaaguccucc

SEQ ID NO: 943233 - RNA, 19 nt, Artificial Sequence
  Description of Artificial Sequence: Synthetic oligonucleotide
accggcuuguuuguuggcu

SEQ ID NO: 943234 - RNA, 19 nt, Artificial Sequence
  Description of Artificial Sequence: Synthetic oligonucleotide
acguacggcaugccggaaa

SEQ ID NO: 943235 - RNA, 19 nt, Artificial Sequence
  Description of Artificial Sequence: Synthetic oligonucleotide
gcauguuggucccaaugga

SEQ ID NO: 943236 - RNA, 19 nt, Artificial Sequence
  Description of Artificial Sequence: Synthetic oligonucleotide
gugggaguaggggcaaggc

SEQ ID NO: 943237 - RNA, 19 nt, Artificial Sequence
  Description of Artificial Sequence: Synthetic oligonucleotide
gggaaaagacaugggagga

SEQ ID NO: 943238 - RNA, 19 nt, Artificial Sequence
  Description of Artificial Sequence: Synthetic oligonucleotide
gcugauccuguucaaagcu

SEQ ID NO: 943239 - RNA, 19 nt, Artificial Sequence
  Description of Artificial Sequence: Synthetic oligonucleotide
ggcaugccggaaauggaag

SEQ ID NO: 943240 - RNA, 19 nt, Artificial Sequence
  Description of Artificial Sequence: Synthetic oligonucleotide
ugugcauguuggucccaau

SEQ ID NO: 943241 - RNA, 19 nt, Artificial Sequence
  Description of Artificial Sequence: Synthetic oligonucleotide
cauguccccgucuguccug

SEQ ID NO: 943242 - RNA, 19 nt, Artificial Sequence
  Description of Artificial Sequence: Synthetic oligonucleotide
gguuugggaggcccacucc

SEQ ID NO: 943243 - RNA, 19 nt, Artificial Sequence
  Description of Artificial Sequence: Synthetic oligonucleotide
cuucggaggcuuggaagug

SEQ ID NO: 943244 - RNA, 19 nt, Artificial Sequence
  Description of Artificial Sequence: Synthetic oligonucleotide
aguucauuccagggccaca

SEQ ID NO: 943245 - RNA, 19 nt, Artificial Sequence
  Description of Artificial Sequence: Synthetic oligonucleotide
ggaauggaugauccaucuc

SEQ ID NO: 943246 - RNA, 19 nt, Artificial Sequence
  Description of Artificial Sequence: Synthetic oligonucleotide
gauccaucucuggccaguc

SEQ ID NO: 943247 - RNA, 19 nt, Artificial Sequence
  Description of Artificial Sequence: Synthetic oligonucleotide
guuguugggaacacaucgu

SEQ ID NO: 943248 - RNA, 19 nt, Artificial Sequence
  Description of Artificial Sequence: Synthetic oligonucleotide
aaauggaaguggagaucua

SEQ ID NO: 943249 - RNA, 19 nt, Artificial Sequence
  Description of Artificial Sequence: Synthetic oligonucleotide
ccggcggcucgccagaacg

SEQ ID NO: 943250 - RNA, 19 nt, Artificial Sequence
  Description of Artificial Sequence: Synthetic oligonucleotide
cccgguggaccacaggacc

SEQ ID NO: 943251 - RNA, 19 nt, Artificial Sequence
  Description of Artificial Sequence: Synthetic oligonucleotide
gaccccgguguugaccaug

SEQ ID NO: 943252 - RNA, 19 nt, Artificial Sequence
  Description of Artificial Sequence: Synthetic oligonucleotide
gcuuccccggaauggauga

SEQ ID NO: 943253 - RNA, 19 nt, Artificial Sequence
  Description of Artificial Sequence: Synthetic oligonucleotide
guguuauugugaagacaga

SEQ ID NO: 943254 - RNA, 19 nt, Artificial Sequence
  Description of Artificial Sequence: Synthetic oligonucleotide
guccauucguacaaacacu

SEQ ID NO: 943255 - RNA, 19 nt, Artificial Sequence
  Description of Artificial Sequence: Synthetic oligonucleotide
aggcccacucccucacaca

SEQ ID NO: 943256 - RNA, 19 nt, Artificial Sequence
  Description of Artificial Sequence: Synthetic oligonucleotide
cccguuguguagcucgccc

SEQ ID NO: 943257 - RNA, 19 nt, Artificial Sequence
  Description of Artificial Sequence: Synthetic oligonucleotide
agacguccucaagguacuc

SEQ ID NO: 943258 - RNA, 19 nt, Artificial Sequence
  Description of Artificial Sequence: Synthetic oligonucleotide
ccggaauggaugauccauc

SEQ ID NO: 943259 - RNA, 19 nt, Artificial Sequence
  Description of Artificial Sequence: Synthetic oligonucleotide
cuacgggugcuggcguccg

SEQ ID NO: 943260 - RNA, 19 nt, Artificial Sequence
  Description of Artificial Sequence: Synthetic oligonucleotide
auguccccgaaugggcaug

SEQ ID NO: 943261 - RNA, 19 nt, Artificial Sequence
  Description of Artificial Sequence: Synthetic oligonucleotide
cacaggaaugucacucugu

SEQ ID NO: 943262 - RNA, 19 nt, Artificial Sequence
  Description of Artificial Sequence: Synthetic oligonucleotide
agagccauuggcaccucua

SEQ ID NO: 943263 - RNA, 19 nt, Artificial Sequence
  Description of Artificial Sequence: Synthetic oligonucleotide
ucccguuguguagcucgcc

SEQ ID NO: 943264 - RNA, 19 nt, Artificial Sequence
  Description of Artificial Sequence: Synthetic oligonucleotide
cacuacgggugcuggcguc

SEQ ID NO: 943265 - RNA, 19 nt, Artificial Sequence
  Description of Artificial Sequence: Synthetic oligonucleotide
cuuuacgcacagucgccua

SEQ ID NO: 943266 - RNA, 19 nt, Artificial Sequence
  Description of Artificial Sequence: Synthetic oligonucleotide
agacaugggaggaggcaaa

SEQ ID NO: 943267 - RNA, 19 nt, Artificial Sequence
  Description of Artificial Sequence: Synthetic oligonucleotide
ggaucaagggaggcgguga

SEQ ID NO: 943268 - RNA, 19 nt, Artificial Sequence
  Description of Artificial Sequence: Synthetic oligonucleotide
ccucaauccaugggucugg

SEQ ID NO: 943269 - RNA, 19 nt, Artificial Sequence
  Description of Artificial Sequence: Synthetic oligonucleotide
caccggcuuguuuguuggc

SEQ ID NO: 943270 - RNA, 19 nt, Artificial Sequence
  Description of Artificial Sequence: Synthetic oligonucleotide
cacgguuugggaggcccac

SEQ ID NO: 943271 - RNA, 19 nt, Artificial Sequence
  Description of Artificial Sequence: Synthetic oligonucleotide
cacgggugaggaaguagaa

SEQ ID NO: 943272 - RNA, 19 nt, Artificial Sequence
  Description of Artificial Sequence: Synthetic oligonucleotide
cccgaaugggcaugucccc

SEQ ID NO: 943273 - RNA, 19 nt, Artificial Sequence
  Description of Artificial Sequence: Synthetic oligonucleotide
gcuggcguccgccccuccg

SEQ ID NO: 943274 - RNA, 19 nt, Artificial Sequence
  Description of Artificial Sequence: Synthetic oligonucleotide
cguuguguagcucgcccag

SEQ ID NO: 943275 - RNA, 19 nt, Artificial Sequence
  Description of Artificial Sequence: Synthetic oligonucleotide
uggcggugugcauguuggu

SEQ ID NO: 943276 - RNA, 19 nt, Artificial Sequence
  Description of Artificial Sequence: Synthetic oligonucleotide
uaccucggcccaacagcua

SEQ ID NO: 943277 - RNA, 19 nt, Artificial Sequence
  Description of Artificial Sequence: Synthetic oligonucleotide
ccgaaugggcauguccccg

SEQ ID NO: 943278 - RNA, 19 nt, Artificial Sequence
  Description of Artificial Sequence: Synthetic oligonucleotide
ggcggugagggcugaagaa

SEQ ID NO: 943279 - RNA, 19 nt, Artificial Sequence
  Description of Artificial Sequence: Synthetic oligonucleotide
cccaaccuaagauccuguc

SEQ ID NO: 943280 - RNA, 19 nt, Artificial Sequence
  Description of Artificial Sequence: Synthetic oligonucleotide
gccggaaauggaaguggag

SEQ ID NO: 943281 - RNA, 19 nt, Artificial Sequence
  Description of Artificial Sequence: Synthetic oligonucleotide
gucccguuguguagcucgc

SEQ ID NO: 943282 - RNA, 19 nt, Artificial Sequence
  Description of Artificial Sequence: Synthetic oligonucleotide
cccuuaaggccacgguuug

SEQ ID NO: 943283 - RNA, 19 nt, Artificial Sequence
  Description of Artificial Sequence: Synthetic oligonucleotide
cucaagguacucggaguaa

SEQ ID NO: 943284 - RNA, 19 nt, Artificial Sequence
  Description of Artificial Sequence: Synthetic oligonucleotide
gggaucaagggaggcggug

SEQ ID NO: 943285 - RNA, 19 nt, Artificial Sequence
  Description of Artificial Sequence: Synthetic oligonucleotide
gucgccuaggggcagcaau

SEQ ID NO: 943286 - RNA, 19 nt, Artificial Sequence
  Description of Artificial Sequence: Synthetic oligonucleotide
guguggcaucucguuuucc

SEQ ID NO: 943287 - RNA, 19 nt, Artificial Sequence
  Description of Artificial Sequence: Synthetic oligonucleotide
guacggcaugccggaaaug

SEQ ID NO: 943288 - RNA, 19 nt, Artificial Sequence
  Description of Artificial Sequence: Synthetic oligonucleotide
cccgguguugaccauggga

SEQ ID NO: 943289 - RNA, 19 nt, Artificial Sequence
  Description of Artificial Sequence: Synthetic oligonucleotide
gaguaggggcaaggccagc

SEQ ID NO: 943290 - RNA, 19 nt, Artificial Sequence
  Description of Artificial Sequence: Synthetic oligonucleotide
ggagaucuaggacgucgaa

SEQ ID NO: 943291 - RNA, 19 nt, Artificial Sequence
  Description of Artificial Sequence: Synthetic oligonucleotide
guccauaugacagcuccuu

SEQ ID NO: 943292 - RNA, 19 nt, Artificial Sequence
  Description of Artificial Sequence: Synthetic oligonucleotide
uggcugguuugagccuccc

SEQ ID NO: 943293 - RNA, 19 nt, Artificial Sequence
  Description of Artificial Sequence: Synthetic oligonucleotide
cagcuaguguagcacugua

SEQ ID NO: 943294 - RNA, 19 nt, Artificial Sequence
  Description of Artificial Sequence: Synthetic oligonucleotide
cugacaccggcuuguuugu

SEQ ID NO: 943295 - RNA, 19 nt, Artificial Sequence
  Description of Artificial Sequence: Synthetic oligonucleotide
agacugccagaggcuggag

SEQ ID NO: 943296 - RNA, 19 nt, Artificial Sequence
  Description of Artificial Sequence: Synthetic oligonucleotide
cgucgaaacagugguuccc

SEQ ID NO: 943297 - RNA, 19 nt, Artificial Sequence
  Description of Artificial Sequence: Synthetic oligonucleotide
guggcuugccccgguggac

SEQ ID NO: 943298 - RNA, 19 nt, Artificial Sequence
  Description of Artificial Sequence: Synthetic oligonucleotide
ccauguccccgaaugggca

SEQ ID NO: 943299 - RNA, 19 nt, Artificial Sequence
  Description of Artificial Sequence: Synthetic oligonucleotide
gugugcauguuggucccaa

SEQ ID NO: 943300 - RNA, 19 nt, Artificial Sequence
  Description of Artificial Sequence: Synthetic oligonucleotide
ggacuucggaggcuuggaa

SEQ ID NO: 943301 - RNA, 19 nt, Artificial Sequence
  Description of Artificial Sequence: Synthetic oligonucleotide
caucgagaaguccuccauu

SEQ ID NO: 943302 - RNA, 19 nt, Artificial Sequence
  Description of Artificial Sequence: Synthetic oligonucleotide
ugcuggcguccgccccucc

SEQ ID NO: 943303 - RNA, 19 nt, Artificial Sequence
  Description of Artificial Sequence: Synthetic oligonucleotide
gggugggaucaagggaggc

SEQ ID NO: 943304 - RNA, 19 nt, Artificial Sequence
  Description of Artificial Sequence: Synthetic oligonucleotide
ggcguccgccccuccggcg

SEQ ID NO: 943305 - RNA, 19 nt, Artificial Sequence
  Description of Artificial Sequence: Synthetic oligonucleotide
ugacaccggcuuguuuguu

SEQ ID NO: 943306 - RNA, 19 nt, Artificial Sequence
  Description of Artificial Sequence: Synthetic oligonucleotide
uggucccaauggacaccau

SEQ ID NO: 943307 - RNA, 19 nt, Artificial Sequence
  Description of Artificial Sequence: Synthetic oligonucleotide
cacuaggucaggggcaggu

SEQ ID NO: 943308 - RNA, 19 nt, Artificial Sequence
  Description of Artificial Sequence: Synthetic oligonucleotide
cucccucacacaggaaugu

SEQ ID NO: 943309 - RNA, 19 nt, Artificial Sequence
  Description of Artificial Sequence: Synthetic oligonucleotide
auccugucgcagagagacu

SEQ ID NO: 943310 - RNA, 19 nt, Artificial Sequence
  Description of Artificial Sequence: Synthetic oligonucleotide
aggcgguguggcaucucgu

SEQ ID NO: 943311 - RNA, 19 nt, Artificial Sequence
  Description of Artificial Sequence: Synthetic oligonucleotide
gcaucgagaaguccuccau

SEQ ID NO: 943312 - RNA, 19 nt, Artificial Sequence
  Description of Artificial Sequence: Synthetic oligonucleotide
ccgucuguccuguuuauau

SEQ ID NO: 943313 - RNA, 19 nt, Artificial Sequence
  Description of Artificial Sequence: Synthetic oligonucleotide
ccucggcccaacagcuaag

SEQ ID NO: 943314 - RNA, 19 nt, Artificial Sequence
  Description of Artificial Sequence: Synthetic oligonucleotide
ccguuguguagcucgccca

SEQ ID NO: 943315 - RNA, 19 nt, Artificial Sequence
  Description of Artificial Sequence: Synthetic oligonucleotide
cgaugacggugacguacgg

SEQ ID NO: 943316 - RNA, 19 nt, Artificial Sequence
  Description of Artificial Sequence: Synthetic oligonucleotide
gcugucacugacaccggcu

SEQ ID NO: 943317 - RNA, 19 nt, Artificial Sequence
  Description of Artificial Sequence: Synthetic oligonucleotide
cucgguacugugucccguu

SEQ ID NO: 943318 - RNA, 19 nt, Artificial Sequence
  Description of Artificial Sequence: Synthetic oligonucleotide
guccuuccaugcuuuuauu

SEQ ID NO: 943319 - RNA, 19 nt, Artificial Sequence
  Description of Artificial Sequence: Synthetic oligonucleotide
ggaccucucgguacugugu

SEQ ID NO: 943320 - RNA, 19 nt, Artificial Sequence
  Description of Artificial Sequence: Synthetic oligonucleotide
ccccagugacacguucccc

SEQ ID NO: 943321 - RNA, 19 nt, Artificial Sequence
  Description of Artificial Sequence: Synthetic oligonucleotide
agucgccuaggggcagcaa

SEQ ID NO: 943322 - RNA, 19 nt, Artificial Sequence
  Description of Artificial Sequence: Synthetic oligonucleotide
cagcuuccccaacccuuaa

SEQ ID NO: 943323 - RNA, 19 nt, Artificial Sequence
  Description of Artificial Sequence: Synthetic oligonucleotide
cgguguugaccaugggaga

SEQ ID NO: 943324 - RNA, 19 nt, Artificial Sequence
  Description of Artificial Sequence: Synthetic oligonucleotide
ggugugcauguugguccca

SEQ ID NO: 943325 - RNA, 19 nt, Artificial Sequence
  Description of Artificial Sequence: Synthetic oligonucleotide
gagucgcugucuacauguu

SEQ ID NO: 943326 - RNA, 19 nt, Artificial Sequence
  Description of Artificial Sequence: Synthetic oligonucleotide
ccacgguuugggaggccca

SEQ ID NO: 943327 - RNA, 19 nt, Artificial Sequence
  Description of Artificial Sequence: Synthetic oligonucleotide
caucguggcuugccccggu

SEQ ID NO: 943328 - RNA, 19 nt, Artificial Sequence
  Description of Artificial Sequence: Synthetic oligonucleotide
guccccgaaugggcauguc

SEQ ID NO: 943329 - RNA, 19 nt, Artificial Sequence
  Description of Artificial Sequence: Synthetic oligonucleotide
gugcuggcguccgccccuc

SEQ ID NO: 943330 - RNA, 19 nt, Artificial Sequence
  Description of Artificial Sequence: Synthetic oligonucleotide
ccccggaauggaugaucca

SEQ ID NO: 943331 - RNA, 19 nt, Artificial Sequence
  Description of Artificial Sequence: Synthetic oligonucleotide
ccugguccauucguacaaa

SEQ ID NO: 943332 - RNA, 19 nt, Artificial Sequence
  Description of Artificial Sequence: Synthetic oligonucleotide
cguacggcaugccggaaau

SEQ ID NO: 943333 - RNA, 19 nt, Artificial Sequence
  Description of Artificial Sequence: Synthetic oligonucleotide
ccauugcacuguguuugaa

SEQ ID NO: 943334 - RNA, 19 nt, Artificial Sequence
  Description of Artificial Sequence: Synthetic oligonucleotide
gcggcucgccagaacgucu

SEQ ID NO: 943335 - RNA, 19 nt, Artificial Sequence
  Description of Artificial Sequence: Synthetic oligonucleotide
agguggcggugugcauguu

SEQ ID NO: 943336 - RNA, 19 nt, Artificial Sequence
  Description of Artificial Sequence: Synthetic oligonucleotide
cugccacuuuacgcacagu

SEQ ID NO: 943337 - RNA, 19 nt, Artificial Sequence
  Description of Artificial Sequence: Synthetic oligonucleotide
cggugacguacggcaugcc

SEQ ID NO: 943338 - RNA, 19 nt, Artificial Sequence
  Description of Artificial Sequence: Synthetic oligonucleotide
gccccuccggcggcucgcc

SEQ ID NO: 943339 - RNA, 19 nt, Artificial Sequence
  Description of Artificial Sequence: Synthetic oligonucleotide
cggccauaucuggagagau

SEQ ID NO: 943340 - RNA, 19 nt, Artificial Sequence
  Description of Artificial Sequence: Synthetic oligonucleotide
ggaccccgguguugaccau

SEQ ID NO: 943341 - RNA, 19 nt, Artificial Sequence
  Description of Artificial Sequence: Synthetic oligonucleotide
cgccuaggggcagcaaucu

SEQ ID NO: 943342 - RNA, 19 nt, Artificial Sequence
  Description of Artificial Sequence: Synthetic oligonucleotide
ccagaacgucugccacuuu

SEQ ID NO: 943343 - RNA, 19 nt, Artificial Sequence
  Description of Artificial Sequence: Synthetic oligonucleotide
aaauuaguuaugaaguagc

SEQ ID NO: 943344 - RNA, 19 nt, Artificial Sequence
  Description of Artificial Sequence: Synthetic oligonucleotide
auaaccuccauguauuggc

SEQ ID NO: 943345 - RNA, 19 nt, Artificial Sequence
  Description of Artificial Sequence: Synthetic oligonucleotide
aauucauuccuccauauaa

SEQ ID NO: 943346 - RNA, 19 nt, Artificial Sequence
  Description of Artificial Sequence: Synthetic oligonucleotide
uuuaauaacuccgacacca

SEQ ID NO: 943347 - RNA, 19 nt, Artificial Sequence
  Description of Artificial Sequence: Synthetic oligonucleotide
uauaaagagcauaugcaag

SEQ ID NO: 943348 - RNA, 19 nt, Artificial Sequence
  Description of Artificial Sequence: Synthetic oligonucleotide
aguaacaguggccuuaugg

SEQ ID NO: 943349 - RNA, 19 nt, Artificial Sequence
  Description of Artificial Sequence: Synthetic oligonucleotide
cucucaacaauauugagac

SEQ ID NO: 943350 - RNA, 19 nt, Artificial Sequence
  Description of Artificial Sequence: Synthetic oligonucleotide
aauauaaagagcauaugca

SEQ ID NO: 943351 - RNA, 19 nt, Artificial Sequence
  Description of Artificial Sequence: Synthetic oligonucleotide
ucaaucaguaguuccauag

SEQ ID NO: 943352 - RNA, 19 nt, Artificial Sequence
  Description of Artificial Sequence: Synthetic oligonucleotide
ugggaugaaaguuucacag

SEQ ID NO: 943353 - RNA, 19 nt, Artificial Sequence
  Description of Artificial Sequence: Synthetic oligonucleotide
agguugaucacuuccaagg

SEQ ID NO: 943354 - RNA, 19 nt, Artificial Sequence
  Description of Artificial Sequence: Synthetic oligonucleotide
ugauguuuaaauguaaaca

SEQ ID NO: 943355 - RNA, 19 nt, Artificial Sequence
  Description of Artificial Sequence: Synthetic oligonucleotide
uuaagaauucacagcaggc

SEQ ID NO: 943356 - RNA, 19 nt, Artificial Sequence
  Description of Artificial Sequence: Synthetic oligonucleotide
ucuucuagugcucauagaa

SEQ ID NO: 943357 - RNA, 19 nt, Artificial Sequence
  Description of Artificial Sequence: Synthetic oligonucleotide
ugacaagaugacucgaugg

SEQ ID NO: 943358 - RNA, 19 nt, Artificial Sequence
  Description of Artificial Sequence: Synthetic oligonucleotide
guaacaguggccuuauggg

SEQ ID NO: 943359 - RNA, 19 nt, Artificial Sequence
  Description of Artificial Sequence: Synthetic oligonucleotide
ucuaauugucucuuuaaga

SEQ ID NO: 943360 - RNA, 19 nt, Artificial Sequence
  Description of Artificial Sequence: Synthetic oligonucleotide
uauaagaagccucccagca

SEQ ID NO: 943361 - RNA, 19 nt, Artificial Sequence
  Description of Artificial Sequence: Synthetic oligonucleotide
uucuagugcucauagaagc

SEQ ID NO: 943362 - RNA, 19 nt, Artificial Sequence
  Description of Artificial Sequence: Synthetic oligonucleotide
gacaagaugacucgauggg

SEQ ID NO: 943363 - RNA, 19 nt, Artificial Sequence
  Description of Artificial Sequence: Synthetic oligonucleotide
ugcgaagucaaucaguagu

SEQ ID NO: 943364 - RNA, 19 nt, Artificial Sequence
  Description of Artificial Sequence: Synthetic oligonucleotide
auguugugccaucaaagcc

SEQ ID NO: 943365 - RNA, 19 nt, Artificial Sequence
  Description of Artificial Sequence: Synthetic oligonucleotide
auguaaacacaaaaguugc

SEQ ID NO: 943366 - RNA, 19 nt, Artificial Sequence
  Description of Artificial Sequence: Synthetic oligonucleotide
auugcucggaaguagggac

SEQ ID NO: 943367 - RNA, 19 nt, Artificial Sequence
  Description of Artificial Sequence: Synthetic oligonucleotide
auagaucauguccugguac

SEQ ID NO: 943368 - RNA, 19 nt, Artificial Sequence
  Description of Artificial Sequence: Synthetic oligonucleotide
agagagucugaacauugcc

SEQ ID NO: 943369 - RNA, 19 nt, Artificial Sequence
  Description of Artificial Sequence: Synthetic oligonucleotide
ucgaugcuuucucagaagg

SEQ ID NO: 943370 - RNA, 19 nt, Artificial Sequence
  Description of Artificial Sequence: Synthetic oligonucleotide
uugaucacuuccaaggucu

SEQ ID NO: 943371 - RNA, 19 nt, Artificial Sequence
  Description of Artificial Sequence: Synthetic oligonucleotide
cauauaagaagccucccag

SEQ ID NO: 943372 - RNA, 19 nt, Artificial Sequence
  Description of Artificial Sequence: Synthetic oligonucleotide
agucuaugacuauaguggg

SEQ ID NO: 943373 - RNA, 19 nt, Artificial Sequence
  Description of Artificial Sequence: Synthetic oligonucleotide
cuaaagucucauucaaagg

SEQ ID NO: 943374 - RNA, 19 nt, Artificial Sequence
  Description of Artificial Sequence: Synthetic oligonucleotide
aaaguugccagacguuuug

SEQ ID NO: 943375 - RNA, 19 nt, Artificial Sequence
  Description of Artificial Sequence: Synthetic oligonucleotide
auugagacaagagacacca

SEQ ID NO: 943376 - RNA, 19 nt, Artificial Sequence
  Description of Artificial Sequence: Synthetic oligonucleotide
ucuaugacuauagugggga

SEQ ID NO: 943377 - RNA, 19 nt, Artificial Sequence
  Description of Artificial Sequence: Synthetic oligonucleotide
aucuaauugucucuuuaag

SEQ ID NO: 943378 - RNA, 19 nt, Artificial Sequence
  Description of Artificial Sequence: Synthetic oligonucleotide
uuguuuaccaaauacuauu

SEQ ID NO: 943379 - RNA, 19 nt, Artificial Sequence
  Description of Artificial Sequence: Synthetic oligonucleotide
uguaaacacaaaaguugcc

SEQ ID NO: 943380 - RNA, 19 nt, Artificial Sequence
  Description of Artificial Sequence: Synthetic oligonucleotide
uaguucuguagguugaggc

SEQ ID NO: 943381 - RNA, 19 nt, Artificial Sequence
  Description of Artificial Sequence: Synthetic oligonucleotide
uguucuaauguuuucucaa

SEQ ID NO: 943382 - RNA, 19 nt, Artificial Sequence
  Description of Artificial Sequence: Synthetic oligonucleotide
aacuccuagucuucuagug

SEQ ID NO: 943383 - RNA, 19 nt, Artificial Sequence
  Description of Artificial Sequence: Synthetic oligonucleotide
agguguuuccuucgggucc

SEQ ID NO: 943384 - RNA, 19 nt, Artificial Sequence
  Description of Artificial Sequence: Synthetic oligonucleotide
uggagauguuccaucagag

SEQ ID NO: 943385 - RNA, 19 nt, Artificial Sequence
  Description of Artificial Sequence: Synthetic oligonucleotide
uaugcgaagucaaucagua

SEQ ID NO: 943386 - RNA, 19 nt, Artificial Sequence
  Description of Artificial Sequence: Synthetic oligonucleotide
acucgaugggcauauaucu

SEQ ID NO: 943387 - RNA, 19 nt, Artificial Sequence
  Description of Artificial Sequence: Synthetic oligonucleotide
ucuagugcucauagaagcc

SEQ ID NO: 943388 - RNA, 19 nt, Artificial Sequence
  Description of Artificial Sequence: Synthetic oligonucleotide
guuggcuaaagucucauuc

SEQ ID NO: 943389 - RNA, 19 nt, Artificial Sequence
  Description of Artificial Sequence: Synthetic oligonucleotide
auaagaagccucccagcac

SEQ ID NO: 943390 - RNA, 19 nt, Artificial Sequence
  Description of Artificial Sequence: Synthetic oligonucleotide
aaucagucuaugacuauag

SEQ ID NO: 943391 - RNA, 19 nt, Artificial Sequence
  Description of Artificial Sequence: Synthetic oligonucleotide
gacgguaauucauuccucc

SEQ ID NO: 943392 - RNA, 19 nt, Artificial Sequence
  Description of Artificial Sequence: Synthetic oligonucleotide
uauaugggauucacaaugu

SEQ ID NO: 943393 - RNA, 19 nt, Artificial Sequence
  Description of Artificial Sequence: Synthetic oligonucleotide
acaacuagcaccacaucac

SEQ ID NO: 943394 - RNA, 19 nt, Artificial Sequence
  Description of Artificial Sequence: Synthetic oligonucleotide
aggcaagagagucugaaca

SEQ ID NO: 943395 - RNA, 19 nt, Artificial Sequence
  Description of Artificial Sequence: Synthetic oligonucleotide
uaauaacuccgacaccacc

SEQ ID NO: 943396 - RNA, 19 nt, Artificial Sequence
  Description of Artificial Sequence: Synthetic oligonucleotide
ugucucuuuaagaauucac

SEQ ID NO: 943397 - RNA, 19 nt, Artificial Sequence
  Description of Artificial Sequence: Synthetic oligonucleotide
agguauugugcaaaggugg

SEQ ID NO: 943398 - RNA, 19 nt, Artificial Sequence
  Description of Artificial Sequence: Synthetic oligonucleotide
uauaaccuccauguauugg

SEQ ID NO: 943399 - RNA, 19 nt, Artificial Sequence
  Description of Artificial Sequence: Synthetic oligonucleotide
guauaugcgaagucaauca

SEQ ID NO: 943400 - RNA, 19 nt, Artificial Sequence
  Description of Artificial Sequence: Synthetic oligonucleotide
uuggcuaaagucucauuca

SEQ ID NO: 943401 - RNA, 19 nt, Artificial Sequence
  Description of Artificial Sequence: Synthetic oligonucleotide
aacauugcucggaaguagg

SEQ ID NO: 943402 - RNA, 19 nt, Artificial Sequence
  Description of Artificial Sequence: Synthetic oligonucleotide
aauuaguuaugaaguagca

SEQ ID NO: 943403 - RNA, 19 nt, Artificial Sequence
  Description of Artificial Sequence: Synthetic oligonucleotide
agaaccacugaccuagcug

SEQ ID NO: 943404 - RNA, 19 nt, Artificial Sequence
  Description of Artificial Sequence: Synthetic oligonucleotide
cauuccuccauauaaccuc

SEQ ID NO: 943405 - RNA, 19 nt, Artificial Sequence
  Description of Artificial Sequence: Synthetic oligonucleotide
uauugagacaagagacacc

SEQ ID NO: 943406 - RNA, 19 nt, Artificial Sequence
  Description of Artificial Sequence: Synthetic oligonucleotide
aggguuguaucucucagca

SEQ ID NO: 943407 - RNA, 19 nt, Artificial Sequence
  Description of Artificial Sequence: Synthetic oligonucleotide
uccauguauuggcaucugg

SEQ ID NO: 943408 - RNA, 19 nt, Artificial Sequence
  Description of Artificial Sequence: Synthetic oligonucleotide
ucauuccuccauauaaccu

SEQ ID NO: 943409 - RNA, 19 nt, Artificial Sequence
  Description of Artificial Sequence: Synthetic oligonucleotide
auauacacucuucugcaga

SEQ ID NO: 943410 - RNA, 19 nt, Artificial Sequence
  Description of Artificial Sequence: Synthetic oligonucleotide
uguuuaccaaauacuauuu

SEQ ID NO: 943411 - RNA, 19 nt, Artificial Sequence
  Description of Artificial Sequence: Synthetic oligonucleotide
aaccuagguguuuccuucg

SEQ ID NO: 943412 - RNA, 19 nt, Artificial Sequence
  Description of Artificial Sequence: Synthetic oligonucleotide
caagagagucugaacauug

SEQ ID NO: 943413 - RNA, 19 nt, Artificial Sequence
  Description of Artificial Sequence: Synthetic oligonucleotide
uguaaacauugcucggaag

SEQ ID NO: 943414 - RNA, 19 nt, Artificial Sequence
  Description of Artificial Sequence: Synthetic oligonucleotide
gaaguagcaaaugaaaaua

SEQ ID NO: 943415 - RNA, 19 nt, Artificial Sequence
  Description of Artificial Sequence: Synthetic oligonucleotide
cuucuagugcucauagaag

SEQ ID NO: 943416 - RNA, 19 nt, Artificial Sequence
  Description of Artificial Sequence: Synthetic oligonucleotide
uuagcgcccacaacuagca

SEQ ID NO: 943417 - RNA, 19 nt, Artificial Sequence
  Description of Artificial Sequence: Synthetic oligonucleotide
ugcucauagaagccacccg

SEQ ID NO: 943418 - RNA, 19 nt, Artificial Sequence
  Description of Artificial Sequence: Synthetic oligonucleotide
aguucuaggguuguaucuc

SEQ ID NO: 943419 - RNA, 19 nt, Artificial Sequence
  Description of Artificial Sequence: Synthetic oligonucleotide
uucucaagcuguacaaagu

SEQ ID NO: 943420 - RNA, 19 nt, Artificial Sequence
  Description of Artificial Sequence: Synthetic oligonucleotide
gacaccaccuccuagccga

SEQ ID NO: 943421 - RNA, 19 nt, Artificial Sequence
  Description of Artificial Sequence: Synthetic oligonucleotide
acugguuaguucuaggguu

SEQ ID NO: 943422 - RNA, 19 nt, Artificial Sequence
  Description of Artificial Sequence: Synthetic oligonucleotide
uucggguccccauaggggc

SEQ ID NO: 943423 - RNA, 19 nt, Artificial Sequence
  Description of Artificial Sequence: Synthetic oligonucleotide
uccuguaaacauugcucgg

SEQ ID NO: 943424 - RNA, 19 nt, Artificial Sequence
  Description of Artificial Sequence: Synthetic oligonucleotide
cuuagcgcccacaacuagc

SEQ ID NO: 943425 - RNA, 19 nt, Artificial Sequence
  Description of Artificial Sequence: Synthetic oligonucleotide
uaacaguggccuuauggga

SEQ ID NO: 943426 - RNA, 19 nt, Artificial Sequence
  Description of Artificial Sequence: Synthetic oligonucleotide
uccaaauauaaagagcaua

SEQ ID NO: 943427 - RNA, 19 nt, Artificial Sequence
  Description of Artificial Sequence: Synthetic oligonucleotide
uaauugucucuuuaagaau

SEQ ID NO: 943428 - RNA, 19 nt, Artificial Sequence
  Description of Artificial Sequence: Synthetic oligonucleotide
uugccagacguuuuguugu

SEQ ID NO: 943429 - RNA, 19 nt, Artificial Sequence
  Description of Artificial Sequence: Synthetic oligonucleotide
auuccuccauauaaccucc

SEQ ID NO: 943430 - RNA, 19 nt, Artificial Sequence
  Description of Artificial Sequence: Synthetic oligonucleotide
uaguucuaggguuguaucu

SEQ ID NO: 943431 - RNA, 19 nt, Artificial Sequence
  Description of Artificial Sequence: Synthetic oligonucleotide
ugaggcaccggcaaagaau

SEQ ID NO: 943432 - RNA, 19 nt, Artificial Sequence
  Description of Artificial Sequence: Synthetic oligonucleotide
uuaauaacuccgacaccac

SEQ ID NO: 943433 - RNA, 19 nt, Artificial Sequence
  Description of Artificial Sequence: Synthetic oligonucleotide
ucgaugggcauauaucuuc

SEQ ID NO: 943434 - RNA, 19 nt, Artificial Sequence
  Description of Artificial Sequence: Synthetic oligonucleotide
uuucaaguauguugugcca

SEQ ID NO: 943435 - RNA, 19 nt, Artificial Sequence
  Description of Artificial Sequence: Synthetic oligonucleotide
ucguuagacuuguaguucu

SEQ ID NO: 943436 - RNA, 19 nt, Artificial Sequence
  Description of Artificial Sequence: Synthetic oligonucleotide
agacguuuuguuguagggg

SEQ ID NO: 943437 - RNA, 19 nt, Artificial Sequence
  Description of Artificial Sequence: Synthetic oligonucleotide
gaguggaaagguauugugc

SEQ ID NO: 943438 - RNA, 19 nt, Artificial Sequence
  Description of Artificial Sequence: Synthetic oligonucleotide
auaggggcuauggugugcc

SEQ ID NO: 943439 - RNA, 19 nt, Artificial Sequence
  Description of Artificial Sequence: Synthetic oligonucleotide
aaaaucagucuaugacuau

SEQ ID NO: 943440 - RNA, 19 nt, Artificial Sequence
  Description of Artificial Sequence: Synthetic oligonucleotide
aauugacccaagccaacaa

SEQ ID NO: 943441 - RNA, 19 nt, Artificial Sequence
  Description of Artificial Sequence: Synthetic oligonucleotide
aucguuagacuuguaguuc

SEQ ID NO: 943442 - RNA, 19 nt, Artificial Sequence
  Description of Artificial Sequence: Synthetic oligonucleotide
ucgugggucaccacaacac

SEQ ID NO: 943443 - RNA, 19 nt, Artificial Sequence
  Description of Artificial Sequence: Synthetic oligonucleotide
accccaaauugacccaagc

SEQ ID NO: 943444 - RNA, 19 nt, Artificial Sequence
  Description of Artificial Sequence: Synthetic oligonucleotide
agugcaacuuaagagacau

SEQ ID NO: 943445 - RNA, 19 nt, Artificial Sequence
  Description of Artificial Sequence: Synthetic oligonucleotide
agcauauaagaagccuccc

SEQ ID NO: 943446 - RNA, 19 nt, Artificial Sequence
  Description of Artificial Sequence: Synthetic oligonucleotide
uccuuuggaucauaccucu

SEQ ID NO: 943447 - RNA, 19 nt, Artificial Sequence
  Description of Artificial Sequence: Synthetic oligonucleotide
aaguagcaaaugaaaauaa

SEQ ID NO: 943448 - RNA, 19 nt, Artificial Sequence
  Description of Artificial Sequence: Synthetic oligonucleotide
accggcaaagaauaaaauu

SEQ ID NO: 943449 - RNA, 19 nt, Artificial Sequence
  Description of Artificial Sequence: Synthetic oligonucleotide
aaaucagucuaugacuaua

SEQ ID NO: 943450 - RNA, 19 nt, Artificial Sequence
  Description of Artificial Sequence: Synthetic oligonucleotide
uauaucuucuuagcgccca

SEQ ID NO: 943451 - RNA, 19 nt, Artificial Sequence
  Description of Artificial Sequence: Synthetic oligonucleotide
uaugacuauaguggggaga

SEQ ID NO: 943452 - RNA, 19 nt, Artificial Sequence
  Description of Artificial Sequence: Synthetic oligonucleotide
agcuguacaaaguuucaaa

SEQ ID NO: 943453 - RNA, 19 nt, Artificial Sequence
  Description of Artificial Sequence: Synthetic oligonucleotide
ucuuagcgcccacaacuag

SEQ ID NO: 943454 - RNA, 19 nt, Artificial Sequence
  Description of Artificial Sequence: Synthetic oligonucleotide
auauaaccuccauguauug

SEQ ID NO: 943455 - RNA, 19 nt, Artificial Sequence
  Description of Artificial Sequence: Synthetic oligonucleotide
auacauguaaacaauuguu

SEQ ID NO: 943456 - RNA, 19 nt, Artificial Sequence
  Description of Artificial Sequence: Synthetic oligonucleotide
ugccaauucuccuguaaac

SEQ ID NO: 943457 - RNA, 19 nt, Artificial Sequence
  Description of Artificial Sequence: Synthetic oligonucleotide
cuucggguccccauagggg

SEQ ID NO: 943458 - RNA, 19 nt, Artificial Sequence
  Description of Artificial Sequence: Synthetic oligonucleotide
uugguuuguuggcuaaagu

SEQ ID NO: 943459 - RNA, 19 nt, Artificial Sequence
  Description of Artificial Sequence: Synthetic oligonucleotide
auaugggauucacaaugug

SEQ ID NO: 943460 - RNA, 19 nt, Artificial Sequence
  Description of Artificial Sequence: Synthetic oligonucleotide
acaguuaucugggagguau

SEQ ID NO: 943461 - RNA, 19 nt, Artificial Sequence
  Description of Artificial Sequence: Synthetic oligonucleotide
gacauaguaacaguggccu

SEQ ID NO: 943462 - RNA, 19 nt, Artificial Sequence
  Description of Artificial Sequence: Synthetic oligonucleotide
auauaucuucuuagcgccc

SEQ ID NO: 943463 - RNA, 19 nt, Artificial Sequence
  Description of Artificial Sequence: Synthetic oligonucleotide
ccauguauuggcaucuggg

SEQ ID NO: 943464 - RNA, 19 nt, Artificial Sequence
  Description of Artificial Sequence: Synthetic oligonucleotide
uaauucauuccuccauaua

SEQ ID NO: 943465 - RNA, 19 nt, Artificial Sequence
  Description of Artificial Sequence: Synthetic oligonucleotide
auagcccucucaucaaugu

SEQ ID NO: 943466 - RNA, 19 nt, Artificial Sequence
  Description of Artificial Sequence: Synthetic oligonucleotide
ugacucgaugggcauauau

SEQ ID NO: 943467 - RNA, 19 nt, Artificial Sequence
  Description of Artificial Sequence: Synthetic oligonucleotide
accacugguuaguucuagg

SEQ ID NO: 943468 - RNA, 19 nt, Artificial Sequence
  Description of Artificial Sequence: Synthetic oligonucleotide
accucucaacaauauugag

SEQ ID NO: 943469 - RNA, 19 nt, Artificial Sequence
  Description of Artificial Sequence: Synthetic oligonucleotide
gggaugaaaguuucacagg

SEQ ID NO: 943470 - RNA, 19 nt, Artificial Sequence
  Description of Artificial Sequence: Synthetic oligonucleotide
auaucuucuuagcgcccac

SEQ ID NO: 943471 - RNA, 19 nt, Artificial Sequence
  Description of Artificial Sequence: Synthetic oligonucleotide
cugacaagaugacucgaug

SEQ ID NO: 943472 - RNA, 19 nt, Artificial Sequence
  Description of Artificial Sequence: Synthetic oligonucleotide
auugacccaagccaacaaa

SEQ ID NO: 943473 - RNA, 19 nt, Artificial Sequence
  Description of Artificial Sequence: Synthetic oligonucleotide
caaccuagguguuuccuuc

SEQ ID NO: 943474 - RNA, 19 nt, Artificial Sequence
  Description of Artificial Sequence: Synthetic oligonucleotide
aacaguggccuuaugggau

SEQ ID NO: 943475 - RNA, 19 nt, Artificial Sequence
  Description of Artificial Sequence: Synthetic oligonucleotide
gucauuuuaauaacuccga

SEQ ID NO: 943476 - RNA, 19 nt, Artificial Sequence
  Description of Artificial Sequence: Synthetic oligonucleotide
guugaucacuuccaagguc

SEQ ID NO: 943477 - RNA, 19 nt, Artificial Sequence
  Description of Artificial Sequence: Synthetic oligonucleotide
guuuuguuguaggggagag

SEQ ID NO: 943478 - RNA, 19 nt, Artificial Sequence
  Description of Artificial Sequence: Synthetic oligonucleotide
cuucuuagcgcccacaacu

SEQ ID NO: 943479 - RNA, 19 nt, Artificial Sequence
  Description of Artificial Sequence: Synthetic oligonucleotide
uucaaguauguugugccau

SEQ ID NO: 943480 - RNA, 19 nt, Artificial Sequence
  Description of Artificial Sequence: Synthetic oligonucleotide
aaguauguugugccaucaa

SEQ ID NO: 943481 - RNA, 19 nt, Artificial Sequence
  Description of Artificial Sequence: Synthetic oligonucleotide
guucuguagguugaggcac

SEQ ID NO: 943482 - RNA, 19 nt, Artificial Sequence
  Description of Artificial Sequence: Synthetic oligonucleotide
gucuaugacuauagugggg

SEQ ID NO: 943483 - RNA, 19 nt, Artificial Sequence
  Description of Artificial Sequence: Synthetic oligonucleotide
ggaagaaaggucaagguua

SEQ ID NO: 943484 - RNA, 19 nt, Artificial Sequence
  Description of Artificial Sequence: Synthetic oligonucleotide
ccugguacacugcacaacc

SEQ ID NO: 943485 - RNA, 19 nt, Artificial Sequence
  Description of Artificial Sequence: Synthetic oligonucleotide
accuagguguuuccuucgg

SEQ ID NO: 943486 - RNA, 19 nt, Artificial Sequence
  Description of Artificial Sequence: Synthetic oligonucleotide
acccgaguccacuuguucu

SEQ ID NO: 943487 - RNA, 19 nt, Artificial Sequence
  Description of Artificial Sequence: Synthetic oligonucleotide
uucuuagcgcccacaacua

SEQ ID NO: 943488 - RNA, 19 nt, Artificial Sequence
  Description of Artificial Sequence: Synthetic oligonucleotide
guuuguuggcuaaagucuc

SEQ ID NO: 943489 - RNA, 19 nt, Artificial Sequence
  Description of Artificial Sequence: Synthetic oligonucleotide
cuaugacuauaguggggag

SEQ ID NO: 943490 - RNA, 19 nt, Artificial Sequence
  Description of Artificial Sequence: Synthetic oligonucleotide
cugaggauuguagcgcucc

SEQ ID NO: 943491 - RNA, 19 nt, Artificial Sequence
  Description of Artificial Sequence: Synthetic oligonucleotide
ucuguagguugaggcaccg

SEQ ID NO: 943492 - RNA, 19 nt, Artificial Sequence
  Description of Artificial Sequence: Synthetic oligonucleotide
aguagcaaaugaaaauaau

SEQ ID NO: 943493 - RNA, 19 nt, Artificial Sequence
  Description of Artificial Sequence: Synthetic oligonucleotide
aucagucuaugacuauagu

SEQ ID NO: 943494 - RNA, 19 nt, Artificial Sequence
  Description of Artificial Sequence: Synthetic oligonucleotide
uccauauaaccuccaugua

SEQ ID NO: 943495 - RNA, 19 nt, Artificial Sequence
  Description of Artificial Sequence: Synthetic oligonucleotide
agccgacgguaauucauuc

SEQ ID NO: 943496 - RNA, 19 nt, Artificial Sequence
  Description of Artificial Sequence: Synthetic oligonucleotide
acgguaauucauuccucca

SEQ ID NO: 943497 - RNA, 19 nt, Artificial Sequence
  Description of Artificial Sequence: Synthetic oligonucleotide
guaguucuguagguugagg

SEQ ID NO: 943498 - RNA, 19 nt, Artificial Sequence
  Description of Artificial Sequence: Synthetic oligonucleotide
gauuguagcgcuccacugu

SEQ ID NO: 943499 - RNA, 19 nt, Artificial Sequence
  Description of Artificial Sequence: Synthetic oligonucleotide
uggugugccaucuguuuuc

SEQ ID NO: 943500 - RNA, 19 nt, Artificial Sequence
  Description of Artificial Sequence: Synthetic oligonucleotide
aggcacuacaauuuucauu

SEQ ID NO: 943501 - RNA, 19 nt, Artificial Sequence
  Description of Artificial Sequence: Synthetic oligonucleotide
auaugcgaagucaaucagu

SEQ ID NO: 943502 - RNA, 19 nt, Artificial Sequence
  Description of Artificial Sequence: Synthetic oligonucleotide
cauauaaccuccauguauu

SEQ ID NO: 943503 - RNA, 19 nt, Artificial Sequence
  Description of Artificial Sequence: Synthetic oligonucleotide
ugaggauuguagcgcucca

SEQ ID NO: 943504 - RNA, 19 nt, Artificial Sequence
  Description of Artificial Sequence: Synthetic oligonucleotide
ccacugguuaguucuaggg

SEQ ID NO: 943505 - RNA, 19 nt, Artificial Sequence
  Description of Artificial Sequence: Synthetic oligonucleotide
augcgaagucaaucaguag

SEQ ID NO: 943506 - RNA, 19 nt, Artificial Sequence
  Description of Artificial Sequence: Synthetic oligonucleotide
acauugcucggaaguaggg

SEQ ID NO: 943507 - RNA, 19 nt, Artificial Sequence
  Description of Artificial Sequence: Synthetic oligonucleotide
cccaaauugacccaagcca

SEQ ID NO: 943508 - RNA, 19 nt, Artificial Sequence
  Description of Artificial Sequence: Synthetic oligonucleotide
aaaccccaaauugacccaa

SEQ ID NO: 943509 - RNA, 19 nt, Artificial Sequence
  Description of Artificial Sequence: Synthetic oligonucleotide
ugucucggaucacuacuuc

SEQ ID NO: 943510 - RNA, 19 nt, Artificial Sequence
  Description of Artificial Sequence: Synthetic oligonucleotide
gguauugugcaaagguggc

SEQ ID NO: 943511 - RNA, 19 nt, Artificial Sequence
  Description of Artificial Sequence: Synthetic oligonucleotide
agcuuucagauguggugcu

SEQ ID NO: 943512 - RNA, 19 nt, Artificial Sequence
  Description of Artificial Sequence: Synthetic oligonucleotide
uugaggcaccggcaaagaa

SEQ ID NO: 943513 - RNA, 19 nt, Artificial Sequence
  Description of Artificial Sequence: Synthetic oligonucleotide
aggucaagguuauuccuuu

SEQ ID NO: 943514 - RNA, 19 nt, Artificial Sequence
  Description of Artificial Sequence: Synthetic oligonucleotide
uggucgugggucaccacaa

SEQ ID NO: 943515 - RNA, 19 nt, Artificial Sequence
  Description of Artificial Sequence: Synthetic oligonucleotide
ugaccuagcuggaguuaca

SEQ ID NO: 943516 - RNA, 19 nt, Artificial Sequence
  Description of Artificial Sequence: Synthetic oligonucleotide
caggcaagagagucugaac

SEQ ID NO: 943517 - RNA, 19 nt, Artificial Sequence
  Description of Artificial Sequence: Synthetic oligonucleotide
ugcucggaaguagggacug

SEQ ID NO: 943518 - RNA, 19 nt, Artificial Sequence
  Description of Artificial Sequence: Synthetic oligonucleotide
aagugcaacuuaagagaca

SEQ ID NO: 943519 - RNA, 19 nt, Artificial Sequence
  Description of Artificial Sequence: Synthetic oligonucleotide
uugugagcuuucagaugug

SEQ ID NO: 943520 - RNA, 19 nt, Artificial Sequence
  Description of Artificial Sequence: Synthetic oligonucleotide
uccuccauauaaccuccau

SEQ ID NO: 943521 - RNA, 19 nt, Artificial Sequence
  Description of Artificial Sequence: Synthetic oligonucleotide
gaccuuaggcacuacaauu

SEQ ID NO: 943522 - RNA, 19 nt, Artificial Sequence
  Description of Artificial Sequence: Synthetic oligonucleotide
ucggaucacuacuucuguc

SEQ ID NO: 943523 - RNA, 19 nt, Artificial Sequence
  Description of Artificial Sequence: Synthetic oligonucleotide
aacuagcaccacaucacau

SEQ ID NO: 943524 - RNA, 19 nt, Artificial Sequence
  Description of Artificial Sequence: Synthetic oligonucleotide
cauguauuggcaucugggu

SEQ ID NO: 943525 - RNA, 19 nt, Artificial Sequence
  Description of Artificial Sequence: Synthetic oligonucleotide
ugagaaccacugaccuagc

SEQ ID NO: 943526 - RNA, 19 nt, Artificial Sequence
  Description of Artificial Sequence: Synthetic oligonucleotide
ccagacguuuuguuguagg

SEQ ID NO: 943527 - RNA, 19 nt, Artificial Sequence
  Description of Artificial Sequence: Synthetic oligonucleotide
caccauauaugggauucac

SEQ ID NO: 943528 - RNA, 19 nt, Artificial Sequence
  Description of Artificial Sequence: Synthetic oligonucleotide
cugaccuagcuggaguuac

SEQ ID NO: 943529 - RNA, 19 nt, Artificial Sequence
  Description of Artificial Sequence: Synthetic oligonucleotide
ggauuguagcgcuccacug

SEQ ID NO: 943530 - RNA, 19 nt, Artificial Sequence
  Description of Artificial Sequence: Synthetic oligonucleotide
uaggcacuacaauuuucau

SEQ ID NO: 943531 - RNA, 19 nt, Artificial Sequence
  Description of Artificial Sequence: Synthetic oligonucleotide
cuucaaugguuuucaagua

SEQ ID NO: 943532 - RNA, 19 nt, Artificial Sequence
  Description of Artificial Sequence: Synthetic oligonucleotide
aaguugccagacguuuugu

SEQ ID NO: 943533 - RNA, 19 nt, Artificial Sequence
  Description of Artificial Sequence: Synthetic oligonucleotide
gaggaccuuaggcacuaca

SEQ ID NO: 943534 - RNA, 19 nt, Artificial Sequence
  Description of Artificial Sequence: Synthetic oligonucleotide
uagccgacgguaauucauu

SEQ ID NO: 943535 - RNA, 19 nt, Artificial Sequence
  Description of Artificial Sequence: Synthetic oligonucleotide
gaccuagcuggaguuacac

SEQ ID NO: 943536 - RNA, 19 nt, Artificial Sequence
  Description of Artificial Sequence: Synthetic oligonucleotide
ccucucaacaauauugaga

SEQ ID NO: 943537 - RNA, 19 nt, Artificial Sequence
  Description of Artificial Sequence: Synthetic oligonucleotide
ugacuauaguggggagagg

SEQ ID NO: 943538 - RNA, 19 nt, Artificial Sequence
  Description of Artificial Sequence: Synthetic oligonucleotide
uuuugguuuguuggcuaaa

SEQ ID NO: 943539 - RNA, 19 nt, Artificial Sequence
  Description of Artificial Sequence: Synthetic oligonucleotide
uccuagccgacgguaauuc

SEQ ID NO: 943540 - RNA, 19 nt, Artificial Sequence
  Description of Artificial Sequence: Synthetic oligonucleotide
agucaaucaguaguuccau

SEQ ID NO: 943541 - RNA, 19 nt, Artificial Sequence
  Description of Artificial Sequence: Synthetic oligonucleotide
ccccaaauugacccaagcc

SEQ ID NO: 943542 - RNA, 19 nt, Artificial Sequence
  Description of Artificial Sequence: Synthetic oligonucleotide
aguugccagacguuuuguu

SEQ ID NO: 943543 - RNA, 19 nt, Artificial Sequence
  Description of Artificial Sequence: Synthetic oligonucleotide
uccuagucuucuagugcuc

SEQ ID NO: 943544 - RNA, 19 nt, Artificial Sequence
  Description of Artificial Sequence: Synthetic oligonucleotide
gacuuguaguucuguaggu

SEQ ID NO: 943545 - RNA, 19 nt, Artificial Sequence
  Description of Artificial Sequence: Synthetic oligonucleotide
cauaguaacaguggccuua

SEQ ID NO: 943546 - RNA, 19 nt, Artificial Sequence
  Description of Artificial Sequence: Synthetic oligonucleotide
gaccacugguuaguucuag

SEQ ID NO: 943547 - RNA, 19 nt, Artificial Sequence
  Description of Artificial Sequence: Synthetic oligonucleotide
cuagguguuuccuucgggu

SEQ ID NO: 943548 - RNA, 19 nt, Artificial Sequence
  Description of Artificial Sequence: Synthetic oligonucleotide
guuccauagcccucucauc

SEQ ID NO: 943549 - RNA, 19 nt, Artificial Sequence
  Description of Artificial Sequence: Synthetic oligonucleotide
ggaucauaccucucaacaa

SEQ ID NO: 943550 - RNA, 19 nt, Artificial Sequence
  Description of Artificial Sequence: Synthetic oligonucleotide
aggaccuuaggcacuacaa

SEQ ID NO: 943551 - RNA, 19 nt, Artificial Sequence
  Description of Artificial Sequence: Synthetic oligonucleotide
gucgugggucaccacaaca

SEQ ID NO: 943552 - RNA, 19 nt, Artificial Sequence
  Description of Artificial Sequence: Synthetic oligonucleotide
uuccuccauauaaccucca

SEQ ID NO: 943553 - RNA, 19 nt, Artificial Sequence
  Description of Artificial Sequence: Synthetic oligonucleotide
aaccccaaauugacccaag

SEQ ID NO: 943554 - RNA, 19 nt, Artificial Sequence
  Description of Artificial Sequence: Synthetic oligonucleotide
ccuacgggaugucauggcc

SEQ ID NO: 943555 - RNA, 19 nt, Artificial Sequence
  Description of Artificial Sequence: Synthetic oligonucleotide
gcucucgaugcuuucucag

SEQ ID NO: 943556 - RNA, 19 nt, Artificial Sequence
  Description of Artificial Sequence: Synthetic oligonucleotide
ccaaauugacccaagccaa

SEQ ID NO: 943557 - RNA, 19 nt, Artificial Sequence
  Description of Artificial Sequence: Synthetic oligonucleotide
caucguuagacuuguaguu

SEQ ID NO: 943558 - RNA, 19 nt, Artificial Sequence
  Description of Artificial Sequence: Synthetic oligonucleotide
cauaggggcuauggugugc

SEQ ID NO: 943559 - RNA, 19 nt, Artificial Sequence
  Description of Artificial Sequence: Synthetic oligonucleotide
uguguugaguggagauguu

SEQ ID NO: 943560 - RNA, 19 nt, Artificial Sequence
  Description of Artificial Sequence: Synthetic oligonucleotide
ccuccauauaaccuccaug

SEQ ID NO: 943561 - RNA, 19 nt, Artificial Sequence
  Description of Artificial Sequence: Synthetic oligonucleotide
guuaguucuaggguuguau

SEQ ID NO: 943562 - RNA, 19 nt, Artificial Sequence
  Description of Artificial Sequence: Synthetic oligonucleotide
aucauaccucucaacaaua

SEQ ID NO: 943563 - RNA, 19 nt, Artificial Sequence
  Description of Artificial Sequence: Synthetic oligonucleotide
acauaguaacaguggccuu

SEQ ID NO: 943564 - RNA, 19 nt, Artificial Sequence
  Description of Artificial Sequence: Synthetic oligonucleotide
ugguuaguucuaggguugu

SEQ ID NO: 943565 - RNA, 19 nt, Artificial Sequence
  Description of Artificial Sequence: Synthetic oligonucleotide
caaguauguugugccauca

SEQ ID NO: 943566 - RNA, 19 nt, Artificial Sequence
  Description of Artificial Sequence: Synthetic oligonucleotide
uugagacaagagacaccau

SEQ ID NO: 943567 - RNA, 19 nt, Artificial Sequence
  Description of Artificial Sequence: Synthetic oligonucleotide
cauugcucggaaguaggga

SEQ ID NO: 943568 - RNA, 19 nt, Artificial Sequence
  Description of Artificial Sequence: Synthetic oligonucleotide
gaugacucgaugggcauau

SEQ ID NO: 943569 - RNA, 19 nt, Artificial Sequence
  Description of Artificial Sequence: Synthetic oligonucleotide
cauagaucauguccuggua

SEQ ID NO: 943570 - RNA, 19 nt, Artificial Sequence
  Description of Artificial Sequence: Synthetic oligonucleotide
cuguguugaguggagaugu

SEQ ID NO: 943571 - RNA, 19 nt, Artificial Sequence
  Description of Artificial Sequence: Synthetic oligonucleotide
aagccacccgaguccacuu

SEQ ID NO: 943572 - RNA, 19 nt, Artificial Sequence
  Description of Artificial Sequence: Synthetic oligonucleotide
ccuagguguuuccuucggg

SEQ ID NO: 943573 - RNA, 19 nt, Artificial Sequence
  Description of Artificial Sequence: Synthetic oligonucleotide
ccuccuacugccaugagcu

SEQ ID NO: 943574 - RNA, 19 nt, Artificial Sequence
  Description of Artificial Sequence: Synthetic oligonucleotide
gccgacgguaauucauucc

SEQ ID NO: 943575 - RNA, 19 nt, Artificial Sequence
  Description of Artificial Sequence: Synthetic oligonucleotide
ggugcaaaugauguuuaaa

SEQ ID NO: 943576 - RNA, 19 nt, Artificial Sequence
  Description of Artificial Sequence: Synthetic oligonucleotide
cacagcaacuccuagucuu

SEQ ID NO: 943577 - RNA, 19 nt, Artificial Sequence
  Description of Artificial Sequence: Synthetic oligonucleotide
ugccagacguuuuguugua

SEQ ID NO: 943578 - RNA, 19 nt, Artificial Sequence
  Description of Artificial Sequence: Synthetic oligonucleotide
gaguuccaucguuagacuu

SEQ ID NO: 943579 - RNA, 19 nt, Artificial Sequence
  Description of Artificial Sequence: Synthetic oligonucleotide
guaucucucagcacugcua

SEQ ID NO: 943580 - RNA, 19 nt, Artificial Sequence
  Description of Artificial Sequence: Synthetic oligonucleotide
cuagccgacgguaauucau

SEQ ID NO: 943581 - RNA, 19 nt, Artificial Sequence
  Description of Artificial Sequence: Synthetic oligonucleotide
cacugguuaguucuagggu

SEQ ID NO: 943582 - RNA, 19 nt, Artificial Sequence
  Description of Artificial Sequence: Synthetic oligonucleotide
cacuacaauuuucauuuau

SEQ ID NO: 943583 - RNA, 19 nt, Artificial Sequence
  Description of Artificial Sequence: Synthetic oligonucleotide
cacccgaguccacuuguuc

SEQ ID NO: 943584 - RNA, 19 nt, Artificial Sequence
  Description of Artificial Sequence: Synthetic oligonucleotide
ggugaguuccaucguuaga

SEQ ID NO: 943585 - RNA, 19 nt, Artificial Sequence
  Description of Artificial Sequence: Synthetic oligonucleotide
accgccagaccaacuccac

SEQ ID NO: 943586 - RNA, 19 nt, Artificial Sequence
  Description of Artificial Sequence: Synthetic oligonucleotide
agccacccgaguccacuug

SEQ ID NO: 943587 - RNA, 19 nt, Artificial Sequence
  Description of Artificial Sequence: Synthetic oligonucleotide
aaggucugccgagggugcu

SEQ ID NO: 943588 - RNA, 19 nt, Artificial Sequence
  Description of Artificial Sequence: Synthetic oligonucleotide
cacugcuaagcucuguggu

SEQ ID NO: 943589 - RNA, 19 nt, Artificial Sequence
  Description of Artificial Sequence: Synthetic oligonucleotide
agagcauaugcaagacuuu

SEQ ID NO: 943590 - RNA, 19 nt, Artificial Sequence
  Description of Artificial Sequence: Synthetic oligonucleotide
gggagguauaugcgaaguc

SEQ ID NO: 943591 - RNA, 19 nt, Artificial Sequence
  Description of Artificial Sequence: Synthetic oligonucleotide
acgggaugucauggccacc

SEQ ID NO: 943592 - RNA, 19 nt, Artificial Sequence
  Description of Artificial Sequence: Synthetic oligonucleotide
gguugaucacuuccaaggu

SEQ ID NO: 943593 - RNA, 19 nt, Artificial Sequence
  Description of Artificial Sequence: Synthetic oligonucleotide
agguugaggcaccggcaaa

SEQ ID NO: 943594 - RNA, 19 nt, Artificial Sequence
  Description of Artificial Sequence: Synthetic oligonucleotide
ggccuuaugggaugaaagu

SEQ ID NO: 943595 - RNA, 19 nt, Artificial Sequence
  Description of Artificial Sequence: Synthetic oligonucleotide
augucucggaucacuacuu

SEQ ID NO: 943596 - RNA, 19 nt, Artificial Sequence
  Description of Artificial Sequence: Synthetic oligonucleotide
cacgggagaccacugguua

SEQ ID NO: 943597 - RNA, 19 nt, Artificial Sequence
  Description of Artificial Sequence: Synthetic oligonucleotide
ccaucguuagacuuguagu

SEQ ID NO: 943598 - RNA, 19 nt, Artificial Sequence
  Description of Artificial Sequence: Synthetic oligonucleotide
ccauauaaccuccauguau

SEQ ID NO: 943599 - RNA, 19 nt, Artificial Sequence
  Description of Artificial Sequence: Synthetic oligonucleotide
gagaggaccuuaggcacua

SEQ ID NO: 943600 - RNA, 19 nt, Artificial Sequence
  Description of Artificial Sequence: Synthetic oligonucleotide
gcaccggcaaagaauaaaa

SEQ ID NO: 943601 - RNA, 19 nt, Artificial Sequence
  Description of Artificial Sequence: Synthetic oligonucleotide
uaggggcuauggugugcca

SEQ ID NO: 943602 - RNA, 19 nt, Artificial Sequence
  Description of Artificial Sequence: Synthetic oligonucleotide
cauaccucucaacaauauu

SEQ ID NO: 943603 - RNA, 19 nt, Artificial Sequence
  Description of Artificial Sequence: Synthetic oligonucleotide
caacuccuagucuucuagu

SEQ ID NO: 943604 - RNA, 19 nt, Artificial Sequence
  Description of Artificial Sequence: Synthetic oligonucleotide
gcggcuuucugccaauucu

SEQ ID NO: 943605 - RNA, 19 nt, Artificial Sequence
  Description of Artificial Sequence: Synthetic oligonucleotide
gcacaaccuagguguuucc

SEQ ID NO: 943606 - RNA, 19 nt, Artificial Sequence
  Description of Artificial Sequence: Synthetic oligonucleotide
ccgacaccaccuccuagcc

SEQ ID NO: 943607 - RNA, 19 nt, Artificial Sequence
  Description of Artificial Sequence: Synthetic oligonucleotide
cucucccuccuacagcaua

SEQ ID NO: 943608 - RNA, 19 nt, Artificial Sequence
  Description of Artificial Sequence: Synthetic oligonucleotide
ggaccuuaggcacuacaau

SEQ ID NO: 943609 - RNA, 19 nt, Artificial Sequence
  Description of Artificial Sequence: Synthetic oligonucleotide
ggcaccggcaaagaauaaa

SEQ ID NO: 943610 - RNA, 19 nt, Artificial Sequence
  Description of Artificial Sequence: Synthetic oligonucleotide
ggcuaaagucucauucaaa

SEQ ID NO: 943611 - RNA, 19 nt, Artificial Sequence
  Description of Artificial Sequence: Synthetic oligonucleotide
ccgacgguaauucauuccu

SEQ ID NO: 943612 - RNA, 19 nt, Artificial Sequence
  Description of Artificial Sequence: Synthetic oligonucleotide
ggcggcuuucugccaauuc

SEQ ID NO: 943613 - RNA, 19 nt, Artificial Sequence
  Description of Artificial Sequence: Synthetic oligonucleotide
caguuaucugggagguaua

SEQ ID NO: 943614 - RNA, 19 nt, Artificial Sequence
  Description of Artificial Sequence: Synthetic oligonucleotide
cacuccuacgggaugucau

SEQ ID NO: 943615 - RNA, 19 nt, Artificial Sequence
  Description of Artificial Sequence: Synthetic oligonucleotide
gcgcccacaacuagcacca

SEQ ID NO: 943616 - RNA, 19 nt, Artificial Sequence
  Description of Artificial Sequence: Synthetic oligonucleotide
uuccaucguuagacuugua

SEQ ID NO: 943617 - RNA, 19 nt, Artificial Sequence
  Description of Artificial Sequence: Synthetic oligonucleotide
cucgaugggcauauaucuu

SEQ ID NO: 943618 - RNA, 19 nt, Artificial Sequence
  Description of Artificial Sequence: Synthetic oligonucleotide
gggauucacaaugugucau

SEQ ID NO: 943619 - RNA, 19 nt, Artificial Sequence
  Description of Artificial Sequence: Synthetic oligonucleotide
gccagacguuuuguuguag

SEQ ID NO: 943620 - RNA, 19 nt, Artificial Sequence
  Description of Artificial Sequence: Synthetic oligonucleotide
gugucaucucucccuccua

SEQ ID NO: 943621 - RNA, 19 nt, Artificial Sequence
  Description of Artificial Sequence: Synthetic oligonucleotide
cacaaccuagguguuuccu

SEQ ID NO: 943622 - RNA, 19 nt, Artificial Sequence
  Description of Artificial Sequence: Synthetic oligonucleotide
gucuggcggcuuucugcca

SEQ ID NO: 943623 - RNA, 19 nt, Artificial Sequence
  Description of Artificial Sequence: Synthetic oligonucleotide
gcuaagcucugugguguca

SEQ ID NO: 943624 - RNA, 19 nt, Artificial Sequence
  Description of Artificial Sequence: Synthetic oligonucleotide
cggaucacuacuucugucu

SEQ ID NO: 943625 - RNA, 19 nt, Artificial Sequence
  Description of Artificial Sequence: Synthetic oligonucleotide
cgacaccaccuccuagccg

SEQ ID NO: 943626 - RNA, 19 nt, Artificial Sequence
  Description of Artificial Sequence: Synthetic oligonucleotide
gccuuaugggaugaaaguu

SEQ ID NO: 943627 - RNA, 19 nt, Artificial Sequence
  Description of Artificial Sequence: Synthetic oligonucleotide
cgacgguaauucauuccuc

SEQ ID NO: 943628 - RNA, 19 nt, Artificial Sequence
  Description of Artificial Sequence: Synthetic oligonucleotide
gcaggugaguuccaucguu

SEQ ID NO: 943629 - RNA, 19 nt, Artificial Sequence
  Description of Artificial Sequence: Synthetic oligonucleotide
ccuagccgacgguaauuca

SEQ ID NO: 943630 - RNA, 19 nt, Artificial Sequence
  Description of Artificial Sequence: Synthetic oligonucleotide
cguuuuguuguaggggaga

SEQ ID NO: 943631 - RNA, 19 nt, Artificial Sequence
  Description of Artificial Sequence: Synthetic oligonucleotide
aggucugccgagggugcuu

SEQ ID NO: 943632 - RNA, 19 nt, Artificial Sequence
  Description of Artificial Sequence: Synthetic oligonucleotide
ccaucacaacuccaugaua

SEQ ID NO: 943633 - RNA, 19 nt, Artificial Sequence
  Description of Artificial Sequence: Synthetic oligonucleotide
ggagaggaccuuaggcacu

SEQ ID NO: 943634 - RNA, 19 nt, Artificial Sequence
  Description of Artificial Sequence: Synthetic oligonucleotide
gguuaguucuaggguugua

SEQ ID NO: 943635 - RNA, 19 nt, Artificial Sequence
  Description of Artificial Sequence: Synthetic oligonucleotide
gugcaacuuaagagacaua

SEQ ID NO: 943636 - RNA, 19 nt, Artificial Sequence
  Description of Artificial Sequence: Synthetic oligonucleotide
ggucaagguuauuccuuuu

SEQ ID NO: 943637 - RNA, 19 nt, Artificial Sequence
  Description of Artificial Sequence: Synthetic oligonucleotide
gcaggcugacaagaugacu

SEQ ID NO: 943638 - RNA, 19 nt, Artificial Sequence
  Description of Artificial Sequence: Synthetic oligonucleotide
gccacccgaguccacuugu

SEQ ID NO: 943639 - RNA, 19 nt, Artificial Sequence
  Description of Artificial Sequence: Synthetic oligonucleotide
augacucgaugggcauaua

SEQ ID NO: 943640 - RNA, 19 nt, Artificial Sequence
  Description of Artificial Sequence: Synthetic oligonucleotide
cgguaauucauuccuccau

SEQ ID NO: 943641 - RNA, 19 nt, Artificial Sequence
  Description of Artificial Sequence: Synthetic oligonucleotide
cgaugcuuucucagaaggu

SEQ ID NO: 943642 - RNA, 19 nt, Artificial Sequence
  Description of Artificial Sequence: Synthetic oligonucleotide
cuccuagccgacgguaauu

SEQ ID NO: 943643 - RNA, 19 nt, Artificial Sequence
  Description of Artificial Sequence: Synthetic oligonucleotide
gaccaccgccagaccaacu

SEQ ID NO: 943644 - RNA, 19 nt, Artificial Sequence
  Description of Artificial Sequence: Synthetic oligonucleotide
cuggcggcuuucugccaau

SEQ ID NO: 943645 - RNA, 19 nt, Artificial Sequence
  Description of Artificial Sequence: Synthetic oligonucleotide
ccacuccuacgggauguca

SEQ ID NO: 943646 - RNA, 19 nt, Artificial Sequence
  Description of Artificial Sequence: Synthetic oligonucleotide
ccuccuagccgacgguaau

SEQ ID NO: 943647 - RNA, 19 nt, Artificial Sequence
  Description of Artificial Sequence: Synthetic oligonucleotide
ccgccagaccaacuccacu

SEQ ID NO: 943648 - RNA, 19 nt, Artificial Sequence
  Description of Artificial Sequence: Synthetic oligonucleotide
ggccaccacgggagaccac

SEQ ID NO: 943649 - RNA, 19 nt, Artificial Sequence
  Description of Artificial Sequence: Synthetic oligonucleotide
ccacccgaguccacuuguu

SEQ ID NO: 943650 - RNA, 19 nt, Artificial Sequence
  Description of Artificial Sequence: Synthetic oligonucleotide
aauaccaauaaauggguac

SEQ ID NO: 943651 - RNA, 19 nt, Artificial Sequence
  Description of Artificial Sequence: Synthetic oligonucleotide
aagguaaagauucucgccc

SEQ ID NO: 943652 - RNA, 19 nt, Artificial Sequence
  Description of Artificial Sequence: Synthetic oligonucleotide
aacuauaguggauuucucc

SEQ ID NO: 943653 - RNA, 19 nt, Artificial Sequence
  Description of Artificial Sequence: Synthetic oligonucleotide
aacuauaaagauaauguac

SEQ ID NO: 943654 - RNA, 19 nt, Artificial Sequence
  Description of Artificial Sequence: Synthetic oligonucleotide
aagauaauguacuuugcuc

SEQ ID NO: 943655 - RNA, 19 nt, Artificial Sequence
  Description of Artificial Sequence: Synthetic oligonucleotide
aaaauuaauggaguguugg

SEQ ID NO: 943656 - RNA, 19 nt, Artificial Sequence
  Description of Artificial Sequence: Synthetic oligonucleotide
ucuaccaaaaucaaguaga

SEQ ID NO: 943657 - RNA, 19 nt, Artificial Sequence
  Description of Artificial Sequence: Synthetic oligonucleotide
acuauaguggauuucuccc

SEQ ID NO: 943658 - RNA, 19 nt, Artificial Sequence
  Description of Artificial Sequence: Synthetic oligonucleotide
ugcaccaugagccaaagcc

SEQ ID NO: 943659 - RNA, 19 nt, Artificial Sequence
  Description of Artificial Sequence: Synthetic oligonucleotide
auuagcaccauucuguaag

SEQ ID NO: 943660 - RNA, 19 nt, Artificial Sequence
  Description of Artificial Sequence: Synthetic oligonucleotide
uacauaauguacauuuuag

SEQ ID NO: 943661 - RNA, 19 nt, Artificial Sequence
  Description of Artificial Sequence: Synthetic oligonucleotide
caaaagcuaaccuuuagcc

SEQ ID NO: 943662 - RNA, 19 nt, Artificial Sequence
  Description of Artificial Sequence: Synthetic oligonucleotide
aaauuaauacccaaaauaa

SEQ ID NO: 943663 - RNA, 19 nt, Artificial Sequence
  Description of Artificial Sequence: Synthetic oligonucleotide
ucuuacauaauguacauuu

SEQ ID NO: 943664 - RNA, 19 nt, Artificial Sequence
  Description of Artificial Sequence: Synthetic oligonucleotide
aaagauaauguacuuugcu

SEQ ID NO: 943665 - RNA, 19 nt, Artificial Sequence
  Description of Artificial Sequence: Synthetic oligonucleotide
uuuggugguacacauuagg

SEQ ID NO: 943666 - RNA, 19 nt, Artificial Sequence
  Description of Artificial Sequence: Synthetic oligonucleotide
uuaggaacaaacauaccug

SEQ ID NO: 943667 - RNA, 19 nt, Artificial Sequence
  Description of Artificial Sequence: Synthetic oligonucleotide
aauaguaagaagaccaaug

SEQ ID NO: 943668 - RNA, 19 nt, Artificial Sequence
  Description of Artificial Sequence: Synthetic oligonucleotide
ucauauaagcuauuggcug

SEQ ID NO: 943669 - RNA, 19 nt, Artificial Sequence
  Description of Artificial Sequence: Synthetic oligonucleotide
agcacaacccauuaaacag

SEQ ID NO: 943670 - RNA, 19 nt, Artificial Sequence
  Description of Artificial Sequence: Synthetic oligonucleotide
uuuauaacaucauucccca

SEQ ID NO: 943671 - RNA, 19 nt, Artificial Sequence
  Description of Artificial Sequence: Synthetic oligonucleotide
uucaccaaauuucauagac

SEQ ID NO: 943672 - RNA, 19 nt, Artificial Sequence
  Description of Artificial Sequence: Synthetic oligonucleotide
uaggaauucaccaaauuuc

SEQ ID NO: 943673 - RNA, 19 nt, Artificial Sequence
  Description of Artificial Sequence: Synthetic oligonucleotide
uccgaauuagcccaguuca

SEQ ID NO: 943674 - RNA, 19 nt, Artificial Sequence
  Description of Artificial Sequence: Synthetic oligonucleotide
aaagcuaaccuuuagccuu

SEQ ID NO: 943675 - RNA, 19 nt, Artificial Sequence
  Description of Artificial Sequence: Synthetic oligonucleotide
uuagaauaacuauaaagau

SEQ ID NO: 943676 - RNA, 19 nt, Artificial Sequence
  Description of Artificial Sequence: Synthetic oligonucleotide
aagcuauuggcugacacgg

SEQ ID NO: 943677 - RNA, 19 nt, Artificial Sequence
  Description of Artificial Sequence: Synthetic oligonucleotide
  modified_base (2)..(2): a, c, u, g, unknown or other
unuucaucaguuugauugg

SEQ ID NO: 943678 - RNA, 19 nt, Artificial Sequence
  Description of Artificial Sequence: Synthetic oligonucleotide
uagccuucguguuaaaugg

SEQ ID NO: 943679 - RNA, 19 nt, Artificial Sequence
  Description of Artificial Sequence: Synthetic oligonucleotide
cuaagguuaaagaacguac

SEQ ID NO: 943680 - RNA, 19 nt, Artificial Sequence
  Description of Artificial Sequence: Synthetic oligonucleotide
auucguaaaucauuuucac

SEQ ID NO: 943681 - RNA, 19 nt, Artificial Sequence
  Description of Artificial Sequence: Synthetic oligonucleotide
aauacccaaaauaaggcug

SEQ ID NO: 943682 - RNA, 19 nt, Artificial Sequence
  Description of Artificial Sequence: Synthetic oligonucleotide
uacacauuaggaauucacc

SEQ ID NO: 943683 - RNA, 19 nt, Artificial Sequence
  Description of Artificial Sequence: Synthetic oligonucleotide
uuagccuucguguuaaaug

SEQ ID NO: 943684 - RNA, 19 nt, Artificial Sequence
  Description of Artificial Sequence: Synthetic oligonucleotide
auaccaauaaauggguacc

SEQ ID NO: 943685 - RNA, 19 nt, Artificial Sequence
  Description of Artificial Sequence: Synthetic oligonucleotide
aucgagaacacagcgaagc

SEQ ID NO: 943686 - RNA, 19 nt, Artificial Sequence
  Description of Artificial Sequence: Synthetic oligonucleotide
aagcuuuaaaagcucaggu

SEQ ID NO: 943687 - RNA, 19 nt, Artificial Sequence
  Description of Artificial Sequence: Synthetic oligonucleotide
uguaagaggaacucgcaug

SEQ ID NO: 943688 - RNA, 19 nt, Artificial Sequence
  Description of Artificial Sequence: Synthetic oligonucleotide
acgauuuauaacaucauuc

SEQ ID NO: 943689 - RNA, 19 nt, Artificial Sequence
  Description of Artificial Sequence: Synthetic oligonucleotide
aaccccaagacuccgauga

SEQ ID NO: 943690 - RNA, 19 nt, Artificial Sequence
  Description of Artificial Sequence: Synthetic oligonucleotide
aaucaaguagaaucuagaa

SEQ ID NO: 943691 - RNA, 19 nt, Artificial Sequence
  Description of Artificial Sequence: Synthetic oligonucleotide
aaguccuuccgauucccgc

SEQ ID NO: 943692 - RNA, 19 nt, Artificial Sequence
  Description of Artificial Sequence: Synthetic oligonucleotide
auaagcuauuggcugacac

SEQ ID NO: 943693 - RNA, 19 nt, Artificial Sequence
  Description of Artificial Sequence: Synthetic oligonucleotide
uagaauaacuauaaagaua

SEQ ID NO: 943694 - RNA, 19 nt, Artificial Sequence
  Description of Artificial Sequence: Synthetic oligonucleotide
ucgcaugucaccaaagagc

SEQ ID NO: 943695 - RNA, 19 nt, Artificial Sequence
  Description of Artificial Sequence: Synthetic oligonucleotide
uaagcuauuggcugacacg

SEQ ID NO: 943696 - RNA, 19 nt, Artificial Sequence
  Description of Artificial Sequence: Synthetic oligonucleotide
ucuugcuaaacguaacaag

SEQ ID NO: 943697 - RNA, 19 nt, Artificial Sequence
  Description of Artificial Sequence: Synthetic oligonucleotide
uucuguaagaggaacucgc

SEQ ID NO: 943698 - RNA, 19 nt, Artificial Sequence
  Description of Artificial Sequence: Synthetic oligonucleotide
auuuucagcauacaaagua

SEQ ID NO: 943699 - RNA, 19 nt, Artificial Sequence
  Description of Artificial Sequence: Synthetic oligonucleotide
acauacuuugcucugauau

SEQ ID NO: 943700 - RNA, 19 nt, Artificial Sequence
  Description of Artificial Sequence: Synthetic oligonucleotide
acuauaaagauaauguacu

SEQ ID NO: 943701 - RNA, 19 nt, Artificial Sequence
  Description of Artificial Sequence: Synthetic oligonucleotide
uaaccuuuagccuucgugu

SEQ ID NO: 943702 - RNA, 19 nt, Artificial Sequence
  Description of Artificial Sequence: Synthetic oligonucleotide
auaaaguccuuccgauucc

SEQ ID NO: 943703 - RNA, 19 nt, Artificial Sequence
  Description of Artificial Sequence: Synthetic oligonucleotide
aguuucaucaccuggcugu

SEQ ID NO: 943704 - RNA, 19 nt, Artificial Sequence
  Description of Artificial Sequence: Synthetic oligonucleotide
caugaauuagauacaaauc

SEQ ID NO: 943705 - RNA, 19 nt, Artificial Sequence
  Description of Artificial Sequence: Synthetic oligonucleotide
aagcacaacccauuaaaca

SEQ ID NO: 943706 - RNA, 19 nt, Artificial Sequence
  Description of Artificial Sequence: Synthetic oligonucleotide
ugaucgagaacacagcgaa

SEQ ID NO: 943707 - RNA, 19 nt, Artificial Sequence
  Description of Artificial Sequence: Synthetic oligonucleotide
aagcgauugaguuucucug

SEQ ID NO: 943708 - RNA, 19 nt, Artificial Sequence
  Description of Artificial Sequence: Synthetic oligonucleotide
aagugucuaagguuaaaga

SEQ ID NO: 943709 - RNA, 19 nt, Artificial Sequence
  Description of Artificial Sequence: Synthetic oligonucleotide
caagguaaugcccagguug

SEQ ID NO: 943710 - RNA, 19 nt, Artificial Sequence
  Description of Artificial Sequence: Synthetic oligonucleotide
uccaccgcuauacucaaag

SEQ ID NO: 943711 - RNA, 19 nt, Artificial Sequence
  Description of Artificial Sequence: Synthetic oligonucleotide
uuuucagcauacaaaguaa

SEQ ID NO: 943712 - RNA, 19 nt, Artificial Sequence
  Description of Artificial Sequence: Synthetic oligonucleotide
ugugguuucuuuauuccca

SEQ ID NO: 943713 - RNA, 19 nt, Artificial Sequence
  Description of Artificial Sequence: Synthetic oligonucleotide
uaaagauaauguacuuugc

SEQ ID NO: 943714 - RNA, 19 nt, Artificial Sequence
  Description of Artificial Sequence: Synthetic oligonucleotide
acaccgaguacuuauccac

SEQ ID NO: 943715 - RNA, 19 nt, Artificial Sequence
  Description of Artificial Sequence: Synthetic oligonucleotide
  modified_base (7)..(7): a, c, u, g, unknown or other
ugcccunuucaucaguuug

SEQ ID NO: 943716 - RNA, 19 nt, Artificial Sequence
  Description of Artificial Sequence: Synthetic oligonucleotide
aaaugaaccccaagacucc

SEQ ID NO: 943717 - RNA, 19 nt, Artificial Sequence
  Description of Artificial Sequence: Synthetic oligonucleotide
aauuagcccaguucacauc

SEQ ID NO: 943718 - RNA, 19 nt, Artificial Sequence
  Description of Artificial Sequence: Synthetic oligonucleotide
aagaccaaugcaaagaaau

SEQ ID NO: 943719 - RNA, 19 nt, Artificial Sequence
  Description of Artificial Sequence: Synthetic oligonucleotide
cuaacaaccuucauagcac

SEQ ID NO: 943720 - RNA, 19 nt, Artificial Sequence
  Description of Artificial Sequence: Synthetic oligonucleotide
acuccgaugaaucccagag

SEQ ID NO: 943721 - RNA, 19 nt, Artificial Sequence
  Description of Artificial Sequence: Synthetic oligonucleotide
acacauuaggaauucacca

SEQ ID NO: 943722 - RNA, 19 nt, Artificial Sequence
  Description of Artificial Sequence: Synthetic oligonucleotide
agugucuaagguuaaagaa

SEQ ID NO: 943723 - RNA, 19 nt, Artificial Sequence
  Description of Artificial Sequence: Synthetic oligonucleotide
aagaagaccaaugcaaaga

SEQ ID NO: 943724 - RNA, 19 nt, Artificial Sequence
  Description of Artificial Sequence: Synthetic oligonucleotide
cuaaacguaacaaggucac

SEQ ID NO: 943725 - RNA, 19 nt, Artificial Sequence
  Description of Artificial Sequence: Synthetic oligonucleotide
accggaaugaucgagaaca

SEQ ID NO: 943726 - RNA, 19 nt, Artificial Sequence
  Description of Artificial Sequence: Synthetic oligonucleotide
gcucauauaagcuauuggc

SEQ ID NO: 943727 - RNA, 19 nt, Artificial Sequence
  Description of Artificial Sequence: Synthetic oligonucleotide
gaugauaacaccgaguacu

SEQ ID NO: 943728 - RNA, 19 nt, Artificial Sequence
  Description of Artificial Sequence: Synthetic oligonucleotide
auuuuggugguacacauua

SEQ ID NO: 943729 - RNA, 19 nt, Artificial Sequence
  Description of Artificial Sequence: Synthetic oligonucleotide
aaaauguccugguaaguuu

SEQ ID NO: 943730 - RNA, 19 nt, Artificial Sequence
  Description of Artificial Sequence: Synthetic oligonucleotide
auuaauggaguguugguua

SEQ ID NO: 943731 - RNA, 19 nt, Artificial Sequence
  Description of Artificial Sequence: Synthetic oligonucleotide
ugaagcccuauaaagcuga

SEQ ID NO: 943732 - RNA, 19 nt, Artificial Sequence
  Description of Artificial Sequence: Synthetic oligonucleotide
auugacuuauuauuguaaa

SEQ ID NO: 943733 - RNA, 19 nt, Artificial Sequence
  Description of Artificial Sequence: Synthetic oligonucleotide
uggaguguugguuauacau

SEQ ID NO: 943734 - RNA, 19 nt, Artificial Sequence
  Description of Artificial Sequence: Synthetic oligonucleotide
aaaucaaguagaaucuaga

SEQ ID NO: 943735 - RNA, 19 nt, Artificial Sequence
  Description of Artificial Sequence: Synthetic oligonucleotide
aaacauaccugcccugugu

SEQ ID NO: 943736 - RNA, 19 nt, Artificial Sequence
  Description of Artificial Sequence: Synthetic oligonucleotide
gguagcaagaaauaguaca

SEQ ID NO: 943737 - RNA, 19 nt, Artificial Sequence
  Description of Artificial Sequence: Synthetic oligonucleotide
augucuaccaaaaucaagu

SEQ ID NO: 943738 - RNA, 19 nt, Artificial Sequence
  Description of Artificial Sequence: Synthetic oligonucleotide
auacucaaaggguccuugc

SEQ ID NO: 943739 - RNA, 19 nt, Artificial Sequence
  Description of Artificial Sequence: Synthetic oligonucleotide
uuggugguacacauuagga

SEQ ID NO: 943740 - RNA, 19 nt, Artificial Sequence
  Description of Artificial Sequence: Synthetic oligonucleotide
acaaccuucauagcacagc

SEQ ID NO: 943741 - RNA, 19 nt, Artificial Sequence
  Description of Artificial Sequence: Synthetic oligonucleotide
uucguaugaagcccuauaa

SEQ ID NO: 943742 - RNA, 19 nt, Artificial Sequence
  Description of Artificial Sequence: Synthetic oligonucleotide
cuaaccuuuagccuucgug

SEQ ID NO: 943743 - RNA, 19 nt, Artificial Sequence
  Description of Artificial Sequence: Synthetic oligonucleotide
aauuaauggaguguugguu

SEQ ID NO: 943744 - RNA, 19 nt, Artificial Sequence
  Description of Artificial Sequence: Synthetic oligonucleotide
uaacaccgaguacuuaucc

SEQ ID NO: 943745 - RNA, 19 nt, Artificial Sequence
  Description of Artificial Sequence: Synthetic oligonucleotide
uccuggauuaagaaguuua

SEQ ID NO: 943746 - RNA, 19 nt, Artificial Sequence
  Description of Artificial Sequence: Synthetic oligonucleotide
ugcuaaacguaacaagguc

SEQ ID NO: 943747 - RNA, 19 nt, Artificial Sequence
  Description of Artificial Sequence: Synthetic oligonucleotide
gauaauguacuuugcucca

SEQ ID NO: 943748 - RNA, 19 nt, Artificial Sequence
  Description of Artificial Sequence: Synthetic oligonucleotide
gucuaccaaaaucaaguag

SEQ ID NO: 943749 - RNA, 19 nt, Artificial Sequence
  Description of Artificial Sequence: Synthetic oligonucleotide
ucucguccgaauuagccca

SEQ ID NO: 943750 - RNA, 19 nt, Artificial Sequence
  Description of Artificial Sequence: Synthetic oligonucleotide
guugguuauacauucguaa

SEQ ID NO: 943751 - RNA, 19 nt, Artificial Sequence
  Description of Artificial Sequence: Synthetic oligonucleotide
uugguuauacauucguaaa

SEQ ID NO: 943752 - RNA, 19 nt, Artificial Sequence
  Description of Artificial Sequence: Synthetic oligonucleotide
aaucuagaaaggugugaga

SEQ ID NO: 943753 - RNA, 19 nt, Artificial Sequence
  Description of Artificial Sequence: Synthetic oligonucleotide
uuauugacuuauuauugua

SEQ ID NO: 943754 - RNA, 19 nt, Artificial Sequence
  Description of Artificial Sequence: Synthetic oligonucleotide
aaugaaccccaagacuccg

SEQ ID NO: 943755 - RNA, 19 nt, Artificial Sequence
  Description of Artificial Sequence: Synthetic oligonucleotide
uucucguccgaauuagccc

SEQ ID NO: 943756 - RNA, 19 nt, Artificial Sequence
  Description of Artificial Sequence: Synthetic oligonucleotide
aacguaacaaggucacuau

SEQ ID NO: 943757 - RNA, 19 nt, Artificial Sequence
  Description of Artificial Sequence: Synthetic oligonucleotide
aacaccgaguacuuaucca

SEQ ID NO: 943758 - RNA, 19 nt, Artificial Sequence
  Description of Artificial Sequence: Synthetic oligonucleotide
agcuuuuggagcuaacccu

SEQ ID NO: 943759 - RNA, 19 nt, Artificial Sequence
  Description of Artificial Sequence: Synthetic oligonucleotide
aaacguaacaaggucacua

SEQ ID NO: 943760 - RNA, 19 nt, Artificial Sequence
  Description of Artificial Sequence: Synthetic oligonucleotide
ugguuauacauucguaaau

SEQ ID NO: 943761 - RNA, 19 nt, Artificial Sequence
  Description of Artificial Sequence: Synthetic oligonucleotide
uaacaaggucacuauguca

SEQ ID NO: 943762 - RNA, 19 nt, Artificial Sequence
  Description of Artificial Sequence: Synthetic oligonucleotide
cagcgaagcacacugaaac

SEQ ID NO: 943763 - RNA, 19 nt, Artificial Sequence
  Description of Artificial Sequence: Synthetic oligonucleotide
auuggcaccucgcuuuagg

SEQ ID NO: 943764 - RNA, 19 nt, Artificial Sequence
  Description of Artificial Sequence: Synthetic oligonucleotide
uacucaaaggguccuugcc

SEQ ID NO: 943765 - RNA, 19 nt, Artificial Sequence
  Description of Artificial Sequence: Synthetic oligonucleotide
cagaaggcgaugauaacac

SEQ ID NO: 943766 - RNA, 19 nt, Artificial Sequence
  Description of Artificial Sequence: Synthetic oligonucleotide
ggagcuaacccuuuucucc

SEQ ID NO: 943767 - RNA, 19 nt, Artificial Sequence
  Description of Artificial Sequence: Synthetic oligonucleotide
ucgcuuuaggaacaaacau

SEQ ID NO: 943768 - RNA, 19 nt, Artificial Sequence
  Description of Artificial Sequence: Synthetic oligonucleotide
agacuccccucuuuaaagg

SEQ ID NO: 943769 - RNA, 19 nt, Artificial Sequence
  Description of Artificial Sequence: Synthetic oligonucleotide
uuuuggugguacacauuag

SEQ ID NO: 943770 - RNA, 19 nt, Artificial Sequence
  Description of Artificial Sequence: Synthetic oligonucleotide
cagcuuuuggagcuaaccc

SEQ ID NO: 943771 - RNA, 19 nt, Artificial Sequence
  Description of Artificial Sequence: Synthetic oligonucleotide
caucaguuugauuggcacc

SEQ ID NO: 943772 - RNA, 19 nt, Artificial Sequence
  Description of Artificial Sequence: Synthetic oligonucleotide
uaagaaguuuagagucaag

SEQ ID NO: 943773 - RNA, 19 nt, Artificial Sequence
  Description of Artificial Sequence: Synthetic oligonucleotide
auauaagcuauuggcugac

SEQ ID NO: 943774 - RNA, 19 nt, Artificial Sequence
  Description of Artificial Sequence: Synthetic oligonucleotide
aguuugauuggcaccucgc

SEQ ID NO: 943775 - RNA, 19 nt, Artificial Sequence
  Description of Artificial Sequence: Synthetic oligonucleotide
accaaauuucauagacucc

SEQ ID NO: 943776 - RNA, 19 nt, Artificial Sequence
  Description of Artificial Sequence: Synthetic oligonucleotide
cgauuuauaacaucauucc

SEQ ID NO: 943777 - RNA, 19 nt, Artificial Sequence
  Description of Artificial Sequence: Synthetic oligonucleotide
acugaaacaaagauguaaa

SEQ ID NO: 943778 - RNA, 19 nt, Artificial Sequence
  Description of Artificial Sequence: Synthetic oligonucleotide
uugauuggcaccucgcuuu

SEQ ID NO: 943779 - RNA, 19 nt, Artificial Sequence
  Description of Artificial Sequence: Synthetic oligonucleotide
uaugaccggaaugaucgag

SEQ ID NO: 943780 - RNA, 19 nt, Artificial Sequence
  Description of Artificial Sequence: Synthetic oligonucleotide
uuucguaugaagcccuaua

SEQ ID NO: 943781 - RNA, 19 nt, Artificial Sequence
  Description of Artificial Sequence: Synthetic oligonucleotide
ccccaauucacacauaagc

SEQ ID NO: 943782 - RNA, 19 nt, Artificial Sequence
  Description of Artificial Sequence: Synthetic oligonucleotide
caagugucuaagguuaaag

SEQ ID NO: 943783 - RNA, 19 nt, Artificial Sequence
  Description of Artificial Sequence: Synthetic oligonucleotide
uuugauuggcaccucgcuu

SEQ ID NO: 943784 - RNA, 19 nt, Artificial Sequence
  Description of Artificial Sequence: Synthetic oligonucleotide
uccuaagacaguggcgugg

SEQ ID NO: 943785 - RNA, 19 nt, Artificial Sequence
  Description of Artificial Sequence: Synthetic oligonucleotide
gagaacacagcgaagcaca

SEQ ID NO: 943786 - RNA, 19 nt, Artificial Sequence
  Description of Artificial Sequence: Synthetic oligonucleotide
uguugguuauacauucgua

SEQ ID NO: 943787 - RNA, 19 nt, Artificial Sequence
  Description of Artificial Sequence: Synthetic oligonucleotide
guaacaaggucacuauguc

SEQ ID NO: 943788 - RNA, 19 nt, Artificial Sequence
  Description of Artificial Sequence: Synthetic oligonucleotide
uacacaagguaaugcccag

SEQ ID NO: 943789 - RNA, 19 nt, Artificial Sequence
  Description of Artificial Sequence: Synthetic oligonucleotide
uauuggcugacacggugga

SEQ ID NO: 943790 - RNA, 19 nt, Artificial Sequence
  Description of Artificial Sequence: Synthetic oligonucleotide
ucuggauuauuggaugcca

SEQ ID NO: 943791 - RNA, 19 nt, Artificial Sequence
  Description of Artificial Sequence: Synthetic oligonucleotide
uauaguggauuucucccuu

SEQ ID NO: 943792 - RNA, 19 nt, Artificial Sequence
  Description of Artificial Sequence: Synthetic oligonucleotide
auucaugaauuagauacaa

SEQ ID NO: 943793 - RNA, 19 nt, Artificial Sequence
  Description of Artificial Sequence: Synthetic oligonucleotide
uuuggcucagccuccguuc

SEQ ID NO: 943794 - RNA, 19 nt, Artificial Sequence
  Description of Artificial Sequence: Synthetic oligonucleotide
cucgcuuuaggaacaaaca

SEQ ID NO: 943795 - RNA, 19 nt, Artificial Sequence
  Description of Artificial Sequence: Synthetic oligonucleotide
gugguguggacagacaccc

SEQ ID NO: 943796 - RNA, 19 nt, Artificial Sequence
  Description of Artificial Sequence: Synthetic oligonucleotide
agauucucgcccaucauca

SEQ ID NO: 943797 - RNA, 19 nt, Artificial Sequence
  Description of Artificial Sequence: Synthetic oligonucleotide
uccccaauucacacauaag

SEQ ID NO: 943798 - RNA, 19 nt, Artificial Sequence
  Description of Artificial Sequence: Synthetic oligonucleotide
aagacuccgaugaauccca

SEQ ID NO: 943799 - RNA, 19 nt, Artificial Sequence
  Description of Artificial Sequence: Synthetic oligonucleotide
ugcucugauauaugccucu

SEQ ID NO: 943800 - RNA, 19 nt, Artificial Sequence
  Description of Artificial Sequence: Synthetic oligonucleotide
auagacuccccucuuuaaa

SEQ ID NO: 943801 - RNA, 19 nt, Artificial Sequence
  Description of Artificial Sequence: Synthetic oligonucleotide
aaccuuuagccuucguguu

SEQ ID NO: 943802 - RNA, 19 nt, Artificial Sequence
  Description of Artificial Sequence: Synthetic oligonucleotide
gaagcgauugaguuucucu

SEQ ID NO: 943803 - RNA, 19 nt, Artificial Sequence
  Description of Artificial Sequence: Synthetic oligonucleotide
agguaaagauucucgccca

SEQ ID NO: 943804 - RNA, 19 nt, Artificial Sequence
  Description of Artificial Sequence: Synthetic oligonucleotide
auaacaccgaguacuuauc

SEQ ID NO: 943805 - RNA, 19 nt, Artificial Sequence
  Description of Artificial Sequence: Synthetic oligonucleotide
gguuauacauucguaaauc

SEQ ID NO: 943806 - RNA, 19 nt, Artificial Sequence
  Description of Artificial Sequence: Synthetic oligonucleotide
ccaaaagcuaaccuuuagc

SEQ ID NO: 943807 - RNA, 19 nt, Artificial Sequence
  Description of Artificial Sequence: Synthetic oligonucleotide
aagcuaaccuuuagccuuc

SEQ ID NO: 943808 - RNA, 19 nt, Artificial Sequence
  Description of Artificial Sequence: Synthetic oligonucleotide
ucuagaaaggugugagauu

SEQ ID NO: 943809 - RNA, 19 nt, Artificial Sequence
  Description of Artificial Sequence: Synthetic oligonucleotide
ucguguuaaauggugcuaa

SEQ ID NO: 943810 - RNA, 19 nt, Artificial Sequence
  Description of Artificial Sequence: Synthetic oligonucleotide
cagguagcaagaaauagua

SEQ ID NO: 943811 - RNA, 19 nt, Artificial Sequence
  Description of Artificial Sequence: Synthetic oligonucleotide
accgcuauacucaaagggu

SEQ ID NO: 943812 - RNA, 19 nt, Artificial Sequence
  Description of Artificial Sequence: Synthetic oligonucleotide
agaggaacuauaguggauu

SEQ ID NO: 943813 - RNA, 19 nt, Artificial Sequence
  Description of Artificial Sequence: Synthetic oligonucleotide
auacauucguaaaucauuu

SEQ ID NO: 943814 - RNA, 19 nt, Artificial Sequence
  Description of Artificial Sequence: Synthetic oligonucleotide
aaaguccuuccgauucccg

SEQ ID NO: 943815 - RNA, 19 nt, Artificial Sequence
  Description of Artificial Sequence: Synthetic oligonucleotide
ugguucucguccgaauuag

SEQ ID NO: 943816 - RNA, 19 nt, Artificial Sequence
  Description of Artificial Sequence: Synthetic oligonucleotide
cccuauaaagcugaagucc

SEQ ID NO: 943817 - RNA, 19 nt, Artificial Sequence
  Description of Artificial Sequence: Synthetic oligonucleotide
auucaccaaauuucauaga

SEQ ID NO: 943818 - RNA, 19 nt, Artificial Sequence
  Description of Artificial Sequence: Synthetic oligonucleotide
gaccaaucuuuaugaccgg

SEQ ID NO: 943819 - RNA, 19 nt, Artificial Sequence
  Description of Artificial Sequence: Synthetic oligonucleotide
aguguugguuauacauucg

SEQ ID NO: 943820 - RNA, 19 nt, Artificial Sequence
  Description of Artificial Sequence: Synthetic oligonucleotide
ugguaaguuucaucaccug

SEQ ID NO: 943821 - RNA, 19 nt, Artificial Sequence
  Description of Artificial Sequence: Synthetic oligonucleotide
ugaaccccaagacuccgau

SEQ ID NO: 943822 - RNA, 19 nt, Artificial Sequence
  Description of Artificial Sequence: Synthetic oligonucleotide
guaagaggaacucgcaugu

SEQ ID NO: 943823 - RNA, 19 nt, Artificial Sequence
  Description of Artificial Sequence: Synthetic oligonucleotide
cacauuaggaauucaccaa

SEQ ID NO: 943824 - RNA, 19 nt, Artificial Sequence
  Description of Artificial Sequence: Synthetic oligonucleotide
aggaacuauaguggauuuc

SEQ ID NO: 943825 - RNA, 19 nt, Artificial Sequence
  Description of Artificial Sequence: Synthetic oligonucleotide
gucauuuccaaaagcuaac

SEQ ID NO: 943826 - RNA, 19 nt, Artificial Sequence
  Description of Artificial Sequence: Synthetic oligonucleotide
uuuuaacugugguguggac

SEQ ID NO: 943827 - RNA, 19 nt, Artificial Sequence
  Description of Artificial Sequence: Synthetic oligonucleotide
ugaccggaaugaucgagaa

SEQ ID NO: 943828 - RNA, 19 nt, Artificial Sequence
  Description of Artificial Sequence: Synthetic oligonucleotide
agguagcaagaaauaguac

SEQ ID NO: 943829 - RNA, 19 nt, Artificial Sequence
  Description of Artificial Sequence: Synthetic oligonucleotide
ugaaucccagagcacucaa

SEQ ID NO: 943830 - RNA, 19 nt, Artificial Sequence
  Description of Artificial Sequence: Synthetic oligonucleotide
uucauagacuccccucuuu

SEQ ID NO: 943831 - RNA, 19 nt, Artificial Sequence
  Description of Artificial Sequence: Synthetic oligonucleotide
uggaugccauuugagaaaa

SEQ ID NO: 943832 - RNA, 19 nt, Artificial Sequence
  Description of Artificial Sequence: Synthetic oligonucleotide
uuucauagacuccccucuu

SEQ ID NO: 943833 - RNA, 19 nt, Artificial Sequence
  Description of Artificial Sequence: Synthetic oligonucleotide
aggaacucgcaugucacca

SEQ ID NO: 943834 - RNA, 19 nt, Artificial Sequence
  Description of Artificial Sequence: Synthetic oligonucleotide
cucccuuucccaacuauga

SEQ ID NO: 943835 - RNA, 19 nt, Artificial Sequence
  Description of Artificial Sequence: Synthetic oligonucleotide
cuuuuaacuguggugugga

SEQ ID NO: 943836 - RNA, 19 nt, Artificial Sequence
  Description of Artificial Sequence: Synthetic oligonucleotide
gcuaaacguaacaagguca

SEQ ID NO: 943837 - RNA, 19 nt, Artificial Sequence
  Description of Artificial Sequence: Synthetic oligonucleotide
ucccgcauuucuucauuca

SEQ ID NO: 943838 - RNA, 19 nt, Artificial Sequence
  Description of Artificial Sequence: Synthetic oligonucleotide
aggcgaugauaacaccgag

SEQ ID NO: 943839 - RNA, 19 nt, Artificial Sequence
  Description of Artificial Sequence: Synthetic oligonucleotide
aacucgcaugucaccaaag

SEQ ID NO: 943840 - RNA, 19 nt, Artificial Sequence
  Description of Artificial Sequence: Synthetic oligonucleotide
uacccaaaauaaggcuggg

SEQ ID NO: 943841 - RNA, 19 nt, Artificial Sequence
  Description of Artificial Sequence: Synthetic oligonucleotide
uuaugaccggaaugaucga

SEQ ID NO: 943842 - RNA, 19 nt, Artificial Sequence
  Description of Artificial Sequence: Synthetic oligonucleotide
guccgaauuagcccaguuc

SEQ ID NO: 943843 - RNA, 19 nt, Artificial Sequence
  Description of Artificial Sequence: Synthetic oligonucleotide
caaacauaccugcccugug

SEQ ID NO: 943844 - RNA, 19 nt, Artificial Sequence
  Description of Artificial Sequence: Synthetic oligonucleotide
gcgaugauaacaccgagua

SEQ ID NO: 943845 - RNA, 19 nt, Artificial Sequence
  Description of Artificial Sequence: Synthetic oligonucleotide
ccucgcuuuaggaacaaac

SEQ ID NO: 943846 - RNA, 19 nt, Artificial Sequence
  Description of Artificial Sequence: Synthetic oligonucleotide
aguggcguggugaaguggu

SEQ ID NO: 943847 - RNA, 19 nt, Artificial Sequence
  Description of Artificial Sequence: Synthetic oligonucleotide
accgaguacuuauccacaa

SEQ ID NO: 943848 - RNA, 19 nt, Artificial Sequence
  Description of Artificial Sequence: Synthetic oligonucleotide
ccuucguguuaaauggugc

SEQ ID NO: 943849 - RNA, 19 nt, Artificial Sequence
  Description of Artificial Sequence: Synthetic oligonucleotide
gcacaacccauuaaacagg

SEQ ID NO: 943850 - RNA, 19 nt, Artificial Sequence
  Description of Artificial Sequence: Synthetic oligonucleotide
aggcucauauaagcuauug

SEQ ID NO: 943851 - RNA, 19 nt, Artificial Sequence
  Description of Artificial Sequence: Synthetic oligonucleotide
ccaacuaugagacauuugu

SEQ ID NO: 943852 - RNA, 19 nt, Artificial Sequence
  Description of Artificial Sequence: Synthetic oligonucleotide
uucguguuaaauggugcua

SEQ ID NO: 943853 - RNA, 19 nt, Artificial Sequence
  Description of Artificial Sequence: Synthetic oligonucleotide
guguuaaauggugcuaaca

SEQ ID NO: 943854 - RNA, 19 nt, Artificial Sequence
  Description of Artificial Sequence: Synthetic oligonucleotide
ugguacacauuaggaauuc

SEQ ID NO: 943855 - RNA, 19 nt, Artificial Sequence
  Description of Artificial Sequence: Synthetic oligonucleotide
cucagaaggcgaugauaac

SEQ ID NO: 943856 - RNA, 19 nt, Artificial Sequence
  Description of Artificial Sequence: Synthetic oligonucleotide
gaucgagaacacagcgaag

SEQ ID NO: 943857 - RNA, 19 nt, Artificial Sequence
  Description of Artificial Sequence: Synthetic oligonucleotide
uauaagcuauuggcugaca

SEQ ID NO: 943858 - RNA, 19 nt, Artificial Sequence
  Description of Artificial Sequence: Synthetic oligonucleotide
agacacccacuaaaagcac

SEQ ID NO: 943859 - RNA, 19 nt, Artificial Sequence
  Description of Artificial Sequence: Synthetic oligonucleotide
acaguggcguggugaagug

SEQ ID NO: 943860 - RNA, 19 nt, Artificial Sequence
  Description of Artificial Sequence: Synthetic oligonucleotide
gaaccccaagacuccgaug

SEQ ID NO: 943861 - RNA, 19 nt, Artificial Sequence
  Description of Artificial Sequence: Synthetic oligonucleotide
augaagcccuauaaagcug

SEQ ID NO: 943862 - RNA, 19 nt, Artificial Sequence
  Description of Artificial Sequence: Synthetic oligonucleotide
guagcaagaaauaguacau

SEQ ID NO: 943863 - RNA, 19 nt, Artificial Sequence
  Description of Artificial Sequence: Synthetic oligonucleotide
ggaacuauaguggauuucu

SEQ ID NO: 943864 - RNA, 19 nt, Artificial Sequence
  Description of Artificial Sequence: Synthetic oligonucleotide
ugguccccgcccuuggaca

SEQ ID NO: 943865 - RNA, 19 nt, Artificial Sequence
  Description of Artificial Sequence: Synthetic oligonucleotide
accaaucuuuaugaccgga

SEQ ID NO: 943866 - RNA, 19 nt, Artificial Sequence
  Description of Artificial Sequence: Synthetic oligonucleotide
uuuucguaugaagcccuau

SEQ ID NO: 943867 - RNA, 19 nt, Artificial Sequence
  Description of Artificial Sequence: Synthetic oligonucleotide
cugguaaguuucaucaccu

SEQ ID NO: 943868 - RNA, 19 nt, Artificial Sequence
  Description of Artificial Sequence: Synthetic oligonucleotide
gaacucgcaugucaccaaa

SEQ ID NO: 943869 - RNA, 19 nt, Artificial Sequence
  Description of Artificial Sequence: Synthetic oligonucleotide
  modified_base (11)..(11): a, c, u, g, unknown or other
uccuugcccunuucaucag

SEQ ID NO: 943870 - RNA, 19 nt, Artificial Sequence
  Description of Artificial Sequence: Synthetic oligonucleotide
augaccggaaugaucgaga

SEQ ID NO: 943871 - RNA, 19 nt, Artificial Sequence
  Description of Artificial Sequence: Synthetic oligonucleotide
guguugguuauacauucgu

SEQ ID NO: 943872 - RNA, 19 nt, Artificial Sequence
  Description of Artificial Sequence: Synthetic oligonucleotide
cuucguguuaaauggugcu

SEQ ID NO: 943873 - RNA, 19 nt, Artificial Sequence
  Description of Artificial Sequence: Synthetic oligonucleotide
ugauuggcaccucgcuuua

SEQ ID NO: 943874 - RNA, 19 nt, Artificial Sequence
  Description of Artificial Sequence: Synthetic oligonucleotide
gaccggaaugaucgagaac

SEQ ID NO: 943875 - RNA, 19 nt, Artificial Sequence
  Description of Artificial Sequence: Synthetic oligonucleotide
uucuuacauaauguacauu

SEQ ID NO: 943876 - RNA, 19 nt, Artificial Sequence
  Description of Artificial Sequence: Synthetic oligonucleotide
accuuuagccuucguguua

SEQ ID NO: 943877 - RNA, 19 nt, Artificial Sequence
  Description of Artificial Sequence: Synthetic oligonucleotide
gacaguggcguggugaagu

SEQ ID NO: 943878 - RNA, 19 nt, Artificial Sequence
  Description of Artificial Sequence: Synthetic oligonucleotide
auucccgcauuucuucauu

SEQ ID NO: 943879 - RNA, 19 nt, Artificial Sequence
  Description of Artificial Sequence: Synthetic oligonucleotide
auaguggauuucucccuuu

SEQ ID NO: 943880 - RNA, 19 nt, Artificial Sequence
  Description of Artificial Sequence: Synthetic oligonucleotide
ugaguuucucuggauuauu

SEQ ID NO: 943881 - RNA, 19 nt, Artificial Sequence
  Description of Artificial Sequence: Synthetic oligonucleotide
cucaaaggguccuugcccu

SEQ ID NO: 943882 - RNA, 19 nt, Artificial Sequence
  Description of Artificial Sequence: Synthetic oligonucleotide
ucccaacuaugagacauuu

SEQ ID NO: 943883 - RNA, 19 nt, Artificial Sequence
  Description of Artificial Sequence: Synthetic oligonucleotide
ugacacgguggaagguaaa

SEQ ID NO: 943884 - RNA, 19 nt, Artificial Sequence
  Description of Artificial Sequence: Synthetic oligonucleotide
cauagacuccccucuuuaa

SEQ ID NO: 943885 - RNA, 19 nt, Artificial Sequence
  Description of Artificial Sequence: Synthetic oligonucleotide
gaaucuugcuggaagcgau

SEQ ID NO: 943886 - RNA, 19 nt, Artificial Sequence
  Description of Artificial Sequence: Synthetic oligonucleotide
cacaagguaaugcccaggu

SEQ ID NO: 943887 - RNA, 19 nt, Artificial Sequence
  Description of Artificial Sequence: Synthetic oligonucleotide
augauaacaccgaguacuu

SEQ ID NO: 943888 - RNA, 19 nt, Artificial Sequence
  Description of Artificial Sequence: Synthetic oligonucleotide
cucguccgaauuagcccag

SEQ ID NO: 943889 - RNA, 19 nt, Artificial Sequence
  Description of Artificial Sequence: Synthetic oligonucleotide
ugauaacaccgaguacuua

SEQ ID NO: 943890 - RNA, 19 nt, Artificial Sequence
  Description of Artificial Sequence: Synthetic oligonucleotide
aaucuugcuggaagcgauu

SEQ ID NO: 943891 - RNA, 19 nt, Artificial Sequence
  Description of Artificial Sequence: Synthetic oligonucleotide
gcuaacccuuuucuccugc

SEQ ID NO: 943892 - RNA, 19 nt, Artificial Sequence
  Description of Artificial Sequence: Synthetic oligonucleotide
uaagaggaacucgcauguc

SEQ ID NO: 943893 - RNA, 19 nt, Artificial Sequence
  Description of Artificial Sequence: Synthetic oligonucleotide
agccuccguuccucgcagc

SEQ ID NO: 943894 - RNA, 19 nt, Artificial Sequence
  Description of Artificial Sequence: Synthetic oligonucleotide
cgcuauacucaaagggucc

SEQ ID NO: 943895 - RNA, 19 nt, Artificial Sequence
  Description of Artificial Sequence: Synthetic oligonucleotide
ccgcuauacucaaaggguc

SEQ ID NO: 943896 - RNA, 19 nt, Artificial Sequence
  Description of Artificial Sequence: Synthetic oligonucleotide
  modified_base (8)..(8): a, c, u, g, unknown or other
uugcccunuucaucaguuu

SEQ ID NO: 943897 - RNA, 19 nt, Artificial Sequence
  Description of Artificial Sequence: Synthetic oligonucleotide
agcuaaccuuuagccuucg

SEQ ID NO: 943898 - RNA, 19 nt, Artificial Sequence
  Description of Artificial Sequence: Synthetic oligonucleotide
uaauggaguguugguuaua

SEQ ID NO: 943899 - RNA, 19 nt, Artificial Sequence
  Description of Artificial Sequence: Synthetic oligonucleotide
cugacacgguggaagguaa

SEQ ID NO: 943900 - RNA, 19 nt, Artificial Sequence
  Description of Artificial Sequence: Synthetic oligonucleotide
gcgauugaguuucucugga

SEQ ID NO: 943901 - RNA, 19 nt, Artificial Sequence
  Description of Artificial Sequence: Synthetic oligonucleotide
gaggaacuauaguggauuu

SEQ ID NO: 943902 - RNA, 19 nt, Artificial Sequence
  Description of Artificial Sequence: Synthetic oligonucleotide
acuuauccacaaacuuccu

SEQ ID NO: 943903 - RNA, 19 nt, Artificial Sequence
  Description of Artificial Sequence: Synthetic oligonucleotide
gccuucguguuaaauggug

SEQ ID NO: 943904 - RNA, 19 nt, Artificial Sequence
  Description of Artificial Sequence: Synthetic oligonucleotide
uggaagcgauugaguuucu

SEQ ID NO: 943905 - RNA, 19 nt, Artificial Sequence
  Description of Artificial Sequence: Synthetic oligonucleotide
  modified_base (9)..(9): a, c, u, g, unknown or other
cuugcccunuucaucaguu

SEQ ID NO: 943906 - RNA, 19 nt, Artificial Sequence
  Description of Artificial Sequence: Synthetic oligonucleotide
caguggcguggugaagugg

SEQ ID NO: 943907 - RNA, 19 nt, Artificial Sequence
  Description of Artificial Sequence: Synthetic oligonucleotide
cuguugcuugguucucguc

SEQ ID NO: 943908 - RNA, 19 nt, Artificial Sequence
  Description of Artificial Sequence: Synthetic oligonucleotide
acccauuaaacaggcuuuu

SEQ ID NO: 943909 - RNA, 19 nt, Artificial Sequence
  Description of Artificial Sequence: Synthetic oligonucleotide
ggcucagaacuucugugaa

SEQ ID NO: 943910 - RNA, 19 nt, Artificial Sequence
  Description of Artificial Sequence: Synthetic oligonucleotide
cagccuccguuccucgcag

SEQ ID NO: 943911 - RNA, 19 nt, Artificial Sequence
  Description of Artificial Sequence: Synthetic oligonucleotide
ccgaauuagcccaguucac

SEQ ID NO: 943912 - RNA, 19 nt, Artificial Sequence
  Description of Artificial Sequence: Synthetic oligonucleotide
cguaacaaggucacuaugu

SEQ ID NO: 943913 - RNA, 19 nt, Artificial Sequence
  Description of Artificial Sequence: Synthetic oligonucleotide
caacuaugagacauuuguu

SEQ ID NO: 943914 - RNA, 19 nt, Artificial Sequence
  Description of Artificial Sequence: Synthetic oligonucleotide
cuguaagaggaacucgcau

SEQ ID NO: 943915 - RNA, 19 nt, Artificial Sequence
  Description of Artificial Sequence: Synthetic oligonucleotide
agccuucguguuaaauggu

SEQ ID NO: 943916 - RNA, 19 nt, Artificial Sequence
  Description of Artificial Sequence: Synthetic oligonucleotide
cccaacuaugagacauuug

SEQ ID NO: 943917 - RNA, 19 nt, Artificial Sequence
  Description of Artificial Sequence: Synthetic oligonucleotide
uuccaccgcuauacucaaa

SEQ ID NO: 943918 - RNA, 19 nt, Artificial Sequence
  Description of Artificial Sequence: Synthetic oligonucleotide
cguuccucgcagcuuuugg

SEQ ID NO: 943919 - RNA, 19 nt, Artificial Sequence
  Description of Artificial Sequence: Synthetic oligonucleotide
  modified_base (6)..(6): a, c, u, g, unknown or other
gcccunuucaucaguuuga

SEQ ID NO: 943920 - RNA, 19 nt, Artificial Sequence
  Description of Artificial Sequence: Synthetic oligonucleotide
gaacacagcgaagcacacu

SEQ ID NO: 943921 - RNA, 19 nt, Artificial Sequence
  Description of Artificial Sequence: Synthetic oligonucleotide
cguguuaaauggugcuaac

SEQ ID NO: 943922 - RNA, 19 nt, Artificial Sequence
  Description of Artificial Sequence: Synthetic oligonucleotide
cgcuuuaggaacaaacaua

SEQ ID NO: 943923 - RNA, 19 nt, Artificial Sequence
  Description of Artificial Sequence: Synthetic oligonucleotide
accccaagacuccgaugaa

SEQ ID NO: 943924 - RNA, 19 nt, Artificial Sequence
  Description of Artificial Sequence: Synthetic oligonucleotide
agacuccgaugaaucccag

SEQ ID NO: 943925 - RNA, 19 nt, Artificial Sequence
  Description of Artificial Sequence: Synthetic oligonucleotide
ccggaaugaucgagaacac

SEQ ID NO: 943926 - RNA, 19 nt, Artificial Sequence
  Description of Artificial Sequence: Synthetic oligonucleotide
gaagcccuauaaagcugaa

SEQ ID NO: 943927 - RNA, 19 nt, Artificial Sequence
  Description of Artificial Sequence: Synthetic oligonucleotide
auuggcugacacgguggaa

SEQ ID NO: 943928 - RNA, 19 nt, Artificial Sequence
  Description of Artificial Sequence: Synthetic oligonucleotide
ccgaugaaucccagagcac

SEQ ID NO: 943929 - RNA, 19 nt, Artificial Sequence
  Description of Artificial Sequence: Synthetic oligonucleotide
ucguccgaauuagcccagu

SEQ ID NO: 943930 - RNA, 19 nt, Artificial Sequence
  Description of Artificial Sequence: Synthetic oligonucleotide
ccccucuauguaaacagaa

SEQ ID NO: 943931 - RNA, 19 nt, Artificial Sequence
  Description of Artificial Sequence: Synthetic oligonucleotide
cccucuauguaaacagaaa

SEQ ID NO: 943932 - RNA, 19 nt, Artificial Sequence
  Description of Artificial Sequence: Synthetic oligonucleotide
cgaugauaacaccgaguac

SEQ ID NO: 943933 - RNA, 19 nt, Artificial Sequence
  Description of Artificial Sequence: Synthetic oligonucleotide
cuggaugagugcuguugcu

SEQ ID NO: 943934 - RNA, 19 nt, Artificial Sequence
  Description of Artificial Sequence: Synthetic oligonucleotide
uccguuccucgcagcuuuu

SEQ ID NO: 943935 - RNA, 19 nt, Artificial Sequence
  Description of Artificial Sequence: Synthetic oligonucleotide
gcuauacucaaaggguccu

SEQ ID NO: 943936 - RNA, 19 nt, Artificial Sequence
  Description of Artificial Sequence: Synthetic oligonucleotide
ggaagcgauugaguuucuc

SEQ ID NO: 943937 - RNA, 19 nt, Artificial Sequence
  Description of Artificial Sequence: Synthetic oligonucleotide
ccuuuagccuucguguuaa

SEQ ID NO: 943938 - RNA, 19 nt, Artificial Sequence
  Description of Artificial Sequence: Synthetic oligonucleotide
gguaaagauucucgcccau

SEQ ID NO: 943939 - RNA, 19 nt, Artificial Sequence
  Description of Artificial Sequence: Synthetic oligonucleotide
ggcgaugauaacaccgagu

SEQ ID NO: 943940 - RNA, 19 nt, Artificial Sequence
  Description of Artificial Sequence: Synthetic oligonucleotide
cuuuagccuucguguuaaa

SEQ ID NO: 943941 - RNA, 19 nt, Artificial Sequence
  Description of Artificial Sequence: Synthetic oligonucleotide
gcaccucgcuuuaggaaca

SEQ ID NO: 943942 - RNA, 19 nt, Artificial Sequence
  Description of Artificial Sequence: Synthetic oligonucleotide
accucgcuuuaggaacaaa

SEQ ID NO: 943943 - RNA, 19 nt, Artificial Sequence
  Description of Artificial Sequence: Synthetic oligonucleotide
guggcguggugaagugguc

SEQ ID NO: 943944 - RNA, 19 nt, Artificial Sequence
  Description of Artificial Sequence: Synthetic oligonucleotide
ccgaguacuuauccacaaa

SEQ ID NO: 943945 - RNA, 19 nt, Artificial Sequence
  Description of Artificial Sequence: Synthetic oligonucleotide
cagcaagcuuucccugcua

SEQ ID NO: 943946 - RNA, 19 nt, Artificial Sequence
  Description of Artificial Sequence: Synthetic oligonucleotide
caccucgcuuuaggaacaa

SEQ ID NO: 943947 - RNA, 19 nt, Artificial Sequence
  Description of Artificial Sequence: Synthetic oligonucleotide
ccguuccucgcagcuuuug

SEQ ID NO: 943948 - RNA, 19 nt, Artificial Sequence
  Description of Artificial Sequence: Synthetic oligonucleotide
  modified_base (5)..(5): a, c, u, g, unknown or other
cccunuucaucaguuugau

SEQ ID NO: 943949 - RNA, 19 nt, Artificial Sequence
  Description of Artificial Sequence: Synthetic oligonucleotide
ccugcccuguguguccuaa

SEQ ID NO: 943950 - RNA, 19 nt, Artificial Sequence
  Description of Artificial Sequence: Synthetic oligonucleotide
cguccgaauuagcccaguu

SEQ ID NO: 943951 - RNA, 19 nt, Artificial Sequence
  Description of Artificial Sequence: Synthetic oligonucleotide
ccccuaguacagccuggau

SEQ ID NO: 943952 - RNA, 19 nt, Artificial Sequence
  Description of Artificial Sequence: Synthetic oligonucleotide
ccccgcccuuggacaucuc

SEQ ID NO: 943953 - RNA, 19 nt, Artificial Sequence
  Description of Artificial Sequence: Synthetic oligonucleotide
uuuauauucacgcugcugg

SEQ ID NO: 943954 - RNA, 19 nt, Artificial Sequence
  Description of Artificial Sequence: Synthetic oligonucleotide
uccaauaacaggaagaccc

SEQ ID NO: 943955 - RNA, 19 nt, Artificial Sequence
  Description of Artificial Sequence: Synthetic oligonucleotide
aaagugagucaauaggccc

SEQ ID NO: 943956 - RNA, 19 nt, Artificial Sequence
  Description of Artificial Sequence: Synthetic oligonucleotide
aauucuauaacuucuugca

SEQ ID NO: 943957 - RNA, 19 nt, Artificial Sequence
  Description of Artificial Sequence: Synthetic oligonucleotide
aaaacuccaaauuaggacu

SEQ ID NO: 943958 - RNA, 19 nt, Artificial Sequence
  Description of Artificial Sequence: Synthetic oligonucleotide
aauuaacccauacucgggc

SEQ ID NO: 943959 - RNA, 19 nt, Artificial Sequence
  Description of Artificial Sequence: Synthetic oligonucleotide
aacaauuuaucuuccuuac

SEQ ID NO: 943960 - RNA, 19 nt, Artificial Sequence
  Description of Artificial Sequence: Synthetic oligonucleotide
uacaaagugagucaauagg

SEQ ID NO: 943961 - RNA, 19 nt, Artificial Sequence
  Description of Artificial Sequence: Synthetic oligonucleotide
cucaacauuaguuaagugg

SEQ ID NO: 943962 - RNA, 19 nt, Artificial Sequence
  Description of Artificial Sequence: Synthetic oligonucleotide
aaaaugguaccacugccac

SEQ ID NO: 943963 - RNA, 19 nt, Artificial Sequence
  Description of Artificial Sequence: Synthetic oligonucleotide
ugacauuguauuuagaugu

SEQ ID NO: 943964 - RNA, 19 nt, Artificial Sequence
  Description of Artificial Sequence: Synthetic oligonucleotide
auaaacaucacacauccca

SEQ ID NO: 943965 - RNA, 19 nt, Artificial Sequence
  Description of Artificial Sequence: Synthetic oligonucleotide
gguaauguaauguaaagcc

SEQ ID NO: 943966 - RNA, 19 nt, Artificial Sequence
  Description of Artificial Sequence: Synthetic oligonucleotide
uauacagggguauacauca

SEQ ID NO: 943967 - RNA, 19 nt, Artificial Sequence
  Description of Artificial Sequence: Synthetic oligonucleotide
ucuucuacggguuugaggu

SEQ ID NO: 943968 - RNA, 19 nt, Artificial Sequence
  Description of Artificial Sequence: Synthetic oligonucleotide
ucauaaguaguaaugaaaa

SEQ ID NO: 943969 - RNA, 19 nt, Artificial Sequence
  Description of Artificial Sequence: Synthetic oligonucleotide
uaaaugauagcaguuauca

SEQ ID NO: 943970 - RNA, 19 nt, Artificial Sequence
  Description of Artificial Sequence: Synthetic oligonucleotide
ucugucauaaguaguaaug

SEQ ID NO: 943971 - RNA, 19 nt, Artificial Sequence
  Description of Artificial Sequence: Synthetic oligonucleotide
aaaaguuaaaugauagcag

SEQ ID NO: 943972 - RNA, 19 nt, Artificial Sequence
  Description of Artificial Sequence: Synthetic oligonucleotide
aagguaauguaauguaaag

SEQ ID NO: 943973 - RNA, 19 nt, Artificial Sequence
  Description of Artificial Sequence: Synthetic oligonucleotide
uuuauaaauuaacccauac

SEQ ID NO: 943974 - RNA, 19 nt, Artificial Sequence
  Description of Artificial Sequence: Synthetic oligonucleotide
aaacauuuaguacucuugu

SEQ ID NO: 943975 - RNA, 19 nt, Artificial Sequence
  Description of Artificial Sequence: Synthetic oligonucleotide
aacugaagaugucuuuagc

SEQ ID NO: 943976 - RNA, 19 nt, Artificial Sequence
  Description of Artificial Sequence: Synthetic oligonucleotide
uaauguaauguaaagcccu

SEQ ID NO: 943977 - RNA, 19 nt, Artificial Sequence
  Description of Artificial Sequence: Synthetic oligonucleotide
uguucauuaauuuagccuu

SEQ ID NO: 943978 - RNA, 19 nt, Artificial Sequence
  Description of Artificial Sequence: Synthetic oligonucleotide
uuaaacauacaaaacugaa

SEQ ID NO: 943979 - RNA, 19 nt, Artificial Sequence
  Description of Artificial Sequence: Synthetic oligonucleotide
uuuucccauauaaacauca

SEQ ID NO: 943980 - RNA, 19 nt, Artificial Sequence
  Description of Artificial Sequence: Synthetic oligonucleotide
uuaaacucaacuuggaaua

SEQ ID NO: 943981 - RNA, 19 nt, Artificial Sequence
  Description of Artificial Sequence: Synthetic oligonucleotide
uaaguaguaaugaaaaguu

SEQ ID NO: 943982 - RNA, 19 nt, Artificial Sequence
  Description of Artificial Sequence: Synthetic oligonucleotide
ugcuguuuauaaauuaacc

SEQ ID NO: 943983 - RNA, 19 nt, Artificial Sequence
  Description of Artificial Sequence: Synthetic oligonucleotide
uccaaauuaggacuuauaa

SEQ ID NO: 943984 - RNA, 19 nt, Artificial Sequence
  Description of Artificial Sequence: Synthetic oligonucleotide
guaucuacacuguauacag

SEQ ID NO: 943985 - RNA, 19 nt, Artificial Sequence
  Description of Artificial Sequence: Synthetic oligonucleotide
auaaauuaacccauacucg

SEQ ID NO: 943986 - RNA, 19 nt, Artificial Sequence
  Description of Artificial Sequence: Synthetic oligonucleotide
uuguucauuaauuuagccu

SEQ ID NO: 943987 - RNA, 19 nt, Artificial Sequence
  Description of Artificial Sequence: Synthetic oligonucleotide
uccaguaaucaucuaagug

SEQ ID NO: 943988 - RNA, 19 nt, Artificial Sequence
  Description of Artificial Sequence: Synthetic oligonucleotide
auuuucuccguucccagac

SEQ ID NO: 943989 - RNA, 19 nt, Artificial Sequence
  Description of Artificial Sequence: Synthetic oligonucleotide
ugugucuugauacuggguc

SEQ ID NO: 943990 - RNA, 19 nt, Artificial Sequence
  Description of Artificial Sequence: Synthetic oligonucleotide
ucuaagugcugacuuaagc

SEQ ID NO: 943991 - RNA, 19 nt, Artificial Sequence
  Description of Artificial Sequence: Synthetic oligonucleotide
ugaaaaguuaaaugauagc

SEQ ID NO: 943992 - RNA, 19 nt, Artificial Sequence
  Description of Artificial Sequence: Synthetic oligonucleotide
agguaauguaauguaaagc

SEQ ID NO: 943993 - RNA, 19 nt, Artificial Sequence
  Description of Artificial Sequence: Synthetic oligonucleotide
ucuuuggucaauucuauaa

SEQ ID NO: 943994 - RNA, 19 nt, Artificial Sequence
  Description of Artificial Sequence: Synthetic oligonucleotide
ucaaaccaaacuuugcugu

SEQ ID NO: 943995 - RNA, 19 nt, Artificial Sequence
  Description of Artificial Sequence: Synthetic oligonucleotide
gaaauuagcacacacccaa

SEQ ID NO: 943996 - RNA, 19 nt, Artificial Sequence
  Description of Artificial Sequence: Synthetic oligonucleotide
uuuguagcuagccaacugu

SEQ ID NO: 943997 - RNA, 19 nt, Artificial Sequence
  Description of Artificial Sequence: Synthetic oligonucleotide
caaggagaaaccucaaacc

SEQ ID NO: 943998 - RNA, 19 nt, Artificial Sequence
  Description of Artificial Sequence: Synthetic oligonucleotide
uuacucaucuagcaaauaa

SEQ ID NO: 943999 - RNA, 19 nt, Artificial Sequence
  Description of Artificial Sequence: Synthetic oligonucleotide
cagguuaucaaacugaaga

SEQ ID NO: 944000 - RNA, 19 nt, Artificial Sequence
  Description of Artificial Sequence: Synthetic oligonucleotide
caucuagcaaauaauuuac

SEQ ID NO: 944001 - RNA, 19 nt, Artificial Sequence
  Description of Artificial Sequence: Synthetic oligonucleotide
uaauugugaaacauuuagu

SEQ ID NO: 944002 - RNA, 19 nt, Artificial Sequence
  Description of Artificial Sequence: Synthetic oligonucleotide
uugggauacgucaagugca

SEQ ID NO: 944003 - RNA, 19 nt, Artificial Sequence
  Description of Artificial Sequence: Synthetic oligonucleotide
uucuauaacuucuugcaaa

SEQ ID NO: 944004 - RNA, 19 nt, Artificial Sequence
  Description of Artificial Sequence: Synthetic oligonucleotide
ucuaccuagaaaaguugcc

SEQ ID NO: 944005 - RNA, 19 nt, Artificial Sequence
  Description of Artificial Sequence: Synthetic oligonucleotide
cauuuugcggugauguucc

SEQ ID NO: 944006 - RNA, 19 nt, Artificial Sequence
  Description of Artificial Sequence: Synthetic oligonucleotide
uaggacuuauaaaaugucu

SEQ ID NO: 944007 - RNA, 19 nt, Artificial Sequence
  Description of Artificial Sequence: Synthetic oligonucleotide
auuagcacacacccaaaag

SEQ ID NO: 944008 - RNA, 19 nt, Artificial Sequence
  Description of Artificial Sequence: Synthetic oligonucleotide
aaauuaacccauacucggg

SEQ ID NO: 944009 - RNA, 19 nt, Artificial Sequence
  Description of Artificial Sequence: Synthetic oligonucleotide
ugggucauaggcuugucag

SEQ ID NO: 944010 - RNA, 19 nt, Artificial Sequence
  Description of Artificial Sequence: Synthetic oligonucleotide
acaauggagucacuucagc

SEQ ID NO: 944011 - RNA, 19 nt, Artificial Sequence
  Description of Artificial Sequence: Synthetic oligonucleotide
gaaacauuuaguacucuug

SEQ ID NO: 944012 - RNA, 19 nt, Artificial Sequence
  Description of Artificial Sequence: Synthetic oligonucleotide
uccuacuccaacuuugccc

SEQ ID NO: 944013 - RNA, 19 nt, Artificial Sequence
  Description of Artificial Sequence: Synthetic oligonucleotide
uuauauucacgcugcuggg

SEQ ID NO: 944014 - RNA, 19 nt, Artificial Sequence
  Description of Artificial Sequence: Synthetic oligonucleotide
agucucucugauuacugcg

SEQ ID NO: 944015 - RNA, 19 nt, Artificial Sequence
  Description of Artificial Sequence: Synthetic oligonucleotide
gacagaaggucuuugguca

SEQ ID NO: 944016 - RNA, 19 nt, Artificial Sequence
  Description of Artificial Sequence: Synthetic oligonucleotide
auacaaagugagucaauag

SEQ ID NO: 944017 - RNA, 19 nt, Artificial Sequence
  Description of Artificial Sequence: Synthetic oligonucleotide
ucuacucaacauuaguuaa

SEQ ID NO: 944018 - RNA, 19 nt, Artificial Sequence
  Description of Artificial Sequence: Synthetic oligonucleotide
aauacaaagugagucaaua

SEQ ID NO: 944019 - RNA, 19 nt, Artificial Sequence
  Description of Artificial Sequence: Synthetic oligonucleotide
aaguccaguaaucaucuaa

SEQ ID NO: 944020 - RNA, 19 nt, Artificial Sequence
  Description of Artificial Sequence: Synthetic oligonucleotide
uaaccagcaaaggugauug

SEQ ID NO: 944021 - RNA, 19 nt, Artificial Sequence
  Description of Artificial Sequence: Synthetic oligonucleotide
aaaucaacaaaggggaaaa

SEQ ID NO: 944022 - RNA, 19 nt, Artificial Sequence
  Description of Artificial Sequence: Synthetic oligonucleotide
gauacgucaagugcaaagc

SEQ ID NO: 944023 - RNA, 19 nt, Artificial Sequence
  Description of Artificial Sequence: Synthetic oligonucleotide
aauaguaucuacacuguau

SEQ ID NO: 944024 - RNA, 19 nt, Artificial Sequence
  Description of Artificial Sequence: Synthetic oligonucleotide
uuaugggcagauuaaugca

SEQ ID NO: 944025 - RNA, 19 nt, Artificial Sequence
  Description of Artificial Sequence: Synthetic oligonucleotide
aagugagucaauaggcccg

SEQ ID NO: 944026 - RNA, 19 nt, Artificial Sequence
  Description of Artificial Sequence: Synthetic oligonucleotide
guugggauacgucaagugc

SEQ ID NO: 944027 - RNA, 19 nt, Artificial Sequence
  Description of Artificial Sequence: Synthetic oligonucleotide
uuaaaugauagcaguuauc

SEQ ID NO: 944028 - RNA, 19 nt, Artificial Sequence
  Description of Artificial Sequence: Synthetic oligonucleotide
aaggugauugcagccgugc

SEQ ID NO: 944029 - RNA, 19 nt, Artificial Sequence
  Description of Artificial Sequence: Synthetic oligonucleotide
uugcccgucacacuuuccg

SEQ ID NO: 944030 - RNA, 19 nt, Artificial Sequence
  Description of Artificial Sequence: Synthetic oligonucleotide
aauuaugggcagauuaaug

SEQ ID NO: 944031 - RNA, 19 nt, Artificial Sequence
  Description of Artificial Sequence: Synthetic oligonucleotide
uuuguugccacuguccucu

SEQ ID NO: 944032 - RNA, 19 nt, Artificial Sequence
  Description of Artificial Sequence: Synthetic oligonucleotide
guugacagaaggucuuugg

SEQ ID NO: 944033 - RNA, 19 nt, Artificial Sequence
  Description of Artificial Sequence: Synthetic oligonucleotide
aauauacagggaaauuaug

SEQ ID NO: 944034 - RNA, 19 nt, Artificial Sequence
  Description of Artificial Sequence: Synthetic oligonucleotide
aauuucaagaggucuucau

SEQ ID NO: 944035 - RNA, 19 nt, Artificial Sequence
  Description of Artificial Sequence: Synthetic oligonucleotide
uuaggacuuauaaaauguc

SEQ ID NO: 944036 - RNA, 19 nt, Artificial Sequence
  Description of Artificial Sequence: Synthetic oligonucleotide
auuacugcggcaucaggug

SEQ ID NO: 944037 - RNA, 19 nt, Artificial Sequence
  Description of Artificial Sequence: Synthetic oligonucleotide
aaaauaguaucuacacugu

SEQ ID NO: 944038 - RNA, 19 nt, Artificial Sequence
  Description of Artificial Sequence: Synthetic oligonucleotide
cuugaucuaguuaauaaaa

SEQ ID NO: 944039 - RNA, 19 nt, Artificial Sequence
  Description of Artificial Sequence: Synthetic oligonucleotide
acuccucuuuaccuggccc

SEQ ID NO: 944040 - RNA, 19 nt, Artificial Sequence
  Description of Artificial Sequence: Synthetic oligonucleotide
ugucuacucaacauuaguu

SEQ ID NO: 944041 - RNA, 19 nt, Artificial Sequence
  Description of Artificial Sequence: Synthetic oligonucleotide
uuggaguacgcccuguugu

SEQ ID NO: 944042 - RNA, 19 nt, Artificial Sequence
  Description of Artificial Sequence: Synthetic oligonucleotide
cauuaauuuagccuugaca

SEQ ID NO: 944043 - RNA, 19 nt, Artificial Sequence
  Description of Artificial Sequence: Synthetic oligonucleotide
gacuuaagcagcaucuacc

SEQ ID NO: 944044 - RNA, 19 nt, Artificial Sequence
  Description of Artificial Sequence: Synthetic oligonucleotide
ucaaucuccgcuucguaac

SEQ ID NO: 944045 - RNA, 19 nt, Artificial Sequence
  Description of Artificial Sequence: Synthetic oligonucleotide
auaguaucuacacuguaua

SEQ ID NO: 944046 - RNA, 19 nt, Artificial Sequence
  Description of Artificial Sequence: Synthetic oligonucleotide
acuugaucuaguuaauaaa

SEQ ID NO: 944047 - RNA, 19 nt, Artificial Sequence
  Description of Artificial Sequence: Synthetic oligonucleotide
ucacuuaggccaacaaaug

SEQ ID NO: 944048 - RNA, 19 nt, Artificial Sequence
  Description of Artificial Sequence: Synthetic oligonucleotide
agcuacaugaacauaauau

SEQ ID NO: 944049 - RNA, 19 nt, Artificial Sequence
  Description of Artificial Sequence: Synthetic oligonucleotide
cauuguauuuagauguguc

SEQ ID NO: 944050 - RNA, 19 nt, Artificial Sequence
  Description of Artificial Sequence: Synthetic oligonucleotide
auaacuguggugcucacuu

SEQ ID NO: 944051 - RNA, 19 nt, Artificial Sequence
  Description of Artificial Sequence: Synthetic oligonucleotide
guaauguaauguaaagccc

SEQ ID NO: 944052 - RNA, 19 nt, Artificial Sequence
  Description of Artificial Sequence: Synthetic oligonucleotide
uccuuacucaucuagcaaa

SEQ ID NO: 944053 - RNA, 19 nt, Artificial Sequence
  Description of Artificial Sequence: Synthetic oligonucleotide
aacucagcuacaugaacau

SEQ ID NO: 944054 - RNA, 19 nt, Artificial Sequence
  Description of Artificial Sequence: Synthetic oligonucleotide
agggaucugucauaaguag

SEQ ID NO: 944055 - RNA, 19 nt, Artificial Sequence
  Description of Artificial Sequence: Synthetic oligonucleotide
uuagaugugucuugauacu

SEQ ID NO: 944056 - RNA, 19 nt, Artificial Sequence
  Description of Artificial Sequence: Synthetic oligonucleotide
ugacuuaagcagcaucuac

SEQ ID NO: 944057 - RNA, 19 nt, Artificial Sequence
  Description of Artificial Sequence: Synthetic oligonucleotide
aacuuugcccgucacacuu

SEQ ID NO: 944058 - RNA, 19 nt, Artificial Sequence
  Description of Artificial Sequence: Synthetic oligonucleotide
uacucaucuagcaaauaau

SEQ ID NO: 944059 - RNA, 19 nt, Artificial Sequence
  Description of Artificial Sequence: Synthetic oligonucleotide
uguauacagggguauacau

SEQ ID NO: 944060 - RNA, 19 nt, Artificial Sequence
  Description of Artificial Sequence: Synthetic oligonucleotide
ucuugauacugggucauag

SEQ ID NO: 944061 - RNA, 19 nt, Artificial Sequence
  Description of Artificial Sequence: Synthetic oligonucleotide
ucagcuuuuguuuucccau

SEQ ID NO: 944062 - RNA, 19 nt, Artificial Sequence
  Description of Artificial Sequence: Synthetic oligonucleotide
uacagggguauacaucagc

SEQ ID NO: 944063 - RNA, 19 nt, Artificial Sequence
  Description of Artificial Sequence: Synthetic oligonucleotide
uuaauuuagccuugacaaa

SEQ ID NO: 944064 - RNA, 19 nt, Artificial Sequence
  Description of Artificial Sequence: Synthetic oligonucleotide
aaucccacagguuccuacu

SEQ ID NO: 944065 - RNA, 19 nt, Artificial Sequence
  Description of Artificial Sequence: Synthetic oligonucleotide
uguugggauacgucaagug

SEQ ID NO: 944066 - RNA, 19 nt, Artificial Sequence
  Description of Artificial Sequence: Synthetic oligonucleotide
aauguaauguaaagcccug

SEQ ID NO: 944067 - RNA, 19 nt, Artificial Sequence
  Description of Artificial Sequence: Synthetic oligonucleotide
ugauuacugcggcaucagg

SEQ ID NO: 944068 - RNA, 19 nt, Artificial Sequence
  Description of Artificial Sequence: Synthetic oligonucleotide
aaauaguaucuacacugua

SEQ ID NO: 944069 - RNA, 19 nt, Artificial Sequence
  Description of Artificial Sequence: Synthetic oligonucleotide
cacuuaggccaacaaaugc

SEQ ID NO: 944070 - RNA, 19 nt, Artificial Sequence
  Description of Artificial Sequence: Synthetic oligonucleotide
uggucaauucuauaacuuc

SEQ ID NO: 944071 - RNA, 19 nt, Artificial Sequence
  Description of Artificial Sequence: Synthetic oligonucleotide
aucuagcaaauaauuuacc

SEQ ID NO: 944072 - RNA, 19 nt, Artificial Sequence
  Description of Artificial Sequence: Synthetic oligonucleotide
gaugaacuccaacagucuc

SEQ ID NO: 944073 - RNA, 19 nt, Artificial Sequence
  Description of Artificial Sequence: Synthetic oligonucleotide
ccuacuccaacuuugcccg

SEQ ID NO: 944074 - RNA, 19 nt, Artificial Sequence
  Description of Artificial Sequence: Synthetic oligonucleotide
aaacucgagggaucuguca

SEQ ID NO: 944075 - RNA, 19 nt, Artificial Sequence
  Description of Artificial Sequence: Synthetic oligonucleotide
uucaacaaacucgagggau

SEQ ID NO: 944076 - RNA, 19 nt, Artificial Sequence
  Description of Artificial Sequence: Synthetic oligonucleotide
accuagaaaaguugccuug

SEQ ID NO: 944077 - RNA, 19 nt, Artificial Sequence
  Description of Artificial Sequence: Synthetic oligonucleotide
agguuaucaaacugaagau

SEQ ID NO: 944078 - RNA, 19 nt, Artificial Sequence
  Description of Artificial Sequence: Synthetic oligonucleotide
aaaacugucugaacuugca

SEQ ID NO: 944079 - RNA, 19 nt, Artificial Sequence
  Description of Artificial Sequence: Synthetic oligonucleotide
aguacucuuguucauuaau

SEQ ID NO: 944080 - RNA, 19 nt, Artificial Sequence
  Description of Artificial Sequence: Synthetic oligonucleotide
ggcaacuugaucuaguuaa

SEQ ID NO: 944081 - RNA, 19 nt, Artificial Sequence
  Description of Artificial Sequence: Synthetic oligonucleotide
uccguucccagacaaggca

SEQ ID NO: 944082 - RNA, 19 nt, Artificial Sequence
  Description of Artificial Sequence: Synthetic oligonucleotide
agggguauacaucagcuuu

SEQ ID NO: 944083 - RNA, 19 nt, Artificial Sequence
  Description of Artificial Sequence: Synthetic oligonucleotide
gaagcaaaacugucugaac

SEQ ID NO: 944084 - RNA, 19 nt, Artificial Sequence
  Description of Artificial Sequence: Synthetic oligonucleotide
ucauuaauuuagccuugac

SEQ ID NO: 944085 - RNA, 19 nt, Artificial Sequence
  Description of Artificial Sequence: Synthetic oligonucleotide
guaaucaucuaagugcuga

SEQ ID NO: 944086 - RNA, 19 nt, Artificial Sequence
  Description of Artificial Sequence: Synthetic oligonucleotide
ucaauaggcccgagaaaca

SEQ ID NO: 944087 - RNA, 19 nt, Artificial Sequence
  Description of Artificial Sequence: Synthetic oligonucleotide
ugcggugauguuccaauga

SEQ ID NO: 944088 - RNA, 19 nt, Artificial Sequence
  Description of Artificial Sequence: Synthetic oligonucleotide
gaaauuaugggcagauuaa

SEQ ID NO: 944089 - RNA, 19 nt, Artificial Sequence
  Description of Artificial Sequence: Synthetic oligonucleotide
caucuaccuagaaaaguug

SEQ ID NO: 944090 - RNA, 19 nt, Artificial Sequence
  Description of Artificial Sequence: Synthetic oligonucleotide
ucugauuacugcggcauca

SEQ ID NO: 944091 - RNA, 19 nt, Artificial Sequence
  Description of Artificial Sequence: Synthetic oligonucleotide
ugccugacauuguauuuag

SEQ ID NO: 944092 - RNA, 19 nt, Artificial Sequence
  Description of Artificial Sequence: Synthetic oligonucleotide
uuguauuuagaugugucuu

SEQ ID NO: 944093 - RNA, 19 nt, Artificial Sequence
  Description of Artificial Sequence: Synthetic oligonucleotide
cuuaaacucaacuuggaau

SEQ ID NO: 944094 - RNA, 19 nt, Artificial Sequence
  Description of Artificial Sequence: Synthetic oligonucleotide
aguuaaaugauagcaguua

SEQ ID NO: 944095 - RNA, 19 nt, Artificial Sequence
  Description of Artificial Sequence: Synthetic oligonucleotide
uggcauuuugcggugaugu

SEQ ID NO: 944096 - RNA, 19 nt, Artificial Sequence
  Description of Artificial Sequence: Synthetic oligonucleotide
ugucagcaaucccacaggu

SEQ ID NO: 944097 - RNA, 19 nt, Artificial Sequence
  Description of Artificial Sequence: Synthetic oligonucleotide
ggauacgucaagugcaaag

SEQ ID NO: 944098 - RNA, 19 nt, Artificial Sequence
  Description of Artificial Sequence: Synthetic oligonucleotide
uguuguugaauugcugcca

SEQ ID NO: 944099 - RNA, 19 nt, Artificial Sequence
  Description of Artificial Sequence: Synthetic oligonucleotide
aaucuccgcuucguaacac

SEQ ID NO: 944100 - RNA, 19 nt, Artificial Sequence
  Description of Artificial Sequence: Synthetic oligonucleotide
uccuaaacaugguuuugcu

SEQ ID NO: 944101 - RNA, 19 nt, Artificial Sequence
  Description of Artificial Sequence: Synthetic oligonucleotide
ugagucaauaggcccgaga

SEQ ID NO: 944102 - RNA, 19 nt, Artificial Sequence
  Description of Artificial Sequence: Synthetic oligonucleotide
agaugugucuugauacugg

SEQ ID NO: 944103 - RNA, 19 nt, Artificial Sequence
  Description of Artificial Sequence: Synthetic oligonucleotide
acuguugggauacgucaag

SEQ ID NO: 944104 - RNA, 19 nt, Artificial Sequence
  Description of Artificial Sequence: Synthetic oligonucleotide
auuacaaacucagcuacau

SEQ ID NO: 944105 - RNA, 19 nt, Artificial Sequence
  Description of Artificial Sequence: Synthetic oligonucleotide
uauauucacgcugcugggc

SEQ ID NO: 944106 - RNA, 19 nt, Artificial Sequence
  Description of Artificial Sequence: Synthetic oligonucleotide
augucuuuagcaggcuggc

SEQ ID NO: 944107 - RNA, 19 nt, Artificial Sequence
  Description of Artificial Sequence: Synthetic oligonucleotide
aacagucucucugauuacu

SEQ ID NO: 944108 - RNA, 19 nt, Artificial Sequence
  Description of Artificial Sequence: Synthetic oligonucleotide
agaagcaaaacugucugaa

SEQ ID NO: 944109 - RNA, 19 nt, Artificial Sequence
  Description of Artificial Sequence: Synthetic oligonucleotide
aaaugguaccacugccaca

SEQ ID NO: 944110 - RNA, 19 nt, Artificial Sequence
  Description of Artificial Sequence: Synthetic oligonucleotide
auucuauaacuucuugcaa

SEQ ID NO: 944111 - RNA, 19 nt, Artificial Sequence
  Description of Artificial Sequence: Synthetic oligonucleotide
agaaguccaguaaucaucu

SEQ ID NO: 944112 - RNA, 19 nt, Artificial Sequence
  Description of Artificial Sequence: Synthetic oligonucleotide
acuuaggccaacaaaugcu

SEQ ID NO: 944113 - RNA, 19 nt, Artificial Sequence
  Description of Artificial Sequence: Synthetic oligonucleotide
auacauuuguccccuacuu

SEQ ID NO: 944114 - RNA, 19 nt, Artificial Sequence
  Description of Artificial Sequence: Synthetic oligonucleotide
guuugagguucaacaaugg

SEQ ID NO: 944115 - RNA, 19 nt, Artificial Sequence
  Description of Artificial Sequence: Synthetic oligonucleotide
ugauagcaguuaucaaaug

SEQ ID NO: 944116 - RNA, 19 nt, Artificial Sequence
  Description of Artificial Sequence: Synthetic oligonucleotide
agcugagcuuuguagcuag

SEQ ID NO: 944117 - RNA, 19 nt, Artificial Sequence
  Description of Artificial Sequence: Synthetic oligonucleotide
ucuccgcuucguaacacug

SEQ ID NO: 944118 - RNA, 19 nt, Artificial Sequence
  Description of Artificial Sequence: Synthetic oligonucleotide
aggggagcacauccuaaac

SEQ ID NO: 944119 - RNA, 19 nt, Artificial Sequence
  Description of Artificial Sequence: Synthetic oligonucleotide
uuccuuacucaucuagcaa

SEQ ID NO: 944120 - RNA, 19 nt, Artificial Sequence
  Description of Artificial Sequence: Synthetic oligonucleotide
aauaacaggaagacccuuu

SEQ ID NO: 944121 - RNA, 19 nt, Artificial Sequence
  Description of Artificial Sequence: Synthetic oligonucleotide
cuucguaacacuguccguc

SEQ ID NO: 944122 - RNA, 19 nt, Artificial Sequence
  Description of Artificial Sequence: Synthetic oligonucleotide
uggccagguuaucaaacug

SEQ ID NO: 944123 - RNA, 19 nt, Artificial Sequence
  Description of Artificial Sequence: Synthetic oligonucleotide
guuguugaauugcugccac

SEQ ID NO: 944124 - RNA, 19 nt, Artificial Sequence
  Description of Artificial Sequence: Synthetic oligonucleotide
cagcaaaggugauugcagc

SEQ ID NO: 944125 - RNA, 19 nt, Artificial Sequence
  Description of Artificial Sequence: Synthetic oligonucleotide
cuuuguagcuagccaacug

SEQ ID NO: 944126 - RNA, 19 nt, Artificial Sequence
  Description of Artificial Sequence: Synthetic oligonucleotide
ugcagagaugaacuccaac

SEQ ID NO: 944127 - RNA, 19 nt, Artificial Sequence
  Description of Artificial Sequence: Synthetic oligonucleotide
caucaggugccugacauug

SEQ ID NO: 944128 - RNA, 19 nt, Artificial Sequence
  Description of Artificial Sequence: Synthetic oligonucleotide
aaggggagcacauccuaaa

SEQ ID NO: 944129 - RNA, 19 nt, Artificial Sequence
  Description of Artificial Sequence: Synthetic oligonucleotide
cuuccuuacucaucuagca

SEQ ID NO: 944130 - RNA, 19 nt, Artificial Sequence
  Description of Artificial Sequence: Synthetic oligonucleotide
uucuacuugcuggagcuga

SEQ ID NO: 944131 - RNA, 19 nt, Artificial Sequence
  Description of Artificial Sequence: Synthetic oligonucleotide
gucuacucaacauuaguua

SEQ ID NO: 944132 - RNA, 19 nt, Artificial Sequence
  Description of Artificial Sequence: Synthetic oligonucleotide
cagcauugccauaaccagc

SEQ ID NO: 944133 - RNA, 19 nt, Artificial Sequence
  Description of Artificial Sequence: Synthetic oligonucleotide
uucguaacacuguccgucu

SEQ ID NO: 944134 - RNA, 19 nt, Artificial Sequence
  Description of Artificial Sequence: Synthetic oligonucleotide
ucagcuacaugaacauaau

SEQ ID NO: 944135 - RNA, 19 nt, Artificial Sequence
  Description of Artificial Sequence: Synthetic oligonucleotide
cauacucgggcuugucugc

SEQ ID NO: 944136 - RNA, 19 nt, Artificial Sequence
  Description of Artificial Sequence: Synthetic oligonucleotide
uguugaauugcugccacuu

SEQ ID NO: 944137 - RNA, 19 nt, Artificial Sequence
  Description of Artificial Sequence: Synthetic oligonucleotide
guauacaucagcuuuuguu

SEQ ID NO: 944138 - RNA, 19 nt, Artificial Sequence
  Description of Artificial Sequence: Synthetic oligonucleotide
uuuucuccguucccagaca

SEQ ID NO: 944139 - RNA, 19 nt, Artificial Sequence
  Description of Artificial Sequence: Synthetic oligonucleotide
gauacugggucauaggcuu

SEQ ID NO: 944140 - RNA, 19 nt, Artificial Sequence
  Description of Artificial Sequence: Synthetic oligonucleotide
uccgcuucguaacacuguc

SEQ ID NO: 944141 - RNA, 19 nt, Artificial Sequence
  Description of Artificial Sequence: Synthetic oligonucleotide
ugcugacuuaagcagcauc

SEQ ID NO: 944142 - RNA, 19 nt, Artificial Sequence
  Description of Artificial Sequence: Synthetic oligonucleotide
gguuugagguucaacaaug

SEQ ID NO: 944143 - RNA, 19 nt, Artificial Sequence
  Description of Artificial Sequence: Synthetic oligonucleotide
aucugucauaaguaguaau

SEQ ID NO: 944144 - RNA, 19 nt, Artificial Sequence
  Description of Artificial Sequence: Synthetic oligonucleotide
gguucaacaauggagucac

SEQ ID NO: 944145 - RNA, 19 nt, Artificial Sequence
  Description of Artificial Sequence: Synthetic oligonucleotide
aguggcuaggcugaguaga

SEQ ID NO: 944146 - RNA, 19 nt, Artificial Sequence
  Description of Artificial Sequence: Synthetic oligonucleotide
caauggagucacuucagca

SEQ ID NO: 944147 - RNA, 19 nt, Artificial Sequence
  Description of Artificial Sequence: Synthetic oligonucleotide
uaccuagaaaaguugccuu

SEQ ID NO: 944148 - RNA, 19 nt, Artificial Sequence
  Description of Artificial Sequence: Synthetic oligonucleotide
ugcaaggguuuccgaaggc

SEQ ID NO: 944149 - RNA, 19 nt, Artificial Sequence
  Description of Artificial Sequence: Synthetic oligonucleotide
uuaacccauacucgggcuu

SEQ ID NO: 944150 - RNA, 19 nt, Artificial Sequence
  Description of Artificial Sequence: Synthetic oligonucleotide
ugcccgucacacuuuccgg

SEQ ID NO: 944151 - RNA, 19 nt, Artificial Sequence
  Description of Artificial Sequence: Synthetic oligonucleotide
agcaccugaaaacuccaaa

SEQ ID NO: 944152 - RNA, 19 nt, Artificial Sequence
  Description of Artificial Sequence: Synthetic oligonucleotide
guaguaaugaaaaguuaaa

SEQ ID NO: 944153 - RNA, 19 nt, Artificial Sequence
  Description of Artificial Sequence: Synthetic oligonucleotide
gauugcagccgugccauug

SEQ ID NO: 944154 - RNA, 19 nt, Artificial Sequence
  Description of Artificial Sequence: Synthetic oligonucleotide
uguagcuagccaacuguuu

SEQ ID NO: 944155 - RNA, 19 nt, Artificial Sequence
  Description of Artificial Sequence: Synthetic oligonucleotide
ugggauacgucaagugcaa

SEQ ID NO: 944156 - RNA, 19 nt, Artificial Sequence
  Description of Artificial Sequence: Synthetic oligonucleotide
aggacuuauaaaaugucua

SEQ ID NO: 944157 - RNA, 19 nt, Artificial Sequence
  Description of Artificial Sequence: Synthetic oligonucleotide
aguuaucaaaugucuucaa

SEQ ID NO: 944158 - RNA, 19 nt, Artificial Sequence
  Description of Artificial Sequence: Synthetic oligonucleotide
uuguagcuagccaacuguu

SEQ ID NO: 944159 - RNA, 19 nt, Artificial Sequence
  Description of Artificial Sequence: Synthetic oligonucleotide
guauuuagaugugucuuga

SEQ ID NO: 944160 - RNA, 19 nt, Artificial Sequence
  Description of Artificial Sequence: Synthetic oligonucleotide
gauuacugcggcaucaggu

SEQ ID NO: 944161 - RNA, 19 nt, Artificial Sequence
  Description of Artificial Sequence: Synthetic oligonucleotide
aaaccaaacuuugcuguuu

SEQ ID NO: 944162 - RNA, 19 nt, Artificial Sequence
  Description of Artificial Sequence: Synthetic oligonucleotide
gcaaaggugauugcagccg

SEQ ID NO: 944163 - RNA, 19 nt, Artificial Sequence
  Description of Artificial Sequence: Synthetic oligonucleotide
uucuacggguuugagguuc

SEQ ID NO: 944164 - RNA, 19 nt, Artificial Sequence
  Description of Artificial Sequence: Synthetic oligonucleotide
agcuuuuguuuucccauau

SEQ ID NO: 944165 - RNA, 19 nt, Artificial Sequence
  Description of Artificial Sequence: Synthetic oligonucleotide
uaacccauacucgggcuug

SEQ ID NO: 944166 - RNA, 19 nt, Artificial Sequence
  Description of Artificial Sequence: Synthetic oligonucleotide
ucuacggguuugagguuca

SEQ ID NO: 944167 - RNA, 19 nt, Artificial Sequence
  Description of Artificial Sequence: Synthetic oligonucleotide
guauacagggguauacauc

SEQ ID NO: 944168 - RNA, 19 nt, Artificial Sequence
  Description of Artificial Sequence: Synthetic oligonucleotide
auggagucacuucagcauu

SEQ ID NO: 944169 - RNA, 19 nt, Artificial Sequence
  Description of Artificial Sequence: Synthetic oligonucleotide
ucacacuuuccggcgaagc

SEQ ID NO: 944170 - RNA, 19 nt, Artificial Sequence
  Description of Artificial Sequence: Synthetic oligonucleotide
auugcagccgugccauugu

SEQ ID NO: 944171 - RNA, 19 nt, Artificial Sequence
  Description of Artificial Sequence: Synthetic oligonucleotide
caguuaucaaaugucuuca

SEQ ID NO: 944172 - RNA, 19 nt, Artificial Sequence
  Description of Artificial Sequence: Synthetic oligonucleotide
caguaaucaucuaagugcu

SEQ ID NO: 944173 - RNA, 19 nt, Artificial Sequence
  Description of Artificial Sequence: Synthetic oligonucleotide
aaggguuuccgaaggcuga

SEQ ID NO: 944174 - RNA, 19 nt, Artificial Sequence
  Description of Artificial Sequence: Synthetic oligonucleotide
gaguacgcccuguuguuga

SEQ ID NO: 944175 - RNA, 19 nt, Artificial Sequence
  Description of Artificial Sequence: Synthetic oligonucleotide
agguucaacaauggaguca

SEQ ID NO: 944176 - RNA, 19 nt, Artificial Sequence
  Description of Artificial Sequence: Synthetic oligonucleotide
aggcccgagaaacaaguaa

SEQ ID NO: 944177 - RNA, 19 nt, Artificial Sequence
  Description of Artificial Sequence: Synthetic oligonucleotide
acuguuuugccagguccuc

SEQ ID NO: 944178 - RNA, 19 nt, Artificial Sequence
  Description of Artificial Sequence: Synthetic oligonucleotide
ccagcaaaggugauugcag

SEQ ID NO: 944179 - RNA, 19 nt, Artificial Sequence
  Description of Artificial Sequence: Synthetic oligonucleotide
ucauucuaccaaagccaaa

SEQ ID NO: 944180 - RNA, 19 nt, Artificial Sequence
  Description of Artificial Sequence: Synthetic oligonucleotide
gugucuugauacuggguca

SEQ ID NO: 944181 - RNA, 19 nt, Artificial Sequence
  Description of Artificial Sequence: Synthetic oligonucleotide
guaauucaaggagaaaccu

SEQ ID NO: 944182 - RNA, 19 nt, Artificial Sequence
  Description of Artificial Sequence: Synthetic oligonucleotide
uugcggugauguuccaaug

SEQ ID NO: 944183 - RNA, 19 nt, Artificial Sequence
  Description of Artificial Sequence: Synthetic oligonucleotide
ugcucacuuaggccaacaa

SEQ ID NO: 944184 - RNA, 19 nt, Artificial Sequence
  Description of Artificial Sequence: Synthetic oligonucleotide
uggcaacuugaucuaguua

SEQ ID NO: 944185 - RNA, 19 nt, Artificial Sequence
  Description of Artificial Sequence: Synthetic oligonucleotide
cucaaucuccgcuucguaa

SEQ ID NO: 944186 - RNA, 19 nt, Artificial Sequence
  Description of Artificial Sequence: Synthetic oligonucleotide
agggaaauuaugggcagau

SEQ ID NO: 944187 - RNA, 19 nt, Artificial Sequence
  Description of Artificial Sequence: Synthetic oligonucleotide
uuugcccgucacacuuucc

SEQ ID NO: 944188 - RNA, 19 nt, Artificial Sequence
  Description of Artificial Sequence: Synthetic oligonucleotide
guucaacaaacucgaggga

SEQ ID NO: 944189 - RNA, 19 nt, Artificial Sequence
  Description of Artificial Sequence: Synthetic oligonucleotide
aggugccugacauuguauu

SEQ ID NO: 944190 - RNA, 19 nt, Artificial Sequence
  Description of Artificial Sequence: Synthetic oligonucleotide
acagucucucugauuacug

SEQ ID NO: 944191 - RNA, 19 nt, Artificial Sequence
  Description of Artificial Sequence: Synthetic oligonucleotide
uacgcccuguuguugaauu

SEQ ID NO: 944192 - RNA, 19 nt, Artificial Sequence
  Description of Artificial Sequence: Synthetic oligonucleotide
aaguugccuuguucaacaa

SEQ ID NO: 944193 - RNA, 19 nt, Artificial Sequence
  Description of Artificial Sequence: Synthetic oligonucleotide
caaacucgagggaucuguc

SEQ ID NO: 944194 - RNA, 19 nt, Artificial Sequence
  Description of Artificial Sequence: Synthetic oligonucleotide
ccaacuuugcccgucacac

SEQ ID NO: 944195 - RNA, 19 nt, Artificial Sequence
  Description of Artificial Sequence: Synthetic oligonucleotide
guaccacugccacaaguga

SEQ ID NO: 944196 - RNA, 19 nt, Artificial Sequence
  Description of Artificial Sequence: Synthetic oligonucleotide
aucuccgcuucguaacacu

SEQ ID NO: 944197 - RNA, 19 nt, Artificial Sequence
  Description of Artificial Sequence: Synthetic oligonucleotide
gagggaucugucauaagua

SEQ ID NO: 944198 - RNA, 19 nt, Artificial Sequence
  Description of Artificial Sequence: Synthetic oligonucleotide
gaauaacuguggugcucac

SEQ ID NO: 944199 - RNA, 19 nt, Artificial Sequence
  Description of Artificial Sequence: Synthetic oligonucleotide
auaaccagcaaaggugauu

SEQ ID NO: 944200 - RNA, 19 nt, Artificial Sequence
  Description of Artificial Sequence: Synthetic oligonucleotide
ccgaaggcugaguugacag

SEQ ID NO: 944201 - RNA, 19 nt, Artificial Sequence
  Description of Artificial Sequence: Synthetic oligonucleotide
cuauaacuucuugcaaauc

SEQ ID NO: 944202 - RNA, 19 nt, Artificial Sequence
  Description of Artificial Sequence: Synthetic oligonucleotide
cugauuacugcggcaucag

SEQ ID NO: 944203 - RNA, 19 nt, Artificial Sequence
  Description of Artificial Sequence: Synthetic oligonucleotide
cgcuucguaacacuguccg

SEQ ID NO: 944204 - RNA, 19 nt, Artificial Sequence
  Description of Artificial Sequence: Synthetic oligonucleotide
acacuuuccggcgaagcaa

SEQ ID NO: 944205 - RNA, 19 nt, Artificial Sequence
  Description of Artificial Sequence: Synthetic oligonucleotide
gagaaaccucaaaccaaac

SEQ ID NO: 944206 - RNA, 19 nt, Artificial Sequence
  Description of Artificial Sequence: Synthetic oligonucleotide
uuccaggaguggcuaggcu

SEQ ID NO: 944207 - RNA, 19 nt, Artificial Sequence
  Description of Artificial Sequence: Synthetic oligonucleotide
gaucugucauaaguaguaa

SEQ ID NO: 944208 - RNA, 19 nt, Artificial Sequence
  Description of Artificial Sequence: Synthetic oligonucleotide
uggaguacgcccuguuguu

SEQ ID NO: 944209 - RNA, 19 nt, Artificial Sequence
  Description of Artificial Sequence: Synthetic oligonucleotide
caacagucucucugauuac

SEQ ID NO: 944210 - RNA, 19 nt, Artificial Sequence
  Description of Artificial Sequence: Synthetic oligonucleotide
agugagucaauaggcccga

SEQ ID NO: 944211 - RNA, 19 nt, Artificial Sequence
  Description of Artificial Sequence: Synthetic oligonucleotide
uuuugcggugauguuccaa

SEQ ID NO: 944212 - RNA, 19 nt, Artificial Sequence
  Description of Artificial Sequence: Synthetic oligonucleotide
cuuugcccgucacacuuuc

SEQ ID NO: 944213 - RNA, 19 nt, Artificial Sequence
  Description of Artificial Sequence: Synthetic oligonucleotide
ggucauaggcuugucagca

SEQ ID NO: 944214 - RNA, 19 nt, Artificial Sequence
  Description of Artificial Sequence: Synthetic oligonucleotide
guuuguugccacuguccuc

SEQ ID NO: 944215 - RNA, 19 nt, Artificial Sequence
  Description of Artificial Sequence: Synthetic oligonucleotide
gggcuugucugcacaaugg

SEQ ID NO: 944216 - RNA, 19 nt, Artificial Sequence
  Description of Artificial Sequence: Synthetic oligonucleotide
guagcuagccaacuguuuu

SEQ ID NO: 944217 - RNA, 19 nt, Artificial Sequence
  Description of Artificial Sequence: Synthetic oligonucleotide
uccgaaggcugaguugaca

SEQ ID NO: 944218 - RNA, 19 nt, Artificial Sequence
  Description of Artificial Sequence: Synthetic oligonucleotide
augggcagauuaaugcaca

SEQ ID NO: 944219 - RNA, 19 nt, Artificial Sequence
  Description of Artificial Sequence: Synthetic oligonucleotide
cacacuuuccggcgaagca

SEQ ID NO: 944220 - RNA, 19 nt, Artificial Sequence
  Description of Artificial Sequence: Synthetic oligonucleotide
cagauggccauacauuugu

SEQ ID NO: 944221 - RNA, 19 nt, Artificial Sequence
  Description of Artificial Sequence: Synthetic oligonucleotide
ugucuuuagcaggcuggca

SEQ ID NO: 944222 - RNA, 19 nt, Artificial Sequence
  Description of Artificial Sequence: Synthetic oligonucleotide
ggaucugucauaaguagua

SEQ ID NO: 944223 - RNA, 19 nt, Artificial Sequence
  Description of Artificial Sequence: Synthetic oligonucleotide
cauacauuuguccccuacu

SEQ ID NO: 944224 - RNA, 19 nt, Artificial Sequence
  Description of Artificial Sequence: Synthetic oligonucleotide
aguaaucaucuaagugcug

SEQ ID NO: 944225 - RNA, 19 nt, Artificial Sequence
  Description of Artificial Sequence: Synthetic oligonucleotide
gcuuaaacucaacuuggaa

SEQ ID NO: 944226 - RNA, 19 nt, Artificial Sequence
  Description of Artificial Sequence: Synthetic oligonucleotide
cugaacuugcaaggguuuc

SEQ ID NO: 944227 - RNA, 19 nt, Artificial Sequence
  Description of Artificial Sequence: Synthetic oligonucleotide
gcauuuugcggugauguuc

SEQ ID NO: 944228 - RNA, 19 nt, Artificial Sequence
  Description of Artificial Sequence: Synthetic oligonucleotide
ucgagggaucugucauaag

SEQ ID NO: 944229 - RNA, 19 nt, Artificial Sequence
  Description of Artificial Sequence: Synthetic oligonucleotide
cuguauacagggguauaca

SEQ ID NO: 944230 - RNA, 19 nt, Artificial Sequence
  Description of Artificial Sequence: Synthetic oligonucleotide
cuaccuagaaaaguugccu

SEQ ID NO: 944231 - RNA, 19 nt, Artificial Sequence
  Description of Artificial Sequence: Synthetic oligonucleotide
caaaagugucuucuuccaa

SEQ ID NO: 944232 - RNA, 19 nt, Artificial Sequence
  Description of Artificial Sequence: Synthetic oligonucleotide
uacggguuugagguucaac

SEQ ID NO: 944233 - RNA, 19 nt, Artificial Sequence
  Description of Artificial Sequence: Synthetic oligonucleotide
ggucaauucuauaacuucu

SEQ ID NO: 944234 - RNA, 19 nt, Artificial Sequence
  Description of Artificial Sequence: Synthetic oligonucleotide
ucacuccagauggccauac

SEQ ID NO: 944235 - RNA, 19 nt, Artificial Sequence
  Description of Artificial Sequence: Synthetic oligonucleotide
cucugauuacugcggcauc

SEQ ID NO: 944236 - RNA, 19 nt, Artificial Sequence
  Description of Artificial Sequence: Synthetic oligonucleotide
agcacauccuaaacauggu

SEQ ID NO: 944237 - RNA, 19 nt, Artificial Sequence
  Description of Artificial Sequence: Synthetic oligonucleotide
gaaggggagcacauccuaa

SEQ ID NO: 944238 - RNA, 19 nt, Artificial Sequence
  Description of Artificial Sequence: Synthetic oligonucleotide
caauaggcccgagaaacaa

SEQ ID NO: 944239 - RNA, 19 nt, Artificial Sequence
  Description of Artificial Sequence: Synthetic oligonucleotide
uaggcccgagaaacaagua

SEQ ID NO: 944240 - RNA, 19 nt, Artificial Sequence
  Description of Artificial Sequence: Synthetic oligonucleotide
gguuuguugccacuguccu

SEQ ID NO: 944241 - RNA, 19 nt, Artificial Sequence
  Description of Artificial Sequence: Synthetic oligonucleotide
gggagcacauccuaaacau

SEQ ID NO: 944242 - RNA, 19 nt, Artificial Sequence
  Description of Artificial Sequence: Synthetic oligonucleotide
cuccaaauuaggacuuaua

SEQ ID NO: 944243 - RNA, 19 nt, Artificial Sequence
  Description of Artificial Sequence: Synthetic oligonucleotide
uuccgaaggcugaguugac

SEQ ID NO: 944244 - RNA, 19 nt, Artificial Sequence
  Description of Artificial Sequence: Synthetic oligonucleotide
cacuuuccggcgaagcaaa

SEQ ID NO: 944245 - RNA, 19 nt, Artificial Sequence
  Description of Artificial Sequence: Synthetic oligonucleotide
ccagguuaucaaacugaag

SEQ ID NO: 944246 - RNA, 19 nt, Artificial Sequence
  Description of Artificial Sequence: Synthetic oligonucleotide
auacagggguauacaucag

SEQ ID NO: 944247 - RNA, 19 nt, Artificial Sequence
  Description of Artificial Sequence: Synthetic oligonucleotide
auuuugcggugauguucca

SEQ ID NO: 944248 - RNA, 19 nt, Artificial Sequence
  Description of Artificial Sequence: Synthetic oligonucleotide
gggcagauuaaugcacaag

SEQ ID NO: 944249 - RNA, 19 nt, Artificial Sequence
  Description of Artificial Sequence: Synthetic oligonucleotide
gcucacuuaggccaacaaa

SEQ ID NO: 944250 - RNA, 19 nt, Artificial Sequence
  Description of Artificial Sequence: Synthetic oligonucleotide
cccgucacacuuuccggcg

SEQ ID NO: 944251 - RNA, 19 nt, Artificial Sequence
  Description of Artificial Sequence: Synthetic oligonucleotide
ccauacauuuguccccuac

SEQ ID NO: 944252 - RNA, 19 nt, Artificial Sequence
  Description of Artificial Sequence: Synthetic oligonucleotide
uacucgggcuugucugcac

SEQ ID NO: 944253 - RNA, 19 nt, Artificial Sequence
  Description of Artificial Sequence: Synthetic oligonucleotide
aguacgcccuguuguugaa

SEQ ID NO: 944254 - RNA, 19 nt, Artificial Sequence
  Description of Artificial Sequence: Synthetic oligonucleotide
ucguaacacuguccgucuu

SEQ ID NO: 944255 - RNA, 19 nt, Artificial Sequence
  Description of Artificial Sequence: Synthetic oligonucleotide
aagcaccugaaaacuccaa

SEQ ID NO: 944256 - RNA, 19 nt, Artificial Sequence
  Description of Artificial Sequence: Synthetic oligonucleotide
cuaggcugaguagaagcaa

SEQ ID NO: 944257 - RNA, 19 nt, Artificial Sequence
  Description of Artificial Sequence: Synthetic oligonucleotide
cuuaagcagcaucuaccua

SEQ ID NO: 944258 - RNA, 19 nt, Artificial Sequence
  Description of Artificial Sequence: Synthetic oligonucleotide
guacucuuguucauuaauu

SEQ ID NO: 944259 - RNA, 19 nt, Artificial Sequence
  Description of Artificial Sequence: Synthetic oligonucleotide
gcccgucacacuuuccggc

SEQ ID NO: 944260 - RNA, 19 nt, Artificial Sequence
  Description of Artificial Sequence: Synthetic oligonucleotide
gccagaaguccaguaauca

SEQ ID NO: 944261 - RNA, 19 nt, Artificial Sequence
  Description of Artificial Sequence: Synthetic oligonucleotide
cucgagggaucugucauaa

SEQ ID NO: 944262 - RNA, 19 nt, Artificial Sequence
  Description of Artificial Sequence: Synthetic oligonucleotide
cccgagaaacaaguaauuc

SEQ ID NO: 944263 - RNA, 19 nt, Artificial Sequence
  Description of Artificial Sequence: Synthetic oligonucleotide
gcuaggcugaguagaagca

SEQ ID NO: 944264 - RNA, 19 nt, Artificial Sequence
  Description of Artificial Sequence: Synthetic oligonucleotide
cacacacccaaaagugucu

SEQ ID NO: 944265 - RNA, 19 nt, Artificial Sequence
  Description of Artificial Sequence: Synthetic oligonucleotide
cagcuacaugaacauaaua

SEQ ID NO: 944266 - RNA, 19 nt, Artificial Sequence
  Description of Artificial Sequence: Synthetic oligonucleotide
ggcuugucagcaaucccac

SEQ ID NO: 944267 - RNA, 19 nt, Artificial Sequence
  Description of Artificial Sequence: Synthetic oligonucleotide
gcggugauguuccaaugaa

SEQ ID NO: 944268 - RNA, 19 nt, Artificial Sequence
  Description of Artificial Sequence: Synthetic oligonucleotide
auucacgcugcugggcaau

SEQ ID NO: 944269 - RNA, 19 nt, Artificial Sequence
  Description of Artificial Sequence: Synthetic oligonucleotide
cuuacucaucuagcaaaua

SEQ ID NO: 944270 - RNA, 19 nt, Artificial Sequence
  Description of Artificial Sequence: Synthetic oligonucleotide
gcaucuaccuagaaaaguu

SEQ ID NO: 944271 - RNA, 19 nt, Artificial Sequence
  Description of Artificial Sequence: Synthetic oligonucleotide
cugacuuaagcagcaucua

SEQ ID NO: 944272 - RNA, 19 nt, Artificial Sequence
  Description of Artificial Sequence: Synthetic oligonucleotide
ggguuugagguucaacaau

SEQ ID NO: 944273 - RNA, 19 nt, Artificial Sequence
  Description of Artificial Sequence: Synthetic oligonucleotide
uucacgcugcugggcaauc

SEQ ID NO: 944274 - RNA, 19 nt, Artificial Sequence
  Description of Artificial Sequence: Synthetic oligonucleotide
aaagcccugcagagaugaa

SEQ ID NO: 944275 - RNA, 19 nt, Artificial Sequence
  Description of Artificial Sequence: Synthetic oligonucleotide
ggacauggguuuguugcca

SEQ ID NO: 944276 - RNA, 19 nt, Artificial Sequence
  Description of Artificial Sequence: Synthetic oligonucleotide
guggcuaggcugaguagaa

SEQ ID NO: 944277 - RNA, 19 nt, Artificial Sequence
  Description of Artificial Sequence: Synthetic oligonucleotide
cuggcaacuugaucuaguu

SEQ ID NO: 944278 - RNA, 19 nt, Artificial Sequence
  Description of Artificial Sequence: Synthetic oligonucleotide
cagggaaauuaugggcaga

SEQ ID NO: 944279 - RNA, 19 nt, Artificial Sequence
  Description of Artificial Sequence: Synthetic oligonucleotide
cucuuuaccuggcccuucu

SEQ ID NO: 944280 - RNA, 19 nt, Artificial Sequence
  Description of Artificial Sequence: Synthetic oligonucleotide
ggccagaaguccaguaauc

SEQ ID NO: 944281 - RNA, 19 nt, Artificial Sequence
  Description of Artificial Sequence: Synthetic oligonucleotide
gugagucaauaggcccgag

SEQ ID NO: 944282 - RNA, 19 nt, Artificial Sequence
  Description of Artificial Sequence: Synthetic oligonucleotide
cuagaaaaguugccuuguu

SEQ ID NO: 944283 - RNA, 19 nt, Artificial Sequence
  Description of Artificial Sequence: Synthetic oligonucleotide
ccgcuucguaacacugucc

SEQ ID NO: 944284 - RNA, 19 nt, Artificial Sequence
  Description of Artificial Sequence: Synthetic oligonucleotide
gguauacaucagcuuuugu

SEQ ID NO: 944285 - RNA, 19 nt, Artificial Sequence
  Description of Artificial Sequence: Synthetic oligonucleotide
cgcccuguuguugaauugc

SEQ ID NO: 944286 - RNA, 19 nt, Artificial Sequence
  Description of Artificial Sequence: Synthetic oligonucleotide
cauaaccagcaaaggugau

SEQ ID NO: 944287 - RNA, 19 nt, Artificial Sequence
  Description of Artificial Sequence: Synthetic oligonucleotide
ccccuacuuuccaggagug

SEQ ID NO: 944288 - RNA, 19 nt, Artificial Sequence
  Description of Artificial Sequence: Synthetic oligonucleotide
cuccgcuucguaacacugu

SEQ ID NO: 944289 - RNA, 19 nt, Artificial Sequence
  Description of Artificial Sequence: Synthetic oligonucleotide
gggaucugucauaaguagu

SEQ ID NO: 944290 - RNA, 19 nt, Artificial Sequence
  Description of Artificial Sequence: Synthetic oligonucleotide
ccaacaaaugcuggcaacu

SEQ ID NO: 944291 - RNA, 19 nt, Artificial Sequence
  Description of Artificial Sequence: Synthetic oligonucleotide
cgggcuugucugcacaaug

SEQ ID NO: 944292 - RNA, 19 nt, Artificial Sequence
  Description of Artificial Sequence: Synthetic oligonucleotide
acuuuccggcgaagcaaaa

SEQ ID NO: 944293 - RNA, 19 nt, Artificial Sequence
  Description of Artificial Sequence: Synthetic oligonucleotide
cagggguauacaucagcuu

SEQ ID NO: 944294 - RNA, 19 nt, Artificial Sequence
  Description of Artificial Sequence: Synthetic oligonucleotide
ccuagaaaaguugccuugu

SEQ ID NO: 944295 - RNA, 19 nt, Artificial Sequence
  Description of Artificial Sequence: Synthetic oligonucleotide
ggccauacauuuguccccu

SEQ ID NO: 944296 - RNA, 19 nt, Artificial Sequence
  Description of Artificial Sequence: Synthetic oligonucleotide
caggugccugacauuguau

SEQ ID NO: 944297 - RNA, 19 nt, Artificial Sequence
  Description of Artificial Sequence: Synthetic oligonucleotide
gcuucguaacacuguccgu

SEQ ID NO: 944298 - RNA, 19 nt, Artificial Sequence
  Description of Artificial Sequence: Synthetic oligonucleotide
gucagcaaucccacagguu

SEQ ID NO: 944299 - RNA, 19 nt, Artificial Sequence
  Description of Artificial Sequence: Synthetic oligonucleotide
gcuggcaacuugaucuagu

SEQ ID NO: 944300 - RNA, 19 nt, Artificial Sequence
  Description of Artificial Sequence: Synthetic oligonucleotide
cgaaggcugaguugacaga

SEQ ID NO: 944301 - RNA, 19 nt, Artificial Sequence
  Description of Artificial Sequence: Synthetic oligonucleotide
cuucuacggguuugagguu

SEQ ID NO: 944302 - RNA, 19 nt, Artificial Sequence
  Description of Artificial Sequence: Synthetic oligonucleotide
gggguauacaucagcuuuu

SEQ ID NO: 944303 - RNA, 19 nt, Artificial Sequence
  Description of Artificial Sequence: Synthetic oligonucleotide
ggcauuuugcggugauguu

SEQ ID NO: 944304 - RNA, 19 nt, Artificial Sequence
  Description of Artificial Sequence: Synthetic oligonucleotide
gggauacgucaagugcaaa

SEQ ID NO: 944305 - RNA, 19 nt, Artificial Sequence
  Description of Artificial Sequence: Synthetic oligonucleotide
cccauacucgggcuugucu

SEQ ID NO: 944306 - RNA, 19 nt, Artificial Sequence
  Description of Artificial Sequence: Synthetic oligonucleotide
cuacggguuugagguucaa

SEQ ID NO: 944307 - RNA, 19 nt, Artificial Sequence
  Description of Artificial Sequence: Synthetic oligonucleotide
ccagacaaggcagcuucua

SEQ ID NO: 944308 - RNA, 19 nt, Artificial Sequence
  Description of Artificial Sequence: Synthetic oligonucleotide
guacgcccuguuguugaau

SEQ ID NO: 944309 - RNA, 19 nt, Artificial Sequence
  Description of Artificial Sequence: Synthetic oligonucleotide
ccgucacacuuuccggcga

SEQ ID NO: 944310 - RNA, 19 nt, Artificial Sequence
  Description of Artificial Sequence: Synthetic oligonucleotide
gcccgagaaacaaguaauu

SEQ ID NO: 944311 - RNA, 19 nt, Artificial Sequence
  Description of Artificial Sequence: Synthetic oligonucleotide
ccgugccauugucuucauc

SEQ ID NO: 944312 - RNA, 19 nt, Artificial Sequence
  Description of Artificial Sequence: Synthetic oligonucleotide
aaggugaccguuuauaggg

SEQ ID NO: 944313 - RNA, 19 nt, Artificial Sequence
  Description of Artificial Sequence: Synthetic oligonucleotide
uauaacggucaccugaacg

SEQ ID NO: 944314 - RNA, 19 nt, Artificial Sequence
  Description of Artificial Sequence: Synthetic oligonucleotide
uguagaucugauauaagca

SEQ ID NO: 944315 - RNA, 19 nt, Artificial Sequence
  Description of Artificial Sequence: Synthetic oligonucleotide
uuauaggggucauaggugg

SEQ ID NO: 944316 - RNA, 19 nt, Artificial Sequence
  Description of Artificial Sequence: Synthetic oligonucleotide
ucagccaugccguaggucg

SEQ ID NO: 944317 - RNA, 19 nt, Artificial Sequence
  Description of Artificial Sequence: Synthetic oligonucleotide
uuuaccagcggcagguucg

SEQ ID NO: 944318 - RNA, 19 nt, Artificial Sequence
  Description of Artificial Sequence: Synthetic oligonucleotide
uuacauuuccgcucguccg

SEQ ID NO: 944319 - RNA, 19 nt, Artificial Sequence
  Description of Artificial Sequence: Synthetic oligonucleotide
guaguuacauuuccgcucg

SEQ ID NO: 944320 - RNA, 19 nt, Artificial Sequence
  Description of Artificial Sequence: Synthetic oligonucleotide
gaacuggcgguucagagcc

SEQ ID NO: 944321 - RNA, 19 nt, Artificial Sequence
  Description of Artificial Sequence: Synthetic oligonucleotide
guacaguucaucaauguag

SEQ ID NO: 944322 - RNA, 19 nt, Artificial Sequence
  Description of Artificial Sequence: Synthetic oligonucleotide
agguguagccaauggaagc

SEQ ID NO: 944323 - RNA, 19 nt, Artificial Sequence
  Description of Artificial Sequence: Synthetic oligonucleotide
gaaggugaccguuuauagg

SEQ ID NO: 944324 - RNA, 19 nt, Artificial Sequence
  Description of Artificial Sequence: Synthetic oligonucleotide
ugcgggagcgcgaauagcg

SEQ ID NO: 944325 - RNA, 19 nt, Artificial Sequence
  Description of Artificial Sequence: Synthetic oligonucleotide
ugcagucccacgcaguccg

SEQ ID NO: 944326 - RNA, 19 nt, Artificial Sequence
  Description of Artificial Sequence: Synthetic oligonucleotide
uuauuucacuacagaaacc

SEQ ID NO: 944327 - RNA, 19 nt, Artificial Sequence
  Description of Artificial Sequence: Synthetic oligonucleotide
aagucguucugcaccaggc

SEQ ID NO: 944328 - RNA, 19 nt, Artificial Sequence
  Description of Artificial Sequence: Synthetic oligonucleotide
guuacauuuccgcucgucc

SEQ ID NO: 944329 - RNA, 19 nt, Artificial Sequence
  Description of Artificial Sequence: Synthetic oligonucleotide
uucgagaagaacuguacuc

SEQ ID NO: 944330 - RNA, 19 nt, Artificial Sequence
  Description of Artificial Sequence: Synthetic oligonucleotide
agcgguaguagccucggcg

SEQ ID NO: 944331 - RNA, 19 nt, Artificial Sequence
  Description of Artificial Sequence: Synthetic oligonucleotide
guuacuauggcuuucuccu

SEQ ID NO: 944332 - RNA, 19 nt, Artificial Sequence
  Description of Artificial Sequence: Synthetic oligonucleotide
uucgcugucgccgggaacg

SEQ ID NO: 944333 - RNA, 19 nt, Artificial Sequence
  Description of Artificial Sequence: Synthetic oligonucleotide
uguggucuagaugugcgcg

SEQ ID NO: 944334 - RNA, 19 nt, Artificial Sequence
  Description of Artificial Sequence: Synthetic oligonucleotide
uucauccggaucuuucggg

SEQ ID NO: 944335 - RNA, 19 nt, Artificial Sequence
  Description of Artificial Sequence: Synthetic oligonucleotide
uggauucggaaggugaccg

SEQ ID NO: 944336 - RNA, 19 nt, Artificial Sequence
  Description of Artificial Sequence: Synthetic oligonucleotide
aaacuggugaugaaaguga

SEQ ID NO: 944337 - RNA, 19 nt, Artificial Sequence
  Description of Artificial Sequence: Synthetic oligonucleotide
guuuauaggggucauaggu

SEQ ID NO: 944338 - RNA, 19 nt, Artificial Sequence
  Description of Artificial Sequence: Synthetic oligonucleotide
uauugaguaucagaccacc

SEQ ID NO: 944339 - RNA, 19 nt, Artificial Sequence
  Description of Artificial Sequence: Synthetic oligonucleotide
guaucagaccaccugcucc

SEQ ID NO: 944340 - RNA, 19 nt, Artificial Sequence
  Description of Artificial Sequence: Synthetic oligonucleotide
agucguucugcaccaggcc

SEQ ID NO: 944341 - RNA, 19 nt, Artificial Sequence
  Description of Artificial Sequence: Synthetic oligonucleotide
gaucuuucgggccauggca

SEQ ID NO: 944342 - RNA, 19 nt, Artificial Sequence
  Description of Artificial Sequence: Synthetic oligonucleotide
ucgacuguagcguggggag

SEQ ID NO: 944343 - RNA, 19 nt, Artificial Sequence
  Description of Artificial Sequence: Synthetic oligonucleotide
aguacugucuucauaggug

SEQ ID NO: 944344 - RNA, 19 nt, Artificial Sequence
  Description of Artificial Sequence: Synthetic oligonucleotide
uaacugggagggcugaucu

SEQ ID NO: 944345 - RNA, 19 nt, Artificial Sequence
  Description of Artificial Sequence: Synthetic oligonucleotide
ucgagaagaacuguacucu

SEQ ID NO: 944346 - RNA, 19 nt, Artificial Sequence
  Description of Artificial Sequence: Synthetic oligonucleotide
guagcauccugacaaaguc

SEQ ID NO: 944347 - RNA, 19 nt, Artificial Sequence
  Description of Artificial Sequence: Synthetic oligonucleotide
uuauccgccuugaacuggc

SEQ ID NO: 944348 - RNA, 19 nt, Artificial Sequence
  Description of Artificial Sequence: Synthetic oligonucleotide
ccuaaugccuguaaugggg

SEQ ID NO: 944349 - RNA, 19 nt, Artificial Sequence
  Description of Artificial Sequence: Synthetic oligonucleotide
auuuccgcucguccgacuc

SEQ ID NO: 944350 - RNA, 19 nt, Artificial Sequence
  Description of Artificial Sequence: Synthetic oligonucleotide
uacauuuccgcucguccga

SEQ ID NO: 944351 - RNA, 19 nt, Artificial Sequence
  Description of Artificial Sequence: Synthetic oligonucleotide
gaauucucuucgcugucgc

SEQ ID NO: 944352 - RNA, 19 nt, Artificial Sequence
  Description of Artificial Sequence: Synthetic oligonucleotide
cacgcaguccgccuaaugc

SEQ ID NO: 944353 - RNA, 19 nt, Artificial Sequence
  Description of Artificial Sequence: Synthetic oligonucleotide
ucauccggaucuuucgggc

SEQ ID NO: 944354 - RNA, 19 nt, Artificial Sequence
  Description of Artificial Sequence: Synthetic oligonucleotide
gacgcggcuggccuggucg

SEQ ID NO: 944355 - RNA, 19 nt, Artificial Sequence
  Description of Artificial Sequence: Synthetic oligonucleotide
ucagacugcggcuucggga

SEQ ID NO: 944356 - RNA, 19 nt, Artificial Sequence
  Description of Artificial Sequence: Synthetic oligonucleotide
ucuuauccgccuugaacug

SEQ ID NO: 944357 - RNA, 19 nt, Artificial Sequence
  Description of Artificial Sequence: Synthetic oligonucleotide
uagaugugcgcggacauca

SEQ ID NO: 944358 - RNA, 19 nt, Artificial Sequence
  Description of Artificial Sequence: Synthetic oligonucleotide
uccguacaguucaucaaug

SEQ ID NO: 944359 - RNA, 19 nt, Artificial Sequence
  Description of Artificial Sequence: Synthetic oligonucleotide
cauccugacaaagucuccg

SEQ ID NO: 944360 - RNA, 19 nt, Artificial Sequence
  Description of Artificial Sequence: Synthetic oligonucleotide
ucguaguuacauuuccgcu

SEQ ID NO: 944361 - RNA, 19 nt, Artificial Sequence
  Description of Artificial Sequence: Synthetic oligonucleotide
uggcgagugacucuggcuc

SEQ ID NO: 944362 - RNA, 19 nt, Artificial Sequence
  Description of Artificial Sequence: Synthetic oligonucleotide
uccgacugcuacuauggug

SEQ ID NO: 944363 - RNA, 19 nt, Artificial Sequence
  Description of Artificial Sequence: Synthetic oligonucleotide
ugugcgcggacaucaaagc

SEQ ID NO: 944364 - RNA, 19 nt, Artificial Sequence
  Description of Artificial Sequence: Synthetic oligonucleotide
gcuacuauggugccugggg

SEQ ID NO: 944365 - RNA, 19 nt, Artificial Sequence
  Description of Artificial Sequence: Synthetic oligonucleotide
ugucuucauagguguagcc

SEQ ID NO: 944366 - RNA, 19 nt, Artificial Sequence
  Description of Artificial Sequence: Synthetic oligonucleotide
ggaaggugaccguuuauag

SEQ ID NO: 944367 - RNA, 19 nt, Artificial Sequence
  Description of Artificial Sequence: Synthetic oligonucleotide
ucuagaugugcgcggacau

SEQ ID NO: 944368 - RNA, 19 nt, Artificial Sequence
  Description of Artificial Sequence: Synthetic oligonucleotide
gcuuauaacggucaccuga

SEQ ID NO: 944369 - RNA, 19 nt, Artificial Sequence
  Description of Artificial Sequence: Synthetic oligonucleotide
acggcuuccacuacggguc

SEQ ID NO: 944370 - RNA, 19 nt, Artificial Sequence
  Description of Artificial Sequence: Synthetic oligonucleotide
uaacggucaccugaacggg

SEQ ID NO: 944371 - RNA, 19 nt, Artificial Sequence
  Description of Artificial Sequence: Synthetic oligonucleotide
caauguagaucugauauaa

SEQ ID NO: 944372 - RNA, 19 nt, Artificial Sequence
  Description of Artificial Sequence: Synthetic oligonucleotide
auagguggggcugucucgg

SEQ ID NO: 944373 - RNA, 19 nt, Artificial Sequence
  Description of Artificial Sequence: Synthetic oligonucleotide
cuuauaacggucaccugaa

SEQ ID NO: 944374 - RNA, 19 nt, Artificial Sequence
  Description of Artificial Sequence: Synthetic oligonucleotide
uuuccguagcauccugaca

SEQ ID NO: 944375 - RNA, 19 nt, Artificial Sequence
  Description of Artificial Sequence: Synthetic oligonucleotide
ggcgaagucguucugcacc

SEQ ID NO: 944376 - RNA, 19 nt, Artificial Sequence
  Description of Artificial Sequence: Synthetic oligonucleotide
aguuacauuuccgcucguc

SEQ ID NO: 944377 - RNA, 19 nt, Artificial Sequence
  Description of Artificial Sequence: Synthetic oligonucleotide
aucuuucgggccauggcac

SEQ ID NO: 944378 - RNA, 19 nt, Artificial Sequence
  Description of Artificial Sequence: Synthetic oligonucleotide
uccgaaacuggugaugaaa

SEQ ID NO: 944379 - RNA, 19 nt, Artificial Sequence
  Description of Artificial Sequence: Synthetic oligonucleotide
ugaccguuuauagggguca

SEQ ID NO: 944380 - RNA, 19 nt, Artificial Sequence
  Description of Artificial Sequence: Synthetic oligonucleotide
guggucuagaugugcgcgg

SEQ ID NO: 944381 - RNA, 19 nt, Artificial Sequence
  Description of Artificial Sequence: Synthetic oligonucleotide
accgcucguaguuacauuu

SEQ ID NO: 944382 - RNA, 19 nt, Artificial Sequence
  Description of Artificial Sequence: Synthetic oligonucleotide
aacgggagcggcuccugcu

SEQ ID NO: 944383 - RNA, 19 nt, Artificial Sequence
  Description of Artificial Sequence: Synthetic oligonucleotide
cuuauccgccuugaacugg

SEQ ID NO: 944384 - RNA, 19 nt, Artificial Sequence
  Description of Artificial Sequence: Synthetic oligonucleotide
uuauaacggucaccugaac

SEQ ID NO: 944385 - RNA, 19 nt, Artificial Sequence
  Description of Artificial Sequence: Synthetic oligonucleotide
  modified_base (9)..(9): a, c, u, g, unknown or other
uccuccucngguucucggc

SEQ ID NO: 944386 - RNA, 19 nt, Artificial Sequence
  Description of Artificial Sequence: Synthetic oligonucleotide
augugcgcggacaucaaag

SEQ ID NO: 944387 - RNA, 19 nt, Artificial Sequence
  Description of Artificial Sequence: Synthetic oligonucleotide
gcgaauagcgccgggagcg

SEQ ID NO: 944388 - RNA, 19 nt, Artificial Sequence
  Description of Artificial Sequence: Synthetic oligonucleotide
gguguagccaauggaagcc

SEQ ID NO: 944389 - RNA, 19 nt, Artificial Sequence
  Description of Artificial Sequence: Synthetic oligonucleotide
uccugacaaagucuccguc

SEQ ID NO: 944390 - RNA, 19 nt, Artificial Sequence
  Description of Artificial Sequence: Synthetic oligonucleotide
cauccggaucuuucgggcc

SEQ ID NO: 944391 - RNA, 19 nt, Artificial Sequence
  Description of Artificial Sequence: Synthetic oligonucleotide
uggucggcuucucccuugg

SEQ ID NO: 944392 - RNA, 19 nt, Artificial Sequence
  Description of Artificial Sequence: Synthetic oligonucleotide
ggcucggggagcgagagcg

SEQ ID NO: 944393 - RNA, 19 nt, Artificial Sequence
  Description of Artificial Sequence: Synthetic oligonucleotide
gagcgcugcagucccacgc

SEQ ID NO: 944394 - RNA, 19 nt, Artificial Sequence
  Description of Artificial Sequence: Synthetic oligonucleotide
cuucauccgaacuugcucu

SEQ ID NO: 944395 - RNA, 19 nt, Artificial Sequence
  Description of Artificial Sequence: Synthetic oligonucleotide
cagagcgguaguagccucg

SEQ ID NO: 944396 - RNA, 19 nt, Artificial Sequence
  Description of Artificial Sequence: Synthetic oligonucleotide
uccgccuaaugccuguaau

SEQ ID NO: 944397 - RNA, 19 nt, Artificial Sequence
  Description of Artificial Sequence: Synthetic oligonucleotide
uccgagugccgccuucccc

SEQ ID NO: 944398 - RNA, 19 nt, Artificial Sequence
  Description of Artificial Sequence: Synthetic oligonucleotide
cuuuaccagcggcagguuc

SEQ ID NO: 944399 - RNA, 19 nt, Artificial Sequence
  Description of Artificial Sequence: Synthetic oligonucleotide
ugcuacuauggugccuggg

SEQ ID NO: 944400 - RNA, 19 nt, Artificial Sequence
  Description of Artificial Sequence: Synthetic oligonucleotide
ucgucgcugccuccgaaac

SEQ ID NO: 944401 - RNA, 19 nt, Artificial Sequence
  Description of Artificial Sequence: Synthetic oligonucleotide
uuaccagcggcagguucgg

SEQ ID NO: 944402 - RNA, 19 nt, Artificial Sequence
  Description of Artificial Sequence: Synthetic oligonucleotide
gcgcguggcgcccagagcg

SEQ ID NO: 944403 - RNA, 19 nt, Artificial Sequence
  Description of Artificial Sequence: Synthetic oligonucleotide
gcuucucgcccacagcugg

SEQ ID NO: 944404 - RNA, 19 nt, Artificial Sequence
  Description of Artificial Sequence: Synthetic oligonucleotide
ucguccgacuccugcuccg

SEQ ID NO: 944405 - RNA, 19 nt, Artificial Sequence
  Description of Artificial Sequence: Synthetic oligonucleotide
uucggaaggugaccguuua

SEQ ID NO: 944406 - RNA, 19 nt, Artificial Sequence
  Description of Artificial Sequence: Synthetic oligonucleotide
ucaccugaacgggagcggc

SEQ ID NO: 944407 - RNA, 19 nt, Artificial Sequence
  Description of Artificial Sequence: Synthetic oligonucleotide
  modified_base (2)..(2): a, c, u, g, unknown or other
cngguucucggccaccuuc

SEQ ID NO: 944408 - RNA, 19 nt, Artificial Sequence
  Description of Artificial Sequence: Synthetic oligonucleotide
uccggggagauggugguga

SEQ ID NO: 944409 - RNA, 19 nt, Artificial Sequence
  Description of Artificial Sequence: Synthetic oligonucleotide
ucucgacuguagcgugggg

SEQ ID NO: 944410 - RNA, 19 nt, Artificial Sequence
  Description of Artificial Sequence: Synthetic oligonucleotide
caggccuccguacaguuca

SEQ ID NO: 944411 - RNA, 19 nt, Artificial Sequence
  Description of Artificial Sequence: Synthetic oligonucleotide
acauuuccgcucguccgac

SEQ ID NO: 944412 - RNA, 19 nt, Artificial Sequence
  Description of Artificial Sequence: Synthetic oligonucleotide
agagcgguaguagccucgg

SEQ ID NO: 944413 - RNA, 19 nt, Artificial Sequence
  Description of Artificial Sequence: Synthetic oligonucleotide
ucauccgaacuugcucucc

SEQ ID NO: 944414 - RNA, 19 nt, Artificial Sequence
  Description of Artificial Sequence: Synthetic oligonucleotide
uacgggucagacugcggcu

SEQ ID NO: 944415 - RNA, 19 nt, Artificial Sequence
  Description of Artificial Sequence: Synthetic oligonucleotide
uucucgcccacagcugggg

SEQ ID NO: 944416 - RNA, 19 nt, Artificial Sequence
  Description of Artificial Sequence: Synthetic oligonucleotide
ccguuuauaggggucauag

SEQ ID NO: 944417 - RNA, 19 nt, Artificial Sequence
  Description of Artificial Sequence: Synthetic oligonucleotide
ucgggccauggcacgaagc

SEQ ID NO: 944418 - RNA, 19 nt, Artificial Sequence
  Description of Artificial Sequence: Synthetic oligonucleotide
cuggauucggaaggugacc

SEQ ID NO: 944419 - RNA, 19 nt, Artificial Sequence
  Description of Artificial Sequence: Synthetic oligonucleotide
uucauccgaacuugcucuc

SEQ ID NO: 944420 - RNA, 19 nt, Artificial Sequence
  Description of Artificial Sequence: Synthetic oligonucleotide
guacccgccacgccgggcc

SEQ ID NO: 944421 - RNA, 19 nt, Artificial Sequence
  Description of Artificial Sequence: Synthetic oligonucleotide
cucucgacuguagcguggg

SEQ ID NO: 944422 - RNA, 19 nt, Artificial Sequence
  Description of Artificial Sequence: Synthetic oligonucleotide
accugaacgggagcggcuc

SEQ ID NO: 944423 - RNA, 19 nt, Artificial Sequence
  Description of Artificial Sequence: Synthetic oligonucleotide
ccuucgagaagaacuguac

SEQ ID NO: 944424 - RNA, 19 nt, Artificial Sequence
  Description of Artificial Sequence: Synthetic oligonucleotide
uuccacuacgggucagacu

SEQ ID NO: 944425 - RNA, 19 nt, Artificial Sequence
  Description of Artificial Sequence: Synthetic oligonucleotide
ucucuucgcugucgccggg

SEQ ID NO: 944426 - RNA, 19 nt, Artificial Sequence
  Description of Artificial Sequence: Synthetic oligonucleotide
auugaguaucagaccaccu

SEQ ID NO: 944427 - RNA, 19 nt, Artificial Sequence
  Description of Artificial Sequence: Synthetic oligonucleotide
ggaucuuucgggccauggc

SEQ ID NO: 944428 - RNA, 19 nt, Artificial Sequence
  Description of Artificial Sequence: Synthetic oligonucleotide
gucagacugcggcuucggg

SEQ ID NO: 944429 - RNA, 19 nt, Artificial Sequence
  Description of Artificial Sequence: Synthetic oligonucleotide
cguaguuacauuuccgcuc

SEQ ID NO: 944430 - RNA, 19 nt, Artificial Sequence
  Description of Artificial Sequence: Synthetic oligonucleotide
cagacugcggcuucgggaa

SEQ ID NO: 944431 - RNA, 19 nt, Artificial Sequence
  Description of Artificial Sequence: Synthetic oligonucleotide
gaccucgagcgccuucgag

SEQ ID NO: 944432 - RNA, 19 nt, Artificial Sequence
  Description of Artificial Sequence: Synthetic oligonucleotide
uggucuagaugugcgcgga

SEQ ID NO: 944433 - RNA, 19 nt, Artificial Sequence
  Description of Artificial Sequence: Synthetic oligonucleotide
gcgggaaccgccuuccgag

SEQ ID NO: 944434 - RNA, 19 nt, Artificial Sequence
  Description of Artificial Sequence: Synthetic oligonucleotide
ugucucggcgggcguaacu

SEQ ID NO: 944435 - RNA, 19 nt, Artificial Sequence
  Description of Artificial Sequence: Synthetic oligonucleotide
agggccuuggcauguuuaa

SEQ ID NO: 944436 - RNA, 19 nt, Artificial Sequence
  Description of Artificial Sequence: Synthetic oligonucleotide
aauagcgccgggagcggga

SEQ ID NO: 944437 - RNA, 19 nt, Artificial Sequence
  Description of Artificial Sequence: Synthetic oligonucleotide
cauugcggccuggagcggg

SEQ ID NO: 944438 - RNA, 19 nt, Artificial Sequence
  Description of Artificial Sequence: Synthetic oligonucleotide
  modified_base (6)..(6): a, c, u, g, unknown or other
uccucngguucucggccac

SEQ ID NO: 944439 - RNA, 19 nt, Artificial Sequence
  Description of Artificial Sequence: Synthetic oligonucleotide
gucaccugaacgggagcgg

SEQ ID NO: 944440 - RNA, 19 nt, Artificial Sequence
  Description of Artificial Sequence: Synthetic oligonucleotide
aggugaccguuuauagggg

SEQ ID NO: 944441 - RNA, 19 nt, Artificial Sequence
  Description of Artificial Sequence: Synthetic oligonucleotide
aacggucaccugaacggga

SEQ ID NO: 944442 - RNA, 19 nt, Artificial Sequence
  Description of Artificial Sequence: Synthetic oligonucleotide
ggucguggccugcuuauug

SEQ ID NO: 944443 - RNA, 19 nt, Artificial Sequence
  Description of Artificial Sequence: Synthetic oligonucleotide
ccgagugccgccuuccccg

SEQ ID NO: 944444 - RNA, 19 nt, Artificial Sequence
  Description of Artificial Sequence: Synthetic oligonucleotide
ucuucgcugucgccgggaa

SEQ ID NO: 944445 - RNA, 19 nt, Artificial Sequence
  Description of Artificial Sequence: Synthetic oligonucleotide
guguccgucgcgggaaccg

SEQ ID NO: 944446 - RNA, 19 nt, Artificial Sequence
  Description of Artificial Sequence: Synthetic oligonucleotide
gaguuacuauggcuuucuc

SEQ ID NO: 944447 - RNA, 19 nt, Artificial Sequence
  Description of Artificial Sequence: Synthetic oligonucleotide
cuucgggaccuggaccucg

SEQ ID NO: 944448 - RNA, 19 nt, Artificial Sequence
  Description of Artificial Sequence: Synthetic oligonucleotide
gaugugcgcggacaucaaa

SEQ ID NO: 944449 - RNA, 19 nt, Artificial Sequence
  Description of Artificial Sequence: Synthetic oligonucleotide
acucucgacuguagcgugg

SEQ ID NO: 944450 - RNA, 19 nt, Artificial Sequence
  Description of Artificial Sequence: Synthetic oligonucleotide
gucucggcgggcguaacug

SEQ ID NO: 944451 - RNA, 19 nt, Artificial Sequence
  Description of Artificial Sequence: Synthetic oligonucleotide
uccguagcauccugacaaa

SEQ ID NO: 944452 - RNA, 19 nt, Artificial Sequence
  Description of Artificial Sequence: Synthetic oligonucleotide
gcgggcguaacugggaggg

SEQ ID NO: 944453 - RNA, 19 nt, Artificial Sequence
  Description of Artificial Sequence: Synthetic oligonucleotide
cuucgagaagaacuguacu

SEQ ID NO: 944454 - RNA, 19 nt, Artificial Sequence
  Description of Artificial Sequence: Synthetic oligonucleotide
acagaaacccagagcgcug

SEQ ID NO: 944455 - RNA, 19 nt, Artificial Sequence
  Description of Artificial Sequence: Synthetic oligonucleotide
gaaccgccuuccgagugcc

SEQ ID NO: 944456 - RNA, 19 nt, Artificial Sequence
  Description of Artificial Sequence: Synthetic oligonucleotide
ucggcgggcguaacuggga

SEQ ID NO: 944457 - RNA, 19 nt, Artificial Sequence
  Description of Artificial Sequence: Synthetic oligonucleotide
acggucaccugaacgggag

SEQ ID NO: 944458 - RNA, 19 nt, Artificial Sequence
  Description of Artificial Sequence: Synthetic oligonucleotide
augccguaggucguggccu

SEQ ID NO: 944459 - RNA, 19 nt, Artificial Sequence
  Description of Artificial Sequence: Synthetic oligonucleotide
agucccacgcaguccgccu

SEQ ID NO: 944460 - RNA, 19 nt, Artificial Sequence
  Description of Artificial Sequence: Synthetic oligonucleotide
cgccuaaugccuguaaugg

SEQ ID NO: 944461 - RNA, 19 nt, Artificial Sequence
  Description of Artificial Sequence: Synthetic oligonucleotide
ucggaaggugaccguuuau

SEQ ID NO: 944462 - RNA, 19 nt, Artificial Sequence
  Description of Artificial Sequence: Synthetic oligonucleotide
cgagaugccggcgaagucg

SEQ ID NO: 944463 - RNA, 19 nt, Artificial Sequence
  Description of Artificial Sequence: Synthetic oligonucleotide
gucuagaugugcgcggaca

SEQ ID NO: 944464 - RNA, 19 nt, Artificial Sequence
  Description of Artificial Sequence: Synthetic oligonucleotide
cucuaccucggccacagua

SEQ ID NO: 944465 - RNA, 19 nt, Artificial Sequence
  Description of Artificial Sequence: Synthetic oligonucleotide
ccugacaaagucuccguca

SEQ ID NO: 944466 - RNA, 19 nt, Artificial Sequence
  Description of Artificial Sequence: Synthetic oligonucleotide
cucgacuguagcgugggga

SEQ ID NO: 944467 - RNA, 19 nt, Artificial Sequence
  Description of Artificial Sequence: Synthetic oligonucleotide
caccccgcuuauaacgguc

SEQ ID NO: 944468 - RNA, 19 nt, Artificial Sequence
  Description of Artificial Sequence: Synthetic oligonucleotide
ggaaccgccuuccgagugc

SEQ ID NO: 944469 - RNA, 19 nt, Artificial Sequence
  Description of Artificial Sequence: Synthetic oligonucleotide
ggcuccgacugcuacuaug

SEQ ID NO: 944470 - RNA, 19 nt, Artificial Sequence
  Description of Artificial Sequence: Synthetic oligonucleotide
uagcgguguccgucgcggg

SEQ ID NO: 944471 - RNA, 19 nt, Artificial Sequence
  Description of Artificial Sequence: Synthetic oligonucleotide
gcgcguacccgccacgccg

SEQ ID NO: 944472 - RNA, 19 nt, Artificial Sequence
  Description of Artificial Sequence: Synthetic oligonucleotide
gcugucgccgggaacgccg

SEQ ID NO: 944473 - RNA, 19 nt, Artificial Sequence
  Description of Artificial Sequence: Synthetic oligonucleotide
uagucggggauguggucua

SEQ ID NO: 944474 - RNA, 19 nt, Artificial Sequence
  Description of Artificial Sequence: Synthetic oligonucleotide
cugucgccgggaacgccgg

SEQ ID NO: 944475 - RNA, 19 nt, Artificial Sequence
  Description of Artificial Sequence: Synthetic oligonucleotide
gagcgagagcgggaacggg

SEQ ID NO: 944476 - RNA, 19 nt, Artificial Sequence
  Description of Artificial Sequence: Synthetic oligonucleotide
  modified_base (7)..(7): a, c, u, g, unknown or other
cuccucngguucucggcca

SEQ ID NO: 944477 - RNA, 19 nt, Artificial Sequence
  Description of Artificial Sequence: Synthetic oligonucleotide
cuagaugugcgcggacauc

SEQ ID NO: 944478 - RNA, 19 nt, Artificial Sequence
  Description of Artificial Sequence: Synthetic oligonucleotide
guagucggggauguggucu

SEQ ID NO: 944479 - RNA, 19 nt, Artificial Sequence
  Description of Artificial Sequence: Synthetic oligonucleotide
cugcuacuauggugccugg

SEQ ID NO: 944480 - RNA, 19 nt, Artificial Sequence
  Description of Artificial Sequence: Synthetic oligonucleotide
uaguuacauuuccgcucgu

SEQ ID NO: 944481 - RNA, 19 nt, Artificial Sequence
  Description of Artificial Sequence: Synthetic oligonucleotide
uguccgucgcgggaaccgc

SEQ ID NO: 944482 - RNA, 19 nt, Artificial Sequence
  Description of Artificial Sequence: Synthetic oligonucleotide
gugaccguuuauagggguc

SEQ ID NO: 944483 - RNA, 19 nt, Artificial Sequence
  Description of Artificial Sequence: Synthetic oligonucleotide
  modified_base (8)..(8): a, c, u, g, unknown or other
ccuccucngguucucggcc

SEQ ID NO: 944484 - RNA, 19 nt, Artificial Sequence
  Description of Artificial Sequence: Synthetic oligonucleotide
ccgccuaaugccuguaaug

SEQ ID NO: 944485 - RNA, 19 nt, Artificial Sequence
  Description of Artificial Sequence: Synthetic oligonucleotide
uacccgccacgccgggccg

SEQ ID NO: 944486 - RNA, 19 nt, Artificial Sequence
  Description of Artificial Sequence: Synthetic oligonucleotide
cucggagcuggauucggaa

SEQ ID NO: 944487 - RNA, 19 nt, Artificial Sequence
  Description of Artificial Sequence: Synthetic oligonucleotide
auugcggccuggagcgggg

SEQ ID NO: 944488 - RNA, 19 nt, Artificial Sequence
  Description of Artificial Sequence: Synthetic oligonucleotide
gcgcgaauagcgccgggag

SEQ ID NO: 944489 - RNA, 19 nt, Artificial Sequence
  Description of Artificial Sequence: Synthetic oligonucleotide
guaggucguggccugcuua

SEQ ID NO: 944490 - RNA, 19 nt, Artificial Sequence
  Description of Artificial Sequence: Synthetic oligonucleotide
  modified_base (3)..(3): a, c, u, g, unknown or other
ucngguucucggccaccuu

SEQ ID NO: 944491 - RNA, 19 nt, Artificial Sequence
  Description of Artificial Sequence: Synthetic oligonucleotide
cgaguagcgguguccgucg

SEQ ID NO: 944492 - RNA, 19 nt, Artificial Sequence
  Description of Artificial Sequence: Synthetic oligonucleotide
cuccguacaguucaucaau

SEQ ID NO: 944493 - RNA, 19 nt, Artificial Sequence
  Description of Artificial Sequence: Synthetic oligonucleotide
gaacgccggcccgaguuac

SEQ ID NO: 944494 - RNA, 19 nt, Artificial Sequence
  Description of Artificial Sequence: Synthetic oligonucleotide
gccucgguaccgcucguag

SEQ ID NO: 944495 - RNA, 19 nt, Artificial Sequence
  Description of Artificial Sequence: Synthetic oligonucleotide
gggaaccgccuuccgagug

SEQ ID NO: 944496 - RNA, 19 nt, Artificial Sequence
  Description of Artificial Sequence: Synthetic oligonucleotide
gcgauggcgagugacucug

SEQ ID NO: 944497 - RNA, 19 nt, Artificial Sequence
  Description of Artificial Sequence: Synthetic oligonucleotide
gcgaagucguucugcacca

SEQ ID NO: 944498 - RNA, 19 nt, Artificial Sequence
  Description of Artificial Sequence: Synthetic oligonucleotide
ccugucucuuuaccagcgg

SEQ ID NO: 944499 - RNA, 19 nt, Artificial Sequence
  Description of Artificial Sequence: Synthetic oligonucleotide
uuucgggccauggcacgaa

SEQ ID NO: 944500 - RNA, 19 nt, Artificial Sequence
  Description of Artificial Sequence: Synthetic oligonucleotide
uaccgcucguaguuacauu

SEQ ID NO: 944501 - RNA, 19 nt, Artificial Sequence
  Description of Artificial Sequence: Synthetic oligonucleotide
gagcgguaguagccucggc

SEQ ID NO: 944502 - RNA, 19 nt, Artificial Sequence
  Description of Artificial Sequence: Synthetic oligonucleotide
uggggacgcggcuggccug

SEQ ID NO: 944503 - RNA, 19 nt, Artificial Sequence
  Description of Artificial Sequence: Synthetic oligonucleotide
cgcucguaguuacauuucc

SEQ ID NO: 944504 - RNA, 19 nt, Artificial Sequence
  Description of Artificial Sequence: Synthetic oligonucleotide
cccagagcgcugcaguccc

SEQ ID NO: 944505 - RNA, 19 nt, Artificial Sequence
  Description of Artificial Sequence: Synthetic oligonucleotide
ggcgggcguaacugggagg

SEQ ID NO: 944506 - RNA, 19 nt, Artificial Sequence
  Description of Artificial Sequence: Synthetic oligonucleotide
ccggcgagcgcgaguagcg

SEQ ID NO: 944507 - RNA, 19 nt, Artificial Sequence
  Description of Artificial Sequence: Synthetic oligonucleotide
cagucccacgcaguccgcc

SEQ ID NO: 944508 - RNA, 19 nt, Artificial Sequence
  Description of Artificial Sequence: Synthetic oligonucleotide
cagagcgcugcagucccac

SEQ ID NO: 944509 - RNA, 19 nt, Artificial Sequence
  Description of Artificial Sequence: Synthetic oligonucleotide
gccggcccgaguuacuaug

SEQ ID NO: 944510 - RNA, 19 nt, Artificial Sequence
  Description of Artificial Sequence: Synthetic oligonucleotide
accccgcuuauaacgguca

SEQ ID NO: 944511 - RNA, 19 nt, Artificial Sequence
  Description of Artificial Sequence: Synthetic oligonucleotide
ggcuucgggaccuggaccu

SEQ ID NO: 944512 - RNA, 19 nt, Artificial Sequence
  Description of Artificial Sequence: Synthetic oligonucleotide
cacgccgggccggcgagcg

SEQ ID NO: 944513 - RNA, 19 nt, Artificial Sequence
  Description of Artificial Sequence: Synthetic oligonucleotide
ugccggcgaagucguucug

SEQ ID NO: 944514 - RNA, 19 nt, Artificial Sequence
  Description of Artificial Sequence: Synthetic oligonucleotide
cucgguaccgcucguaguu

SEQ ID NO: 944515 - RNA, 19 nt, Artificial Sequence
  Description of Artificial Sequence: Synthetic oligonucleotide
uggcuacggcuuccacuac

SEQ ID NO: 944516 - RNA, 19 nt, Artificial Sequence
  Description of Artificial Sequence: Synthetic oligonucleotide
ccggcccgaguuacuaugg

SEQ ID NO: 944517 - RNA, 19 nt, Artificial Sequence
  Description of Artificial Sequence: Synthetic oligonucleotide
gagaugccggcgaagucgu

SEQ ID NO: 944518 - RNA, 19 nt, Artificial Sequence
  Description of Artificial Sequence: Synthetic oligonucleotide
agccaugccguaggucgug

SEQ ID NO: 944519 - RNA, 19 nt, Artificial Sequence
  Description of Artificial Sequence: Synthetic oligonucleotide
cuccucgcgcccugggcuc

SEQ ID NO: 944520 - RNA, 19 nt, Artificial Sequence
  Description of Artificial Sequence: Synthetic oligonucleotide
ccgucuuucucgcuccuuc

SEQ ID NO: 944521 - RNA, 19 nt, Artificial Sequence
  Description of Artificial Sequence: Synthetic oligonucleotide
gcgcgaguagcgguguccg

SEQ ID NO: 944522 - RNA, 19 nt, Artificial Sequence
  Description of Artificial Sequence: Synthetic oligonucleotide
cugcgggagcgcgaauagc

SEQ ID NO: 944523 - RNA, 19 nt, Artificial Sequence
  Description of Artificial Sequence: Synthetic oligonucleotide
aaccgccuuccgagugccg

SEQ ID NO: 944524 - RNA, 19 nt, Artificial Sequence
  Description of Artificial Sequence: Synthetic oligonucleotide
cucgucgcugccuccgaaa

SEQ ID NO: 944525 - RNA, 19 nt, Artificial Sequence
  Description of Artificial Sequence: Synthetic oligonucleotide
ggcguaacugggagggcug

SEQ ID NO: 944526 - RNA, 19 nt, Artificial Sequence
  Description of Artificial Sequence: Synthetic oligonucleotide
ugcggcggcggcggcggcg

SEQ ID NO: 944527 - RNA, 19 nt, Artificial Sequence
  Description of Artificial Sequence: Synthetic oligonucleotide
ggugaccguuuauaggggu

SEQ ID NO: 944528 - RNA, 19 nt, Artificial Sequence
  Description of Artificial Sequence: Synthetic oligonucleotide
ucgcugucgccgggaacgc

SEQ ID NO: 944529 - RNA, 19 nt, Artificial Sequence
  Description of Artificial Sequence: Synthetic oligonucleotide
agucggggauguggucuag

SEQ ID NO: 944530 - RNA, 19 nt, Artificial Sequence
  Description of Artificial Sequence: Synthetic oligonucleotide
ggucuagaugugcgcggac

SEQ ID NO: 944531 - RNA, 19 nt, Artificial Sequence
  Description of Artificial Sequence: Synthetic oligonucleotide
ggccugcuuauugaguauc

SEQ ID NO: 944532 - RNA, 19 nt, Artificial Sequence
  Description of Artificial Sequence: Synthetic oligonucleotide
cuaccucggccacaguacu

SEQ ID NO: 944533 - RNA, 19 nt, Artificial Sequence
  Description of Artificial Sequence: Synthetic oligonucleotide
cccgcuuauaacggucacc

SEQ ID NO: 944534 - RNA, 19 nt, Artificial Sequence
  Description of Artificial Sequence: Synthetic oligonucleotide
ccuccgaaacuggugauga

SEQ ID NO: 944535 - RNA, 19 nt, Artificial Sequence
  Description of Artificial Sequence: Synthetic oligonucleotide
aacgccggcccgaguuacu

SEQ ID NO: 944536 - RNA, 19 nt, Artificial Sequence
  Description of Artificial Sequence: Synthetic oligonucleotide
gcgaguagcgguguccguc

SEQ ID NO: 944537 - RNA, 19 nt, Artificial Sequence
  Description of Artificial Sequence: Synthetic oligonucleotide
accguuuauaggggucaua

SEQ ID NO: 944538 - RNA, 19 nt, Artificial Sequence
  Description of Artificial Sequence: Synthetic oligonucleotide
cgggagcgcgaauagcgcc

SEQ ID NO: 944539 - RNA, 19 nt, Artificial Sequence
  Description of Artificial Sequence: Synthetic oligonucleotide
agcgggaacgggacucgga

SEQ ID NO: 944540 - RNA, 19 nt, Artificial Sequence
  Description of Artificial Sequence: Synthetic oligonucleotide
gccuccgaaacuggugaug

SEQ ID NO: 944541 - RNA, 19 nt, Artificial Sequence
  Description of Artificial Sequence: Synthetic oligonucleotide
agcuuggguuuggcagcuc

SEQ ID NO: 944542 - RNA, 19 nt, Artificial Sequence
  Description of Artificial Sequence: Synthetic oligonucleotide
guccgucgcgggaaccgcc

SEQ ID NO: 944543 - RNA, 19 nt, Artificial Sequence
  Description of Artificial Sequence: Synthetic oligonucleotide
ccugaacgggagcggcucc

SEQ ID NO: 944544 - RNA, 19 nt, Artificial Sequence
  Description of Artificial Sequence: Synthetic oligonucleotide
ccguagcauccugacaaag

SEQ ID NO: 944545 - RNA, 19 nt, Artificial Sequence
  Description of Artificial Sequence: Synthetic oligonucleotide
cuuccccggcugcgggagc

SEQ ID NO: 944546 - RNA, 19 nt, Artificial Sequence
  Description of Artificial Sequence: Synthetic oligonucleotide
cuccgaaacuggugaugaa

SEQ ID NO: 944547 - RNA, 19 nt, Artificial Sequence
  Description of Artificial Sequence: Synthetic oligonucleotide
acgccgggccggcgagcgc

SEQ ID NO: 944548 - RNA, 19 nt, Artificial Sequence
  Description of Artificial Sequence: Synthetic oligonucleotide
gccggcgaagucguucugc

SEQ ID NO: 944549 - RNA, 19 nt, Artificial Sequence
  Description of Artificial Sequence: Synthetic oligonucleotide
guaccgcucguaguuacau

SEQ ID NO: 944550 - RNA, 19 nt, Artificial Sequence
  Description of Artificial Sequence: Synthetic oligonucleotide
guccgccuaaugccuguaa

SEQ ID NO: 944551 - RNA, 19 nt, Artificial Sequence
  Description of Artificial Sequence: Synthetic oligonucleotide
ggggacgcggcuggccugg

SEQ ID NO: 944552 - RNA, 19 nt, Artificial Sequence
  Description of Artificial Sequence: Synthetic oligonucleotide
agaugugcgcggacaucaa

SEQ ID NO: 944553 - RNA, 19 nt, Artificial Sequence
  Description of Artificial Sequence: Synthetic oligonucleotide
ccgcucguaguuacauuuc

SEQ ID NO: 944554 - RNA, 19 nt, Artificial Sequence
  Description of Artificial Sequence: Synthetic oligonucleotide
ccgagcaccccgcuuauaa

SEQ ID NO: 944555 - RNA, 19 nt, Artificial Sequence
  Description of Artificial Sequence: Synthetic oligonucleotide
cgggcgcuggcauugcggc

SEQ ID NO: 944556 - RNA, 19 nt, Artificial Sequence
  Description of Artificial Sequence: Synthetic oligonucleotide
  modified_base (4)..(4): a, c, u, g, unknown or other
cucngguucucggccaccu

SEQ ID NO: 944557 - RNA, 19 nt, Artificial Sequence
  Description of Artificial Sequence: Synthetic oligonucleotide
ccgcuuauaacggucaccu

SEQ ID NO: 944558 - RNA, 19 nt, Artificial Sequence
  Description of Artificial Sequence: Synthetic oligonucleotide
cugcuccggggagauggug

SEQ ID NO: 944559 - RNA, 19 nt, Artificial Sequence
  Description of Artificial Sequence: Synthetic oligonucleotide
ggcccgaguuacuauggcu

SEQ ID NO: 944560 - RNA, 19 nt, Artificial Sequence
  Description of Artificial Sequence: Synthetic oligonucleotide
ccuccgacgucccucaucu

SEQ ID NO: 944561 - RNA, 19 nt, Artificial Sequence
  Description of Artificial Sequence: Synthetic oligonucleotide
gcgcccagagcgguaguag

SEQ ID NO: 944562 - RNA, 19 nt, Artificial Sequence
  Description of Artificial Sequence: Synthetic oligonucleotide
ccuccguacaguucaucaa

SEQ ID NO: 944563 - RNA, 19 nt, Artificial Sequence
  Description of Artificial Sequence: Synthetic oligonucleotide
ccaugccguaggucguggc

SEQ ID NO: 944564 - RNA, 19 nt, Artificial Sequence
  Description of Artificial Sequence: Synthetic oligonucleotide
gccaugccguaggucgugg

SEQ ID NO: 944565 - RNA, 19 nt, Artificial Sequence
  Description of Artificial Sequence: Synthetic oligonucleotide
cgcgaauagcgccgggagc

SEQ ID NO: 944566 - RNA, 19 nt, Artificial Sequence
  Description of Artificial Sequence: Synthetic oligonucleotide
gguucaggcucguccacau

SEQ ID NO: 944567 - RNA, 19 nt, Artificial Sequence
  Description of Artificial Sequence: Synthetic oligonucleotide
gcaguccgccuaaugccug

SEQ ID NO: 944568 - RNA, 19 nt, Artificial Sequence
  Description of Artificial Sequence: Synthetic oligonucleotide
augcggcggcggcggcggc

SEQ ID NO: 944569 - RNA, 19 nt, Artificial Sequence
  Description of Artificial Sequence: Synthetic oligonucleotide
ggcgcguacccgccacgcc

SEQ ID NO: 944570 - RNA, 19 nt, Artificial Sequence
  Description of Artificial Sequence: Synthetic oligonucleotide
gguaccgcucguaguuaca

SEQ ID NO: 944571 - RNA, 19 nt, Artificial Sequence
  Description of Artificial Sequence: Synthetic oligonucleotide
ggggcgcguacccgccacg

SEQ ID NO: 944572 - RNA, 19 nt, Artificial Sequence
  Description of Artificial Sequence: Synthetic oligonucleotide
cggaucuuucgggccaugg

SEQ ID NO: 944573 - RNA, 19 nt, Artificial Sequence
  Description of Artificial Sequence: Synthetic oligonucleotide
cucuucgcugucgccggga

SEQ ID NO: 944574 - RNA, 19 nt, Artificial Sequence
  Description of Artificial Sequence: Synthetic oligonucleotide
gccggcgagcgcgaguagc

SEQ ID NO: 944575 - RNA, 19 nt, Artificial Sequence
  Description of Artificial Sequence: Synthetic oligonucleotide
cgacugcuacuauggugcc

SEQ ID NO: 944576 - RNA, 19 nt, Artificial Sequence
  Description of Artificial Sequence: Synthetic oligonucleotide
ccggcgaagucguucugca

SEQ ID NO: 944577 - RNA, 19 nt, Artificial Sequence
  Description of Artificial Sequence: Synthetic oligonucleotide
cguagcauccugacaaagu

SEQ ID NO: 944578 - RNA, 19 nt, Artificial Sequence
  Description of Artificial Sequence: Synthetic oligonucleotide
gggaacgccggcccgaguu

SEQ ID NO: 944579 - RNA, 19 nt, Artificial Sequence
  Description of Artificial Sequence: Synthetic oligonucleotide
cgcguacccgccacgccgg

SEQ ID NO: 944580 - RNA, 19 nt, Artificial Sequence
  Description of Artificial Sequence: Synthetic oligonucleotide
gagcgcgcguggcgcccag

SEQ ID NO: 944581 - RNA, 19 nt, Artificial Sequence
  Description of Artificial Sequence: Synthetic oligonucleotide
gucccacgcaguccgccua

SEQ ID NO: 944582 - RNA, 19 nt, Artificial Sequence
  Description of Artificial Sequence: Synthetic oligonucleotide
ccgaguuacuauggcuuuc

SEQ ID NO: 944583 - RNA, 19 nt, Artificial Sequence
  Description of Artificial Sequence: Synthetic oligonucleotide
cgguaccgcucguaguuac

SEQ ID NO: 944584 - RNA, 19 nt, Artificial Sequence
  Description of Artificial Sequence: Synthetic oligonucleotide
ggauucggaaggugaccgu

SEQ ID NO: 944585 - RNA, 19 nt, Artificial Sequence
  Description of Artificial Sequence: Synthetic oligonucleotide
aguccgccuaaugccugua

SEQ ID NO: 944586 - RNA, 19 nt, Artificial Sequence
  Description of Artificial Sequence: Synthetic oligonucleotide
acgccggcccgaguuacua

SEQ ID NO: 944587 - RNA, 19 nt, Artificial Sequence
  Description of Artificial Sequence: Synthetic oligonucleotide
ccacgcaguccgccuaaug

SEQ ID NO: 944588 - RNA, 19 nt, Artificial Sequence
  Description of Artificial Sequence: Synthetic oligonucleotide
ggaacgccggcccgaguua

SEQ ID NO: 944589 - RNA, 19 nt, Artificial Sequence
  Description of Artificial Sequence: Synthetic oligonucleotide
ccuuccccggcugcgggag

SEQ ID NO: 944590 - RNA, 19 nt, Artificial Sequence
  Description of Artificial Sequence: Synthetic oligonucleotide
ccggggagaugguggugag

SEQ ID NO: 944591 - RNA, 19 nt, Artificial Sequence
  Description of Artificial Sequence: Synthetic oligonucleotide
caccugaacgggagcggcu

SEQ ID NO: 944592 - RNA, 19 nt, Artificial Sequence
  Description of Artificial Sequence: Synthetic oligonucleotide
ggagcuggauucggaaggu

SEQ ID NO: 944593 - RNA, 19 nt, Artificial Sequence
  Description of Artificial Sequence: Synthetic oligonucleotide
uaccagcggcagguucggu

SEQ ID NO: 944594 - RNA, 19 nt, Artificial Sequence
  Description of Artificial Sequence: Synthetic oligonucleotide
ggcgauggcgagugacucu

SEQ ID NO: 944595 - RNA, 19 nt, Artificial Sequence
  Description of Artificial Sequence: Synthetic oligonucleotide
ggcggcuguacuggcguuc

SEQ ID NO: 944596 - RNA, 19 nt, Artificial Sequence
  Description of Artificial Sequence: Synthetic oligonucleotide
cauuuccgcucguccgacu

SEQ ID NO: 944597 - RNA, 19 nt, Artificial Sequence
  Description of Artificial Sequence: Synthetic oligonucleotide
ccccgcuuauaacggucac

SEQ ID NO: 944598 - RNA, 19 nt, Artificial Sequence
  Description of Artificial Sequence: Synthetic oligonucleotide
caguccgccuaaugccugu

SEQ ID NO: 944599 - RNA, 19 nt, Artificial Sequence
  Description of Artificial Sequence: Synthetic oligonucleotide
gggcguaacugggagggcu

SEQ ID NO: 944600 - RNA, 19 nt, Artificial Sequence
  Description of Artificial Sequence: Synthetic oligonucleotide
cgcuuauaacggucaccug

SEQ ID NO: 944601 - RNA, 19 nt, Artificial Sequence
  Description of Artificial Sequence: Synthetic oligonucleotide
gcuggcauugcggccugga

SEQ ID NO: 944602 - RNA, 19 nt, Artificial Sequence
  Description of Artificial Sequence: Synthetic oligonucleotide
gggcgcguacccgccacgc

SEQ ID NO: 944603 - RNA, 19 nt, Artificial Sequence
  Description of Artificial Sequence: Synthetic oligonucleotide
agcggcagguucggucuuu

SEQ ID NO: 944604 - RNA, 19 nt, Artificial Sequence
  Description of Artificial Sequence: Synthetic oligonucleotide
cugucucggcgggcguaac

SEQ ID NO: 944605 - RNA, 19 nt, Artificial Sequence
  Description of Artificial Sequence: Synthetic oligonucleotide
ggggaccaggagcgcgagc

SEQ ID NO: 944606 - RNA, 19 nt, Artificial Sequence
  Description of Artificial Sequence: Synthetic oligonucleotide
aggucguggccugcuuauu

SEQ ID NO: 944607 - RNA, 19 nt, Artificial Sequence
  Description of Artificial Sequence: Synthetic oligonucleotide
ccgagaugccggcgaaguc

SEQ ID NO: 944608 - RNA, 19 nt, Artificial Sequence
  Description of Artificial Sequence: Synthetic oligonucleotide
ggcgagcgcgaguagcggu

SEQ ID NO: 944609 - RNA, 19 nt, Artificial Sequence
  Description of Artificial Sequence: Synthetic oligonucleotide
cagccaugccguaggucgu

SEQ ID NO: 944610 - RNA, 19 nt, Artificial Sequence
  Description of Artificial Sequence: Synthetic oligonucleotide
gcauugcggccuggagcgg

SEQ ID NO: 944611 - RNA, 19 nt, Artificial Sequence
  Description of Artificial Sequence: Synthetic oligonucleotide
  modified_base (5)..(5): a, c, u, g, unknown or other
ccucngguucucggccacc

SEQ ID NO: 944612 - RNA, 19 nt, Artificial Sequence
  Description of Artificial Sequence: Synthetic oligonucleotide
ccgacuccugcuccgggga

SEQ ID NO: 944613 - RNA, 19 nt, Artificial Sequence
  Description of Artificial Sequence: Synthetic oligonucleotide
gcguacccgccacgccggg

SEQ ID NO: 944614 - RNA, 19 nt, Artificial Sequence
  Description of Artificial Sequence: Synthetic oligonucleotide
cugcggcggggcgcguacc

SEQ ID NO: 944615 - RNA, 19 nt, Artificial Sequence
  Description of Artificial Sequence: Synthetic oligonucleotide
cggcgggcguaacugggag

SEQ ID NO: 944616 - RNA, 19 nt, Artificial Sequence
  Description of Artificial Sequence: Synthetic oligonucleotide
cgcguggcgcccagagcgg

SEQ ID NO: 944617 - RNA, 19 nt, Artificial Sequence
  Description of Artificial Sequence: Synthetic oligonucleotide
gcggcuccgacugcuacua

SEQ ID NO: 944618 - RNA, 19 nt, Artificial Sequence
  Description of Artificial Sequence: Synthetic oligonucleotide
gcggcggcggcggcggcgg

SEQ ID NO: 944619 - RNA, 19 nt, Artificial Sequence
  Description of Artificial Sequence: Synthetic oligonucleotide
ggggcgauggcgagugacu

SEQ ID NO: 944620 - RNA, 19 nt, Artificial Sequence
  Description of Artificial Sequence: Synthetic oligonucleotide
gcugucucggcgggcguaa

SEQ ID NO: 944621 - RNA, 19 nt, Artificial Sequence
  Description of Artificial Sequence: Synthetic oligonucleotide
gggccggcgagcgcgagua

SEQ ID NO: 944622 - RNA, 19 nt, Artificial Sequence
  Description of Artificial Sequence: Synthetic oligonucleotide
cgcgagcuggagcgggagc

SEQ ID NO: 944623 - RNA, 19 nt, Artificial Sequence
  Description of Artificial Sequence: Synthetic oligonucleotide
ggccuccguacaguucauc

SEQ ID NO: 944624 - RNA, 19 nt, Artificial Sequence
  Description of Artificial Sequence: Synthetic oligonucleotide
cuccgucagccaugccgua

SEQ ID NO: 944625 - RNA, 19 nt, Artificial Sequence
  Description of Artificial Sequence: Synthetic oligonucleotide
aggccuccguacaguucau

SEQ ID NO: 944626 - RNA, 19 nt, Artificial Sequence
  Description of Artificial Sequence: Synthetic oligonucleotide
ggccggcgagcgcgaguag

SEQ ID NO: 944627 - RNA, 19 nt, Artificial Sequence
  Description of Artificial Sequence: Synthetic oligonucleotide
gcgcuggcauugcggccug

SEQ ID NO: 944628 - RNA, 19 nt, Artificial Sequence
  Description of Artificial Sequence: Synthetic oligonucleotide
gcggcggcggcggcggcag

SEQ ID NO: 944629 - RNA, 19 nt, Artificial Sequence
  Description of Artificial Sequence: Synthetic oligonucleotide
gccguaggucguggccugc

SEQ ID NO: 944630 - RNA, 19 nt, Artificial Sequence
  Description of Artificial Sequence: Synthetic oligonucleotide
gcugaucuuccggccccuc

SEQ ID NO: 944631 - RNA, 19 nt, Artificial Sequence
  Description of Artificial Sequence: Synthetic oligonucleotide
ggacgcggcuggccugguc

SEQ ID NO: 944632 - RNA, 19 nt, Artificial Sequence
  Description of Artificial Sequence: Synthetic oligonucleotide
gcuucgggaccuggaccuc

SEQ ID NO: 944633 - RNA, 19 nt, Artificial Sequence
  Description of Artificial Sequence: Synthetic oligonucleotide
cccgaguuacuauggcuuu

SEQ ID NO: 944634 - RNA, 19 nt, Artificial Sequence
  Description of Artificial Sequence: Synthetic oligonucleotide
ccuccgagaugccggcgaa

SEQ ID NO: 944635 - RNA, 19 nt, Artificial Sequence
  Description of Artificial Sequence: Synthetic oligonucleotide
agcgcgcguggcgcccaga

SEQ ID NO: 944636 - RNA, 19 nt, Artificial Sequence
  Description of Artificial Sequence: Synthetic oligonucleotide
gccgggaacgccggcccga

SEQ ID NO: 944637 - RNA, 19 nt, Artificial Sequence
  Description of Artificial Sequence: Synthetic oligonucleotide
cguacccgccacgccgggc

SEQ ID NO: 944638 - RNA, 19 nt, Artificial Sequence
  Description of Artificial Sequence: Synthetic oligonucleotide
cgccgggaacgccggcccg

SEQ ID NO: 944639 - RNA, 19 nt, Artificial Sequence
  Description of Artificial Sequence: Synthetic oligonucleotide
cgguguccgucgcgggaac

SEQ ID NO: 944640 - RNA, 19 nt, Artificial Sequence
  Description of Artificial Sequence: Synthetic oligonucleotide
ccggaucuuucgggccaug

SEQ ID NO: 944641 - RNA, 19 nt, Artificial Sequence
  Description of Artificial Sequence: Synthetic oligonucleotide
gcggggcgcguacccgcca

SEQ ID NO: 944642 - RNA, 19 nt, Artificial Sequence
  Description of Artificial Sequence: Synthetic oligonucleotide
cgcugucgccgggaacgcc

SEQ ID NO: 944643 - RNA, 19 nt, Artificial Sequence
  Description of Artificial Sequence: Synthetic oligonucleotide
cgggcguaacugggagggc

SEQ ID NO: 944644 - RNA, 19 nt, Artificial Sequence
  Description of Artificial Sequence: Synthetic oligonucleotide
ggcggcggcggcggcggca

SEQ ID NO: 944645 - RNA, 19 nt, Artificial Sequence
  Description of Artificial Sequence: Synthetic oligonucleotide
ccacgccgggccggcgagc

SEQ ID NO: 944646 - RNA, 19 nt, Artificial Sequence
  Description of Artificial Sequence: Synthetic oligonucleotide
gggcugucucggcgggcgu

SEQ ID NO: 944647 - RNA, 19 nt, Artificial Sequence
  Description of Artificial Sequence: Synthetic oligonucleotide
cagcggcagguucggucuu

SEQ ID NO: 944648 - RNA, 19 nt, Artificial Sequence
  Description of Artificial Sequence: Synthetic oligonucleotide
gcguggcgcccagagcggu

SEQ ID NO: 944649 - RNA, 19 nt, Artificial Sequence
  Description of Artificial Sequence: Synthetic oligonucleotide
cgggaaccgccuuccgagu

SEQ ID NO: 944650 - RNA, 19 nt, Artificial Sequence
  Description of Artificial Sequence: Synthetic oligonucleotide
cgccacgccgggccggcga

SEQ ID NO: 944651 - RNA, 19 nt, Artificial Sequence
  Description of Artificial Sequence: Synthetic oligonucleotide
ccguaggucguggccugcu

SEQ ID NO: 944652 - RNA, 19 nt, Artificial Sequence
  Description of Artificial Sequence: Synthetic oligonucleotide
cguggcgcccagagcggua

SEQ ID NO: 944653 - RNA, 19 nt, Artificial Sequence
  Description of Artificial Sequence: Synthetic oligonucleotide
caccuccgacgucccucau

SEQ ID NO: 944654 - RNA, 19 nt, Artificial Sequence
  Description of Artificial Sequence: Synthetic oligonucleotide
ccgccuugaacuggcgguu

SEQ ID NO: 944655 - RNA, 19 nt, Artificial Sequence
  Description of Artificial Sequence: Synthetic oligonucleotide
gcggcagguucggucuuuu

SEQ ID NO: 944656 - RNA, 19 nt, Artificial Sequence
  Description of Artificial Sequence: Synthetic oligonucleotide
cguaggucguggccugcuu

SEQ ID NO: 944657 - RNA, 19 nt, Artificial Sequence
  Description of Artificial Sequence: Synthetic oligonucleotide
cgagcgcgaguagcggugu

SEQ ID NO: 944658 - RNA, 19 nt, Artificial Sequence
  Description of Artificial Sequence: Synthetic oligonucleotide
cgcgaguagcgguguccgu

SEQ ID NO: 944659 - RNA, 19 nt, Artificial Sequence
  Description of Artificial Sequence: Synthetic oligonucleotide
cccgucuuucucgcuccuu

SEQ ID NO: 944660 - RNA, 19 nt, Artificial Sequence
  Description of Artificial Sequence: Synthetic oligonucleotide
gggacgcggcuggccuggu

SEQ ID NO: 944661 - RNA, 19 nt, Artificial Sequence
  Description of Artificial Sequence: Synthetic oligonucleotide
cggcggcggcggcggcggc

SEQ ID NO: 944662 - RNA, 19 nt, Artificial Sequence
  Description of Artificial Sequence: Synthetic oligonucleotide
cggcuccgacugcuacuau

SEQ ID NO: 944663 - RNA, 19 nt, Artificial Sequence
  Description of Artificial Sequence: Synthetic oligonucleotide
aggacaaacaccuuuuccc

SEQ ID NO: 944664 - RNA, 19 nt, Artificial Sequence
  Description of Artificial Sequence: Synthetic oligonucleotide
uugaguuguaccaugagga

SEQ ID NO: 944665 - RNA, 19 nt, Artificial Sequence
  Description of Artificial Sequence: Synthetic oligonucleotide
aagcauugccaacagccgc

SEQ ID NO: 944666 - RNA, 19 nt, Artificial Sequence
  Description of Artificial Sequence: Synthetic oligonucleotide
acuggcaagagccaucucg

SEQ ID NO: 944667 - RNA, 19 nt, Artificial Sequence
  Description of Artificial Sequence: Synthetic oligonucleotide
gauggcauagcugagucgg

SEQ ID NO: 944668 - RNA, 19 nt, Artificial Sequence
  Description of Artificial Sequence: Synthetic oligonucleotide
agagcguccaucuccaugg

SEQ ID NO: 944669 - RNA, 19 nt, Artificial Sequence
  Description of Artificial Sequence: Synthetic oligonucleotide
caacucaaggcucaggucg

SEQ ID NO: 944670 - RNA, 19 nt, Artificial Sequence
  Description of Artificial Sequence: Synthetic oligonucleotide
ucuucuugagucuugcuca

SEQ ID NO: 944671 - RNA, 19 nt, Artificial Sequence
  Description of Artificial Sequence: Synthetic oligonucleotide
accucguucagcugcaggc

SEQ ID NO: 944672 - RNA, 19 nt, Artificial Sequence
  Description of Artificial Sequence: Synthetic oligonucleotide
aggugcuccaacucaaggc

SEQ ID NO: 944673 - RNA, 19 nt, Artificial Sequence
  Description of Artificial Sequence: Synthetic oligonucleotide
uaacucuuggagcugccgg

SEQ ID NO: 944674 - RNA, 19 nt, Artificial Sequence
  Description of Artificial Sequence: Synthetic oligonucleotide
guuugauuuccccugcccg

SEQ ID NO: 944675 - RNA, 19 nt, Artificial Sequence
  Description of Artificial Sequence: Synthetic oligonucleotide
caucaaacccuuaauggug

SEQ ID NO: 944676 - RNA, 19 nt, Artificial Sequence
  Description of Artificial Sequence: Synthetic oligonucleotide
agacuuuccaccaagguca

SEQ ID NO: 944677 - RNA, 19 nt, Artificial Sequence
  Description of Artificial Sequence: Synthetic oligonucleotide
uuccggauggcauagcuga

SEQ ID NO: 944678 - RNA, 19 nt, Artificial Sequence
  Description of Artificial Sequence: Synthetic oligonucleotide
ucuugagucuugcucagcu

SEQ ID NO: 944679 - RNA, 19 nt, Artificial Sequence
  Description of Artificial Sequence: Synthetic oligonucleotide
ucagcauccaagcgguucc

SEQ ID NO: 944680 - RNA, 19 nt, Artificial Sequence
  Description of Artificial Sequence: Synthetic oligonucleotide
ucauuuccaggcuauucag

SEQ ID NO: 944681 - RNA, 19 nt, Artificial Sequence
  Description of Artificial Sequence: Synthetic oligonucleotide
ugaggauagcugcucuugg

SEQ ID NO: 944682 - RNA, 19 nt, Artificial Sequence
  Description of Artificial Sequence: Synthetic oligonucleotide
aagcaugugcgugaggcuc

SEQ ID NO: 944683 - RNA, 19 nt, Artificial Sequence
  Description of Artificial Sequence: Synthetic oligonucleotide
uccugaaggcgucugagcu

SEQ ID NO: 944684 - RNA, 19 nt, Artificial Sequence
  Description of Artificial Sequence: Synthetic oligonucleotide
cugaaggucagcccggucc

SEQ ID NO: 944685 - RNA, 19 nt, Artificial Sequence
  Description of Artificial Sequence: Synthetic oligonucleotide
acccuuaaugguguggacc

SEQ ID NO: 944686 - RNA, 19 nt, Artificial Sequence
  Description of Artificial Sequence: Synthetic oligonucleotide
ucauucagccuccucuuug

SEQ ID NO: 944687 - RNA, 19 nt, Artificial Sequence
  Description of Artificial Sequence: Synthetic oligonucleotide
aaacccuuaauggugugga

SEQ ID NO: 944688 - RNA, 19 nt, Artificial Sequence
  Description of Artificial Sequence: Synthetic oligonucleotide
aagagcguccaucuccaug

SEQ ID NO: 944689 - RNA, 19 nt, Artificial Sequence
  Description of Artificial Sequence: Synthetic oligonucleotide
gaaaccacggccuuggccu

SEQ ID NO: 944690 - RNA, 19 nt, Artificial Sequence
  Description of Artificial Sequence: Synthetic oligonucleotide
cugagugcuuuucauggcg

SEQ ID NO: 944691 - RNA, 19 nt, Artificial Sequence
  Description of Artificial Sequence: Synthetic oligonucleotide
acuuuucgagccaucaaac

SEQ ID NO: 944692 - RNA, 19 nt, Artificial Sequence
  Description of Artificial Sequence: Synthetic oligonucleotide
caagggacacuuuucgagc

SEQ ID NO: 944693 - RNA, 19 nt, Artificial Sequence
  Description of Artificial Sequence: Synthetic oligonucleotide
agcgguuccguucuucccg

SEQ ID NO: 944694 - RNA, 19 nt, Artificial Sequence
  Description of Artificial Sequence: Synthetic oligonucleotide
uuggugcagagucugaauc

SEQ ID NO: 944695 - RNA, 19 nt, Artificial Sequence
  Description of Artificial Sequence: Synthetic oligonucleotide
uuugauuuccccugcccgu

SEQ ID NO: 944696 - RNA, 19 nt, Artificial Sequence
  Description of Artificial Sequence: Synthetic oligonucleotide
cacggugucuagaagcucc

SEQ ID NO: 944697 - RNA, 19 nt, Artificial Sequence
  Description of Artificial Sequence: Synthetic oligonucleotide
uucauggagucccugugcu

SEQ ID NO: 944698 - RNA, 19 nt, Artificial Sequence
  Description of Artificial Sequence: Synthetic oligonucleotide
aacccuuaaugguguggac

SEQ ID NO: 944699 - RNA, 19 nt, Artificial Sequence
  Description of Artificial Sequence: Synthetic oligonucleotide
ugagagcuguucccgaagc

SEQ ID NO: 944700 - RNA, 19 nt, Artificial Sequence
  Description of Artificial Sequence: Synthetic oligonucleotide
ggucauugaggauagcugc

SEQ ID NO: 944701 - RNA, 19 nt, Artificial Sequence
  Description of Artificial Sequence: Synthetic oligonucleotide
guucuuccggaccaucucg

SEQ ID NO: 944702 - RNA, 19 nt, Artificial Sequence
  Description of Artificial Sequence: Synthetic oligonucleotide
ggacaaacaccuuuucccg

SEQ ID NO: 944703 - RNA, 19 nt, Artificial Sequence
  Description of Artificial Sequence: Synthetic oligonucleotide
cugcacggugucuagaagc

SEQ ID NO: 944704 - RNA, 19 nt, Artificial Sequence
  Description of Artificial Sequence: Synthetic oligonucleotide
uggcgcaaggaaaccacgg

SEQ ID NO: 944705 - RNA, 19 nt, Artificial Sequence
  Description of Artificial Sequence: Synthetic oligonucleotide
aggauagcugcucuuggug

SEQ ID NO: 944706 - RNA, 19 nt, Artificial Sequence
  Description of Artificial Sequence: Synthetic oligonucleotide
gacagagucuguccgcugc

SEQ ID NO: 944707 - RNA, 19 nt, Artificial Sequence
  Description of Artificial Sequence: Synthetic oligonucleotide
gaccacgaacuucagcugc

SEQ ID NO: 944708 - RNA, 19 nt, Artificial Sequence
  Description of Artificial Sequence: Synthetic oligonucleotide
agaucggcacuucuuagga

SEQ ID NO: 944709 - RNA, 19 nt, Artificial Sequence
  Description of Artificial Sequence: Synthetic oligonucleotide
aggauacucgggcuccagc

SEQ ID NO: 944710 - RNA, 19 nt, Artificial Sequence
  Description of Artificial Sequence: Synthetic oligonucleotide
acuucuuaggauacucggg

SEQ ID NO: 944711 - RNA, 19 nt, Artificial Sequence
  Description of Artificial Sequence: Synthetic oligonucleotide
uugcuggucagacuggcaa

SEQ ID NO: 944712 - RNA, 19 nt, Artificial Sequence
  Description of Artificial Sequence: Synthetic oligonucleotide
ugggccaucacuuguuccu

SEQ ID NO: 944713 - RNA, 19 nt, Artificial Sequence
  Description of Artificial Sequence: Synthetic oligonucleotide
accgacagcuguuugauuu

SEQ ID NO: 944714 - RNA, 19 nt, Artificial Sequence
  Description of Artificial Sequence: Synthetic oligonucleotide
ugcaagauggccugcuccu

SEQ ID NO: 944715 - RNA, 19 nt, Artificial Sequence
  Description of Artificial Sequence: Synthetic oligonucleotide
cauggagucccugugcucc

SEQ ID NO: 944716 - RNA, 19 nt, Artificial Sequence
  Description of Artificial Sequence: Synthetic oligonucleotide
ucuggcgcaaggaaaccac

SEQ ID NO: 944717 - RNA, 19 nt, Artificial Sequence
  Description of Artificial Sequence: Synthetic oligonucleotide
agagaucggcacuucuuag

SEQ ID NO: 944718 - RNA, 19 nt, Artificial Sequence
  Description of Artificial Sequence: Synthetic oligonucleotide
gcuacagucugguucagcc

SEQ ID NO: 944719 - RNA, 19 nt, Artificial Sequence
  Description of Artificial Sequence: Synthetic oligonucleotide
cugaccccgaagcagcucg

SEQ ID NO: 944720 - RNA, 19 nt, Artificial Sequence
  Description of Artificial Sequence: Synthetic oligonucleotide
gaauccgggcuacagucug

SEQ ID NO: 944721 - RNA, 19 nt, Artificial Sequence
  Description of Artificial Sequence: Synthetic oligonucleotide
gaggcucuguacccgaacc

SEQ ID NO: 944722 - RNA, 19 nt, Artificial Sequence
  Description of Artificial Sequence: Synthetic oligonucleotide
gcaagggacacuuuucgag

SEQ ID NO: 944723 - RNA, 19 nt, Artificial Sequence
  Description of Artificial Sequence: Synthetic oligonucleotide
cuuaggauacucgggcucc

SEQ ID NO: 944724 - RNA, 19 nt, Artificial Sequence
  Description of Artificial Sequence: Synthetic oligonucleotide
caucucgugagccuggguc

SEQ ID NO: 944725 - RNA, 19 nt, Artificial Sequence
  Description of Artificial Sequence: Synthetic oligonucleotide
uugaggauagcugcucuug

SEQ ID NO: 944726 - RNA, 19 nt, Artificial Sequence
  Description of Artificial Sequence: Synthetic oligonucleotide
cucaggagggacuucguuc

SEQ ID NO: 944727 - RNA, 19 nt, Artificial Sequence
  Description of Artificial Sequence: Synthetic oligonucleotide
uggaucuggcgcaaggaaa

SEQ ID NO: 944728 - RNA, 19 nt, Artificial Sequence
  Description of Artificial Sequence: Synthetic oligonucleotide
gaccaucucggcuccagcc

SEQ ID NO: 944729 - RNA, 19 nt, Artificial Sequence
  Description of Artificial Sequence: Synthetic oligonucleotide
gcuccagcacaucugaagg

SEQ ID NO: 944730 - RNA, 19 nt, Artificial Sequence
  Description of Artificial Sequence: Synthetic oligonucleotide
aguuguaccaugaggacaa

SEQ ID NO: 944731 - RNA, 19 nt, Artificial Sequence
  Description of Artificial Sequence: Synthetic oligonucleotide
gagcauccgaaccuccucc

SEQ ID NO: 944732 - RNA, 19 nt, Artificial Sequence
  Description of Artificial Sequence: Synthetic oligonucleotide
ucccucaagugcugcacgg

SEQ ID NO: 944733 - RNA, 19 nt, Artificial Sequence
  Description of Artificial Sequence: Synthetic oligonucleotide
uccacgguggccugaaggu

SEQ ID NO: 944734 - RNA, 19 nt, Artificial Sequence
  Description of Artificial Sequence: Synthetic oligonucleotide
uucuuaggauacucgggcu

SEQ ID NO: 944735 - RNA, 19 nt, Artificial Sequence
  Description of Artificial Sequence: Synthetic oligonucleotide
aaacaccuuuucccgccag

SEQ ID NO: 944736 - RNA, 19 nt, Artificial Sequence
  Description of Artificial Sequence: Synthetic oligonucleotide
augguguggaccuuccgga

SEQ ID NO: 944737 - RNA, 19 nt, Artificial Sequence
  Description of Artificial Sequence: Synthetic oligonucleotide
cauccgaaccuccuccucc

SEQ ID NO: 944738 - RNA, 19 nt, Artificial Sequence
  Description of Artificial Sequence: Synthetic oligonucleotide
caggucggcauccacuggg

SEQ ID NO: 944739 - RNA, 19 nt, Artificial Sequence
  Description of Artificial Sequence: Synthetic oligonucleotide
accgcaagagcguccaucu

SEQ ID NO: 944740 - RNA, 19 nt, Artificial Sequence
  Description of Artificial Sequence: Synthetic oligonucleotide
caagcgguuccguucuucc

SEQ ID NO: 944741 - RNA, 19 nt, Artificial Sequence
  Description of Artificial Sequence: Synthetic oligonucleotide
ucaagugcugcacgguguc

SEQ ID NO: 944742 - RNA, 19 nt, Artificial Sequence
  Description of Artificial Sequence: Synthetic oligonucleotide
aucggcacuucuuaggaua

SEQ ID NO: 944743 - RNA, 19 nt, Artificial Sequence
  Description of Artificial Sequence: Synthetic oligonucleotide
cucaggucggcauccacug

SEQ ID NO: 944744 - RNA, 19 nt, Artificial Sequence
  Description of Artificial Sequence: Synthetic oligonucleotide
gaugcucaugcgcuccacc

SEQ ID NO: 944745 - RNA, 19 nt, Artificial Sequence
  Description of Artificial Sequence: Synthetic oligonucleotide
ugugcgugaggcucuguac

SEQ ID NO: 944746 - RNA, 19 nt, Artificial Sequence
  Description of Artificial Sequence: Synthetic oligonucleotide
cacaucugaaggcuggauc

SEQ ID NO: 944747 - RNA, 19 nt, Artificial Sequence
  Description of Artificial Sequence: Synthetic oligonucleotide
ggucuugaugcucaugcgc

SEQ ID NO: 944748 - RNA, 19 nt, Artificial Sequence
  Description of Artificial Sequence: Synthetic oligonucleotide
ugcgugaggcucuguaccc

SEQ ID NO: 944749 - RNA, 19 nt, Artificial Sequence
  Description of Artificial Sequence: Synthetic oligonucleotide
cacacgcugagccuccucc

SEQ ID NO: 944750 - RNA, 19 nt, Artificial Sequence
  Description of Artificial Sequence: Synthetic oligonucleotide
cuucuugagucuugcucag

SEQ ID NO: 944751 - RNA, 19 nt, Artificial Sequence
  Description of Artificial Sequence: Synthetic oligonucleotide
caaacccuuaauggugugg

SEQ ID NO: 944752 - RNA, 19 nt, Artificial Sequence
  Description of Artificial Sequence: Synthetic oligonucleotide
ugggcacucagcugcagcu

SEQ ID NO: 944753 - RNA, 19 nt, Artificial Sequence
  Description of Artificial Sequence: Synthetic oligonucleotide
gugcgugaggcucuguacc

SEQ ID NO: 944754 - RNA, 19 nt, Artificial Sequence
  Description of Artificial Sequence: Synthetic oligonucleotide
aucucgugagccuggguca

SEQ ID NO: 944755 - RNA, 19 nt, Artificial Sequence
  Description of Artificial Sequence: Synthetic oligonucleotide
ucggcacuucuuaggauac

SEQ ID NO: 944756 - RNA, 19 nt, Artificial Sequence
  Description of Artificial Sequence: Synthetic oligonucleotide
uacccgaaccugcagcaac

SEQ ID NO: 944757 - RNA, 19 nt, Artificial Sequence
  Description of Artificial Sequence: Synthetic oligonucleotide
gcaagcaugugcgugaggc

SEQ ID NO: 944758 - RNA, 19 nt, Artificial Sequence
  Description of Artificial Sequence: Synthetic oligonucleotide
ugaccacgaacuucagcug

SEQ ID NO: 944759 - RNA, 19 nt, Artificial Sequence
  Description of Artificial Sequence: Synthetic oligonucleotide
gccgcuuugucuugcaggg

SEQ ID NO: 944760 - RNA, 19 nt, Artificial Sequence
  Description of Artificial Sequence: Synthetic oligonucleotide
gacacuuuucgagccauca

SEQ ID NO: 944761 - RNA, 19 nt, Artificial Sequence
  Description of Artificial Sequence: Synthetic oligonucleotide
uucauggcgcugaccacga

SEQ ID NO: 944762 - RNA, 19 nt, Artificial Sequence
  Description of Artificial Sequence: Synthetic oligonucleotide
ugggaauccgggcuacagu

SEQ ID NO: 944763 - RNA, 19 nt, Artificial Sequence
  Description of Artificial Sequence: Synthetic oligonucleotide
ucaggucggcauccacugg

SEQ ID NO: 944764 - RNA, 19 nt, Artificial Sequence
  Description of Artificial Sequence: Synthetic oligonucleotide
uguccgcugcuucugccgc

SEQ ID NO: 944765 - RNA, 19 nt, Artificial Sequence
  Description of Artificial Sequence: Synthetic oligonucleotide
augcucaugcgcuccaccu

SEQ ID NO: 944766 - RNA, 19 nt, Artificial Sequence
  Description of Artificial Sequence: Synthetic oligonucleotide
cugccgggagaucagcucc

SEQ ID NO: 944767 - RNA, 19 nt, Artificial Sequence
  Description of Artificial Sequence: Synthetic oligonucleotide
uuuucauggcgcugaccac

SEQ ID NO: 944768 - RNA, 19 nt, Artificial Sequence
  Description of Artificial Sequence: Synthetic oligonucleotide
ucccgcguggcucugugcu

SEQ ID NO: 944769 - RNA, 19 nt, Artificial Sequence
  Description of Artificial Sequence: Synthetic oligonucleotide
uuugcaggcgcagcugagc

SEQ ID NO: 944770 - RNA, 19 nt, Artificial Sequence
  Description of Artificial Sequence: Synthetic oligonucleotide
aucaaacccuuaauggugu

SEQ ID NO: 944771 - RNA, 19 nt, Artificial Sequence
  Description of Artificial Sequence: Synthetic oligonucleotide
cauggcgcugaccacgaac

SEQ ID NO: 944772 - RNA, 19 nt, Artificial Sequence
  Description of Artificial Sequence: Synthetic oligonucleotide
cuugagucuugcucagcug

SEQ ID NO: 944773 - RNA, 19 nt, Artificial Sequence
  Description of Artificial Sequence: Synthetic oligonucleotide
ucccggagcauccgaaccu

SEQ ID NO: 944774 - RNA, 19 nt, Artificial Sequence
  Description of Artificial Sequence: Synthetic oligonucleotide
cuggcgcaaggaaaccacg

SEQ ID NO: 944775 - RNA, 19 nt, Artificial Sequence
  Description of Artificial Sequence: Synthetic oligonucleotide
agcaagggacacuuuucga

SEQ ID NO: 944776 - RNA, 19 nt, Artificial Sequence
  Description of Artificial Sequence: Synthetic oligonucleotide
guccugagugcuuuucaug

SEQ ID NO: 944777 - RNA, 19 nt, Artificial Sequence
  Description of Artificial Sequence: Synthetic oligonucleotide
agugcugcacggugucuag

SEQ ID NO: 944778 - RNA, 19 nt, Artificial Sequence
  Description of Artificial Sequence: Synthetic oligonucleotide
ugcugcacggugucuagaa

SEQ ID NO: 944779 - RNA, 19 nt, Artificial Sequence
  Description of Artificial Sequence: Synthetic oligonucleotide
ucauugaggauagcugcuc

SEQ ID NO: 944780 - RNA, 19 nt, Artificial Sequence
  Description of Artificial Sequence: Synthetic oligonucleotide
uccaggcuauucagggccc

SEQ ID NO: 944781 - RNA, 19 nt, Artificial Sequence
  Description of Artificial Sequence: Synthetic oligonucleotide
ucugcgggccacacgcuga

SEQ ID NO: 944782 - RNA, 19 nt, Artificial Sequence
  Description of Artificial Sequence: Synthetic oligonucleotide
ugaggcucuguacccgaac

SEQ ID NO: 944783 - RNA, 19 nt, Artificial Sequence
  Description of Artificial Sequence: Synthetic oligonucleotide
uccccugcccguuucauuu

SEQ ID NO: 944784 - RNA, 19 nt, Artificial Sequence
  Description of Artificial Sequence: Synthetic oligonucleotide
ucuuggugcagagucugaa

SEQ ID NO: 944785 - RNA, 19 nt, Artificial Sequence
  Description of Artificial Sequence: Synthetic oligonucleotide
gggaauccgggcuacaguc

SEQ ID NO: 944786 - RNA, 19 nt, Artificial Sequence
  Description of Artificial Sequence: Synthetic oligonucleotide
uuugucuugcagggcuugc

SEQ ID NO: 944787 - RNA, 19 nt, Artificial Sequence
  Description of Artificial Sequence: Synthetic oligonucleotide
cucccucaagugcugcacg

SEQ ID NO: 944788 - RNA, 19 nt, Artificial Sequence
  Description of Artificial Sequence: Synthetic oligonucleotide
uuuugucccucucgagcuc

SEQ ID NO: 944789 - RNA, 19 nt, Artificial Sequence
  Description of Artificial Sequence: Synthetic oligonucleotide
uccggauggcauagcugag

SEQ ID NO: 944790 - RNA, 19 nt, Artificial Sequence
  Description of Artificial Sequence: Synthetic oligonucleotide
auugaggauagcugcucuu

SEQ ID NO: 944791 - RNA, 19 nt, Artificial Sequence
  Description of Artificial Sequence: Synthetic oligonucleotide
agcagagaucggcacuucu

SEQ ID NO: 944792 - RNA, 19 nt, Artificial Sequence
  Description of Artificial Sequence: Synthetic oligonucleotide
cugguuccgcuccuuuucc

SEQ ID NO: 944793 - RNA, 19 nt, Artificial Sequence
  Description of Artificial Sequence: Synthetic oligonucleotide
uuucccgcguggcucugug

SEQ ID NO: 944794 - RNA, 19 nt, Artificial Sequence
  Description of Artificial Sequence: Synthetic oligonucleotide
cugggccuugaguuguacc

SEQ ID NO: 944795 - RNA, 19 nt, Artificial Sequence
  Description of Artificial Sequence: Synthetic oligonucleotide
cucccggagcauccgaacc

SEQ ID NO: 944796 - RNA, 19 nt, Artificial Sequence
  Description of Artificial Sequence: Synthetic oligonucleotide
cuaccuggucccucagccc

SEQ ID NO: 944797 - RNA, 19 nt, Artificial Sequence
  Description of Artificial Sequence: Synthetic oligonucleotide
ucuuugugucugagagcug

SEQ ID NO: 944798 - RNA, 19 nt, Artificial Sequence
  Description of Artificial Sequence: Synthetic oligonucleotide
auggcgcugaccacgaacu

SEQ ID NO: 944799 - RNA, 19 nt, Artificial Sequence
  Description of Artificial Sequence: Synthetic oligonucleotide
cucucgagcuccugcacuc

SEQ ID NO: 944800 - RNA, 19 nt, Artificial Sequence
  Description of Artificial Sequence: Synthetic oligonucleotide
uccguucuucccgaaggug

SEQ ID NO: 944801 - RNA, 19 nt, Artificial Sequence
  Description of Artificial Sequence: Synthetic oligonucleotide
ugugaaccucaggagggac

SEQ ID NO: 944802 - RNA, 19 nt, Artificial Sequence
  Description of Artificial Sequence: Synthetic oligonucleotide
agugcuuuucauggcgcug

SEQ ID NO: 944803 - RNA, 19 nt, Artificial Sequence
  Description of Artificial Sequence: Synthetic oligonucleotide
cagccgucguaacucuugg

SEQ ID NO: 944804 - RNA, 19 nt, Artificial Sequence
  Description of Artificial Sequence: Synthetic oligonucleotide
uccuggucagcuccucuuc

SEQ ID NO: 944805 - RNA, 19 nt, Artificial Sequence
  Description of Artificial Sequence: Synthetic oligonucleotide
ucgugagccugggucauug

SEQ ID NO: 944806 - RNA, 19 nt, Artificial Sequence
  Description of Artificial Sequence: Synthetic oligonucleotide
agucugguucagccugguc

SEQ ID NO: 944807 - RNA, 19 nt, Artificial Sequence
  Description of Artificial Sequence: Synthetic oligonucleotide
accccgaagcagcucgguc

SEQ ID NO: 944808 - RNA, 19 nt, Artificial Sequence
  Description of Artificial Sequence: Synthetic oligonucleotide
ugcccguagaucugcugcu

SEQ ID NO: 944809 - RNA, 19 nt, Artificial Sequence
  Description of Artificial Sequence: Synthetic oligonucleotide
ggauggcauagcugagucg

SEQ ID NO: 944810 - RNA, 19 nt, Artificial Sequence
  Description of Artificial Sequence: Synthetic oligonucleotide
ugguuccgcuccuuuuccc

SEQ ID NO: 944811 - RNA, 19 nt, Artificial Sequence
  Description of Artificial Sequence: Synthetic oligonucleotide
gaucuggcgcaaggaaacc

SEQ ID NO: 944812 - RNA, 19 nt, Artificial Sequence
  Description of Artificial Sequence: Synthetic oligonucleotide
gcucaugcgcuccaccucc

SEQ ID NO: 944813 - RNA, 19 nt, Artificial Sequence
  Description of Artificial Sequence: Synthetic oligonucleotide
ucucccggagcauccgaac

SEQ ID NO: 944814 - RNA, 19 nt, Artificial Sequence
  Description of Artificial Sequence: Synthetic oligonucleotide
gcgcaaggaaaccacggcc

SEQ ID NO: 944815 - RNA, 19 nt, Artificial Sequence
  Description of Artificial Sequence: Synthetic oligonucleotide
gaccuuccggauggcauag

SEQ ID NO: 944816 - RNA, 19 nt, Artificial Sequence
  Description of Artificial Sequence: Synthetic oligonucleotide
ugcuuuucauggcgcugac

SEQ ID NO: 944817 - RNA, 19 nt, Artificial Sequence
  Description of Artificial Sequence: Synthetic oligonucleotide
ggaucuggcgcaaggaaac

SEQ ID NO: 944818 - RNA, 19 nt, Artificial Sequence
  Description of Artificial Sequence: Synthetic oligonucleotide
ccgaguuuccaccucggcc

SEQ ID NO: 944819 - RNA, 19 nt, Artificial Sequence
  Description of Artificial Sequence: Synthetic oligonucleotide
gcauagcugagucgguugc

SEQ ID NO: 944820 - RNA, 19 nt, Artificial Sequence
  Description of Artificial Sequence: Synthetic oligonucleotide
cacgguggccugaagguca

SEQ ID NO: 944821 - RNA, 19 nt, Artificial Sequence
  Description of Artificial Sequence: Synthetic oligonucleotide
gaagccgaguuuccaccuc

SEQ ID NO: 944822 - RNA, 19 nt, Artificial Sequence
  Description of Artificial Sequence: Synthetic oligonucleotide
gggacagcuuugcaggcgc

SEQ ID NO: 944823 - RNA, 19 nt, Artificial Sequence
  Description of Artificial Sequence: Synthetic oligonucleotide
cuugcccguagaucugcug

SEQ ID NO: 944824 - RNA, 19 nt, Artificial Sequence
  Description of Artificial Sequence: Synthetic oligonucleotide
agggacacuuuucgagcca

SEQ ID NO: 944825 - RNA, 19 nt, Artificial Sequence
  Description of Artificial Sequence: Synthetic oligonucleotide
cugggaauccgggcuacag

SEQ ID NO: 944826 - RNA, 19 nt, Artificial Sequence
  Description of Artificial Sequence: Synthetic oligonucleotide
cugcagggaggucucccgg

SEQ ID NO: 944827 - RNA, 19 nt, Artificial Sequence
  Description of Artificial Sequence: Synthetic oligonucleotide
ggcgcaaggaaaccacggc

SEQ ID NO: 944828 - RNA, 19 nt, Artificial Sequence
  Description of Artificial Sequence: Synthetic oligonucleotide
ccgucguaacucuuggagc

SEQ ID NO: 944829 - RNA, 19 nt, Artificial Sequence
  Description of Artificial Sequence: Synthetic oligonucleotide
uucuugagucuugcucagc

SEQ ID NO: 944830 - RNA, 19 nt, Artificial Sequence
  Description of Artificial Sequence: Synthetic oligonucleotide
ccucgacagagucuguccg

SEQ ID NO: 944831 - RNA, 19 nt, Artificial Sequence
  Description of Artificial Sequence: Synthetic oligonucleotide
ucccguucuggcucccaug

SEQ ID NO: 944832 - RNA, 19 nt, Artificial Sequence
  Description of Artificial Sequence: Synthetic oligonucleotide
caugaggacaaacaccuuu

SEQ ID NO: 944833 - RNA, 19 nt, Artificial Sequence
  Description of Artificial Sequence: Synthetic oligonucleotide
caaggaaaccacggccuug

SEQ ID NO: 944834 - RNA, 19 nt, Artificial Sequence
  Description of Artificial Sequence: Synthetic oligonucleotide
uaggauacucgggcuccag

SEQ ID NO: 944835 - RNA, 19 nt, Artificial Sequence
  Description of Artificial Sequence: Synthetic oligonucleotide
agucgguugcugaggcugg

SEQ ID NO: 944836 - RNA, 19 nt, Artificial Sequence
  Description of Artificial Sequence: Synthetic oligonucleotide
uggcgggccgacuccagcu

SEQ ID NO: 944837 - RNA, 19 nt, Artificial Sequence
  Description of Artificial Sequence: Synthetic oligonucleotide
uguucccgaagccgaguuu

SEQ ID NO: 944838 - RNA, 19 nt, Artificial Sequence
  Description of Artificial Sequence: Synthetic oligonucleotide
cagggcaagcaugugcgug

SEQ ID NO: 944839 - RNA, 19 nt, Artificial Sequence
  Description of Artificial Sequence: Synthetic oligonucleotide
aggucaccugagcuuccag

SEQ ID NO: 944840 - RNA, 19 nt, Artificial Sequence
  Description of Artificial Sequence: Synthetic oligonucleotide
uccagccaaggcagcgcgc

SEQ ID NO: 944841 - RNA, 19 nt, Artificial Sequence
  Description of Artificial Sequence: Synthetic oligonucleotide
ucugagcuccugguuccgc

SEQ ID NO: 944842 - RNA, 19 nt, Artificial Sequence
  Description of Artificial Sequence: Synthetic oligonucleotide
cugugcuggaucuggcgca

SEQ ID NO: 944843 - RNA, 19 nt, Artificial Sequence
  Description of Artificial Sequence: Synthetic oligonucleotide
cagagaucggcacuucuua

SEQ ID NO: 944844 - RNA, 19 nt, Artificial Sequence
  Description of Artificial Sequence: Synthetic oligonucleotide
cuugcucccgggcccggcc

SEQ ID NO: 944845 - RNA, 19 nt, Artificial Sequence
  Description of Artificial Sequence: Synthetic oligonucleotide
uugcugaggcugggaaucc

SEQ ID NO: 944846 - RNA, 19 nt, Artificial Sequence
  Description of Artificial Sequence: Synthetic oligonucleotide
ugccaccgcaagagcgucc

SEQ ID NO: 944847 - RNA, 19 nt, Artificial Sequence
  Description of Artificial Sequence: Synthetic oligonucleotide
uugauuuccccugcccguu

SEQ ID NO: 944848 - RNA, 19 nt, Artificial Sequence
  Description of Artificial Sequence: Synthetic oligonucleotide
ccucagacuuuccaccaag

SEQ ID NO: 944849 - RNA, 19 nt, Artificial Sequence
  Description of Artificial Sequence: Synthetic oligonucleotide
cuggaucuggcgcaaggaa

SEQ ID NO: 944850 - RNA, 19 nt, Artificial Sequence
  Description of Artificial Sequence: Synthetic oligonucleotide
aggcgucugagcuccuggu

SEQ ID NO: 944851 - RNA, 19 nt, Artificial Sequence
  Description of Artificial Sequence: Synthetic oligonucleotide
cuggcaagagccaucucgu

SEQ ID NO: 944852 - RNA, 19 nt, Artificial Sequence
  Description of Artificial Sequence: Synthetic oligonucleotide
ugggccaccgacagcuguu

SEQ ID NO: 944853 - RNA, 19 nt, Artificial Sequence
  Description of Artificial Sequence: Synthetic oligonucleotide
cccguucuggcucccaugc

SEQ ID NO: 944854 - RNA, 19 nt, Artificial Sequence
  Description of Artificial Sequence: Synthetic oligonucleotide
aggucggcauccacugggg

SEQ ID NO: 944855 - RNA, 19 nt, Artificial Sequence
  Description of Artificial Sequence: Synthetic oligonucleotide
ccgauucagcuccauuugc

SEQ ID NO: 944856 - RNA, 19 nt, Artificial Sequence
  Description of Artificial Sequence: Synthetic oligonucleotide
cugcagagcuugcccguag

SEQ ID NO: 944857 - RNA, 19 nt, Artificial Sequence
  Description of Artificial Sequence: Synthetic oligonucleotide
cucccuccgcgccucauuc

SEQ ID NO: 944858 - RNA, 19 nt, Artificial Sequence
  Description of Artificial Sequence: Synthetic oligonucleotide
aacuccacgguggccugaa

SEQ ID NO: 944859 - RNA, 19 nt, Artificial Sequence
  Description of Artificial Sequence: Synthetic oligonucleotide
ccucuuugugucugagagc

SEQ ID NO: 944860 - RNA, 19 nt, Artificial Sequence
  Description of Artificial Sequence: Synthetic oligonucleotide
cucgagcuccugcacucug

SEQ ID NO: 944861 - RNA, 19 nt, Artificial Sequence
  Description of Artificial Sequence: Synthetic oligonucleotide
ugagcccgauucagcucca

SEQ ID NO: 944862 - RNA, 19 nt, Artificial Sequence
  Description of Artificial Sequence: Synthetic oligonucleotide
gagugcuuuucauggcgcu

SEQ ID NO: 944863 - RNA, 19 nt, Artificial Sequence
  Description of Artificial Sequence: Synthetic oligonucleotide
gucugagagcuguucccga

SEQ ID NO: 944864 - RNA, 19 nt, Artificial Sequence
  Description of Artificial Sequence: Synthetic oligonucleotide
aggcuauucagggcccucu

SEQ ID NO: 944865 - RNA, 19 nt, Artificial Sequence
  Description of Artificial Sequence: Synthetic oligonucleotide
gagcguccaucuccauggc

SEQ ID NO: 944866 - RNA, 19 nt, Artificial Sequence
  Description of Artificial Sequence: Synthetic oligonucleotide
agcccgguccucccucaag

SEQ ID NO: 944867 - RNA, 19 nt, Artificial Sequence
  Description of Artificial Sequence: Synthetic oligonucleotide
uugcucagcugaccccgaa

SEQ ID NO: 944868 - RNA, 19 nt, Artificial Sequence
  Description of Artificial Sequence: Synthetic oligonucleotide
ucccgccagcugcucagca

SEQ ID NO: 944869 - RNA, 19 nt, Artificial Sequence
  Description of Artificial Sequence: Synthetic oligonucleotide
uggcauagcugagucgguu

SEQ ID NO: 944870 - RNA, 19 nt, Artificial Sequence
  Description of Artificial Sequence: Synthetic oligonucleotide
caccgcaagagcguccauc

SEQ ID NO: 944871 - RNA, 19 nt, Artificial Sequence
  Description of Artificial Sequence: Synthetic oligonucleotide
cauugaggauagcugcucu

SEQ ID NO: 944872 - RNA, 19 nt, Artificial Sequence
  Description of Artificial Sequence: Synthetic oligonucleotide
cuccucgacagagucuguc

SEQ ID NO: 944873 - RNA, 19 nt, Artificial Sequence
  Description of Artificial Sequence: Synthetic oligonucleotide
gcugcacggugucuagaag

SEQ ID NO: 944874 - RNA, 19 nt, Artificial Sequence
  Description of Artificial Sequence: Synthetic oligonucleotide
ggagcauccgaaccuccuc

SEQ ID NO: 944875 - RNA, 19 nt, Artificial Sequence
  Description of Artificial Sequence: Synthetic oligonucleotide
ccucaagugcugcacggug

SEQ ID NO: 944876 - RNA, 19 nt, Artificial Sequence
  Description of Artificial Sequence: Synthetic oligonucleotide
accuuccggauggcauagc

SEQ ID NO: 944877 - RNA, 19 nt, Artificial Sequence
  Description of Artificial Sequence: Synthetic oligonucleotide
ucauggugccauggaugcu

SEQ ID NO: 944878 - RNA, 19 nt, Artificial Sequence
  Description of Artificial Sequence: Synthetic oligonucleotide
agccgucguaacucuugga

SEQ ID NO: 944879 - RNA, 19 nt, Artificial Sequence
  Description of Artificial Sequence: Synthetic oligonucleotide
ugcacucugcgggccacac

SEQ ID NO: 944880 - RNA, 19 nt, Artificial Sequence
  Description of Artificial Sequence: Synthetic oligonucleotide
ccagccgucguaacucuug

SEQ ID NO: 944881 - RNA, 19 nt, Artificial Sequence
  Description of Artificial Sequence: Synthetic oligonucleotide
agccgaguuuccaccucgg

SEQ ID NO: 944882 - RNA, 19 nt, Artificial Sequence
  Description of Artificial Sequence: Synthetic oligonucleotide
agccaucucgugagccugg

SEQ ID NO: 944883 - RNA, 19 nt, Artificial Sequence
  Description of Artificial Sequence: Synthetic oligonucleotide
uucccgcguggcucugugc

SEQ ID NO: 944884 - RNA, 19 nt, Artificial Sequence
  Description of Artificial Sequence: Synthetic oligonucleotide
cagcauccaagcgguuccg

SEQ ID NO: 944885 - RNA, 19 nt, Artificial Sequence
  Description of Artificial Sequence: Synthetic oligonucleotide
cuccucuuugugucugaga

SEQ ID NO: 944886 - RNA, 19 nt, Artificial Sequence
  Description of Artificial Sequence: Synthetic oligonucleotide
uccuuccgggccucauccu

SEQ ID NO: 944887 - RNA, 19 nt, Artificial Sequence
  Description of Artificial Sequence: Synthetic oligonucleotide
cguacuuccucagacuuuc

SEQ ID NO: 944888 - RNA, 19 nt, Artificial Sequence
  Description of Artificial Sequence: Synthetic oligonucleotide
gucugagcuccugguuccg

SEQ ID NO: 944889 - RNA, 19 nt, Artificial Sequence
  Description of Artificial Sequence: Synthetic oligonucleotide
uccgccgcuuugucuugca

SEQ ID NO: 944890 - RNA, 19 nt, Artificial Sequence
  Description of Artificial Sequence: Synthetic oligonucleotide
ucgguugcugaggcuggga

SEQ ID NO: 944891 - RNA, 19 nt, Artificial Sequence
  Description of Artificial Sequence: Synthetic oligonucleotide
gagcuugcccguagaucug

SEQ ID NO: 944892 - RNA, 19 nt, Artificial Sequence
  Description of Artificial Sequence: Synthetic oligonucleotide
ucucgugagccugggucau

SEQ ID NO: 944893 - RNA, 19 nt, Artificial Sequence
  Description of Artificial Sequence: Synthetic oligonucleotide
ggccuccugagcccgauuc

SEQ ID NO: 944894 - RNA, 19 nt, Artificial Sequence
  Description of Artificial Sequence: Synthetic oligonucleotide
ucccuccgcgccucauuca

SEQ ID NO: 944895 - RNA, 19 nt, Artificial Sequence
  Description of Artificial Sequence: Synthetic oligonucleotide
ccaacucaaggcucagguc

SEQ ID NO: 944896 - RNA, 19 nt, Artificial Sequence
  Description of Artificial Sequence: Synthetic oligonucleotide
ggagaucagcuccgccugc

SEQ ID NO: 944897 - RNA, 19 nt, Artificial Sequence
  Description of Artificial Sequence: Synthetic oligonucleotide
uuuccccugcccguuucau

SEQ ID NO: 944898 - RNA, 19 nt, Artificial Sequence
  Description of Artificial Sequence: Synthetic oligonucleotide
gucgguugcugaggcuggg

SEQ ID NO: 944899 - RNA, 19 nt, Artificial Sequence
  Description of Artificial Sequence: Synthetic oligonucleotide
ccucguucagcugcaggcg

SEQ ID NO: 944900 - RNA, 19 nt, Artificial Sequence
  Description of Artificial Sequence: Synthetic oligonucleotide
cgccgcuuugucuugcagg

SEQ ID NO: 944901 - RNA, 19 nt, Artificial Sequence
  Description of Artificial Sequence: Synthetic oligonucleotide
cagcuguuugauuuccccu

SEQ ID NO: 944902 - RNA, 19 nt, Artificial Sequence
  Description of Artificial Sequence: Synthetic oligonucleotide
caccaaggucaccugagcu

SEQ ID NO: 944903 - RNA, 19 nt, Artificial Sequence
  Description of Artificial Sequence: Synthetic oligonucleotide
cacguacuuccucagacuu

SEQ ID NO: 944904 - RNA, 19 nt, Artificial Sequence
  Description of Artificial Sequence: Synthetic oligonucleotide
cuacagucugguucagccu

SEQ ID NO: 944905 - RNA, 19 nt, Artificial Sequence
  Description of Artificial Sequence: Synthetic oligonucleotide
gcaagagcguccaucucca

SEQ ID NO: 944906 - RNA, 19 nt, Artificial Sequence
  Description of Artificial Sequence: Synthetic oligonucleotide
ccgguccucccucaagugc

SEQ ID NO: 944907 - RNA, 19 nt, Artificial Sequence
  Description of Artificial Sequence: Synthetic oligonucleotide
agcccgauucagcuccauu

SEQ ID NO: 944908 - RNA, 19 nt, Artificial Sequence
  Description of Artificial Sequence: Synthetic oligonucleotide
uccagccgucguaacucuu

SEQ ID NO: 944909 - RNA, 19 nt, Artificial Sequence
  Description of Artificial Sequence: Synthetic oligonucleotide
gggacuccugggcacgcug

SEQ ID NO: 944910 - RNA, 19 nt, Artificial Sequence
  Description of Artificial Sequence: Synthetic oligonucleotide
guacuuccucagacuuucc

SEQ ID NO: 944911 - RNA, 19 nt, Artificial Sequence
  Description of Artificial Sequence: Synthetic oligonucleotide
cuuggugcagagucugaau

SEQ ID NO: 944912 - RNA, 19 nt, Artificial Sequence
  Description of Artificial Sequence: Synthetic oligonucleotide
ggcaagcaugugcgugagg

SEQ ID NO: 944913 - RNA, 19 nt, Artificial Sequence
  Description of Artificial Sequence: Synthetic oligonucleotide
agcauccaagcgguuccgu

SEQ ID NO: 944914 - RNA, 19 nt, Artificial Sequence
  Description of Artificial Sequence: Synthetic oligonucleotide
ccgaaccugcagcaacucc

SEQ ID NO: 944915 - RNA, 19 nt, Artificial Sequence
  Description of Artificial Sequence: Synthetic oligonucleotide
gcgcugaccacgaacuuca

SEQ ID NO: 944916 - RNA, 19 nt, Artificial Sequence
  Description of Artificial Sequence: Synthetic oligonucleotide
acggugucuagaagcuccu

SEQ ID NO: 944917 - RNA, 19 nt, Artificial Sequence
  Description of Artificial Sequence: Synthetic oligonucleotide
ucauggcgcugaccacgaa

SEQ ID NO: 944918 - RNA, 19 nt, Artificial Sequence
  Description of Artificial Sequence: Synthetic oligonucleotide
cccuuaaugguguggaccu

SEQ ID NO: 944919 - RNA, 19 nt, Artificial Sequence
  Description of Artificial Sequence: Synthetic oligonucleotide
uggcgcugaccacgaacuu

SEQ ID NO: 944920 - RNA, 19 nt, Artificial Sequence
  Description of Artificial Sequence: Synthetic oligonucleotide
cucagccccuucauggagu

SEQ ID NO: 944921 - RNA, 19 nt, Artificial Sequence
  Description of Artificial Sequence: Synthetic oligonucleotide
ucgagccaucaaacccuua

SEQ ID NO: 944922 - RNA, 19 nt, Artificial Sequence
  Description of Artificial Sequence: Synthetic oligonucleotide
ggcacgcugcagcuccugc

SEQ ID NO: 944923 - RNA, 19 nt, Artificial Sequence
  Description of Artificial Sequence: Synthetic oligonucleotide
cucagcugcagcucagcau

SEQ ID NO: 944924 - RNA, 19 nt, Artificial Sequence
  Description of Artificial Sequence: Synthetic oligonucleotide
ggcgcugaccacgaacuuc

SEQ ID NO: 944925 - RNA, 19 nt, Artificial Sequence
  Description of Artificial Sequence: Synthetic oligonucleotide
ccgacagcuguuugauuuc

SEQ ID NO: 944926 - RNA, 19 nt, Artificial Sequence
  Description of Artificial Sequence: Synthetic oligonucleotide
ggcuauucagggcccucuc

SEQ ID NO: 944927 - RNA, 19 nt, Artificial Sequence
  Description of Artificial Sequence: Synthetic oligonucleotide
gccgaguuuccaccucggc

SEQ ID NO: 944928 - RNA, 19 nt, Artificial Sequence
  Description of Artificial Sequence: Synthetic oligonucleotide
ggaccuuccggauggcaua

SEQ ID NO: 944929 - RNA, 19 nt, Artificial Sequence
  Description of Artificial Sequence: Synthetic oligonucleotide
gcugcugccccacguugac

SEQ ID NO: 944930 - RNA, 19 nt, Artificial Sequence
  Description of Artificial Sequence: Synthetic oligonucleotide
uggcucugugcuggaucug

SEQ ID NO: 944931 - RNA, 19 nt, Artificial Sequence
  Description of Artificial Sequence: Synthetic oligonucleotide
auggcauagcugagucggu

SEQ ID NO: 944932 - RNA, 19 nt, Artificial Sequence
  Description of Artificial Sequence: Synthetic oligonucleotide
gcacucugcgggccacacg

SEQ ID NO: 944933 - RNA, 19 nt, Artificial Sequence
  Description of Artificial Sequence: Synthetic oligonucleotide
gcuugcugcaagauggccu

SEQ ID NO: 944934 - RNA, 19 nt, Artificial Sequence
  Description of Artificial Sequence: Synthetic oligonucleotide
acguacuuccucagacuuu

SEQ ID NO: 944935 - RNA, 19 nt, Artificial Sequence
  Description of Artificial Sequence: Synthetic oligonucleotide
cguaacucuuggagcugcc

SEQ ID NO: 944936 - RNA, 19 nt, Artificial Sequence
  Description of Artificial Sequence: Synthetic oligonucleotide
cgagccaucaaacccuuaa

SEQ ID NO: 944937 - RNA, 19 nt, Artificial Sequence
  Description of Artificial Sequence: Synthetic oligonucleotide
cuuggagcugccgggagau

SEQ ID NO: 944938 - RNA, 19 nt, Artificial Sequence
  Description of Artificial Sequence: Synthetic oligonucleotide
ggcuacagucugguucagc

SEQ ID NO: 944939 - RNA, 19 nt, Artificial Sequence
  Description of Artificial Sequence: Synthetic oligonucleotide
caggcuauucagggcccuc

SEQ ID NO: 944940 - RNA, 19 nt, Artificial Sequence
  Description of Artificial Sequence: Synthetic oligonucleotide
gccuugaguuguaccauga

SEQ ID NO: 944941 - RNA, 19 nt, Artificial Sequence
  Description of Artificial Sequence: Synthetic oligonucleotide
cgucguaacucuuggagcu

SEQ ID NO: 944942 - RNA, 19 nt, Artificial Sequence
  Description of Artificial Sequence: Synthetic oligonucleotide
cugguucagccuggucaug

SEQ ID NO: 944943 - RNA, 19 nt, Artificial Sequence
  Description of Artificial Sequence: Synthetic oligonucleotide
ggcgggccgacuccagcug

SEQ ID NO: 944944 - RNA, 19 nt, Artificial Sequence
  Description of Artificial Sequence: Synthetic oligonucleotide
uccgggcuacagucugguu

SEQ ID NO: 944945 - RNA, 19 nt, Artificial Sequence
  Description of Artificial Sequence: Synthetic oligonucleotide
accucaggagggacuucgu

SEQ ID NO: 944946 - RNA, 19 nt, Artificial Sequence
  Description of Artificial Sequence: Synthetic oligonucleotide
cgcuccuuuucccgcgugg

SEQ ID NO: 944947 - RNA, 19 nt, Artificial Sequence
  Description of Artificial Sequence: Synthetic oligonucleotide
gucucccggagcauccgaa

SEQ ID NO: 944948 - RNA, 19 nt, Artificial Sequence
  Description of Artificial Sequence: Synthetic oligonucleotide
cugggucauugaggauagc

SEQ ID NO: 944949 - RNA, 19 nt, Artificial Sequence
  Description of Artificial Sequence: Synthetic oligonucleotide
gcgguuccguucuucccga

SEQ ID NO: 944950 - RNA, 19 nt, Artificial Sequence
  Description of Artificial Sequence: Synthetic oligonucleotide
gccggagguuggcagcuuc

SEQ ID NO: 944951 - RNA, 19 nt, Artificial Sequence
  Description of Artificial Sequence: Synthetic oligonucleotide
gguccucccucaagugcug

SEQ ID NO: 944952 - RNA, 19 nt, Artificial Sequence
  Description of Artificial Sequence: Synthetic oligonucleotide
gccaccgcaagagcgucca

SEQ ID NO: 944953 - RNA, 19 nt, Artificial Sequence
  Description of Artificial Sequence: Synthetic oligonucleotide
cccgguccucccucaagug

SEQ ID NO: 944954 - RNA, 19 nt, Artificial Sequence
  Description of Artificial Sequence: Synthetic oligonucleotide
uggccuccugagcccgauu

SEQ ID NO: 944955 - RNA, 19 nt, Artificial Sequence
  Description of Artificial Sequence: Synthetic oligonucleotide
ccuccgcgccucauucagc

SEQ ID NO: 944956 - RNA, 19 nt, Artificial Sequence
  Description of Artificial Sequence: Synthetic oligonucleotide
ccgccagcugcucagcaga

SEQ ID NO: 944957 - RNA, 19 nt, Artificial Sequence
  Description of Artificial Sequence: Synthetic oligonucleotide
gcucugggccaucacuugu

SEQ ID NO: 944958 - RNA, 19 nt, Artificial Sequence
  Description of Artificial Sequence: Synthetic oligonucleotide
ccguucuggcucccaugcc

SEQ ID NO: 944959 - RNA, 19 nt, Artificial Sequence
  Description of Artificial Sequence: Synthetic oligonucleotide
gugcugcacggugucuaga

SEQ ID NO: 944960 - RNA, 19 nt, Artificial Sequence
  Description of Artificial Sequence: Synthetic oligonucleotide
cgcgccucauucagccucc

SEQ ID NO: 944961 - RNA, 19 nt, Artificial Sequence
  Description of Artificial Sequence: Synthetic oligonucleotide
ggaauccgggcuacagucu

SEQ ID NO: 944962 - RNA, 19 nt, Artificial Sequence
  Description of Artificial Sequence: Synthetic oligonucleotide
cucauucagccuccucuuu

SEQ ID NO: 944963 - RNA, 19 nt, Artificial Sequence
  Description of Artificial Sequence: Synthetic oligonucleotide
gccucauccugaaggcguc

SEQ ID NO: 944964 - RNA, 19 nt, Artificial Sequence
  Description of Artificial Sequence: Synthetic oligonucleotide
gcuccgccgcuuugucuug

SEQ ID NO: 944965 - RNA, 19 nt, Artificial Sequence
  Description of Artificial Sequence: Synthetic oligonucleotide
ccagcuccgccgcuuuguc

SEQ ID NO: 944966 - RNA, 19 nt, Artificial Sequence
  Description of Artificial Sequence: Synthetic oligonucleotide
gcaaggaaaccacggccuu

SEQ ID NO: 944967 - RNA, 19 nt, Artificial Sequence
  Description of Artificial Sequence: Synthetic oligonucleotide
ccugaaggucagcccgguc

SEQ ID NO: 944968 - RNA, 19 nt, Artificial Sequence
  Description of Artificial Sequence: Synthetic oligonucleotide
ccacguacuuccucagacu

SEQ ID NO: 944969 - RNA, 19 nt, Artificial Sequence
  Description of Artificial Sequence: Synthetic oligonucleotide
gcagagcuugcccguagau

SEQ ID NO: 944970 - RNA, 19 nt, Artificial Sequence
  Description of Artificial Sequence: Synthetic oligonucleotide
ccacgguggccugaagguc

SEQ ID NO: 944971 - RNA, 19 nt, Artificial Sequence
  Description of Artificial Sequence: Synthetic oligonucleotide
ccguuucauuuccaggcua

SEQ ID NO: 944972 - RNA, 19 nt, Artificial Sequence
  Description of Artificial Sequence: Synthetic oligonucleotide
cguuucauuuccaggcuau

SEQ ID NO: 944973 - RNA, 19 nt, Artificial Sequence
  Description of Artificial Sequence: Synthetic oligonucleotide
gaccccgaagcagcucggu

SEQ ID NO: 944974 - RNA, 19 nt, Artificial Sequence
  Description of Artificial Sequence: Synthetic oligonucleotide
aggcagcgcgcaggcccuc

SEQ ID NO: 944975 - RNA, 19 nt, Artificial Sequence
  Description of Artificial Sequence: Synthetic oligonucleotide
cccgcguggcucugugcug

SEQ ID NO: 944976 - RNA, 19 nt, Artificial Sequence
  Description of Artificial Sequence: Synthetic oligonucleotide
cgacagagucuguccgcug

SEQ ID NO: 944977 - RNA, 19 nt, Artificial Sequence
  Description of Artificial Sequence: Synthetic oligonucleotide
cagcuccgccgcuuugucu

SEQ ID NO: 944978 - RNA, 19 nt, Artificial Sequence
  Description of Artificial Sequence: Synthetic oligonucleotide
ggacagcuuugcaggcgca

SEQ ID NO: 944979 - RNA, 19 nt, Artificial Sequence
  Description of Artificial Sequence: Synthetic oligonucleotide
ugccccuggcgggccgacu

SEQ ID NO: 944980 - RNA, 19 nt, Artificial Sequence
  Description of Artificial Sequence: Synthetic oligonucleotide
ccgcuuugucuugcagggc

SEQ ID NO: 944981 - RNA, 19 nt, Artificial Sequence
  Description of Artificial Sequence: Synthetic oligonucleotide
gggcuacagucugguucag

SEQ ID NO: 944982 - RNA, 19 nt, Artificial Sequence
  Description of Artificial Sequence: Synthetic oligonucleotide
cggaccaucucggcuccag

SEQ ID NO: 944983 - RNA, 19 nt, Artificial Sequence
  Description of Artificial Sequence: Synthetic oligonucleotide
cccgaaccugcagcaacuc

SEQ ID NO: 944984 - RNA, 19 nt, Artificial Sequence
  Description of Artificial Sequence: Synthetic oligonucleotide
ccguagaucugcugcugcu

SEQ ID NO: 944985 - RNA, 19 nt, Artificial Sequence
  Description of Artificial Sequence: Synthetic oligonucleotide
ccccugcccguuucauuuc

SEQ ID NO: 944986 - RNA, 19 nt, Artificial Sequence
  Description of Artificial Sequence: Synthetic oligonucleotide
ccucucgagcuccugcacu

SEQ ID NO: 944987 - RNA, 19 nt, Artificial Sequence
  Description of Artificial Sequence: Synthetic oligonucleotide
cgguccucccucaagugcu

SEQ ID NO: 944988 - RNA, 19 nt, Artificial Sequence
  Description of Artificial Sequence: Synthetic oligonucleotide
ccgcaagagcguccaucuc

SEQ ID NO: 944989 - RNA, 19 nt, Artificial Sequence
  Description of Artificial Sequence: Synthetic oligonucleotide
cgguugcugaggcugggaa

SEQ ID NO: 944990 - RNA, 19 nt, Artificial Sequence
  Description of Artificial Sequence: Synthetic oligonucleotide
gcuguucccgaagccgagu

SEQ ID NO: 944991 - RNA, 19 nt, Artificial Sequence
  Description of Artificial Sequence: Synthetic oligonucleotide
cugccccuggcgggccgac

SEQ ID NO: 944992 - RNA, 19 nt, Artificial Sequence
  Description of Artificial Sequence: Synthetic oligonucleotide
ccccuucauggagucccug

SEQ ID NO: 944993 - RNA, 19 nt, Artificial Sequence
  Description of Artificial Sequence: Synthetic oligonucleotide
caccgacagcuguuugauu

SEQ ID NO: 944994 - RNA, 19 nt, Artificial Sequence
  Description of Artificial Sequence: Synthetic oligonucleotide
ccaccgacagcuguuugau

SEQ ID NO: 944995 - RNA, 19 nt, Artificial Sequence
  Description of Artificial Sequence: Synthetic oligonucleotide
cagcccgguccucccucaa

SEQ ID NO: 944996 - RNA, 19 nt, Artificial Sequence
  Description of Artificial Sequence: Synthetic oligonucleotide
gcuuugucuugcagggcuu

SEQ ID NO: 944997 - RNA, 19 nt, Artificial Sequence
  Description of Artificial Sequence: Synthetic oligonucleotide
ggcagcgcgcaggcccuca

SEQ ID NO: 944998 - RNA, 19 nt, Artificial Sequence
  Description of Artificial Sequence: Synthetic oligonucleotide
ccggauggcauagcugagu

SEQ ID NO: 944999 - RNA, 19 nt, Artificial Sequence
  Description of Artificial Sequence: Synthetic oligonucleotide
cgugagccugggucauuga

SEQ ID NO: 945000 - RNA, 19 nt, Artificial Sequence
  Description of Artificial Sequence: Synthetic oligonucleotide
gagcccgauucagcuccau

SEQ ID NO: 945001 - RNA, 19 nt, Artificial Sequence
  Description of Artificial Sequence: Synthetic oligonucleotide
ccucaggagggacuucguu

SEQ ID NO: 945002 - RNA, 19 nt, Artificial Sequence
  Description of Artificial Sequence: Synthetic oligonucleotide
ccugcagagcuugcccgua

SEQ ID NO: 945003 - RNA, 19 nt, Artificial Sequence
  Description of Artificial Sequence: Synthetic oligonucleotide
gcugccccuggcgggccga

SEQ ID NO: 945004 - RNA, 19 nt, Artificial Sequence
  Description of Artificial Sequence: Synthetic oligonucleotide
cgcugcagcaugagguuuu

SEQ ID NO: 945005 - RNA, 19 nt, Artificial Sequence
  Description of Artificial Sequence: Synthetic oligonucleotide
ccaucucgugagccugggu

SEQ ID NO: 945006 - RNA, 19 nt, Artificial Sequence
  Description of Artificial Sequence: Synthetic oligonucleotide
cucgugagccugggucauu

SEQ ID NO: 945007 - RNA, 19 nt, Artificial Sequence
  Description of Artificial Sequence: Synthetic oligonucleotide
gggaggucucccggagcau

SEQ ID NO: 945008 - RNA, 19 nt, Artificial Sequence
  Description of Artificial Sequence: Synthetic oligonucleotide
gccccuucauggagucccu

SEQ ID NO: 945009 - RNA, 19 nt, Artificial Sequence
  Description of Artificial Sequence: Synthetic oligonucleotide
gcuccucgacagagucugu

SEQ ID NO: 945010 - RNA, 19 nt, Artificial Sequence
  Description of Artificial Sequence: Synthetic oligonucleotide
cgguuccguucuucccgaa

SEQ ID NO: 945011 - RNA, 19 nt, Artificial Sequence
  Description of Artificial Sequence: Synthetic oligonucleotide
gcgccucauucagccuccu

SEQ ID NO: 945012 - RNA, 19 nt, Artificial Sequence
  Description of Artificial Sequence: Synthetic oligonucleotide
ccggaccaucucggcucca

SEQ ID NO: 945013 - RNA, 19 nt, Artificial Sequence
  Description of Artificial Sequence: Synthetic oligonucleotide
ccaccgcaagagcguccau

SEQ ID NO: 945014 - RNA, 19 nt, Artificial Sequence
  Description of Artificial Sequence: Synthetic oligonucleotide
aacauguuaaccuucaggc

SEQ ID NO: 945015 - RNA, 19 nt, Artificial Sequence
  Description of Artificial Sequence: Synthetic oligonucleotide
agagauauagcccauauac

SEQ ID NO: 945016 - RNA, 19 nt, Artificial Sequence
  Description of Artificial Sequence: Synthetic oligonucleotide
agauauagcccauauaccc

SEQ ID NO: 945017 - RNA, 19 nt, Artificial Sequence
  Description of Artificial Sequence: Synthetic oligonucleotide
cuauaagccaccuugaagg

SEQ ID NO: 945018 - RNA, 19 nt, Artificial Sequence
  Description of Artificial Sequence: Synthetic oligonucleotide
uuaacuuugaguagcaagc

SEQ ID NO: 945019 - RNA, 19 nt, Artificial Sequence
  Description of Artificial Sequence: Synthetic oligonucleotide
aaaucugugaguuagcaau

SEQ ID NO: 945020 - RNA, 19 nt, Artificial Sequence
  Description of Artificial Sequence: Synthetic oligonucleotide
aggagguucaccuggaucc

SEQ ID NO: 945021 - RNA, 19 nt, Artificial Sequence
  Description of Artificial Sequence: Synthetic oligonucleotide
gaugauucccgucacaugc

SEQ ID NO: 945022 - RNA, 19 nt, Artificial Sequence
  Description of Artificial Sequence: Synthetic oligonucleotide
uguuccuuauauauggucc

SEQ ID NO: 945023 - RNA, 19 nt, Artificial Sequence
  Description of Artificial Sequence: Synthetic oligonucleotide
uuagucuugagucaacccc

SEQ ID NO: 945024 - RNA, 19 nt, Artificial Sequence
  Description of Artificial Sequence: Synthetic oligonucleotide
cauguuaaccuucaggccg

SEQ ID NO: 945025 - RNA, 19 nt, Artificial Sequence
  Description of Artificial Sequence: Synthetic oligonucleotide
aaucacaccugacacccgc

SEQ ID NO: 945026 - RNA, 19 nt, Artificial Sequence
  Description of Artificial Sequence: Synthetic oligonucleotide
uaggcuauaagccaccuug

SEQ ID NO: 945027 - RNA, 19 nt, Artificial Sequence
  Description of Artificial Sequence: Synthetic oligonucleotide
aauccaaucaggaggaagg

SEQ ID NO: 945028 - RNA, 19 nt, Artificial Sequence
  Description of Artificial Sequence: Synthetic oligonucleotide
ugugaguuagcaauggcgc

SEQ ID NO: 945029 - RNA, 19 nt, Artificial Sequence
  Description of Artificial Sequence: Synthetic oligonucleotide
agagugaugcgcuuaugcc

SEQ ID NO: 945030 - RNA, 19 nt, Artificial Sequence
  Description of Artificial Sequence: Synthetic oligonucleotide
aaagcaacacgccgcauag

SEQ ID NO: 945031 - RNA, 19 nt, Artificial Sequence
  Description of Artificial Sequence: Synthetic oligonucleotide
ugcgcuuaugccaagagac

SEQ ID NO: 945032 - RNA, 19 nt, Artificial Sequence
  Description of Artificial Sequence: Synthetic oligonucleotide
gaagucaccggacacggcg

SEQ ID NO: 945033 - RNA, 19 nt, Artificial Sequence
  Description of Artificial Sequence: Synthetic oligonucleotide
uguagcaaggguuugggga

SEQ ID NO: 945034 - RNA, 19 nt, Artificial Sequence
  Description of Artificial Sequence: Synthetic oligonucleotide
uacaacugaucucacagug

SEQ ID NO: 945035 - RNA, 19 nt, Artificial Sequence
  Description of Artificial Sequence: Synthetic oligonucleotide
agugaagauaucuccucgc

SEQ ID NO: 945036 - RNA, 19 nt, Artificial Sequence
  Description of Artificial Sequence: Synthetic oligonucleotide
ugccuauuaacuuugagua

SEQ ID NO: 945037 - RNA, 19 nt, Artificial Sequence
  Description of Artificial Sequence: Synthetic oligonucleotide
aacacaagcacagaugcug

SEQ ID NO: 945038 - RNA, 19 nt, Artificial Sequence
  Description of Artificial Sequence: Synthetic oligonucleotide
acauguuaaccuucaggcc

SEQ ID NO: 945039 - RNA, 19 nt, Artificial Sequence
  Description of Artificial Sequence: Synthetic oligonucleotide
uugguagagauauagccca

SEQ ID NO: 945040 - RNA, 19 nt, Artificial Sequence
  Description of Artificial Sequence: Synthetic oligonucleotide
ugagguacaacugaucuca

SEQ ID NO: 945041 - RNA, 19 nt, Artificial Sequence
  Description of Artificial Sequence: Synthetic oligonucleotide
uucaccuggauccagggcu

SEQ ID NO: 945042 - RNA, 19 nt, Artificial Sequence
  Description of Artificial Sequence: Synthetic oligonucleotide
cacgaaacaggguacagcc

SEQ ID NO: 945043 - RNA, 19 nt, Artificial Sequence
  Description of Artificial Sequence: Synthetic oligonucleotide
uccgucuaggcuauaagcc

SEQ ID NO: 945044 - RNA, 19 nt, Artificial Sequence
  Description of Artificial Sequence: Synthetic oligonucleotide
auauagcccauauacccgg

SEQ ID NO: 945045 - RNA, 19 nt, Artificial Sequence
  Description of Artificial Sequence: Synthetic oligonucleotide
uccaguggagaacacaaug

SEQ ID NO: 945046 - RNA, 19 nt, Artificial Sequence
  Description of Artificial Sequence: Synthetic oligonucleotide
ucgguagcacgaaacaggg

SEQ ID NO: 945047 - RNA, 19 nt, Artificial Sequence
  Description of Artificial Sequence: Synthetic oligonucleotide
uugagucaaccccugacag

SEQ ID NO: 945048 - RNA, 19 nt, Artificial Sequence
  Description of Artificial Sequence: Synthetic oligonucleotide
uguccagccgcccauagug

SEQ ID NO: 945049 - RNA, 19 nt, Artificial Sequence
  Description of Artificial Sequence: Synthetic oligonucleotide
ugaggcggaaaucugugag

SEQ ID NO: 945050 - RNA, 19 nt, Artificial Sequence
  Description of Artificial Sequence: Synthetic oligonucleotide
auauacccggacuucaguc

SEQ ID NO: 945051 - RNA, 19 nt, Artificial Sequence
  Description of Artificial Sequence: Synthetic oligonucleotide
gguacaacugaucucacag

SEQ ID NO: 945052 - RNA, 19 nt, Artificial Sequence
  Description of Artificial Sequence: Synthetic oligonucleotide
ugcguaaucacaccugaca

SEQ ID NO: 945053 - RNA, 19 nt, Artificial Sequence
  Description of Artificial Sequence: Synthetic oligonucleotide
uuaccaucauuguagcaag

SEQ ID NO: 945054 - RNA, 19 nt, Artificial Sequence
  Description of Artificial Sequence: Synthetic oligonucleotide
aauguauuuucgagucugc

SEQ ID NO: 945055 - RNA, 19 nt, Artificial Sequence
  Description of Artificial Sequence: Synthetic oligonucleotide
uggauaaacuugaacuuga

SEQ ID NO: 945056 - RNA, 19 nt, Artificial Sequence
  Description of Artificial Sequence: Synthetic oligonucleotide
uguauuuucgagucugccu

SEQ ID NO: 945057 - RNA, 19 nt, Artificial Sequence
  Description of Artificial Sequence: Synthetic oligonucleotide
aaagccaggaauguguggu

SEQ ID NO: 945058 - RNA, 19 nt, Artificial Sequence
  Description of Artificial Sequence: Synthetic oligonucleotide
cacaauguauuuucgaguc

SEQ ID NO: 945059 - RNA, 19 nt, Artificial Sequence
  Description of Artificial Sequence: Synthetic oligonucleotide
guagcaagccagcagaggc

SEQ ID NO: 945060 - RNA, 19 nt, Artificial Sequence
  Description of Artificial Sequence: Synthetic oligonucleotide
cucgguagcacgaaacagg

SEQ ID NO: 945061 - RNA, 19 nt, Artificial Sequence
  Description of Artificial Sequence: Synthetic oligonucleotide
uccacuugcauucuggaua

SEQ ID NO: 945062 - RNA, 19 nt, Artificial Sequence
  Description of Artificial Sequence: Synthetic oligonucleotide
uuuagucuugagucaaccc

SEQ ID NO: 945063 - RNA, 19 nt, Artificial Sequence
  Description of Artificial Sequence: Synthetic oligonucleotide
uagcgagccacgaugggcg

SEQ ID NO: 945064 - RNA, 19 nt, Artificial Sequence
  Description of Artificial Sequence: Synthetic oligonucleotide
agggcuugcugucauaauc

SEQ ID NO: 945065 - RNA, 19 nt, Artificial Sequence
  Description of Artificial Sequence: Synthetic oligonucleotide
cauccaacuccccagaaug

SEQ ID NO: 945066 - RNA, 19 nt, Artificial Sequence
  Description of Artificial Sequence: Synthetic oligonucleotide
caacacgccgcauagcacg

SEQ ID NO: 945067 - RNA, 19 nt, Artificial Sequence
  Description of Artificial Sequence: Synthetic oligonucleotide
ugucauauggcugucggga

SEQ ID NO: 945068 - RNA, 19 nt, Artificial Sequence
  Description of Artificial Sequence: Synthetic oligonucleotide
ugggugaugauucccguca

SEQ ID NO: 945069 - RNA, 19 nt, Artificial Sequence
  Description of Artificial Sequence: Synthetic oligonucleotide
cuuguaggaugccacauac

SEQ ID NO: 945070 - RNA, 19 nt, Artificial Sequence
  Description of Artificial Sequence: Synthetic oligonucleotide
accgucguuacugugggcc

SEQ ID NO: 945071 - RNA, 19 nt, Artificial Sequence
  Description of Artificial Sequence: Synthetic oligonucleotide
aggacacgcacauagcgag

SEQ ID NO: 945072 - RNA, 19 nt, Artificial Sequence
  Description of Artificial Sequence: Synthetic oligonucleotide
uuuuagucuugagucaacc

SEQ ID NO: 945073 - RNA, 19 nt, Artificial Sequence
  Description of Artificial Sequence: Synthetic oligonucleotide
guagcaaggguuuggggag

SEQ ID NO: 945074 - RNA, 19 nt, Artificial Sequence
  Description of Artificial Sequence: Synthetic oligonucleotide
guugguagagauauagccc

SEQ ID NO: 945075 - RNA, 19 nt, Artificial Sequence
  Description of Artificial Sequence: Synthetic oligonucleotide
ucagguauucugcucuccc

SEQ ID NO: 945076 - RNA, 19 nt, Artificial Sequence
  Description of Artificial Sequence: Synthetic oligonucleotide
acacaauguauuuucgagu

SEQ ID NO: 945077 - RNA, 19 nt, Artificial Sequence
  Description of Artificial Sequence: Synthetic oligonucleotide
gagguuaggacuuggggca

SEQ ID NO: 945078 - RNA, 19 nt, Artificial Sequence
  Description of Artificial Sequence: Synthetic oligonucleotide
acguacacagaugaggcgg

SEQ ID NO: 945079 - RNA, 19 nt, Artificial Sequence
  Description of Artificial Sequence: Synthetic oligonucleotide
cauuuaccaucauuguagc

SEQ ID NO: 945080 - RNA, 19 nt, Artificial Sequence
  Description of Artificial Sequence: Synthetic oligonucleotide
gaagauaucuccucgcugu

SEQ ID NO: 945081 - RNA, 19 nt, Artificial Sequence
  Description of Artificial Sequence: Synthetic oligonucleotide
auguauuuucgagucugcc

SEQ ID NO: 945082 - RNA, 19 nt, Artificial Sequence
  Description of Artificial Sequence: Synthetic oligonucleotide
acugaucucacagugggug

SEQ ID NO: 945083 - RNA, 19 nt, Artificial Sequence
  Description of Artificial Sequence: Synthetic oligonucleotide
cacacaaggccugugaagc

SEQ ID NO: 945084 - RNA, 19 nt, Artificial Sequence
  Description of Artificial Sequence: Synthetic oligonucleotide
agcaacacgccgcauagca

SEQ ID NO: 945085 - RNA, 19 nt, Artificial Sequence
  Description of Artificial Sequence: Synthetic oligonucleotide
auuguagcaaggguuuggg

SEQ ID NO: 945086 - RNA, 19 nt, Artificial Sequence
  Description of Artificial Sequence: Synthetic oligonucleotide
uucccuguucaucucagac

SEQ ID NO: 945087 - RNA, 19 nt, Artificial Sequence
  Description of Artificial Sequence: Synthetic oligonucleotide
uuccgaaggagguucaccu

SEQ ID NO: 945088 - RNA, 19 nt, Artificial Sequence
  Description of Artificial Sequence: Synthetic oligonucleotide
acuggaccuggccaaaguc

SEQ ID NO: 945089 - RNA, 19 nt, Artificial Sequence
  Description of Artificial Sequence: Synthetic oligonucleotide
uucgagucugccuauuaac

SEQ ID NO: 945090 - RNA, 19 nt, Artificial Sequence
  Description of Artificial Sequence: Synthetic oligonucleotide
ugcagggcgagggaaaagg

SEQ ID NO: 945091 - RNA, 19 nt, Artificial Sequence
  Description of Artificial Sequence: Synthetic oligonucleotide
cacaccgucguuacugugg

SEQ ID NO: 945092 - RNA, 19 nt, Artificial Sequence
  Description of Artificial Sequence: Synthetic oligonucleotide
ggagguuaggacuuggggc

SEQ ID NO: 945093 - RNA, 19 nt, Artificial Sequence
  Description of Artificial Sequence: Synthetic oligonucleotide
gagauauagcccauauacc

SEQ ID NO: 945094 - RNA, 19 nt, Artificial Sequence
  Description of Artificial Sequence: Synthetic oligonucleotide
acagaugaggcggaaaucu

SEQ ID NO: 945095 - RNA, 19 nt, Artificial Sequence
  Description of Artificial Sequence: Synthetic oligonucleotide
uguccaugcauugaccagc

SEQ ID NO: 945096 - RNA, 19 nt, Artificial Sequence
  Description of Artificial Sequence: Synthetic oligonucleotide
accaucauuguagcaaggg

SEQ ID NO: 945097 - RNA, 19 nt, Artificial Sequence
  Description of Artificial Sequence: Synthetic oligonucleotide
uucaauucacagcccagaa

SEQ ID NO: 945098 - RNA, 19 nt, Artificial Sequence
  Description of Artificial Sequence: Synthetic oligonucleotide
uccgaguugccaaggaaga

SEQ ID NO: 945099 - RNA, 19 nt, Artificial Sequence
  Description of Artificial Sequence: Synthetic oligonucleotide
uauacccggacuucagucu

SEQ ID NO: 945100 - RNA, 19 nt, Artificial Sequence
  Description of Artificial Sequence: Synthetic oligonucleotide
gagugaugcgcuuaugcca

SEQ ID NO: 945101 - RNA, 19 nt, Artificial Sequence
  Description of Artificial Sequence: Synthetic oligonucleotide
gaugcgcuuaugccaagag

SEQ ID NO: 945102 - RNA, 19 nt, Artificial Sequence
  Description of Artificial Sequence: Synthetic oligonucleotide
ucccuguucaucucagacc

SEQ ID NO: 945103 - RNA, 19 nt, Artificial Sequence
  Description of Artificial Sequence: Synthetic oligonucleotide
ggucgauugggcuggaagg

SEQ ID NO: 945104 - RNA, 19 nt, Artificial Sequence
  Description of Artificial Sequence: Synthetic oligonucleotide
ugauguacugugccuccag

SEQ ID NO: 945105 - RNA, 19 nt, Artificial Sequence
  Description of Artificial Sequence: Synthetic oligonucleotide
guauuuucgagucugccua

SEQ ID NO: 945106 - RNA, 19 nt, Artificial Sequence
  Description of Artificial Sequence: Synthetic oligonucleotide
uauaagccaccuugaaggu

SEQ ID NO: 945107 - RNA, 19 nt, Artificial Sequence
  Description of Artificial Sequence: Synthetic oligonucleotide
uacugugccuccagagagg

SEQ ID NO: 945108 - RNA, 19 nt, Artificial Sequence
  Description of Artificial Sequence: Synthetic oligonucleotide
cuggccaaagucacgggcc

SEQ ID NO: 945109 - RNA, 19 nt, Artificial Sequence
  Description of Artificial Sequence: Synthetic oligonucleotide
ucagucacuuggcauuuac

SEQ ID NO: 945110 - RNA, 19 nt, Artificial Sequence
  Description of Artificial Sequence: Synthetic oligonucleotide
ccuauuaacuuugaguagc

SEQ ID NO: 945111 - RNA, 19 nt, Artificial Sequence
  Description of Artificial Sequence: Synthetic oligonucleotide
cauucaauucacagcccag

SEQ ID NO: 945112 - RNA, 19 nt, Artificial Sequence
  Description of Artificial Sequence: Synthetic oligonucleotide
acaccgucguuacuguggg

SEQ ID NO: 945113 - RNA, 19 nt, Artificial Sequence
  Description of Artificial Sequence: Synthetic oligonucleotide
uuguagcaaggguuugggg

SEQ ID NO: 945114 - RNA, 19 nt, Artificial Sequence
  Description of Artificial Sequence: Synthetic oligonucleotide
aaggcacgcagguuccaag

SEQ ID NO: 945115 - RNA, 19 nt, Artificial Sequence
  Description of Artificial Sequence: Synthetic oligonucleotide
cuggaagcugucauauggc

SEQ ID NO: 945116 - RNA, 19 nt, Artificial Sequence
  Description of Artificial Sequence: Synthetic oligonucleotide
acggcgaaaaggccggagg

SEQ ID NO: 945117 - RNA, 19 nt, Artificial Sequence
  Description of Artificial Sequence: Synthetic oligonucleotide
auagcccauauacccggac

SEQ ID NO: 945118 - RNA, 19 nt, Artificial Sequence
  Description of Artificial Sequence: Synthetic oligonucleotide
uguuguccgaguugccaag

SEQ ID NO: 945119 - RNA, 19 nt, Artificial Sequence
  Description of Artificial Sequence: Synthetic oligonucleotide
uuugaguagcaagccagca

SEQ ID NO: 945120 - RNA, 19 nt, Artificial Sequence
  Description of Artificial Sequence: Synthetic oligonucleotide
uaccaucauuguagcaagg

SEQ ID NO: 945121 - RNA, 19 nt, Artificial Sequence
  Description of Artificial Sequence: Synthetic oligonucleotide
gaugaggcggaaaucugug

SEQ ID NO: 945122 - RNA, 19 nt, Artificial Sequence
  Description of Artificial Sequence: Synthetic oligonucleotide
auucccgucacaugccucu

SEQ ID NO: 945123 - RNA, 19 nt, Artificial Sequence
  Description of Artificial Sequence: Synthetic oligonucleotide
cauuguagcaaggguuugg

SEQ ID NO: 945124 - RNA, 19 nt, Artificial Sequence
  Description of Artificial Sequence: Synthetic oligonucleotide
gauaaacuugaacuugagu

SEQ ID NO: 945125 - RNA, 19 nt, Artificial Sequence
  Description of Artificial Sequence: Synthetic oligonucleotide
ugaugauucccgucacaug

SEQ ID NO: 945126 - RNA, 19 nt, Artificial Sequence
  Description of Artificial Sequence: Synthetic oligonucleotide
gaggcgcaaagcaacacgc

SEQ ID NO: 945127 - RNA, 19 nt, Artificial Sequence
  Description of Artificial Sequence: Synthetic oligonucleotide
gacacggcgaaaaggccgg

SEQ ID NO: 945128 - RNA, 19 nt, Artificial Sequence
  Description of Artificial Sequence: Synthetic oligonucleotide
ccccaauccaaucaggagg

SEQ ID NO: 945129 - RNA, 19 nt, Artificial Sequence
  Description of Artificial Sequence: Synthetic oligonucleotide
guauucugcucucccugcg

SEQ ID NO: 945130 - RNA, 19 nt, Artificial Sequence
  Description of Artificial Sequence: Synthetic oligonucleotide
acaauguauuuucgagucu

SEQ ID NO: 945131 - RNA, 19 nt, Artificial Sequence
  Description of Artificial Sequence: Synthetic oligonucleotide
gcaguugguagagauauag

SEQ ID NO: 945132 - RNA, 19 nt, Artificial Sequence
  Description of Artificial Sequence: Synthetic oligonucleotide
gguagcacgaaacagggua

SEQ ID NO: 945133 - RNA, 19 nt, Artificial Sequence
  Description of Artificial Sequence: Synthetic oligonucleotide
uaaucacaccugacacccg

SEQ ID NO: 945134 - RNA, 19 nt, Artificial Sequence
  Description of Artificial Sequence: Synthetic oligonucleotide
uugagguacaacugaucuc

SEQ ID NO: 945135 - RNA, 19 nt, Artificial Sequence
  Description of Artificial Sequence: Synthetic oligonucleotide
aacaggguacagccugaug

SEQ ID NO: 945136 - RNA, 19 nt, Artificial Sequence
  Description of Artificial Sequence: Synthetic oligonucleotide
auucaauucacagcccaga

SEQ ID NO: 945137 - RNA, 19 nt, Artificial Sequence
  Description of Artificial Sequence: Synthetic oligonucleotide
uagcccauauacccggacu

SEQ ID NO: 945138 - RNA, 19 nt, Artificial Sequence
  Description of Artificial Sequence: Synthetic oligonucleotide
gugaguuagcaauggcgcc

SEQ ID NO: 945139 - RNA, 19 nt, Artificial Sequence
  Description of Artificial Sequence: Synthetic oligonucleotide
ggcgcaaagcaacacgccg

SEQ ID NO: 945140 - RNA, 19 nt, Artificial Sequence
  Description of Artificial Sequence: Synthetic oligonucleotide
aguagcaagccagcagagg

SEQ ID NO: 945141 - RNA, 19 nt, Artificial Sequence
  Description of Artificial Sequence: Synthetic oligonucleotide
gacaucauugucuuggcuu

SEQ ID NO: 945142 - RNA, 19 nt, Artificial Sequence
  Description of Artificial Sequence: Synthetic oligonucleotide
uuguuguccgaguugccaa

SEQ ID NO: 945143 - RNA, 19 nt, Artificial Sequence
  Description of Artificial Sequence: Synthetic oligonucleotide
aagccaggaauguguggug

SEQ ID NO: 945144 - RNA, 19 nt, Artificial Sequence
  Description of Artificial Sequence: Synthetic oligonucleotide
aaggacacgcacauagcga

SEQ ID NO: 945145 - RNA, 19 nt, Artificial Sequence
  Description of Artificial Sequence: Synthetic oligonucleotide
uggcauuuaccaucauugu

SEQ ID NO: 945146 - RNA, 19 nt, Artificial Sequence
  Description of Artificial Sequence: Synthetic oligonucleotide
ugcacacaaggccugugaa

SEQ ID NO: 945147 - RNA, 19 nt, Artificial Sequence
  Description of Artificial Sequence: Synthetic oligonucleotide
uguguguucucagucacuu

SEQ ID NO: 945148 - RNA, 19 nt, Artificial Sequence
  Description of Artificial Sequence: Synthetic oligonucleotide
cuauuaacuuugaguagca

SEQ ID NO: 945149 - RNA, 19 nt, Artificial Sequence
  Description of Artificial Sequence: Synthetic oligonucleotide
ugauucccgucacaugccu

SEQ ID NO: 945150 - RNA, 19 nt, Artificial Sequence
  Description of Artificial Sequence: Synthetic oligonucleotide
guccgaguugccaaggaag

SEQ ID NO: 945151 - RNA, 19 nt, Artificial Sequence
  Description of Artificial Sequence: Synthetic oligonucleotide
uuuucgagucugccuauua

SEQ ID NO: 945152 - RNA, 19 nt, Artificial Sequence
  Description of Artificial Sequence: Synthetic oligonucleotide
cuugagucaaccccugaca

SEQ ID NO: 945153 - RNA, 19 nt, Artificial Sequence
  Description of Artificial Sequence: Synthetic oligonucleotide
ugagugcacaggucaaccu

SEQ ID NO: 945154 - RNA, 19 nt, Artificial Sequence
  Description of Artificial Sequence: Synthetic oligonucleotide
auaagccaccuugaagguc

SEQ ID NO: 945155 - RNA, 19 nt, Artificial Sequence
  Description of Artificial Sequence: Synthetic oligonucleotide
augauucccgucacaugcc

SEQ ID NO: 945156 - RNA, 19 nt, Artificial Sequence
  Description of Artificial Sequence: Synthetic oligonucleotide
ggaggcgcaaagcaacacg

SEQ ID NO: 945157 - RNA, 19 nt, Artificial Sequence
  Description of Artificial Sequence: Synthetic oligonucleotide
gcccgaguagcccagagag

SEQ ID NO: 945158 - RNA, 19 nt, Artificial Sequence
  Description of Artificial Sequence: Synthetic oligonucleotide
uggcagauguacugaguga

SEQ ID NO: 945159 - RNA, 19 nt, Artificial Sequence
  Description of Artificial Sequence: Synthetic oligonucleotide
uguccgaguugccaaggaa

SEQ ID NO: 945160 - RNA, 19 nt, Artificial Sequence
  Description of Artificial Sequence: Synthetic oligonucleotide
aagcaacacgccgcauagc

SEQ ID NO: 945161 - RNA, 19 nt, Artificial Sequence
  Description of Artificial Sequence: Synthetic oligonucleotide
uuguaggaugccacauacu

SEQ ID NO: 945162 - RNA, 19 nt, Artificial Sequence
  Description of Artificial Sequence: Synthetic oligonucleotide
cagucacuuggcauuuacc

SEQ ID NO: 945163 - RNA, 19 nt, Artificial Sequence
  Description of Artificial Sequence: Synthetic oligonucleotide
agaaugccugagaaagggg

SEQ ID NO: 945164 - RNA, 19 nt, Artificial Sequence
  Description of Artificial Sequence: Synthetic oligonucleotide
acuaacagccuagcagcuc

SEQ ID NO: 945165 - RNA, 19 nt, Artificial Sequence
  Description of Artificial Sequence: Synthetic oligonucleotide
gcggaaaucugugaguuag

SEQ ID NO: 945166 - RNA, 19 nt, Artificial Sequence
  Description of Artificial Sequence: Synthetic oligonucleotide
cugaacgcccaggaaaccc

SEQ ID NO: 945167 - RNA, 19 nt, Artificial Sequence
  Description of Artificial Sequence: Synthetic oligonucleotide
ugcuuugggcuguccaggc

SEQ ID NO: 945168 - RNA, 19 nt, Artificial Sequence
  Description of Artificial Sequence: Synthetic oligonucleotide
gcuagcagaaggccugugg

SEQ ID NO: 945169 - RNA, 19 nt, Artificial Sequence
  Description of Artificial Sequence: Synthetic oligonucleotide
uccuuauauaugguccacu

SEQ ID NO: 945170 - RNA, 19 nt, Artificial Sequence
  Description of Artificial Sequence: Synthetic oligonucleotide
acagaggacuaacagccua

SEQ ID NO: 945171 - RNA, 19 nt, Artificial Sequence
  Description of Artificial Sequence: Synthetic oligonucleotide
gauguacugugccuccaga

SEQ ID NO: 945172 - RNA, 19 nt, Artificial Sequence
  Description of Artificial Sequence: Synthetic oligonucleotide
cugccuauuaacuuugagu

SEQ ID NO: 945173 - RNA, 19 nt, Artificial Sequence
  Description of Artificial Sequence: Synthetic oligonucleotide
uauagcccauauacccgga

SEQ ID NO: 945174 - RNA, 19 nt, Artificial Sequence
  Description of Artificial Sequence: Synthetic oligonucleotide
gguacagccugauguacug

SEQ ID NO: 945175 - RNA, 19 nt, Artificial Sequence
  Description of Artificial Sequence: Synthetic oligonucleotide
uggugugcagagaggggca

SEQ ID NO: 945176 - RNA, 19 nt, Artificial Sequence
  Description of Artificial Sequence: Synthetic oligonucleotide
aucauuguagcaaggguuu

SEQ ID NO: 945177 - RNA, 19 nt, Artificial Sequence
  Description of Artificial Sequence: Synthetic oligonucleotide
ucgaagcgaagggugcagg

SEQ ID NO: 945178 - RNA, 19 nt, Artificial Sequence
  Description of Artificial Sequence: Synthetic oligonucleotide
uacuggaccuggccaaagu

SEQ ID NO: 945179 - RNA, 19 nt, Artificial Sequence
  Description of Artificial Sequence: Synthetic oligonucleotide
gcguaaucacaccugacac

SEQ ID NO: 945180 - RNA, 19 nt, Artificial Sequence
  Description of Artificial Sequence: Synthetic oligonucleotide
augcgcuuaugccaagaga

SEQ ID NO: 945181 - RNA, 19 nt, Artificial Sequence
  Description of Artificial Sequence: Synthetic oligonucleotide
ccuuauauaugguccacuc

SEQ ID NO: 945182 - RNA, 19 nt, Artificial Sequence
  Description of Artificial Sequence: Synthetic oligonucleotide
ucauuguagcaaggguuug

SEQ ID NO: 945183 - RNA, 19 nt, Artificial Sequence
  Description of Artificial Sequence: Synthetic oligonucleotide
ugcaggcucgguagcacga

SEQ ID NO: 945184 - RNA, 19 nt, Artificial Sequence
  Description of Artificial Sequence: Synthetic oligonucleotide
aucauugucuuggcuuauc

SEQ ID NO: 945185 - RNA, 19 nt, Artificial Sequence
  Description of Artificial Sequence: Synthetic oligonucleotide
uauuuucgagucugccuau

SEQ ID NO: 945186 - RNA, 19 nt, Artificial Sequence
  Description of Artificial Sequence: Synthetic oligonucleotide
gaguuagcaauggcgcccc

SEQ ID NO: 945187 - RNA, 19 nt, Artificial Sequence
  Description of Artificial Sequence: Synthetic oligonucleotide
agugaugcgcuuaugccaa

SEQ ID NO: 945188 - RNA, 19 nt, Artificial Sequence
  Description of Artificial Sequence: Synthetic oligonucleotide
gccuauuaacuuugaguag

SEQ ID NO: 945189 - RNA, 19 nt, Artificial Sequence
  Description of Artificial Sequence: Synthetic oligonucleotide
agaugaggcggaaaucugu

SEQ ID NO: 945190 - RNA, 19 nt, Artificial Sequence
  Description of Artificial Sequence: Synthetic oligonucleotide
gaugcugagacccgcgggu

SEQ ID NO: 945191 - RNA, 19 nt, Artificial Sequence
  Description of Artificial Sequence: Synthetic oligonucleotide
aggcccaggggcucagaac

SEQ ID NO: 945192 - RNA, 19 nt, Artificial Sequence
  Description of Artificial Sequence: Synthetic oligonucleotide
ucugagugcacaggucaac

SEQ ID NO: 945193 - RNA, 19 nt, Artificial Sequence
  Description of Artificial Sequence: Synthetic oligonucleotide
ggacugaacauguuaaccu

SEQ ID NO: 945194 - RNA, 19 nt, Artificial Sequence
  Description of Artificial Sequence: Synthetic oligonucleotide
aguuauucuucaggcccag

SEQ ID NO: 945195 - RNA, 19 nt, Artificial Sequence
  Description of Artificial Sequence: Synthetic oligonucleotide
aggcucgguagcacgaaac

SEQ ID NO: 945196 - RNA, 19 nt, Artificial Sequence
  Description of Artificial Sequence: Synthetic oligonucleotide
uucaggccguuguugucca

SEQ ID NO: 945197 - RNA, 19 nt, Artificial Sequence
  Description of Artificial Sequence: Synthetic oligonucleotide
aagaccuugucagucccuu

SEQ ID NO: 945198 - RNA, 19 nt, Artificial Sequence
  Description of Artificial Sequence: Synthetic oligonucleotide
aaucaggaggaagggcuaa

SEQ ID NO: 945199 - RNA, 19 nt, Artificial Sequence
  Description of Artificial Sequence: Synthetic oligonucleotide
cccaaaacaccuugucucc

SEQ ID NO: 945200 - RNA, 19 nt, Artificial Sequence
  Description of Artificial Sequence: Synthetic oligonucleotide
aggccggaggcgcaaagca

SEQ ID NO: 945201 - RNA, 19 nt, Artificial Sequence
  Description of Artificial Sequence: Synthetic oligonucleotide
augaggcggaaaucuguga

SEQ ID NO: 945202 - RNA, 19 nt, Artificial Sequence
  Description of Artificial Sequence: Synthetic oligonucleotide
guagcacgaaacaggguac

SEQ ID NO: 945203 - RNA, 19 nt, Artificial Sequence
  Description of Artificial Sequence: Synthetic oligonucleotide
gugcaggcucgguagcacg

SEQ ID NO: 945204 - RNA, 19 nt, Artificial Sequence
  Description of Artificial Sequence: Synthetic oligonucleotide
ucuaggcuauaagccaccu

SEQ ID NO: 945205 - RNA, 19 nt, Artificial Sequence
  Description of Artificial Sequence: Synthetic oligonucleotide
uguucaucucagacccauc

SEQ ID NO: 945206 - RNA, 19 nt, Artificial Sequence
  Description of Artificial Sequence: Synthetic oligonucleotide
ccgaaggagguucaccugg

SEQ ID NO: 945207 - RNA, 19 nt, Artificial Sequence
  Description of Artificial Sequence: Synthetic oligonucleotide
gguaccagccaaaggcacg

SEQ ID NO: 945208 - RNA, 19 nt, Artificial Sequence
  Description of Artificial Sequence: Synthetic oligonucleotide
ccaccauucuggcacaagc

SEQ ID NO: 945209 - RNA, 19 nt, Artificial Sequence
  Description of Artificial Sequence: Synthetic oligonucleotide
ucaccggacacggcgaaaa

SEQ ID NO: 945210 - RNA, 19 nt, Artificial Sequence
  Description of Artificial Sequence: Synthetic oligonucleotide
ugcccgaguagcccagaga

SEQ ID NO: 945211 - RNA, 19 nt, Artificial Sequence
  Description of Artificial Sequence: Synthetic oligonucleotide
aggcacgcagguuccaagu

SEQ ID NO: 945212 - RNA, 19 nt, Artificial Sequence
  Description of Artificial Sequence: Synthetic oligonucleotide
uagcacgaaacaggguaca

SEQ ID NO: 945213 - RNA, 19 nt, Artificial Sequence
  Description of Artificial Sequence: Synthetic oligonucleotide
uaacagccuagcagcucca

SEQ ID NO: 945214 - RNA, 19 nt, Artificial Sequence
  Description of Artificial Sequence: Synthetic oligonucleotide
cauugaccagcccugagcu

SEQ ID NO: 945215 - RNA, 19 nt, Artificial Sequence
  Description of Artificial Sequence: Synthetic oligonucleotide
gucacagaagucaccggac

SEQ ID NO: 945216 - RNA, 19 nt, Artificial Sequence
  Description of Artificial Sequence: Synthetic oligonucleotide
gaucucagcgcuggcuggc

SEQ ID NO: 945217 - RNA, 19 nt, Artificial Sequence
  Description of Artificial Sequence: Synthetic oligonucleotide
aggccguuguuguccaugu

SEQ ID NO: 945218 - RNA, 19 nt, Artificial Sequence
  Description of Artificial Sequence: Synthetic oligonucleotide
acccgcaucuuccgaagga

SEQ ID NO: 945219 - RNA, 19 nt, Artificial Sequence
  Description of Artificial Sequence: Synthetic oligonucleotide
ugaugcgcuuaugccaaga

SEQ ID NO: 945220 - RNA, 19 nt, Artificial Sequence
  Description of Artificial Sequence: Synthetic oligonucleotide
aagcugucauauggcuguc

SEQ ID NO: 945221 - RNA, 19 nt, Artificial Sequence
  Description of Artificial Sequence: Synthetic oligonucleotide
gcacacaaggccugugaag

SEQ ID NO: 945222 - RNA, 19 nt, Artificial Sequence
  Description of Artificial Sequence: Synthetic oligonucleotide
auacccggacuucagucuu

SEQ ID NO: 945223 - RNA, 19 nt, Artificial Sequence
  Description of Artificial Sequence: Synthetic oligonucleotide
aggggcucagaacauccau

SEQ ID NO: 945224 - RNA, 19 nt, Artificial Sequence
  Description of Artificial Sequence: Synthetic oligonucleotide
cagugggugcccgaguagc

SEQ ID NO: 945225 - RNA, 19 nt, Artificial Sequence
  Description of Artificial Sequence: Synthetic oligonucleotide
gaagggugcaggcucggua

SEQ ID NO: 945226 - RNA, 19 nt, Artificial Sequence
  Description of Artificial Sequence: Synthetic oligonucleotide
ugacacccgcaucuuccga

SEQ ID NO: 945227 - RNA, 19 nt, Artificial Sequence
  Description of Artificial Sequence: Synthetic oligonucleotide
cacgccgcauagcacggcc

SEQ ID NO: 945228 - RNA, 19 nt, Artificial Sequence
  Description of Artificial Sequence: Synthetic oligonucleotide
gacgcggguaagaacacaa

SEQ ID NO: 945229 - RNA, 19 nt, Artificial Sequence
  Description of Artificial Sequence: Synthetic oligonucleotide
gaaacaggguacagccuga

SEQ ID NO: 945230 - RNA, 19 nt, Artificial Sequence
  Description of Artificial Sequence: Synthetic oligonucleotide
aucucagcgcuggcuggcc

SEQ ID NO: 945231 - RNA, 19 nt, Artificial Sequence
  Description of Artificial Sequence: Synthetic oligonucleotide
auguuaaccuucaggccgu

SEQ ID NO: 945232 - RNA, 19 nt, Artificial Sequence
  Description of Artificial Sequence: Synthetic oligonucleotide
uauggcugucgggaauuga

SEQ ID NO: 945233 - RNA, 19 nt, Artificial Sequence
  Description of Artificial Sequence: Synthetic oligonucleotide
aacugaucucacagugggu

SEQ ID NO: 945234 - RNA, 19 nt, Artificial Sequence
  Description of Artificial Sequence: Synthetic oligonucleotide
gucgggaauugaguuauuc

SEQ ID NO: 945235 - RNA, 19 nt, Artificial Sequence
  Description of Artificial Sequence: Synthetic oligonucleotide
agaccuugucagucccuug

SEQ ID NO: 945236 - RNA, 19 nt, Artificial Sequence
  Description of Artificial Sequence: Synthetic oligonucleotide
cacccugcguaaucacacc

SEQ ID NO: 945237 - RNA, 19 nt, Artificial Sequence
  Description of Artificial Sequence: Synthetic oligonucleotide
agggagguuaggacuuggg

SEQ ID NO: 945238 - RNA, 19 nt, Artificial Sequence
  Description of Artificial Sequence: Synthetic oligonucleotide
aagucaccggacacggcga

SEQ ID NO: 945239 - RNA, 19 nt, Artificial Sequence
  Description of Artificial Sequence: Synthetic oligonucleotide
cugcguaaucacaccugac

SEQ ID NO: 945240 - RNA, 19 nt, Artificial Sequence
  Description of Artificial Sequence: Synthetic oligonucleotide
ggcauuuaccaucauugua

SEQ ID NO: 945241 - RNA, 19 nt, Artificial Sequence
  Description of Artificial Sequence: Synthetic oligonucleotide
aacuugaacuugaguccgu

SEQ ID NO: 945242 - RNA, 19 nt, Artificial Sequence
  Description of Artificial Sequence: Synthetic oligonucleotide
agcgaagggugcaggcucg

SEQ ID NO: 945243 - RNA, 19 nt, Artificial Sequence
  Description of Artificial Sequence: Synthetic oligonucleotide
ugcugcgggacgcggguaa

SEQ ID NO: 945244 - RNA, 19 nt, Artificial Sequence
  Description of Artificial Sequence: Synthetic oligonucleotide
gcagaaggccuguggaggc

SEQ ID NO: 945245 - RNA, 19 nt, Artificial Sequence
  Description of Artificial Sequence: Synthetic oligonucleotide
cacgcacauagcgagccac

SEQ ID NO: 945246 - RNA, 19 nt, Artificial Sequence
  Description of Artificial Sequence: Synthetic oligonucleotide
agucuuguaggugcuggaa

SEQ ID NO: 945247 - RNA, 19 nt, Artificial Sequence
  Description of Artificial Sequence: Synthetic oligonucleotide
agccccaauccaaucagga

SEQ ID NO: 945248 - RNA, 19 nt, Artificial Sequence
  Description of Artificial Sequence: Synthetic oligonucleotide
gucgauugggcuggaagga

SEQ ID NO: 945249 - RNA, 19 nt, Artificial Sequence
  Description of Artificial Sequence: Synthetic oligonucleotide
cggguaagaacacaagcac

SEQ ID NO: 945250 - RNA, 19 nt, Artificial Sequence
  Description of Artificial Sequence: Synthetic oligonucleotide
agcuggagucacagaaguc

SEQ ID NO: 945251 - RNA, 19 nt, Artificial Sequence
  Description of Artificial Sequence: Synthetic oligonucleotide
gcggguaagaacacaagca

SEQ ID NO: 945252 - RNA, 19 nt, Artificial Sequence
  Description of Artificial Sequence: Synthetic oligonucleotide
caggcgcagagugaugcgc

SEQ ID NO: 945253 - RNA, 19 nt, Artificial Sequence
  Description of Artificial Sequence: Synthetic oligonucleotide
acggccagcgcacgggaga

SEQ ID NO: 945254 - RNA, 19 nt, Artificial Sequence
  Description of Artificial Sequence: Synthetic oligonucleotide
aggcggaaaucugugaguu

SEQ ID NO: 945255 - RNA, 19 nt, Artificial Sequence
  Description of Artificial Sequence: Synthetic oligonucleotide
ccuuccaugcccaguguug

SEQ ID NO: 945256 - RNA, 19 nt, Artificial Sequence
  Description of Artificial Sequence: Synthetic oligonucleotide
auagcacggccagcgcacg

SEQ ID NO: 945257 - RNA, 19 nt, Artificial Sequence
  Description of Artificial Sequence: Synthetic oligonucleotide
ccggacuucagucuucuuc

SEQ ID NO: 945258 - RNA, 19 nt, Artificial Sequence
  Description of Artificial Sequence: Synthetic oligonucleotide
cacgaugggcgucucaaaa

SEQ ID NO: 945259 - RNA, 19 nt, Artificial Sequence
  Description of Artificial Sequence: Synthetic oligonucleotide
gccccaauccaaucaggag

SEQ ID NO: 945260 - RNA, 19 nt, Artificial Sequence
  Description of Artificial Sequence: Synthetic oligonucleotide
ucccgucacaugccucuga

SEQ ID NO: 945261 - RNA, 19 nt, Artificial Sequence
  Description of Artificial Sequence: Synthetic oligonucleotide
acgcacauagcgagccacg

SEQ ID NO: 945262 - RNA, 19 nt, Artificial Sequence
  Description of Artificial Sequence: Synthetic oligonucleotide
ccuggccaaagucacgggc

SEQ ID NO: 945263 - RNA, 19 nt, Artificial Sequence
  Description of Artificial Sequence: Synthetic oligonucleotide
cagcgcacgggagagcggc

SEQ ID NO: 945264 - RNA, 19 nt, Artificial Sequence
  Description of Artificial Sequence: Synthetic oligonucleotide
acccgcggguuccugcguc

SEQ ID NO: 945265 - RNA, 19 nt, Artificial Sequence
  Description of Artificial Sequence: Synthetic oligonucleotide
cacccgcaucuuccgaagg

SEQ ID NO: 945266 - RNA, 19 nt, Artificial Sequence
  Description of Artificial Sequence: Synthetic oligonucleotide
ccauauacccggacuucag

SEQ ID NO: 945267 - RNA, 19 nt, Artificial Sequence
  Description of Artificial Sequence: Synthetic oligonucleotide
gcacaagcuggagucacag

SEQ ID NO: 945268 - RNA, 19 nt, Artificial Sequence
  Description of Artificial Sequence: Synthetic oligonucleotide
cgcggguaagaacacaagc

SEQ ID NO: 945269 - RNA, 19 nt, Artificial Sequence
  Description of Artificial Sequence: Synthetic oligonucleotide
cgaguugccaaggaagacc

SEQ ID NO: 945270 - RNA, 19 nt, Artificial Sequence
  Description of Artificial Sequence: Synthetic oligonucleotide
ccauucaauucacagccca

SEQ ID NO: 945271 - RNA, 19 nt, Artificial Sequence
  Description of Artificial Sequence: Synthetic oligonucleotide
gcgaaaaggccggaggcgc

SEQ ID NO: 945272 - RNA, 19 nt, Artificial Sequence
  Description of Artificial Sequence: Synthetic oligonucleotide
gagcugugcagacgagcca

SEQ ID NO: 945273 - RNA, 19 nt, Artificial Sequence
  Description of Artificial Sequence: Synthetic oligonucleotide
aggcuauaagccaccuuga

SEQ ID NO: 945274 - RNA, 19 nt, Artificial Sequence
  Description of Artificial Sequence: Synthetic oligonucleotide
uccucgcuguguguucuca

SEQ ID NO: 945275 - RNA, 19 nt, Artificial Sequence
  Description of Artificial Sequence: Synthetic oligonucleotide
uacugugggccaccuugua

SEQ ID NO: 945276 - RNA, 19 nt, Artificial Sequence
  Description of Artificial Sequence: Synthetic oligonucleotide
ugcgggacgcggguaagaa

SEQ ID NO: 945277 - RNA, 19 nt, Artificial Sequence
  Description of Artificial Sequence: Synthetic oligonucleotide
gcacgaaacaggguacagc

SEQ ID NO: 945278 - RNA, 19 nt, Artificial Sequence
  Description of Artificial Sequence: Synthetic oligonucleotide
ggaaggacacgcacauagc

SEQ ID NO: 945279 - RNA, 19 nt, Artificial Sequence
  Description of Artificial Sequence: Synthetic oligonucleotide
gaagcgaagggugcaggcu

SEQ ID NO: 945280 - RNA, 19 nt, Artificial Sequence
  Description of Artificial Sequence: Synthetic oligonucleotide
gugaagggcaagucuggua

SEQ ID NO: 945281 - RNA, 19 nt, Artificial Sequence
  Description of Artificial Sequence: Synthetic oligonucleotide
gaacgcccaggaaacccac

SEQ ID NO: 945282 - RNA, 19 nt, Artificial Sequence
  Description of Artificial Sequence: Synthetic oligonucleotide
agcgcugaacgcccaggaa

SEQ ID NO: 945283 - RNA, 19 nt, Artificial Sequence
  Description of Artificial Sequence: Synthetic oligonucleotide
uggggagcaggguccuuuc

SEQ ID NO: 945284 - RNA, 19 nt, Artificial Sequence
  Description of Artificial Sequence: Synthetic oligonucleotide
aaaaggccggaggcgcaaa

SEQ ID NO: 945285 - RNA, 19 nt, Artificial Sequence
  Description of Artificial Sequence: Synthetic oligonucleotide
acacgcacauagcgagcca

SEQ ID NO: 945286 - RNA, 19 nt, Artificial Sequence
  Description of Artificial Sequence: Synthetic oligonucleotide
uggcacccugcguaaucac

SEQ ID NO: 945287 - RNA, 19 nt, Artificial Sequence
  Description of Artificial Sequence: Synthetic oligonucleotide
gcagauguacugagugaag

SEQ ID NO: 945288 - RNA, 19 nt, Artificial Sequence
  Description of Artificial Sequence: Synthetic oligonucleotide
gucguuacugugggccacc

SEQ ID NO: 945289 - RNA, 19 nt, Artificial Sequence
  Description of Artificial Sequence: Synthetic oligonucleotide
gugggugcccgaguagccc

SEQ ID NO: 945290 - RNA, 19 nt, Artificial Sequence
  Description of Artificial Sequence: Synthetic oligonucleotide
agucaccggacacggcgaa

SEQ ID NO: 945291 - RNA, 19 nt, Artificial Sequence
  Description of Artificial Sequence: Synthetic oligonucleotide
gaaaaggccggaggcgcaa

SEQ ID NO: 945292 - RNA, 19 nt, Artificial Sequence
  Description of Artificial Sequence: Synthetic oligonucleotide
gagguacaacugaucucac

SEQ ID NO: 945293 - RNA, 19 nt, Artificial Sequence
  Description of Artificial Sequence: Synthetic oligonucleotide
cagacccauccaacucccc

SEQ ID NO: 945294 - RNA, 19 nt, Artificial Sequence
  Description of Artificial Sequence: Synthetic oligonucleotide
cauauacccggacuucagu

SEQ ID NO: 945295 - RNA, 19 nt, Artificial Sequence
  Description of Artificial Sequence: Synthetic oligonucleotide
caccauucuggcacaagcu

SEQ ID NO: 945296 - RNA, 19 nt, Artificial Sequence
  Description of Artificial Sequence: Synthetic oligonucleotide
gcauagcacggccagcgca

SEQ ID NO: 945297 - RNA, 19 nt, Artificial Sequence
  Description of Artificial Sequence: Synthetic oligonucleotide
gcgcaaagcaacacgccgc

SEQ ID NO: 945298 - RNA, 19 nt, Artificial Sequence
  Description of Artificial Sequence: Synthetic oligonucleotide
ccaccuugaaggucuucag

SEQ ID NO: 945299 - RNA, 19 nt, Artificial Sequence
  Description of Artificial Sequence: Synthetic oligonucleotide
gugaugcgcuuaugccaag

SEQ ID NO: 945300 - RNA, 19 nt, Artificial Sequence
  Description of Artificial Sequence: Synthetic oligonucleotide
ccgaguagcccagagagca

SEQ ID NO: 945301 - RNA, 19 nt, Artificial Sequence
  Description of Artificial Sequence: Synthetic oligonucleotide
caggguacagccugaugua

SEQ ID NO: 945302 - RNA, 19 nt, Artificial Sequence
  Description of Artificial Sequence: Synthetic oligonucleotide
cgcuuaugccaagagacag

SEQ ID NO: 945303 - RNA, 19 nt, Artificial Sequence
  Description of Artificial Sequence: Synthetic oligonucleotide
acgcggguaagaacacaag

SEQ ID NO: 945304 - RNA, 19 nt, Artificial Sequence
  Description of Artificial Sequence: Synthetic oligonucleotide
caccggacacggcgaaaag

SEQ ID NO: 945305 - RNA, 19 nt, Artificial Sequence
  Description of Artificial Sequence: Synthetic oligonucleotide
ccgcauagcacggccagcg

SEQ ID NO: 945306 - RNA, 19 nt, Artificial Sequence
  Description of Artificial Sequence: Synthetic oligonucleotide
ggcaagucugguacccugc

SEQ ID NO: 945307 - RNA, 19 nt, Artificial Sequence
  Description of Artificial Sequence: Synthetic oligonucleotide
gcgcugaacgcccaggaaa

SEQ ID NO: 945308 - RNA, 19 nt, Artificial Sequence
  Description of Artificial Sequence: Synthetic oligonucleotide
gcacccugcguaaucacac

SEQ ID NO: 945309 - RNA, 19 nt, Artificial Sequence
  Description of Artificial Sequence: Synthetic oligonucleotide
uuggcuuaucaggcagguc

SEQ ID NO: 945310 - RNA, 19 nt, Artificial Sequence
  Description of Artificial Sequence: Synthetic oligonucleotide
gccugugaagcccucggga

SEQ ID NO: 945311 - RNA, 19 nt, Artificial Sequence
  Description of Artificial Sequence: Synthetic oligonucleotide
ccgucuaggcuauaagcca

SEQ ID NO: 945312 - RNA, 19 nt, Artificial Sequence
  Description of Artificial Sequence: Synthetic oligonucleotide
auuuucgagucugccuauu

SEQ ID NO: 945313 - RNA, 19 nt, Artificial Sequence
  Description of Artificial Sequence: Synthetic oligonucleotide
cacggcgaaaaggccggag

SEQ ID NO: 945314 - RNA, 19 nt, Artificial Sequence
  Description of Artificial Sequence: Synthetic oligonucleotide
ucguuacugugggccaccu

SEQ ID NO: 945315 - RNA, 19 nt, Artificial Sequence
  Description of Artificial Sequence: Synthetic oligonucleotide
uucccgucacaugccucug

SEQ ID NO: 945316 - RNA, 19 nt, Artificial Sequence
  Description of Artificial Sequence: Synthetic oligonucleotide
ccugcguaaucacaccuga

SEQ ID NO: 945317 - RNA, 19 nt, Artificial Sequence
  Description of Artificial Sequence: Synthetic oligonucleotide
ggcucagaacauccauuca

SEQ ID NO: 945318 - RNA, 19 nt, Artificial Sequence
  Description of Artificial Sequence: Synthetic oligonucleotide
agcgagccacgaugggcgu

SEQ ID NO: 945319 - RNA, 19 nt, Artificial Sequence
  Description of Artificial Sequence: Synthetic oligonucleotide
gcugagacccgcggguucc

SEQ ID NO: 945320 - RNA, 19 nt, Artificial Sequence
  Description of Artificial Sequence: Synthetic oligonucleotide
cgaagcgaagggugcaggc

SEQ ID NO: 945321 - RNA, 19 nt, Artificial Sequence
  Description of Artificial Sequence: Synthetic oligonucleotide
cccgucacaugccucugag

SEQ ID NO: 945322 - RNA, 19 nt, Artificial Sequence
  Description of Artificial Sequence: Synthetic oligonucleotide
cacggccagcgcacgggag

SEQ ID NO: 945323 - RNA, 19 nt, Artificial Sequence
  Description of Artificial Sequence: Synthetic oligonucleotide
aucacaccugacacccgca

SEQ ID NO: 945324 - RNA, 19 nt, Artificial Sequence
  Description of Artificial Sequence: Synthetic oligonucleotide
cugucgggaauugaguuau

SEQ ID NO: 945325 - RNA, 19 nt, Artificial Sequence
  Description of Artificial Sequence: Synthetic oligonucleotide
cuuguaggugcuggaagcu

SEQ ID NO: 945326 - RNA, 19 nt, Artificial Sequence
  Description of Artificial Sequence: Synthetic oligonucleotide
gcugucgggaauugaguua

SEQ ID NO: 945327 - RNA, 19 nt, Artificial Sequence
  Description of Artificial Sequence: Synthetic oligonucleotide
ugucgggaauugaguuauu

SEQ ID NO: 945328 - RNA, 19 nt, Artificial Sequence
  Description of Artificial Sequence: Synthetic oligonucleotide
gccugauguacugugccuc

SEQ ID NO: 945329 - RNA, 19 nt, Artificial Sequence
  Description of Artificial Sequence: Synthetic oligonucleotide
ggaccuggccaaagucacg

SEQ ID NO: 945330 - RNA, 19 nt, Artificial Sequence
  Description of Artificial Sequence: Synthetic oligonucleotide
gccggaggcgcaaagcaac

SEQ ID NO: 945331 - RNA, 19 nt, Artificial Sequence
  Description of Artificial Sequence: Synthetic oligonucleotide
cuuggcuuaucaggcaggu

SEQ ID NO: 945332 - RNA, 19 nt, Artificial Sequence
  Description of Artificial Sequence: Synthetic oligonucleotide
cagcgcugaacgcccagga

SEQ ID NO: 945333 - RNA, 19 nt, Artificial Sequence
  Description of Artificial Sequence: Synthetic oligonucleotide
gagagcacuggcagaugua

SEQ ID NO: 945334 - RNA, 19 nt, Artificial Sequence
  Description of Artificial Sequence: Synthetic oligonucleotide
caccgucguuacugugggc

SEQ ID NO: 945335 - RNA, 19 nt, Artificial Sequence
  Description of Artificial Sequence: Synthetic oligonucleotide
ccuugucuccauccacuug

SEQ ID NO: 945336 - RNA, 19 nt, Artificial Sequence
  Description of Artificial Sequence: Synthetic oligonucleotide
cagagagcacuggcagaug

SEQ ID NO: 945337 - RNA, 19 nt, Artificial Sequence
  Description of Artificial Sequence: Synthetic oligonucleotide
ggguuccugcguccgcucc

SEQ ID NO: 945338 - RNA, 19 nt, Artificial Sequence
  Description of Artificial Sequence: Synthetic oligonucleotide
cccgaguagcccagagagc

SEQ ID NO: 945339 - RNA, 19 nt, Artificial Sequence
  Description of Artificial Sequence: Synthetic oligonucleotide
cauacuggaccuggccaaa

SEQ ID NO: 945340 - RNA, 19 nt, Artificial Sequence
  Description of Artificial Sequence: Synthetic oligonucleotide
cacaugccucugagugcac

SEQ ID NO: 945341 - RNA, 19 nt, Artificial Sequence
  Description of Artificial Sequence: Synthetic oligonucleotide
ggacacgcacauagcgagc

SEQ ID NO: 945342 - RNA, 19 nt, Artificial Sequence
  Description of Artificial Sequence: Synthetic oligonucleotide
gccaccuuguaggaugcca

SEQ ID NO: 945343 - RNA, 19 nt, Artificial Sequence
  Description of Artificial Sequence: Synthetic oligonucleotide
uguuaaccuucaggccguu

SEQ ID NO: 945344 - RNA, 19 nt, Artificial Sequence
  Description of Artificial Sequence: Synthetic oligonucleotide
gcaacacgccgcauagcac

SEQ ID NO: 945345 - RNA, 19 nt, Artificial Sequence
  Description of Artificial Sequence: Synthetic oligonucleotide
gcacgcagguuccaagucu

SEQ ID NO: 945346 - RNA, 19 nt, Artificial Sequence
  Description of Artificial Sequence: Synthetic oligonucleotide
cccaguguugagguacaac

SEQ ID NO: 945347 - RNA, 19 nt, Artificial Sequence
  Description of Artificial Sequence: Synthetic oligonucleotide
ggcacccugcguaaucaca

SEQ ID NO: 945348 - RNA, 19 nt, Artificial Sequence
  Description of Artificial Sequence: Synthetic oligonucleotide
augcugagacccgcggguu

SEQ ID NO: 945349 - RNA, 19 nt, Artificial Sequence
  Description of Artificial Sequence: Synthetic oligonucleotide
ucaggccguuguuguccau

SEQ ID NO: 945350 - RNA, 19 nt, Artificial Sequence
  Description of Artificial Sequence: Synthetic oligonucleotide
cccauauacccggacuuca

SEQ ID NO: 945351 - RNA, 19 nt, Artificial Sequence
  Description of Artificial Sequence: Synthetic oligonucleotide
ccagcgcugaacgcccagg

SEQ ID NO: 945352 - RNA, 19 nt, Artificial Sequence
  Description of Artificial Sequence: Synthetic oligonucleotide
gcgcuuaugccaagagaca

SEQ ID NO: 945353 - RNA, 19 nt, Artificial Sequence
  Description of Artificial Sequence: Synthetic oligonucleotide
caugcccaguguugaggua

SEQ ID NO: 945354 - RNA, 19 nt, Artificial Sequence
  Description of Artificial Sequence: Synthetic oligonucleotide
ccgaguugccaaggaagac

SEQ ID NO: 945355 - RNA, 19 nt, Artificial Sequence
  Description of Artificial Sequence: Synthetic oligonucleotide
cugcgcggcuggcacccug

SEQ ID NO: 945356 - RNA, 19 nt, Artificial Sequence
  Description of Artificial Sequence: Synthetic oligonucleotide
caccuggauccagggcuug

SEQ ID NO: 945357 - RNA, 19 nt, Artificial Sequence
  Description of Artificial Sequence: Synthetic oligonucleotide
caggcucgguagcacgaaa

SEQ ID NO: 945358 - RNA, 19 nt, Artificial Sequence
  Description of Artificial Sequence: Synthetic oligonucleotide
gcucgaagcgaagggugca

SEQ ID NO: 945359 - RNA, 19 nt, Artificial Sequence
  Description of Artificial Sequence: Synthetic oligonucleotide
gcccugagcugugcagacg

SEQ ID NO: 945360 - RNA, 19 nt, Artificial Sequence
  Description of Artificial Sequence: Synthetic oligonucleotide
ggccaaagucacgggcccc

SEQ ID NO: 945361 - RNA, 19 nt, Artificial Sequence
  Description of Artificial Sequence: Synthetic oligonucleotide
guacagccugauguacugu

SEQ ID NO: 945362 - RNA, 19 nt, Artificial Sequence
  Description of Artificial Sequence: Synthetic oligonucleotide
ggcggaaaucugugaguua

SEQ ID NO: 945363 - RNA, 19 nt, Artificial Sequence
  Description of Artificial Sequence: Synthetic oligonucleotide
ccacaccgucguuacugug

SEQ ID NO: 945364 - RNA, 19 nt, Artificial Sequence
  Description of Artificial Sequence: Synthetic oligonucleotide
ggaaacccacguacacaga

SEQ ID NO: 945365 - RNA, 19 nt, Artificial Sequence
  Description of Artificial Sequence: Synthetic oligonucleotide
cuaggcuauaagccaccuu

SEQ ID NO: 945366 - RNA, 19 nt, Artificial Sequence
  Description of Artificial Sequence: Synthetic oligonucleotide
cgcaaagcaacacgccgca

SEQ ID NO: 945367 - RNA, 19 nt, Artificial Sequence
  Description of Artificial Sequence: Synthetic oligonucleotide
ccagcgcacgggagagcgg

SEQ ID NO: 945368 - RNA, 19 nt, Artificial Sequence
  Description of Artificial Sequence: Synthetic oligonucleotide
gcgaagggugcaggcucgg

SEQ ID NO: 945369 - RNA, 19 nt, Artificial Sequence
  Description of Artificial Sequence: Synthetic oligonucleotide
cugugccuccagagaggga

SEQ ID NO: 945370 - RNA, 19 nt, Artificial Sequence
  Description of Artificial Sequence: Synthetic oligonucleotide
gccccagcgcugaacgccc

SEQ ID NO: 945371 - RNA, 19 nt, Artificial Sequence
  Description of Artificial Sequence: Synthetic oligonucleotide
aaccccugacagggagguu

SEQ ID NO: 945372 - RNA, 19 nt, Artificial Sequence
  Description of Artificial Sequence: Synthetic oligonucleotide
guuaggacuuggggcaguu

SEQ ID NO: 945373 - RNA, 19 nt, Artificial Sequence
  Description of Artificial Sequence: Synthetic oligonucleotide
cccgcggguuccugcgucc

SEQ ID NO: 945374 - RNA, 19 nt, Artificial Sequence
  Description of Artificial Sequence: Synthetic oligonucleotide
ggacgcggguaagaacaca

SEQ ID NO: 945375 - RNA, 19 nt, Artificial Sequence
  Description of Artificial Sequence: Synthetic oligonucleotide
cgaaggagguucaccugga

SEQ ID NO: 945376 - RNA, 19 nt, Artificial Sequence
  Description of Artificial Sequence: Synthetic oligonucleotide
gggcuguccaggcauugau

SEQ ID NO: 945377 - RNA, 19 nt, Artificial Sequence
  Description of Artificial Sequence: Synthetic oligonucleotide
gcugcgggacgcggguaag

SEQ ID NO: 945378 - RNA, 19 nt, Artificial Sequence
  Description of Artificial Sequence: Synthetic oligonucleotide
ccgucguuacugugggcca

SEQ ID NO: 945379 - RNA, 19 nt, Artificial Sequence
  Description of Artificial Sequence: Synthetic oligonucleotide
cccugcgcggcuggcaccc

SEQ ID NO: 945380 - RNA, 19 nt, Artificial Sequence
  Description of Artificial Sequence: Synthetic oligonucleotide
gcgcggcuggcacccugcg

SEQ ID NO: 945381 - RNA, 19 nt, Artificial Sequence
  Description of Artificial Sequence: Synthetic oligonucleotide
ccggaggcgcaaagcaaca

SEQ ID NO: 945382 - RNA, 19 nt, Artificial Sequence
  Description of Artificial Sequence: Synthetic oligonucleotide
gucaccggacacggcgaaa

SEQ ID NO: 945383 - RNA, 19 nt, Artificial Sequence
  Description of Artificial Sequence: Synthetic oligonucleotide
gccgcauagcacggccagc

SEQ ID NO: 945384 - RNA, 19 nt, Artificial Sequence
  Description of Artificial Sequence: Synthetic oligonucleotide
cugcgggacgcggguaaga

SEQ ID NO: 945385 - RNA, 19 nt, Artificial Sequence
  Description of Artificial Sequence: Synthetic oligonucleotide
cuguccaggcauugaucuu

SEQ ID NO: 945386 - RNA, 19 nt, Artificial Sequence
  Description of Artificial Sequence: Synthetic oligonucleotide
gcacauagcgagccacgau

SEQ ID NO: 945387 - RNA, 19 nt, Artificial Sequence
  Description of Artificial Sequence: Synthetic oligonucleotide
caucauugucuuggcuuau

SEQ ID NO: 945388 - RNA, 19 nt, Artificial Sequence
  Description of Artificial Sequence: Synthetic oligonucleotide
ggccggaggcgcaaagcaa

SEQ ID NO: 945389 - RNA, 19 nt, Artificial Sequence
  Description of Artificial Sequence: Synthetic oligonucleotide
cucagucacuuggcauuua

SEQ ID NO: 945390 - RNA, 19 nt, Artificial Sequence
  Description of Artificial Sequence: Synthetic oligonucleotide
cgucguuacugugggccac

SEQ ID NO: 945391 - RNA, 19 nt, Artificial Sequence
  Description of Artificial Sequence: Synthetic oligonucleotide
caggaaggacacgcacaua

SEQ ID NO: 945392 - RNA, 19 nt, Artificial Sequence
  Description of Artificial Sequence: Synthetic oligonucleotide
augcugcgggacgcgggua

SEQ ID NO: 945393 - RNA, 19 nt, Artificial Sequence
  Description of Artificial Sequence: Synthetic oligonucleotide
cgagucugccuauuaacuu

SEQ ID NO: 945394 - RNA, 19 nt, Artificial Sequence
  Description of Artificial Sequence: Synthetic oligonucleotide
gguuaggacuuggggcagu

SEQ ID NO: 945395 - RNA, 19 nt, Artificial Sequence
  Description of Artificial Sequence: Synthetic oligonucleotide
ccgcggguuccugcguccg

SEQ ID NO: 945396 - RNA, 19 nt, Artificial Sequence
  Description of Artificial Sequence: Synthetic oligonucleotide
cgcacauagcgagccacga

SEQ ID NO: 945397 - RNA, 19 nt, Artificial Sequence
  Description of Artificial Sequence: Synthetic oligonucleotide
cgcacgggagagcggcaug

SEQ ID NO: 945398 - RNA, 19 nt, Artificial Sequence
  Description of Artificial Sequence: Synthetic oligonucleotide
ggugcccgaguagcccaga

SEQ ID NO: 945399 - RNA, 19 nt, Artificial Sequence
  Description of Artificial Sequence: Synthetic oligonucleotide
cggccagcgcacgggagag

SEQ ID NO: 945400 - RNA, 19 nt, Artificial Sequence
  Description of Artificial Sequence: Synthetic oligonucleotide
cacgggagagcggcaugcu

SEQ ID NO: 945401 - RNA, 19 nt, Artificial Sequence
  Description of Artificial Sequence: Synthetic oligonucleotide
gcgagccacgaugggcguc

SEQ ID NO: 945402 - RNA, 19 nt, Artificial Sequence
  Description of Artificial Sequence: Synthetic oligonucleotide
ggcgcagagugaugcgcuu

SEQ ID NO: 945403 - RNA, 19 nt, Artificial Sequence
  Description of Artificial Sequence: Synthetic oligonucleotide
cggguuccugcguccgcuc

SEQ ID NO: 945404 - RNA, 19 nt, Artificial Sequence
  Description of Artificial Sequence: Synthetic oligonucleotide
ccgucacaugccucugagu

SEQ ID NO: 945405 - RNA, 19 nt, Artificial Sequence
  Description of Artificial Sequence: Synthetic oligonucleotide
gcccaguguugagguacaa

SEQ ID NO: 945406 - RNA, 19 nt, Artificial Sequence
  Description of Artificial Sequence: Synthetic oligonucleotide
cgcagagugaugcgcuuau

SEQ ID NO: 945407 - RNA, 19 nt, Artificial Sequence
  Description of Artificial Sequence: Synthetic oligonucleotide
cgagccacgaugggcgucu

SEQ ID NO: 945408 - RNA, 19 nt, Artificial Sequence
  Description of Artificial Sequence: Synthetic oligonucleotide
ccccagcgcugaacgccca

SEQ ID NO: 945409 - RNA, 19 nt, Artificial Sequence
  Description of Artificial Sequence: Synthetic oligonucleotide
cgguagcacgaaacagggu

SEQ ID NO: 945410 - RNA, 19 nt, Artificial Sequence
  Description of Artificial Sequence: Synthetic oligonucleotide
gcgcacgggagagcggcau

SEQ ID NO: 945411 - RNA, 19 nt, Artificial Sequence
  Description of Artificial Sequence: Synthetic oligonucleotide
cccggacuucagucuucuu

SEQ ID NO: 945412 - RNA, 19 nt, Artificial Sequence
  Description of Artificial Sequence: Synthetic oligonucleotide
cgcggcuggcacccugcgu

SEQ ID NO: 945413 - RNA, 19 nt, Artificial Sequence
  Description of Artificial Sequence: Synthetic oligonucleotide
ccugcgcggcuggcacccu

SEQ ID NO: 945414 - RNA, 19 nt, Artificial Sequence
  Description of Artificial Sequence: Synthetic oligonucleotide
aguucaaggaccuugaacc

SEQ ID NO: 945415 - RNA, 19 nt, Artificial Sequence
  Description of Artificial Sequence: Synthetic oligonucleotide
auaaagaagaccuaaaaug

SEQ ID NO: 945416 - RNA, 19 nt, Artificial Sequence
  Description of Artificial Sequence: Synthetic oligonucleotide
auaaggauaaacuaaauau

SEQ ID NO: 945417 - RNA, 19 nt, Artificial Sequence
  Description of Artificial Sequence: Synthetic oligonucleotide
caucauauaaugaauacag

SEQ ID NO: 945418 - RNA, 19 nt, Artificial Sequence
  Description of Artificial Sequence: Synthetic oligonucleotide
aagcuacuaaagcagauac

SEQ ID NO: 945419 - RNA, 19 nt, Artificial Sequence
  Description of Artificial Sequence: Synthetic oligonucleotide
aaauaucuggcacuuauug

SEQ ID NO: 945420 - RNA, 19 nt, Artificial Sequence
  Description of Artificial Sequence: Synthetic oligonucleotide
ucuaaguuauauaaagaag

SEQ ID NO: 945421 - RNA, 19 nt, Artificial Sequence
  Description of Artificial Sequence: Synthetic oligonucleotide
uguucuaaguucaaggacc

SEQ ID NO: 945422 - RNA, 19 nt, Artificial Sequence
  Description of Artificial Sequence: Synthetic oligonucleotide
uauguauuagguuugguca

SEQ ID NO: 945423 - RNA, 19 nt, Artificial Sequence
  Description of Artificial Sequence: Synthetic oligonucleotide
acuucuaaguuauauaaag

SEQ ID NO: 945424 - RNA, 19 nt, Artificial Sequence
  Description of Artificial Sequence: Synthetic oligonucleotide
auuaauggcaccaagcuac

SEQ ID NO: 945425 - RNA, 19 nt, Artificial Sequence
  Description of Artificial Sequence: Synthetic oligonucleotide
aguuauauaaagaagaccu

SEQ ID NO: 945426 - RNA, 19 nt, Artificial Sequence
  Description of Artificial Sequence: Synthetic oligonucleotide
aacuuugucacuuagucaa

SEQ ID NO: 945427 - RNA, 19 nt, Artificial Sequence
  Description of Artificial Sequence: Synthetic oligonucleotide
gauguaaguauguauuagg

SEQ ID NO: 945428 - RNA, 19 nt, Artificial Sequence
  Description of Artificial Sequence: Synthetic oligonucleotide
auauaaugaauacagccag

SEQ ID NO: 945429 - RNA, 19 nt, Artificial Sequence
  Description of Artificial Sequence: Synthetic oligonucleotide
aaaguauuacuuugucugg

SEQ ID NO: 945430 - RNA, 19 nt, Artificial Sequence
  Description of Artificial Sequence: Synthetic oligonucleotide
cuaaguuauauaaagaaga

SEQ ID NO: 945431 - RNA, 19 nt, Artificial Sequence
  Description of Artificial Sequence: Synthetic oligonucleotide
aagaccuaaaaugagcuuc

SEQ ID NO: 945432 - RNA, 19 nt, Artificial Sequence
  Description of Artificial Sequence: Synthetic oligonucleotide
aguagaaugaaauaguguu

SEQ ID NO: 945433 - RNA, 19 nt, Artificial Sequence
  Description of Artificial Sequence: Synthetic oligonucleotide
ugaggauucacauacgcug

SEQ ID NO: 945434 - RNA, 19 nt, Artificial Sequence
  Description of Artificial Sequence: Synthetic oligonucleotide
aaccugaugcaauugcucg

SEQ ID NO: 945435 - RNA, 19 nt, Artificial Sequence
  Description of Artificial Sequence: Synthetic oligonucleotide
acuacuucaauuccgaacu

SEQ ID NO: 945436 - RNA, 19 nt, Artificial Sequence
  Description of Artificial Sequence: Synthetic oligonucleotide
uucuaaguuauauaaagaa

SEQ ID NO: 945437 - RNA, 19 nt, Artificial Sequence
  Description of Artificial Sequence: Synthetic oligonucleotide
ucaucauuuagaaccgugg

SEQ ID NO: 945438 - RNA, 19 nt, Artificial Sequence
  Description of Artificial Sequence: Synthetic oligonucleotide
gaaguugguagucaaacgc

SEQ ID NO: 945439 - RNA, 19 nt, Artificial Sequence
  Description of Artificial Sequence: Synthetic oligonucleotide
aaccguggugcccuuaucc

SEQ ID NO: 945440 - RNA, 19 nt, Artificial Sequence
  Description of Artificial Sequence: Synthetic oligonucleotide
uaagcauauaucucugccg

SEQ ID NO: 945441 - RNA, 19 nt, Artificial Sequence
  Description of Artificial Sequence: Synthetic oligonucleotide
aacgcugaaaccacuauac

SEQ ID NO: 945442 - RNA, 19 nt, Artificial Sequence
  Description of Artificial Sequence: Synthetic oligonucleotide
agucuauaggauuugcagg

SEQ ID NO: 945443 - RNA, 19 nt, Artificial Sequence
  Description of Artificial Sequence: Synthetic oligonucleotide
ucucgauaagcauauaucu

SEQ ID NO: 945444 - RNA, 19 nt, Artificial Sequence
  Description of Artificial Sequence: Synthetic oligonucleotide
gaaguuaucccuacaaugc

SEQ ID NO: 945445 - RNA, 19 nt, Artificial Sequence
  Description of Artificial Sequence: Synthetic oligonucleotide
auaaugaauacagccagcg

SEQ ID NO: 945446 - RNA, 19 nt, Artificial Sequence
  Description of Artificial Sequence: Synthetic oligonucleotide
cuugacauuguuuacagca

SEQ ID NO: 945447 - RNA, 19 nt, Artificial Sequence
  Description of Artificial Sequence: Synthetic oligonucleotide
aagcauauaucucugccgu

SEQ ID NO: 945448 - RNA, 19 nt, Artificial Sequence
  Description of Artificial Sequence: Synthetic oligonucleotide
auacuucugaauccaaccg

SEQ ID NO: 945449 - RNA, 19 nt, Artificial Sequence
  Description of Artificial Sequence: Synthetic oligonucleotide
aauaucuggcacuuauuga

SEQ ID NO: 945450 - RNA, 19 nt, Artificial Sequence
  Description of Artificial Sequence: Synthetic oligonucleotide
uguguacuguagaaggccg

SEQ ID NO: 945451 - RNA, 19 nt, Artificial Sequence
  Description of Artificial Sequence: Synthetic oligonucleotide
aucccuacaaugcacuuac

SEQ ID NO: 945452 - RNA, 19 nt, Artificial Sequence
  Description of Artificial Sequence: Synthetic oligonucleotide
acaaaucuuacacugggca

SEQ ID NO: 945453 - RNA, 19 nt, Artificial Sequence
  Description of Artificial Sequence: Synthetic oligonucleotide
uaaguauguauuagguuug

SEQ ID NO: 945454 - RNA, 19 nt, Artificial Sequence
  Description of Artificial Sequence: Synthetic oligonucleotide
uuauucuauccauuaaugu

SEQ ID NO: 945455 - RNA, 19 nt, Artificial Sequence
  Description of Artificial Sequence: Synthetic oligonucleotide
cauauaaugaauacagcca

SEQ ID NO: 945456 - RNA, 19 nt, Artificial Sequence
  Description of Artificial Sequence: Synthetic oligonucleotide
gaaauuggggcccuguuac

SEQ ID NO: 945457 - RNA, 19 nt, Artificial Sequence
  Description of Artificial Sequence: Synthetic oligonucleotide
uuugucacuuagucaaggg

SEQ ID NO: 945458 - RNA, 19 nt, Artificial Sequence
  Description of Artificial Sequence: Synthetic oligonucleotide
aguauuacuuugucuggac

SEQ ID NO: 945459 - RNA, 19 nt, Artificial Sequence
  Description of Artificial Sequence: Synthetic oligonucleotide
ucuaaguucaaggaccuug

SEQ ID NO: 945460 - RNA, 19 nt, Artificial Sequence
  Description of Artificial Sequence: Synthetic oligonucleotide
aaccacuauacacauacau

SEQ ID NO: 945461 - RNA, 19 nt, Artificial Sequence
  Description of Artificial Sequence: Synthetic oligonucleotide
aaacuuugucacuuaguca

SEQ ID NO: 945462 - RNA, 19 nt, Artificial Sequence
  Description of Artificial Sequence: Synthetic oligonucleotide
aauuccgaacuccugcucu

SEQ ID NO: 945463 - RNA, 19 nt, Artificial Sequence
  Description of Artificial Sequence: Synthetic oligonucleotide
uuuaaguaguagaaugaaa

SEQ ID NO: 945464 - RNA, 19 nt, Artificial Sequence
  Description of Artificial Sequence: Synthetic oligonucleotide
auaguucagagccauugag

SEQ ID NO: 945465 - RNA, 19 nt, Artificial Sequence
  Description of Artificial Sequence: Synthetic oligonucleotide
accuaucagauucagguug

SEQ ID NO: 945466 - RNA, 19 nt, Artificial Sequence
  Description of Artificial Sequence: Synthetic oligonucleotide
uauaaugaauacagccagc

SEQ ID NO: 945467 - RNA, 19 nt, Artificial Sequence
  Description of Artificial Sequence: Synthetic oligonucleotide
caaugguccaugcauaccc

SEQ ID NO: 945468 - RNA, 19 nt, Artificial Sequence
  Description of Artificial Sequence: Synthetic oligonucleotide
uacacauacaucagaggca

SEQ ID NO: 945469 - RNA, 19 nt, Artificial Sequence
  Description of Artificial Sequence: Synthetic oligonucleotide
cuguaagaaaagucuauag

SEQ ID NO: 945470 - RNA, 19 nt, Artificial Sequence
  Description of Artificial Sequence: Synthetic oligonucleotide
uuauucaugaugucuaauu

SEQ ID NO: 945471 - RNA, 19 nt, Artificial Sequence
  Description of Artificial Sequence: Synthetic oligonucleotide
uuaaggagcugaauucuca

SEQ ID NO: 945472 - RNA, 19 nt, Artificial Sequence
  Description of Artificial Sequence: Synthetic oligonucleotide
cagguuggaagcuuuauac

SEQ ID NO: 945473 - RNA, 19 nt, Artificial Sequence
  Description of Artificial Sequence: Synthetic oligonucleotide
agcaacagauaguucagag

SEQ ID NO: 945474 - RNA, 19 nt, Artificial Sequence
  Description of Artificial Sequence: Synthetic oligonucleotide
aucccauucacguagcugu

SEQ ID NO: 945475 - RNA, 19 nt, Artificial Sequence
  Description of Artificial Sequence: Synthetic oligonucleotide
uucacuacuucaauuccga

SEQ ID NO: 945476 - RNA, 19 nt, Artificial Sequence
  Description of Artificial Sequence: Synthetic oligonucleotide
aauuaauggcaccaagcua

SEQ ID NO: 945477 - RNA, 19 nt, Artificial Sequence
  Description of Artificial Sequence: Synthetic oligonucleotide
aaguuaucccuacaaugca

SEQ ID NO: 945478 - RNA, 19 nt, Artificial Sequence
  Description of Artificial Sequence: Synthetic oligonucleotide
uguuacagcaguugcguga

SEQ ID NO: 945479 - RNA, 19 nt, Artificial Sequence
  Description of Artificial Sequence: Synthetic oligonucleotide
uggcuguaaauuuccaucc

SEQ ID NO: 945480 - RNA, 19 nt, Artificial Sequence
  Description of Artificial Sequence: Synthetic oligonucleotide
ggauaaacuaaauauuuca

SEQ ID NO: 945481 - RNA, 19 nt, Artificial Sequence
  Description of Artificial Sequence: Synthetic oligonucleotide
aucauuuagaaccguggug

SEQ ID NO: 945482 - RNA, 19 nt, Artificial Sequence
  Description of Artificial Sequence: Synthetic oligonucleotide
auguauuagguuuggucag

SEQ ID NO: 945483 - RNA, 19 nt, Artificial Sequence
  Description of Artificial Sequence: Synthetic oligonucleotide
aucauauaaugaauacagc

SEQ ID NO: 945484 - RNA, 19 nt, Artificial Sequence
  Description of Artificial Sequence: Synthetic oligonucleotide
agccauugagaccauauca

SEQ ID NO: 945485 - RNA, 19 nt, Artificial Sequence
  Description of Artificial Sequence: Synthetic oligonucleotide
augguugacggcaacacac

SEQ ID NO: 945486 - RNA, 19 nt, Artificial Sequence
  Description of Artificial Sequence: Synthetic oligonucleotide
uggacuuauuucaucuuca

SEQ ID NO: 945487 - RNA, 19 nt, Artificial Sequence
  Description of Artificial Sequence: Synthetic oligonucleotide
uuugagauuuucaucccau

SEQ ID NO: 945488 - RNA, 19 nt, Artificial Sequence
  Description of Artificial Sequence: Synthetic oligonucleotide
ucguuauagauguaaguau

SEQ ID NO: 945489 - RNA, 19 nt, Artificial Sequence
  Description of Artificial Sequence: Synthetic oligonucleotide
gacggcaacacacacucug

SEQ ID NO: 945490 - RNA, 19 nt, Artificial Sequence
  Description of Artificial Sequence: Synthetic oligonucleotide
aauuuguuaggaaguuauc

SEQ ID NO: 945491 - RNA, 19 nt, Artificial Sequence
  Description of Artificial Sequence: Synthetic oligonucleotide
guaaguauguauuagguuu

SEQ ID NO: 945492 - RNA, 19 nt, Artificial Sequence
  Description of Artificial Sequence: Synthetic oligonucleotide
ucucaaugacacauauuca

SEQ ID NO: 945493 - RNA, 19 nt, Artificial Sequence
  Description of Artificial Sequence: Synthetic oligonucleotide
aagucguugaauagcacug

SEQ ID NO: 945494 - RNA, 19 nt, Artificial Sequence
  Description of Artificial Sequence: Synthetic oligonucleotide
uucugaauccaaccgugug

SEQ ID NO: 945495 - RNA, 19 nt, Artificial Sequence
  Description of Artificial Sequence: Synthetic oligonucleotide
aaaucuuacacugggcaau

SEQ ID NO: 945496 - RNA, 19 nt, Artificial Sequence
  Description of Artificial Sequence: Synthetic oligonucleotide
ugucuaauucacagcgaag

SEQ ID NO: 945497 - RNA, 19 nt, Artificial Sequence
  Description of Artificial Sequence: Synthetic oligonucleotide
acacauacaucagaggcag

SEQ ID NO: 945498 - RNA, 19 nt, Artificial Sequence
  Description of Artificial Sequence: Synthetic oligonucleotide
aauugcucgugugugugag

SEQ ID NO: 945499 - RNA, 19 nt, Artificial Sequence
  Description of Artificial Sequence: Synthetic oligonucleotide
acaggauaauuaauggcac

SEQ ID NO: 945500 - RNA, 19 nt, Artificial Sequence
  Description of Artificial Sequence: Synthetic oligonucleotide
uucacagcgaagucguuga

SEQ ID NO: 945501 - RNA, 19 nt, Artificial Sequence
  Description of Artificial Sequence: Synthetic oligonucleotide
ucugccgucguuccaaacu

SEQ ID NO: 945502 - RNA, 19 nt, Artificial Sequence
  Description of Artificial Sequence: Synthetic oligonucleotide
uguaaguauguauuagguu

SEQ ID NO: 945503 - RNA, 19 nt, Artificial Sequence
  Description of Artificial Sequence: Synthetic oligonucleotide
ucuaauucacagcgaaguc

SEQ ID NO: 945504 - RNA, 19 nt, Artificial Sequence
  Description of Artificial Sequence: Synthetic oligonucleotide
agauguaaguauguauuag

SEQ ID NO: 945505 - RNA, 19 nt, Artificial Sequence
  Description of Artificial Sequence: Synthetic oligonucleotide
cauacgcugccauugggcc

SEQ ID NO: 945506 - RNA, 19 nt, Artificial Sequence
  Description of Artificial Sequence: Synthetic oligonucleotide
uuuagaaccguggugcccu

SEQ ID NO: 945507 - RNA, 19 nt, Artificial Sequence
  Description of Artificial Sequence: Synthetic oligonucleotide
aggauucacauacgcugcc

SEQ ID NO: 945508 - RNA, 19 nt, Artificial Sequence
  Description of Artificial Sequence: Synthetic oligonucleotide
cuuacacugggcaaugguc

SEQ ID NO: 945509 - RNA, 19 nt, Artificial Sequence
  Description of Artificial Sequence: Synthetic oligonucleotide
cugcagacaugguugacgg

SEQ ID NO: 945510 - RNA, 19 nt, Artificial Sequence
  Description of Artificial Sequence: Synthetic oligonucleotide
uguagacuuuacauaagua

SEQ ID NO: 945511 - RNA, 19 nt, Artificial Sequence
  Description of Artificial Sequence: Synthetic oligonucleotide
ugauucuaacugaacugca

SEQ ID NO: 945512 - RNA, 19 nt, Artificial Sequence
  Description of Artificial Sequence: Synthetic oligonucleotide
cuugcccucucaaugacac

SEQ ID NO: 945513 - RNA, 19 nt, Artificial Sequence
  Description of Artificial Sequence: Synthetic oligonucleotide
auagauguaaguauguauu

SEQ ID NO: 945514 - RNA, 19 nt, Artificial Sequence
  Description of Artificial Sequence: Synthetic oligonucleotide
gaaagugggcauuucuuca

SEQ ID NO: 945515 - RNA, 19 nt, Artificial Sequence
  Description of Artificial Sequence: Synthetic oligonucleotide
uucucaacacaucaucaau

SEQ ID NO: 945516 - RNA, 19 nt, Artificial Sequence
  Description of Artificial Sequence: Synthetic oligonucleotide
ucuuugagauuuucauccc

SEQ ID NO: 945517 - RNA, 19 nt, Artificial Sequence
  Description of Artificial Sequence: Synthetic oligonucleotide
agaagaccuaaaaugagcu

SEQ ID NO: 945518 - RNA, 19 nt, Artificial Sequence
  Description of Artificial Sequence: Synthetic oligonucleotide
ucucuugacauuguuuaca

SEQ ID NO: 945519 - RNA, 19 nt, Artificial Sequence
  Description of Artificial Sequence: Synthetic oligonucleotide
auuuagaaccguggugccc

SEQ ID NO: 945520 - RNA, 19 nt, Artificial Sequence
  Description of Artificial Sequence: Synthetic oligonucleotide
aggauaauuaauggcacca

SEQ ID NO: 945521 - RNA, 19 nt, Artificial Sequence
  Description of Artificial Sequence: Synthetic oligonucleotide
guugcgugaacaguggaag

SEQ ID NO: 945522 - RNA, 19 nt, Artificial Sequence
  Description of Artificial Sequence: Synthetic oligonucleotide
aaagucuauaggauuugca

SEQ ID NO: 945523 - RNA, 19 nt, Artificial Sequence
  Description of Artificial Sequence: Synthetic oligonucleotide
aaacgcugaaaccacuaua

SEQ ID NO: 945524 - RNA, 19 nt, Artificial Sequence
  Description of Artificial Sequence: Synthetic oligonucleotide
agauacuucugaauccaac

SEQ ID NO: 945525 - RNA, 19 nt, Artificial Sequence
  Description of Artificial Sequence: Synthetic oligonucleotide
gguuggaagcuuuauacac

SEQ ID NO: 945526 - RNA, 19 nt, Artificial Sequence
  Description of Artificial Sequence: Synthetic oligonucleotide
augucuaauucacagcgaa

SEQ ID NO: 945527 - RNA, 19 nt, Artificial Sequence
  Description of Artificial Sequence: Synthetic oligonucleotide
uuaauguuucagcaucaua

SEQ ID NO: 945528 - RNA, 19 nt, Artificial Sequence
  Description of Artificial Sequence: Synthetic oligonucleotide
ugacauuguuuacagcaaa

SEQ ID NO: 945529 - RNA, 19 nt, Artificial Sequence
  Description of Artificial Sequence: Synthetic oligonucleotide
aaguauuacuuugucugga

SEQ ID NO: 945530 - RNA, 19 nt, Artificial Sequence
  Description of Artificial Sequence: Synthetic oligonucleotide
cucgauaagcauauaucuc

SEQ ID NO: 945531 - RNA, 19 nt, Artificial Sequence
  Description of Artificial Sequence: Synthetic oligonucleotide
aauuugcacuuuagcuugc

SEQ ID NO: 945532 - RNA, 19 nt, Artificial Sequence
  Description of Artificial Sequence: Synthetic oligonucleotide
ucagauuugcacagugaaa

SEQ ID NO: 945533 - RNA, 19 nt, Artificial Sequence
  Description of Artificial Sequence: Synthetic oligonucleotide
auacuggucuucccaagag

SEQ ID NO: 945534 - RNA, 19 nt, Artificial Sequence
  Description of Artificial Sequence: Synthetic oligonucleotide
ugguccaugcauacccggg

SEQ ID NO: 945535 - RNA, 19 nt, Artificial Sequence
  Description of Artificial Sequence: Synthetic oligonucleotide
uagauguaaguauguauua

SEQ ID NO: 945536 - RNA, 19 nt, Artificial Sequence
  Description of Artificial Sequence: Synthetic oligonucleotide
caggauaauuaauggcacc

SEQ ID NO: 945537 - RNA, 19 nt, Artificial Sequence
  Description of Artificial Sequence: Synthetic oligonucleotide
aaguugguagucaaacgcu

SEQ ID NO: 945538 - RNA, 19 nt, Artificial Sequence
  Description of Artificial Sequence: Synthetic oligonucleotide
agucguugaauagcacugc

SEQ ID NO: 945539 - RNA, 19 nt, Artificial Sequence
  Description of Artificial Sequence: Synthetic oligonucleotide
aaugguccaugcauacccg

SEQ ID NO: 945540 - RNA, 19 nt, Artificial Sequence
  Description of Artificial Sequence: Synthetic oligonucleotide
ugcacuuuagcuugcugaa

SEQ ID NO: 945541 - RNA, 19 nt, Artificial Sequence
  Description of Artificial Sequence: Synthetic oligonucleotide
uacuucaauuccgaacucc

SEQ ID NO: 945542 - RNA, 19 nt, Artificial Sequence
  Description of Artificial Sequence: Synthetic oligonucleotide
ucguugaauagcacugcca

SEQ ID NO: 945543 - RNA, 19 nt, Artificial Sequence
  Description of Artificial Sequence: Synthetic oligonucleotide
acagcgaagucguugaaua

SEQ ID NO: 945544 - RNA, 19 nt, Artificial Sequence
  Description of Artificial Sequence: Synthetic oligonucleotide
cauugagaccauaucaaga

SEQ ID NO: 945545 - RNA, 19 nt, Artificial Sequence
  Description of Artificial Sequence: Synthetic oligonucleotide
gaugucacaaaacuggauu

SEQ ID NO: 945546 - RNA, 19 nt, Artificial Sequence
  Description of Artificial Sequence: Synthetic oligonucleotide
auucucaacacaucaucaa

SEQ ID NO: 945547 - RNA, 19 nt, Artificial Sequence
  Description of Artificial Sequence: Synthetic oligonucleotide
gaagucguugaauagcacu

SEQ ID NO: 945548 - RNA, 19 nt, Artificial Sequence
  Description of Artificial Sequence: Synthetic oligonucleotide
auguaaguauguauuaggu

SEQ ID NO: 945549 - RNA, 19 nt, Artificial Sequence
  Description of Artificial Sequence: Synthetic oligonucleotide
uauaucucugccgucguuc

SEQ ID NO: 945550 - RNA, 19 nt, Artificial Sequence
  Description of Artificial Sequence: Synthetic oligonucleotide
gaagcuuuauacacaguca

SEQ ID NO: 945551 - RNA, 19 nt, Artificial Sequence
  Description of Artificial Sequence: Synthetic oligonucleotide
gcuuuauacacagucagug

SEQ ID NO: 945552 - RNA, 19 nt, Artificial Sequence
  Description of Artificial Sequence: Synthetic oligonucleotide
guguucuaaguucaaggac

SEQ ID NO: 945553 - RNA, 19 nt, Artificial Sequence
  Description of Artificial Sequence: Synthetic oligonucleotide
cuuugucacuuagucaagg

SEQ ID NO: 945554 - RNA, 19 nt, Artificial Sequence
  Description of Artificial Sequence: Synthetic oligonucleotide
ccaaccguguguuuuaugc

SEQ ID NO: 945555 - RNA, 19 nt, Artificial Sequence
  Description of Artificial Sequence: Synthetic oligonucleotide
uuagcuugcugaauuccau

SEQ ID NO: 945556 - RNA, 19 nt, Artificial Sequence
  Description of Artificial Sequence: Synthetic oligonucleotide
cuugcacauuacuguaugc

SEQ ID NO: 945557 - RNA, 19 nt, Artificial Sequence
  Description of Artificial Sequence: Synthetic oligonucleotide
augaacuucuaaguuauau

SEQ ID NO: 945558 - RNA, 19 nt, Artificial Sequence
  Description of Artificial Sequence: Synthetic oligonucleotide
aguacaagaugaugucaca

SEQ ID NO: 945559 - RNA, 19 nt, Artificial Sequence
  Description of Artificial Sequence: Synthetic oligonucleotide
cauuuagaaccguggugcc

SEQ ID NO: 945560 - RNA, 19 nt, Artificial Sequence
  Description of Artificial Sequence: Synthetic oligonucleotide
aucaagacuucguuauaga

SEQ ID NO: 945561 - RNA, 19 nt, Artificial Sequence
  Description of Artificial Sequence: Synthetic oligonucleotide
guuaggaaguuaucccuac

SEQ ID NO: 945562 - RNA, 19 nt, Artificial Sequence
  Description of Artificial Sequence: Synthetic oligonucleotide
gaggauucacauacgcugc

SEQ ID NO: 945563 - RNA, 19 nt, Artificial Sequence
  Description of Artificial Sequence: Synthetic oligonucleotide
cuggacuuauuucaucuuc

SEQ ID NO: 945564 - RNA, 19 nt, Artificial Sequence
  Description of Artificial Sequence: Synthetic oligonucleotide
agaccauaucaagacuucg

SEQ ID NO: 945565 - RNA, 19 nt, Artificial Sequence
  Description of Artificial Sequence: Synthetic oligonucleotide
aauccaaccguguguuuua

SEQ ID NO: 945566 - RNA, 19 nt, Artificial Sequence
  Description of Artificial Sequence: Synthetic oligonucleotide
acuucguuauagauguaag

SEQ ID NO: 945567 - RNA, 19 nt, Artificial Sequence
  Description of Artificial Sequence: Synthetic oligonucleotide
gccauugggccacauaagg

SEQ ID NO: 945568 - RNA, 19 nt, Artificial Sequence
  Description of Artificial Sequence: Synthetic oligonucleotide
augucacaaaacuggauuu

SEQ ID NO: 945569 - RNA, 19 nt, Artificial Sequence
  Description of Artificial Sequence: Synthetic oligonucleotide
agcaguugcgugaacagug

SEQ ID NO: 945570 - RNA, 19 nt, Artificial Sequence
  Description of Artificial Sequence: Synthetic oligonucleotide
accauaucaagacuucguu

SEQ ID NO: 945571 - RNA, 19 nt, Artificial Sequence
  Description of Artificial Sequence: Synthetic oligonucleotide
gcauauaucucugccgucg

SEQ ID NO: 945572 - RNA, 19 nt, Artificial Sequence
  Description of Artificial Sequence: Synthetic oligonucleotide
aagggaaccugaugcaauu

SEQ ID NO: 945573 - RNA, 19 nt, Artificial Sequence
  Description of Artificial Sequence: Synthetic oligonucleotide
ucacuuagucaagggaacc

SEQ ID NO: 945574 - RNA, 19 nt, Artificial Sequence
  Description of Artificial Sequence: Synthetic oligonucleotide
ugaugucacaaaacuggau

SEQ ID NO: 945575 - RNA, 19 nt, Artificial Sequence
  Description of Artificial Sequence: Synthetic oligonucleotide
gaugcaauugcucgugugu

SEQ ID NO: 945576 - RNA, 19 nt, Artificial Sequence
  Description of Artificial Sequence: Synthetic oligonucleotide
uguacauauccaugaggau

SEQ ID NO: 945577 - RNA, 19 nt, Artificial Sequence
  Description of Artificial Sequence: Synthetic oligonucleotide
gauaaacuaaauauuucau

SEQ ID NO: 945578 - RNA, 19 nt, Artificial Sequence
  Description of Artificial Sequence: Synthetic oligonucleotide
uugggccacauaaggauaa

SEQ ID NO: 945579 - RNA, 19 nt, Artificial Sequence
  Description of Artificial Sequence: Synthetic oligonucleotide
auuugcaggaagagaauca

SEQ ID NO: 945580 - RNA, 19 nt, Artificial Sequence
  Description of Artificial Sequence: Synthetic oligonucleotide
uguguuuuaugcugcuuuu

SEQ ID NO: 945581 - RNA, 19 nt, Artificial Sequence
  Description of Artificial Sequence: Synthetic oligonucleotide
augguccaugcauacccgg

SEQ ID NO: 945582 - RNA, 19 nt, Artificial Sequence
  Description of Artificial Sequence: Synthetic oligonucleotide
uguauuagguuuggucaga

SEQ ID NO: 945583 - RNA, 19 nt, Artificial Sequence
  Description of Artificial Sequence: Synthetic oligonucleotide
acuuagucaagggaaccug

SEQ ID NO: 945584 - RNA, 19 nt, Artificial Sequence
  Description of Artificial Sequence: Synthetic oligonucleotide
aaguaccaaggagagcaug

SEQ ID NO: 945585 - RNA, 19 nt, Artificial Sequence
  Description of Artificial Sequence: Synthetic oligonucleotide
ugguugacggcaacacaca

SEQ ID NO: 945586 - RNA, 19 nt, Artificial Sequence
  Description of Artificial Sequence: Synthetic oligonucleotide
ucacguagcuguuucuuua

SEQ ID NO: 945587 - RNA, 19 nt, Artificial Sequence
  Description of Artificial Sequence: Synthetic oligonucleotide
caauuuguuaggaaguuau

SEQ ID NO: 945588 - RNA, 19 nt, Artificial Sequence
  Description of Artificial Sequence: Synthetic oligonucleotide
gcaacagauaguucagagc

SEQ ID NO: 945589 - RNA, 19 nt, Artificial Sequence
  Description of Artificial Sequence: Synthetic oligonucleotide
ggugcccuuauccuguucc

SEQ ID NO: 945590 - RNA, 19 nt, Artificial Sequence
  Description of Artificial Sequence: Synthetic oligonucleotide
cuucaauuccgaacuccug

SEQ ID NO: 945591 - RNA, 19 nt, Artificial Sequence
  Description of Artificial Sequence: Synthetic oligonucleotide
ugcaauugcucgugugugu

SEQ ID NO: 945592 - RNA, 19 nt, Artificial Sequence
  Description of Artificial Sequence: Synthetic oligonucleotide
acuucaauuccgaacuccu

SEQ ID NO: 945593 - RNA, 19 nt, Artificial Sequence
  Description of Artificial Sequence: Synthetic oligonucleotide
ucuugcccucucaaugaca

SEQ ID NO: 945594 - RNA, 19 nt, Artificial Sequence
  Description of Artificial Sequence: Synthetic oligonucleotide
agcugaauucucaacacau

SEQ ID NO: 945595 - RNA, 19 nt, Artificial Sequence
  Description of Artificial Sequence: Synthetic oligonucleotide
aguugguagucaaacgcug

SEQ ID NO: 945596 - RNA, 19 nt, Artificial Sequence
  Description of Artificial Sequence: Synthetic oligonucleotide
ucguccaauugcuuucacu

SEQ ID NO: 945597 - RNA, 19 nt, Artificial Sequence
  Description of Artificial Sequence: Synthetic oligonucleotide
cuuagucaagggaaccuga

SEQ ID NO: 945598 - RNA, 19 nt, Artificial Sequence
  Description of Artificial Sequence: Synthetic oligonucleotide
accuugaaccucugucguc

SEQ ID NO: 945599 - RNA, 19 nt, Artificial Sequence
  Description of Artificial Sequence: Synthetic oligonucleotide
gaaccugaugcaauugcuc

SEQ ID NO: 945600 - RNA, 19 nt, Artificial Sequence
  Description of Artificial Sequence: Synthetic oligonucleotide
gagcugaauucucaacaca

SEQ ID NO: 945601 - RNA, 19 nt, Artificial Sequence
  Description of Artificial Sequence: Synthetic oligonucleotide
ugucuggacuuauuucauc

SEQ ID NO: 945602 - RNA, 19 nt, Artificial Sequence
  Description of Artificial Sequence: Synthetic oligonucleotide
aggaaacaauuuguuagga

SEQ ID NO: 945603 - RNA, 19 nt, Artificial Sequence
  Description of Artificial Sequence: Synthetic oligonucleotide
ucuauccauuaauguuuca

SEQ ID NO: 945604 - RNA, 19 nt, Artificial Sequence
  Description of Artificial Sequence: Synthetic oligonucleotide
gugaguggacaugacauca

SEQ ID NO: 945605 - RNA, 19 nt, Artificial Sequence
  Description of Artificial Sequence: Synthetic oligonucleotide
ggagcugaauucucaacac

SEQ ID NO: 945606 - RNA, 19 nt, Artificial Sequence
  Description of Artificial Sequence: Synthetic oligonucleotide
cugccauugggccacauaa

SEQ ID NO: 945607 - RNA, 19 nt, Artificial Sequence
  Description of Artificial Sequence: Synthetic oligonucleotide
aagcaacagauaguucaga

SEQ ID NO: 945608 - RNA, 19 nt, Artificial Sequence
  Description of Artificial Sequence: Synthetic oligonucleotide
gagccauugagaccauauc

SEQ ID NO: 945609 - RNA, 19 nt, Artificial Sequence
  Description of Artificial Sequence: Synthetic oligonucleotide
acuuauugagugauucuaa

SEQ ID NO: 945610 - RNA, 19 nt, Artificial Sequence
  Description of Artificial Sequence: Synthetic oligonucleotide
gaagacaagcagcuacucu

SEQ ID NO: 945611 - RNA, 19 nt, Artificial Sequence
  Description of Artificial Sequence: Synthetic oligonucleotide
augcauacccgggaaacca

SEQ ID NO: 945612 - RNA, 19 nt, Artificial Sequence
  Description of Artificial Sequence: Synthetic oligonucleotide
accugaugcaauugcucgu

SEQ ID NO: 945613 - RNA, 19 nt, Artificial Sequence
  Description of Artificial Sequence: Synthetic oligonucleotide
auuacuuugucuggacuua

SEQ ID NO: 945614 - RNA, 19 nt, Artificial Sequence
  Description of Artificial Sequence: Synthetic oligonucleotide
cugccgucguuccaaacug

SEQ ID NO: 945615 - RNA, 19 nt, Artificial Sequence
  Description of Artificial Sequence: Synthetic oligonucleotide
caugcauacccgggaaacc

SEQ ID NO: 945616 - RNA, 19 nt, Artificial Sequence
  Description of Artificial Sequence: Synthetic oligonucleotide
uucacguagcuguuucuuu

SEQ ID NO: 945617 - RNA, 19 nt, Artificial Sequence
  Description of Artificial Sequence: Synthetic oligonucleotide
gagaccauaucaagacuuc

SEQ ID NO: 945618 - RNA, 19 nt, Artificial Sequence
  Description of Artificial Sequence: Synthetic oligonucleotide
uugagauuuucaucccauu

SEQ ID NO: 945619 - RNA, 19 nt, Artificial Sequence
  Description of Artificial Sequence: Synthetic oligonucleotide
aguuaagccccaaaauuuu

SEQ ID NO: 945620 - RNA, 19 nt, Artificial Sequence
  Description of Artificial Sequence: Synthetic oligonucleotide
cagcgaagucguugaauag

SEQ ID NO: 945621 - RNA, 19 nt, Artificial Sequence
  Description of Artificial Sequence: Synthetic oligonucleotide
augaggauucacauacgcu

SEQ ID NO: 945622 - RNA, 19 nt, Artificial Sequence
  Description of Artificial Sequence: Synthetic oligonucleotide
ucuauaggauuugcaggaa

SEQ ID NO: 945623 - RNA, 19 nt, Artificial Sequence
  Description of Artificial Sequence: Synthetic oligonucleotide
agcuacucuguaagaaaag

SEQ ID NO: 945624 - RNA, 19 nt, Artificial Sequence
  Description of Artificial Sequence: Synthetic oligonucleotide
accguggugcccuuauccu

SEQ ID NO: 945625 - RNA, 19 nt, Artificial Sequence
  Description of Artificial Sequence: Synthetic oligonucleotide
gaguuaagccccaaaauuu

SEQ ID NO: 945626 - RNA, 19 nt, Artificial Sequence
  Description of Artificial Sequence: Synthetic oligonucleotide
agagccauugagaccauau

SEQ ID NO: 945627 - RNA, 19 nt, Artificial Sequence
  Description of Artificial Sequence: Synthetic oligonucleotide
acagagcagagcgaguuaa

SEQ ID NO: 945628 - RNA, 19 nt, Artificial Sequence
  Description of Artificial Sequence: Synthetic oligonucleotide
ugaaccucugucguccaau

SEQ ID NO: 945629 - RNA, 19 nt, Artificial Sequence
  Description of Artificial Sequence: Synthetic oligonucleotide
ggcacuuauugagugauuc

SEQ ID NO: 945630 - RNA, 19 nt, Artificial Sequence
  Description of Artificial Sequence: Synthetic oligonucleotide
acggcaacacacacucugg

SEQ ID NO: 945631 - RNA, 19 nt, Artificial Sequence
  Description of Artificial Sequence: Synthetic oligonucleotide
agaaccguggugcccuuau

SEQ ID NO: 945632 - RNA, 19 nt, Artificial Sequence
  Description of Artificial Sequence: Synthetic oligonucleotide
acaauuuguuaggaaguua

SEQ ID NO: 945633 - RNA, 19 nt, Artificial Sequence
  Description of Artificial Sequence: Synthetic oligonucleotide
gcaucauauaaugaauaca

SEQ ID NO: 945634 - RNA, 19 nt, Artificial Sequence
  Description of Artificial Sequence: Synthetic oligonucleotide
cuugaaguugguagucaaa

SEQ ID NO: 945635 - RNA, 19 nt, Artificial Sequence
  Description of Artificial Sequence: Synthetic oligonucleotide
uaucucugccgucguucca

SEQ ID NO: 945636 - RNA, 19 nt, Artificial Sequence
  Description of Artificial Sequence: Synthetic oligonucleotide
guacauauccaugaggauu

SEQ ID NO: 945637 - RNA, 19 nt, Artificial Sequence
  Description of Artificial Sequence: Synthetic oligonucleotide
cagagcagagcgaguuaag

SEQ ID NO: 945638 - RNA, 19 nt, Artificial Sequence
  Description of Artificial Sequence: Synthetic oligonucleotide
ccuugaaccucugucgucc

SEQ ID NO: 945639 - RNA, 19 nt, Artificial Sequence
  Description of Artificial Sequence: Synthetic oligonucleotide
ccacauaaggauaaacuaa

SEQ ID NO: 945640 - RNA, 19 nt, Artificial Sequence
  Description of Artificial Sequence: Synthetic oligonucleotide
cacuuauugagugauucua

SEQ ID NO: 945641 - RNA, 19 nt, Artificial Sequence
  Description of Artificial Sequence: Synthetic oligonucleotide
caucauuuagaaccguggu

SEQ ID NO: 945642 - RNA, 19 nt, Artificial Sequence
  Description of Artificial Sequence: Synthetic oligonucleotide
accaagcuacuaaagcaga

SEQ ID NO: 945643 - RNA, 19 nt, Artificial Sequence
  Description of Artificial Sequence: Synthetic oligonucleotide
aaggccgaccuaucagauu

SEQ ID NO: 945644 - RNA, 19 nt, Artificial Sequence
  Description of Artificial Sequence: Synthetic oligonucleotide
ggcaaugguccaugcauac

SEQ ID NO: 945645 - RNA, 19 nt, Artificial Sequence
  Description of Artificial Sequence: Synthetic oligonucleotide
uuacuuugucuggacuuau

SEQ ID NO: 945646 - RNA, 19 nt, Artificial Sequence
  Description of Artificial Sequence: Synthetic oligonucleotide
gauucacauacgcugccau

SEQ ID NO: 945647 - RNA, 19 nt, Artificial Sequence
  Description of Artificial Sequence: Synthetic oligonucleotide
gaaaccagcuguguacugu

SEQ ID NO: 945648 - RNA, 19 nt, Artificial Sequence
  Description of Artificial Sequence: Synthetic oligonucleotide
ccuacaaugcacuuacaaa

SEQ ID NO: 945649 - RNA, 19 nt, Artificial Sequence
  Description of Artificial Sequence: Synthetic oligonucleotide
agcuacuaaagcagauacu

SEQ ID NO: 945650 - RNA, 19 nt, Artificial Sequence
  Description of Artificial Sequence: Synthetic oligonucleotide
aguugcgugaacaguggaa

SEQ ID NO: 945651 - RNA, 19 nt, Artificial Sequence
  Description of Artificial Sequence: Synthetic oligonucleotide
gguugacggcaacacacac

SEQ ID NO: 945652 - RNA, 19 nt, Artificial Sequence
  Description of Artificial Sequence: Synthetic oligonucleotide
gcaauugcucgugugugug

SEQ ID NO: 945653 - RNA, 19 nt, Artificial Sequence
  Description of Artificial Sequence: Synthetic oligonucleotide
ugcccuuauccuguuccac

SEQ ID NO: 945654 - RNA, 19 nt, Artificial Sequence
  Description of Artificial Sequence: Synthetic oligonucleotide
gaagaccuaaaaugagcuu

SEQ ID NO: 945655 - RNA, 19 nt, Artificial Sequence
  Description of Artificial Sequence: Synthetic oligonucleotide
aucaggaaagugggcauuu

SEQ ID NO: 945656 - RNA, 19 nt, Artificial Sequence
  Description of Artificial Sequence: Synthetic oligonucleotide
caagcuacuaaagcagaua

SEQ ID NO: 945657 - RNA, 19 nt, Artificial Sequence
  Description of Artificial Sequence: Synthetic oligonucleotide
gcccuguuacagcaguugc

SEQ ID NO: 945658 - RNA, 19 nt, Artificial Sequence
  Description of Artificial Sequence: Synthetic oligonucleotide
gcaguggucugugccaccg

SEQ ID NO: 945659 - RNA, 19 nt, Artificial Sequence
  Description of Artificial Sequence: Synthetic oligonucleotide
guagaaugaaauaguguuu

SEQ ID NO: 945660 - RNA, 19 nt, Artificial Sequence
  Description of Artificial Sequence: Synthetic oligonucleotide
ucccuacaaugcacuuaca

SEQ ID NO: 945661 - RNA, 19 nt, Artificial Sequence
  Description of Artificial Sequence: Synthetic oligonucleotide
ugaauccaaccguguguuu

SEQ ID NO: 945662 - RNA, 19 nt, Artificial Sequence
  Description of Artificial Sequence: Synthetic oligonucleotide
auugggccacauaaggaua

SEQ ID NO: 945663 - RNA, 19 nt, Artificial Sequence
  Description of Artificial Sequence: Synthetic oligonucleotide
guauuagguuuggucagaa

SEQ ID NO: 945664 - RNA, 19 nt, Artificial Sequence
  Description of Artificial Sequence: Synthetic oligonucleotide
cacuuuagcuugcugaauu

SEQ ID NO: 945665 - RNA, 19 nt, Artificial Sequence
  Description of Artificial Sequence: Synthetic oligonucleotide
accguucccugugagugga

SEQ ID NO: 945666 - RNA, 19 nt, Artificial Sequence
  Description of Artificial Sequence: Synthetic oligonucleotide
gccauugagaccauaucaa

SEQ ID NO: 945667 - RNA, 19 nt, Artificial Sequence
  Description of Artificial Sequence: Synthetic oligonucleotide
gcagagcgaguuaagcccc

SEQ ID NO: 945668 - RNA, 19 nt, Artificial Sequence
  Description of Artificial Sequence: Synthetic oligonucleotide
gguccaugcauacccggga

SEQ ID NO: 945669 - RNA, 19 nt, Artificial Sequence
  Description of Artificial Sequence: Synthetic oligonucleotide
ccaccguucccugugagug

SEQ ID NO: 945670 - RNA, 19 nt, Artificial Sequence
  Description of Artificial Sequence: Synthetic oligonucleotide
gcgaagucguugaauagca

SEQ ID NO: 945671 - RNA, 19 nt, Artificial Sequence
  Description of Artificial Sequence: Synthetic oligonucleotide
cuccugcucuucucgauaa

SEQ ID NO: 945672 - RNA, 19 nt, Artificial Sequence
  Description of Artificial Sequence: Synthetic oligonucleotide
acguagcuguuucuuuauu

SEQ ID NO: 945673 - RNA, 19 nt, Artificial Sequence
  Description of Artificial Sequence: Synthetic oligonucleotide
gaaccguggugcccuuauc

SEQ ID NO: 945674 - RNA, 19 nt, Artificial Sequence
  Description of Artificial Sequence: Synthetic oligonucleotide
gaccuaucagauucagguu

SEQ ID NO: 945675 - RNA, 19 nt, Artificial Sequence
  Description of Artificial Sequence: Synthetic oligonucleotide
caucaucaauaggaagaca

SEQ ID NO: 945676 - RNA, 19 nt, Artificial Sequence
  Description of Artificial Sequence: Synthetic oligonucleotide
ucucugccgucguuccaaa

SEQ ID NO: 945677 - RNA, 19 nt, Artificial Sequence
  Description of Artificial Sequence: Synthetic oligonucleotide
ccgaccuaucagauucagg

SEQ ID NO: 945678 - RNA, 19 nt, Artificial Sequence
  Description of Artificial Sequence: Synthetic oligonucleotide
caggaaagugggcauuucu

SEQ ID NO: 945679 - RNA, 19 nt, Artificial Sequence
  Description of Artificial Sequence: Synthetic oligonucleotide
ccgucguuccaaacugugc

SEQ ID NO: 945680 - RNA, 19 nt, Artificial Sequence
  Description of Artificial Sequence: Synthetic oligonucleotide
cuucugaauccaaccgugu

SEQ ID NO: 945681 - RNA, 19 nt, Artificial Sequence
  Description of Artificial Sequence: Synthetic oligonucleotide
gugcccuuauccuguucca

SEQ ID NO: 945682 - RNA, 19 nt, Artificial Sequence
  Description of Artificial Sequence: Synthetic oligonucleotide
ccucugaacaagugugcuc

SEQ ID NO: 945683 - RNA, 19 nt, Artificial Sequence
  Description of Artificial Sequence: Synthetic oligonucleotide
caaggaccuugaaccucug

SEQ ID NO: 945684 - RNA, 19 nt, Artificial Sequence
  Description of Artificial Sequence: Synthetic oligonucleotide
gagcgaguuaagccccaaa

SEQ ID NO: 945685 - RNA, 19 nt, Artificial Sequence
  Description of Artificial Sequence: Synthetic oligonucleotide
guugacggcaacacacacu

SEQ ID NO: 945686 - RNA, 19 nt, Artificial Sequence
  Description of Artificial Sequence: Synthetic oligonucleotide
gauucagguuggaagcuuu

SEQ ID NO: 945687 - RNA, 19 nt, Artificial Sequence
  Description of Artificial Sequence: Synthetic oligonucleotide
ccauugggccacauaagga

SEQ ID NO: 945688 - RNA, 19 nt, Artificial Sequence
  Description of Artificial Sequence: Synthetic oligonucleotide
cauacccgggaaaccagcu

SEQ ID NO: 945689 - RNA, 19 nt, Artificial Sequence
  Description of Artificial Sequence: Synthetic oligonucleotide
cccuacaaugcacuuacaa

SEQ ID NO: 945690 - RNA, 19 nt, Artificial Sequence
  Description of Artificial Sequence: Synthetic oligonucleotide
cucugccgucguuccaaac

SEQ ID NO: 945691 - RNA, 19 nt, Artificial Sequence
  Description of Artificial Sequence: Synthetic oligonucleotide
cauauaucucugccgucgu

SEQ ID NO: 945692 - RNA, 19 nt, Artificial Sequence
  Description of Artificial Sequence: Synthetic oligonucleotide
ccauaucaagacuucguua

SEQ ID NO: 945693 - RNA, 19 nt, Artificial Sequence
  Description of Artificial Sequence: Synthetic oligonucleotide
caguugcgugaacagugga

SEQ ID NO: 945694 - RNA, 19 nt, Artificial Sequence
  Description of Artificial Sequence: Synthetic oligonucleotide
gucguccaauugcuuucac

SEQ ID NO: 945695 - RNA, 19 nt, Artificial Sequence
  Description of Artificial Sequence: Synthetic oligonucleotide
uuagaaccguggugcccuu

SEQ ID NO: 945696 - RNA, 19 nt, Artificial Sequence
  Description of Artificial Sequence: Synthetic oligonucleotide
gacuguguucuaaguucaa

SEQ ID NO: 945697 - RNA, 19 nt, Artificial Sequence
  Description of Artificial Sequence: Synthetic oligonucleotide
cacuuagucaagggaaccu

SEQ ID NO: 945698 - RNA, 19 nt, Artificial Sequence
  Description of Artificial Sequence: Synthetic oligonucleotide
gaaccucugucguccaauu

SEQ ID NO: 945699 - RNA, 19 nt, Artificial Sequence
  Description of Artificial Sequence: Synthetic oligonucleotide
gcauacccgggaaaccagc

SEQ ID NO: 945700 - RNA, 19 nt, Artificial Sequence
  Description of Artificial Sequence: Synthetic oligonucleotide
caaacgcugaaaccacuau

SEQ ID NO: 945701 - RNA, 19 nt, Artificial Sequence
  Description of Artificial Sequence: Synthetic oligonucleotide
caagugugcucuugaaguu

SEQ ID NO: 945702 - RNA, 19 nt, Artificial Sequence
  Description of Artificial Sequence: Synthetic oligonucleotide
ggauucacauacgcugcca

SEQ ID NO: 945703 - RNA, 19 nt, Artificial Sequence
  Description of Artificial Sequence: Synthetic oligonucleotide
gcacuuauugagugauucu

SEQ ID NO: 945704 - RNA, 19 nt, Artificial Sequence
  Description of Artificial Sequence: Synthetic oligonucleotide
gaaggccgaccuaucagau

SEQ ID NO: 945705 - RNA, 19 nt, Artificial Sequence
  Description of Artificial Sequence: Synthetic oligonucleotide
cuggcacuuauugagugau

SEQ ID NO: 945706 - RNA, 19 nt, Artificial Sequence
  Description of Artificial Sequence: Synthetic oligonucleotide
guaccaaggagagcauggu

SEQ ID NO: 945707 - RNA, 19 nt, Artificial Sequence
  Description of Artificial Sequence: Synthetic oligonucleotide
gccgucguuccaaacugug

SEQ ID NO: 945708 - RNA, 19 nt, Artificial Sequence
  Description of Artificial Sequence: Synthetic oligonucleotide
acccgggaaaccagcugug

SEQ ID NO: 945709 - RNA, 19 nt, Artificial Sequence
  Description of Artificial Sequence: Synthetic oligonucleotide
cagagcgaguuaagcccca

SEQ ID NO: 945710 - RNA, 19 nt, Artificial Sequence
  Description of Artificial Sequence: Synthetic oligonucleotide
auccaaccguguguuuuau

SEQ ID NO: 945711 - RNA, 19 nt, Artificial Sequence
  Description of Artificial Sequence: Synthetic oligonucleotide
ccguggugcccuuauccug

SEQ ID NO: 945712 - RNA, 19 nt, Artificial Sequence
  Description of Artificial Sequence: Synthetic oligonucleotide
gccgaccuaucagauucag

SEQ ID NO: 945713 - RNA, 19 nt, Artificial Sequence
  Description of Artificial Sequence: Synthetic oligonucleotide
cacguagcuguuucuuuau

SEQ ID NO: 945714 - RNA, 19 nt, Artificial Sequence
  Description of Artificial Sequence: Synthetic oligonucleotide
agagcgaguuaagccccaa

SEQ ID NO: 945715 - RNA, 19 nt, Artificial Sequence
  Description of Artificial Sequence: Synthetic oligonucleotide
cggcaacacacacucuggc

SEQ ID NO: 945716 - RNA, 19 nt, Artificial Sequence
  Description of Artificial Sequence: Synthetic oligonucleotide
cgaguuaagccccaaaauu

SEQ ID NO: 945717 - RNA, 19 nt, Artificial Sequence
  Description of Artificial Sequence: Synthetic oligonucleotide
uagaaccguggugcccuua

SEQ ID NO: 945718 - RNA, 19 nt, Artificial Sequence
  Description of Artificial Sequence: Synthetic oligonucleotide
cgucguuccaaacugugcu

SEQ ID NO: 945719 - RNA, 19 nt, Artificial Sequence
  Description of Artificial Sequence: Synthetic oligonucleotide
cacagcgaagucguugaau

SEQ ID NO: 945720 - RNA, 19 nt, Artificial Sequence
  Description of Artificial Sequence: Synthetic oligonucleotide
ccucugucguccaauugcu

SEQ ID NO: 945721 - RNA, 19 nt, Artificial Sequence
  Description of Artificial Sequence: Synthetic oligonucleotide
agacuucguuauagaugua

SEQ ID NO: 945722 - RNA, 19 nt, Artificial Sequence
  Description of Artificial Sequence: Synthetic oligonucleotide
cugguauuucugccaccau

SEQ ID NO: 945723 - RNA, 19 nt, Artificial Sequence
  Description of Artificial Sequence: Synthetic oligonucleotide
ccgggaaaccagcugugua

SEQ ID NO: 945724 - RNA, 19 nt, Artificial Sequence
  Description of Artificial Sequence: Synthetic oligonucleotide
cccucucaaugacacauau

SEQ ID NO: 945725 - RNA, 19 nt, Artificial Sequence
  Description of Artificial Sequence: Synthetic oligonucleotide
ccaauauggcuugcacaaa

SEQ ID NO: 945726 - RNA, 19 nt, Artificial Sequence
  Description of Artificial Sequence: Synthetic oligonucleotide
ggccgaccuaucagauuca

SEQ ID NO: 945727 - RNA, 19 nt, Artificial Sequence
  Description of Artificial Sequence: Synthetic oligonucleotide
gcccucucaaugacacaua

SEQ ID NO: 945728 - RNA, 19 nt, Artificial Sequence
  Description of Artificial Sequence: Synthetic oligonucleotide
gcgaggccaugaagucaga

SEQ ID NO: 945729 - RNA, 19 nt, Artificial Sequence
  Description of Artificial Sequence: Synthetic oligonucleotide
uuuaauucaauucugaagu

SEQ ID NO: 945730 - RNA, 19 nt, Artificial Sequence
  Description of Artificial Sequence: Synthetic oligonucleotide
uuuguguugucauugaugg

SEQ ID NO: 945731 - RNA, 19 nt, Artificial Sequence
  Description of Artificial Sequence: Synthetic oligonucleotide
aaugacauuauuaugacca

SEQ ID NO: 945732 - RNA, 19 nt, Artificial Sequence
  Description of Artificial Sequence: Synthetic oligonucleotide
auuauuaugaccaaggugu

SEQ ID NO: 945733 - RNA, 19 nt, Artificial Sequence
  Description of Artificial Sequence: Synthetic oligonucleotide
uuagaggccaaucaaaugu

SEQ ID NO: 945734 - RNA, 19 nt, Artificial Sequence
  Description of Artificial Sequence: Synthetic oligonucleotide
ugucauggcaacuagaaca

SEQ ID NO: 945735 - RNA, 19 nt, Artificial Sequence
  Description of Artificial Sequence: Synthetic oligonucleotide
ucuaacuuuccuaaacagg

SEQ ID NO: 945736 - RNA, 19 nt, Artificial Sequence
  Description of Artificial Sequence: Synthetic oligonucleotide
agcgacuuucauuaaaccc

SEQ ID NO: 945737 - RNA, 19 nt, Artificial Sequence
  Description of Artificial Sequence: Synthetic oligonucleotide
uuccuaagugccaacaacg

SEQ ID NO: 945738 - RNA, 19 nt, Artificial Sequence
  Description of Artificial Sequence: Synthetic oligonucleotide
uauuuacugaaccuggggc

SEQ ID NO: 945739 - RNA, 19 nt, Artificial Sequence
  Description of Artificial Sequence: Synthetic oligonucleotide
cuuaccaacagacuguugc

SEQ ID NO: 945740 - RNA, 19 nt, Artificial Sequence
  Description of Artificial Sequence: Synthetic oligonucleotide
uucaaguaagaauuagagg

SEQ ID NO: 945741 - RNA, 19 nt, Artificial Sequence
  Description of Artificial Sequence: Synthetic oligonucleotide
agaggcuuaacccuuuggc

SEQ ID NO: 945742 - RNA, 19 nt, Artificial Sequence
  Description of Artificial Sequence: Synthetic oligonucleotide
ugaacaugaaaaccgauaa

SEQ ID NO: 945743 - RNA, 19 nt, Artificial Sequence
  Description of Artificial Sequence: Synthetic oligonucleotide
agagcuucgaagaaggacc

SEQ ID NO: 945744 - RNA, 19 nt, Artificial Sequence
  Description of Artificial Sequence: Synthetic oligonucleotide
gaaaguguuggucaggcug

SEQ ID NO: 945745 - RNA, 19 nt, Artificial Sequence
  Description of Artificial Sequence: Synthetic oligonucleotide
uuuguccugaacaugaaaa

SEQ ID NO: 945746 - RNA, 19 nt, Artificial Sequence
  Description of Artificial Sequence: Synthetic oligonucleotide
ucaccuuaccaacagacug

SEQ ID NO: 945747 - RNA, 19 nt, Artificial Sequence
  Description of Artificial Sequence: Synthetic oligonucleotide
cuaagugccaacaacggac

SEQ ID NO: 945748 - RNA, 19 nt, Artificial Sequence
  Description of Artificial Sequence: Synthetic oligonucleotide
ugaacguucagaaaauaaa

SEQ ID NO: 945749 - RNA, 19 nt, Artificial Sequence
  Description of Artificial Sequence: Synthetic oligonucleotide
accgauaacaaauuuaaau

SEQ ID NO: 945750 - RNA, 19 nt, Artificial Sequence
  Description of Artificial Sequence: Synthetic oligonucleotide
ucaaauagaggugauugag

SEQ ID NO: 945751 - RNA, 19 nt, Artificial Sequence
  Description of Artificial Sequence: Synthetic oligonucleotide
accaauuuuagauuuacau

SEQ ID NO: 945752 - RNA, 19 nt, Artificial Sequence
  Description of Artificial Sequence: Synthetic oligonucleotide
uauauaauggggcagcauu

SEQ ID NO: 945753 - RNA, 19 nt, Artificial Sequence
  Description of Artificial Sequence: Synthetic oligonucleotide
uguuauuuguaguuuuccc

SEQ ID NO: 945754 - RNA, 19 nt, Artificial Sequence
  Description of Artificial Sequence: Synthetic oligonucleotide
aagagcuucgaagaaggac

SEQ ID NO: 945755 - RNA, 19 nt, Artificial Sequence
  Description of Artificial Sequence: Synthetic oligonucleotide
gucgauuucaaauagaggu

SEQ ID NO: 945756 - RNA, 19 nt, Artificial Sequence
  Description of Artificial Sequence: Synthetic oligonucleotide
auuaaacccaucaucagag

SEQ ID NO: 945757 - RNA, 19 nt, Artificial Sequence
  Description of Artificial Sequence: Synthetic oligonucleotide
uuaaacaacccuccggacu

SEQ ID NO: 945758 - RNA, 19 nt, Artificial Sequence
  Description of Artificial Sequence: Synthetic oligonucleotide
gugaaaguacaauaaagac

SEQ ID NO: 945759 - RNA, 19 nt, Artificial Sequence
  Description of Artificial Sequence: Synthetic oligonucleotide
ugugcgucgaugcugacga

SEQ ID NO: 945760 - RNA, 19 nt, Artificial Sequence
  Description of Artificial Sequence: Synthetic oligonucleotide
gugaauuugggaucaacag

SEQ ID NO: 945761 - RNA, 19 nt, Artificial Sequence
  Description of Artificial Sequence: Synthetic oligonucleotide
guugcaaggauagucaucc

SEQ ID NO: 945762 - RNA, 19 nt, Artificial Sequence
  Description of Artificial Sequence: Synthetic oligonucleotide
ugucgauuucaaauagagg

SEQ ID NO: 945763 - RNA, 19 nt, Artificial Sequence
  Description of Artificial Sequence: Synthetic oligonucleotide
acauaagucaugaacguuc

SEQ ID NO: 945764 - RNA, 19 nt, Artificial Sequence
  Description of Artificial Sequence: Synthetic oligonucleotide
aacaacggacauacuaugc

SEQ ID NO: 945765 - RNA, 19 nt, Artificial Sequence
  Description of Artificial Sequence: Synthetic oligonucleotide
auaugcaaagcagagcgac

SEQ ID NO: 945766 - RNA, 19 nt, Artificial Sequence
  Description of Artificial Sequence: Synthetic oligonucleotide
aacccaaaauacuggcuuc

SEQ ID NO: 945767 - RNA, 19 nt, Artificial Sequence
  Description of Artificial Sequence: Synthetic oligonucleotide
ucgauuucaaauagaggug

SEQ ID NO: 945768 - RNA, 19 nt, Artificial Sequence
  Description of Artificial Sequence: Synthetic oligonucleotide
gacauugaagaccagggca

SEQ ID NO: 945769 - RNA, 19 nt, Artificial Sequence
  Description of Artificial Sequence: Synthetic oligonucleotide
aaaccgauaacaaauuuaa

SEQ ID NO: 945770 - RNA, 19 nt, Artificial Sequence
  Description of Artificial Sequence: Synthetic oligonucleotide
cauuauuaugaccaaggug

SEQ ID NO: 945771 - RNA, 19 nt, Artificial Sequence
  Description of Artificial Sequence: Synthetic oligonucleotide
ugcaaggauagucauccag

SEQ ID NO: 945772 - RNA, 19 nt, Artificial Sequence
  Description of Artificial Sequence: Synthetic oligonucleotide
aaacuuuacggggaaagug

SEQ ID NO: 945773 - RNA, 19 nt, Artificial Sequence
  Description of Artificial Sequence: Synthetic oligonucleotide
aaaacccuagugcugacau

SEQ ID NO: 945774 - RNA, 19 nt, Artificial Sequence
  Description of Artificial Sequence: Synthetic oligonucleotide
uccuaagugccaacaacgg

SEQ ID NO: 945775 - RNA, 19 nt, Artificial Sequence
  Description of Artificial Sequence: Synthetic oligonucleotide
augcugacgaaguagcccg

SEQ ID NO: 945776 - RNA, 19 nt, Artificial Sequence
  Description of Artificial Sequence: Synthetic oligonucleotide
uccuaaacagguuuucccc

SEQ ID NO: 945777 - RNA, 19 nt, Artificial Sequence
  Description of Artificial Sequence: Synthetic oligonucleotide
aacggacauacuaugcagc

SEQ ID NO: 945778 - RNA, 19 nt, Artificial Sequence
  Description of Artificial Sequence: Synthetic oligonucleotide
aggaccuauauaauggggc

SEQ ID NO: 945779 - RNA, 19 nt, Artificial Sequence
  Description of Artificial Sequence: Synthetic oligonucleotide
ucuaagugucaauauaaaa

SEQ ID NO: 945780 - RNA, 19 nt, Artificial Sequence
  Description of Artificial Sequence: Synthetic oligonucleotide
auugcaagccauccaagag

SEQ ID NO: 945781 - RNA, 19 nt, Artificial Sequence
  Description of Artificial Sequence: Synthetic oligonucleotide
augguggacauccuauuac

SEQ ID NO: 945782 - RNA, 19 nt, Artificial Sequence
  Description of Artificial Sequence: Synthetic oligonucleotide
auagauuccuuuauuaucu

SEQ ID NO: 945783 - RNA, 19 nt, Artificial Sequence
  Description of Artificial Sequence: Synthetic oligonucleotide
gaacuuguaugucccaucc

SEQ ID NO: 945784 - RNA, 19 nt, Artificial Sequence
  Description of Artificial Sequence: Synthetic oligonucleotide
aacccuagugcugacauug

SEQ ID NO: 945785 - RNA, 19 nt, Artificial Sequence
  Description of Artificial Sequence: Synthetic oligonucleotide
uugccuaucauugcaagcc

SEQ ID NO: 945786 - RNA, 19 nt, Artificial Sequence
  Description of Artificial Sequence: Synthetic oligonucleotide
ugacuaaauggacaaaaua

SEQ ID NO: 945787 - RNA, 19 nt, Artificial Sequence
  Description of Artificial Sequence: Synthetic oligonucleotide
auuuacugaaccuggggca

SEQ ID NO: 945788 - RNA, 19 nt, Artificial Sequence
  Description of Artificial Sequence: Synthetic oligonucleotide
ugcccuauggugaaaguca

SEQ ID NO: 945789 - RNA, 19 nt, Artificial Sequence
  Description of Artificial Sequence: Synthetic oligonucleotide
uuccuaaacagguuuuccc

SEQ ID NO: 945790 - RNA, 19 nt, Artificial Sequence
  Description of Artificial Sequence: Synthetic oligonucleotide
acauccuauuacuaaagca

SEQ ID NO: 945791 - RNA, 19 nt, Artificial Sequence
  Description of Artificial Sequence: Synthetic oligonucleotide
ugacgaaguagcccgacgc

SEQ ID NO: 945792 - RNA, 19 nt, Artificial Sequence
  Description of Artificial Sequence: Synthetic oligonucleotide
aacuuuccuaaacagguuu

SEQ ID NO: 945793 - RNA, 19 nt, Artificial Sequence
  Description of Artificial Sequence: Synthetic oligonucleotide
uccuguucgugcuuuacag

SEQ ID NO: 945794 - RNA, 19 nt, Artificial Sequence
  Description of Artificial Sequence: Synthetic oligonucleotide
aaggccuuuuaaacaaccc

SEQ ID NO: 945795 - RNA, 19 nt, Artificial Sequence
  Description of Artificial Sequence: Synthetic oligonucleotide
aguagcccgacgcuguggc

SEQ ID NO: 945796 - RNA, 19 nt, Artificial Sequence
  Description of Artificial Sequence: Synthetic oligonucleotide
agugguugccuaucauugc

SEQ ID NO: 945797 - RNA, 19 nt, Artificial Sequence
  Description of Artificial Sequence: Synthetic oligonucleotide
uuauuaucugguccuguga

SEQ ID NO: 945798 - RNA, 19 nt, Artificial Sequence
  Description of Artificial Sequence: Synthetic oligonucleotide
aaugucauggcaacuagaa

SEQ ID NO: 945799 - RNA, 19 nt, Artificial Sequence
  Description of Artificial Sequence: Synthetic oligonucleotide
accuauauaauggggcagc

SEQ ID NO: 945800 - RNA, 19 nt, Artificial Sequence
  Description of Artificial Sequence: Synthetic oligonucleotide
ugauugaguucuaaguguc

SEQ ID NO: 945801 - RNA, 19 nt, Artificial Sequence
  Description of Artificial Sequence: Synthetic oligonucleotide
guacaauaaagacccauac

SEQ ID NO: 945802 - RNA, 19 nt, Artificial Sequence
  Description of Artificial Sequence: Synthetic oligonucleotide
aaauagugguugccuauca

SEQ ID NO: 945803 - RNA, 19 nt, Artificial Sequence
  Description of Artificial Sequence: Synthetic oligonucleotide
aaauuggcaugcaacagcu

SEQ ID NO: 945804 - RNA, 19 nt, Artificial Sequence
  Description of Artificial Sequence: Synthetic oligonucleotide
agcagagcgacuuucauua

SEQ ID NO: 945805 - RNA, 19 nt, Artificial Sequence
  Description of Artificial Sequence: Synthetic oligonucleotide
uccgcgagcgucaccaugg

SEQ ID NO: 945806 - RNA, 19 nt, Artificial Sequence
  Description of Artificial Sequence: Synthetic oligonucleotide
uguccugaacaugaaaacc

SEQ ID NO: 945807 - RNA, 19 nt, Artificial Sequence
  Description of Artificial Sequence: Synthetic oligonucleotide
aguagaucugucccaaugu

SEQ ID NO: 945808 - RNA, 19 nt, Artificial Sequence
  Description of Artificial Sequence: Synthetic oligonucleotide
gaauugugaauuugggauc

SEQ ID NO: 945809 - RNA, 19 nt, Artificial Sequence
  Description of Artificial Sequence: Synthetic oligonucleotide
aacuuuacggggaaagugu

SEQ ID NO: 945810 - RNA, 19 nt, Artificial Sequence
  Description of Artificial Sequence: Synthetic oligonucleotide
auuagaggccaaucaaaug

SEQ ID NO: 945811 - RNA, 19 nt, Artificial Sequence
  Description of Artificial Sequence: Synthetic oligonucleotide
acauuacuaucuuuggagu

SEQ ID NO: 945812 - RNA, 19 nt, Artificial Sequence
  Description of Artificial Sequence: Synthetic oligonucleotide
aaaaccgauaacaaauuua

SEQ ID NO: 945813 - RNA, 19 nt, Artificial Sequence
  Description of Artificial Sequence: Synthetic oligonucleotide
ucugaugagcuucugucuc

SEQ ID NO: 945814 - RNA, 19 nt, Artificial Sequence
  Description of Artificial Sequence: Synthetic oligonucleotide
ucgauguccaggaaaccgc

SEQ ID NO: 945815 - RNA, 19 nt, Artificial Sequence
  Description of Artificial Sequence: Synthetic oligonucleotide
agagcgacuuucauuaaac

SEQ ID NO: 945816 - RNA, 19 nt, Artificial Sequence
  Description of Artificial Sequence: Synthetic oligonucleotide
aauuucgcucuuccuaagu

SEQ ID NO: 945817 - RNA, 19 nt, Artificial Sequence
  Description of Artificial Sequence: Synthetic oligonucleotide
acaacggacauacuaugca

SEQ ID NO: 945818 - RNA, 19 nt, Artificial Sequence
  Description of Artificial Sequence: Synthetic oligonucleotide
agacccauacagcaucaac

SEQ ID NO: 945819 - RNA, 19 nt, Artificial Sequence
  Description of Artificial Sequence: Synthetic oligonucleotide
cagguaguagaucuguccc

SEQ ID NO: 945820 - RNA, 19 nt, Artificial Sequence
  Description of Artificial Sequence: Synthetic oligonucleotide
aaggaccuauauaaugggg

SEQ ID NO: 945821 - RNA, 19 nt, Artificial Sequence
  Description of Artificial Sequence: Synthetic oligonucleotide
gaggugauugaguucuaag

SEQ ID NO: 945822 - RNA, 19 nt, Artificial Sequence
  Description of Artificial Sequence: Synthetic oligonucleotide
gugucgauuucaaauagag

SEQ ID NO: 945823 - RNA, 19 nt, Artificial Sequence
  Description of Artificial Sequence: Synthetic oligonucleotide
uuccccaacaccaauuaau

SEQ ID NO: 945824 - RNA, 19 nt, Artificial Sequence
  Description of Artificial Sequence: Synthetic oligonucleotide
gauacacaaccaauuuuag

SEQ ID NO: 945825 - RNA, 19 nt, Artificial Sequence
  Description of Artificial Sequence: Synthetic oligonucleotide
guaucaacuaaugacauua

SEQ ID NO: 945826 - RNA, 19 nt, Artificial Sequence
  Description of Artificial Sequence: Synthetic oligonucleotide
ugaccaagguguuugguaa

SEQ ID NO: 945827 - RNA, 19 nt, Artificial Sequence
  Description of Artificial Sequence: Synthetic oligonucleotide
auauaauggggcagcauuc

SEQ ID NO: 945828 - RNA, 19 nt, Artificial Sequence
  Description of Artificial Sequence: Synthetic oligonucleotide
ucugcgugugcgucgaugc

SEQ ID NO: 945829 - RNA, 19 nt, Artificial Sequence
  Description of Artificial Sequence: Synthetic oligonucleotide
uccuuuauagauuccuuua

SEQ ID NO: 945830 - RNA, 19 nt, Artificial Sequence
  Description of Artificial Sequence: Synthetic oligonucleotide
uuguccugaacaugaaaac

SEQ ID NO: 945831 - RNA, 19 nt, Artificial Sequence
  Description of Artificial Sequence: Synthetic oligonucleotide
uaguuuuccccuugcaaga

SEQ ID NO: 945832 - RNA, 19 nt, Artificial Sequence
  Description of Artificial Sequence: Synthetic oligonucleotide
cuaucauugcaagccaucc

SEQ ID NO: 945833 - RNA, 19 nt, Artificial Sequence
  Description of Artificial Sequence: Synthetic oligonucleotide
uggacauccuauuacuaaa

SEQ ID NO: 945834 - RNA, 19 nt, Artificial Sequence
  Description of Artificial Sequence: Synthetic oligonucleotide
auacacaaccaauuuuaga

SEQ ID NO: 945835 - RNA, 19 nt, Artificial Sequence
  Description of Artificial Sequence: Synthetic oligonucleotide
ugacauuauuaugaccaag

SEQ ID NO: 945836 - RNA, 19 nt, Artificial Sequence
  Description of Artificial Sequence: Synthetic oligonucleotide
cauuacuaucuuuggaguc

SEQ ID NO: 945837 - RNA, 19 nt, Artificial Sequence
  Description of Artificial Sequence: Synthetic oligonucleotide
aauagugguugccuaucau

SEQ ID NO: 945838 - RNA, 19 nt, Artificial Sequence
  Description of Artificial Sequence: Synthetic oligonucleotide
caacggacauacuaugcag

SEQ ID NO: 945839 - RNA, 19 nt, Artificial Sequence
  Description of Artificial Sequence: Synthetic oligonucleotide
agcgucaccauggugcggc

SEQ ID NO: 945840 - RNA, 19 nt, Artificial Sequence
  Description of Artificial Sequence: Synthetic oligonucleotide
uguaugucccauccaugug

SEQ ID NO: 945841 - RNA, 19 nt, Artificial Sequence
  Description of Artificial Sequence: Synthetic oligonucleotide
gaacaugaaaaccgauaac

SEQ ID NO: 945842 - RNA, 19 nt, Artificial Sequence
  Description of Artificial Sequence: Synthetic oligonucleotide
ugucaaauuuucacucuaa

SEQ ID NO: 945843 - RNA, 19 nt, Artificial Sequence
  Description of Artificial Sequence: Synthetic oligonucleotide
ucaugaacguucagaaaau

SEQ ID NO: 945844 - RNA, 19 nt, Artificial Sequence
  Description of Artificial Sequence: Synthetic oligonucleotide
auacuaugcagcacaaaag

SEQ ID NO: 945845 - RNA, 19 nt, Artificial Sequence
  Description of Artificial Sequence: Synthetic oligonucleotide
agugacuaaauggacaaaa

SEQ ID NO: 945846 - RNA, 19 nt, Artificial Sequence
  Description of Artificial Sequence: Synthetic oligonucleotide
ugcgaagguauauuuccca

SEQ ID NO: 945847 - RNA, 19 nt, Artificial Sequence
  Description of Artificial Sequence: Synthetic oligonucleotide
gaacguucagaaaauaaaa

SEQ ID NO: 945848 - RNA, 19 nt, Artificial Sequence
  Description of Artificial Sequence: Synthetic oligonucleotide
ugaguucuaagugucaaua

SEQ ID NO: 945849 - RNA, 19 nt, Artificial Sequence
  Description of Artificial Sequence: Synthetic oligonucleotide
aaaguguuggucaggcugu

SEQ ID NO: 945850 - RNA, 19 nt, Artificial Sequence
  Description of Artificial Sequence: Synthetic oligonucleotide
cuuccuaagugccaacaac

SEQ ID NO: 945851 - RNA, 19 nt, Artificial Sequence
  Description of Artificial Sequence: Synthetic oligonucleotide
cacucuaacuuuccuaaac

SEQ ID NO: 945852 - RNA, 19 nt, Artificial Sequence
  Description of Artificial Sequence: Synthetic oligonucleotide
ugguccugugaucuccacg

SEQ ID NO: 945853 - RNA, 19 nt, Artificial Sequence
  Description of Artificial Sequence: Synthetic oligonucleotide
guauauuucccacuggacu

SEQ ID NO: 945854 - RNA, 19 nt, Artificial Sequence
  Description of Artificial Sequence: Synthetic oligonucleotide
ucuuggaaggaccuauaua

SEQ ID NO: 945855 - RNA, 19 nt, Artificial Sequence
  Description of Artificial Sequence: Synthetic oligonucleotide
uauaauggggcagcauuca

SEQ ID NO: 945856 - RNA, 19 nt, Artificial Sequence
  Description of Artificial Sequence: Synthetic oligonucleotide
agaguagucuguuccaaaa

SEQ ID NO: 945857 - RNA, 19 nt, Artificial Sequence
  Description of Artificial Sequence: Synthetic oligonucleotide
auggcaacuagaacaagag

SEQ ID NO: 945858 - RNA, 19 nt, Artificial Sequence
  Description of Artificial Sequence: Synthetic oligonucleotide
gaggcuuaacccuuuggca

SEQ ID NO: 945859 - RNA, 19 nt, Artificial Sequence
  Description of Artificial Sequence: Synthetic oligonucleotide
ggugaaaguacaauaaaga

SEQ ID NO: 945860 - RNA, 19 nt, Artificial Sequence
  Description of Artificial Sequence: Synthetic oligonucleotide
agaaggaccaaaggaccac

SEQ ID NO: 945861 - RNA, 19 nt, Artificial Sequence
  Description of Artificial Sequence: Synthetic oligonucleotide
ugguggacauccuauuacu

SEQ ID NO: 945862 - RNA, 19 nt, Artificial Sequence
  Description of Artificial Sequence: Synthetic oligonucleotide
uaugcaaagcagagcgacu

SEQ ID NO: 945863 - RNA, 19 nt, Artificial Sequence
  Description of Artificial Sequence: Synthetic oligonucleotide
aacccuccggacuucaaaa

SEQ ID NO: 945864 - RNA, 19 nt, Artificial Sequence
  Description of Artificial Sequence: Synthetic oligonucleotide
uggggcauauuagauacac

SEQ ID NO: 945865 - RNA, 19 nt, Artificial Sequence
  Description of Artificial Sequence: Synthetic oligonucleotide
auagugguugccuaucauu

SEQ ID NO: 945866 - RNA, 19 nt, Artificial Sequence
  Description of Artificial Sequence: Synthetic oligonucleotide
ggagucaugguggacaucc

SEQ ID NO: 945867 - RNA, 19 nt, Artificial Sequence
  Description of Artificial Sequence: Synthetic oligonucleotide
aggcuuaacccuuuggcau

SEQ ID NO: 945868 - RNA, 19 nt, Artificial Sequence
  Description of Artificial Sequence: Synthetic oligonucleotide
acaaaauagugguugccua

SEQ ID NO: 945869 - RNA, 19 nt, Artificial Sequence
  Description of Artificial Sequence: Synthetic oligonucleotide
acgucgauguccaggaaac

SEQ ID NO: 945870 - RNA, 19 nt, Artificial Sequence
  Description of Artificial Sequence: Synthetic oligonucleotide
gagcgacuuucauuaaacc

SEQ ID NO: 945871 - RNA, 19 nt, Artificial Sequence
  Description of Artificial Sequence: Synthetic oligonucleotide
caacaacggacauacuaug

SEQ ID NO: 945872 - RNA, 19 nt, Artificial Sequence
  Description of Artificial Sequence: Synthetic oligonucleotide
cuuguaugucccauccaug

SEQ ID NO: 945873 - RNA, 19 nt, Artificial Sequence
  Description of Artificial Sequence: Synthetic oligonucleotide
uggugaaagucaccuuacc

SEQ ID NO: 945874 - RNA, 19 nt, Artificial Sequence
  Description of Artificial Sequence: Synthetic oligonucleotide
acuguugcaaggauaguca

SEQ ID NO: 945875 - RNA, 19 nt, Artificial Sequence
  Description of Artificial Sequence: Synthetic oligonucleotide
gaccaaaggaccacucugc

SEQ ID NO: 945876 - RNA, 19 nt, Artificial Sequence
  Description of Artificial Sequence: Synthetic oligonucleotide
auuugggaucaacaggaaa

SEQ ID NO: 945877 - RNA, 19 nt, Artificial Sequence
  Description of Artificial Sequence: Synthetic oligonucleotide
ucccgaacuuccauguacu

SEQ ID NO: 945878 - RNA, 19 nt, Artificial Sequence
  Description of Artificial Sequence: Synthetic oligonucleotide
ucgaagaagcacuccucug

SEQ ID NO: 945879 - RNA, 19 nt, Artificial Sequence
  Description of Artificial Sequence: Synthetic oligonucleotide
ccauccaagaggcuuaacc

SEQ ID NO: 945880 - RNA, 19 nt, Artificial Sequence
  Description of Artificial Sequence: Synthetic oligonucleotide
guguuugguaaacaacuga

SEQ ID NO: 945881 - RNA, 19 nt, Artificial Sequence
  Description of Artificial Sequence: Synthetic oligonucleotide
aacuuguuauuuguaguuu

SEQ ID NO: 945882 - RNA, 19 nt, Artificial Sequence
  Description of Artificial Sequence: Synthetic oligonucleotide
aagcagagcgacuuucauu

SEQ ID NO: 945883 - RNA, 19 nt, Artificial Sequence
  Description of Artificial Sequence: Synthetic oligonucleotide
uggaucgcccauaugcaaa

SEQ ID NO: 945884 - RNA, 19 nt, Artificial Sequence
  Description of Artificial Sequence: Synthetic oligonucleotide
accaagguguuugguaaac

SEQ ID NO: 945885 - RNA, 19 nt, Artificial Sequence
  Description of Artificial Sequence: Synthetic oligonucleotide
aacauaagucaugaacguu

SEQ ID NO: 945886 - RNA, 19 nt, Artificial Sequence
  Description of Artificial Sequence: Synthetic oligonucleotide
gaccuauauaauggggcag

SEQ ID NO: 945887 - RNA, 19 nt, Artificial Sequence
  Description of Artificial Sequence: Synthetic oligonucleotide
ccuggggcauauuagauac

SEQ ID NO: 945888 - RNA, 19 nt, Artificial Sequence
  Description of Artificial Sequence: Synthetic oligonucleotide
ugccuaucauugcaagcca

SEQ ID NO: 945889 - RNA, 19 nt, Artificial Sequence
  Description of Artificial Sequence: Synthetic oligonucleotide
aucgcccauaugcaaagca

SEQ ID NO: 945890 - RNA, 19 nt, Artificial Sequence
  Description of Artificial Sequence: Synthetic oligonucleotide
cugcgaagguauauuuccc

SEQ ID NO: 945891 - RNA, 19 nt, Artificial Sequence
  Description of Artificial Sequence: Synthetic oligonucleotide
auaagucaugaacguucag

SEQ ID NO: 945892 - RNA, 19 nt, Artificial Sequence
  Description of Artificial Sequence: Synthetic oligonucleotide
uguaucaacuaaugacauu

SEQ ID NO: 945893 - RNA, 19 nt, Artificial Sequence
  Description of Artificial Sequence: Synthetic oligonucleotide
ugucaauggugaacauuac

SEQ ID NO: 945894 - RNA, 19 nt, Artificial Sequence
  Description of Artificial Sequence: Synthetic oligonucleotide
uauuuguccugaacaugaa

SEQ ID NO: 945895 - RNA, 19 nt, Artificial Sequence
  Description of Artificial Sequence: Synthetic oligonucleotide
cuuuacggggaaaguguug

SEQ ID NO: 945896 - RNA, 19 nt, Artificial Sequence
  Description of Artificial Sequence: Synthetic oligonucleotide
uagcuaccagacaucaguc

SEQ ID NO: 945897 - RNA, 19 nt, Artificial Sequence
  Description of Artificial Sequence: Synthetic oligonucleotide
uccaagaggcuuaacccuu

SEQ ID NO: 945898 - RNA, 19 nt, Artificial Sequence
  Description of Artificial Sequence: Synthetic oligonucleotide
uuuacugaaccuggggcau

SEQ ID NO: 945899 - RNA, 19 nt, Artificial Sequence
  Description of Artificial Sequence: Synthetic oligonucleotide
ugggcuacuuccugaacaa

SEQ ID NO: 945900 - RNA, 19 nt, Artificial Sequence
  Description of Artificial Sequence: Synthetic oligonucleotide
uggacucucgaucuccuuu

SEQ ID NO: 945901 - RNA, 19 nt, Artificial Sequence
  Description of Artificial Sequence: Synthetic oligonucleotide
gugggcuacuuccugaaca

SEQ ID NO: 945902 - RNA, 19 nt, Artificial Sequence
  Description of Artificial Sequence: Synthetic oligonucleotide
cauugcaagccauccaaga

SEQ ID NO: 945903 - RNA, 19 nt, Artificial Sequence
  Description of Artificial Sequence: Synthetic oligonucleotide
ggcaacuagaacaagagcu

SEQ ID NO: 945904 - RNA, 19 nt, Artificial Sequence
  Description of Artificial Sequence: Synthetic oligonucleotide
aggaccaaaggaccacucu

SEQ ID NO: 945905 - RNA, 19 nt, Artificial Sequence
  Description of Artificial Sequence: Synthetic oligonucleotide
augacauuauuaugaccaa

SEQ ID NO: 945906 - RNA, 19 nt, Artificial Sequence
  Description of Artificial Sequence: Synthetic oligonucleotide
augaacguucagaaaauaa

SEQ ID NO: 945907 - RNA, 19 nt, Artificial Sequence
  Description of Artificial Sequence: Synthetic oligonucleotide
agcuaccagacaucaguca

SEQ ID NO: 945908 - RNA, 19 nt, Artificial Sequence
  Description of Artificial Sequence: Synthetic oligonucleotide
agaucugucccaaugucau

SEQ ID NO: 945909 - RNA, 19 nt, Artificial Sequence
  Description of Artificial Sequence: Synthetic oligonucleotide
gcgacuuucauuaaaccca

SEQ ID NO: 945910 - RNA, 19 nt, Artificial Sequence
  Description of Artificial Sequence: Synthetic oligonucleotide
aaguagcccgacgcugugg

SEQ ID NO: 945911 - RNA, 19 nt, Artificial Sequence
  Description of Artificial Sequence: Synthetic oligonucleotide
uauuuguaguuuuccccuu

SEQ ID NO: 945912 - RNA, 19 nt, Artificial Sequence
  Description of Artificial Sequence: Synthetic oligonucleotide
aaagggagaguagucuguu

SEQ ID NO: 945913 - RNA, 19 nt, Artificial Sequence
  Description of Artificial Sequence: Synthetic oligonucleotide
ggaccuauauaauggggca

SEQ ID NO: 945914 - RNA, 19 nt, Artificial Sequence
  Description of Artificial Sequence: Synthetic oligonucleotide
ugguugccuaucauugcaa

SEQ ID NO: 945915 - RNA, 19 nt, Artificial Sequence
  Description of Artificial Sequence: Synthetic oligonucleotide
gcgagcgucaccauggugc

SEQ ID NO: 945916 - RNA, 19 nt, Artificial Sequence
  Description of Artificial Sequence: Synthetic oligonucleotide
gaaaccgcccuccgccacc

SEQ ID NO: 945917 - RNA, 19 nt, Artificial Sequence
  Description of Artificial Sequence: Synthetic oligonucleotide
auugauggcucuguguauu

SEQ ID NO: 945918 - RNA, 19 nt, Artificial Sequence
  Description of Artificial Sequence: Synthetic oligonucleotide
gaaaaccgauaacaaauuu

SEQ ID NO: 945919 - RNA, 19 nt, Artificial Sequence
  Description of Artificial Sequence: Synthetic oligonucleotide
uaugaccaagguguuuggu

SEQ ID NO: 945920 - RNA, 19 nt, Artificial Sequence
  Description of Artificial Sequence: Synthetic oligonucleotide
gauugaguucuaaguguca

SEQ ID NO: 945921 - RNA, 19 nt, Artificial Sequence
  Description of Artificial Sequence: Synthetic oligonucleotide
ugcgugugcgucgaugcug

SEQ ID NO: 945922 - RNA, 19 nt, Artificial Sequence
  Description of Artificial Sequence: Synthetic oligonucleotide
acaucagucaccacauaau

SEQ ID NO: 945923 - RNA, 19 nt, Artificial Sequence
  Description of Artificial Sequence: Synthetic oligonucleotide
cuguucgugcuuuacagcu

SEQ ID NO: 945924 - RNA, 19 nt, Artificial Sequence
  Description of Artificial Sequence: Synthetic oligonucleotide
uugauggcucuguguauuc

SEQ ID NO: 945925 - RNA, 19 nt, Artificial Sequence
  Description of Artificial Sequence: Synthetic oligonucleotide
cauaauccuggaucgccca

SEQ ID NO: 945926 - RNA, 19 nt, Artificial Sequence
  Description of Artificial Sequence: Synthetic oligonucleotide
agguagcuaccagacauca

SEQ ID NO: 945927 - RNA, 19 nt, Artificial Sequence
  Description of Artificial Sequence: Synthetic oligonucleotide
acgaaguagcccgacgcug

SEQ ID NO: 945928 - RNA, 19 nt, Artificial Sequence
  Description of Artificial Sequence: Synthetic oligonucleotide
ggacauccuauuacuaaag

SEQ ID NO: 945929 - RNA, 19 nt, Artificial Sequence
  Description of Artificial Sequence: Synthetic oligonucleotide
aucucuucagguaguagau

SEQ ID NO: 945930 - RNA, 19 nt, Artificial Sequence
  Description of Artificial Sequence: Synthetic oligonucleotide
aaccgauaacaaauuuaaa

SEQ ID NO: 945931 - RNA, 19 nt, Artificial Sequence
  Description of Artificial Sequence: Synthetic oligonucleotide
ucaacugcuugugucgauu

SEQ ID NO: 945932 - RNA, 19 nt, Artificial Sequence
  Description of Artificial Sequence: Synthetic oligonucleotide
uguacuccuguucgugcuu

SEQ ID NO: 945933 - RNA, 19 nt, Artificial Sequence
  Description of Artificial Sequence: Synthetic oligonucleotide
ggcuuaacccuuuggcaug

SEQ ID NO: 945934 - RNA, 19 nt, Artificial Sequence
  Description of Artificial Sequence: Synthetic oligonucleotide
gugacccgcucgaagaagc

SEQ ID NO: 945935 - RNA, 19 nt, Artificial Sequence
  Description of Artificial Sequence: Synthetic oligonucleotide
gcuugugucgauuucaaau

SEQ ID NO: 945936 - RNA, 19 nt, Artificial Sequence
  Description of Artificial Sequence: Synthetic oligonucleotide
gcaauuucgcucuuccuaa

SEQ ID NO: 945937 - RNA, 19 nt, Artificial Sequence
  Description of Artificial Sequence: Synthetic oligonucleotide
agcugcccuauggugaaag

SEQ ID NO: 945938 - RNA, 19 nt, Artificial Sequence
  Description of Artificial Sequence: Synthetic oligonucleotide
auaauccuggaucgcccau

SEQ ID NO: 945939 - RNA, 19 nt, Artificial Sequence
  Description of Artificial Sequence: Synthetic oligonucleotide
aaccuggggcauauuagau

SEQ ID NO: 945940 - RNA, 19 nt, Artificial Sequence
  Description of Artificial Sequence: Synthetic oligonucleotide
uacuaucuuuggagucaug

SEQ ID NO: 945941 - RNA, 19 nt, Artificial Sequence
  Description of Artificial Sequence: Synthetic oligonucleotide
cacaaccaauuuuagauuu

SEQ ID NO: 945942 - RNA, 19 nt, Artificial Sequence
  Description of Artificial Sequence: Synthetic oligonucleotide
guauucucucccgaacuuc

SEQ ID NO: 945943 - RNA, 19 nt, Artificial Sequence
  Description of Artificial Sequence: Synthetic oligonucleotide
cagguagcuaccagacauc

SEQ ID NO: 945944 - RNA, 19 nt, Artificial Sequence
  Description of Artificial Sequence: Synthetic oligonucleotide
ugcaaagcagagcgacuuu

SEQ ID NO: 945945 - RNA, 19 nt, Artificial Sequence
  Description of Artificial Sequence: Synthetic oligonucleotide
ggacaaaauagugguugcc

SEQ ID NO: 945946 - RNA, 19 nt, Artificial Sequence
  Description of Artificial Sequence: Synthetic oligonucleotide
gcgaagguauauuucccac

SEQ ID NO: 945947 - RNA, 19 nt, Artificial Sequence
  Description of Artificial Sequence: Synthetic oligonucleotide
cugcccuauggugaaaguc

SEQ ID NO: 945948 - RNA, 19 nt, Artificial Sequence
  Description of Artificial Sequence: Synthetic oligonucleotide
ggacaaauaaaacccuagu

SEQ ID NO: 945949 - RNA, 19 nt, Artificial Sequence
  Description of Artificial Sequence: Synthetic oligonucleotide
gaggccaaucaaaugucaa

SEQ ID NO: 945950 - RNA, 19 nt, Artificial Sequence
  Description of Artificial Sequence: Synthetic oligonucleotide
ugcugacgaaguagcccga

SEQ ID NO: 945951 - RNA, 19 nt, Artificial Sequence
  Description of Artificial Sequence: Synthetic oligonucleotide
cuuuggcaugagaaaugca

SEQ ID NO: 945952 - RNA, 19 nt, Artificial Sequence
  Description of Artificial Sequence: Synthetic oligonucleotide
ccgauaacaaauuuaaauu

SEQ ID NO: 945953 - RNA, 19 nt, Artificial Sequence
  Description of Artificial Sequence: Synthetic oligonucleotide
acuuuccuaaacagguuuu

SEQ ID NO: 945954 - RNA, 19 nt, Artificial Sequence
  Description of Artificial Sequence: Synthetic oligonucleotide
gacauacuaugcagcacaa

SEQ ID NO: 945955 - RNA, 19 nt, Artificial Sequence
  Description of Artificial Sequence: Synthetic oligonucleotide
gacgaaguagcccgacgcu

SEQ ID NO: 945956 - RNA, 19 nt, Artificial Sequence
  Description of Artificial Sequence: Synthetic oligonucleotide
agugccaacaacggacaua

SEQ ID NO: 945957 - RNA, 19 nt, Artificial Sequence
  Description of Artificial Sequence: Synthetic oligonucleotide
gaucgcccauaugcaaagc

SEQ ID NO: 945958 - RNA, 19 nt, Artificial Sequence
  Description of Artificial Sequence: Synthetic oligonucleotide
uacugaaccuggggcauau

SEQ ID NO: 945959 - RNA, 19 nt, Artificial Sequence
  Description of Artificial Sequence: Synthetic oligonucleotide
gagagagucucuucauuuu

SEQ ID NO: 945960 - RNA, 19 nt, Artificial Sequence
  Description of Artificial Sequence: Synthetic oligonucleotide
agaggugauugaguucuaa

SEQ ID NO: 945961 - RNA, 19 nt, Artificial Sequence
  Description of Artificial Sequence: Synthetic oligonucleotide
aucaacugcuugugucgau

SEQ ID NO: 945962 - RNA, 19 nt, Artificial Sequence
  Description of Artificial Sequence: Synthetic oligonucleotide
acuuuacggggaaaguguu

SEQ ID NO: 945963 - RNA, 19 nt, Artificial Sequence
  Description of Artificial Sequence: Synthetic oligonucleotide
ccgaacuuccauguacucc

SEQ ID NO: 945964 - RNA, 19 nt, Artificial Sequence
  Description of Artificial Sequence: Synthetic oligonucleotide
ccuaaacagguuuucccca

SEQ ID NO: 945965 - RNA, 19 nt, Artificial Sequence
  Description of Artificial Sequence: Synthetic oligonucleotide
acaaccaauuuuagauuua

SEQ ID NO: 945966 - RNA, 19 nt, Artificial Sequence
  Description of Artificial Sequence: Synthetic oligonucleotide
caccuuaccaacagacugu

SEQ ID NO: 945967 - RNA, 19 nt, Artificial Sequence
  Description of Artificial Sequence: Synthetic oligonucleotide
aaaccgcccuccgccaccu

SEQ ID NO: 945968 - RNA, 19 nt, Artificial Sequence
  Description of Artificial Sequence: Synthetic oligonucleotide
aggugacccgcucgaagaa

SEQ ID NO: 945969 - RNA, 19 nt, Artificial Sequence
  Description of Artificial Sequence: Synthetic oligonucleotide
ugucaucgccacugccagu

SEQ ID NO: 945970 - RNA, 19 nt, Artificial Sequence
  Description of Artificial Sequence: Synthetic oligonucleotide
gacccgcucgaagaagcac

SEQ ID NO: 945971 - RNA, 19 nt, Artificial Sequence
  Description of Artificial Sequence: Synthetic oligonucleotide
accuuaccaacagacuguu

SEQ ID NO: 945972 - RNA, 19 nt, Artificial Sequence
  Description of Artificial Sequence: Synthetic oligonucleotide
auagucauccaggguugaa

SEQ ID NO: 945973 - RNA, 19 nt, Artificial Sequence
  Description of Artificial Sequence: Synthetic oligonucleotide
cucugcgugugcgucgaug

SEQ ID NO: 945974 - RNA, 19 nt, Artificial Sequence
  Description of Artificial Sequence: Synthetic oligonucleotide
cucucccgaacuuccaugu

SEQ ID NO: 945975 - RNA, 19 nt, Artificial Sequence
  Description of Artificial Sequence: Synthetic oligonucleotide
cuccgcgagcgucaccaug

SEQ ID NO: 945976 - RNA, 19 nt, Artificial Sequence
  Description of Artificial Sequence: Synthetic oligonucleotide
caugaacguucagaaaaua

SEQ ID NO: 945977 - RNA, 19 nt, Artificial Sequence
  Description of Artificial Sequence: Synthetic oligonucleotide
uuacugaaccuggggcaua

SEQ ID NO: 945978 - RNA, 19 nt, Artificial Sequence
  Description of Artificial Sequence: Synthetic oligonucleotide
guagcccgacgcuguggcc

SEQ ID NO: 945979 - RNA, 19 nt, Artificial Sequence
  Description of Artificial Sequence: Synthetic oligonucleotide
ggugacccgcucgaagaag

SEQ ID NO: 945980 - RNA, 19 nt, Artificial Sequence
  Description of Artificial Sequence: Synthetic oligonucleotide
caacccuccggacuucaaa

SEQ ID NO: 945981 - RNA, 19 nt, Artificial Sequence
  Description of Artificial Sequence: Synthetic oligonucleotide
ccuaagugccaacaacgga

SEQ ID NO: 945982 - RNA, 19 nt, Artificial Sequence
  Description of Artificial Sequence: Synthetic oligonucleotide
agacuguugcaaggauagu

SEQ ID NO: 945983 - RNA, 19 nt, Artificial Sequence
  Description of Artificial Sequence: Synthetic oligonucleotide
ggacucucgaucuccuuua

SEQ ID NO: 945984 - RNA, 19 nt, Artificial Sequence
  Description of Artificial Sequence: Synthetic oligonucleotide
cgagcgucaccauggugcg

SEQ ID NO: 945985 - RNA, 19 nt, Artificial Sequence
  Description of Artificial Sequence: Synthetic oligonucleotide
uacuccuguucgugcuuua

SEQ ID NO: 945986 - RNA, 19 nt, Artificial Sequence
  Description of Artificial Sequence: Synthetic oligonucleotide
gagcgucaccauggugcgg

SEQ ID NO: 945987 - RNA, 19 nt, Artificial Sequence
  Description of Artificial Sequence: Synthetic oligonucleotide
gacgcggacugcggccucc

SEQ ID NO: 945988 - RNA, 19 nt, Artificial Sequence
  Description of Artificial Sequence: Synthetic oligonucleotide
cuggggcauauuagauaca

SEQ ID NO: 945989 - RNA, 19 nt, Artificial Sequence
  Description of Artificial Sequence: Synthetic oligonucleotide
ggcugcgaagguauauuuc

SEQ ID NO: 945990 - RNA, 19 nt, Artificial Sequence
  Description of Artificial Sequence: Synthetic oligonucleotide
cauugauggcucuguguau

SEQ ID NO: 945991 - RNA, 19 nt, Artificial Sequence
  Description of Artificial Sequence: Synthetic oligonucleotide
gugcggcacgggccgaagc

SEQ ID NO: 945992 - RNA, 19 nt, Artificial Sequence
  Description of Artificial Sequence: Synthetic oligonucleotide
ggaaaccgcccuccgccac

SEQ ID NO: 945993 - RNA, 19 nt, Artificial Sequence
  Description of Artificial Sequence: Synthetic oligonucleotide
aucgccacugccaguucau

SEQ ID NO: 945994 - RNA, 19 nt, Artificial Sequence
  Description of Artificial Sequence: Synthetic oligonucleotide
caugcaacagcugcccuau

SEQ ID NO: 945995 - RNA, 19 nt, Artificial Sequence
  Description of Artificial Sequence: Synthetic oligonucleotide
gcaugcaacagcugcccua

SEQ ID NO: 945996 - RNA, 19 nt, Artificial Sequence
  Description of Artificial Sequence: Synthetic oligonucleotide
gcccgaggugacccgcucg

SEQ ID NO: 945997 - RNA, 19 nt, Artificial Sequence
  Description of Artificial Sequence: Synthetic oligonucleotide
ggugaacauuacuaucuuu

SEQ ID NO: 945998 - RNA, 19 nt, Artificial Sequence
  Description of Artificial Sequence: Synthetic oligonucleotide
cggacugcggccuccggag

SEQ ID NO: 945999 - RNA, 19 nt, Artificial Sequence
  Description of Artificial Sequence: Synthetic oligonucleotide
gguggacauccuauuacua

SEQ ID NO: 946000 - RNA, 19 nt, Artificial Sequence
  Description of Artificial Sequence: Synthetic oligonucleotide
cacuaaggccagugacuaa

SEQ ID NO: 946001 - RNA, 19 nt, Artificial Sequence
  Description of Artificial Sequence: Synthetic oligonucleotide
ccuuaccaacagacuguug

SEQ ID NO: 946002 - RNA, 19 nt, Artificial Sequence
  Description of Artificial Sequence: Synthetic oligonucleotide
gacucucgaucuccuuuau

SEQ ID NO: 946003 - RNA, 19 nt, Artificial Sequence
  Description of Artificial Sequence: Synthetic oligonucleotide
agcuucgaagaaggaccaa

SEQ ID NO: 946004 - RNA, 19 nt, Artificial Sequence
  Description of Artificial Sequence: Synthetic oligonucleotide
cuuccccaaugucaauggu

SEQ ID NO: 946005 - RNA, 19 nt, Artificial Sequence
  Description of Artificial Sequence: Synthetic oligonucleotide
agccauccaagaggcuuaa

SEQ ID NO: 946006 - RNA, 19 nt, Artificial Sequence
  Description of Artificial Sequence: Synthetic oligonucleotide
cccgaacuuccauguacuc

SEQ ID NO: 946007 - RNA, 19 nt, Artificial Sequence
  Description of Artificial Sequence: Synthetic oligonucleotide
cuccgccaccucgaagaug

SEQ ID NO: 946008 - RNA, 19 nt, Artificial Sequence
  Description of Artificial Sequence: Synthetic oligonucleotide
gcugacgaaguagcccgac

SEQ ID NO: 946009 - RNA, 19 nt, Artificial Sequence
  Description of Artificial Sequence: Synthetic oligonucleotide
gcgugugcgucgaugcuga

SEQ ID NO: 946010 - RNA, 19 nt, Artificial Sequence
  Description of Artificial Sequence: Synthetic oligonucleotide
ucgccacugccaguucauu

SEQ ID NO: 946011 - RNA, 19 nt, Artificial Sequence
  Description of Artificial Sequence: Synthetic oligonucleotide
gcggacugcggccuccgga

SEQ ID NO: 946012 - RNA, 19 nt, Artificial Sequence
  Description of Artificial Sequence: Synthetic oligonucleotide
ccaagguguuugguaaaca

SEQ ID NO: 946013 - RNA, 19 nt, Artificial Sequence
  Description of Artificial Sequence: Synthetic oligonucleotide
ccgggacgcggacugcggc

SEQ ID NO: 946014 - RNA, 19 nt, Artificial Sequence
  Description of Artificial Sequence: Synthetic oligonucleotide
cggacauacuaugcagcac

SEQ ID NO: 946015 - RNA, 19 nt, Artificial Sequence
  Description of Artificial Sequence: Synthetic oligonucleotide
cgggacgcggacugcggcc

SEQ ID NO: 946016 - RNA, 19 nt, Artificial Sequence
  Description of Artificial Sequence: Synthetic oligonucleotide
cccgaggugacccgcucga

SEQ ID NO: 946017 - RNA, 19 nt, Artificial Sequence
  Description of Artificial Sequence: Synthetic oligonucleotide
cgucgauguccaggaaacc

SEQ ID NO: 946018 - RNA, 19 nt, Artificial Sequence
  Description of Artificial Sequence: Synthetic oligonucleotide
ggcaugcaacagcugcccu

SEQ ID NO: 946019 - RNA, 19 nt, Artificial Sequence
  Description of Artificial Sequence: Synthetic oligonucleotide
acccaucaucagagagaga

SEQ ID NO: 946020 - RNA, 19 nt, Artificial Sequence
  Description of Artificial Sequence: Synthetic oligonucleotide
cgggccgaagccgggacgc

SEQ ID NO: 946021 - RNA, 19 nt, Artificial Sequence
  Description of Artificial Sequence: Synthetic oligonucleotide
gcugcccuauggugaaagu

SEQ ID NO: 946022 - RNA, 19 nt, Artificial Sequence
  Description of Artificial Sequence: Synthetic oligonucleotide
cugcgugugcgucgaugcu

SEQ ID NO: 946023 - RNA, 19 nt, Artificial Sequence
  Description of Artificial Sequence: Synthetic oligonucleotide
gggccgaagccgggacgcg

SEQ ID NO: 946024 - RNA, 19 nt, Artificial Sequence
  Description of Artificial Sequence: Synthetic oligonucleotide
cgacuuucauuaaacccau

SEQ ID NO: 946025 - RNA, 19 nt, Artificial Sequence
  Description of Artificial Sequence: Synthetic oligonucleotide
gugcgucgaugcugacgaa

SEQ ID NO: 946026 - RNA, 19 nt, Artificial Sequence
  Description of Artificial Sequence: Synthetic oligonucleotide
gccuaucauugcaagccau

SEQ ID NO: 946027 - RNA, 19 nt, Artificial Sequence
  Description of Artificial Sequence: Synthetic oligonucleotide
gccauccaagaggcuuaac

SEQ ID NO: 946028 - RNA, 19 nt, Artificial Sequence
  Description of Artificial Sequence: Synthetic oligonucleotide
cgcgagcgucaccauggug

SEQ ID NO: 946029 - RNA, 19 nt, Artificial Sequence
  Description of Artificial Sequence: Synthetic oligonucleotide
ggacgcggacugcggccuc

SEQ ID NO: 946030 - RNA, 19 nt, Artificial Sequence
  Description of Artificial Sequence: Synthetic oligonucleotide
gcgucaccauggugcggca

SEQ ID NO: 946031 - RNA, 19 nt, Artificial Sequence
  Description of Artificial Sequence: Synthetic oligonucleotide
gcacgggccgaagccggga

SEQ ID NO: 946032 - RNA, 19 nt, Artificial Sequence
  Description of Artificial Sequence: Synthetic oligonucleotide
ccgccaccucgaagaugag

SEQ ID NO: 946033 - RNA, 19 nt, Artificial Sequence
  Description of Artificial Sequence: Synthetic oligonucleotide
cccgacgcuguggccagca

SEQ ID NO: 946034 - RNA, 19 nt, Artificial Sequence
  Description of Artificial Sequence: Synthetic oligonucleotide
cgcggacugcggccuccgg

SEQ ID NO: 946035 - RNA, 19 nt, Artificial Sequence
  Description of Artificial Sequence: Synthetic oligonucleotide
ccgaggugacccgcucgaa

SEQ ID NO: 946036 - RNA, 19 nt, Artificial Sequence
  Description of Artificial Sequence: Synthetic oligonucleotide
gcuccgcgagcgucaccau

SEQ ID NO: 946037 - RNA, 19 nt, Artificial Sequence
  Description of Artificial Sequence: Synthetic oligonucleotide
ccgcgagcgucaccauggu

SEQ ID NO: 946038 - RNA, 19 nt, Artificial Sequence
  Description of Artificial Sequence: Synthetic oligonucleotide
uuauuuacggaaaugcugg

SEQ ID NO: 946039 - RNA, 19 nt, Artificial Sequence
  Description of Artificial Sequence: Synthetic oligonucleotide
uguaaauuuaaacugggca

SEQ ID NO: 946040 - RNA, 19 nt, Artificial Sequence
  Description of Artificial Sequence: Synthetic oligonucleotide
agagguacaaauuguaacc

SEQ ID NO: 946041 - RNA, 19 nt, Artificial Sequence
  Description of Artificial Sequence: Synthetic oligonucleotide
aaaagugugagccacauua

SEQ ID NO: 946042 - RNA, 19 nt, Artificial Sequence
  Description of Artificial Sequence: Synthetic oligonucleotide
uuuacggaaaugcugguag

SEQ ID NO: 946043 - RNA, 19 nt, Artificial Sequence
  Description of Artificial Sequence: Synthetic oligonucleotide
auagagaacauuaaauggc

SEQ ID NO: 946044 - RNA, 19 nt, Artificial Sequence
  Description of Artificial Sequence: Synthetic oligonucleotide
ucuacaaauccccaggagc

SEQ ID NO: 946045 - RNA, 19 nt, Artificial Sequence
  Description of Artificial Sequence: Synthetic oligonucleotide
augcucuuaaaguaaaugg

SEQ ID NO: 946046 - RNA, 19 nt, Artificial Sequence
  Description of Artificial Sequence: Synthetic oligonucleotide
auuaaauggcuguaguaac

SEQ ID NO: 946047 - RNA, 19 nt, Artificial Sequence
  Description of Artificial Sequence: Synthetic oligonucleotide
ucucguuuguaaauggugg

SEQ ID NO: 946048 - RNA, 19 nt, Artificial Sequence
  Description of Artificial Sequence: Synthetic oligonucleotide
aguaacucauguuuggcac

SEQ ID NO: 946049 - RNA, 19 nt, Artificial Sequence
  Description of Artificial Sequence: Synthetic oligonucleotide
uuuuguuggaaagaguggg

SEQ ID NO: 946050 - RNA, 19 nt, Artificial Sequence
  Description of Artificial Sequence: Synthetic oligonucleotide
uuauacuuggucacgacca

SEQ ID NO: 946051 - RNA, 19 nt, Artificial Sequence
  Description of Artificial Sequence: Synthetic oligonucleotide
aaaaguuugaagccagcug

SEQ ID NO: 946052 - RNA, 19 nt, Artificial Sequence
  Description of Artificial Sequence: Synthetic oligonucleotide
ucauguaccucaaacucgg

SEQ ID NO: 946053 - RNA, 19 nt, Artificial Sequence
  Description of Artificial Sequence: Synthetic oligonucleotide
ucuacuacacccauucgag

SEQ ID NO: 946054 - RNA, 19 nt, Artificial Sequence
  Description of Artificial Sequence: Synthetic oligonucleotide
uucauguaccucaaacucg

SEQ ID NO: 946055 - RNA, 19 nt, Artificial Sequence
  Description of Artificial Sequence: Synthetic oligonucleotide
ugcucuuaaaguaaauggc

SEQ ID NO: 946056 - RNA, 19 nt, Artificial Sequence
  Description of Artificial Sequence: Synthetic oligonucleotide
ucuaauguuucuccacugg

SEQ ID NO: 946057 - RNA, 19 nt, Artificial Sequence
  Description of Artificial Sequence: Synthetic oligonucleotide
aagacgauggguuuugacu

SEQ ID NO: 946058 - RNA, 19 nt, Artificial Sequence
  Description of Artificial Sequence: Synthetic oligonucleotide
aagugugagccacauuagc

SEQ ID NO: 946059 - RNA, 19 nt, Artificial Sequence
  Description of Artificial Sequence: Synthetic oligonucleotide
uguuguagagccacaaacc

SEQ ID NO: 946060 - RNA, 19 nt, Artificial Sequence
  Description of Artificial Sequence: Synthetic oligonucleotide
aaauggugguucucugucc

SEQ ID NO: 946061 - RNA, 19 nt, Artificial Sequence
  Description of Artificial Sequence: Synthetic oligonucleotide
uaaaguaaauggcauggca

SEQ ID NO: 946062 - RNA, 19 nt, Artificial Sequence
  Description of Artificial Sequence: Synthetic oligonucleotide
gagugagcaacuuuguucc

SEQ ID NO: 946063 - RNA, 19 nt, Artificial Sequence
  Description of Artificial Sequence: Synthetic oligonucleotide
cugaaaguagucuucagug

SEQ ID NO: 946064 - RNA, 19 nt, Artificial Sequence
  Description of Artificial Sequence: Synthetic oligonucleotide
uucggcacaaagaugagcu

SEQ ID NO: 946065 - RNA, 19 nt, Artificial Sequence
  Description of Artificial Sequence: Synthetic oligonucleotide
auuagcaaugaagccaucc

SEQ ID NO: 946066 - RNA, 19 nt, Artificial Sequence
  Description of Artificial Sequence: Synthetic oligonucleotide
aguauauaguccuggucac

SEQ ID NO: 946067 - RNA, 19 nt, Artificial Sequence
  Description of Artificial Sequence: Synthetic oligonucleotide
agacgauggguuuugacuc

SEQ ID NO: 946068 - RNA, 19 nt, Artificial Sequence
  Description of Artificial Sequence: Synthetic oligonucleotide
cuacaaauccccaggagcc

SEQ ID NO: 946069 - RNA, 19 nt, Artificial Sequence
  Description of Artificial Sequence: Synthetic oligonucleotide
cugggcaacaaauucaccc

SEQ ID NO: 946070 - RNA, 19 nt, Artificial Sequence
  Description of Artificial Sequence: Synthetic oligonucleotide
uugggcaugaguaggacug

SEQ ID NO: 946071 - RNA, 19 nt, Artificial Sequence
  Description of Artificial Sequence: Synthetic oligonucleotide
ggccguauuguuuagaggg

SEQ ID NO: 946072 - RNA, 19 nt, Artificial Sequence
  Description of Artificial Sequence: Synthetic oligonucleotide
auguaccucaaacucggcc

SEQ ID NO: 946073 - RNA, 19 nt, Artificial Sequence
  Description of Artificial Sequence: Synthetic oligonucleotide
auggcauggcaucaaaacg

SEQ ID NO: 946074 - RNA, 19 nt, Artificial Sequence
  Description of Artificial Sequence: Synthetic oligonucleotide
uuuucuacugaaaguaguc

SEQ ID NO: 946075 - RNA, 19 nt, Artificial Sequence
  Description of Artificial Sequence: Synthetic oligonucleotide
uacuacacccauucgagcc

SEQ ID NO: 946076 - RNA, 19 nt, Artificial Sequence
  Description of Artificial Sequence: Synthetic oligonucleotide
caaaccuugaccaagcaga

SEQ ID NO: 946077 - RNA, 19 nt, Artificial Sequence
  Description of Artificial Sequence: Synthetic oligonucleotide
uguaccucaaacucggccu

SEQ ID NO: 946078 - RNA, 19 nt, Artificial Sequence
  Description of Artificial Sequence: Synthetic oligonucleotide
uuaaauggcuguaguaacu

SEQ ID NO: 946079 - RNA, 19 nt, Artificial Sequence
  Description of Artificial Sequence: Synthetic oligonucleotide
ucgacuugcagaacucugg

SEQ ID NO: 946080 - RNA, 19 nt, Artificial Sequence
  Description of Artificial Sequence: Synthetic oligonucleotide
acagcauaccuucuauugg

SEQ ID NO: 946081 - RNA, 19 nt, Artificial Sequence
  Description of Artificial Sequence: Synthetic oligonucleotide
uaggacuguaaauuuaaac

SEQ ID NO: 946082 - RNA, 19 nt, Artificial Sequence
  Description of Artificial Sequence: Synthetic oligonucleotide
cuuauacuuggucacgacc

SEQ ID NO: 946083 - RNA, 19 nt, Artificial Sequence
  Description of Artificial Sequence: Synthetic oligonucleotide
caguuauuuacggaaaugc

SEQ ID NO: 946084 - RNA, 19 nt, Artificial Sequence
  Description of Artificial Sequence: Synthetic oligonucleotide
caaagaucggaguacccgg

SEQ ID NO: 946085 - RNA, 19 nt, Artificial Sequence
  Description of Artificial Sequence: Synthetic oligonucleotide
acaaucugaaagucaguuc

SEQ ID NO: 946086 - RNA, 19 nt, Artificial Sequence
  Description of Artificial Sequence: Synthetic oligonucleotide
uuuagaggggucucguuug

SEQ ID NO: 946087 - RNA, 19 nt, Artificial Sequence
  Description of Artificial Sequence: Synthetic oligonucleotide
agaugagcugccuuaauga

SEQ ID NO: 946088 - RNA, 19 nt, Artificial Sequence
  Description of Artificial Sequence: Synthetic oligonucleotide
agccacaccaauuacaaaa

SEQ ID NO: 946089 - RNA, 19 nt, Artificial Sequence
  Description of Artificial Sequence: Synthetic oligonucleotide
uaaauggugguucucuguc

SEQ ID NO: 946090 - RNA, 19 nt, Artificial Sequence
  Description of Artificial Sequence: Synthetic oligonucleotide
aaaguaaauggcauggcau

SEQ ID NO: 946091 - RNA, 19 nt, Artificial Sequence
  Description of Artificial Sequence: Synthetic oligonucleotide
cucccuuccagccacaagc

SEQ ID NO: 946092 - RNA, 19 nt, Artificial Sequence
  Description of Artificial Sequence: Synthetic oligonucleotide
ugagccacaccaauuacaa

SEQ ID NO: 946093 - RNA, 19 nt, Artificial Sequence
  Description of Artificial Sequence: Synthetic oligonucleotide
cagagguacaaauuguaac

SEQ ID NO: 946094 - RNA, 19 nt, Artificial Sequence
  Description of Artificial Sequence: Synthetic oligonucleotide
cuguuguagagccacaaac

SEQ ID NO: 946095 - RNA, 19 nt, Artificial Sequence
  Description of Artificial Sequence: Synthetic oligonucleotide
acuguaaauuuaaacuggg

SEQ ID NO: 946096 - RNA, 19 nt, Artificial Sequence
  Description of Artificial Sequence: Synthetic oligonucleotide
gacgaacugcacuucacag

SEQ ID NO: 946097 - RNA, 19 nt, Artificial Sequence
  Description of Artificial Sequence: Synthetic oligonucleotide
uaggauucuggauaauugu

SEQ ID NO: 946098 - RNA, 19 nt, Artificial Sequence
  Description of Artificial Sequence: Synthetic oligonucleotide
uccacauggaccccaaggu

SEQ ID NO: 946099 - RNA, 19 nt, Artificial Sequence
  Description of Artificial Sequence: Synthetic oligonucleotide
ucauguuuggcacacucua

SEQ ID NO: 946100 - RNA, 19 nt, Artificial Sequence
  Description of Artificial Sequence: Synthetic oligonucleotide
aaagggaccacugguuauc

SEQ ID NO: 946101 - RNA, 19 nt, Artificial Sequence
  Description of Artificial Sequence: Synthetic oligonucleotide
gguuugaccagucguaagg

SEQ ID NO: 946102 - RNA, 19 nt, Artificial Sequence
  Description of Artificial Sequence: Synthetic oligonucleotide
aaguagucuucaguggccg

SEQ ID NO: 946103 - RNA, 19 nt, Artificial Sequence
  Description of Artificial Sequence: Synthetic oligonucleotide
acaaaccuugaccaagcag

SEQ ID NO: 946104 - RNA, 19 nt, Artificial Sequence
  Description of Artificial Sequence: Synthetic oligonucleotide
ugagcugacuaggacaucc

SEQ ID NO: 946105 - RNA, 19 nt, Artificial Sequence
  Description of Artificial Sequence: Synthetic oligonucleotide
acuggugugacagcauacc

SEQ ID NO: 946106 - RNA, 19 nt, Artificial Sequence
  Description of Artificial Sequence: Synthetic oligonucleotide
auuaucauggcaucgccuu

SEQ ID NO: 946107 - RNA, 19 nt, Artificial Sequence
  Description of Artificial Sequence: Synthetic oligonucleotide
uuaaacugggcaacaaauu

SEQ ID NO: 946108 - RNA, 19 nt, Artificial Sequence
  Description of Artificial Sequence: Synthetic oligonucleotide
gaucggaguacccgguugg

SEQ ID NO: 946109 - RNA, 19 nt, Artificial Sequence
  Description of Artificial Sequence: Synthetic oligonucleotide
aaauuuaaacugggcaaca

SEQ ID NO: 946110 - RNA, 19 nt, Artificial Sequence
  Description of Artificial Sequence: Synthetic oligonucleotide
ugguuuccggguuugacca

SEQ ID NO: 946111 - RNA, 19 nt, Artificial Sequence
  Description of Artificial Sequence: Synthetic oligonucleotide
cuguaaauuuaaacugggc

SEQ ID NO: 946112 - RNA, 19 nt, Artificial Sequence
  Description of Artificial Sequence: Synthetic oligonucleotide
uuacaaaagugugagccac

SEQ ID NO: 946113 - RNA, 19 nt, Artificial Sequence
  Description of Artificial Sequence: Synthetic oligonucleotide
uuacggaaaugcugguagg

SEQ ID NO: 946114 - RNA, 19 nt, Artificial Sequence
  Description of Artificial Sequence: Synthetic oligonucleotide
ugaguauauaguccugguc

SEQ ID NO: 946115 - RNA, 19 nt, Artificial Sequence
  Description of Artificial Sequence: Synthetic oligonucleotide
ucaaacucggccuuuucau

SEQ ID NO: 946116 - RNA, 19 nt, Artificial Sequence
  Description of Artificial Sequence: Synthetic oligonucleotide
cucggcgauaguuugcucc

SEQ ID NO: 946117 - RNA, 19 nt, Artificial Sequence
  Description of Artificial Sequence: Synthetic oligonucleotide
cauaccuucuauuggugug

SEQ ID NO: 946118 - RNA, 19 nt, Artificial Sequence
  Description of Artificial Sequence: Synthetic oligonucleotide
uucauuuucaggccguauu

SEQ ID NO: 946119 - RNA, 19 nt, Artificial Sequence
  Description of Artificial Sequence: Synthetic oligonucleotide
uacggaaaugcugguaggg

SEQ ID NO: 946120 - RNA, 19 nt, Artificial Sequence
  Description of Artificial Sequence: Synthetic oligonucleotide
uacuuggucacgaccaggu

SEQ ID NO: 946121 - RNA, 19 nt, Artificial Sequence
  Description of Artificial Sequence: Synthetic oligonucleotide
acgugaaguuuucauuuuc

SEQ ID NO: 946122 - RNA, 19 nt, Artificial Sequence
  Description of Artificial Sequence: Synthetic oligonucleotide
uugacuccugauuuuauua

SEQ ID NO: 946123 - RNA, 19 nt, Artificial Sequence
  Description of Artificial Sequence: Synthetic oligonucleotide
ugucacuuguguguucugg

SEQ ID NO: 946124 - RNA, 19 nt, Artificial Sequence
  Description of Artificial Sequence: Synthetic oligonucleotide
gaugagcugccuuaaugac

SEQ ID NO: 946125 - RNA, 19 nt, Artificial Sequence
  Description of Artificial Sequence: Synthetic oligonucleotide
ucucuacaaauccccagga

SEQ ID NO: 946126 - RNA, 19 nt, Artificial Sequence
  Description of Artificial Sequence: Synthetic oligonucleotide
gacagcaugccagagguac

SEQ ID NO: 946127 - RNA, 19 nt, Artificial Sequence
  Description of Artificial Sequence: Synthetic oligonucleotide
ucaaaggggagaagugaca

SEQ ID NO: 946128 - RNA, 19 nt, Artificial Sequence
  Description of Artificial Sequence: Synthetic oligonucleotide
uucaacuggugugacagca

SEQ ID NO: 946129 - RNA, 19 nt, Artificial Sequence
  Description of Artificial Sequence: Synthetic oligonucleotide
acaucuuccuaccaccacu

SEQ ID NO: 946130 - RNA, 19 nt, Artificial Sequence
  Description of Artificial Sequence: Synthetic oligonucleotide
uucgacuugcagaacucug

SEQ ID NO: 946131 - RNA, 19 nt, Artificial Sequence
  Description of Artificial Sequence: Synthetic oligonucleotide
ugccuuaaugacaucugcu

SEQ ID NO: 946132 - RNA, 19 nt, Artificial Sequence
  Description of Artificial Sequence: Synthetic oligonucleotide
uuggucacgaccagguccu

SEQ ID NO: 946133 - RNA, 19 nt, Artificial Sequence
  Description of Artificial Sequence: Synthetic oligonucleotide
guaggauucuggauaauug

SEQ ID NO: 946134 - RNA, 19 nt, Artificial Sequence
  Description of Artificial Sequence: Synthetic oligonucleotide
acaaagaugagcugccuua

SEQ ID NO: 946135 - RNA, 19 nt, Artificial Sequence
  Description of Artificial Sequence: Synthetic oligonucleotide
auuguuuagaggggucucg

SEQ ID NO: 946136 - RNA, 19 nt, Artificial Sequence
  Description of Artificial Sequence: Synthetic oligonucleotide
ugggcaacaaauucacccu

SEQ ID NO: 946137 - RNA, 19 nt, Artificial Sequence
  Description of Artificial Sequence: Synthetic oligonucleotide
uuucuacugaaaguagucu

SEQ ID NO: 946138 - RNA, 19 nt, Artificial Sequence
  Description of Artificial Sequence: Synthetic oligonucleotide
cacacaguuauuuacggaa

SEQ ID NO: 946139 - RNA, 19 nt, Artificial Sequence
  Description of Artificial Sequence: Synthetic oligonucleotide
cugguuuccggguuugacc

SEQ ID NO: 946140 - RNA, 19 nt, Artificial Sequence
  Description of Artificial Sequence: Synthetic oligonucleotide
ugcagaacucuggagaaga

SEQ ID NO: 946141 - RNA, 19 nt, Artificial Sequence
  Description of Artificial Sequence: Synthetic oligonucleotide
agccacaagcuguagcuag

SEQ ID NO: 946142 - RNA, 19 nt, Artificial Sequence
  Description of Artificial Sequence: Synthetic oligonucleotide
aagacgaacugcacuucac

SEQ ID NO: 946143 - RNA, 19 nt, Artificial Sequence
  Description of Artificial Sequence: Synthetic oligonucleotide
ugaccagucguaaggcagc

SEQ ID NO: 946144 - RNA, 19 nt, Artificial Sequence
  Description of Artificial Sequence: Synthetic oligonucleotide
agccacauuagcaaugaag

SEQ ID NO: 946145 - RNA, 19 nt, Artificial Sequence
  Description of Artificial Sequence: Synthetic oligonucleotide
agcuagagucucuucgauc

SEQ ID NO: 946146 - RNA, 19 nt, Artificial Sequence
  Description of Artificial Sequence: Synthetic oligonucleotide
gucucuucgauccgcgagg

SEQ ID NO: 946147 - RNA, 19 nt, Artificial Sequence
  Description of Artificial Sequence: Synthetic oligonucleotide
ucuucgcccgacaucuucc

SEQ ID NO: 946148 - RNA, 19 nt, Artificial Sequence
  Description of Artificial Sequence: Synthetic oligonucleotide
uuuucgacuugcagaacuc

SEQ ID NO: 946149 - RNA, 19 nt, Artificial Sequence
  Description of Artificial Sequence: Synthetic oligonucleotide
uccugauuuuauuauucaa

SEQ ID NO: 946150 - RNA, 19 nt, Artificial Sequence
  Description of Artificial Sequence: Synthetic oligonucleotide
aagucaccuuccuugagua

SEQ ID NO: 946151 - RNA, 19 nt, Artificial Sequence
  Description of Artificial Sequence: Synthetic oligonucleotide
uuugaccagucguaaggca

SEQ ID NO: 946152 - RNA, 19 nt, Artificial Sequence
  Description of Artificial Sequence: Synthetic oligonucleotide
ucuucgauccgcgaggaaa

SEQ ID NO: 946153 - RNA, 19 nt, Artificial Sequence
  Description of Artificial Sequence: Synthetic oligonucleotide
uggguuuugacuccugauu

SEQ ID NO: 946154 - RNA, 19 nt, Artificial Sequence
  Description of Artificial Sequence: Synthetic oligonucleotide
ucucuguccugcaucuuug

SEQ ID NO: 946155 - RNA, 19 nt, Artificial Sequence
  Description of Artificial Sequence: Synthetic oligonucleotide
agcugacuaggacauccac

SEQ ID NO: 946156 - RNA, 19 nt, Artificial Sequence
  Description of Artificial Sequence: Synthetic oligonucleotide
uuuucaggccguauuguuu

SEQ ID NO: 946157 - RNA, 19 nt, Artificial Sequence
  Description of Artificial Sequence: Synthetic oligonucleotide
uccggguuugaccagucgu

SEQ ID NO: 946158 - RNA, 19 nt, Artificial Sequence
  Description of Artificial Sequence: Synthetic oligonucleotide
ugguagggaaggcaacacc

SEQ ID NO: 946159 - RNA, 19 nt, Artificial Sequence
  Description of Artificial Sequence: Synthetic oligonucleotide
aguuauuuacggaaaugcu

SEQ ID NO: 946160 - RNA, 19 nt, Artificial Sequence
  Description of Artificial Sequence: Synthetic oligonucleotide
acaguuauuuacggaaaug

SEQ ID NO: 946161 - RNA, 19 nt, Artificial Sequence
  Description of Artificial Sequence: Synthetic oligonucleotide
caauuacaaaagugugagc

SEQ ID NO: 946162 - RNA, 19 nt, Artificial Sequence
  Description of Artificial Sequence: Synthetic oligonucleotide
gaucacaugcugcuucaac

SEQ ID NO: 946163 - RNA, 19 nt, Artificial Sequence
  Description of Artificial Sequence: Synthetic oligonucleotide
ugguggcuaacuuagccuc

SEQ ID NO: 946164 - RNA, 19 nt, Artificial Sequence
  Description of Artificial Sequence: Synthetic oligonucleotide
ucgucuucgcccgacaucu

SEQ ID NO: 946165 - RNA, 19 nt, Artificial Sequence
  Description of Artificial Sequence: Synthetic oligonucleotide
aaugagugagcaacuuugu

SEQ ID NO: 946166 - RNA, 19 nt, Artificial Sequence
  Description of Artificial Sequence: Synthetic oligonucleotide
uggcuguaguaacucaugu

SEQ ID NO: 946167 - RNA, 19 nt, Artificial Sequence
  Description of Artificial Sequence: Synthetic oligonucleotide
caggccguauuguuuagag

SEQ ID NO: 946168 - RNA, 19 nt, Artificial Sequence
  Description of Artificial Sequence: Synthetic oligonucleotide
ugacuccugauuuuauuau

SEQ ID NO: 946169 - RNA, 19 nt, Artificial Sequence
  Description of Artificial Sequence: Synthetic oligonucleotide
uacgggacccaccucaguc

SEQ ID NO: 946170 - RNA, 19 nt, Artificial Sequence
  Description of Artificial Sequence: Synthetic oligonucleotide
accaauuacaaaaguguga

SEQ ID NO: 946171 - RNA, 19 nt, Artificial Sequence
  Description of Artificial Sequence: Synthetic oligonucleotide
ucuggauaauuguuuucuc

SEQ ID NO: 946172 - RNA, 19 nt, Artificial Sequence
  Description of Artificial Sequence: Synthetic oligonucleotide
uuugacuccugauuuuauu

SEQ ID NO: 946173 - RNA, 19 nt, Artificial Sequence
  Description of Artificial Sequence: Synthetic oligonucleotide
gcuucaacuggugugacag

SEQ ID NO: 946174 - RNA, 19 nt, Artificial Sequence
  Description of Artificial Sequence: Synthetic oligonucleotide
gucuguaggauucuggaua

SEQ ID NO: 946175 - RNA, 19 nt, Artificial Sequence
  Description of Artificial Sequence: Synthetic oligonucleotide
uguaggauucuggauaauu

SEQ ID NO: 946176 - RNA, 19 nt, Artificial Sequence
  Description of Artificial Sequence: Synthetic oligonucleotide
ucuguuguagagccacaaa

SEQ ID NO: 946177 - RNA, 19 nt, Artificial Sequence
  Description of Artificial Sequence: Synthetic oligonucleotide
agacgaacugcacuucaca

SEQ ID NO: 946178 - RNA, 19 nt, Artificial Sequence
  Description of Artificial Sequence: Synthetic oligonucleotide
cucuacuacacccauucga

SEQ ID NO: 946179 - RNA, 19 nt, Artificial Sequence
  Description of Artificial Sequence: Synthetic oligonucleotide
caucuuauacuuggucacg

SEQ ID NO: 946180 - RNA, 19 nt, Artificial Sequence
  Description of Artificial Sequence: Synthetic oligonucleotide
gcuaacuuagccuccuuug

SEQ ID NO: 946181 - RNA, 19 nt, Artificial Sequence
  Description of Artificial Sequence: Synthetic oligonucleotide
gaagacgaacugcacuuca

SEQ ID NO: 946182 - RNA, 19 nt, Artificial Sequence
  Description of Artificial Sequence: Synthetic oligonucleotide
acgaacugcacuucacaga

SEQ ID NO: 946183 - RNA, 19 nt, Artificial Sequence
  Description of Artificial Sequence: Synthetic oligonucleotide
gacgauggguuuugacucc

SEQ ID NO: 946184 - RNA, 19 nt, Artificial Sequence
  Description of Artificial Sequence: Synthetic oligonucleotide
auugggcaugaguaggacu

SEQ ID NO: 946185 - RNA, 19 nt, Artificial Sequence
  Description of Artificial Sequence: Synthetic oligonucleotide
uacccgguuggcgaugucg

SEQ ID NO: 946186 - RNA, 19 nt, Artificial Sequence
  Description of Artificial Sequence: Synthetic oligonucleotide
uauuuacggaaaugcuggu

SEQ ID NO: 946187 - RNA, 19 nt, Artificial Sequence
  Description of Artificial Sequence: Synthetic oligonucleotide
cauguuuggcacacucuac

SEQ ID NO: 946188 - RNA, 19 nt, Artificial Sequence
  Description of Artificial Sequence: Synthetic oligonucleotide
cuacuacacccauucgagc

SEQ ID NO: 946189 - RNA, 19 nt, Artificial Sequence
  Description of Artificial Sequence: Synthetic oligonucleotide
uauaguccuggucacucuu

SEQ ID NO: 946190 - RNA, 19 nt, Artificial Sequence
  Description of Artificial Sequence: Synthetic oligonucleotide
aguaggacuguaaauuuaa

SEQ ID NO: 946191 - RNA, 19 nt, Artificial Sequence
  Description of Artificial Sequence: Synthetic oligonucleotide
agaucggaguacccgguug

SEQ ID NO: 946192 - RNA, 19 nt, Artificial Sequence
  Description of Artificial Sequence: Synthetic oligonucleotide
guuguagagccacaaaccu

SEQ ID NO: 946193 - RNA, 19 nt, Artificial Sequence
  Description of Artificial Sequence: Synthetic oligonucleotide
cucuacaaauccccaggag

SEQ ID NO: 946194 - RNA, 19 nt, Artificial Sequence
  Description of Artificial Sequence: Synthetic oligonucleotide
ggugguggcuaacuuagcc

SEQ ID NO: 946195 - RNA, 19 nt, Artificial Sequence
  Description of Artificial Sequence: Synthetic oligonucleotide
acucuacuacacccauucg

SEQ ID NO: 946196 - RNA, 19 nt, Artificial Sequence
  Description of Artificial Sequence: Synthetic oligonucleotide
ggcaggaauggcaagcugg

SEQ ID NO: 946197 - RNA, 19 nt, Artificial Sequence
  Description of Artificial Sequence: Synthetic oligonucleotide
aggccguauuguuuagagg

SEQ ID NO: 946198 - RNA, 19 nt, Artificial Sequence
  Description of Artificial Sequence: Synthetic oligonucleotide
cugcacuucacagagccug

SEQ ID NO: 946199 - RNA, 19 nt, Artificial Sequence
  Description of Artificial Sequence: Synthetic oligonucleotide
auuuucaggccguauuguu

SEQ ID NO: 946200 - RNA, 19 nt, Artificial Sequence
  Description of Artificial Sequence: Synthetic oligonucleotide
guuugaccagucguaaggc

SEQ ID NO: 946201 - RNA, 19 nt, Artificial Sequence
  Description of Artificial Sequence: Synthetic oligonucleotide
uaacucauguuuggcacac

SEQ ID NO: 946202 - RNA, 19 nt, Artificial Sequence
  Description of Artificial Sequence: Synthetic oligonucleotide
acacacaguuauuuacgga

SEQ ID NO: 946203 - RNA, 19 nt, Artificial Sequence
  Description of Artificial Sequence: Synthetic oligonucleotide
ucgauccgcgaggaaagcg

SEQ ID NO: 946204 - RNA, 19 nt, Artificial Sequence
  Description of Artificial Sequence: Synthetic oligonucleotide
cuggacuuccaugucagac

SEQ ID NO: 946205 - RNA, 19 nt, Artificial Sequence
  Description of Artificial Sequence: Synthetic oligonucleotide
uuguagagccacaaaccuu

SEQ ID NO: 946206 - RNA, 19 nt, Artificial Sequence
  Description of Artificial Sequence: Synthetic oligonucleotide
ccaagcagaguagaaaagg

SEQ ID NO: 946207 - RNA, 19 nt, Artificial Sequence
  Description of Artificial Sequence: Synthetic oligonucleotide
guuaccuggguccccugag

SEQ ID NO: 946208 - RNA, 19 nt, Artificial Sequence
  Description of Artificial Sequence: Synthetic oligonucleotide
uggcaagcuggggauacgg

SEQ ID NO: 946209 - RNA, 19 nt, Artificial Sequence
  Description of Artificial Sequence: Synthetic oligonucleotide
aacucggccuuuucauggu

SEQ ID NO: 946210 - RNA, 19 nt, Artificial Sequence
  Description of Artificial Sequence: Synthetic oligonucleotide
ugggugggcgaaugugugg

SEQ ID NO: 946211 - RNA, 19 nt, Artificial Sequence
  Description of Artificial Sequence: Synthetic oligonucleotide
ucaccuuccuugaguauau

SEQ ID NO: 946212 - RNA, 19 nt, Artificial Sequence
  Description of Artificial Sequence: Synthetic oligonucleotide
caucgccuuucucacacag

SEQ ID NO: 946213 - RNA, 19 nt, Artificial Sequence
  Description of Artificial Sequence: Synthetic oligonucleotide
agcugccuuaaugacaucu

SEQ ID NO: 946214 - RNA, 19 nt, Artificial Sequence
  Description of Artificial Sequence: Synthetic oligonucleotide
ucgcccgacaucuuccuac

SEQ ID NO: 946215 - RNA, 19 nt, Artificial Sequence
  Description of Artificial Sequence: Synthetic oligonucleotide
cagaagaccccgcucacuc

SEQ ID NO: 946216 - RNA, 19 nt, Artificial Sequence
  Description of Artificial Sequence: Synthetic oligonucleotide
ucggcgauaguuugcuccu

SEQ ID NO: 946217 - RNA, 19 nt, Artificial Sequence
  Description of Artificial Sequence: Synthetic oligonucleotide
aacgccuuuccaccucacu

SEQ ID NO: 946218 - RNA, 19 nt, Artificial Sequence
  Description of Artificial Sequence: Synthetic oligonucleotide
ggcaucaaaacgccuuucc

SEQ ID NO: 946219 - RNA, 19 nt, Artificial Sequence
  Description of Artificial Sequence: Synthetic oligonucleotide
uuccggguuugaccagucg

SEQ ID NO: 946220 - RNA, 19 nt, Artificial Sequence
  Description of Artificial Sequence: Synthetic oligonucleotide
uagagucucuucgauccgc

SEQ ID NO: 946221 - RNA, 19 nt, Artificial Sequence
  Description of Artificial Sequence: Synthetic oligonucleotide
uauuguuuagaggggucuc

SEQ ID NO: 946222 - RNA, 19 nt, Artificial Sequence
  Description of Artificial Sequence: Synthetic oligonucleotide
uuagaggggucucguuugu

SEQ ID NO: 946223 - RNA, 19 nt, Artificial Sequence
  Description of Artificial Sequence: Synthetic oligonucleotide
aaagaucggaguacccggu

SEQ ID NO: 946224 - RNA, 19 nt, Artificial Sequence
  Description of Artificial Sequence: Synthetic oligonucleotide
cuagagucucuucgauccg

SEQ ID NO: 946225 - RNA, 19 nt, Artificial Sequence
  Description of Artificial Sequence: Synthetic oligonucleotide
accaaagaucggaguaccc

SEQ ID NO: 946226 - RNA, 19 nt, Artificial Sequence
  Description of Artificial Sequence: Synthetic oligonucleotide
caugcugcuucaacuggug

SEQ ID NO: 946227 - RNA, 19 nt, Artificial Sequence
  Description of Artificial Sequence: Synthetic oligonucleotide
uuucgacuugcagaacucu

SEQ ID NO: 946228 - RNA, 19 nt, Artificial Sequence
  Description of Artificial Sequence: Synthetic oligonucleotide
gggaccacugguuauccgc

SEQ ID NO: 946229 - RNA, 19 nt, Artificial Sequence
  Description of Artificial Sequence: Synthetic oligonucleotide
cucagcacugauacaccug

SEQ ID NO: 946230 - RNA, 19 nt, Artificial Sequence
  Description of Artificial Sequence: Synthetic oligonucleotide
auccgcauggggccauugg

SEQ ID NO: 946231 - RNA, 19 nt, Artificial Sequence
  Description of Artificial Sequence: Synthetic oligonucleotide
ccaaagaucggaguacccg

SEQ ID NO: 946232 - RNA, 19 nt, Artificial Sequence
  Description of Artificial Sequence: Synthetic oligonucleotide
gaagccuggccucccaaga

SEQ ID NO: 946233 - RNA, 19 nt, Artificial Sequence
  Description of Artificial Sequence: Synthetic oligonucleotide
caccaaagaucggaguacc

SEQ ID NO: 946234 - RNA, 19 nt, Artificial Sequence
  Description of Artificial Sequence: Synthetic oligonucleotide
cacccuccuucucauagag

SEQ ID NO: 946235 - RNA, 19 nt, Artificial Sequence
  Description of Artificial Sequence: Synthetic oligonucleotide
ucccuuccagccacaagcu

SEQ ID NO: 946236 - RNA, 19 nt, Artificial Sequence
  Description of Artificial Sequence: Synthetic oligonucleotide
cuucggcacaaagaugagc

SEQ ID NO: 946237 - RNA, 19 nt, Artificial Sequence
  Description of Artificial Sequence: Synthetic oligonucleotide
uucuauuggugugcaauua

SEQ ID NO: 946238 - RNA, 19 nt, Artificial Sequence
  Description of Artificial Sequence: Synthetic oligonucleotide
aagagccuuuagcucugca

SEQ ID NO: 946239 - RNA, 19 nt, Artificial Sequence
  Description of Artificial Sequence: Synthetic oligonucleotide
uucuguuguagagccacaa

SEQ ID NO: 946240 - RNA, 19 nt, Artificial Sequence
  Description of Artificial Sequence: Synthetic oligonucleotide
gggucucguuuguaaaugg

SEQ ID NO: 946241 - RNA, 19 nt, Artificial Sequence
  Description of Artificial Sequence: Synthetic oligonucleotide
gcucuuaaaguaaauggca

SEQ ID NO: 946242 - RNA, 19 nt, Artificial Sequence
  Description of Artificial Sequence: Synthetic oligonucleotide
ggauacgggacccaccuca

SEQ ID NO: 946243 - RNA, 19 nt, Artificial Sequence
  Description of Artificial Sequence: Synthetic oligonucleotide
uagcuagagucucuucgau

SEQ ID NO: 946244 - RNA, 19 nt, Artificial Sequence
  Description of Artificial Sequence: Synthetic oligonucleotide
agagucucuucgauccgcg

SEQ ID NO: 946245 - RNA, 19 nt, Artificial Sequence
  Description of Artificial Sequence: Synthetic oligonucleotide
uucaggccguauuguuuag

SEQ ID NO: 946246 - RNA, 19 nt, Artificial Sequence
  Description of Artificial Sequence: Synthetic oligonucleotide
uuaucauggcaucgccuuu

SEQ ID NO: 946247 - RNA, 19 nt, Artificial Sequence
  Description of Artificial Sequence: Synthetic oligonucleotide
acccgguuggcgaugucgc

SEQ ID NO: 946248 - RNA, 19 nt, Artificial Sequence
  Description of Artificial Sequence: Synthetic oligonucleotide
acgaccagguccucggcga

SEQ ID NO: 946249 - RNA, 19 nt, Artificial Sequence
  Description of Artificial Sequence: Synthetic oligonucleotide
aagaucggaguacccgguu

SEQ ID NO: 946250 - RNA, 19 nt, Artificial Sequence
  Description of Artificial Sequence: Synthetic oligonucleotide
gauacgggacccaccucag

SEQ ID NO: 946251 - RNA, 19 nt, Artificial Sequence
  Description of Artificial Sequence: Synthetic oligonucleotide
ucggcacaaagaugagcug

SEQ ID NO: 946252 - RNA, 19 nt, Artificial Sequence
  Description of Artificial Sequence: Synthetic oligonucleotide
cacgaccagguccucggcg

SEQ ID NO: 946253 - RNA, 19 nt, Artificial Sequence
  Description of Artificial Sequence: Synthetic oligonucleotide
ugcuucaacuggugugaca

SEQ ID NO: 946254 - RNA, 19 nt, Artificial Sequence
  Description of Artificial Sequence: Synthetic oligonucleotide
cuucaacuggugugacagc

SEQ ID NO: 946255 - RNA, 19 nt, Artificial Sequence
  Description of Artificial Sequence: Synthetic oligonucleotide
gagcuggaggcuuccacca

SEQ ID NO: 946256 - RNA, 19 nt, Artificial Sequence
  Description of Artificial Sequence: Synthetic oligonucleotide
cuggauaauuguuuucucu

SEQ ID NO: 946257 - RNA, 19 nt, Artificial Sequence
  Description of Artificial Sequence: Synthetic oligonucleotide
acucggccuuuucaugguc

SEQ ID NO: 946258 - RNA, 19 nt, Artificial Sequence
  Description of Artificial Sequence: Synthetic oligonucleotide
caacuuuguuccaggcuuc

SEQ ID NO: 946259 - RNA, 19 nt, Artificial Sequence
  Description of Artificial Sequence: Synthetic oligonucleotide
uugcagaacucuggagaag

SEQ ID NO: 946260 - RNA, 19 nt, Artificial Sequence
  Description of Artificial Sequence: Synthetic oligonucleotide
uggggauacgggacccacc

SEQ ID NO: 946261 - RNA, 19 nt, Artificial Sequence
  Description of Artificial Sequence: Synthetic oligonucleotide
ugggcgaaugugugggaac

SEQ ID NO: 946262 - RNA, 19 nt, Artificial Sequence
  Description of Artificial Sequence: Synthetic oligonucleotide
aggcacgugaaguuuucau

SEQ ID NO: 946263 - RNA, 19 nt, Artificial Sequence
  Description of Artificial Sequence: Synthetic oligonucleotide
aggggucucguuuguaaau

SEQ ID NO: 946264 - RNA, 19 nt, Artificial Sequence
  Description of Artificial Sequence: Synthetic oligonucleotide
cuuagccuccuuuguucug

SEQ ID NO: 946265 - RNA, 19 nt, Artificial Sequence
  Description of Artificial Sequence: Synthetic oligonucleotide
gagugggugggcgaaugug

SEQ ID NO: 946266 - RNA, 19 nt, Artificial Sequence
  Description of Artificial Sequence: Synthetic oligonucleotide
agggaccacugguuauccg

SEQ ID NO: 946267 - RNA, 19 nt, Artificial Sequence
  Description of Artificial Sequence: Synthetic oligonucleotide
uccucggcgauaguuugcu

SEQ ID NO: 946268 - RNA, 19 nt, Artificial Sequence
  Description of Artificial Sequence: Synthetic oligonucleotide
caauuaaaugagugagcaa

SEQ ID NO: 946269 - RNA, 19 nt, Artificial Sequence
  Description of Artificial Sequence: Synthetic oligonucleotide
ggcaucgccuuucucacac

SEQ ID NO: 946270 - RNA, 19 nt, Artificial Sequence
  Description of Artificial Sequence: Synthetic oligonucleotide
ccacugguuauccgcaugg

SEQ ID NO: 946271 - RNA, 19 nt, Artificial Sequence
  Description of Artificial Sequence: Synthetic oligonucleotide
agugggugggcgaaugugu

SEQ ID NO: 946272 - RNA, 19 nt, Artificial Sequence
  Description of Artificial Sequence: Synthetic oligonucleotide
uguuuagaggggucucguu

SEQ ID NO: 946273 - RNA, 19 nt, Artificial Sequence
  Description of Artificial Sequence: Synthetic oligonucleotide
cauguaccucaaacucggc

SEQ ID NO: 946274 - RNA, 19 nt, Artificial Sequence
  Description of Artificial Sequence: Synthetic oligonucleotide
cugguggcauucucugcag

SEQ ID NO: 946275 - RNA, 19 nt, Artificial Sequence
  Description of Artificial Sequence: Synthetic oligonucleotide
ucucuucgauccgcgagga

SEQ ID NO: 946276 - RNA, 19 nt, Artificial Sequence
  Description of Artificial Sequence: Synthetic oligonucleotide
acggaaaugcugguaggga

SEQ ID NO: 946277 - RNA, 19 nt, Artificial Sequence
  Description of Artificial Sequence: Synthetic oligonucleotide
auuuacggaaaugcuggua

SEQ ID NO: 946278 - RNA, 19 nt, Artificial Sequence
  Description of Artificial Sequence: Synthetic oligonucleotide
aaacgccuuuccaccucac

SEQ ID NO: 946279 - RNA, 19 nt, Artificial Sequence
  Description of Artificial Sequence: Synthetic oligonucleotide
gccacaaaccuugaccaag

SEQ ID NO: 946280 - RNA, 19 nt, Artificial Sequence
  Description of Artificial Sequence: Synthetic oligonucleotide
ccacaaaccuugaccaagc

SEQ ID NO: 946281 - RNA, 19 nt, Artificial Sequence
  Description of Artificial Sequence: Synthetic oligonucleotide
ucacagagccuggggugcg

SEQ ID NO: 946282 - RNA, 19 nt, Artificial Sequence
  Description of Artificial Sequence: Synthetic oligonucleotide
cuugaccaagcagaguaga

SEQ ID NO: 946283 - RNA, 19 nt, Artificial Sequence
  Description of Artificial Sequence: Synthetic oligonucleotide
gcgaaugugugggaacugg

SEQ ID NO: 946284 - RNA, 19 nt, Artificial Sequence
  Description of Artificial Sequence: Synthetic oligonucleotide
gaagugacacacacaguua

SEQ ID NO: 946285 - RNA, 19 nt, Artificial Sequence
  Description of Artificial Sequence: Synthetic oligonucleotide
gccacaccaauuacaaaag

SEQ ID NO: 946286 - RNA, 19 nt, Artificial Sequence
  Description of Artificial Sequence: Synthetic oligonucleotide
agcauaccuucuauuggug

SEQ ID NO: 946287 - RNA, 19 nt, Artificial Sequence
  Description of Artificial Sequence: Synthetic oligonucleotide
ccauuaucauggcaucgcc

SEQ ID NO: 946288 - RNA, 19 nt, Artificial Sequence
  Description of Artificial Sequence: Synthetic oligonucleotide
cuaacuuagccuccuuugu

SEQ ID NO: 946289 - RNA, 19 nt, Artificial Sequence
  Description of Artificial Sequence: Synthetic oligonucleotide
gaggggucucguuuguaaa

SEQ ID NO: 946290 - RNA, 19 nt, Artificial Sequence
  Description of Artificial Sequence: Synthetic oligonucleotide
uuuccggguuugaccaguc

SEQ ID NO: 946291 - RNA, 19 nt, Artificial Sequence
  Description of Artificial Sequence: Synthetic oligonucleotide
aaccuugaccaagcagagu

SEQ ID NO: 946292 - RNA, 19 nt, Artificial Sequence
  Description of Artificial Sequence: Synthetic oligonucleotide
gggugggcgaauguguggg

SEQ ID NO: 946293 - RNA, 19 nt, Artificial Sequence
  Description of Artificial Sequence: Synthetic oligonucleotide
ggcgauaguuugcuccugc

SEQ ID NO: 946294 - RNA, 19 nt, Artificial Sequence
  Description of Artificial Sequence: Synthetic oligonucleotide
ugguggcauucucugcagu

SEQ ID NO: 946295 - RNA, 19 nt, Artificial Sequence
  Description of Artificial Sequence: Synthetic oligonucleotide
acaugcugcuucaacuggu

SEQ ID NO: 946296 - RNA, 19 nt, Artificial Sequence
  Description of Artificial Sequence: Synthetic oligonucleotide
guauuguuuagaggggucu

SEQ ID NO: 946297 - RNA, 19 nt, Artificial Sequence
  Description of Artificial Sequence: Synthetic oligonucleotide
ggagaagacgaacugcacu

SEQ ID NO: 946298 - RNA, 19 nt, Artificial Sequence
  Description of Artificial Sequence: Synthetic oligonucleotide
ucaggccguauuguuuaga

SEQ ID NO: 946299 - RNA, 19 nt, Artificial Sequence
  Description of Artificial Sequence: Synthetic oligonucleotide
gucaccuuccuugaguaua

SEQ ID NO: 946300 - RNA, 19 nt, Artificial Sequence
  Description of Artificial Sequence: Synthetic oligonucleotide
uuccggccuguuaccuggg

SEQ ID NO: 946301 - RNA, 19 nt, Artificial Sequence
  Description of Artificial Sequence: Synthetic oligonucleotide
cauugggcaugaguaggac

SEQ ID NO: 946302 - RNA, 19 nt, Artificial Sequence
  Description of Artificial Sequence: Synthetic oligonucleotide
gucuucgcccgacaucuuc

SEQ ID NO: 946303 - RNA, 19 nt, Artificial Sequence
  Description of Artificial Sequence: Synthetic oligonucleotide
uucgauccgcgaggaaagc

SEQ ID NO: 946304 - RNA, 19 nt, Artificial Sequence
  Description of Artificial Sequence: Synthetic oligonucleotide
gucaggcucaaagggacca

SEQ ID NO: 946305 - RNA, 19 nt, Artificial Sequence
  Description of Artificial Sequence: Synthetic oligonucleotide
gcaugaguaggacuguaaa

SEQ ID NO: 946306 - RNA, 19 nt, Artificial Sequence
  Description of Artificial Sequence: Synthetic oligonucleotide
ggguuugaccagucguaag

SEQ ID NO: 946307 - RNA, 19 nt, Artificial Sequence
  Description of Artificial Sequence: Synthetic oligonucleotide
cauuaucauggcaucgccu

SEQ ID NO: 946308 - RNA, 19 nt, Artificial Sequence
  Description of Artificial Sequence: Synthetic oligonucleotide
acaaauccccaggagccau

SEQ ID NO: 946309 - RNA, 19 nt, Artificial Sequence
  Description of Artificial Sequence: Synthetic oligonucleotide
gggacagcaugccagaggu

SEQ ID NO: 946310 - RNA, 19 nt, Artificial Sequence
  Description of Artificial Sequence: Synthetic oligonucleotide
gccguauuguuuagagggg

SEQ ID NO: 946311 - RNA, 19 nt, Artificial Sequence
  Description of Artificial Sequence: Synthetic oligonucleotide
gggcagaagaccccgcuca

SEQ ID NO: 946312 - RNA, 19 nt, Artificial Sequence
  Description of Artificial Sequence: Synthetic oligonucleotide
gaacugcacuucacagagc

SEQ ID NO: 946313 - RNA, 19 nt, Artificial Sequence
  Description of Artificial Sequence: Synthetic oligonucleotide
gcauaaacuucauguaccu

SEQ ID NO: 946314 - RNA, 19 nt, Artificial Sequence
  Description of Artificial Sequence: Synthetic oligonucleotide
agucaccuuccuugaguau

SEQ ID NO: 946315 - RNA, 19 nt, Artificial Sequence
  Description of Artificial Sequence: Synthetic oligonucleotide
acucuucaaaggggagaag

SEQ ID NO: 946316 - RNA, 19 nt, Artificial Sequence
  Description of Artificial Sequence: Synthetic oligonucleotide
gugggugggcgaaugugug

SEQ ID NO: 946317 - RNA, 19 nt, Artificial Sequence
  Description of Artificial Sequence: Synthetic oligonucleotide
ggggucucguuuguaaaug

SEQ ID NO: 946318 - RNA, 19 nt, Artificial Sequence
  Description of Artificial Sequence: Synthetic oligonucleotide
gagucucuucgauccgcga

SEQ ID NO: 946319 - RNA, 19 nt, Artificial Sequence
  Description of Artificial Sequence: Synthetic oligonucleotide
caaagaugagcugccuuaa

SEQ ID NO: 946320 - RNA, 19 nt, Artificial Sequence
  Description of Artificial Sequence: Synthetic oligonucleotide
cacaaucugaaagucaguu

SEQ ID NO: 946321 - RNA, 19 nt, Artificial Sequence
  Description of Artificial Sequence: Synthetic oligonucleotide
auacgggacccaccucagu

SEQ ID NO: 946322 - RNA, 19 nt, Artificial Sequence
  Description of Artificial Sequence: Synthetic oligonucleotide
cacaaaccuugaccaagca

SEQ ID NO: 946323 - RNA, 19 nt, Artificial Sequence
  Description of Artificial Sequence: Synthetic oligonucleotide
aguacccgguuggcgaugu

SEQ ID NO: 946324 - RNA, 19 nt, Artificial Sequence
  Description of Artificial Sequence: Synthetic oligonucleotide
gugacacacacaguuauuu

SEQ ID NO: 946325 - RNA, 19 nt, Artificial Sequence
  Description of Artificial Sequence: Synthetic oligonucleotide
ucccaagaccagagucagu

SEQ ID NO: 946326 - RNA, 19 nt, Artificial Sequence
  Description of Artificial Sequence: Synthetic oligonucleotide
ucucuccaucgaucacaug

SEQ ID NO: 946327 - RNA, 19 nt, Artificial Sequence
  Description of Artificial Sequence: Synthetic oligonucleotide
acgauggguuuugacuccu

SEQ ID NO: 946328 - RNA, 19 nt, Artificial Sequence
  Description of Artificial Sequence: Synthetic oligonucleotide
cccgacaucuuccuaccac

SEQ ID NO: 946329 - RNA, 19 nt, Artificial Sequence
  Description of Artificial Sequence: Synthetic oligonucleotide
uauccgcauggggccauug

SEQ ID NO: 946330 - RNA, 19 nt, Artificial Sequence
  Description of Artificial Sequence: Synthetic oligonucleotide
cggccuguuaccugggucc

SEQ ID NO: 946331 - RNA, 19 nt, Artificial Sequence
  Description of Artificial Sequence: Synthetic oligonucleotide
cuggggauacgggacccac

SEQ ID NO: 946332 - RNA, 19 nt, Artificial Sequence
  Description of Artificial Sequence: Synthetic oligonucleotide
ccuuccuugaguauauagu

SEQ ID NO: 946333 - RNA, 19 nt, Artificial Sequence
  Description of Artificial Sequence: Synthetic oligonucleotide
agugacacacacaguuauu

SEQ ID NO: 946334 - RNA, 19 nt, Artificial Sequence
  Description of Artificial Sequence: Synthetic oligonucleotide
ccgcauggggccauugggc

SEQ ID NO: 946335 - RNA, 19 nt, Artificial Sequence
  Description of Artificial Sequence: Synthetic oligonucleotide
gagccacaccaauuacaaa

SEQ ID NO: 946336 - RNA, 19 nt, Artificial Sequence
  Description of Artificial Sequence: Synthetic oligonucleotide
cucaaagggaccacugguu

SEQ ID NO: 946337 - RNA, 19 nt, Artificial Sequence
  Description of Artificial Sequence: Synthetic oligonucleotide
gguggcuaacuuagccucc

SEQ ID NO: 946338 - RNA, 19 nt, Artificial Sequence
  Description of Artificial Sequence: Synthetic oligonucleotide
ggucacgaccagguccucg

SEQ ID NO: 946339 - RNA, 19 nt, Artificial Sequence
  Description of Artificial Sequence: Synthetic oligonucleotide
ggaauggcaagcuggggau

SEQ ID NO: 946340 - RNA, 19 nt, Artificial Sequence
  Description of Artificial Sequence: Synthetic oligonucleotide
uccggccuguuaccugggu

SEQ ID NO: 946341 - RNA, 19 nt, Artificial Sequence
  Description of Artificial Sequence: Synthetic oligonucleotide
uucgcccgacaucuuccua

SEQ ID NO: 946342 - RNA, 19 nt, Artificial Sequence
  Description of Artificial Sequence: Synthetic oligonucleotide
ccaccaaagaucggaguac

SEQ ID NO: 946343 - RNA, 19 nt, Artificial Sequence
  Description of Artificial Sequence: Synthetic oligonucleotide
gagcugacuaggacaucca

SEQ ID NO: 946344 - RNA, 19 nt, Artificial Sequence
  Description of Artificial Sequence: Synthetic oligonucleotide
cugggacagcaugccagag

SEQ ID NO: 946345 - RNA, 19 nt, Artificial Sequence
  Description of Artificial Sequence: Synthetic oligonucleotide
gguuuccggguuugaccag

SEQ ID NO: 946346 - RNA, 19 nt, Artificial Sequence
  Description of Artificial Sequence: Synthetic oligonucleotide
cguauuguuuagagggguc

SEQ ID NO: 946347 - RNA, 19 nt, Artificial Sequence
  Description of Artificial Sequence: Synthetic oligonucleotide
acacccauucgagccuucu

SEQ ID NO: 946348 - RNA, 19 nt, Artificial Sequence
  Description of Artificial Sequence: Synthetic oligonucleotide
gcagaacucuggagaagag

SEQ ID NO: 946349 - RNA, 19 nt, Artificial Sequence
  Description of Artificial Sequence: Synthetic oligonucleotide
cgauaguuugcuccugcug

SEQ ID NO: 946350 - RNA, 19 nt, Artificial Sequence
  Description of Artificial Sequence: Synthetic oligonucleotide
gccuuaaugacaucugcuu

SEQ ID NO: 946351 - RNA, 19 nt, Artificial Sequence
  Description of Artificial Sequence: Synthetic oligonucleotide
ccaagaccagagucaguug

SEQ ID NO: 946352 - RNA, 19 nt, Artificial Sequence
  Description of Artificial Sequence: Synthetic oligonucleotide
guccucggcgauaguuugc

SEQ ID NO: 946353 - RNA, 19 nt, Artificial Sequence
  Description of Artificial Sequence: Synthetic oligonucleotide
gaguacccgguuggcgaug

SEQ ID NO: 946354 - RNA, 19 nt, Artificial Sequence
  Description of Artificial Sequence: Synthetic oligonucleotide
gcauaccuucuauuggugu

SEQ ID NO: 946355 - RNA, 19 nt, Artificial Sequence
  Description of Artificial Sequence: Synthetic oligonucleotide
caaagggaccacugguuau

SEQ ID NO: 946356 - RNA, 19 nt, Artificial Sequence
  Description of Artificial Sequence: Synthetic oligonucleotide
ggcagaagaccccgcucac

SEQ ID NO: 946357 - RNA, 19 nt, Artificial Sequence
  Description of Artificial Sequence: Synthetic oligonucleotide
ugcagucuuggaggccuuc

SEQ ID NO: 946358 - RNA, 19 nt, Artificial Sequence
  Description of Artificial Sequence: Synthetic oligonucleotide
cugcuucaacuggugugac

SEQ ID NO: 946359 - RNA, 19 nt, Artificial Sequence
  Description of Artificial Sequence: Synthetic oligonucleotide
ccacaagcuguagcuagag

SEQ ID NO: 946360 - RNA, 19 nt, Artificial Sequence
  Description of Artificial Sequence: Synthetic oligonucleotide
cacuuguguguucugguuu

SEQ ID NO: 946361 - RNA, 19 nt, Artificial Sequence
  Description of Artificial Sequence: Synthetic oligonucleotide
uagaggggucucguuugua

SEQ ID NO: 946362 - RNA, 19 nt, Artificial Sequence
  Description of Artificial Sequence: Synthetic oligonucleotide
ggaccacugguuauccgca

SEQ ID NO: 946363 - RNA, 19 nt, Artificial Sequence
  Description of Artificial Sequence: Synthetic oligonucleotide
ccauugggcaugaguagga

SEQ ID NO: 946364 - RNA, 19 nt, Artificial Sequence
  Description of Artificial Sequence: Synthetic oligonucleotide
ggcacgugaaguuuucauu

SEQ ID NO: 946365 - RNA, 19 nt, Artificial Sequence
  Description of Artificial Sequence: Synthetic oligonucleotide
guagagccacaaaccuuga

SEQ ID NO: 946366 - RNA, 19 nt, Artificial Sequence
  Description of Artificial Sequence: Synthetic oligonucleotide
gugggcgaaugugugggaa

SEQ ID NO: 946367 - RNA, 19 nt, Artificial Sequence
  Description of Artificial Sequence: Synthetic oligonucleotide
guuuccggguuugaccagu

SEQ ID NO: 946368 - RNA, 19 nt, Artificial Sequence
  Description of Artificial Sequence: Synthetic oligonucleotide
ccgguuggcgaugucgccc

SEQ ID NO: 946369 - RNA, 19 nt, Artificial Sequence
  Description of Artificial Sequence: Synthetic oligonucleotide
ggcgaaugugugggaacug

SEQ ID NO: 946370 - RNA, 19 nt, Artificial Sequence
  Description of Artificial Sequence: Synthetic oligonucleotide
cugauacaccugagcugga

SEQ ID NO: 946371 - RNA, 19 nt, Artificial Sequence
  Description of Artificial Sequence: Synthetic oligonucleotide
ggggcagaagaccccgcuc

SEQ ID NO: 946372 - RNA, 19 nt, Artificial Sequence
  Description of Artificial Sequence: Synthetic oligonucleotide
agagucaguuggagcuggu

SEQ ID NO: 946373 - RNA, 19 nt, Artificial Sequence
  Description of Artificial Sequence: Synthetic oligonucleotide
agcaugccagagguacaaa

SEQ ID NO: 946374 - RNA, 19 nt, Artificial Sequence
  Description of Artificial Sequence: Synthetic oligonucleotide
cacaagcuguagcuagagu

SEQ ID NO: 946375 - RNA, 19 nt, Artificial Sequence
  Description of Artificial Sequence: Synthetic oligonucleotide
acacucuacuacacccauu

SEQ ID NO: 946376 - RNA, 19 nt, Artificial Sequence
  Description of Artificial Sequence: Synthetic oligonucleotide
gguuauccgcauggggcca

SEQ ID NO: 946377 - RNA, 19 nt, Artificial Sequence
  Description of Artificial Sequence: Synthetic oligonucleotide
ggccuguuaccuggguccc

SEQ ID NO: 946378 - RNA, 19 nt, Artificial Sequence
  Description of Artificial Sequence: Synthetic oligonucleotide
cugcucgucuucgcccgac

SEQ ID NO: 946379 - RNA, 19 nt, Artificial Sequence
  Description of Artificial Sequence: Synthetic oligonucleotide
gaccacugguuauccgcau

SEQ ID NO: 946380 - RNA, 19 nt, Artificial Sequence
  Description of Artificial Sequence: Synthetic oligonucleotide
cugagcugacuaggacauc

SEQ ID NO: 946381 - RNA, 19 nt, Artificial Sequence
  Description of Artificial Sequence: Synthetic oligonucleotide
cuucgcccgacaucuuccu

SEQ ID NO: 946382 - RNA, 19 nt, Artificial Sequence
  Description of Artificial Sequence: Synthetic oligonucleotide
ggucucguuuguaaauggu

SEQ ID NO: 946383 - RNA, 19 nt, Artificial Sequence
  Description of Artificial Sequence: Synthetic oligonucleotide
ggugggcgaauguguggga

SEQ ID NO: 946384 - RNA, 19 nt, Artificial Sequence
  Description of Artificial Sequence: Synthetic oligonucleotide
guagggaaggcaacaccuu

SEQ ID NO: 946385 - RNA, 19 nt, Artificial Sequence
  Description of Artificial Sequence: Synthetic oligonucleotide
uuauccgcauggggccauu

SEQ ID NO: 946386 - RNA, 19 nt, Artificial Sequence
  Description of Artificial Sequence: Synthetic oligonucleotide
cgcccgacaucuuccuacc

SEQ ID NO: 946387 - RNA, 19 nt, Artificial Sequence
  Description of Artificial Sequence: Synthetic oligonucleotide
cccgguuggcgaugucgcc

SEQ ID NO: 946388 - RNA, 19 nt, Artificial Sequence
  Description of Artificial Sequence: Synthetic oligonucleotide
ccggccuguuaccuggguc

SEQ ID NO: 946389 - RNA, 19 nt, Artificial Sequence
  Description of Artificial Sequence: Synthetic oligonucleotide
gcgauaguuugcuccugcu

SEQ ID NO: 946390 - RNA, 19 nt, Artificial Sequence
  Description of Artificial Sequence: Synthetic oligonucleotide
ccggguuugaccagucgua

SEQ ID NO: 946391 - RNA, 19 nt, Artificial Sequence
  Description of Artificial Sequence: Synthetic oligonucleotide
gagucaguuggagcugguu

SEQ ID NO: 946392 - RNA, 19 nt, Artificial Sequence
  Description of Artificial Sequence: Synthetic oligonucleotide
gggauacgggacccaccuc

SEQ ID NO: 946393 - RNA, 19 nt, Artificial Sequence
  Description of Artificial Sequence: Synthetic oligonucleotide
gggcgaaugugugggaacu

SEQ ID NO: 946394 - RNA, 19 nt, Artificial Sequence
  Description of Artificial Sequence: Synthetic oligonucleotide
cccaagaccagagucaguu

SEQ ID NO: 946395 - RNA, 19 nt, Artificial Sequence
  Description of Artificial Sequence: Synthetic oligonucleotide
accagucguaaggcagcuu

SEQ ID NO: 946396 - RNA, 19 nt, Artificial Sequence
  Description of Artificial Sequence: Synthetic oligonucleotide
ggaguacccgguuggcgau

SEQ ID NO: 946397 - RNA, 19 nt, Artificial Sequence
  Description of Artificial Sequence: Synthetic oligonucleotide
cucuucgauccgcgaggaa

SEQ ID NO: 946398 - RNA, 19 nt, Artificial Sequence
  Description of Artificial Sequence: Synthetic oligonucleotide
gcaucgccuuucucacaca

SEQ ID NO: 946399 - RNA, 19 nt, Artificial Sequence
  Description of Artificial Sequence: Synthetic oligonucleotide
guacccgguuggcgauguc

SEQ ID NO: 946400 - RNA, 19 nt, Artificial Sequence
  Description of Artificial Sequence: Synthetic oligonucleotide
guuauccgcauggggccau

SEQ ID NO: 946401 - RNA, 19 nt, Artificial Sequence
  Description of Artificial Sequence: Synthetic oligonucleotide
uggucacgaccagguccuc

SEQ ID NO: 946402 - RNA, 19 nt, Artificial Sequence
  Description of Artificial Sequence: Synthetic oligonucleotide
cuggguccccugagccaca

SEQ ID NO: 946403 - RNA, 19 nt, Artificial Sequence
  Description of Artificial Sequence: Synthetic oligonucleotide
gugugacagcauaccuucu

SEQ ID NO: 946404 - RNA, 19 nt, Artificial Sequence
  Description of Artificial Sequence: Synthetic oligonucleotide
ggaccccaaggucaauuuu

SEQ ID NO: 946405 - RNA, 19 nt, Artificial Sequence
  Description of Artificial Sequence: Synthetic oligonucleotide
gccuguuaccugggucccc

SEQ ID NO: 946406 - RNA, 19 nt, Artificial Sequence
  Description of Artificial Sequence: Synthetic oligonucleotide
ggguccccugagccacacc

SEQ ID NO: 946407 - RNA, 19 nt, Artificial Sequence
  Description of Artificial Sequence: Synthetic oligonucleotide
gcuuuccggccuguuaccu

SEQ ID NO: 946408 - RNA, 19 nt, Artificial Sequence
  Description of Artificial Sequence: Synthetic oligonucleotide
gcccgacaucuuccuacca

SEQ ID NO: 946409 - RNA, 19 nt, Artificial Sequence
  Description of Artificial Sequence: Synthetic oligonucleotide
gggcaugaguaggacugua

SEQ ID NO: 946410 - RNA, 19 nt, Artificial Sequence
  Description of Artificial Sequence: Synthetic oligonucleotide
ccucggcgauaguuugcuc

SEQ ID NO: 946411 - RNA, 19 nt, Artificial Sequence
  Description of Artificial Sequence: Synthetic oligonucleotide
cacccauucgagccuucuu

SEQ ID NO: 946412 - RNA, 19 nt, Artificial Sequence
  Description of Artificial Sequence: Synthetic oligonucleotide
gcucgucuucgcccgacau

SEQ ID NO: 946413 - RNA, 19 nt, Artificial Sequence
  Description of Artificial Sequence: Synthetic oligonucleotide
caccuuccuugaguauaua

SEQ ID NO: 946414 - RNA, 19 nt, Artificial Sequence
  Description of Artificial Sequence: Synthetic oligonucleotide
cuguaggauucuggauaau

SEQ ID NO: 946415 - RNA, 19 nt, Artificial Sequence
  Description of Artificial Sequence: Synthetic oligonucleotide
cggguuugaccagucguaa

SEQ ID NO: 946416 - RNA, 19 nt, Artificial Sequence
  Description of Artificial Sequence: Synthetic oligonucleotide
cugcagucuuggaggccuu

SEQ ID NO: 946417 - RNA, 19 nt, Artificial Sequence
  Description of Artificial Sequence: Synthetic oligonucleotide
cggcgauaguuugcuccug

SEQ ID NO: 946418 - RNA, 19 nt, Artificial Sequence
  Description of Artificial Sequence: Synthetic oligonucleotide
cgucuucgcccgacaucuu

SEQ ID NO: 946419 - RNA, 19 nt, Artificial Sequence
  Description of Artificial Sequence: Synthetic oligonucleotide
aaucacaucggucauuucc

SEQ ID NO: 946420 - RNA, 19 nt, Artificial Sequence
  Description of Artificial Sequence: Synthetic oligonucleotide
auucgucuuauauagaugc

SEQ ID NO: 946421 - RNA, 19 nt, Artificial Sequence
  Description of Artificial Sequence: Synthetic oligonucleotide
ucuuauucgucuuauauag

SEQ ID NO: 946422 - RNA, 19 nt, Artificial Sequence
  Description of Artificial Sequence: Synthetic oligonucleotide
agcaugucgacuuacauac

SEQ ID NO: 946423 - RNA, 19 nt, Artificial Sequence
  Description of Artificial Sequence: Synthetic oligonucleotide
acugauucggaguagaguc

SEQ ID NO: 946424 - RNA, 19 nt, Artificial Sequence
  Description of Artificial Sequence: Synthetic oligonucleotide
  modified_base (4)..(4): a, c, u, g, unknown or other
aggnaggucauucuuauuc

SEQ ID NO: 946425 - RNA, 19 nt, Artificial Sequence
  Description of Artificial Sequence: Synthetic oligonucleotide
aguacgaauacucuaacug

SEQ ID NO: 946426 - RNA, 19 nt, Artificial Sequence
  Description of Artificial Sequence: Synthetic oligonucleotide
ucaaucacgucauugaaug

SEQ ID NO: 946427 - RNA, 19 nt, Artificial Sequence
  Description of Artificial Sequence: Synthetic oligonucleotide
uuuaagaccuucaaguagu

SEQ ID NO: 946428 - RNA, 19 nt, Artificial Sequence
  Description of Artificial Sequence: Synthetic oligonucleotide
gaauacucuaacuguaagg

SEQ ID NO: 946429 - RNA, 19 nt, Artificial Sequence
  Description of Artificial Sequence: Synthetic oligonucleotide
aggcauacuuauuagggcc

SEQ ID NO: 946430 - RNA, 19 nt, Artificial Sequence
  Description of Artificial Sequence: Synthetic oligonucleotide
aaucacgucauugaauggg

SEQ ID NO: 946431 - RNA, 19 nt, Artificial Sequence
  Description of Artificial Sequence: Synthetic oligonucleotide
agugcuuguaagcaugucg

SEQ ID NO: 946432 - RNA, 19 nt, Artificial Sequence
  Description of Artificial Sequence: Synthetic oligonucleotide
gacauaauuaucuccagca

SEQ ID NO: 946433 - RNA, 19 nt, Artificial Sequence
  Description of Artificial Sequence: Synthetic oligonucleotide
ucgauggacauaauuaucu

SEQ ID NO: 946434 - RNA, 19 nt, Artificial Sequence
  Description of Artificial Sequence: Synthetic oligonucleotide
gacaguaucggcaaacagg

SEQ ID NO: 946435 - RNA, 19 nt, Artificial Sequence
  Description of Artificial Sequence: Synthetic oligonucleotide
ucucugaugauuuucauuu

SEQ ID NO: 946436 - RNA, 19 nt, Artificial Sequence
  Description of Artificial Sequence: Synthetic oligonucleotide
aguauauccgcugcgauuc

SEQ ID NO: 946437 - RNA, 19 nt, Artificial Sequence
  Description of Artificial Sequence: Synthetic oligonucleotide
uauuaaucuccucugcugu

SEQ ID NO: 946438 - RNA, 19 nt, Artificial Sequence
  Description of Artificial Sequence: Synthetic oligonucleotide
auauagaugcaugaugccg

SEQ ID NO: 946439 - RNA, 19 nt, Artificial Sequence
  Description of Artificial Sequence: Synthetic oligonucleotide
uuuccauccgucuugcuug

SEQ ID NO: 946440 - RNA, 19 nt, Artificial Sequence
  Description of Artificial Sequence: Synthetic oligonucleotide
aguaucggcaaacaggaca

SEQ ID NO: 946441 - RNA, 19 nt, Artificial Sequence
  Description of Artificial Sequence: Synthetic oligonucleotide
uaugcgaacaaucuuguuu

SEQ ID NO: 946442 - RNA, 19 nt, Artificial Sequence
  Description of Artificial Sequence: Synthetic oligonucleotide
uuauucgucuuauauagau

SEQ ID NO: 946443 - RNA, 19 nt, Artificial Sequence
  Description of Artificial Sequence: Synthetic oligonucleotide
uguuauuaaucuccucugc

SEQ ID NO: 946444 - RNA, 19 nt, Artificial Sequence
  Description of Artificial Sequence: Synthetic oligonucleotide
uuguuaguaaguacgaaua

SEQ ID NO: 946445 - RNA, 19 nt, Artificial Sequence
  Description of Artificial Sequence: Synthetic oligonucleotide
cuaagucugagcuccaggc

SEQ ID NO: 946446 - RNA, 19 nt, Artificial Sequence
  Description of Artificial Sequence: Synthetic oligonucleotide
uucucuaugcgaacaaucu

SEQ ID NO: 946447 - RNA, 19 nt, Artificial Sequence
  Description of Artificial Sequence: Synthetic oligonucleotide
cuucaaguaguuuggaaac

SEQ ID NO: 946448 - RNA, 19 nt, Artificial Sequence
  Description of Artificial Sequence: Synthetic oligonucleotide
uucauuuguucaaucacgu

SEQ ID NO: 946449 - RNA, 19 nt, Artificial Sequence
  Description of Artificial Sequence: Synthetic oligonucleotide
aguuuggccacucuggugu

SEQ ID NO: 946450 - RNA, 19 nt, Artificial Sequence
  Description of Artificial Sequence: Synthetic oligonucleotide
caugucgacuuacauaccg

SEQ ID NO: 946451 - RNA, 19 nt, Artificial Sequence
  Description of Artificial Sequence: Synthetic oligonucleotide
uacucuaacuguaaggcau

SEQ ID NO: 946452 - RNA, 19 nt, Artificial Sequence
  Description of Artificial Sequence: Synthetic oligonucleotide
uguuaguaaguacgaauac

SEQ ID NO: 946453 - RNA, 19 nt, Artificial Sequence
  Description of Artificial Sequence: Synthetic oligonucleotide
  modified_base (7)..(7): a, c, u, g, unknown or other
uuaaggnaggucauucuua

SEQ ID NO: 946454 - RNA, 19 nt, Artificial Sequence
  Description of Artificial Sequence: Synthetic oligonucleotide
gaucuccgugauuugaagg

SEQ ID NO: 946455 - RNA, 19 nt, Artificial Sequence
  Description of Artificial Sequence: Synthetic oligonucleotide
uucccgacggccaaggugc

SEQ ID NO: 946456 - RNA, 19 nt, Artificial Sequence
  Description of Artificial Sequence: Synthetic oligonucleotide
cuucauaaggucgugacug

SEQ ID NO: 946457 - RNA, 19 nt, Artificial Sequence
  Description of Artificial Sequence: Synthetic oligonucleotide
aacgucaucuucgauggag

SEQ ID NO: 946458 - RNA, 19 nt, Artificial Sequence
  Description of Artificial Sequence: Synthetic oligonucleotide
acaucggucauuucccgac

SEQ ID NO: 946459 - RNA, 19 nt, Artificial Sequence
  Description of Artificial Sequence: Synthetic oligonucleotide
uauauagaugcaugaugcc

SEQ ID NO: 946460 - RNA, 19 nt, Artificial Sequence
  Description of Artificial Sequence: Synthetic oligonucleotide
ucgacuuacauaccgucca

SEQ ID NO: 946461 - RNA, 19 nt, Artificial Sequence
  Description of Artificial Sequence: Synthetic oligonucleotide
uauucgucuuauauagaug

SEQ ID NO: 946462 - RNA, 19 nt, Artificial Sequence
  Description of Artificial Sequence: Synthetic oligonucleotide
uuaguaagcugcauggcau

SEQ ID NO: 946463 - RNA, 19 nt, Artificial Sequence
  Description of Artificial Sequence: Synthetic oligonucleotide
  modified_base (8)..(8): a, c, u, g, unknown or other
uuuaaggnaggucauucuu

SEQ ID NO: 946464 - RNA, 19 nt, Artificial Sequence
  Description of Artificial Sequence: Synthetic oligonucleotide
cuuauuagggcccacccuc

SEQ ID NO: 946465 - RNA, 19 nt, Artificial Sequence
  Description of Artificial Sequence: Synthetic oligonucleotide
ugaagaaggaaaucugguc

SEQ ID NO: 946466 - RNA, 19 nt, Artificial Sequence
  Description of Artificial Sequence: Synthetic oligonucleotide
aggucacuaagucugagcu

SEQ ID NO: 946467 - RNA, 19 nt, Artificial Sequence
  Description of Artificial Sequence: Synthetic oligonucleotide
agacucguccauucgcucc

SEQ ID NO: 946468 - RNA, 19 nt, Artificial Sequence
  Description of Artificial Sequence: Synthetic oligonucleotide
auguuauuaaucuccucug

SEQ ID NO: 946469 - RNA, 19 nt, Artificial Sequence
  Description of Artificial Sequence: Synthetic oligonucleotide
uucauguuauuaaucuccu

SEQ ID NO: 946470 - RNA, 19 nt, Artificial Sequence
  Description of Artificial Sequence: Synthetic oligonucleotide
uacuuauuagggcccaccc

SEQ ID NO: 946471 - RNA, 19 nt, Artificial Sequence
  Description of Artificial Sequence: Synthetic oligonucleotide
gucacuaagucugagcucc

SEQ ID NO: 946472 - RNA, 19 nt, Artificial Sequence
  Description of Artificial Sequence: Synthetic oligonucleotide
aaguacgaauacucuaacu

SEQ ID NO: 946473 - RNA, 19 nt, Artificial Sequence
  Description of Artificial Sequence: Synthetic oligonucleotide
uccgucagguccaucacag

SEQ ID NO: 946474 - RNA, 19 nt, Artificial Sequence
  Description of Artificial Sequence: Synthetic oligonucleotide
ucucaauaaucacaucggu

SEQ ID NO: 946475 - RNA, 19 nt, Artificial Sequence
  Description of Artificial Sequence: Synthetic oligonucleotide
guccauucgcuccagacag

SEQ ID NO: 946476 - RNA, 19 nt, Artificial Sequence
  Description of Artificial Sequence: Synthetic oligonucleotide
aauggggcgacaaacuuca

SEQ ID NO: 946477 - RNA, 19 nt, Artificial Sequence
  Description of Artificial Sequence: Synthetic oligonucleotide
agcaccauguacugauucg

SEQ ID NO: 946478 - RNA, 19 nt, Artificial Sequence
  Description of Artificial Sequence: Synthetic oligonucleotide
aucgcccucacacucguac

SEQ ID NO: 946479 - RNA, 19 nt, Artificial Sequence
  Description of Artificial Sequence: Synthetic oligonucleotide
gucucaauaaucacaucgg

SEQ ID NO: 946480 - RNA, 19 nt, Artificial Sequence
  Description of Artificial Sequence: Synthetic oligonucleotide
acugacggccguugcaugc

SEQ ID NO: 946481 - RNA, 19 nt, Artificial Sequence
  Description of Artificial Sequence: Synthetic oligonucleotide
cucaauaaucacaucgguc

SEQ ID NO: 946482 - RNA, 19 nt, Artificial Sequence
  Description of Artificial Sequence: Synthetic oligonucleotide
auaaggucgugacugguca

SEQ ID NO: 946483 - RNA, 19 nt, Artificial Sequence
  Description of Artificial Sequence: Synthetic oligonucleotide
ucuaugcgaacaaucuugu

SEQ ID NO: 946484 - RNA, 19 nt, Artificial Sequence
  Description of Artificial Sequence: Synthetic oligonucleotide
uucauaaggucgugacugg

SEQ ID NO: 946485 - RNA, 19 nt, Artificial Sequence
  Description of Artificial Sequence: Synthetic oligonucleotide
uaguaaguacgaauacucu

SEQ ID NO: 946486 - RNA, 19 nt, Artificial Sequence
  Description of Artificial Sequence: Synthetic oligonucleotide
uccagcauagucccagacc

SEQ ID NO: 946487 - RNA, 19 nt, Artificial Sequence
  Description of Artificial Sequence: Synthetic oligonucleotide
ugacaguaucggcaaacag

SEQ ID NO: 946488 - RNA, 19 nt, Artificial Sequence
  Description of Artificial Sequence: Synthetic oligonucleotide
uucuuauucgucuuauaua

SEQ ID NO: 946489 - RNA, 19 nt, Artificial Sequence
  Description of Artificial Sequence: Synthetic oligonucleotide
auacuuauuagggcccacc

SEQ ID NO: 946490 - RNA, 19 nt, Artificial Sequence
  Description of Artificial Sequence: Synthetic oligonucleotide
aacaaucuuuccauccguc

SEQ ID NO: 946491 - RNA, 19 nt, Artificial Sequence
  Description of Artificial Sequence: Synthetic oligonucleotide
  modified_base (3)..(3): a, c, u, g, unknown or other
ggnaggucauucuuauucg

SEQ ID NO: 946492 - RNA, 19 nt, Artificial Sequence
  Description of Artificial Sequence: Synthetic oligonucleotide
uaaguacgaauacucuaac

SEQ ID NO: 946493 - RNA, 19 nt, Artificial Sequence
  Description of Artificial Sequence: Synthetic oligonucleotide
uugaauggggcgacaaacu

SEQ ID NO: 946494 - RNA, 19 nt, Artificial Sequence
  Description of Artificial Sequence: Synthetic oligonucleotide
uacgaauacucuaacugua

SEQ ID NO: 946495 - RNA, 19 nt, Artificial Sequence
  Description of Artificial Sequence: Synthetic oligonucleotide
cuugcuacggcccuuccug

SEQ ID NO: 946496 - RNA, 19 nt, Artificial Sequence
  Description of Artificial Sequence: Synthetic oligonucleotide
agucgauggacauaauuau

SEQ ID NO: 946497 - RNA, 19 nt, Artificial Sequence
  Description of Artificial Sequence: Synthetic oligonucleotide
uuucccgacggccaaggug

SEQ ID NO: 946498 - RNA, 19 nt, Artificial Sequence
  Description of Artificial Sequence: Synthetic oligonucleotide
  modified_base (6)..(6): a, c, u, g, unknown or other
uaaggnaggucauucuuau

SEQ ID NO: 946499 - RNA, 19 nt, Artificial Sequence
  Description of Artificial Sequence: Synthetic oligonucleotide
gcaaacgucaucuucgaug

SEQ ID NO: 946500 - RNA, 19 nt, Artificial Sequence
  Description of Artificial Sequence: Synthetic oligonucleotide
uucaaucacgucauugaau

SEQ ID NO: 946501 - RNA, 19 nt, Artificial Sequence
  Description of Artificial Sequence: Synthetic oligonucleotide
acaguaucggcaaacagga

SEQ ID NO: 946502 - RNA, 19 nt, Artificial Sequence
  Description of Artificial Sequence: Synthetic oligonucleotide
aagcaugucgacuuacaua

SEQ ID NO: 946503 - RNA, 19 nt, Artificial Sequence
  Description of Artificial Sequence: Synthetic oligonucleotide
aaguaguuuggaaaccucu

SEQ ID NO: 946504 - RNA, 19 nt, Artificial Sequence
  Description of Artificial Sequence: Synthetic oligonucleotide
ucucucaaggucacuugcc

SEQ ID NO: 946505 - RNA, 19 nt, Artificial Sequence
  Description of Artificial Sequence: Synthetic oligonucleotide
uggcguuugacaguaucgg

SEQ ID NO: 946506 - RNA, 19 nt, Artificial Sequence
  Description of Artificial Sequence: Synthetic oligonucleotide
augcgaacaaucuuguuuu

SEQ ID NO: 946507 - RNA, 19 nt, Artificial Sequence
  Description of Artificial Sequence: Synthetic oligonucleotide
ucuuauauagaugcaugau

SEQ ID NO: 946508 - RNA, 19 nt, Artificial Sequence
  Description of Artificial Sequence: Synthetic oligonucleotide
cuucucuaugcgaacaauc

SEQ ID NO: 946509 - RNA, 19 nt, Artificial Sequence
  Description of Artificial Sequence: Synthetic oligonucleotide
agguaucgcccucacacuc

SEQ ID NO: 946510 - RNA, 19 nt, Artificial Sequence
  Description of Artificial Sequence: Synthetic oligonucleotide
uccgugcugaguuuggcca

SEQ ID NO: 946511 - RNA, 19 nt, Artificial Sequence
  Description of Artificial Sequence: Synthetic oligonucleotide
auagucccagacccggugg

SEQ ID NO: 946512 - RNA, 19 nt, Artificial Sequence
  Description of Artificial Sequence: Synthetic oligonucleotide
uucaaguaguuuggaaacc

SEQ ID NO: 946513 - RNA, 19 nt, Artificial Sequence
  Description of Artificial Sequence: Synthetic oligonucleotide
cauugugucucucaacuca

SEQ ID NO: 946514 - RNA, 19 nt, Artificial Sequence
  Description of Artificial Sequence: Synthetic oligonucleotide
aaccagucgauggacauaa

SEQ ID NO: 946515 - RNA, 19 nt, Artificial Sequence
  Description of Artificial Sequence: Synthetic oligonucleotide
cauguagaagcuaucugca

SEQ ID NO: 946516 - RNA, 19 nt, Artificial Sequence
  Description of Artificial Sequence: Synthetic oligonucleotide
ucacaucggucauuucccg

SEQ ID NO: 946517 - RNA, 19 nt, Artificial Sequence
  Description of Artificial Sequence: Synthetic oligonucleotide
agacccggugguuaguaag

SEQ ID NO: 946518 - RNA, 19 nt, Artificial Sequence
  Description of Artificial Sequence: Synthetic oligonucleotide
uucgucuuauauagaugca

SEQ ID NO: 946519 - RNA, 19 nt, Artificial Sequence
  Description of Artificial Sequence: Synthetic oligonucleotide
aguaagcugcauggcauac

SEQ ID NO: 946520 - RNA, 19 nt, Artificial Sequence
  Description of Artificial Sequence: Synthetic oligonucleotide
accgacucgcuuugcuucc

SEQ ID NO: 946521 - RNA, 19 nt, Artificial Sequence
  Description of Artificial Sequence: Synthetic oligonucleotide
auaccguccacauccuaug

SEQ ID NO: 946522 - RNA, 19 nt, Artificial Sequence
  Description of Artificial Sequence: Synthetic oligonucleotide
ugucgacuuacauaccguc

SEQ ID NO: 946523 - RNA, 19 nt, Artificial Sequence
  Description of Artificial Sequence: Synthetic oligonucleotide
cuccgugauuugaaggucc

SEQ ID NO: 946524 - RNA, 19 nt, Artificial Sequence
  Description of Artificial Sequence: Synthetic oligonucleotide
ucccaguauauccgcugcg

SEQ ID NO: 946525 - RNA, 19 nt, Artificial Sequence
  Description of Artificial Sequence: Synthetic oligonucleotide
acuucauaaggucgugacu

SEQ ID NO: 946526 - RNA, 19 nt, Artificial Sequence
  Description of Artificial Sequence: Synthetic oligonucleotide
ugaauggggcgacaaacuu

SEQ ID NO: 946527 - RNA, 19 nt, Artificial Sequence
  Description of Artificial Sequence: Synthetic oligonucleotide
gcuugcaaccagucgaugg

SEQ ID NO: 946528 - RNA, 19 nt, Artificial Sequence
  Description of Artificial Sequence: Synthetic oligonucleotide
acuuauuagggcccacccu

SEQ ID NO: 946529 - RNA, 19 nt, Artificial Sequence
  Description of Artificial Sequence: Synthetic oligonucleotide
caugaugccgugcacgauc

SEQ ID NO: 946530 - RNA, 19 nt, Artificial Sequence
  Description of Artificial Sequence: Synthetic oligonucleotide
ucggaguagagucucugau

SEQ ID NO: 946531 - RNA, 19 nt, Artificial Sequence
  Description of Artificial Sequence: Synthetic oligonucleotide
caaucacgucauugaaugg

SEQ ID NO: 946532 - RNA, 19 nt, Artificial Sequence
  Description of Artificial Sequence: Synthetic oligonucleotide
aucacgucauugaaugggg

SEQ ID NO: 946533 - RNA, 19 nt, Artificial Sequence
  Description of Artificial Sequence: Synthetic oligonucleotide
cauacgugugcugaguuuc

SEQ ID NO: 946534 - RNA, 19 nt, Artificial Sequence
  Description of Artificial Sequence: Synthetic oligonucleotide
guaucggcaaacaggacac

SEQ ID NO: 946535 - RNA, 19 nt, Artificial Sequence
  Description of Artificial Sequence: Synthetic oligonucleotide
aucggucauuucccgacgg

SEQ ID NO: 946536 - RNA, 19 nt, Artificial Sequence
  Description of Artificial Sequence: Synthetic oligonucleotide
uuaaucuccucugcugugu

SEQ ID NO: 946537 - RNA, 19 nt, Artificial Sequence
  Description of Artificial Sequence: Synthetic oligonucleotide
cacagacucguccauucgc

SEQ ID NO: 946538 - RNA, 19 nt, Artificial Sequence
  Description of Artificial Sequence: Synthetic oligonucleotide
ucucuaugcgaacaaucuu

SEQ ID NO: 946539 - RNA, 19 nt, Artificial Sequence
  Description of Artificial Sequence: Synthetic oligonucleotide
auuuguucaaucacgucau

SEQ ID NO: 946540 - RNA, 19 nt, Artificial Sequence
  Description of Artificial Sequence: Synthetic oligonucleotide
ucacgucauugaauggggc

SEQ ID NO: 946541 - RNA, 19 nt, Artificial Sequence
  Description of Artificial Sequence: Synthetic oligonucleotide
cauaaggucgugacugguc

SEQ ID NO: 946542 - RNA, 19 nt, Artificial Sequence
  Description of Artificial Sequence: Synthetic oligonucleotide
ucgucuuauauagaugcau

SEQ ID NO: 946543 - RNA, 19 nt, Artificial Sequence
  Description of Artificial Sequence: Synthetic oligonucleotide
gucucucaaggucacuugc

SEQ ID NO: 946544 - RNA, 19 nt, Artificial Sequence
  Description of Artificial Sequence: Synthetic oligonucleotide
uuggcacggagacacuugu

SEQ ID NO: 946545 - RNA, 19 nt, Artificial Sequence
  Description of Artificial Sequence: Synthetic oligonucleotide
ugcaaccagucgauggaca

SEQ ID NO: 946546 - RNA, 19 nt, Artificial Sequence
  Description of Artificial Sequence: Synthetic oligonucleotide
uacugauucggaguagagu

SEQ ID NO: 946547 - RNA, 19 nt, Artificial Sequence
  Description of Artificial Sequence: Synthetic oligonucleotide
acacucguacugaacaauc

SEQ ID NO: 946548 - RNA, 19 nt, Artificial Sequence
  Description of Artificial Sequence: Synthetic oligonucleotide
ucauuuguucaaucacguc

SEQ ID NO: 946549 - RNA, 19 nt, Artificial Sequence
  Description of Artificial Sequence: Synthetic oligonucleotide
ggacauaauuaucuccagc

SEQ ID NO: 946550 - RNA, 19 nt, Artificial Sequence
  Description of Artificial Sequence: Synthetic oligonucleotide
uugacaguaucggcaaaca

SEQ ID NO: 946551 - RNA, 19 nt, Artificial Sequence
  Description of Artificial Sequence: Synthetic oligonucleotide
uguaagcaugucgacuuac

SEQ ID NO: 946552 - RNA, 19 nt, Artificial Sequence
  Description of Artificial Sequence: Synthetic oligonucleotide
uacggcccuuccuggaugg

SEQ ID NO: 946553 - RNA, 19 nt, Artificial Sequence
  Description of Artificial Sequence: Synthetic oligonucleotide
ucguccauucgcuccagac

SEQ ID NO: 946554 - RNA, 19 nt, Artificial Sequence
  Description of Artificial Sequence: Synthetic oligonucleotide
ugagugcacuuucuuucca

SEQ ID NO: 946555 - RNA, 19 nt, Artificial Sequence
  Description of Artificial Sequence: Synthetic oligonucleotide
guacgaauacucuaacugu

SEQ ID NO: 946556 - RNA, 19 nt, Artificial Sequence
  Description of Artificial Sequence: Synthetic oligonucleotide
aguagagucucugaugauu

SEQ ID NO: 946557 - RNA, 19 nt, Artificial Sequence
  Description of Artificial Sequence: Synthetic oligonucleotide
ucucgauggucucuuuaaa

SEQ ID NO: 946558 - RNA, 19 nt, Artificial Sequence
  Description of Artificial Sequence: Synthetic oligonucleotide
aaggucgugacuggucaug

SEQ ID NO: 946559 - RNA, 19 nt, Artificial Sequence
  Description of Artificial Sequence: Synthetic oligonucleotide
ggggcgacaaacuucauaa

SEQ ID NO: 946560 - RNA, 19 nt, Artificial Sequence
  Description of Artificial Sequence: Synthetic oligonucleotide
cuugcaaccagucgaugga

SEQ ID NO: 946561 - RNA, 19 nt, Artificial Sequence
  Description of Artificial Sequence: Synthetic oligonucleotide
ucucaacagaaagggguug

SEQ ID NO: 946562 - RNA, 19 nt, Artificial Sequence
  Description of Artificial Sequence: Synthetic oligonucleotide
uguauucaccgacucgcuu

SEQ ID NO: 946563 - RNA, 19 nt, Artificial Sequence
  Description of Artificial Sequence: Synthetic oligonucleotide
acucguacugaacaaucuu

SEQ ID NO: 946564 - RNA, 19 nt, Artificial Sequence
  Description of Artificial Sequence: Synthetic oligonucleotide
aacugacggccguugcaug

SEQ ID NO: 946565 - RNA, 19 nt, Artificial Sequence
  Description of Artificial Sequence: Synthetic oligonucleotide
aaacaaauccagagguuuu

SEQ ID NO: 946566 - RNA, 19 nt, Artificial Sequence
  Description of Artificial Sequence: Synthetic oligonucleotide
acgugugcugaguuuccuc

SEQ ID NO: 946567 - RNA, 19 nt, Artificial Sequence
  Description of Artificial Sequence: Synthetic oligonucleotide
uccgugauuugaagguccu

SEQ ID NO: 946568 - RNA, 19 nt, Artificial Sequence
  Description of Artificial Sequence: Synthetic oligonucleotide
acucuaacuguaaggcauc

SEQ ID NO: 946569 - RNA, 19 nt, Artificial Sequence
  Description of Artificial Sequence: Synthetic oligonucleotide
ucacacucguacugaacaa

SEQ ID NO: 946570 - RNA, 19 nt, Artificial Sequence
  Description of Artificial Sequence: Synthetic oligonucleotide
ugauucggaguagagucuc

SEQ ID NO: 946571 - RNA, 19 nt, Artificial Sequence
  Description of Artificial Sequence: Synthetic oligonucleotide
guaagcugcauggcauacg

SEQ ID NO: 946572 - RNA, 19 nt, Artificial Sequence
  Description of Artificial Sequence: Synthetic oligonucleotide
ccggugguuaguaagcugc

SEQ ID NO: 946573 - RNA, 19 nt, Artificial Sequence
  Description of Artificial Sequence: Synthetic oligonucleotide
gaauggggcgacaaacuuc

SEQ ID NO: 946574 - RNA, 19 nt, Artificial Sequence
  Description of Artificial Sequence: Synthetic oligonucleotide
cauagucccagacccggug

SEQ ID NO: 946575 - RNA, 19 nt, Artificial Sequence
  Description of Artificial Sequence: Synthetic oligonucleotide
uugcuacggcccuuccugg

SEQ ID NO: 946576 - RNA, 19 nt, Artificial Sequence
  Description of Artificial Sequence: Synthetic oligonucleotide
cucugaugauuuucauuug

SEQ ID NO: 946577 - RNA, 19 nt, Artificial Sequence
  Description of Artificial Sequence: Synthetic oligonucleotide
ucauugaauggggcgacaa

SEQ ID NO: 946578 - RNA, 19 nt, Artificial Sequence
  Description of Artificial Sequence: Synthetic oligonucleotide
auacgugugcugaguuucc

SEQ ID NO: 946579 - RNA, 19 nt, Artificial Sequence
  Description of Artificial Sequence: Synthetic oligonucleotide
uuaagaccuucaaguaguu

SEQ ID NO: 946580 - RNA, 19 nt, Artificial Sequence
  Description of Artificial Sequence: Synthetic oligonucleotide
gguugcauaggguggugag

SEQ ID NO: 946581 - RNA, 19 nt, Artificial Sequence
  Description of Artificial Sequence: Synthetic oligonucleotide
ucggucauuucccgacggc

SEQ ID NO: 946582 - RNA, 19 nt, Artificial Sequence
  Description of Artificial Sequence: Synthetic oligonucleotide
gaugccgugcacgaucuca

SEQ ID NO: 946583 - RNA, 19 nt, Artificial Sequence
  Description of Artificial Sequence: Synthetic oligonucleotide
ugcuuguaagcaugucgac

SEQ ID NO: 946584 - RNA, 19 nt, Artificial Sequence
  Description of Artificial Sequence: Synthetic oligonucleotide
gacacguggugucauccca

SEQ ID NO: 946585 - RNA, 19 nt, Artificial Sequence
  Description of Artificial Sequence: Synthetic oligonucleotide
ccucaaagugcuuguaagc

SEQ ID NO: 946586 - RNA, 19 nt, Artificial Sequence
  Description of Artificial Sequence: Synthetic oligonucleotide
uugcuugcaaccagucgau

SEQ ID NO: 946587 - RNA, 19 nt, Artificial Sequence
  Description of Artificial Sequence: Synthetic oligonucleotide
gucgacuuacauaccgucc

SEQ ID NO: 946588 - RNA, 19 nt, Artificial Sequence
  Description of Artificial Sequence: Synthetic oligonucleotide
uggcaaacgucaucuucga

SEQ ID NO: 946589 - RNA, 19 nt, Artificial Sequence
  Description of Artificial Sequence: Synthetic oligonucleotide
cuuguaagcaugucgacuu

SEQ ID NO: 946590 - RNA, 19 nt, Artificial Sequence
  Description of Artificial Sequence: Synthetic oligonucleotide
ucguccucaggcauacuua

SEQ ID NO: 946591 - RNA, 19 nt, Artificial Sequence
  Description of Artificial Sequence: Synthetic oligonucleotide
accuucaaguaguuuggaa

SEQ ID NO: 946592 - RNA, 19 nt, Artificial Sequence
  Description of Artificial Sequence: Synthetic oligonucleotide
cuccgugcugaguuuggcc

SEQ ID NO: 946593 - RNA, 19 nt, Artificial Sequence
  Description of Artificial Sequence: Synthetic oligonucleotide
acgucauugaauggggcga

SEQ ID NO: 946594 - RNA, 19 nt, Artificial Sequence
  Description of Artificial Sequence: Synthetic oligonucleotide
gaagucucagggacaaguc

SEQ ID NO: 946595 - RNA, 19 nt, Artificial Sequence
  Description of Artificial Sequence: Synthetic oligonucleotide
caucggucauuucccgacg

SEQ ID NO: 946596 - RNA, 19 nt, Artificial Sequence
  Description of Artificial Sequence: Synthetic oligonucleotide
acguggugucaucccaccg

SEQ ID NO: 946597 - RNA, 19 nt, Artificial Sequence
  Description of Artificial Sequence: Synthetic oligonucleotide
uggggcgacaaacuucaua

SEQ ID NO: 946598 - RNA, 19 nt, Artificial Sequence
  Description of Artificial Sequence: Synthetic oligonucleotide
ucauaaggucgugacuggu

SEQ ID NO: 946599 - RNA, 19 nt, Artificial Sequence
  Description of Artificial Sequence: Synthetic oligonucleotide
auccgcugcgauuccagcu

SEQ ID NO: 946600 - RNA, 19 nt, Artificial Sequence
  Description of Artificial Sequence: Synthetic oligonucleotide
gacccggugguuaguaagc

SEQ ID NO: 946601 - RNA, 19 nt, Artificial Sequence
  Description of Artificial Sequence: Synthetic oligonucleotide
uacauaccguccacauccu

SEQ ID NO: 946602 - RNA, 19 nt, Artificial Sequence
  Description of Artificial Sequence: Synthetic oligonucleotide
ggcuguauucaccgacucg

SEQ ID NO: 946603 - RNA, 19 nt, Artificial Sequence
  Description of Artificial Sequence: Synthetic oligonucleotide
  modified_base (5)..(5): a, c, u, g, unknown or other
aaggnaggucauucuuauu

SEQ ID NO: 946604 - RNA, 19 nt, Artificial Sequence
  Description of Artificial Sequence: Synthetic oligonucleotide
  modified_base (2)..(2): a, c, u, g, unknown or other
gnaggucauucuuauucgu

SEQ ID NO: 946605 - RNA, 19 nt, Artificial Sequence
  Description of Artificial Sequence: Synthetic oligonucleotide
uauauccgcugcgauucca

SEQ ID NO: 946606 - RNA, 19 nt, Artificial Sequence
  Description of Artificial Sequence: Synthetic oligonucleotide
uguucagcugagugcacuu

SEQ ID NO: 946607 - RNA, 19 nt, Artificial Sequence
  Description of Artificial Sequence: Synthetic oligonucleotide
cauuucccgacggccaagg

SEQ ID NO: 946608 - RNA, 19 nt, Artificial Sequence
  Description of Artificial Sequence: Synthetic oligonucleotide
uaguaagcugcauggcaua

SEQ ID NO: 946609 - RNA, 19 nt, Artificial Sequence
  Description of Artificial Sequence: Synthetic oligonucleotide
gaacaaucuuuccauccgu

SEQ ID NO: 946610 - RNA, 19 nt, Artificial Sequence
  Description of Artificial Sequence: Synthetic oligonucleotide
gacucguccauucgcucca

SEQ ID NO: 946611 - RNA, 19 nt, Artificial Sequence
  Description of Artificial Sequence: Synthetic oligonucleotide
auucggaguagagucucug

SEQ ID NO: 946612 - RNA, 19 nt, Artificial Sequence
  Description of Artificial Sequence: Synthetic oligonucleotide
aucagucugugcacugaac

SEQ ID NO: 946613 - RNA, 19 nt, Artificial Sequence
  Description of Artificial Sequence: Synthetic oligonucleotide
ggaucuccgugauuugaag

SEQ ID NO: 946614 - RNA, 19 nt, Artificial Sequence
  Description of Artificial Sequence: Synthetic oligonucleotide
uggaaaccucugcccaucu

SEQ ID NO: 946615 - RNA, 19 nt, Artificial Sequence
  Description of Artificial Sequence: Synthetic oligonucleotide
ccuucaaguaguuuggaaa

SEQ ID NO: 946616 - RNA, 19 nt, Artificial Sequence
  Description of Artificial Sequence: Synthetic oligonucleotide
aucggcaaacaggacacgu

SEQ ID NO: 946617 - RNA, 19 nt, Artificial Sequence
  Description of Artificial Sequence: Synthetic oligonucleotide
cacguggugucaucccacc

SEQ ID NO: 946618 - RNA, 19 nt, Artificial Sequence
  Description of Artificial Sequence: Synthetic oligonucleotide
cuauguggccacauauuaa

SEQ ID NO: 946619 - RNA, 19 nt, Artificial Sequence
  Description of Artificial Sequence: Synthetic oligonucleotide
uaccguccacauccuaugu

SEQ ID NO: 946620 - RNA, 19 nt, Artificial Sequence
  Description of Artificial Sequence: Synthetic oligonucleotide
uaucggcaaacaggacacg

SEQ ID NO: 946621 - RNA, 19 nt, Artificial Sequence
  Description of Artificial Sequence: Synthetic oligonucleotide
cauagaccagcuggcaaac

SEQ ID NO: 946622 - RNA, 19 nt, Artificial Sequence
  Description of Artificial Sequence: Synthetic oligonucleotide
cagcauagucccagacccg

SEQ ID NO: 946623 - RNA, 19 nt, Artificial Sequence
  Description of Artificial Sequence: Synthetic oligonucleotide
uuccauccgucuugcuugc

SEQ ID NO: 946624 - RNA, 19 nt, Artificial Sequence
  Description of Artificial Sequence: Synthetic oligonucleotide
uuguaagcaugucgacuua

SEQ ID NO: 946625 - RNA, 19 nt, Artificial Sequence
  Description of Artificial Sequence: Synthetic oligonucleotide
gccguugcaugccauguag

SEQ ID NO: 946626 - RNA, 19 nt, Artificial Sequence
  Description of Artificial Sequence: Synthetic oligonucleotide
acagacucguccauucgcu

SEQ ID NO: 946627 - RNA, 19 nt, Artificial Sequence
  Description of Artificial Sequence: Synthetic oligonucleotide
acacguggugucaucccac

SEQ ID NO: 946628 - RNA, 19 nt, Artificial Sequence
  Description of Artificial Sequence: Synthetic oligonucleotide
gaaaucuggucugggagcu

SEQ ID NO: 946629 - RNA, 19 nt, Artificial Sequence
  Description of Artificial Sequence: Synthetic oligonucleotide
aaacgucaucuucgaugga

SEQ ID NO: 946630 - RNA, 19 nt, Artificial Sequence
  Description of Artificial Sequence: Synthetic oligonucleotide
gucgauggacauaauuauc

SEQ ID NO: 946631 - RNA, 19 nt, Artificial Sequence
  Description of Artificial Sequence: Synthetic oligonucleotide
uuuguucaaucacgucauu

SEQ ID NO: 946632 - RNA, 19 nt, Artificial Sequence
  Description of Artificial Sequence: Synthetic oligonucleotide
  modified_base (9)..(9): a, c, u, g, unknown or other
cuuuaaggnaggucauucu

SEQ ID NO: 946633 - RNA, 19 nt, Artificial Sequence
  Description of Artificial Sequence: Synthetic oligonucleotide
ccgugcacgaucucaacag

SEQ ID NO: 946634 - RNA, 19 nt, Artificial Sequence
  Description of Artificial Sequence: Synthetic oligonucleotide
ucuccgugauuugaagguc

SEQ ID NO: 946635 - RNA, 19 nt, Artificial Sequence
  Description of Artificial Sequence: Synthetic oligonucleotide
ggaguugaacugacggccg

SEQ ID NO: 946636 - RNA, 19 nt, Artificial Sequence
  Description of Artificial Sequence: Synthetic oligonucleotide
ggcguuugacaguaucggc

SEQ ID NO: 946637 - RNA, 19 nt, Artificial Sequence
  Description of Artificial Sequence: Synthetic oligonucleotide
agacuggcgccaucuucag

SEQ ID NO: 946638 - RNA, 19 nt, Artificial Sequence
  Description of Artificial Sequence: Synthetic oligonucleotide
ucacuaagucugagcucca

SEQ ID NO: 946639 - RNA, 19 nt, Artificial Sequence
  Description of Artificial Sequence: Synthetic oligonucleotide
  modified_base (11)..(11): a, c, u, g, unknown or other
uucuuuaaggnaggucauu

SEQ ID NO: 946640 - RNA, 19 nt, Artificial Sequence
  Description of Artificial Sequence: Synthetic oligonucleotide
uugcaaccagucgauggac

SEQ ID NO: 946641 - RNA, 19 nt, Artificial Sequence
  Description of Artificial Sequence: Synthetic oligonucleotide
acaucacgcagcugcuccu

SEQ ID NO: 946642 - RNA, 19 nt, Artificial Sequence
  Description of Artificial Sequence: Synthetic oligonucleotide
guaagcaugucgacuuaca

SEQ ID NO: 946643 - RNA, 19 nt, Artificial Sequence
  Description of Artificial Sequence: Synthetic oligonucleotide
gggguugccgcugaagaag

SEQ ID NO: 946644 - RNA, 19 nt, Artificial Sequence
  Description of Artificial Sequence: Synthetic oligonucleotide
auugugucucucaacucau

SEQ ID NO: 946645 - RNA, 19 nt, Artificial Sequence
  Description of Artificial Sequence: Synthetic oligonucleotide
ucauuucccgacggccaag

SEQ ID NO: 946646 - RNA, 19 nt, Artificial Sequence
  Description of Artificial Sequence: Synthetic oligonucleotide
gguaucgcccucacacucg

SEQ ID NO: 946647 - RNA, 19 nt, Artificial Sequence
  Description of Artificial Sequence: Synthetic oligonucleotide
guuggcacggagacacuug

SEQ ID NO: 946648 - RNA, 19 nt, Artificial Sequence
  Description of Artificial Sequence: Synthetic oligonucleotide
aggucacuugccccucuug

SEQ ID NO: 946649 - RNA, 19 nt, Artificial Sequence
  Description of Artificial Sequence: Synthetic oligonucleotide
acgaauacucuaacuguaa

SEQ ID NO: 946650 - RNA, 19 nt, Artificial Sequence
  Description of Artificial Sequence: Synthetic oligonucleotide
ugguugcauagggugguga

SEQ ID NO: 946651 - RNA, 19 nt, Artificial Sequence
  Description of Artificial Sequence: Synthetic oligonucleotide
guauucaccgacucgcuuu

SEQ ID NO: 946652 - RNA, 19 nt, Artificial Sequence
  Description of Artificial Sequence: Synthetic oligonucleotide
ucuaacuguaaggcaucua

SEQ ID NO: 946653 - RNA, 19 nt, Artificial Sequence
  Description of Artificial Sequence: Synthetic oligonucleotide
gguuaguaagcugcauggc

SEQ ID NO: 946654 - RNA, 19 nt, Artificial Sequence
  Description of Artificial Sequence: Synthetic oligonucleotide
uaaggucgugacuggucau

SEQ ID NO: 946655 - RNA, 19 nt, Artificial Sequence
  Description of Artificial Sequence: Synthetic oligonucleotide
cucucaacucaucugggcu

SEQ ID NO: 946656 - RNA, 19 nt, Artificial Sequence
  Description of Artificial Sequence: Synthetic oligonucleotide
ugcuacggcccuuccugga

SEQ ID NO: 946657 - RNA, 19 nt, Artificial Sequence
  Description of Artificial Sequence: Synthetic oligonucleotide
ugcugaguuuggccacucu

SEQ ID NO: 946658 - RNA, 19 nt, Artificial Sequence
  Description of Artificial Sequence: Synthetic oligonucleotide
cgaauacucuaacuguaag

SEQ ID NO: 946659 - RNA, 19 nt, Artificial Sequence
  Description of Artificial Sequence: Synthetic oligonucleotide
cacauagaccagcuggcaa

SEQ ID NO: 946660 - RNA, 19 nt, Artificial Sequence
  Description of Artificial Sequence: Synthetic oligonucleotide
augucgacuuacauaccgu

SEQ ID NO: 946661 - RNA, 19 nt, Artificial Sequence
  Description of Artificial Sequence: Synthetic oligonucleotide
ucgcccucacacucguacu

SEQ ID NO: 946662 - RNA, 19 nt, Artificial Sequence
  Description of Artificial Sequence: Synthetic oligonucleotide
cauaccguccacauccuau

SEQ ID NO: 946663 - RNA, 19 nt, Artificial Sequence
  Description of Artificial Sequence: Synthetic oligonucleotide
cagacucguccauucgcuc

SEQ ID NO: 946664 - RNA, 19 nt, Artificial Sequence
  Description of Artificial Sequence: Synthetic oligonucleotide
uggcauacgugugcugagu

SEQ ID NO: 946665 - RNA, 19 nt, Artificial Sequence
  Description of Artificial Sequence: Synthetic oligonucleotide
ugacggccguugcaugcca

SEQ ID NO: 946666 - RNA, 19 nt, Artificial Sequence
  Description of Artificial Sequence: Synthetic oligonucleotide
cauacuuauuagggcccac

SEQ ID NO: 946667 - RNA, 19 nt, Artificial Sequence
  Description of Artificial Sequence: Synthetic oligonucleotide
cuacggcccuuccuggaug

SEQ ID NO: 946668 - RNA, 19 nt, Artificial Sequence
  Description of Artificial Sequence: Synthetic oligonucleotide
uacgugugcugaguuuccu

SEQ ID NO: 946669 - RNA, 19 nt, Artificial Sequence
  Description of Artificial Sequence: Synthetic oligonucleotide
acggccguugcaugccaug

SEQ ID NO: 946670 - RNA, 19 nt, Artificial Sequence
  Description of Artificial Sequence: Synthetic oligonucleotide
cugacggccguugcaugcc

SEQ ID NO: 946671 - RNA, 19 nt, Artificial Sequence
  Description of Artificial Sequence: Synthetic oligonucleotide
cucguacugaacaaucuuu

SEQ ID NO: 946672 - RNA, 19 nt, Artificial Sequence
  Description of Artificial Sequence: Synthetic oligonucleotide
gcguuugacaguaucggca

SEQ ID NO: 946673 - RNA, 19 nt, Artificial Sequence
  Description of Artificial Sequence: Synthetic oligonucleotide
cacccucccacucagcaaa

SEQ ID NO: 946674 - RNA, 19 nt, Artificial Sequence
  Description of Artificial Sequence: Synthetic oligonucleotide
ggagacuggcgccaucuuc

SEQ ID NO: 946675 - RNA, 19 nt, Artificial Sequence
  Description of Artificial Sequence: Synthetic oligonucleotide
cauugaauggggcgacaaa

SEQ ID NO: 946676 - RNA, 19 nt, Artificial Sequence
  Description of Artificial Sequence: Synthetic oligonucleotide
auuucccgacggccaaggu

SEQ ID NO: 946677 - RNA, 19 nt, Artificial Sequence
  Description of Artificial Sequence: Synthetic oligonucleotide
ugcuugcaaccagucgaug

SEQ ID NO: 946678 - RNA, 19 nt, Artificial Sequence
  Description of Artificial Sequence: Synthetic oligonucleotide
ggucacuaagucugagcuc

SEQ ID NO: 946679 - RNA, 19 nt, Artificial Sequence
  Description of Artificial Sequence: Synthetic oligonucleotide
ggacacguggugucauccc

SEQ ID NO: 946680 - RNA, 19 nt, Artificial Sequence
  Description of Artificial Sequence: Synthetic oligonucleotide
cacaucggucauuucccga

SEQ ID NO: 946681 - RNA, 19 nt, Artificial Sequence
  Description of Artificial Sequence: Synthetic oligonucleotide
cgugauuugaagguccuuc

SEQ ID NO: 946682 - RNA, 19 nt, Artificial Sequence
  Description of Artificial Sequence: Synthetic oligonucleotide
caucagucugugcacugaa

SEQ ID NO: 946683 - RNA, 19 nt, Artificial Sequence
  Description of Artificial Sequence: Synthetic oligonucleotide
gggcgacaaacuucauaag

SEQ ID NO: 946684 - RNA, 19 nt, Artificial Sequence
  Description of Artificial Sequence: Synthetic oligonucleotide
gaccuucaaguaguuugga

SEQ ID NO: 946685 - RNA, 19 nt, Artificial Sequence
  Description of Artificial Sequence: Synthetic oligonucleotide
guagagucucugaugauuu

SEQ ID NO: 946686 - RNA, 19 nt, Artificial Sequence
  Description of Artificial Sequence: Synthetic oligonucleotide
gcgacaaacuucauaaggu

SEQ ID NO: 946687 - RNA, 19 nt, Artificial Sequence
  Description of Artificial Sequence: Synthetic oligonucleotide
ugccgugcacgaucucaac

SEQ ID NO: 946688 - RNA, 19 nt, Artificial Sequence
  Description of Artificial Sequence: Synthetic oligonucleotide
cacucguacugaacaaucu

SEQ ID NO: 946689 - RNA, 19 nt, Artificial Sequence
  Description of Artificial Sequence: Synthetic oligonucleotide
ggcuuguuaguaaguacga

SEQ ID NO: 946690 - RNA, 19 nt, Artificial Sequence
  Description of Artificial Sequence: Synthetic oligonucleotide
gccaaggugcugauggaug

SEQ ID NO: 946691 - RNA, 19 nt, Artificial Sequence
  Description of Artificial Sequence: Synthetic oligonucleotide
acauccuauguggccacau

SEQ ID NO: 946692 - RNA, 19 nt, Artificial Sequence
  Description of Artificial Sequence: Synthetic oligonucleotide
agcuccgugcugaguuugg

SEQ ID NO: 946693 - RNA, 19 nt, Artificial Sequence
  Description of Artificial Sequence: Synthetic oligonucleotide
gaguugaacugacggccgu

SEQ ID NO: 946694 - RNA, 19 nt, Artificial Sequence
  Description of Artificial Sequence: Synthetic oligonucleotide
cugauucggaguagagucu

SEQ ID NO: 946695 - RNA, 19 nt, Artificial Sequence
  Description of Artificial Sequence: Synthetic oligonucleotide
gaacugacggccguugcau

SEQ ID NO: 946696 - RNA, 19 nt, Artificial Sequence
  Description of Artificial Sequence: Synthetic oligonucleotide
ggcgcugcgaggcucaucu

SEQ ID NO: 946697 - RNA, 19 nt, Artificial Sequence
  Description of Artificial Sequence: Synthetic oligonucleotide
gugcacgaucucaacagaa

SEQ ID NO: 946698 - RNA, 19 nt, Artificial Sequence
  Description of Artificial Sequence: Synthetic oligonucleotide
ggucauuucccgacggcca

SEQ ID NO: 946699 - RNA, 19 nt, Artificial Sequence
  Description of Artificial Sequence: Synthetic oligonucleotide
ucaacucaucugggcuggc

SEQ ID NO: 946700 - RNA, 19 nt, Artificial Sequence
  Description of Artificial Sequence: Synthetic oligonucleotide
caaucuuuccauccgucuu

SEQ ID NO: 946701 - RNA, 19 nt, Artificial Sequence
  Description of Artificial Sequence: Synthetic oligonucleotide
acauaccguccacauccua

SEQ ID NO: 946702 - RNA, 19 nt, Artificial Sequence
  Description of Artificial Sequence: Synthetic oligonucleotide
cucuugcuacggcccuucc

SEQ ID NO: 946703 - RNA, 19 nt, Artificial Sequence
  Description of Artificial Sequence: Synthetic oligonucleotide
aguugaacugacggccguu

SEQ ID NO: 946704 - RNA, 19 nt, Artificial Sequence
  Description of Artificial Sequence: Synthetic oligonucleotide
caucccaccgcugcagaca

SEQ ID NO: 946705 - RNA, 19 nt, Artificial Sequence
  Description of Artificial Sequence: Synthetic oligonucleotide
ggaggucacuaagucugag

SEQ ID NO: 946706 - RNA, 19 nt, Artificial Sequence
  Description of Artificial Sequence: Synthetic oligonucleotide
ccauugugucucucaacuc

SEQ ID NO: 946707 - RNA, 19 nt, Artificial Sequence
  Description of Artificial Sequence: Synthetic oligonucleotide
gcauaggguggugaggauc

SEQ ID NO: 946708 - RNA, 19 nt, Artificial Sequence
  Description of Artificial Sequence: Synthetic oligonucleotide
gccgugcacgaucucaaca

SEQ ID NO: 946709 - RNA, 19 nt, Artificial Sequence
  Description of Artificial Sequence: Synthetic oligonucleotide
ggacacacagcauggcgcu

SEQ ID NO: 946710 - RNA, 19 nt, Artificial Sequence
  Description of Artificial Sequence: Synthetic oligonucleotide
ugaugccgugcacgaucuc

SEQ ID NO: 946711 - RNA, 19 nt, Artificial Sequence
  Description of Artificial Sequence: Synthetic oligonucleotide
cauccuauguggccacaua

SEQ ID NO: 946712 - RNA, 19 nt, Artificial Sequence
  Description of Artificial Sequence: Synthetic oligonucleotide
cgauggaguugaacugacg

SEQ ID NO: 946713 - RNA, 19 nt, Artificial Sequence
  Description of Artificial Sequence: Synthetic oligonucleotide
gggcuguauucaccgacuc

SEQ ID NO: 946714 - RNA, 19 nt, Artificial Sequence
  Description of Artificial Sequence: Synthetic oligonucleotide
guaucgcccucacacucgu

SEQ ID NO: 946715 - RNA, 19 nt, Artificial Sequence
  Description of Artificial Sequence: Synthetic oligonucleotide
gcuuguaagcaugucgacu

SEQ ID NO: 946716 - RNA, 19 nt, Artificial Sequence
  Description of Artificial Sequence: Synthetic oligonucleotide
cuguauucaccgacucgcu

SEQ ID NO: 946717 - RNA, 19 nt, Artificial Sequence
  Description of Artificial Sequence: Synthetic oligonucleotide
cccaccggccccugaagag

SEQ ID NO: 946718 - RNA, 19 nt, Artificial Sequence
  Description of Artificial Sequence: Synthetic oligonucleotide
gcauacuuauuagggccca

SEQ ID NO: 946719 - RNA, 19 nt, Artificial Sequence
  Description of Artificial Sequence: Synthetic oligonucleotide
gauucggaguagagucucu

SEQ ID NO: 946720 - RNA, 19 nt, Artificial Sequence
  Description of Artificial Sequence: Synthetic oligonucleotide
ucccgacggccaaggugcu

SEQ ID NO: 946721 - RNA, 19 nt, Artificial Sequence
  Description of Artificial Sequence: Synthetic oligonucleotide
guguucagcugagugcacu

SEQ ID NO: 946722 - RNA, 19 nt, Artificial Sequence
  Description of Artificial Sequence: Synthetic oligonucleotide
uaucgcccucacacucgua

SEQ ID NO: 946723 - RNA, 19 nt, Artificial Sequence
  Description of Artificial Sequence: Synthetic oligonucleotide
ccaccggccccugaagagg

SEQ ID NO: 946724 - RNA, 19 nt, Artificial Sequence
  Description of Artificial Sequence: Synthetic oligonucleotide
cggucauuucccgacggcc

SEQ ID NO: 946725 - RNA, 19 nt, Artificial Sequence
  Description of Artificial Sequence: Synthetic oligonucleotide
ggcgccaucuucagauuuc

SEQ ID NO: 946726 - RNA, 19 nt, Artificial Sequence
  Description of Artificial Sequence: Synthetic oligonucleotide
cagguaucgcccucacacu

SEQ ID NO: 946727 - RNA, 19 nt, Artificial Sequence
  Description of Artificial Sequence: Synthetic oligonucleotide
gcuccgucagguccaucac

SEQ ID NO: 946728 - RNA, 19 nt, Artificial Sequence
  Description of Artificial Sequence: Synthetic oligonucleotide
accggccccugaagagggc

SEQ ID NO: 946729 - RNA, 19 nt, Artificial Sequence
  Description of Artificial Sequence: Synthetic oligonucleotide
ggacaggugaggacacaca

SEQ ID NO: 946730 - RNA, 19 nt, Artificial Sequence
  Description of Artificial Sequence: Synthetic oligonucleotide
gcaaccagucgauggacau

SEQ ID NO: 946731 - RNA, 19 nt, Artificial Sequence
  Description of Artificial Sequence: Synthetic oligonucleotide
gcacuuggggagcuccguc

SEQ ID NO: 946732 - RNA, 19 nt, Artificial Sequence
  Description of Artificial Sequence: Synthetic oligonucleotide
gcaucagucugugcacuga

SEQ ID NO: 946733 - RNA, 19 nt, Artificial Sequence
  Description of Artificial Sequence: Synthetic oligonucleotide
ccgugcugaguuuggccac

SEQ ID NO: 946734 - RNA, 19 nt, Artificial Sequence
  Description of Artificial Sequence: Synthetic oligonucleotide
cacacucguacugaacaau

SEQ ID NO: 946735 - RNA, 19 nt, Artificial Sequence
  Description of Artificial Sequence: Synthetic oligonucleotide
gggauguugaucugcccuu

SEQ ID NO: 946736 - RNA, 19 nt, Artificial Sequence
  Description of Artificial Sequence: Synthetic oligonucleotide
gcaugucgacuuacauacc

SEQ ID NO: 946737 - RNA, 19 nt, Artificial Sequence
  Description of Artificial Sequence: Synthetic oligonucleotide
ccgcugcgauuccagcugg

SEQ ID NO: 946738 - RNA, 19 nt, Artificial Sequence
  Description of Artificial Sequence: Synthetic oligonucleotide
cagguccaucacagggaga

SEQ ID NO: 946739 - RNA, 19 nt, Artificial Sequence
  Description of Artificial Sequence: Synthetic oligonucleotide
cgacuuacauaccguccac

SEQ ID NO: 946740 - RNA, 19 nt, Artificial Sequence
  Description of Artificial Sequence: Synthetic oligonucleotide
gcuccgugcugaguuuggc

SEQ ID NO: 946741 - RNA, 19 nt, Artificial Sequence
  Description of Artificial Sequence: Synthetic oligonucleotide
cccaguauauccgcugcga

SEQ ID NO: 946742 - RNA, 19 nt, Artificial Sequence
  Description of Artificial Sequence: Synthetic oligonucleotide
cuaugcgaacaaucuuguu

SEQ ID NO: 946743 - RNA, 19 nt, Artificial Sequence
  Description of Artificial Sequence: Synthetic oligonucleotide
cgcugcgaggcucaucuuc

SEQ ID NO: 946744 - RNA, 19 nt, Artificial Sequence
  Description of Artificial Sequence: Synthetic oligonucleotide
cgcuccagacagacagugc

SEQ ID NO: 946745 - RNA, 19 nt, Artificial Sequence
  Description of Artificial Sequence: Synthetic oligonucleotide
cucguccauucgcuccaga

SEQ ID NO: 946746 - RNA, 19 nt, Artificial Sequence
  Description of Artificial Sequence: Synthetic oligonucleotide
gcugcgaggcucaucuucu

SEQ ID NO: 946747 - RNA, 19 nt, Artificial Sequence
  Description of Artificial Sequence: Synthetic oligonucleotide
ggcauacgugugcugaguu

SEQ ID NO: 946748 - RNA, 19 nt, Artificial Sequence
  Description of Artificial Sequence: Synthetic oligonucleotide
gguguucagcugagugcac

SEQ ID NO: 946749 - RNA, 19 nt, Artificial Sequence
  Description of Artificial Sequence: Synthetic oligonucleotide
ccgcugaagaaggaaaucu

SEQ ID NO: 946750 - RNA, 19 nt, Artificial Sequence
  Description of Artificial Sequence: Synthetic oligonucleotide
ccguugcaugccauguaga

SEQ ID NO: 946751 - RNA, 19 nt, Artificial Sequence
  Description of Artificial Sequence: Synthetic oligonucleotide
ggcucuggcguuugacagu

SEQ ID NO: 946752 - RNA, 19 nt, Artificial Sequence
  Description of Artificial Sequence: Synthetic oligonucleotide
cacauccuauguggccaca

SEQ ID NO: 946753 - RNA, 19 nt, Artificial Sequence
  Description of Artificial Sequence: Synthetic oligonucleotide
ccgacggccaaggugcuga

SEQ ID NO: 946754 - RNA, 19 nt, Artificial Sequence
  Description of Artificial Sequence: Synthetic oligonucleotide
cuucagcccuuuccacaua

SEQ ID NO: 946755 - RNA, 19 nt, Artificial Sequence
  Description of Artificial Sequence: Synthetic oligonucleotide
gcauacgugugcugaguuu

SEQ ID NO: 946756 - RNA, 19 nt, Artificial Sequence
  Description of Artificial Sequence: Synthetic oligonucleotide
gcccucacacucguacuga

SEQ ID NO: 946757 - RNA, 19 nt, Artificial Sequence
  Description of Artificial Sequence: Synthetic oligonucleotide
ggggcuguauucaccgacu

SEQ ID NO: 946758 - RNA, 19 nt, Artificial Sequence
  Description of Artificial Sequence: Synthetic oligonucleotide
guucagcugagugcacuuu

SEQ ID NO: 946759 - RNA, 19 nt, Artificial Sequence
  Description of Artificial Sequence: Synthetic oligonucleotide
gguugccgcugaagaagga

SEQ ID NO: 946760 - RNA, 19 nt, Artificial Sequence
  Description of Artificial Sequence: Synthetic oligonucleotide
cgugcacgaucucaacaga

SEQ ID NO: 946761 - RNA, 19 nt, Artificial Sequence
  Description of Artificial Sequence: Synthetic oligonucleotide
ggccguugcaugccaugua

SEQ ID NO: 946762 - RNA, 19 nt, Artificial Sequence
  Description of Artificial Sequence: Synthetic oligonucleotide
ggucgugacuggucauggu

SEQ ID NO: 946763 - RNA, 19 nt, Artificial Sequence
  Description of Artificial Sequence: Synthetic oligonucleotide
gcuacggcccuuccuggau

SEQ ID NO: 946764 - RNA, 19 nt, Artificial Sequence
  Description of Artificial Sequence: Synthetic oligonucleotide
gguuggcacggagacacuu

SEQ ID NO: 946765 - RNA, 19 nt, Artificial Sequence
  Description of Artificial Sequence: Synthetic oligonucleotide
ccaguauauccgcugcgau

SEQ ID NO: 946766 - RNA, 19 nt, Artificial Sequence
  Description of Artificial Sequence: Synthetic oligonucleotide
cggugguuaguaagcugca

SEQ ID NO: 946767 - RNA, 19 nt, Artificial Sequence
  Description of Artificial Sequence: Synthetic oligonucleotide
auggggcgacaaacuucau

SEQ ID NO: 946768 - RNA, 19 nt, Artificial Sequence
  Description of Artificial Sequence: Synthetic oligonucleotide
gacggccguugcaugccau

SEQ ID NO: 946769 - RNA, 19 nt, Artificial Sequence
  Description of Artificial Sequence: Synthetic oligonucleotide
gguccaucacagggagacu

SEQ ID NO: 946770 - RNA, 19 nt, Artificial Sequence
  Description of Artificial Sequence: Synthetic oligonucleotide
ccagacccggugguuagua

SEQ ID NO: 946771 - RNA, 19 nt, Artificial Sequence
  Description of Artificial Sequence: Synthetic oligonucleotide
ccuucucuaugcgaacaau

SEQ ID NO: 946772 - RNA, 19 nt, Artificial Sequence
  Description of Artificial Sequence: Synthetic oligonucleotide
gcauagucccagacccggu

SEQ ID NO: 946773 - RNA, 19 nt, Artificial Sequence
  Description of Artificial Sequence: Synthetic oligonucleotide
ccacuggcucuggcguuug

SEQ ID NO: 946774 - RNA, 19 nt, Artificial Sequence
  Description of Artificial Sequence: Synthetic oligonucleotide
gcgauuccagcuggcuugu

SEQ ID NO: 946775 - RNA, 19 nt, Artificial Sequence
  Description of Artificial Sequence: Synthetic oligonucleotide
guucguccucaggcauacu

SEQ ID NO: 946776 - RNA, 19 nt, Artificial Sequence
  Description of Artificial Sequence: Synthetic oligonucleotide
cccgacggccaaggugcug

SEQ ID NO: 946777 - RNA, 19 nt, Artificial Sequence
  Description of Artificial Sequence: Synthetic oligonucleotide
gcccacccucccacucagc

SEQ ID NO: 946778 - RNA, 19 nt, Artificial Sequence
  Description of Artificial Sequence: Synthetic oligonucleotide
ggagcuccgucagguccau

SEQ ID NO: 946779 - RNA, 19 nt, Artificial Sequence
  Description of Artificial Sequence: Synthetic oligonucleotide
cgugcugaguuuggccacu

SEQ ID NO: 946780 - RNA, 19 nt, Artificial Sequence
  Description of Artificial Sequence: Synthetic oligonucleotide
cggccguugcaugccaugu

SEQ ID NO: 946781 - RNA, 19 nt, Artificial Sequence
  Description of Artificial Sequence: Synthetic oligonucleotide
ccgacucgcuuugcuuccu

SEQ ID NO: 946782 - RNA, 19 nt, Artificial Sequence
  Description of Artificial Sequence: Synthetic oligonucleotide
ccgugauuugaagguccuu

SEQ ID NO: 946783 - RNA, 19 nt, Artificial Sequence
  Description of Artificial Sequence: Synthetic oligonucleotide
cccagacccggugguuagu

SEQ ID NO: 946784 - RNA, 19 nt, Artificial Sequence
  Description of Artificial Sequence: Synthetic oligonucleotide
gcgcugcgaggcucaucuu

SEQ ID NO: 946785 - RNA, 19 nt, Artificial Sequence
  Description of Artificial Sequence: Synthetic oligonucleotide
aaugggaugagauagagag

SEQ ID NO: 946786 - RNA, 19 nt, Artificial Sequence
  Description of Artificial Sequence: Synthetic oligonucleotide
aagaugcugagucauuggc

SEQ ID NO: 946787 - RNA, 19 nt, Artificial Sequence
  Description of Artificial Sequence: Synthetic oligonucleotide
aaggaauugaacgagaagu

SEQ ID NO: 946788 - RNA, 19 nt, Artificial Sequence
  Description of Artificial Sequence: Synthetic oligonucleotide
uuuucgaguaaucugcucc

SEQ ID NO: 946789 - RNA, 19 nt, Artificial Sequence
  Description of Artificial Sequence: Synthetic oligonucleotide
ucagaauucagucugaauu

SEQ ID NO: 946790 - RNA, 19 nt, Artificial Sequence
  Description of Artificial Sequence: Synthetic oligonucleotide
uuuucuaugccauuacaag

SEQ ID NO: 946791 - RNA, 19 nt, Artificial Sequence
  Description of Artificial Sequence: Synthetic oligonucleotide
ucgaguuaucauuugaggg

SEQ ID NO: 946792 - RNA, 19 nt, Artificial Sequence
  Description of Artificial Sequence: Synthetic oligonucleotide
ggaaugaauacuuaguggg

SEQ ID NO: 946793 - RNA, 19 nt, Artificial Sequence
  Description of Artificial Sequence: Synthetic oligonucleotide
aaauagagggcacagcugu

SEQ ID NO: 946794 - RNA, 19 nt, Artificial Sequence
  Description of Artificial Sequence: Synthetic oligonucleotide
aagucguccauggagauac

SEQ ID NO: 946795 - RNA, 19 nt, Artificial Sequence
  Description of Artificial Sequence: Synthetic oligonucleotide
uuagugucaggcuugaggc

SEQ ID NO: 946796 - RNA, 19 nt, Artificial Sequence
  Description of Artificial Sequence: Synthetic oligonucleotide
gagucgaugagcuugcagg

SEQ ID NO: 946797 - RNA, 19 nt, Artificial Sequence
  Description of Artificial Sequence: Synthetic oligonucleotide
ugaauuuucgaguaaucug

SEQ ID NO: 946798 - RNA, 19 nt, Artificial Sequence
  Description of Artificial Sequence: Synthetic oligonucleotide
caucaugagaggaagaggc

SEQ ID NO: 946799 - RNA, 19 nt, Artificial Sequence
  Description of Artificial Sequence: Synthetic oligonucleotide
gaaacuauaagaaugaagu

SEQ ID NO: 946800 - RNA, 19 nt, Artificial Sequence
  Description of Artificial Sequence: Synthetic oligonucleotide
gaauuuucgaguaaucugc

SEQ ID NO: 946801 - RNA, 19 nt, Artificial Sequence
  Description of Artificial Sequence: Synthetic oligonucleotide
uugaacgagaaguugagca

SEQ ID NO: 946802 - RNA, 19 nt, Artificial Sequence
  Description of Artificial Sequence: Synthetic oligonucleotide
ugaagugagccaaugaacu

SEQ ID NO: 946803 - RNA, 19 nt, Artificial Sequence
  Description of Artificial Sequence: Synthetic oligonucleotide
gagccaaugaacuugcaag

SEQ ID NO: 946804 - RNA, 19 nt, Artificial Sequence
  Description of Artificial Sequence: Synthetic oligonucleotide
auuacaagaucaucuggac

SEQ ID NO: 946805 - RNA, 19 nt, Artificial Sequence
  Description of Artificial Sequence: Synthetic oligonucleotide
aggaaugaauacuuagugg

SEQ ID NO: 946806 - RNA, 19 nt, Artificial Sequence
  Description of Artificial Sequence: Synthetic oligonucleotide
uuaaccacuggaucagucg

SEQ ID NO: 946807 - RNA, 19 nt, Artificial Sequence
  Description of Artificial Sequence: Synthetic oligonucleotide
ucauugauagacauaggac

SEQ ID NO: 946808 - RNA, 19 nt, Artificial Sequence
  Description of Artificial Sequence: Synthetic oligonucleotide
ccaauuaucccucugaacg

SEQ ID NO: 946809 - RNA, 19 nt, Artificial Sequence
  Description of Artificial Sequence: Synthetic oligonucleotide
aauuaucccucugaacggc

SEQ ID NO: 946810 - RNA, 19 nt, Artificial Sequence
  Description of Artificial Sequence: Synthetic oligonucleotide
cucgcuucaacuuucgggg

SEQ ID NO: 946811 - RNA, 19 nt, Artificial Sequence
  Description of Artificial Sequence: Synthetic oligonucleotide
acuauaagaaugaagugag

SEQ ID NO: 946812 - RNA, 19 nt, Artificial Sequence
  Description of Artificial Sequence: Synthetic oligonucleotide
ggauggaaggaauugaacg

SEQ ID NO: 946813 - RNA, 19 nt, Artificial Sequence
  Description of Artificial Sequence: Synthetic oligonucleotide
aaaugcucacugcagagga

SEQ ID NO: 946814 - RNA, 19 nt, Artificial Sequence
  Description of Artificial Sequence: Synthetic oligonucleotide
gauagagagcuccugcccg

SEQ ID NO: 946815 - RNA, 19 nt, Artificial Sequence
  Description of Artificial Sequence: Synthetic oligonucleotide
uagucgauacuucugauuc

SEQ ID NO: 946816 - RNA, 19 nt, Artificial Sequence
  Description of Artificial Sequence: Synthetic oligonucleotide
uugggguuacaucaguagg

SEQ ID NO: 946817 - RNA, 19 nt, Artificial Sequence
  Description of Artificial Sequence: Synthetic oligonucleotide
ugccauuacaagaucaucu

SEQ ID NO: 946818 - RNA, 19 nt, Artificial Sequence
  Description of Artificial Sequence: Synthetic oligonucleotide
cacuuuguggagaagcucg

SEQ ID NO: 946819 - RNA, 19 nt, Artificial Sequence
  Description of Artificial Sequence: Synthetic oligonucleotide
aucgaguuaucauuugagg

SEQ ID NO: 946820 - RNA, 19 nt, Artificial Sequence
  Description of Artificial Sequence: Synthetic oligonucleotide
agauagagagcuccugccc

SEQ ID NO: 946821 - RNA, 19 nt, Artificial Sequence
  Description of Artificial Sequence: Synthetic oligonucleotide
accucauugauagacauag

SEQ ID NO: 946822 - RNA, 19 nt, Artificial Sequence
  Description of Artificial Sequence: Synthetic oligonucleotide
acugugcucacucugcacg

SEQ ID NO: 946823 - RNA, 19 nt, Artificial Sequence
  Description of Artificial Sequence: Synthetic oligonucleotide
gaugaagccacacucucug

SEQ ID NO: 946824 - RNA, 19 nt, Artificial Sequence
  Description of Artificial Sequence: Synthetic oligonucleotide
uuugggguuacaucaguag

SEQ ID NO: 946825 - RNA, 19 nt, Artificial Sequence
  Description of Artificial Sequence: Synthetic oligonucleotide
uggucuuucuccuagcaug

SEQ ID NO: 946826 - RNA, 19 nt, Artificial Sequence
  Description of Artificial Sequence: Synthetic oligonucleotide
gaaagguaccaacuccugg

SEQ ID NO: 946827 - RNA, 19 nt, Artificial Sequence
  Description of Artificial Sequence: Synthetic oligonucleotide
auggaaugggaugagauag

SEQ ID NO: 946828 - RNA, 19 nt, Artificial Sequence
  Description of Artificial Sequence: Synthetic oligonucleotide
uuauuugguuuucuaugcc

SEQ ID NO: 946829 - RNA, 19 nt, Artificial Sequence
  Description of Artificial Sequence: Synthetic oligonucleotide
uccgacagguggaaaauag

SEQ ID NO: 946830 - RNA, 19 nt, Artificial Sequence
  Description of Artificial Sequence: Synthetic oligonucleotide
aauugaacgagaaguugag

SEQ ID NO: 946831 - RNA, 19 nt, Artificial Sequence
  Description of Artificial Sequence: Synthetic oligonucleotide
uuacaagaucaucuggaca

SEQ ID NO: 946832 - RNA, 19 nt, Artificial Sequence
  Description of Artificial Sequence: Synthetic oligonucleotide
gaaugaauacuuagugggg

SEQ ID NO: 946833 - RNA, 19 nt, Artificial Sequence
  Description of Artificial Sequence: Synthetic oligonucleotide
cauaggacuggcaucacug

SEQ ID NO: 946834 - RNA, 19 nt, Artificial Sequence
  Description of Artificial Sequence: Synthetic oligonucleotide
agaaacuauaagaaugaag

SEQ ID NO: 946835 - RNA, 19 nt, Artificial Sequence
  Description of Artificial Sequence: Synthetic oligonucleotide
gaaggaauugaacgagaag

SEQ ID NO: 946836 - RNA, 19 nt, Artificial Sequence
  Description of Artificial Sequence: Synthetic oligonucleotide
ucggaaagguaccaacucc

SEQ ID NO: 946837 - RNA, 19 nt, Artificial Sequence
  Description of Artificial Sequence: Synthetic oligonucleotide
gaagaugcugagucauugg

SEQ ID NO: 946838 - RNA, 19 nt, Artificial Sequence
  Description of Artificial Sequence: Synthetic oligonucleotide
ucuguaucucucuucggcc

SEQ ID NO: 946839 - RNA, 19 nt, Artificial Sequence
  Description of Artificial Sequence: Synthetic oligonucleotide
ucguuuggaguccuuuagg

SEQ ID NO: 946840 - RNA, 19 nt, Artificial Sequence
  Description of Artificial Sequence: Synthetic oligonucleotide
ucuccuagcauggccaugg

SEQ ID NO: 946841 - RNA, 19 nt, Artificial Sequence
  Description of Artificial Sequence: Synthetic oligonucleotide
ugggguuacaucaguagga

SEQ ID NO: 946842 - RNA, 19 nt, Artificial Sequence
  Description of Artificial Sequence: Synthetic oligonucleotide
agauccuggagauggaaug

SEQ ID NO: 946843 - RNA, 19 nt, Artificial Sequence
  Description of Artificial Sequence: Synthetic oligonucleotide
ucggucaaugggcucacgg

SEQ ID NO: 946844 - RNA, 19 nt, Artificial Sequence
  Description of Artificial Sequence: Synthetic oligonucleotide
caucgaguuaucauuugag

SEQ ID NO: 946845 - RNA, 19 nt, Artificial Sequence
  Description of Artificial Sequence: Synthetic oligonucleotide
cucauugauagacauagga

SEQ ID NO: 946846 - RNA, 19 nt, Artificial Sequence
  Description of Artificial Sequence: Synthetic oligonucleotide
cauuacaagaucaucugga

SEQ ID NO: 946847 - RNA, 19 nt, Artificial Sequence
  Description of Artificial Sequence: Synthetic oligonucleotide
ucuuauucugccgagccga

SEQ ID NO: 946848 - RNA, 19 nt, Artificial Sequence
  Description of Artificial Sequence: Synthetic oligonucleotide
gguuacaucaguaggaggc

SEQ ID NO: 946849 - RNA, 19 nt, Artificial Sequence
  Description of Artificial Sequence: Synthetic oligonucleotide
uauucugccgagccgaaaa

SEQ ID NO: 946850 - RNA, 19 nt, Artificial Sequence
  Description of Artificial Sequence: Synthetic oligonucleotide
gaauugaacgagaaguuga

SEQ ID NO: 946851 - RNA, 19 nt, Artificial Sequence
  Description of Artificial Sequence: Synthetic oligonucleotide
cucuguaucucucuucggc

SEQ ID NO: 946852 - RNA, 19 nt, Artificial Sequence
  Description of Artificial Sequence: Synthetic oligonucleotide
uuagguaggggagguaggg

SEQ ID NO: 946853 - RNA, 19 nt, Artificial Sequence
  Description of Artificial Sequence: Synthetic oligonucleotide
aucaguaggaggcgcagag

SEQ ID NO: 946854 - RNA, 19 nt, Artificial Sequence
  Description of Artificial Sequence: Synthetic oligonucleotide
ucuuguagguaaugugaag

SEQ ID NO: 946855 - RNA, 19 nt, Artificial Sequence
  Description of Artificial Sequence: Synthetic oligonucleotide
ucugccgagccgaaaagca

SEQ ID NO: 946856 - RNA, 19 nt, Artificial Sequence
  Description of Artificial Sequence: Synthetic oligonucleotide
gaacuuggaggacucuggg

SEQ ID NO: 946857 - RNA, 19 nt, Artificial Sequence
  Description of Artificial Sequence: Synthetic oligonucleotide
uugauagacauaggacugg

SEQ ID NO: 946858 - RNA, 19 nt, Artificial Sequence
  Description of Artificial Sequence: Synthetic oligonucleotide
aaacugucuguucaaguuu

SEQ ID NO: 946859 - RNA, 19 nt, Artificial Sequence
  Description of Artificial Sequence: Synthetic oligonucleotide
uaaccacuggaucagucgu

SEQ ID NO: 946860 - RNA, 19 nt, Artificial Sequence
  Description of Artificial Sequence: Synthetic oligonucleotide
uaugccauuacaagaucau

SEQ ID NO: 946861 - RNA, 19 nt, Artificial Sequence
  Description of Artificial Sequence: Synthetic oligonucleotide
auugaacgagaaguugagc

SEQ ID NO: 946862 - RNA, 19 nt, Artificial Sequence
  Description of Artificial Sequence: Synthetic oligonucleotide
uuucgaguaaucugcucca

SEQ ID NO: 946863 - RNA, 19 nt, Artificial Sequence
  Description of Artificial Sequence: Synthetic oligonucleotide
auuuucgaguaaucugcuc

SEQ ID NO: 946864 - RNA, 19 nt, Artificial Sequence
  Description of Artificial Sequence: Synthetic oligonucleotide
ucugaauuuucgaguaauc

SEQ ID NO: 946865 - RNA, 19 nt, Artificial Sequence
  Description of Artificial Sequence: Synthetic oligonucleotide
guaaugugaagaugcugag

SEQ ID NO: 946866 - RNA, 19 nt, Artificial Sequence
  Description of Artificial Sequence: Synthetic oligonucleotide
agugagccaaugaacuugc

SEQ ID NO: 946867 - RNA, 19 nt, Artificial Sequence
  Description of Artificial Sequence: Synthetic oligonucleotide
uguagguaaugugaagaug

SEQ ID NO: 946868 - RNA, 19 nt, Artificial Sequence
  Description of Artificial Sequence: Synthetic oligonucleotide
ugaacggcuuuuaaccacu

SEQ ID NO: 946869 - RNA, 19 nt, Artificial Sequence
  Description of Artificial Sequence: Synthetic oligonucleotide
acuuagguaggggagguag

SEQ ID NO: 946870 - RNA, 19 nt, Artificial Sequence
  Description of Artificial Sequence: Synthetic oligonucleotide
uuuaaccacuggaucaguc

SEQ ID NO: 946871 - RNA, 19 nt, Artificial Sequence
  Description of Artificial Sequence: Synthetic oligonucleotide
ugagccaaugaacuugcaa

SEQ ID NO: 946872 - RNA, 19 nt, Artificial Sequence
  Description of Artificial Sequence: Synthetic oligonucleotide
aggacuggcaucacugugc

SEQ ID NO: 946873 - RNA, 19 nt, Artificial Sequence
  Description of Artificial Sequence: Synthetic oligonucleotide
accauugcgggccucgguc

SEQ ID NO: 946874 - RNA, 19 nt, Artificial Sequence
  Description of Artificial Sequence: Synthetic oligonucleotide
uuucggaccuggcugucag

SEQ ID NO: 946875 - RNA, 19 nt, Artificial Sequence
  Description of Artificial Sequence: Synthetic oligonucleotide
ucaacuuucggggcucagg

SEQ ID NO: 946876 - RNA, 19 nt, Artificial Sequence
  Description of Artificial Sequence: Synthetic oligonucleotide
ugaacgagaaguugagcau

SEQ ID NO: 946877 - RNA, 19 nt, Artificial Sequence
  Description of Artificial Sequence: Synthetic oligonucleotide
caucuugggaggcucgugg

SEQ ID NO: 946878 - RNA, 19 nt, Artificial Sequence
  Description of Artificial Sequence: Synthetic oligonucleotide
gauaccacucuugucugcc

SEQ ID NO: 946879 - RNA, 19 nt, Artificial Sequence
  Description of Artificial Sequence: Synthetic oligonucleotide
cacuggaucagucguuugg

SEQ ID NO: 946880 - RNA, 19 nt, Artificial Sequence
  Description of Artificial Sequence: Synthetic oligonucleotide
guuacaucaguaggaggcg

SEQ ID NO: 946881 - RNA, 19 nt, Artificial Sequence
  Description of Artificial Sequence: Synthetic oligonucleotide
agacauaggacuggcauca

SEQ ID NO: 946882 - RNA, 19 nt, Artificial Sequence
  Description of Artificial Sequence: Synthetic oligonucleotide
cuuguagguaaugugaaga

SEQ ID NO: 946883 - RNA, 19 nt, Artificial Sequence
  Description of Artificial Sequence: Synthetic oligonucleotide
aacgagaaguugagcauag

SEQ ID NO: 946884 - RNA, 19 nt, Artificial Sequence
  Description of Artificial Sequence: Synthetic oligonucleotide
uggaaggaauugaacgaga

SEQ ID NO: 946885 - RNA, 19 nt, Artificial Sequence
  Description of Artificial Sequence: Synthetic oligonucleotide
cuggguucaucuugggagg

SEQ ID NO: 946886 - RNA, 19 nt, Artificial Sequence
  Description of Artificial Sequence: Synthetic oligonucleotide
gguaaugugaagaugcuga

SEQ ID NO: 946887 - RNA, 19 nt, Artificial Sequence
  Description of Artificial Sequence: Synthetic oligonucleotide
cuuagguaggggagguagg

SEQ ID NO: 946888 - RNA, 19 nt, Artificial Sequence
  Description of Artificial Sequence: Synthetic oligonucleotide
uguguggccucucaugguc

SEQ ID NO: 946889 - RNA, 19 nt, Artificial Sequence
  Description of Artificial Sequence: Synthetic oligonucleotide
gguaccaacuccugguggg

SEQ ID NO: 946890 - RNA, 19 nt, Artificial Sequence
  Description of Artificial Sequence: Synthetic oligonucleotide
uuguagguaaugugaagau

SEQ ID NO: 946891 - RNA, 19 nt, Artificial Sequence
  Description of Artificial Sequence: Synthetic oligonucleotide
uggaucagucguuuggagu

SEQ ID NO: 946892 - RNA, 19 nt, Artificial Sequence
  Description of Artificial Sequence: Synthetic oligonucleotide
aucccuguguucugggcac

SEQ ID NO: 946893 - RNA, 19 nt, Artificial Sequence
  Description of Artificial Sequence: Synthetic oligonucleotide
gaaugaagugagccaauga

SEQ ID NO: 946894 - RNA, 19 nt, Artificial Sequence
  Description of Artificial Sequence: Synthetic oligonucleotide
uccaauuaucccucugaac

SEQ ID NO: 946895 - RNA, 19 nt, Artificial Sequence
  Description of Artificial Sequence: Synthetic oligonucleotide
caccuuguuagugucaggc

SEQ ID NO: 946896 - RNA, 19 nt, Artificial Sequence
  Description of Artificial Sequence: Synthetic oligonucleotide
ugccauagaaacugucugu

SEQ ID NO: 946897 - RNA, 19 nt, Artificial Sequence
  Description of Artificial Sequence: Synthetic oligonucleotide
uacaucaguaggaggcgca

SEQ ID NO: 946898 - RNA, 19 nt, Artificial Sequence
  Description of Artificial Sequence: Synthetic oligonucleotide
ugauagacauaggacuggc

SEQ ID NO: 946899 - RNA, 19 nt, Artificial Sequence
  Description of Artificial Sequence: Synthetic oligonucleotide
ucugguugcugcuccaagu

SEQ ID NO: 946900 - RNA, 19 nt, Artificial Sequence
  Description of Artificial Sequence: Synthetic oligonucleotide
cucgccuuugcccugccgg

SEQ ID NO: 946901 - RNA, 19 nt, Artificial Sequence
  Description of Artificial Sequence: Synthetic oligonucleotide
uuuguggagaagcucgcuu

SEQ ID NO: 946902 - RNA, 19 nt, Artificial Sequence
  Description of Artificial Sequence: Synthetic oligonucleotide
agguaccaacuccuggugg

SEQ ID NO: 946903 - RNA, 19 nt, Artificial Sequence
  Description of Artificial Sequence: Synthetic oligonucleotide
uagacauaggacuggcauc

SEQ ID NO: 946904 - RNA, 19 nt, Artificial Sequence
  Description of Artificial Sequence: Synthetic oligonucleotide
ucuaugccauuacaagauc

SEQ ID NO: 946905 - RNA, 19 nt, Artificial Sequence
  Description of Artificial Sequence: Synthetic oligonucleotide
gaguuaucauuugagggca

SEQ ID NO: 946906 - RNA, 19 nt, Artificial Sequence
  Description of Artificial Sequence: Synthetic oligonucleotide
uagugucaggcuugaggcg

SEQ ID NO: 946907 - RNA, 19 nt, Artificial Sequence
  Description of Artificial Sequence: Synthetic oligonucleotide
gugagggaccuacaguucc

SEQ ID NO: 946908 - RNA, 19 nt, Artificial Sequence
  Description of Artificial Sequence: Synthetic oligonucleotide
guaggagugcagugagucg

SEQ ID NO: 946909 - RNA, 19 nt, Artificial Sequence
  Description of Artificial Sequence: Synthetic oligonucleotide
ucucuucggccucuuucgg

SEQ ID NO: 946910 - RNA, 19 nt, Artificial Sequence
  Description of Artificial Sequence: Synthetic oligonucleotide
cuaugccauuacaagauca

SEQ ID NO: 946911 - RNA, 19 nt, Artificial Sequence
  Description of Artificial Sequence: Synthetic oligonucleotide
ucgaguaaucugcuccaca

SEQ ID NO: 946912 - RNA, 19 nt, Artificial Sequence
  Description of Artificial Sequence: Synthetic oligonucleotide
ugaccucauugauagacau

SEQ ID NO: 946913 - RNA, 19 nt, Artificial Sequence
  Description of Artificial Sequence: Synthetic oligonucleotide
gagucggaaagguaccaac

SEQ ID NO: 946914 - RNA, 19 nt, Artificial Sequence
  Description of Artificial Sequence: Synthetic oligonucleotide
aggacagcgguuccacgac

SEQ ID NO: 946915 - RNA, 19 nt, Artificial Sequence
  Description of Artificial Sequence: Synthetic oligonucleotide
aaaggccaccuuguuagug

SEQ ID NO: 946916 - RNA, 19 nt, Artificial Sequence
  Description of Artificial Sequence: Synthetic oligonucleotide
ugggaagccuucugagggg

SEQ ID NO: 946917 - RNA, 19 nt, Artificial Sequence
  Description of Artificial Sequence: Synthetic oligonucleotide
gagacagcgcgcuucucgc

SEQ ID NO: 946918 - RNA, 19 nt, Artificial Sequence
  Description of Artificial Sequence: Synthetic oligonucleotide
ggaucagucguuuggaguc

SEQ ID NO: 946919 - RNA, 19 nt, Artificial Sequence
  Description of Artificial Sequence: Synthetic oligonucleotide
cucuuauucugccgagccg

SEQ ID NO: 946920 - RNA, 19 nt, Artificial Sequence
  Description of Artificial Sequence: Synthetic oligonucleotide
aaggagacagcgcgcuucu

SEQ ID NO: 946921 - RNA, 19 nt, Artificial Sequence
  Description of Artificial Sequence: Synthetic oligonucleotide
ugaggaacuuggaggacuc

SEQ ID NO: 946922 - RNA, 19 nt, Artificial Sequence
  Description of Artificial Sequence: Synthetic oligonucleotide
ccgaaaagcaguaggagug

SEQ ID NO: 946923 - RNA, 19 nt, Artificial Sequence
  Description of Artificial Sequence: Synthetic oligonucleotide
ggagacagcgcgcuucucg

SEQ ID NO: 946924 - RNA, 19 nt, Artificial Sequence
  Description of Artificial Sequence: Synthetic oligonucleotide
ugccgagccgaaaagcagu

SEQ ID NO: 946925 - RNA, 19 nt, Artificial Sequence
  Description of Artificial Sequence: Synthetic oligonucleotide
acuuuguggagaagcucgc

SEQ ID NO: 946926 - RNA, 19 nt, Artificial Sequence
  Description of Artificial Sequence: Synthetic oligonucleotide
uuacaucaguaggaggcgc

SEQ ID NO: 946927 - RNA, 19 nt, Artificial Sequence
  Description of Artificial Sequence: Synthetic oligonucleotide
cugcccguucacuucaccc

SEQ ID NO: 946928 - RNA, 19 nt, Artificial Sequence
  Description of Artificial Sequence: Synthetic oligonucleotide
guaaucugcuccacauggg

SEQ ID NO: 946929 - RNA, 19 nt, Artificial Sequence
  Description of Artificial Sequence: Synthetic oligonucleotide
ucggaccuggcugucagag

SEQ ID NO: 946930 - RNA, 19 nt, Artificial Sequence
  Description of Artificial Sequence: Synthetic oligonucleotide
guaggaggcgcagaggggc

SEQ ID NO: 946931 - RNA, 19 nt, Artificial Sequence
  Description of Artificial Sequence: Synthetic oligonucleotide
augccauuacaagaucauc

SEQ ID NO: 946932 - RNA, 19 nt, Artificial Sequence
  Description of Artificial Sequence: Synthetic oligonucleotide
uguaucucucuucggccuc

SEQ ID NO: 946933 - RNA, 19 nt, Artificial Sequence
  Description of Artificial Sequence: Synthetic oligonucleotide
cagcuuucggaccuggcug

SEQ ID NO: 946934 - RNA, 19 nt, Artificial Sequence
  Description of Artificial Sequence: Synthetic oligonucleotide
agacagcgcgcuucucgcc

SEQ ID NO: 946935 - RNA, 19 nt, Artificial Sequence
  Description of Artificial Sequence: Synthetic oligonucleotide
ucgccaucgaguuaucauu

SEQ ID NO: 946936 - RNA, 19 nt, Artificial Sequence
  Description of Artificial Sequence: Synthetic oligonucleotide
ugcccguucacuucacccu

SEQ ID NO: 946937 - RNA, 19 nt, Artificial Sequence
  Description of Artificial Sequence: Synthetic oligonucleotide
uaccuggcucuuauucugc

SEQ ID NO: 946938 - RNA, 19 nt, Artificial Sequence
  Description of Artificial Sequence: Synthetic oligonucleotide
ggaauugaacgagaaguug

SEQ ID NO: 946939 - RNA, 19 nt, Artificial Sequence
  Description of Artificial Sequence: Synthetic oligonucleotide
ucuugggaggcucguggcu

SEQ ID NO: 946940 - RNA, 19 nt, Artificial Sequence
  Description of Artificial Sequence: Synthetic oligonucleotide
gucggaaagguaccaacuc

SEQ ID NO: 946941 - RNA, 19 nt, Artificial Sequence
  Description of Artificial Sequence: Synthetic oligonucleotide
acgacuggguucaucuugg

SEQ ID NO: 946942 - RNA, 19 nt, Artificial Sequence
  Description of Artificial Sequence: Synthetic oligonucleotide
ggaccuacaguuccuuucc

SEQ ID NO: 946943 - RNA, 19 nt, Artificial Sequence
  Description of Artificial Sequence: Synthetic oligonucleotide
acuguagucgauacuucug

SEQ ID NO: 946944 - RNA, 19 nt, Artificial Sequence
  Description of Artificial Sequence: Synthetic oligonucleotide
agucgauacuucugauucu

SEQ ID NO: 946945 - RNA, 19 nt, Artificial Sequence
  Description of Artificial Sequence: Synthetic oligonucleotide
accgccgcgcagcagauca

SEQ ID NO: 946946 - RNA, 19 nt, Artificial Sequence
  Description of Artificial Sequence: Synthetic oligonucleotide
ugagggaccuacaguuccu

SEQ ID NO: 946947 - RNA, 19 nt, Artificial Sequence
  Description of Artificial Sequence: Synthetic oligonucleotide
agcaguaggagugcaguga

SEQ ID NO: 946948 - RNA, 19 nt, Artificial Sequence
  Description of Artificial Sequence: Synthetic oligonucleotide
aauagagggcacagcugug

SEQ ID NO: 946949 - RNA, 19 nt, Artificial Sequence
  Description of Artificial Sequence: Synthetic oligonucleotide
cuuggaggagaaacuauaa

SEQ ID NO: 946950 - RNA, 19 nt, Artificial Sequence
  Description of Artificial Sequence: Synthetic oligonucleotide
cuggaucagucguuuggag

SEQ ID NO: 946951 - RNA, 19 nt, Artificial Sequence
  Description of Artificial Sequence: Synthetic oligonucleotide
aggccacuuagguagggga

SEQ ID NO: 946952 - RNA, 19 nt, Artificial Sequence
  Description of Artificial Sequence: Synthetic oligonucleotide
gcagcagaucaccauugcg

SEQ ID NO: 946953 - RNA, 19 nt, Artificial Sequence
  Description of Artificial Sequence: Synthetic oligonucleotide
ucuggacaacacaggcucu

SEQ ID NO: 946954 - RNA, 19 nt, Artificial Sequence
  Description of Artificial Sequence: Synthetic oligonucleotide
uucugccgagccgaaaagc

SEQ ID NO: 946955 - RNA, 19 nt, Artificial Sequence
  Description of Artificial Sequence: Synthetic oligonucleotide
aucaccauugcgggccucg

SEQ ID NO: 946956 - RNA, 19 nt, Artificial Sequence
  Description of Artificial Sequence: Synthetic oligonucleotide
uggaggugugaagucgucc

SEQ ID NO: 946957 - RNA, 19 nt, Artificial Sequence
  Description of Artificial Sequence: Synthetic oligonucleotide
gacacuguagucgauacuu

SEQ ID NO: 946958 - RNA, 19 nt, Artificial Sequence
  Description of Artificial Sequence: Synthetic oligonucleotide
agcuuucggaccuggcugu

SEQ ID NO: 946959 - RNA, 19 nt, Artificial Sequence
  Description of Artificial Sequence: Synthetic oligonucleotide
uggagauaccacucuuguc

SEQ ID NO: 946960 - RNA, 19 nt, Artificial Sequence
  Description of Artificial Sequence: Synthetic oligonucleotide
cucucgagugugcuuggag

SEQ ID NO: 946961 - RNA, 19 nt, Artificial Sequence
  Description of Artificial Sequence: Synthetic oligonucleotide
gaucagucguuuggagucc

SEQ ID NO: 946962 - RNA, 19 nt, Artificial Sequence
  Description of Artificial Sequence: Synthetic oligonucleotide
ggcggaugaagccacacuc

SEQ ID NO: 946963 - RNA, 19 nt, Artificial Sequence
  Description of Artificial Sequence: Synthetic oligonucleotide
ucccgcaggcagcauaccu

SEQ ID NO: 946964 - RNA, 19 nt, Artificial Sequence
  Description of Artificial Sequence: Synthetic oligonucleotide
agucggaaagguaccaacu

SEQ ID NO: 946965 - RNA, 19 nt, Artificial Sequence
  Description of Artificial Sequence: Synthetic oligonucleotide
cuggucagacacuguaguc

SEQ ID NO: 946966 - RNA, 19 nt, Artificial Sequence
  Description of Artificial Sequence: Synthetic oligonucleotide
ugcauuggcuugugugugu

SEQ ID NO: 946967 - RNA, 19 nt, Artificial Sequence
  Description of Artificial Sequence: Synthetic oligonucleotide
cacugcagaggaaugaaua

SEQ ID NO: 946968 - RNA, 19 nt, Artificial Sequence
  Description of Artificial Sequence: Synthetic oligonucleotide
cugccgagccgaaaagcag

SEQ ID NO: 946969 - RNA, 19 nt, Artificial Sequence
  Description of Artificial Sequence: Synthetic oligonucleotide
gcauaccuggcucuuauuc

SEQ ID NO: 946970 - RNA, 19 nt, Artificial Sequence
  Description of Artificial Sequence: Synthetic oligonucleotide
agugagggaccuacaguuc

SEQ ID NO: 946971 - RNA, 19 nt, Artificial Sequence
  Description of Artificial Sequence: Synthetic oligonucleotide
cucgagugugcuuggagga

SEQ ID NO: 946972 - RNA, 19 nt, Artificial Sequence
  Description of Artificial Sequence: Synthetic oligonucleotide
gguccaauuaucccucuga

SEQ ID NO: 946973 - RNA, 19 nt, Artificial Sequence
  Description of Artificial Sequence: Synthetic oligonucleotide
uggcucuuauucugccgag

SEQ ID NO: 946974 - RNA, 19 nt, Artificial Sequence
  Description of Artificial Sequence: Synthetic oligonucleotide
ggaagggcugcagagucgg

SEQ ID NO: 946975 - RNA, 19 nt, Artificial Sequence
  Description of Artificial Sequence: Synthetic oligonucleotide
gaagcucgcuucaacuuuc

SEQ ID NO: 946976 - RNA, 19 nt, Artificial Sequence
  Description of Artificial Sequence: Synthetic oligonucleotide
acucuugucugccccgccu

SEQ ID NO: 946977 - RNA, 19 nt, Artificial Sequence
  Description of Artificial Sequence: Synthetic oligonucleotide
gacuggguucaucuuggga

SEQ ID NO: 946978 - RNA, 19 nt, Artificial Sequence
  Description of Artificial Sequence: Synthetic oligonucleotide
agcucgcuucaacuuucgg

SEQ ID NO: 946979 - RNA, 19 nt, Artificial Sequence
  Description of Artificial Sequence: Synthetic oligonucleotide
ucgcuucaacuuucggggc

SEQ ID NO: 946980 - RNA, 19 nt, Artificial Sequence
  Description of Artificial Sequence: Synthetic oligonucleotide
gaccuacaguuccuuuccc

SEQ ID NO: 946981 - RNA, 19 nt, Artificial Sequence
  Description of Artificial Sequence: Synthetic oligonucleotide
gacagcgguuccacgacug

SEQ ID NO: 946982 - RNA, 19 nt, Artificial Sequence
  Description of Artificial Sequence: Synthetic oligonucleotide
ggguuacaucaguaggagg

SEQ ID NO: 946983 - RNA, 19 nt, Artificial Sequence
  Description of Artificial Sequence: Synthetic oligonucleotide
aagcucgcuucaacuuucg

SEQ ID NO: 946984 - RNA, 19 nt, Artificial Sequence
  Description of Artificial Sequence: Synthetic oligonucleotide
agucugaauuuucgaguaa

SEQ ID NO: 946985 - RNA, 19 nt, Artificial Sequence
  Description of Artificial Sequence: Synthetic oligonucleotide
ggagguaggggagacuugc

SEQ ID NO: 946986 - RNA, 19 nt, Artificial Sequence
  Description of Artificial Sequence: Synthetic oligonucleotide
agucguuuggaguccuuua

SEQ ID NO: 946987 - RNA, 19 nt, Artificial Sequence
  Description of Artificial Sequence: Synthetic oligonucleotide
cagucugaauuuucgagua

SEQ ID NO: 946988 - RNA, 19 nt, Artificial Sequence
  Description of Artificial Sequence: Synthetic oligonucleotide
guaggggagacuugcucuc

SEQ ID NO: 946989 - RNA, 19 nt, Artificial Sequence
  Description of Artificial Sequence: Synthetic oligonucleotide
aggaauugaacgagaaguu

SEQ ID NO: 946990 - RNA, 19 nt, Artificial Sequence
  Description of Artificial Sequence: Synthetic oligonucleotide
gcaucaugagaggaagagg

SEQ ID NO: 946991 - RNA, 19 nt, Artificial Sequence
  Description of Artificial Sequence: Synthetic oligonucleotide
ugguugcugcuccaaguua

SEQ ID NO: 946992 - RNA, 19 nt, Artificial Sequence
  Description of Artificial Sequence: Synthetic oligonucleotide
ucugugcauuggcuugugu

SEQ ID NO: 946993 - RNA, 19 nt, Artificial Sequence
  Description of Artificial Sequence: Synthetic oligonucleotide
gaacgagaaguugagcaua

SEQ ID NO: 946994 - RNA, 19 nt, Artificial Sequence
  Description of Artificial Sequence: Synthetic oligonucleotide
gagagcuccugcccguuca

SEQ ID NO: 946995 - RNA, 19 nt, Artificial Sequence
  Description of Artificial Sequence: Synthetic oligonucleotide
gagaaacuauaagaaugaa

SEQ ID NO: 946996 - RNA, 19 nt, Artificial Sequence
  Description of Artificial Sequence: Synthetic oligonucleotide
agcaguucaccgccgcgca

SEQ ID NO: 946997 - RNA, 19 nt, Artificial Sequence
  Description of Artificial Sequence: Synthetic oligonucleotide
ucuugggacugccccugcu

SEQ ID NO: 946998 - RNA, 19 nt, Artificial Sequence
  Description of Artificial Sequence: Synthetic oligonucleotide
gggguuacaucaguaggag

SEQ ID NO: 946999 - RNA, 19 nt, Artificial Sequence
  Description of Artificial Sequence: Synthetic oligonucleotide
ugagcauaggcuggcccac

SEQ ID NO: 947000 - RNA, 19 nt, Artificial Sequence
  Description of Artificial Sequence: Synthetic oligonucleotide
guagugguugccauagaaa

SEQ ID NO: 947001 - RNA, 19 nt, Artificial Sequence
  Description of Artificial Sequence: Synthetic oligonucleotide
ucuuucggucaaugggcuc

SEQ ID NO: 947002 - RNA, 19 nt, Artificial Sequence
  Description of Artificial Sequence: Synthetic oligonucleotide
ggcuccuuagcaaaggaga

SEQ ID NO: 947003 - RNA, 19 nt, Artificial Sequence
  Description of Artificial Sequence: Synthetic oligonucleotide
ggucagacacuguagucga

SEQ ID NO: 947004 - RNA, 19 nt, Artificial Sequence
  Description of Artificial Sequence: Synthetic oligonucleotide
cucugguugcugcuccaag

SEQ ID NO: 947005 - RNA, 19 nt, Artificial Sequence
  Description of Artificial Sequence: Synthetic oligonucleotide
cgagccgaaaagcaguagg

SEQ ID NO: 947006 - RNA, 19 nt, Artificial Sequence
  Description of Artificial Sequence: Synthetic oligonucleotide
ucuccgacagguggaaaau

SEQ ID NO: 947007 - RNA, 19 nt, Artificial Sequence
  Description of Artificial Sequence: Synthetic oligonucleotide
cacacucucugugcauugg

SEQ ID NO: 947008 - RNA, 19 nt, Artificial Sequence
  Description of Artificial Sequence: Synthetic oligonucleotide
cuauucccacugcaccuug

SEQ ID NO: 947009 - RNA, 19 nt, Artificial Sequence
  Description of Artificial Sequence: Synthetic oligonucleotide
augcucacugcagaggaau

SEQ ID NO: 947010 - RNA, 19 nt, Artificial Sequence
  Description of Artificial Sequence: Synthetic oligonucleotide
cauggggcuccuuagcaaa

SEQ ID NO: 947011 - RNA, 19 nt, Artificial Sequence
  Description of Artificial Sequence: Synthetic oligonucleotide
cucucucgagugugcuugg

SEQ ID NO: 947012 - RNA, 19 nt, Artificial Sequence
  Description of Artificial Sequence: Synthetic oligonucleotide
gggaccuacaguuccuuuc

SEQ ID NO: 947013 - RNA, 19 nt, Artificial Sequence
  Description of Artificial Sequence: Synthetic oligonucleotide
uggguucaucuugggaggc

SEQ ID NO: 947014 - RNA, 19 nt, Artificial Sequence
  Description of Artificial Sequence: Synthetic oligonucleotide
caguucaccgccgcgcagc

SEQ ID NO: 947015 - RNA, 19 nt, Artificial Sequence
  Description of Artificial Sequence: Synthetic oligonucleotide
uggcuugugugugucugga

SEQ ID NO: 947016 - RNA, 19 nt, Artificial Sequence
  Description of Artificial Sequence: Synthetic oligonucleotide
uucgaguaaucugcuccac

SEQ ID NO: 947017 - RNA, 19 nt, Artificial Sequence
  Description of Artificial Sequence: Synthetic oligonucleotide
auaggcuggcccacauggg

SEQ ID NO: 947018 - RNA, 19 nt, Artificial Sequence
  Description of Artificial Sequence: Synthetic oligonucleotide
cuuucggggcucaggcuuc

SEQ ID NO: 947019 - RNA, 19 nt, Artificial Sequence
  Description of Artificial Sequence: Synthetic oligonucleotide
ugugcucacucugcacggc

SEQ ID NO: 947020 - RNA, 19 nt, Artificial Sequence
  Description of Artificial Sequence: Synthetic oligonucleotide
aggcggaugaagccacacu

SEQ ID NO: 947021 - RNA, 19 nt, Artificial Sequence
  Description of Artificial Sequence: Synthetic oligonucleotide
cuuuuggagaaacugucuu

SEQ ID NO: 947022 - RNA, 19 nt, Artificial Sequence
  Description of Artificial Sequence: Synthetic oligonucleotide
uuucggggcucaggcuucg

SEQ ID NO: 947023 - RNA, 19 nt, Artificial Sequence
  Description of Artificial Sequence: Synthetic oligonucleotide
uguuagugucaggcuugag

SEQ ID NO: 947024 - RNA, 19 nt, Artificial Sequence
  Description of Artificial Sequence: Synthetic oligonucleotide
aaugcucacugcagaggaa

SEQ ID NO: 947025 - RNA, 19 nt, Artificial Sequence
  Description of Artificial Sequence: Synthetic oligonucleotide
auuaucccucugaacggcu

SEQ ID NO: 947026 - RNA, 19 nt, Artificial Sequence
  Description of Artificial Sequence: Synthetic oligonucleotide
gaagugagccaaugaacuu

SEQ ID NO: 947027 - RNA, 19 nt, Artificial Sequence
  Description of Artificial Sequence: Synthetic oligonucleotide
cagugagggaccuacaguu

SEQ ID NO: 947028 - RNA, 19 nt, Artificial Sequence
  Description of Artificial Sequence: Synthetic oligonucleotide
gagaagcucgcuucaacuu

SEQ ID NO: 947029 - RNA, 19 nt, Artificial Sequence
  Description of Artificial Sequence: Synthetic oligonucleotide
gguaggggagacuugcucu

SEQ ID NO: 947030 - RNA, 19 nt, Artificial Sequence
  Description of Artificial Sequence: Synthetic oligonucleotide
ggucugacagccagguacc

SEQ ID NO: 947031 - RNA, 19 nt, Artificial Sequence
  Description of Artificial Sequence: Synthetic oligonucleotide
aguucaccgccgcgcagca

SEQ ID NO: 947032 - RNA, 19 nt, Artificial Sequence
  Description of Artificial Sequence: Synthetic oligonucleotide
caagaucaucuggacaaca

SEQ ID NO: 947033 - RNA, 19 nt, Artificial Sequence
  Description of Artificial Sequence: Synthetic oligonucleotide
gaacggcuuuuaaccacug

SEQ ID NO: 947034 - RNA, 19 nt, Artificial Sequence
  Description of Artificial Sequence: Synthetic oligonucleotide
ccagguacccagcauccag

SEQ ID NO: 947035 - RNA, 19 nt, Artificial Sequence
  Description of Artificial Sequence: Synthetic oligonucleotide
ugcuguaagugaggaacuu

SEQ ID NO: 947036 - RNA, 19 nt, Artificial Sequence
  Description of Artificial Sequence: Synthetic oligonucleotide
ggagaagcucgcuucaacu

SEQ ID NO: 947037 - RNA, 19 nt, Artificial Sequence
  Description of Artificial Sequence: Synthetic oligonucleotide
acuauucccacugcaccuu

SEQ ID NO: 947038 - RNA, 19 nt, Artificial Sequence
  Description of Artificial Sequence: Synthetic oligonucleotide
cacggcuuccgcagcuggc

SEQ ID NO: 947039 - RNA, 19 nt, Artificial Sequence
  Description of Artificial Sequence: Synthetic oligonucleotide
agcgguuccacgacugggu

SEQ ID NO: 947040 - RNA, 19 nt, Artificial Sequence
  Description of Artificial Sequence: Synthetic oligonucleotide
uuucggucaaugggcucac

SEQ ID NO: 947041 - RNA, 19 nt, Artificial Sequence
  Description of Artificial Sequence: Synthetic oligonucleotide
ggaaggaauugaacgagaa

SEQ ID NO: 947042 - RNA, 19 nt, Artificial Sequence
  Description of Artificial Sequence: Synthetic oligonucleotide
cacuguagucgauacuucu

SEQ ID NO: 947043 - RNA, 19 nt, Artificial Sequence
  Description of Artificial Sequence: Synthetic oligonucleotide
uucuccuagcauggccaug

SEQ ID NO: 947044 - RNA, 19 nt, Artificial Sequence
  Description of Artificial Sequence: Synthetic oligonucleotide
agagucggaaagguaccaa

SEQ ID NO: 947045 - RNA, 19 nt, Artificial Sequence
  Description of Artificial Sequence: Synthetic oligonucleotide
guagucgauacuucugauu

SEQ ID NO: 947046 - RNA, 19 nt, Artificial Sequence
  Description of Artificial Sequence: Synthetic oligonucleotide
gcgcuucucgccuuugccc

SEQ ID NO: 947047 - RNA, 19 nt, Artificial Sequence
  Description of Artificial Sequence: Synthetic oligonucleotide
gguggaaaauagagggcac

SEQ ID NO: 947048 - RNA, 19 nt, Artificial Sequence
  Description of Artificial Sequence: Synthetic oligonucleotide
ccucauugauagacauagg

SEQ ID NO: 947049 - RNA, 19 nt, Artificial Sequence
  Description of Artificial Sequence: Synthetic oligonucleotide
cccggaggcagacaggaug

SEQ ID NO: 947050 - RNA, 19 nt, Artificial Sequence
  Description of Artificial Sequence: Synthetic oligonucleotide
cuucucgccuuugcccugc

SEQ ID NO: 947051 - RNA, 19 nt, Artificial Sequence
  Description of Artificial Sequence: Synthetic oligonucleotide
ccauugcgggccucggucg

SEQ ID NO: 947052 - RNA, 19 nt, Artificial Sequence
  Description of Artificial Sequence: Synthetic oligonucleotide
cuguaucucucuucggccu

SEQ ID NO: 947053 - RNA, 19 nt, Artificial Sequence
  Description of Artificial Sequence: Synthetic oligonucleotide
ggccacuuagguaggggag

SEQ ID NO: 947054 - RNA, 19 nt, Artificial Sequence
  Description of Artificial Sequence: Synthetic oligonucleotide
gguccuccagucuuuugga

SEQ ID NO: 947055 - RNA, 19 nt, Artificial Sequence
  Description of Artificial Sequence: Synthetic oligonucleotide
gacagcgcgcuucucgccu

SEQ ID NO: 947056 - RNA, 19 nt, Artificial Sequence
  Description of Artificial Sequence: Synthetic oligonucleotide
aaccacuggaucagucguu

SEQ ID NO: 947057 - RNA, 19 nt, Artificial Sequence
  Description of Artificial Sequence: Synthetic oligonucleotide
uucggaccuggcugucaga

SEQ ID NO: 947058 - RNA, 19 nt, Artificial Sequence
  Description of Artificial Sequence: Synthetic oligonucleotide
ggcacugauaaaggccacc

SEQ ID NO: 947059 - RNA, 19 nt, Artificial Sequence
  Description of Artificial Sequence: Synthetic oligonucleotide
aucagucguuuggaguccu

SEQ ID NO: 947060 - RNA, 19 nt, Artificial Sequence
  Description of Artificial Sequence: Synthetic oligonucleotide
cacucuugucugccccgcc

SEQ ID NO: 947061 - RNA, 19 nt, Artificial Sequence
  Description of Artificial Sequence: Synthetic oligonucleotide
cuuauucugccgagccgaa

SEQ ID NO: 947062 - RNA, 19 nt, Artificial Sequence
  Description of Artificial Sequence: Synthetic oligonucleotide
ucucucgagugugcuugga

SEQ ID NO: 947063 - RNA, 19 nt, Artificial Sequence
  Description of Artificial Sequence: Synthetic oligonucleotide
gucguccauggagauacca

SEQ ID NO: 947064 - RNA, 19 nt, Artificial Sequence
  Description of Artificial Sequence: Synthetic oligonucleotide
agcauaccuggcucuuauu

SEQ ID NO: 947065 - RNA, 19 nt, Artificial Sequence
  Description of Artificial Sequence: Synthetic oligonucleotide
agccacacucucugugcau

SEQ ID NO: 947066 - RNA, 19 nt, Artificial Sequence
  Description of Artificial Sequence: Synthetic oligonucleotide
ucagucguuuggaguccuu

SEQ ID NO: 947067 - RNA, 19 nt, Artificial Sequence
  Description of Artificial Sequence: Synthetic oligonucleotide
agggaccuacaguuccuuu

SEQ ID NO: 947068 - RNA, 19 nt, Artificial Sequence
  Description of Artificial Sequence: Synthetic oligonucleotide
uucucgccuuugcccugcc

SEQ ID NO: 947069 - RNA, 19 nt, Artificial Sequence
  Description of Artificial Sequence: Synthetic oligonucleotide
ucggucgugggcgccgcca

SEQ ID NO: 947070 - RNA, 19 nt, Artificial Sequence
  Description of Artificial Sequence: Synthetic oligonucleotide
cgguuggagcaguucaccg

SEQ ID NO: 947071 - RNA, 19 nt, Artificial Sequence
  Description of Artificial Sequence: Synthetic oligonucleotide
ccaucgaguuaucauuuga

SEQ ID NO: 947072 - RNA, 19 nt, Artificial Sequence
  Description of Artificial Sequence: Synthetic oligonucleotide
gagugugcuuggaggagaa

SEQ ID NO: 947073 - RNA, 19 nt, Artificial Sequence
  Description of Artificial Sequence: Synthetic oligonucleotide
gaagucguccauggagaua

SEQ ID NO: 947074 - RNA, 19 nt, Artificial Sequence
  Description of Artificial Sequence: Synthetic oligonucleotide
uccgggcuuugggucagug

SEQ ID NO: 947075 - RNA, 19 nt, Artificial Sequence
  Description of Artificial Sequence: Synthetic oligonucleotide
ggcucugggaagccuucug

SEQ ID NO: 947076 - RNA, 19 nt, Artificial Sequence
  Description of Artificial Sequence: Synthetic oligonucleotide
ggguccaauuaucccucug

SEQ ID NO: 947077 - RNA, 19 nt, Artificial Sequence
  Description of Artificial Sequence: Synthetic oligonucleotide
gccacacuauucccacugc

SEQ ID NO: 947078 - RNA, 19 nt, Artificial Sequence
  Description of Artificial Sequence: Synthetic oligonucleotide
gaccucauugauagacaua

SEQ ID NO: 947079 - RNA, 19 nt, Artificial Sequence
  Description of Artificial Sequence: Synthetic oligonucleotide
cuucugagggguugcugua

SEQ ID NO: 947080 - RNA, 19 nt, Artificial Sequence
  Description of Artificial Sequence: Synthetic oligonucleotide
gggcuuugggucagugggg

SEQ ID NO: 947081 - RNA, 19 nt, Artificial Sequence
  Description of Artificial Sequence: Synthetic oligonucleotide
cuuccgggcuuugggucag

SEQ ID NO: 947082 - RNA, 19 nt, Artificial Sequence
  Description of Artificial Sequence: Synthetic oligonucleotide
cccacaugggagaugugca

SEQ ID NO: 947083 - RNA, 19 nt, Artificial Sequence
  Description of Artificial Sequence: Synthetic oligonucleotide
gcuuggaggagaaacuaua

SEQ ID NO: 947084 - RNA, 19 nt, Artificial Sequence
  Description of Artificial Sequence: Synthetic oligonucleotide
ggcucuuauucugccgagc

SEQ ID NO: 947085 - RNA, 19 nt, Artificial Sequence
  Description of Artificial Sequence: Synthetic oligonucleotide
uccugcccguucacuucac

SEQ ID NO: 947086 - RNA, 19 nt, Artificial Sequence
  Description of Artificial Sequence: Synthetic oligonucleotide
caggcuucgccaucgaguu

SEQ ID NO: 947087 - RNA, 19 nt, Artificial Sequence
  Description of Artificial Sequence: Synthetic oligonucleotide
cuguguagugguugccaua

SEQ ID NO: 947088 - RNA, 19 nt, Artificial Sequence
  Description of Artificial Sequence: Synthetic oligonucleotide
ucaccgccgcgcagcagau

SEQ ID NO: 947089 - RNA, 19 nt, Artificial Sequence
  Description of Artificial Sequence: Synthetic oligonucleotide
auugcgggccucggucgug

SEQ ID NO: 947090 - RNA, 19 nt, Artificial Sequence
  Description of Artificial Sequence: Synthetic oligonucleotide
cuucgccaucgaguuauca

SEQ ID NO: 947091 - RNA, 19 nt, Artificial Sequence
  Description of Artificial Sequence: Synthetic oligonucleotide
ccaggacagcgguuccacg

SEQ ID NO: 947092 - RNA, 19 nt, Artificial Sequence
  Description of Artificial Sequence: Synthetic oligonucleotide
cuuucggaccuggcuguca

SEQ ID NO: 947093 - RNA, 19 nt, Artificial Sequence
  Description of Artificial Sequence: Synthetic oligonucleotide
gcagugagggaccuacagu

SEQ ID NO: 947094 - RNA, 19 nt, Artificial Sequence
  Description of Artificial Sequence: Synthetic oligonucleotide
caggcucuuuagcucucca

SEQ ID NO: 947095 - RNA, 19 nt, Artificial Sequence
  Description of Artificial Sequence: Synthetic oligonucleotide
ccgguuggagcaguucacc

SEQ ID NO: 947096 - RNA, 19 nt, Artificial Sequence
  Description of Artificial Sequence: Synthetic oligonucleotide
ccgacagguggaaaauaga

SEQ ID NO: 947097 - RNA, 19 nt, Artificial Sequence
  Description of Artificial Sequence: Synthetic oligonucleotide
uagagagcuccugcccguu

SEQ ID NO: 947098 - RNA, 19 nt, Artificial Sequence
  Description of Artificial Sequence: Synthetic oligonucleotide
cugguugcugcuccaaguu

SEQ ID NO: 947099 - RNA, 19 nt, Artificial Sequence
  Description of Artificial Sequence: Synthetic oligonucleotide
acagcgcgcuucucgccuu

SEQ ID NO: 947100 - RNA, 19 nt, Artificial Sequence
  Description of Artificial Sequence: Synthetic oligonucleotide
gcccguucacuucacccuc

SEQ ID NO: 947101 - RNA, 19 nt, Artificial Sequence
  Description of Artificial Sequence: Synthetic oligonucleotide
ucccuguguucugggcacu

SEQ ID NO: 947102 - RNA, 19 nt, Artificial Sequence
  Description of Artificial Sequence: Synthetic oligonucleotide
ccuuugcccugccgguugg

SEQ ID NO: 947103 - RNA, 19 nt, Artificial Sequence
  Description of Artificial Sequence: Synthetic oligonucleotide
cucuucggccucuuucggu

SEQ ID NO: 947104 - RNA, 19 nt, Artificial Sequence
  Description of Artificial Sequence: Synthetic oligonucleotide
aggagugcagugagucgau

SEQ ID NO: 947105 - RNA, 19 nt, Artificial Sequence
  Description of Artificial Sequence: Synthetic oligonucleotide
agugugcuuggaggagaaa

SEQ ID NO: 947106 - RNA, 19 nt, Artificial Sequence
  Description of Artificial Sequence: Synthetic oligonucleotide
cuucaacuuucggggcuca

SEQ ID NO: 947107 - RNA, 19 nt, Artificial Sequence
  Description of Artificial Sequence: Synthetic oligonucleotide
ggagugcagugagucgaug

SEQ ID NO: 947108 - RNA, 19 nt, Artificial Sequence
  Description of Artificial Sequence: Synthetic oligonucleotide
cuaccugcucccgcaggca

SEQ ID NO: 947109 - RNA, 19 nt, Artificial Sequence
  Description of Artificial Sequence: Synthetic oligonucleotide
cuuuguggagaagcucgcu

SEQ ID NO: 947110 - RNA, 19 nt, Artificial Sequence
  Description of Artificial Sequence: Synthetic oligonucleotide
cgcagcagaucaccauugc

SEQ ID NO: 947111 - RNA, 19 nt, Artificial Sequence
  Description of Artificial Sequence: Synthetic oligonucleotide
cgcgcuucucgccuuugcc

SEQ ID NO: 947112 - RNA, 19 nt, Artificial Sequence
  Description of Artificial Sequence: Synthetic oligonucleotide
cagcauaccuggcucuuau

SEQ ID NO: 947113 - RNA, 19 nt, Artificial Sequence
  Description of Artificial Sequence: Synthetic oligonucleotide
gcuuugggguuacaucagu

SEQ ID NO: 947114 - RNA, 19 nt, Artificial Sequence
  Description of Artificial Sequence: Synthetic oligonucleotide
gaucaccauugcgggccuc

SEQ ID NO: 947115 - RNA, 19 nt, Artificial Sequence
  Description of Artificial Sequence: Synthetic oligonucleotide
ccugcccguucacuucacc

SEQ ID NO: 947116 - RNA, 19 nt, Artificial Sequence
  Description of Artificial Sequence: Synthetic oligonucleotide
cucccgcaggcagcauacc

SEQ ID NO: 947117 - RNA, 19 nt, Artificial Sequence
  Description of Artificial Sequence: Synthetic oligonucleotide
gcuguguagugguugccau

SEQ ID NO: 947118 - RNA, 19 nt, Artificial Sequence
  Description of Artificial Sequence: Synthetic oligonucleotide
gccauagaaacugucuguu

SEQ ID NO: 947119 - RNA, 19 nt, Artificial Sequence
  Description of Artificial Sequence: Synthetic oligonucleotide
aggcuucgccaucgaguua

SEQ ID NO: 947120 - RNA, 19 nt, Artificial Sequence
  Description of Artificial Sequence: Synthetic oligonucleotide
cgaguaaucugcuccacau

SEQ ID NO: 947121 - RNA, 19 nt, Artificial Sequence
  Description of Artificial Sequence: Synthetic oligonucleotide
gugagccaaugaacuugca

SEQ ID NO: 947122 - RNA, 19 nt, Artificial Sequence
  Description of Artificial Sequence: Synthetic oligonucleotide
gccucucauggucccugug

SEQ ID NO: 947123 - RNA, 19 nt, Artificial Sequence
  Description of Artificial Sequence: Synthetic oligonucleotide
ggcuccggugcucgccgcc

SEQ ID NO: 947124 - RNA, 19 nt, Artificial Sequence
  Description of Artificial Sequence: Synthetic oligonucleotide
agcgcgcuucucgccuuug

SEQ ID NO: 947125 - RNA, 19 nt, Artificial Sequence
  Description of Artificial Sequence: Synthetic oligonucleotide
cucggucgugggcgccgcc

SEQ ID NO: 947126 - RNA, 19 nt, Artificial Sequence
  Description of Artificial Sequence: Synthetic oligonucleotide
cuccgacagguggaaaaua

SEQ ID NO: 947127 - RNA, 19 nt, Artificial Sequence
  Description of Artificial Sequence: Synthetic oligonucleotide
gggaugagauagagagcuc

SEQ ID NO: 947128 - RNA, 19 nt, Artificial Sequence
  Description of Artificial Sequence: Synthetic oligonucleotide
ucggccucuuucggucaau

SEQ ID NO: 947129 - RNA, 19 nt, Artificial Sequence
  Description of Artificial Sequence: Synthetic oligonucleotide
gcuccuuagcaaaggagau

SEQ ID NO: 947130 - RNA, 19 nt, Artificial Sequence
  Description of Artificial Sequence: Synthetic oligonucleotide
ggcuuugggucaguggggu

SEQ ID NO: 947131 - RNA, 19 nt, Artificial Sequence
  Description of Artificial Sequence: Synthetic oligonucleotide
ccaggcuccggugcucgcc

SEQ ID NO: 947132 - RNA, 19 nt, Artificial Sequence
  Description of Artificial Sequence: Synthetic oligonucleotide
gcgcgcuucucgccuuugc

SEQ ID NO: 947133 - RNA, 19 nt, Artificial Sequence
  Description of Artificial Sequence: Synthetic oligonucleotide
cacugauaaaggccaccuu

SEQ ID NO: 947134 - RNA, 19 nt, Artificial Sequence
  Description of Artificial Sequence: Synthetic oligonucleotide
cauugcgggccucggucgu

SEQ ID NO: 947135 - RNA, 19 nt, Artificial Sequence
  Description of Artificial Sequence: Synthetic oligonucleotide
gccucggucgugggcgccg

SEQ ID NO: 947136 - RNA, 19 nt, Artificial Sequence
  Description of Artificial Sequence: Synthetic oligonucleotide
gugaagaugcugagucauu

SEQ ID NO: 947137 - RNA, 19 nt, Artificial Sequence
  Description of Artificial Sequence: Synthetic oligonucleotide
gcggaugaagccacacucu

SEQ ID NO: 947138 - RNA, 19 nt, Artificial Sequence
  Description of Artificial Sequence: Synthetic oligonucleotide
cuuugcccugccgguugga

SEQ ID NO: 947139 - RNA, 19 nt, Artificial Sequence
  Description of Artificial Sequence: Synthetic oligonucleotide
ggacagcgguuccacgacu

SEQ ID NO: 947140 - RNA, 19 nt, Artificial Sequence
  Description of Artificial Sequence: Synthetic oligonucleotide
ggacugccccugcuccuga

SEQ ID NO: 947141 - RNA, 19 nt, Artificial Sequence
  Description of Artificial Sequence: Synthetic oligonucleotide
cgguuccacgacuggguuc

SEQ ID NO: 947142 - RNA, 19 nt, Artificial Sequence
  Description of Artificial Sequence: Synthetic oligonucleotide
cagucguuuggaguccuuu

SEQ ID NO: 947143 - RNA, 19 nt, Artificial Sequence
  Description of Artificial Sequence: Synthetic oligonucleotide
uuccgggcuuugggucagu

SEQ ID NO: 947144 - RNA, 19 nt, Artificial Sequence
  Description of Artificial Sequence: Synthetic oligonucleotide
caccauugcgggccucggu

SEQ ID NO: 947145 - RNA, 19 nt, Artificial Sequence
  Description of Artificial Sequence: Synthetic oligonucleotide
gggcucaggcuucgccauc

SEQ ID NO: 947146 - RNA, 19 nt, Artificial Sequence
  Description of Artificial Sequence: Synthetic oligonucleotide
cggcuuuuaaccacuggau

SEQ ID NO: 947147 - RNA, 19 nt, Artificial Sequence
  Description of Artificial Sequence: Synthetic oligonucleotide
cgagugugcuuggaggaga

SEQ ID NO: 947148 - RNA, 19 nt, Artificial Sequence
  Description of Artificial Sequence: Synthetic oligonucleotide
gcuuucggaccuggcuguc

SEQ ID NO: 947149 - RNA, 19 nt, Artificial Sequence
  Description of Artificial Sequence: Synthetic oligonucleotide
gccgagccgaaaagcagua

SEQ ID NO: 947150 - RNA, 19 nt, Artificial Sequence
  Description of Artificial Sequence: Synthetic oligonucleotide
gccgcgcagcagaucacca

SEQ ID NO: 947151 - RNA, 19 nt, Artificial Sequence
  Description of Artificial Sequence: Synthetic oligonucleotide
cgcuucucgccuuugcccu

SEQ ID NO: 947152 - RNA, 19 nt, Artificial Sequence
  Description of Artificial Sequence: Synthetic oligonucleotide
gggguccaauuaucccucu

SEQ ID NO: 947153 - RNA, 19 nt, Artificial Sequence
  Description of Artificial Sequence: Synthetic oligonucleotide
cggucgugggcgccgccag

SEQ ID NO: 947154 - RNA, 19 nt, Artificial Sequence
  Description of Artificial Sequence: Synthetic oligonucleotide
cgcuucaacuuucggggcu

SEQ ID NO: 947155 - RNA, 19 nt, Artificial Sequence
  Description of Artificial Sequence: Synthetic oligonucleotide
gcgguuccacgacuggguu

SEQ ID NO: 947156 - RNA, 19 nt, Artificial Sequence
  Description of Artificial Sequence: Synthetic oligonucleotide
ccucggucgugggcgccgc

SEQ ID NO: 947157 - RNA, 19 nt, Artificial Sequence
  Description of Artificial Sequence: Synthetic oligonucleotide
cgccaucgaguuaucauuu

SEQ ID NO: 947158 - RNA, 19 nt, Artificial Sequence
  Description of Artificial Sequence: Synthetic oligonucleotide
ccgccgcgcagcagaucac

SEQ ID NO: 947159 - RNA, 19 nt, Artificial Sequence
  Description of Artificial Sequence: Synthetic oligonucleotide
cgcgcagcagaucaccauu

SEQ ID NO: 947160 - RNA, 19 nt, Artificial Sequence
  Description of Artificial Sequence: Synthetic oligonucleotide
cggcugacccucugccgca

SEQ ID NO: 947161 - RNA, 19 nt, Artificial Sequence
  Description of Artificial Sequence: Synthetic oligonucleotide
ccacugcaccuuggcucug

SEQ ID NO: 947162 - RNA, 19 nt, Artificial Sequence
  Description of Artificial Sequence: Synthetic oligonucleotide
ccgcgcagcagaucaccau

SEQ ID NO: 947163 - RNA, 19 nt, Artificial Sequence
  Description of Artificial Sequence: Synthetic oligonucleotide
cagcgcgcuucucgccuuu

SEQ ID NO: 947164 - RNA, 19 nt, Artificial Sequence
  Description of Artificial Sequence: Synthetic oligonucleotide
cccugccgguuggagcagu

SEQ ID NO: 947165 - RNA, 19 nt, Artificial Sequence
  Description of Artificial Sequence: Synthetic oligonucleotide
agaugaaugggccagaggc

SEQ ID NO: 947166 - RNA, 19 nt, Artificial Sequence
  Description of Artificial Sequence: Synthetic oligonucleotide
uuuguauucuuuaccacgg

SEQ ID NO: 947167 - RNA, 19 nt, Artificial Sequence
  Description of Artificial Sequence: Synthetic oligonucleotide
aauuugauuccuuugcucu

SEQ ID NO: 947168 - RNA, 19 nt, Artificial Sequence
  Description of Artificial Sequence: Synthetic oligonucleotide
gguagugaaacucaaagcg

SEQ ID NO: 947169 - RNA, 19 nt, Artificial Sequence
  Description of Artificial Sequence: Synthetic oligonucleotide
agaguuuguauucuuuacc

SEQ ID NO: 947170 - RNA, 19 nt, Artificial Sequence
  Description of Artificial Sequence: Synthetic oligonucleotide
uacaucauuacuaugcaga

SEQ ID NO: 947171 - RNA, 19 nt, Artificial Sequence
  Description of Artificial Sequence: Synthetic oligonucleotide
aaugcgaucaugcauccug

SEQ ID NO: 947172 - RNA, 19 nt, Artificial Sequence
  Description of Artificial Sequence: Synthetic oligonucleotide
ucguaaaugagauuuggcc

SEQ ID NO: 947173 - RNA, 19 nt, Artificial Sequence
  Description of Artificial Sequence: Synthetic oligonucleotide
aguuacauggaccaaacca

SEQ ID NO: 947174 - RNA, 19 nt, Artificial Sequence
  Description of Artificial Sequence: Synthetic oligonucleotide
gauuccuuagaacuugagg

SEQ ID NO: 947175 - RNA, 19 nt, Artificial Sequence
  Description of Artificial Sequence: Synthetic oligonucleotide
aagacuuuuagccacucgu

SEQ ID NO: 947176 - RNA, 19 nt, Artificial Sequence
  Description of Artificial Sequence: Synthetic oligonucleotide
acaguaccaaaucucuucc

SEQ ID NO: 947177 - RNA, 19 nt, Artificial Sequence
  Description of Artificial Sequence: Synthetic oligonucleotide
acgaucuagauccccagcc

SEQ ID NO: 947178 - RNA, 19 nt, Artificial Sequence
  Description of Artificial Sequence: Synthetic oligonucleotide
aagacgagaugaaugggcc

SEQ ID NO: 947179 - RNA, 19 nt, Artificial Sequence
  Description of Artificial Sequence: Synthetic oligonucleotide
cagaagacgagaugaaugg

SEQ ID NO: 947180 - RNA, 19 nt, Artificial Sequence
  Description of Artificial Sequence: Synthetic oligonucleotide
accaaaguaauuuuccugu

SEQ ID NO: 947181 - RNA, 19 nt, Artificial Sequence
  Description of Artificial Sequence: Synthetic oligonucleotide
uacaguuaaaucuuugaaa

SEQ ID NO: 947182 - RNA, 19 nt, Artificial Sequence
  Description of Artificial Sequence: Synthetic oligonucleotide
acucaaaggcucccgaagc

SEQ ID NO: 947183 - RNA, 19 nt, Artificial Sequence
  Description of Artificial Sequence: Synthetic oligonucleotide
cuuugcaaugcgaucaugc

SEQ ID NO: 947184 - RNA, 19 nt, Artificial Sequence
  Description of Artificial Sequence: Synthetic oligonucleotide
uuacaguuaaaucuuugaa

SEQ ID NO: 947185 - RNA, 19 nt, Artificial Sequence
  Description of Artificial Sequence: Synthetic oligonucleotide
guaaaugagauuuggccug

SEQ ID NO: 947186 - RNA, 19 nt, Artificial Sequence
  Description of Artificial Sequence: Synthetic oligonucleotide
ucgauugauguuuaauuug

SEQ ID NO: 947187 - RNA, 19 nt, Artificial Sequence
  Description of Artificial Sequence: Synthetic oligonucleotide
ugguauugcaguuuccgag

SEQ ID NO: 947188 - RNA, 19 nt, Artificial Sequence
  Description of Artificial Sequence: Synthetic oligonucleotide
uuuaccacggcuguuuugc

SEQ ID NO: 947189 - RNA, 19 nt, Artificial Sequence
  Description of Artificial Sequence: Synthetic oligonucleotide
gagguuaaggggcaauagg

SEQ ID NO: 947190 - RNA, 19 nt, Artificial Sequence
  Description of Artificial Sequence: Synthetic oligonucleotide
aaugagauuuggccugcuc

SEQ ID NO: 947191 - RNA, 19 nt, Artificial Sequence
  Description of Artificial Sequence: Synthetic oligonucleotide
uuucgauugauguuuaauu

SEQ ID NO: 947192 - RNA, 19 nt, Artificial Sequence
  Description of Artificial Sequence: Synthetic oligonucleotide
gaucuagauccccagcccg

SEQ ID NO: 947193 - RNA, 19 nt, Artificial Sequence
  Description of Artificial Sequence: Synthetic oligonucleotide
uuaaggggcaauaggacuc

SEQ ID NO: 947194 - RNA, 19 nt, Artificial Sequence
  Description of Artificial Sequence: Synthetic oligonucleotide
aaaucuuugaaaggcacau

SEQ ID NO: 947195 - RNA, 19 nt, Artificial Sequence
  Description of Artificial Sequence: Synthetic oligonucleotide
ucaaguuuucccaucacuu

SEQ ID NO: 947196 - RNA, 19 nt, Artificial Sequence
  Description of Artificial Sequence: Synthetic oligonucleotide
uuaguuacauggaccaaac

SEQ ID NO: 947197 - RNA, 19 nt, Artificial Sequence
  Description of Artificial Sequence: Synthetic oligonucleotide
ugcuguaaagcauccagca

SEQ ID NO: 947198 - RNA, 19 nt, Artificial Sequence
  Description of Artificial Sequence: Synthetic oligonucleotide
gguagucucagccacauug

SEQ ID NO: 947199 - RNA, 19 nt, Artificial Sequence
  Description of Artificial Sequence: Synthetic oligonucleotide
uggacauacaccuccucag

SEQ ID NO: 947200 - RNA, 19 nt, Artificial Sequence
  Description of Artificial Sequence: Synthetic oligonucleotide
gacaguaccaaaucucuuc

SEQ ID NO: 947201 - RNA, 19 nt, Artificial Sequence
  Description of Artificial Sequence: Synthetic oligonucleotide
aguuaggguagugaaacuc

SEQ ID NO: 947202 - RNA, 19 nt, Artificial Sequence
  Description of Artificial Sequence: Synthetic oligonucleotide
acaagcauggggaaaacag

SEQ ID NO: 947203 - RNA, 19 nt, Artificial Sequence
  Description of Artificial Sequence: Synthetic oligonucleotide
ugaaacucaaagcguacaa

SEQ ID NO: 947204 - RNA, 19 nt, Artificial Sequence
  Description of Artificial Sequence: Synthetic oligonucleotide
gaagguaccgaucacccuc

SEQ ID NO: 947205 - RNA, 19 nt, Artificial Sequence
  Description of Artificial Sequence: Synthetic oligonucleotide
aguaccaaaucucuuccca

SEQ ID NO: 947206 - RNA, 19 nt, Artificial Sequence
  Description of Artificial Sequence: Synthetic oligonucleotide
gaagacgagaugaaugggc

SEQ ID NO: 947207 - RNA, 19 nt, Artificial Sequence
  Description of Artificial Sequence: Synthetic oligonucleotide
uccucauggugaaugagga

SEQ ID NO: 947208 - RNA, 19 nt, Artificial Sequence
  Description of Artificial Sequence: Synthetic oligonucleotide
ugagcuagcugcaguaucu

SEQ ID NO: 947209 - RNA, 19 nt, Artificial Sequence
  Description of Artificial Sequence: Synthetic oligonucleotide
gaugaucugggccucaaga

SEQ ID NO: 947210 - RNA, 19 nt, Artificial Sequence
  Description of Artificial Sequence: Synthetic oligonucleotide
ugggccucaagacuuuuag

SEQ ID NO: 947211 - RNA, 19 nt, Artificial Sequence
  Description of Artificial Sequence: Synthetic oligonucleotide
uucgauugauguuuaauuu

SEQ ID NO: 947212 - RNA, 19 nt, Artificial Sequence
  Description of Artificial Sequence: Synthetic oligonucleotide
ugggaaucagaaaggcuag

SEQ ID NO: 947213 - RNA, 19 nt, Artificial Sequence
  Description of Artificial Sequence: Synthetic oligonucleotide
ugaucagaugcauuucugu

SEQ ID NO: 947214 - RNA, 19 nt, Artificial Sequence
  Description of Artificial Sequence: Synthetic oligonucleotide
ugaggaugaagucacccuc

SEQ ID NO: 947215 - RNA, 19 nt, Artificial Sequence
  Description of Artificial Sequence: Synthetic oligonucleotide
ucgcagauccucaugguga

SEQ ID NO: 947216 - RNA, 19 nt, Artificial Sequence
  Description of Artificial Sequence: Synthetic oligonucleotide
ucucaaaccggguagucuc

SEQ ID NO: 947217 - RNA, 19 nt, Artificial Sequence
  Description of Artificial Sequence: Synthetic oligonucleotide
ggcaauaggacucuauggc

SEQ ID NO: 947218 - RNA, 19 nt, Artificial Sequence
  Description of Artificial Sequence: Synthetic oligonucleotide
accaaaucucuucccaauc

SEQ ID NO: 947219 - RNA, 19 nt, Artificial Sequence
  Description of Artificial Sequence: Synthetic oligonucleotide
agguucauuccccugacga

SEQ ID NO: 947220 - RNA, 19 nt, Artificial Sequence
  Description of Artificial Sequence: Synthetic oligonucleotide
cuuacgcucauccccauug

SEQ ID NO: 947221 - RNA, 19 nt, Artificial Sequence
  Description of Artificial Sequence: Synthetic oligonucleotide
ugaucugggccucaagacu

SEQ ID NO: 947222 - RNA, 19 nt, Artificial Sequence
  Description of Artificial Sequence: Synthetic oligonucleotide
cuuacaguuaaaucuuuga

SEQ ID NO: 947223 - RNA, 19 nt, Artificial Sequence
  Description of Artificial Sequence: Synthetic oligonucleotide
uugcuguaaagcauccagc

SEQ ID NO: 947224 - RNA, 19 nt, Artificial Sequence
  Description of Artificial Sequence: Synthetic oligonucleotide
guaauuuuccugucccaag

SEQ ID NO: 947225 - RNA, 19 nt, Artificial Sequence
  Description of Artificial Sequence: Synthetic oligonucleotide
aaagucgcagauccucaug

SEQ ID NO: 947226 - RNA, 19 nt, Artificial Sequence
  Description of Artificial Sequence: Synthetic oligonucleotide
ggccucaagacuuuuagcc

SEQ ID NO: 947227 - RNA, 19 nt, Artificial Sequence
  Description of Artificial Sequence: Synthetic oligonucleotide
ucaggcgucacuccuggug

SEQ ID NO: 947228 - RNA, 19 nt, Artificial Sequence
  Description of Artificial Sequence: Synthetic oligonucleotide
aaaggucaauggguugacc

SEQ ID NO: 947229 - RNA, 19 nt, Artificial Sequence
  Description of Artificial Sequence: Synthetic oligonucleotide
uggccuuacgcucaucccc

SEQ ID NO: 947230 - RNA, 19 nt, Artificial Sequence
  Description of Artificial Sequence: Synthetic oligonucleotide
gguauccuugucuucaucc

SEQ ID NO: 947231 - RNA, 19 nt, Artificial Sequence
  Description of Artificial Sequence: Synthetic oligonucleotide
augcauccuggccuuacgc

SEQ ID NO: 947232 - RNA, 19 nt, Artificial Sequence
  Description of Artificial Sequence: Synthetic oligonucleotide
cucguaaaugagauuuggc

SEQ ID NO: 947233 - RNA, 19 nt, Artificial Sequence
  Description of Artificial Sequence: Synthetic oligonucleotide
ucacccucaaguuuuccca

SEQ ID NO: 947234 - RNA, 19 nt, Artificial Sequence
  Description of Artificial Sequence: Synthetic oligonucleotide
acucguaaaugagauuugg

SEQ ID NO: 947235 - RNA, 19 nt, Artificial Sequence
  Description of Artificial Sequence: Synthetic oligonucleotide
auccccauuggcccgggcc

SEQ ID NO: 947236 - RNA, 19 nt, Artificial Sequence
  Description of Artificial Sequence: Synthetic oligonucleotide
ucacacucauucuccagcc

SEQ ID NO: 947237 - RNA, 19 nt, Artificial Sequence
  Description of Artificial Sequence: Synthetic oligonucleotide
uuccccuucccaccaauag

SEQ ID NO: 947238 - RNA, 19 nt, Artificial Sequence
  Description of Artificial Sequence: Synthetic oligonucleotide
agggaagguaccgaucacc

SEQ ID NO: 947239 - RNA, 19 nt, Artificial Sequence
  Description of Artificial Sequence: Synthetic oligonucleotide
cauccgucaagggugaagg

SEQ ID NO: 947240 - RNA, 19 nt, Artificial Sequence
  Description of Artificial Sequence: Synthetic oligonucleotide
guauucuuuaccacggcug

SEQ ID NO: 947241 - RNA, 19 nt, Artificial Sequence
  Description of Artificial Sequence: Synthetic oligonucleotide
accggguagucucagccac

SEQ ID NO: 947242 - RNA, 19 nt, Artificial Sequence
  Description of Artificial Sequence: Synthetic oligonucleotide
gacgagaugaaugggccag

SEQ ID NO: 947243 - RNA, 19 nt, Artificial Sequence
  Description of Artificial Sequence: Synthetic oligonucleotide
aagucacccucuucauccg

SEQ ID NO: 947244 - RNA, 19 nt, Artificial Sequence
  Description of Artificial Sequence: Synthetic oligonucleotide
uuacgcucauccccauugg

SEQ ID NO: 947245 - RNA, 19 nt, Artificial Sequence
  Description of Artificial Sequence: Synthetic oligonucleotide
ccugacgaugaucagaugc

SEQ ID NO: 947246 - RNA, 19 nt, Artificial Sequence
  Description of Artificial Sequence: Synthetic oligonucleotide
uccgaguuaggguagugaa

SEQ ID NO: 947247 - RNA, 19 nt, Artificial Sequence
  Description of Artificial Sequence: Synthetic oligonucleotide
cugggaaucagaaaggcua

SEQ ID NO: 947248 - RNA, 19 nt, Artificial Sequence
  Description of Artificial Sequence: Synthetic oligonucleotide
guacaucauuacuaugcag

SEQ ID NO: 947249 - RNA, 19 nt, Artificial Sequence
  Description of Artificial Sequence: Synthetic oligonucleotide
uuaggguagugaaacucaa

SEQ ID NO: 947250 - RNA, 19 nt, Artificial Sequence
  Description of Artificial Sequence: Synthetic oligonucleotide
ggaucacccucuuaaagcc

SEQ ID NO: 947251 - RNA, 19 nt, Artificial Sequence
  Description of Artificial Sequence: Synthetic oligonucleotide
ugugggcuuucuuccaucc

SEQ ID NO: 947252 - RNA, 19 nt, Artificial Sequence
  Description of Artificial Sequence: Synthetic oligonucleotide
uugcaaugcgaucaugcau

SEQ ID NO: 947253 - RNA, 19 nt, Artificial Sequence
  Description of Artificial Sequence: Synthetic oligonucleotide
gguauugcaguuuccgagc

SEQ ID NO: 947254 - RNA, 19 nt, Artificial Sequence
  Description of Artificial Sequence: Synthetic oligonucleotide
caggacaguaccaaaucuc

SEQ ID NO: 947255 - RNA, 19 nt, Artificial Sequence
  Description of Artificial Sequence: Synthetic oligonucleotide
acuuuuagccacucguaaa

SEQ ID NO: 947256 - RNA, 19 nt, Artificial Sequence
  Description of Artificial Sequence: Synthetic oligonucleotide
gggcaauaggacucuaugg

SEQ ID NO: 947257 - RNA, 19 nt, Artificial Sequence
  Description of Artificial Sequence: Synthetic oligonucleotide
uagccacucguaaaugaga

SEQ ID NO: 947258 - RNA, 19 nt, Artificial Sequence
  Description of Artificial Sequence: Synthetic oligonucleotide
agaagacgagaugaauggg

SEQ ID NO: 947259 - RNA, 19 nt, Artificial Sequence
  Description of Artificial Sequence: Synthetic oligonucleotide
acggaauccugucccuccc

SEQ ID NO: 947260 - RNA, 19 nt, Artificial Sequence
  Description of Artificial Sequence: Synthetic oligonucleotide
gaugaucagaugcauuucu

SEQ ID NO: 947261 - RNA, 19 nt, Artificial Sequence
  Description of Artificial Sequence: Synthetic oligonucleotide
caguaucucaagcuguuuc

SEQ ID NO: 947262 - RNA, 19 nt, Artificial Sequence
  Description of Artificial Sequence: Synthetic oligonucleotide
guauugcaguuuccgagcc

SEQ ID NO: 947263 - RNA, 19 nt, Artificial Sequence
  Description of Artificial Sequence: Synthetic oligonucleotide
cuuucgguccugagcaagc

SEQ ID NO: 947264 - RNA, 19 nt, Artificial Sequence
  Description of Artificial Sequence: Synthetic oligonucleotide
cacucaaaggcucccgaag

SEQ ID NO: 947265 - RNA, 19 nt, Artificial Sequence
  Description of Artificial Sequence: Synthetic oligonucleotide
aucacccucuuaaagccac

SEQ ID NO: 947266 - RNA, 19 nt, Artificial Sequence
  Description of Artificial Sequence: Synthetic oligonucleotide
uggaaaggucaauggguug

SEQ ID NO: 947267 - RNA, 19 nt, Artificial Sequence
  Description of Artificial Sequence: Synthetic oligonucleotide
agagguuaaggggcaauag

SEQ ID NO: 947268 - RNA, 19 nt, Artificial Sequence
  Description of Artificial Sequence: Synthetic oligonucleotide
caggcgucacuccuggugg

SEQ ID NO: 947269 - RNA, 19 nt, Artificial Sequence
  Description of Artificial Sequence: Synthetic oligonucleotide
ucuuucgguccugagcaag

SEQ ID NO: 947270 - RNA, 19 nt, Artificial Sequence
  Description of Artificial Sequence: Synthetic oligonucleotide
ucaucaggcgucacuccug

SEQ ID NO: 947271 - RNA, 19 nt, Artificial Sequence
  Description of Artificial Sequence: Synthetic oligonucleotide
caucauuacuaugcagagg

SEQ ID NO: 947272 - RNA, 19 nt, Artificial Sequence
  Description of Artificial Sequence: Synthetic oligonucleotide
uccgucaagggugaaggca

SEQ ID NO: 947273 - RNA, 19 nt, Artificial Sequence
  Description of Artificial Sequence: Synthetic oligonucleotide
auuucgauugauguuuaau

SEQ ID NO: 947274 - RNA, 19 nt, Artificial Sequence
  Description of Artificial Sequence: Synthetic oligonucleotide
auuacuaugcagagguuaa

SEQ ID NO: 947275 - RNA, 19 nt, Artificial Sequence
  Description of Artificial Sequence: Synthetic oligonucleotide
uuacuaugcagagguuaag

SEQ ID NO: 947276 - RNA, 19 nt, Artificial Sequence
  Description of Artificial Sequence: Synthetic oligonucleotide
acucagugauuccuuagaa

SEQ ID NO: 947277 - RNA, 19 nt, Artificial Sequence
  Description of Artificial Sequence: Synthetic oligonucleotide
uaccaaaucucuucccaau

SEQ ID NO: 947278 - RNA, 19 nt, Artificial Sequence
  Description of Artificial Sequence: Synthetic oligonucleotide
ugcauccuggccuuacgcu

SEQ ID NO: 947279 - RNA, 19 nt, Artificial Sequence
  Description of Artificial Sequence: Synthetic oligonucleotide
uggggauaggacucggggu

SEQ ID NO: 947280 - RNA, 19 nt, Artificial Sequence
  Description of Artificial Sequence: Synthetic oligonucleotide
aucuagauccccagcccgc

SEQ ID NO: 947281 - RNA, 19 nt, Artificial Sequence
  Description of Artificial Sequence: Synthetic oligonucleotide
cagucagaagacgagauga

SEQ ID NO: 947282 - RNA, 19 nt, Artificial Sequence
  Description of Artificial Sequence: Synthetic oligonucleotide
guuaggguagugaaacuca

SEQ ID NO: 947283 - RNA, 19 nt, Artificial Sequence
  Description of Artificial Sequence: Synthetic oligonucleotide
agacggacucagugauucc

SEQ ID NO: 947284 - RNA, 19 nt, Artificial Sequence
  Description of Artificial Sequence: Synthetic oligonucleotide
auccgucaagggugaaggc

SEQ ID NO: 947285 - RNA, 19 nt, Artificial Sequence
  Description of Artificial Sequence: Synthetic oligonucleotide
guuaaggggcaauaggacu

SEQ ID NO: 947286 - RNA, 19 nt, Artificial Sequence
  Description of Artificial Sequence: Synthetic oligonucleotide
caucaggcgucacuccugg

SEQ ID NO: 947287 - RNA, 19 nt, Artificial Sequence
  Description of Artificial Sequence: Synthetic oligonucleotide
gcugguauugcaguuuccg

SEQ ID NO: 947288 - RNA, 19 nt, Artificial Sequence
  Description of Artificial Sequence: Synthetic oligonucleotide
caagggugaaggcaccuug

SEQ ID NO: 947289 - RNA, 19 nt, Artificial Sequence
  Description of Artificial Sequence: Synthetic oligonucleotide
ucccaucacuuacaguuaa

SEQ ID NO: 947290 - RNA, 19 nt, Artificial Sequence
  Description of Artificial Sequence: Synthetic oligonucleotide
caggcacuucucauguugc

SEQ ID NO: 947291 - RNA, 19 nt, Artificial Sequence
  Description of Artificial Sequence: Synthetic oligonucleotide
agauccucauggugaauga

SEQ ID NO: 947292 - RNA, 19 nt, Artificial Sequence
  Description of Artificial Sequence: Synthetic oligonucleotide
ugcaguaucucaagcuguu

SEQ ID NO: 947293 - RNA, 19 nt, Artificial Sequence
  Description of Artificial Sequence: Synthetic oligonucleotide
uggagaguuuguauucuuu

SEQ ID NO: 947294 - RNA, 19 nt, Artificial Sequence
  Description of Artificial Sequence: Synthetic oligonucleotide
uccccuucccaccaauagu

SEQ ID NO: 947295 - RNA, 19 nt, Artificial Sequence
  Description of Artificial Sequence: Synthetic oligonucleotide
auggugaaugaggaugaag

SEQ ID NO: 947296 - RNA, 19 nt, Artificial Sequence
  Description of Artificial Sequence: Synthetic oligonucleotide
ugauuucgauugauguuua

SEQ ID NO: 947297 - RNA, 19 nt, Artificial Sequence
  Description of Artificial Sequence: Synthetic oligonucleotide
gucgcagauccucauggug

SEQ ID NO: 947298 - RNA, 19 nt, Artificial Sequence
  Description of Artificial Sequence: Synthetic oligonucleotide
ucauccgucaagggugaag

SEQ ID NO: 947299 - RNA, 19 nt, Artificial Sequence
  Description of Artificial Sequence: Synthetic oligonucleotide
aaguggggccggguuaaac

SEQ ID NO: 947300 - RNA, 19 nt, Artificial Sequence
  Description of Artificial Sequence: Synthetic oligonucleotide
uucucaaaccggguagucu

SEQ ID NO: 947301 - RNA, 19 nt, Artificial Sequence
  Description of Artificial Sequence: Synthetic oligonucleotide
ucacccucuuaaagccacg

SEQ ID NO: 947302 - RNA, 19 nt, Artificial Sequence
  Description of Artificial Sequence: Synthetic oligonucleotide
cacggaauccugucccucc

SEQ ID NO: 947303 - RNA, 19 nt, Artificial Sequence
  Description of Artificial Sequence: Synthetic oligonucleotide
uauugcaguuuccgagccu

SEQ ID NO: 947304 - RNA, 19 nt, Artificial Sequence
  Description of Artificial Sequence: Synthetic oligonucleotide
aguuuccgagccuccagca

SEQ ID NO: 947305 - RNA, 19 nt, Artificial Sequence
  Description of Artificial Sequence: Synthetic oligonucleotide
ggucacggaauccuguccc

SEQ ID NO: 947306 - RNA, 19 nt, Artificial Sequence
  Description of Artificial Sequence: Synthetic oligonucleotide
gagguucauuccccugacg

SEQ ID NO: 947307 - RNA, 19 nt, Artificial Sequence
  Description of Artificial Sequence: Synthetic oligonucleotide
gcccgcuuggcauugagag

SEQ ID NO: 947308 - RNA, 19 nt, Artificial Sequence
  Description of Artificial Sequence: Synthetic oligonucleotide
cccaccaauaguaccaaag

SEQ ID NO: 947309 - RNA, 19 nt, Artificial Sequence
  Description of Artificial Sequence: Synthetic oligonucleotide
ggggauaggacucggggug

SEQ ID NO: 947310 - RNA, 19 nt, Artificial Sequence
  Description of Artificial Sequence: Synthetic oligonucleotide
caguaccaaaucucuuccc

SEQ ID NO: 947311 - RNA, 19 nt, Artificial Sequence
  Description of Artificial Sequence: Synthetic oligonucleotide
acacucauucuccagccuu

SEQ ID NO: 947312 - RNA, 19 nt, Artificial Sequence
  Description of Artificial Sequence: Synthetic oligonucleotide
accagcuugucacuucuaa

SEQ ID NO: 947313 - RNA, 19 nt, Artificial Sequence
  Description of Artificial Sequence: Synthetic oligonucleotide
uaggguagugaaacucaaa

SEQ ID NO: 947314 - RNA, 19 nt, Artificial Sequence
  Description of Artificial Sequence: Synthetic oligonucleotide
cuuagaagccugugggaga

SEQ ID NO: 947315 - RNA, 19 nt, Artificial Sequence
  Description of Artificial Sequence: Synthetic oligonucleotide
uuuugagccugguccgagu

SEQ ID NO: 947316 - RNA, 19 nt, Artificial Sequence
  Description of Artificial Sequence: Synthetic oligonucleotide
cacucguaaaugagauuug

SEQ ID NO: 947317 - RNA, 19 nt, Artificial Sequence
  Description of Artificial Sequence: Synthetic oligonucleotide
ucgcugguauugcaguuuc

SEQ ID NO: 947318 - RNA, 19 nt, Artificial Sequence
  Description of Artificial Sequence: Synthetic oligonucleotide
ggggcaauaggacucuaug

SEQ ID NO: 947319 - RNA, 19 nt, Artificial Sequence
  Description of Artificial Sequence: Synthetic oligonucleotide
cuggacauacaccuccuca

SEQ ID NO: 947320 - RNA, 19 nt, Artificial Sequence
  Description of Artificial Sequence: Synthetic oligonucleotide
agacgagaugaaugggcca

SEQ ID NO: 947321 - RNA, 19 nt, Artificial Sequence
  Description of Artificial Sequence: Synthetic oligonucleotide
gaggucaucacugguugca

SEQ ID NO: 947322 - RNA, 19 nt, Artificial Sequence
  Description of Artificial Sequence: Synthetic oligonucleotide
ucaaaccggguagucucag

SEQ ID NO: 947323 - RNA, 19 nt, Artificial Sequence
  Description of Artificial Sequence: Synthetic oligonucleotide
gaugccugccucacgguac

SEQ ID NO: 947324 - RNA, 19 nt, Artificial Sequence
  Description of Artificial Sequence: Synthetic oligonucleotide
gaaaacagcugggcgggac

SEQ ID NO: 947325 - RNA, 19 nt, Artificial Sequence
  Description of Artificial Sequence: Synthetic oligonucleotide
cuguugaguucugagaaga

SEQ ID NO: 947326 - RNA, 19 nt, Artificial Sequence
  Description of Artificial Sequence: Synthetic oligonucleotide
ugagcucccgggcacgauc

SEQ ID NO: 947327 - RNA, 19 nt, Artificial Sequence
  Description of Artificial Sequence: Synthetic oligonucleotide
cucccgaagccucaccuug

SEQ ID NO: 947328 - RNA, 19 nt, Artificial Sequence
  Description of Artificial Sequence: Synthetic oligonucleotide
ugcgaucaugcauccuggc

SEQ ID NO: 947329 - RNA, 19 nt, Artificial Sequence
  Description of Artificial Sequence: Synthetic oligonucleotide
guggggccggguuaaacug

SEQ ID NO: 947330 - RNA, 19 nt, Artificial Sequence
  Description of Artificial Sequence: Synthetic oligonucleotide
gcaauaggacucuauggca

SEQ ID NO: 947331 - RNA, 19 nt, Artificial Sequence
  Description of Artificial Sequence: Synthetic oligonucleotide
cacgaucuagauccccagc

SEQ ID NO: 947332 - RNA, 19 nt, Artificial Sequence
  Description of Artificial Sequence: Synthetic oligonucleotide
gagauuuggccugcuccag

SEQ ID NO: 947333 - RNA, 19 nt, Artificial Sequence
  Description of Artificial Sequence: Synthetic oligonucleotide
guaccaaaguaauuuuccu

SEQ ID NO: 947334 - RNA, 19 nt, Artificial Sequence
  Description of Artificial Sequence: Synthetic oligonucleotide
cuggccuuacgcucauccc

SEQ ID NO: 947335 - RNA, 19 nt, Artificial Sequence
  Description of Artificial Sequence: Synthetic oligonucleotide
uccccugacgaugaucaga

SEQ ID NO: 947336 - RNA, 19 nt, Artificial Sequence
  Description of Artificial Sequence: Synthetic oligonucleotide
uucccaucacuuacaguua

SEQ ID NO: 947337 - RNA, 19 nt, Artificial Sequence
  Description of Artificial Sequence: Synthetic oligonucleotide
cccucuuaaagccacggug

SEQ ID NO: 947338 - RNA, 19 nt, Artificial Sequence
  Description of Artificial Sequence: Synthetic oligonucleotide
augcgaucaugcauccugg

SEQ ID NO: 947339 - RNA, 19 nt, Artificial Sequence
  Description of Artificial Sequence: Synthetic oligonucleotide
agcguacaaaagcauccaa

SEQ ID NO: 947340 - RNA, 19 nt, Artificial Sequence
  Description of Artificial Sequence: Synthetic oligonucleotide
gcguacaaaagcauccaag

SEQ ID NO: 947341 - RNA, 19 nt, Artificial Sequence
  Description of Artificial Sequence: Synthetic oligonucleotide
uaaggggcaauaggacucu

SEQ ID NO: 947342 - RNA, 19 nt, Artificial Sequence
  Description of Artificial Sequence: Synthetic oligonucleotide
cugcucgcugguauugcag

SEQ ID NO: 947343 - RNA, 19 nt, Artificial Sequence
  Description of Artificial Sequence: Synthetic oligonucleotide
ggacauacaccuccucagc

SEQ ID NO: 947344 - RNA, 19 nt, Artificial Sequence
  Description of Artificial Sequence: Synthetic oligonucleotide
ucugggaaagucgcagauc

SEQ ID NO: 947345 - RNA, 19 nt, Artificial Sequence
  Description of Artificial Sequence: Synthetic oligonucleotide
gacucggggugcugugggg

SEQ ID NO: 947346 - RNA, 19 nt, Artificial Sequence
  Description of Artificial Sequence: Synthetic oligonucleotide
gguuaaggggcaauaggac

SEQ ID NO: 947347 - RNA, 19 nt, Artificial Sequence
  Description of Artificial Sequence: Synthetic oligonucleotide
gugauuucgauugauguuu

SEQ ID NO: 947348 - RNA, 19 nt, Artificial Sequence
  Description of Artificial Sequence: Synthetic oligonucleotide
gcuguugaguucugagaag

SEQ ID NO: 947349 - RNA, 19 nt, Artificial Sequence
  Description of Artificial Sequence: Synthetic oligonucleotide
ucuagauccccagcccgcu

SEQ ID NO: 947350 - RNA, 19 nt, Artificial Sequence
  Description of Artificial Sequence: Synthetic oligonucleotide
ugggagguucauuccccug

SEQ ID NO: 947351 - RNA, 19 nt, Artificial Sequence
  Description of Artificial Sequence: Synthetic oligonucleotide
cacccucuuaaagccacgg

SEQ ID NO: 947352 - RNA, 19 nt, Artificial Sequence
  Description of Artificial Sequence: Synthetic oligonucleotide
uccaagucaucaggcguca

SEQ ID NO: 947353 - RNA, 19 nt, Artificial Sequence
  Description of Artificial Sequence: Synthetic oligonucleotide
cugguauugcaguuuccga

SEQ ID NO: 947354 - RNA, 19 nt, Artificial Sequence
  Description of Artificial Sequence: Synthetic oligonucleotide
uaccgaucacccucaaguu

SEQ ID NO: 947355 - RNA, 19 nt, Artificial Sequence
  Description of Artificial Sequence: Synthetic oligonucleotide
agucgcagauccucauggu

SEQ ID NO: 947356 - RNA, 19 nt, Artificial Sequence
  Description of Artificial Sequence: Synthetic oligonucleotide
gauuucgauugauguuuaa

SEQ ID NO: 947357 - RNA, 19 nt, Artificial Sequence
  Description of Artificial Sequence: Synthetic oligonucleotide
gggaagguaccgaucaccc

SEQ ID NO: 947358 - RNA, 19 nt, Artificial Sequence
  Description of Artificial Sequence: Synthetic oligonucleotide
gaaggcaccuuggaaaggu

SEQ ID NO: 947359 - RNA, 19 nt, Artificial Sequence
  Description of Artificial Sequence: Synthetic oligonucleotide
ucccgaagccucaccuuga

SEQ ID NO: 947360 - RNA, 19 nt, Artificial Sequence
  Description of Artificial Sequence: Synthetic oligonucleotide
cugguccgaguuaggguag

SEQ ID NO: 947361 - RNA, 19 nt, Artificial Sequence
  Description of Artificial Sequence: Synthetic oligonucleotide
uggggccggguuaaacugu

SEQ ID NO: 947362 - RNA, 19 nt, Artificial Sequence
  Description of Artificial Sequence: Synthetic oligonucleotide
agccacucguaaaugagau

SEQ ID NO: 947363 - RNA, 19 nt, Artificial Sequence
  Description of Artificial Sequence: Synthetic oligonucleotide
acggugauuucgauugaug

SEQ ID NO: 947364 - RNA, 19 nt, Artificial Sequence
  Description of Artificial Sequence: Synthetic oligonucleotide
acccucuuaaagccacggu

SEQ ID NO: 947365 - RNA, 19 nt, Artificial Sequence
  Description of Artificial Sequence: Synthetic oligonucleotide
ucaugcauccuggccuuac

SEQ ID NO: 947366 - RNA, 19 nt, Artificial Sequence
  Description of Artificial Sequence: Synthetic oligonucleotide
gcgaucaugcauccuggcc

SEQ ID NO: 947367 - RNA, 19 nt, Artificial Sequence
  Description of Artificial Sequence: Synthetic oligonucleotide
cacauugcccuggugcaug

SEQ ID NO: 947368 - RNA, 19 nt, Artificial Sequence
  Description of Artificial Sequence: Synthetic oligonucleotide
agauccucacagucuggaa

SEQ ID NO: 947369 - RNA, 19 nt, Artificial Sequence
  Description of Artificial Sequence: Synthetic oligonucleotide
gaaugggccagaggcugug

SEQ ID NO: 947370 - RNA, 19 nt, Artificial Sequence
  Description of Artificial Sequence: Synthetic oligonucleotide
uuaccacggcuguuuugcu

SEQ ID NO: 947371 - RNA, 19 nt, Artificial Sequence
  Description of Artificial Sequence: Synthetic oligonucleotide
gaugaaugggccagaggcu

SEQ ID NO: 947372 - RNA, 19 nt, Artificial Sequence
  Description of Artificial Sequence: Synthetic oligonucleotide
cuucauccgucaaggguga

SEQ ID NO: 947373 - RNA, 19 nt, Artificial Sequence
  Description of Artificial Sequence: Synthetic oligonucleotide
ccgucaagggugaaggcac

SEQ ID NO: 947374 - RNA, 19 nt, Artificial Sequence
  Description of Artificial Sequence: Synthetic oligonucleotide
aggauccuuugugaaagau

SEQ ID NO: 947375 - RNA, 19 nt, Artificial Sequence
  Description of Artificial Sequence: Synthetic oligonucleotide
gcaaugcgaucaugcaucc

SEQ ID NO: 947376 - RNA, 19 nt, Artificial Sequence
  Description of Artificial Sequence: Synthetic oligonucleotide
caauggguugaccugcucu

SEQ ID NO: 947377 - RNA, 19 nt, Artificial Sequence
  Description of Artificial Sequence: Synthetic oligonucleotide
ggacucggggugcuguggg

SEQ ID NO: 947378 - RNA, 19 nt, Artificial Sequence
  Description of Artificial Sequence: Synthetic oligonucleotide
agacuuuuagccacucgua

SEQ ID NO: 947379 - RNA, 19 nt, Artificial Sequence
  Description of Artificial Sequence: Synthetic oligonucleotide
agucacccucuucauccgu

SEQ ID NO: 947380 - RNA, 19 nt, Artificial Sequence
  Description of Artificial Sequence: Synthetic oligonucleotide
uuccccugacgaugaucag

SEQ ID NO: 947381 - RNA, 19 nt, Artificial Sequence
  Description of Artificial Sequence: Synthetic oligonucleotide
aagccacggugauuucgau

SEQ ID NO: 947382 - RNA, 19 nt, Artificial Sequence
  Description of Artificial Sequence: Synthetic oligonucleotide
acaaguggggccggguuaa

SEQ ID NO: 947383 - RNA, 19 nt, Artificial Sequence
  Description of Artificial Sequence: Synthetic oligonucleotide
acgguaccuguucagccuu

SEQ ID NO: 947384 - RNA, 19 nt, Artificial Sequence
  Description of Artificial Sequence: Synthetic oligonucleotide
uaccacggcuguuuugcuu

SEQ ID NO: 947385 - RNA, 19 nt, Artificial Sequence
  Description of Artificial Sequence: Synthetic oligonucleotide
cugugggcuuucuuccauc

SEQ ID NO: 947386 - RNA, 19 nt, Artificial Sequence
  Description of Artificial Sequence: Synthetic oligonucleotide
gcacgaucuagauccccag

SEQ ID NO: 947387 - RNA, 19 nt, Artificial Sequence
  Description of Artificial Sequence: Synthetic oligonucleotide
cuuggaugaucugggccuc

SEQ ID NO: 947388 - RNA, 19 nt, Artificial Sequence
  Description of Artificial Sequence: Synthetic oligonucleotide
cguaaaugagauuuggccu

SEQ ID NO: 947389 - RNA, 19 nt, Artificial Sequence
  Description of Artificial Sequence: Synthetic oligonucleotide
cucagucagaagacgagau

SEQ ID NO: 947390 - RNA, 19 nt, Artificial Sequence
  Description of Artificial Sequence: Synthetic oligonucleotide
gacggacucagugauuccu

SEQ ID NO: 947391 - RNA, 19 nt, Artificial Sequence
  Description of Artificial Sequence: Synthetic oligonucleotide
cgagcagacggacucagug

SEQ ID NO: 947392 - RNA, 19 nt, Artificial Sequence
  Description of Artificial Sequence: Synthetic oligonucleotide
gggccucaagacuuuuagc

SEQ ID NO: 947393 - RNA, 19 nt, Artificial Sequence
  Description of Artificial Sequence: Synthetic oligonucleotide
auacaccuccucagccuuc

SEQ ID NO: 947394 - RNA, 19 nt, Artificial Sequence
  Description of Artificial Sequence: Synthetic oligonucleotide
ggccggguuaaacuguaca

SEQ ID NO: 947395 - RNA, 19 nt, Artificial Sequence
  Description of Artificial Sequence: Synthetic oligonucleotide
cagggaagguaccgaucac

SEQ ID NO: 947396 - RNA, 19 nt, Artificial Sequence
  Description of Artificial Sequence: Synthetic oligonucleotide
ccgcugggaaucagaaagg

SEQ ID NO: 947397 - RNA, 19 nt, Artificial Sequence
  Description of Artificial Sequence: Synthetic oligonucleotide
ggugauuucgauugauguu

SEQ ID NO: 947398 - RNA, 19 nt, Artificial Sequence
  Description of Artificial Sequence: Synthetic oligonucleotide
ggcacaagcauggggaaaa

SEQ ID NO: 947399 - RNA, 19 nt, Artificial Sequence
  Description of Artificial Sequence: Synthetic oligonucleotide
guccgaguuaggguaguga

SEQ ID NO: 947400 - RNA, 19 nt, Artificial Sequence
  Description of Artificial Sequence: Synthetic oligonucleotide
cgaucuagauccccagccc

SEQ ID NO: 947401 - RNA, 19 nt, Artificial Sequence
  Description of Artificial Sequence: Synthetic oligonucleotide
caauaguaccaaaguaauu

SEQ ID NO: 947402 - RNA, 19 nt, Artificial Sequence
  Description of Artificial Sequence: Synthetic oligonucleotide
ccuccccuaagcagggaag

SEQ ID NO: 947403 - RNA, 19 nt, Artificial Sequence
  Description of Artificial Sequence: Synthetic oligonucleotide
ccugguccgaguuagggua

SEQ ID NO: 947404 - RNA, 19 nt, Artificial Sequence
  Description of Artificial Sequence: Synthetic oligonucleotide
ucccgggcacgaucuagau

SEQ ID NO: 947405 - RNA, 19 nt, Artificial Sequence
  Description of Artificial Sequence: Synthetic oligonucleotide
uucuuccauccagaaccuc

SEQ ID NO: 947406 - RNA, 19 nt, Artificial Sequence
  Description of Artificial Sequence: Synthetic oligonucleotide
ccgcuuggcauugagagca

SEQ ID NO: 947407 - RNA, 19 nt, Artificial Sequence
  Description of Artificial Sequence: Synthetic oligonucleotide
cucccgggcacgaucuaga

SEQ ID NO: 947408 - RNA, 19 nt, Artificial Sequence
  Description of Artificial Sequence: Synthetic oligonucleotide
acgagaugaaugggccaga

SEQ ID NO: 947409 - RNA, 19 nt, Artificial Sequence
  Description of Artificial Sequence: Synthetic oligonucleotide
ggcacgaucuagaucccca

SEQ ID NO: 947410 - RNA, 19 nt, Artificial Sequence
  Description of Artificial Sequence: Synthetic oligonucleotide
gugggcuuucuuccaucca

SEQ ID NO: 947411 - RNA, 19 nt, Artificial Sequence
  Description of Artificial Sequence: Synthetic oligonucleotide
cacgguaccuguucagccu

SEQ ID NO: 947412 - RNA, 19 nt, Artificial Sequence
  Description of Artificial Sequence: Synthetic oligonucleotide
ccggguuaaacuguacauc

SEQ ID NO: 947413 - RNA, 19 nt, Artificial Sequence
  Description of Artificial Sequence: Synthetic oligonucleotide
gcucagucagaagacgaga

SEQ ID NO: 947414 - RNA, 19 nt, Artificial Sequence
  Description of Artificial Sequence: Synthetic oligonucleotide
ucccgagcagacggacuca

SEQ ID NO: 947415 - RNA, 19 nt, Artificial Sequence
  Description of Artificial Sequence: Synthetic oligonucleotide
gagccugguccgaguuagg

SEQ ID NO: 947416 - RNA, 19 nt, Artificial Sequence
  Description of Artificial Sequence: Synthetic oligonucleotide
gucagaagacgagaugaau

SEQ ID NO: 947417 - RNA, 19 nt, Artificial Sequence
  Description of Artificial Sequence: Synthetic oligonucleotide
agggcugcucgcugguauu

SEQ ID NO: 947418 - RNA, 19 nt, Artificial Sequence
  Description of Artificial Sequence: Synthetic oligonucleotide
gggauaggacucggggugc

SEQ ID NO: 947419 - RNA, 19 nt, Artificial Sequence
  Description of Artificial Sequence: Synthetic oligonucleotide
caaguccgcugggaaucag

SEQ ID NO: 947420 - RNA, 19 nt, Artificial Sequence
  Description of Artificial Sequence: Synthetic oligonucleotide
cccgcuuggcauugagagc

SEQ ID NO: 947421 - RNA, 19 nt, Artificial Sequence
  Description of Artificial Sequence: Synthetic oligonucleotide
cagugauuccuuagaacuu

SEQ ID NO: 947422 - RNA, 19 nt, Artificial Sequence
  Description of Artificial Sequence: Synthetic oligonucleotide
aucaggcgucacuccuggu

SEQ ID NO: 947423 - RNA, 19 nt, Artificial Sequence
  Description of Artificial Sequence: Synthetic oligonucleotide
aggggcaauaggacucuau

SEQ ID NO: 947424 - RNA, 19 nt, Artificial Sequence
  Description of Artificial Sequence: Synthetic oligonucleotide
aggcacaagcauggggaaa

SEQ ID NO: 947425 - RNA, 19 nt, Artificial Sequence
  Description of Artificial Sequence: Synthetic oligonucleotide
cagagguuaaggggcaaua

SEQ ID NO: 947426 - RNA, 19 nt, Artificial Sequence
  Description of Artificial Sequence: Synthetic oligonucleotide
cauacaccuccucagccuu

SEQ ID NO: 947427 - RNA, 19 nt, Artificial Sequence
  Description of Artificial Sequence: Synthetic oligonucleotide
ggccacucaaaggcucccg

SEQ ID NO: 947428 - RNA, 19 nt, Artificial Sequence
  Description of Artificial Sequence: Synthetic oligonucleotide
cugccugcgcuuggcuugc

SEQ ID NO: 947429 - RNA, 19 nt, Artificial Sequence
  Description of Artificial Sequence: Synthetic oligonucleotide
ccucaaguuuucccaucac

SEQ ID NO: 947430 - RNA, 19 nt, Artificial Sequence
  Description of Artificial Sequence: Synthetic oligonucleotide
ggcuagugcagcagguguc

SEQ ID NO: 947431 - RNA, 19 nt, Artificial Sequence
  Description of Artificial Sequence: Synthetic oligonucleotide
gccacucaaaggcucccga

SEQ ID NO: 947432 - RNA, 19 nt, Artificial Sequence
  Description of Artificial Sequence: Synthetic oligonucleotide
cacugaccagcugggucac

SEQ ID NO: 947433 - RNA, 19 nt, Artificial Sequence
  Description of Artificial Sequence: Synthetic oligonucleotide
ccacucguaaaugagauuu

SEQ ID NO: 947434 - RNA, 19 nt, Artificial Sequence
  Description of Artificial Sequence: Synthetic oligonucleotide
cuuccccuucccaccaaua

SEQ ID NO: 947435 - RNA, 19 nt, Artificial Sequence
  Description of Artificial Sequence: Synthetic oligonucleotide
guacaaguggggccggguu

SEQ ID NO: 947436 - RNA, 19 nt, Artificial Sequence
  Description of Artificial Sequence: Synthetic oligonucleotide
gcugcucgcugguauugca

SEQ ID NO: 947437 - RNA, 19 nt, Artificial Sequence
  Description of Artificial Sequence: Synthetic oligonucleotide
acggacucagugauuccuu

SEQ ID NO: 947438 - RNA, 19 nt, Artificial Sequence
  Description of Artificial Sequence: Synthetic oligonucleotide
ggccuuacgcucaucccca

SEQ ID NO: 947439 - RNA, 19 nt, Artificial Sequence
  Description of Artificial Sequence: Synthetic oligonucleotide
gccggguuaaacuguacau

SEQ ID NO: 947440 - RNA, 19 nt, Artificial Sequence
  Description of Artificial Sequence: Synthetic oligonucleotide
ggguauccuugucuucauc

SEQ ID NO: 947441 - RNA, 19 nt, Artificial Sequence
  Description of Artificial Sequence: Synthetic oligonucleotide
guccgcugggaaucagaaa

SEQ ID NO: 947442 - RNA, 19 nt, Artificial Sequence
  Description of Artificial Sequence: Synthetic oligonucleotide
aaggggcaauaggacucua

SEQ ID NO: 947443 - RNA, 19 nt, Artificial Sequence
  Description of Artificial Sequence: Synthetic oligonucleotide
cgaucaugcauccuggccu

SEQ ID NO: 947444 - RNA, 19 nt, Artificial Sequence
  Description of Artificial Sequence: Synthetic oligonucleotide
gcuccacugcuggggauag

SEQ ID NO: 947445 - RNA, 19 nt, Artificial Sequence
  Description of Artificial Sequence: Synthetic oligonucleotide
ggggccuuagaagccugug

SEQ ID NO: 947446 - RNA, 19 nt, Artificial Sequence
  Description of Artificial Sequence: Synthetic oligonucleotide
gggcgggacaggcugccac

SEQ ID NO: 947447 - RNA, 19 nt, Artificial Sequence
  Description of Artificial Sequence: Synthetic oligonucleotide
ccgaagccucaccuugacc

SEQ ID NO: 947448 - RNA, 19 nt, Artificial Sequence
  Description of Artificial Sequence: Synthetic oligonucleotide
uucauccgucaagggugaa

SEQ ID NO: 947449 - RNA, 19 nt, Artificial Sequence
  Description of Artificial Sequence: Synthetic oligonucleotide
cugggccucaagacuuuua

SEQ ID NO: 947450 - RNA, 19 nt, Artificial Sequence
  Description of Artificial Sequence: Synthetic oligonucleotide
cggugauuucgauugaugu

SEQ ID NO: 947451 - RNA, 19 nt, Artificial Sequence
  Description of Artificial Sequence: Synthetic oligonucleotide
cgagaugaaugggccagag

SEQ ID NO: 947452 - RNA, 19 nt, Artificial Sequence
  Description of Artificial Sequence: Synthetic oligonucleotide
gucaagggugaaggcaccu

SEQ ID NO: 947453 - RNA, 19 nt, Artificial Sequence
  Description of Artificial Sequence: Synthetic oligonucleotide
gggcugcucgcugguauug

SEQ ID NO: 947454 - RNA, 19 nt, Artificial Sequence
  Description of Artificial Sequence: Synthetic oligonucleotide
ggguugaccugcucuggcu

SEQ ID NO: 947455 - RNA, 19 nt, Artificial Sequence
  Description of Artificial Sequence: Synthetic oligonucleotide
cacacucauucuccagccu

SEQ ID NO: 947456 - RNA, 19 nt, Artificial Sequence
  Description of Artificial Sequence: Synthetic oligonucleotide
cccgaagccucaccuugac

SEQ ID NO: 947457 - RNA, 19 nt, Artificial Sequence
  Description of Artificial Sequence: Synthetic oligonucleotide
ccgaucacccucaaguuuu

SEQ ID NO: 947458 - RNA, 19 nt, Artificial Sequence
  Description of Artificial Sequence: Synthetic oligonucleotide
gcgucacuccugguggggc

SEQ ID NO: 947459 - RNA, 19 nt, Artificial Sequence
  Description of Artificial Sequence: Synthetic oligonucleotide
cgaugaucagaugcauuuc

SEQ ID NO: 947460 - RNA, 19 nt, Artificial Sequence
  Description of Artificial Sequence: Synthetic oligonucleotide
ugggcgggacaggcugcca

SEQ ID NO: 947461 - RNA, 19 nt, Artificial Sequence
  Description of Artificial Sequence: Synthetic oligonucleotide
uggcccgggccuggaugcc

SEQ ID NO: 947462 - RNA, 19 nt, Artificial Sequence
  Description of Artificial Sequence: Synthetic oligonucleotide
guaaagcauccagcacugu

SEQ ID NO: 947463 - RNA, 19 nt, Artificial Sequence
  Description of Artificial Sequence: Synthetic oligonucleotide
ugccugccucacgguaccu

SEQ ID NO: 947464 - RNA, 19 nt, Artificial Sequence
  Description of Artificial Sequence: Synthetic oligonucleotide
gucaaggcccugggccuga

SEQ ID NO: 947465 - RNA, 19 nt, Artificial Sequence
  Description of Artificial Sequence: Synthetic oligonucleotide
ccccugacgaugaucagau

SEQ ID NO: 947466 - RNA, 19 nt, Artificial Sequence
  Description of Artificial Sequence: Synthetic oligonucleotide
cacggugauuucgauugau

SEQ ID NO: 947467 - RNA, 19 nt, Artificial Sequence
  Description of Artificial Sequence: Synthetic oligonucleotide
cauguugcuccaggaguau

SEQ ID NO: 947468 - RNA, 19 nt, Artificial Sequence
  Description of Artificial Sequence: Synthetic oligonucleotide
gcgggacaggcugccacug

SEQ ID NO: 947469 - RNA, 19 nt, Artificial Sequence
  Description of Artificial Sequence: Synthetic oligonucleotide
cccgggcacgaucuagauc

SEQ ID NO: 947470 - RNA, 19 nt, Artificial Sequence
  Description of Artificial Sequence: Synthetic oligonucleotide
gccuugggcucagucagaa

SEQ ID NO: 947471 - RNA, 19 nt, Artificial Sequence
  Description of Artificial Sequence: Synthetic oligonucleotide
cucgcugguauugcaguuu

SEQ ID NO: 947472 - RNA, 19 nt, Artificial Sequence
  Description of Artificial Sequence: Synthetic oligonucleotide
gguacaaguggggccgggu

SEQ ID NO: 947473 - RNA, 19 nt, Artificial Sequence
  Description of Artificial Sequence: Synthetic oligonucleotide
agcucccgggcacgaucua

SEQ ID NO: 947474 - RNA, 19 nt, Artificial Sequence
  Description of Artificial Sequence: Synthetic oligonucleotide
cgaucacccucaaguuuuc

SEQ ID NO: 947475 - RNA, 19 nt, Artificial Sequence
  Description of Artificial Sequence: Synthetic oligonucleotide
ggaaaacagcugggcggga

SEQ ID NO: 947476 - RNA, 19 nt, Artificial Sequence
  Description of Artificial Sequence: Synthetic oligonucleotide
cccugacgaugaucagaug

SEQ ID NO: 947477 - RNA, 19 nt, Artificial Sequence
  Description of Artificial Sequence: Synthetic oligonucleotide
ggcgggacaggcugccacu

SEQ ID NO: 947478 - RNA, 19 nt, Artificial Sequence
  Description of Artificial Sequence: Synthetic oligonucleotide
caaugcgaucaugcauccu

SEQ ID NO: 947479 - RNA, 19 nt, Artificial Sequence
  Description of Artificial Sequence: Synthetic oligonucleotide
ggacaguaccaaaucucuu

SEQ ID NO: 947480 - RNA, 19 nt, Artificial Sequence
  Description of Artificial Sequence: Synthetic oligonucleotide
gggguauccuugucuucau

SEQ ID NO: 947481 - RNA, 19 nt, Artificial Sequence
  Description of Artificial Sequence: Synthetic oligonucleotide
ccccuaagcagggaaggua

SEQ ID NO: 947482 - RNA, 19 nt, Artificial Sequence
  Description of Artificial Sequence: Synthetic oligonucleotide
ugccugcgcuuggcuugca

SEQ ID NO: 947483 - RNA, 19 nt, Artificial Sequence
  Description of Artificial Sequence: Synthetic oligonucleotide
ggggccggguuaaacugua

SEQ ID NO: 947484 - RNA, 19 nt, Artificial Sequence
  Description of Artificial Sequence: Synthetic oligonucleotide
ccaaguccgcugggaauca

SEQ ID NO: 947485 - RNA, 19 nt, Artificial Sequence
  Description of Artificial Sequence: Synthetic oligonucleotide
gccacucguaaaugagauu

SEQ ID NO: 947486 - RNA, 19 nt, Artificial Sequence
  Description of Artificial Sequence: Synthetic oligonucleotide
gcagagguuaaggggcaau

SEQ ID NO: 947487 - RNA, 19 nt, Artificial Sequence
  Description of Artificial Sequence: Synthetic oligonucleotide
ccacggugauuucgauuga

SEQ ID NO: 947488 - RNA, 19 nt, Artificial Sequence
  Description of Artificial Sequence: Synthetic oligonucleotide
caaguggggccggguuaaa

SEQ ID NO: 947489 - RNA, 19 nt, Artificial Sequence
  Description of Artificial Sequence: Synthetic oligonucleotide
cccagcccgcuuggcauug

SEQ ID NO: 947490 - RNA, 19 nt, Artificial Sequence
  Description of Artificial Sequence: Synthetic oligonucleotide
cugccucacgguaccuguu

SEQ ID NO: 947491 - RNA, 19 nt, Artificial Sequence
  Description of Artificial Sequence: Synthetic oligonucleotide
ccucauggugaaugaggau

SEQ ID NO: 947492 - RNA, 19 nt, Artificial Sequence
  Description of Artificial Sequence: Synthetic oligonucleotide
ccugugggcuuucuuccau

SEQ ID NO: 947493 - RNA, 19 nt, Artificial Sequence
  Description of Artificial Sequence: Synthetic oligonucleotide
cccuuugcaaugcgaucau

SEQ ID NO: 947494 - RNA, 19 nt, Artificial Sequence
  Description of Artificial Sequence: Synthetic oligonucleotide
gcucccgagcagacggacu

SEQ ID NO: 947495 - RNA, 19 nt, Artificial Sequence
  Description of Artificial Sequence: Synthetic oligonucleotide
gccuuacgcucauccccau

SEQ ID NO: 947496 - RNA, 19 nt, Artificial Sequence
  Description of Artificial Sequence: Synthetic oligonucleotide
ggguagucucagccacauu

SEQ ID NO: 947497 - RNA, 19 nt, Artificial Sequence
  Description of Artificial Sequence: Synthetic oligonucleotide
ccuuacgcucauccccauu

SEQ ID NO: 947498 - RNA, 19 nt, Artificial Sequence
  Description of Artificial Sequence: Synthetic oligonucleotide
cgguaccuguucagccuuu

SEQ ID NO: 947499 - RNA, 19 nt, Artificial Sequence
  Description of Artificial Sequence: Synthetic oligonucleotide
aaaugcucagucuacagcc

SEQ ID NO: 947500 - RNA, 19 nt, Artificial Sequence
  Description of Artificial Sequence: Synthetic oligonucleotide
uuagaugacagacaggugg

SEQ ID NO: 947501 - RNA, 19 nt, Artificial Sequence
  Description of Artificial Sequence: Synthetic oligonucleotide
aauguagaaccccagaaca

SEQ ID NO: 947502 - RNA, 19 nt, Artificial Sequence
  Description of Artificial Sequence: Synthetic oligonucleotide
auuuucgucauuugcaaac

SEQ ID NO: 947503 - RNA, 19 nt, Artificial Sequence
  Description of Artificial Sequence: Synthetic oligonucleotide
ucuucaugcgccuucacgg

SEQ ID NO: 947504 - RNA, 19 nt, Artificial Sequence
  Description of Artificial Sequence: Synthetic oligonucleotide
aaucaguuuggccuguauc

SEQ ID NO: 947505 - RNA, 19 nt, Artificial Sequence
  Description of Artificial Sequence: Synthetic oligonucleotide
aaugaaauagggaacccuc

SEQ ID NO: 947506 - RNA, 19 nt, Artificial Sequence
  Description of Artificial Sequence: Synthetic oligonucleotide
uaugauucaaaccuugauc

SEQ ID NO: 947507 - RNA, 19 nt, Artificial Sequence
  Description of Artificial Sequence: Synthetic oligonucleotide
ugcaucauaagucaugccu

SEQ ID NO: 947508 - RNA, 19 nt, Artificial Sequence
  Description of Artificial Sequence: Synthetic oligonucleotide
aauuccacugcuuguaaug

SEQ ID NO: 947509 - RNA, 19 nt, Artificial Sequence
  Description of Artificial Sequence: Synthetic oligonucleotide
auauacacaggguugucac

SEQ ID NO: 947510 - RNA, 19 nt, Artificial Sequence
  Description of Artificial Sequence: Synthetic oligonucleotide
aauggcaauguagaacccc

SEQ ID NO: 947511 - RNA, 19 nt, Artificial Sequence
  Description of Artificial Sequence: Synthetic oligonucleotide
uaucccaggacacaguuug

SEQ ID NO: 947512 - RNA, 19 nt, Artificial Sequence
  Description of Artificial Sequence: Synthetic oligonucleotide
aaugggaucgaggaagaac

SEQ ID NO: 947513 - RNA, 19 nt, Artificial Sequence
  Description of Artificial Sequence: Synthetic oligonucleotide
aacucaacaccuuguacag

SEQ ID NO: 947514 - RNA, 19 nt, Artificial Sequence
  Description of Artificial Sequence: Synthetic oligonucleotide
accaagggaacucaacacc

SEQ ID NO: 947515 - RNA, 19 nt, Artificial Sequence
  Description of Artificial Sequence: Synthetic oligonucleotide
augggaucgaggaagaacc

SEQ ID NO: 947516 - RNA, 19 nt, Artificial Sequence
  Description of Artificial Sequence: Synthetic oligonucleotide
agugcaucauaagucaugc

SEQ ID NO: 947517 - RNA, 19 nt, Artificial Sequence
  Description of Artificial Sequence: Synthetic oligonucleotide
ucacagauccacaucugcg

SEQ ID NO: 947518 - RNA, 19 nt, Artificial Sequence
  Description of Artificial Sequence: Synthetic oligonucleotide
aaauucaagaaaaucaguu

SEQ ID NO: 947519 - RNA, 19 nt, Artificial Sequence
  Description of Artificial Sequence: Synthetic oligonucleotide
gaaauagggaacccucacg

SEQ ID NO: 947520 - RNA, 19 nt, Artificial Sequence
  Description of Artificial Sequence: Synthetic oligonucleotide
acgaaauucaagaaaauca

SEQ ID NO: 947521 - RNA, 19 nt, Artificial Sequence
  Description of Artificial Sequence: Synthetic oligonucleotide
ucagucuacagccagguua

SEQ ID NO: 947522 - RNA, 19 nt, Artificial Sequence
  Description of Artificial Sequence: Synthetic oligonucleotide
cagauauagaaugaugggg

SEQ ID NO: 947523 - RNA, 19 nt, Artificial Sequence
  Description of Artificial Sequence: Synthetic oligonucleotide
guauaagggcaucuggugg

SEQ ID NO: 947524 - RNA, 19 nt, Artificial Sequence
  Description of Artificial Sequence: Synthetic oligonucleotide
ucuacgcccagcauauggg

SEQ ID NO: 947525 - RNA, 19 nt, Artificial Sequence
  Description of Artificial Sequence: Synthetic oligonucleotide
uuguauagcuuucugccga

SEQ ID NO: 947526 - RNA, 19 nt, Artificial Sequence
  Description of Artificial Sequence: Synthetic oligonucleotide
cuuguaaugggaucgagga

SEQ ID NO: 947527 - RNA, 19 nt, Artificial Sequence
  Description of Artificial Sequence: Synthetic oligonucleotide
aguauaagggcaucuggug

SEQ ID NO: 947528 - RNA, 19 nt, Artificial Sequence
  Description of Artificial Sequence: Synthetic oligonucleotide
aguaauugcagguaugauu

SEQ ID NO: 947529 - RNA, 19 nt, Artificial Sequence
  Description of Artificial Sequence: Synthetic oligonucleotide
agagaauuaucuuccucag

SEQ ID NO: 947530 - RNA, 19 nt, Artificial Sequence
  Description of Artificial Sequence: Synthetic oligonucleotide
aaacggaauggcaauguag

SEQ ID NO: 947531 - RNA, 19 nt, Artificial Sequence
  Description of Artificial Sequence: Synthetic oligonucleotide
aaacugaacuuugaagucu

SEQ ID NO: 947532 - RNA, 19 nt, Artificial Sequence
  Description of Artificial Sequence: Synthetic oligonucleotide
agauauagaaugauggggu

SEQ ID NO: 947533 - RNA, 19 nt, Artificial Sequence
  Description of Artificial Sequence: Synthetic oligonucleotide
ugaaauagggaacccucac

SEQ ID NO: 947534 - RNA, 19 nt, Artificial Sequence
  Description of Artificial Sequence: Synthetic oligonucleotide
cucggaagcuucgagaugg

SEQ ID NO: 947535 - RNA, 19 nt, Artificial Sequence
  Description of Artificial Sequence: Synthetic oligonucleotide
cuguguacgccagagaggg

SEQ ID NO: 947536 - RNA, 19 nt, Artificial Sequence
  Description of Artificial Sequence: Synthetic oligonucleotide
gaaguaucgauauaucacu

SEQ ID NO: 947537 - RNA, 19 nt, Artificial Sequence
  Description of Artificial Sequence: Synthetic oligonucleotide
ucacggauauuugugaaug

SEQ ID NO: 947538 - RNA, 19 nt, Artificial Sequence
  Description of Artificial Sequence: Synthetic oligonucleotide
gauucaaaccuugauccug

SEQ ID NO: 947539 - RNA, 19 nt, Artificial Sequence
  Description of Artificial Sequence: Synthetic oligonucleotide
cuuucgucugcccagcgcc

SEQ ID NO: 947540 - RNA, 19 nt, Artificial Sequence
  Description of Artificial Sequence: Synthetic oligonucleotide
ucuagguaugcgcugggcu

SEQ ID NO: 947541 - RNA, 19 nt, Artificial Sequence
  Description of Artificial Sequence: Synthetic oligonucleotide
ucgucauuugcaaacuuaa

SEQ ID NO: 947542 - RNA, 19 nt, Artificial Sequence
  Description of Artificial Sequence: Synthetic oligonucleotide
uauagaaugaugggguggu

SEQ ID NO: 947543 - RNA, 19 nt, Artificial Sequence
  Description of Artificial Sequence: Synthetic oligonucleotide
cucacgaaauucaagaaaa

SEQ ID NO: 947544 - RNA, 19 nt, Artificial Sequence
  Description of Artificial Sequence: Synthetic oligonucleotide
acccucacgaaauucaaga

SEQ ID NO: 947545 - RNA, 19 nt, Artificial Sequence
  Description of Artificial Sequence: Synthetic oligonucleotide
agaacacagagaauuaucu

SEQ ID NO: 947546 - RNA, 19 nt, Artificial Sequence
  Description of Artificial Sequence: Synthetic oligonucleotide
aguaucgauauaucacuga

SEQ ID NO: 947547 - RNA, 19 nt, Artificial Sequence
  Description of Artificial Sequence: Synthetic oligonucleotide
aguccauucuguguacgcc

SEQ ID NO: 947548 - RNA, 19 nt, Artificial Sequence
  Description of Artificial Sequence: Synthetic oligonucleotide
caauguagaaccccagaac

SEQ ID NO: 947549 - RNA, 19 nt, Artificial Sequence
  Description of Artificial Sequence: Synthetic oligonucleotide
uucccuaggaauucccuca

SEQ ID NO: 947550 - RNA, 19 nt, Artificial Sequence
  Description of Artificial Sequence: Synthetic oligonucleotide
cgauauaucacugaaaaug

SEQ ID NO: 947551 - RNA, 19 nt, Artificial Sequence
  Description of Artificial Sequence: Synthetic oligonucleotide
aaugauggggugguuagaa

SEQ ID NO: 947552 - RNA, 19 nt, Artificial Sequence
  Description of Artificial Sequence: Synthetic oligonucleotide
cucuacgcccagcauaugg

SEQ ID NO: 947553 - RNA, 19 nt, Artificial Sequence
  Description of Artificial Sequence: Synthetic oligonucleotide
guacuuaugucuguagccc

SEQ ID NO: 947554 - RNA, 19 nt, Artificial Sequence
  Description of Artificial Sequence: Synthetic oligonucleotide
uaucgauauaucacugaaa

SEQ ID NO: 947555 - RNA, 19 nt, Artificial Sequence
  Description of Artificial Sequence: Synthetic oligonucleotide
accccaaccucuguaaucg

SEQ ID NO: 947556 - RNA, 19 nt, Artificial Sequence
  Description of Artificial Sequence: Synthetic oligonucleotide
ugugccagacuccaauagu

SEQ ID NO: 947557 - RNA, 19 nt, Artificial Sequence
  Description of Artificial Sequence: Synthetic oligonucleotide
uuugugaauggagacucca

SEQ ID NO: 947558 - RNA, 19 nt, Artificial Sequence
  Description of Artificial Sequence: Synthetic oligonucleotide
gguacaugagcugaagggg

SEQ ID NO: 947559 - RNA, 19 nt, Artificial Sequence
  Description of Artificial Sequence: Synthetic oligonucleotide
uucucuacgcccagcauau

SEQ ID NO: 947560 - RNA, 19 nt, Artificial Sequence
  Description of Artificial Sequence: Synthetic oligonucleotide
gaacuuugaagucucggaa

SEQ ID NO: 947561 - RNA, 19 nt, Artificial Sequence
  Description of Artificial Sequence: Synthetic oligonucleotide
uaaucgaaggugaccacau

SEQ ID NO: 947562 - RNA, 19 nt, Artificial Sequence
  Description of Artificial Sequence: Synthetic oligonucleotide
ucgaaggugaccacauggu

SEQ ID NO: 947563 - RNA, 19 nt, Artificial Sequence
  Description of Artificial Sequence: Synthetic oligonucleotide
uugcagguaugauucaaac

SEQ ID NO: 947564 - RNA, 19 nt, Artificial Sequence
  Description of Artificial Sequence: Synthetic oligonucleotide
aaguaucgauauaucacug

SEQ ID NO: 947565 - RNA, 19 nt, Artificial Sequence
  Description of Artificial Sequence: Synthetic oligonucleotide
auagggaacccucacgaaa

SEQ ID NO: 947566 - RNA, 19 nt, Artificial Sequence
  Description of Artificial Sequence: Synthetic oligonucleotide
ucuuucuagguaugcgcug

SEQ ID NO: 947567 - RNA, 19 nt, Artificial Sequence
  Description of Artificial Sequence: Synthetic oligonucleotide
ggaaguaucgauauaucac

SEQ ID NO: 947568 - RNA, 19 nt, Artificial Sequence
  Description of Artificial Sequence: Synthetic oligonucleotide
uacuuaugucuguagccca

SEQ ID NO: 947569 - RNA, 19 nt, Artificial Sequence
  Description of Artificial Sequence: Synthetic oligonucleotide
cacgaaauucaagaaaauc

SEQ ID NO: 947570 - RNA, 19 nt, Artificial Sequence
  Description of Artificial Sequence: Synthetic oligonucleotide
aauagggaacccucacgaa

SEQ ID NO: 947571 - RNA, 19 nt, Artificial Sequence
  Description of Artificial Sequence: Synthetic oligonucleotide
ugauucaaaccuugauccu

SEQ ID NO: 947572 - RNA, 19 nt, Artificial Sequence
  Description of Artificial Sequence: Synthetic oligonucleotide
guaucgauauaucacugaa

SEQ ID NO: 947573 - RNA, 19 nt, Artificial Sequence
  Description of Artificial Sequence: Synthetic oligonucleotide
aaucgaaggugaccacaug

SEQ ID NO: 947574 - RNA, 19 nt, Artificial Sequence
  Description of Artificial Sequence: Synthetic oligonucleotide
gucucucgcucacagaggc

SEQ ID NO: 947575 - RNA, 19 nt, Artificial Sequence
  Description of Artificial Sequence: Synthetic oligonucleotide
cuucaugcgccuucacggg

SEQ ID NO: 947576 - RNA, 19 nt, Artificial Sequence
  Description of Artificial Sequence: Synthetic oligonucleotide
accacuuggaguccauucu

SEQ ID NO: 947577 - RNA, 19 nt, Artificial Sequence
  Description of Artificial Sequence: Synthetic oligonucleotide
ugccagacuccaauaguca

SEQ ID NO: 947578 - RNA, 19 nt, Artificial Sequence
  Description of Artificial Sequence: Synthetic oligonucleotide
ucuuucgucugcccagcgc

SEQ ID NO: 947579 - RNA, 19 nt, Artificial Sequence
  Description of Artificial Sequence: Synthetic oligonucleotide
ggacaacccaaccacuugg

SEQ ID NO: 947580 - RNA, 19 nt, Artificial Sequence
  Description of Artificial Sequence: Synthetic oligonucleotide
gcuacugggugccagacug

SEQ ID NO: 947581 - RNA, 19 nt, Artificial Sequence
  Description of Artificial Sequence: Synthetic oligonucleotide
gaguccauucuguguacgc

SEQ ID NO: 947582 - RNA, 19 nt, Artificial Sequence
  Description of Artificial Sequence: Synthetic oligonucleotide
uaugucuguagcccagguc

SEQ ID NO: 947583 - RNA, 19 nt, Artificial Sequence
  Description of Artificial Sequence: Synthetic oligonucleotide
aucauaagucaugccucgc

SEQ ID NO: 947584 - RNA, 19 nt, Artificial Sequence
  Description of Artificial Sequence: Synthetic oligonucleotide
uccaguauaagggcaucug

SEQ ID NO: 947585 - RNA, 19 nt, Artificial Sequence
  Description of Artificial Sequence: Synthetic oligonucleotide
cuacgcccagcauaugggg

SEQ ID NO: 947586 - RNA, 19 nt, Artificial Sequence
  Description of Artificial Sequence: Synthetic oligonucleotide
uccgacuucccuaggaauu

SEQ ID NO: 947587 - RNA, 19 nt, Artificial Sequence
  Description of Artificial Sequence: Synthetic oligonucleotide
uucacggauauuugugaau

SEQ ID NO: 947588 - RNA, 19 nt, Artificial Sequence
  Description of Artificial Sequence: Synthetic oligonucleotide
uguacgccagagagggcag

SEQ ID NO: 947589 - RNA, 19 nt, Artificial Sequence
  Description of Artificial Sequence: Synthetic oligonucleotide
gagugcaucauaagucaug

SEQ ID NO: 947590 - RNA, 19 nt, Artificial Sequence
  Description of Artificial Sequence: Synthetic oligonucleotide
uuguaaugggaucgaggaa

SEQ ID NO: 947591 - RNA, 19 nt, Artificial Sequence
  Description of Artificial Sequence: Synthetic oligonucleotide
agaaacggaauggcaaugu

SEQ ID NO: 947592 - RNA, 19 nt, Artificial Sequence
  Description of Artificial Sequence: Synthetic oligonucleotide
uguaaucgaaggugaccac

SEQ ID NO: 947593 - RNA, 19 nt, Artificial Sequence
  Description of Artificial Sequence: Synthetic oligonucleotide
aacucagguaggguggcca

SEQ ID NO: 947594 - RNA, 19 nt, Artificial Sequence
  Description of Artificial Sequence: Synthetic oligonucleotide
gucauuugcaaacuuaauu

SEQ ID NO: 947595 - RNA, 19 nt, Artificial Sequence
  Description of Artificial Sequence: Synthetic oligonucleotide
gggaaguaucgauauauca

SEQ ID NO: 947596 - RNA, 19 nt, Artificial Sequence
  Description of Artificial Sequence: Synthetic oligonucleotide
cucucgcucacagaggcgc

SEQ ID NO: 947597 - RNA, 19 nt, Artificial Sequence
  Description of Artificial Sequence: Synthetic oligonucleotide
agauuuguugccacuccag

SEQ ID NO: 947598 - RNA, 19 nt, Artificial Sequence
  Description of Artificial Sequence: Synthetic oligonucleotide
cucgcucugaugguguucc

SEQ ID NO: 947599 - RNA, 19 nt, Artificial Sequence
  Description of Artificial Sequence: Synthetic oligonucleotide
uaauuccacugcuuguaau

SEQ ID NO: 947600 - RNA, 19 nt, Artificial Sequence
  Description of Artificial Sequence: Synthetic oligonucleotide
caccguguuucccucacag

SEQ ID NO: 947601 - RNA, 19 nt, Artificial Sequence
  Description of Artificial Sequence: Synthetic oligonucleotide
uaauugcagguaugauuca

SEQ ID NO: 947602 - RNA, 19 nt, Artificial Sequence
  Description of Artificial Sequence: Synthetic oligonucleotide
uggugugccagacuccaau

SEQ ID NO: 947603 - RNA, 19 nt, Artificial Sequence
  Description of Artificial Sequence: Synthetic oligonucleotide
uuaagugguggugccagaa

SEQ ID NO: 947604 - RNA, 19 nt, Artificial Sequence
  Description of Artificial Sequence: Synthetic oligonucleotide
ucucucgcucacagaggcg

SEQ ID NO: 947605 - RNA, 19 nt, Artificial Sequence
  Description of Artificial Sequence: Synthetic oligonucleotide
cuucccuaggaauucccuc

SEQ ID NO: 947606 - RNA, 19 nt, Artificial Sequence
  Description of Artificial Sequence: Synthetic oligonucleotide
ucaguauccguggaagcuc

SEQ ID NO: 947607 - RNA, 19 nt, Artificial Sequence
  Description of Artificial Sequence: Synthetic oligonucleotide
acggauauuugugaaugga

SEQ ID NO: 947608 - RNA, 19 nt, Artificial Sequence
  Description of Artificial Sequence: Synthetic oligonucleotide
ggauauuugugaauggaga

SEQ ID NO: 947609 - RNA, 19 nt, Artificial Sequence
  Description of Artificial Sequence: Synthetic oligonucleotide
ucgguccgcuuccucaucc

SEQ ID NO: 947610 - RNA, 19 nt, Artificial Sequence
  Description of Artificial Sequence: Synthetic oligonucleotide
cuccaaggugacuggcucg

SEQ ID NO: 947611 - RNA, 19 nt, Artificial Sequence
  Description of Artificial Sequence: Synthetic oligonucleotide
acgggcuagucucagugcu

SEQ ID NO: 947612 - RNA, 19 nt, Artificial Sequence
  Description of Artificial Sequence: Synthetic oligonucleotide
ucaagcggcagucggcguc

SEQ ID NO: 947613 - RNA, 19 nt, Artificial Sequence
  Description of Artificial Sequence: Synthetic oligonucleotide
gauggugugccagacucca

SEQ ID NO: 947614 - RNA, 19 nt, Artificial Sequence
  Description of Artificial Sequence: Synthetic oligonucleotide
aucgaggaagaaccaguca

SEQ ID NO: 947615 - RNA, 19 nt, Artificial Sequence
  Description of Artificial Sequence: Synthetic oligonucleotide
aacccucacgaaauucaag

SEQ ID NO: 947616 - RNA, 19 nt, Artificial Sequence
  Description of Artificial Sequence: Synthetic oligonucleotide
ucucggaagcuucgagaug

SEQ ID NO: 947617 - RNA, 19 nt, Artificial Sequence
  Description of Artificial Sequence: Synthetic oligonucleotide
gcgucucucgcucacagag

SEQ ID NO: 947618 - RNA, 19 nt, Artificial Sequence
  Description of Artificial Sequence: Synthetic oligonucleotide
auucaaaccuugauccugu

SEQ ID NO: 947619 - RNA, 19 nt, Artificial Sequence
  Description of Artificial Sequence: Synthetic oligonucleotide
agguaugauucaaaccuug

SEQ ID NO: 947620 - RNA, 19 nt, Artificial Sequence
  Description of Artificial Sequence: Synthetic oligonucleotide
auauaucacugaaaaugga

SEQ ID NO: 947621 - RNA, 19 nt, Artificial Sequence
  Description of Artificial Sequence: Synthetic oligonucleotide
ccaggucugagugaaaggg

SEQ ID NO: 947622 - RNA, 19 nt, Artificial Sequence
  Description of Artificial Sequence: Synthetic oligonucleotide
aggugacuggcucgguccg

SEQ ID NO: 947623 - RNA, 19 nt, Artificial Sequence
  Description of Artificial Sequence: Synthetic oligonucleotide
cagcucucaugcuccaagg

SEQ ID NO: 947624 - RNA, 19 nt, Artificial Sequence
  Description of Artificial Sequence: Synthetic oligonucleotide
gaucgaggaagaaccaguc

SEQ ID NO: 947625 - RNA, 19 nt, Artificial Sequence
  Description of Artificial Sequence: Synthetic oligonucleotide
uuucgucugcccagcgccc

SEQ ID NO: 947626 - RNA, 19 nt, Artificial Sequence
  Description of Artificial Sequence: Synthetic oligonucleotide
caucccgcggcccuaucgg

SEQ ID NO: 947627 - RNA, 19 nt, Artificial Sequence
  Description of Artificial Sequence: Synthetic oligonucleotide
ugcuuugauccagucaaaa

SEQ ID NO: 947628 - RNA, 19 nt, Artificial Sequence
  Description of Artificial Sequence: Synthetic oligonucleotide
auaugggguccacuugcug

SEQ ID NO: 947629 - RNA, 19 nt, Artificial Sequence
  Description of Artificial Sequence: Synthetic oligonucleotide
gcuuguaaugggaucgagg

SEQ ID NO: 947630 - RNA, 19 nt, Artificial Sequence
  Description of Artificial Sequence: Synthetic oligonucleotide
guaaccaagggaacucaac

SEQ ID NO: 947631 - RNA, 19 nt, Artificial Sequence
  Description of Artificial Sequence: Synthetic oligonucleotide
augaaauagggaacccuca

SEQ ID NO: 947632 - RNA, 19 nt, Artificial Sequence
  Description of Artificial Sequence: Synthetic oligonucleotide
guauccguggaagcucagg

SEQ ID NO: 947633 - RNA, 19 nt, Artificial Sequence
  Description of Artificial Sequence: Synthetic oligonucleotide
ggaacucaacaccuuguac

SEQ ID NO: 947634 - RNA, 19 nt, Artificial Sequence
  Description of Artificial Sequence: Synthetic oligonucleotide
uuccgacuucccuaggaau

SEQ ID NO: 947635 - RNA, 19 nt, Artificial Sequence
  Description of Artificial Sequence: Synthetic oligonucleotide
aguuuggccuguaucccag

SEQ ID NO: 947636 - RNA, 19 nt, Artificial Sequence
  Description of Artificial Sequence: Synthetic oligonucleotide
gguugucaccacuucuugc

SEQ ID NO: 947637 - RNA, 19 nt, Artificial Sequence
  Description of Artificial Sequence: Synthetic oligonucleotide
guguacgccagagagggca

SEQ ID NO: 947638 - RNA, 19 nt, Artificial Sequence
  Description of Artificial Sequence: Synthetic oligonucleotide
guaggguggccaccagagg

SEQ ID NO: 947639 - RNA, 19 nt, Artificial Sequence
  Description of Artificial Sequence: Synthetic oligonucleotide
gcuagucucagugcuggcg

SEQ ID NO: 947640 - RNA, 19 nt, Artificial Sequence
  Description of Artificial Sequence: Synthetic oligonucleotide
ggcggcgcagcucucaugc

SEQ ID NO: 947641 - RNA, 19 nt, Artificial Sequence
  Description of Artificial Sequence: Synthetic oligonucleotide
cagucggaaccacaggcuc

SEQ ID NO: 947642 - RNA, 19 nt, Artificial Sequence
  Description of Artificial Sequence: Synthetic oligonucleotide
cuucacggauauuugugaa

SEQ ID NO: 947643 - RNA, 19 nt, Artificial Sequence
  Description of Artificial Sequence: Synthetic oligonucleotide
uaguaauugcagguaugau

SEQ ID NO: 947644 - RNA, 19 nt, Artificial Sequence
  Description of Artificial Sequence: Synthetic oligonucleotide
guuagaugacagacaggug

SEQ ID NO: 947645 - RNA, 19 nt, Artificial Sequence
  Description of Artificial Sequence: Synthetic oligonucleotide
gacuucccuaggaauuccc

SEQ ID NO: 947646 - RNA, 19 nt, Artificial Sequence
  Description of Artificial Sequence: Synthetic oligonucleotide
caguauaagggcaucuggu

SEQ ID NO: 947647 - RNA, 19 nt, Artificial Sequence
  Description of Artificial Sequence: Synthetic oligonucleotide
uucgucugcccagcgcccg

SEQ ID NO: 947648 - RNA, 19 nt, Artificial Sequence
  Description of Artificial Sequence: Synthetic oligonucleotide
gccguaccagauuuguugc

SEQ ID NO: 947649 - RNA, 19 nt, Artificial Sequence
  Description of Artificial Sequence: Synthetic oligonucleotide
cacgggcuagucucagugc

SEQ ID NO: 947650 - RNA, 19 nt, Artificial Sequence
  Description of Artificial Sequence: Synthetic oligonucleotide
ugccccuuacuguggguga

SEQ ID NO: 947651 - RNA, 19 nt, Artificial Sequence
  Description of Artificial Sequence: Synthetic oligonucleotide
caaggugacuggcucgguc

SEQ ID NO: 947652 - RNA, 19 nt, Artificial Sequence
  Description of Artificial Sequence: Synthetic oligonucleotide
cuacugggugccagacugc

SEQ ID NO: 947653 - RNA, 19 nt, Artificial Sequence
  Description of Artificial Sequence: Synthetic oligonucleotide
agguuagaugacagacagg

SEQ ID NO: 947654 - RNA, 19 nt, Artificial Sequence
  Description of Artificial Sequence: Synthetic oligonucleotide
uguguacgccagagagggc

SEQ ID NO: 947655 - RNA, 19 nt, Artificial Sequence
  Description of Artificial Sequence: Synthetic oligonucleotide
ggaacccucacgaaauuca

SEQ ID NO: 947656 - RNA, 19 nt, Artificial Sequence
  Description of Artificial Sequence: Synthetic oligonucleotide
gagguaguaauugcaggua

SEQ ID NO: 947657 - RNA, 19 nt, Artificial Sequence
  Description of Artificial Sequence: Synthetic oligonucleotide
guaaugggaucgaggaaga

SEQ ID NO: 947658 - RNA, 19 nt, Artificial Sequence
  Description of Artificial Sequence: Synthetic oligonucleotide
guuccgacuucccuaggaa

SEQ ID NO: 947659 - RNA, 19 nt, Artificial Sequence
  Description of Artificial Sequence: Synthetic oligonucleotide
augagcugaaggggacaac

SEQ ID NO: 947660 - RNA, 19 nt, Artificial Sequence
  Description of Artificial Sequence: Synthetic oligonucleotide
agacgcagguucugcuuca

SEQ ID NO: 947661 - RNA, 19 nt, Artificial Sequence
  Description of Artificial Sequence: Synthetic oligonucleotide
gacaacccaaccacuugga

SEQ ID NO: 947662 - RNA, 19 nt, Artificial Sequence
  Description of Artificial Sequence: Synthetic oligonucleotide
gccuucacgggcuagucuc

SEQ ID NO: 947663 - RNA, 19 nt, Artificial Sequence
  Description of Artificial Sequence: Synthetic oligonucleotide
gggcuagucucagugcugg

SEQ ID NO: 947664 - RNA, 19 nt, Artificial Sequence
  Description of Artificial Sequence: Synthetic oligonucleotide
accguguuucccucacaga

SEQ ID NO: 947665 - RNA, 19 nt, Artificial Sequence
  Description of Artificial Sequence: Synthetic oligonucleotide
ccaguuccgacuucccuag

SEQ ID NO: 947666 - RNA, 19 nt, Artificial Sequence
  Description of Artificial Sequence: Synthetic oligonucleotide
ggacaaacugaacuuugaa

SEQ ID NO: 947667 - RNA, 19 nt, Artificial Sequence
  Description of Artificial Sequence: Synthetic oligonucleotide
caagaaacggaauggcaau

SEQ ID NO: 947668 - RNA, 19 nt, Artificial Sequence
  Description of Artificial Sequence: Synthetic oligonucleotide
gggacaacccaaccacuug

SEQ ID NO: 947669 - RNA, 19 nt, Artificial Sequence
  Description of Artificial Sequence: Synthetic oligonucleotide
caguauccguggaagcuca

SEQ ID NO: 947670 - RNA, 19 nt, Artificial Sequence
  Description of Artificial Sequence: Synthetic oligonucleotide
caggugccccuuacugugg

SEQ ID NO: 947671 - RNA, 19 nt, Artificial Sequence
  Description of Artificial Sequence: Synthetic oligonucleotide
gaugguguucccacggagu

SEQ ID NO: 947672 - RNA, 19 nt, Artificial Sequence
  Description of Artificial Sequence: Synthetic oligonucleotide
gguaugauucaaaccuuga

SEQ ID NO: 947673 - RNA, 19 nt, Artificial Sequence
  Description of Artificial Sequence: Synthetic oligonucleotide
uucacgggcuagucucagu

SEQ ID NO: 947674 - RNA, 19 nt, Artificial Sequence
  Description of Artificial Sequence: Synthetic oligonucleotide
ggguugucaccacuucuug

SEQ ID NO: 947675 - RNA, 19 nt, Artificial Sequence
  Description of Artificial Sequence: Synthetic oligonucleotide
caagcggcagucggcgucc

SEQ ID NO: 947676 - RNA, 19 nt, Artificial Sequence
  Description of Artificial Sequence: Synthetic oligonucleotide
acaugagcugaaggggaca

SEQ ID NO: 947677 - RNA, 19 nt, Artificial Sequence
  Description of Artificial Sequence: Synthetic oligonucleotide
ggaguccauucuguguacg

SEQ ID NO: 947678 - RNA, 19 nt, Artificial Sequence
  Description of Artificial Sequence: Synthetic oligonucleotide
gugccccuuacugugggug

SEQ ID NO: 947679 - RNA, 19 nt, Artificial Sequence
  Description of Artificial Sequence: Synthetic oligonucleotide
cuagucucagugcuggcgu

SEQ ID NO: 947680 - RNA, 19 nt, Artificial Sequence
  Description of Artificial Sequence: Synthetic oligonucleotide
gggaucgaggaagaaccag

SEQ ID NO: 947681 - RNA, 19 nt, Artificial Sequence
  Description of Artificial Sequence: Synthetic oligonucleotide
uucaagcggcagucggcgu

SEQ ID NO: 947682 - RNA, 19 nt, Artificial Sequence
  Description of Artificial Sequence: Synthetic oligonucleotide
aggguugucaccacuucuu

SEQ ID NO: 947683 - RNA, 19 nt, Artificial Sequence
  Description of Artificial Sequence: Synthetic oligonucleotide
augccugcguccgcuccgc

SEQ ID NO: 947684 - RNA, 19 nt, Artificial Sequence
  Description of Artificial Sequence: Synthetic oligonucleotide
agucggaaccacaggcucu

SEQ ID NO: 947685 - RNA, 19 nt, Artificial Sequence
  Description of Artificial Sequence: Synthetic oligonucleotide
gggugguuagaagccagag

SEQ ID NO: 947686 - RNA, 19 nt, Artificial Sequence
  Description of Artificial Sequence: Synthetic oligonucleotide
uaaugggaucgaggaagaa

SEQ ID NO: 947687 - RNA, 19 nt, Artificial Sequence
  Description of Artificial Sequence: Synthetic oligonucleotide
ccccuugcccgccagacgc

SEQ ID NO: 947688 - RNA, 19 nt, Artificial Sequence
  Description of Artificial Sequence: Synthetic oligonucleotide
uacgccagagagggcagaa

SEQ ID NO: 947689 - RNA, 19 nt, Artificial Sequence
  Description of Artificial Sequence: Synthetic oligonucleotide
cuucacgggcuagucucag

SEQ ID NO: 947690 - RNA, 19 nt, Artificial Sequence
  Description of Artificial Sequence: Synthetic oligonucleotide
ccacuugcugucaguaaac

SEQ ID NO: 947691 - RNA, 19 nt, Artificial Sequence
  Description of Artificial Sequence: Synthetic oligonucleotide
gcaagcagguacaugagcu

SEQ ID NO: 947692 - RNA, 19 nt, Artificial Sequence
  Description of Artificial Sequence: Synthetic oligonucleotide
ugcgccuucacgggcuagu

SEQ ID NO: 947693 - RNA, 19 nt, Artificial Sequence
  Description of Artificial Sequence: Synthetic oligonucleotide
ucgucugcccagcgcccgc

SEQ ID NO: 947694 - RNA, 19 nt, Artificial Sequence
  Description of Artificial Sequence: Synthetic oligonucleotide
cucaguauccguggaagcu

SEQ ID NO: 947695 - RNA, 19 nt, Artificial Sequence
  Description of Artificial Sequence: Synthetic oligonucleotide
uucaugccugcguccgcuc

SEQ ID NO: 947696 - RNA, 19 nt, Artificial Sequence
  Description of Artificial Sequence: Synthetic oligonucleotide
ccucacgaaauucaagaaa

SEQ ID NO: 947697 - RNA, 19 nt, Artificial Sequence
  Description of Artificial Sequence: Synthetic oligonucleotide
augccucgcucugauggug

SEQ ID NO: 947698 - RNA, 19 nt, Artificial Sequence
  Description of Artificial Sequence: Synthetic oligonucleotide
cacuugcugucaguaaaca

SEQ ID NO: 947699 - RNA, 19 nt, Artificial Sequence
  Description of Artificial Sequence: Synthetic oligonucleotide
cuaucggcccgcaguccuc

SEQ ID NO: 947700 - RNA, 19 nt, Artificial Sequence
  Description of Artificial Sequence: Synthetic oligonucleotide
gcaauguuguauagcuuuc

SEQ ID NO: 947701 - RNA, 19 nt, Artificial Sequence
  Description of Artificial Sequence: Synthetic oligonucleotide
ggccccaaauauacacagg

SEQ ID NO: 947702 - RNA, 19 nt, Artificial Sequence
  Description of Artificial Sequence: Synthetic oligonucleotide
gcuucaagcggcagucggc

SEQ ID NO: 947703 - RNA, 19 nt, Artificial Sequence
  Description of Artificial Sequence: Synthetic oligonucleotide
ccuaggaauucccucagua

SEQ ID NO: 947704 - RNA, 19 nt, Artificial Sequence
  Description of Artificial Sequence: Synthetic oligonucleotide
ccacacgguggucaccucc

SEQ ID NO: 947705 - RNA, 19 nt, Artificial Sequence
  Description of Artificial Sequence: Synthetic oligonucleotide
caguuccgacuucccuagg

SEQ ID NO: 947706 - RNA, 19 nt, Artificial Sequence
  Description of Artificial Sequence: Synthetic oligonucleotide
aguauccguggaagcucag

SEQ ID NO: 947707 - RNA, 19 nt, Artificial Sequence
  Description of Artificial Sequence: Synthetic oligonucleotide
cauaugggguccacuugcu

SEQ ID NO: 947708 - RNA, 19 nt, Artificial Sequence
  Description of Artificial Sequence: Synthetic oligonucleotide
ggaucgaggaagaaccagu

SEQ ID NO: 947709 - RNA, 19 nt, Artificial Sequence
  Description of Artificial Sequence: Synthetic oligonucleotide
ccaagggaacucaacaccu

SEQ ID NO: 947710 - RNA, 19 nt, Artificial Sequence
  Description of Artificial Sequence: Synthetic oligonucleotide
ucucuacgcccagcauaug

SEQ ID NO: 947711 - RNA, 19 nt, Artificial Sequence
  Description of Artificial Sequence: Synthetic oligonucleotide
gguggcgucucucgcucac

SEQ ID NO: 947712 - RNA, 19 nt, Artificial Sequence
  Description of Artificial Sequence: Synthetic oligonucleotide
caguccucggcgccccgac

SEQ ID NO: 947713 - RNA, 19 nt, Artificial Sequence
  Description of Artificial Sequence: Synthetic oligonucleotide
cugaguccucuuucuaggu

SEQ ID NO: 947714 - RNA, 19 nt, Artificial Sequence
  Description of Artificial Sequence: Synthetic oligonucleotide
gggaacccucacgaaauuc

SEQ ID NO: 947715 - RNA, 19 nt, Artificial Sequence
  Description of Artificial Sequence: Synthetic oligonucleotide
aguccucggcgccccgacu

SEQ ID NO: 947716 - RNA, 19 nt, Artificial Sequence
  Description of Artificial Sequence: Synthetic oligonucleotide
cacaucugcggaggcucug

SEQ ID NO: 947717 - RNA, 19 nt, Artificial Sequence
  Description of Artificial Sequence: Synthetic oligonucleotide
cccgcuucaugccugcguc

SEQ ID NO: 947718 - RNA, 19 nt, Artificial Sequence
  Description of Artificial Sequence: Synthetic oligonucleotide
cacacgguggucaccuccu

SEQ ID NO: 947719 - RNA, 19 nt, Artificial Sequence
  Description of Artificial Sequence: Synthetic oligonucleotide
gggguccacuugcugucag

SEQ ID NO: 947720 - RNA, 19 nt, Artificial Sequence
  Description of Artificial Sequence: Synthetic oligonucleotide
gacgagccugaggcggcgc

SEQ ID NO: 947721 - RNA, 19 nt, Artificial Sequence
  Description of Artificial Sequence: Synthetic oligonucleotide
gguaaccaagggaacucaa

SEQ ID NO: 947722 - RNA, 19 nt, Artificial Sequence
  Description of Artificial Sequence: Synthetic oligonucleotide
aggcggcgcagcucucaug

SEQ ID NO: 947723 - RNA, 19 nt, Artificial Sequence
  Description of Artificial Sequence: Synthetic oligonucleotide
cugcggaggcucugcccac

SEQ ID NO: 947724 - RNA, 19 nt, Artificial Sequence
  Description of Artificial Sequence: Synthetic oligonucleotide
cgucucucgcucacagagg

SEQ ID NO: 947725 - RNA, 19 nt, Artificial Sequence
  Description of Artificial Sequence: Synthetic oligonucleotide
gucuacagccagguuagau

SEQ ID NO: 947726 - RNA, 19 nt, Artificial Sequence
  Description of Artificial Sequence: Synthetic oligonucleotide
agcggcagucggcguccag

SEQ ID NO: 947727 - RNA, 19 nt, Artificial Sequence
  Description of Artificial Sequence: Synthetic oligonucleotide
uccacacgguggucaccuc

SEQ ID NO: 947728 - RNA, 19 nt, Artificial Sequence
  Description of Artificial Sequence: Synthetic oligonucleotide
agcgcccgcuucaugccug

SEQ ID NO: 947729 - RNA, 19 nt, Artificial Sequence
  Description of Artificial Sequence: Synthetic oligonucleotide
ggcuagucucagugcuggc

SEQ ID NO: 947730 - RNA, 19 nt, Artificial Sequence
  Description of Artificial Sequence: Synthetic oligonucleotide
gcccuaucggcccgcaguc

SEQ ID NO: 947731 - RNA, 19 nt, Artificial Sequence
  Description of Artificial Sequence: Synthetic oligonucleotide
gcggcagucggcguccagc

SEQ ID NO: 947732 - RNA, 19 nt, Artificial Sequence
  Description of Artificial Sequence: Synthetic oligonucleotide
aucccaggacacaguuuga

SEQ ID NO: 947733 - RNA, 19 nt, Artificial Sequence
  Description of Artificial Sequence: Synthetic oligonucleotide
ccgacuucccuaggaauuc

SEQ ID NO: 947734 - RNA, 19 nt, Artificial Sequence
  Description of Artificial Sequence: Synthetic oligonucleotide
cgcuucaugccugcguccg

SEQ ID NO: 947735 - RNA, 19 nt, Artificial Sequence
  Description of Artificial Sequence: Synthetic oligonucleotide
cuucaugccugcguccgcu

SEQ ID NO: 947736 - RNA, 19 nt, Artificial Sequence
  Description of Artificial Sequence: Synthetic oligonucleotide
cccucacgaaauucaagaa

SEQ ID NO: 947737 - RNA, 19 nt, Artificial Sequence
  Description of Artificial Sequence: Synthetic oligonucleotide
ggcccuaucggcccgcagu

SEQ ID NO: 947738 - RNA, 19 nt, Artificial Sequence
  Description of Artificial Sequence: Synthetic oligonucleotide
gcucacagaggcgccguac

SEQ ID NO: 947739 - RNA, 19 nt, Artificial Sequence
  Description of Artificial Sequence: Synthetic oligonucleotide
gagucaccccaaccucugu

SEQ ID NO: 947740 - RNA, 19 nt, Artificial Sequence
  Description of Artificial Sequence: Synthetic oligonucleotide
ugacuggcucgguccgcuu

SEQ ID NO: 947741 - RNA, 19 nt, Artificial Sequence
  Description of Artificial Sequence: Synthetic oligonucleotide
ggacgagccugaggcggcg

SEQ ID NO: 947742 - RNA, 19 nt, Artificial Sequence
  Description of Artificial Sequence: Synthetic oligonucleotide
cuucgagauggugcagcaa

SEQ ID NO: 947743 - RNA, 19 nt, Artificial Sequence
  Description of Artificial Sequence: Synthetic oligonucleotide
agguaugcgcugggcuccu

SEQ ID NO: 947744 - RNA, 19 nt, Artificial Sequence
  Description of Artificial Sequence: Synthetic oligonucleotide
ggugacuggcucgguccgc

SEQ ID NO: 947745 - RNA, 19 nt, Artificial Sequence
  Description of Artificial Sequence: Synthetic oligonucleotide
acgccagagagggcagaaa

SEQ ID NO: 947746 - RNA, 19 nt, Artificial Sequence
  Description of Artificial Sequence: Synthetic oligonucleotide
guacgccagagagggcaga

SEQ ID NO: 947747 - RNA, 19 nt, Artificial Sequence
  Description of Artificial Sequence: Synthetic oligonucleotide
aagcggcagucggcgucca

SEQ ID NO: 947748 - RNA, 19 nt, Artificial Sequence
  Description of Artificial Sequence: Synthetic oligonucleotide
gggcuacugggugccagac

SEQ ID NO: 947749 - RNA, 19 nt, Artificial Sequence
  Description of Artificial Sequence: Synthetic oligonucleotide
cucaucccgcggcccuauc

SEQ ID NO: 947750 - RNA, 19 nt, Artificial Sequence
  Description of Artificial Sequence: Synthetic oligonucleotide
ccuucacgggcuagucuca

SEQ ID NO: 947751 - RNA, 19 nt, Artificial Sequence
  Description of Artificial Sequence: Synthetic oligonucleotide
ccgccugccugccaccgug

SEQ ID NO: 947752 - RNA, 19 nt, Artificial Sequence
  Description of Artificial Sequence: Synthetic oligonucleotide
guccucggcgccccgacuu

SEQ ID NO: 947753 - RNA, 19 nt, Artificial Sequence
  Description of Artificial Sequence: Synthetic oligonucleotide
cgacuucccuaggaauucc

SEQ ID NO: 947754 - RNA, 19 nt, Artificial Sequence
  Description of Artificial Sequence: Synthetic oligonucleotide
guggcgucucucgcucaca

SEQ ID NO: 947755 - RNA, 19 nt, Artificial Sequence
  Description of Artificial Sequence: Synthetic oligonucleotide
ggcgccguaccagauuugu

SEQ ID NO: 947756 - RNA, 19 nt, Artificial Sequence
  Description of Artificial Sequence: Synthetic oligonucleotide
cccuuacugugggugagca

SEQ ID NO: 947757 - RNA, 19 nt, Artificial Sequence
  Description of Artificial Sequence: Synthetic oligonucleotide
caugcgccuucacgggcua

SEQ ID NO: 947758 - RNA, 19 nt, Artificial Sequence
  Description of Artificial Sequence: Synthetic oligonucleotide
gguucucuacgcccagcau

SEQ ID NO: 947759 - RNA, 19 nt, Artificial Sequence
  Description of Artificial Sequence: Synthetic oligonucleotide
cgggcuagucucagugcug

SEQ ID NO: 947760 - RNA, 19 nt, Artificial Sequence
  Description of Artificial Sequence: Synthetic oligonucleotide
ccccuuacugugggugagc

SEQ ID NO: 947761 - RNA, 19 nt, Artificial Sequence
  Description of Artificial Sequence: Synthetic oligonucleotide
ccuaucggcccgcaguccu

SEQ ID NO: 947762 - RNA, 19 nt, Artificial Sequence
  Description of Artificial Sequence: Synthetic oligonucleotide
gccccgacuuugcccgccc

SEQ ID NO: 947763 - RNA, 19 nt, Artificial Sequence
  Description of Artificial Sequence: Synthetic oligonucleotide
ggcuacugggugccagacu

SEQ ID NO: 947764 - RNA, 19 nt, Artificial Sequence
  Description of Artificial Sequence: Synthetic oligonucleotide
ccauucuguguacgccaga

SEQ ID NO: 947765 - RNA, 19 nt, Artificial Sequence
  Description of Artificial Sequence: Synthetic oligonucleotide
gcgcccgcuucaugccugc

SEQ ID NO: 947766 - RNA, 19 nt, Artificial Sequence
  Description of Artificial Sequence: Synthetic oligonucleotide
cccuaucggcccgcagucc

SEQ ID NO: 947767 - RNA, 19 nt, Artificial Sequence
  Description of Artificial Sequence: Synthetic oligonucleotide
ccccgacuuugcccgcccg

SEQ ID NO: 947768 - RNA, 19 nt, Artificial Sequence
  Description of Artificial Sequence: Synthetic oligonucleotide
ccgagaugaaagggcacaa

SEQ ID NO: 947769 - RNA, 19 nt, Artificial Sequence
  Description of Artificial Sequence: Synthetic oligonucleotide
cucagucuacagccagguu

SEQ ID NO: 947770 - RNA, 19 nt, Artificial Sequence
  Description of Artificial Sequence: Synthetic oligonucleotide
ggagugguccugcgcuccu

SEQ ID NO: 947771 - RNA, 19 nt, Artificial Sequence
  Description of Artificial Sequence: Synthetic oligonucleotide
ccgagccggaggaggacga

SEQ ID NO: 947772 - RNA, 19 nt, Artificial Sequence
  Description of Artificial Sequence: Synthetic oligonucleotide
cgccagacgcagguucugc

SEQ ID NO: 947773 - RNA, 19 nt, Artificial Sequence
  Description of Artificial Sequence: Synthetic oligonucleotide
ggcaucugguggcgucucu

SEQ ID NO: 947774 - RNA, 19 nt, Artificial Sequence
  Description of Artificial Sequence: Synthetic oligonucleotide
ccccaaccucuguaaucga

SEQ ID NO: 947775 - RNA, 19 nt, Artificial Sequence
  Description of Artificial Sequence: Synthetic oligonucleotide
gcaguccucggcgccccga

SEQ ID NO: 947776 - RNA, 19 nt, Artificial Sequence
  Description of Artificial Sequence: Synthetic oligonucleotide
gggaaggaaggugggucuu

SEQ ID NO: 947777 - RNA, 19 nt, Artificial Sequence
  Description of Artificial Sequence: Synthetic oligonucleotide
ccgccagacgcagguucug

SEQ ID NO: 947778 - RNA, 19 nt, Artificial Sequence
  Description of Artificial Sequence: Synthetic oligonucleotide
ccgcggcccuaucggcccg

SEQ ID NO: 947779 - RNA, 19 nt, Artificial Sequence
  Description of Artificial Sequence: Synthetic oligonucleotide
gcgccccgacuuugcccgc

SEQ ID NO: 947780 - RNA, 19 nt, Artificial Sequence
  Description of Artificial Sequence: Synthetic oligonucleotide
cccuaggaauucccucagu

SEQ ID NO: 947781 - RNA, 19 nt, Artificial Sequence
  Description of Artificial Sequence: Synthetic oligonucleotide
cuggcucgguccgcuuccu

SEQ ID NO: 947782 - RNA, 19 nt, Artificial Sequence
  Description of Artificial Sequence: Synthetic oligonucleotide
gcuccgcugcgcggcucug

SEQ ID NO: 947783 - RNA, 19 nt, Artificial Sequence
  Description of Artificial Sequence: Synthetic oligonucleotide
gcggcgcagcucucaugcu

SEQ ID NO: 947784 - RNA, 19 nt, Artificial Sequence
  Description of Artificial Sequence: Synthetic oligonucleotide
cgccuucacgggcuagucu

SEQ ID NO: 947785 - RNA, 19 nt, Artificial Sequence
  Description of Artificial Sequence: Synthetic oligonucleotide
gcggcccuaucggcccgca

SEQ ID NO: 947786 - RNA, 19 nt, Artificial Sequence
  Description of Artificial Sequence: Synthetic oligonucleotide
cgacuuugcccgcccgccu

SEQ ID NO: 947787 - RNA, 19 nt, Artificial Sequence
  Description of Artificial Sequence: Synthetic oligonucleotide
gcgccguaccagauuuguu

SEQ ID NO: 947788 - RNA, 19 nt, Artificial Sequence
  Description of Artificial Sequence: Synthetic oligonucleotide
ccaaggugacuggcucggu

SEQ ID NO: 947789 - RNA, 19 nt, Artificial Sequence
  Description of Artificial Sequence: Synthetic oligonucleotide
aaacgugagaucuugcagg

SEQ ID NO: 947790 - RNA, 19 nt, Artificial Sequence
  Description of Artificial Sequence: Synthetic oligonucleotide
aauaaagugacaauugcug

SEQ ID NO: 947791 - RNA, 19 nt, Artificial Sequence
  Description of Artificial Sequence: Synthetic oligonucleotide
aaagcggauuguuucuucc

SEQ ID NO: 947792 - RNA, 19 nt, Artificial Sequence
  Description of Artificial Sequence: Synthetic oligonucleotide
uaugguaaggguaugagua

SEQ ID NO: 947793 - RNA, 19 nt, Artificial Sequence
  Description of Artificial Sequence: Synthetic oligonucleotide
aaaacgugagaucuugcag

SEQ ID NO: 947794 - RNA, 19 nt, Artificial Sequence
  Description of Artificial Sequence: Synthetic oligonucleotide
aacgugagaucuugcaggc

SEQ ID NO: 947795 - RNA, 19 nt, Artificial Sequence
  Description of Artificial Sequence: Synthetic oligonucleotide
aaucagcacacauccauuc

SEQ ID NO: 947796 - RNA, 19 nt, Artificial Sequence
  Description of Artificial Sequence: Synthetic oligonucleotide
aaauggagcgcugacgucg

SEQ ID NO: 947797 - RNA, 19 nt, Artificial Sequence
  Description of Artificial Sequence: Synthetic oligonucleotide
aaagugacaauugcuggcg

SEQ ID NO: 947798 - RNA, 19 nt, Artificial Sequence
  Description of Artificial Sequence: Synthetic oligonucleotide
agcaggucaagcaagagac

SEQ ID NO: 947799 - RNA, 19 nt, Artificial Sequence
  Description of Artificial Sequence: Synthetic oligonucleotide
aaaccagcgaaacgcuggc

SEQ ID NO: 947800 - RNA, 19 nt, Artificial Sequence
  Description of Artificial Sequence: Synthetic oligonucleotide
aauaugguaaggguaugag

SEQ ID NO: 947801 - RNA, 19 nt, Artificial Sequence
  Description of Artificial Sequence: Synthetic oligonucleotide
gacgacaggagccacacgc

SEQ ID NO: 947802 - RNA, 19 nt, Artificial Sequence
  Description of Artificial Sequence: Synthetic oligonucleotide
uauaccaugguggacaggu

SEQ ID NO: 947803 - RNA, 19 nt, Artificial Sequence
  Description of Artificial Sequence: Synthetic oligonucleotide
uuucaccugagacaggaca

SEQ ID NO: 947804 - RNA, 19 nt, Artificial Sequence
  Description of Artificial Sequence: Synthetic oligonucleotide
agaguaugcaaggaacugc

SEQ ID NO: 947805 - RNA, 19 nt, Artificial Sequence
  Description of Artificial Sequence: Synthetic oligonucleotide
uuugaaggcggcagcauug

SEQ ID NO: 947806 - RNA, 19 nt, Artificial Sequence
  Description of Artificial Sequence: Synthetic oligonucleotide
ucaacgaagugcagcacag

SEQ ID NO: 947807 - RNA, 19 nt, Artificial Sequence
  Description of Artificial Sequence: Synthetic oligonucleotide
uauggaacagcuccucgcc

SEQ ID NO: 947808 - RNA, 19 nt, Artificial Sequence
  Description of Artificial Sequence: Synthetic oligonucleotide
agaagcacaauggagccgg

SEQ ID NO: 947809 - RNA, 19 nt, Artificial Sequence
  Description of Artificial Sequence: Synthetic oligonucleotide
caaaccagcgaaacgcugg

SEQ ID NO: 947810 - RNA, 19 nt, Artificial Sequence
  Description of Artificial Sequence: Synthetic oligonucleotide
aaggguaugaguagccuuc

SEQ ID NO: 947811 - RNA, 19 nt, Artificial Sequence
  Description of Artificial Sequence: Synthetic oligonucleotide
uugagacuggggaagacga

SEQ ID NO: 947812 - RNA, 19 nt, Artificial Sequence
  Description of Artificial Sequence: Synthetic oligonucleotide
agcagcccaaaccaagagc

SEQ ID NO: 947813 - RNA, 19 nt, Artificial Sequence
  Description of Artificial Sequence: Synthetic oligonucleotide
aagacgacaggagccacac

SEQ ID NO: 947814 - RNA, 19 nt, Artificial Sequence
  Description of Artificial Sequence: Synthetic oligonucleotide
aauaccuuccaagcagguc

SEQ ID NO: 947815 - RNA, 19 nt, Artificial Sequence
  Description of Artificial Sequence: Synthetic oligonucleotide
guacuuauugcugucagug

SEQ ID NO: 947816 - RNA, 19 nt, Artificial Sequence
  Description of Artificial Sequence: Synthetic oligonucleotide
aaaauggagcgcugacguc

SEQ ID NO: 947817 - RNA, 19 nt, Artificial Sequence
  Description of Artificial Sequence: Synthetic oligonucleotide
agcuuugccuacccuauac

SEQ ID NO: 947818 - RNA, 19 nt, Artificial Sequence
  Description of Artificial Sequence: Synthetic oligonucleotide
ugaguagccuucucauugg

SEQ ID NO: 947819 - RNA, 19 nt, Artificial Sequence
  Description of Artificial Sequence: Synthetic oligonucleotide
guggcuagaguaugcaagg

SEQ ID NO: 947820 - RNA, 19 nt, Artificial Sequence
  Description of Artificial Sequence: Synthetic oligonucleotide
ugcccuuacgagcacgagg

SEQ ID NO: 947821 - RNA, 19 nt, Artificial Sequence
  Description of Artificial Sequence: Synthetic oligonucleotide
cagguucacacuuucacug

SEQ ID NO: 947822 - RNA, 19 nt, Artificial Sequence
  Description of Artificial Sequence: Synthetic oligonucleotide
aaggcggcagcauuguaca

SEQ ID NO: 947823 - RNA, 19 nt, Artificial Sequence
  Description of Artificial Sequence: Synthetic oligonucleotide
agugacaauugcuggcggg

SEQ ID NO: 947824 - RNA, 19 nt, Artificial Sequence
  Description of Artificial Sequence: Synthetic oligonucleotide
aaauaugguaaggguauga

SEQ ID NO: 947825 - RNA, 19 nt, Artificial Sequence
  Description of Artificial Sequence: Synthetic oligonucleotide
agugcgauggcuuccccag

SEQ ID NO: 947826 - RNA, 19 nt, Artificial Sequence
  Description of Artificial Sequence: Synthetic oligonucleotide
gaaaauggagcgcugacgu

SEQ ID NO: 947827 - RNA, 19 nt, Artificial Sequence
  Description of Artificial Sequence: Synthetic oligonucleotide
aggacagauggugagcagc

SEQ ID NO: 947828 - RNA, 19 nt, Artificial Sequence
  Description of Artificial Sequence: Synthetic oligonucleotide
agucuuaaguguccugauc

SEQ ID NO: 947829 - RNA, 19 nt, Artificial Sequence
  Description of Artificial Sequence: Synthetic oligonucleotide
aaggcacuuuuccagggca

SEQ ID NO: 947830 - RNA, 19 nt, Artificial Sequence
  Description of Artificial Sequence: Synthetic oligonucleotide
uccaguccaaagcggauug

SEQ ID NO: 947831 - RNA, 19 nt, Artificial Sequence
  Description of Artificial Sequence: Synthetic oligonucleotide
ugcagcacagcucggaaaa

SEQ ID NO: 947832 - RNA, 19 nt, Artificial Sequence
  Description of Artificial Sequence: Synthetic oligonucleotide
auaugguaaggguaugagu

SEQ ID NO: 947833 - RNA, 19 nt, Artificial Sequence
  Description of Artificial Sequence: Synthetic oligonucleotide
gauggugagcagcaaugcc

SEQ ID NO: 947834 - RNA, 19 nt, Artificial Sequence
  Description of Artificial Sequence: Synthetic oligonucleotide
cacagcucggaaaauggag

SEQ ID NO: 947835 - RNA, 19 nt, Artificial Sequence
  Description of Artificial Sequence: Synthetic oligonucleotide
aguggcuagaguaugcaag

SEQ ID NO: 947836 - RNA, 19 nt, Artificial Sequence
  Description of Artificial Sequence: Synthetic oligonucleotide
acuccaaaccagcgaaacg

SEQ ID NO: 947837 - RNA, 19 nt, Artificial Sequence
  Description of Artificial Sequence: Synthetic oligonucleotide
augguaaggguaugaguag

SEQ ID NO: 947838 - RNA, 19 nt, Artificial Sequence
  Description of Artificial Sequence: Synthetic oligonucleotide
aaaauaugguaaggguaug

SEQ ID NO: 947839 - RNA, 19 nt, Artificial Sequence
  Description of Artificial Sequence: Synthetic oligonucleotide
uugccuacccuauaccaug

SEQ ID NO: 947840 - RNA, 19 nt, Artificial Sequence
  Description of Artificial Sequence: Synthetic oligonucleotide
agcgcauugcccuuacgag

SEQ ID NO: 947841 - RNA, 19 nt, Artificial Sequence
  Description of Artificial Sequence: Synthetic oligonucleotide
agcggauuguuucuuccuc

SEQ ID NO: 947842 - RNA, 19 nt, Artificial Sequence
  Description of Artificial Sequence: Synthetic oligonucleotide
uaugcagagcacuuccagu

SEQ ID NO: 947843 - RNA, 19 nt, Artificial Sequence
  Description of Artificial Sequence: Synthetic oligonucleotide
gucuaugcagagcacuucc

SEQ ID NO: 947844 - RNA, 19 nt, Artificial Sequence
  Description of Artificial Sequence: Synthetic oligonucleotide
agguucacacuuucacugg

SEQ ID NO: 947845 - RNA, 19 nt, Artificial Sequence
  Description of Artificial Sequence: Synthetic oligonucleotide
uuugccuacccuauaccau

SEQ ID NO: 947846 - RNA, 19 nt, Artificial Sequence
  Description of Artificial Sequence: Synthetic oligonucleotide
agcacaauggagccgggca

SEQ ID NO: 947847 - RNA, 19 nt, Artificial Sequence
  Description of Artificial Sequence: Synthetic oligonucleotide
cauucuaggcagcuuugcc

SEQ ID NO: 947848 - RNA, 19 nt, Artificial Sequence
  Description of Artificial Sequence: Synthetic oligonucleotide
uuggguacugcuccuggca

SEQ ID NO: 947849 - RNA, 19 nt, Artificial Sequence
  Description of Artificial Sequence: Synthetic oligonucleotide
cuaugcagagcacuuccag

SEQ ID NO: 947850 - RNA, 19 nt, Artificial Sequence
  Description of Artificial Sequence: Synthetic oligonucleotide
aauccgcagguucacacuu

SEQ ID NO: 947851 - RNA, 19 nt, Artificial Sequence
  Description of Artificial Sequence: Synthetic oligonucleotide
uacccuauaccauggugga

SEQ ID NO: 947852 - RNA, 19 nt, Artificial Sequence
  Description of Artificial Sequence: Synthetic oligonucleotide
aacuaggagucggggacac

SEQ ID NO: 947853 - RNA, 19 nt, Artificial Sequence
  Description of Artificial Sequence: Synthetic oligonucleotide
gguagcggcauccagcacc

SEQ ID NO: 947854 - RNA, 19 nt, Artificial Sequence
  Description of Artificial Sequence: Synthetic oligonucleotide
ugccuacccuauaccaugg

SEQ ID NO: 947855 - RNA, 19 nt, Artificial Sequence
  Description of Artificial Sequence: Synthetic oligonucleotide
ucacggagaagcucguugu

SEQ ID NO: 947856 - RNA, 19 nt, Artificial Sequence
  Description of Artificial Sequence: Synthetic oligonucleotide
aagcggauuguuucuuccu

SEQ ID NO: 947857 - RNA, 19 nt, Artificial Sequence
  Description of Artificial Sequence: Synthetic oligonucleotide
uucuaggcagcuuugccua

SEQ ID NO: 947858 - RNA, 19 nt, Artificial Sequence
  Description of Artificial Sequence: Synthetic oligonucleotide
acccucaacgaagugcagc

SEQ ID NO: 947859 - RNA, 19 nt, Artificial Sequence
  Description of Artificial Sequence: Synthetic oligonucleotide
gagcagaagcacaauggag

SEQ ID NO: 947860 - RNA, 19 nt, Artificial Sequence
  Description of Artificial Sequence: Synthetic oligonucleotide
ucgcauuugguuucaccug

SEQ ID NO: 947861 - RNA, 19 nt, Artificial Sequence
  Description of Artificial Sequence: Synthetic oligonucleotide
uccaaaccagcgaaacgcu

SEQ ID NO: 947862 - RNA, 19 nt, Artificial Sequence
  Description of Artificial Sequence: Synthetic oligonucleotide
agcacacauccauucuagg

SEQ ID NO: 947863 - RNA, 19 nt, Artificial Sequence
  Description of Artificial Sequence: Synthetic oligonucleotide
cacuagugccacaagacca

SEQ ID NO: 947864 - RNA, 19 nt, Artificial Sequence
  Description of Artificial Sequence: Synthetic oligonucleotide
cuugcggagcgcauugccc

SEQ ID NO: 947865 - RNA, 19 nt, Artificial Sequence
  Description of Artificial Sequence: Synthetic oligonucleotide
ucucauuggccagucagcu

SEQ ID NO: 947866 - RNA, 19 nt, Artificial Sequence
  Description of Artificial Sequence: Synthetic oligonucleotide
uccauucuaggcagcuuug

SEQ ID NO: 947867 - RNA, 19 nt, Artificial Sequence
  Description of Artificial Sequence: Synthetic oligonucleotide
cuuugccuacccuauacca

SEQ ID NO: 947868 - RNA, 19 nt, Artificial Sequence
  Description of Artificial Sequence: Synthetic oligonucleotide
guacugagcaggcugggac

SEQ ID NO: 947869 - RNA, 19 nt, Artificial Sequence
  Description of Artificial Sequence: Synthetic oligonucleotide
cucucaagagcuccuugcc

SEQ ID NO: 947870 - RNA, 19 nt, Artificial Sequence
  Description of Artificial Sequence: Synthetic oligonucleotide
gaaggcggcagcauuguac

SEQ ID NO: 947871 - RNA, 19 nt, Artificial Sequence
  Description of Artificial Sequence: Synthetic oligonucleotide
gagcgcauugcccuuacga

SEQ ID NO: 947872 - RNA, 19 nt, Artificial Sequence
  Description of Artificial Sequence: Synthetic oligonucleotide
ugguaaggguaugaguagc

SEQ ID NO: 947873 - RNA, 19 nt, Artificial Sequence
  Description of Artificial Sequence: Synthetic oligonucleotide
caggguagcggcauccagc

SEQ ID NO: 947874 - RNA, 19 nt, Artificial Sequence
  Description of Artificial Sequence: Synthetic oligonucleotide
ucaggguagcggcauccag

SEQ ID NO: 947875 - RNA, 19 nt, Artificial Sequence
  Description of Artificial Sequence: Synthetic oligonucleotide
uguguagaugcgguggcga

SEQ ID NO: 947876 - RNA, 19 nt, Artificial Sequence
  Description of Artificial Sequence: Synthetic oligonucleotide
ggaaaauggagcgcugacg

SEQ ID NO: 947877 - RNA, 19 nt, Artificial Sequence
  Description of Artificial Sequence: Synthetic oligonucleotide
gaggcauuccuggaacuag

SEQ ID NO: 947878 - RNA, 19 nt, Artificial Sequence
  Description of Artificial Sequence: Synthetic oligonucleotide
acagucacugguaguacuc

SEQ ID NO: 947879 - RNA, 19 nt, Artificial Sequence
  Description of Artificial Sequence: Synthetic oligonucleotide
uaaguguccugaucccaug

SEQ ID NO: 947880 - RNA, 19 nt, Artificial Sequence
  Description of Artificial Sequence: Synthetic oligonucleotide
acuagugccacaagaccag

SEQ ID NO: 947881 - RNA, 19 nt, Artificial Sequence
  Description of Artificial Sequence: Synthetic oligonucleotide
gguaugaguagccuucuca

SEQ ID NO: 947882 - RNA, 19 nt, Artificial Sequence
  Description of Artificial Sequence: Synthetic oligonucleotide
uacugagcaggcugggaca

SEQ ID NO: 947883 - RNA, 19 nt, Artificial Sequence
  Description of Artificial Sequence: Synthetic oligonucleotide
ggagcgcugacgucgacgg

SEQ ID NO: 947884 - RNA, 19 nt, Artificial Sequence
  Description of Artificial Sequence: Synthetic oligonucleotide
agccacuagugccacaaga

SEQ ID NO: 947885 - RNA, 19 nt, Artificial Sequence
  Description of Artificial Sequence: Synthetic oligonucleotide
caacugcacacagagcagg

SEQ ID NO: 947886 - RNA, 19 nt, Artificial Sequence
  Description of Artificial Sequence: Synthetic oligonucleotide
ugagcccaacacauccuug

SEQ ID NO: 947887 - RNA, 19 nt, Artificial Sequence
  Description of Artificial Sequence: Synthetic oligonucleotide
gacaagagcuucggcagcc

SEQ ID NO: 947888 - RNA, 19 nt, Artificial Sequence
  Description of Artificial Sequence: Synthetic oligonucleotide
aggguagcggcauccagca

SEQ ID NO: 947889 - RNA, 19 nt, Artificial Sequence
  Description of Artificial Sequence: Synthetic oligonucleotide
agcgcugacgucgacgguc

SEQ ID NO: 947890 - RNA, 19 nt, Artificial Sequence
  Description of Artificial Sequence: Synthetic oligonucleotide
aaccagcgaaacgcuggcc

SEQ ID NO: 947891 - RNA, 19 nt, Artificial Sequence
  Description of Artificial Sequence: Synthetic oligonucleotide
aaucuuggcacgguacuua

SEQ ID NO: 947892 - RNA, 19 nt, Artificial Sequence
  Description of Artificial Sequence: Synthetic oligonucleotide
agcaccgagguuagcagcg

SEQ ID NO: 947893 - RNA, 19 nt, Artificial Sequence
  Description of Artificial Sequence: Synthetic oligonucleotide
ugucccucgcacgacuccg

SEQ ID NO: 947894 - RNA, 19 nt, Artificial Sequence
  Description of Artificial Sequence: Synthetic oligonucleotide
agcagugcgauggcuuccc

SEQ ID NO: 947895 - RNA, 19 nt, Artificial Sequence
  Description of Artificial Sequence: Synthetic oligonucleotide
aucuucgugaggcgccccg

SEQ ID NO: 947896 - RNA, 19 nt, Artificial Sequence
  Description of Artificial Sequence: Synthetic oligonucleotide
gagucggggacacgguaag

SEQ ID NO: 947897 - RNA, 19 nt, Artificial Sequence
  Description of Artificial Sequence: Synthetic oligonucleotide
gucacugguaguacuccgg

SEQ ID NO: 947898 - RNA, 19 nt, Artificial Sequence
  Description of Artificial Sequence: Synthetic oligonucleotide
acggagaagcucguuguuc

SEQ ID NO: 947899 - RNA, 19 nt, Artificial Sequence
  Description of Artificial Sequence: Synthetic oligonucleotide
gcuagaguaugcaaggaac

SEQ ID NO: 947900 - RNA, 19 nt, Artificial Sequence
  Description of Artificial Sequence: Synthetic oligonucleotide
uggagcgcugacgucgacg

SEQ ID NO: 947901 - RNA, 19 nt, Artificial Sequence
  Description of Artificial Sequence: Synthetic oligonucleotide
cucaacgaagugcagcaca

SEQ ID NO: 947902 - RNA, 19 nt, Artificial Sequence
  Description of Artificial Sequence: Synthetic oligonucleotide
cucgcauuugguuucaccu

SEQ ID NO: 947903 - RNA, 19 nt, Artificial Sequence
  Description of Artificial Sequence: Synthetic oligonucleotide
cugacgucgacggucaauc

SEQ ID NO: 947904 - RNA, 19 nt, Artificial Sequence
  Description of Artificial Sequence: Synthetic oligonucleotide
gcugcguuccagcaggaag

SEQ ID NO: 947905 - RNA, 19 nt, Artificial Sequence
  Description of Artificial Sequence: Synthetic oligonucleotide
cacgaggcauuccuggaac

SEQ ID NO: 947906 - RNA, 19 nt, Artificial Sequence
  Description of Artificial Sequence: Synthetic oligonucleotide
gagacuggggaagacgaca

SEQ ID NO: 947907 - RNA, 19 nt, Artificial Sequence
  Description of Artificial Sequence: Synthetic oligonucleotide
ugagacuggggaagacgac

SEQ ID NO: 947908 - RNA, 19 nt, Artificial Sequence
  Description of Artificial Sequence: Synthetic oligonucleotide
acgucgacggucaaucuug

SEQ ID NO: 947909 - RNA, 19 nt, Artificial Sequence
  Description of Artificial Sequence: Synthetic oligonucleotide
caaagcggauuguuucuuc

SEQ ID NO: 947910 - RNA, 19 nt, Artificial Sequence
  Description of Artificial Sequence: Synthetic oligonucleotide
ugaccgcccuugcggagcg

SEQ ID NO: 947911 - RNA, 19 nt, Artificial Sequence
  Description of Artificial Sequence: Synthetic oligonucleotide
acgaagugcagcacagcuc

SEQ ID NO: 947912 - RNA, 19 nt, Artificial Sequence
  Description of Artificial Sequence: Synthetic oligonucleotide
cuggaacuaggagucgggg

SEQ ID NO: 947913 - RNA, 19 nt, Artificial Sequence
  Description of Artificial Sequence: Synthetic oligonucleotide
aagaugucacggagaagcu

SEQ ID NO: 947914 - RNA, 19 nt, Artificial Sequence
  Description of Artificial Sequence: Synthetic oligonucleotide
uguggguaccaggacagau

SEQ ID NO: 947915 - RNA, 19 nt, Artificial Sequence
  Description of Artificial Sequence: Synthetic oligonucleotide
agacuggggaagacgacag

SEQ ID NO: 947916 - RNA, 19 nt, Artificial Sequence
  Description of Artificial Sequence: Synthetic oligonucleotide
uugucccucgcacgacucc

SEQ ID NO: 947917 - RNA, 19 nt, Artificial Sequence
  Description of Artificial Sequence: Synthetic oligonucleotide
uccucauauucaccacccu

SEQ ID NO: 947918 - RNA, 19 nt, Artificial Sequence
  Description of Artificial Sequence: Synthetic oligonucleotide
gugcgcugaguugagacug

SEQ ID NO: 947919 - RNA, 19 nt, Artificial Sequence
  Description of Artificial Sequence: Synthetic oligonucleotide
ucccucgcacgacuccggg

SEQ ID NO: 947920 - RNA, 19 nt, Artificial Sequence
  Description of Artificial Sequence: Synthetic oligonucleotide
ugacaauugcuggcgggga

SEQ ID NO: 947921 - RNA, 19 nt, Artificial Sequence
  Description of Artificial Sequence: Synthetic oligonucleotide
aggcauuccuggaacuagg

SEQ ID NO: 947922 - RNA, 19 nt, Artificial Sequence
  Description of Artificial Sequence: Synthetic oligonucleotide
guaugaguagccuucucau

SEQ ID NO: 947923 - RNA, 19 nt, Artificial Sequence
  Description of Artificial Sequence: Synthetic oligonucleotide
gguaaggguaugaguagcc

SEQ ID NO: 947924 - RNA, 19 nt, Artificial Sequence
  Description of Artificial Sequence: Synthetic oligonucleotide
gagggcggggacuccaaac

SEQ ID NO: 947925 - RNA, 19 nt, Artificial Sequence
  Description of Artificial Sequence: Synthetic oligonucleotide
auggcccucccacauuugu

SEQ ID NO: 947926 - RNA, 19 nt, Artificial Sequence
  Description of Artificial Sequence: Synthetic oligonucleotide
gcccuuacgagcacgaggc

SEQ ID NO: 947927 - RNA, 19 nt, Artificial Sequence
  Description of Artificial Sequence: Synthetic oligonucleotide
guggguaccaggacagaug

SEQ ID NO: 947928 - RNA, 19 nt, Artificial Sequence
  Description of Artificial Sequence: Synthetic oligonucleotide
cuuaaguguccugauccca

SEQ ID NO: 947929 - RNA, 19 nt, Artificial Sequence
  Description of Artificial Sequence: Synthetic oligonucleotide
cagucacugguaguacucc

SEQ ID NO: 947930 - RNA, 19 nt, Artificial Sequence
  Description of Artificial Sequence: Synthetic oligonucleotide
aauggagcgcugacgucga

SEQ ID NO: 947931 - RNA, 19 nt, Artificial Sequence
  Description of Artificial Sequence: Synthetic oligonucleotide
guccacgcaguccuucagc

SEQ ID NO: 947932 - RNA, 19 nt, Artificial Sequence
  Description of Artificial Sequence: Synthetic oligonucleotide
gugauagugcaugccugag

SEQ ID NO: 947933 - RNA, 19 nt, Artificial Sequence
  Description of Artificial Sequence: Synthetic oligonucleotide
aucuuggcacgguacuuau

SEQ ID NO: 947934 - RNA, 19 nt, Artificial Sequence
  Description of Artificial Sequence: Synthetic oligonucleotide
ggggaagacgacaggagcc

SEQ ID NO: 947935 - RNA, 19 nt, Artificial Sequence
  Description of Artificial Sequence: Synthetic oligonucleotide
ccacuagugccacaagacc

SEQ ID NO: 947936 - RNA, 19 nt, Artificial Sequence
  Description of Artificial Sequence: Synthetic oligonucleotide
acgugagaucuugcaggcc

SEQ ID NO: 947937 - RNA, 19 nt, Artificial Sequence
  Description of Artificial Sequence: Synthetic oligonucleotide
uggguccagggcccaacug

SEQ ID NO: 947938 - RNA, 19 nt, Artificial Sequence
  Description of Artificial Sequence: Synthetic oligonucleotide
ccugagucggcuuggguac

SEQ ID NO: 947939 - RNA, 19 nt, Artificial Sequence
  Description of Artificial Sequence: Synthetic oligonucleotide
cacauccauucuaggcagc

SEQ ID NO: 947940 - RNA, 19 nt, Artificial Sequence
  Description of Artificial Sequence: Synthetic oligonucleotide
cacgguacuuauugcuguc

SEQ ID NO: 947941 - RNA, 19 nt, Artificial Sequence
  Description of Artificial Sequence: Synthetic oligonucleotide
cacugagcaccgagguuag

SEQ ID NO: 947942 - RNA, 19 nt, Artificial Sequence
  Description of Artificial Sequence: Synthetic oligonucleotide
gaaacgcuggccggugcgc

SEQ ID NO: 947943 - RNA, 19 nt, Artificial Sequence
  Description of Artificial Sequence: Synthetic oligonucleotide
gcaauccgcagguucacac

SEQ ID NO: 947944 - RNA, 19 nt, Artificial Sequence
  Description of Artificial Sequence: Synthetic oligonucleotide
cuugucccucgcacgacuc

SEQ ID NO: 947945 - RNA, 19 nt, Artificial Sequence
  Description of Artificial Sequence: Synthetic oligonucleotide
gcuuggguacugcuccugg

SEQ ID NO: 947946 - RNA, 19 nt, Artificial Sequence
  Description of Artificial Sequence: Synthetic oligonucleotide
acgaggcauuccuggaacu

SEQ ID NO: 947947 - RNA, 19 nt, Artificial Sequence
  Description of Artificial Sequence: Synthetic oligonucleotide
agccacacgccgcgcgcgc

SEQ ID NO: 947948 - RNA, 19 nt, Artificial Sequence
  Description of Artificial Sequence: Synthetic oligonucleotide
uggcuagaguaugcaagga

SEQ ID NO: 947949 - RNA, 19 nt, Artificial Sequence
  Description of Artificial Sequence: Synthetic oligonucleotide
cuucgugaggcgccccgcc

SEQ ID NO: 947950 - RNA, 19 nt, Artificial Sequence
  Description of Artificial Sequence: Synthetic oligonucleotide
gcgcauugcccuuacgagc

SEQ ID NO: 947951 - RNA, 19 nt, Artificial Sequence
  Description of Artificial Sequence: Synthetic oligonucleotide
gagguuagcagcggcugca

SEQ ID NO: 947952 - RNA, 19 nt, Artificial Sequence
  Description of Artificial Sequence: Synthetic oligonucleotide
gcuuugccuacccuauacc

SEQ ID NO: 947953 - RNA, 19 nt, Artificial Sequence
  Description of Artificial Sequence: Synthetic oligonucleotide
cucggaaaauggagcgcug

SEQ ID NO: 947954 - RNA, 19 nt, Artificial Sequence
  Description of Artificial Sequence: Synthetic oligonucleotide
cuaggcagcuuugccuacc

SEQ ID NO: 947955 - RNA, 19 nt, Artificial Sequence
  Description of Artificial Sequence: Synthetic oligonucleotide
cagcugccugucaaggaug

SEQ ID NO: 947956 - RNA, 19 nt, Artificial Sequence
  Description of Artificial Sequence: Synthetic oligonucleotide
cuccgcagugguacugagc

SEQ ID NO: 947957 - RNA, 19 nt, Artificial Sequence
  Description of Artificial Sequence: Synthetic oligonucleotide
agacgacaggagccacacg

SEQ ID NO: 947958 - RNA, 19 nt, Artificial Sequence
  Description of Artificial Sequence: Synthetic oligonucleotide
guucacacuuucacuggac

SEQ ID NO: 947959 - RNA, 19 nt, Artificial Sequence
  Description of Artificial Sequence: Synthetic oligonucleotide
gaagacgacaggagccaca

SEQ ID NO: 947960 - RNA, 19 nt, Artificial Sequence
  Description of Artificial Sequence: Synthetic oligonucleotide
aaacgcuggccggugcgcu

SEQ ID NO: 947961 - RNA, 19 nt, Artificial Sequence
  Description of Artificial Sequence: Synthetic oligonucleotide
gagcccagcugucuaugca

SEQ ID NO: 947962 - RNA, 19 nt, Artificial Sequence
  Description of Artificial Sequence: Synthetic oligonucleotide
gcaagcucaaagagcagug

SEQ ID NO: 947963 - RNA, 19 nt, Artificial Sequence
  Description of Artificial Sequence: Synthetic oligonucleotide
ccucgcacgacuccgggcc

SEQ ID NO: 947964 - RNA, 19 nt, Artificial Sequence
  Description of Artificial Sequence: Synthetic oligonucleotide
uccgagcuuugaaggcggc

SEQ ID NO: 947965 - RNA, 19 nt, Artificial Sequence
  Description of Artificial Sequence: Synthetic oligonucleotide
ccuggaacuaggagucggg

SEQ ID NO: 947966 - RNA, 19 nt, Artificial Sequence
  Description of Artificial Sequence: Synthetic oligonucleotide
auugcccuuacgagcacga

SEQ ID NO: 947967 - RNA, 19 nt, Artificial Sequence
  Description of Artificial Sequence: Synthetic oligonucleotide
ugacgucgacggucaaucu

SEQ ID NO: 947968 - RNA, 19 nt, Artificial Sequence
  Description of Artificial Sequence: Synthetic oligonucleotide
agucggcuuggguacugcu

SEQ ID NO: 947969 - RNA, 19 nt, Artificial Sequence
  Description of Artificial Sequence: Synthetic oligonucleotide
caggacagauggugagcag

SEQ ID NO: 947970 - RNA, 19 nt, Artificial Sequence
  Description of Artificial Sequence: Synthetic oligonucleotide
caaggucccgggcaagcuc

SEQ ID NO: 947971 - RNA, 19 nt, Artificial Sequence
  Description of Artificial Sequence: Synthetic oligonucleotide
gguuagcagcggcugcagg

SEQ ID NO: 947972 - RNA, 19 nt, Artificial Sequence
  Description of Artificial Sequence: Synthetic oligonucleotide
ucuucgugaggcgccccgc

SEQ ID NO: 947973 - RNA, 19 nt, Artificial Sequence
  Description of Artificial Sequence: Synthetic oligonucleotide
cuugcacugucuucuguua

SEQ ID NO: 947974 - RNA, 19 nt, Artificial Sequence
  Description of Artificial Sequence: Synthetic oligonucleotide
gcgcugaccgcccuugcgg

SEQ ID NO: 947975 - RNA, 19 nt, Artificial Sequence
  Description of Artificial Sequence: Synthetic oligonucleotide
uuacgagcacgaggcauuc

SEQ ID NO: 947976 - RNA, 19 nt, Artificial Sequence
  Description of Artificial Sequence: Synthetic oligonucleotide
ccuacccuauaccauggug

SEQ ID NO: 947977 - RNA, 19 nt, Artificial Sequence
  Description of Artificial Sequence: Synthetic oligonucleotide
gccacuagugccacaagac

SEQ ID NO: 947978 - RNA, 19 nt, Artificial Sequence
  Description of Artificial Sequence: Synthetic oligonucleotide
caaagggccagagucuuaa

SEQ ID NO: 947979 - RNA, 19 nt, Artificial Sequence
  Description of Artificial Sequence: Synthetic oligonucleotide
agaugcgguggcgagccca

SEQ ID NO: 947980 - RNA, 19 nt, Artificial Sequence
  Description of Artificial Sequence: Synthetic oligonucleotide
ggcuagaguaugcaaggaa

SEQ ID NO: 947981 - RNA, 19 nt, Artificial Sequence
  Description of Artificial Sequence: Synthetic oligonucleotide
gagccacuagugccacaag

SEQ ID NO: 947982 - RNA, 19 nt, Artificial Sequence
  Description of Artificial Sequence: Synthetic oligonucleotide
gcuucacaagacaucugcc

SEQ ID NO: 947983 - RNA, 19 nt, Artificial Sequence
  Description of Artificial Sequence: Synthetic oligonucleotide
cuugucggugaggcagucc

SEQ ID NO: 947984 - RNA, 19 nt, Artificial Sequence
  Description of Artificial Sequence: Synthetic oligonucleotide
gcucgcauuugguuucacc

SEQ ID NO: 947985 - RNA, 19 nt, Artificial Sequence
  Description of Artificial Sequence: Synthetic oligonucleotide
cugaccgcccuugcggagc

SEQ ID NO: 947986 - RNA, 19 nt, Artificial Sequence
  Description of Artificial Sequence: Synthetic oligonucleotide
aauugcuggcggggaccag

SEQ ID NO: 947987 - RNA, 19 nt, Artificial Sequence
  Description of Artificial Sequence: Synthetic oligonucleotide
ugagucggcuuggguacug

SEQ ID NO: 947988 - RNA, 19 nt, Artificial Sequence
  Description of Artificial Sequence: Synthetic oligonucleotide
aguccaaagcggauuguuu

SEQ ID NO: 947989 - RNA, 19 nt, Artificial Sequence
  Description of Artificial Sequence: Synthetic oligonucleotide
caauggagccgggcagugg

SEQ ID NO: 947990 - RNA, 19 nt, Artificial Sequence
  Description of Artificial Sequence: Synthetic oligonucleotide
gaguugagacuggggaaga

SEQ ID NO: 947991 - RNA, 19 nt, Artificial Sequence
  Description of Artificial Sequence: Synthetic oligonucleotide
ugaaggcggcagcauugua

SEQ ID NO: 947992 - RNA, 19 nt, Artificial Sequence
  Description of Artificial Sequence: Synthetic oligonucleotide
uggccggugcgcugaguug

SEQ ID NO: 947993 - RNA, 19 nt, Artificial Sequence
  Description of Artificial Sequence: Synthetic oligonucleotide
gucgacggucaaucuuggc

SEQ ID NO: 947994 - RNA, 19 nt, Artificial Sequence
  Description of Artificial Sequence: Synthetic oligonucleotide
aggguaugaguagccuucu

SEQ ID NO: 947995 - RNA, 19 nt, Artificial Sequence
  Description of Artificial Sequence: Synthetic oligonucleotide
gagccacacgccgcgcgcg

SEQ ID NO: 947996 - RNA, 19 nt, Artificial Sequence
  Description of Artificial Sequence: Synthetic oligonucleotide
gagaucuugcaggccuuca

SEQ ID NO: 947997 - RNA, 19 nt, Artificial Sequence
  Description of Artificial Sequence: Synthetic oligonucleotide
ugccugagcccaacacauc

SEQ ID NO: 947998 - RNA, 19 nt, Artificial Sequence
  Description of Artificial Sequence: Synthetic oligonucleotide
cuuacgagcacgaggcauu

SEQ ID NO: 947999 - RNA, 19 nt, Artificial Sequence
  Description of Artificial Sequence: Synthetic oligonucleotide
caggcgcaggcucucaaga

SEQ ID NO: 948000 - RNA, 19 nt, Artificial Sequence
  Description of Artificial Sequence: Synthetic oligonucleotide
cccuauaccaugguggaca

SEQ ID NO: 948001 - RNA, 19 nt, Artificial Sequence
  Description of Artificial Sequence: Synthetic oligonucleotide
accgagguuagcagcggcu

SEQ ID NO: 948002 - RNA, 19 nt, Artificial Sequence
  Description of Artificial Sequence: Synthetic oligonucleotide
auggagcgcugacgucgac

SEQ ID NO: 948003 - RNA, 19 nt, Artificial Sequence
  Description of Artificial Sequence: Synthetic oligonucleotide
guaaggguaugaguagccu

SEQ ID NO: 948004 - RNA, 19 nt, Artificial Sequence
  Description of Artificial Sequence: Synthetic oligonucleotide
ggcucucaagagcuccuug

SEQ ID NO: 948005 - RNA, 19 nt, Artificial Sequence
  Description of Artificial Sequence: Synthetic oligonucleotide
agcgaaacgcuggccggug

SEQ ID NO: 948006 - RNA, 19 nt, Artificial Sequence
  Description of Artificial Sequence: Synthetic oligonucleotide
cauggcccucccacauuug

SEQ ID NO: 948007 - RNA, 19 nt, Artificial Sequence
  Description of Artificial Sequence: Synthetic oligonucleotide
gacgucgacggucaaucuu

SEQ ID NO: 948008 - RNA, 19 nt, Artificial Sequence
  Description of Artificial Sequence: Synthetic oligonucleotide
auaccaugguggacaggug

SEQ ID NO: 948009 - RNA, 19 nt, Artificial Sequence
  Description of Artificial Sequence: Synthetic oligonucleotide
gagucggcuuggguacugc

SEQ ID NO: 948010 - RNA, 19 nt, Artificial Sequence
  Description of Artificial Sequence: Synthetic oligonucleotide
caggugcuuuucaaaacgu

SEQ ID NO: 948011 - RNA, 19 nt, Artificial Sequence
  Description of Artificial Sequence: Synthetic oligonucleotide
cagugcgauggcuucccca

SEQ ID NO: 948012 - RNA, 19 nt, Artificial Sequence
  Description of Artificial Sequence: Synthetic oligonucleotide
uggcgagcccagcugucua

SEQ ID NO: 948013 - RNA, 19 nt, Artificial Sequence
  Description of Artificial Sequence: Synthetic oligonucleotide
cauuggccagucagcuuca

SEQ ID NO: 948014 - RNA, 19 nt, Artificial Sequence
  Description of Artificial Sequence: Synthetic oligonucleotide
gucggcuuggguacugcuc

SEQ ID NO: 948015 - RNA, 19 nt, Artificial Sequence
  Description of Artificial Sequence: Synthetic oligonucleotide
agcaauccgcagguucaca

SEQ ID NO: 948016 - RNA, 19 nt, Artificial Sequence
  Description of Artificial Sequence: Synthetic oligonucleotide
caguggcuagaguaugcaa

SEQ ID NO: 948017 - RNA, 19 nt, Artificial Sequence
  Description of Artificial Sequence: Synthetic oligonucleotide
ucuugucggugaggcaguc

SEQ ID NO: 948018 - RNA, 19 nt, Artificial Sequence
  Description of Artificial Sequence: Synthetic oligonucleotide
cacccucaacgaagugcag

SEQ ID NO: 948019 - RNA, 19 nt, Artificial Sequence
  Description of Artificial Sequence: Synthetic oligonucleotide
ccauucuaggcagcuuugc

SEQ ID NO: 948020 - RNA, 19 nt, Artificial Sequence
  Description of Artificial Sequence: Synthetic oligonucleotide
ggcggggaccaguucuugc

SEQ ID NO: 948021 - RNA, 19 nt, Artificial Sequence
  Description of Artificial Sequence: Synthetic oligonucleotide
agcucgcauuugguuucac

SEQ ID NO: 948022 - RNA, 19 nt, Artificial Sequence
  Description of Artificial Sequence: Synthetic oligonucleotide
ccaagcaggucaagcaaga

SEQ ID NO: 948023 - RNA, 19 nt, Artificial Sequence
  Description of Artificial Sequence: Synthetic oligonucleotide
ugaggcgccccgcccuguc

SEQ ID NO: 948024 - RNA, 19 nt, Artificial Sequence
  Description of Artificial Sequence: Synthetic oligonucleotide
caauccgcagguucacacu

SEQ ID NO: 948025 - RNA, 19 nt, Artificial Sequence
  Description of Artificial Sequence: Synthetic oligonucleotide
acacgccgcgcgcgccacc

SEQ ID NO: 948026 - RNA, 19 nt, Artificial Sequence
  Description of Artificial Sequence: Synthetic oligonucleotide
cagcaauccgcagguucac

SEQ ID NO: 948027 - RNA, 19 nt, Artificial Sequence
  Description of Artificial Sequence: Synthetic oligonucleotide
cuuugaaggcggcagcauu

SEQ ID NO: 948028 - RNA, 19 nt, Artificial Sequence
  Description of Artificial Sequence: Synthetic oligonucleotide
cgcgccaccaucuucguga

SEQ ID NO: 948029 - RNA, 19 nt, Artificial Sequence
  Description of Artificial Sequence: Synthetic oligonucleotide
cgaaacgcuggccggugcg

SEQ ID NO: 948030 - RNA, 19 nt, Artificial Sequence
  Description of Artificial Sequence: Synthetic oligonucleotide
cugucuaugcagagcacuu

SEQ ID NO: 948031 - RNA, 19 nt, Artificial Sequence
  Description of Artificial Sequence: Synthetic oligonucleotide
ggagcgcauugcccuuacg

SEQ ID NO: 948032 - RNA, 19 nt, Artificial Sequence
  Description of Artificial Sequence: Synthetic oligonucleotide
cugaucccauggcccuccc

SEQ ID NO: 948033 - RNA, 19 nt, Artificial Sequence
  Description of Artificial Sequence: Synthetic oligonucleotide
caucuucgugaggcgcccc

SEQ ID NO: 948034 - RNA, 19 nt, Artificial Sequence
  Description of Artificial Sequence: Synthetic oligonucleotide
gcaggucaagcaagagacc

SEQ ID NO: 948035 - RNA, 19 nt, Artificial Sequence
  Description of Artificial Sequence: Synthetic oligonucleotide
ugcuggcggggaccaguuc

SEQ ID NO: 948036 - RNA, 19 nt, Artificial Sequence
  Description of Artificial Sequence: Synthetic oligonucleotide
cacucuugucggugaggca

SEQ ID NO: 948037 - RNA, 19 nt, Artificial Sequence
  Description of Artificial Sequence: Synthetic oligonucleotide
gcuggcggggaccaguucu

SEQ ID NO: 948038 - RNA, 19 nt, Artificial Sequence
  Description of Artificial Sequence: Synthetic oligonucleotide
gcacgguacuuauugcugu

SEQ ID NO: 948039 - RNA, 19 nt, Artificial Sequence
  Description of Artificial Sequence: Synthetic oligonucleotide
ggcauuccuggaacuagga

SEQ ID NO: 948040 - RNA, 19 nt, Artificial Sequence
  Description of Artificial Sequence: Synthetic oligonucleotide
ggcacuuuuccagggcauc

SEQ ID NO: 948041 - RNA, 19 nt, Artificial Sequence
  Description of Artificial Sequence: Synthetic oligonucleotide
cggugcgcugaguugagac

SEQ ID NO: 948042 - RNA, 19 nt, Artificial Sequence
  Description of Artificial Sequence: Synthetic oligonucleotide
gcugucuaugcagagcacu

SEQ ID NO: 948043 - RNA, 19 nt, Artificial Sequence
  Description of Artificial Sequence: Synthetic oligonucleotide
augcgguggcgagcccagc

SEQ ID NO: 948044 - RNA, 19 nt, Artificial Sequence
  Description of Artificial Sequence: Synthetic oligonucleotide
acaagacaucugcccgcuu

SEQ ID NO: 948045 - RNA, 19 nt, Artificial Sequence
  Description of Artificial Sequence: Synthetic oligonucleotide
ggcgcggggucagggaccg

SEQ ID NO: 948046 - RNA, 19 nt, Artificial Sequence
  Description of Artificial Sequence: Synthetic oligonucleotide
ggugcgcugaguugagacu

SEQ ID NO: 948047 - RNA, 19 nt, Artificial Sequence
  Description of Artificial Sequence: Synthetic oligonucleotide
gcggcagcauuguacaggu

SEQ ID NO: 948048 - RNA, 19 nt, Artificial Sequence
  Description of Artificial Sequence: Synthetic oligonucleotide
gcugaccgcccuugcggag

SEQ ID NO: 948049 - RNA, 19 nt, Artificial Sequence
  Description of Artificial Sequence: Synthetic oligonucleotide
caccacccucaacgaagug

SEQ ID NO: 948050 - RNA, 19 nt, Artificial Sequence
  Description of Artificial Sequence: Synthetic oligonucleotide
gguaguacuccgggccuca

SEQ ID NO: 948051 - RNA, 19 nt, Artificial Sequence
  Description of Artificial Sequence: Synthetic oligonucleotide
gguacugagcaggcuggga

SEQ ID NO: 948052 - RNA, 19 nt, Artificial Sequence
  Description of Artificial Sequence: Synthetic oligonucleotide
cugccagcgugaggcugcg

SEQ ID NO: 948053 - RNA, 19 nt, Artificial Sequence
  Description of Artificial Sequence: Synthetic oligonucleotide
ccagcgugaggcugcguuc

SEQ ID NO: 948054 - RNA, 19 nt, Artificial Sequence
  Description of Artificial Sequence: Synthetic oligonucleotide
ggagucggggacacgguaa

SEQ ID NO: 948055 - RNA, 19 nt, Artificial Sequence
  Description of Artificial Sequence: Synthetic oligonucleotide
ggguaugaguagccuucuc

SEQ ID NO: 948056 - RNA, 19 nt, Artificial Sequence
  Description of Artificial Sequence: Synthetic oligonucleotide
gcgguggcgagcccagcug

SEQ ID NO: 948057 - RNA, 19 nt, Artificial Sequence
  Description of Artificial Sequence: Synthetic oligonucleotide
cgucgacggucaaucuugg

SEQ ID NO: 948058 - RNA, 19 nt, Artificial Sequence
  Description of Artificial Sequence: Synthetic oligonucleotide
ccgagguuagcagcggcug

SEQ ID NO: 948059 - RNA, 19 nt, Artificial Sequence
  Description of Artificial Sequence: Synthetic oligonucleotide
cagcggcugcaggcuaugg

SEQ ID NO: 948060 - RNA, 19 nt, Artificial Sequence
  Description of Artificial Sequence: Synthetic oligonucleotide
gcacgaggcauuccuggaa

SEQ ID NO: 948061 - RNA, 19 nt, Artificial Sequence
  Description of Artificial Sequence: Synthetic oligonucleotide
cgagguuagcagcggcugc

SEQ ID NO: 948062 - RNA, 19 nt, Artificial Sequence
  Description of Artificial Sequence: Synthetic oligonucleotide
guaguacuccgggccucac

SEQ ID NO: 948063 - RNA, 19 nt, Artificial Sequence
  Description of Artificial Sequence: Synthetic oligonucleotide
ggccggugcgcugaguuga

SEQ ID NO: 948064 - RNA, 19 nt, Artificial Sequence
  Description of Artificial Sequence: Synthetic oligonucleotide
cagggaccgggagggcggg

SEQ ID NO: 948065 - RNA, 19 nt, Artificial Sequence
  Description of Artificial Sequence: Synthetic oligonucleotide
ccuccgcagugguacugag

SEQ ID NO: 948066 - RNA, 19 nt, Artificial Sequence
  Description of Artificial Sequence: Synthetic oligonucleotide
cacaaagggccagagucuu

SEQ ID NO: 948067 - RNA, 19 nt, Artificial Sequence
  Description of Artificial Sequence: Synthetic oligonucleotide
cuccgggccuugguccgag

SEQ ID NO: 948068 - RNA, 19 nt, Artificial Sequence
  Description of Artificial Sequence: Synthetic oligonucleotide
gggcaucugccagcgugag

SEQ ID NO: 948069 - RNA, 19 nt, Artificial Sequence
  Description of Artificial Sequence: Synthetic oligonucleotide
gcagugcgauggcuucccc

SEQ ID NO: 948070 - RNA, 19 nt, Artificial Sequence
  Description of Artificial Sequence: Synthetic oligonucleotide
cccucgcacgacuccgggc

SEQ ID NO: 948071 - RNA, 19 nt, Artificial Sequence
  Description of Artificial Sequence: Synthetic oligonucleotide
gcuugucccucgcacgacu

SEQ ID NO: 948072 - RNA, 19 nt, Artificial Sequence
  Description of Artificial Sequence: Synthetic oligonucleotide
auccgcagguucacacuuu

SEQ ID NO: 948073 - RNA, 19 nt, Artificial Sequence
  Description of Artificial Sequence: Synthetic oligonucleotide
gcauugcccuuacgagcac

SEQ ID NO: 948074 - RNA, 19 nt, Artificial Sequence
  Description of Artificial Sequence: Synthetic oligonucleotide
cuggccggugcgcugaguu

SEQ ID NO: 948075 - RNA, 19 nt, Artificial Sequence
  Description of Artificial Sequence: Synthetic oligonucleotide
cucauuggccagucagcuu

SEQ ID NO: 948076 - RNA, 19 nt, Artificial Sequence
  Description of Artificial Sequence: Synthetic oligonucleotide
ccuugguccgagcuuugaa

SEQ ID NO: 948077 - RNA, 19 nt, Artificial Sequence
  Description of Artificial Sequence: Synthetic oligonucleotide
ccucaacgaagugcagcac

SEQ ID NO: 948078 - RNA, 19 nt, Artificial Sequence
  Description of Artificial Sequence: Synthetic oligonucleotide
caguccaaagcggauuguu

SEQ ID NO: 948079 - RNA, 19 nt, Artificial Sequence
  Description of Artificial Sequence: Synthetic oligonucleotide
ucgcacgacuccgggccuu

SEQ ID NO: 948080 - RNA, 19 nt, Artificial Sequence
  Description of Artificial Sequence: Synthetic oligonucleotide
caucugcccgcuugucccu

SEQ ID NO: 948081 - RNA, 19 nt, Artificial Sequence
  Description of Artificial Sequence: Synthetic oligonucleotide
ggacuccaaaccagcgaaa

SEQ ID NO: 948082 - RNA, 19 nt, Artificial Sequence
  Description of Artificial Sequence: Synthetic oligonucleotide
ccgcuugucccucgcacga

SEQ ID NO: 948083 - RNA, 19 nt, Artificial Sequence
  Description of Artificial Sequence: Synthetic oligonucleotide
cacacgccgcgcgcgccac

SEQ ID NO: 948084 - RNA, 19 nt, Artificial Sequence
  Description of Artificial Sequence: Synthetic oligonucleotide
cagcucgcauuugguuuca

SEQ ID NO: 948085 - RNA, 19 nt, Artificial Sequence
  Description of Artificial Sequence: Synthetic oligonucleotide
ggguagcggcauccagcac

SEQ ID NO: 948086 - RNA, 19 nt, Artificial Sequence
  Description of Artificial Sequence: Synthetic oligonucleotide
gguggcgagcccagcuguc

SEQ ID NO: 948087 - RNA, 19 nt, Artificial Sequence
  Description of Artificial Sequence: Synthetic oligonucleotide
cacgacuccgggccuuggu

SEQ ID NO: 948088 - RNA, 19 nt, Artificial Sequence
  Description of Artificial Sequence: Synthetic oligonucleotide
gcagaccauguaggcuggc

SEQ ID NO: 948089 - RNA, 19 nt, Artificial Sequence
  Description of Artificial Sequence: Synthetic oligonucleotide
cacggagaagcucguuguu

SEQ ID NO: 948090 - RNA, 19 nt, Artificial Sequence
  Description of Artificial Sequence: Synthetic oligonucleotide
cuccucgcccuugggucca

SEQ ID NO: 948091 - RNA, 19 nt, Artificial Sequence
  Description of Artificial Sequence: Synthetic oligonucleotide
gcgcugacgucgacgguca

SEQ ID NO: 948092 - RNA, 19 nt, Artificial Sequence
  Description of Artificial Sequence: Synthetic oligonucleotide
cuggaaccugagucggcuu

SEQ ID NO: 948093 - RNA, 19 nt, Artificial Sequence
  Description of Artificial Sequence: Synthetic oligonucleotide
gagcgcugacgucgacggu

SEQ ID NO: 948094 - RNA, 19 nt, Artificial Sequence
  Description of Artificial Sequence: Synthetic oligonucleotide
gccggugcgcugaguugag

SEQ ID NO: 948095 - RNA, 19 nt, Artificial Sequence
  Description of Artificial Sequence: Synthetic oligonucleotide
cagcgaaacgcuggccggu

SEQ ID NO: 948096 - RNA, 19 nt, Artificial Sequence
  Description of Artificial Sequence: Synthetic oligonucleotide
ccuuacgagcacgaggcau

SEQ ID NO: 948097 - RNA, 19 nt, Artificial Sequence
  Description of Artificial Sequence: Synthetic oligonucleotide
gaccgcccuugcggagcgc

SEQ ID NO: 948098 - RNA, 19 nt, Artificial Sequence
  Description of Artificial Sequence: Synthetic oligonucleotide
gcguuccagcaggaaguca

SEQ ID NO: 948099 - RNA, 19 nt, Artificial Sequence
  Description of Artificial Sequence: Synthetic oligonucleotide
cucgcacgacuccgggccu

SEQ ID NO: 948100 - RNA, 19 nt, Artificial Sequence
  Description of Artificial Sequence: Synthetic oligonucleotide
cagugguacugagcaggcu

SEQ ID NO: 948101 - RNA, 19 nt, Artificial Sequence
  Description of Artificial Sequence: Synthetic oligonucleotide
ggcgagcccagcugucuau

SEQ ID NO: 948102 - RNA, 19 nt, Artificial Sequence
  Description of Artificial Sequence: Synthetic oligonucleotide
gggccuugguccgagcuuu

SEQ ID NO: 948103 - RNA, 19 nt, Artificial Sequence
  Description of Artificial Sequence: Synthetic oligonucleotide
gccuacccuauaccauggu

SEQ ID NO: 948104 - RNA, 19 nt, Artificial Sequence
  Description of Artificial Sequence: Synthetic oligonucleotide
cugagucggcuuggguacu

SEQ ID NO: 948105 - RNA, 19 nt, Artificial Sequence
  Description of Artificial Sequence: Synthetic oligonucleotide
guggggcuugcugcacugu

SEQ ID NO: 948106 - RNA, 19 nt, Artificial Sequence
  Description of Artificial Sequence: Synthetic oligonucleotide
cgugaggcgccccgcccug

SEQ ID NO: 948107 - RNA, 19 nt, Artificial Sequence
  Description of Artificial Sequence: Synthetic oligonucleotide
cgcugaccgcccuugcgga

SEQ ID NO: 948108 - RNA, 19 nt, Artificial Sequence
  Description of Artificial Sequence: Synthetic oligonucleotide
cccuuacgagcacgaggca

SEQ ID NO: 948109 - RNA, 19 nt, Artificial Sequence
  Description of Artificial Sequence: Synthetic oligonucleotide
gcugacgucgacggucaau

SEQ ID NO: 948110 - RNA, 19 nt, Artificial Sequence
  Description of Artificial Sequence: Synthetic oligonucleotide
cggagcgcauugcccuuac

SEQ ID NO: 948111 - RNA, 19 nt, Artificial Sequence
  Description of Artificial Sequence: Synthetic oligonucleotide
cggauuguuucuuccucau

SEQ ID NO: 948112 - RNA, 19 nt, Artificial Sequence
  Description of Artificial Sequence: Synthetic oligonucleotide
cgaggcauuccuggaacua

SEQ ID NO: 948113 - RNA, 19 nt, Artificial Sequence
  Description of Artificial Sequence: Synthetic oligonucleotide
gccggggcagcugccuguc

SEQ ID NO: 948114 - RNA, 19 nt, Artificial Sequence
  Description of Artificial Sequence: Synthetic oligonucleotide
cgcuugucccucgcacgac

SEQ ID NO: 948115 - RNA, 19 nt, Artificial Sequence
  Description of Artificial Sequence: Synthetic oligonucleotide
cccucccacauuugucuau

SEQ ID NO: 948116 - RNA, 19 nt, Artificial Sequence
  Description of Artificial Sequence: Synthetic oligonucleotide
ggguaccaggacagauggu

SEQ ID NO: 948117 - RNA, 19 nt, Artificial Sequence
  Description of Artificial Sequence: Synthetic oligonucleotide
ccggaccagcucgcauuug

SEQ ID NO: 948118 - RNA, 19 nt, Artificial Sequence
  Description of Artificial Sequence: Synthetic oligonucleotide
ggucccgggcaagcucaaa

SEQ ID NO: 948119 - RNA, 19 nt, Artificial Sequence
  Description of Artificial Sequence: Synthetic oligonucleotide
gcggagcgcauugcccuua

SEQ ID NO: 948120 - RNA, 19 nt, Artificial Sequence
  Description of Artificial Sequence: Synthetic oligonucleotide
ccucccacauuugucuauu

SEQ ID NO: 948121 - RNA, 19 nt, Artificial Sequence
  Description of Artificial Sequence: Synthetic oligonucleotide
gugaggcgccccgcccugu

SEQ ID NO: 948122 - RNA, 19 nt, Artificial Sequence
  Description of Artificial Sequence: Synthetic oligonucleotide
ccaguccaaagcggauugu

SEQ ID NO: 948123 - RNA, 19 nt, Artificial Sequence
  Description of Artificial Sequence: Synthetic oligonucleotide
cacggcgcugaccgcccuu

SEQ ID NO: 948124 - RNA, 19 nt, Artificial Sequence
  Description of Artificial Sequence: Synthetic oligonucleotide
cccggaccagcucgcauuu

SEQ ID NO: 948125 - RNA, 19 nt, Artificial Sequence
  Description of Artificial Sequence: Synthetic oligonucleotide
cgguggcgagcccagcugu

SEQ ID NO: 948126 - RNA, 19 nt, Artificial Sequence
  Description of Artificial Sequence: Synthetic oligonucleotide
ccggugcgcugaguugaga

SEQ ID NO: 948127 - RNA, 19 nt, Artificial Sequence
  Description of Artificial Sequence: Synthetic oligonucleotide
ggcaguccacgcaguccuu

SEQ ID NO: 948128 - RNA, 19 nt, Artificial Sequence
  Description of Artificial Sequence: Synthetic oligonucleotide
cgcugacgucgacggucaa

SEQ ID NO: 948129 - RNA, 19 nt, Artificial Sequence
  Description of Artificial Sequence: Synthetic oligonucleotide
aaagauuuacagcagccac

SEQ ID NO: 948130 - RNA, 19 nt, Artificial Sequence
  Description of Artificial Sequence: Synthetic oligonucleotide
ugagcugacaccaagacac

SEQ ID NO: 948131 - RNA, 19 nt, Artificial Sequence
  Description of Artificial Sequence: Synthetic oligonucleotide
cuaggaaucaggaaugggg

SEQ ID NO: 948132 - RNA, 19 nt, Artificial Sequence
  Description of Artificial Sequence: Synthetic oligonucleotide
ucuucuaggaaucaggaau

SEQ ID NO: 948133 - RNA, 19 nt, Artificial Sequence
  Description of Artificial Sequence: Synthetic oligonucleotide
cuuguaucgguuuacuucc

SEQ ID NO: 948134 - RNA, 19 nt, Artificial Sequence
  Description of Artificial Sequence: Synthetic oligonucleotide
aguguggugacguagggag

SEQ ID NO: 948135 - RNA, 19 nt, Artificial Sequence
  Description of Artificial Sequence: Synthetic oligonucleotide
aaccuguucuugaugaucc

SEQ ID NO: 948136 - RNA, 19 nt, Artificial Sequence
  Description of Artificial Sequence: Synthetic oligonucleotide
aaacauaccggcaagccag

SEQ ID NO: 948137 - RNA, 19 nt, Artificial Sequence
  Description of Artificial Sequence: Synthetic oligonucleotide
aaccucugaaccuuuucac

SEQ ID NO: 948138 - RNA, 19 nt, Artificial Sequence
  Description of Artificial Sequence: Synthetic oligonucleotide
gauuggagugaccauaaug

SEQ ID NO: 948139 - RNA, 19 nt, Artificial Sequence
  Description of Artificial Sequence: Synthetic oligonucleotide
agcggguaccacuucaucc

SEQ ID NO: 948140 - RNA, 19 nt, Artificial Sequence
  Description of Artificial Sequence: Synthetic oligonucleotide
acgagguccaccuugaagu

SEQ ID NO: 948141 - RNA, 19 nt, Artificial Sequence
  Description of Artificial Sequence: Synthetic oligonucleotide
ugacguagggagcagcggg

SEQ ID NO: 948142 - RNA, 19 nt, Artificial Sequence
  Description of Artificial Sequence: Synthetic oligonucleotide
auaccggcaagccagcacg

SEQ ID NO: 948143 - RNA, 19 nt, Artificial Sequence
  Description of Artificial Sequence: Synthetic oligonucleotide
uguagaaacugggacaccc

SEQ ID NO: 948144 - RNA, 19 nt, Artificial Sequence
  Description of Artificial Sequence: Synthetic oligonucleotide
aaaagauuuacagcagcca

SEQ ID NO: 948145 - RNA, 19 nt, Artificial Sequence
  Description of Artificial Sequence: Synthetic oligonucleotide
acaagagguccccaaaguc

SEQ ID NO: 948146 - RNA, 19 nt, Artificial Sequence
  Description of Artificial Sequence: Synthetic oligonucleotide
gaugucuguagaaacuggg

SEQ ID NO: 948147 - RNA, 19 nt, Artificial Sequence
  Description of Artificial Sequence: Synthetic oligonucleotide
augucauugccaugaacac

SEQ ID NO: 948148 - RNA, 19 nt, Artificial Sequence
  Description of Artificial Sequence: Synthetic oligonucleotide
ugcacgaucaggucuguag

SEQ ID NO: 948149 - RNA, 19 nt, Artificial Sequence
  Description of Artificial Sequence: Synthetic oligonucleotide
caugucauagcagccaucg

SEQ ID NO: 948150 - RNA, 19 nt, Artificial Sequence
  Description of Artificial Sequence: Synthetic oligonucleotide
ucgguuuacuuccugguca

SEQ ID NO: 948151 - RNA, 19 nt, Artificial Sequence
  Description of Artificial Sequence: Synthetic oligonucleotide
cugauuccgagcuucauac

SEQ ID NO: 948152 - RNA, 19 nt, Artificial Sequence
  Description of Artificial Sequence: Synthetic oligonucleotide
agaagcuaggcaguguccc

SEQ ID NO: 948153 - RNA, 19 nt, Artificial Sequence
  Description of Artificial Sequence: Synthetic oligonucleotide
ucaacgugaugucauugcc

SEQ ID NO: 948154 - RNA, 19 nt, Artificial Sequence
  Description of Artificial Sequence: Synthetic oligonucleotide
uaggaaucaggaauggggu

SEQ ID NO: 948155 - RNA, 19 nt, Artificial Sequence
  Description of Artificial Sequence: Synthetic oligonucleotide
uuuacuuccuggucaaagu

SEQ ID NO: 948156 - RNA, 19 nt, Artificial Sequence
  Description of Artificial Sequence: Synthetic oligonucleotide
cacauagcaauacuccucc

SEQ ID NO: 948157 - RNA, 19 nt, Artificial Sequence
  Description of Artificial Sequence: Synthetic oligonucleotide
aucucggccaucuacuguc

SEQ ID NO: 948158 - RNA, 19 nt, Artificial Sequence
  Description of Artificial Sequence: Synthetic oligonucleotide
aguauggcgccccaaucac

SEQ ID NO: 948159 - RNA, 19 nt, Artificial Sequence
  Description of Artificial Sequence: Synthetic oligonucleotide
cugagguacaaaaugagga

SEQ ID NO: 948160 - RNA, 19 nt, Artificial Sequence
  Description of Artificial Sequence: Synthetic oligonucleotide
uugaugauccuuugcacga

SEQ ID NO: 948161 - RNA, 19 nt, Artificial Sequence
  Description of Artificial Sequence: Synthetic oligonucleotide
ugugcagagaacagucaag

SEQ ID NO: 948162 - RNA, 19 nt, Artificial Sequence
  Description of Artificial Sequence: Synthetic oligonucleotide
uucugaaacauaccggcaa

SEQ ID NO: 948163 - RNA, 19 nt, Artificial Sequence
  Description of Artificial Sequence: Synthetic oligonucleotide
agguaucucggccaucuac

SEQ ID NO: 948164 - RNA, 19 nt, Artificial Sequence
  Description of Artificial Sequence: Synthetic oligonucleotide
cagcauucgacccacgagg

SEQ ID NO: 948165 - RNA, 19 nt, Artificial Sequence
  Description of Artificial Sequence: Synthetic oligonucleotide
auagcaauacuccuccagu

SEQ ID NO: 948166 - RNA, 19 nt, Artificial Sequence
  Description of Artificial Sequence: Synthetic oligonucleotide
ucugaggaaaguguguccc

SEQ ID NO: 948167 - RNA, 19 nt, Artificial Sequence
  Description of Artificial Sequence: Synthetic oligonucleotide
caagccagcacgcucagag

SEQ ID NO: 948168 - RNA, 19 nt, Artificial Sequence
  Description of Artificial Sequence: Synthetic oligonucleotide
ucacuagcagcauucgacc

SEQ ID NO: 948169 - RNA, 19 nt, Artificial Sequence
  Description of Artificial Sequence: Synthetic oligonucleotide
uuguauuuguccagugucu

SEQ ID NO: 948170 - RNA, 19 nt, Artificial Sequence
  Description of Artificial Sequence: Synthetic oligonucleotide
guaucgguuuacuuccugg

SEQ ID NO: 948171 - RNA, 19 nt, Artificial Sequence
  Description of Artificial Sequence: Synthetic oligonucleotide
uuccucguagguaucucgg

SEQ ID NO: 948172 - RNA, 19 nt, Artificial Sequence
  Description of Artificial Sequence: Synthetic oligonucleotide
aguccgcucaugcagguuc

SEQ ID NO: 948173 - RNA, 19 nt, Artificial Sequence
  Description of Artificial Sequence: Synthetic oligonucleotide
gaagauuccucuccucuug

SEQ ID NO: 948174 - RNA, 19 nt, Artificial Sequence
  Description of Artificial Sequence: Synthetic oligonucleotide
uguaggccggcgaugaugu

SEQ ID NO: 948175 - RNA, 19 nt, Artificial Sequence
  Description of Artificial Sequence: Synthetic oligonucleotide
aggaauggggugcuagaac

SEQ ID NO: 948176 - RNA, 19 nt, Artificial Sequence
  Description of Artificial Sequence: Synthetic oligonucleotide
gucagcauauucccgauac

SEQ ID NO: 948177 - RNA, 19 nt, Artificial Sequence
  Description of Artificial Sequence: Synthetic oligonucleotide
uacgagguccaccuugaag

SEQ ID NO: 948178 - RNA, 19 nt, Artificial Sequence
  Description of Artificial Sequence: Synthetic oligonucleotide
uggucaaaguguaggccgg

SEQ ID NO: 948179 - RNA, 19 nt, Artificial Sequence
  Description of Artificial Sequence: Synthetic oligonucleotide
aagcugauuggagugacca

SEQ ID NO: 948180 - RNA, 19 nt, Artificial Sequence
  Description of Artificial Sequence: Synthetic oligonucleotide
acauacgagguccaccuug

SEQ ID NO: 948181 - RNA, 19 nt, Artificial Sequence
  Description of Artificial Sequence: Synthetic oligonucleotide
ugcccaauguggaacaggu

SEQ ID NO: 948182 - RNA, 19 nt, Artificial Sequence
  Description of Artificial Sequence: Synthetic oligonucleotide
aaguccacgugcccaaugu

SEQ ID NO: 948183 - RNA, 19 nt, Artificial Sequence
  Description of Artificial Sequence: Synthetic oligonucleotide
cuuugcacgaucaggucug

SEQ ID NO: 948184 - RNA, 19 nt, Artificial Sequence
  Description of Artificial Sequence: Synthetic oligonucleotide
ucuaggaaucaggaauggg

SEQ ID NO: 948185 - RNA, 19 nt, Artificial Sequence
  Description of Artificial Sequence: Synthetic oligonucleotide
aggagcucugcugugaccg

SEQ ID NO: 948186 - RNA, 19 nt, Artificial Sequence
  Description of Artificial Sequence: Synthetic oligonucleotide
ugcuuauccuguccacugg

SEQ ID NO: 948187 - RNA, 19 nt, Artificial Sequence
  Description of Artificial Sequence: Synthetic oligonucleotide
gaaacauaccggcaagcca

SEQ ID NO: 948188 - RNA, 19 nt, Artificial Sequence
  Description of Artificial Sequence: Synthetic oligonucleotide
auacuccgaggacaucucc

SEQ ID NO: 948189 - RNA, 19 nt, Artificial Sequence
  Description of Artificial Sequence: Synthetic oligonucleotide
aggguacccacuugcaggg

SEQ ID NO: 948190 - RNA, 19 nt, Artificial Sequence
  Description of Artificial Sequence: Synthetic oligonucleotide
gaagucugugcagagaaca

SEQ ID NO: 948191 - RNA, 19 nt, Artificial Sequence
  Description of Artificial Sequence: Synthetic oligonucleotide
aucgguuuacuuccugguc

SEQ ID NO: 948192 - RNA, 19 nt, Artificial Sequence
  Description of Artificial Sequence: Synthetic oligonucleotide
gaaccucugaaccuuuuca

SEQ ID NO: 948193 - RNA, 19 nt, Artificial Sequence
  Description of Artificial Sequence: Synthetic oligonucleotide
ugucuucccaugacauacg

SEQ ID NO: 948194 - RNA, 19 nt, Artificial Sequence
  Description of Artificial Sequence: Synthetic oligonucleotide
ugauccuuugcacgaucag

SEQ ID NO: 948195 - RNA, 19 nt, Artificial Sequence
  Description of Artificial Sequence: Synthetic oligonucleotide
caaucaccacuucugaaac

SEQ ID NO: 948196 - RNA, 19 nt, Artificial Sequence
  Description of Artificial Sequence: Synthetic oligonucleotide
gcauauucccgauacuccg

SEQ ID NO: 948197 - RNA, 19 nt, Artificial Sequence
  Description of Artificial Sequence: Synthetic oligonucleotide
agcaauacuccuccaguca

SEQ ID NO: 948198 - RNA, 19 nt, Artificial Sequence
  Description of Artificial Sequence: Synthetic oligonucleotide
cuuccucguagguaucucg

SEQ ID NO: 948199 - RNA, 19 nt, Artificial Sequence
  Description of Artificial Sequence: Synthetic oligonucleotide
aggggugugucccagacaa

SEQ ID NO: 948200 - RNA, 19 nt, Artificial Sequence
  Description of Artificial Sequence: Synthetic oligonucleotide
uaucgguuuacuuccuggu

SEQ ID NO: 948201 - RNA, 19 nt, Artificial Sequence
  Description of Artificial Sequence: Synthetic oligonucleotide
cucuguaccucccagccug

SEQ ID NO: 948202 - RNA, 19 nt, Artificial Sequence
  Description of Artificial Sequence: Synthetic oligonucleotide
ugucagguacaauuucugu

SEQ ID NO: 948203 - RNA, 19 nt, Artificial Sequence
  Description of Artificial Sequence: Synthetic oligonucleotide
uguaucgguuuacuuccug

SEQ ID NO: 948204 - RNA, 19 nt, Artificial Sequence
  Description of Artificial Sequence: Synthetic oligonucleotide
ugccaaaacugucagcaua

SEQ ID NO: 948205 - RNA, 19 nt, Artificial Sequence
  Description of Artificial Sequence: Synthetic oligonucleotide
cugucuucccaugacauac

SEQ ID NO: 948206 - RNA, 19 nt, Artificial Sequence
  Description of Artificial Sequence: Synthetic oligonucleotide
agaacgugccccaaaguag

SEQ ID NO: 948207 - RNA, 19 nt, Artificial Sequence
  Description of Artificial Sequence: Synthetic oligonucleotide
gguacaauuucugucuucc

SEQ ID NO: 948208 - RNA, 19 nt, Artificial Sequence
  Description of Artificial Sequence: Synthetic oligonucleotide
cuuccagucaggcgggagg

SEQ ID NO: 948209 - RNA, 19 nt, Artificial Sequence
  Description of Artificial Sequence: Synthetic oligonucleotide
gucacuagcagcauucgac

SEQ ID NO: 948210 - RNA, 19 nt, Artificial Sequence
  Description of Artificial Sequence: Synthetic oligonucleotide
aauggggugcuagaacgug

SEQ ID NO: 948211 - RNA, 19 nt, Artificial Sequence
  Description of Artificial Sequence: Synthetic oligonucleotide
agaggguacccacuugcag

SEQ ID NO: 948212 - RNA, 19 nt, Artificial Sequence
  Description of Artificial Sequence: Synthetic oligonucleotide
agagccaucccugucaggu

SEQ ID NO: 948213 - RNA, 19 nt, Artificial Sequence
  Description of Artificial Sequence: Synthetic oligonucleotide
cugggaugucuguagaaac

SEQ ID NO: 948214 - RNA, 19 nt, Artificial Sequence
  Description of Artificial Sequence: Synthetic oligonucleotide
ugccggaagauuccucucc

SEQ ID NO: 948215 - RNA, 19 nt, Artificial Sequence
  Description of Artificial Sequence: Synthetic oligonucleotide
gaguauggcgccccaauca

SEQ ID NO: 948216 - RNA, 19 nt, Artificial Sequence
  Description of Artificial Sequence: Synthetic oligonucleotide
gccacugucgaucugccgg

SEQ ID NO: 948217 - RNA, 19 nt, Artificial Sequence
  Description of Artificial Sequence: Synthetic oligonucleotide
uacuccaaccuguucuuga

SEQ ID NO: 948218 - RNA, 19 nt, Artificial Sequence
  Description of Artificial Sequence: Synthetic oligonucleotide
guauuuguccagugucucc

SEQ ID NO: 948219 - RNA, 19 nt, Artificial Sequence
  Description of Artificial Sequence: Synthetic oligonucleotide
aacauaccggcaagccagc

SEQ ID NO: 948220 - RNA, 19 nt, Artificial Sequence
  Description of Artificial Sequence: Synthetic oligonucleotide
cuuauccuguccacugggc

SEQ ID NO: 948221 - RNA, 19 nt, Artificial Sequence
  Description of Artificial Sequence: Synthetic oligonucleotide
uuguaccucucuuccuggg

SEQ ID NO: 948222 - RNA, 19 nt, Artificial Sequence
  Description of Artificial Sequence: Synthetic oligonucleotide
ugggcugcuucacugugug

SEQ ID NO: 948223 - RNA, 19 nt, Artificial Sequence
  Description of Artificial Sequence: Synthetic oligonucleotide
augucauagcagccaucgc

SEQ ID NO: 948224 - RNA, 19 nt, Artificial Sequence
  Description of Artificial Sequence: Synthetic oligonucleotide
uguagugagguugcugcca

SEQ ID NO: 948225 - RNA, 19 nt, Artificial Sequence
  Description of Artificial Sequence: Synthetic oligonucleotide
uagcaauacuccuccaguc

SEQ ID NO: 948226 - RNA, 19 nt, Artificial Sequence
  Description of Artificial Sequence: Synthetic oligonucleotide
aggaaucaggaauggggug

SEQ ID NO: 948227 - RNA, 19 nt, Artificial Sequence
  Description of Artificial Sequence: Synthetic oligonucleotide
ccuuguaucgguuuacuuc

SEQ ID NO: 948228 - RNA, 19 nt, Artificial Sequence
  Description of Artificial Sequence: Synthetic oligonucleotide
uguaccucucuuccugggu

SEQ ID NO: 948229 - RNA, 19 nt, Artificial Sequence
  Description of Artificial Sequence: Synthetic oligonucleotide
aaacugggacaccccuguc

SEQ ID NO: 948230 - RNA, 19 nt, Artificial Sequence
  Description of Artificial Sequence: Synthetic oligonucleotide
cagccaucgcaccacaccc

SEQ ID NO: 948231 - RNA, 19 nt, Artificial Sequence
  Description of Artificial Sequence: Synthetic oligonucleotide
aaaguguaggccggcgaug

SEQ ID NO: 948232 - RNA, 19 nt, Artificial Sequence
  Description of Artificial Sequence: Synthetic oligonucleotide
ugucaacgugaugucauug

SEQ ID NO: 948233 - RNA, 19 nt, Artificial Sequence
  Description of Artificial Sequence: Synthetic oligonucleotide
aaguguaggccggcgauga

SEQ ID NO: 948234 - RNA, 19 nt, Artificial Sequence
  Description of Artificial Sequence: Synthetic oligonucleotide
cugcuuauccuguccacug

SEQ ID NO: 948235 - RNA, 19 nt, Artificial Sequence
  Description of Artificial Sequence: Synthetic oligonucleotide
ccggcgaugauguagggcc

SEQ ID NO: 948236 - RNA, 19 nt, Artificial Sequence
  Description of Artificial Sequence: Synthetic oligonucleotide
cagaguccgcucaugcagg

SEQ ID NO: 948237 - RNA, 19 nt, Artificial Sequence
  Description of Artificial Sequence: Synthetic oligonucleotide
ucugcuuauccuguccacu

SEQ ID NO: 948238 - RNA, 19 nt, Artificial Sequence
  Description of Artificial Sequence: Synthetic oligonucleotide
gcuagaacgugccccaaag

SEQ ID NO: 948239 - RNA, 19 nt, Artificial Sequence
  Description of Artificial Sequence: Synthetic oligonucleotide
gucccagacaagacuaggg

SEQ ID NO: 948240 - RNA, 19 nt, Artificial Sequence
  Description of Artificial Sequence: Synthetic oligonucleotide
acaguuguauuuguccagu

SEQ ID NO: 948241 - RNA, 19 nt, Artificial Sequence
  Description of Artificial Sequence: Synthetic oligonucleotide
uccucguagguaucucggc

SEQ ID NO: 948242 - RNA, 19 nt, Artificial Sequence
  Description of Artificial Sequence: Synthetic oligonucleotide
gaaacugggacaccccugu

SEQ ID NO: 948243 - RNA, 19 nt, Artificial Sequence
  Description of Artificial Sequence: Synthetic oligonucleotide
cagaagcuaggcagugucc

SEQ ID NO: 948244 - RNA, 19 nt, Artificial Sequence
  Description of Artificial Sequence: Synthetic oligonucleotide
gaccauaaugcaccauguc

SEQ ID NO: 948245 - RNA, 19 nt, Artificial Sequence
  Description of Artificial Sequence: Synthetic oligonucleotide
aucagugugcacacccacg

SEQ ID NO: 948246 - RNA, 19 nt, Artificial Sequence
  Description of Artificial Sequence: Synthetic oligonucleotide
gcuuauccuguccacuggg

SEQ ID NO: 948247 - RNA, 19 nt, Artificial Sequence
  Description of Artificial Sequence: Synthetic oligonucleotide
cccucugaaccucugaacc

SEQ ID NO: 948248 - RNA, 19 nt, Artificial Sequence
  Description of Artificial Sequence: Synthetic oligonucleotide
agcagcauucgacccacga

SEQ ID NO: 948249 - RNA, 19 nt, Artificial Sequence
  Description of Artificial Sequence: Synthetic oligonucleotide
gaacgugccccaaaguaga

SEQ ID NO: 948250 - RNA, 19 nt, Artificial Sequence
  Description of Artificial Sequence: Synthetic oligonucleotide
ucccgauacuccgaggaca

SEQ ID NO: 948251 - RNA, 19 nt, Artificial Sequence
  Description of Artificial Sequence: Synthetic oligonucleotide
guaucucggccaucuacug

SEQ ID NO: 948252 - RNA, 19 nt, Artificial Sequence
  Description of Artificial Sequence: Synthetic oligonucleotide
gcaguuggaacuguggaug

SEQ ID NO: 948253 - RNA, 19 nt, Artificial Sequence
  Description of Artificial Sequence: Synthetic oligonucleotide
cuguagugagguugcugcc

SEQ ID NO: 948254 - RNA, 19 nt, Artificial Sequence
  Description of Artificial Sequence: Synthetic oligonucleotide
ugugcacacccacgaugag

SEQ ID NO: 948255 - RNA, 19 nt, Artificial Sequence
  Description of Artificial Sequence: Synthetic oligonucleotide
caucgcaccacacccgcac

SEQ ID NO: 948256 - RNA, 19 nt, Artificial Sequence
  Description of Artificial Sequence: Synthetic oligonucleotide
ggcgaagcugauuggagug

SEQ ID NO: 948257 - RNA, 19 nt, Artificial Sequence
  Description of Artificial Sequence: Synthetic oligonucleotide
uacugucaacgugauguca

SEQ ID NO: 948258 - RNA, 19 nt, Artificial Sequence
  Description of Artificial Sequence: Synthetic oligonucleotide
accacacccgcacggcgcg

SEQ ID NO: 948259 - RNA, 19 nt, Artificial Sequence
  Description of Artificial Sequence: Synthetic oligonucleotide
cauaccggcaagccagcac

SEQ ID NO: 948260 - RNA, 19 nt, Artificial Sequence
  Description of Artificial Sequence: Synthetic oligonucleotide
uucccgauacuccgaggac

SEQ ID NO: 948261 - RNA, 19 nt, Artificial Sequence
  Description of Artificial Sequence: Synthetic oligonucleotide
acacccugggugcguuugc

SEQ ID NO: 948262 - RNA, 19 nt, Artificial Sequence
  Description of Artificial Sequence: Synthetic oligonucleotide
gucaaaguguaggccggcg

SEQ ID NO: 948263 - RNA, 19 nt, Artificial Sequence
  Description of Artificial Sequence: Synthetic oligonucleotide
acugucaacgugaugucau

SEQ ID NO: 948264 - RNA, 19 nt, Artificial Sequence
  Description of Artificial Sequence: Synthetic oligonucleotide
ggugcguuugcacucucug

SEQ ID NO: 948265 - RNA, 19 nt, Artificial Sequence
  Description of Artificial Sequence: Synthetic oligonucleotide
guagaaacugggacacccc

SEQ ID NO: 948266 - RNA, 19 nt, Artificial Sequence
  Description of Artificial Sequence: Synthetic oligonucleotide
acugucgaucugccggaag

SEQ ID NO: 948267 - RNA, 19 nt, Artificial Sequence
  Description of Artificial Sequence: Synthetic oligonucleotide
cagucaagcuggcccagcc

SEQ ID NO: 948268 - RNA, 19 nt, Artificial Sequence
  Description of Artificial Sequence: Synthetic oligonucleotide
cauacgagguccaccuuga

SEQ ID NO: 948269 - RNA, 19 nt, Artificial Sequence
  Description of Artificial Sequence: Synthetic oligonucleotide
gacaagagguccccaaagu

SEQ ID NO: 948270 - RNA, 19 nt, Artificial Sequence
  Description of Artificial Sequence: Synthetic oligonucleotide
cucguagguaucucggcca

SEQ ID NO: 948271 - RNA, 19 nt, Artificial Sequence
  Description of Artificial Sequence: Synthetic oligonucleotide
aguccacgugcccaaugug

SEQ ID NO: 948272 - RNA, 19 nt, Artificial Sequence
  Description of Artificial Sequence: Synthetic oligonucleotide
ugauuccgagcuucauacu

SEQ ID NO: 948273 - RNA, 19 nt, Artificial Sequence
  Description of Artificial Sequence: Synthetic oligonucleotide
ugcuucacugugugagcca

SEQ ID NO: 948274 - RNA, 19 nt, Artificial Sequence
  Description of Artificial Sequence: Synthetic oligonucleotide
cauauucccgauacuccga

SEQ ID NO: 948275 - RNA, 19 nt, Artificial Sequence
  Description of Artificial Sequence: Synthetic oligonucleotide
ggcuugaguaacauccucc

SEQ ID NO: 948276 - RNA, 19 nt, Artificial Sequence
  Description of Artificial Sequence: Synthetic oligonucleotide
ggaugucuguagaaacugg

SEQ ID NO: 948277 - RNA, 19 nt, Artificial Sequence
  Description of Artificial Sequence: Synthetic oligonucleotide
acagucaagcuggcccagc

SEQ ID NO: 948278 - RNA, 19 nt, Artificial Sequence
  Description of Artificial Sequence: Synthetic oligonucleotide
uuguaucgguuuacuuccu

SEQ ID NO: 948279 - RNA, 19 nt, Artificial Sequence
  Description of Artificial Sequence: Synthetic oligonucleotide
ugccccaaaguagagggua

SEQ ID NO: 948280 - RNA, 19 nt, Artificial Sequence
  Description of Artificial Sequence: Synthetic oligonucleotide
ggugacguagggagcagcg

SEQ ID NO: 948281 - RNA, 19 nt, Artificial Sequence
  Description of Artificial Sequence: Synthetic oligonucleotide
ugcuagaacgugccccaaa

SEQ ID NO: 948282 - RNA, 19 nt, Artificial Sequence
  Description of Artificial Sequence: Synthetic oligonucleotide
cccaugacauacgaggucc

SEQ ID NO: 948283 - RNA, 19 nt, Artificial Sequence
  Description of Artificial Sequence: Synthetic oligonucleotide
gagaacagucaagcuggcc

SEQ ID NO: 948284 - RNA, 19 nt, Artificial Sequence
  Description of Artificial Sequence: Synthetic oligonucleotide
gcagcauucgacccacgag

SEQ ID NO: 948285 - RNA, 19 nt, Artificial Sequence
  Description of Artificial Sequence: Synthetic oligonucleotide
cauggcacgugccuggcga

SEQ ID NO: 948286 - RNA, 19 nt, Artificial Sequence
  Description of Artificial Sequence: Synthetic oligonucleotide
acuuccucguagguaucuc

SEQ ID NO: 948287 - RNA, 19 nt, Artificial Sequence
  Description of Artificial Sequence: Synthetic oligonucleotide
gggaugucuguagaaacug

SEQ ID NO: 948288 - RNA, 19 nt, Artificial Sequence
  Description of Artificial Sequence: Synthetic oligonucleotide
ugaggaccagaagucugug

SEQ ID NO: 948289 - RNA, 19 nt, Artificial Sequence
  Description of Artificial Sequence: Synthetic oligonucleotide
caugaacacagaagucaca

SEQ ID NO: 948290 - RNA, 19 nt, Artificial Sequence
  Description of Artificial Sequence: Synthetic oligonucleotide
ucguagguaucucggccau

SEQ ID NO: 948291 - RNA, 19 nt, Artificial Sequence
  Description of Artificial Sequence: Synthetic oligonucleotide
ucugaaccucugaaccuuu

SEQ ID NO: 948292 - RNA, 19 nt, Artificial Sequence
  Description of Artificial Sequence: Synthetic oligonucleotide
gcaagugcgucuucuagga

SEQ ID NO: 948293 - RNA, 19 nt, Artificial Sequence
  Description of Artificial Sequence: Synthetic oligonucleotide
uccuuugcacgaucagguc

SEQ ID NO: 948294 - RNA, 19 nt, Artificial Sequence
  Description of Artificial Sequence: Synthetic oligonucleotide
agaaacugggacaccccug

SEQ ID NO: 948295 - RNA, 19 nt, Artificial Sequence
  Description of Artificial Sequence: Synthetic oligonucleotide
caccacacccgcacggcgc

SEQ ID NO: 948296 - RNA, 19 nt, Artificial Sequence
  Description of Artificial Sequence: Synthetic oligonucleotide
ugguggacacacccugggu

SEQ ID NO: 948297 - RNA, 19 nt, Artificial Sequence
  Description of Artificial Sequence: Synthetic oligonucleotide
cgagcuucauacuccaacc

SEQ ID NO: 948298 - RNA, 19 nt, Artificial Sequence
  Description of Artificial Sequence: Synthetic oligonucleotide
aacgugccccaaaguagag

SEQ ID NO: 948299 - RNA, 19 nt, Artificial Sequence
  Description of Artificial Sequence: Synthetic oligonucleotide
ugauuggagugaccauaau

SEQ ID NO: 948300 - RNA, 19 nt, Artificial Sequence
  Description of Artificial Sequence: Synthetic oligonucleotide
gcgucuucuaggaaucagg

SEQ ID NO: 948301 - RNA, 19 nt, Artificial Sequence
  Description of Artificial Sequence: Synthetic oligonucleotide
acgugcccaauguggaaca

SEQ ID NO: 948302 - RNA, 19 nt, Artificial Sequence
  Description of Artificial Sequence: Synthetic oligonucleotide
gaagugacccaggagcucu

SEQ ID NO: 948303 - RNA, 19 nt, Artificial Sequence
  Description of Artificial Sequence: Synthetic oligonucleotide
ucucggccaucuacuguca

SEQ ID NO: 948304 - RNA, 19 nt, Artificial Sequence
  Description of Artificial Sequence: Synthetic oligonucleotide
acauagcaauacuccucca

SEQ ID NO: 948305 - RNA, 19 nt, Artificial Sequence
  Description of Artificial Sequence: Synthetic oligonucleotide
aggcgggaggggugugucc

SEQ ID NO: 948306 - RNA, 19 nt, Artificial Sequence
  Description of Artificial Sequence: Synthetic oligonucleotide
cacgugcccaauguggaac

SEQ ID NO: 948307 - RNA, 19 nt, Artificial Sequence
  Description of Artificial Sequence: Synthetic oligonucleotide
ugaccgaguauggcgcccc

SEQ ID NO: 948308 - RNA, 19 nt, Artificial Sequence
  Description of Artificial Sequence: Synthetic oligonucleotide
gugacguagggagcagcgg

SEQ ID NO: 948309 - RNA, 19 nt, Artificial Sequence
  Description of Artificial Sequence: Synthetic oligonucleotide
uaccggcaagccagcacgc

SEQ ID NO: 948310 - RNA, 19 nt, Artificial Sequence
  Description of Artificial Sequence: Synthetic oligonucleotide
acgugccccaaaguagagg

SEQ ID NO: 948311 - RNA, 19 nt, Artificial Sequence
  Description of Artificial Sequence: Synthetic oligonucleotide
gccaucuacugucaacgug

SEQ ID NO: 948312 - RNA, 19 nt, Artificial Sequence
  Description of Artificial Sequence: Synthetic oligonucleotide
ugguaagggucagagccau

SEQ ID NO: 948313 - RNA, 19 nt, Artificial Sequence
  Description of Artificial Sequence: Synthetic oligonucleotide
guguaggccggcgaugaug

SEQ ID NO: 948314 - RNA, 19 nt, Artificial Sequence
  Description of Artificial Sequence: Synthetic oligonucleotide
ggugcuagaacgugcccca

SEQ ID NO: 948315 - RNA, 19 nt, Artificial Sequence
  Description of Artificial Sequence: Synthetic oligonucleotide
gugcccaauguggaacagg

SEQ ID NO: 948316 - RNA, 19 nt, Artificial Sequence
  Description of Artificial Sequence: Synthetic oligonucleotide
gucuguagugagguugcug

SEQ ID NO: 948317 - RNA, 19 nt, Artificial Sequence
  Description of Artificial Sequence: Synthetic oligonucleotide
caugacauacgagguccac

SEQ ID NO: 948318 - RNA, 19 nt, Artificial Sequence
  Description of Artificial Sequence: Synthetic oligonucleotide
agaguccgcucaugcaggu

SEQ ID NO: 948319 - RNA, 19 nt, Artificial Sequence
  Description of Artificial Sequence: Synthetic oligonucleotide
ccucguagguaucucggcc

SEQ ID NO: 948320 - RNA, 19 nt, Artificial Sequence
  Description of Artificial Sequence: Synthetic oligonucleotide
guuugcacucucuguaccu

SEQ ID NO: 948321 - RNA, 19 nt, Artificial Sequence
  Description of Artificial Sequence: Synthetic oligonucleotide
guagguaucucggccaucu

SEQ ID NO: 948322 - RNA, 19 nt, Artificial Sequence
  Description of Artificial Sequence: Synthetic oligonucleotide
cauucgacccacgaggucu

SEQ ID NO: 948323 - RNA, 19 nt, Artificial Sequence
  Description of Artificial Sequence: Synthetic oligonucleotide
acaggugcccucugcuuau

SEQ ID NO: 948324 - RNA, 19 nt, Artificial Sequence
  Description of Artificial Sequence: Synthetic oligonucleotide
ggcgagaagaggugggcac

SEQ ID NO: 948325 - RNA, 19 nt, Artificial Sequence
  Description of Artificial Sequence: Synthetic oligonucleotide
agcauucgacccacgaggu

SEQ ID NO: 948326 - RNA, 19 nt, Artificial Sequence
  Description of Artificial Sequence: Synthetic oligonucleotide
guaccucucuuccugggua

SEQ ID NO: 948327 - RNA, 19 nt, Artificial Sequence
  Description of Artificial Sequence: Synthetic oligonucleotide
ugaugauccuuugcacgau

SEQ ID NO: 948328 - RNA, 19 nt, Artificial Sequence
  Description of Artificial Sequence: Synthetic oligonucleotide
gggugcuagaacgugcccc

SEQ ID NO: 948329 - RNA, 19 nt, Artificial Sequence
  Description of Artificial Sequence: Synthetic oligonucleotide
cagggcgagggcuugagua

SEQ ID NO: 948330 - RNA, 19 nt, Artificial Sequence
  Description of Artificial Sequence: Synthetic oligonucleotide
gcggguaccacuucaucca

SEQ ID NO: 948331 - RNA, 19 nt, Artificial Sequence
  Description of Artificial Sequence: Synthetic oligonucleotide
auggcgccccaaucaccac

SEQ ID NO: 948332 - RNA, 19 nt, Artificial Sequence
  Description of Artificial Sequence: Synthetic oligonucleotide
auacuccaaccuguucuug

SEQ ID NO: 948333 - RNA, 19 nt, Artificial Sequence
  Description of Artificial Sequence: Synthetic oligonucleotide
gacaccccuguccaggggu

SEQ ID NO: 948334 - RNA, 19 nt, Artificial Sequence
  Description of Artificial Sequence: Synthetic oligonucleotide
ucuugcccuuguaucgguu

SEQ ID NO: 948335 - RNA, 19 nt, Artificial Sequence
  Description of Artificial Sequence: Synthetic oligonucleotide
uguggaugccaaggacaca

SEQ ID NO: 948336 - RNA, 19 nt, Artificial Sequence
  Description of Artificial Sequence: Synthetic oligonucleotide
acgugaugucauugccaug

SEQ ID NO: 948337 - RNA, 19 nt, Artificial Sequence
  Description of Artificial Sequence: Synthetic oligonucleotide
ugcccuuguaucgguuuac

SEQ ID NO: 948338 - RNA, 19 nt, Artificial Sequence
  Description of Artificial Sequence: Synthetic oligonucleotide
uggccuguaccaucuugua

SEQ ID NO: 948339 - RNA, 19 nt, Artificial Sequence
  Description of Artificial Sequence: Synthetic oligonucleotide
uagcagcauucgacccacg

SEQ ID NO: 948340 - RNA, 19 nt, Artificial Sequence
  Description of Artificial Sequence: Synthetic oligonucleotide
guauggcgccccaaucacc

SEQ ID NO: 948341 - RNA, 19 nt, Artificial Sequence
  Description of Artificial Sequence: Synthetic oligonucleotide
agccaucgcaccacacccg

SEQ ID NO: 948342 - RNA, 19 nt, Artificial Sequence
  Description of Artificial Sequence: Synthetic oligonucleotide
cuuuucaccaaagcugggu

SEQ ID NO: 948343 - RNA, 19 nt, Artificial Sequence
  Description of Artificial Sequence: Synthetic oligonucleotide
acacccacgaugagguagu

SEQ ID NO: 948344 - RNA, 19 nt, Artificial Sequence
  Description of Artificial Sequence: Synthetic oligonucleotide
agccaccggggcaagugcg

SEQ ID NO: 948345 - RNA, 19 nt, Artificial Sequence
  Description of Artificial Sequence: Synthetic oligonucleotide
acccacuugcagggugacc

SEQ ID NO: 948346 - RNA, 19 nt, Artificial Sequence
  Description of Artificial Sequence: Synthetic oligonucleotide
ccggccacguagaugacug

SEQ ID NO: 948347 - RNA, 19 nt, Artificial Sequence
  Description of Artificial Sequence: Synthetic oligonucleotide
uccuucccagaagcaaacu

SEQ ID NO: 948348 - RNA, 19 nt, Artificial Sequence
  Description of Artificial Sequence: Synthetic oligonucleotide
ggccuguaccaucuuguac

SEQ ID NO: 948349 - RNA, 19 nt, Artificial Sequence
  Description of Artificial Sequence: Synthetic oligonucleotide
aucugccggaagauuccuc

SEQ ID NO: 948350 - RNA, 19 nt, Artificial Sequence
  Description of Artificial Sequence: Synthetic oligonucleotide
gaaucaggaauggggugcu

SEQ ID NO: 948351 - RNA, 19 nt, Artificial Sequence
  Description of Artificial Sequence: Synthetic oligonucleotide
uuugcacgaucaggucugu

SEQ ID NO: 948352 - RNA, 19 nt, Artificial Sequence
  Description of Artificial Sequence: Synthetic oligonucleotide
auucgacccacgaggucug

SEQ ID NO: 948353 - RNA, 19 nt, Artificial Sequence
  Description of Artificial Sequence: Synthetic oligonucleotide
ucuccaguguggugacgua

SEQ ID NO: 948354 - RNA, 19 nt, Artificial Sequence
  Description of Artificial Sequence: Synthetic oligonucleotide
cggccaucuacugucaacg

SEQ ID NO: 948355 - RNA, 19 nt, Artificial Sequence
  Description of Artificial Sequence: Synthetic oligonucleotide
cacuugcagggugacccag

SEQ ID NO: 948356 - RNA, 19 nt, Artificial Sequence
  Description of Artificial Sequence: Synthetic oligonucleotide
gccaucgcaccacacccgc

SEQ ID NO: 948357 - RNA, 19 nt, Artificial Sequence
  Description of Artificial Sequence: Synthetic oligonucleotide
cagcaaggcagcuuccucu

SEQ ID NO: 948358 - RNA, 19 nt, Artificial Sequence
  Description of Artificial Sequence: Synthetic oligonucleotide
guccccggcaggugucggg

SEQ ID NO: 948359 - RNA, 19 nt, Artificial Sequence
  Description of Artificial Sequence: Synthetic oligonucleotide
ucgacccacgaggucugug

SEQ ID NO: 948360 - RNA, 19 nt, Artificial Sequence
  Description of Artificial Sequence: Synthetic oligonucleotide
aguguguccccggcaggug

SEQ ID NO: 948361 - RNA, 19 nt, Artificial Sequence
  Description of Artificial Sequence: Synthetic oligonucleotide
cacaggugcccucugcuua

SEQ ID NO: 948362 - RNA, 19 nt, Artificial Sequence
  Description of Artificial Sequence: Synthetic oligonucleotide
caaaguguaggccggcgau

SEQ ID NO: 948363 - RNA, 19 nt, Artificial Sequence
  Description of Artificial Sequence: Synthetic oligonucleotide
uggcacgugccuggcgaag

SEQ ID NO: 948364 - RNA, 19 nt, Artificial Sequence
  Description of Artificial Sequence: Synthetic oligonucleotide
uguccccggcaggugucgg

SEQ ID NO: 948365 - RNA, 19 nt, Artificial Sequence
  Description of Artificial Sequence: Synthetic oligonucleotide
uccccgugcccguuccgga

SEQ ID NO: 948366 - RNA, 19 nt, Artificial Sequence
  Description of Artificial Sequence: Synthetic oligonucleotide
gcguuugcacucucuguac

SEQ ID NO: 948367 - RNA, 19 nt, Artificial Sequence
  Description of Artificial Sequence: Synthetic oligonucleotide
ggccccugcgcccagccgc

SEQ ID NO: 948368 - RNA, 19 nt, Artificial Sequence
  Description of Artificial Sequence: Synthetic oligonucleotide
acagggcgagggcuugagu

SEQ ID NO: 948369 - RNA, 19 nt, Artificial Sequence
  Description of Artificial Sequence: Synthetic oligonucleotide
gaauggggugcuagaacgu

SEQ ID NO: 948370 - RNA, 19 nt, Artificial Sequence
  Description of Artificial Sequence: Synthetic oligonucleotide
uagguaucucggccaucua

SEQ ID NO: 948371 - RNA, 19 nt, Artificial Sequence
  Description of Artificial Sequence: Synthetic oligonucleotide
gugaccgaguauggcgccc

SEQ ID NO: 948372 - RNA, 19 nt, Artificial Sequence
  Description of Artificial Sequence: Synthetic oligonucleotide
auacgagguccaccuugaa

SEQ ID NO: 948373 - RNA, 19 nt, Artificial Sequence
  Description of Artificial Sequence: Synthetic oligonucleotide
cagcggguaccacuucauc

SEQ ID NO: 948374 - RNA, 19 nt, Artificial Sequence
  Description of Artificial Sequence: Synthetic oligonucleotide
ccacguagaugacugucuc

SEQ ID NO: 948375 - RNA, 19 nt, Artificial Sequence
  Description of Artificial Sequence: Synthetic oligonucleotide
ggccccuuaugcuuggcaa

SEQ ID NO: 948376 - RNA, 19 nt, Artificial Sequence
  Description of Artificial Sequence: Synthetic oligonucleotide
cccagccugcuucacuucc

SEQ ID NO: 948377 - RNA, 19 nt, Artificial Sequence
  Description of Artificial Sequence: Synthetic oligonucleotide
uccccggcaggugucgggu

SEQ ID NO: 948378 - RNA, 19 nt, Artificial Sequence
  Description of Artificial Sequence: Synthetic oligonucleotide
ccguuccggaucauggcac

SEQ ID NO: 948379 - RNA, 19 nt, Artificial Sequence
  Description of Artificial Sequence: Synthetic oligonucleotide
aguguaggccggcgaugau

SEQ ID NO: 948380 - RNA, 19 nt, Artificial Sequence
  Description of Artificial Sequence: Synthetic oligonucleotide
cacgaggucugugguggac

SEQ ID NO: 948381 - RNA, 19 nt, Artificial Sequence
  Description of Artificial Sequence: Synthetic oligonucleotide
auggcacgugccuggcgaa

SEQ ID NO: 948382 - RNA, 19 nt, Artificial Sequence
  Description of Artificial Sequence: Synthetic oligonucleotide
accggccacguagaugacu

SEQ ID NO: 948383 - RNA, 19 nt, Artificial Sequence
  Description of Artificial Sequence: Synthetic oligonucleotide
caggaauggggugcuagaa

SEQ ID NO: 948384 - RNA, 19 nt, Artificial Sequence
  Description of Artificial Sequence: Synthetic oligonucleotide
uacccacuugcagggugac

SEQ ID NO: 948385 - RNA, 19 nt, Artificial Sequence
  Description of Artificial Sequence: Synthetic oligonucleotide
cuagaacgugccccaaagu

SEQ ID NO: 948386 - RNA, 19 nt, Artificial Sequence
  Description of Artificial Sequence: Synthetic oligonucleotide
acauaccggcaagccagca

SEQ ID NO: 948387 - RNA, 19 nt, Artificial Sequence
  Description of Artificial Sequence: Synthetic oligonucleotide
cccucugcuuauccugucc

SEQ ID NO: 948388 - RNA, 19 nt, Artificial Sequence
  Description of Artificial Sequence: Synthetic oligonucleotide
ggcgggagggguguguccc

SEQ ID NO: 948389 - RNA, 19 nt, Artificial Sequence
  Description of Artificial Sequence: Synthetic oligonucleotide
ucccagccugcuucacuuc

SEQ ID NO: 948390 - RNA, 19 nt, Artificial Sequence
  Description of Artificial Sequence: Synthetic oligonucleotide
gggcuugccaaaacuguca

SEQ ID NO: 948391 - RNA, 19 nt, Artificial Sequence
  Description of Artificial Sequence: Synthetic oligonucleotide
guguccccggcaggugucg

SEQ ID NO: 948392 - RNA, 19 nt, Artificial Sequence
  Description of Artificial Sequence: Synthetic oligonucleotide
ggucaaaguguaggccggc

SEQ ID NO: 948393 - RNA, 19 nt, Artificial Sequence
  Description of Artificial Sequence: Synthetic oligonucleotide
gugcguuugcacucucugu

SEQ ID NO: 948394 - RNA, 19 nt, Artificial Sequence
  Description of Artificial Sequence: Synthetic oligonucleotide
ggggcuugccaaaacuguc

SEQ ID NO: 948395 - RNA, 19 nt, Artificial Sequence
  Description of Artificial Sequence: Synthetic oligonucleotide
ccugucagguacaauuucu

SEQ ID NO: 948396 - RNA, 19 nt, Artificial Sequence
  Description of Artificial Sequence: Synthetic oligonucleotide
caguguggugacguaggga

SEQ ID NO: 948397 - RNA, 19 nt, Artificial Sequence
  Description of Artificial Sequence: Synthetic oligonucleotide
gacguagggagcagcgggu

SEQ ID NO: 948398 - RNA, 19 nt, Artificial Sequence
  Description of Artificial Sequence: Synthetic oligonucleotide
ggccacguagaugacuguc

SEQ ID NO: 948399 - RNA, 19 nt, Artificial Sequence
  Description of Artificial Sequence: Synthetic oligonucleotide
gcacgaucaggucuguagu

SEQ ID NO: 948400 - RNA, 19 nt, Artificial Sequence
  Description of Artificial Sequence: Synthetic oligonucleotide
ggcaguuggaacuguggau

SEQ ID NO: 948401 - RNA, 19 nt, Artificial Sequence
  Description of Artificial Sequence: Synthetic oligonucleotide
ugggugcguuugcacucuc

SEQ ID NO: 948402 - RNA, 19 nt, Artificial Sequence
  Description of Artificial Sequence: Synthetic oligonucleotide
gcccguuccggaucauggc

SEQ ID NO: 948403 - RNA, 19 nt, Artificial Sequence
  Description of Artificial Sequence: Synthetic oligonucleotide
guuccggaucauggcacca

SEQ ID NO: 948404 - RNA, 19 nt, Artificial Sequence
  Description of Artificial Sequence: Synthetic oligonucleotide
ggcaagccagcacgcucag

SEQ ID NO: 948405 - RNA, 19 nt, Artificial Sequence
  Description of Artificial Sequence: Synthetic oligonucleotide
gaucugccggaagauuccu

SEQ ID NO: 948406 - RNA, 19 nt, Artificial Sequence
  Description of Artificial Sequence: Synthetic oligonucleotide
ggcacgugccuggcgaagc

SEQ ID NO: 948407 - RNA, 19 nt, Artificial Sequence
  Description of Artificial Sequence: Synthetic oligonucleotide
gcggggcgagaagaggugg

SEQ ID NO: 948408 - RNA, 19 nt, Artificial Sequence
  Description of Artificial Sequence: Synthetic oligonucleotide
ggggugcuagaacgugccc

SEQ ID NO: 948409 - RNA, 19 nt, Artificial Sequence
  Description of Artificial Sequence: Synthetic oligonucleotide
gaccgaguauggcgcccca

SEQ ID NO: 948410 - RNA, 19 nt, Artificial Sequence
  Description of Artificial Sequence: Synthetic oligonucleotide
ccuuugcacgaucaggucu

SEQ ID NO: 948411 - RNA, 19 nt, Artificial Sequence
  Description of Artificial Sequence: Synthetic oligonucleotide
gcuaggcaguguccccugc

SEQ ID NO: 948412 - RNA, 19 nt, Artificial Sequence
  Description of Artificial Sequence: Synthetic oligonucleotide
cguuccggaucauggcacc

SEQ ID NO: 948413 - RNA, 19 nt, Artificial Sequence
  Description of Artificial Sequence: Synthetic oligonucleotide
gccaaaacugucagcauau

SEQ ID NO: 948414 - RNA, 19 nt, Artificial Sequence
  Description of Artificial Sequence: Synthetic oligonucleotide
accggcaagccagcacgcu

SEQ ID NO: 948415 - RNA, 19 nt, Artificial Sequence
  Description of Artificial Sequence: Synthetic oligonucleotide
gugcccguuccggaucaug

SEQ ID NO: 948416 - RNA, 19 nt, Artificial Sequence
  Description of Artificial Sequence: Synthetic oligonucleotide
ggcaccggccacguagaug

SEQ ID NO: 948417 - RNA, 19 nt, Artificial Sequence
  Description of Artificial Sequence: Synthetic oligonucleotide
gcuuccagucaggcgggag

SEQ ID NO: 948418 - RNA, 19 nt, Artificial Sequence
  Description of Artificial Sequence: Synthetic oligonucleotide
gcauucgacccacgagguc

SEQ ID NO: 948419 - RNA, 19 nt, Artificial Sequence
  Description of Artificial Sequence: Synthetic oligonucleotide
ccccuuaugcuuggcaauc

SEQ ID NO: 948420 - RNA, 19 nt, Artificial Sequence
  Description of Artificial Sequence: Synthetic oligonucleotide
gccggcgaugauguagggc

SEQ ID NO: 948421 - RNA, 19 nt, Artificial Sequence
  Description of Artificial Sequence: Synthetic oligonucleotide
cccguuccggaucauggca

SEQ ID NO: 948422 - RNA, 19 nt, Artificial Sequence
  Description of Artificial Sequence: Synthetic oligonucleotide
cacccgcacggcgcgcugg

SEQ ID NO: 948423 - RNA, 19 nt, Artificial Sequence
  Description of Artificial Sequence: Synthetic oligonucleotide
uucgacccacgaggucugu

SEQ ID NO: 948424 - RNA, 19 nt, Artificial Sequence
  Description of Artificial Sequence: Synthetic oligonucleotide
cgaagcugauuggagugac

SEQ ID NO: 948425 - RNA, 19 nt, Artificial Sequence
  Description of Artificial Sequence: Synthetic oligonucleotide
gugcgucuucuaggaauca

SEQ ID NO: 948426 - RNA, 19 nt, Artificial Sequence
  Description of Artificial Sequence: Synthetic oligonucleotide
gcgaagcugauuggaguga

SEQ ID NO: 948427 - RNA, 19 nt, Artificial Sequence
  Description of Artificial Sequence: Synthetic oligonucleotide
cccaaucaccacuucugaa

SEQ ID NO: 948428 - RNA, 19 nt, Artificial Sequence
  Description of Artificial Sequence: Synthetic oligonucleotide
cgaguauggcgccccaauc

SEQ ID NO: 948429 - RNA, 19 nt, Artificial Sequence
  Description of Artificial Sequence: Synthetic oligonucleotide
ggugggccuuggucacuag

SEQ ID NO: 948430 - RNA, 19 nt, Artificial Sequence
  Description of Artificial Sequence: Synthetic oligonucleotide
gacauacgagguccaccuu

SEQ ID NO: 948431 - RNA, 19 nt, Artificial Sequence
  Description of Artificial Sequence: Synthetic oligonucleotide
gcgagaagaggugggcaca

SEQ ID NO: 948432 - RNA, 19 nt, Artificial Sequence
  Description of Artificial Sequence: Synthetic oligonucleotide
uccgcucaugcagguucau

SEQ ID NO: 948433 - RNA, 19 nt, Artificial Sequence
  Description of Artificial Sequence: Synthetic oligonucleotide
ggcggggcgagaagaggug

SEQ ID NO: 948434 - RNA, 19 nt, Artificial Sequence
  Description of Artificial Sequence: Synthetic oligonucleotide
accgaguauggcgccccaa

SEQ ID NO: 948435 - RNA, 19 nt, Artificial Sequence
  Description of Artificial Sequence: Synthetic oligonucleotide
ccccaaucaccacuucuga

SEQ ID NO: 948436 - RNA, 19 nt, Artificial Sequence
  Description of Artificial Sequence: Synthetic oligonucleotide
ggcgaugauguagggccuc

SEQ ID NO: 948437 - RNA, 19 nt, Artificial Sequence
  Description of Artificial Sequence: Synthetic oligonucleotide
gggcgagggcuugaguaac

SEQ ID NO: 948438 - RNA, 19 nt, Artificial Sequence
  Description of Artificial Sequence: Synthetic oligonucleotide
aggcaccggccacguagau

SEQ ID NO: 948439 - RNA, 19 nt, Artificial Sequence
  Description of Artificial Sequence: Synthetic oligonucleotide
cucggccaucuacugucaa

SEQ ID NO: 948440 - RNA, 19 nt, Artificial Sequence
  Description of Artificial Sequence: Synthetic oligonucleotide
gggcgagaagaggugggca

SEQ ID NO: 948441 - RNA, 19 nt, Artificial Sequence
  Description of Artificial Sequence: Synthetic oligonucleotide
cugucaacgugaugucauu

SEQ ID NO: 948442 - RNA, 19 nt, Artificial Sequence
  Description of Artificial Sequence: Synthetic oligonucleotide
ccgcacggcgcgcuggccc

SEQ ID NO: 948443 - RNA, 19 nt, Artificial Sequence
  Description of Artificial Sequence: Synthetic oligonucleotide
ggucugugguggacacacc

SEQ ID NO: 948444 - RNA, 19 nt, Artificial Sequence
  Description of Artificial Sequence: Synthetic oligonucleotide
gccggccuccccgugcccg

SEQ ID NO: 948445 - RNA, 19 nt, Artificial Sequence
  Description of Artificial Sequence: Synthetic oligonucleotide
gucaucccucugaaccucu

SEQ ID NO: 948446 - RNA, 19 nt, Artificial Sequence
  Description of Artificial Sequence: Synthetic oligonucleotide
caccggccacguagaugac

SEQ ID NO: 948447 - RNA, 19 nt, Artificial Sequence
  Description of Artificial Sequence: Synthetic oligonucleotide
cggcaagccagcacgcuca

SEQ ID NO: 948448 - RNA, 19 nt, Artificial Sequence
  Description of Artificial Sequence: Synthetic oligonucleotide
ggggugugucccagacaag

SEQ ID NO: 948449 - RNA, 19 nt, Artificial Sequence
  Description of Artificial Sequence: Synthetic oligonucleotide
cugaaccucugaaccuuuu

SEQ ID NO: 948450 - RNA, 19 nt, Artificial Sequence
  Description of Artificial Sequence: Synthetic oligonucleotide
gucaggcgggaggggugug

SEQ ID NO: 948451 - RNA, 19 nt, Artificial Sequence
  Description of Artificial Sequence: Synthetic oligonucleotide
cacccacgaugagguaguc

SEQ ID NO: 948452 - RNA, 19 nt, Artificial Sequence
  Description of Artificial Sequence: Synthetic oligonucleotide
caggugcccucugcuuauc

SEQ ID NO: 948453 - RNA, 19 nt, Artificial Sequence
  Description of Artificial Sequence: Synthetic oligonucleotide
gguaagggucagagccauc

SEQ ID NO: 948454 - RNA, 19 nt, Artificial Sequence
  Description of Artificial Sequence: Synthetic oligonucleotide
cacggcgcgcuggcccacc

SEQ ID NO: 948455 - RNA, 19 nt, Artificial Sequence
  Description of Artificial Sequence: Synthetic oligonucleotide
gccccugcgcccagccgcg

SEQ ID NO: 948456 - RNA, 19 nt, Artificial Sequence
  Description of Artificial Sequence: Synthetic oligonucleotide
gccccuuaugcuuggcaau

SEQ ID NO: 948457 - RNA, 19 nt, Artificial Sequence
  Description of Artificial Sequence: Synthetic oligonucleotide
cugggugcguuugcacucu

SEQ ID NO: 948458 - RNA, 19 nt, Artificial Sequence
  Description of Artificial Sequence: Synthetic oligonucleotide
ccgcucaugcagguucaug

SEQ ID NO: 948459 - RNA, 19 nt, Artificial Sequence
  Description of Artificial Sequence: Synthetic oligonucleotide
cccgauacuccgaggacau

SEQ ID NO: 948460 - RNA, 19 nt, Artificial Sequence
  Description of Artificial Sequence: Synthetic oligonucleotide
gggcggggcgagaagaggu

SEQ ID NO: 948461 - RNA, 19 nt, Artificial Sequence
  Description of Artificial Sequence: Synthetic oligonucleotide
cccugggugcguuugcacu

SEQ ID NO: 948462 - RNA, 19 nt, Artificial Sequence
  Description of Artificial Sequence: Synthetic oligonucleotide
gugccccaaaguagagggu

SEQ ID NO: 948463 - RNA, 19 nt, Artificial Sequence
  Description of Artificial Sequence: Synthetic oligonucleotide
cgugcccaauguggaacag

SEQ ID NO: 948464 - RNA, 19 nt, Artificial Sequence
  Description of Artificial Sequence: Synthetic oligonucleotide
ccggcaggugucgggugag

SEQ ID NO: 948465 - RNA, 19 nt, Artificial Sequence
  Description of Artificial Sequence: Synthetic oligonucleotide
cccggcaggugucggguga

SEQ ID NO: 948466 - RNA, 19 nt, Artificial Sequence
  Description of Artificial Sequence: Synthetic oligonucleotide
gcgggagggguguguccca

SEQ ID NO: 948467 - RNA, 19 nt, Artificial Sequence
  Description of Artificial Sequence: Synthetic oligonucleotide
ccaucgcaccacacccgca

SEQ ID NO: 948468 - RNA, 19 nt, Artificial Sequence
  Description of Artificial Sequence: Synthetic oligonucleotide
ccaccggggcaagugcguc

SEQ ID NO: 948469 - RNA, 19 nt, Artificial Sequence
  Description of Artificial Sequence: Synthetic oligonucleotide
gaguccgcucaugcagguu

SEQ ID NO: 948470 - RNA, 19 nt, Artificial Sequence
  Description of Artificial Sequence: Synthetic oligonucleotide
gcgaugauguagggccucu

SEQ ID NO: 948471 - RNA, 19 nt, Artificial Sequence
  Description of Artificial Sequence: Synthetic oligonucleotide
ccgaguauggcgccccaau

SEQ ID NO: 948472 - RNA, 19 nt, Artificial Sequence
  Description of Artificial Sequence: Synthetic oligonucleotide
cccuuguaucgguuuacuu

SEQ ID NO: 948473 - RNA, 19 nt, Artificial Sequence
  Description of Artificial Sequence: Synthetic oligonucleotide
ggggccccuuaugcuuggc

SEQ ID NO: 948474 - RNA, 19 nt, Artificial Sequence
  Description of Artificial Sequence: Synthetic oligonucleotide
ccccggcaggugucgggug

SEQ ID NO: 948475 - RNA, 19 nt, Artificial Sequence
  Description of Artificial Sequence: Synthetic oligonucleotide
ggccuccccgugcccguuc

SEQ ID NO: 948476 - RNA, 19 nt, Artificial Sequence
  Description of Artificial Sequence: Synthetic oligonucleotide
gcagcggguaccacuucau

SEQ ID NO: 948477 - RNA, 19 nt, Artificial Sequence
  Description of Artificial Sequence: Synthetic oligonucleotide
gggugcguuugcacucucu

SEQ ID NO: 948478 - RNA, 19 nt, Artificial Sequence
  Description of Artificial Sequence: Synthetic oligonucleotide
ccacgaggucuguggugga

SEQ ID NO: 948479 - RNA, 19 nt, Artificial Sequence
  Description of Artificial Sequence: Synthetic oligonucleotide
gcgagggcuugaguaacau

SEQ ID NO: 948480 - RNA, 19 nt, Artificial Sequence
  Description of Artificial Sequence: Synthetic oligonucleotide
ccgauacuccgaggacauc

SEQ ID NO: 948481 - RNA, 19 nt, Artificial Sequence
  Description of Artificial Sequence: Synthetic oligonucleotide
gcgccccaaucaccacuuc

SEQ ID NO: 948482 - RNA, 19 nt, Artificial Sequence
  Description of Artificial Sequence: Synthetic oligonucleotide
cccuuaugcuuggcaaucu

SEQ ID NO: 948483 - RNA, 19 nt, Artificial Sequence
  Description of Artificial Sequence: Synthetic oligonucleotide
cgggaggggugugucccag

SEQ ID NO: 948484 - RNA, 19 nt, Artificial Sequence
  Description of Artificial Sequence: Synthetic oligonucleotide
gcacagggcgagggcuuga

SEQ ID NO: 948485 - RNA, 19 nt, Artificial Sequence
  Description of Artificial Sequence: Synthetic oligonucleotide
cgccccaaucaccacuucu

SEQ ID NO: 948486 - RNA, 19 nt, Artificial Sequence
  Description of Artificial Sequence: Synthetic oligonucleotide
gccaccggggcaagugcgu

SEQ ID NO: 948487 - RNA, 19 nt, Artificial Sequence
  Description of Artificial Sequence: Synthetic oligonucleotide
ccacacccgcacggcgcgc

SEQ ID NO: 948488 - RNA, 19 nt, Artificial Sequence
  Description of Artificial Sequence: Synthetic oligonucleotide
cccgcacggcgcgcuggcc

SEQ ID NO: 948489 - RNA, 19 nt, Artificial Sequence
  Description of Artificial Sequence: Synthetic oligonucleotide
cccggggcacugggaggag

SEQ ID NO: 948490 - RNA, 19 nt, Artificial Sequence
  Description of Artificial Sequence: Synthetic oligonucleotide
ggguacccacuugcagggu

SEQ ID NO: 948491 - RNA, 19 nt, Artificial Sequence
  Description of Artificial Sequence: Synthetic oligonucleotide
ccggggcacugggaggaga

SEQ ID NO: 948492 - RNA, 19 nt, Artificial Sequence
  Description of Artificial Sequence: Synthetic oligonucleotide
cggggcaagugcgucuucu

SEQ ID NO: 948493 - RNA, 19 nt, Artificial Sequence
  Description of Artificial Sequence: Synthetic oligonucleotide
ccccgugcccguuccggau

SEQ ID NO: 948494 - RNA, 19 nt, Artificial Sequence
  Description of Artificial Sequence: Synthetic oligonucleotide
cgugcccguuccggaucau

SEQ ID NO: 948495 - RNA, 19 nt, Artificial Sequence
  Description of Artificial Sequence: Synthetic oligonucleotide
uuuaaagggagccagcggc

SEQ ID NO: 948496 - RNA, 19 nt, Artificial Sequence
  Description of Artificial Sequence: Synthetic oligonucleotide
gacauagugacccacuucc

SEQ ID NO: 948497 - RNA, 19 nt, Artificial Sequence
  Description of Artificial Sequence: Synthetic oligonucleotide
ugacuaaauacaaugcucu

SEQ ID NO: 948498 - RNA, 19 nt, Artificial Sequence
  Description of Artificial Sequence: Synthetic oligonucleotide
aauggucccagucuuuauc

SEQ ID NO: 948499 - RNA, 19 nt, Artificial Sequence
  Description of Artificial Sequence: Synthetic oligonucleotide
uaucccaucaggcaucucc

SEQ ID NO: 948500 - RNA, 19 nt, Artificial Sequence
  Description of Artificial Sequence: Synthetic oligonucleotide
ucgacauugcuccagggcc

SEQ ID NO: 948501 - RNA, 19 nt, Artificial Sequence
  Description of Artificial Sequence: Synthetic oligonucleotide
ucuauguagcagaaaaccu

SEQ ID NO: 948502 - RNA, 19 nt, Artificial Sequence
  Description of Artificial Sequence: Synthetic oligonucleotide
aaaaccuucucagcagcgc

SEQ ID NO: 948503 - RNA, 19 nt, Artificial Sequence
  Description of Artificial Sequence: Synthetic oligonucleotide
agcauauccccauacaugu

SEQ ID NO: 948504 - RNA, 19 nt, Artificial Sequence
  Description of Artificial Sequence: Synthetic oligonucleotide
uguguguaucccaucaggc

SEQ ID NO: 948505 - RNA, 19 nt, Artificial Sequence
  Description of Artificial Sequence: Synthetic oligonucleotide
ggauauuggcauuuaaagg

SEQ ID NO: 948506 - RNA, 19 nt, Artificial Sequence
  Description of Artificial Sequence: Synthetic oligonucleotide
uguuaacaccgccugauga

SEQ ID NO: 948507 - RNA, 19 nt, Artificial Sequence
  Description of Artificial Sequence: Synthetic oligonucleotide
aaguaguagagcccaacca

SEQ ID NO: 948508 - RNA, 19 nt, Artificial Sequence
  Description of Artificial Sequence: Synthetic oligonucleotide
uccccuaugaagucguccg

SEQ ID NO: 948509 - RNA, 19 nt, Artificial Sequence
  Description of Artificial Sequence: Synthetic oligonucleotide
cacguugcuaagcauaucc

SEQ ID NO: 948510 - RNA, 19 nt, Artificial Sequence
  Description of Artificial Sequence: Synthetic oligonucleotide
uaagcauauccccauacau

SEQ ID NO: 948511 - RNA, 19 nt, Artificial Sequence
  Description of Artificial Sequence: Synthetic oligonucleotide
augacuaaauacaaugcuc

SEQ ID NO: 948512 - RNA, 19 nt, Artificial Sequence
  Description of Artificial Sequence: Synthetic oligonucleotide
gaaguaguagagcccaacc

SEQ ID NO: 948513 - RNA, 19 nt, Artificial Sequence
  Description of Artificial Sequence: Synthetic oligonucleotide
gucuauguagcagaaaacc

SEQ ID NO: 948514 - RNA, 19 nt, Artificial Sequence
  Description of Artificial Sequence: Synthetic oligonucleotide
auuuaaagggagccagcgg

SEQ ID NO: 948515 - RNA, 19 nt, Artificial Sequence
  Description of Artificial Sequence: Synthetic oligonucleotide
aagucguccgcacaagcug

SEQ ID NO: 948516 - RNA, 19 nt, Artificial Sequence
  Description of Artificial Sequence: Synthetic oligonucleotide
guugauucuggacauggug

SEQ ID NO: 948517 - RNA, 19 nt, Artificial Sequence
  Description of Artificial Sequence: Synthetic oligonucleotide
uccgcaacaggauauuggc

SEQ ID NO: 948518 - RNA, 19 nt, Artificial Sequence
  Description of Artificial Sequence: Synthetic oligonucleotide
uaugaagucguccgcacaa

SEQ ID NO: 948519 - RNA, 19 nt, Artificial Sequence
  Description of Artificial Sequence: Synthetic oligonucleotide
auagcggcugaccuccugc

SEQ ID NO: 948520 - RNA, 19 nt, Artificial Sequence
  Description of Artificial Sequence: Synthetic oligonucleotide
uuggcauuuaaagggagcc

SEQ ID NO: 948521 - RNA, 19 nt, Artificial Sequence
  Description of Artificial Sequence: Synthetic oligonucleotide
cuuauagcggcugaccucc

SEQ ID NO: 948522 - RNA, 19 nt, Artificial Sequence
  Description of Artificial Sequence: Synthetic oligonucleotide
aacgucaggcccuugagua

SEQ ID NO: 948523 - RNA, 19 nt, Artificial Sequence
  Description of Artificial Sequence: Synthetic oligonucleotide
uauuggcauuuaaagggag

SEQ ID NO: 948524 - RNA, 19 nt, Artificial Sequence
  Description of Artificial Sequence: Synthetic oligonucleotide
uucaggauuagcaccugca

SEQ ID NO: 948525 - RNA, 19 nt, Artificial Sequence
  Description of Artificial Sequence: Synthetic oligonucleotide
uuaacaccgccugaugacg

SEQ ID NO: 948526 - RNA, 19 nt, Artificial Sequence
  Description of Artificial Sequence: Synthetic oligonucleotide
ucggguacgaaaaggagau

SEQ ID NO: 948527 - RNA, 19 nt, Artificial Sequence
  Description of Artificial Sequence: Synthetic oligonucleotide
agguuccggacauagugac

SEQ ID NO: 948528 - RNA, 19 nt, Artificial Sequence
  Description of Artificial Sequence: Synthetic oligonucleotide
gucuuugacagacccagag

SEQ ID NO: 948529 - RNA, 19 nt, Artificial Sequence
  Description of Artificial Sequence: Synthetic oligonucleotide
cuccguaugacuaaauaca

SEQ ID NO: 948530 - RNA, 19 nt, Artificial Sequence
  Description of Artificial Sequence: Synthetic oligonucleotide
gaguacaggcuucucgggg

SEQ ID NO: 948531 - RNA, 19 nt, Artificial Sequence
  Description of Artificial Sequence: Synthetic oligonucleotide
ucuuugacagacccagaga

SEQ ID NO: 948532 - RNA, 19 nt, Artificial Sequence
  Description of Artificial Sequence: Synthetic oligonucleotide
aaagcugcgcacagucugc

SEQ ID NO: 948533 - RNA, 19 nt, Artificial Sequence
  Description of Artificial Sequence: Synthetic oligonucleotide
uucugaaccgugugcagcc

SEQ ID NO: 948534 - RNA, 19 nt, Artificial Sequence
  Description of Artificial Sequence: Synthetic oligonucleotide
uccguaugacuaaauacaa

SEQ ID NO: 948535 - RNA, 19 nt, Artificial Sequence
  Description of Artificial Sequence: Synthetic oligonucleotide
  modified_base (4)..(4): a, c, u, g, unknown or other
cagngcaagggcagaaagg

SEQ ID NO: 948536 - RNA, 19 nt, Artificial Sequence
  Description of Artificial Sequence: Synthetic oligonucleotide
  modified_base (3)..(3): a, c, u, g, unknown or other
agngcaagggcagaaaggu

SEQ ID NO: 948537 - RNA, 19 nt, Artificial Sequence
  Description of Artificial Sequence: Synthetic oligonucleotide
aagcauauccccauacaug

SEQ ID NO: 948538 - RNA, 19 nt, Artificial Sequence
  Description of Artificial Sequence: Synthetic oligonucleotide
acgaaaaggagaugucuug

SEQ ID NO: 948539 - RNA, 19 nt, Artificial Sequence
  Description of Artificial Sequence: Synthetic oligonucleotide
cuguguguaucccaucagg

SEQ ID NO: 948540 - RNA, 19 nt, Artificial Sequence
  Description of Artificial Sequence: Synthetic oligonucleotide
uggucugcguucugaaccg

SEQ ID NO: 948541 - RNA, 19 nt, Artificial Sequence
  Description of Artificial Sequence: Synthetic oligonucleotide
uaacaccgccugaugacgg

SEQ ID NO: 948542 - RNA, 19 nt, Artificial Sequence
  Description of Artificial Sequence: Synthetic oligonucleotide
uguagcagaaaaccuucuc

SEQ ID NO: 948543 - RNA, 19 nt, Artificial Sequence
  Description of Artificial Sequence: Synthetic oligonucleotide
cagacguuguuucuguccc

SEQ ID NO: 948544 - RNA, 19 nt, Artificial Sequence
  Description of Artificial Sequence: Synthetic oligonucleotide
gaccucaccagccaggauc

SEQ ID NO: 948545 - RNA, 19 nt, Artificial Sequence
  Description of Artificial Sequence: Synthetic oligonucleotide
cuuucugucuauguagcag

SEQ ID NO: 948546 - RNA, 19 nt, Artificial Sequence
  Description of Artificial Sequence: Synthetic oligonucleotide
guuccggacauagugaccc

SEQ ID NO: 948547 - RNA, 19 nt, Artificial Sequence
  Description of Artificial Sequence: Synthetic oligonucleotide
uacgaaaaggagaugucuu

SEQ ID NO: 948548 - RNA, 19 nt, Artificial Sequence
  Description of Artificial Sequence: Synthetic oligonucleotide
ugaguacaggcuucucggg

SEQ ID NO: 948549 - RNA, 19 nt, Artificial Sequence
  Description of Artificial Sequence: Synthetic oligonucleotide
guuaacaccgccugaugac

SEQ ID NO: 948550 - RNA, 19 nt, Artificial Sequence
  Description of Artificial Sequence: Synthetic oligonucleotide
agguugauucuggacaugg

SEQ ID NO: 948551 - RNA, 19 nt, Artificial Sequence
  Description of Artificial Sequence: Synthetic oligonucleotide
cuccgcaacaggauauugg

SEQ ID NO: 948552 - RNA, 19 nt, Artificial Sequence
  Description of Artificial Sequence: Synthetic oligonucleotide
uuuaucccgaccccagccu

SEQ ID NO: 948553 - RNA, 19 nt, Artificial Sequence
  Description of Artificial Sequence: Synthetic oligonucleotide
gaaaaggagaugucuugga

SEQ ID NO: 948554 - RNA, 19 nt, Artificial Sequence
  Description of Artificial Sequence: Synthetic oligonucleotide
cacuugggcauccucacag

SEQ ID NO: 948555 - RNA, 19 nt, Artificial Sequence
  Description of Artificial Sequence: Synthetic oligonucleotide
ugcguucugaaccgugugc

SEQ ID NO: 948556 - RNA, 19 nt, Artificial Sequence
  Description of Artificial Sequence: Synthetic oligonucleotide
cugucuauguagcagaaaa

SEQ ID NO: 948557 - RNA, 19 nt, Artificial Sequence
  Description of Artificial Sequence: Synthetic oligonucleotide
agccaucgcauccuggauc

SEQ ID NO: 948558 - RNA, 19 nt, Artificial Sequence
  Description of Artificial Sequence: Synthetic oligonucleotide
ugauucuggacauggugaa

SEQ ID NO: 948559 - RNA, 19 nt, Artificial Sequence
  Description of Artificial Sequence: Synthetic oligonucleotide
cucccugcgaccuccaggc

SEQ ID NO: 948560 - RNA, 19 nt, Artificial Sequence
  Description of Artificial Sequence: Synthetic oligonucleotide
ggguuguacaccuucucgg

SEQ ID NO: 948561 - RNA, 19 nt, Artificial Sequence
  Description of Artificial Sequence: Synthetic oligonucleotide
uaguagagcccaaccaccu

SEQ ID NO: 948562 - RNA, 19 nt, Artificial Sequence
  Description of Artificial Sequence: Synthetic oligonucleotide
uaagccugggcgacacccg

SEQ ID NO: 948563 - RNA, 19 nt, Artificial Sequence
  Description of Artificial Sequence: Synthetic oligonucleotide
ucuguuaacaccgccugau

SEQ ID NO: 948564 - RNA, 19 nt, Artificial Sequence
  Description of Artificial Sequence: Synthetic oligonucleotide
cuuggaauuccacgcggcc

SEQ ID NO: 948565 - RNA, 19 nt, Artificial Sequence
  Description of Artificial Sequence: Synthetic oligonucleotide
aacccaaggucuuggcgca

SEQ ID NO: 948566 - RNA, 19 nt, Artificial Sequence
  Description of Artificial Sequence: Synthetic oligonucleotide
aagccugggcgacacccgg

SEQ ID NO: 948567 - RNA, 19 nt, Artificial Sequence
  Description of Artificial Sequence: Synthetic oligonucleotide
ucuccccuauuucugugug

SEQ ID NO: 948568 - RNA, 19 nt, Artificial Sequence
  Description of Artificial Sequence: Synthetic oligonucleotide
cucuuuccaggucucggcg

SEQ ID NO: 948569 - RNA, 19 nt, Artificial Sequence
  Description of Artificial Sequence: Synthetic oligonucleotide
gucgacauugcuccagggc

SEQ ID NO: 948570 - RNA, 19 nt, Artificial Sequence
  Description of Artificial Sequence: Synthetic oligonucleotide
acuaaauacaaugcucuuu

SEQ ID NO: 948571 - RNA, 19 nt, Artificial Sequence
  Description of Artificial Sequence: Synthetic oligonucleotide
aucccaucaggcaucuccc

SEQ ID NO: 948572 - RNA, 19 nt, Artificial Sequence
  Description of Artificial Sequence: Synthetic oligonucleotide
acguugcuaagcauauccc

SEQ ID NO: 948573 - RNA, 19 nt, Artificial Sequence
  Description of Artificial Sequence: Synthetic oligonucleotide
agucguccgcacaagcugc

SEQ ID NO: 948574 - RNA, 19 nt, Artificial Sequence
  Description of Artificial Sequence: Synthetic oligonucleotide
ucuguguccggaagccuca

SEQ ID NO: 948575 - RNA, 19 nt, Artificial Sequence
  Description of Artificial Sequence: Synthetic oligonucleotide
cucucgaauccgcagguug

SEQ ID NO: 948576 - RNA, 19 nt, Artificial Sequence
  Description of Artificial Sequence: Synthetic oligonucleotide
cuuagccaucgcauccugg

SEQ ID NO: 948577 - RNA, 19 nt, Artificial Sequence
  Description of Artificial Sequence: Synthetic oligonucleotide
uguccggaagccucacucc

SEQ ID NO: 948578 - RNA, 19 nt, Artificial Sequence
  Description of Artificial Sequence: Synthetic oligonucleotide
aaagggagccagcggcuca

SEQ ID NO: 948579 - RNA, 19 nt, Artificial Sequence
  Description of Artificial Sequence: Synthetic oligonucleotide
auauuggcauuuaaaggga

SEQ ID NO: 948580 - RNA, 19 nt, Artificial Sequence
  Description of Artificial Sequence: Synthetic oligonucleotide
agcgcucucagagagaaaa

SEQ ID NO: 948581 - RNA, 19 nt, Artificial Sequence
  Description of Artificial Sequence: Synthetic oligonucleotide
cugucccacggcuaacugg

SEQ ID NO: 948582 - RNA, 19 nt, Artificial Sequence
  Description of Artificial Sequence: Synthetic oligonucleotide
aucaccagcaccguccugu

SEQ ID NO: 948583 - RNA, 19 nt, Artificial Sequence
  Description of Artificial Sequence: Synthetic oligonucleotide
ucggcuuucugucuaugua

SEQ ID NO: 948584 - RNA, 19 nt, Artificial Sequence
  Description of Artificial Sequence: Synthetic oligonucleotide
aaauggucccagucuuuau

SEQ ID NO: 948585 - RNA, 19 nt, Artificial Sequence
  Description of Artificial Sequence: Synthetic oligonucleotide
cucggguacgaaaaggaga

SEQ ID NO: 948586 - RNA, 19 nt, Artificial Sequence
  Description of Artificial Sequence: Synthetic oligonucleotide
guaccaggugagcauagac

SEQ ID NO: 948587 - RNA, 19 nt, Artificial Sequence
  Description of Artificial Sequence: Synthetic oligonucleotide
aggaucaggacccgugggu

SEQ ID NO: 948588 - RNA, 19 nt, Artificial Sequence
  Description of Artificial Sequence: Synthetic oligonucleotide
acgucaggcccuugaguac

SEQ ID NO: 948589 - RNA, 19 nt, Artificial Sequence
  Description of Artificial Sequence: Synthetic oligonucleotide
ugcacaccgcaguucagga

SEQ ID NO: 948590 - RNA, 19 nt, Artificial Sequence
  Description of Artificial Sequence: Synthetic oligonucleotide
gguuguacaccuucucggc

SEQ ID NO: 948591 - RNA, 19 nt, Artificial Sequence
  Description of Artificial Sequence: Synthetic oligonucleotide
ucugucccacggcuaacug

SEQ ID NO: 948592 - RNA, 19 nt, Artificial Sequence
  Description of Artificial Sequence: Synthetic oligonucleotide
ccuccguaugacuaaauac

SEQ ID NO: 948593 - RNA, 19 nt, Artificial Sequence
  Description of Artificial Sequence: Synthetic oligonucleotide
guguguaucccaucaggca

SEQ ID NO: 948594 - RNA, 19 nt, Artificial Sequence
  Description of Artificial Sequence: Synthetic oligonucleotide
gaggaagguaagccugggc

SEQ ID NO: 948595 - RNA, 19 nt, Artificial Sequence
  Description of Artificial Sequence: Synthetic oligonucleotide
cagucugcagcccuccuac

SEQ ID NO: 948596 - RNA, 19 nt, Artificial Sequence
  Description of Artificial Sequence: Synthetic oligonucleotide
gacucggguacgaaaagga

SEQ ID NO: 948597 - RNA, 19 nt, Artificial Sequence
  Description of Artificial Sequence: Synthetic oligonucleotide
guacaggcuucucggggcg

SEQ ID NO: 948598 - RNA, 19 nt, Artificial Sequence
  Description of Artificial Sequence: Synthetic oligonucleotide
uaccgccucacgcaccacc

SEQ ID NO: 948599 - RNA, 19 nt, Artificial Sequence
  Description of Artificial Sequence: Synthetic oligonucleotide
  modified_base (5)..(5): a, c, u, g, unknown or other
gcagngcaagggcagaaag

SEQ ID NO: 948600 - RNA, 19 nt, Artificial Sequence
  Description of Artificial Sequence: Synthetic oligonucleotide
uuaucccgaccccagccuc

SEQ ID NO: 948601 - RNA, 19 nt, Artificial Sequence
  Description of Artificial Sequence: Synthetic oligonucleotide
uauagcggcugaccuccug

SEQ ID NO: 948602 - RNA, 19 nt, Artificial Sequence
  Description of Artificial Sequence: Synthetic oligonucleotide
gcagauucggcuuucuguc

SEQ ID NO: 948603 - RNA, 19 nt, Artificial Sequence
  Description of Artificial Sequence: Synthetic oligonucleotide
uaucccgaccccagccucc

SEQ ID NO: 948604 - RNA, 19 nt, Artificial Sequence
  Description of Artificial Sequence: Synthetic oligonucleotide
aucucuguuaacaccgccu

SEQ ID NO: 948605 - RNA, 19 nt, Artificial Sequence
  Description of Artificial Sequence: Synthetic oligonucleotide
caccagcgcucucagagag

SEQ ID NO: 948606 - RNA, 19 nt, Artificial Sequence
  Description of Artificial Sequence: Synthetic oligonucleotide
guguccggaagccucacuc

SEQ ID NO: 948607 - RNA, 19 nt, Artificial Sequence
  Description of Artificial Sequence: Synthetic oligonucleotide
agaaccaccuggcggugca

SEQ ID NO: 948608 - RNA, 19 nt, Artificial Sequence
  Description of Artificial Sequence: Synthetic oligonucleotide
cuugggcauccucacaguc

SEQ ID NO: 948609 - RNA, 19 nt, Artificial Sequence
  Description of Artificial Sequence: Synthetic oligonucleotide
uguuucugucccacggcua

SEQ ID NO: 948610 - RNA, 19 nt, Artificial Sequence
  Description of Artificial Sequence: Synthetic oligonucleotide
ggagaggaagguaagccug

SEQ ID NO: 948611 - RNA, 19 nt, Artificial Sequence
  Description of Artificial Sequence: Synthetic oligonucleotide
caucuccccuaugaagucg

SEQ ID NO: 948612 - RNA, 19 nt, Artificial Sequence
  Description of Artificial Sequence: Synthetic oligonucleotide
gacguuguuucugucccac

SEQ ID NO: 948613 - RNA, 19 nt, Artificial Sequence
  Description of Artificial Sequence: Synthetic oligonucleotide
gcaaccgccacaucagggc

SEQ ID NO: 948614 - RNA, 19 nt, Artificial Sequence
  Description of Artificial Sequence: Synthetic oligonucleotide
cugcacaccgcaguucagg

SEQ ID NO: 948615 - RNA, 19 nt, Artificial Sequence
  Description of Artificial Sequence: Synthetic oligonucleotide
cuauguagcagaaaaccuu

SEQ ID NO: 948616 - RNA, 19 nt, Artificial Sequence
  Description of Artificial Sequence: Synthetic oligonucleotide
guccgcacaagcugcccgg

SEQ ID NO: 948617 - RNA, 19 nt, Artificial Sequence
  Description of Artificial Sequence: Synthetic oligonucleotide
accuucucggcugcuauug

SEQ ID NO: 948618 - RNA, 19 nt, Artificial Sequence
  Description of Artificial Sequence: Synthetic oligonucleotide
agauucggcuuucugucua

SEQ ID NO: 948619 - RNA, 19 nt, Artificial Sequence
  Description of Artificial Sequence: Synthetic oligonucleotide
ucggccccaaagcugcgca

SEQ ID NO: 948620 - RNA, 19 nt, Artificial Sequence
  Description of Artificial Sequence: Synthetic oligonucleotide
uccccuauuucugugugua

SEQ ID NO: 948621 - RNA, 19 nt, Artificial Sequence
  Description of Artificial Sequence: Synthetic oligonucleotide
agccccauagucagccagc

SEQ ID NO: 948622 - RNA, 19 nt, Artificial Sequence
  Description of Artificial Sequence: Synthetic oligonucleotide
ugacccacuuccuccugga

SEQ ID NO: 948623 - RNA, 19 nt, Artificial Sequence
  Description of Artificial Sequence: Synthetic oligonucleotide
cugcccuugcuugagcacc

SEQ ID NO: 948624 - RNA, 19 nt, Artificial Sequence
  Description of Artificial Sequence: Synthetic oligonucleotide
acucggguacgaaaaggag

SEQ ID NO: 948625 - RNA, 19 nt, Artificial Sequence
  Description of Artificial Sequence: Synthetic oligonucleotide
cucacacugggcguccagg

SEQ ID NO: 948626 - RNA, 19 nt, Artificial Sequence
  Description of Artificial Sequence: Synthetic oligonucleotide
cucggggcgacucggguac

SEQ ID NO: 948627 - RNA, 19 nt, Artificial Sequence
  Description of Artificial Sequence: Synthetic oligonucleotide
cuguuaacaccgccugaug

SEQ ID NO: 948628 - RNA, 19 nt, Artificial Sequence
  Description of Artificial Sequence: Synthetic oligonucleotide
cguugcuaagcauaucccc

SEQ ID NO: 948629 - RNA, 19 nt, Artificial Sequence
  Description of Artificial Sequence: Synthetic oligonucleotide
uguaccaggugagcauaga

SEQ ID NO: 948630 - RNA, 19 nt, Artificial Sequence
  Description of Artificial Sequence: Synthetic oligonucleotide
uccgcagguugauucugga

SEQ ID NO: 948631 - RNA, 19 nt, Artificial Sequence
  Description of Artificial Sequence: Synthetic oligonucleotide
cguuguuucugucccacgg

SEQ ID NO: 948632 - RNA, 19 nt, Artificial Sequence
  Description of Artificial Sequence: Synthetic oligonucleotide
aggucuuggcgcagcaagg

SEQ ID NO: 948633 - RNA, 19 nt, Artificial Sequence
  Description of Artificial Sequence: Synthetic oligonucleotide
auugugaggggcaggucca

SEQ ID NO: 948634 - RNA, 19 nt, Artificial Sequence
  Description of Artificial Sequence: Synthetic oligonucleotide
ggaagguaagccugggcga

SEQ ID NO: 948635 - RNA, 19 nt, Artificial Sequence
  Description of Artificial Sequence: Synthetic oligonucleotide
ugcuaagcauauccccaua

SEQ ID NO: 948636 - RNA, 19 nt, Artificial Sequence
  Description of Artificial Sequence: Synthetic oligonucleotide
cuccccuaugaagucgucc

SEQ ID NO: 948637 - RNA, 19 nt, Artificial Sequence
  Description of Artificial Sequence: Synthetic oligonucleotide
aacaggauauuggcauuua

SEQ ID NO: 948638 - RNA, 19 nt, Artificial Sequence
  Description of Artificial Sequence: Synthetic oligonucleotide
auauccccauacauguaca

SEQ ID NO: 948639 - RNA, 19 nt, Artificial Sequence
  Description of Artificial Sequence: Synthetic oligonucleotide
guacgaaaaggagaugucu

SEQ ID NO: 948640 - RNA, 19 nt, Artificial Sequence
  Description of Artificial Sequence: Synthetic oligonucleotide
uggccagacguuguuucug

SEQ ID NO: 948641 - RNA, 19 nt, Artificial Sequence
  Description of Artificial Sequence: Synthetic oligonucleotide
uucucggggcgacucgggu

SEQ ID NO: 948642 - RNA, 19 nt, Artificial Sequence
  Description of Artificial Sequence: Synthetic oligonucleotide
cuucucggggcgacucggg

SEQ ID NO: 948643 - RNA, 19 nt, Artificial Sequence
  Description of Artificial Sequence: Synthetic oligonucleotide
gaauagcaggaaggagagc

SEQ ID NO: 948644 - RNA, 19 nt, Artificial Sequence
  Description of Artificial Sequence: Synthetic oligonucleotide
ucacagucccucaggccau

SEQ ID NO: 948645 - RNA, 19 nt, Artificial Sequence
  Description of Artificial Sequence: Synthetic oligonucleotide
acaggcuucucggggcgac

SEQ ID NO: 948646 - RNA, 19 nt, Artificial Sequence
  Description of Artificial Sequence: Synthetic oligonucleotide
uguguccggaagccucacu

SEQ ID NO: 948647 - RNA, 19 nt, Artificial Sequence
  Description of Artificial Sequence: Synthetic oligonucleotide
caccugcccggccuuagcc

SEQ ID NO: 948648 - RNA, 19 nt, Artificial Sequence
  Description of Artificial Sequence: Synthetic oligonucleotide
cuaugaagucguccgcaca

SEQ ID NO: 948649 - RNA, 19 nt, Artificial Sequence
  Description of Artificial Sequence: Synthetic oligonucleotide
uuagcaccugcaugcccaa

SEQ ID NO: 948650 - RNA, 19 nt, Artificial Sequence
  Description of Artificial Sequence: Synthetic oligonucleotide
aucacccuccguaugacua

SEQ ID NO: 948651 - RNA, 19 nt, Artificial Sequence
  Description of Artificial Sequence: Synthetic oligonucleotide
uccuaccgccucacgcacc

SEQ ID NO: 948652 - RNA, 19 nt, Artificial Sequence
  Description of Artificial Sequence: Synthetic oligonucleotide
agacguuguuucuguccca

SEQ ID NO: 948653 - RNA, 19 nt, Artificial Sequence
  Description of Artificial Sequence: Synthetic oligonucleotide
gcaugaaguaguagagccc

SEQ ID NO: 948654 - RNA, 19 nt, Artificial Sequence
  Description of Artificial Sequence: Synthetic oligonucleotide
auccgcagguugauucugg

SEQ ID NO: 948655 - RNA, 19 nt, Artificial Sequence
  Description of Artificial Sequence: Synthetic oligonucleotide
uccggacauagugacccac

SEQ ID NO: 948656 - RNA, 19 nt, Artificial Sequence
  Description of Artificial Sequence: Synthetic oligonucleotide
caguggggcucuguguccg

SEQ ID NO: 948657 - RNA, 19 nt, Artificial Sequence
  Description of Artificial Sequence: Synthetic oligonucleotide
gaagucguccgcacaagcu

SEQ ID NO: 948658 - RNA, 19 nt, Artificial Sequence
  Description of Artificial Sequence: Synthetic oligonucleotide
acaccgccugaugacgggg

SEQ ID NO: 948659 - RNA, 19 nt, Artificial Sequence
  Description of Artificial Sequence: Synthetic oligonucleotide
cugaaccgugugcagccug

SEQ ID NO: 948660 - RNA, 19 nt, Artificial Sequence
  Description of Artificial Sequence: Synthetic oligonucleotide
agugacccacuuccuccug

SEQ ID NO: 948661 - RNA, 19 nt, Artificial Sequence
  Description of Artificial Sequence: Synthetic oligonucleotide
aagguaagccugggcgaca

SEQ ID NO: 948662 - RNA, 19 nt, Artificial Sequence
  Description of Artificial Sequence: Synthetic oligonucleotide
cgaauccgcagguugauuc

SEQ ID NO: 948663 - RNA, 19 nt, Artificial Sequence
  Description of Artificial Sequence: Synthetic oligonucleotide
aagcugcgcacagucugca

SEQ ID NO: 948664 - RNA, 19 nt, Artificial Sequence
  Description of Artificial Sequence: Synthetic oligonucleotide
agcaccguccugucucccu

SEQ ID NO: 948665 - RNA, 19 nt, Artificial Sequence
  Description of Artificial Sequence: Synthetic oligonucleotide
ucucggggcgacucgggua

SEQ ID NO: 948666 - RNA, 19 nt, Artificial Sequence
  Description of Artificial Sequence: Synthetic oligonucleotide
accugcccggccuuagcca

SEQ ID NO: 948667 - RNA, 19 nt, Artificial Sequence
  Description of Artificial Sequence: Synthetic oligonucleotide
gaacgucaggcccuugagu

SEQ ID NO: 948668 - RNA, 19 nt, Artificial Sequence
  Description of Artificial Sequence: Synthetic oligonucleotide
guuguacaccuucucggcu

SEQ ID NO: 948669 - RNA, 19 nt, Artificial Sequence
  Description of Artificial Sequence: Synthetic oligonucleotide
acauugcuccagggccucc

SEQ ID NO: 948670 - RNA, 19 nt, Artificial Sequence
  Description of Artificial Sequence: Synthetic oligonucleotide
ccuaugaagucguccgcac

SEQ ID NO: 948671 - RNA, 19 nt, Artificial Sequence
  Description of Artificial Sequence: Synthetic oligonucleotide
aucgcauccuggaucucug

SEQ ID NO: 948672 - RNA, 19 nt, Artificial Sequence
  Description of Artificial Sequence: Synthetic oligonucleotide
cugcuauugugaggggcag

SEQ ID NO: 948673 - RNA, 19 nt, Artificial Sequence
  Description of Artificial Sequence: Synthetic oligonucleotide
acacccggagcaugaagua

SEQ ID NO: 948674 - RNA, 19 nt, Artificial Sequence
  Description of Artificial Sequence: Synthetic oligonucleotide
uccccgugggucuggguuc

SEQ ID NO: 948675 - RNA, 19 nt, Artificial Sequence
  Description of Artificial Sequence: Synthetic oligonucleotide
uuccggacauagugaccca

SEQ ID NO: 948676 - RNA, 19 nt, Artificial Sequence
  Description of Artificial Sequence: Synthetic oligonucleotide
uuauagcggcugaccuccu

SEQ ID NO: 948677 - RNA, 19 nt, Artificial Sequence
  Description of Artificial Sequence: Synthetic oligonucleotide
agcugcgcacagucugcag

SEQ ID NO: 948678 - RNA, 19 nt, Artificial Sequence
  Description of Artificial Sequence: Synthetic oligonucleotide
aggccaucacccuccguau

SEQ ID NO: 948679 - RNA, 19 nt, Artificial Sequence
  Description of Artificial Sequence: Synthetic oligonucleotide
cuccuaccgccucacgcac

SEQ ID NO: 948680 - RNA, 19 nt, Artificial Sequence
  Description of Artificial Sequence: Synthetic oligonucleotide
  modified_base (2)..(2): a, c, u, g, unknown or other
gngcaagggcagaaagguc

SEQ ID NO: 948681 - RNA, 19 nt, Artificial Sequence
  Description of Artificial Sequence: Synthetic oligonucleotide
ccuuauagcggcugaccuc

SEQ ID NO: 948682 - RNA, 19 nt, Artificial Sequence
  Description of Artificial Sequence: Synthetic oligonucleotide
ucugaaccgugugcagccu

SEQ ID NO: 948683 - RNA, 19 nt, Artificial Sequence
  Description of Artificial Sequence: Synthetic oligonucleotide
gcauuuaaagggagccagc

SEQ ID NO: 948684 - RNA, 19 nt, Artificial Sequence
  Description of Artificial Sequence: Synthetic oligonucleotide
gacugcuggggcacucaug

SEQ ID NO: 948685 - RNA, 19 nt, Artificial Sequence
  Description of Artificial Sequence: Synthetic oligonucleotide
aggucucggcgccaccaca

SEQ ID NO: 948686 - RNA, 19 nt, Artificial Sequence
  Description of Artificial Sequence: Synthetic oligonucleotide
cauacauguacaccagguu

SEQ ID NO: 948687 - RNA, 19 nt, Artificial Sequence
  Description of Artificial Sequence: Synthetic oligonucleotide
cucuguuaacaccgccuga

SEQ ID NO: 948688 - RNA, 19 nt, Artificial Sequence
  Description of Artificial Sequence: Synthetic oligonucleotide
gccaucacccuccguauga

SEQ ID NO: 948689 - RNA, 19 nt, Artificial Sequence
  Description of Artificial Sequence: Synthetic oligonucleotide
agccugguuggggccaggg

SEQ ID NO: 948690 - RNA, 19 nt, Artificial Sequence
  Description of Artificial Sequence: Synthetic oligonucleotide
ggauuagcaccugcaugcc

SEQ ID NO: 948691 - RNA, 19 nt, Artificial Sequence
  Description of Artificial Sequence: Synthetic oligonucleotide
gaaccgugugcagccugug

SEQ ID NO: 948692 - RNA, 19 nt, Artificial Sequence
  Description of Artificial Sequence: Synthetic oligonucleotide
aggacccguggguuccuca

SEQ ID NO: 948693 - RNA, 19 nt, Artificial Sequence
  Description of Artificial Sequence: Synthetic oligonucleotide
caccguccugucucccugc

SEQ ID NO: 948694 - RNA, 19 nt, Artificial Sequence
  Description of Artificial Sequence: Synthetic oligonucleotide
gcaagggcagaaagguccc

SEQ ID NO: 948695 - RNA, 19 nt, Artificial Sequence
  Description of Artificial Sequence: Synthetic oligonucleotide
ccccauacauguacaccag

SEQ ID NO: 948696 - RNA, 19 nt, Artificial Sequence
  Description of Artificial Sequence: Synthetic oligonucleotide
ucguccgcacaagcugccc

SEQ ID NO: 948697 - RNA, 19 nt, Artificial Sequence
  Description of Artificial Sequence: Synthetic oligonucleotide
gauucggcuuucugucuau

SEQ ID NO: 948698 - RNA, 19 nt, Artificial Sequence
  Description of Artificial Sequence: Synthetic oligonucleotide
cacaagcugcccgggcagc

SEQ ID NO: 948699 - RNA, 19 nt, Artificial Sequence
  Description of Artificial Sequence: Synthetic oligonucleotide
ucccugcgaccuccaggcc

SEQ ID NO: 948700 - RNA, 19 nt, Artificial Sequence
  Description of Artificial Sequence: Synthetic oligonucleotide
ccugcgaccuccaggccug

SEQ ID NO: 948701 - RNA, 19 nt, Artificial Sequence
  Description of Artificial Sequence: Synthetic oligonucleotide
ggcaaucaccagcaccguc

SEQ ID NO: 948702 - RNA, 19 nt, Artificial Sequence
  Description of Artificial Sequence: Synthetic oligonucleotide
gaaccaccuggcggugcag

SEQ ID NO: 948703 - RNA, 19 nt, Artificial Sequence
  Description of Artificial Sequence: Synthetic oligonucleotide
gcaucuccccuaugaaguc

SEQ ID NO: 948704 - RNA, 19 nt, Artificial Sequence
  Description of Artificial Sequence: Synthetic oligonucleotide
cagguugauucuggacaug

SEQ ID NO: 948705 - RNA, 19 nt, Artificial Sequence
  Description of Artificial Sequence: Synthetic oligonucleotide
caggucucggcgccaccac

SEQ ID NO: 948706 - RNA, 19 nt, Artificial Sequence
  Description of Artificial Sequence: Synthetic oligonucleotide
gguuccggacauagugacc

SEQ ID NO: 948707 - RNA, 19 nt, Artificial Sequence
  Description of Artificial Sequence: Synthetic oligonucleotide
cuccccuggugaccucacc

SEQ ID NO: 948708 - RNA, 19 nt, Artificial Sequence
  Description of Artificial Sequence: Synthetic oligonucleotide
ucgaauccgcagguugauu

SEQ ID NO: 948709 - RNA, 19 nt, Artificial Sequence
  Description of Artificial Sequence: Synthetic oligonucleotide
gccaucgcauccuggaucu

SEQ ID NO: 948710 - RNA, 19 nt, Artificial Sequence
  Description of Artificial Sequence: Synthetic oligonucleotide
gucguccgcacaagcugcc

SEQ ID NO: 948711 - RNA, 19 nt, Artificial Sequence
  Description of Artificial Sequence: Synthetic oligonucleotide
gcagcgcccacguugcuaa

SEQ ID NO: 948712 - RNA, 19 nt, Artificial Sequence
  Description of Artificial Sequence: Synthetic oligonucleotide
gccugggcgacacccggag

SEQ ID NO: 948713 - RNA, 19 nt, Artificial Sequence
  Description of Artificial Sequence: Synthetic oligonucleotide
ccuccuaccgccucacgca

SEQ ID NO: 948714 - RNA, 19 nt, Artificial Sequence
  Description of Artificial Sequence: Synthetic oligonucleotide
cucggccccaaagcugcgc

SEQ ID NO: 948715 - RNA, 19 nt, Artificial Sequence
  Description of Artificial Sequence: Synthetic oligonucleotide
aaccgccacaucagggcuu

SEQ ID NO: 948716 - RNA, 19 nt, Artificial Sequence
  Description of Artificial Sequence: Synthetic oligonucleotide
aggcuccgcaacaggauau

SEQ ID NO: 948717 - RNA, 19 nt, Artificial Sequence
  Description of Artificial Sequence: Synthetic oligonucleotide
cgacucggguacgaaaagg

SEQ ID NO: 948718 - RNA, 19 nt, Artificial Sequence
  Description of Artificial Sequence: Synthetic oligonucleotide
augaaguaguagagcccaa

SEQ ID NO: 948719 - RNA, 19 nt, Artificial Sequence
  Description of Artificial Sequence: Synthetic oligonucleotide
caucgcauccuggaucucu

SEQ ID NO: 948720 - RNA, 19 nt, Artificial Sequence
  Description of Artificial Sequence: Synthetic oligonucleotide
ggugucggagcucagccuu

SEQ ID NO: 948721 - RNA, 19 nt, Artificial Sequence
  Description of Artificial Sequence: Synthetic oligonucleotide
ccccuaugaagucguccgc

SEQ ID NO: 948722 - RNA, 19 nt, Artificial Sequence
  Description of Artificial Sequence: Synthetic oligonucleotide
ugggcgacacccggagcau

SEQ ID NO: 948723 - RNA, 19 nt, Artificial Sequence
  Description of Artificial Sequence: Synthetic oligonucleotide
cgugggucuggguucuggc

SEQ ID NO: 948724 - RNA, 19 nt, Artificial Sequence
  Description of Artificial Sequence: Synthetic oligonucleotide
gcgcccacguugcuaagca

SEQ ID NO: 948725 - RNA, 19 nt, Artificial Sequence
  Description of Artificial Sequence: Synthetic oligonucleotide
gcuccgcaacaggauauug

SEQ ID NO: 948726 - RNA, 19 nt, Artificial Sequence
  Description of Artificial Sequence: Synthetic oligonucleotide
gccucgguugaagaacuca

SEQ ID NO: 948727 - RNA, 19 nt, Artificial Sequence
  Description of Artificial Sequence: Synthetic oligonucleotide
ucggggcgacucggguacg

SEQ ID NO: 948728 - RNA, 19 nt, Artificial Sequence
  Description of Artificial Sequence: Synthetic oligonucleotide
aggugagcauagacauccu

SEQ ID NO: 948729 - RNA, 19 nt, Artificial Sequence
  Description of Artificial Sequence: Synthetic oligonucleotide
accgccacaucagggcuuu

SEQ ID NO: 948730 - RNA, 19 nt, Artificial Sequence
  Description of Artificial Sequence: Synthetic oligonucleotide
cgcaacaggauauuggcau

SEQ ID NO: 948731 - RNA, 19 nt, Artificial Sequence
  Description of Artificial Sequence: Synthetic oligonucleotide
ccaucacuugggcauccuc

SEQ ID NO: 948732 - RNA, 19 nt, Artificial Sequence
  Description of Artificial Sequence: Synthetic oligonucleotide
gcgcucucagagagaaaag

SEQ ID NO: 948733 - RNA, 19 nt, Artificial Sequence
  Description of Artificial Sequence: Synthetic oligonucleotide
caucacccuccguaugacu

SEQ ID NO: 948734 - RNA, 19 nt, Artificial Sequence
  Description of Artificial Sequence: Synthetic oligonucleotide
cgccucacgcaccaccugc

SEQ ID NO: 948735 - RNA, 19 nt, Artificial Sequence
  Description of Artificial Sequence: Synthetic oligonucleotide
accagcgcucucagagaga

SEQ ID NO: 948736 - RNA, 19 nt, Artificial Sequence
  Description of Artificial Sequence: Synthetic oligonucleotide
ggcgacacccggagcauga

SEQ ID NO: 948737 - RNA, 19 nt, Artificial Sequence
  Description of Artificial Sequence: Synthetic oligonucleotide
gcccaaccaccuucaccag

SEQ ID NO: 948738 - RNA, 19 nt, Artificial Sequence
  Description of Artificial Sequence: Synthetic oligonucleotide
ggccagacguuguuucugu

SEQ ID NO: 948739 - RNA, 19 nt, Artificial Sequence
  Description of Artificial Sequence: Synthetic oligonucleotide
ccgcaacaggauauuggca

SEQ ID NO: 948740 - RNA, 19 nt, Artificial Sequence
  Description of Artificial Sequence: Synthetic oligonucleotide
ggcucaucagggagguguc

SEQ ID NO: 948741 - RNA, 19 nt, Artificial Sequence
  Description of Artificial Sequence: Synthetic oligonucleotide
cccuaugaagucguccgca

SEQ ID NO: 948742 - RNA, 19 nt, Artificial Sequence
  Description of Artificial Sequence: Synthetic oligonucleotide
ugccucccaccagcgcucu

SEQ ID NO: 948743 - RNA, 19 nt, Artificial Sequence
  Description of Artificial Sequence: Synthetic oligonucleotide
gccagacguuguuucuguc

SEQ ID NO: 948744 - RNA, 19 nt, Artificial Sequence
  Description of Artificial Sequence: Synthetic oligonucleotide
cugcccggccuuagccauc

SEQ ID NO: 948745 - RNA, 19 nt, Artificial Sequence
  Description of Artificial Sequence: Synthetic oligonucleotide
gucccacggcuaacuggcc

SEQ ID NO: 948746 - RNA, 19 nt, Artificial Sequence
  Description of Artificial Sequence: Synthetic oligonucleotide
cuccccuauuucugugugu

SEQ ID NO: 948747 - RNA, 19 nt, Artificial Sequence
  Description of Artificial Sequence: Synthetic oligonucleotide
ccaucacccuccguaugac

SEQ ID NO: 948748 - RNA, 19 nt, Artificial Sequence
  Description of Artificial Sequence: Synthetic oligonucleotide
gaacucaguggggcucugu

SEQ ID NO: 948749 - RNA, 19 nt, Artificial Sequence
  Description of Artificial Sequence: Synthetic oligonucleotide
cagcaccguccugucuccc

SEQ ID NO: 948750 - RNA, 19 nt, Artificial Sequence
  Description of Artificial Sequence: Synthetic oligonucleotide
cccuccguaugacuaaaua

SEQ ID NO: 948751 - RNA, 19 nt, Artificial Sequence
  Description of Artificial Sequence: Synthetic oligonucleotide
  modified_base (6)..(6): a, c, u, g, unknown or other
ggcagngcaagggcagaaa

SEQ ID NO: 948752 - RNA, 19 nt, Artificial Sequence
  Description of Artificial Sequence: Synthetic oligonucleotide
gggcgacucggguacgaaa

SEQ ID NO: 948753 - RNA, 19 nt, Artificial Sequence
  Description of Artificial Sequence: Synthetic oligonucleotide
ccggagcaugaaguaguag

SEQ ID NO: 948754 - RNA, 19 nt, Artificial Sequence
  Description of Artificial Sequence: Synthetic oligonucleotide
caucaggcaucuccccuau

SEQ ID NO: 948755 - RNA, 19 nt, Artificial Sequence
  Description of Artificial Sequence: Synthetic oligonucleotide
gguugauucuggacauggu

SEQ ID NO: 948756 - RNA, 19 nt, Artificial Sequence
  Description of Artificial Sequence: Synthetic oligonucleotide
gcugcacaccgcaguucag

SEQ ID NO: 948757 - RNA, 19 nt, Artificial Sequence
  Description of Artificial Sequence: Synthetic oligonucleotide
acccuccguaugacuaaau

SEQ ID NO: 948758 - RNA, 19 nt, Artificial Sequence
  Description of Artificial Sequence: Synthetic oligonucleotide
cacccuccguaugacuaaa

SEQ ID NO: 948759 - RNA, 19 nt, Artificial Sequence
  Description of Artificial Sequence: Synthetic oligonucleotide
cgcacaagcugcccgggca

SEQ ID NO: 948760 - RNA, 19 nt, Artificial Sequence
  Description of Artificial Sequence: Synthetic oligonucleotide
cucgaauccgcagguugau

SEQ ID NO: 948761 - RNA, 19 nt, Artificial Sequence
  Description of Artificial Sequence: Synthetic oligonucleotide
ccaccugcccggccuuagc

SEQ ID NO: 948762 - RNA, 19 nt, Artificial Sequence
  Description of Artificial Sequence: Synthetic oligonucleotide
cccggccuuagccaucgca

SEQ ID NO: 948763 - RNA, 19 nt, Artificial Sequence
  Description of Artificial Sequence: Synthetic oligonucleotide
ggaucaggacccguggguu

SEQ ID NO: 948764 - RNA, 19 nt, Artificial Sequence
  Description of Artificial Sequence: Synthetic oligonucleotide
gccacaucagggcuuuguu

SEQ ID NO: 948765 - RNA, 19 nt, Artificial Sequence
  Description of Artificial Sequence: Synthetic oligonucleotide
cccacguugcuaagcauau

SEQ ID NO: 948766 - RNA, 19 nt, Artificial Sequence
  Description of Artificial Sequence: Synthetic oligonucleotide
gcccuccuaccgccucacg

SEQ ID NO: 948767 - RNA, 19 nt, Artificial Sequence
  Description of Artificial Sequence: Synthetic oligonucleotide
caauggccagacguuguuu

SEQ ID NO: 948768 - RNA, 19 nt, Artificial Sequence
  Description of Artificial Sequence: Synthetic oligonucleotide
ccggccuuagccaucgcau

SEQ ID NO: 948769 - RNA, 19 nt, Artificial Sequence
  Description of Artificial Sequence: Synthetic oligonucleotide
gcauauccccauacaugua

SEQ ID NO: 948770 - RNA, 19 nt, Artificial Sequence
  Description of Artificial Sequence: Synthetic oligonucleotide
gggcgacacccggagcaug

SEQ ID NO: 948771 - RNA, 19 nt, Artificial Sequence
  Description of Artificial Sequence: Synthetic oligonucleotide
cugcgaccuccaggccugc

SEQ ID NO: 948772 - RNA, 19 nt, Artificial Sequence
  Description of Artificial Sequence: Synthetic oligonucleotide
caggacccguggguuccuc

SEQ ID NO: 948773 - RNA, 19 nt, Artificial Sequence
  Description of Artificial Sequence: Synthetic oligonucleotide
ccggacauagugacccacu

SEQ ID NO: 948774 - RNA, 19 nt, Artificial Sequence
  Description of Artificial Sequence: Synthetic oligonucleotide
ccacguugcuaagcauauc

SEQ ID NO: 948775 - RNA, 19 nt, Artificial Sequence
  Description of Artificial Sequence: Synthetic oligonucleotide
gggaggugucggagcucag

SEQ ID NO: 948776 - RNA, 19 nt, Artificial Sequence
  Description of Artificial Sequence: Synthetic oligonucleotide
gcgcacagucugcagcccu

SEQ ID NO: 948777 - RNA, 19 nt, Artificial Sequence
  Description of Artificial Sequence: Synthetic oligonucleotide
cccggagcaugaaguagua

SEQ ID NO: 948778 - RNA, 19 nt, Artificial Sequence
  Description of Artificial Sequence: Synthetic oligonucleotide
cccugcgaccuccaggccu

SEQ ID NO: 948779 - RNA, 19 nt, Artificial Sequence
  Description of Artificial Sequence: Synthetic oligonucleotide
cgacauugcuccagggccu

SEQ ID NO: 948780 - RNA, 19 nt, Artificial Sequence
  Description of Artificial Sequence: Synthetic oligonucleotide
ggccucgguugaagaacuc

SEQ ID NO: 948781 - RNA, 19 nt, Artificial Sequence
  Description of Artificial Sequence: Synthetic oligonucleotide
cccgggcaauggccagacg

SEQ ID NO: 948782 - RNA, 19 nt, Artificial Sequence
  Description of Artificial Sequence: Synthetic oligonucleotide
ccgccucacgcaccaccug

SEQ ID NO: 948783 - RNA, 19 nt, Artificial Sequence
  Description of Artificial Sequence: Synthetic oligonucleotide
cacagucccucaggccaua

SEQ ID NO: 948784 - RNA, 19 nt, Artificial Sequence
  Description of Artificial Sequence: Synthetic oligonucleotide
cggguacgaaaaggagaug

SEQ ID NO: 948785 - RNA, 19 nt, Artificial Sequence
  Description of Artificial Sequence: Synthetic oligonucleotide
ggggcgacucggguacgaa

SEQ ID NO: 948786 - RNA, 19 nt, Artificial Sequence
  Description of Artificial Sequence: Synthetic oligonucleotide
gggcguccagggcacuggu

SEQ ID NO: 948787 - RNA, 19 nt, Artificial Sequence
  Description of Artificial Sequence: Synthetic oligonucleotide
ggucugcguucugaaccgu

SEQ ID NO: 948788 - RNA, 19 nt, Artificial Sequence
  Description of Artificial Sequence: Synthetic oligonucleotide
gcgacacccggagcaugaa

SEQ ID NO: 948789 - RNA, 19 nt, Artificial Sequence
  Description of Artificial Sequence: Synthetic oligonucleotide
ccguccugucucccugcga

SEQ ID NO: 948790 - RNA, 19 nt, Artificial Sequence
  Description of Artificial Sequence: Synthetic oligonucleotide
caggcuucucggggcgacu

SEQ ID NO: 948791 - RNA, 19 nt, Artificial Sequence
  Description of Artificial Sequence: Synthetic oligonucleotide
ggcuccgcaacaggauauu

SEQ ID NO: 948792 - RNA, 19 nt, Artificial Sequence
  Description of Artificial Sequence: Synthetic oligonucleotide
ccaucgcauccuggaucuc

SEQ ID NO: 948793 - RNA, 19 nt, Artificial Sequence
  Description of Artificial Sequence: Synthetic oligonucleotide
gccaucacuugggcauccu

SEQ ID NO: 948794 - RNA, 19 nt, Artificial Sequence
  Description of Artificial Sequence: Synthetic oligonucleotide
ccccuauuucuguguguau

SEQ ID NO: 948795 - RNA, 19 nt, Artificial Sequence
  Description of Artificial Sequence: Synthetic oligonucleotide
cggacauagugacccacuu

SEQ ID NO: 948796 - RNA, 19 nt, Artificial Sequence
  Description of Artificial Sequence: Synthetic oligonucleotide
cagcagcgcccacguugcu

SEQ ID NO: 948797 - RNA, 19 nt, Artificial Sequence
  Description of Artificial Sequence: Synthetic oligonucleotide
ccgccacaucagggcuuug

SEQ ID NO: 948798 - RNA, 19 nt, Artificial Sequence
  Description of Artificial Sequence: Synthetic oligonucleotide
ccccgugggucuggguucu

SEQ ID NO: 948799 - RNA, 19 nt, Artificial Sequence
  Description of Artificial Sequence: Synthetic oligonucleotide
cggggcgacucggguacga

SEQ ID NO: 948800 - RNA, 19 nt, Artificial Sequence
  Description of Artificial Sequence: Synthetic oligonucleotide
  modified_base (1)..(1): a, c, u, g, unknown or other
ngcaagggcagaaaggucc

SEQ ID NO: 948801 - RNA, 19 nt, Artificial Sequence
  Description of Artificial Sequence: Synthetic oligonucleotide
uuuauuggaaccuuaaacg

SEQ ID NO: 948802 - RNA, 19 nt, Artificial Sequence
  Description of Artificial Sequence: Synthetic oligonucleotide
aacguuaaaagucgaaggc

SEQ ID NO: 948803 - RNA, 19 nt, Artificial Sequence
  Description of Artificial Sequence: Synthetic oligonucleotide
cuaacuuccagucagaugc

SEQ ID NO: 948804 - RNA, 19 nt, Artificial Sequence
  Description of Artificial Sequence: Synthetic oligonucleotide
aaugcuaugcuucaaaugu

SEQ ID NO: 948805 - RNA, 19 nt, Artificial Sequence
  Description of Artificial Sequence: Synthetic oligonucleotide
agguagaacauacauaucc

SEQ ID NO: 948806 - RNA, 19 nt, Artificial Sequence
  Description of Artificial Sequence: Synthetic oligonucleotide
aaauaauccagcccgaaag

SEQ ID NO: 948807 - RNA, 19 nt, Artificial Sequence
  Description of Artificial Sequence: Synthetic oligonucleotide
aaacguuaaaagucgaagg

SEQ ID NO: 948808 - RNA, 19 nt, Artificial Sequence
  Description of Artificial Sequence: Synthetic oligonucleotide
uuagauuuuggaauaggcg

SEQ ID NO: 948809 - RNA, 19 nt, Artificial Sequence
  Description of Artificial Sequence: Synthetic oligonucleotide
gaagcuacggaaaagauug

SEQ ID NO: 948810 - RNA, 19 nt, Artificial Sequence
  Description of Artificial Sequence: Synthetic oligonucleotide
ugaaaagggauccacacca

SEQ ID NO: 948811 - RNA, 19 nt, Artificial Sequence
  Description of Artificial Sequence: Synthetic oligonucleotide
cauuguaaaaggaauggcg

SEQ ID NO: 948812 - RNA, 19 nt, Artificial Sequence
  Description of Artificial Sequence: Synthetic oligonucleotide
uauaaauccuccccaaucc

SEQ ID NO: 948813 - RNA, 19 nt, Artificial Sequence
  Description of Artificial Sequence: Synthetic oligonucleotide
accauuauugcaccaauac

SEQ ID NO: 948814 - RNA, 19 nt, Artificial Sequence
  Description of Artificial Sequence: Synthetic oligonucleotide
caauaaaugcacuacgccc

SEQ ID NO: 948815 - RNA, 19 nt, Artificial Sequence
  Description of Artificial Sequence: Synthetic oligonucleotide
cucaaauugcccaacaaag

SEQ ID NO: 948816 - RNA, 19 nt, Artificial Sequence
  Description of Artificial Sequence: Synthetic oligonucleotide
agcuaaauggacuacaaga

SEQ ID NO: 948817 - RNA, 19 nt, Artificial Sequence
  Description of Artificial Sequence: Synthetic oligonucleotide
aguuggauggcuguggugc

SEQ ID NO: 948818 - RNA, 19 nt, Artificial Sequence
  Description of Artificial Sequence: Synthetic oligonucleotide
auuggaaccuuaaacgucc

SEQ ID NO: 948819 - RNA, 19 nt, Artificial Sequence
  Description of Artificial Sequence: Synthetic oligonucleotide
auuguaaaaggaauggcgg

SEQ ID NO: 948820 - RNA, 19 nt, Artificial Sequence
  Description of Artificial Sequence: Synthetic oligonucleotide
ucaacucccucacagaaug

SEQ ID NO: 948821 - RNA, 19 nt, Artificial Sequence
  Description of Artificial Sequence: Synthetic oligonucleotide
uguaauagcagcuuuccau

SEQ ID NO: 948822 - RNA, 19 nt, Artificial Sequence
  Description of Artificial Sequence: Synthetic oligonucleotide
aaagugacgggacgguaac

SEQ ID NO: 948823 - RNA, 19 nt, Artificial Sequence
  Description of Artificial Sequence: Synthetic oligonucleotide
aaaggcuacugucacaggu

SEQ ID NO: 948824 - RNA, 19 nt, Artificial Sequence
  Description of Artificial Sequence: Synthetic oligonucleotide
gaaacguuaaaagucgaag

SEQ ID NO: 948825 - RNA, 19 nt, Artificial Sequence
  Description of Artificial Sequence: Synthetic oligonucleotide
auaaauccuccccaauccc

SEQ ID NO: 948826 - RNA, 19 nt, Artificial Sequence
  Description of Artificial Sequence: Synthetic oligonucleotide
uuguaaaaggaauggcggg

SEQ ID NO: 948827 - RNA, 19 nt, Artificial Sequence
  Description of Artificial Sequence: Synthetic oligonucleotide
uggucuaacuuccagucag

SEQ ID NO: 948828 - RNA, 19 nt, Artificial Sequence
  Description of Artificial Sequence: Synthetic oligonucleotide
gaagaauauaaauccuccc

SEQ ID NO: 948829 - RNA, 19 nt, Artificial Sequence
  Description of Artificial Sequence: Synthetic oligonucleotide
agauugagaaaauagguuu

SEQ ID NO: 948830 - RNA, 19 nt, Artificial Sequence
  Description of Artificial Sequence: Synthetic oligonucleotide
gauaaucuccgcuacuccc

SEQ ID NO: 948831 - RNA, 19 nt, Artificial Sequence
  Description of Artificial Sequence: Synthetic oligonucleotide
ugugauuuagccuccuuca

SEQ ID NO: 948832 - RNA, 19 nt, Artificial Sequence
  Description of Artificial Sequence: Synthetic oligonucleotide
ucugcaagaagagagcugc

SEQ ID NO: 948833 - RNA, 19 nt, Artificial Sequence
  Description of Artificial Sequence: Synthetic oligonucleotide
gauuuagccuccuucacac

SEQ ID NO: 948834 - RNA, 19 nt, Artificial Sequence
  Description of Artificial Sequence: Synthetic oligonucleotide
aaugcacuacgcccgguac

SEQ ID NO: 948835 - RNA, 19 nt, Artificial Sequence
  Description of Artificial Sequence: Synthetic oligonucleotide
guugcugauagcaacagag

SEQ ID NO: 948836 - RNA, 19 nt, Artificial Sequence
  Description of Artificial Sequence: Synthetic oligonucleotide
ugaguaaaauuaaugcuau

SEQ ID NO: 948837 - RNA, 19 nt, Artificial Sequence
  Description of Artificial Sequence: Synthetic oligonucleotide
ugggaguaagcucaggccc

SEQ ID NO: 948838 - RNA, 19 nt, Artificial Sequence
  Description of Artificial Sequence: Synthetic oligonucleotide
aucugagacaaauucaaga

SEQ ID NO: 948839 - RNA, 19 nt, Artificial Sequence
  Description of Artificial Sequence: Synthetic oligonucleotide
acaagaaauguuuaugaaa

SEQ ID NO: 948840 - RNA, 19 nt, Artificial Sequence
  Description of Artificial Sequence: Synthetic oligonucleotide
caaauugcccaacaaagug

SEQ ID NO: 948841 - RNA, 19 nt, Artificial Sequence
  Description of Artificial Sequence: Synthetic oligonucleotide
ccauggaacagcuaaaugg

SEQ ID NO: 948842 - RNA, 19 nt, Artificial Sequence
  Description of Artificial Sequence: Synthetic oligonucleotide
uuaagauauccuagcuggg

SEQ ID NO: 948843 - RNA, 19 nt, Artificial Sequence
  Description of Artificial Sequence: Synthetic oligonucleotide
agagaaaagugacgggacg

SEQ ID NO: 948844 - RNA, 19 nt, Artificial Sequence
  Description of Artificial Sequence: Synthetic oligonucleotide
aguuaaaacucuuaauguu

SEQ ID NO: 948845 - RNA, 19 nt, Artificial Sequence
  Description of Artificial Sequence: Synthetic oligonucleotide
auagcuagucacuauauuu

SEQ ID NO: 948846 - RNA, 19 nt, Artificial Sequence
  Description of Artificial Sequence: Synthetic oligonucleotide
aucaaguuaaaacucuuaa

SEQ ID NO: 948847 - RNA, 19 nt, Artificial Sequence
  Description of Artificial Sequence: Synthetic oligonucleotide
uaaugcuaugcuucaaaug

SEQ ID NO: 948848 - RNA, 19 nt, Artificial Sequence
  Description of Artificial Sequence: Synthetic oligonucleotide
uaauagcagcuuuccaugg

SEQ ID NO: 948849 - RNA, 19 nt, Artificial Sequence
  Description of Artificial Sequence: Synthetic oligonucleotide
uucggaacagagcuggaug

SEQ ID NO: 948850 - RNA, 19 nt, Artificial Sequence
  Description of Artificial Sequence: Synthetic oligonucleotide
uaaacguccugccauggcu

SEQ ID NO: 948851 - RNA, 19 nt, Artificial Sequence
  Description of Artificial Sequence: Synthetic oligonucleotide
uauuggaaccuuaaacguc

SEQ ID NO: 948852 - RNA, 19 nt, Artificial Sequence
  Description of Artificial Sequence: Synthetic oligonucleotide
uucuacuggugccugagca

SEQ ID NO: 948853 - RNA, 19 nt, Artificial Sequence
  Description of Artificial Sequence: Synthetic oligonucleotide
ugcccaacaaaguggacag

SEQ ID NO: 948854 - RNA, 19 nt, Artificial Sequence
  Description of Artificial Sequence: Synthetic oligonucleotide
uuaaaagucgaaggcgucc

SEQ ID NO: 948855 - RNA, 19 nt, Artificial Sequence
  Description of Artificial Sequence: Synthetic oligonucleotide
aauccagcccgaaagcaac

SEQ ID NO: 948856 - RNA, 19 nt, Artificial Sequence
  Description of Artificial Sequence: Synthetic oligonucleotide
cuacaagaaauguuuauga

SEQ ID NO: 948857 - RNA, 19 nt, Artificial Sequence
  Description of Artificial Sequence: Synthetic oligonucleotide
acguuaaaagucgaaggcg

SEQ ID NO: 948858 - RNA, 19 nt, Artificial Sequence
  Description of Artificial Sequence: Synthetic oligonucleotide
gucacucgcacucucaaag

SEQ ID NO: 948859 - RNA, 19 nt, Artificial Sequence
  Description of Artificial Sequence: Synthetic oligonucleotide
agcuagucacuauauuuuc

SEQ ID NO: 948860 - RNA, 19 nt, Artificial Sequence
  Description of Artificial Sequence: Synthetic oligonucleotide
ugauaaucuccgcuacucc

SEQ ID NO: 948861 - RNA, 19 nt, Artificial Sequence
  Description of Artificial Sequence: Synthetic oligonucleotide
gaaccuuaaacguccugcc

SEQ ID NO: 948862 - RNA, 19 nt, Artificial Sequence
  Description of Artificial Sequence: Synthetic oligonucleotide
aguacccagaccugaacag

SEQ ID NO: 948863 - RNA, 19 nt, Artificial Sequence
  Description of Artificial Sequence: Synthetic oligonucleotide
auuaaugcuaugcuucaaa

SEQ ID NO: 948864 - RNA, 19 nt, Artificial Sequence
  Description of Artificial Sequence: Synthetic oligonucleotide
auaaucuccgcuacucccc

SEQ ID NO: 948865 - RNA, 19 nt, Artificial Sequence
  Description of Artificial Sequence: Synthetic oligonucleotide
uacaagaaauguuuaugaa

SEQ ID NO: 948866 - RNA, 19 nt, Artificial Sequence
  Description of Artificial Sequence: Synthetic oligonucleotide
caaucacacucaaaacugg

SEQ ID NO: 948867 - RNA, 19 nt, Artificial Sequence
  Description of Artificial Sequence: Synthetic oligonucleotide
cucgcacucucaaaguugg

SEQ ID NO: 948868 - RNA, 19 nt, Artificial Sequence
  Description of Artificial Sequence: Synthetic oligonucleotide
uccaugguuagauuuugga

SEQ ID NO: 948869 - RNA, 19 nt, Artificial Sequence
  Description of Artificial Sequence: Synthetic oligonucleotide
ucccucaacucccucacag

SEQ ID NO: 948870 - RNA, 19 nt, Artificial Sequence
  Description of Artificial Sequence: Synthetic oligonucleotide
uuaaugcuaugcuucaaau

SEQ ID NO: 948871 - RNA, 19 nt, Artificial Sequence
  Description of Artificial Sequence: Synthetic oligonucleotide
aacagguggucuccuggcg

SEQ ID NO: 948872 - RNA, 19 nt, Artificial Sequence
  Description of Artificial Sequence: Synthetic oligonucleotide
caaagagcuccccugaaac

SEQ ID NO: 948873 - RNA, 19 nt, Artificial Sequence
  Description of Artificial Sequence: Synthetic oligonucleotide
acgccaaucacacucaaaa

SEQ ID NO: 948874 - RNA, 19 nt, Artificial Sequence
  Description of Artificial Sequence: Synthetic oligonucleotide
ugguucggaacagagcugg

SEQ ID NO: 948875 - RNA, 19 nt, Artificial Sequence
  Description of Artificial Sequence: Synthetic oligonucleotide
aauuauguaauagcagcuu

SEQ ID NO: 948876 - RNA, 19 nt, Artificial Sequence
  Description of Artificial Sequence: Synthetic oligonucleotide
auaaaugcacuacgcccgg

SEQ ID NO: 948877 - RNA, 19 nt, Artificial Sequence
  Description of Artificial Sequence: Synthetic oligonucleotide
aauagcuagucacuauauu

SEQ ID NO: 948878 - RNA, 19 nt, Artificial Sequence
  Description of Artificial Sequence: Synthetic oligonucleotide
cugauagcaacagaggaug

SEQ ID NO: 948879 - RNA, 19 nt, Artificial Sequence
  Description of Artificial Sequence: Synthetic oligonucleotide
caucacgccaaucacacuc

SEQ ID NO: 948880 - RNA, 19 nt, Artificial Sequence
  Description of Artificial Sequence: Synthetic oligonucleotide
cuggcguacagcaaguaac

SEQ ID NO: 948881 - RNA, 19 nt, Artificial Sequence
  Description of Artificial Sequence: Synthetic oligonucleotide
agcaacagaggaugguggg

SEQ ID NO: 948882 - RNA, 19 nt, Artificial Sequence
  Description of Artificial Sequence: Synthetic oligonucleotide
ucggaacagagcuggaugc

SEQ ID NO: 948883 - RNA, 19 nt, Artificial Sequence
  Description of Artificial Sequence: Synthetic oligonucleotide
ucuaacuuccagucagaug

SEQ ID NO: 948884 - RNA, 19 nt, Artificial Sequence
  Description of Artificial Sequence: Synthetic oligonucleotide
uccugaucacgaaguagcg

SEQ ID NO: 948885 - RNA, 19 nt, Artificial Sequence
  Description of Artificial Sequence: Synthetic oligonucleotide
cauggaacagcuaaaugga

SEQ ID NO: 948886 - RNA, 19 nt, Artificial Sequence
  Description of Artificial Sequence: Synthetic oligonucleotide
aagauugagaaaauagguu

SEQ ID NO: 948887 - RNA, 19 nt, Artificial Sequence
  Description of Artificial Sequence: Synthetic oligonucleotide
ucuugcaaggaaacguuaa

SEQ ID NO: 948888 - RNA, 19 nt, Artificial Sequence
  Description of Artificial Sequence: Synthetic oligonucleotide
cuaugcuucaaauguagca

SEQ ID NO: 948889 - RNA, 19 nt, Artificial Sequence
  Description of Artificial Sequence: Synthetic oligonucleotide
gaagauugagaaaauaggu

SEQ ID NO: 948890 - RNA, 19 nt, Artificial Sequence
  Description of Artificial Sequence: Synthetic oligonucleotide
acacaucaaguuaaaacuc

SEQ ID NO: 948891 - RNA, 19 nt, Artificial Sequence
  Description of Artificial Sequence: Synthetic oligonucleotide
gagcuaagcgcuucuacug

SEQ ID NO: 948892 - RNA, 19 nt, Artificial Sequence
  Description of Artificial Sequence: Synthetic oligonucleotide
cugacgucaggcuucacac

SEQ ID NO: 948893 - RNA, 19 nt, Artificial Sequence
  Description of Artificial Sequence: Synthetic oligonucleotide
uagcuagucacuauauuuu

SEQ ID NO: 948894 - RNA, 19 nt, Artificial Sequence
  Description of Artificial Sequence: Synthetic oligonucleotide
uaaaagucgaaggcguccc

SEQ ID NO: 948895 - RNA, 19 nt, Artificial Sequence
  Description of Artificial Sequence: Synthetic oligonucleotide
gaaacaacagguggucucc

SEQ ID NO: 948896 - RNA, 19 nt, Artificial Sequence
  Description of Artificial Sequence: Synthetic oligonucleotide
ugccuuauauacauuuguc

SEQ ID NO: 948897 - RNA, 19 nt, Artificial Sequence
  Description of Artificial Sequence: Synthetic oligonucleotide
aacagcuaaauggacuaca

SEQ ID NO: 948898 - RNA, 19 nt, Artificial Sequence
  Description of Artificial Sequence: Synthetic oligonucleotide
gauugagaaaauagguuuc

SEQ ID NO: 948899 - RNA, 19 nt, Artificial Sequence
  Description of Artificial Sequence: Synthetic oligonucleotide
agugugauaaucuccgcua

SEQ ID NO: 948900 - RNA, 19 nt, Artificial Sequence
  Description of Artificial Sequence: Synthetic oligonucleotide
gacgucaggcuucacacac

SEQ ID NO: 948901 - RNA, 19 nt, Artificial Sequence
  Description of Artificial Sequence: Synthetic oligonucleotide
cagcccgaaagcaacagag

SEQ ID NO: 948902 - RNA, 19 nt, Artificial Sequence
  Description of Artificial Sequence: Synthetic oligonucleotide
ugaagucgugacaggagca

SEQ ID NO: 948903 - RNA, 19 nt, Artificial Sequence
  Description of Artificial Sequence: Synthetic oligonucleotide
cagagguaacaaaauaauc

SEQ ID NO: 948904 - RNA, 19 nt, Artificial Sequence
  Description of Artificial Sequence: Synthetic oligonucleotide
ugacgggacgguaacuugc

SEQ ID NO: 948905 - RNA, 19 nt, Artificial Sequence
  Description of Artificial Sequence: Synthetic oligonucleotide
uuaaacguccugccauggc

SEQ ID NO: 948906 - RNA, 19 nt, Artificial Sequence
  Description of Artificial Sequence: Synthetic oligonucleotide
augcacuacgcccgguacc

SEQ ID NO: 948907 - RNA, 19 nt, Artificial Sequence
  Description of Artificial Sequence: Synthetic oligonucleotide
gaauagugacuuugccucc

SEQ ID NO: 948908 - RNA, 19 nt, Artificial Sequence
  Description of Artificial Sequence: Synthetic oligonucleotide
auugcaccaauacagcaua

SEQ ID NO: 948909 - RNA, 19 nt, Artificial Sequence
  Description of Artificial Sequence: Synthetic oligonucleotide
agcaacagagaagcuacgg

SEQ ID NO: 948910 - RNA, 19 nt, Artificial Sequence
  Description of Artificial Sequence: Synthetic oligonucleotide
aucacgaaguagcggcugg

SEQ ID NO: 948911 - RNA, 19 nt, Artificial Sequence
  Description of Artificial Sequence: Synthetic oligonucleotide
aucacacucaaaacuggac

SEQ ID NO: 948912 - RNA, 19 nt, Artificial Sequence
  Description of Artificial Sequence: Synthetic oligonucleotide
aaucacacucaaaacugga

SEQ ID NO: 948913 - RNA, 19 nt, Artificial Sequence
  Description of Artificial Sequence: Synthetic oligonucleotide
gugaguaaaauuaaugcua

SEQ ID NO: 948914 - RNA, 19 nt, Artificial Sequence
  Description of Artificial Sequence: Synthetic oligonucleotide
accuuaaacguccugccau

SEQ ID NO: 948915 - RNA, 19 nt, Artificial Sequence
  Description of Artificial Sequence: Synthetic oligonucleotide
gaguaaaauuaaugcuaug

SEQ ID NO: 948916 - RNA, 19 nt, Artificial Sequence
  Description of Artificial Sequence: Synthetic oligonucleotide
auccgguagacgcugacgu

SEQ ID NO: 948917 - RNA, 19 nt, Artificial Sequence
  Description of Artificial Sequence: Synthetic oligonucleotide
acuacgcccgguaccaucc

SEQ ID NO: 948918 - RNA, 19 nt, Artificial Sequence
  Description of Artificial Sequence: Synthetic oligonucleotide
uaggcgaucuucccuuuug

SEQ ID NO: 948919 - RNA, 19 nt, Artificial Sequence
  Description of Artificial Sequence: Synthetic oligonucleotide
ggcggaauccgguagacgc

SEQ ID NO: 948920 - RNA, 19 nt, Artificial Sequence
  Description of Artificial Sequence: Synthetic oligonucleotide
aauagugacuuugccucca

SEQ ID NO: 948921 - RNA, 19 nt, Artificial Sequence
  Description of Artificial Sequence: Synthetic oligonucleotide
agucacuauauuuucuaua

SEQ ID NO: 948922 - RNA, 19 nt, Artificial Sequence
  Description of Artificial Sequence: Synthetic oligonucleotide
gaaaugaugcggucccuca

SEQ ID NO: 948923 - RNA, 19 nt, Artificial Sequence
  Description of Artificial Sequence: Synthetic oligonucleotide
ccgaaagcaacagagaagc

SEQ ID NO: 948924 - RNA, 19 nt, Artificial Sequence
  Description of Artificial Sequence: Synthetic oligonucleotide
ggaaccuuaaacguccugc

SEQ ID NO: 948925 - RNA, 19 nt, Artificial Sequence
  Description of Artificial Sequence: Synthetic oligonucleotide
agguaaagcugugauuuag

SEQ ID NO: 948926 - RNA, 19 nt, Artificial Sequence
  Description of Artificial Sequence: Synthetic oligonucleotide
gugggaguaagcucaggcc

SEQ ID NO: 948927 - RNA, 19 nt, Artificial Sequence
  Description of Artificial Sequence: Synthetic oligonucleotide
aaaugcacuacgcccggua

SEQ ID NO: 948928 - RNA, 19 nt, Artificial Sequence
  Description of Artificial Sequence: Synthetic oligonucleotide
acggugaguaaaauuaaug

SEQ ID NO: 948929 - RNA, 19 nt, Artificial Sequence
  Description of Artificial Sequence: Synthetic oligonucleotide
ccaauaaaugcacuacgcc

SEQ ID NO: 948930 - RNA, 19 nt, Artificial Sequence
  Description of Artificial Sequence: Synthetic oligonucleotide
gcaaguaacacagagguaa

SEQ ID NO: 948931 - RNA, 19 nt, Artificial Sequence
  Description of Artificial Sequence: Synthetic oligonucleotide
ugaacucugcacagucggc

SEQ ID NO: 948932 - RNA, 19 nt, Artificial Sequence
  Description of Artificial Sequence: Synthetic oligonucleotide
gaagucgugacaggagcag

SEQ ID NO: 948933 - RNA, 19 nt, Artificial Sequence
  Description of Artificial Sequence: Synthetic oligonucleotide
aucucuaauuaccauuauu

SEQ ID NO: 948934 - RNA, 19 nt, Artificial Sequence
  Description of Artificial Sequence: Synthetic oligonucleotide
aaaaggaauggcgggcaga

SEQ ID NO: 948935 - RNA, 19 nt, Artificial Sequence
  Description of Artificial Sequence: Synthetic oligonucleotide
aaaguggacaguacccaga

SEQ ID NO: 948936 - RNA, 19 nt, Artificial Sequence
  Description of Artificial Sequence: Synthetic oligonucleotide
agaauggugcccucagggu

SEQ ID NO: 948937 - RNA, 19 nt, Artificial Sequence
  Description of Artificial Sequence: Synthetic oligonucleotide
guacuguucuacuggugcc

SEQ ID NO: 948938 - RNA, 19 nt, Artificial Sequence
  Description of Artificial Sequence: Synthetic oligonucleotide
agauauccuagcuggguau

SEQ ID NO: 948939 - RNA, 19 nt, Artificial Sequence
  Description of Artificial Sequence: Synthetic oligonucleotide
guagaacauacauauccaa

SEQ ID NO: 948940 - RNA, 19 nt, Artificial Sequence
  Description of Artificial Sequence: Synthetic oligonucleotide
guugugagcaggaaacaac

SEQ ID NO: 948941 - RNA, 19 nt, Artificial Sequence
  Description of Artificial Sequence: Synthetic oligonucleotide
caacagagaagcuacggaa

SEQ ID NO: 948942 - RNA, 19 nt, Artificial Sequence
  Description of Artificial Sequence: Synthetic oligonucleotide
acagcauaugccuuauaua

SEQ ID NO: 948943 - RNA, 19 nt, Artificial Sequence
  Description of Artificial Sequence: Synthetic oligonucleotide
cuuaaacguccugccaugg

SEQ ID NO: 948944 - RNA, 19 nt, Artificial Sequence
  Description of Artificial Sequence: Synthetic oligonucleotide
augaucugagacaaauuca

SEQ ID NO: 948945 - RNA, 19 nt, Artificial Sequence
  Description of Artificial Sequence: Synthetic oligonucleotide
aaggcguguggguacugca

SEQ ID NO: 948946 - RNA, 19 nt, Artificial Sequence
  Description of Artificial Sequence: Synthetic oligonucleotide
aauggacccaaaguuugaa

SEQ ID NO: 948947 - RNA, 19 nt, Artificial Sequence
  Description of Artificial Sequence: Synthetic oligonucleotide
aagugaucuugcaaggaaa

SEQ ID NO: 948948 - RNA, 19 nt, Artificial Sequence
  Description of Artificial Sequence: Synthetic oligonucleotide
guagacgcugacgucaggc

SEQ ID NO: 948949 - RNA, 19 nt, Artificial Sequence
  Description of Artificial Sequence: Synthetic oligonucleotide
auauccaaacaggugcuca

SEQ ID NO: 948950 - RNA, 19 nt, Artificial Sequence
  Description of Artificial Sequence: Synthetic oligonucleotide
ugaucacgaaguagcggcu

SEQ ID NO: 948951 - RNA, 19 nt, Artificial Sequence
  Description of Artificial Sequence: Synthetic oligonucleotide
aauuaaugcuaugcuucaa

SEQ ID NO: 948952 - RNA, 19 nt, Artificial Sequence
  Description of Artificial Sequence: Synthetic oligonucleotide
gguuagauuuuggaauagg

SEQ ID NO: 948953 - RNA, 19 nt, Artificial Sequence
  Description of Artificial Sequence: Synthetic oligonucleotide
uugaagugauucggaggcg

SEQ ID NO: 948954 - RNA, 19 nt, Artificial Sequence
  Description of Artificial Sequence: Synthetic oligonucleotide
ugguuagauuuuggaauag

SEQ ID NO: 948955 - RNA, 19 nt, Artificial Sequence
  Description of Artificial Sequence: Synthetic oligonucleotide
aagcugugauuuagccucc

SEQ ID NO: 948956 - RNA, 19 nt, Artificial Sequence
  Description of Artificial Sequence: Synthetic oligonucleotide
uaaucuccgcuacuccccu

SEQ ID NO: 948957 - RNA, 19 nt, Artificial Sequence
  Description of Artificial Sequence: Synthetic oligonucleotide
agucgugacaggagcaggg

SEQ ID NO: 948958 - RNA, 19 nt, Artificial Sequence
  Description of Artificial Sequence: Synthetic oligonucleotide
gcgaucuucccuuuugaag

SEQ ID NO: 948959 - RNA, 19 nt, Artificial Sequence
  Description of Artificial Sequence: Synthetic oligonucleotide
ugcacuacgcccgguacca

SEQ ID NO: 948960 - RNA, 19 nt, Artificial Sequence
  Description of Artificial Sequence: Synthetic oligonucleotide
gugauaaucuccgcuacuc

SEQ ID NO: 948961 - RNA, 19 nt, Artificial Sequence
  Description of Artificial Sequence: Synthetic oligonucleotide
cagcuaaauggacuacaag

SEQ ID NO: 948962 - RNA, 19 nt, Artificial Sequence
  Description of Artificial Sequence: Synthetic oligonucleotide
aguuuugauguaggcgauc

SEQ ID NO: 948963 - RNA, 19 nt, Artificial Sequence
  Description of Artificial Sequence: Synthetic oligonucleotide
aaauggacccaaaguuuga

SEQ ID NO: 948964 - RNA, 19 nt, Artificial Sequence
  Description of Artificial Sequence: Synthetic oligonucleotide
gcuacggaaaagauugucc

SEQ ID NO: 948965 - RNA, 19 nt, Artificial Sequence
  Description of Artificial Sequence: Synthetic oligonucleotide
guacccagaccugaacagg

SEQ ID NO: 948966 - RNA, 19 nt, Artificial Sequence
  Description of Artificial Sequence: Synthetic oligonucleotide
uacaaaugucugaggucac

SEQ ID NO: 948967 - RNA, 19 nt, Artificial Sequence
  Description of Artificial Sequence: Synthetic oligonucleotide
aacguccugccauggcucu

SEQ ID NO: 948968 - RNA, 19 nt, Artificial Sequence
  Description of Artificial Sequence: Synthetic oligonucleotide
uggugccugguucggaaca

SEQ ID NO: 948969 - RNA, 19 nt, Artificial Sequence
  Description of Artificial Sequence: Synthetic oligonucleotide
acaucucuaauuaccauua

SEQ ID NO: 948970 - RNA, 19 nt, Artificial Sequence
  Description of Artificial Sequence: Synthetic oligonucleotide
ucacaucucuaauuaccau

SEQ ID NO: 948971 - RNA, 19 nt, Artificial Sequence
  Description of Artificial Sequence: Synthetic oligonucleotide
caauuauguaauagcagcu

SEQ ID NO: 948972 - RNA, 19 nt, Artificial Sequence
  Description of Artificial Sequence: Synthetic oligonucleotide
ucacucgcacucucaaagu

SEQ ID NO: 948973 - RNA, 19 nt, Artificial Sequence
  Description of Artificial Sequence: Synthetic oligonucleotide
aagcaacagagaagcuacg

SEQ ID NO: 948974 - RNA, 19 nt, Artificial Sequence
  Description of Artificial Sequence: Synthetic oligonucleotide
uggugcugaagucgugaca

SEQ ID NO: 948975 - RNA, 19 nt, Artificial Sequence
  Description of Artificial Sequence: Synthetic oligonucleotide
aggguacuguucuacuggu

SEQ ID NO: 948976 - RNA, 19 nt, Artificial Sequence
  Description of Artificial Sequence: Synthetic oligonucleotide
auguaggcgaucuucccuu

SEQ ID NO: 948977 - RNA, 19 nt, Artificial Sequence
  Description of Artificial Sequence: Synthetic oligonucleotide
gugauuuagccuccuucac

SEQ ID NO: 948978 - RNA, 19 nt, Artificial Sequence
  Description of Artificial Sequence: Synthetic oligonucleotide
gaucacgaaguagcggcug

SEQ ID NO: 948979 - RNA, 19 nt, Artificial Sequence
  Description of Artificial Sequence: Synthetic oligonucleotide
gagaugaucugagacaaau

SEQ ID NO: 948980 - RNA, 19 nt, Artificial Sequence
  Description of Artificial Sequence: Synthetic oligonucleotide
gguaaagcugugauuuagc

SEQ ID NO: 948981 - RNA, 19 nt, Artificial Sequence
  Description of Artificial Sequence: Synthetic oligonucleotide
guuggauggcuguggugcc

SEQ ID NO: 948982 - RNA, 19 nt, Artificial Sequence
  Description of Artificial Sequence: Synthetic oligonucleotide
ucacacugacaauuaugua

SEQ ID NO: 948983 - RNA, 19 nt, Artificial Sequence
  Description of Artificial Sequence: Synthetic oligonucleotide
gguagaacauacauaucca

SEQ ID NO: 948984 - RNA, 19 nt, Artificial Sequence
  Description of Artificial Sequence: Synthetic oligonucleotide
aaacccacggugaguaaaa

SEQ ID NO: 948985 - RNA, 19 nt, Artificial Sequence
  Description of Artificial Sequence: Synthetic oligonucleotide
gauauccuagcuggguauc

SEQ ID NO: 948986 - RNA, 19 nt, Artificial Sequence
  Description of Artificial Sequence: Synthetic oligonucleotide
cagaucuaaaaggauaucu

SEQ ID NO: 948987 - RNA, 19 nt, Artificial Sequence
  Description of Artificial Sequence: Synthetic oligonucleotide
acucgcacucucaaaguug

SEQ ID NO: 948988 - RNA, 19 nt, Artificial Sequence
  Description of Artificial Sequence: Synthetic oligonucleotide
caaaggcuacugucacagg

SEQ ID NO: 948989 - RNA, 19 nt, Artificial Sequence
  Description of Artificial Sequence: Synthetic oligonucleotide
cuugcaaggaaacguuaaa

SEQ ID NO: 948990 - RNA, 19 nt, Artificial Sequence
  Description of Artificial Sequence: Synthetic oligonucleotide
aaacaacagguggucuccu

SEQ ID NO: 948991 - RNA, 19 nt, Artificial Sequence
  Description of Artificial Sequence: Synthetic oligonucleotide
cuucagguagaacauacau

SEQ ID NO: 948992 - RNA, 19 nt, Artificial Sequence
  Description of Artificial Sequence: Synthetic oligonucleotide
caguacccagaccugaaca

SEQ ID NO: 948993 - RNA, 19 nt, Artificial Sequence
  Description of Artificial Sequence: Synthetic oligonucleotide
aaucuccgcuacuccccug

SEQ ID NO: 948994 - RNA, 19 nt, Artificial Sequence
  Description of Artificial Sequence: Synthetic oligonucleotide
aaggcuacugucacaggua

SEQ ID NO: 948995 - RNA, 19 nt, Artificial Sequence
  Description of Artificial Sequence: Synthetic oligonucleotide
guuuaugaaaagggaucca

SEQ ID NO: 948996 - RNA, 19 nt, Artificial Sequence
  Description of Artificial Sequence: Synthetic oligonucleotide
guuuugauguaggcgaucu

SEQ ID NO: 948997 - RNA, 19 nt, Artificial Sequence
  Description of Artificial Sequence: Synthetic oligonucleotide
gaacagcuaaauggacuac

SEQ ID NO: 948998 - RNA, 19 nt, Artificial Sequence
  Description of Artificial Sequence: Synthetic oligonucleotide
gugacgggacgguaacuug

SEQ ID NO: 948999 - RNA, 19 nt, Artificial Sequence
  Description of Artificial Sequence: Synthetic oligonucleotide
uccccaauccccuccucaa

SEQ ID NO: 949000 - RNA, 19 nt, Artificial Sequence
  Description of Artificial Sequence: Synthetic oligonucleotide
auuuugguucugggaaaug

SEQ ID NO: 949001 - RNA, 19 nt, Artificial Sequence
  Description of Artificial Sequence: Synthetic oligonucleotide
auggacuacaagaaauguu

SEQ ID NO: 949002 - RNA, 19 nt, Artificial Sequence
  Description of Artificial Sequence: Synthetic oligonucleotide
cccgguaccauccuggauc

SEQ ID NO: 949003 - RNA, 19 nt, Artificial Sequence
  Description of Artificial Sequence: Synthetic oligonucleotide
agugacgggacgguaacuu

SEQ ID NO: 949004 - RNA, 19 nt, Artificial Sequence
  Description of Artificial Sequence: Synthetic oligonucleotide
gcaacagagaagcuacgga

SEQ ID NO: 949005 - RNA, 19 nt, Artificial Sequence
  Description of Artificial Sequence: Synthetic oligonucleotide
gguaccauccuggauccug

SEQ ID NO: 949006 - RNA, 19 nt, Artificial Sequence
  Description of Artificial Sequence: Synthetic oligonucleotide
cccgaaagcaacagagaag

SEQ ID NO: 949007 - RNA, 19 nt, Artificial Sequence
  Description of Artificial Sequence: Synthetic oligonucleotide
gacgcugacgucaggcuuc

SEQ ID NO: 949008 - RNA, 19 nt, Artificial Sequence
  Description of Artificial Sequence: Synthetic oligonucleotide
auauccuagcuggguauca

SEQ ID NO: 949009 - RNA, 19 nt, Artificial Sequence
  Description of Artificial Sequence: Synthetic oligonucleotide
cagucggccagugugauaa

SEQ ID NO: 949010 - RNA, 19 nt, Artificial Sequence
  Description of Artificial Sequence: Synthetic oligonucleotide
ucccaauagcuagucacua

SEQ ID NO: 949011 - RNA, 19 nt, Artificial Sequence
  Description of Artificial Sequence: Synthetic oligonucleotide
guucuacuggugccugagc

SEQ ID NO: 949012 - RNA, 19 nt, Artificial Sequence
  Description of Artificial Sequence: Synthetic oligonucleotide
gccuuauauacauuugucu

SEQ ID NO: 949013 - RNA, 19 nt, Artificial Sequence
  Description of Artificial Sequence: Synthetic oligonucleotide
cugguucggaacagagcug

SEQ ID NO: 949014 - RNA, 19 nt, Artificial Sequence
  Description of Artificial Sequence: Synthetic oligonucleotide
cccacggugaguaaaauua

SEQ ID NO: 949015 - RNA, 19 nt, Artificial Sequence
  Description of Artificial Sequence: Synthetic oligonucleotide
uauccuagcuggguaucaa

SEQ ID NO: 949016 - RNA, 19 nt, Artificial Sequence
  Description of Artificial Sequence: Synthetic oligonucleotide
uacgcccgguaccauccug

SEQ ID NO: 949017 - RNA, 19 nt, Artificial Sequence
  Description of Artificial Sequence: Synthetic oligonucleotide
gcguacagcaaguaacaca

SEQ ID NO: 949018 - RNA, 19 nt, Artificial Sequence
  Description of Artificial Sequence: Synthetic oligonucleotide
ccaacaaaguggacaguac

SEQ ID NO: 949019 - RNA, 19 nt, Artificial Sequence
  Description of Artificial Sequence: Synthetic oligonucleotide
auccuagcuggguaucaaa

SEQ ID NO: 949020 - RNA, 19 nt, Artificial Sequence
  Description of Artificial Sequence: Synthetic oligonucleotide
gcauaugccuuauauacau

SEQ ID NO: 949021 - RNA, 19 nt, Artificial Sequence
  Description of Artificial Sequence: Synthetic oligonucleotide
cugaagucuccccacaagu

SEQ ID NO: 949022 - RNA, 19 nt, Artificial Sequence
  Description of Artificial Sequence: Synthetic oligonucleotide
aggucacucgcacucucaa

SEQ ID NO: 949023 - RNA, 19 nt, Artificial Sequence
  Description of Artificial Sequence: Synthetic oligonucleotide
agacgcugacgucaggcuu

SEQ ID NO: 949024 - RNA, 19 nt, Artificial Sequence
  Description of Artificial Sequence: Synthetic oligonucleotide
auugcccaacaaaguggac

SEQ ID NO: 949025 - RNA, 19 nt, Artificial Sequence
  Description of Artificial Sequence: Synthetic oligonucleotide
ucuccgcuacuccccugcc

SEQ ID NO: 949026 - RNA, 19 nt, Artificial Sequence
  Description of Artificial Sequence: Synthetic oligonucleotide
cacaucucuaauuaccauu

SEQ ID NO: 949027 - RNA, 19 nt, Artificial Sequence
  Description of Artificial Sequence: Synthetic oligonucleotide
guaucaaagccuggggcaa

SEQ ID NO: 949028 - RNA, 19 nt, Artificial Sequence
  Description of Artificial Sequence: Synthetic oligonucleotide
aagugacgggacgguaacu

SEQ ID NO: 949029 - RNA, 19 nt, Artificial Sequence
  Description of Artificial Sequence: Synthetic oligonucleotide
ccuuaaacguccugccaug

SEQ ID NO: 949030 - RNA, 19 nt, Artificial Sequence
  Description of Artificial Sequence: Synthetic oligonucleotide
gcugacgucaggcuucaca

SEQ ID NO: 949031 - RNA, 19 nt, Artificial Sequence
  Description of Artificial Sequence: Synthetic oligonucleotide
ucgcacucucaaaguuggc

SEQ ID NO: 949032 - RNA, 19 nt, Artificial Sequence
  Description of Artificial Sequence: Synthetic oligonucleotide
caaggcguguggguacugc

SEQ ID NO: 949033 - RNA, 19 nt, Artificial Sequence
  Description of Artificial Sequence: Synthetic oligonucleotide
gaauaggcgguggggugac

SEQ ID NO: 949034 - RNA, 19 nt, Artificial Sequence
  Description of Artificial Sequence: Synthetic oligonucleotide
acgcccgguaccauccugg

SEQ ID NO: 949035 - RNA, 19 nt, Artificial Sequence
  Description of Artificial Sequence: Synthetic oligonucleotide
ggcguguggguacugcaug

SEQ ID NO: 949036 - RNA, 19 nt, Artificial Sequence
  Description of Artificial Sequence: Synthetic oligonucleotide
caguuggauggcuguggug

SEQ ID NO: 949037 - RNA, 19 nt, Artificial Sequence
  Description of Artificial Sequence: Synthetic oligonucleotide
caaaauaauccagcccgaa

SEQ ID NO: 949038 - RNA, 19 nt, Artificial Sequence
  Description of Artificial Sequence: Synthetic oligonucleotide
caauagcuagucacuauau

SEQ ID NO: 949039 - RNA, 19 nt, Artificial Sequence
  Description of Artificial Sequence: Synthetic oligonucleotide
gcuaugcuucaaauguagc

SEQ ID NO: 949040 - RNA, 19 nt, Artificial Sequence
  Description of Artificial Sequence: Synthetic oligonucleotide
cacuacgcccgguaccauc

SEQ ID NO: 949041 - RNA, 19 nt, Artificial Sequence
  Description of Artificial Sequence: Synthetic oligonucleotide
cugagacaaauucaagaau

SEQ ID NO: 949042 - RNA, 19 nt, Artificial Sequence
  Description of Artificial Sequence: Synthetic oligonucleotide
gcccgaaagcaacagagaa

SEQ ID NO: 949043 - RNA, 19 nt, Artificial Sequence
  Description of Artificial Sequence: Synthetic oligonucleotide
aucacgccaaucacacuca

SEQ ID NO: 949044 - RNA, 19 nt, Artificial Sequence
  Description of Artificial Sequence: Synthetic oligonucleotide
aagcuacggaaaagauugu

SEQ ID NO: 949045 - RNA, 19 nt, Artificial Sequence
  Description of Artificial Sequence: Synthetic oligonucleotide
ccugaucacgaaguagcgg

SEQ ID NO: 949046 - RNA, 19 nt, Artificial Sequence
  Description of Artificial Sequence: Synthetic oligonucleotide
uaaaugcacuacgcccggu

SEQ ID NO: 949047 - RNA, 19 nt, Artificial Sequence
  Description of Artificial Sequence: Synthetic oligonucleotide
auaggcgguggggugacau

SEQ ID NO: 949048 - RNA, 19 nt, Artificial Sequence
  Description of Artificial Sequence: Synthetic oligonucleotide
cuccccacaagucacugcu

SEQ ID NO: 949049 - RNA, 19 nt, Artificial Sequence
  Description of Artificial Sequence: Synthetic oligonucleotide
gaaguagcggcuggagucu

SEQ ID NO: 949050 - RNA, 19 nt, Artificial Sequence
  Description of Artificial Sequence: Synthetic oligonucleotide
cagugugauaaucuccgcu

SEQ ID NO: 949051 - RNA, 19 nt, Artificial Sequence
  Description of Artificial Sequence: Synthetic oligonucleotide
caucauuaccuccaugguu

SEQ ID NO: 949052 - RNA, 19 nt, Artificial Sequence
  Description of Artificial Sequence: Synthetic oligonucleotide
gcucuacacaucaaguuaa

SEQ ID NO: 949053 - RNA, 19 nt, Artificial Sequence
  Description of Artificial Sequence: Synthetic oligonucleotide
aacccacggugaguaaaau

SEQ ID NO: 949054 - RNA, 19 nt, Artificial Sequence
  Description of Artificial Sequence: Synthetic oligonucleotide
acccacuugaagugaucuu

SEQ ID NO: 949055 - RNA, 19 nt, Artificial Sequence
  Description of Artificial Sequence: Synthetic oligonucleotide
ccgguaccauccuggaucc

SEQ ID NO: 949056 - RNA, 19 nt, Artificial Sequence
  Description of Artificial Sequence: Synthetic oligonucleotide
ccccugaaacuuuaucuuc

SEQ ID NO: 949057 - RNA, 19 nt, Artificial Sequence
  Description of Artificial Sequence: Synthetic oligonucleotide
ggaaaugaugcggucccuc

SEQ ID NO: 949058 - RNA, 19 nt, Artificial Sequence
  Description of Artificial Sequence: Synthetic oligonucleotide
ggaaacguuaaaagucgaa

SEQ ID NO: 949059 - RNA, 19 nt, Artificial Sequence
  Description of Artificial Sequence: Synthetic oligonucleotide
agguuucccaauagcuagu

SEQ ID NO: 949060 - RNA, 19 nt, Artificial Sequence
  Description of Artificial Sequence: Synthetic oligonucleotide
agcccgaaagcaacagaga

SEQ ID NO: 949061 - RNA, 19 nt, Artificial Sequence
  Description of Artificial Sequence: Synthetic oligonucleotide
gguugugagcaggaaacaa

SEQ ID NO: 949062 - RNA, 19 nt, Artificial Sequence
  Description of Artificial Sequence: Synthetic oligonucleotide
augcuaugcuucaaaugua

SEQ ID NO: 949063 - RNA, 19 nt, Artificial Sequence
  Description of Artificial Sequence: Synthetic oligonucleotide
ccccacaagucacugcuug

SEQ ID NO: 949064 - RNA, 19 nt, Artificial Sequence
  Description of Artificial Sequence: Synthetic oligonucleotide
ggaauaggcggugggguga

SEQ ID NO: 949065 - RNA, 19 nt, Artificial Sequence
  Description of Artificial Sequence: Synthetic oligonucleotide
ggugccugguucggaacag

SEQ ID NO: 949066 - RNA, 19 nt, Artificial Sequence
  Description of Artificial Sequence: Synthetic oligonucleotide
gcuccccugaaacuuuauc

SEQ ID NO: 949067 - RNA, 19 nt, Artificial Sequence
  Description of Artificial Sequence: Synthetic oligonucleotide
cacggugaguaaaauuaau

SEQ ID NO: 949068 - RNA, 19 nt, Artificial Sequence
  Description of Artificial Sequence: Synthetic oligonucleotide
agcaaguaacacagaggua

SEQ ID NO: 949069 - RNA, 19 nt, Artificial Sequence
  Description of Artificial Sequence: Synthetic oligonucleotide
aauaggcgguggggugaca

SEQ ID NO: 949070 - RNA, 19 nt, Artificial Sequence
  Description of Artificial Sequence: Synthetic oligonucleotide
ggcgaucuucccuuuugaa

SEQ ID NO: 949071 - RNA, 19 nt, Artificial Sequence
  Description of Artificial Sequence: Synthetic oligonucleotide
cacgccaaucacacucaaa

SEQ ID NO: 949072 - RNA, 19 nt, Artificial Sequence
  Description of Artificial Sequence: Synthetic oligonucleotide
gacgggacgguaacuugcu

SEQ ID NO: 949073 - RNA, 19 nt, Artificial Sequence
  Description of Artificial Sequence: Synthetic oligonucleotide
cgccaaucacacucaaaac

SEQ ID NO: 949074 - RNA, 19 nt, Artificial Sequence
  Description of Artificial Sequence: Synthetic oligonucleotide
agcugugauuuagccuccu

SEQ ID NO: 949075 - RNA, 19 nt, Artificial Sequence
  Description of Artificial Sequence: Synthetic oligonucleotide
gcugauagcaacagaggau

SEQ ID NO: 949076 - RNA, 19 nt, Artificial Sequence
  Description of Artificial Sequence: Synthetic oligonucleotide
acagucggccagugugaua

SEQ ID NO: 949077 - RNA, 19 nt, Artificial Sequence
  Description of Artificial Sequence: Synthetic oligonucleotide
cuggacccaguuggauggc

SEQ ID NO: 949078 - RNA, 19 nt, Artificial Sequence
  Description of Artificial Sequence: Synthetic oligonucleotide
guacagcaaguaacacaga

SEQ ID NO: 949079 - RNA, 19 nt, Artificial Sequence
  Description of Artificial Sequence: Synthetic oligonucleotide
uccuggcguacagcaagua

SEQ ID NO: 949080 - RNA, 19 nt, Artificial Sequence
  Description of Artificial Sequence: Synthetic oligonucleotide
gccugguucggaacagagc

SEQ ID NO: 949081 - RNA, 19 nt, Artificial Sequence
  Description of Artificial Sequence: Synthetic oligonucleotide
ccagaucuaaaaggauauc

SEQ ID NO: 949082 - RNA, 19 nt, Artificial Sequence
  Description of Artificial Sequence: Synthetic oligonucleotide
gucuaacuuccagucagau

SEQ ID NO: 949083 - RNA, 19 nt, Artificial Sequence
  Description of Artificial Sequence: Synthetic oligonucleotide
caguuuugauguaggcgau

SEQ ID NO: 949084 - RNA, 19 nt, Artificial Sequence
  Description of Artificial Sequence: Synthetic oligonucleotide
acgggacgguaacuugcuu

SEQ ID NO: 949085 - RNA, 19 nt, Artificial Sequence
  Description of Artificial Sequence: Synthetic oligonucleotide
guucggaacagagcuggau

SEQ ID NO: 949086 - RNA, 19 nt, Artificial Sequence
  Description of Artificial Sequence: Synthetic oligonucleotide
ggaggcggccaguccaauc

SEQ ID NO: 949087 - RNA, 19 nt, Artificial Sequence
  Description of Artificial Sequence: Synthetic oligonucleotide
ccacggugaguaaaauuaa

SEQ ID NO: 949088 - RNA, 19 nt, Artificial Sequence
  Description of Artificial Sequence: Synthetic oligonucleotide
guucgaggcccgcggcgga

SEQ ID NO: 949089 - RNA, 19 nt, Artificial Sequence
  Description of Artificial Sequence: Synthetic oligonucleotide
cacucgcacucucaaaguu

SEQ ID NO: 949090 - RNA, 19 nt, Artificial Sequence
  Description of Artificial Sequence: Synthetic oligonucleotide
gucccucaacucccucaca

SEQ ID NO: 949091 - RNA, 19 nt, Artificial Sequence
  Description of Artificial Sequence: Synthetic oligonucleotide
ccuggcguacagcaaguaa

SEQ ID NO: 949092 - RNA, 19 nt, Artificial Sequence
  Description of Artificial Sequence: Synthetic oligonucleotide
cuccuggcguacagcaagu

SEQ ID NO: 949093 - RNA, 19 nt, Artificial Sequence
  Description of Artificial Sequence: Synthetic oligonucleotide
cggaauccgguagacgcug

SEQ ID NO: 949094 - RNA, 19 nt, Artificial Sequence
  Description of Artificial Sequence: Synthetic oligonucleotide
agcuccccugaaacuuuau

SEQ ID NO: 949095 - RNA, 19 nt, Artificial Sequence
  Description of Artificial Sequence: Synthetic oligonucleotide
guaggcgaucuucccuuuu

SEQ ID NO: 949096 - RNA, 19 nt, Artificial Sequence
  Description of Artificial Sequence: Synthetic oligonucleotide
ggugcccucagggucauuu

SEQ ID NO: 949097 - RNA, 19 nt, Artificial Sequence
  Description of Artificial Sequence: Synthetic oligonucleotide
agccgcgguucgaggcccg

SEQ ID NO: 949098 - RNA, 19 nt, Artificial Sequence
  Description of Artificial Sequence: Synthetic oligonucleotide
ggucaaacccacggugagu

SEQ ID NO: 949099 - RNA, 19 nt, Artificial Sequence
  Description of Artificial Sequence: Synthetic oligonucleotide
cgguaacuugcuuuaagau

SEQ ID NO: 949100 - RNA, 19 nt, Artificial Sequence
  Description of Artificial Sequence: Synthetic oligonucleotide
gguucggaacagagcugga

SEQ ID NO: 949101 - RNA, 19 nt, Artificial Sequence
  Description of Artificial Sequence: Synthetic oligonucleotide
cuccgcuacuccccugccu

SEQ ID NO: 949102 - RNA, 19 nt, Artificial Sequence
  Description of Artificial Sequence: Synthetic oligonucleotide
cccaauagcuagucacuau

SEQ ID NO: 949103 - RNA, 19 nt, Artificial Sequence
  Description of Artificial Sequence: Synthetic oligonucleotide
cccacaagucacugcuugu

SEQ ID NO: 949104 - RNA, 19 nt, Artificial Sequence
  Description of Artificial Sequence: Synthetic oligonucleotide
gcggaauccgguagacgcu

SEQ ID NO: 949105 - RNA, 19 nt, Artificial Sequence
  Description of Artificial Sequence: Synthetic oligonucleotide
gggaaaugaugcggucccu

SEQ ID NO: 949106 - RNA, 19 nt, Artificial Sequence
  Description of Artificial Sequence: Synthetic oligonucleotide
cuacgcccgguaccauccu

SEQ ID NO: 949107 - RNA, 19 nt, Artificial Sequence
  Description of Artificial Sequence: Synthetic oligonucleotide
cggcggaauccgguagacg

SEQ ID NO: 949108 - RNA, 19 nt, Artificial Sequence
  Description of Artificial Sequence: Synthetic oligonucleotide
ccuugguugugagcaggaa

SEQ ID NO: 949109 - RNA, 19 nt, Artificial Sequence
  Description of Artificial Sequence: Synthetic oligonucleotide
ccgcgguucgaggcccgcg

SEQ ID NO: 949110 - RNA, 19 nt, Artificial Sequence
  Description of Artificial Sequence: Synthetic oligonucleotide
gcgcuucuacugcucugcu

SEQ ID NO: 949111 - RNA, 19 nt, Artificial Sequence
  Description of Artificial Sequence: Synthetic oligonucleotide
gccgcgguucgaggcccgc

SEQ ID NO: 949112 - RNA, 19 nt, Artificial Sequence
  Description of Artificial Sequence: Synthetic oligonucleotide
ggcgguggggugacauggu

SEQ ID NO: 949113 - RNA, 19 nt, Artificial Sequence
  Description of Artificial Sequence: Synthetic oligonucleotide
cgcccgguaccauccugga

SEQ ID NO: 949114 - RNA, 19 nt, Artificial Sequence
  Description of Artificial Sequence: Synthetic oligonucleotide
cgaggcccgcggcggaauc

SEQ ID NO: 949115 - RNA, 19 nt, Artificial Sequence
  Description of Artificial Sequence: Synthetic oligonucleotide
gcacuacgcccgguaccau

SEQ ID NO: 949116 - RNA, 19 nt, Artificial Sequence
  Description of Artificial Sequence: Synthetic oligonucleotide
cgcugacgucaggcuucac

SEQ ID NO: 949117 - RNA, 19 nt, Artificial Sequence
  Description of Artificial Sequence: Synthetic oligonucleotide
auuggauaugaacagaacc

SEQ ID NO: 949118 - RNA, 19 nt, Artificial Sequence
  Description of Artificial Sequence: Synthetic oligonucleotide
agaacuagagccuugaguc

SEQ ID NO: 949119 - RNA, 19 nt, Artificial Sequence
  Description of Artificial Sequence: Synthetic oligonucleotide
aaaauaagcaagccccggc

SEQ ID NO: 949120 - RNA, 19 nt, Artificial Sequence
  Description of Artificial Sequence: Synthetic oligonucleotide
caugacauuagugagagcg

SEQ ID NO: 949121 - RNA, 19 nt, Artificial Sequence
  Description of Artificial Sequence: Synthetic oligonucleotide
auuguaaugcaguagccac

SEQ ID NO: 949122 - RNA, 19 nt, Artificial Sequence
  Description of Artificial Sequence: Synthetic oligonucleotide
uugauuguaaugcaguagc

SEQ ID NO: 949123 - RNA, 19 nt, Artificial Sequence
  Description of Artificial Sequence: Synthetic oligonucleotide
uuggauaugaacagaacca

SEQ ID NO: 949124 - RNA, 19 nt, Artificial Sequence
  Description of Artificial Sequence: Synthetic oligonucleotide
gaugcgacuuccuuaaagg

SEQ ID NO: 949125 - RNA, 19 nt, Artificial Sequence
  Description of Artificial Sequence: Synthetic oligonucleotide
cuuacuaccaccgacagug

SEQ ID NO: 949126 - RNA, 19 nt, Artificial Sequence
  Description of Artificial Sequence: Synthetic oligonucleotide
uaaugcaguagccacuugg

SEQ ID NO: 949127 - RNA, 19 nt, Artificial Sequence
  Description of Artificial Sequence: Synthetic oligonucleotide
aauaagcuuacucaggauu

SEQ ID NO: 949128 - RNA, 19 nt, Artificial Sequence
  Description of Artificial Sequence: Synthetic oligonucleotide
aaagguauucaauggcuug

SEQ ID NO: 949129 - RNA, 19 nt, Artificial Sequence
  Description of Artificial Sequence: Synthetic oligonucleotide
aagguauucaauggcuugc

SEQ ID NO: 949130 - RNA, 19 nt, Artificial Sequence
  Description of Artificial Sequence: Synthetic oligonucleotide
uuugagaggcaacuugagg

SEQ ID NO: 949131 - RNA, 19 nt, Artificial Sequence
  Description of Artificial Sequence: Synthetic oligonucleotide
ucugaaggccaacauaacc

SEQ ID NO: 949132 - RNA, 19 nt, Artificial Sequence
  Description of Artificial Sequence: Synthetic oligonucleotide
aaauuuccugagcucacuc

SEQ ID NO: 949133 - RNA, 19 nt, Artificial Sequence
  Description of Artificial Sequence: Synthetic oligonucleotide
agcaaggucggcuagaaca

SEQ ID NO: 949134 - RNA, 19 nt, Artificial Sequence
  Description of Artificial Sequence: Synthetic oligonucleotide
uccuuaaagggaauggagc

SEQ ID NO: 949135 - RNA, 19 nt, Artificial Sequence
  Description of Artificial Sequence: Synthetic oligonucleotide
auuguugagggcgugaagg

SEQ ID NO: 949136 - RNA, 19 nt, Artificial Sequence
  Description of Artificial Sequence: Synthetic oligonucleotide
aaguguucagagcuccuac

SEQ ID NO: 949137 - RNA, 19 nt, Artificial Sequence
  Description of Artificial Sequence: Synthetic oligonucleotide
aaugguacagaugaccgug

SEQ ID NO: 949138 - RNA, 19 nt, Artificial Sequence
  Description of Artificial Sequence: Synthetic oligonucleotide
ggugaguccucauagaagg

SEQ ID NO: 949139 - RNA, 19 nt, Artificial Sequence
  Description of Artificial Sequence: Synthetic oligonucleotide
aaagagcggguccagaacu

SEQ ID NO: 949140 - RNA, 19 nt, Artificial Sequence
  Description of Artificial Sequence: Synthetic oligonucleotide
aaugguauuuuagaaauuu

SEQ ID NO: 949141 - RNA, 19 nt, Artificial Sequence
  Description of Artificial Sequence: Synthetic oligonucleotide
caagguuguacguaggccc

SEQ ID NO: 949142 - RNA, 19 nt, Artificial Sequence
  Description of Artificial Sequence: Synthetic oligonucleotide
aaugcuuaagcgucuuugu

SEQ ID NO: 949143 - RNA, 19 nt, Artificial Sequence
  Description of Artificial Sequence: Synthetic oligonucleotide
ugaucuagaacuagagccu

SEQ ID NO: 949144 - RNA, 19 nt, Artificial Sequence
  Description of Artificial Sequence: Synthetic oligonucleotide
uguccuauugcacuggcaa

SEQ ID NO: 949145 - RNA, 19 nt, Artificial Sequence
  Description of Artificial Sequence: Synthetic oligonucleotide
aggguugaggcaaagagcg

SEQ ID NO: 949146 - RNA, 19 nt, Artificial Sequence
  Description of Artificial Sequence: Synthetic oligonucleotide
gguuaaacaaaauacaucu

SEQ ID NO: 949147 - RNA, 19 nt, Artificial Sequence
  Description of Artificial Sequence: Synthetic oligonucleotide
aauuggauaugaacagaac

SEQ ID NO: 949148 - RNA, 19 nt, Artificial Sequence
  Description of Artificial Sequence: Synthetic oligonucleotide
uagaacuagagccuugagu

SEQ ID NO: 949149 - RNA, 19 nt, Artificial Sequence
  Description of Artificial Sequence: Synthetic oligonucleotide
aguguucagagcuccuacc

SEQ ID NO: 949150 - RNA, 19 nt, Artificial Sequence
  Description of Artificial Sequence: Synthetic oligonucleotide
ugacaaucagcaaggucgg

SEQ ID NO: 949151 - RNA, 19 nt, Artificial Sequence
  Description of Artificial Sequence: Synthetic oligonucleotide
aaauggcuuacuaccaccg

SEQ ID NO: 949152 - RNA, 19 nt, Artificial Sequence
  Description of Artificial Sequence: Synthetic oligonucleotide
aacccaaugagauguuuga

SEQ ID NO: 949153 - RNA, 19 nt, Artificial Sequence
  Description of Artificial Sequence: Synthetic oligonucleotide
auggcuuacuaccaccgac

SEQ ID NO: 949154 - RNA, 19 nt, Artificial Sequence
  Description of Artificial Sequence: Synthetic oligonucleotide
gggaaaauaagcaagcccc

SEQ ID NO: 949155 - RNA, 19 nt, Artificial Sequence
  Description of Artificial Sequence: Synthetic oligonucleotide
uuaguucccucucugaaau

SEQ ID NO: 949156 - RNA, 19 nt, Artificial Sequence
  Description of Artificial Sequence: Synthetic oligonucleotide
ugggcaucaacaugggucc

SEQ ID NO: 949157 - RNA, 19 nt, Artificial Sequence
  Description of Artificial Sequence: Synthetic oligonucleotide
agagcgaugacacccacgu

SEQ ID NO: 949158 - RNA, 19 nt, Artificial Sequence
  Description of Artificial Sequence: Synthetic oligonucleotide
agagccuugagucaucagu

SEQ ID NO: 949159 - RNA, 19 nt, Artificial Sequence
  Description of Artificial Sequence: Synthetic oligonucleotide
gagucaagguuguacguag

SEQ ID NO: 949160 - RNA, 19 nt, Artificial Sequence
  Description of Artificial Sequence: Synthetic oligonucleotide
uggauaugaacagaaccag

SEQ ID NO: 949161 - RNA, 19 nt, Artificial Sequence
  Description of Artificial Sequence: Synthetic oligonucleotide
uuuuccucgcaaaugguau

SEQ ID NO: 949162 - RNA, 19 nt, Artificial Sequence
  Description of Artificial Sequence: Synthetic oligonucleotide
ugcgacuuccuuaaaggga

SEQ ID NO: 949163 - RNA, 19 nt, Artificial Sequence
  Description of Artificial Sequence: Synthetic oligonucleotide
cucgcaaaugguauuuuag

SEQ ID NO: 949164 - RNA, 19 nt, Artificial Sequence
  Description of Artificial Sequence: Synthetic oligonucleotide
ugauuggaaugucauugug

SEQ ID NO: 949165 - RNA, 19 nt, Artificial Sequence
  Description of Artificial Sequence: Synthetic oligonucleotide
aaaugguacagaugaccgu

SEQ ID NO: 949166 - RNA, 19 nt, Artificial Sequence
  Description of Artificial Sequence: Synthetic oligonucleotide
aagugaucuagaacuagag

SEQ ID NO: 949167 - RNA, 19 nt, Artificial Sequence
  Description of Artificial Sequence: Synthetic oligonucleotide
acgaacgcagauccagugc

SEQ ID NO: 949168 - RNA, 19 nt, Artificial Sequence
  Description of Artificial Sequence: Synthetic oligonucleotide
aagguuguacguaggcccc

SEQ ID NO: 949169 - RNA, 19 nt, Artificial Sequence
  Description of Artificial Sequence: Synthetic oligonucleotide
aaagugaucuagaacuaga

SEQ ID NO: 949170 - RNA, 19 nt, Artificial Sequence
  Description of Artificial Sequence: Synthetic oligonucleotide
ugcagugccguuugcacag

SEQ ID NO: 949171 - RNA, 19 nt, Artificial Sequence
  Description of Artificial Sequence: Synthetic oligonucleotide
uggauugaagauacaugug

SEQ ID NO: 949172 - RNA, 19 nt, Artificial Sequence
  Description of Artificial Sequence: Synthetic oligonucleotide
acauuagugagagcgauga

SEQ ID NO: 949173 - RNA, 19 nt, Artificial Sequence
  Description of Artificial Sequence: Synthetic oligonucleotide
uggugaguccucauagaag

SEQ ID NO: 949174 - RNA, 19 nt, Artificial Sequence
  Description of Artificial Sequence: Synthetic oligonucleotide
augcgacuuccuuaaaggg

SEQ ID NO: 949175 - RNA, 19 nt, Artificial Sequence
  Description of Artificial Sequence: Synthetic oligonucleotide
caaccucuggaaaaucucc

SEQ ID NO: 949176 - RNA, 19 nt, Artificial Sequence
  Description of Artificial Sequence: Synthetic oligonucleotide
auaagcuuacucaggauug

SEQ ID NO: 949177 - RNA, 19 nt, Artificial Sequence
  Description of Artificial Sequence: Synthetic oligonucleotide
uuuaguucccucucugaaa

SEQ ID NO: 949178 - RNA, 19 nt, Artificial Sequence
  Description of Artificial Sequence: Synthetic oligonucleotide
aauaagcaagccccggcaa

SEQ ID NO: 949179 - RNA, 19 nt, Artificial Sequence
  Description of Artificial Sequence: Synthetic oligonucleotide
agauccguagggaggaacc

SEQ ID NO: 949180 - RNA, 19 nt, Artificial Sequence
  Description of Artificial Sequence: Synthetic oligonucleotide
ucggcuagaacaucuggcu

SEQ ID NO: 949181 - RNA, 19 nt, Artificial Sequence
  Description of Artificial Sequence: Synthetic oligonucleotide
ucacucucgccuccaaucc

SEQ ID NO: 949182 - RNA, 19 nt, Artificial Sequence
  Description of Artificial Sequence: Synthetic oligonucleotide
uccuaagcaccagaauugg

SEQ ID NO: 949183 - RNA, 19 nt, Artificial Sequence
  Description of Artificial Sequence: Synthetic oligonucleotide
cuuugguuugaagugcugc

SEQ ID NO: 949184 - RNA, 19 nt, Artificial Sequence
  Description of Artificial Sequence: Synthetic oligonucleotide
gauuccacgugcaugggac

SEQ ID NO: 949185 - RNA, 19 nt, Artificial Sequence
  Description of Artificial Sequence: Synthetic oligonucleotide
gauuguaaugcaguagcca

SEQ ID NO: 949186 - RNA, 19 nt, Artificial Sequence
  Description of Artificial Sequence: Synthetic oligonucleotide
agaugaccgugguugauug

SEQ ID NO: 949187 - RNA, 19 nt, Artificial Sequence
  Description of Artificial Sequence: Synthetic oligonucleotide
ucuagaacuagagccuuga

SEQ ID NO: 949188 - RNA, 19 nt, Artificial Sequence
  Description of Artificial Sequence: Synthetic oligonucleotide
aauccacuccggcaucuug

SEQ ID NO: 949189 - RNA, 19 nt, Artificial Sequence
  Description of Artificial Sequence: Synthetic oligonucleotide
uguacguaggccccuccca

SEQ ID NO: 949190 - RNA, 19 nt, Artificial Sequence
  Description of Artificial Sequence: Synthetic oligonucleotide
gaauuggauaugaacagaa

SEQ ID NO: 949191 - RNA, 19 nt, Artificial Sequence
  Description of Artificial Sequence: Synthetic oligonucleotide
aauggcuuacuaccaccga

SEQ ID NO: 949192 - RNA, 19 nt, Artificial Sequence
  Description of Artificial Sequence: Synthetic oligonucleotide
uuguggggcgucaccauag

SEQ ID NO: 949193 - RNA, 19 nt, Artificial Sequence
  Description of Artificial Sequence: Synthetic oligonucleotide
uggggcgucaccauaguau

SEQ ID NO: 949194 - RNA, 19 nt, Artificial Sequence
  Description of Artificial Sequence: Synthetic oligonucleotide
cuuggugguucugugacag

SEQ ID NO: 949195 - RNA, 19 nt, Artificial Sequence
  Description of Artificial Sequence: Synthetic oligonucleotide
uucgugugugguaugguau

SEQ ID NO: 949196 - RNA, 19 nt, Artificial Sequence
  Description of Artificial Sequence: Synthetic oligonucleotide
cugcuucaccccaauaagc

SEQ ID NO: 949197 - RNA, 19 nt, Artificial Sequence
  Description of Artificial Sequence: Synthetic oligonucleotide
gccaacauaaccacauucg

SEQ ID NO: 949198 - RNA, 19 nt, Artificial Sequence
  Description of Artificial Sequence: Synthetic oligonucleotide
ucgugaagugcuguccugg

SEQ ID NO: 949199 - RNA, 19 nt, Artificial Sequence
  Description of Artificial Sequence: Synthetic oligonucleotide
gcuacuugaauagaaaaca

SEQ ID NO: 949200 - RNA, 19 nt, Artificial Sequence
  Description of Artificial Sequence: Synthetic oligonucleotide
aaacgcccgaugccaacag

SEQ ID NO: 949201 - RNA, 19 nt, Artificial Sequence
  Description of Artificial Sequence: Synthetic oligonucleotide
ucccaccucacgaacgcag

SEQ ID NO: 949202 - RNA, 19 nt, Artificial Sequence
  Description of Artificial Sequence: Synthetic oligonucleotide
gaggguugaggcaaagagc

SEQ ID NO: 949203 - RNA, 19 nt, Artificial Sequence
  Description of Artificial Sequence: Synthetic oligonucleotide
acaaccucuggaaaaucuc

SEQ ID NO: 949204 - RNA, 19 nt, Artificial Sequence
  Description of Artificial Sequence: Synthetic oligonucleotide
gacaguuuuccaugcccgc

SEQ ID NO: 949205 - RNA, 19 nt, Artificial Sequence
  Description of Artificial Sequence: Synthetic oligonucleotide
accgacagugccaauggac

SEQ ID NO: 949206 - RNA, 19 nt, Artificial Sequence
  Description of Artificial Sequence: Synthetic oligonucleotide
auagccccugcuucacccc

SEQ ID NO: 949207 - RNA, 19 nt, Artificial Sequence
  Description of Artificial Sequence: Synthetic oligonucleotide
uccggcaucuugaguuugg

SEQ ID NO: 949208 - RNA, 19 nt, Artificial Sequence
  Description of Artificial Sequence: Synthetic oligonucleotide
aaggaccccucuuuuaguu

SEQ ID NO: 949209 - RNA, 19 nt, Artificial Sequence
  Description of Artificial Sequence: Synthetic oligonucleotide
ucaggaugcgacuuccuua

SEQ ID NO: 949210 - RNA, 19 nt, Artificial Sequence
  Description of Artificial Sequence: Synthetic oligonucleotide
acauucgugugugguaugg

SEQ ID NO: 949211 - RNA, 19 nt, Artificial Sequence
  Description of Artificial Sequence: Synthetic oligonucleotide
cucacgaacgcagauccag

SEQ ID NO: 949212 - RNA, 19 nt, Artificial Sequence
  Description of Artificial Sequence: Synthetic oligonucleotide
gaagcccaugacauuagug

SEQ ID NO: 949213 - RNA, 19 nt, Artificial Sequence
  Description of Artificial Sequence: Synthetic oligonucleotide
uuguacguaggccccuccc

SEQ ID NO: 949214 - RNA, 19 nt, Artificial Sequence
  Description of Artificial Sequence: Synthetic oligonucleotide
acaaucagcaaggucggcu

SEQ ID NO: 949215 - RNA, 19 nt, Artificial Sequence
  Description of Artificial Sequence: Synthetic oligonucleotide
uguuccuaagcaccagaau

SEQ ID NO: 949216 - RNA, 19 nt, Artificial Sequence
  Description of Artificial Sequence: Synthetic oligonucleotide
agaauuggauaugaacaga

SEQ ID NO: 949217 - RNA, 19 nt, Artificial Sequence
  Description of Artificial Sequence: Synthetic oligonucleotide
uguggugaguccucauaga

SEQ ID NO: 949218 - RNA, 19 nt, Artificial Sequence
  Description of Artificial Sequence: Synthetic oligonucleotide
aaaacgcccgaugccaaca

SEQ ID NO: 949219 - RNA, 19 nt, Artificial Sequence
  Description of Artificial Sequence: Synthetic oligonucleotide
accgugguugauuguaaug

SEQ ID NO: 949220 - RNA, 19 nt, Artificial Sequence
  Description of Artificial Sequence: Synthetic oligonucleotide
aaggucggcuagaacaucu

SEQ ID NO: 949221 - RNA, 19 nt, Artificial Sequence
  Description of Artificial Sequence: Synthetic oligonucleotide
gaugacacccacgucccug

SEQ ID NO: 949222 - RNA, 19 nt, Artificial Sequence
  Description of Artificial Sequence: Synthetic oligonucleotide
agcguuucccucgugaagu

SEQ ID NO: 949223 - RNA, 19 nt, Artificial Sequence
  Description of Artificial Sequence: Synthetic oligonucleotide
gcccugaaaugcuuaagcg

SEQ ID NO: 949224 - RNA, 19 nt, Artificial Sequence
  Description of Artificial Sequence: Synthetic oligonucleotide
uuaagcgucuuuguacauc

SEQ ID NO: 949225 - RNA, 19 nt, Artificial Sequence
  Description of Artificial Sequence: Synthetic oligonucleotide
ggaugcgacuuccuuaaag

SEQ ID NO: 949226 - RNA, 19 nt, Artificial Sequence
  Description of Artificial Sequence: Synthetic oligonucleotide
cuagcgagggccugcgggc

SEQ ID NO: 949227 - RNA, 19 nt, Artificial Sequence
  Description of Artificial Sequence: Synthetic oligonucleotide
uccuauugcacuggcaaau

SEQ ID NO: 949228 - RNA, 19 nt, Artificial Sequence
  Description of Artificial Sequence: Synthetic oligonucleotide
uuuuccaugcccgccggga

SEQ ID NO: 949229 - RNA, 19 nt, Artificial Sequence
  Description of Artificial Sequence: Synthetic oligonucleotide
ugacauuagugagagcgau

SEQ ID NO: 949230 - RNA, 19 nt, Artificial Sequence
  Description of Artificial Sequence: Synthetic oligonucleotide
guuccuaagcaccagaauu

SEQ ID NO: 949231 - RNA, 19 nt, Artificial Sequence
  Description of Artificial Sequence: Synthetic oligonucleotide
uuugaagugcugccaugau

SEQ ID NO: 949232 - RNA, 19 nt, Artificial Sequence
  Description of Artificial Sequence: Synthetic oligonucleotide
uacagaugaccgugguuga

SEQ ID NO: 949233 - RNA, 19 nt, Artificial Sequence
  Description of Artificial Sequence: Synthetic oligonucleotide
uaagcuuacucaggauuga

SEQ ID NO: 949234 - RNA, 19 nt, Artificial Sequence
  Description of Artificial Sequence: Synthetic oligonucleotide
ugcgcuugucccaccaaac

SEQ ID NO: 949235 - RNA, 19 nt, Artificial Sequence
  Description of Artificial Sequence: Synthetic oligonucleotide
uccacuccggcaucuugag

SEQ ID NO: 949236 - RNA, 19 nt, Artificial Sequence
  Description of Artificial Sequence: Synthetic oligonucleotide
gcaaggaccccucuuuuag

SEQ ID NO: 949237 - RNA, 19 nt, Artificial Sequence
  Description of Artificial Sequence: Synthetic oligonucleotide
ugaagcccaugacauuagu

SEQ ID NO: 949238 - RNA, 19 nt, Artificial Sequence
  Description of Artificial Sequence: Synthetic oligonucleotide
ggauugacaugcaagcccc

SEQ ID NO: 949239 - RNA, 19 nt, Artificial Sequence
  Description of Artificial Sequence: Synthetic oligonucleotide
acagcuagcgagggccugc

SEQ ID NO: 949240 - RNA, 19 nt, Artificial Sequence
  Description of Artificial Sequence: Synthetic oligonucleotide
ucacgaacgcagauccagu

SEQ ID NO: 949241 - RNA, 19 nt, Artificial Sequence
  Description of Artificial Sequence: Synthetic oligonucleotide
caagccccggcaaggaccc

SEQ ID NO: 949242 - RNA, 19 nt, Artificial Sequence
  Description of Artificial Sequence: Synthetic oligonucleotide
acacccacgucccugcgcu

SEQ ID NO: 949243 - RNA, 19 nt, Artificial Sequence
  Description of Artificial Sequence: Synthetic oligonucleotide
caaagagcggguccagaac

SEQ ID NO: 949244 - RNA, 19 nt, Artificial Sequence
  Description of Artificial Sequence: Synthetic oligonucleotide
aucaacaugggucccuguu

SEQ ID NO: 949245 - RNA, 19 nt, Artificial Sequence
  Description of Artificial Sequence: Synthetic oligonucleotide
auucgugugugguauggua

SEQ ID NO: 949246 - RNA, 19 nt, Artificial Sequence
  Description of Artificial Sequence: Synthetic oligonucleotide
uguucagagcuccuaccuu

SEQ ID NO: 949247 - RNA, 19 nt, Artificial Sequence
  Description of Artificial Sequence: Synthetic oligonucleotide
gaauagaaaacagcuuugu

SEQ ID NO: 949248 - RNA, 19 nt, Artificial Sequence
  Description of Artificial Sequence: Synthetic oligonucleotide
aaggguccugcugugacaa

SEQ ID NO: 949249 - RNA, 19 nt, Artificial Sequence
  Description of Artificial Sequence: Synthetic oligonucleotide
cacgaacgcagauccagug

SEQ ID NO: 949250 - RNA, 19 nt, Artificial Sequence
  Description of Artificial Sequence: Synthetic oligonucleotide
gaaaacgcccgaugccaac

SEQ ID NO: 949251 - RNA, 19 nt, Artificial Sequence
  Description of Artificial Sequence: Synthetic oligonucleotide
cuagaacuagagccuugag

SEQ ID NO: 949252 - RNA, 19 nt, Artificial Sequence
  Description of Artificial Sequence: Synthetic oligonucleotide
agcaagccccggcaaggac

SEQ ID NO: 949253 - RNA, 19 nt, Artificial Sequence
  Description of Artificial Sequence: Synthetic oligonucleotide
ggaccccucuuuuaguucc

SEQ ID NO: 949254 - RNA, 19 nt, Artificial Sequence
  Description of Artificial Sequence: Synthetic oligonucleotide
uuacuaccaccgacagugc

SEQ ID NO: 949255 - RNA, 19 nt, Artificial Sequence
  Description of Artificial Sequence: Synthetic oligonucleotide
cccaauaagcuuacucagg

SEQ ID NO: 949256 - RNA, 19 nt, Artificial Sequence
  Description of Artificial Sequence: Synthetic oligonucleotide
gcuagcgagggccugcggg

SEQ ID NO: 949257 - RNA, 19 nt, Artificial Sequence
  Description of Artificial Sequence: Synthetic oligonucleotide
ggaggaaccucuucccaag

SEQ ID NO: 949258 - RNA, 19 nt, Artificial Sequence
  Description of Artificial Sequence: Synthetic oligonucleotide
ccgacagugccaauggacc

SEQ ID NO: 949259 - RNA, 19 nt, Artificial Sequence
  Description of Artificial Sequence: Synthetic oligonucleotide
agcagauccguagggagga

SEQ ID NO: 949260 - RNA, 19 nt, Artificial Sequence
  Description of Artificial Sequence: Synthetic oligonucleotide
accaccgacagugccaaug

SEQ ID NO: 949261 - RNA, 19 nt, Artificial Sequence
  Description of Artificial Sequence: Synthetic oligonucleotide
ugccguuugcacaggccca

SEQ ID NO: 949262 - RNA, 19 nt, Artificial Sequence
  Description of Artificial Sequence: Synthetic oligonucleotide
cucuaaguguucagagcuc

SEQ ID NO: 949263 - RNA, 19 nt, Artificial Sequence
  Description of Artificial Sequence: Synthetic oligonucleotide
cauuguugagggcgugaag

SEQ ID NO: 949264 - RNA, 19 nt, Artificial Sequence
  Description of Artificial Sequence: Synthetic oligonucleotide
gagagcgaugacacccacg

SEQ ID NO: 949265 - RNA, 19 nt, Artificial Sequence
  Description of Artificial Sequence: Synthetic oligonucleotide
uaaguguucagagcuccua

SEQ ID NO: 949266 - RNA, 19 nt, Artificial Sequence
  Description of Artificial Sequence: Synthetic oligonucleotide
ugaccgugguugauuguaa

SEQ ID NO: 949267 - RNA, 19 nt, Artificial Sequence
  Description of Artificial Sequence: Synthetic oligonucleotide
ggucggcuagaacaucugg

SEQ ID NO: 949268 - RNA, 19 nt, Artificial Sequence
  Description of Artificial Sequence: Synthetic oligonucleotide
uacguaggccccucccacc

SEQ ID NO: 949269 - RNA, 19 nt, Artificial Sequence
  Description of Artificial Sequence: Synthetic oligonucleotide
gcucauggauuccacgugc

SEQ ID NO: 949270 - RNA, 19 nt, Artificial Sequence
  Description of Artificial Sequence: Synthetic oligonucleotide
ccgugguugauuguaaugc

SEQ ID NO: 949271 - RNA, 19 nt, Artificial Sequence
  Description of Artificial Sequence: Synthetic oligonucleotide
cauucacaucauaguuccc

SEQ ID NO: 949272 - RNA, 19 nt, Artificial Sequence
  Description of Artificial Sequence: Synthetic oligonucleotide
uggcugguagugauuggaa

SEQ ID NO: 949273 - RNA, 19 nt, Artificial Sequence
  Description of Artificial Sequence: Synthetic oligonucleotide
gaccuaaggguccugcugu

SEQ ID NO: 949274 - RNA, 19 nt, Artificial Sequence
  Description of Artificial Sequence: Synthetic oligonucleotide
uuuccucgcaaaugguauu

SEQ ID NO: 949275 - RNA, 19 nt, Artificial Sequence
  Description of Artificial Sequence: Synthetic oligonucleotide
augcuuaagcgucuuugua

SEQ ID NO: 949276 - RNA, 19 nt, Artificial Sequence
  Description of Artificial Sequence: Synthetic oligonucleotide
uagugauuggaaugucauu

SEQ ID NO: 949277 - RNA, 19 nt, Artificial Sequence
  Description of Artificial Sequence: Synthetic oligonucleotide
ggauaugaacagaaccagc

SEQ ID NO: 949278 - RNA, 19 nt, Artificial Sequence
  Description of Artificial Sequence: Synthetic oligonucleotide
agacaaccucuggaaaauc

SEQ ID NO: 949279 - RNA, 19 nt, Artificial Sequence
  Description of Artificial Sequence: Synthetic oligonucleotide
agcaccagaauuggauaug

SEQ ID NO: 949280 - RNA, 19 nt, Artificial Sequence
  Description of Artificial Sequence: Synthetic oligonucleotide
ugagagcgaugacacccac

SEQ ID NO: 949281 - RNA, 19 nt, Artificial Sequence
  Description of Artificial Sequence: Synthetic oligonucleotide
agccuugagucaucaguga

SEQ ID NO: 949282 - RNA, 19 nt, Artificial Sequence
  Description of Artificial Sequence: Synthetic oligonucleotide
ccugcuucaccccaauaag

SEQ ID NO: 949283 - RNA, 19 nt, Artificial Sequence
  Description of Artificial Sequence: Synthetic oligonucleotide
ucccugagaaaacgcccga

SEQ ID NO: 949284 - RNA, 19 nt, Artificial Sequence
  Description of Artificial Sequence: Synthetic oligonucleotide
guacguaggccccucccac

SEQ ID NO: 949285 - RNA, 19 nt, Artificial Sequence
  Description of Artificial Sequence: Synthetic oligonucleotide
caggaugcgacuuccuuaa

SEQ ID NO: 949286 - RNA, 19 nt, Artificial Sequence
  Description of Artificial Sequence: Synthetic oligonucleotide
acgugcaugggacuucuuu

SEQ ID NO: 949287 - RNA, 19 nt, Artificial Sequence
  Description of Artificial Sequence: Synthetic oligonucleotide
ugacaaguacuagcagaac

SEQ ID NO: 949288 - RNA, 19 nt, Artificial Sequence
  Description of Artificial Sequence: Synthetic oligonucleotide
ucgugugugguaugguauu

SEQ ID NO: 949289 - RNA, 19 nt, Artificial Sequence
  Description of Artificial Sequence: Synthetic oligonucleotide
uggaccuaaggguccugcu

SEQ ID NO: 949290 - RNA, 19 nt, Artificial Sequence
  Description of Artificial Sequence: Synthetic oligonucleotide
accacauucguguguggua

SEQ ID NO: 949291 - RNA, 19 nt, Artificial Sequence
  Description of Artificial Sequence: Synthetic oligonucleotide
ggcuuacuaccaccgacag

SEQ ID NO: 949292 - RNA, 19 nt, Artificial Sequence
  Description of Artificial Sequence: Synthetic oligonucleotide
ggguccagaacugucacac

SEQ ID NO: 949293 - RNA, 19 nt, Artificial Sequence
  Description of Artificial Sequence: Synthetic oligonucleotide
ugucccuuacugggcauca

SEQ ID NO: 949294 - RNA, 19 nt, Artificial Sequence
  Description of Artificial Sequence: Synthetic oligonucleotide
gugaguccucauagaaggg

SEQ ID NO: 949295 - RNA, 19 nt, Artificial Sequence
  Description of Artificial Sequence: Synthetic oligonucleotide
gacacccacgucccugcgc

SEQ ID NO: 949296 - RNA, 19 nt, Artificial Sequence
  Description of Artificial Sequence: Synthetic oligonucleotide
caccuguccuauugcacug

SEQ ID NO: 949297 - RNA, 19 nt, Artificial Sequence
  Description of Artificial Sequence: Synthetic oligonucleotide
ggaccuaaggguccugcug

SEQ ID NO: 949298 - RNA, 19 nt, Artificial Sequence
  Description of Artificial Sequence: Synthetic oligonucleotide
augacauuagugagagcga

SEQ ID NO: 949299 - RNA, 19 nt, Artificial Sequence
  Description of Artificial Sequence: Synthetic oligonucleotide
uggcggacucggcccagcg

SEQ ID NO: 949300 - RNA, 19 nt, Artificial Sequence
  Description of Artificial Sequence: Synthetic oligonucleotide
auuccacgugcaugggacu

SEQ ID NO: 949301 - RNA, 19 nt, Artificial Sequence
  Description of Artificial Sequence: Synthetic oligonucleotide
uguggggcgucaccauagu

SEQ ID NO: 949302 - RNA, 19 nt, Artificial Sequence
  Description of Artificial Sequence: Synthetic oligonucleotide
gggaaacccaaugagaugu

SEQ ID NO: 949303 - RNA, 19 nt, Artificial Sequence
  Description of Artificial Sequence: Synthetic oligonucleotide
acguaggccccucccaccu

SEQ ID NO: 949304 - RNA, 19 nt, Artificial Sequence
  Description of Artificial Sequence: Synthetic oligonucleotide
guuguacguaggccccucc

SEQ ID NO: 949305 - RNA, 19 nt, Artificial Sequence
  Description of Artificial Sequence: Synthetic oligonucleotide
cucgugaagugcuguccug

SEQ ID NO: 949306 - RNA, 19 nt, Artificial Sequence
  Description of Artificial Sequence: Synthetic oligonucleotide
caaucagcaaggucggcua

SEQ ID NO: 949307 - RNA, 19 nt, Artificial Sequence
  Description of Artificial Sequence: Synthetic oligonucleotide
accuaaggguccugcugug

SEQ ID NO: 949308 - RNA, 19 nt, Artificial Sequence
  Description of Artificial Sequence: Synthetic oligonucleotide
uuccucgcaaaugguauuu

SEQ ID NO: 949309 - RNA, 19 nt, Artificial Sequence
  Description of Artificial Sequence: Synthetic oligonucleotide
uaaagggaauggagcuuuu

SEQ ID NO: 949310 - RNA, 19 nt, Artificial Sequence
  Description of Artificial Sequence: Synthetic oligonucleotide
cuguuccuaagcaccagaa

SEQ ID NO: 949311 - RNA, 19 nt, Artificial Sequence
  Description of Artificial Sequence: Synthetic oligonucleotide
guagugauuggaaugucau

SEQ ID NO: 949312 - RNA, 19 nt, Artificial Sequence
  Description of Artificial Sequence: Synthetic oligonucleotide
gaacgcagauccagugcug

SEQ ID NO: 949313 - RNA, 19 nt, Artificial Sequence
  Description of Artificial Sequence: Synthetic oligonucleotide
gagcuccuaccuucuuccc

SEQ ID NO: 949314 - RNA, 19 nt, Artificial Sequence
  Description of Artificial Sequence: Synthetic oligonucleotide
ccugagaaaacgcccgaug

SEQ ID NO: 949315 - RNA, 19 nt, Artificial Sequence
  Description of Artificial Sequence: Synthetic oligonucleotide
ccuuugagaggcaacuuga

SEQ ID NO: 949316 - RNA, 19 nt, Artificial Sequence
  Description of Artificial Sequence: Synthetic oligonucleotide
ccaccgacagugccaaugg

SEQ ID NO: 949317 - RNA, 19 nt, Artificial Sequence
  Description of Artificial Sequence: Synthetic oligonucleotide
auccacuccggcaucuuga

SEQ ID NO: 949318 - RNA, 19 nt, Artificial Sequence
  Description of Artificial Sequence: Synthetic oligonucleotide
gcccaagcagauccguagg

SEQ ID NO: 949319 - RNA, 19 nt, Artificial Sequence
  Description of Artificial Sequence: Synthetic oligonucleotide
aucuagaacuagagccuug

SEQ ID NO: 949320 - RNA, 19 nt, Artificial Sequence
  Description of Artificial Sequence: Synthetic oligonucleotide
cacauucgugugugguaug

SEQ ID NO: 949321 - RNA, 19 nt, Artificial Sequence
  Description of Artificial Sequence: Synthetic oligonucleotide
uugaggcaaagagcggguc

SEQ ID NO: 949322 - RNA, 19 nt, Artificial Sequence
  Description of Artificial Sequence: Synthetic oligonucleotide
acgcccgaugccaacagcu

SEQ ID NO: 949323 - RNA, 19 nt, Artificial Sequence
  Description of Artificial Sequence: Synthetic oligonucleotide
gacaaucagcaaggucggc

SEQ ID NO: 949324 - RNA, 19 nt, Artificial Sequence
  Description of Artificial Sequence: Synthetic oligonucleotide
gccuugagucaucagugac

SEQ ID NO: 949325 - RNA, 19 nt, Artificial Sequence
  Description of Artificial Sequence: Synthetic oligonucleotide
agcggguccagaacuguca

SEQ ID NO: 949326 - RNA, 19 nt, Artificial Sequence
  Description of Artificial Sequence: Synthetic oligonucleotide
ucccucgugaagugcuguc

SEQ ID NO: 949327 - RNA, 19 nt, Artificial Sequence
  Description of Artificial Sequence: Synthetic oligonucleotide
ccuuaaagggaauggagcu

SEQ ID NO: 949328 - RNA, 19 nt, Artificial Sequence
  Description of Artificial Sequence: Synthetic oligonucleotide
cugguagugauuggaaugu

SEQ ID NO: 949329 - RNA, 19 nt, Artificial Sequence
  Description of Artificial Sequence: Synthetic oligonucleotide
cagauccguagggaggaac

SEQ ID NO: 949330 - RNA, 19 nt, Artificial Sequence
  Description of Artificial Sequence: Synthetic oligonucleotide
cagcucucagaccugcaga

SEQ ID NO: 949331 - RNA, 19 nt, Artificial Sequence
  Description of Artificial Sequence: Synthetic oligonucleotide
cuauugcacuggcaaaucu

SEQ ID NO: 949332 - RNA, 19 nt, Artificial Sequence
  Description of Artificial Sequence: Synthetic oligonucleotide
gcaagccccggcaaggacc

SEQ ID NO: 949333 - RNA, 19 nt, Artificial Sequence
  Description of Artificial Sequence: Synthetic oligonucleotide
uucccucgugaagugcugu

SEQ ID NO: 949334 - RNA, 19 nt, Artificial Sequence
  Description of Artificial Sequence: Synthetic oligonucleotide
cugguaccaccaguaggag

SEQ ID NO: 949335 - RNA, 19 nt, Artificial Sequence
  Description of Artificial Sequence: Synthetic oligonucleotide
gcucccugagaaaacgccc

SEQ ID NO: 949336 - RNA, 19 nt, Artificial Sequence
  Description of Artificial Sequence: Synthetic oligonucleotide
cagugccguuugcacaggc

SEQ ID NO: 949337 - RNA, 19 nt, Artificial Sequence
  Description of Artificial Sequence: Synthetic oligonucleotide
gcgacuuccuuaaagggaa

SEQ ID NO: 949338 - RNA, 19 nt, Artificial Sequence
  Description of Artificial Sequence: Synthetic oligonucleotide
agagcggguccagaacugu

SEQ ID NO: 949339 - RNA, 19 nt, Artificial Sequence
  Description of Artificial Sequence: Synthetic oligonucleotide
uuccacgugcaugggacuu

SEQ ID NO: 949340 - RNA, 19 nt, Artificial Sequence
  Description of Artificial Sequence: Synthetic oligonucleotide
agaaaacgcccgaugccaa

SEQ ID NO: 949341 - RNA, 19 nt, Artificial Sequence
  Description of Artificial Sequence: Synthetic oligonucleotide
guuucccucgugaagugcu

SEQ ID NO: 949342 - RNA, 19 nt, Artificial Sequence
  Description of Artificial Sequence: Synthetic oligonucleotide
agcuagcgagggccugcgg

SEQ ID NO: 949343 - RNA, 19 nt, Artificial Sequence
  Description of Artificial Sequence: Synthetic oligonucleotide
cagcccugaaaugcuuaag

SEQ ID NO: 949344 - RNA, 19 nt, Artificial Sequence
  Description of Artificial Sequence: Synthetic oligonucleotide
gggcgugaagggcaacaag

SEQ ID NO: 949345 - RNA, 19 nt, Artificial Sequence
  Description of Artificial Sequence: Synthetic oligonucleotide
gugagagcgaugacaccca

SEQ ID NO: 949346 - RNA, 19 nt, Artificial Sequence
  Description of Artificial Sequence: Synthetic oligonucleotide
cuccaauccacuccggcau

SEQ ID NO: 949347 - RNA, 19 nt, Artificial Sequence
  Description of Artificial Sequence: Synthetic oligonucleotide
gaaccagcccugaaaugcu

SEQ ID NO: 949348 - RNA, 19 nt, Artificial Sequence
  Description of Artificial Sequence: Synthetic oligonucleotide
gcggacucggcccagcgga

SEQ ID NO: 949349 - RNA, 19 nt, Artificial Sequence
  Description of Artificial Sequence: Synthetic oligonucleotide
caagcagaucugguguaga

SEQ ID NO: 949350 - RNA, 19 nt, Artificial Sequence
  Description of Artificial Sequence: Synthetic oligonucleotide
ggccucugcuacuugaaua

SEQ ID NO: 949351 - RNA, 19 nt, Artificial Sequence
  Description of Artificial Sequence: Synthetic oligonucleotide
acaugggucccuguuccua

SEQ ID NO: 949352 - RNA, 19 nt, Artificial Sequence
  Description of Artificial Sequence: Synthetic oligonucleotide
cagcuagcgagggccugcg

SEQ ID NO: 949353 - RNA, 19 nt, Artificial Sequence
  Description of Artificial Sequence: Synthetic oligonucleotide
cuucggggacaguuuucca

SEQ ID NO: 949354 - RNA, 19 nt, Artificial Sequence
  Description of Artificial Sequence: Synthetic oligonucleotide
caauaagcuuacucaggau

SEQ ID NO: 949355 - RNA, 19 nt, Artificial Sequence
  Description of Artificial Sequence: Synthetic oligonucleotide
aggucggcuagaacaucug

SEQ ID NO: 949356 - RNA, 19 nt, Artificial Sequence
  Description of Artificial Sequence: Synthetic oligonucleotide
gaugaccgugguugauugu

SEQ ID NO: 949357 - RNA, 19 nt, Artificial Sequence
  Description of Artificial Sequence: Synthetic oligonucleotide
gagcgaugacacccacguc

SEQ ID NO: 949358 - RNA, 19 nt, Artificial Sequence
  Description of Artificial Sequence: Synthetic oligonucleotide
gauccguagggaggaaccu

SEQ ID NO: 949359 - RNA, 19 nt, Artificial Sequence
  Description of Artificial Sequence: Synthetic oligonucleotide
caaggucggcuagaacauc

SEQ ID NO: 949360 - RNA, 19 nt, Artificial Sequence
  Description of Artificial Sequence: Synthetic oligonucleotide
uccucgcaaaugguauuuu

SEQ ID NO: 949361 - RNA, 19 nt, Artificial Sequence
  Description of Artificial Sequence: Synthetic oligonucleotide
aaccagcccugaaaugcuu

SEQ ID NO: 949362 - RNA, 19 nt, Artificial Sequence
  Description of Artificial Sequence: Synthetic oligonucleotide
cuaaguguucagagcuccu

SEQ ID NO: 949363 - RNA, 19 nt, Artificial Sequence
  Description of Artificial Sequence: Synthetic oligonucleotide
cacucucgccuccaaucca

SEQ ID NO: 949364 - RNA, 19 nt, Artificial Sequence
  Description of Artificial Sequence: Synthetic oligonucleotide
cagcaaggucggcuagaac

SEQ ID NO: 949365 - RNA, 19 nt, Artificial Sequence
  Description of Artificial Sequence: Synthetic oligonucleotide
ggagucaagguuguacgua

SEQ ID NO: 949366 - RNA, 19 nt, Artificial Sequence
  Description of Artificial Sequence: Synthetic oligonucleotide
gagcggguccagaacuguc

SEQ ID NO: 949367 - RNA, 19 nt, Artificial Sequence
  Description of Artificial Sequence: Synthetic oligonucleotide
ggcggacucggcccagcgg

SEQ ID NO: 949368 - RNA, 19 nt, Artificial Sequence
  Description of Artificial Sequence: Synthetic oligonucleotide
caccagaauuggauaugaa

SEQ ID NO: 949369 - RNA, 19 nt, Artificial Sequence
  Description of Artificial Sequence: Synthetic oligonucleotide
cuggaggguugaggcaaag

SEQ ID NO: 949370 - RNA, 19 nt, Artificial Sequence
  Description of Artificial Sequence: Synthetic oligonucleotide
gaccgugguugauuguaau

SEQ ID NO: 949371 - RNA, 19 nt, Artificial Sequence
  Description of Artificial Sequence: Synthetic oligonucleotide
agggcgugaagggcaacaa

SEQ ID NO: 949372 - RNA, 19 nt, Artificial Sequence
  Description of Artificial Sequence: Synthetic oligonucleotide
ccuuugguuugaagugcug

SEQ ID NO: 949373 - RNA, 19 nt, Artificial Sequence
  Description of Artificial Sequence: Synthetic oligonucleotide
cuuaaagggaauggagcuu

SEQ ID NO: 949374 - RNA, 19 nt, Artificial Sequence
  Description of Artificial Sequence: Synthetic oligonucleotide
cccugaaaugcuuaagcgu

SEQ ID NO: 949375 - RNA, 19 nt, Artificial Sequence
  Description of Artificial Sequence: Synthetic oligonucleotide
gccaacagcuagcgagggc

SEQ ID NO: 949376 - RNA, 19 nt, Artificial Sequence
  Description of Artificial Sequence: Synthetic oligonucleotide
gucaggaugcgacuuccuu

SEQ ID NO: 949377 - RNA, 19 nt, Artificial Sequence
  Description of Artificial Sequence: Synthetic oligonucleotide
ccaacauaaccacauucgu

SEQ ID NO: 949378 - RNA, 19 nt, Artificial Sequence
  Description of Artificial Sequence: Synthetic oligonucleotide
ccuauugcacuggcaaauc

SEQ ID NO: 949379 - RNA, 19 nt, Artificial Sequence
  Description of Artificial Sequence: Synthetic oligonucleotide
gucauugugcagggucaga

SEQ ID NO: 949380 - RNA, 19 nt, Artificial Sequence
  Description of Artificial Sequence: Synthetic oligonucleotide
caaggaccccucuuuuagu

SEQ ID NO: 949381 - RNA, 19 nt, Artificial Sequence
  Description of Artificial Sequence: Synthetic oligonucleotide
cuuaagcgucuuuguacau

SEQ ID NO: 949382 - RNA, 19 nt, Artificial Sequence
  Description of Artificial Sequence: Synthetic oligonucleotide
cccgccgggaggcuggcgg

SEQ ID NO: 949383 - RNA, 19 nt, Artificial Sequence
  Description of Artificial Sequence: Synthetic oligonucleotide
aggaugcgacuuccuuaaa

SEQ ID NO: 949384 - RNA, 19 nt, Artificial Sequence
  Description of Artificial Sequence: Synthetic oligonucleotide
gcguuucccucgugaagug

SEQ ID NO: 949385 - RNA, 19 nt, Artificial Sequence
  Description of Artificial Sequence: Synthetic oligonucleotide
cccucgugaagugcugucc

SEQ ID NO: 949386 - RNA, 19 nt, Artificial Sequence
  Description of Artificial Sequence: Synthetic oligonucleotide
ccuaagcaccagaauugga

SEQ ID NO: 949387 - RNA, 19 nt, Artificial Sequence
  Description of Artificial Sequence: Synthetic oligonucleotide
ggacucggcccagcggagg

SEQ ID NO: 949388 - RNA, 19 nt, Artificial Sequence
  Description of Artificial Sequence: Synthetic oligonucleotide
caccgacagugccaaugga

SEQ ID NO: 949389 - RNA, 19 nt, Artificial Sequence
  Description of Artificial Sequence: Synthetic oligonucleotide
guggggcgucaccauagua

SEQ ID NO: 949390 - RNA, 19 nt, Artificial Sequence
  Description of Artificial Sequence: Synthetic oligonucleotide
cucuucuuguggggcguca

SEQ ID NO: 949391 - RNA, 19 nt, Artificial Sequence
  Description of Artificial Sequence: Synthetic oligonucleotide
caucagggucaggaugcga

SEQ ID NO: 949392 - RNA, 19 nt, Artificial Sequence
  Description of Artificial Sequence: Synthetic oligonucleotide
caacagcuagcgagggccu

SEQ ID NO: 949393 - RNA, 19 nt, Artificial Sequence
  Description of Artificial Sequence: Synthetic oligonucleotide
gguuguacguaggccccuc

SEQ ID NO: 949394 - RNA, 19 nt, Artificial Sequence
  Description of Artificial Sequence: Synthetic oligonucleotide
ccucgcaaaugguauuuua

SEQ ID NO: 949395 - RNA, 19 nt, Artificial Sequence
  Description of Artificial Sequence: Synthetic oligonucleotide
gggcugucccuuacugggc

SEQ ID NO: 949396 - RNA, 19 nt, Artificial Sequence
  Description of Artificial Sequence: Synthetic oligonucleotide
ggggagauagccccugcuu

SEQ ID NO: 949397 - RNA, 19 nt, Artificial Sequence
  Description of Artificial Sequence: Synthetic oligonucleotide
cgaacgcagauccagugcu

SEQ ID NO: 949398 - RNA, 19 nt, Artificial Sequence
  Description of Artificial Sequence: Synthetic oligonucleotide
gcaaggucggcuagaacau

SEQ ID NO: 949399 - RNA, 19 nt, Artificial Sequence
  Description of Artificial Sequence: Synthetic oligonucleotide
cagaugaccgugguugauu

SEQ ID NO: 949400 - RNA, 19 nt, Artificial Sequence
  Description of Artificial Sequence: Synthetic oligonucleotide
cgucaccauaguauuugga

SEQ ID NO: 949401 - RNA, 19 nt, Artificial Sequence
  Description of Artificial Sequence: Synthetic oligonucleotide
caucaacaugggucccugu

SEQ ID NO: 949402 - RNA, 19 nt, Artificial Sequence
  Description of Artificial Sequence: Synthetic oligonucleotide
ccagcccugaaaugcuuaa

SEQ ID NO: 949403 - RNA, 19 nt, Artificial Sequence
  Description of Artificial Sequence: Synthetic oligonucleotide
cguuucccucgugaagugc

SEQ ID NO: 949404 - RNA, 19 nt, Artificial Sequence
  Description of Artificial Sequence: Synthetic oligonucleotide
gcuuacuaccaccgacagu

SEQ ID NO: 949405 - RNA, 19 nt, Artificial Sequence
  Description of Artificial Sequence: Synthetic oligonucleotide
cugcagcguuucccucgug

SEQ ID NO: 949406 - RNA, 19 nt, Artificial Sequence
  Description of Artificial Sequence: Synthetic oligonucleotide
ggcuucggggacaguuuuc

SEQ ID NO: 949407 - RNA, 19 nt, Artificial Sequence
  Description of Artificial Sequence: Synthetic oligonucleotide
uaccaccgacagugccaau

SEQ ID NO: 949408 - RNA, 19 nt, Artificial Sequence
  Description of Artificial Sequence: Synthetic oligonucleotide
cucucgccuccaauccacu

SEQ ID NO: 949409 - RNA, 19 nt, Artificial Sequence
  Description of Artificial Sequence: Synthetic oligonucleotide
ccuaaggguccugcuguga

SEQ ID NO: 949410 - RNA, 19 nt, Artificial Sequence
  Description of Artificial Sequence: Synthetic oligonucleotide
ccacauucgugugugguau

SEQ ID NO: 949411 - RNA, 19 nt, Artificial Sequence
  Description of Artificial Sequence: Synthetic oligonucleotide
gccguuugcacaggcccaa

SEQ ID NO: 949412 - RNA, 19 nt, Artificial Sequence
  Description of Artificial Sequence: Synthetic oligonucleotide
ccucacgaacgcagaucca

SEQ ID NO: 949413 - RNA, 19 nt, Artificial Sequence
  Description of Artificial Sequence: Synthetic oligonucleotide
gggcuucggggacaguuuu

SEQ ID NO: 949414 - RNA, 19 nt, Artificial Sequence
  Description of Artificial Sequence: Synthetic oligonucleotide
cgugcggucgcgggccgcg

SEQ ID NO: 949415 - RNA, 19 nt, Artificial Sequence
  Description of Artificial Sequence: Synthetic oligonucleotide
gcuggcggacucggcccag

SEQ ID NO: 949416 - RNA, 19 nt, Artificial Sequence
  Description of Artificial Sequence: Synthetic oligonucleotide
cccugcgcuugucccacca

SEQ ID NO: 949417 - RNA, 19 nt, Artificial Sequence
  Description of Artificial Sequence: Synthetic oligonucleotide
ggucaggaugcgacuuccu

SEQ ID NO: 949418 - RNA, 19 nt, Artificial Sequence
  Description of Artificial Sequence: Synthetic oligonucleotide
caguagccacuuggggccu

SEQ ID NO: 949419 - RNA, 19 nt, Artificial Sequence
  Description of Artificial Sequence: Synthetic oligonucleotide
caauccacuccggcaucuu

SEQ ID NO: 949420 - RNA, 19 nt, Artificial Sequence
  Description of Artificial Sequence: Synthetic oligonucleotide
gcagauccguagggaggaa

SEQ ID NO: 949421 - RNA, 19 nt, Artificial Sequence
  Description of Artificial Sequence: Synthetic oligonucleotide
ggggcuucggggacaguuu

SEQ ID NO: 949422 - RNA, 19 nt, Artificial Sequence
  Description of Artificial Sequence: Synthetic oligonucleotide
cguaggccccucccaccuc

SEQ ID NO: 949423 - RNA, 19 nt, Artificial Sequence
  Description of Artificial Sequence: Synthetic oligonucleotide
ccaccucacgaacgcagau

SEQ ID NO: 949424 - RNA, 19 nt, Artificial Sequence
  Description of Artificial Sequence: Synthetic oligonucleotide
ggccugcgggcgugcgguc

SEQ ID NO: 949425 - RNA, 19 nt, Artificial Sequence
  Description of Artificial Sequence: Synthetic oligonucleotide
ccgccgggaggcuggcgga

SEQ ID NO: 949426 - RNA, 19 nt, Artificial Sequence
  Description of Artificial Sequence: Synthetic oligonucleotide
gggcgucaccauaguauuu

SEQ ID NO: 949427 - RNA, 19 nt, Artificial Sequence
  Description of Artificial Sequence: Synthetic oligonucleotide
ccacuccggcaucuugagu

SEQ ID NO: 949428 - RNA, 19 nt, Artificial Sequence
  Description of Artificial Sequence: Synthetic oligonucleotide
gcgugcggucgcgggccgc

SEQ ID NO: 949429 - RNA, 19 nt, Artificial Sequence
  Description of Artificial Sequence: Synthetic oligonucleotide
cccugagaaaacgcccgau

SEQ ID NO: 949430 - RNA, 19 nt, Artificial Sequence
  Description of Artificial Sequence: Synthetic oligonucleotide
cgugugugguaugguauuu

SEQ ID NO: 949431 - RNA, 19 nt, Artificial Sequence
  Description of Artificial Sequence: Synthetic oligonucleotide
cccggcaaggaccccucuu

SEQ ID NO: 949432 - RNA, 19 nt, Artificial Sequence
  Description of Artificial Sequence: Synthetic oligonucleotide
auaauuauuauuuuaacgg

SEQ ID NO: 949433 - RNA, 19 nt, Artificial Sequence
  Description of Artificial Sequence: Synthetic oligonucleotide
acuaacuccauccucagcg

SEQ ID NO: 949434 - RNA, 19 nt, Artificial Sequence
  Description of Artificial Sequence: Synthetic oligonucleotide
aauacugagcauuuagcuc

SEQ ID NO: 949435 - RNA, 19 nt, Artificial Sequence
  Description of Artificial Sequence: Synthetic oligonucleotide
ugcgauuucaccaagucca

SEQ ID NO: 949436 - RNA, 19 nt, Artificial Sequence
  Description of Artificial Sequence: Synthetic oligonucleotide
aaagcuacauaggaaaggg

SEQ ID NO: 949437 - RNA, 19 nt, Artificial Sequence
  Description of Artificial Sequence: Synthetic oligonucleotide
ucgaauucccuccagaagc

SEQ ID NO: 949438 - RNA, 19 nt, Artificial Sequence
  Description of Artificial Sequence: Synthetic oligonucleotide
auuaaagcuacauaggaaa

SEQ ID NO: 949439 - RNA, 19 nt, Artificial Sequence
  Description of Artificial Sequence: Synthetic oligonucleotide
aagcuagccagcuccaacc

SEQ ID NO: 949440 - RNA, 19 nt, Artificial Sequence
  Description of Artificial Sequence: Synthetic oligonucleotide
ggaaaggagguucagaugg

SEQ ID NO: 949441 - RNA, 19 nt, Artificial Sequence
  Description of Artificial Sequence: Synthetic oligonucleotide
auuuuaacgggguggggcc

SEQ ID NO: 949442 - RNA, 19 nt, Artificial Sequence
  Description of Artificial Sequence: Synthetic oligonucleotide
ggguauuaaagcuacauag

SEQ ID NO: 949443 - RNA, 19 nt, Artificial Sequence
  Description of Artificial Sequence: Synthetic oligonucleotide
auuauuuuaacgggguggg

SEQ ID NO: 949444 - RNA, 19 nt, Artificial Sequence
  Description of Artificial Sequence: Synthetic oligonucleotide
uauuaaagcuacauaggaa

SEQ ID NO: 949445 - RNA, 19 nt, Artificial Sequence
  Description of Artificial Sequence: Synthetic oligonucleotide
ucucgcacggcaaacauga

SEQ ID NO: 949446 - RNA, 19 nt, Artificial Sequence
  Description of Artificial Sequence: Synthetic oligonucleotide
cacaucuacccucagagag

SEQ ID NO: 949447 - RNA, 19 nt, Artificial Sequence
  Description of Artificial Sequence: Synthetic oligonucleotide
uauuuuaacgggguggggc

SEQ ID NO: 949448 - RNA, 19 nt, Artificial Sequence
  Description of Artificial Sequence: Synthetic oligonucleotide
uuauuauuuuaacggggug

SEQ ID NO: 949449 - RNA, 19 nt, Artificial Sequence
  Description of Artificial Sequence: Synthetic oligonucleotide
aauccgaagccccugggcu

SEQ ID NO: 949450 - RNA, 19 nt, Artificial Sequence
  Description of Artificial Sequence: Synthetic oligonucleotide
uggauguggguauuaaagc

SEQ ID NO: 949451 - RNA, 19 nt, Artificial Sequence
  Description of Artificial Sequence: Synthetic oligonucleotide
uuaugcccaagcuagccag

SEQ ID NO: 949452 - RNA, 19 nt, Artificial Sequence
  Description of Artificial Sequence: Synthetic oligonucleotide
ugaaaacuacuuuucuucu

SEQ ID NO: 949453 - RNA, 19 nt, Artificial Sequence
  Description of Artificial Sequence: Synthetic oligonucleotide
ucucucguaaacauccaca

SEQ ID NO: 949454 - RNA, 19 nt, Artificial Sequence
  Description of Artificial Sequence: Synthetic oligonucleotide
ucgacgauaaggcucuccc

SEQ ID NO: 949455 - RNA, 19 nt, Artificial Sequence
  Description of Artificial Sequence: Synthetic oligonucleotide
ucguaaacauccacacacg

SEQ ID NO: 949456 - RNA, 19 nt, Artificial Sequence
  Description of Artificial Sequence: Synthetic oligonucleotide
aaugcagcauuccgcuccg

SEQ ID NO: 949457 - RNA, 19 nt, Artificial Sequence
  Description of Artificial Sequence: Synthetic oligonucleotide
uuagugacuggagaacagg

SEQ ID NO: 949458 - RNA, 19 nt, Artificial Sequence
  Description of Artificial Sequence: Synthetic oligonucleotide
cugauggccaacauggaac

SEQ ID NO: 949459 - RNA, 19 nt, Artificial Sequence
  Description of Artificial Sequence: Synthetic oligonucleotide
aacauccacacacguccac

SEQ ID NO: 949460 - RNA, 19 nt, Artificial Sequence
  Description of Artificial Sequence: Synthetic oligonucleotide
aacauggaacgagccaggc

SEQ ID NO: 949461 - RNA, 19 nt, Artificial Sequence
  Description of Artificial Sequence: Synthetic oligonucleotide
aaaucuuuccaggccaucu

SEQ ID NO: 949462 - RNA, 19 nt, Artificial Sequence
  Description of Artificial Sequence: Synthetic oligonucleotide
aucgaagccaccuucccug

SEQ ID NO: 949463 - RNA, 19 nt, Artificial Sequence
  Description of Artificial Sequence: Synthetic oligonucleotide
gauaaggcucucccaagcc

SEQ ID NO: 949464 - RNA, 19 nt, Artificial Sequence
  Description of Artificial Sequence: Synthetic oligonucleotide
uccucagcggaacugcucc

SEQ ID NO: 949465 - RNA, 19 nt, Artificial Sequence
  Description of Artificial Sequence: Synthetic oligonucleotide
augaggugcgauuucacca

SEQ ID NO: 949466 - RNA, 19 nt, Artificial Sequence
  Description of Artificial Sequence: Synthetic oligonucleotide
aaccuagaauccaaugauc

SEQ ID NO: 949467 - RNA, 19 nt, Artificial Sequence
  Description of Artificial Sequence: Synthetic oligonucleotide
accaacuaacuccauccuc

SEQ ID NO: 949468 - RNA, 19 nt, Artificial Sequence
  Description of Artificial Sequence: Synthetic oligonucleotide
agggcucucgauaagcacc

SEQ ID NO: 949469 - RNA, 19 nt, Artificial Sequence
  Description of Artificial Sequence: Synthetic oligonucleotide
gugcuuaugcccaagcuag

SEQ ID NO: 949470 - RNA, 19 nt, Artificial Sequence
  Description of Artificial Sequence: Synthetic oligonucleotide
cuggugaucugaaaacuac

SEQ ID NO: 949471 - RNA, 19 nt, Artificial Sequence
  Description of Artificial Sequence: Synthetic oligonucleotide
acguccaccgaccucgacg

SEQ ID NO: 949472 - RNA, 19 nt, Artificial Sequence
  Description of Artificial Sequence: Synthetic oligonucleotide
uaaggcucucccaagcccu

SEQ ID NO: 949473 - RNA, 19 nt, Artificial Sequence
  Description of Artificial Sequence: Synthetic oligonucleotide
caugaggugcgauuucacc

SEQ ID NO: 949474 - RNA, 19 nt, Artificial Sequence
  Description of Artificial Sequence: Synthetic oligonucleotide
gaacacugaaaccuaggga

SEQ ID NO: 949475 - RNA, 19 nt, Artificial Sequence
  Description of Artificial Sequence: Synthetic oligonucleotide
auuuagcucccaucccugg

SEQ ID NO: 949476 - RNA, 19 nt, Artificial Sequence
  Description of Artificial Sequence: Synthetic oligonucleotide
auguggguauuaaagcuac

SEQ ID NO: 949477 - RNA, 19 nt, Artificial Sequence
  Description of Artificial Sequence: Synthetic oligonucleotide
ugaaucaggguuggguucc

SEQ ID NO: 949478 - RNA, 19 nt, Artificial Sequence
  Description of Artificial Sequence: Synthetic oligonucleotide
augagggcucucgauaagc

SEQ ID NO: 949479 - RNA, 19 nt, Artificial Sequence
  Description of Artificial Sequence: Synthetic oligonucleotide
ugagcauuuagcucccauc

SEQ ID NO: 949480 - RNA, 19 nt, Artificial Sequence
  Description of Artificial Sequence: Synthetic oligonucleotide
aaguccauggcuuguucaa

SEQ ID NO: 949481 - RNA, 19 nt, Artificial Sequence
  Description of Artificial Sequence: Synthetic oligonucleotide
uggugaucugaaaacuacu

SEQ ID NO: 949482 - RNA, 19 nt, Artificial Sequence
  Description of Artificial Sequence: Synthetic oligonucleotide
uuuccgccacucauggucc

SEQ ID NO: 949483 - RNA, 19 nt, Artificial Sequence
  Description of Artificial Sequence: Synthetic oligonucleotide
uggguauuaaagcuacaua

SEQ ID NO: 949484 - RNA, 19 nt, Artificial Sequence
  Description of Artificial Sequence: Synthetic oligonucleotide
cuccaaugcagcauuccgc

SEQ ID NO: 949485 - RNA, 19 nt, Artificial Sequence
  Description of Artificial Sequence: Synthetic oligonucleotide
ggaaccacuaucaucauca

SEQ ID NO: 949486 - RNA, 19 nt, Artificial Sequence
  Description of Artificial Sequence: Synthetic oligonucleotide
cuuuccaggccaucuacug

SEQ ID NO: 949487 - RNA, 19 nt, Artificial Sequence
  Description of Artificial Sequence: Synthetic oligonucleotide
ucgaucgaagccaccuucc

SEQ ID NO: 949488 - RNA, 19 nt, Artificial Sequence
  Description of Artificial Sequence: Synthetic oligonucleotide
gacgauaaggcucucccaa

SEQ ID NO: 949489 - RNA, 19 nt, Artificial Sequence
  Description of Artificial Sequence: Synthetic oligonucleotide
accuagaauccaaugaucu

SEQ ID NO: 949490 - RNA, 19 nt, Artificial Sequence
  Description of Artificial Sequence: Synthetic oligonucleotide
caucuacccucagagaggg

SEQ ID NO: 949491 - RNA, 19 nt, Artificial Sequence
  Description of Artificial Sequence: Synthetic oligonucleotide
ugucgcugccuuaagccca

SEQ ID NO: 949492 - RNA, 19 nt, Artificial Sequence
  Description of Artificial Sequence: Synthetic oligonucleotide
uccaacgggagccggugag

SEQ ID NO: 949493 - RNA, 19 nt, Artificial Sequence
  Description of Artificial Sequence: Synthetic oligonucleotide
uuauuuuaacggggugggg

SEQ ID NO: 949494 - RNA, 19 nt, Artificial Sequence
  Description of Artificial Sequence: Synthetic oligonucleotide
gaauccgaagccccugggc

SEQ ID NO: 949495 - RNA, 19 nt, Artificial Sequence
  Description of Artificial Sequence: Synthetic oligonucleotide
ugaggugcgauuucaccaa

SEQ ID NO: 949496 - RNA, 19 nt, Artificial Sequence
  Description of Artificial Sequence: Synthetic oligonucleotide
uggccaacauggaacgagc

SEQ ID NO: 949497 - RNA, 19 nt, Artificial Sequence
  Description of Artificial Sequence: Synthetic oligonucleotide
gguugugggauagaggugc

SEQ ID NO: 949498 - RNA, 19 nt, Artificial Sequence
  Description of Artificial Sequence: Synthetic oligonucleotide
gagcacuaucuccaguccc

SEQ ID NO: 949499 - RNA, 19 nt, Artificial Sequence
  Description of Artificial Sequence: Synthetic oligonucleotide
gccaauacugagcauuuag

SEQ ID NO: 949500 - RNA, 19 nt, Artificial Sequence
  Description of Artificial Sequence: Synthetic oligonucleotide
cucgaauucccuccagaag

SEQ ID NO: 949501 - RNA, 19 nt, Artificial Sequence
  Description of Artificial Sequence: Synthetic oligonucleotide
uggaugagggcucucgaua

SEQ ID NO: 949502 - RNA, 19 nt, Artificial Sequence
  Description of Artificial Sequence: Synthetic oligonucleotide
cacggcaaacaugaggugc

SEQ ID NO: 949503 - RNA, 19 nt, Artificial Sequence
  Description of Artificial Sequence: Synthetic oligonucleotide
accgaccucgacgauaagg

SEQ ID NO: 949504 - RNA, 19 nt, Artificial Sequence
  Description of Artificial Sequence: Synthetic oligonucleotide
gggauagaggugcuuaugc

SEQ ID NO: 949505 - RNA, 19 nt, Artificial Sequence
  Description of Artificial Sequence: Synthetic oligonucleotide
cuucuuuccgccacucaug

SEQ ID NO: 949506 - RNA, 19 nt, Artificial Sequence
  Description of Artificial Sequence: Synthetic oligonucleotide
gugcgauuucaccaagucc

SEQ ID NO: 949507 - RNA, 19 nt, Artificial Sequence
  Description of Artificial Sequence: Synthetic oligonucleotide
caacauggaacgagccagg

SEQ ID NO: 949508 - RNA, 19 nt, Artificial Sequence
  Description of Artificial Sequence: Synthetic oligonucleotide
cauuuagcucccaucccug

SEQ ID NO: 949509 - RNA, 19 nt, Artificial Sequence
  Description of Artificial Sequence: Synthetic oligonucleotide
caagucccgaggauggcag

SEQ ID NO: 949510 - RNA, 19 nt, Artificial Sequence
  Description of Artificial Sequence: Synthetic oligonucleotide
acaucuacccucagagagg

SEQ ID NO: 949511 - RNA, 19 nt, Artificial Sequence
  Description of Artificial Sequence: Synthetic oligonucleotide
acgauaaggcucucccaag

SEQ ID NO: 949512 - RNA, 19 nt, Artificial Sequence
  Description of Artificial Sequence: Synthetic oligonucleotide
ugcugucgcugccuuaagc

SEQ ID NO: 949513 - RNA, 19 nt, Artificial Sequence
  Description of Artificial Sequence: Synthetic oligonucleotide
auagaggugcuuaugccca

SEQ ID NO: 949514 - RNA, 19 nt, Artificial Sequence
  Description of Artificial Sequence: Synthetic oligonucleotide
uccccauuggggaggcggg

SEQ ID NO: 949515 - RNA, 19 nt, Artificial Sequence
  Description of Artificial Sequence: Synthetic oligonucleotide
gaugagggcucucgauaag

SEQ ID NO: 949516 - RNA, 19 nt, Artificial Sequence
  Description of Artificial Sequence: Synthetic oligonucleotide
gcugucgcugccuuaagcc

SEQ ID NO: 949517 - RNA, 19 nt, Artificial Sequence
  Description of Artificial Sequence: Synthetic oligonucleotide
cugucgcugccuuaagccc

SEQ ID NO: 949518 - RNA, 19 nt, Artificial Sequence
  Description of Artificial Sequence: Synthetic oligonucleotide
guuagugacuggagaacag

SEQ ID NO: 949519 - RNA, 19 nt, Artificial Sequence
  Description of Artificial Sequence: Synthetic oligonucleotide
agccgugcaagucccgagg

SEQ ID NO: 949520 - RNA, 19 nt, Artificial Sequence
  Description of Artificial Sequence: Synthetic oligonucleotide
auuccgcuccgccaggucu

SEQ ID NO: 949521 - RNA, 19 nt, Artificial Sequence
  Description of Artificial Sequence: Synthetic oligonucleotide
ggauagaggugcuuaugcc

SEQ ID NO: 949522 - RNA, 19 nt, Artificial Sequence
  Description of Artificial Sequence: Synthetic oligonucleotide
uccccagaacacugaaacc

SEQ ID NO: 949523 - RNA, 19 nt, Artificial Sequence
  Description of Artificial Sequence: Synthetic oligonucleotide
ugcggcuccaaagggaucu

SEQ ID NO: 949524 - RNA, 19 nt, Artificial Sequence
  Description of Artificial Sequence: Synthetic oligonucleotide
caacuaacuccauccucag

SEQ ID NO: 949525 - RNA, 19 nt, Artificial Sequence
  Description of Artificial Sequence: Synthetic oligonucleotide
caggggaauccgaagcccc

SEQ ID NO: 949526 - RNA, 19 nt, Artificial Sequence
  Description of Artificial Sequence: Synthetic oligonucleotide
uuccggaaccacuaucauc

SEQ ID NO: 949527 - RNA, 19 nt, Artificial Sequence
  Description of Artificial Sequence: Synthetic oligonucleotide
gguuggguuccccauuggg

SEQ ID NO: 949528 - RNA, 19 nt, Artificial Sequence
  Description of Artificial Sequence: Synthetic oligonucleotide
gguccgacauggcaggagg

SEQ ID NO: 949529 - RNA, 19 nt, Artificial Sequence
  Description of Artificial Sequence: Synthetic oligonucleotide
cuggguccgacauggcagg

SEQ ID NO: 949530 - RNA, 19 nt, Artificial Sequence
  Description of Artificial Sequence: Synthetic oligonucleotide
ugguuagugacuggagaac

SEQ ID NO: 949531 - RNA, 19 nt, Artificial Sequence
  Description of Artificial Sequence: Synthetic oligonucleotide
ugcugcggcuccaaaggga

SEQ ID NO: 949532 - RNA, 19 nt, Artificial Sequence
  Description of Artificial Sequence: Synthetic oligonucleotide
guaaacauccacacacguc

SEQ ID NO: 949533 - RNA, 19 nt, Artificial Sequence
  Description of Artificial Sequence: Synthetic oligonucleotide
gauguggguauuaaagcua

SEQ ID NO: 949534 - RNA, 19 nt, Artificial Sequence
  Description of Artificial Sequence: Synthetic oligonucleotide
ugacucgucuggaccaacu

SEQ ID NO: 949535 - RNA, 19 nt, Artificial Sequence
  Description of Artificial Sequence: Synthetic oligonucleotide
gaggugcuuaugcccaagc

SEQ ID NO: 949536 - RNA, 19 nt, Artificial Sequence
  Description of Artificial Sequence: Synthetic oligonucleotide
aagccggccgaaguuuggg

SEQ ID NO: 949537 - RNA, 19 nt, Artificial Sequence
  Description of Artificial Sequence: Synthetic oligonucleotide
uguccaggugaccacugau

SEQ ID NO: 949538 - RNA, 19 nt, Artificial Sequence
  Description of Artificial Sequence: Synthetic oligonucleotide
caagcuagccagcuccaac

SEQ ID NO: 949539 - RNA, 19 nt, Artificial Sequence
  Description of Artificial Sequence: Synthetic oligonucleotide
uguggguauuaaagcuaca

SEQ ID NO: 949540 - RNA, 19 nt, Artificial Sequence
  Description of Artificial Sequence: Synthetic oligonucleotide
ccgaccucgacgauaaggc

SEQ ID NO: 949541 - RNA, 19 nt, Artificial Sequence
  Description of Artificial Sequence: Synthetic oligonucleotide
ucucucucguaaacaucca

SEQ ID NO: 949542 - RNA, 19 nt, Artificial Sequence
  Description of Artificial Sequence: Synthetic oligonucleotide
ugcuuaugcccaagcuagc

SEQ ID NO: 949543 - RNA, 19 nt, Artificial Sequence
  Description of Artificial Sequence: Synthetic oligonucleotide
ucuucucgcacggcaaaca

SEQ ID NO: 949544 - RNA, 19 nt, Artificial Sequence
  Description of Artificial Sequence: Synthetic oligonucleotide
acuaggcucggguggggag

SEQ ID NO: 949545 - RNA, 19 nt, Artificial Sequence
  Description of Artificial Sequence: Synthetic oligonucleotide
ccaacauggaacgagccag

SEQ ID NO: 949546 - RNA, 19 nt, Artificial Sequence
  Description of Artificial Sequence: Synthetic oligonucleotide
aggugcuuaugcccaagcu

SEQ ID NO: 949547 - RNA, 19 nt, Artificial Sequence
  Description of Artificial Sequence: Synthetic oligonucleotide
acucgucuggaccaacuaa

SEQ ID NO: 949548 - RNA, 19 nt, Artificial Sequence
  Description of Artificial Sequence: Synthetic oligonucleotide
cucucucguaaacauccac

SEQ ID NO: 949549 - RNA, 19 nt, Artificial Sequence
  Description of Artificial Sequence: Synthetic oligonucleotide
cucauaguccguggugacg

SEQ ID NO: 949550 - RNA, 19 nt, Artificial Sequence
  Description of Artificial Sequence: Synthetic oligonucleotide
uccggacuaggcucgggug

SEQ ID NO: 949551 - RNA, 19 nt, Artificial Sequence
  Description of Artificial Sequence: Synthetic oligonucleotide
gagggcucucgauaagcac

SEQ ID NO: 949552 - RNA, 19 nt, Artificial Sequence
  Description of Artificial Sequence: Synthetic oligonucleotide
ugggauagaggugcuuaug

SEQ ID NO: 949553 - RNA, 19 nt, Artificial Sequence
  Description of Artificial Sequence: Synthetic oligonucleotide
cagcauuccgcuccgccag

SEQ ID NO: 949554 - RNA, 19 nt, Artificial Sequence
  Description of Artificial Sequence: Synthetic oligonucleotide
gucgaucgaagccaccuuc

SEQ ID NO: 949555 - RNA, 19 nt, Artificial Sequence
  Description of Artificial Sequence: Synthetic oligonucleotide
uccgacauggcaggagggc

SEQ ID NO: 949556 - RNA, 19 nt, Artificial Sequence
  Description of Artificial Sequence: Synthetic oligonucleotide
ccaacuaacuccauccuca

SEQ ID NO: 949557 - RNA, 19 nt, Artificial Sequence
  Description of Artificial Sequence: Synthetic oligonucleotide
gacaucuggguccgacaug

SEQ ID NO: 949558 - RNA, 19 nt, Artificial Sequence
  Description of Artificial Sequence: Synthetic oligonucleotide
cuugccaggcccugccagc

SEQ ID NO: 949559 - RNA, 19 nt, Artificial Sequence
  Description of Artificial Sequence: Synthetic oligonucleotide
acaugaggugcgauuucac

SEQ ID NO: 949560 - RNA, 19 nt, Artificial Sequence
  Description of Artificial Sequence: Synthetic oligonucleotide
cuuaugcccaagcuagcca

SEQ ID NO: 949561 - RNA, 19 nt, Artificial Sequence
  Description of Artificial Sequence: Synthetic oligonucleotide
gaaccacuaucaucaucac

SEQ ID NO: 949562 - RNA, 19 nt, Artificial Sequence
  Description of Artificial Sequence: Synthetic oligonucleotide
cuggggcgagagucgaucg

SEQ ID NO: 949563 - RNA, 19 nt, Artificial Sequence
  Description of Artificial Sequence: Synthetic oligonucleotide
ugcuccaaugcagcauucc

SEQ ID NO: 949564 - RNA, 19 nt, Artificial Sequence
  Description of Artificial Sequence: Synthetic oligonucleotide
gcugccuuaagcccagagc

SEQ ID NO: 949565 - RNA, 19 nt, Artificial Sequence
  Description of Artificial Sequence: Synthetic oligonucleotide
gaggugcgauuucaccaag

SEQ ID NO: 949566 - RNA, 19 nt, Artificial Sequence
  Description of Artificial Sequence: Synthetic oligonucleotide
gggacaggccaauacugag

SEQ ID NO: 949567 - RNA, 19 nt, Artificial Sequence
  Description of Artificial Sequence: Synthetic oligonucleotide
ccuccaaaucuuuccaggc

SEQ ID NO: 949568 - RNA, 19 nt, Artificial Sequence
  Description of Artificial Sequence: Synthetic oligonucleotide
agcacuaucuccaguccca

SEQ ID NO: 949569 - RNA, 19 nt, Artificial Sequence
  Description of Artificial Sequence: Synthetic oligonucleotide
caaguccauggcuuguuca

SEQ ID NO: 949570 - RNA, 19 nt, Artificial Sequence
  Description of Artificial Sequence: Synthetic oligonucleotide
gcgagagucgaucgaagcc

SEQ ID NO: 949571 - RNA, 19 nt, Artificial Sequence
  Description of Artificial Sequence: Synthetic oligonucleotide
gcuccaaagggaucuggag

SEQ ID NO: 949572 - RNA, 19 nt, Artificial Sequence
  Description of Artificial Sequence: Synthetic oligonucleotide
uuuaacgggguggggccug

SEQ ID NO: 949573 - RNA, 19 nt, Artificial Sequence
  Description of Artificial Sequence: Synthetic oligonucleotide
gaaggagcgggccuguggu

SEQ ID NO: 949574 - RNA, 19 nt, Artificial Sequence
  Description of Artificial Sequence: Synthetic oligonucleotide
ggugcgauuucaccaaguc

SEQ ID NO: 949575 - RNA, 19 nt, Artificial Sequence
  Description of Artificial Sequence: Synthetic oligonucleotide
cuaggcucggguggggagg

SEQ ID NO: 949576 - RNA, 19 nt, Artificial Sequence
  Description of Artificial Sequence: Synthetic oligonucleotide
agccggccgaaguuugggg

SEQ ID NO: 949577 - RNA, 19 nt, Artificial Sequence
  Description of Artificial Sequence: Synthetic oligonucleotide
agcuagccagcuccaaccu

SEQ ID NO: 949578 - RNA, 19 nt, Artificial Sequence
  Description of Artificial Sequence: Synthetic oligonucleotide
uuuuaacgggguggggccu

SEQ ID NO: 949579 - RNA, 19 nt, Artificial Sequence
  Description of Artificial Sequence: Synthetic oligonucleotide
aggcccauugggcgcagag

SEQ ID NO: 949580 - RNA, 19 nt, Artificial Sequence
  Description of Artificial Sequence: Synthetic oligonucleotide
gagccgugcaagucccgag

SEQ ID NO: 949581 - RNA, 19 nt, Artificial Sequence
  Description of Artificial Sequence: Synthetic oligonucleotide
gaagccggccgaaguuugg

SEQ ID NO: 949582 - RNA, 19 nt, Artificial Sequence
  Description of Artificial Sequence: Synthetic oligonucleotide
ggcgagagucgaucgaagc

SEQ ID NO: 949583 - RNA, 19 nt, Artificial Sequence
  Description of Artificial Sequence: Synthetic oligonucleotide
ggugcuuaugcccaagcua

SEQ ID NO: 949584 - RNA, 19 nt, Artificial Sequence
  Description of Artificial Sequence: Synthetic oligonucleotide
cauugggcgcagagggccc

SEQ ID NO: 949585 - RNA, 19 nt, Artificial Sequence
  Description of Artificial Sequence: Synthetic oligonucleotide
agcauuccgcuccgccagg

SEQ ID NO: 949586 - RNA, 19 nt, Artificial Sequence
  Description of Artificial Sequence: Synthetic oligonucleotide
gagguggcgagggagggca

SEQ ID NO: 949587 - RNA, 19 nt, Artificial Sequence
  Description of Artificial Sequence: Synthetic oligonucleotide
uggggcgagagucgaucga

SEQ ID NO: 949588 - RNA, 19 nt, Artificial Sequence
  Description of Artificial Sequence: Synthetic oligonucleotide
gguuagugacuggagaaca

SEQ ID NO: 949589 - RNA, 19 nt, Artificial Sequence
  Description of Artificial Sequence: Synthetic oligonucleotide
gaaaggagguucagaugga

SEQ ID NO: 949590 - RNA, 19 nt, Artificial Sequence
  Description of Artificial Sequence: Synthetic oligonucleotide
cagcuccaaccuagaaucc

SEQ ID NO: 949591 - RNA, 19 nt, Artificial Sequence
  Description of Artificial Sequence: Synthetic oligonucleotide
uaggcucggguggggaggg

SEQ ID NO: 949592 - RNA, 19 nt, Artificial Sequence
  Description of Artificial Sequence: Synthetic oligonucleotide
gagagucgaucgaagccac

SEQ ID NO: 949593 - RNA, 19 nt, Artificial Sequence
  Description of Artificial Sequence: Synthetic oligonucleotide
gggaauccgaagccccugg

SEQ ID NO: 949594 - RNA, 19 nt, Artificial Sequence
  Description of Artificial Sequence: Synthetic oligonucleotide
agagucgaucgaagccacc

SEQ ID NO: 949595 - RNA, 19 nt, Artificial Sequence
  Description of Artificial Sequence: Synthetic oligonucleotide
caacgggagccggugaggc

SEQ ID NO: 949596 - RNA, 19 nt, Artificial Sequence
  Description of Artificial Sequence: Synthetic oligonucleotide
ggaauccgaagccccuggg

SEQ ID NO: 949597 - RNA, 19 nt, Artificial Sequence
  Description of Artificial Sequence: Synthetic oligonucleotide
ucgaagccaccuucccuga

SEQ ID NO: 949598 - RNA, 19 nt, Artificial Sequence
  Description of Artificial Sequence: Synthetic oligonucleotide
gaucgaagccaccuucccu

SEQ ID NO: 949599 - RNA, 19 nt, Artificial Sequence
  Description of Artificial Sequence: Synthetic oligonucleotide
ggugaggcaggggaauccg

SEQ ID NO: 949600 - RNA, 19 nt, Artificial Sequence
  Description of Artificial Sequence: Synthetic oligonucleotide
gcuuaugcccaagcuagcc

SEQ ID NO: 949601 - RNA, 19 nt, Artificial Sequence
  Description of Artificial Sequence: Synthetic oligonucleotide
gaacaggggagaggaggug

SEQ ID NO: 949602 - RNA, 19 nt, Artificial Sequence
  Description of Artificial Sequence: Synthetic oligonucleotide
gagucgaucgaagccaccu

SEQ ID NO: 949603 - RNA, 19 nt, Artificial Sequence
  Description of Artificial Sequence: Synthetic oligonucleotide
ggaugagggcucucgauaa

SEQ ID NO: 949604 - RNA, 19 nt, Artificial Sequence
  Description of Artificial Sequence: Synthetic oligonucleotide
agaggugcuuaugcccaag

SEQ ID NO: 949605 - RNA, 19 nt, Artificial Sequence
  Description of Artificial Sequence: Synthetic oligonucleotide
ucuuuccgccacucauggu

SEQ ID NO: 949606 - RNA, 19 nt, Artificial Sequence
  Description of Artificial Sequence: Synthetic oligonucleotide
ggccccucgaauucccucc

SEQ ID NO: 949607 - RNA, 19 nt, Artificial Sequence
  Description of Artificial Sequence: Synthetic oligonucleotide
gaccaacuaacuccauccu

SEQ ID NO: 949608 - RNA, 19 nt, Artificial Sequence
  Description of Artificial Sequence: Synthetic oligonucleotide
gcuuccggaaccacuauca

SEQ ID NO: 949609 - RNA, 19 nt, Artificial Sequence
  Description of Artificial Sequence: Synthetic oligonucleotide
agucgaucgaagccaccuu

SEQ ID NO: 949610 - RNA, 19 nt, Artificial Sequence
  Description of Artificial Sequence: Synthetic oligonucleotide
uccaccgaccucgacgaua

SEQ ID NO: 949611 - RNA, 19 nt, Artificial Sequence
  Description of Artificial Sequence: Synthetic oligonucleotide
gacucgucuggaccaacua

SEQ ID NO: 949612 - RNA, 19 nt, Artificial Sequence
  Description of Artificial Sequence: Synthetic oligonucleotide
agucccgaggauggcagcu

SEQ ID NO: 949613 - RNA, 19 nt, Artificial Sequence
  Description of Artificial Sequence: Synthetic oligonucleotide
ugcaagucccgaggauggc

SEQ ID NO: 949614 - RNA, 19 nt, Artificial Sequence
  Description of Artificial Sequence: Synthetic oligonucleotide
guggguauuaaagcuacau

SEQ ID NO: 949615 - RNA, 19 nt, Artificial Sequence
  Description of Artificial Sequence: Synthetic oligonucleotide
cgaauucccuccagaagcc

SEQ ID NO: 949616 - RNA, 19 nt, Artificial Sequence
  Description of Artificial Sequence: Synthetic oligonucleotide
gugcccgccgcugaacucc

SEQ ID NO: 949617 - RNA, 19 nt, Artificial Sequence
  Description of Artificial Sequence: Synthetic oligonucleotide
aggccugguugugggauag

SEQ ID NO: 949618 - RNA, 19 nt, Artificial Sequence
  Description of Artificial Sequence: Synthetic oligonucleotide
ccggacuaggcucgggugg

SEQ ID NO: 949619 - RNA, 19 nt, Artificial Sequence
  Description of Artificial Sequence: Synthetic oligonucleotide
gcauuuagcucccaucccu

SEQ ID NO: 949620 - RNA, 19 nt, Artificial Sequence
  Description of Artificial Sequence: Synthetic oligonucleotide
ucccgaggccccucgaauu

SEQ ID NO: 949621 - RNA, 19 nt, Artificial Sequence
  Description of Artificial Sequence: Synthetic oligonucleotide
gugagggaaaggagguuca

SEQ ID NO: 949622 - RNA, 19 nt, Artificial Sequence
  Description of Artificial Sequence: Synthetic oligonucleotide
caaacaugaggugcgauuu

SEQ ID NO: 949623 - RNA, 19 nt, Artificial Sequence
  Description of Artificial Sequence: Synthetic oligonucleotide
ccaaccaggcuuccggaac

SEQ ID NO: 949624 - RNA, 19 nt, Artificial Sequence
  Description of Artificial Sequence: Synthetic oligonucleotide
uuaacgggguggggccugc

SEQ ID NO: 949625 - RNA, 19 nt, Artificial Sequence
  Description of Artificial Sequence: Synthetic oligonucleotide
gcacauugugagggaaagg

SEQ ID NO: 949626 - RNA, 19 nt, Artificial Sequence
  Description of Artificial Sequence: Synthetic oligonucleotide
cucccaagcccuggggcag

SEQ ID NO: 949627 - RNA, 19 nt, Artificial Sequence
  Description of Artificial Sequence: Synthetic oligonucleotide
cuucuucucgcacggcaaa

SEQ ID NO: 949628 - RNA, 19 nt, Artificial Sequence
  Description of Artificial Sequence: Synthetic oligonucleotide
gucgcugccuuaagcccag

SEQ ID NO: 949629 - RNA, 19 nt, Artificial Sequence
  Description of Artificial Sequence: Synthetic oligonucleotide
gauggccaacauggaacga

SEQ ID NO: 949630 - RNA, 19 nt, Artificial Sequence
  Description of Artificial Sequence: Synthetic oligonucleotide
gugaccacugauggccaac

SEQ ID NO: 949631 - RNA, 19 nt, Artificial Sequence
  Description of Artificial Sequence: Synthetic oligonucleotide
gccuccugaaucaggguug

SEQ ID NO: 949632 - RNA, 19 nt, Artificial Sequence
  Description of Artificial Sequence: Synthetic oligonucleotide
ugcccgccgcugaacuccc

SEQ ID NO: 949633 - RNA, 19 nt, Artificial Sequence
  Description of Artificial Sequence: Synthetic oligonucleotide
ggugacgcuggugaucuga

SEQ ID NO: 949634 - RNA, 19 nt, Artificial Sequence
  Description of Artificial Sequence: Synthetic oligonucleotide
ccauuggggaggcggggcg

SEQ ID NO: 949635 - RNA, 19 nt, Artificial Sequence
  Description of Artificial Sequence: Synthetic oligonucleotide
aucuacccucagagagggc

SEQ ID NO: 949636 - RNA, 19 nt, Artificial Sequence
  Description of Artificial Sequence: Synthetic oligonucleotide
ugggguggagaggcugaca

SEQ ID NO: 949637 - RNA, 19 nt, Artificial Sequence
  Description of Artificial Sequence: Synthetic oligonucleotide
gcguugcugggguggagag

SEQ ID NO: 949638 - RNA, 19 nt, Artificial Sequence
  Description of Artificial Sequence: Synthetic oligonucleotide
aggugcgauuucaccaagu

SEQ ID NO: 949639 - RNA, 19 nt, Artificial Sequence
  Description of Artificial Sequence: Synthetic oligonucleotide
ggccaacauggaacgagcc

SEQ ID NO: 949640 - RNA, 19 nt, Artificial Sequence
  Description of Artificial Sequence: Synthetic oligonucleotide
ggguuccccauuggggagg

SEQ ID NO: 949641 - RNA, 19 nt, Artificial Sequence
  Description of Artificial Sequence: Synthetic oligonucleotide
cauuccgcuccgccagguc

SEQ ID NO: 949642 - RNA, 19 nt, Artificial Sequence
  Description of Artificial Sequence: Synthetic oligonucleotide
ccucauaguccguggugac

SEQ ID NO: 949643 - RNA, 19 nt, Artificial Sequence
  Description of Artificial Sequence: Synthetic oligonucleotide
ggcgcguagcaguccauuc

SEQ ID NO: 949644 - RNA, 19 nt, Artificial Sequence
  Description of Artificial Sequence: Synthetic oligonucleotide
cgugcaagucccgaggaug

SEQ ID NO: 949645 - RNA, 19 nt, Artificial Sequence
  Description of Artificial Sequence: Synthetic oligonucleotide
ccaggccaucuacugcugg

SEQ ID NO: 949646 - RNA, 19 nt, Artificial Sequence
  Description of Artificial Sequence: Synthetic oligonucleotide
ccgacauggcaggagggcc

SEQ ID NO: 949647 - RNA, 19 nt, Artificial Sequence
  Description of Artificial Sequence: Synthetic oligonucleotide
gggacaucuggguccgaca

SEQ ID NO: 949648 - RNA, 19 nt, Artificial Sequence
  Description of Artificial Sequence: Synthetic oligonucleotide
ccucgaauucccuccagaa

SEQ ID NO: 949649 - RNA, 19 nt, Artificial Sequence
  Description of Artificial Sequence: Synthetic oligonucleotide
caggccaauacugagcauu

SEQ ID NO: 949650 - RNA, 19 nt, Artificial Sequence
  Description of Artificial Sequence: Synthetic oligonucleotide
gcugaacucccagauucca

SEQ ID NO: 949651 - RNA, 19 nt, Artificial Sequence
  Description of Artificial Sequence: Synthetic oligonucleotide
cugcugucgcugccuuaag

SEQ ID NO: 949652 - RNA, 19 nt, Artificial Sequence
  Description of Artificial Sequence: Synthetic oligonucleotide
aggcuuccggaaccacuau

SEQ ID NO: 949653 - RNA, 19 nt, Artificial Sequence
  Description of Artificial Sequence: Synthetic oligonucleotide
cgcacggcaaacaugaggu

SEQ ID NO: 949654 - RNA, 19 nt, Artificial Sequence
  Description of Artificial Sequence: Synthetic oligonucleotide
uccgccacucauggucccu

SEQ ID NO: 949655 - RNA, 19 nt, Artificial Sequence
  Description of Artificial Sequence: Synthetic oligonucleotide
cccgagccgugcaaguccc

SEQ ID NO: 949656 - RNA, 19 nt, Artificial Sequence
  Description of Artificial Sequence: Synthetic oligonucleotide
gucccgaggauggcagcug

SEQ ID NO: 949657 - RNA, 19 nt, Artificial Sequence
  Description of Artificial Sequence: Synthetic oligonucleotide
uugugggauagaggugcuu

SEQ ID NO: 949658 - RNA, 19 nt, Artificial Sequence
  Description of Artificial Sequence: Synthetic oligonucleotide
cagagggcccgagccgugc

SEQ ID NO: 949659 - RNA, 19 nt, Artificial Sequence
  Description of Artificial Sequence: Synthetic oligonucleotide
cugacucgucuggaccaac

SEQ ID NO: 949660 - RNA, 19 nt, Artificial Sequence
  Description of Artificial Sequence: Synthetic oligonucleotide
ccucuacuucuucucgcac

SEQ ID NO: 949661 - RNA, 19 nt, Artificial Sequence
  Description of Artificial Sequence: Synthetic oligonucleotide
ggacaucuggguccgacau

SEQ ID NO: 949662 - RNA, 19 nt, Artificial Sequence
  Description of Artificial Sequence: Synthetic oligonucleotide
gccugguuagugacuggag

SEQ ID NO: 949663 - RNA, 19 nt, Artificial Sequence
  Description of Artificial Sequence: Synthetic oligonucleotide
cccauugggcgcagagggc

SEQ ID NO: 949664 - RNA, 19 nt, Artificial Sequence
  Description of Artificial Sequence: Synthetic oligonucleotide
cgaucgaagccaccuuccc

SEQ ID NO: 949665 - RNA, 19 nt, Artificial Sequence
  Description of Artificial Sequence: Synthetic oligonucleotide
uggguccgacauggcagga

SEQ ID NO: 949666 - RNA, 19 nt, Artificial Sequence
  Description of Artificial Sequence: Synthetic oligonucleotide
cgagagucgaucgaagcca

SEQ ID NO: 949667 - RNA, 19 nt, Artificial Sequence
  Description of Artificial Sequence: Synthetic oligonucleotide
guccaacgggagccgguga

SEQ ID NO: 949668 - RNA, 19 nt, Artificial Sequence
  Description of Artificial Sequence: Synthetic oligonucleotide
cugcggcuccaaagggauc

SEQ ID NO: 949669 - RNA, 19 nt, Artificial Sequence
  Description of Artificial Sequence: Synthetic oligonucleotide
ccccagaacacugaaaccu

SEQ ID NO: 949670 - RNA, 19 nt, Artificial Sequence
  Description of Artificial Sequence: Synthetic oligonucleotide
gaaggcccauugggcgcag

SEQ ID NO: 949671 - RNA, 19 nt, Artificial Sequence
  Description of Artificial Sequence: Synthetic oligonucleotide
ggguccgacauggcaggag

SEQ ID NO: 949672 - RNA, 19 nt, Artificial Sequence
  Description of Artificial Sequence: Synthetic oligonucleotide
ccaaugaucugccuccagu

SEQ ID NO: 949673 - RNA, 19 nt, Artificial Sequence
  Description of Artificial Sequence: Synthetic oligonucleotide
gugacgcuggugaucugaa

SEQ ID NO: 949674 - RNA, 19 nt, Artificial Sequence
  Description of Artificial Sequence: Synthetic oligonucleotide
caggcaccucuggaacaag

SEQ ID NO: 949675 - RNA, 19 nt, Artificial Sequence
  Description of Artificial Sequence: Synthetic oligonucleotide
cccugacucgucuggacca

SEQ ID NO: 949676 - RNA, 19 nt, Artificial Sequence
  Description of Artificial Sequence: Synthetic oligonucleotide
ggggacaucuggguccgac

SEQ ID NO: 949677 - RNA, 19 nt, Artificial Sequence
  Description of Artificial Sequence: Synthetic oligonucleotide
ccacccggaagcgggaggc

SEQ ID NO: 949678 - RNA, 19 nt, Artificial Sequence
  Description of Artificial Sequence: Synthetic oligonucleotide
ccaacgggagccggugagg

SEQ ID NO: 949679 - RNA, 19 nt, Artificial Sequence
  Description of Artificial Sequence: Synthetic oligonucleotide
ccaccgaccucgacgauaa

SEQ ID NO: 949680 - RNA, 19 nt, Artificial Sequence
  Description of Artificial Sequence: Synthetic oligonucleotide
cugagcauuuagcucccau

SEQ ID NO: 949681 - RNA, 19 nt, Artificial Sequence
  Description of Artificial Sequence: Synthetic oligonucleotide
ugggcgcagagggcccgag

SEQ ID NO: 949682 - RNA, 19 nt, Artificial Sequence
  Description of Artificial Sequence: Synthetic oligonucleotide
gccgugcaagucccgagga

SEQ ID NO: 949683 - RNA, 19 nt, Artificial Sequence
  Description of Artificial Sequence: Synthetic oligonucleotide
cgcguagcaguccauucuc

SEQ ID NO: 949684 - RNA, 19 nt, Artificial Sequence
  Description of Artificial Sequence: Synthetic oligonucleotide
agcgggccugugguccagg

SEQ ID NO: 949685 - RNA, 19 nt, Artificial Sequence
  Description of Artificial Sequence: Synthetic oligonucleotide
gugaaggagcgggccugug

SEQ ID NO: 949686 - RNA, 19 nt, Artificial Sequence
  Description of Artificial Sequence: Synthetic oligonucleotide
cguccaccgaccucgacga

SEQ ID NO: 949687 - RNA, 19 nt, Artificial Sequence
  Description of Artificial Sequence: Synthetic oligonucleotide
ccggaagcgggaggcaggg

SEQ ID NO: 949688 - RNA, 19 nt, Artificial Sequence
  Description of Artificial Sequence: Synthetic oligonucleotide
gagggcccgagccgugcaa

SEQ ID NO: 949689 - RNA, 19 nt, Artificial Sequence
  Description of Artificial Sequence: Synthetic oligonucleotide
ggcguugcugggguggaga

SEQ ID NO: 949690 - RNA, 19 nt, Artificial Sequence
  Description of Artificial Sequence: Synthetic oligonucleotide
cacguccaccgaccucgac

SEQ ID NO: 949691 - RNA, 19 nt, Artificial Sequence
  Description of Artificial Sequence: Synthetic oligonucleotide
cacacacguccaccgaccu

SEQ ID NO: 949692 - RNA, 19 nt, Artificial Sequence
  Description of Artificial Sequence: Synthetic oligonucleotide
ccacaucuacccucagaga

SEQ ID NO: 949693 - RNA, 19 nt, Artificial Sequence
  Description of Artificial Sequence: Synthetic oligonucleotide
ggggcgagagucgaucgaa

SEQ ID NO: 949694 - RNA, 19 nt, Artificial Sequence
  Description of Artificial Sequence: Synthetic oligonucleotide
ggaacgagccaggcugaga

SEQ ID NO: 949695 - RNA, 19 nt, Artificial Sequence
  Description of Artificial Sequence: Synthetic oligonucleotide
uggggccugccaggucacc

SEQ ID NO: 949696 - RNA, 19 nt, Artificial Sequence
  Description of Artificial Sequence: Synthetic oligonucleotide
gggguccaacgggagccgg

SEQ ID NO: 949697 - RNA, 19 nt, Artificial Sequence
  Description of Artificial Sequence: Synthetic oligonucleotide
gagcgggccugugguccag

SEQ ID NO: 949698 - RNA, 19 nt, Artificial Sequence
  Description of Artificial Sequence: Synthetic oligonucleotide
cggacuaggcucggguggg

SEQ ID NO: 949699 - RNA, 19 nt, Artificial Sequence
  Description of Artificial Sequence: Synthetic oligonucleotide
gcgcguagcaguccauucu

SEQ ID NO: 949700 - RNA, 19 nt, Artificial Sequence
  Description of Artificial Sequence: Synthetic oligonucleotide
ggaggggugcccgccgcug

SEQ ID NO: 949701 - RNA, 19 nt, Artificial Sequence
  Description of Artificial Sequence: Synthetic oligonucleotide
gcgggguuggaugugggua

SEQ ID NO: 949702 - RNA, 19 nt, Artificial Sequence
  Description of Artificial Sequence: Synthetic oligonucleotide
cggaaccacuaucaucauc

SEQ ID NO: 949703 - RNA, 19 nt, Artificial Sequence
  Description of Artificial Sequence: Synthetic oligonucleotide
ggagcgggccuguggucca

SEQ ID NO: 949704 - RNA, 19 nt, Artificial Sequence
  Description of Artificial Sequence: Synthetic oligonucleotide
caccgaccucgacgauaag

SEQ ID NO: 949705 - RNA, 19 nt, Artificial Sequence
  Description of Artificial Sequence: Synthetic oligonucleotide
ggcuggcaucgaaguagag

SEQ ID NO: 949706 - RNA, 19 nt, Artificial Sequence
  Description of Artificial Sequence: Synthetic oligonucleotide
guggggccugccaggucac

SEQ ID NO: 949707 - RNA, 19 nt, Artificial Sequence
  Description of Artificial Sequence: Synthetic oligonucleotide
cagaagccggccgaaguuu

SEQ ID NO: 949708 - RNA, 19 nt, Artificial Sequence
  Description of Artificial Sequence: Synthetic oligonucleotide
cgacgauaaggcucuccca

SEQ ID NO: 949709 - RNA, 19 nt, Artificial Sequence
  Description of Artificial Sequence: Synthetic oligonucleotide
gcugcggcuccaaagggau

SEQ ID NO: 949710 - RNA, 19 nt, Artificial Sequence
  Description of Artificial Sequence: Synthetic oligonucleotide
ccccauuggggaggcgggg

SEQ ID NO: 949711 - RNA, 19 nt, Artificial Sequence
  Description of Artificial Sequence: Synthetic oligonucleotide
gccccucgaauucccucca

SEQ ID NO: 949712 - RNA, 19 nt, Artificial Sequence
  Description of Artificial Sequence: Synthetic oligonucleotide
acacguccaccgaccucga

SEQ ID NO: 949713 - RNA, 19 nt, Artificial Sequence
  Description of Artificial Sequence: Synthetic oligonucleotide
ccgagccgugcaagucccg

SEQ ID NO: 949714 - RNA, 19 nt, Artificial Sequence
  Description of Artificial Sequence: Synthetic oligonucleotide
cguagcaguccauucuccu

SEQ ID NO: 949715 - RNA, 19 nt, Artificial Sequence
  Description of Artificial Sequence: Synthetic oligonucleotide
cucagcggaacugcuccau

SEQ ID NO: 949716 - RNA, 19 nt, Artificial Sequence
  Description of Artificial Sequence: Synthetic oligonucleotide
ccccucgaauucccuccag

SEQ ID NO: 949717 - RNA, 19 nt, Artificial Sequence
  Description of Artificial Sequence: Synthetic oligonucleotide
ggcccgagccgugcaaguc

SEQ ID NO: 949718 - RNA, 19 nt, Artificial Sequence
  Description of Artificial Sequence: Synthetic oligonucleotide
gccagggcgcguagcaguc

SEQ ID NO: 949719 - RNA, 19 nt, Artificial Sequence
  Description of Artificial Sequence: Synthetic oligonucleotide
agcuggggcgagagucgau

SEQ ID NO: 949720 - RNA, 19 nt, Artificial Sequence
  Description of Artificial Sequence: Synthetic oligonucleotide
ggcgggguuggaugugggu

SEQ ID NO: 949721 - RNA, 19 nt, Artificial Sequence
  Description of Artificial Sequence: Synthetic oligonucleotide
ccagggcgcguagcagucc

SEQ ID NO: 949722 - RNA, 19 nt, Artificial Sequence
  Description of Artificial Sequence: Synthetic oligonucleotide
ggcaaacaugaggugcgau

SEQ ID NO: 949723 - RNA, 19 nt, Artificial Sequence
  Description of Artificial Sequence: Synthetic oligonucleotide
ggguuggauguggguauua

SEQ ID NO: 949724 - RNA, 19 nt, Artificial Sequence
  Description of Artificial Sequence: Synthetic oligonucleotide
gcggcuccaaagggaucug

SEQ ID NO: 949725 - RNA, 19 nt, Artificial Sequence
  Description of Artificial Sequence: Synthetic oligonucleotide
ggcggcgggguuggaugug

SEQ ID NO: 949726 - RNA, 19 nt, Artificial Sequence
  Description of Artificial Sequence: Synthetic oligonucleotide
cacccggaagcgggaggca

SEQ ID NO: 949727 - RNA, 19 nt, Artificial Sequence
  Description of Artificial Sequence: Synthetic oligonucleotide
agggcgcguagcaguccau

SEQ ID NO: 949728 - RNA, 19 nt, Artificial Sequence
  Description of Artificial Sequence: Synthetic oligonucleotide
cggcgggguuggauguggg

SEQ ID NO: 949729 - RNA, 19 nt, Artificial Sequence
  Description of Artificial Sequence: Synthetic oligonucleotide
cgggcggagccaagaggug

SEQ ID NO: 949730 - RNA, 19 nt, Artificial Sequence
  Description of Artificial Sequence: Synthetic oligonucleotide
ccgccgcugaacucccaga

SEQ ID NO: 949731 - RNA, 19 nt, Artificial Sequence
  Description of Artificial Sequence: Synthetic oligonucleotide
gggcggcgggguuggaugu

SEQ ID NO: 949732 - RNA, 19 nt, Artificial Sequence
  Description of Artificial Sequence: Synthetic oligonucleotide
gccgcugaacucccagauu

SEQ ID NO: 949733 - RNA, 19 nt, Artificial Sequence
  Description of Artificial Sequence: Synthetic oligonucleotide
ccucccgaggccccucgaa

SEQ ID NO: 949734 - RNA, 19 nt, Artificial Sequence
  Description of Artificial Sequence: Synthetic oligonucleotide
ccugacucgucuggaccaa

SEQ ID NO: 949735 - RNA, 19 nt, Artificial Sequence
  Description of Artificial Sequence: Synthetic oligonucleotide
ccaagagguggggcucuga

SEQ ID NO: 949736 - RNA, 19 nt, Artificial Sequence
  Description of Artificial Sequence: Synthetic oligonucleotide
ggggccccuggggacaucu

SEQ ID NO: 949737 - RNA, 19 nt, Artificial Sequence
  Description of Artificial Sequence: Synthetic oligonucleotide
gggcccgagccgugcaagu

SEQ ID NO: 949738 - RNA, 19 nt, Artificial Sequence
  Description of Artificial Sequence: Synthetic oligonucleotide
cgagccgugcaagucccga

SEQ ID NO: 949739 - RNA, 19 nt, Artificial Sequence
  Description of Artificial Sequence: Synthetic oligonucleotide
cgaccucgacgauaaggcu

SEQ ID NO: 949740 - RNA, 19 nt, Artificial Sequence
  Description of Artificial Sequence: Synthetic oligonucleotide
gccucccgaggccccucga

SEQ ID NO: 949741 - RNA, 19 nt, Artificial Sequence
  Description of Artificial Sequence: Synthetic oligonucleotide
cugggcggcgggguuggau

SEQ ID NO: 949742 - RNA, 19 nt, Artificial Sequence
  Description of Artificial Sequence: Synthetic oligonucleotide
guccaccgaccucgacgau

SEQ ID NO: 949743 - RNA, 19 nt, Artificial Sequence
  Description of Artificial Sequence: Synthetic oligonucleotide
gggcgcguagcaguccauu

SEQ ID NO: 949744 - RNA, 19 nt, Artificial Sequence
  Description of Artificial Sequence: Synthetic oligonucleotide
cggcaaacaugaggugcga

SEQ ID NO: 949745 - RNA, 19 nt, Artificial Sequence
  Description of Artificial Sequence: Synthetic oligonucleotide
cgccgcugaacucccagau

SEQ ID NO: 949746 - RNA, 19 nt, Artificial Sequence
  Description of Artificial Sequence: Synthetic oligonucleotide
ccgugcaagucccgaggau

SEQ ID NO: 949747 - RNA, 19 nt, Artificial Sequence
  Description of Artificial Sequence: Synthetic oligonucleotide
ccggaaccacuaucaucau

SEQ ID NO: 949748 - RNA, 19 nt, Artificial Sequence
  Description of Artificial Sequence: Synthetic oligonucleotide
ccgccaggucucggaucug

SEQ ID NO: 949749 - RNA, 19 nt, Artificial Sequence
  Description of Artificial Sequence: Synthetic oligonucleotide
aaaguaaaacccuuaaacc

SEQ ID NO: 949750 - RNA, 19 nt, Artificial Sequence
  Description of Artificial Sequence: Synthetic oligonucleotide
accacaaagagauugaggc

SEQ ID NO: 949751 - RNA, 19 nt, Artificial Sequence
  Description of Artificial Sequence: Synthetic oligonucleotide
uuuauauagagcaagacuc

SEQ ID NO: 949752 - RNA, 19 nt, Artificial Sequence
  Description of Artificial Sequence: Synthetic oligonucleotide
auaaauauacuucauuagg

SEQ ID NO: 949753 - RNA, 19 nt, Artificial Sequence
  Description of Artificial Sequence: Synthetic oligonucleotide
aauauacuucauuaggagg

SEQ ID NO: 949754 - RNA, 19 nt, Artificial Sequence
  Description of Artificial Sequence: Synthetic oligonucleotide
aaugaauuaggaaacuggc

SEQ ID NO: 949755 - RNA, 19 nt, Artificial Sequence
  Description of Artificial Sequence: Synthetic oligonucleotide
aaauauacuucauuaggag

SEQ ID NO: 949756 - RNA, 19 nt, Artificial Sequence
  Description of Artificial Sequence: Synthetic oligonucleotide
gaaaaugugauguuugugc

SEQ ID NO: 949757 - RNA, 19 nt, Artificial Sequence
  Description of Artificial Sequence: Synthetic oligonucleotide
aaaugucuaaggcagcuac

SEQ ID NO: 949758 - RNA, 19 nt, Artificial Sequence
  Description of Artificial Sequence: Synthetic oligonucleotide
uaugaaaggaucaaacacc

SEQ ID NO: 949759 - RNA, 19 nt, Artificial Sequence
  Description of Artificial Sequence: Synthetic oligonucleotide
aaguaaaacccuuaaacca

SEQ ID NO: 949760 - RNA, 19 nt, Artificial Sequence
  Description of Artificial Sequence: Synthetic oligonucleotide
auuuucuccacauuaucgc

SEQ ID NO: 949761 - RNA, 19 nt, Artificial Sequence
  Description of Artificial Sequence: Synthetic oligonucleotide
uuaugaaaggaucaaacac

SEQ ID NO: 949762 - RNA, 19 nt, Artificial Sequence
  Description of Artificial Sequence: Synthetic oligonucleotide
accaaauuuucugagaucc

SEQ ID NO: 949763 - RNA, 19 nt, Artificial Sequence
  Description of Artificial Sequence: Synthetic oligonucleotide
ugaauuaggaaacuggccu

SEQ ID NO: 949764 - RNA, 19 nt, Artificial Sequence
  Description of Artificial Sequence: Synthetic oligonucleotide
cuuauucucaucauauucg

SEQ ID NO: 949765 - RNA, 19 nt, Artificial Sequence
  Description of Artificial Sequence: Synthetic oligonucleotide
aauuguacaaucaaacuug

SEQ ID NO: 949766 - RNA, 19 nt, Artificial Sequence
  Description of Artificial Sequence: Synthetic oligonucleotide
ugaaauauuacagugaaua

SEQ ID NO: 949767 - RNA, 19 nt, Artificial Sequence
  Description of Artificial Sequence: Synthetic oligonucleotide
uuuagaggcugcuagagcc

SEQ ID NO: 949768 - RNA, 19 nt, Artificial Sequence
  Description of Artificial Sequence: Synthetic oligonucleotide
agacuaaccaggcugauuc

SEQ ID NO: 949769 - RNA, 19 nt, Artificial Sequence
  Description of Artificial Sequence: Synthetic oligonucleotide
auuguuuuggaacuacuuc

SEQ ID NO: 949770 - RNA, 19 nt, Artificial Sequence
  Description of Artificial Sequence: Synthetic oligonucleotide
aaugcugccugcccggucc

SEQ ID NO: 949771 - RNA, 19 nt, Artificial Sequence
  Description of Artificial Sequence: Synthetic oligonucleotide
gauaacuggaugcuaacag

SEQ ID NO: 949772 - RNA, 19 nt, Artificial Sequence
  Description of Artificial Sequence: Synthetic oligonucleotide
ugagcugaaacacagaaua

SEQ ID NO: 949773 - RNA, 19 nt, Artificial Sequence
  Description of Artificial Sequence: Synthetic oligonucleotide
aauaaaguaaaacccuuaa

SEQ ID NO: 949774 - RNA, 19 nt, Artificial Sequence
  Description of Artificial Sequence: Synthetic oligonucleotide
cuuuguaccagcaacuccc

SEQ ID NO: 949775 - RNA, 19 nt, Artificial Sequence
  Description of Artificial Sequence: Synthetic oligonucleotide
uaucauuagcuuuaaaaga

SEQ ID NO: 949776 - RNA, 19 nt, Artificial Sequence
  Description of Artificial Sequence: Synthetic oligonucleotide
caaugaauuaggaaacugg

SEQ ID NO: 949777 - RNA, 19 nt, Artificial Sequence
  Description of Artificial Sequence: Synthetic oligonucleotide
agcaguauuucauuuagag

SEQ ID NO: 949778 - RNA, 19 nt, Artificial Sequence
  Description of Artificial Sequence: Synthetic oligonucleotide
ucuucgacaucccggaucg

SEQ ID NO: 949779 - RNA, 19 nt, Artificial Sequence
  Description of Artificial Sequence: Synthetic oligonucleotide
auguuugugccaaagaggc

SEQ ID NO: 949780 - RNA, 19 nt, Artificial Sequence
  Description of Artificial Sequence: Synthetic oligonucleotide
agcacacuuacauucacac

SEQ ID NO: 949781 - RNA, 19 nt, Artificial Sequence
  Description of Artificial Sequence: Synthetic oligonucleotide
uauuacagugaauacuugc

SEQ ID NO: 949782 - RNA, 19 nt, Artificial Sequence
  Description of Artificial Sequence: Synthetic oligonucleotide
cuagcaaugaauuaggaaa

SEQ ID NO: 949783 - RNA, 19 nt, Artificial Sequence
  Description of Artificial Sequence: Synthetic oligonucleotide
auuaucgcaauuuucauua

SEQ ID NO: 949784 - RNA, 19 nt, Artificial Sequence
  Description of Artificial Sequence: Synthetic oligonucleotide
aauauuacagugaauacuu

SEQ ID NO: 949785 - RNA, 19 nt, Artificial Sequence
  Description of Artificial Sequence: Synthetic oligonucleotide
uuauauagagcaagacucc

SEQ ID NO: 949786 - RNA, 19 nt, Artificial Sequence
  Description of Artificial Sequence: Synthetic oligonucleotide
uuguuuuggaacuacuuca

SEQ ID NO: 949787 - RNA, 19 nt, Artificial Sequence
  Description of Artificial Sequence: Synthetic oligonucleotide
agaaacagcugcuacccac

SEQ ID NO: 949788 - RNA, 19 nt, Artificial Sequence
  Description of Artificial Sequence: Synthetic oligonucleotide
aacuacuucauaauaauaa

SEQ ID NO: 949789 - RNA, 19 nt, Artificial Sequence
  Description of Artificial Sequence: Synthetic oligonucleotide
ugaauacuugcguaaaugu

SEQ ID NO: 949790 - RNA, 19 nt, Artificial Sequence
  Description of Artificial Sequence: Synthetic oligonucleotide
augaaaggaucaaacaccc

SEQ ID NO: 949791 - RNA, 19 nt, Artificial Sequence
  Description of Artificial Sequence: Synthetic oligonucleotide
uuauuucggaagaaagcag

SEQ ID NO: 949792 - RNA, 19 nt, Artificial Sequence
  Description of Artificial Sequence: Synthetic oligonucleotide
cuugcguaaaugucuaagg

SEQ ID NO: 949793 - RNA, 19 nt, Artificial Sequence
  Description of Artificial Sequence: Synthetic oligonucleotide
ucaaauuugaucagaucuc

SEQ ID NO: 949794 - RNA, 19 nt, Artificial Sequence
  Description of Artificial Sequence: Synthetic oligonucleotide
uuugcucaaauaagggaag

SEQ ID NO: 949795 - RNA, 19 nt, Artificial Sequence
  Description of Artificial Sequence: Synthetic oligonucleotide
uuauccagagacugaacag

SEQ ID NO: 949796 - RNA, 19 nt, Artificial Sequence
  Description of Artificial Sequence: Synthetic oligonucleotide
auauuauugacaugguuau

SEQ ID NO: 949797 - RNA, 19 nt, Artificial Sequence
  Description of Artificial Sequence: Synthetic oligonucleotide
uugcguaaaugucuaaggc

SEQ ID NO: 949798 - RNA, 19 nt, Artificial Sequence
  Description of Artificial Sequence: Synthetic oligonucleotide
cauauuauugacaugguua

SEQ ID NO: 949799 - RNA, 19 nt, Artificial Sequence
  Description of Artificial Sequence: Synthetic oligonucleotide
aaagcuggaaaucgguagu

SEQ ID NO: 949800 - RNA, 19 nt, Artificial Sequence
  Description of Artificial Sequence: Synthetic oligonucleotide
ucugaaguuuaucauaauu

SEQ ID NO: 949801 - RNA, 19 nt, Artificial Sequence
  Description of Artificial Sequence: Synthetic oligonucleotide
ugcguaaaugucuaaggca

SEQ ID NO: 949802 - RNA, 19 nt, Artificial Sequence
  Description of Artificial Sequence: Synthetic oligonucleotide
uucauuaggagguccacac

SEQ ID NO: 949803 - RNA, 19 nt, Artificial Sequence
  Description of Artificial Sequence: Synthetic oligonucleotide
uugacaugguuaugaaagg

SEQ ID NO: 949804 - RNA, 19 nt, Artificial Sequence
  Description of Artificial Sequence: Synthetic oligonucleotide
aguaaaacccuuaaaccag

SEQ ID NO: 949805 - RNA, 19 nt, Artificial Sequence
  Description of Artificial Sequence: Synthetic oligonucleotide
gacgacaccguguucuucg

SEQ ID NO: 949806 - RNA, 19 nt, Artificial Sequence
  Description of Artificial Sequence: Synthetic oligonucleotide
uuucauuaaggaaacugau

SEQ ID NO: 949807 - RNA, 19 nt, Artificial Sequence
  Description of Artificial Sequence: Synthetic oligonucleotide
uggaacuacuucauaauaa

SEQ ID NO: 949808 - RNA, 19 nt, Artificial Sequence
  Description of Artificial Sequence: Synthetic oligonucleotide
aucgcaauuuucauuaagg

SEQ ID NO: 949809 - RNA, 19 nt, Artificial Sequence
  Description of Artificial Sequence: Synthetic oligonucleotide
auauacuucauuaggaggu

SEQ ID NO: 949810 - RNA, 19 nt, Artificial Sequence
  Description of Artificial Sequence: Synthetic oligonucleotide
gaaccaauuugguuugucc

SEQ ID NO: 949811 - RNA, 19 nt, Artificial Sequence
  Description of Artificial Sequence: Synthetic oligonucleotide
cuugccgcagacaagaguc

SEQ ID NO: 949812 - RNA, 19 nt, Artificial Sequence
  Description of Artificial Sequence: Synthetic oligonucleotide
accguguucuucgacaucc

SEQ ID NO: 949813 - RNA, 19 nt, Artificial Sequence
  Description of Artificial Sequence: Synthetic oligonucleotide
ugucauguuuccuugccgc

SEQ ID NO: 949814 - RNA, 19 nt, Artificial Sequence
  Description of Artificial Sequence: Synthetic oligonucleotide
augaauuaggaaacuggcc

SEQ ID NO: 949815 - RNA, 19 nt, Artificial Sequence
  Description of Artificial Sequence: Synthetic oligonucleotide
uaucgcaauuuucauuaag

SEQ ID NO: 949816 - RNA, 19 nt, Artificial Sequence
  Description of Artificial Sequence: Synthetic oligonucleotide
cagccuuauuaucagaagg

SEQ ID NO: 949817 - RNA, 19 nt, Artificial Sequence
  Description of Artificial Sequence: Synthetic oligonucleotide
acugguucucaccucaguc

SEQ ID NO: 949818 - RNA, 19 nt, Artificial Sequence
  Description of Artificial Sequence: Synthetic oligonucleotide
aaugucuaaggcagcuacc

SEQ ID NO: 949819 - RNA, 19 nt, Artificial Sequence
  Description of Artificial Sequence: Synthetic oligonucleotide
acuggaugcuaacaggaag

SEQ ID NO: 949820 - RNA, 19 nt, Artificial Sequence
  Description of Artificial Sequence: Synthetic oligonucleotide
uggucuuuguaccagcaac

SEQ ID NO: 949821 - RNA, 19 nt, Artificial Sequence
  Description of Artificial Sequence: Synthetic oligonucleotide
uuauucucaucauauucgu

SEQ ID NO: 949822 - RNA, 19 nt, Artificial Sequence
  Description of Artificial Sequence: Synthetic oligonucleotide
ucugcacugguucucaccu

SEQ ID NO: 949823 - RNA, 19 nt, Artificial Sequence
  Description of Artificial Sequence: Synthetic oligonucleotide
ucauuagcuuuaaaagaga

SEQ ID NO: 949824 - RNA, 19 nt, Artificial Sequence
  Description of Artificial Sequence: Synthetic oligonucleotide
cacgugauuguuuuggaac

SEQ ID NO: 949825 - RNA, 19 nt, Artificial Sequence
  Description of Artificial Sequence: Synthetic oligonucleotide
ucauauucguccacgucca

SEQ ID NO: 949826 - RNA, 19 nt, Artificial Sequence
  Description of Artificial Sequence: Synthetic oligonucleotide
uguucuucgacaucccgga

SEQ ID NO: 949827 - RNA, 19 nt, Artificial Sequence
  Description of Artificial Sequence: Synthetic oligonucleotide
cuuauuucggaagaaagca

SEQ ID NO: 949828 - RNA, 19 nt, Artificial Sequence
  Description of Artificial Sequence: Synthetic oligonucleotide
uauucguccacguccaccu

SEQ ID NO: 949829 - RNA, 19 nt, Artificial Sequence
  Description of Artificial Sequence: Synthetic oligonucleotide
cuggaaaucgguagugggg

SEQ ID NO: 949830 - RNA, 19 nt, Artificial Sequence
  Description of Artificial Sequence: Synthetic oligonucleotide
ucuugcagucaacacacga

SEQ ID NO: 949831 - RNA, 19 nt, Artificial Sequence
  Description of Artificial Sequence: Synthetic oligonucleotide
guuugugccaaagaggcgc

SEQ ID NO: 949832 - RNA, 19 nt, Artificial Sequence
  Description of Artificial Sequence: Synthetic oligonucleotide
ugccauuugguuguuuugg

SEQ ID NO: 949833 - RNA, 19 nt, Artificial Sequence
  Description of Artificial Sequence: Synthetic oligonucleotide
aagaaagcaguauuucauu

SEQ ID NO: 949834 - RNA, 19 nt, Artificial Sequence
  Description of Artificial Sequence: Synthetic oligonucleotide
gacuucauugggcauauga

SEQ ID NO: 949835 - RNA, 19 nt, Artificial Sequence
  Description of Artificial Sequence: Synthetic oligonucleotide
augauaacuggaugcuaac

SEQ ID NO: 949836 - RNA, 19 nt, Artificial Sequence
  Description of Artificial Sequence: Synthetic oligonucleotide
aagaacacugaagacuuca

SEQ ID NO: 949837 - RNA, 19 nt, Artificial Sequence
  Description of Artificial Sequence: Synthetic oligonucleotide
ucgcaauuuucauuaagga

SEQ ID NO: 949838 - RNA, 19 nt, Artificial Sequence
  Description of Artificial Sequence: Synthetic oligonucleotide
uuuggaacuacuucauaau

SEQ ID NO: 949839 - RNA, 19 nt, Artificial Sequence
  Description of Artificial Sequence: Synthetic oligonucleotide
acccgaagaacacugaaga

SEQ ID NO: 949840 - RNA, 19 nt, Artificial Sequence
  Description of Artificial Sequence: Synthetic oligonucleotide
ucucaccucagucagugac

SEQ ID NO: 949841 - RNA, 19 nt, Artificial Sequence
  Description of Artificial Sequence: Synthetic oligonucleotide
uuuucuccacauuaucgca

SEQ ID NO: 949842 - RNA, 19 nt, Artificial Sequence
  Description of Artificial Sequence: Synthetic oligonucleotide
gagauugaggccaugauaa

SEQ ID NO: 949843 - RNA, 19 nt, Artificial Sequence
  Description of Artificial Sequence: Synthetic oligonucleotide
uaggaaacuggccucaaau

SEQ ID NO: 949844 - RNA, 19 nt, Artificial Sequence
  Description of Artificial Sequence: Synthetic oligonucleotide
aaagagauugaggccauga

SEQ ID NO: 949845 - RNA, 19 nt, Artificial Sequence
  Description of Artificial Sequence: Synthetic oligonucleotide
aacauugcacugcuauugu

SEQ ID NO: 949846 - RNA, 19 nt, Artificial Sequence
  Description of Artificial Sequence: Synthetic oligonucleotide
ugaacagccuuuucaauau

SEQ ID NO: 949847 - RNA, 19 nt, Artificial Sequence
  Description of Artificial Sequence: Synthetic oligonucleotide
acguccaccuuccggaagc

SEQ ID NO: 949848 - RNA, 19 nt, Artificial Sequence
  Description of Artificial Sequence: Synthetic oligonucleotide
aacacagaauauguauuug

SEQ ID NO: 949849 - RNA, 19 nt, Artificial Sequence
  Description of Artificial Sequence: Synthetic oligonucleotide
cucuuuguguugauagggg

SEQ ID NO: 949850 - RNA, 19 nt, Artificial Sequence
  Description of Artificial Sequence: Synthetic oligonucleotide
cauuacccgaagaacacug

SEQ ID NO: 949851 - RNA, 19 nt, Artificial Sequence
  Description of Artificial Sequence: Synthetic oligonucleotide
uacccgaagaacacugaag

SEQ ID NO: 949852 - RNA, 19 nt, Artificial Sequence
  Description of Artificial Sequence: Synthetic oligonucleotide
uacagaauuucugcacugg

SEQ ID NO: 949853 - RNA, 19 nt, Artificial Sequence
  Description of Artificial Sequence: Synthetic oligonucleotide
uggaaaucgguaguggggc

SEQ ID NO: 949854 - RNA, 19 nt, Artificial Sequence
  Description of Artificial Sequence: Synthetic oligonucleotide
agacaaugcugccugcccg

SEQ ID NO: 949855 - RNA, 19 nt, Artificial Sequence
  Description of Artificial Sequence: Synthetic oligonucleotide
guauacauauuauugacau

SEQ ID NO: 949856 - RNA, 19 nt, Artificial Sequence
  Description of Artificial Sequence: Synthetic oligonucleotide
agaaccaaauuuucugaga

SEQ ID NO: 949857 - RNA, 19 nt, Artificial Sequence
  Description of Artificial Sequence: Synthetic oligonucleotide
cugagauccccauuacccg

SEQ ID NO: 949858 - RNA, 19 nt, Artificial Sequence
  Description of Artificial Sequence: Synthetic oligonucleotide
auauucguccacguccacc

SEQ ID NO: 949859 - RNA, 19 nt, Artificial Sequence
  Description of Artificial Sequence: Synthetic oligonucleotide
aauuaggaaacuggccuca

SEQ ID NO: 949860 - RNA, 19 nt, Artificial Sequence
  Description of Artificial Sequence: Synthetic oligonucleotide
uucggaagaaagcaguauu

SEQ ID NO: 949861 - RNA, 19 nt, Artificial Sequence
  Description of Artificial Sequence: Synthetic oligonucleotide
uguuuuggaacuacuucau

SEQ ID NO: 949862 - RNA, 19 nt, Artificial Sequence
  Description of Artificial Sequence: Synthetic oligonucleotide
acaugguuaugaaaggauc

SEQ ID NO: 949863 - RNA, 19 nt, Artificial Sequence
  Description of Artificial Sequence: Synthetic oligonucleotide
ucgguaguggggcucaccc

SEQ ID NO: 949864 - RNA, 19 nt, Artificial Sequence
  Description of Artificial Sequence: Synthetic oligonucleotide
gaauuaggaaacuggccuc

SEQ ID NO: 949865 - RNA, 19 nt, Artificial Sequence
  Description of Artificial Sequence: Synthetic oligonucleotide
ucuggaacuggcaucuuau

SEQ ID NO: 949866 - RNA, 19 nt, Artificial Sequence
  Description of Artificial Sequence: Synthetic oligonucleotide
cagaaccaaauuuucugag

SEQ ID NO: 949867 - RNA, 19 nt, Artificial Sequence
  Description of Artificial Sequence: Synthetic oligonucleotide
uacuucauuaggaggucca

SEQ ID NO: 949868 - RNA, 19 nt, Artificial Sequence
  Description of Artificial Sequence: Synthetic oligonucleotide
uucgacaucccggaucgcg

SEQ ID NO: 949869 - RNA, 19 nt, Artificial Sequence
  Description of Artificial Sequence: Synthetic oligonucleotide
caugguuaugaaaggauca

SEQ ID NO: 949870 - RNA, 19 nt, Artificial Sequence
  Description of Artificial Sequence: Synthetic oligonucleotide
ugggcauaugaaauauuac

SEQ ID NO: 949871 - RNA, 19 nt, Artificial Sequence
  Description of Artificial Sequence: Synthetic oligonucleotide
uggcaucuuaugcacagac

SEQ ID NO: 949872 - RNA, 19 nt, Artificial Sequence
  Description of Artificial Sequence: Synthetic oligonucleotide
caggaaguagcacacuuac

SEQ ID NO: 949873 - RNA, 19 nt, Artificial Sequence
  Description of Artificial Sequence: Synthetic oligonucleotide
uuccugacuagcaaugaau

SEQ ID NO: 949874 - RNA, 19 nt, Artificial Sequence
  Description of Artificial Sequence: Synthetic oligonucleotide
agcugaaacacagaauaug

SEQ ID NO: 949875 - RNA, 19 nt, Artificial Sequence
  Description of Artificial Sequence: Synthetic oligonucleotide
ucauuuagaggcugcuaga

SEQ ID NO: 949876 - RNA, 19 nt, Artificial Sequence
  Description of Artificial Sequence: Synthetic oligonucleotide
gaacuggcaucuuaugcac

SEQ ID NO: 949877 - RNA, 19 nt, Artificial Sequence
  Description of Artificial Sequence: Synthetic oligonucleotide
uaaaacccuuaaaccagca

SEQ ID NO: 949878 - RNA, 19 nt, Artificial Sequence
  Description of Artificial Sequence: Synthetic oligonucleotide
agcuaccuuauuucggaag

SEQ ID NO: 949879 - RNA, 19 nt, Artificial Sequence
  Description of Artificial Sequence: Synthetic oligonucleotide
acuugcguaaaugucuaag

SEQ ID NO: 949880 - RNA, 19 nt, Artificial Sequence
  Description of Artificial Sequence: Synthetic oligonucleotide
uauugacaugguuaugaaa

SEQ ID NO: 949881 - RNA, 19 nt, Artificial Sequence
  Description of Artificial Sequence: Synthetic oligonucleotide
gugaauacuugcguaaaug

SEQ ID NO: 949882 - RNA, 19 nt, Artificial Sequence
  Description of Artificial Sequence: Synthetic oligonucleotide
uacagugaauacuugcgua

SEQ ID NO: 949883 - RNA, 19 nt, Artificial Sequence
  Description of Artificial Sequence: Synthetic oligonucleotide
accuuauuucggaagaaag

SEQ ID NO: 949884 - RNA, 19 nt, Artificial Sequence
  Description of Artificial Sequence: Synthetic oligonucleotide
agauugaggccaugauaac

SEQ ID NO: 949885 - RNA, 19 nt, Artificial Sequence
  Description of Artificial Sequence: Synthetic oligonucleotide
ugcagucaacacacgaaca

SEQ ID NO: 949886 - RNA, 19 nt, Artificial Sequence
  Description of Artificial Sequence: Synthetic oligonucleotide
gaauauguauuuguuugga

SEQ ID NO: 949887 - RNA, 19 nt, Artificial Sequence
  Description of Artificial Sequence: Synthetic oligonucleotide
aacuuauucucaucauauu

SEQ ID NO: 949888 - RNA, 19 nt, Artificial Sequence
  Description of Artificial Sequence: Synthetic oligonucleotide
uccccagacagccuuauua

SEQ ID NO: 949889 - RNA, 19 nt, Artificial Sequence
  Description of Artificial Sequence: Synthetic oligonucleotide
ugcucaaauaagggaagag

SEQ ID NO: 949890 - RNA, 19 nt, Artificial Sequence
  Description of Artificial Sequence: Synthetic oligonucleotide
cauuaggagguccacacca

SEQ ID NO: 949891 - RNA, 19 nt, Artificial Sequence
  Description of Artificial Sequence: Synthetic oligonucleotide
agagauugaggccaugaua

SEQ ID NO: 949892 - RNA, 19 nt, Artificial Sequence
  Description of Artificial Sequence: Synthetic oligonucleotide
ucauuaggagguccacacc

SEQ ID NO: 949893 - RNA, 19 nt, Artificial Sequence
  Description of Artificial Sequence: Synthetic oligonucleotide
ugagauccccauuacccga

SEQ ID NO: 949894 - RNA, 19 nt, Artificial Sequence
  Description of Artificial Sequence: Synthetic oligonucleotide
uucuucgacaucccggauc

SEQ ID NO: 949895 - RNA, 19 nt, Artificial Sequence
  Description of Artificial Sequence: Synthetic oligonucleotide
ccuuauuucggaagaaagc

SEQ ID NO: 949896 - RNA, 19 nt, Artificial Sequence
  Description of Artificial Sequence: Synthetic oligonucleotide
aagcgggccgacgacaccg

SEQ ID NO: 949897 - RNA, 19 nt, Artificial Sequence
  Description of Artificial Sequence: Synthetic oligonucleotide
aggcagcuaccuuauuucg

SEQ ID NO: 949898 - RNA, 19 nt, Artificial Sequence
  Description of Artificial Sequence: Synthetic oligonucleotide
ugauaacuggaugcuaaca

SEQ ID NO: 949899 - RNA, 19 nt, Artificial Sequence
  Description of Artificial Sequence: Synthetic oligonucleotide
acauauuauugacaugguu

SEQ ID NO: 949900 - RNA, 19 nt, Artificial Sequence
  Description of Artificial Sequence: Synthetic oligonucleotide
uuccuugccgcagacaaga

SEQ ID NO: 949901 - RNA, 19 nt, Artificial Sequence
  Description of Artificial Sequence: Synthetic oligonucleotide
agcaacucccacuucugug

SEQ ID NO: 949902 - RNA, 19 nt, Artificial Sequence
  Description of Artificial Sequence: Synthetic oligonucleotide
uuacccgaagaacacugaa

SEQ ID NO: 949903 - RNA, 19 nt, Artificial Sequence
  Description of Artificial Sequence: Synthetic oligonucleotide
agcuggacuacacaguuuu

SEQ ID NO: 949904 - RNA, 19 nt, Artificial Sequence
  Description of Artificial Sequence: Synthetic oligonucleotide
gacaccguguucuucgaca

SEQ ID NO: 949905 - RNA, 19 nt, Artificial Sequence
  Description of Artificial Sequence: Synthetic oligonucleotide
aacccuuaaaccagcaaaa

SEQ ID NO: 949906 - RNA, 19 nt, Artificial Sequence
  Description of Artificial Sequence: Synthetic oligonucleotide
cuuucgcgagcccagcccg

SEQ ID NO: 949907 - RNA, 19 nt, Artificial Sequence
  Description of Artificial Sequence: Synthetic oligonucleotide
ucauugggcauaugaaaua

SEQ ID NO: 949908 - RNA, 19 nt, Artificial Sequence
  Description of Artificial Sequence: Synthetic oligonucleotide
uuuguaccagcaacuccca

SEQ ID NO: 949909 - RNA, 19 nt, Artificial Sequence
  Description of Artificial Sequence: Synthetic oligonucleotide
accaauuugguuuguccaa

SEQ ID NO: 949910 - RNA, 19 nt, Artificial Sequence
  Description of Artificial Sequence: Synthetic oligonucleotide
cugcuauugucagaggggc

SEQ ID NO: 949911 - RNA, 19 nt, Artificial Sequence
  Description of Artificial Sequence: Synthetic oligonucleotide
cugucauguuuccuugccg

SEQ ID NO: 949912 - RNA, 19 nt, Artificial Sequence
  Description of Artificial Sequence: Synthetic oligonucleotide
gugccucuagccuuucgcg

SEQ ID NO: 949913 - RNA, 19 nt, Artificial Sequence
  Description of Artificial Sequence: Synthetic oligonucleotide
guaaaacccuuaaaccagc

SEQ ID NO: 949914 - RNA, 19 nt, Artificial Sequence
  Description of Artificial Sequence: Synthetic oligonucleotide
uccacgaacuuauucucau

SEQ ID NO: 949915 - RNA, 19 nt, Artificial Sequence
  Description of Artificial Sequence: Synthetic oligonucleotide
aagaggcgcuuguauuuug

SEQ ID NO: 949916 - RNA, 19 nt, Artificial Sequence
  Description of Artificial Sequence: Synthetic oligonucleotide
agaaccaauuugguuuguc

SEQ ID NO: 949917 - RNA, 19 nt, Artificial Sequence
  Description of Artificial Sequence: Synthetic oligonucleotide
agccuuauuaucagaagga

SEQ ID NO: 949918 - RNA, 19 nt, Artificial Sequence
  Description of Artificial Sequence: Synthetic oligonucleotide
aguauuucauuuagaggcu

SEQ ID NO: 949919 - RNA, 19 nt, Artificial Sequence
  Description of Artificial Sequence: Synthetic oligonucleotide
augucuaaggcagcuaccu

SEQ ID NO: 949920 - RNA, 19 nt, Artificial Sequence
  Description of Artificial Sequence: Synthetic oligonucleotide
uuuacaagcaccggucauu

SEQ ID NO: 949921 - RNA, 19 nt, Artificial Sequence
  Description of Artificial Sequence: Synthetic oligonucleotide
uuugugccaaagaggcgcu

SEQ ID NO: 949922 - RNA, 19 nt, Artificial Sequence
  Description of Artificial Sequence: Synthetic oligonucleotide
agaggcgcuuguauuuugc

SEQ ID NO: 949923 - RNA, 19 nt, Artificial Sequence
  Description of Artificial Sequence: Synthetic oligonucleotide
acccuaccccuccagcagc

SEQ ID NO: 949924 - RNA, 19 nt, Artificial Sequence
  Description of Artificial Sequence: Synthetic oligonucleotide
ugcacagacuaaccaggcu

SEQ ID NO: 949925 - RNA, 19 nt, Artificial Sequence
  Description of Artificial Sequence: Synthetic oligonucleotide
augcacagacuaaccaggc

SEQ ID NO: 949926 - RNA, 19 nt, Artificial Sequence
  Description of Artificial Sequence: Synthetic oligonucleotide
uccggaagcgggccgacga

SEQ ID NO: 949927 - RNA, 19 nt, Artificial Sequence
  Description of Artificial Sequence: Synthetic oligonucleotide
gacccuaccccuccagcag

SEQ ID NO: 949928 - RNA, 19 nt, Artificial Sequence
  Description of Artificial Sequence: Synthetic oligonucleotide
aaaucgguaguggggcuca

SEQ ID NO: 949929 - RNA, 19 nt, Artificial Sequence
  Description of Artificial Sequence: Synthetic oligonucleotide
ugggguaguuuccccagac

SEQ ID NO: 949930 - RNA, 19 nt, Artificial Sequence
  Description of Artificial Sequence: Synthetic oligonucleotide
ucgacaucccggaucgcga

SEQ ID NO: 949931 - RNA, 19 nt, Artificial Sequence
  Description of Artificial Sequence: Synthetic oligonucleotide
ugugccaaagaggcgcuug

SEQ ID NO: 949932 - RNA, 19 nt, Artificial Sequence
  Description of Artificial Sequence: Synthetic oligonucleotide
ggaaguagcacacuuacau

SEQ ID NO: 949933 - RNA, 19 nt, Artificial Sequence
  Description of Artificial Sequence: Synthetic oligonucleotide
cuugcagucaacacacgaa

SEQ ID NO: 949934 - RNA, 19 nt, Artificial Sequence
  Description of Artificial Sequence: Synthetic oligonucleotide
gacuaaccaggcugauucc

SEQ ID NO: 949935 - RNA, 19 nt, Artificial Sequence
  Description of Artificial Sequence: Synthetic oligonucleotide
uuaggaaacuggccucaaa

SEQ ID NO: 949936 - RNA, 19 nt, Artificial Sequence
  Description of Artificial Sequence: Synthetic oligonucleotide
auuguacaaucaaacuuga

SEQ ID NO: 949937 - RNA, 19 nt, Artificial Sequence
  Description of Artificial Sequence: Synthetic oligonucleotide
ucuggggcgucgccgguag

SEQ ID NO: 949938 - RNA, 19 nt, Artificial Sequence
  Description of Artificial Sequence: Synthetic oligonucleotide
uuucggaagaaagcaguau

SEQ ID NO: 949939 - RNA, 19 nt, Artificial Sequence
  Description of Artificial Sequence: Synthetic oligonucleotide
gacaucccggaucgcgacg

SEQ ID NO: 949940 - RNA, 19 nt, Artificial Sequence
  Description of Artificial Sequence: Synthetic oligonucleotide
aguuuccccagacagccuu

SEQ ID NO: 949941 - RNA, 19 nt, Artificial Sequence
  Description of Artificial Sequence: Synthetic oligonucleotide
agcaagacuccuugcucug

SEQ ID NO: 949942 - RNA, 19 nt, Artificial Sequence
  Description of Artificial Sequence: Synthetic oligonucleotide
uugcucaaauaagggaaga

SEQ ID NO: 949943 - RNA, 19 nt, Artificial Sequence
  Description of Artificial Sequence: Synthetic oligonucleotide
uaccuuauuucggaagaaa

SEQ ID NO: 949944 - RNA, 19 nt, Artificial Sequence
  Description of Artificial Sequence: Synthetic oligonucleotide
ugguuaugaaaggaucaaa

SEQ ID NO: 949945 - RNA, 19 nt, Artificial Sequence
  Description of Artificial Sequence: Synthetic oligonucleotide
uccgcggugccucuagccu

SEQ ID NO: 949946 - RNA, 19 nt, Artificial Sequence
  Description of Artificial Sequence: Synthetic oligonucleotide
cacaccauucuuauccaga

SEQ ID NO: 949947 - RNA, 19 nt, Artificial Sequence
  Description of Artificial Sequence: Synthetic oligonucleotide
caauggacccuaccccucc

SEQ ID NO: 949948 - RNA, 19 nt, Artificial Sequence
  Description of Artificial Sequence: Synthetic oligonucleotide
agguccacaccauucuuau

SEQ ID NO: 949949 - RNA, 19 nt, Artificial Sequence
  Description of Artificial Sequence: Synthetic oligonucleotide
aucgcgacgcgacgcuggc

SEQ ID NO: 949950 - RNA, 19 nt, Artificial Sequence
  Description of Artificial Sequence: Synthetic oligonucleotide
agcaaugaauuaggaaacu

SEQ ID NO: 949951 - RNA, 19 nt, Artificial Sequence
  Description of Artificial Sequence: Synthetic oligonucleotide
guagcacacuuacauucac

SEQ ID NO: 949952 - RNA, 19 nt, Artificial Sequence
  Description of Artificial Sequence: Synthetic oligonucleotide
gaagacuucauugggcaua

SEQ ID NO: 949953 - RNA, 19 nt, Artificial Sequence
  Description of Artificial Sequence: Synthetic oligonucleotide
uggacccuaccccuccagc

SEQ ID NO: 949954 - RNA, 19 nt, Artificial Sequence
  Description of Artificial Sequence: Synthetic oligonucleotide
gcuaccuuauuucggaaga

SEQ ID NO: 949955 - RNA, 19 nt, Artificial Sequence
  Description of Artificial Sequence: Synthetic oligonucleotide
uuucgcgagcccagcccgg

SEQ ID NO: 949956 - RNA, 19 nt, Artificial Sequence
  Description of Artificial Sequence: Synthetic oligonucleotide
gguaguggggcucacccac

SEQ ID NO: 949957 - RNA, 19 nt, Artificial Sequence
  Description of Artificial Sequence: Synthetic oligonucleotide
aguagcacacuuacauuca

SEQ ID NO: 949958 - RNA, 19 nt, Artificial Sequence
  Description of Artificial Sequence: Synthetic oligonucleotide
aaagaggcgcuuguauuuu

SEQ ID NO: 949959 - RNA, 19 nt, Artificial Sequence
  Description of Artificial Sequence: Synthetic oligonucleotide
agaucucucaguauugguu

SEQ ID NO: 949960 - RNA, 19 nt, Artificial Sequence
  Description of Artificial Sequence: Synthetic oligonucleotide
ugcuauugucagaggggcu

SEQ ID NO: 949961 - RNA, 19 nt, Artificial Sequence
  Description of Artificial Sequence: Synthetic oligonucleotide
gaucgcgacgcgacgcugg

SEQ ID NO: 949962 - RNA, 19 nt, Artificial Sequence
  Description of Artificial Sequence: Synthetic oligonucleotide
gauugaggccaugauaacu

SEQ ID NO: 949963 - RNA, 19 nt, Artificial Sequence
  Description of Artificial Sequence: Synthetic oligonucleotide
ggugccucuagccuuucgc

SEQ ID NO: 949964 - RNA, 19 nt, Artificial Sequence
  Description of Artificial Sequence: Synthetic oligonucleotide
uuaucgcaauuuucauuaa

SEQ ID NO: 949965 - RNA, 19 nt, Artificial Sequence
  Description of Artificial Sequence: Synthetic oligonucleotide
acgaacuuauucucaucau

SEQ ID NO: 949966 - RNA, 19 nt, Artificial Sequence
  Description of Artificial Sequence: Synthetic oligonucleotide
augguuaugaaaggaucaa

SEQ ID NO: 949967 - RNA, 19 nt, Artificial Sequence
  Description of Artificial Sequence: Synthetic oligonucleotide
gaagagugguccaguuuug

SEQ ID NO: 949968 - RNA, 19 nt, Artificial Sequence
  Description of Artificial Sequence: Synthetic oligonucleotide
uuacaagcaccggucauuu

SEQ ID NO: 949969 - RNA, 19 nt, Artificial Sequence
  Description of Artificial Sequence: Synthetic oligonucleotide
cauucauucacgugauugu

SEQ ID NO: 949970 - RNA, 19 nt, Artificial Sequence
  Description of Artificial Sequence: Synthetic oligonucleotide
caguuuugcaauguuaaua

SEQ ID NO: 949971 - RNA, 19 nt, Artificial Sequence
  Description of Artificial Sequence: Synthetic oligonucleotide
ugccugacucuuuguguug

SEQ ID NO: 949972 - RNA, 19 nt, Artificial Sequence
  Description of Artificial Sequence: Synthetic oligonucleotide
uaaccaggcugauucccuc

SEQ ID NO: 949973 - RNA, 19 nt, Artificial Sequence
  Description of Artificial Sequence: Synthetic oligonucleotide
auuuucugagauccccauu

SEQ ID NO: 949974 - RNA, 19 nt, Artificial Sequence
  Description of Artificial Sequence: Synthetic oligonucleotide
cuggaugcuaacaggaagu

SEQ ID NO: 949975 - RNA, 19 nt, Artificial Sequence
  Description of Artificial Sequence: Synthetic oligonucleotide
acaccguguucuucgacau

SEQ ID NO: 949976 - RNA, 19 nt, Artificial Sequence
  Description of Artificial Sequence: Synthetic oligonucleotide
uucugaaguuuaucauaau

SEQ ID NO: 949977 - RNA, 19 nt, Artificial Sequence
  Description of Artificial Sequence: Synthetic oligonucleotide
gcugucauguuuccuugcc

SEQ ID NO: 949978 - RNA, 19 nt, Artificial Sequence
  Description of Artificial Sequence: Synthetic oligonucleotide
augcuaacaggaaguagca

SEQ ID NO: 949979 - RNA, 19 nt, Artificial Sequence
  Description of Artificial Sequence: Synthetic oligonucleotide
cauucacgugauuguuuug

SEQ ID NO: 949980 - RNA, 19 nt, Artificial Sequence
  Description of Artificial Sequence: Synthetic oligonucleotide
ccagacagccuuauuauca

SEQ ID NO: 949981 - RNA, 19 nt, Artificial Sequence
  Description of Artificial Sequence: Synthetic oligonucleotide
agacagccuuauuaucaga

SEQ ID NO: 949982 - RNA, 19 nt, Artificial Sequence
  Description of Artificial Sequence: Synthetic oligonucleotide
cugaaacacagaauaugua

SEQ ID NO: 949983 - RNA, 19 nt, Artificial Sequence
  Description of Artificial Sequence: Synthetic oligonucleotide
acaauggacccuaccccuc

SEQ ID NO: 949984 - RNA, 19 nt, Artificial Sequence
  Description of Artificial Sequence: Synthetic oligonucleotide
ucccggaucgcgacgcgac

SEQ ID NO: 949985 - RNA, 19 nt, Artificial Sequence
  Description of Artificial Sequence: Synthetic oligonucleotide
aucgguaguggggcucacc

SEQ ID NO: 949986 - RNA, 19 nt, Artificial Sequence
  Description of Artificial Sequence: Synthetic oligonucleotide
ucccacuucugugagugau

SEQ ID NO: 949987 - RNA, 19 nt, Artificial Sequence
  Description of Artificial Sequence: Synthetic oligonucleotide
uccuugccgcagacaagag

SEQ ID NO: 949988 - RNA, 19 nt, Artificial Sequence
  Description of Artificial Sequence: Synthetic oligonucleotide
gacaugguuaugaaaggau

SEQ ID NO: 949989 - RNA, 19 nt, Artificial Sequence
  Description of Artificial Sequence: Synthetic oligonucleotide
agauccccauuacccgaag

SEQ ID NO: 949990 - RNA, 19 nt, Artificial Sequence
  Description of Artificial Sequence: Synthetic oligonucleotide
aaucgguaguggggcucac

SEQ ID NO: 949991 - RNA, 19 nt, Artificial Sequence
  Description of Artificial Sequence: Synthetic oligonucleotide
gcucacuucccucuuccgc

SEQ ID NO: 949992 - RNA, 19 nt, Artificial Sequence
  Description of Artificial Sequence: Synthetic oligonucleotide
cuccgcggugccucuagcc

SEQ ID NO: 949993 - RNA, 19 nt, Artificial Sequence
  Description of Artificial Sequence: Synthetic oligonucleotide
gucaccacaaagagauuga

SEQ ID NO: 949994 - RNA, 19 nt, Artificial Sequence
  Description of Artificial Sequence: Synthetic oligonucleotide
uguuuccuugccgcagaca

SEQ ID NO: 949995 - RNA, 19 nt, Artificial Sequence
  Description of Artificial Sequence: Synthetic oligonucleotide
gagaaacagcugcuaccca

SEQ ID NO: 949996 - RNA, 19 nt, Artificial Sequence
  Description of Artificial Sequence: Synthetic oligonucleotide
auuucggaagaaagcagua

SEQ ID NO: 949997 - RNA, 19 nt, Artificial Sequence
  Description of Artificial Sequence: Synthetic oligonucleotide
cccauuacccgaagaacac

SEQ ID NO: 949998 - RNA, 19 nt, Artificial Sequence
  Description of Artificial Sequence: Synthetic oligonucleotide
gcuauugucagaggggcuc

SEQ ID NO: 949999 - RNA, 19 nt, Artificial Sequence
  Description of Artificial Sequence: Synthetic oligonucleotide
auuacccgaagaacacuga

SEQ ID NO: 950000 - RNA, 19 nt, Artificial Sequence
  Description of Artificial Sequence: Synthetic oligonucleotide
auacuugcguaaaugucua

SEQ ID NO: 950001 - RNA, 19 nt, Artificial Sequence
  Description of Artificial Sequence: Synthetic oligonucleotide
cuucauuaggagguccaca

SEQ ID NO: 950002 - RNA, 19 nt, Artificial Sequence
  Description of Artificial Sequence: Synthetic oligonucleotide
acacgaacaauggacccua

SEQ ID NO: 950003 - RNA, 19 nt, Artificial Sequence
  Description of Artificial Sequence: Synthetic oligonucleotide
cuagccuuucgcgagccca

SEQ ID NO: 950004 - RNA, 19 nt, Artificial Sequence
  Description of Artificial Sequence: Synthetic oligonucleotide
uacuugcguaaaugucuaa

SEQ ID NO: 950005 - RNA, 19 nt, Artificial Sequence
  Description of Artificial Sequence: Synthetic oligonucleotide
cauuaucgcaauuuucauu

SEQ ID NO: 950006 - RNA, 19 nt, Artificial Sequence
  Description of Artificial Sequence: Synthetic oligonucleotide
uucucaccucagucaguga

SEQ ID NO: 950007 - RNA, 19 nt, Artificial Sequence
  Description of Artificial Sequence: Synthetic oligonucleotide
aaccagcaaaagaguaaaa

SEQ ID NO: 950008 - RNA, 19 nt, Artificial Sequence
  Description of Artificial Sequence: Synthetic oligonucleotide
gaagcgggccgacgacacc

SEQ ID NO: 950009 - RNA, 19 nt, Artificial Sequence
  Description of Artificial Sequence: Synthetic oligonucleotide
gcacuuucaagacaaugcu

SEQ ID NO: 950010 - RNA, 19 nt, Artificial Sequence
  Description of Artificial Sequence: Synthetic oligonucleotide
caaagaggcgcuuguauuu

SEQ ID NO: 950011 - RNA, 19 nt, Artificial Sequence
  Description of Artificial Sequence: Synthetic oligonucleotide
ccccauuacccgaagaaca

SEQ ID NO: 950012 - RNA, 19 nt, Artificial Sequence
  Description of Artificial Sequence: Synthetic oligonucleotide
auuaggagguccacaccau

SEQ ID NO: 950013 - RNA, 19 nt, Artificial Sequence
  Description of Artificial Sequence: Synthetic oligonucleotide
acaggaaguagcacacuua

SEQ ID NO: 950014 - RNA, 19 nt, Artificial Sequence
  Description of Artificial Sequence: Synthetic oligonucleotide
aggaaguagcacacuuaca

SEQ ID NO: 950015 - RNA, 19 nt, Artificial Sequence
  Description of Artificial Sequence: Synthetic oligonucleotide
cauauucguccacguccac

SEQ ID NO: 950016 - RNA, 19 nt, Artificial Sequence
  Description of Artificial Sequence: Synthetic oligonucleotide
uccgcucuggggcgucgcc

SEQ ID NO: 950017 - RNA, 19 nt, Artificial Sequence
  Description of Artificial Sequence: Synthetic oligonucleotide
gagguccacaccauucuua

SEQ ID NO: 950018 - RNA, 19 nt, Artificial Sequence
  Description of Artificial Sequence: Synthetic oligonucleotide
cacguccaccuuccggaag

SEQ ID NO: 950019 - RNA, 19 nt, Artificial Sequence
  Description of Artificial Sequence: Synthetic oligonucleotide
caugugcauucauucacgu

SEQ ID NO: 950020 - RNA, 19 nt, Artificial Sequence
  Description of Artificial Sequence: Synthetic oligonucleotide
gcucaaauaagggaagagu

SEQ ID NO: 950021 - RNA, 19 nt, Artificial Sequence
  Description of Artificial Sequence: Synthetic oligonucleotide
ccuuucgcgagcccagccc

SEQ ID NO: 950022 - RNA, 19 nt, Artificial Sequence
  Description of Artificial Sequence: Synthetic oligonucleotide
cccgaagaacacugaagac

SEQ ID NO: 950023 - RNA, 19 nt, Artificial Sequence
  Description of Artificial Sequence: Synthetic oligonucleotide
guccacgaacuuauucuca

SEQ ID NO: 950024 - RNA, 19 nt, Artificial Sequence
  Description of Artificial Sequence: Synthetic oligonucleotide
cuucccuccgcggugccuc

SEQ ID NO: 950025 - RNA, 19 nt, Artificial Sequence
  Description of Artificial Sequence: Synthetic oligonucleotide
acgacaccguguucuucga

SEQ ID NO: 950026 - RNA, 19 nt, Artificial Sequence
  Description of Artificial Sequence: Synthetic oligonucleotide
ggacccuaccccuccagca

SEQ ID NO: 950027 - RNA, 19 nt, Artificial Sequence
  Description of Artificial Sequence: Synthetic oligonucleotide
uuccggaagcgggccgacg

SEQ ID NO: 950028 - RNA, 19 nt, Artificial Sequence
  Description of Artificial Sequence: Synthetic oligonucleotide
cauugggcauaugaaauau

SEQ ID NO: 950029 - RNA, 19 nt, Artificial Sequence
  Description of Artificial Sequence: Synthetic oligonucleotide
uucgcgagcccagcccggc

SEQ ID NO: 950030 - RNA, 19 nt, Artificial Sequence
  Description of Artificial Sequence: Synthetic oligonucleotide
cacgaacaauggacccuac

SEQ ID NO: 950031 - RNA, 19 nt, Artificial Sequence
  Description of Artificial Sequence: Synthetic oligonucleotide
ggaagcaagcagaaauaaa

SEQ ID NO: 950032 - RNA, 19 nt, Artificial Sequence
  Description of Artificial Sequence: Synthetic oligonucleotide
gagauccccauuacccgaa

SEQ ID NO: 950033 - RNA, 19 nt, Artificial Sequence
  Description of Artificial Sequence: Synthetic oligonucleotide
gcaagacuccuugcucugg

SEQ ID NO: 950034 - RNA, 19 nt, Artificial Sequence
  Description of Artificial Sequence: Synthetic oligonucleotide
cugugagugauguccaguu

SEQ ID NO: 950035 - RNA, 19 nt, Artificial Sequence
  Description of Artificial Sequence: Synthetic oligonucleotide
cagugaauacuugcguaaa

SEQ ID NO: 950036 - RNA, 19 nt, Artificial Sequence
  Description of Artificial Sequence: Synthetic oligonucleotide
cuaccuuauuucggaagaa

SEQ ID NO: 950037 - RNA, 19 nt, Artificial Sequence
  Description of Artificial Sequence: Synthetic oligonucleotide
caucccggaucgcgacgcg

SEQ ID NO: 950038 - RNA, 19 nt, Artificial Sequence
  Description of Artificial Sequence: Synthetic oligonucleotide
ccaccuuccggaagcgggc

SEQ ID NO: 950039 - RNA, 19 nt, Artificial Sequence
  Description of Artificial Sequence: Synthetic oligonucleotide
caccuuccggaagcgggcc

SEQ ID NO: 950040 - RNA, 19 nt, Artificial Sequence
  Description of Artificial Sequence: Synthetic oligonucleotide
cagaucucucaguauuggu

SEQ ID NO: 950041 - RNA, 19 nt, Artificial Sequence
  Description of Artificial Sequence: Synthetic oligonucleotide
uacaagcaccggucauuuu

SEQ ID NO: 950042 - RNA, 19 nt, Artificial Sequence
  Description of Artificial Sequence: Synthetic oligonucleotide
cacccacuacuugcucugg

SEQ ID NO: 950043 - RNA, 19 nt, Artificial Sequence
  Description of Artificial Sequence: Synthetic oligonucleotide
ggucuuuguaccagcaacu

SEQ ID NO: 950044 - RNA, 19 nt, Artificial Sequence
  Description of Artificial Sequence: Synthetic oligonucleotide
cccggcgcggcucacuucc

SEQ ID NO: 950045 - RNA, 19 nt, Artificial Sequence
  Description of Artificial Sequence: Synthetic oligonucleotide
gagcugaaacacagaauau

SEQ ID NO: 950046 - RNA, 19 nt, Artificial Sequence
  Description of Artificial Sequence: Synthetic oligonucleotide
acagacuaaccaggcugau

SEQ ID NO: 950047 - RNA, 19 nt, Artificial Sequence
  Description of Artificial Sequence: Synthetic oligonucleotide
cguccacgaacuuauucuc

SEQ ID NO: 950048 - RNA, 19 nt, Artificial Sequence
  Description of Artificial Sequence: Synthetic oligonucleotide
cccagacagccuuauuauc

SEQ ID NO: 950049 - RNA, 19 nt, Artificial Sequence
  Description of Artificial Sequence: Synthetic oligonucleotide
gggguaguuuccccagaca

SEQ ID NO: 950050 - RNA, 19 nt, Artificial Sequence
  Description of Artificial Sequence: Synthetic oligonucleotide
cuccacauuaucgcaauuu

SEQ ID NO: 950051 - RNA, 19 nt, Artificial Sequence
  Description of Artificial Sequence: Synthetic oligonucleotide
uuccccagacagccuuauu

SEQ ID NO: 950052 - RNA, 19 nt, Artificial Sequence
  Description of Artificial Sequence: Synthetic oligonucleotide
caccguguucuucgacauc

SEQ ID NO: 950053 - RNA, 19 nt, Artificial Sequence
  Description of Artificial Sequence: Synthetic oligonucleotide
agagccgccuggagugcag

SEQ ID NO: 950054 - RNA, 19 nt, Artificial Sequence
  Description of Artificial Sequence: Synthetic oligonucleotide
ggaagcgggccgacgacac

SEQ ID NO: 950055 - RNA, 19 nt, Artificial Sequence
  Description of Artificial Sequence: Synthetic oligonucleotide
cacacgaacaauggacccu

SEQ ID NO: 950056 - RNA, 19 nt, Artificial Sequence
  Description of Artificial Sequence: Synthetic oligonucleotide
ugccugcccgguccuucac

SEQ ID NO: 950057 - RNA, 19 nt, Artificial Sequence
  Description of Artificial Sequence: Synthetic oligonucleotide
ccacgaacuuauucucauc

SEQ ID NO: 950058 - RNA, 19 nt, Artificial Sequence
  Description of Artificial Sequence: Synthetic oligonucleotide
ccucuagccuuucgcgagc

SEQ ID NO: 950059 - RNA, 19 nt, Artificial Sequence
  Description of Artificial Sequence: Synthetic oligonucleotide
uuccgcucuggggcgucgc

SEQ ID NO: 950060 - RNA, 19 nt, Artificial Sequence
  Description of Artificial Sequence: Synthetic oligonucleotide
cagcuaccuuauuucggaa

SEQ ID NO: 950061 - RNA, 19 nt, Artificial Sequence
  Description of Artificial Sequence: Synthetic oligonucleotide
acgcgacgcuggccuuccc

SEQ ID NO: 950062 - RNA, 19 nt, Artificial Sequence
  Description of Artificial Sequence: Synthetic oligonucleotide
gccaugauaacuggaugcu

SEQ ID NO: 950063 - RNA, 19 nt, Artificial Sequence
  Description of Artificial Sequence: Synthetic oligonucleotide
caccauuaucuggaagcaa

SEQ ID NO: 950064 - RNA, 19 nt, Artificial Sequence
  Description of Artificial Sequence: Synthetic oligonucleotide
gcgacgcuggccuucccuc

SEQ ID NO: 950065 - RNA, 19 nt, Artificial Sequence
  Description of Artificial Sequence: Synthetic oligonucleotide
cuauugucagaggggcucu

SEQ ID NO: 950066 - RNA, 19 nt, Artificial Sequence
  Description of Artificial Sequence: Synthetic oligonucleotide
cuggacccugggucaccac

SEQ ID NO: 950067 - RNA, 19 nt, Artificial Sequence
  Description of Artificial Sequence: Synthetic oligonucleotide
ccguguucuucgacauccc

SEQ ID NO: 950068 - RNA, 19 nt, Artificial Sequence
  Description of Artificial Sequence: Synthetic oligonucleotide
ggggcgucgccgguagccg

SEQ ID NO: 950069 - RNA, 19 nt, Artificial Sequence
  Description of Artificial Sequence: Synthetic oligonucleotide
ccacuacuugcucuggaaa

SEQ ID NO: 950070 - RNA, 19 nt, Artificial Sequence
  Description of Artificial Sequence: Synthetic oligonucleotide
gccgacgacaccguguucu

SEQ ID NO: 950071 - RNA, 19 nt, Artificial Sequence
  Description of Artificial Sequence: Synthetic oligonucleotide
cuucgacaucccggaucgc

SEQ ID NO: 950072 - RNA, 19 nt, Artificial Sequence
  Description of Artificial Sequence: Synthetic oligonucleotide
agcccggcgcggcucacuu

SEQ ID NO: 950073 - RNA, 19 nt, Artificial Sequence
  Description of Artificial Sequence: Synthetic oligonucleotide
ucgggcccggccuggccau

SEQ ID NO: 950074 - RNA, 19 nt, Artificial Sequence
  Description of Artificial Sequence: Synthetic oligonucleotide
ucgcgacgcgacgcuggcc

SEQ ID NO: 950075 - RNA, 19 nt, Artificial Sequence
  Description of Artificial Sequence: Synthetic oligonucleotide
cagcaacucccacuucugu

SEQ ID NO: 950076 - RNA, 19 nt, Artificial Sequence
  Description of Artificial Sequence: Synthetic oligonucleotide
ccccuugaaacaaaauuuu

SEQ ID NO: 950077 - RNA, 19 nt, Artificial Sequence
  Description of Artificial Sequence: Synthetic oligonucleotide
ccggaucgcgacgcgacgc

SEQ ID NO: 950078 - RNA, 19 nt, Artificial Sequence
  Description of Artificial Sequence: Synthetic oligonucleotide
cgcucuggggcgucgccgg

SEQ ID NO: 950079 - RNA, 19 nt, Artificial Sequence
  Description of Artificial Sequence: Synthetic oligonucleotide
cucccacuucugugaguga

SEQ ID NO: 950080 - RNA, 19 nt, Artificial Sequence
  Description of Artificial Sequence: Synthetic oligonucleotide
ggcgcggcucacuucccuc

SEQ ID NO: 950081 - RNA, 19 nt, Artificial Sequence
  Description of Artificial Sequence: Synthetic oligonucleotide
cccggaucgcgacgcgacg

SEQ ID NO: 950082 - RNA, 19 nt, Artificial Sequence
  Description of Artificial Sequence: Synthetic oligonucleotide
ggacccugggucaccacaa

SEQ ID NO: 950083 - RNA, 19 nt, Artificial Sequence
  Description of Artificial Sequence: Synthetic oligonucleotide
ggaucgcgacgcgacgcug

SEQ ID NO: 950084 - RNA, 19 nt, Artificial Sequence
  Description of Artificial Sequence: Synthetic oligonucleotide
cgacaucccggaucgcgac

SEQ ID NO: 950085 - RNA, 19 nt, Artificial Sequence
  Description of Artificial Sequence: Synthetic oligonucleotide
gcgcuuguauuuugcaaau

SEQ ID NO: 950086 - RNA, 19 nt, Artificial Sequence
  Description of Artificial Sequence: Synthetic oligonucleotide
gggcgucgccgguagccgc

SEQ ID NO: 950087 - RNA, 19 nt, Artificial Sequence
  Description of Artificial Sequence: Synthetic oligonucleotide
gccgcagacaagaguccac

SEQ ID NO: 950088 - RNA, 19 nt, Artificial Sequence
  Description of Artificial Sequence: Synthetic oligonucleotide
gcagcggugccauuugguu

SEQ ID NO: 950089 - RNA, 19 nt, Artificial Sequence
  Description of Artificial Sequence: Synthetic oligonucleotide
gguccuucacugccugacu

SEQ ID NO: 950090 - RNA, 19 nt, Artificial Sequence
  Description of Artificial Sequence: Synthetic oligonucleotide
guucuucgacaucccggau

SEQ ID NO: 950091 - RNA, 19 nt, Artificial Sequence
  Description of Artificial Sequence: Synthetic oligonucleotide
gggaagagugguccaguuu

SEQ ID NO: 950092 - RNA, 19 nt, Artificial Sequence
  Description of Artificial Sequence: Synthetic oligonucleotide
cuggggcgucgccgguagc

SEQ ID NO: 950093 - RNA, 19 nt, Artificial Sequence
  Description of Artificial Sequence: Synthetic oligonucleotide
ccaguuuugcaauguuaau

SEQ ID NO: 950094 - RNA, 19 nt, Artificial Sequence
  Description of Artificial Sequence: Synthetic oligonucleotide
gucgccgguagccgcugcu

SEQ ID NO: 950095 - RNA, 19 nt, Artificial Sequence
  Description of Artificial Sequence: Synthetic oligonucleotide
guaguggggcucacccacu

SEQ ID NO: 950096 - RNA, 19 nt, Artificial Sequence
  Description of Artificial Sequence: Synthetic oligonucleotide
ccggaagcgggccgacgac

SEQ ID NO: 950097 - RNA, 19 nt, Artificial Sequence
  Description of Artificial Sequence: Synthetic oligonucleotide
agcgggccgacgacaccgu

SEQ ID NO: 950098 - RNA, 19 nt, Artificial Sequence
  Description of Artificial Sequence: Synthetic oligonucleotide
cccuccgcggugccucuag

SEQ ID NO: 950099 - RNA, 19 nt, Artificial Sequence
  Description of Artificial Sequence: Synthetic oligonucleotide
caucgccgccguccuccuc

SEQ ID NO: 950100 - RNA, 19 nt, Artificial Sequence
  Description of Artificial Sequence: Synthetic oligonucleotide
ccaugauaacuggaugcua

SEQ ID NO: 950101 - RNA, 19 nt, Artificial Sequence
  Description of Artificial Sequence: Synthetic oligonucleotide
cagacuaaccaggcugauu

SEQ ID NO: 950102 - RNA, 19 nt, Artificial Sequence
  Description of Artificial Sequence: Synthetic oligonucleotide
ccuccgcggugccucuagc

SEQ ID NO: 950103 - RNA, 19 nt, Artificial Sequence
  Description of Artificial Sequence: Synthetic oligonucleotide
ccuugccgcagacaagagu

SEQ ID NO: 950104 - RNA, 19 nt, Artificial Sequence
  Description of Artificial Sequence: Synthetic oligonucleotide
cacagggcagcggugccau

SEQ ID NO: 950105 - RNA, 19 nt, Artificial Sequence
  Description of Artificial Sequence: Synthetic oligonucleotide
cgacaccguguucuucgac

SEQ ID NO: 950106 - RNA, 19 nt, Artificial Sequence
  Description of Artificial Sequence: Synthetic oligonucleotide
cguccaccuuccggaagcg

SEQ ID NO: 950107 - RNA, 19 nt, Artificial Sequence
  Description of Artificial Sequence: Synthetic oligonucleotide
gcgggccgacgacaccgug

SEQ ID NO: 950108 - RNA, 19 nt, Artificial Sequence
  Description of Artificial Sequence: Synthetic oligonucleotide
ccauuacccgaagaacacu

SEQ ID NO: 950109 - RNA, 19 nt, Artificial Sequence
  Description of Artificial Sequence: Synthetic oligonucleotide
cgccgguagccgcugcuug

SEQ ID NO: 950110 - RNA, 19 nt, Artificial Sequence
  Description of Artificial Sequence: Synthetic oligonucleotide
cggugccucuagccuuucg

SEQ ID NO: 950111 - RNA, 19 nt, Artificial Sequence
  Description of Artificial Sequence: Synthetic oligonucleotide
gcgcggcucacuucccucu

SEQ ID NO: 950112 - RNA, 19 nt, Artificial Sequence
  Description of Artificial Sequence: Synthetic oligonucleotide
ggccgacgacaccguguuc

SEQ ID NO: 950113 - RNA, 19 nt, Artificial Sequence
  Description of Artificial Sequence: Synthetic oligonucleotide
ccacguccaccuuccggaa

SEQ ID NO: 950114 - RNA, 19 nt, Artificial Sequence
  Description of Artificial Sequence: Synthetic oligonucleotide
cgguaguggggcucaccca

SEQ ID NO: 950115 - RNA, 19 nt, Artificial Sequence
  Description of Artificial Sequence: Synthetic oligonucleotide
cgacgacaccguguucuuc

SEQ ID NO: 950116 - RNA, 19 nt, Artificial Sequence
  Description of Artificial Sequence: Synthetic oligonucleotide
gcgucgccgguagccgcug

SEQ ID NO: 950117 - RNA, 19 nt, Artificial Sequence
  Description of Artificial Sequence: Synthetic oligonucleotide
cggaagcgggccgacgaca

SEQ ID NO: 950118 - RNA, 19 nt, Artificial Sequence
  Description of Artificial Sequence: Synthetic oligonucleotide
ggcgucgccgguagccgcu

SEQ ID NO: 950119 - RNA, 19 nt, Artificial Sequence
  Description of Artificial Sequence: Synthetic oligonucleotide
cccucgucgggcccggccu

SEQ ID NO: 950120 - RNA, 19 nt, Artificial Sequence
  Description of Artificial Sequence: Synthetic oligonucleotide
cgucgccgguagccgcugc

SEQ ID NO: 950121 - RNA, 19 nt, Artificial Sequence
  Description of Artificial Sequence: Synthetic oligonucleotide
gcccggcgcggcucacuuc

SEQ ID NO: 950122 - RNA, 19 nt, Artificial Sequence
  Description of Artificial Sequence: Synthetic oligonucleotide
cgggccgacgacaccgugu

SEQ ID NO: 950123 - RNA, 19 nt, Artificial Sequence
  Description of Artificial Sequence: Synthetic oligonucleotide
gcucuggggcgucgccggu

SEQ ID NO: 950124 - RNA, 19 nt, Artificial Sequence
  Description of Artificial Sequence: Synthetic oligonucleotide
ccuaccccuccagcagcaa

SEQ ID NO: 950125 - RNA, 19 nt, Artificial Sequence
  Description of Artificial Sequence: Synthetic oligonucleotide
ccgcggugccucuagccuu

SEQ ID NO: 950126 - RNA, 19 nt, Artificial Sequence
  Description of Artificial Sequence: Synthetic oligonucleotide
ccgacgacaccguguucuu

SEQ ID NO: 950127 - RNA, 19 nt, Artificial Sequence
  Description of Artificial Sequence: Synthetic oligonucleotide
cggaucgcgacgcgacgcu

SEQ ID NO: 950128 - RNA, 19 nt, Artificial Sequence
  Description of Artificial Sequence: Synthetic oligonucleotide
ccuucccuccgcggugccu

SEQ ID NO: 950129 - RNA, 19 nt, Artificial Sequence
  Description of Artificial Sequence: Synthetic oligonucleotide
cggcgcggcucacuucccu

SEQ ID NO: 950130 - RNA, 19 nt, Artificial Sequence
  Description of Artificial Sequence: Synthetic oligonucleotide
gcggugccauuugguuguu

SEQ ID NO: 950131 - RNA, 19 nt, Artificial Sequence
  Description of Artificial Sequence: Synthetic oligonucleotide
aaucauuugaaguugaucu

SEQ ID NO: 950132 - RNA, 19 nt, Artificial Sequence
  Description of Artificial Sequence: Synthetic oligonucleotide
agaaaagucguauuuacac

SEQ ID NO: 950133 - RNA, 19 nt, Artificial Sequence
  Description of Artificial Sequence: Synthetic oligonucleotide
uuuuagagaagccauacug

SEQ ID NO: 950134 - RNA, 19 nt, Artificial Sequence
  Description of Artificial Sequence: Synthetic oligonucleotide
aguagcuccacauacacgg

SEQ ID NO: 950135 - RNA, 19 nt, Artificial Sequence
  Description of Artificial Sequence: Synthetic oligonucleotide
uuugucucuagaaaagucg

SEQ ID NO: 950136 - RNA, 19 nt, Artificial Sequence
  Description of Artificial Sequence: Synthetic oligonucleotide
aacguaaacaacuucugag

SEQ ID NO: 950137 - RNA, 19 nt, Artificial Sequence
  Description of Artificial Sequence: Synthetic oligonucleotide
aacucuuuggccugcauac

SEQ ID NO: 950138 - RNA, 19 nt, Artificial Sequence
  Description of Artificial Sequence: Synthetic oligonucleotide
auaauuucaacaaagaacu

SEQ ID NO: 950139 - RNA, 19 nt, Artificial Sequence
  Description of Artificial Sequence: Synthetic oligonucleotide
aacucuacuacagaugagc

SEQ ID NO: 950140 - RNA, 19 nt, Artificial Sequence
  Description of Artificial Sequence: Synthetic oligonucleotide
uuuagagaagccauacugg

SEQ ID NO: 950141 - RNA, 19 nt, Artificial Sequence
  Description of Artificial Sequence: Synthetic oligonucleotide
uguuaagaaacucaauggc

SEQ ID NO: 950142 - RNA, 19 nt, Artificial Sequence
  Description of Artificial Sequence: Synthetic oligonucleotide
aauaacuccauucacgaau

SEQ ID NO: 950143 - RNA, 19 nt, Artificial Sequence
  Description of Artificial Sequence: Synthetic oligonucleotide
cuuauauaaaccacguugc

SEQ ID NO: 950144 - RNA, 19 nt, Artificial Sequence
  Description of Artificial Sequence: Synthetic oligonucleotide
ucguauuuacacaucaagg

SEQ ID NO: 950145 - RNA, 19 nt, Artificial Sequence
  Description of Artificial Sequence: Synthetic oligonucleotide
aaaaccuagugacauaaug

SEQ ID NO: 950146 - RNA, 19 nt, Artificial Sequence
  Description of Artificial Sequence: Synthetic oligonucleotide
aacgguauaaccucuucuc

SEQ ID NO: 950147 - RNA, 19 nt, Artificial Sequence
  Description of Artificial Sequence: Synthetic oligonucleotide
uggaauacuuauauaaacc

SEQ ID NO: 950148 - RNA, 19 nt, Artificial Sequence
  Description of Artificial Sequence: Synthetic oligonucleotide
ugucuaucuaccaaaaucu

SEQ ID NO: 950149 - RNA, 19 nt, Artificial Sequence
  Description of Artificial Sequence: Synthetic oligonucleotide
uuuuaaauguagaucucag

SEQ ID NO: 950150 - RNA, 19 nt, Artificial Sequence
  Description of Artificial Sequence: Synthetic oligonucleotide
auauuuaacucuuuggccu

SEQ ID NO: 950151 - RNA, 19 nt, Artificial Sequence
  Description of Artificial Sequence: Synthetic oligonucleotide
acugucuuaggaaauaugc

SEQ ID NO: 950152 - RNA, 19 nt, Artificial Sequence
  Description of Artificial Sequence: Synthetic oligonucleotide
uucacaauaacuccauuca

SEQ ID NO: 950153 - RNA, 19 nt, Artificial Sequence
  Description of Artificial Sequence: Synthetic oligonucleotide
aaaccuguccuugugaagg

SEQ ID NO: 950154 - RNA, 19 nt, Artificial Sequence
  Description of Artificial Sequence: Synthetic oligonucleotide
agguugauuaaguuuggcc

SEQ ID NO: 950155 - RNA, 19 nt, Artificial Sequence
  Description of Artificial Sequence: Synthetic oligonucleotide
aauucuaagucucugcuuu

SEQ ID NO: 950156 - RNA, 19 nt, Artificial Sequence
  Description of Artificial Sequence: Synthetic oligonucleotide
aaaggcaaaucccuuagga

SEQ ID NO: 950157 - RNA, 19 nt, Artificial Sequence
  Description of Artificial Sequence: Synthetic oligonucleotide
ugucuuaggaaauaugcca

SEQ ID NO: 950158 - RNA, 19 nt, Artificial Sequence
  Description of Artificial Sequence: Synthetic oligonucleotide
acuuuuaggagugagucac

SEQ ID NO: 950159 - RNA, 19 nt, Artificial Sequence
  Description of Artificial Sequence: Synthetic oligonucleotide
uguaauguggaauacuuau

SEQ ID NO: 950160 - RNA, 19 nt, Artificial Sequence
  Description of Artificial Sequence: Synthetic oligonucleotide
uaaauguagaucucagcag

SEQ ID NO: 950161 - RNA, 19 nt, Artificial Sequence
  Description of Artificial Sequence: Synthetic oligonucleotide
uuuguuucaaacuccacaa

SEQ ID NO: 950162 - RNA, 19 nt, Artificial Sequence
  Description of Artificial Sequence: Synthetic oligonucleotide
aaucgaauaugcugacugg

SEQ ID NO: 950163 - RNA, 19 nt, Artificial Sequence
  Description of Artificial Sequence: Synthetic oligonucleotide
aaucaacguaaacaacuuc

SEQ ID NO: 950164 - RNA, 19 nt, Artificial Sequence
  Description of Artificial Sequence: Synthetic oligonucleotide
uuuauuugagauauuguuu

SEQ ID NO: 950165 - RNA, 19 nt, Artificial Sequence
  Description of Artificial Sequence: Synthetic oligonucleotide
aggcaaaucccuuaggauc

SEQ ID NO: 950166 - RNA, 19 nt, Artificial Sequence
  Description of Artificial Sequence: Synthetic oligonucleotide
uugguuguuaaccuucucc

SEQ ID NO: 950167 - RNA, 19 nt, Artificial Sequence
  Description of Artificial Sequence: Synthetic oligonucleotide
guuguuaaccuucuccugg

SEQ ID NO: 950168 - RNA, 19 nt, Artificial Sequence
  Description of Artificial Sequence: Synthetic oligonucleotide
ucugacuccaauuuuauuu

SEQ ID NO: 950169 - RNA, 19 nt, Artificial Sequence
  Description of Artificial Sequence: Synthetic oligonucleotide
uuucgauuugcucucgaag

SEQ ID NO: 950170 - RNA, 19 nt, Artificial Sequence
  Description of Artificial Sequence: Synthetic oligonucleotide
uuuaaauguagaucucagc

SEQ ID NO: 950171 - RNA, 19 nt, Artificial Sequence
  Description of Artificial Sequence: Synthetic oligonucleotide
agcaaaucaacguaaacaa

SEQ ID NO: 950172 - RNA, 19 nt, Artificial Sequence
  Description of Artificial Sequence: Synthetic oligonucleotide
aguaccucugcucaugauc

SEQ ID NO: 950173 - RNA, 19 nt, Artificial Sequence
  Description of Artificial Sequence: Synthetic oligonucleotide
uccuucuagcaaaucaacg

SEQ ID NO: 950174 - RNA, 19 nt, Artificial Sequence
  Description of Artificial Sequence: Synthetic oligonucleotide
gaauugugggccuugguug

SEQ ID NO: 950175 - RNA, 19 nt, Artificial Sequence
  Description of Artificial Sequence: Synthetic oligonucleotide
uguagagcagaauucuaag

SEQ ID NO: 950176 - RNA, 19 nt, Artificial Sequence
  Description of Artificial Sequence: Synthetic oligonucleotide
acaauaacuccauucacga

SEQ ID NO: 950177 - RNA, 19 nt, Artificial Sequence
  Description of Artificial Sequence: Synthetic oligonucleotide
aucuaccaaaaucuucugc

SEQ ID NO: 950178 - RNA, 19 nt, Artificial Sequence
  Description of Artificial Sequence: Synthetic oligonucleotide
uuauauaaaccacguugcc

SEQ ID NO: 950179 - RNA, 19 nt, Artificial Sequence
  Description of Artificial Sequence: Synthetic oligonucleotide
uuuugaaccgggcauggca

SEQ ID NO: 950180 - RNA, 19 nt, Artificial Sequence
  Description of Artificial Sequence: Synthetic oligonucleotide
uuuggucucucucccaagg

SEQ ID NO: 950181 - RNA, 19 nt, Artificial Sequence
  Description of Artificial Sequence: Synthetic oligonucleotide
uucgauuugcucucgaaga

SEQ ID NO: 950182 - RNA, 19 nt, Artificial Sequence
  Description of Artificial Sequence: Synthetic oligonucleotide
uuuacuuuuaggagugagu

SEQ ID NO: 950183 - RNA, 19 nt, Artificial Sequence
  Description of Artificial Sequence: Synthetic oligonucleotide
ugaguaacauucuugggaa

SEQ ID NO: 950184 - RNA, 19 nt, Artificial Sequence
  Description of Artificial Sequence: Synthetic oligonucleotide
cucagagaaucgaauaugc

SEQ ID NO: 950185 - RNA, 19 nt, Artificial Sequence
  Description of Artificial Sequence: Synthetic oligonucleotide
aaaccuagugacauaaugu

SEQ ID NO: 950186 - RNA, 19 nt, Artificial Sequence
  Description of Artificial Sequence: Synthetic oligonucleotide
gucguauuuacacaucaag

SEQ ID NO: 950187 - RNA, 19 nt, Artificial Sequence
  Description of Artificial Sequence: Synthetic oligonucleotide
ucaacguaaacaacuucug

SEQ ID NO: 950188 - RNA, 19 nt, Artificial Sequence
  Description of Artificial Sequence: Synthetic oligonucleotide
uugcuuuggagcuucagga

SEQ ID NO: 950189 - RNA, 19 nt, Artificial Sequence
  Description of Artificial Sequence: Synthetic oligonucleotide
uuucaaucccagcugugag

SEQ ID NO: 950190 - RNA, 19 nt, Artificial Sequence
  Description of Artificial Sequence: Synthetic oligonucleotide
cuucacaauaacuccauuc

SEQ ID NO: 950191 - RNA, 19 nt, Artificial Sequence
  Description of Artificial Sequence: Synthetic oligonucleotide
ucuacuacagaugagcuuu

SEQ ID NO: 950192 - RNA, 19 nt, Artificial Sequence
  Description of Artificial Sequence: Synthetic oligonucleotide
uuaggagugagucaccuuu

SEQ ID NO: 950193 - RNA, 19 nt, Artificial Sequence
  Description of Artificial Sequence: Synthetic oligonucleotide
uuuaugucucuccuugugu

SEQ ID NO: 950194 - RNA, 19 nt, Artificial Sequence
  Description of Artificial Sequence: Synthetic oligonucleotide
aaccuagugacauaaugua

SEQ ID NO: 950195 - RNA, 19 nt, Artificial Sequence
  Description of Artificial Sequence: Synthetic oligonucleotide
aucgaauaugcugacuggc

SEQ ID NO: 950196 - RNA, 19 nt, Artificial Sequence
  Description of Artificial Sequence: Synthetic oligonucleotide
uuuuacuuuuaggagugag

SEQ ID NO: 950197 - RNA, 19 nt, Artificial Sequence
  Description of Artificial Sequence: Synthetic oligonucleotide
agagcagaauucuaagucu

SEQ ID NO: 950198 - RNA, 19 nt, Artificial Sequence
  Description of Artificial Sequence: Synthetic oligonucleotide
agcuuuggugauuaacuuc

SEQ ID NO: 950199 - RNA, 19 nt, Artificial Sequence
  Description of Artificial Sequence: Synthetic oligonucleotide
ucaggaguuuugaaccggg

SEQ ID NO: 950200 - RNA, 19 nt, Artificial Sequence
  Description of Artificial Sequence: Synthetic oligonucleotide
caguagacuuguaaugugg

SEQ ID NO: 950201 - RNA, 19 nt, Artificial Sequence
  Description of Artificial Sequence: Synthetic oligonucleotide
guugauuaaguuuggccug

SEQ ID NO: 950202 - RNA, 19 nt, Artificial Sequence
  Description of Artificial Sequence: Synthetic oligonucleotide
gcuaaugccaucuuucugc

SEQ ID NO: 950203 - RNA, 19 nt, Artificial Sequence
  Description of Artificial Sequence: Synthetic oligonucleotide
gugaguaacauucuuggga

SEQ ID NO: 950204 - RNA, 19 nt, Artificial Sequence
  Description of Artificial Sequence: Synthetic oligonucleotide
cauccauucagucuuggac

SEQ ID NO: 950205 - RNA, 19 nt, Artificial Sequence
  Description of Artificial Sequence: Synthetic oligonucleotide
gaaaagucguauuuacaca

SEQ ID NO: 950206 - RNA, 19 nt, Artificial Sequence
  Description of Artificial Sequence: Synthetic oligonucleotide
uuguuaaccuucuccuggg

SEQ ID NO: 950207 - RNA, 19 nt, Artificial Sequence
  Description of Artificial Sequence: Synthetic oligonucleotide
aaucccuuaggauccccag

SEQ ID NO: 950208 - RNA, 19 nt, Artificial Sequence
  Description of Artificial Sequence: Synthetic oligonucleotide
uuggagauuucagaagcgg

SEQ ID NO: 950209 - RNA, 19 nt, Artificial Sequence
  Description of Artificial Sequence: Synthetic oligonucleotide
cugucuuaggaaauaugcc

SEQ ID NO: 950210 - RNA, 19 nt, Artificial Sequence
  Description of Artificial Sequence: Synthetic oligonucleotide
uuaaguuuggccugucuau

SEQ ID NO: 950211 - RNA, 19 nt, Artificial Sequence
  Description of Artificial Sequence: Synthetic oligonucleotide
uugucucuagaaaagucgu

SEQ ID NO: 950212 - RNA, 19 nt, Artificial Sequence
  Description of Artificial Sequence: Synthetic oligonucleotide
uuuucaaugcucuggcuau

SEQ ID NO: 950213 - RNA, 19 nt, Artificial Sequence
  Description of Artificial Sequence: Synthetic oligonucleotide
aguaucuccuucuagcaaa

SEQ ID NO: 950214 - RNA, 19 nt, Artificial Sequence
  Description of Artificial Sequence: Synthetic oligonucleotide
acguaaacaacuucugaga

SEQ ID NO: 950215 - RNA, 19 nt, Artificial Sequence
  Description of Artificial Sequence: Synthetic oligonucleotide
ucaguaucuccuucuagca

SEQ ID NO: 950216 - RNA, 19 nt, Artificial Sequence
  Description of Artificial Sequence: Synthetic oligonucleotide
ugcucuaacuucagguaag

SEQ ID NO: 950217 - RNA, 19 nt, Artificial Sequence
  Description of Artificial Sequence: Synthetic oligonucleotide
cuaaguccaacucuacuac

SEQ ID NO: 950218 - RNA, 19 nt, Artificial Sequence
  Description of Artificial Sequence: Synthetic oligonucleotide
aauugugggccuugguugu

SEQ ID NO: 950219 - RNA, 19 nt, Artificial Sequence
  Description of Artificial Sequence: Synthetic oligonucleotide
ccauauuuaacucuuuggc

SEQ ID NO: 950220 - RNA, 19 nt, Artificial Sequence
  Description of Artificial Sequence: Synthetic oligonucleotide
aucaacguaaacaacuucu

SEQ ID NO: 950221 - RNA, 19 nt, Artificial Sequence
  Description of Artificial Sequence: Synthetic oligonucleotide
uucuagaacacuccagcaa

SEQ ID NO: 950222 - RNA, 19 nt, Artificial Sequence
  Description of Artificial Sequence: Synthetic oligonucleotide
gugauuaacuucuccgugc

SEQ ID NO: 950223 - RNA, 19 nt, Artificial Sequence
  Description of Artificial Sequence: Synthetic oligonucleotide
aagcggcuuggcuaaugcc

SEQ ID NO: 950224 - RNA, 19 nt, Artificial Sequence
  Description of Artificial Sequence: Synthetic oligonucleotide
agugcggccaaaauauccc

SEQ ID NO: 950225 - RNA, 19 nt, Artificial Sequence
  Description of Artificial Sequence: Synthetic oligonucleotide
uuugcagguugcuuuggag

SEQ ID NO: 950226 - RNA, 19 nt, Artificial Sequence
  Description of Artificial Sequence: Synthetic oligonucleotide
uucuagcaaaucaacguaa

SEQ ID NO: 950227 - RNA, 19 nt, Artificial Sequence
  Description of Artificial Sequence: Synthetic oligonucleotide
aaggcaaaucccuuaggau

SEQ ID NO: 950228 - RNA, 19 nt, Artificial Sequence
  Description of Artificial Sequence: Synthetic oligonucleotide
gauucuggucccuucuaag

SEQ ID NO: 950229 - RNA, 19 nt, Artificial Sequence
  Description of Artificial Sequence: Synthetic oligonucleotide
aucauuugaaguugaucug

SEQ ID NO: 950230 - RNA, 19 nt, Artificial Sequence
  Description of Artificial Sequence: Synthetic oligonucleotide
uuguugaaagacaccagaa

SEQ ID NO: 950231 - RNA, 19 nt, Artificial Sequence
  Description of Artificial Sequence: Synthetic oligonucleotide
caaaucaacguaaacaacu

SEQ ID NO: 950232 - RNA, 19 nt, Artificial Sequence
  Description of Artificial Sequence: Synthetic oligonucleotide
aagggaacccaaagggagc

SEQ ID NO: 950233 - RNA, 19 nt, Artificial Sequence
  Description of Artificial Sequence: Synthetic oligonucleotide
uacucagagaaucgaauau

SEQ ID NO: 950234 - RNA, 19 nt, Artificial Sequence
  Description of Artificial Sequence: Synthetic oligonucleotide
acaucaaggaacaaaggcu

SEQ ID NO: 950235 - RNA, 19 nt, Artificial Sequence
  Description of Artificial Sequence: Synthetic oligonucleotide
auuaaguuuggccugucua

SEQ ID NO: 950236 - RNA, 19 nt, Artificial Sequence
  Description of Artificial Sequence: Synthetic oligonucleotide
ugagagugcggccaaaaua

SEQ ID NO: 950237 - RNA, 19 nt, Artificial Sequence
  Description of Artificial Sequence: Synthetic oligonucleotide
uucaagacacauuuauuua

SEQ ID NO: 950238 - RNA, 19 nt, Artificial Sequence
  Description of Artificial Sequence: Synthetic oligonucleotide
cucaaucauacucagagaa

SEQ ID NO: 950239 - RNA, 19 nt, Artificial Sequence
  Description of Artificial Sequence: Synthetic oligonucleotide
cagaauucuaagucucugc

SEQ ID NO: 950240 - RNA, 19 nt, Artificial Sequence
  Description of Artificial Sequence: Synthetic oligonucleotide
auacacggugcguuccucc

SEQ ID NO: 950241 - RNA, 19 nt, Artificial Sequence
  Description of Artificial Sequence: Synthetic oligonucleotide
aggaccucgagguuccaac

SEQ ID NO: 950242 - RNA, 19 nt, Artificial Sequence
  Description of Artificial Sequence: Synthetic oligonucleotide
uguacagucgguuuccauu

SEQ ID NO: 950243 - RNA, 19 nt, Artificial Sequence
  Description of Artificial Sequence: Synthetic oligonucleotide
uucagaagcggcuuggcua

SEQ ID NO: 950244 - RNA, 19 nt, Artificial Sequence
  Description of Artificial Sequence: Synthetic oligonucleotide
ucgagguuccaacagugcu

SEQ ID NO: 950245 - RNA, 19 nt, Artificial Sequence
  Description of Artificial Sequence: Synthetic oligonucleotide
gauuucagaagcggcuugg

SEQ ID NO: 950246 - RNA, 19 nt, Artificial Sequence
  Description of Artificial Sequence: Synthetic oligonucleotide
guauuuacacaucaaggaa

SEQ ID NO: 950247 - RNA, 19 nt, Artificial Sequence
  Description of Artificial Sequence: Synthetic oligonucleotide
agucugugcauucauuacu

SEQ ID NO: 950248 - RNA, 19 nt, Artificial Sequence
  Description of Artificial Sequence: Synthetic oligonucleotide
uccuuggagauuucagaag

SEQ ID NO: 950249 - RNA, 19 nt, Artificial Sequence
  Description of Artificial Sequence: Synthetic oligonucleotide
ucagagaaucgaauaugcu

SEQ ID NO: 950250 - RNA, 19 nt, Artificial Sequence
  Description of Artificial Sequence: Synthetic oligonucleotide
ucgaauaugcugacuggcu

SEQ ID NO: 950251 - RNA, 19 nt, Artificial Sequence
  Description of Artificial Sequence: Synthetic oligonucleotide
aaauacucuuucaauccca

SEQ ID NO: 950252 - RNA, 19 nt, Artificial Sequence
  Description of Artificial Sequence: Synthetic oligonucleotide
ucuagaaaagucguauuua

SEQ ID NO: 950253 - RNA, 19 nt, Artificial Sequence
  Description of Artificial Sequence: Synthetic oligonucleotide
cuuguugagucuuggccag

SEQ ID NO: 950254 - RNA, 19 nt, Artificial Sequence
  Description of Artificial Sequence: Synthetic oligonucleotide
uggugauuaacuucuccgu

SEQ ID NO: 950255 - RNA, 19 nt, Artificial Sequence
  Description of Artificial Sequence: Synthetic oligonucleotide
uauuugucucuagaaaagu

SEQ ID NO: 950256 - RNA, 19 nt, Artificial Sequence
  Description of Artificial Sequence: Synthetic oligonucleotide
auaauguauuugucucuag

SEQ ID NO: 950257 - RNA, 19 nt, Artificial Sequence
  Description of Artificial Sequence: Synthetic oligonucleotide
gucuuaggaaauaugccag

SEQ ID NO: 950258 - RNA, 19 nt, Artificial Sequence
  Description of Artificial Sequence: Synthetic oligonucleotide
ugggccuugguuguuaacc

SEQ ID NO: 950259 - RNA, 19 nt, Artificial Sequence
  Description of Artificial Sequence: Synthetic oligonucleotide
cucucaacgguauaaccuc

SEQ ID NO: 950260 - RNA, 19 nt, Artificial Sequence
  Description of Artificial Sequence: Synthetic oligonucleotide
uagacuuguaauguggaau

SEQ ID NO: 950261 - RNA, 19 nt, Artificial Sequence
  Description of Artificial Sequence: Synthetic oligonucleotide
aaauaucccugacuuguuu

SEQ ID NO: 950262 - RNA, 19 nt, Artificial Sequence
  Description of Artificial Sequence: Synthetic oligonucleotide
auucuagaacacuccagca

SEQ ID NO: 950263 - RNA, 19 nt, Artificial Sequence
  Description of Artificial Sequence: Synthetic oligonucleotide
acuacagaugagcuuuuca

SEQ ID NO: 950264 - RNA, 19 nt, Artificial Sequence
  Description of Artificial Sequence: Synthetic oligonucleotide
uacuuuuaggagugaguca

SEQ ID NO: 950265 - RNA, 19 nt, Artificial Sequence
  Description of Artificial Sequence: Synthetic oligonucleotide
cucagcagaacaauccauc

SEQ ID NO: 950266 - RNA, 19 nt, Artificial Sequence
  Description of Artificial Sequence: Synthetic oligonucleotide
cauucacgaauugugggcc

SEQ ID NO: 950267 - RNA, 19 nt, Artificial Sequence
  Description of Artificial Sequence: Synthetic oligonucleotide
aauaugcugacuggcuugu

SEQ ID NO: 950268 - RNA, 19 nt, Artificial Sequence
  Description of Artificial Sequence: Synthetic oligonucleotide
aggaguuuugaaccgggca

SEQ ID NO: 950269 - RNA, 19 nt, Artificial Sequence
  Description of Artificial Sequence: Synthetic oligonucleotide
cuagcaaaucaacguaaac

SEQ ID NO: 950270 - RNA, 19 nt, Artificial Sequence
  Description of Artificial Sequence: Synthetic oligonucleotide
aaaucaacguaaacaacuu

SEQ ID NO: 950271 - RNA, 19 nt, Artificial Sequence
  Description of Artificial Sequence: Synthetic oligonucleotide
caccagaagagagaugucc

SEQ ID NO: 950272 - RNA, 19 nt, Artificial Sequence
  Description of Artificial Sequence: Synthetic oligonucleotide
aaccucuucucccauuuua

SEQ ID NO: 950273 - RNA, 19 nt, Artificial Sequence
  Description of Artificial Sequence: Synthetic oligonucleotide
auacucagagaaucgaaua

SEQ ID NO: 950274 - RNA, 19 nt, Artificial Sequence
  Description of Artificial Sequence: Synthetic oligonucleotide
gaacacuccagcaagggaa

SEQ ID NO: 950275 - RNA, 19 nt, Artificial Sequence
  Description of Artificial Sequence: Synthetic oligonucleotide
ucgauuugcucucgaagaa

SEQ ID NO: 950276 - RNA, 19 nt, Artificial Sequence
  Description of Artificial Sequence: Synthetic oligonucleotide
uuguagugccaaauacucu

SEQ ID NO: 950277 - RNA, 19 nt, Artificial Sequence
  Description of Artificial Sequence: Synthetic oligonucleotide
uuaggaaauaugccagguu

SEQ ID NO: 950278 - RNA, 19 nt, Artificial Sequence
  Description of Artificial Sequence: Synthetic oligonucleotide
cauuacugccugagcaucc

SEQ ID NO: 950279 - RNA, 19 nt, Artificial Sequence
  Description of Artificial Sequence: Synthetic oligonucleotide
uaaguccaacucuacuaca

SEQ ID NO: 950280 - RNA, 19 nt, Artificial Sequence
  Description of Artificial Sequence: Synthetic oligonucleotide
cacucucaacgguauaacc

SEQ ID NO: 950281 - RNA, 19 nt, Artificial Sequence
  Description of Artificial Sequence: Synthetic oligonucleotide
cuacagaugagcuuuucaa

SEQ ID NO: 950282 - RNA, 19 nt, Artificial Sequence
  Description of Artificial Sequence: Synthetic oligonucleotide
gguugauuaaguuuggccu

SEQ ID NO: 950283 - RNA, 19 nt, Artificial Sequence
  Description of Artificial Sequence: Synthetic oligonucleotide
uguccuccauauuuaacuc

SEQ ID NO: 950284 - RNA, 19 nt, Artificial Sequence
  Description of Artificial Sequence: Synthetic oligonucleotide
uugggaaguagcuccacau

SEQ ID NO: 950285 - RNA, 19 nt, Artificial Sequence
  Description of Artificial Sequence: Synthetic oligonucleotide
uuuucgauuugcucucgaa

SEQ ID NO: 950286 - RNA, 19 nt, Artificial Sequence
  Description of Artificial Sequence: Synthetic oligonucleotide
acucucaacgguauaaccu

SEQ ID NO: 950287 - RNA, 19 nt, Artificial Sequence
  Description of Artificial Sequence: Synthetic oligonucleotide
auguagaucucagcagaac

SEQ ID NO: 950288 - RNA, 19 nt, Artificial Sequence
  Description of Artificial Sequence: Synthetic oligonucleotide
uuguaauguggaauacuua

SEQ ID NO: 950289 - RNA, 19 nt, Artificial Sequence
  Description of Artificial Sequence: Synthetic oligonucleotide
ucccuuaggauccccagua

SEQ ID NO: 950290 - RNA, 19 nt, Artificial Sequence
  Description of Artificial Sequence: Synthetic oligonucleotide
gagugcggccaaaauaucc

SEQ ID NO: 950291 - RNA, 19 nt, Artificial Sequence
  Description of Artificial Sequence: Synthetic oligonucleotide
ucucaacgguauaaccucu

SEQ ID NO: 950292 - RNA, 19 nt, Artificial Sequence
  Description of Artificial Sequence: Synthetic oligonucleotide
uugagucuuggccagucua

SEQ ID NO: 950293 - RNA, 19 nt, Artificial Sequence
  Description of Artificial Sequence: Synthetic oligonucleotide
ucaacgguauaaccucuuc

SEQ ID NO: 950294 - RNA, 19 nt, Artificial Sequence
  Description of Artificial Sequence: Synthetic oligonucleotide
ugacuccaauuuuauuuga

SEQ ID NO: 950295 - RNA, 19 nt, Artificial Sequence
  Description of Artificial Sequence: Synthetic oligonucleotide
ggugauuaacuucuccgug

SEQ ID NO: 950296 - RNA, 19 nt, Artificial Sequence
  Description of Artificial Sequence: Synthetic oligonucleotide
gaguaacauucuugggaag

SEQ ID NO: 950297 - RNA, 19 nt, Artificial Sequence
  Description of Artificial Sequence: Synthetic oligonucleotide
agucuuggacagcacucuc

SEQ ID NO: 950298 - RNA, 19 nt, Artificial Sequence
  Description of Artificial Sequence: Synthetic oligonucleotide
gaagggauggguuuguuuu

SEQ ID NO: 950299 - RNA, 19 nt, Artificial Sequence
  Description of Artificial Sequence: Synthetic oligonucleotide
uccccaguagacuuguaau

SEQ ID NO: 950300 - RNA, 19 nt, Artificial Sequence
  Description of Artificial Sequence: Synthetic oligonucleotide
uuaggauccccaguagacu

SEQ ID NO: 950301 - RNA, 19 nt, Artificial Sequence
  Description of Artificial Sequence: Synthetic oligonucleotide
gagaaucgaauaugcugac

SEQ ID NO: 950302 - RNA, 19 nt, Artificial Sequence
  Description of Artificial Sequence: Synthetic oligonucleotide
gaccucgagguuccaacag

SEQ ID NO: 950303 - RNA, 19 nt, Artificial Sequence
  Description of Artificial Sequence: Synthetic oligonucleotide
caaaauaucccugacuugu

SEQ ID NO: 950304 - RNA, 19 nt, Artificial Sequence
  Description of Artificial Sequence: Synthetic oligonucleotide
acuuguaauguggaauacu

SEQ ID NO: 950305 - RNA, 19 nt, Artificial Sequence
  Description of Artificial Sequence: Synthetic oligonucleotide
ccacauuucccaaauacuc

SEQ ID NO: 950306 - RNA, 19 nt, Artificial Sequence
  Description of Artificial Sequence: Synthetic oligonucleotide
acaauccaucacacggucc

SEQ ID NO: 950307 - RNA, 19 nt, Artificial Sequence
  Description of Artificial Sequence: Synthetic oligonucleotide
uggcuaaugccaucuuucu

SEQ ID NO: 950308 - RNA, 19 nt, Artificial Sequence
  Description of Artificial Sequence: Synthetic oligonucleotide
aaaccacguugccacauuu

SEQ ID NO: 950309 - RNA, 19 nt, Artificial Sequence
  Description of Artificial Sequence: Synthetic oligonucleotide
cacguugccacauuuccca

SEQ ID NO: 950310 - RNA, 19 nt, Artificial Sequence
  Description of Artificial Sequence: Synthetic oligonucleotide
agucgguuuccauuucuga

SEQ ID NO: 950311 - RNA, 19 nt, Artificial Sequence
  Description of Artificial Sequence: Synthetic oligonucleotide
ugcauacugucuuccuucu

SEQ ID NO: 950312 - RNA, 19 nt, Artificial Sequence
  Description of Artificial Sequence: Synthetic oligonucleotide
aaccacguugccacauuuc

SEQ ID NO: 950313 - RNA, 19 nt, Artificial Sequence
  Description of Artificial Sequence: Synthetic oligonucleotide
auuucugacuccaauuuua

SEQ ID NO: 950314 - RNA, 19 nt, Artificial Sequence
  Description of Artificial Sequence: Synthetic oligonucleotide
ucuggcuauuagcuuccca

SEQ ID NO: 950315 - RNA, 19 nt, Artificial Sequence
  Description of Artificial Sequence: Synthetic oligonucleotide
cacugucuuaggaaauaug

SEQ ID NO: 950316 - RNA, 19 nt, Artificial Sequence
  Description of Artificial Sequence: Synthetic oligonucleotide
cuucuaaguccaacucuac

SEQ ID NO: 950317 - RNA, 19 nt, Artificial Sequence
  Description of Artificial Sequence: Synthetic oligonucleotide
guaccucugcucaugauca

SEQ ID NO: 950318 - RNA, 19 nt, Artificial Sequence
  Description of Artificial Sequence: Synthetic oligonucleotide
cacgguccuagcauucuag

SEQ ID NO: 950319 - RNA, 19 nt, Artificial Sequence
  Description of Artificial Sequence: Synthetic oligonucleotide
acacccaugccgcuugugu

SEQ ID NO: 950320 - RNA, 19 nt, Artificial Sequence
  Description of Artificial Sequence: Synthetic oligonucleotide
ccauucacgaauugugggc

SEQ ID NO: 950321 - RNA, 19 nt, Artificial Sequence
  Description of Artificial Sequence: Synthetic oligonucleotide
cuuguaauguggaauacuu

SEQ ID NO: 950322 - RNA, 19 nt, Artificial Sequence
  Description of Artificial Sequence: Synthetic oligonucleotide
cucgagguuccaacagugc

SEQ ID NO: 950323 - RNA, 19 nt, Artificial Sequence
  Description of Artificial Sequence: Synthetic oligonucleotide
uaacuccauucacgaauug

SEQ ID NO: 950324 - RNA, 19 nt, Artificial Sequence
  Description of Artificial Sequence: Synthetic oligonucleotide
cauucagucuuggacagca

SEQ ID NO: 950325 - RNA, 19 nt, Artificial Sequence
  Description of Artificial Sequence: Synthetic oligonucleotide
cguauuuacacaucaagga

SEQ ID NO: 950326 - RNA, 19 nt, Artificial Sequence
  Description of Artificial Sequence: Synthetic oligonucleotide
gagagugcggccaaaauau

SEQ ID NO: 950327 - RNA, 19 nt, Artificial Sequence
  Description of Artificial Sequence: Synthetic oligonucleotide
cuucuagcaaaucaacgua

SEQ ID NO: 950328 - RNA, 19 nt, Artificial Sequence
  Description of Artificial Sequence: Synthetic oligonucleotide
aaaucccuuaggaucccca

SEQ ID NO: 950329 - RNA, 19 nt, Artificial Sequence
  Description of Artificial Sequence: Synthetic oligonucleotide
gcuuguugagucuuggcca

SEQ ID NO: 950330 - RNA, 19 nt, Artificial Sequence
  Description of Artificial Sequence: Synthetic oligonucleotide
ugggaaguagcuccacaua

SEQ ID NO: 950331 - RNA, 19 nt, Artificial Sequence
  Description of Artificial Sequence: Synthetic oligonucleotide
auccccaguagacuuguaa

SEQ ID NO: 950332 - RNA, 19 nt, Artificial Sequence
  Description of Artificial Sequence: Synthetic oligonucleotide
cuucuuggcuuuuggccug

SEQ ID NO: 950333 - RNA, 19 nt, Artificial Sequence
  Description of Artificial Sequence: Synthetic oligonucleotide
caacguaaacaacuucuga

SEQ ID NO: 950334 - RNA, 19 nt, Artificial Sequence
  Description of Artificial Sequence: Synthetic oligonucleotide
gagguugauuaaguuuggc

SEQ ID NO: 950335 - RNA, 19 nt, Artificial Sequence
  Description of Artificial Sequence: Synthetic oligonucleotide
uggccugucuaucuaccaa

SEQ ID NO: 950336 - RNA, 19 nt, Artificial Sequence
  Description of Artificial Sequence: Synthetic oligonucleotide
caucccgaaccagaagucc

SEQ ID NO: 950337 - RNA, 19 nt, Artificial Sequence
  Description of Artificial Sequence: Synthetic oligonucleotide
uccaucacacgguccuagc

SEQ ID NO: 950338 - RNA, 19 nt, Artificial Sequence
  Description of Artificial Sequence: Synthetic oligonucleotide
uucuccggauucugguccc

SEQ ID NO: 950339 - RNA, 19 nt, Artificial Sequence
  Description of Artificial Sequence: Synthetic oligonucleotide
auucacgaauugugggccu

SEQ ID NO: 950340 - RNA, 19 nt, Artificial Sequence
  Description of Artificial Sequence: Synthetic oligonucleotide
gguuguuaaccuucuccug

SEQ ID NO: 950341 - RNA, 19 nt, Artificial Sequence
  Description of Artificial Sequence: Synthetic oligonucleotide
ccaacucuacuacagauga

SEQ ID NO: 950342 - RNA, 19 nt, Artificial Sequence
  Description of Artificial Sequence: Synthetic oligonucleotide
caacucuacuacagaugag

SEQ ID NO: 950343 - RNA, 19 nt, Artificial Sequence
  Description of Artificial Sequence: Synthetic oligonucleotide
acucuacuacagaugagcu

SEQ ID NO: 950344 - RNA, 19 nt, Artificial Sequence
  Description of Artificial Sequence: Synthetic oligonucleotide
caggaguuuugaaccgggc

SEQ ID NO: 950345 - RNA, 19 nt, Artificial Sequence
  Description of Artificial Sequence: Synthetic oligonucleotide
cuuucaaucccagcuguga

SEQ ID NO: 950346 - RNA, 19 nt, Artificial Sequence
  Description of Artificial Sequence: Synthetic oligonucleotide
uucucccauuuuaugucuc

SEQ ID NO: 950347 - RNA, 19 nt, Artificial Sequence
  Description of Artificial Sequence: Synthetic oligonucleotide
accucgagguuccaacagu

SEQ ID NO: 950348 - RNA, 19 nt, Artificial Sequence
  Description of Artificial Sequence: Synthetic oligonucleotide
uacacggugcguuccuccu

SEQ ID NO: 950349 - RNA, 19 nt, Artificial Sequence
  Description of Artificial Sequence: Synthetic oligonucleotide
guagagcagaauucuaagu

SEQ ID NO: 950350 - RNA, 19 nt, Artificial Sequence
  Description of Artificial Sequence: Synthetic oligonucleotide
agcuacucuuaaggaaggg

SEQ ID NO: 950351 - RNA, 19 nt, Artificial Sequence
  Description of Artificial Sequence: Synthetic oligonucleotide
uuuaacucuuuggccugca

SEQ ID NO: 950352 - RNA, 19 nt, Artificial Sequence
  Description of Artificial Sequence: Synthetic oligonucleotide
uaaaccacguugccacauu

SEQ ID NO: 950353 - RNA, 19 nt, Artificial Sequence
  Description of Artificial Sequence: Synthetic oligonucleotide
acauacacggugcguuccu

SEQ ID NO: 950354 - RNA, 19 nt, Artificial Sequence
  Description of Artificial Sequence: Synthetic oligonucleotide
cagucgguuuccauuucug

SEQ ID NO: 950355 - RNA, 19 nt, Artificial Sequence
  Description of Artificial Sequence: Synthetic oligonucleotide
guagacuuguaauguggaa

SEQ ID NO: 950356 - RNA, 19 nt, Artificial Sequence
  Description of Artificial Sequence: Synthetic oligonucleotide
uuuaggagugagucaccuu

SEQ ID NO: 950357 - RNA, 19 nt, Artificial Sequence
  Description of Artificial Sequence: Synthetic oligonucleotide
uagugccaaauacucuuuu

SEQ ID NO: 950358 - RNA, 19 nt, Artificial Sequence
  Description of Artificial Sequence: Synthetic oligonucleotide
uugugaagguuugcauccc

SEQ ID NO: 950359 - RNA, 19 nt, Artificial Sequence
  Description of Artificial Sequence: Synthetic oligonucleotide
ccguccuucucaaucauac

SEQ ID NO: 950360 - RNA, 19 nt, Artificial Sequence
  Description of Artificial Sequence: Synthetic oligonucleotide
auaacuccauucacgaauu

SEQ ID NO: 950361 - RNA, 19 nt, Artificial Sequence
  Description of Artificial Sequence: Synthetic oligonucleotide
aucccuuaggauccccagu

SEQ ID NO: 950362 - RNA, 19 nt, Artificial Sequence
  Description of Artificial Sequence: Synthetic oligonucleotide
cauaauguauuugucucua

SEQ ID NO: 950363 - RNA, 19 nt, Artificial Sequence
  Description of Artificial Sequence: Synthetic oligonucleotide
uguugagucuuggccaguc

SEQ ID NO: 950364 - RNA, 19 nt, Artificial Sequence
  Description of Artificial Sequence: Synthetic oligonucleotide
agaaucgaauaugcugacu

SEQ ID NO: 950365 - RNA, 19 nt, Artificial Sequence
  Description of Artificial Sequence: Synthetic oligonucleotide
gcauucauuacugccugag

SEQ ID NO: 950366 - RNA, 19 nt, Artificial Sequence
  Description of Artificial Sequence: Synthetic oligonucleotide
augccagguuuucuuggug

SEQ ID NO: 950367 - RNA, 19 nt, Artificial Sequence
  Description of Artificial Sequence: Synthetic oligonucleotide
auccaucacacgguccuag

SEQ ID NO: 950368 - RNA, 19 nt, Artificial Sequence
  Description of Artificial Sequence: Synthetic oligonucleotide
acgguccuagcauucuaga

SEQ ID NO: 950369 - RNA, 19 nt, Artificial Sequence
  Description of Artificial Sequence: Synthetic oligonucleotide
ugcucaugaucuucacaau

SEQ ID NO: 950370 - RNA, 19 nt, Artificial Sequence
  Description of Artificial Sequence: Synthetic oligonucleotide
cauacucagagaaucgaau

SEQ ID NO: 950371 - RNA, 19 nt, Artificial Sequence
  Description of Artificial Sequence: Synthetic oligonucleotide
uuuucccgagguugauuaa

SEQ ID NO: 950372 - RNA, 19 nt, Artificial Sequence
  Description of Artificial Sequence: Synthetic oligonucleotide
acacggugcguuccuccuc

SEQ ID NO: 950373 - RNA, 19 nt, Artificial Sequence
  Description of Artificial Sequence: Synthetic oligonucleotide
uucaaugcucuggcuauua

SEQ ID NO: 950374 - RNA, 19 nt, Artificial Sequence
  Description of Artificial Sequence: Synthetic oligonucleotide
agggaacccaaagggagcu

SEQ ID NO: 950375 - RNA, 19 nt, Artificial Sequence
  Description of Artificial Sequence: Synthetic oligonucleotide
acuuguuuccugccaggua

SEQ ID NO: 950376 - RNA, 19 nt, Artificial Sequence
  Description of Artificial Sequence: Synthetic oligonucleotide
ggucucuugccuuuacaca

SEQ ID NO: 950377 - RNA, 19 nt, Artificial Sequence
  Description of Artificial Sequence: Synthetic oligonucleotide
uucuuggcuuuuggccugg

SEQ ID NO: 950378 - RNA, 19 nt, Artificial Sequence
  Description of Artificial Sequence: Synthetic oligonucleotide
ggcuaaugccaucuuucug

SEQ ID NO: 950379 - RNA, 19 nt, Artificial Sequence
  Description of Artificial Sequence: Synthetic oligonucleotide
ucacgaauugugggccuug

SEQ ID NO: 950380 - RNA, 19 nt, Artificial Sequence
  Description of Artificial Sequence: Synthetic oligonucleotide
aaagggagcugccguccuu

SEQ ID NO: 950381 - RNA, 19 nt, Artificial Sequence
  Description of Artificial Sequence: Synthetic oligonucleotide
cucuaacuucagguaagac

SEQ ID NO: 950382 - RNA, 19 nt, Artificial Sequence
  Description of Artificial Sequence: Synthetic oligonucleotide
guggguuguuaagaaacuc

SEQ ID NO: 950383 - RNA, 19 nt, Artificial Sequence
  Description of Artificial Sequence: Synthetic oligonucleotide
cgguauaaccucuucuccc

SEQ ID NO: 950384 - RNA, 19 nt, Artificial Sequence
  Description of Artificial Sequence: Synthetic oligonucleotide
ugaaccgggcauggcauuc

SEQ ID NO: 950385 - RNA, 19 nt, Artificial Sequence
  Description of Artificial Sequence: Synthetic oligonucleotide
accuagugacauaauguau

SEQ ID NO: 950386 - RNA, 19 nt, Artificial Sequence
  Description of Artificial Sequence: Synthetic oligonucleotide
cacgaauugugggccuugg

SEQ ID NO: 950387 - RNA, 19 nt, Artificial Sequence
  Description of Artificial Sequence: Synthetic oligonucleotide
cacccaugccgcuuguguc

SEQ ID NO: 950388 - RNA, 19 nt, Artificial Sequence
  Description of Artificial Sequence: Synthetic oligonucleotide
acgaauugugggccuuggu

SEQ ID NO: 950389 - RNA, 19 nt, Artificial Sequence
  Description of Artificial Sequence: Synthetic oligonucleotide
cuauuagcuucccaucugu

SEQ ID NO: 950390 - RNA, 19 nt, Artificial Sequence
  Description of Artificial Sequence: Synthetic oligonucleotide
ccaguagacuuguaaugug

SEQ ID NO: 950391 - RNA, 19 nt, Artificial Sequence
  Description of Artificial Sequence: Synthetic oligonucleotide
agagugcggccaaaauauc

SEQ ID NO: 950392 - RNA, 19 nt, Artificial Sequence
  Description of Artificial Sequence: Synthetic oligonucleotide
uccggauucuggucccuuc

SEQ ID NO: 950393 - RNA, 19 nt, Artificial Sequence
  Description of Artificial Sequence: Synthetic oligonucleotide
gucucuagaaaagucguau

SEQ ID NO: 950394 - RNA, 19 nt, Artificial Sequence
  Description of Artificial Sequence: Synthetic oligonucleotide
aucccgaaccagaagucca

SEQ ID NO: 950395 - RNA, 19 nt, Artificial Sequence
  Description of Artificial Sequence: Synthetic oligonucleotide
ugugggccuugguuguuaa

SEQ ID NO: 950396 - RNA, 19 nt, Artificial Sequence
  Description of Artificial Sequence: Synthetic oligonucleotide
ucuccgugccucuuuucuu

SEQ ID NO: 950397 - RNA, 19 nt, Artificial Sequence
  Description of Artificial Sequence: Synthetic oligonucleotide
acagacggcucagucuucu

SEQ ID NO: 950398 - RNA, 19 nt, Artificial Sequence
  Description of Artificial Sequence: Synthetic oligonucleotide
ccagucuaaucuucucagc

SEQ ID NO: 950399 - RNA, 19 nt, Artificial Sequence
  Description of Artificial Sequence: Synthetic oligonucleotide
gcaaaucaacguaaacaac

SEQ ID NO: 950400 - RNA, 19 nt, Artificial Sequence
  Description of Artificial Sequence: Synthetic oligonucleotide
ccccaguagacuuguaaug

SEQ ID NO: 950401 - RNA, 19 nt, Artificial Sequence
  Description of Artificial Sequence: Synthetic oligonucleotide
ggaguuuugaaccgggcau

SEQ ID NO: 950402 - RNA, 19 nt, Artificial Sequence
  Description of Artificial Sequence: Synthetic oligonucleotide
cuuaggaaauaugccaggu

SEQ ID NO: 950403 - RNA, 19 nt, Artificial Sequence
  Description of Artificial Sequence: Synthetic oligonucleotide
caauaacuccauucacgaa

SEQ ID NO: 950404 - RNA, 19 nt, Artificial Sequence
  Description of Artificial Sequence: Synthetic oligonucleotide
ggccagucuaaucuucuca

SEQ ID NO: 950405 - RNA, 19 nt, Artificial Sequence
  Description of Artificial Sequence: Synthetic oligonucleotide
ccuucuagcaaaucaacgu

SEQ ID NO: 950406 - RNA, 19 nt, Artificial Sequence
  Description of Artificial Sequence: Synthetic oligonucleotide
ucccgagguugauuaaguu

SEQ ID NO: 950407 - RNA, 19 nt, Artificial Sequence
  Description of Artificial Sequence: Synthetic oligonucleotide
uacuacagaugagcuuuuc

SEQ ID NO: 950408 - RNA, 19 nt, Artificial Sequence
  Description of Artificial Sequence: Synthetic oligonucleotide
guacagucgguuuccauuu

SEQ ID NO: 950409 - RNA, 19 nt, Artificial Sequence
  Description of Artificial Sequence: Synthetic oligonucleotide
ccucgagguuccaacagug

SEQ ID NO: 950410 - RNA, 19 nt, Artificial Sequence
  Description of Artificial Sequence: Synthetic oligonucleotide
agaagcggcuuggcuaaug

SEQ ID NO: 950411 - RNA, 19 nt, Artificial Sequence
  Description of Artificial Sequence: Synthetic oligonucleotide
acaccagaagagagauguc

SEQ ID NO: 950412 - RNA, 19 nt, Artificial Sequence
  Description of Artificial Sequence: Synthetic oligonucleotide
uaccucugcucaugaucac

SEQ ID NO: 950413 - RNA, 19 nt, Artificial Sequence
  Description of Artificial Sequence: Synthetic oligonucleotide
cucuguagagcagaauucu

SEQ ID NO: 950414 - RNA, 19 nt, Artificial Sequence
  Description of Artificial Sequence: Synthetic oligonucleotide
gcaguccuuggucucuugc

SEQ ID NO: 950415 - RNA, 19 nt, Artificial Sequence
  Description of Artificial Sequence: Synthetic oligonucleotide
ucccaucuguggucaauuu

SEQ ID NO: 950416 - RNA, 19 nt, Artificial Sequence
  Description of Artificial Sequence: Synthetic oligonucleotide
caacgguauaaccucuucu

SEQ ID NO: 950417 - RNA, 19 nt, Artificial Sequence
  Description of Artificial Sequence: Synthetic oligonucleotide
gugaagguuugcaucccga

SEQ ID NO: 950418 - RNA, 19 nt, Artificial Sequence
  Description of Artificial Sequence: Synthetic oligonucleotide
ccuucuaaguccaacucua

SEQ ID NO: 950419 - RNA, 19 nt, Artificial Sequence
  Description of Artificial Sequence: Synthetic oligonucleotide
ggagauuucagaagcggcu

SEQ ID NO: 950420 - RNA, 19 nt, Artificial Sequence
  Description of Artificial Sequence: Synthetic oligonucleotide
aaggaccucgagguuccaa

SEQ ID NO: 950421 - RNA, 19 nt, Artificial Sequence
  Description of Artificial Sequence: Synthetic oligonucleotide
gcacuguacagucgguuuc

SEQ ID NO: 950422 - RNA, 19 nt, Artificial Sequence
  Description of Artificial Sequence: Synthetic oligonucleotide
uugaaccgggcauggcauu

SEQ ID NO: 950423 - RNA, 19 nt, Artificial Sequence
  Description of Artificial Sequence: Synthetic oligonucleotide
gcggccaaaauaucccuga

SEQ ID NO: 950424 - RNA, 19 nt, Artificial Sequence
  Description of Artificial Sequence: Synthetic oligonucleotide
cacggugcguuccuccuca

SEQ ID NO: 950425 - RNA, 19 nt, Artificial Sequence
  Description of Artificial Sequence: Synthetic oligonucleotide
uucacgaauugugggccuu

SEQ ID NO: 950426 - RNA, 19 nt, Artificial Sequence
  Description of Artificial Sequence: Synthetic oligonucleotide
ucuuggcuuuuggccuggg

SEQ ID NO: 950427 - RNA, 19 nt, Artificial Sequence
  Description of Artificial Sequence: Synthetic oligonucleotide
ggauucuggucccuucuaa

SEQ ID NO: 950428 - RNA, 19 nt, Artificial Sequence
  Description of Artificial Sequence: Synthetic oligonucleotide
acacgguccuagcauucua

SEQ ID NO: 950429 - RNA, 19 nt, Artificial Sequence
  Description of Artificial Sequence: Synthetic oligonucleotide
cgagguugauuaaguuugg

SEQ ID NO: 950430 - RNA, 19 nt, Artificial Sequence
  Description of Artificial Sequence: Synthetic oligonucleotide
ccuagugacauaauguauu

SEQ ID NO: 950431 - RNA, 19 nt, Artificial Sequence
  Description of Artificial Sequence: Synthetic oligonucleotide
cccaucuguggucaauuuc

SEQ ID NO: 950432 - RNA, 19 nt, Artificial Sequence
  Description of Artificial Sequence: Synthetic oligonucleotide
cauacacggugcguuccuc

SEQ ID NO: 950433 - RNA, 19 nt, Artificial Sequence
  Description of Artificial Sequence: Synthetic oligonucleotide
ccaaagggagcugccgucc

SEQ ID NO: 950434 - RNA, 19 nt, Artificial Sequence
  Description of Artificial Sequence: Synthetic oligonucleotide
ggaccucgagguuccaaca

SEQ ID NO: 950435 - RNA, 19 nt, Artificial Sequence
  Description of Artificial Sequence: Synthetic oligonucleotide
uuguugagucuuggccagu

SEQ ID NO: 950436 - RNA, 19 nt, Artificial Sequence
  Description of Artificial Sequence: Synthetic oligonucleotide
ugccgcuuguguccuccau

SEQ ID NO: 950437 - RNA, 19 nt, Artificial Sequence
  Description of Artificial Sequence: Synthetic oligonucleotide
agggagcugccguccuucu

SEQ ID NO: 950438 - RNA, 19 nt, Artificial Sequence
  Description of Artificial Sequence: Synthetic oligonucleotide
ccuuaggauccccaguaga

SEQ ID NO: 950439 - RNA, 19 nt, Artificial Sequence
  Description of Artificial Sequence: Synthetic oligonucleotide
aaaggaccucgagguucca

SEQ ID NO: 950440 - RNA, 19 nt, Artificial Sequence
  Description of Artificial Sequence: Synthetic oligonucleotide
aucccagcugugaguaaca

SEQ ID NO: 950441 - RNA, 19 nt, Artificial Sequence
  Description of Artificial Sequence: Synthetic oligonucleotide
uugugggccuugguuguua

SEQ ID NO: 950442 - RNA, 19 nt, Artificial Sequence
  Description of Artificial Sequence: Synthetic oligonucleotide
guugagucuuggccagucu

SEQ ID NO: 950443 - RNA, 19 nt, Artificial Sequence
  Description of Artificial Sequence: Synthetic oligonucleotide
ucucucucccaagggcuuu

SEQ ID NO: 950444 - RNA, 19 nt, Artificial Sequence
  Description of Artificial Sequence: Synthetic oligonucleotide
agaagccauacuggcuuuu

SEQ ID NO: 950445 - RNA, 19 nt, Artificial Sequence
  Description of Artificial Sequence: Synthetic oligonucleotide
cucuacuacagaugagcuu

SEQ ID NO: 950446 - RNA, 19 nt, Artificial Sequence
  Description of Artificial Sequence: Synthetic oligonucleotide
gccaguaccucugcucaug

SEQ ID NO: 950447 - RNA, 19 nt, Artificial Sequence
  Description of Artificial Sequence: Synthetic oligonucleotide
gugggccuugguuguuaac

SEQ ID NO: 950448 - RNA, 19 nt, Artificial Sequence
  Description of Artificial Sequence: Synthetic oligonucleotide
cucuggcuauuagcuuccc

SEQ ID NO: 950449 - RNA, 19 nt, Artificial Sequence
  Description of Artificial Sequence: Synthetic oligonucleotide
ucuccggauucuggucccu

SEQ ID NO: 950450 - RNA, 19 nt, Artificial Sequence
  Description of Artificial Sequence: Synthetic oligonucleotide
gugcggccaaaauaucccu

SEQ ID NO: 950451 - RNA, 19 nt, Artificial Sequence
  Description of Artificial Sequence: Synthetic oligonucleotide
gcucuaacuucagguaaga

SEQ ID NO: 950452 - RNA, 19 nt, Artificial Sequence
  Description of Artificial Sequence: Synthetic oligonucleotide
gagaagccauacuggcuuu

SEQ ID NO: 950453 - RNA, 19 nt, Artificial Sequence
  Description of Artificial Sequence: Synthetic oligonucleotide
cccugcucuaacuucaggu

SEQ ID NO: 950454 - RNA, 19 nt, Artificial Sequence
  Description of Artificial Sequence: Synthetic oligonucleotide
gguggguuguuaagaaacu

SEQ ID NO: 950455 - RNA, 19 nt, Artificial Sequence
  Description of Artificial Sequence: Synthetic oligonucleotide
gucuaucuaccaaaaucuu

SEQ ID NO: 950456 - RNA, 19 nt, Artificial Sequence
  Description of Artificial Sequence: Synthetic oligonucleotide
gacagacggcucagucuuc

SEQ ID NO: 950457 - RNA, 19 nt, Artificial Sequence
  Description of Artificial Sequence: Synthetic oligonucleotide
gcaucccgaaccagaaguc

SEQ ID NO: 950458 - RNA, 19 nt, Artificial Sequence
  Description of Artificial Sequence: Synthetic oligonucleotide
ggcacuguacagucgguuu

SEQ ID NO: 950459 - RNA, 19 nt, Artificial Sequence
  Description of Artificial Sequence: Synthetic oligonucleotide
cacacccaugccgcuugug

SEQ ID NO: 950460 - RNA, 19 nt, Artificial Sequence
  Description of Artificial Sequence: Synthetic oligonucleotide
auugugggccuugguuguu

SEQ ID NO: 950461 - RNA, 19 nt, Artificial Sequence
  Description of Artificial Sequence: Synthetic oligonucleotide
guaucuccuucuagcaaau

SEQ ID NO: 950462 - RNA, 19 nt, Artificial Sequence
  Description of Artificial Sequence: Synthetic oligonucleotide
cuccgugccucuuuucuuu

SEQ ID NO: 950463 - RNA, 19 nt, Artificial Sequence
  Description of Artificial Sequence: Synthetic oligonucleotide
cucaacgguauaaccucuu

SEQ ID NO: 950464 - RNA, 19 nt, Artificial Sequence
  Description of Artificial Sequence: Synthetic oligonucleotide
cugagagugcggccaaaau

SEQ ID NO: 950465 - RNA, 19 nt, Artificial Sequence
  Description of Artificial Sequence: Synthetic oligonucleotide
ccauccauucagucuugga

SEQ ID NO: 950466 - RNA, 19 nt, Artificial Sequence
  Description of Artificial Sequence: Synthetic oligonucleotide
cccaguagacuuguaaugu

SEQ ID NO: 950467 - RNA, 19 nt, Artificial Sequence
  Description of Artificial Sequence: Synthetic oligonucleotide
guagugccaaauacucuuu

SEQ ID NO: 950468 - RNA, 19 nt, Artificial Sequence
  Description of Artificial Sequence: Synthetic oligonucleotide
cccuucuaaguccaacucu

SEQ ID NO: 950469 - RNA, 19 nt, Artificial Sequence
  Description of Artificial Sequence: Synthetic oligonucleotide
ccauucagucuuggacagc

SEQ ID NO: 950470 - RNA, 19 nt, Artificial Sequence
  Description of Artificial Sequence: Synthetic oligonucleotide
ggacagcacucucaacggu

SEQ ID NO: 950471 - RNA, 19 nt, Artificial Sequence
  Description of Artificial Sequence: Synthetic oligonucleotide
gccgcuuguguccuccaua

SEQ ID NO: 950472 - RNA, 19 nt, Artificial Sequence
  Description of Artificial Sequence: Synthetic oligonucleotide
cuacuacagaugagcuuuu

SEQ ID NO: 950473 - RNA, 19 nt, Artificial Sequence
  Description of Artificial Sequence: Synthetic oligonucleotide
cugaaaggaccucgagguu

SEQ ID NO: 950474 - RNA, 19 nt, Artificial Sequence
  Description of Artificial Sequence: Synthetic oligonucleotide
acggugcguuccuccucau

SEQ ID NO: 950475 - RNA, 19 nt, Artificial Sequence
  Description of Artificial Sequence: Synthetic oligonucleotide
cacacgguccuagcauucu

SEQ ID NO: 950476 - RNA, 19 nt, Artificial Sequence
  Description of Artificial Sequence: Synthetic oligonucleotide
cgaauugugggccuugguu

SEQ ID NO: 950477 - RNA, 19 nt, Artificial Sequence
  Description of Artificial Sequence: Synthetic oligonucleotide
ccgugccucuuuucuuuuc

SEQ ID NO: 950478 - RNA, 19 nt, Artificial Sequence
  Description of Artificial Sequence: Synthetic oligonucleotide
cagcacucucaacgguaua

SEQ ID NO: 950479 - RNA, 19 nt, Artificial Sequence
  Description of Artificial Sequence: Synthetic oligonucleotide
gauccccaguagacuugua

SEQ ID NO: 950480 - RNA, 19 nt, Artificial Sequence
  Description of Artificial Sequence: Synthetic oligonucleotide
ccuguccuugugaagguuu

SEQ ID NO: 950481 - RNA, 19 nt, Artificial Sequence
  Description of Artificial Sequence: Synthetic oligonucleotide
ggcucagucuucucccguu

SEQ ID NO: 950482 - RNA, 19 nt, Artificial Sequence
  Description of Artificial Sequence: Synthetic oligonucleotide
ccgcuuguguccuccauau

SEQ ID NO: 950483 - RNA, 19 nt, Artificial Sequence
  Description of Artificial Sequence: Synthetic oligonucleotide
ccugucuaucuaccaaaau

SEQ ID NO: 950484 - RNA, 19 nt, Artificial Sequence
  Description of Artificial Sequence: Synthetic oligonucleotide
cugcgcccucuucuuggcu

SEQ ID NO: 950485 - RNA, 19 nt, Artificial Sequence
  Description of Artificial Sequence: Synthetic oligonucleotide
gcauacugucuuccuucuu

SEQ ID NO: 950486 - RNA, 19 nt, Artificial Sequence
  Description of Artificial Sequence: Synthetic oligonucleotide
gccguccuucucaaucaua

SEQ ID NO: 950487 - RNA, 19 nt, Artificial Sequence
  Description of Artificial Sequence: Synthetic oligonucleotide
gggcacuguacagucgguu

SEQ ID NO: 950488 - RNA, 19 nt, Artificial Sequence
  Description of Artificial Sequence: Synthetic oligonucleotide
ccuccauauuuaacucuuu

SEQ ID NO: 950489 - RNA, 19 nt, Artificial Sequence
  Description of Artificial Sequence: Synthetic oligonucleotide
cggugcguuccuccucauc

SEQ ID NO: 950490 - RNA, 19 nt, Artificial Sequence
  Description of Artificial Sequence: Synthetic oligonucleotide
cccagcugugaguaacauu

SEQ ID NO: 950491 - RNA, 19 nt, Artificial Sequence
  Description of Artificial Sequence: Synthetic oligonucleotide
cuccggauucuggucccuu

SEQ ID NO: 950492 - RNA, 19 nt, Artificial Sequence
  Description of Artificial Sequence: Synthetic oligonucleotide
cccgaaccagaaguccacu

SEQ ID NO: 950493 - RNA, 19 nt, Artificial Sequence
  Description of Artificial Sequence: Synthetic oligonucleotide
cgggcauggcauucaguau

SEQ ID NO: 950494 - RNA, 19 nt, Artificial Sequence
  Description of Artificial Sequence: Synthetic oligonucleotide
cggcucagucuucucccgu

SEQ ID NO: 950495 - RNA, 19 nt, Artificial Sequence
  Description of Artificial Sequence: Synthetic oligonucleotide
gcccucagaggcaguccuu

SEQ ID NO: 950496 - RNA, 19 nt, Artificial Sequence
  Description of Artificial Sequence: Synthetic oligonucleotide
cgcuuguguccuccauauu

SEQ ID NO: 950497 - RNA, 19 nt, Artificial Sequence
  Description of Artificial Sequence: Synthetic oligonucleotide
aaagcuuuuagucucacac

SEQ ID NO: 950498 - RNA, 19 nt, Artificial Sequence
  Description of Artificial Sequence: Synthetic oligonucleotide
gauuaaucauucuugaacg

SEQ ID NO: 950499 - RNA, 19 nt, Artificial Sequence
  Description of Artificial Sequence: Synthetic oligonucleotide
aauuuucacccuuacaucg

SEQ ID NO: 950500 - RNA, 19 nt, Artificial Sequence
  Description of Artificial Sequence: Synthetic oligonucleotide
auaaguuucaugaaaaugc

SEQ ID NO: 950501 - RNA, 19 nt, Artificial Sequence
  Description of Artificial Sequence: Synthetic oligonucleotide
uucaguuaaacuuagaccu

SEQ ID NO: 950502 - RNA, 19 nt, Artificial Sequence
  Description of Artificial Sequence: Synthetic oligonucleotide
agauuaaucauucuugaac

SEQ ID NO: 950503 - RNA, 19 nt, Artificial Sequence
  Description of Artificial Sequence: Synthetic oligonucleotide
aauaguuagugcuggagac

SEQ ID NO: 950504 - RNA, 19 nt, Artificial Sequence
  Description of Artificial Sequence: Synthetic oligonucleotide
aaagauuauggaaaggggc

SEQ ID NO: 950505 - RNA, 19 nt, Artificial Sequence
  Description of Artificial Sequence: Synthetic oligonucleotide
aucgaaauaggccuaaagc

SEQ ID NO: 950506 - RNA, 19 nt, Artificial Sequence
  Description of Artificial Sequence: Synthetic oligonucleotide
acuaaucuuagcuagauca

SEQ ID NO: 950507 - RNA, 19 nt, Artificial Sequence
  Description of Artificial Sequence: Synthetic oligonucleotide
uuuaguuuaacagucaugu

SEQ ID NO: 950508 - RNA, 19 nt, Artificial Sequence
  Description of Artificial Sequence: Synthetic oligonucleotide
aauaagagcuauuagcuau

SEQ ID NO: 950509 - RNA, 19 nt, Artificial Sequence
  Description of Artificial Sequence: Synthetic oligonucleotide
aaaauaagagcuauuagcu

SEQ ID NO: 950510 - RNA, 19 nt, Artificial Sequence
  Description of Artificial Sequence: Synthetic oligonucleotide
uguagguagaguuuaaucu

SEQ ID NO: 950511 - RNA, 19 nt, Artificial Sequence
  Description of Artificial Sequence: Synthetic oligonucleotide
uuagcuauguauuaacuga

SEQ ID NO: 950512 - RNA, 19 nt, Artificial Sequence
  Description of Artificial Sequence: Synthetic oligonucleotide
uuauauguaaugacuguag

SEQ ID NO: 950513 - RNA, 19 nt, Artificial Sequence
  Description of Artificial Sequence: Synthetic oligonucleotide
cauucuugaacguacaagc

SEQ ID NO: 950514 - RNA, 19 nt, Artificial Sequence
  Description of Artificial Sequence: Synthetic oligonucleotide
aguuuaacagucauguucc

SEQ ID NO: 950515 - RNA, 19 nt, Artificial Sequence
  Description of Artificial Sequence: Synthetic oligonucleotide
auggaaaggggcuaaaagg

SEQ ID NO: 950516 - RNA, 19 nt, Artificial Sequence
  Description of Artificial Sequence: Synthetic oligonucleotide
uguucaguuaaacuuagac

SEQ ID NO: 950517 - RNA, 19 nt, Artificial Sequence
  Description of Artificial Sequence: Synthetic oligonucleotide
ucgaaauaggccuaaagca

SEQ ID NO: 950518 - RNA, 19 nt, Artificial Sequence
  Description of Artificial Sequence: Synthetic oligonucleotide
uuuauuacacagauuaauc

SEQ ID NO: 950519 - RNA, 19 nt, Artificial Sequence
  Description of Artificial Sequence: Synthetic oligonucleotide
aguuguagguucuucaggg

SEQ ID NO: 950520 - RNA, 19 nt, Artificial Sequence
  Description of Artificial Sequence: Synthetic oligonucleotide
augccuuuaagcuuaugcc

SEQ ID NO: 950521 - RNA, 19 nt, Artificial Sequence
  Description of Artificial Sequence: Synthetic oligonucleotide
uucacacaaaauuauaugu

SEQ ID NO: 950522 - RNA, 19 nt, Artificial Sequence
  Description of Artificial Sequence: Synthetic oligonucleotide
uuauuacacagauuaauca

SEQ ID NO: 950523 - RNA, 19 nt, Artificial Sequence
  Description of Artificial Sequence: Synthetic oligonucleotide
guaguaaucaguuuauuac

SEQ ID NO: 950524 - RNA, 19 nt, Artificial Sequence
  Description of Artificial Sequence: Synthetic oligonucleotide
aauuauauguaaugacugu

SEQ ID NO: 950525 - RNA, 19 nt, Artificial Sequence
  Description of Artificial Sequence: Synthetic oligonucleotide
aauguuguucaguuaaacu

SEQ ID NO: 950526 - RNA, 19 nt, Artificial Sequence
  Description of Artificial Sequence: Synthetic oligonucleotide
uuugaaauaguuagugcug

SEQ ID NO: 950527 - RNA, 19 nt, Artificial Sequence
  Description of Artificial Sequence: Synthetic oligonucleotide
gaacguacaagcuccaucc

SEQ ID NO: 950528 - RNA, 19 nt, Artificial Sequence
  Description of Artificial Sequence: Synthetic oligonucleotide
agagcuauuagcuauguau

SEQ ID NO: 950529 - RNA, 19 nt, Artificial Sequence
  Description of Artificial Sequence: Synthetic oligonucleotide
uuaauuacaucgcauacuu

SEQ ID NO: 950530 - RNA, 19 nt, Artificial Sequence
  Description of Artificial Sequence: Synthetic oligonucleotide
uguuguuccaaguauguac

SEQ ID NO: 950531 - RNA, 19 nt, Artificial Sequence
  Description of Artificial Sequence: Synthetic oligonucleotide
uuucagauuagauggauuc

SEQ ID NO: 950532 - RNA, 19 nt, Artificial Sequence
  Description of Artificial Sequence: Synthetic oligonucleotide
guucaguuaaacuuagacc

SEQ ID NO: 950533 - RNA, 19 nt, Artificial Sequence
  Description of Artificial Sequence: Synthetic oligonucleotide
ugucagguaaacaugugca

SEQ ID NO: 950534 - RNA, 19 nt, Artificial Sequence
  Description of Artificial Sequence: Synthetic oligonucleotide
uugcuuaauaaaauuacuc

SEQ ID NO: 950535 - RNA, 19 nt, Artificial Sequence
  Description of Artificial Sequence: Synthetic oligonucleotide
aacaggaccugcugaacac

SEQ ID NO: 950536 - RNA, 19 nt, Artificial Sequence
  Description of Artificial Sequence: Synthetic oligonucleotide
uaaucauucuugaacguac

SEQ ID NO: 950537 - RNA, 19 nt, Artificial Sequence
  Description of Artificial Sequence: Synthetic oligonucleotide
ugaccguagaauaucaaga

SEQ ID NO: 950538 - RNA, 19 nt, Artificial Sequence
  Description of Artificial Sequence: Synthetic oligonucleotide
uuuuaugacuguuucagau

SEQ ID NO: 950539 - RNA, 19 nt, Artificial Sequence
  Description of Artificial Sequence: Synthetic oligonucleotide
auucacacaaaauuauaug

SEQ ID NO: 950540 - RNA, 19 nt, Artificial Sequence
  Description of Artificial Sequence: Synthetic oligonucleotide
auugggaucacacaacaga

SEQ ID NO: 950541 - RNA, 19 nt, Artificial Sequence
  Description of Artificial Sequence: Synthetic oligonucleotide
ucuguugggaaaugaauug

SEQ ID NO: 950542 - RNA, 19 nt, Artificial Sequence
  Description of Artificial Sequence: Synthetic oligonucleotide
uaagcuuaugccucuaucu

SEQ ID NO: 950543 - RNA, 19 nt, Artificial Sequence
  Description of Artificial Sequence: Synthetic oligonucleotide
aguauguacaacacgcagc

SEQ ID NO: 950544 - RNA, 19 nt, Artificial Sequence
  Description of Artificial Sequence: Synthetic oligonucleotide
agaaaccacauacaaacca

SEQ ID NO: 950545 - RNA, 19 nt, Artificial Sequence
  Description of Artificial Sequence: Synthetic oligonucleotide
uaguaaucaguuuauuaca

SEQ ID NO: 950546 - RNA, 19 nt, Artificial Sequence
  Description of Artificial Sequence: Synthetic oligonucleotide
cacagauuaaucauucuug

SEQ ID NO: 950547 - RNA, 19 nt, Artificial Sequence
  Description of Artificial Sequence: Synthetic oligonucleotide
auguagguagaguuuaauc

SEQ ID NO: 950548 - RNA, 19 nt, Artificial Sequence
  Description of Artificial Sequence: Synthetic oligonucleotide
aauggaaaucaaaaggacu

SEQ ID NO: 950549 - RNA, 19 nt, Artificial Sequence
  Description of Artificial Sequence: Synthetic oligonucleotide
uuuggccccauuauuguag

SEQ ID NO: 950550 - RNA, 19 nt, Artificial Sequence
  Description of Artificial Sequence: Synthetic oligonucleotide
cuuaaggacaaucuccuac

SEQ ID NO: 950551 - RNA, 19 nt, Artificial Sequence
  Description of Artificial Sequence: Synthetic oligonucleotide
uuaaggacaaucuccuaca

SEQ ID NO: 950552 - RNA, 19 nt, Artificial Sequence
  Description of Artificial Sequence: Synthetic oligonucleotide
uauauguaaugacuguagu

SEQ ID NO: 950553 - RNA, 19 nt, Artificial Sequence
  Description of Artificial Sequence: Synthetic oligonucleotide
uuauccaauuuuaagucaa

SEQ ID NO: 950554 - RNA, 19 nt, Artificial Sequence
  Description of Artificial Sequence: Synthetic oligonucleotide
aaagccuauucacacaaaa

SEQ ID NO: 950555 - RNA, 19 nt, Artificial Sequence
  Description of Artificial Sequence: Synthetic oligonucleotide
ucuuuaauuacaucgcaua

SEQ ID NO: 950556 - RNA, 19 nt, Artificial Sequence
  Description of Artificial Sequence: Synthetic oligonucleotide
aguaaucaguuuauuacac

SEQ ID NO: 950557 - RNA, 19 nt, Artificial Sequence
  Description of Artificial Sequence: Synthetic oligonucleotide
acacuuuauguacuaacag

SEQ ID NO: 950558 - RNA, 19 nt, Artificial Sequence
  Description of Artificial Sequence: Synthetic oligonucleotide
uauuagcuauguauuaacu

SEQ ID NO: 950559 - RNA, 19 nt, Artificial Sequence
  Description of Artificial Sequence: Synthetic oligonucleotide
aagcacacacuguguaccc

SEQ ID NO: 950560 - RNA, 19 nt, Artificial Sequence
  Description of Artificial Sequence: Synthetic oligonucleotide
uguacaacacgcagcacug

SEQ ID NO: 950561 - RNA, 19 nt, Artificial Sequence
  Description of Artificial Sequence: Synthetic oligonucleotide
uggaauggugcacauauaa

SEQ ID NO: 950562 - RNA, 19 nt, Artificial Sequence
  Description of Artificial Sequence: Synthetic oligonucleotide
uucucacacacacacaccu

SEQ ID NO: 950563 - RNA, 19 nt, Artificial Sequence
  Description of Artificial Sequence: Synthetic oligonucleotide
gagguuauccaauaauuuc

SEQ ID NO: 950564 - RNA, 19 nt, Artificial Sequence
  Description of Artificial Sequence: Synthetic oligonucleotide
caguuuauuacacagauua

SEQ ID NO: 950565 - RNA, 19 nt, Artificial Sequence
  Description of Artificial Sequence: Synthetic oligonucleotide
cuuuuagucucacaccuag

SEQ ID NO: 950566 - RNA, 19 nt, Artificial Sequence
  Description of Artificial Sequence: Synthetic oligonucleotide
uuuaauuacaucgcauacu

SEQ ID NO: 950567 - RNA, 19 nt, Artificial Sequence
  Description of Artificial Sequence: Synthetic oligonucleotide
uuauguacuaacagcucca

SEQ ID NO: 950568 - RNA, 19 nt, Artificial Sequence
  Description of Artificial Sequence: Synthetic oligonucleotide
cuuuaauuacaucgcauac

SEQ ID NO: 950569 - RNA, 19 nt, Artificial Sequence
  Description of Artificial Sequence: Synthetic oligonucleotide
acuuuauguacuaacagcu

SEQ ID NO: 950570 - RNA, 19 nt, Artificial Sequence
  Description of Artificial Sequence: Synthetic oligonucleotide
aagauuauggaaaggggcu

SEQ ID NO: 950571 - RNA, 19 nt, Artificial Sequence
  Description of Artificial Sequence: Synthetic oligonucleotide
acauauaaguuucaugaaa

SEQ ID NO: 950572 - RNA, 19 nt, Artificial Sequence
  Description of Artificial Sequence: Synthetic oligonucleotide
ccaaguauguacaacacgc

SEQ ID NO: 950573 - RNA, 19 nt, Artificial Sequence
  Description of Artificial Sequence: Synthetic oligonucleotide
uguaaugacuguaguaauc

SEQ ID NO: 950574 - RNA, 19 nt, Artificial Sequence
  Description of Artificial Sequence: Synthetic oligonucleotide
auuauccaauuuuaaguca

SEQ ID NO: 950575 - RNA, 19 nt, Artificial Sequence
  Description of Artificial Sequence: Synthetic oligonucleotide
acagauuaaucauucuuga

SEQ ID NO: 950576 - RNA, 19 nt, Artificial Sequence
  Description of Artificial Sequence: Synthetic oligonucleotide
uuacuauguaaacuggaau

SEQ ID NO: 950577 - RNA, 19 nt, Artificial Sequence
  Description of Artificial Sequence: Synthetic oligonucleotide
cuuacaucgaaauaggccu

SEQ ID NO: 950578 - RNA, 19 nt, Artificial Sequence
  Description of Artificial Sequence: Synthetic oligonucleotide
aaauaagagcuauuagcua

SEQ ID NO: 950579 - RNA, 19 nt, Artificial Sequence
  Description of Artificial Sequence: Synthetic oligonucleotide
ugcacauauaaguuucaug

SEQ ID NO: 950580 - RNA, 19 nt, Artificial Sequence
  Description of Artificial Sequence: Synthetic oligonucleotide
auacaaaccaaagauuaug

SEQ ID NO: 950581 - RNA, 19 nt, Artificial Sequence
  Description of Artificial Sequence: Synthetic oligonucleotide
cuauuagcuauguauuaac

SEQ ID NO: 950582 - RNA, 19 nt, Artificial Sequence
  Description of Artificial Sequence: Synthetic oligonucleotide
ccaauuuuaagucaauaag

SEQ ID NO: 950583 - RNA, 19 nt, Artificial Sequence
  Description of Artificial Sequence: Synthetic oligonucleotide
uaugccucuaucuugcuua

SEQ ID NO: 950584 - RNA, 19 nt, Artificial Sequence
  Description of Artificial Sequence: Synthetic oligonucleotide
uagagguuauccaauaauu

SEQ ID NO: 950585 - RNA, 19 nt, Artificial Sequence
  Description of Artificial Sequence: Synthetic oligonucleotide
ucaccuaaguuguagguuc

SEQ ID NO: 950586 - RNA, 19 nt, Artificial Sequence
  Description of Artificial Sequence: Synthetic oligonucleotide
uuuuagucucacaccuagg

SEQ ID NO: 950587 - RNA, 19 nt, Artificial Sequence
  Description of Artificial Sequence: Synthetic oligonucleotide
ucagauuagauggauucca

SEQ ID NO: 950588 - RNA, 19 nt, Artificial Sequence
  Description of Artificial Sequence: Synthetic oligonucleotide
gaauggugcacauauaagu

SEQ ID NO: 950589 - RNA, 19 nt, Artificial Sequence
  Description of Artificial Sequence: Synthetic oligonucleotide
uaaucuuagcuagaucaag

SEQ ID NO: 950590 - RNA, 19 nt, Artificial Sequence
  Description of Artificial Sequence: Synthetic oligonucleotide
caauaaggaaagcuuuuag

SEQ ID NO: 950591 - RNA, 19 nt, Artificial Sequence
  Description of Artificial Sequence: Synthetic oligonucleotide
agccuauucacacaaaauu

SEQ ID NO: 950592 - RNA, 19 nt, Artificial Sequence
  Description of Artificial Sequence: Synthetic oligonucleotide
gaccguagaauaucaagac

SEQ ID NO: 950593 - RNA, 19 nt, Artificial Sequence
  Description of Artificial Sequence: Synthetic oligonucleotide
auaguuagugcuggagacc

SEQ ID NO: 950594 - RNA, 19 nt, Artificial Sequence
  Description of Artificial Sequence: Synthetic oligonucleotide
aaucuuagcuagaucaagu

SEQ ID NO: 950595 - RNA, 19 nt, Artificial Sequence
  Description of Artificial Sequence: Synthetic oligonucleotide
acuccacccugauaggggc

SEQ ID NO: 950596 - RNA, 19 nt, Artificial Sequence
  Description of Artificial Sequence: Synthetic oligonucleotide
gugaccguagaauaucaag

SEQ ID NO: 950597 - RNA, 19 nt, Artificial Sequence
  Description of Artificial Sequence: Synthetic oligonucleotide
agaccgggagcuccgaagc

SEQ ID NO: 950598 - RNA, 19 nt, Artificial Sequence
  Description of Artificial Sequence: Synthetic oligonucleotide
uuaaucuguuuggucauag

SEQ ID NO: 950599 - RNA, 19 nt, Artificial Sequence
  Description of Artificial Sequence: Synthetic oligonucleotide
uuacaucgcauacuucuga

SEQ ID NO: 950600 - RNA, 19 nt, Artificial Sequence
  Description of Artificial Sequence: Synthetic oligonucleotide
uucuuuaauuacaucgcau

SEQ ID NO: 950601 - RNA, 19 nt, Artificial Sequence
  Description of Artificial Sequence: Synthetic oligonucleotide
gacuguaguaaucaguuua

SEQ ID NO: 950602 - RNA, 19 nt, Artificial Sequence
  Description of Artificial Sequence: Synthetic oligonucleotide
uuaagcuuaugccucuauc

SEQ ID NO: 950603 - RNA, 19 nt, Artificial Sequence
  Description of Artificial Sequence: Synthetic oligonucleotide
uccacuuaaggacaaucuc

SEQ ID NO: 950604 - RNA, 19 nt, Artificial Sequence
  Description of Artificial Sequence: Synthetic oligonucleotide
aagaccgggagcuccgaag

SEQ ID NO: 950605 - RNA, 19 nt, Artificial Sequence
  Description of Artificial Sequence: Synthetic oligonucleotide
cauccaagcacacacugug

SEQ ID NO: 950606 - RNA, 19 nt, Artificial Sequence
  Description of Artificial Sequence: Synthetic oligonucleotide
ugaacguacaagcuccauc

SEQ ID NO: 950607 - RNA, 19 nt, Artificial Sequence
  Description of Artificial Sequence: Synthetic oligonucleotide
uagguagaguuuaaucugu

SEQ ID NO: 950608 - RNA, 19 nt, Artificial Sequence
  Description of Artificial Sequence: Synthetic oligonucleotide
agcuccgaagcgcggaucc

SEQ ID NO: 950609 - RNA, 19 nt, Artificial Sequence
  Description of Artificial Sequence: Synthetic oligonucleotide
ccaaagauuauggaaaggg

SEQ ID NO: 950610 - RNA, 19 nt, Artificial Sequence
  Description of Artificial Sequence: Synthetic oligonucleotide
caccacuaaucuuagcuag

SEQ ID NO: 950611 - RNA, 19 nt, Artificial Sequence
  Description of Artificial Sequence: Synthetic oligonucleotide
uggugcacauauaaguuuc

SEQ ID NO: 950612 - RNA, 19 nt, Artificial Sequence
  Description of Artificial Sequence: Synthetic oligonucleotide
aguucccuagcuuuauuug

SEQ ID NO: 950613 - RNA, 19 nt, Artificial Sequence
  Description of Artificial Sequence: Synthetic oligonucleotide
gcuuaauaaaauuacucuc

SEQ ID NO: 950614 - RNA, 19 nt, Artificial Sequence
  Description of Artificial Sequence: Synthetic oligonucleotide
auauguaaugacuguagua

SEQ ID NO: 950615 - RNA, 19 nt, Artificial Sequence
  Description of Artificial Sequence: Synthetic oligonucleotide
agucaaauggaaaucaaaa

SEQ ID NO: 950616 - RNA, 19 nt, Artificial Sequence
  Description of Artificial Sequence: Synthetic oligonucleotide
ucugcuaggaggcaauguu

SEQ ID NO: 950617 - RNA, 19 nt, Artificial Sequence
  Description of Artificial Sequence: Synthetic oligonucleotide
acuaccucucacaucuugc

SEQ ID NO: 950618 - RNA, 19 nt, Artificial Sequence
  Description of Artificial Sequence: Synthetic oligonucleotide
ccuuacaucgaaauaggcc

SEQ ID NO: 950619 - RNA, 19 nt, Artificial Sequence
  Description of Artificial Sequence: Synthetic oligonucleotide
aaguacaguauuucugguu

SEQ ID NO: 950620 - RNA, 19 nt, Artificial Sequence
  Description of Artificial Sequence: Synthetic oligonucleotide
uuuaaauguuguucaguua

SEQ ID NO: 950621 - RNA, 19 nt, Artificial Sequence
  Description of Artificial Sequence: Synthetic oligonucleotide
agguuauccaauaauuucu

SEQ ID NO: 950622 - RNA, 19 nt, Artificial Sequence
  Description of Artificial Sequence: Synthetic oligonucleotide
uucacccuuacaucgaaau

SEQ ID NO: 950623 - RNA, 19 nt, Artificial Sequence
  Description of Artificial Sequence: Synthetic oligonucleotide
uuccaaguauguacaacac

SEQ ID NO: 950624 - RNA, 19 nt, Artificial Sequence
  Description of Artificial Sequence: Synthetic oligonucleotide
gauccgacgagcugagggc

SEQ ID NO: 950625 - RNA, 19 nt, Artificial Sequence
  Description of Artificial Sequence: Synthetic oligonucleotide
ugaaaacauuucaggggug

SEQ ID NO: 950626 - RNA, 19 nt, Artificial Sequence
  Description of Artificial Sequence: Synthetic oligonucleotide
uucagauuagauggauucc

SEQ ID NO: 950627 - RNA, 19 nt, Artificial Sequence
  Description of Artificial Sequence: Synthetic oligonucleotide
ugucauuuggccccauuau

SEQ ID NO: 950628 - RNA, 19 nt, Artificial Sequence
  Description of Artificial Sequence: Synthetic oligonucleotide
uuaaucauucuugaacgua

SEQ ID NO: 950629 - RNA, 19 nt, Artificial Sequence
  Description of Artificial Sequence: Synthetic oligonucleotide
caucgaaauaggccuaaag

SEQ ID NO: 950630 - RNA, 19 nt, Artificial Sequence
  Description of Artificial Sequence: Synthetic oligonucleotide
gccauuauccaauuuuaag

SEQ ID NO: 950631 - RNA, 19 nt, Artificial Sequence
  Description of Artificial Sequence: Synthetic oligonucleotide
uugccauuauccaauuuua

SEQ ID NO: 950632 - RNA, 19 nt, Artificial Sequence
  Description of Artificial Sequence: Synthetic oligonucleotide
ucagggugaaaugaauaca

SEQ ID NO: 950633 - RNA, 19 nt, Artificial Sequence
  Description of Artificial Sequence: Synthetic oligonucleotide
ugucaccuaaguuguaggu

SEQ ID NO: 950634 - RNA, 19 nt, Artificial Sequence
  Description of Artificial Sequence: Synthetic oligonucleotide
ggauccgacgagcugaggg

SEQ ID NO: 950635 - RNA, 19 nt, Artificial Sequence
  Description of Artificial Sequence: Synthetic oligonucleotide
cucccauccaagcacacac

SEQ ID NO: 950636 - RNA, 19 nt, Artificial Sequence
  Description of Artificial Sequence: Synthetic oligonucleotide
cuauguauuaacugagaaa

SEQ ID NO: 950637 - RNA, 19 nt, Artificial Sequence
  Description of Artificial Sequence: Synthetic oligonucleotide
cacacuuuauguacuaaca

SEQ ID NO: 950638 - RNA, 19 nt, Artificial Sequence
  Description of Artificial Sequence: Synthetic oligonucleotide
acgagcugagggccgaggc

SEQ ID NO: 950639 - RNA, 19 nt, Artificial Sequence
  Description of Artificial Sequence: Synthetic oligonucleotide
uauguacuaacagcuccag

SEQ ID NO: 950640 - RNA, 19 nt, Artificial Sequence
  Description of Artificial Sequence: Synthetic oligonucleotide
acguacaagcuccauccag

SEQ ID NO: 950641 - RNA, 19 nt, Artificial Sequence
  Description of Artificial Sequence: Synthetic oligonucleotide
uggauugggaucacacaac

SEQ ID NO: 950642 - RNA, 19 nt, Artificial Sequence
  Description of Artificial Sequence: Synthetic oligonucleotide
ccacuuaaggacaaucucc

SEQ ID NO: 950643 - RNA, 19 nt, Artificial Sequence
  Description of Artificial Sequence: Synthetic oligonucleotide
ugguacagaaguacaguau

SEQ ID NO: 950644 - RNA, 19 nt, Artificial Sequence
  Description of Artificial Sequence: Synthetic oligonucleotide
uuauuguagccugccaaug

SEQ ID NO: 950645 - RNA, 19 nt, Artificial Sequence
  Description of Artificial Sequence: Synthetic oligonucleotide
uauuuccaucaaaugaauu

SEQ ID NO: 950646 - RNA, 19 nt, Artificial Sequence
  Description of Artificial Sequence: Synthetic oligonucleotide
ugugucagguaaacaugug

SEQ ID NO: 950647 - RNA, 19 nt, Artificial Sequence
  Description of Artificial Sequence: Synthetic oligonucleotide
aaacgguggcgacggcccc

SEQ ID NO: 950648 - RNA, 19 nt, Artificial Sequence
  Description of Artificial Sequence: Synthetic oligonucleotide
accguagaauaucaagaca

SEQ ID NO: 950649 - RNA, 19 nt, Artificial Sequence
  Description of Artificial Sequence: Synthetic oligonucleotide
agagccauggugggaaacg

SEQ ID NO: 950650 - RNA, 19 nt, Artificial Sequence
  Description of Artificial Sequence: Synthetic oligonucleotide
ucccuagcuuuauuuguag

SEQ ID NO: 950651 - RNA, 19 nt, Artificial Sequence
  Description of Artificial Sequence: Synthetic oligonucleotide
ucaauaaggaaagcuuuua

SEQ ID NO: 950652 - RNA, 19 nt, Artificial Sequence
  Description of Artificial Sequence: Synthetic oligonucleotide
cuagguuacgccuggagaa

SEQ ID NO: 950653 - RNA, 19 nt, Artificial Sequence
  Description of Artificial Sequence: Synthetic oligonucleotide
gaagaugaggcgugggcuc

SEQ ID NO: 950654 - RNA, 19 nt, Artificial Sequence
  Description of Artificial Sequence: Synthetic oligonucleotide
auaggggcugucauuuggc

SEQ ID NO: 950655 - RNA, 19 nt, Artificial Sequence
  Description of Artificial Sequence: Synthetic oligonucleotide
ucacaccuagguuacgccu

SEQ ID NO: 950656 - RNA, 19 nt, Artificial Sequence
  Description of Artificial Sequence: Synthetic oligonucleotide
ugggaucacacaacagaga

SEQ ID NO: 950657 - RNA, 19 nt, Artificial Sequence
  Description of Artificial Sequence: Synthetic oligonucleotide
uuaagucaauaaggaaagc

SEQ ID NO: 950658 - RNA, 19 nt, Artificial Sequence
  Description of Artificial Sequence: Synthetic oligonucleotide
guacaagcuccauccagag

SEQ ID NO: 950659 - RNA, 19 nt, Artificial Sequence
  Description of Artificial Sequence: Synthetic oligonucleotide
uagauccgagcaaucucag

SEQ ID NO: 950660 - RNA, 19 nt, Artificial Sequence
  Description of Artificial Sequence: Synthetic oligonucleotide
uuuaagcuuaugccucuau

SEQ ID NO: 950661 - RNA, 19 nt, Artificial Sequence
  Description of Artificial Sequence: Synthetic oligonucleotide
gaaacgguggcgacggccc

SEQ ID NO: 950662 - RNA, 19 nt, Artificial Sequence
  Description of Artificial Sequence: Synthetic oligonucleotide
augacuguaguaaucaguu

SEQ ID NO: 950663 - RNA, 19 nt, Artificial Sequence
  Description of Artificial Sequence: Synthetic oligonucleotide
gcuucucacacacacacac

SEQ ID NO: 950664 - RNA, 19 nt, Artificial Sequence
  Description of Artificial Sequence: Synthetic oligonucleotide
aaucauucuugaacguaca

SEQ ID NO: 950665 - RNA, 19 nt, Artificial Sequence
  Description of Artificial Sequence: Synthetic oligonucleotide
agaauguagguagaguuua

SEQ ID NO: 950666 - RNA, 19 nt, Artificial Sequence
  Description of Artificial Sequence: Synthetic oligonucleotide
cacuccacccugauagggg

SEQ ID NO: 950667 - RNA, 19 nt, Artificial Sequence
  Description of Artificial Sequence: Synthetic oligonucleotide
cgaaauaggccuaaagcag

SEQ ID NO: 950668 - RNA, 19 nt, Artificial Sequence
  Description of Artificial Sequence: Synthetic oligonucleotide
cuucucacacacacacacc

SEQ ID NO: 950669 - RNA, 19 nt, Artificial Sequence
  Description of Artificial Sequence: Synthetic oligonucleotide
ucaguuaaacuuagaccuu

SEQ ID NO: 950670 - RNA, 19 nt, Artificial Sequence
  Description of Artificial Sequence: Synthetic oligonucleotide
uguguacccacuaccucuc

SEQ ID NO: 950671 - RNA, 19 nt, Artificial Sequence
  Description of Artificial Sequence: Synthetic oligonucleotide
aacguacaagcuccaucca

SEQ ID NO: 950672 - RNA, 19 nt, Artificial Sequence
  Description of Artificial Sequence: Synthetic oligonucleotide
uuaugcgcugcugccacag

SEQ ID NO: 950673 - RNA, 19 nt, Artificial Sequence
  Description of Artificial Sequence: Synthetic oligonucleotide
gauugggaucacacaacag

SEQ ID NO: 950674 - RNA, 19 nt, Artificial Sequence
  Description of Artificial Sequence: Synthetic oligonucleotide
uucccuagcuuuauuugua

SEQ ID NO: 950675 - RNA, 19 nt, Artificial Sequence
  Description of Artificial Sequence: Synthetic oligonucleotide
cucacaccuagguuacgcc

SEQ ID NO: 950676 - RNA, 19 nt, Artificial Sequence
  Description of Artificial Sequence: Synthetic oligonucleotide
uuacgccuggagaacuggc

SEQ ID NO: 950677 - RNA, 19 nt, Artificial Sequence
  Description of Artificial Sequence: Synthetic oligonucleotide
ggcgugggcucauagaaag

SEQ ID NO: 950678 - RNA, 19 nt, Artificial Sequence
  Description of Artificial Sequence: Synthetic oligonucleotide
uguuucagauuagauggau

SEQ ID NO: 950679 - RNA, 19 nt, Artificial Sequence
  Description of Artificial Sequence: Synthetic oligonucleotide
acaccuagguuacgccugg

SEQ ID NO: 950680 - RNA, 19 nt, Artificial Sequence
  Description of Artificial Sequence: Synthetic oligonucleotide
acacacacacaccucucug

SEQ ID NO: 950681 - RNA, 19 nt, Artificial Sequence
  Description of Artificial Sequence: Synthetic oligonucleotide
agcuauuagcuauguauua

SEQ ID NO: 950682 - RNA, 19 nt, Artificial Sequence
  Description of Artificial Sequence: Synthetic oligonucleotide
cugcuaggaggcaauguug

SEQ ID NO: 950683 - RNA, 19 nt, Artificial Sequence
  Description of Artificial Sequence: Synthetic oligonucleotide
aagcgcggauccgacgagc

SEQ ID NO: 950684 - RNA, 19 nt, Artificial Sequence
  Description of Artificial Sequence: Synthetic oligonucleotide
auaagagcuauuagcuaug

SEQ ID NO: 950685 - RNA, 19 nt, Artificial Sequence
  Description of Artificial Sequence: Synthetic oligonucleotide
cacaccuagguuacgccug

SEQ ID NO: 950686 - RNA, 19 nt, Artificial Sequence
  Description of Artificial Sequence: Synthetic oligonucleotide
acccuuacaucgaaauagg

SEQ ID NO: 950687 - RNA, 19 nt, Artificial Sequence
  Description of Artificial Sequence: Synthetic oligonucleotide
auccgacgagcugagggcc

SEQ ID NO: 950688 - RNA, 19 nt, Artificial Sequence
  Description of Artificial Sequence: Synthetic oligonucleotide
accuagguuacgccuggag

SEQ ID NO: 950689 - RNA, 19 nt, Artificial Sequence
  Description of Artificial Sequence: Synthetic oligonucleotide
uacgccuggagaacuggcu

SEQ ID NO: 950690 - RNA, 19 nt, Artificial Sequence
  Description of Artificial Sequence: Synthetic oligonucleotide
uuguagccugccaaugaaa

SEQ ID NO: 950691 - RNA, 19 nt, Artificial Sequence
  Description of Artificial Sequence: Synthetic oligonucleotide
ugugaccguagaauaucaa

SEQ ID NO: 950692 - RNA, 19 nt, Artificial Sequence
  Description of Artificial Sequence: Synthetic oligonucleotide
caaguauguacaacacgca

SEQ ID NO: 950693 - RNA, 19 nt, Artificial Sequence
  Description of Artificial Sequence: Synthetic oligonucleotide
ucacccuuacaucgaaaua

SEQ ID NO: 950694 - RNA, 19 nt, Artificial Sequence
  Description of Artificial Sequence: Synthetic oligonucleotide
uaggccuaaagcaguuaaa

SEQ ID NO: 950695 - RNA, 19 nt, Artificial Sequence
  Description of Artificial Sequence: Synthetic oligonucleotide
uaagagcuauuagcuaugu

SEQ ID NO: 950696 - RNA, 19 nt, Artificial Sequence
  Description of Artificial Sequence: Synthetic oligonucleotide
agagguuauccaauaauuu

SEQ ID NO: 950697 - RNA, 19 nt, Artificial Sequence
  Description of Artificial Sequence: Synthetic oligonucleotide
agcggucaccgcaucaccc

SEQ ID NO: 950698 - RNA, 19 nt, Artificial Sequence
  Description of Artificial Sequence: Synthetic oligonucleotide
guuacgccuggagaacugg

SEQ ID NO: 950699 - RNA, 19 nt, Artificial Sequence
  Description of Artificial Sequence: Synthetic oligonucleotide
cacacuguguacccacuac

SEQ ID NO: 950700 - RNA, 19 nt, Artificial Sequence
  Description of Artificial Sequence: Synthetic oligonucleotide
gagccauggugggaaacgg

SEQ ID NO: 950701 - RNA, 19 nt, Artificial Sequence
  Description of Artificial Sequence: Synthetic oligonucleotide
aggccuaaagcaguuaaaa

SEQ ID NO: 950702 - RNA, 19 nt, Artificial Sequence
  Description of Artificial Sequence: Synthetic oligonucleotide
cucuaucuugcuuaauaaa

SEQ ID NO: 950703 - RNA, 19 nt, Artificial Sequence
  Description of Artificial Sequence: Synthetic oligonucleotide
aagagcuauuagcuaugua

SEQ ID NO: 950704 - RNA, 19 nt, Artificial Sequence
  Description of Artificial Sequence: Synthetic oligonucleotide
ccguagaauaucaagacaa

SEQ ID NO: 950705 - RNA, 19 nt, Artificial Sequence
  Description of Artificial Sequence: Synthetic oligonucleotide
ucucacacacacacaccuc

SEQ ID NO: 950706 - RNA, 19 nt, Artificial Sequence
  Description of Artificial Sequence: Synthetic oligonucleotide
aaauaggccuaaagcaguu

SEQ ID NO: 950707 - RNA, 19 nt, Artificial Sequence
  Description of Artificial Sequence: Synthetic oligonucleotide
gauuauggaaaggggcuaa

SEQ ID NO: 950708 - RNA, 19 nt, Artificial Sequence
  Description of Artificial Sequence: Synthetic oligonucleotide
cuucagggugaaaugaaua

SEQ ID NO: 950709 - RNA, 19 nt, Artificial Sequence
  Description of Artificial Sequence: Synthetic oligonucleotide
cagucaaauggaaaucaaa

SEQ ID NO: 950710 - RNA, 19 nt, Artificial Sequence
  Description of Artificial Sequence: Synthetic oligonucleotide
cacuaccucucacaucuug

SEQ ID NO: 950711 - RNA, 19 nt, Artificial Sequence
  Description of Artificial Sequence: Synthetic oligonucleotide
aacugggucuuuaaauaua

SEQ ID NO: 950712 - RNA, 19 nt, Artificial Sequence
  Description of Artificial Sequence: Synthetic oligonucleotide
augaggcgugggcucauag

SEQ ID NO: 950713 - RNA, 19 nt, Artificial Sequence
  Description of Artificial Sequence: Synthetic oligonucleotide
ucacacacacacaccucuc

SEQ ID NO: 950714 - RNA, 19 nt, Artificial Sequence
  Description of Artificial Sequence: Synthetic oligonucleotide
cacuuaaggacaaucuccu

SEQ ID NO: 950715 - RNA, 19 nt, Artificial Sequence
  Description of Artificial Sequence: Synthetic oligonucleotide
ggauugggaucacacaaca

SEQ ID NO: 950716 - RNA, 19 nt, Artificial Sequence
  Description of Artificial Sequence: Synthetic oligonucleotide
ucgcgagucggccggagaa

SEQ ID NO: 950717 - RNA, 19 nt, Artificial Sequence
  Description of Artificial Sequence: Synthetic oligonucleotide
gagucggccggagaagacc

SEQ ID NO: 950718 - RNA, 19 nt, Artificial Sequence
  Description of Artificial Sequence: Synthetic oligonucleotide
gaccgggagcuccgaagcg

SEQ ID NO: 950719 - RNA, 19 nt, Artificial Sequence
  Description of Artificial Sequence: Synthetic oligonucleotide
auuuucacccuuacaucga

SEQ ID NO: 950720 - RNA, 19 nt, Artificial Sequence
  Description of Artificial Sequence: Synthetic oligonucleotide
gagaccgcccgagcggucg

SEQ ID NO: 950721 - RNA, 19 nt, Artificial Sequence
  Description of Artificial Sequence: Synthetic oligonucleotide
ccacacuuuauguacuaac

SEQ ID NO: 950722 - RNA, 19 nt, Artificial Sequence
  Description of Artificial Sequence: Synthetic oligonucleotide
aguuuauuacacagauuaa

SEQ ID NO: 950723 - RNA, 19 nt, Artificial Sequence
  Description of Artificial Sequence: Synthetic oligonucleotide
uacaucgaaauaggccuaa

SEQ ID NO: 950724 - RNA, 19 nt, Artificial Sequence
  Description of Artificial Sequence: Synthetic oligonucleotide
ucggccggagaagaccggg

SEQ ID NO: 950725 - RNA, 19 nt, Artificial Sequence
  Description of Artificial Sequence: Synthetic oligonucleotide
cagauuaaucauucuugaa

SEQ ID NO: 950726 - RNA, 19 nt, Artificial Sequence
  Description of Artificial Sequence: Synthetic oligonucleotide
ggacaaaaguacuuuugaa

SEQ ID NO: 950727 - RNA, 19 nt, Artificial Sequence
  Description of Artificial Sequence: Synthetic oligonucleotide
gaagcgcggauccgacgag

SEQ ID NO: 950728 - RNA, 19 nt, Artificial Sequence
  Description of Artificial Sequence: Synthetic oligonucleotide
aauaggccuaaagcaguua

SEQ ID NO: 950729 - RNA, 19 nt, Artificial Sequence
  Description of Artificial Sequence: Synthetic oligonucleotide
uagguuacgccuggagaac

SEQ ID NO: 950730 - RNA, 19 nt, Artificial Sequence
  Description of Artificial Sequence: Synthetic oligonucleotide
auuuggccccauuauugua

SEQ ID NO: 950731 - RNA, 19 nt, Artificial Sequence
  Description of Artificial Sequence: Synthetic oligonucleotide
ugacuguaguaaucaguuu

SEQ ID NO: 950732 - RNA, 19 nt, Artificial Sequence
  Description of Artificial Sequence: Synthetic oligonucleotide
gcaacugggucuuuaaaua

SEQ ID NO: 950733 - RNA, 19 nt, Artificial Sequence
  Description of Artificial Sequence: Synthetic oligonucleotide
guucccuagcuuuauuugu

SEQ ID NO: 950734 - RNA, 19 nt, Artificial Sequence
  Description of Artificial Sequence: Synthetic oligonucleotide
ucaccgcaucacccggcgg

SEQ ID NO: 950735 - RNA, 19 nt, Artificial Sequence
  Description of Artificial Sequence: Synthetic oligonucleotide
gcugucaccuaaguuguag

SEQ ID NO: 950736 - RNA, 19 nt, Artificial Sequence
  Description of Artificial Sequence: Synthetic oligonucleotide
agcuauguauuaacugaga

SEQ ID NO: 950737 - RNA, 19 nt, Artificial Sequence
  Description of Artificial Sequence: Synthetic oligonucleotide
agauuauggaaaggggcua

SEQ ID NO: 950738 - RNA, 19 nt, Artificial Sequence
  Description of Artificial Sequence: Synthetic oligonucleotide
uccgaagcgcggauccgac

SEQ ID NO: 950739 - RNA, 19 nt, Artificial Sequence
  Description of Artificial Sequence: Synthetic oligonucleotide
uccacccugauaggggcug

SEQ ID NO: 950740 - RNA, 19 nt, Artificial Sequence
  Description of Artificial Sequence: Synthetic oligonucleotide
uggaggaucucgggccagg

SEQ ID NO: 950741 - RNA, 19 nt, Artificial Sequence
  Description of Artificial Sequence: Synthetic oligonucleotide
uuguuguuccaaguaugua

SEQ ID NO: 950742 - RNA, 19 nt, Artificial Sequence
  Description of Artificial Sequence: Synthetic oligonucleotide
aaaagccuauucacacaaa

SEQ ID NO: 950743 - RNA, 19 nt, Artificial Sequence
  Description of Artificial Sequence: Synthetic oligonucleotide
cucacacacacacaccucu

SEQ ID NO: 950744 - RNA, 19 nt, Artificial Sequence
  Description of Artificial Sequence: Synthetic oligonucleotide
uaacagcuccaguccauuu

SEQ ID NO: 950745 - RNA, 19 nt, Artificial Sequence
  Description of Artificial Sequence: Synthetic oligonucleotide
aguuaaacuuagaccuuaa

SEQ ID NO: 950746 - RNA, 19 nt, Artificial Sequence
  Description of Artificial Sequence: Synthetic oligonucleotide
cuugaacguacaagcucca

SEQ ID NO: 950747 - RNA, 19 nt, Artificial Sequence
  Description of Artificial Sequence: Synthetic oligonucleotide
gccugagaccgcccgagcg

SEQ ID NO: 950748 - RNA, 19 nt, Artificial Sequence
  Description of Artificial Sequence: Synthetic oligonucleotide
gguacagaaguacaguauu

SEQ ID NO: 950749 - RNA, 19 nt, Artificial Sequence
  Description of Artificial Sequence: Synthetic oligonucleotide
gaguucccuagcuuuauuu

SEQ ID NO: 950750 - RNA, 19 nt, Artificial Sequence
  Description of Artificial Sequence: Synthetic oligonucleotide
ucucugcuaggaggcaaug

SEQ ID NO: 950751 - RNA, 19 nt, Artificial Sequence
  Description of Artificial Sequence: Synthetic oligonucleotide
gacgagcugagggccgagg

SEQ ID NO: 950752 - RNA, 19 nt, Artificial Sequence
  Description of Artificial Sequence: Synthetic oligonucleotide
agaccgcccgagcggucgc

SEQ ID NO: 950753 - RNA, 19 nt, Artificial Sequence
  Description of Artificial Sequence: Synthetic oligonucleotide
cagcgucugggccugccgc

SEQ ID NO: 950754 - RNA, 19 nt, Artificial Sequence
  Description of Artificial Sequence: Synthetic oligonucleotide
accacuaaucuuagcuaga

SEQ ID NO: 950755 - RNA, 19 nt, Artificial Sequence
  Description of Artificial Sequence: Synthetic oligonucleotide
cccuuacaucgaaauaggc

SEQ ID NO: 950756 - RNA, 19 nt, Artificial Sequence
  Description of Artificial Sequence: Synthetic oligonucleotide
gaauguagguagaguuuaa

SEQ ID NO: 950757 - RNA, 19 nt, Artificial Sequence
  Description of Artificial Sequence: Synthetic oligonucleotide
gaacaaagcccaccacacu

SEQ ID NO: 950758 - RNA, 19 nt, Artificial Sequence
  Description of Artificial Sequence: Synthetic oligonucleotide
cauuuggccccauuauugu

SEQ ID NO: 950759 - RNA, 19 nt, Artificial Sequence
  Description of Artificial Sequence: Synthetic oligonucleotide
ccaagcacacacuguguac

SEQ ID NO: 950760 - RNA, 19 nt, Artificial Sequence
  Description of Artificial Sequence: Synthetic oligonucleotide
ccugagaccgcccgagcgg

SEQ ID NO: 950761 - RNA, 19 nt, Artificial Sequence
  Description of Artificial Sequence: Synthetic oligonucleotide
agguuacgccuggagaacu

SEQ ID NO: 950762 - RNA, 19 nt, Artificial Sequence
  Description of Artificial Sequence: Synthetic oligonucleotide
gccuauucacacaaaauua

SEQ ID NO: 950763 - RNA, 19 nt, Artificial Sequence
  Description of Artificial Sequence: Synthetic oligonucleotide
acgccuggagaacuggcuu

SEQ ID NO: 950764 - RNA, 19 nt, Artificial Sequence
  Description of Artificial Sequence: Synthetic oligonucleotide
cacgcagcacugcuguguc

SEQ ID NO: 950765 - RNA, 19 nt, Artificial Sequence
  Description of Artificial Sequence: Synthetic oligonucleotide
acaggaccugcugaacacu

SEQ ID NO: 950766 - RNA, 19 nt, Artificial Sequence
  Description of Artificial Sequence: Synthetic oligonucleotide
gguaaucuguugggaaaug

SEQ ID NO: 950767 - RNA, 19 nt, Artificial Sequence
  Description of Artificial Sequence: Synthetic oligonucleotide
gccucuaucuugcuuaaua

SEQ ID NO: 950768 - RNA, 19 nt, Artificial Sequence
  Description of Artificial Sequence: Synthetic oligonucleotide
acggggacggggcgagggg

SEQ ID NO: 950769 - RNA, 19 nt, Artificial Sequence
  Description of Artificial Sequence: Synthetic oligonucleotide
gccuuuaagcuuaugccuc

SEQ ID NO: 950770 - RNA, 19 nt, Artificial Sequence
  Description of Artificial Sequence: Synthetic oligonucleotide
uugaacguacaagcuccau

SEQ ID NO: 950771 - RNA, 19 nt, Artificial Sequence
  Description of Artificial Sequence: Synthetic oligonucleotide
agaguucccuagcuuuauu

SEQ ID NO: 950772 - RNA, 19 nt, Artificial Sequence
  Description of Artificial Sequence: Synthetic oligonucleotide
cuggaauuguuucaugauu

SEQ ID NO: 950773 - RNA, 19 nt, Artificial Sequence
  Description of Artificial Sequence: Synthetic oligonucleotide
guuagugcuggagaccacu

SEQ ID NO: 950774 - RNA, 19 nt, Artificial Sequence
  Description of Artificial Sequence: Synthetic oligonucleotide
caguuaaacuuagaccuua

SEQ ID NO: 950775 - RNA, 19 nt, Artificial Sequence
  Description of Artificial Sequence: Synthetic oligonucleotide
agcgucugggccugccgca

SEQ ID NO: 950776 - RNA, 19 nt, Artificial Sequence
  Description of Artificial Sequence: Synthetic oligonucleotide
ggccggagaagaccgggag

SEQ ID NO: 950777 - RNA, 19 nt, Artificial Sequence
  Description of Artificial Sequence: Synthetic oligonucleotide
caacugggucuuuaaauau

SEQ ID NO: 950778 - RNA, 19 nt, Artificial Sequence
  Description of Artificial Sequence: Synthetic oligonucleotide
ccuagguuacgccuggaga

SEQ ID NO: 950779 - RNA, 19 nt, Artificial Sequence
  Description of Artificial Sequence: Synthetic oligonucleotide
gucauuuggccccauuauu

SEQ ID NO: 950780 - RNA, 19 nt, Artificial Sequence
  Description of Artificial Sequence: Synthetic oligonucleotide
acacaccucucugcuagga

SEQ ID NO: 950781 - RNA, 19 nt, Artificial Sequence
  Description of Artificial Sequence: Synthetic oligonucleotide
ccccuuuaugcgcugcugc

SEQ ID NO: 950782 - RNA, 19 nt, Artificial Sequence
  Description of Artificial Sequence: Synthetic oligonucleotide
accacacuuuauguacuaa

SEQ ID NO: 950783 - RNA, 19 nt, Artificial Sequence
  Description of Artificial Sequence: Synthetic oligonucleotide
ccucuaucuugcuuaauaa

SEQ ID NO: 950784 - RNA, 19 nt, Artificial Sequence
  Description of Artificial Sequence: Synthetic oligonucleotide
agcacacacuguguaccca

SEQ ID NO: 950785 - RNA, 19 nt, Artificial Sequence
  Description of Artificial Sequence: Synthetic oligonucleotide
gaagaccgggagcuccgaa

SEQ ID NO: 950786 - RNA, 19 nt, Artificial Sequence
  Description of Artificial Sequence: Synthetic oligonucleotide
ccuggaauggugcacauau

SEQ ID NO: 950787 - RNA, 19 nt, Artificial Sequence
  Description of Artificial Sequence: Synthetic oligonucleotide
ggagcaacugggucuuuaa

SEQ ID NO: 950788 - RNA, 19 nt, Artificial Sequence
  Description of Artificial Sequence: Synthetic oligonucleotide
ccuaaguuguagguucuuc

SEQ ID NO: 950789 - RNA, 19 nt, Artificial Sequence
  Description of Artificial Sequence: Synthetic oligonucleotide
ggugggaaacgguggcgac

SEQ ID NO: 950790 - RNA, 19 nt, Artificial Sequence
  Description of Artificial Sequence: Synthetic oligonucleotide
cuguugggaaaugaauugu

SEQ ID NO: 950791 - RNA, 19 nt, Artificial Sequence
  Description of Artificial Sequence: Synthetic oligonucleotide
gcggucgcgagucggccgg

SEQ ID NO: 950792 - RNA, 19 nt, Artificial Sequence
  Description of Artificial Sequence: Synthetic oligonucleotide
gagcggucgcgagucggcc

SEQ ID NO: 950793 - RNA, 19 nt, Artificial Sequence
  Description of Artificial Sequence: Synthetic oligonucleotide
acaucgaaauaggccuaaa

SEQ ID NO: 950794 - RNA, 19 nt, Artificial Sequence
  Description of Artificial Sequence: Synthetic oligonucleotide
gguuacgccuggagaacug

SEQ ID NO: 950795 - RNA, 19 nt, Artificial Sequence
  Description of Artificial Sequence: Synthetic oligonucleotide
agguagaguuuaaucuguu

SEQ ID NO: 950796 - RNA, 19 nt, Artificial Sequence
  Description of Artificial Sequence: Synthetic oligonucleotide
agccauggugggaaacggu

SEQ ID NO: 950797 - RNA, 19 nt, Artificial Sequence
  Description of Artificial Sequence: Synthetic oligonucleotide
cacacacacacaccucucu

SEQ ID NO: 950798 - RNA, 19 nt, Artificial Sequence
  Description of Artificial Sequence: Synthetic oligonucleotide
aggagcaacugggucuuua

SEQ ID NO: 950799 - RNA, 19 nt, Artificial Sequence
  Description of Artificial Sequence: Synthetic oligonucleotide
agcgcggauccgacgagcu

SEQ ID NO: 950800 - RNA, 19 nt, Artificial Sequence
  Description of Artificial Sequence: Synthetic oligonucleotide
gguagaguuuaaucuguuu

SEQ ID NO: 950801 - RNA, 19 nt, Artificial Sequence
  Description of Artificial Sequence: Synthetic oligonucleotide
agaagaccgggagcuccga

SEQ ID NO: 950802 - RNA, 19 nt, Artificial Sequence
  Description of Artificial Sequence: Synthetic oligonucleotide
ccccauuauuguagccugc

SEQ ID NO: 950803 - RNA, 19 nt, Artificial Sequence
  Description of Artificial Sequence: Synthetic oligonucleotide
ccgaggcccacucagcguc

SEQ ID NO: 950804 - RNA, 19 nt, Artificial Sequence
  Description of Artificial Sequence: Synthetic oligonucleotide
ugagaccgcccgagcgguc

SEQ ID NO: 950805 - RNA, 19 nt, Artificial Sequence
  Description of Artificial Sequence: Synthetic oligonucleotide
cuggaggaucucgggccag

SEQ ID NO: 950806 - RNA, 19 nt, Artificial Sequence
  Description of Artificial Sequence: Synthetic oligonucleotide
caccuaaguuguagguucu

SEQ ID NO: 950807 - RNA, 19 nt, Artificial Sequence
  Description of Artificial Sequence: Synthetic oligonucleotide
accuaaguuguagguucuu

SEQ ID NO: 950808 - RNA, 19 nt, Artificial Sequence
  Description of Artificial Sequence: Synthetic oligonucleotide
cuccgaagcgcggauccga

SEQ ID NO: 950809 - RNA, 19 nt, Artificial Sequence
  Description of Artificial Sequence: Synthetic oligonucleotide
gguuauccaauaauuucuu

SEQ ID NO: 950810 - RNA, 19 nt, Artificial Sequence
  Description of Artificial Sequence: Synthetic oligonucleotide
cuuaugccucuaucuugcu

SEQ ID NO: 950811 - RNA, 19 nt, Artificial Sequence
  Description of Artificial Sequence: Synthetic oligonucleotide
gucgcgagucggccggaga

SEQ ID NO: 950812 - RNA, 19 nt, Artificial Sequence
  Description of Artificial Sequence: Synthetic oligonucleotide
ccgaagcgcggauccgacg

SEQ ID NO: 950813 - RNA, 19 nt, Artificial Sequence
  Description of Artificial Sequence: Synthetic oligonucleotide
gauuccacuuaaggacaau

SEQ ID NO: 950814 - RNA, 19 nt, Artificial Sequence
  Description of Artificial Sequence: Synthetic oligonucleotide
cucgggccaggucauucaa

SEQ ID NO: 950815 - RNA, 19 nt, Artificial Sequence
  Description of Artificial Sequence: Synthetic oligonucleotide
cccuagcuuuauuuguaga

SEQ ID NO: 950816 - RNA, 19 nt, Artificial Sequence
  Description of Artificial Sequence: Synthetic oligonucleotide
gagggccgaggcccacuca

SEQ ID NO: 950817 - RNA, 19 nt, Artificial Sequence
  Description of Artificial Sequence: Synthetic oligonucleotide
cucucugcuaggaggcaau

SEQ ID NO: 950818 - RNA, 19 nt, Artificial Sequence
  Description of Artificial Sequence: Synthetic oligonucleotide
cugcugugucagguaaaca

SEQ ID NO: 950819 - RNA, 19 nt, Artificial Sequence
  Description of Artificial Sequence: Synthetic oligonucleotide
gcuccgaagcgcggauccg

SEQ ID NO: 950820 - RNA, 19 nt, Artificial Sequence
  Description of Artificial Sequence: Synthetic oligonucleotide
agaugaggcgugggcucau

SEQ ID NO: 950821 - RNA, 19 nt, Artificial Sequence
  Description of Artificial Sequence: Synthetic oligonucleotide
ccuuuaagcuuaugccucu

SEQ ID NO: 950822 - RNA, 19 nt, Artificial Sequence
  Description of Artificial Sequence: Synthetic oligonucleotide
cucugcuaggaggcaaugu

SEQ ID NO: 950823 - RNA, 19 nt, Artificial Sequence
  Description of Artificial Sequence: Synthetic oligonucleotide
gaugaggcgugggcucaua

SEQ ID NO: 950824 - RNA, 19 nt, Artificial Sequence
  Description of Artificial Sequence: Synthetic oligonucleotide
cgagcggucgcgagucggc

SEQ ID NO: 950825 - RNA, 19 nt, Artificial Sequence
  Description of Artificial Sequence: Synthetic oligonucleotide
ggccugagaccgcccgagc

SEQ ID NO: 950826 - RNA, 19 nt, Artificial Sequence
  Description of Artificial Sequence: Synthetic oligonucleotide
gcgugggcucauagaaagc

SEQ ID NO: 950827 - RNA, 19 nt, Artificial Sequence
  Description of Artificial Sequence: Synthetic oligonucleotide
ggcuucucacacacacaca

SEQ ID NO: 950828 - RNA, 19 nt, Artificial Sequence
  Description of Artificial Sequence: Synthetic oligonucleotide
gcggauccgacgagcugag

SEQ ID NO: 950829 - RNA, 19 nt, Artificial Sequence
  Description of Artificial Sequence: Synthetic oligonucleotide
gcuuuuagucucacaccua

SEQ ID NO: 950830 - RNA, 19 nt, Artificial Sequence
  Description of Artificial Sequence: Synthetic oligonucleotide
gggagcuccgaagcgcgga

SEQ ID NO: 950831 - RNA, 19 nt, Artificial Sequence
  Description of Artificial Sequence: Synthetic oligonucleotide
ccgagcggucgcgagucgg

SEQ ID NO: 950832 - RNA, 19 nt, Artificial Sequence
  Description of Artificial Sequence: Synthetic oligonucleotide
cuguaguaaucaguuuauu

SEQ ID NO: 950833 - RNA, 19 nt, Artificial Sequence
  Description of Artificial Sequence: Synthetic oligonucleotide
ccggagaagaccgggagcu

SEQ ID NO: 950834 - RNA, 19 nt, Artificial Sequence
  Description of Artificial Sequence: Synthetic oligonucleotide
gcgcggauccgacgagcug

SEQ ID NO: 950835 - RNA, 19 nt, Artificial Sequence
  Description of Artificial Sequence: Synthetic oligonucleotide
gggaaacgguggcgacggc

SEQ ID NO: 950836 - RNA, 19 nt, Artificial Sequence
  Description of Artificial Sequence: Synthetic oligonucleotide
cgcggauccgacgagcuga

SEQ ID NO: 950837 - RNA, 19 nt, Artificial Sequence
  Description of Artificial Sequence: Synthetic oligonucleotide
gcaucacccggcggcggcc

SEQ ID NO: 950838 - RNA, 19 nt, Artificial Sequence
  Description of Artificial Sequence: Synthetic oligonucleotide
gcgucugggccugccgcag

SEQ ID NO: 950839 - RNA, 19 nt, Artificial Sequence
  Description of Artificial Sequence: Synthetic oligonucleotide
gcccgagcggucgcgaguc

SEQ ID NO: 950840 - RNA, 19 nt, Artificial Sequence
  Description of Artificial Sequence: Synthetic oligonucleotide
ggucgcgagucggccggag

SEQ ID NO: 950841 - RNA, 19 nt, Artificial Sequence
  Description of Artificial Sequence: Synthetic oligonucleotide
cgcaucacccggcggcggc

SEQ ID NO: 950842 - RNA, 19 nt, Artificial Sequence
  Description of Artificial Sequence: Synthetic oligonucleotide
ccugauaggggcugucauu

SEQ ID NO: 950843 - RNA, 19 nt, Artificial Sequence
  Description of Artificial Sequence: Synthetic oligonucleotide
ggagcuccgaagcgcggau

SEQ ID NO: 950844 - RNA, 19 nt, Artificial Sequence
  Description of Artificial Sequence: Synthetic oligonucleotide
caccuagguuacgccugga

SEQ ID NO: 950845 - RNA, 19 nt, Artificial Sequence
  Description of Artificial Sequence: Synthetic oligonucleotide
cggcggccccuuuaugcgc

SEQ ID NO: 950846 - RNA, 19 nt, Artificial Sequence
  Description of Artificial Sequence: Synthetic oligonucleotide
ggccccuuuaugcgcugcu

SEQ ID NO: 950847 - RNA, 19 nt, Artificial Sequence
  Description of Artificial Sequence: Synthetic oligonucleotide
cgcgagucggccggagaag

SEQ ID NO: 950848 - RNA, 19 nt, Artificial Sequence
  Description of Artificial Sequence: Synthetic oligonucleotide
cccgagcggucgcgagucg

SEQ ID NO: 950849 - RNA, 19 nt, Artificial Sequence
  Description of Artificial Sequence: Synthetic oligonucleotide
ccgcaucacccggcggcgg

SEQ ID NO: 950850 - RNA, 19 nt, Artificial Sequence
  Description of Artificial Sequence: Synthetic oligonucleotide
cccugauaggggcugucau

SEQ ID NO: 950851 - RNA, 19 nt, Artificial Sequence
  Description of Artificial Sequence: Synthetic oligonucleotide
ggcggccccuuuaugcgcu

SEQ ID NO: 950852 - RNA, 19 nt, Artificial Sequence
  Description of Artificial Sequence: Synthetic oligonucleotide
gaucucgggccaggucauu

SEQ ID NO: 950853 - RNA, 19 nt, Artificial Sequence
  Description of Artificial Sequence: Synthetic oligonucleotide
ccucucacaucuugccauu

SEQ ID NO: 950854 - RNA, 19 nt, Artificial Sequence
  Description of Artificial Sequence: Synthetic oligonucleotide
ccgacgagcugagggccga

SEQ ID NO: 950855 - RNA, 19 nt, Artificial Sequence
  Description of Artificial Sequence: Synthetic oligonucleotide
ggccugccgcagcggucac

SEQ ID NO: 950856 - RNA, 19 nt, Artificial Sequence
  Description of Artificial Sequence: Synthetic oligonucleotide
cggccggagaagaccggga

SEQ ID NO: 950857 - RNA, 19 nt, Artificial Sequence
  Description of Artificial Sequence: Synthetic oligonucleotide
cggauccgacgagcugagg

SEQ ID NO: 950858 - RNA, 19 nt, Artificial Sequence
  Description of Artificial Sequence: Synthetic oligonucleotide
gccgcagcggucaccgcau

SEQ ID NO: 950859 - RNA, 19 nt, Artificial Sequence
  Description of Artificial Sequence: Synthetic oligonucleotide
cgcccgagcggucgcgagu

SEQ ID NO: 950860 - RNA, 19 nt, Artificial Sequence
  Description of Artificial Sequence: Synthetic oligonucleotide
cggucgcgagucggccgga

SEQ ID NO: 950861 - RNA, 19 nt, Artificial Sequence
  Description of Artificial Sequence: Synthetic oligonucleotide
aaugcaaccgcacucggcc

SEQ ID NO: 950862 - RNA, 19 nt, Artificial Sequence
  Description of Artificial Sequence: Synthetic oligonucleotide
aauagggugagccccaggc

SEQ ID NO: 950863 - RNA, 19 nt, Artificial Sequence
  Description of Artificial Sequence: Synthetic oligonucleotide
gaugauaaaagccaaggac

SEQ ID NO: 950864 - RNA, 19 nt, Artificial Sequence
  Description of Artificial Sequence: Synthetic oligonucleotide
uuagguaguagccagggug

SEQ ID NO: 950865 - RNA, 19 nt, Artificial Sequence
  Description of Artificial Sequence: Synthetic oligonucleotide
agggcuagaaaguggaucc

SEQ ID NO: 950866 - RNA, 19 nt, Artificial Sequence
  Description of Artificial Sequence: Synthetic oligonucleotide
augaagcuuagguaguagc

SEQ ID NO: 950867 - RNA, 19 nt, Artificial Sequence
  Description of Artificial Sequence: Synthetic oligonucleotide
accgucauguuccaguagc

SEQ ID NO: 950868 - RNA, 19 nt, Artificial Sequence
  Description of Artificial Sequence: Synthetic oligonucleotide
ugaagcuuagguaguagcc

SEQ ID NO: 950869 - RNA, 19 nt, Artificial Sequence
  Description of Artificial Sequence: Synthetic oligonucleotide
cucgguuucuccuucaggg

SEQ ID NO: 950870 - RNA, 19 nt, Artificial Sequence
  Description of Artificial Sequence: Synthetic oligonucleotide
aaguggauccaauaguaga

SEQ ID NO: 950871 - RNA, 19 nt, Artificial Sequence
  Description of Artificial Sequence: Synthetic oligonucleotide
gauaagaaggaccauuaga

SEQ ID NO: 950872 - RNA, 19 nt, Artificial Sequence
  Description of Artificial Sequence: Synthetic oligonucleotide
auagcagucgauguuacgg

SEQ ID NO: 950873 - RNA, 19 nt, Artificial Sequence
  Description of Artificial Sequence: Synthetic oligonucleotide
auucccacauagcaguagc

SEQ ID NO: 950874 - RNA, 19 nt, Artificial Sequence
  Description of Artificial Sequence: Synthetic oligonucleotide
aagucugugccauagcagu

SEQ ID NO: 950875 - RNA, 19 nt, Artificial Sequence
  Description of Artificial Sequence: Synthetic oligonucleotide
uggauccaauaguagaugg

SEQ ID NO: 950876 - RNA, 19 nt, Artificial Sequence
  Description of Artificial Sequence: Synthetic oligonucleotide
acugguuugaugauaaaag

SEQ ID NO: 950877 - RNA, 19 nt, Artificial Sequence
  Description of Artificial Sequence: Synthetic oligonucleotide
gauggagauaagaaggacc

SEQ ID NO: 950878 - RNA, 19 nt, Artificial Sequence
  Description of Artificial Sequence: Synthetic oligonucleotide
ggucaugaagcuuagguag

SEQ ID NO: 950879 - RNA, 19 nt, Artificial Sequence
  Description of Artificial Sequence: Synthetic oligonucleotide
agaacguaggagcggaacg

SEQ ID NO: 950880 - RNA, 19 nt, Artificial Sequence
  Description of Artificial Sequence: Synthetic oligonucleotide
cagagaaugcaaagcaugg

SEQ ID NO: 950881 - RNA, 19 nt, Artificial Sequence
  Description of Artificial Sequence: Synthetic oligonucleotide
auaagaaggaccauuagau

SEQ ID NO: 950882 - RNA, 19 nt, Artificial Sequence
  Description of Artificial Sequence: Synthetic oligonucleotide
ugcgguagcggaagaaugg

SEQ ID NO: 950883 - RNA, 19 nt, Artificial Sequence
  Description of Artificial Sequence: Synthetic oligonucleotide
uccucagaacguaggagcg

SEQ ID NO: 950884 - RNA, 19 nt, Artificial Sequence
  Description of Artificial Sequence: Synthetic oligonucleotide
ucauacuccagggaagccg

SEQ ID NO: 950885 - RNA, 19 nt, Artificial Sequence
  Description of Artificial Sequence: Synthetic oligonucleotide
agaugguuaucagagaaug

SEQ ID NO: 950886 - RNA, 19 nt, Artificial Sequence
  Description of Artificial Sequence: Synthetic oligonucleotide
cuccucagaacguaggagc

SEQ ID NO: 950887 - RNA, 19 nt, Artificial Sequence
  Description of Artificial Sequence: Synthetic oligonucleotide
gaagccggaggcuauuucc

SEQ ID NO: 950888 - RNA, 19 nt, Artificial Sequence
  Description of Artificial Sequence: Synthetic oligonucleotide
aagaaugggccugucauga

SEQ ID NO: 950889 - RNA, 19 nt, Artificial Sequence
  Description of Artificial Sequence: Synthetic oligonucleotide
uuuacgaaaggucgugguc

SEQ ID NO: 950890 - RNA, 19 nt, Artificial Sequence
  Description of Artificial Sequence: Synthetic oligonucleotide
uuacgaaaggucguggucu

SEQ ID NO: 950891 - RNA, 19 nt, Artificial Sequence
  Description of Artificial Sequence: Synthetic oligonucleotide
uagaagcgcaugcggaagg

SEQ ID NO: 950892 - RNA, 19 nt, Artificial Sequence
  Description of Artificial Sequence: Synthetic oligonucleotide
aguagcgcaugccaucccg

SEQ ID NO: 950893 - RNA, 19 nt, Artificial Sequence
  Description of Artificial Sequence: Synthetic oligonucleotide
cacauguagucguaggcgc

SEQ ID NO: 950894 - RNA, 19 nt, Artificial Sequence
  Description of Artificial Sequence: Synthetic oligonucleotide
auagggugagccccaggcc

SEQ ID NO: 950895 - RNA, 19 nt, Artificial Sequence
  Description of Artificial Sequence: Synthetic oligonucleotide
ugugccauagcagucgaug

SEQ ID NO: 950896 - RNA, 19 nt, Artificial Sequence
  Description of Artificial Sequence: Synthetic oligonucleotide
accacaggugaauagggug

SEQ ID NO: 950897 - RNA, 19 nt, Artificial Sequence
  Description of Artificial Sequence: Synthetic oligonucleotide
agauaagaaggaccauuag

SEQ ID NO: 950898 - RNA, 19 nt, Artificial Sequence
  Description of Artificial Sequence: Synthetic oligonucleotide
aaggcauccucgcgcacgg

SEQ ID NO: 950899 - RNA, 19 nt, Artificial Sequence
  Description of Artificial Sequence: Synthetic oligonucleotide
acgggguaggccccgaagc

SEQ ID NO: 950900 - RNA, 19 nt, Artificial Sequence
  Description of Artificial Sequence: Synthetic oligonucleotide
aagagaugcgaggacagca

SEQ ID NO: 950901 - RNA, 19 nt, Artificial Sequence
  Description of Artificial Sequence: Synthetic oligonucleotide
uccuagcccaacaagggac

SEQ ID NO: 950902 - RNA, 19 nt, Artificial Sequence
  Description of Artificial Sequence: Synthetic oligonucleotide
ucggccgcaauccaggcca

SEQ ID NO: 950903 - RNA, 19 nt, Artificial Sequence
  Description of Artificial Sequence: Synthetic oligonucleotide
gaagcuccuaccccaacgc

SEQ ID NO: 950904 - RNA, 19 nt, Artificial Sequence
  Description of Artificial Sequence: Synthetic oligonucleotide
uggguaaaggacagcccgg

SEQ ID NO: 950905 - RNA, 19 nt, Artificial Sequence
  Description of Artificial Sequence: Synthetic oligonucleotide
gaacguaggagcggaacgg

SEQ ID NO: 950906 - RNA, 19 nt, Artificial Sequence
  Description of Artificial Sequence: Synthetic oligonucleotide
gagcgugucgcccauggag

SEQ ID NO: 950907 - RNA, 19 nt, Artificial Sequence
  Description of Artificial Sequence: Synthetic oligonucleotide
uguuuacgaaaggucgugg

SEQ ID NO: 950908 - RNA, 19 nt, Artificial Sequence
  Description of Artificial Sequence: Synthetic oligonucleotide
gaagaccgggaccauguag

SEQ ID NO: 950909 - RNA, 19 nt, Artificial Sequence
  Description of Artificial Sequence: Synthetic oligonucleotide
acuccagauagcccucagc

SEQ ID NO: 950910 - RNA, 19 nt, Artificial Sequence
  Description of Artificial Sequence: Synthetic oligonucleotide
uguggcucagacuguagga

SEQ ID NO: 950911 - RNA, 19 nt, Artificial Sequence
  Description of Artificial Sequence: Synthetic oligonucleotide
gaagaaugggccugucaug

SEQ ID NO: 950912 - RNA, 19 nt, Artificial Sequence
  Description of Artificial Sequence: Synthetic oligonucleotide
aacgcuggggacccacggg

SEQ ID NO: 950913 - RNA, 19 nt, Artificial Sequence
  Description of Artificial Sequence: Synthetic oligonucleotide
agagaaugcaaagcauggg

SEQ ID NO: 950914 - RNA, 19 nt, Artificial Sequence
  Description of Artificial Sequence: Synthetic oligonucleotide
aggcgaagaagaccgggac

SEQ ID NO: 950915 - RNA, 19 nt, Artificial Sequence
  Description of Artificial Sequence: Synthetic oligonucleotide
ccaugcaagagccagggcg

SEQ ID NO: 950916 - RNA, 19 nt, Artificial Sequence
  Description of Artificial Sequence: Synthetic oligonucleotide
aagaccgggaccauguaga

SEQ ID NO: 950917 - RNA, 19 nt, Artificial Sequence
  Description of Artificial Sequence: Synthetic oligonucleotide
gagaugcgaggacagcagg

SEQ ID NO: 950918 - RNA, 19 nt, Artificial Sequence
  Description of Artificial Sequence: Synthetic oligonucleotide
aguaccggagcgugucgcc

SEQ ID NO: 950919 - RNA, 19 nt, Artificial Sequence
  Description of Artificial Sequence: Synthetic oligonucleotide
caggugaauagggugagcc

SEQ ID NO: 950920 - RNA, 19 nt, Artificial Sequence
  Description of Artificial Sequence: Synthetic oligonucleotide
agcgggaagagaugcgagg

SEQ ID NO: 950921 - RNA, 19 nt, Artificial Sequence
  Description of Artificial Sequence: Synthetic oligonucleotide
aagaagaccgggaccaugu

SEQ ID NO: 950922 - RNA, 19 nt, Artificial Sequence
  Description of Artificial Sequence: Synthetic oligonucleotide
uacugguuugaugauaaaa

SEQ ID NO: 950923 - RNA, 19 nt, Artificial Sequence
  Description of Artificial Sequence: Synthetic oligonucleotide
gaaaguggauccaauagua

SEQ ID NO: 950924 - RNA, 19 nt, Artificial Sequence
  Description of Artificial Sequence: Synthetic oligonucleotide
uaagaaggaccauuagaua

SEQ ID NO: 950925 - RNA, 19 nt, Artificial Sequence
  Description of Artificial Sequence: Synthetic oligonucleotide
ggguguuuacgaaaggucg

SEQ ID NO: 950926 - RNA, 19 nt, Artificial Sequence
  Description of Artificial Sequence: Synthetic oligonucleotide
cacguagaagcgcaugcgg

SEQ ID NO: 950927 - RNA, 19 nt, Artificial Sequence
  Description of Artificial Sequence: Synthetic oligonucleotide
gggagauuuauacauucug

SEQ ID NO: 950928 - RNA, 19 nt, Artificial Sequence
  Description of Artificial Sequence: Synthetic oligonucleotide
gaagccgacagggauggag

SEQ ID NO: 950929 - RNA, 19 nt, Artificial Sequence
  Description of Artificial Sequence: Synthetic oligonucleotide
gaacggggcgcucuuguag

SEQ ID NO: 950930 - RNA, 19 nt, Artificial Sequence
  Description of Artificial Sequence: Synthetic oligonucleotide
caagaugguuaucagagaa

SEQ ID NO: 950931 - RNA, 19 nt, Artificial Sequence
  Description of Artificial Sequence: Synthetic oligonucleotide
aggguguuuacgaaagguc

SEQ ID NO: 950932 - RNA, 19 nt, Artificial Sequence
  Description of Artificial Sequence: Synthetic oligonucleotide
uggucaugaagcuuaggua

SEQ ID NO: 950933 - RNA, 19 nt, Artificial Sequence
  Description of Artificial Sequence: Synthetic oligonucleotide
guaggagcggaacggggcg

SEQ ID NO: 950934 - RNA, 19 nt, Artificial Sequence
  Description of Artificial Sequence: Synthetic oligonucleotide
caugccaucccgcacccgc

SEQ ID NO: 950935 - RNA, 19 nt, Artificial Sequence
  Description of Artificial Sequence: Synthetic oligonucleotide
aggccgacuccagauagcc

SEQ ID NO: 950936 - RNA, 19 nt, Artificial Sequence
  Description of Artificial Sequence: Synthetic oligonucleotide
auccaauaguagauggagg

SEQ ID NO: 950937 - RNA, 19 nt, Artificial Sequence
  Description of Artificial Sequence: Synthetic oligonucleotide
aaggcggaauccucuccag

SEQ ID NO: 950938 - RNA, 19 nt, Artificial Sequence
  Description of Artificial Sequence: Synthetic oligonucleotide
caaggccgacuccagauag

SEQ ID NO: 950939 - RNA, 19 nt, Artificial Sequence
  Description of Artificial Sequence: Synthetic oligonucleotide
guaggcgcgcaucuugagg

SEQ ID NO: 950940 - RNA, 19 nt, Artificial Sequence
  Description of Artificial Sequence: Synthetic oligonucleotide
uagaaggcauccucgcgca

SEQ ID NO: 950941 - RNA, 19 nt, Artificial Sequence
  Description of Artificial Sequence: Synthetic oligonucleotide
aaggucguggucucugaaa

SEQ ID NO: 950942 - RNA, 19 nt, Artificial Sequence
  Description of Artificial Sequence: Synthetic oligonucleotide
aagcccgcggcaaugcaac

SEQ ID NO: 950943 - RNA, 19 nt, Artificial Sequence
  Description of Artificial Sequence: Synthetic oligonucleotide
gaggagauaggagaagguc

SEQ ID NO: 950944 - RNA, 19 nt, Artificial Sequence
  Description of Artificial Sequence: Synthetic oligonucleotide
ucugaaauacugguuugau

SEQ ID NO: 950945 - RNA, 19 nt, Artificial Sequence
  Description of Artificial Sequence: Synthetic oligonucleotide
ggugaauagggugagcccc

SEQ ID NO: 950946 - RNA, 19 nt, Artificial Sequence
  Description of Artificial Sequence: Synthetic oligonucleotide
acgcaauucccacgcaaag

SEQ ID NO: 950947 - RNA, 19 nt, Artificial Sequence
  Description of Artificial Sequence: Synthetic oligonucleotide
ugcauguguaacacuuuau

SEQ ID NO: 950948 - RNA, 19 nt, Artificial Sequence
  Description of Artificial Sequence: Synthetic oligonucleotide
gucguggucucugaaauac

SEQ ID NO: 950949 - RNA, 19 nt, Artificial Sequence
  Description of Artificial Sequence: Synthetic oligonucleotide
ucacgcaauucccacgcaa

SEQ ID NO: 950950 - RNA, 19 nt, Artificial Sequence
  Description of Artificial Sequence: Synthetic oligonucleotide
cggaaggcgaagaagaccg

SEQ ID NO: 950951 - RNA, 19 nt, Artificial Sequence
  Description of Artificial Sequence: Synthetic oligonucleotide
gaaggcggaauccucucca

SEQ ID NO: 950952 - RNA, 19 nt, Artificial Sequence
  Description of Artificial Sequence: Synthetic oligonucleotide
uccagcgggaagagaugcg

SEQ ID NO: 950953 - RNA, 19 nt, Artificial Sequence
  Description of Artificial Sequence: Synthetic oligonucleotide
auaggagaagguccaugca

SEQ ID NO: 950954 - RNA, 19 nt, Artificial Sequence
  Description of Artificial Sequence: Synthetic oligonucleotide
ucccacgcaaagccugagg

SEQ ID NO: 950955 - RNA, 19 nt, Artificial Sequence
  Description of Artificial Sequence: Synthetic oligonucleotide
gauucccacauagcaguag

SEQ ID NO: 950956 - RNA, 19 nt, Artificial Sequence
  Description of Artificial Sequence: Synthetic oligonucleotide
uagucguaggcgcgcaucu

SEQ ID NO: 950957 - RNA, 19 nt, Artificial Sequence
  Description of Artificial Sequence: Synthetic oligonucleotide
cacucggccgcaauccagg

SEQ ID NO: 950958 - RNA, 19 nt, Artificial Sequence
  Description of Artificial Sequence: Synthetic oligonucleotide
gagauaagaaggaccauua

SEQ ID NO: 950959 - RNA, 19 nt, Artificial Sequence
  Description of Artificial Sequence: Synthetic oligonucleotide
aaaggucguggucucugaa

SEQ ID NO: 950960 - RNA, 19 nt, Artificial Sequence
  Description of Artificial Sequence: Synthetic oligonucleotide
aaggccgacuccagauagc

SEQ ID NO: 950961 - RNA, 19 nt, Artificial Sequence
  Description of Artificial Sequence: Synthetic oligonucleotide
gaagccgccuucuccgggc

SEQ ID NO: 950962 - RNA, 19 nt, Artificial Sequence
  Description of Artificial Sequence: Synthetic oligonucleotide
caaugcaaccgcacucggc

SEQ ID NO: 950963 - RNA, 19 nt, Artificial Sequence
  Description of Artificial Sequence: Synthetic oligonucleotide
caugcggaaggcgaagaag

SEQ ID NO: 950964 - RNA, 19 nt, Artificial Sequence
  Description of Artificial Sequence: Synthetic oligonucleotide
gaauagggugagccccagg

SEQ ID NO: 950965 - RNA, 19 nt, Artificial Sequence
  Description of Artificial Sequence: Synthetic oligonucleotide
ugcaaccgcacucggccgc

SEQ ID NO: 950966 - RNA, 19 nt, Artificial Sequence
  Description of Artificial Sequence: Synthetic oligonucleotide
ggcaaugcaaccgcacucg

SEQ ID NO: 950967 - RNA, 19 nt, Artificial Sequence
  Description of Artificial Sequence: Synthetic oligonucleotide
agauaggagaagguccaug

SEQ ID NO: 950968 - RNA, 19 nt, Artificial Sequence
  Description of Artificial Sequence: Synthetic oligonucleotide
agagaugcgaggacagcag

SEQ ID NO: 950969 - RNA, 19 nt, Artificial Sequence
  Description of Artificial Sequence: Synthetic oligonucleotide
cuagaaaguggauccaaua

SEQ ID NO: 950970 - RNA, 19 nt, Artificial Sequence
  Description of Artificial Sequence: Synthetic oligonucleotide
agcgcaugccaucccgcac

SEQ ID NO: 950971 - RNA, 19 nt, Artificial Sequence
  Description of Artificial Sequence: Synthetic oligonucleotide
ggcuccuagcccaacaagg

SEQ ID NO: 950972 - RNA, 19 nt, Artificial Sequence
  Description of Artificial Sequence: Synthetic oligonucleotide
guaggcgcucaacagcaug

SEQ ID NO: 950973 - RNA, 19 nt, Artificial Sequence
  Description of Artificial Sequence: Synthetic oligonucleotide
acucggccgcaauccaggc

SEQ ID NO: 950974 - RNA, 19 nt, Artificial Sequence
  Description of Artificial Sequence: Synthetic oligonucleotide
gcacauguagucguaggcg

SEQ ID NO: 950975 - RNA, 19 nt, Artificial Sequence
  Description of Artificial Sequence: Synthetic oligonucleotide
acauguagucguaggcgcg

SEQ ID NO: 950976 - RNA, 19 nt, Artificial Sequence
  Description of Artificial Sequence: Synthetic oligonucleotide
ggagcuuuucccuggcuug

SEQ ID NO: 950977 - RNA, 19 nt, Artificial Sequence
  Description of Artificial Sequence: Synthetic oligonucleotide
guagaagcgcaugcggaag

SEQ ID NO: 950978 - RNA, 19 nt, Artificial Sequence
  Description of Artificial Sequence: Synthetic oligonucleotide
ucguaggcgcgcaucuuga

SEQ ID NO: 950979 - RNA, 19 nt, Artificial Sequence
  Description of Artificial Sequence: Synthetic oligonucleotide
gucguaggcgcgcaucuug

SEQ ID NO: 950980 - RNA, 19 nt, Artificial Sequence
  Description of Artificial Sequence: Synthetic oligonucleotide
ucccggagcuuuucccugg

SEQ ID NO: 950981 - RNA, 19 nt, Artificial Sequence
  Description of Artificial Sequence: Synthetic oligonucleotide
aagccgacagggauggaga

SEQ ID NO: 950982 - RNA, 19 nt, Artificial Sequence
  Description of Artificial Sequence: Synthetic oligonucleotide
cauguagucguaggcgcgc

SEQ ID NO: 950983 - RNA, 19 nt, Artificial Sequence
  Description of Artificial Sequence: Synthetic oligonucleotide
gcacgcagaagucugugcc

SEQ ID NO: 950984 - RNA, 19 nt, Artificial Sequence
  Description of Artificial Sequence: Synthetic oligonucleotide
guguuuacgaaaggucgug

SEQ ID NO: 950985 - RNA, 19 nt, Artificial Sequence
  Description of Artificial Sequence: Synthetic oligonucleotide
augcaaccgcacucggccg

SEQ ID NO: 950986 - RNA, 19 nt, Artificial Sequence
  Description of Artificial Sequence: Synthetic oligonucleotide
accgcacucggccgcaauc

SEQ ID NO: 950987 - RNA, 19 nt, Artificial Sequence
  Description of Artificial Sequence: Synthetic oligonucleotide
guaggugcgguagcggaag

SEQ ID NO: 950988 - RNA, 19 nt, Artificial Sequence
  Description of Artificial Sequence: Synthetic oligonucleotide
aagcgcaugcggaaggcga

SEQ ID NO: 950989 - RNA, 19 nt, Artificial Sequence
  Description of Artificial Sequence: Synthetic oligonucleotide
aggcuccuagcccaacaag

SEQ ID NO: 950990 - RNA, 19 nt, Artificial Sequence
  Description of Artificial Sequence: Synthetic oligonucleotide
acaggugaauagggugagc

SEQ ID NO: 950991 - RNA, 19 nt, Artificial Sequence
  Description of Artificial Sequence: Synthetic oligonucleotide
acggcuuccagcgggaaga

SEQ ID NO: 950992 - RNA, 19 nt, Artificial Sequence
  Description of Artificial Sequence: Synthetic oligonucleotide
ugccauagcagucgauguu

SEQ ID NO: 950993 - RNA, 19 nt, Artificial Sequence
  Description of Artificial Sequence: Synthetic oligonucleotide
uucaauccagguccagcuu

SEQ ID NO: 950994 - RNA, 19 nt, Artificial Sequence
  Description of Artificial Sequence: Synthetic oligonucleotide
caaagagcggggcuggcca

SEQ ID NO: 950995 - RNA, 19 nt, Artificial Sequence
  Description of Artificial Sequence: Synthetic oligonucleotide
cuucaauccagguccagcu

SEQ ID NO: 950996 - RNA, 19 nt, Artificial Sequence
  Description of Artificial Sequence: Synthetic oligonucleotide
uccgcaaggccgacuccag

SEQ ID NO: 950997 - RNA, 19 nt, Artificial Sequence
  Description of Artificial Sequence: Synthetic oligonucleotide
ggcguagaaggcauccucg

SEQ ID NO: 950998 - RNA, 19 nt, Artificial Sequence
  Description of Artificial Sequence: Synthetic oligonucleotide
aaaggacagcccggcucac

SEQ ID NO: 950999 - RNA, 19 nt, Artificial Sequence
  Description of Artificial Sequence: Synthetic oligonucleotide
gcucacgcaauucccacgc

SEQ ID NO: 951000 - RNA, 19 nt, Artificial Sequence
  Description of Artificial Sequence: Synthetic oligonucleotide
agaaggcauccucgcgcac

SEQ ID NO: 951001 - RNA, 19 nt, Artificial Sequence
  Description of Artificial Sequence: Synthetic oligonucleotide
agcagucgauguuacggau

SEQ ID NO: 951002 - RNA, 19 nt, Artificial Sequence
  Description of Artificial Sequence: Synthetic oligonucleotide
ugaauagggugagccccag

SEQ ID NO: 951003 - RNA, 19 nt, Artificial Sequence
  Description of Artificial Sequence: Synthetic oligonucleotide
ucguggucucugaaauacu

SEQ ID NO: 951004 - RNA, 19 nt, Artificial Sequence
  Description of Artificial Sequence: Synthetic oligonucleotide
cuuccagcgggaagagaug

SEQ ID NO: 951005 - RNA, 19 nt, Artificial Sequence
  Description of Artificial Sequence: Synthetic oligonucleotide
gcccauggagagcaggacg

SEQ ID NO: 951006 - RNA, 19 nt, Artificial Sequence
  Description of Artificial Sequence: Synthetic oligonucleotide
aagccggaggcuauuuccu

SEQ ID NO: 951007 - RNA, 19 nt, Artificial Sequence
  Description of Artificial Sequence: Synthetic oligonucleotide
agcccaacaagggacucug

SEQ ID NO: 951008 - RNA, 19 nt, Artificial Sequence
  Description of Artificial Sequence: Synthetic oligonucleotide
uagcggaagaaugggccug

SEQ ID NO: 951009 - RNA, 19 nt, Artificial Sequence
  Description of Artificial Sequence: Synthetic oligonucleotide
guuuacgaaaggucguggu

SEQ ID NO: 951010 - RNA, 19 nt, Artificial Sequence
  Description of Artificial Sequence: Synthetic oligonucleotide
gaugcgaggacagcaggaa

SEQ ID NO: 951011 - RNA, 19 nt, Artificial Sequence
  Description of Artificial Sequence: Synthetic oligonucleotide
cagaacguaggagcggaac

SEQ ID NO: 951012 - RNA, 19 nt, Artificial Sequence
  Description of Artificial Sequence: Synthetic oligonucleotide
gcuccuagcccaacaaggg

SEQ ID NO: 951013 - RNA, 19 nt, Artificial Sequence
  Description of Artificial Sequence: Synthetic oligonucleotide
gaaccuggcccugaagcuc

SEQ ID NO: 951014 - RNA, 19 nt, Artificial Sequence
  Description of Artificial Sequence: Synthetic oligonucleotide
agcuccuaccccaacgcug

SEQ ID NO: 951015 - RNA, 19 nt, Artificial Sequence
  Description of Artificial Sequence: Synthetic oligonucleotide
ggagauaggagaaggucca

SEQ ID NO: 951016 - RNA, 19 nt, Artificial Sequence
  Description of Artificial Sequence: Synthetic oligonucleotide
ggcgaagaagaccgggacc

SEQ ID NO: 951017 - RNA, 19 nt, Artificial Sequence
  Description of Artificial Sequence: Synthetic oligonucleotide
gucuccgcaaggccgacuc

SEQ ID NO: 951018 - RNA, 19 nt, Artificial Sequence
  Description of Artificial Sequence: Synthetic oligonucleotide
guuuacaccucgguuucuc

SEQ ID NO: 951019 - RNA, 19 nt, Artificial Sequence
  Description of Artificial Sequence: Synthetic oligonucleotide
acaagggacucuggcuggg

SEQ ID NO: 951020 - RNA, 19 nt, Artificial Sequence
  Description of Artificial Sequence: Synthetic oligonucleotide
agggacucuggcuggguaa

SEQ ID NO: 951021 - RNA, 19 nt, Artificial Sequence
  Description of Artificial Sequence: Synthetic oligonucleotide
agucgauguuacggauggc

SEQ ID NO: 951022 - RNA, 19 nt, Artificial Sequence
  Description of Artificial Sequence: Synthetic oligonucleotide
guggguaggcccagcaggc

SEQ ID NO: 951023 - RNA, 19 nt, Artificial Sequence
  Description of Artificial Sequence: Synthetic oligonucleotide
aggccaaagagcggggcug

SEQ ID NO: 951024 - RNA, 19 nt, Artificial Sequence
  Description of Artificial Sequence: Synthetic oligonucleotide
cucagaacguaggagcgga

SEQ ID NO: 951025 - RNA, 19 nt, Artificial Sequence
  Description of Artificial Sequence: Synthetic oligonucleotide
ggcucacgcaauucccacg

SEQ ID NO: 951026 - RNA, 19 nt, Artificial Sequence
  Description of Artificial Sequence: Synthetic oligonucleotide
ucagaacguaggagcggaa

SEQ ID NO: 951027 - RNA, 19 nt, Artificial Sequence
  Description of Artificial Sequence: Synthetic oligonucleotide
gugcgguagcggaagaaug

SEQ ID NO: 951028 - RNA, 19 nt, Artificial Sequence
  Description of Artificial Sequence: Synthetic oligonucleotide
gugucaacagcagcuggac

SEQ ID NO: 951029 - RNA, 19 nt, Artificial Sequence
  Description of Artificial Sequence: Synthetic oligonucleotide
ggcuccuugcugaagccgg

SEQ ID NO: 951030 - RNA, 19 nt, Artificial Sequence
  Description of Artificial Sequence: Synthetic oligonucleotide
agaugcgaggacagcagga

SEQ ID NO: 951031 - RNA, 19 nt, Artificial Sequence
  Description of Artificial Sequence: Synthetic oligonucleotide
cucugaaauacugguuuga

SEQ ID NO: 951032 - RNA, 19 nt, Artificial Sequence
  Description of Artificial Sequence: Synthetic oligonucleotide
agcccgcggcaaugcaacc

SEQ ID NO: 951033 - RNA, 19 nt, Artificial Sequence
  Description of Artificial Sequence: Synthetic oligonucleotide
uaccggagcgugucgccca

SEQ ID NO: 951034 - RNA, 19 nt, Artificial Sequence
  Description of Artificial Sequence: Synthetic oligonucleotide
aggccccgaagcccgcggc

SEQ ID NO: 951035 - RNA, 19 nt, Artificial Sequence
  Description of Artificial Sequence: Synthetic oligonucleotide
gaugggaaggcggaauccu

SEQ ID NO: 951036 - RNA, 19 nt, Artificial Sequence
  Description of Artificial Sequence: Synthetic oligonucleotide
agcgugucgcccauggaga

SEQ ID NO: 951037 - RNA, 19 nt, Artificial Sequence
  Description of Artificial Sequence: Synthetic oligonucleotide
cacgcaauucccacgcaaa

SEQ ID NO: 951038 - RNA, 19 nt, Artificial Sequence
  Description of Artificial Sequence: Synthetic oligonucleotide
augacacuggguggcaggu

SEQ ID NO: 951039 - RNA, 19 nt, Artificial Sequence
  Description of Artificial Sequence: Synthetic oligonucleotide
gcgaagaagaccgggacca

SEQ ID NO: 951040 - RNA, 19 nt, Artificial Sequence
  Description of Artificial Sequence: Synthetic oligonucleotide
uguagucguaggcgcgcau

SEQ ID NO: 951041 - RNA, 19 nt, Artificial Sequence
  Description of Artificial Sequence: Synthetic oligonucleotide
gcaaugcaaccgcacucgg

SEQ ID NO: 951042 - RNA, 19 nt, Artificial Sequence
  Description of Artificial Sequence: Synthetic oligonucleotide
gacgaagcccaugcacaug

SEQ ID NO: 951043 - RNA, 19 nt, Artificial Sequence
  Description of Artificial Sequence: Synthetic oligonucleotide
agacuguaggaagcugcug

SEQ ID NO: 951044 - RNA, 19 nt, Artificial Sequence
  Description of Artificial Sequence: Synthetic oligonucleotide
cccaaggcgagccccagcc

SEQ ID NO: 951045 - RNA, 19 nt, Artificial Sequence
  Description of Artificial Sequence: Synthetic oligonucleotide
cucagacuguaggaagcug

SEQ ID NO: 951046 - RNA, 19 nt, Artificial Sequence
  Description of Artificial Sequence: Synthetic oligonucleotide
aggcacagcgggaugguca

SEQ ID NO: 951047 - RNA, 19 nt, Artificial Sequence
  Description of Artificial Sequence: Synthetic oligonucleotide
acugcaccgucauguucca

SEQ ID NO: 951048 - RNA, 19 nt, Artificial Sequence
  Description of Artificial Sequence: Synthetic oligonucleotide
uguuuacaccucgguuucu

SEQ ID NO: 951049 - RNA, 19 nt, Artificial Sequence
  Description of Artificial Sequence: Synthetic oligonucleotide
gucgcccauggagagcagg

SEQ ID NO: 951050 - RNA, 19 nt, Artificial Sequence
  Description of Artificial Sequence: Synthetic oligonucleotide
guagcggaagaaugggccu

SEQ ID NO: 951051 - RNA, 19 nt, Artificial Sequence
  Description of Artificial Sequence: Synthetic oligonucleotide
ucccgcacccgcacgcaga

SEQ ID NO: 951052 - RNA, 19 nt, Artificial Sequence
  Description of Artificial Sequence: Synthetic oligonucleotide
cacgggguaggccccgaag

SEQ ID NO: 951053 - RNA, 19 nt, Artificial Sequence
  Description of Artificial Sequence: Synthetic oligonucleotide
cacgcagaagucugugcca

SEQ ID NO: 951054 - RNA, 19 nt, Artificial Sequence
  Description of Artificial Sequence: Synthetic oligonucleotide
caguaccggagcgugucgc

SEQ ID NO: 951055 - RNA, 19 nt, Artificial Sequence
  Description of Artificial Sequence: Synthetic oligonucleotide
agaaugggccugucaugau

SEQ ID NO: 951056 - RNA, 19 nt, Artificial Sequence
  Description of Artificial Sequence: Synthetic oligonucleotide
agaccgggaccauguagaa

SEQ ID NO: 951057 - RNA, 19 nt, Artificial Sequence
  Description of Artificial Sequence: Synthetic oligonucleotide
uagcccaacaagggacucu

SEQ ID NO: 951058 - RNA, 19 nt, Artificial Sequence
  Description of Artificial Sequence: Synthetic oligonucleotide
cucggccgcaauccaggcc

SEQ ID NO: 951059 - RNA, 19 nt, Artificial Sequence
  Description of Artificial Sequence: Synthetic oligonucleotide
uaggugcgguagcggaaga

SEQ ID NO: 951060 - RNA, 19 nt, Artificial Sequence
  Description of Artificial Sequence: Synthetic oligonucleotide
cacggcuuccagcgggaag

SEQ ID NO: 951061 - RNA, 19 nt, Artificial Sequence
  Description of Artificial Sequence: Synthetic oligonucleotide
cuccuagcccaacaaggga

SEQ ID NO: 951062 - RNA, 19 nt, Artificial Sequence
  Description of Artificial Sequence: Synthetic oligonucleotide
guagcgcaugccaucccgc

SEQ ID NO: 951063 - RNA, 19 nt, Artificial Sequence
  Description of Artificial Sequence: Synthetic oligonucleotide
ccgucauguuccaguagcg

SEQ ID NO: 951064 - RNA, 19 nt, Artificial Sequence
  Description of Artificial Sequence: Synthetic oligonucleotide
uggaccucacuggccagac

SEQ ID NO: 951065 - RNA, 19 nt, Artificial Sequence
  Description of Artificial Sequence: Synthetic oligonucleotide
guagucguaggcgcgcauc

SEQ ID NO: 951066 - RNA, 19 nt, Artificial Sequence
  Description of Artificial Sequence: Synthetic oligonucleotide
ggaagccgccuucuccggg

SEQ ID NO: 951067 - RNA, 19 nt, Artificial Sequence
  Description of Artificial Sequence: Synthetic oligonucleotide
gaaugggccugucaugauu

SEQ ID NO: 951068 - RNA, 19 nt, Artificial Sequence
  Description of Artificial Sequence: Synthetic oligonucleotide
gcgguagcggaagaauggg

SEQ ID NO: 951069 - RNA, 19 nt, Artificial Sequence
  Description of Artificial Sequence: Synthetic oligonucleotide
gcuccucagaacguaggag

SEQ ID NO: 951070 - RNA, 19 nt, Artificial Sequence
  Description of Artificial Sequence: Synthetic oligonucleotide
ggaugggaaggcggaaucc

SEQ ID NO: 951071 - RNA, 19 nt, Artificial Sequence
  Description of Artificial Sequence: Synthetic oligonucleotide
gccagggcgugacaggagc

SEQ ID NO: 951072 - RNA, 19 nt, Artificial Sequence
  Description of Artificial Sequence: Synthetic oligonucleotide
ggguaaaggacagcccggc

SEQ ID NO: 951073 - RNA, 19 nt, Artificial Sequence
  Description of Artificial Sequence: Synthetic oligonucleotide
uucccacgcaaagccugag

SEQ ID NO: 951074 - RNA, 19 nt, Artificial Sequence
  Description of Artificial Sequence: Synthetic oligonucleotide
aggccagcgcagcacggcu

SEQ ID NO: 951075 - RNA, 19 nt, Artificial Sequence
  Description of Artificial Sequence: Synthetic oligonucleotide
uguuacggauggccucaua

SEQ ID NO: 951076 - RNA, 19 nt, Artificial Sequence
  Description of Artificial Sequence: Synthetic oligonucleotide
gugaauagggugagcccca

SEQ ID NO: 951077 - RNA, 19 nt, Artificial Sequence
  Description of Artificial Sequence: Synthetic oligonucleotide
ggguaggccccgaagcccg

SEQ ID NO: 951078 - RNA, 19 nt, Artificial Sequence
  Description of Artificial Sequence: Synthetic oligonucleotide
ggauccaauaguagaugga

SEQ ID NO: 951079 - RNA, 19 nt, Artificial Sequence
  Description of Artificial Sequence: Synthetic oligonucleotide
agccgacagggauggagau

SEQ ID NO: 951080 - RNA, 19 nt, Artificial Sequence
  Description of Artificial Sequence: Synthetic oligonucleotide
ggguaggcccagcaggcug

SEQ ID NO: 951081 - RNA, 19 nt, Artificial Sequence
  Description of Artificial Sequence: Synthetic oligonucleotide
guaccggagcgugucgccc

SEQ ID NO: 951082 - RNA, 19 nt, Artificial Sequence
  Description of Artificial Sequence: Synthetic oligonucleotide
acgcagaagucugugccau

SEQ ID NO: 951083 - RNA, 19 nt, Artificial Sequence
  Description of Artificial Sequence: Synthetic oligonucleotide
ccagggguaggcuccuugc

SEQ ID NO: 951084 - RNA, 19 nt, Artificial Sequence
  Description of Artificial Sequence: Synthetic oligonucleotide
ccaguagcgcaugccaucc

SEQ ID NO: 951085 - RNA, 19 nt, Artificial Sequence
  Description of Artificial Sequence: Synthetic oligonucleotide
agcggaagaaugggccugu

SEQ ID NO: 951086 - RNA, 19 nt, Artificial Sequence
  Description of Artificial Sequence: Synthetic oligonucleotide
aaccgcacucggccgcaau

SEQ ID NO: 951087 - RNA, 19 nt, Artificial Sequence
  Description of Artificial Sequence: Synthetic oligonucleotide
caguagcgcaugccauccc

SEQ ID NO: 951088 - RNA, 19 nt, Artificial Sequence
  Description of Artificial Sequence: Synthetic oligonucleotide
ccucgguuucuccuucagg

SEQ ID NO: 951089 - RNA, 19 nt, Artificial Sequence
  Description of Artificial Sequence: Synthetic oligonucleotide
gcagucgauguuacggaug

SEQ ID NO: 951090 - RNA, 19 nt, Artificial Sequence
  Description of Artificial Sequence: Synthetic oligonucleotide
cuguagcugagugucucca

SEQ ID NO: 951091 - RNA, 19 nt, Artificial Sequence
  Description of Artificial Sequence: Synthetic oligonucleotide
ccacguagaagcgcaugcg

SEQ ID NO: 951092 - RNA, 19 nt, Artificial Sequence
  Description of Artificial Sequence: Synthetic oligonucleotide
ccccaucucuucaauccag

SEQ ID NO: 951093 - RNA, 19 nt, Artificial Sequence
  Description of Artificial Sequence: Synthetic oligonucleotide
gcgcacggcuuccagcggg

SEQ ID NO: 951094 - RNA, 19 nt, Artificial Sequence
  Description of Artificial Sequence: Synthetic oligonucleotide
cuagcccaacaagggacuc

SEQ ID NO: 951095 - RNA, 19 nt, Artificial Sequence
  Description of Artificial Sequence: Synthetic oligonucleotide
cauuggaggguggggccac

SEQ ID NO: 951096 - RNA, 19 nt, Artificial Sequence
  Description of Artificial Sequence: Synthetic oligonucleotide
acccgcacgcagaagucug

SEQ ID NO: 951097 - RNA, 19 nt, Artificial Sequence
  Description of Artificial Sequence: Synthetic oligonucleotide
ggcgcucuuguagauguac

SEQ ID NO: 951098 - RNA, 19 nt, Artificial Sequence
  Description of Artificial Sequence: Synthetic oligonucleotide
ugucgcccauggagagcag

SEQ ID NO: 951099 - RNA, 19 nt, Artificial Sequence
  Description of Artificial Sequence: Synthetic oligonucleotide
ggggcuguuuacaccucgg

SEQ ID NO: 951100 - RNA, 19 nt, Artificial Sequence
  Description of Artificial Sequence: Synthetic oligonucleotide
cugggcacggaucccggga

SEQ ID NO: 951101 - RNA, 19 nt, Artificial Sequence
  Description of Artificial Sequence: Synthetic oligonucleotide
ggcucggaagaagaggaga

SEQ ID NO: 951102 - RNA, 19 nt, Artificial Sequence
  Description of Artificial Sequence: Synthetic oligonucleotide
caggguguuuacgaaaggu

SEQ ID NO: 951103 - RNA, 19 nt, Artificial Sequence
  Description of Artificial Sequence: Synthetic oligonucleotide
caccacugcaccgucaugu

SEQ ID NO: 951104 - RNA, 19 nt, Artificial Sequence
  Description of Artificial Sequence: Synthetic oligonucleotide
gucaugaagcuuagguagu

SEQ ID NO: 951105 - RNA, 19 nt, Artificial Sequence
  Description of Artificial Sequence: Synthetic oligonucleotide
auguagucguaggcgcgca

SEQ ID NO: 951106 - RNA, 19 nt, Artificial Sequence
  Description of Artificial Sequence: Synthetic oligonucleotide
gcucgcuggccccuggggc

SEQ ID NO: 951107 - RNA, 19 nt, Artificial Sequence
  Description of Artificial Sequence: Synthetic oligonucleotide
uggggaccacaggugaaua

SEQ ID NO: 951108 - RNA, 19 nt, Artificial Sequence
  Description of Artificial Sequence: Synthetic oligonucleotide
ccacgcaaagccugaggug

SEQ ID NO: 951109 - RNA, 19 nt, Artificial Sequence
  Description of Artificial Sequence: Synthetic oligonucleotide
caauucccacgcaaagccu

SEQ ID NO: 951110 - RNA, 19 nt, Artificial Sequence
  Description of Artificial Sequence: Synthetic oligonucleotide
cccggcucacgcaauuccc

SEQ ID NO: 951111 - RNA, 19 nt, Artificial Sequence
  Description of Artificial Sequence: Synthetic oligonucleotide
gcgugucgcccauggagag

SEQ ID NO: 951112 - RNA, 19 nt, Artificial Sequence
  Description of Artificial Sequence: Synthetic oligonucleotide
gguguuuacgaaaggucgu

SEQ ID NO: 951113 - RNA, 19 nt, Artificial Sequence
  Description of Artificial Sequence: Synthetic oligonucleotide
cagucccaggcucgcuggc

SEQ ID NO: 951114 - RNA, 19 nt, Artificial Sequence
  Description of Artificial Sequence: Synthetic oligonucleotide
ccucagaacguaggagcgg

SEQ ID NO: 951115 - RNA, 19 nt, Artificial Sequence
  Description of Artificial Sequence: Synthetic oligonucleotide
cccgcggcaaugcaaccgc

SEQ ID NO: 951116 - RNA, 19 nt, Artificial Sequence
  Description of Artificial Sequence: Synthetic oligonucleotide
cuccuaccccaacgcuggg

SEQ ID NO: 951117 - RNA, 19 nt, Artificial Sequence
  Description of Artificial Sequence: Synthetic oligonucleotide
cagccgccaggcacagcgg

SEQ ID NO: 951118 - RNA, 19 nt, Artificial Sequence
  Description of Artificial Sequence: Synthetic oligonucleotide
cagccacgggguaggcccc

SEQ ID NO: 951119 - RNA, 19 nt, Artificial Sequence
  Description of Artificial Sequence: Synthetic oligonucleotide
gggccugucaugauuccca

SEQ ID NO: 951120 - RNA, 19 nt, Artificial Sequence
  Description of Artificial Sequence: Synthetic oligonucleotide
ggggcgcucuuguagaugu

SEQ ID NO: 951121 - RNA, 19 nt, Artificial Sequence
  Description of Artificial Sequence: Synthetic oligonucleotide
accagugcacccaguccca

SEQ ID NO: 951122 - RNA, 19 nt, Artificial Sequence
  Description of Artificial Sequence: Synthetic oligonucleotide
ggccugucaugauucccac

SEQ ID NO: 951123 - RNA, 19 nt, Artificial Sequence
  Description of Artificial Sequence: Synthetic oligonucleotide
gggguaggccccgaagccc

SEQ ID NO: 951124 - RNA, 19 nt, Artificial Sequence
  Description of Artificial Sequence: Synthetic oligonucleotide
gcgggaagagaugcgagga

SEQ ID NO: 951125 - RNA, 19 nt, Artificial Sequence
  Description of Artificial Sequence: Synthetic oligonucleotide
cuuagguaguagccagggu

SEQ ID NO: 951126 - RNA, 19 nt, Artificial Sequence
  Description of Artificial Sequence: Synthetic oligonucleotide
acgaaaggucguggucucu

SEQ ID NO: 951127 - RNA, 19 nt, Artificial Sequence
  Description of Artificial Sequence: Synthetic oligonucleotide
ugucuccgcaaggccgacu

SEQ ID NO: 951128 - RNA, 19 nt, Artificial Sequence
  Description of Artificial Sequence: Synthetic oligonucleotide
ccaucccgcacccgcacgc

SEQ ID NO: 951129 - RNA, 19 nt, Artificial Sequence
  Description of Artificial Sequence: Synthetic oligonucleotide
ccaaagagcggggcuggcc

SEQ ID NO: 951130 - RNA, 19 nt, Artificial Sequence
  Description of Artificial Sequence: Synthetic oligonucleotide
ccggaggcuauuuccuuuc

SEQ ID NO: 951131 - RNA, 19 nt, Artificial Sequence
  Description of Artificial Sequence: Synthetic oligonucleotide
ccaacaagggacucuggcu

SEQ ID NO: 951132 - RNA, 19 nt, Artificial Sequence
  Description of Artificial Sequence: Synthetic oligonucleotide
ggcuagaaaguggauccaa

SEQ ID NO: 951133 - RNA, 19 nt, Artificial Sequence
  Description of Artificial Sequence: Synthetic oligonucleotide
ccaguaccggagcgugucg

SEQ ID NO: 951134 - RNA, 19 nt, Artificial Sequence
  Description of Artificial Sequence: Synthetic oligonucleotide
gcgcgcaucuugaggaacc

SEQ ID NO: 951135 - RNA, 19 nt, Artificial Sequence
  Description of Artificial Sequence: Synthetic oligonucleotide
agcgcaugcggaaggcgaa

SEQ ID NO: 951136 - RNA, 19 nt, Artificial Sequence
  Description of Artificial Sequence: Synthetic oligonucleotide
gugccaguaggcgcucaac

SEQ ID NO: 951137 - RNA, 19 nt, Artificial Sequence
  Description of Artificial Sequence: Synthetic oligonucleotide
gcccgcggcaaugcaaccg

SEQ ID NO: 951138 - RNA, 19 nt, Artificial Sequence
  Description of Artificial Sequence: Synthetic oligonucleotide
gccaaggacaaaacaggaa

SEQ ID NO: 951139 - RNA, 19 nt, Artificial Sequence
  Description of Artificial Sequence: Synthetic oligonucleotide
aggcgcgcaucuugaggaa

SEQ ID NO: 951140 - RNA, 19 nt, Artificial Sequence
  Description of Artificial Sequence: Synthetic oligonucleotide
acggggcgcucuuguagau

SEQ ID NO: 951141 - RNA, 19 nt, Artificial Sequence
  Description of Artificial Sequence: Synthetic oligonucleotide
caggggcuguuuacaccuc

SEQ ID NO: 951142 - RNA, 19 nt, Artificial Sequence
  Description of Artificial Sequence: Synthetic oligonucleotide
cagucgggcaggaggccca

SEQ ID NO: 951143 - RNA, 19 nt, Artificial Sequence
  Description of Artificial Sequence: Synthetic oligonucleotide
gguaggcccagcaggcuga

SEQ ID NO: 951144 - RNA, 19 nt, Artificial Sequence
  Description of Artificial Sequence: Synthetic oligonucleotide
cgguagcggaagaaugggc

SEQ ID NO: 951145 - RNA, 19 nt, Artificial Sequence
  Description of Artificial Sequence: Synthetic oligonucleotide
gggcacggaucccgggaag

SEQ ID NO: 951146 - RNA, 19 nt, Artificial Sequence
  Description of Artificial Sequence: Synthetic oligonucleotide
agccacgggguaggccccg

SEQ ID NO: 951147 - RNA, 19 nt, Artificial Sequence
  Description of Artificial Sequence: Synthetic oligonucleotide
gguaaaggacagcccggcu

SEQ ID NO: 951148 - RNA, 19 nt, Artificial Sequence
  Description of Artificial Sequence: Synthetic oligonucleotide
gcacucggccgcaauccag

SEQ ID NO: 951149 - RNA, 19 nt, Artificial Sequence
  Description of Artificial Sequence: Synthetic oligonucleotide
ccgcacucggccgcaaucc

SEQ ID NO: 951150 - RNA, 19 nt, Artificial Sequence
  Description of Artificial Sequence: Synthetic oligonucleotide
gcaauccaggccacguaga

SEQ ID NO: 951151 - RNA, 19 nt, Artificial Sequence
  Description of Artificial Sequence: Synthetic oligonucleotide
accggagcgugucgcccau

SEQ ID NO: 951152 - RNA, 19 nt, Artificial Sequence
  Description of Artificial Sequence: Synthetic oligonucleotide
cguagaagcgcaugcggaa

SEQ ID NO: 951153 - RNA, 19 nt, Artificial Sequence
  Description of Artificial Sequence: Synthetic oligonucleotide
cgcucaacagcauggucca

SEQ ID NO: 951154 - RNA, 19 nt, Artificial Sequence
  Description of Artificial Sequence: Synthetic oligonucleotide
ggacucuggcuggguaaag

SEQ ID NO: 951155 - RNA, 19 nt, Artificial Sequence
  Description of Artificial Sequence: Synthetic oligonucleotide
ccgggaccauguagaagag

SEQ ID NO: 951156 - RNA, 19 nt, Artificial Sequence
  Description of Artificial Sequence: Synthetic oligonucleotide
ggucguggucucugaaaua

SEQ ID NO: 951157 - RNA, 19 nt, Artificial Sequence
  Description of Artificial Sequence: Synthetic oligonucleotide
agucguaggcgcgcaucuu

SEQ ID NO: 951158 - RNA, 19 nt, Artificial Sequence
  Description of Artificial Sequence: Synthetic oligonucleotide
gguaggugcgguagcggaa

SEQ ID NO: 951159 - RNA, 19 nt, Artificial Sequence
  Description of Artificial Sequence: Synthetic oligonucleotide
ggaggccgugccaguaggc

SEQ ID NO: 951160 - RNA, 19 nt, Artificial Sequence
  Description of Artificial Sequence: Synthetic oligonucleotide
ggggagauuuauacauucu

SEQ ID NO: 951161 - RNA, 19 nt, Artificial Sequence
  Description of Artificial Sequence: Synthetic oligonucleotide
ccaaggcgagccccagccc

SEQ ID NO: 951162 - RNA, 19 nt, Artificial Sequence
  Description of Artificial Sequence: Synthetic oligonucleotide
ggacgaagcccaugcacau

SEQ ID NO: 951163 - RNA, 19 nt, Artificial Sequence
  Description of Artificial Sequence: Synthetic oligonucleotide
gcggcaaugcaaccgcacu

SEQ ID NO: 951164 - RNA, 19 nt, Artificial Sequence
  Description of Artificial Sequence: Synthetic oligonucleotide
cggcaaugcaaccgcacuc

SEQ ID NO: 951165 - RNA, 19 nt, Artificial Sequence
  Description of Artificial Sequence: Synthetic oligonucleotide
ggcgcgcaucuugaggaac

SEQ ID NO: 951166 - RNA, 19 nt, Artificial Sequence
  Description of Artificial Sequence: Synthetic oligonucleotide
cguaggcgcgcaucuugag

SEQ ID NO: 951167 - RNA, 19 nt, Artificial Sequence
  Description of Artificial Sequence: Synthetic oligonucleotide
gccugucaugauucccaca

SEQ ID NO: 951168 - RNA, 19 nt, Artificial Sequence
  Description of Artificial Sequence: Synthetic oligonucleotide
ggugcgguagcggaagaau

SEQ ID NO: 951169 - RNA, 19 nt, Artificial Sequence
  Description of Artificial Sequence: Synthetic oligonucleotide
gggcuagaaaguggaucca

SEQ ID NO: 951170 - RNA, 19 nt, Artificial Sequence
  Description of Artificial Sequence: Synthetic oligonucleotide
ccggcucacgcaauuccca

SEQ ID NO: 951171 - RNA, 19 nt, Artificial Sequence
  Description of Artificial Sequence: Synthetic oligonucleotide
gggcuguuuacaccucggu

SEQ ID NO: 951172 - RNA, 19 nt, Artificial Sequence
  Description of Artificial Sequence: Synthetic oligonucleotide
cgcggcaaugcaaccgcac

SEQ ID NO: 951173 - RNA, 19 nt, Artificial Sequence
  Description of Artificial Sequence: Synthetic oligonucleotide
ccgacuccagauagcccuc

SEQ ID NO: 951174 - RNA, 19 nt, Artificial Sequence
  Description of Artificial Sequence: Synthetic oligonucleotide
ccuagcccaacaagggacu

SEQ ID NO: 951175 - RNA, 19 nt, Artificial Sequence
  Description of Artificial Sequence: Synthetic oligonucleotide
ggaacggggcgcucuugua

SEQ ID NO: 951176 - RNA, 19 nt, Artificial Sequence
  Description of Artificial Sequence: Synthetic oligonucleotide
ggcacagcgggauggucau

SEQ ID NO: 951177 - RNA, 19 nt, Artificial Sequence
  Description of Artificial Sequence: Synthetic oligonucleotide
ccgaagcccgcggcaaugc

SEQ ID NO: 951178 - RNA, 19 nt, Artificial Sequence
  Description of Artificial Sequence: Synthetic oligonucleotide
gcgcaugcggaaggcgaag

SEQ ID NO: 951179 - RNA, 19 nt, Artificial Sequence
  Description of Artificial Sequence: Synthetic oligonucleotide
cggcucacgcaauucccac

SEQ ID NO: 951180 - RNA, 19 nt, Artificial Sequence
  Description of Artificial Sequence: Synthetic oligonucleotide
gagcggaacggggcgcucu

SEQ ID NO: 951181 - RNA, 19 nt, Artificial Sequence
  Description of Artificial Sequence: Synthetic oligonucleotide
ccagggcgugacaggagca

SEQ ID NO: 951182 - RNA, 19 nt, Artificial Sequence
  Description of Artificial Sequence: Synthetic oligonucleotide
acagcccggcucacgcaau

SEQ ID NO: 951183 - RNA, 19 nt, Artificial Sequence
  Description of Artificial Sequence: Synthetic oligonucleotide
gugucuccgcaaggccgac

SEQ ID NO: 951184 - RNA, 19 nt, Artificial Sequence
  Description of Artificial Sequence: Synthetic oligonucleotide
gggacccacggggauggga

SEQ ID NO: 951185 - RNA, 19 nt, Artificial Sequence
  Description of Artificial Sequence: Synthetic oligonucleotide
gguaggccccgaagcccgc

SEQ ID NO: 951186 - RNA, 19 nt, Artificial Sequence
  Description of Artificial Sequence: Synthetic oligonucleotide
gccaaagagcggggcuggc

SEQ ID NO: 951187 - RNA, 19 nt, Artificial Sequence
  Description of Artificial Sequence: Synthetic oligonucleotide
cgcuccucagaacguagga

SEQ ID NO: 951188 - RNA, 19 nt, Artificial Sequence
  Description of Artificial Sequence: Synthetic oligonucleotide
cacccgcacgcagaagucu

SEQ ID NO: 951189 - RNA, 19 nt, Artificial Sequence
  Description of Artificial Sequence: Synthetic oligonucleotide
cacucuucccggagcuuuu

SEQ ID NO: 951190 - RNA, 19 nt, Artificial Sequence
  Description of Artificial Sequence: Synthetic oligonucleotide
cgugucgcccauggagagc

SEQ ID NO: 951191 - RNA, 19 nt, Artificial Sequence
  Description of Artificial Sequence: Synthetic oligonucleotide
gccgcaauccaggccacgu

SEQ ID NO: 951192 - RNA, 19 nt, Artificial Sequence
  Description of Artificial Sequence: Synthetic oligonucleotide
gccggaggcuauuuccuuu

SEQ ID NO: 951193 - RNA, 19 nt, Artificial Sequence
  Description of Artificial Sequence: Synthetic oligonucleotide
gcaaccgcacucggccgca

SEQ ID NO: 951194 - RNA, 19 nt, Artificial Sequence
  Description of Artificial Sequence: Synthetic oligonucleotide
cauguuccccaggggcugu

SEQ ID NO: 951195 - RNA, 19 nt, Artificial Sequence
  Description of Artificial Sequence: Synthetic oligonucleotide
cgcacccgcacgcagaagu

SEQ ID NO: 951196 - RNA, 19 nt, Artificial Sequence
  Description of Artificial Sequence: Synthetic oligonucleotide
ccucagccgccaggcacag

SEQ ID NO: 951197 - RNA, 19 nt, Artificial Sequence
  Description of Artificial Sequence: Synthetic oligonucleotide
ccaucaaagaggggacagu

SEQ ID NO: 951198 - RNA, 19 nt, Artificial Sequence
  Description of Artificial Sequence: Synthetic oligonucleotide
gcggaacggggcgcucuug

SEQ ID NO: 951199 - RNA, 19 nt, Artificial Sequence
  Description of Artificial Sequence: Synthetic oligonucleotide
ggagcggaacggggcgcuc

SEQ ID NO: 951200 - RNA, 19 nt, Artificial Sequence
  Description of Artificial Sequence: Synthetic oligonucleotide
ggggacccacggggauggg

SEQ ID NO: 951201 - RNA, 19 nt, Artificial Sequence
  Description of Artificial Sequence: Synthetic oligonucleotide
cccgcacccgcacgcagaa

SEQ ID NO: 951202 - RNA, 19 nt, Artificial Sequence
  Description of Artificial Sequence: Synthetic oligonucleotide
ccgcaauccaggccacgua

SEQ ID NO: 951203 - RNA, 19 nt, Artificial Sequence
  Description of Artificial Sequence: Synthetic oligonucleotide
cgcaugcggaaggcgaaga

SEQ ID NO: 951204 - RNA, 19 nt, Artificial Sequence
  Description of Artificial Sequence: Synthetic oligonucleotide
ccgcggcaaugcaaccgca

SEQ ID NO: 951205 - RNA, 19 nt, Artificial Sequence
  Description of Artificial Sequence: Synthetic oligonucleotide
cggggcgcucuuguagaug

SEQ ID NO: 951206 - RNA, 19 nt, Artificial Sequence
  Description of Artificial Sequence: Synthetic oligonucleotide
gcauccucgcgcacggcuu

SEQ ID NO: 951207 - RNA, 19 nt, Artificial Sequence
  Description of Artificial Sequence: Synthetic oligonucleotide
caaccgcacucggccgcaa

SEQ ID NO: 951208 - RNA, 19 nt, Artificial Sequence
  Description of Artificial Sequence: Synthetic oligonucleotide
ggaagccgacagggaugga

SEQ ID NO: 951209 - RNA, 19 nt, Artificial Sequence
  Description of Artificial Sequence: Synthetic oligonucleotide
ggccuggggugccgccguc

SEQ ID NO: 951210 - RNA, 19 nt, Artificial Sequence
  Description of Artificial Sequence: Synthetic oligonucleotide
cgcgcaucuugaggaacca

SEQ ID NO: 951211 - RNA, 19 nt, Artificial Sequence
  Description of Artificial Sequence: Synthetic oligonucleotide
gggcagcgggcgggcguag

SEQ ID NO: 951212 - RNA, 19 nt, Artificial Sequence
  Description of Artificial Sequence: Synthetic oligonucleotide
cccgcacgcagaagucugu

SEQ ID NO: 951213 - RNA, 19 nt, Artificial Sequence
  Description of Artificial Sequence: Synthetic oligonucleotide
cggaacggggcgcucuugu

SEQ ID NO: 951214 - RNA, 19 nt, Artificial Sequence
  Description of Artificial Sequence: Synthetic oligonucleotide
gcacggcuuccagcgggaa

SEQ ID NO: 951215 - RNA, 19 nt, Artificial Sequence
  Description of Artificial Sequence: Synthetic oligonucleotide
ccgcacccgcacgcagaag

SEQ ID NO: 951216 - RNA, 19 nt, Artificial Sequence
  Description of Artificial Sequence: Synthetic oligonucleotide
ccgccgucuuccucuugcu

SEQ ID NO: 951217 - RNA, 19 nt, Artificial Sequence
  Description of Artificial Sequence: Synthetic oligonucleotide
ccggagcgugucgcccaug

SEQ ID NO: 951218 - RNA, 19 nt, Artificial Sequence
  Description of Artificial Sequence: Synthetic oligonucleotide
ccggagcuuuucccuggcu

SEQ ID NO: 951219 - RNA, 19 nt, Artificial Sequence
  Description of Artificial Sequence: Synthetic oligonucleotide
ccgugccaguaggcgcuca

SEQ ID NO: 951220 - RNA, 19 nt, Artificial Sequence
  Description of Artificial Sequence: Synthetic oligonucleotide
cgggcguagaaggcauccu

SEQ ID NO: 951221 - RNA, 19 nt, Artificial Sequence
  Description of Artificial Sequence: Synthetic oligonucleotide
aauuaaaucuaaaugucgc

SEQ ID NO: 951222 - RNA, 19 nt, Artificial Sequence
  Description of Artificial Sequence: Synthetic oligonucleotide
aauucggcgagucauaggg

SEQ ID NO: 951223 - RNA, 19 nt, Artificial Sequence
  Description of Artificial Sequence: Synthetic oligonucleotide
aagccuuuaaauuccaucg

SEQ ID NO: 951224 - RNA, 19 nt, Artificial Sequence
  Description of Artificial Sequence: Synthetic oligonucleotide
ucuauugagcuccugaagg

SEQ ID NO: 951225 - RNA, 19 nt, Artificial Sequence
  Description of Artificial Sequence: Synthetic oligonucleotide
ucuauugucauccaauuca

SEQ ID NO: 951226 - RNA, 19 nt, Artificial Sequence
  Description of Artificial Sequence: Synthetic oligonucleotide
uuuguauaugcaaagaggu

SEQ ID NO: 951227 - RNA, 19 nt, Artificial Sequence
  Description of Artificial Sequence: Synthetic oligonucleotide
aauucaugcaguugaguac

SEQ ID NO: 951228 - RNA, 19 nt, Artificial Sequence
  Description of Artificial Sequence: Synthetic oligonucleotide
uccucuaucauccugcggg

SEQ ID NO: 951229 - RNA, 19 nt, Artificial Sequence
  Description of Artificial Sequence: Synthetic oligonucleotide
aguacagcaugguagaaac

SEQ ID NO: 951230 - RNA, 19 nt, Artificial Sequence
  Description of Artificial Sequence: Synthetic oligonucleotide
aaauuuuacucuaauucgg

SEQ ID NO: 951231 - RNA, 19 nt, Artificial Sequence
  Description of Artificial Sequence: Synthetic oligonucleotide
gauuccauauuuaucauag

SEQ ID NO: 951232 - RNA, 19 nt, Artificial Sequence
  Description of Artificial Sequence: Synthetic oligonucleotide
aguuaauucaugcaguuga

SEQ ID NO: 951233 - RNA, 19 nt, Artificial Sequence
  Description of Artificial Sequence: Synthetic oligonucleotide
uguguuuggaagaucuugg

SEQ ID NO: 951234 - RNA, 19 nt, Artificial Sequence
  Description of Artificial Sequence: Synthetic oligonucleotide
auaaggaagauuuuguaga

SEQ ID NO: 951235 - RNA, 19 nt, Artificial Sequence
  Description of Artificial Sequence: Synthetic oligonucleotide
uuuaaauuccaucgguuug

SEQ ID NO: 951236 - RNA, 19 nt, Artificial Sequence
  Description of Artificial Sequence: Synthetic oligonucleotide
aauccugaugagcucauuc

SEQ ID NO: 951237 - RNA, 19 nt, Artificial Sequence
  Description of Artificial Sequence: Synthetic oligonucleotide
aaaucuaaaugucgcuuuc

SEQ ID NO: 951238 - RNA, 19 nt, Artificial Sequence
  Description of Artificial Sequence: Synthetic oligonucleotide
cuaaaugucgcuuucguuc

SEQ ID NO: 951239 - RNA, 19 nt, Artificial Sequence
  Description of Artificial Sequence: Synthetic oligonucleotide
gaggaguuaauucaugcag

SEQ ID NO: 951240 - RNA, 19 nt, Artificial Sequence
  Description of Artificial Sequence: Synthetic oligonucleotide
uuuguaucacgcaaggcca

SEQ ID NO: 951241 - RNA, 19 nt, Artificial Sequence
  Description of Artificial Sequence: Synthetic oligonucleotide
uguuugacuguuaaggccu

SEQ ID NO: 951242 - RNA, 19 nt, Artificial Sequence
  Description of Artificial Sequence: Synthetic oligonucleotide
gaugaugccauguaaucug

SEQ ID NO: 951243 - RNA, 19 nt, Artificial Sequence
  Description of Artificial Sequence: Synthetic oligonucleotide
ugaagggccaucaaguaca

SEQ ID NO: 951244 - RNA, 19 nt, Artificial Sequence
  Description of Artificial Sequence: Synthetic oligonucleotide
aacuguugcucugugacac

SEQ ID NO: 951245 - RNA, 19 nt, Artificial Sequence
  Description of Artificial Sequence: Synthetic oligonucleotide
ucuaauucggauuccauau

SEQ ID NO: 951246 - RNA, 19 nt, Artificial Sequence
  Description of Artificial Sequence: Synthetic oligonucleotide
gaugaugaggaguuaauuc

SEQ ID NO: 951247 - RNA, 19 nt, Artificial Sequence
  Description of Artificial Sequence: Synthetic oligonucleotide
auuccaucgguuuggcucc

SEQ ID NO: 951248 - RNA, 19 nt, Artificial Sequence
  Description of Artificial Sequence: Synthetic oligonucleotide
uccuuuaacggguucagcc

SEQ ID NO: 951249 - RNA, 19 nt, Artificial Sequence
  Description of Artificial Sequence: Synthetic oligonucleotide
ucagguuacauacuugccu

SEQ ID NO: 951250 - RNA, 19 nt, Artificial Sequence
  Description of Artificial Sequence: Synthetic oligonucleotide
aauggacaucuauugagcu

SEQ ID NO: 951251 - RNA, 19 nt, Artificial Sequence
  Description of Artificial Sequence: Synthetic oligonucleotide
uuguuuguaucacgcaagg

SEQ ID NO: 951252 - RNA, 19 nt, Artificial Sequence
  Description of Artificial Sequence: Synthetic oligonucleotide
augaugaggaguuaauuca

SEQ ID NO: 951253 - RNA, 19 nt, Artificial Sequence
  Description of Artificial Sequence: Synthetic oligonucleotide
ucacuugugaaauauuuuc

SEQ ID NO: 951254 - RNA, 19 nt, Artificial Sequence
  Description of Artificial Sequence: Synthetic oligonucleotide
acuacugcgaaauuuuacu

SEQ ID NO: 951255 - RNA, 19 nt, Artificial Sequence
  Description of Artificial Sequence: Synthetic oligonucleotide
caacauaugaggaccauug

SEQ ID NO: 951256 - RNA, 19 nt, Artificial Sequence
  Description of Artificial Sequence: Synthetic oligonucleotide
ucacgaacuagcuuuacac

SEQ ID NO: 951257 - RNA, 19 nt, Artificial Sequence
  Description of Artificial Sequence: Synthetic oligonucleotide
aaaucugcuaacuuuuauu

SEQ ID NO: 951258 - RNA, 19 nt, Artificial Sequence
  Description of Artificial Sequence: Synthetic oligonucleotide
uuaacuguuguauuucuau

SEQ ID NO: 951259 - RNA, 19 nt, Artificial Sequence
  Description of Artificial Sequence: Synthetic oligonucleotide
gaugcuuguuuguaucacg

SEQ ID NO: 951260 - RNA, 19 nt, Artificial Sequence
  Description of Artificial Sequence: Synthetic oligonucleotide
uguguauuccucaaccacu

SEQ ID NO: 951261 - RNA, 19 nt, Artificial Sequence
  Description of Artificial Sequence: Synthetic oligonucleotide
auucacuugagcgagccac

SEQ ID NO: 951262 - RNA, 19 nt, Artificial Sequence
  Description of Artificial Sequence: Synthetic oligonucleotide
caauucaaugaacuguugc

SEQ ID NO: 951263 - RNA, 19 nt, Artificial Sequence
  Description of Artificial Sequence: Synthetic oligonucleotide
auuaaaucuaaaugucgcu

SEQ ID NO: 951264 - RNA, 19 nt, Artificial Sequence
  Description of Artificial Sequence: Synthetic oligonucleotide
auauuccugccguacauuc

SEQ ID NO: 951265 - RNA, 19 nt, Artificial Sequence
  Description of Artificial Sequence: Synthetic oligonucleotide
aacggcuuggucugcacuc

SEQ ID NO: 951266 - RNA, 19 nt, Artificial Sequence
  Description of Artificial Sequence: Synthetic oligonucleotide
uucaguuaauaaugcauca

SEQ ID NO: 951267 - RNA, 19 nt, Artificial Sequence
  Description of Artificial Sequence: Synthetic oligonucleotide
uucaguaacgaguuuugcu

SEQ ID NO: 951268 - RNA, 19 nt, Artificial Sequence
  Description of Artificial Sequence: Synthetic oligonucleotide
cuacuagcuccuuuaacgg

SEQ ID NO: 951269 - RNA, 19 nt, Artificial Sequence
  Description of Artificial Sequence: Synthetic oligonucleotide
cacuugugaaauauuuucc

SEQ ID NO: 951270 - RNA, 19 nt, Artificial Sequence
  Description of Artificial Sequence: Synthetic oligonucleotide
cuuugauucgaguuuccag

SEQ ID NO: 951271 - RNA, 19 nt, Artificial Sequence
  Description of Artificial Sequence: Synthetic oligonucleotide
cuauugagcuccugaaggg

SEQ ID NO: 951272 - RNA, 19 nt, Artificial Sequence
  Description of Artificial Sequence: Synthetic oligonucleotide
uuguauaugcaaagaggug

SEQ ID NO: 951273 - RNA, 19 nt, Artificial Sequence
  Description of Artificial Sequence: Synthetic oligonucleotide
ugucugaaauuccugggga

SEQ ID NO: 951274 - RNA, 19 nt, Artificial Sequence
  Description of Artificial Sequence: Synthetic oligonucleotide
uaaaugucgcuuucguuca

SEQ ID NO: 951275 - RNA, 19 nt, Artificial Sequence
  Description of Artificial Sequence: Synthetic oligonucleotide
ucucuagauauucaguuuu

SEQ ID NO: 951276 - RNA, 19 nt, Artificial Sequence
  Description of Artificial Sequence: Synthetic oligonucleotide
gaguuuugcuuucugaaca

SEQ ID NO: 951277 - RNA, 19 nt, Artificial Sequence
  Description of Artificial Sequence: Synthetic oligonucleotide
guaaucugcuucuaauuug

SEQ ID NO: 951278 - RNA, 19 nt, Artificial Sequence
  Description of Artificial Sequence: Synthetic oligonucleotide
ugcaguugaguacuacugc

SEQ ID NO: 951279 - RNA, 19 nt, Artificial Sequence
  Description of Artificial Sequence: Synthetic oligonucleotide
acgaacuagcuuuacaccu

SEQ ID NO: 951280 - RNA, 19 nt, Artificial Sequence
  Description of Artificial Sequence: Synthetic oligonucleotide
uauaaugucuugccuuugu

SEQ ID NO: 951281 - RNA, 19 nt, Artificial Sequence
  Description of Artificial Sequence: Synthetic oligonucleotide
gauuugcccuucuuuaagc

SEQ ID NO: 951282 - RNA, 19 nt, Artificial Sequence
  Description of Artificial Sequence: Synthetic oligonucleotide
aacgaguuuugcuuucuga

SEQ ID NO: 951283 - RNA, 19 nt, Artificial Sequence
  Description of Artificial Sequence: Synthetic oligonucleotide
gagucauagggauuugccc

SEQ ID NO: 951284 - RNA, 19 nt, Artificial Sequence
  Description of Artificial Sequence: Synthetic oligonucleotide
uuuguguauuccucaacca

SEQ ID NO: 951285 - RNA, 19 nt, Artificial Sequence
  Description of Artificial Sequence: Synthetic oligonucleotide
uccuuaauaugucuauccu

SEQ ID NO: 951286 - RNA, 19 nt, Artificial Sequence
  Description of Artificial Sequence: Synthetic oligonucleotide
uuuacuagaccuguuaauu

SEQ ID NO: 951287 - RNA, 19 nt, Artificial Sequence
  Description of Artificial Sequence: Synthetic oligonucleotide
aauuuuacucuaauucgga

SEQ ID NO: 951288 - RNA, 19 nt, Artificial Sequence
  Description of Artificial Sequence: Synthetic oligonucleotide
agaggugcaaaucuuuacu

SEQ ID NO: 951289 - RNA, 19 nt, Artificial Sequence
  Description of Artificial Sequence: Synthetic oligonucleotide
uucgaguuuccagaguacg

SEQ ID NO: 951290 - RNA, 19 nt, Artificial Sequence
  Description of Artificial Sequence: Synthetic oligonucleotide
uuuuacucuaauucggauu

SEQ ID NO: 951291 - RNA, 19 nt, Artificial Sequence
  Description of Artificial Sequence: Synthetic oligonucleotide
uugauucgaguuuccagag

SEQ ID NO: 951292 - RNA, 19 nt, Artificial Sequence
  Description of Artificial Sequence: Synthetic oligonucleotide
ugaggaguuaauucaugca

SEQ ID NO: 951293 - RNA, 19 nt, Artificial Sequence
  Description of Artificial Sequence: Synthetic oligonucleotide
aaagcugucugaaauuccu

SEQ ID NO: 951294 - RNA, 19 nt, Artificial Sequence
  Description of Artificial Sequence: Synthetic oligonucleotide
uacugcgaaauuuuacucu

SEQ ID NO: 951295 - RNA, 19 nt, Artificial Sequence
  Description of Artificial Sequence: Synthetic oligonucleotide
uugaguacuacugcgaaau

SEQ ID NO: 951296 - RNA, 19 nt, Artificial Sequence
  Description of Artificial Sequence: Synthetic oligonucleotide
caaaucuuuacuagaccug

SEQ ID NO: 951297 - RNA, 19 nt, Artificial Sequence
  Description of Artificial Sequence: Synthetic oligonucleotide
uaaaucuaaaugucgcuuu

SEQ ID NO: 951298 - RNA, 19 nt, Artificial Sequence
  Description of Artificial Sequence: Synthetic oligonucleotide
aguaacgaguuuugcuuuc

SEQ ID NO: 951299 - RNA, 19 nt, Artificial Sequence
  Description of Artificial Sequence: Synthetic oligonucleotide
gaauggacaucuauugagc

SEQ ID NO: 951300 - RNA, 19 nt, Artificial Sequence
  Description of Artificial Sequence: Synthetic oligonucleotide
ucuaucauccugcgggugu

SEQ ID NO: 951301 - RNA, 19 nt, Artificial Sequence
  Description of Artificial Sequence: Synthetic oligonucleotide
acaucuauugagcuccuga

SEQ ID NO: 951302 - RNA, 19 nt, Artificial Sequence
  Description of Artificial Sequence: Synthetic oligonucleotide
ucaguuaacuguuguauuu

SEQ ID NO: 951303 - RNA, 19 nt, Artificial Sequence
  Description of Artificial Sequence: Synthetic oligonucleotide
uaauucggauuccauauuu

SEQ ID NO: 951304 - RNA, 19 nt, Artificial Sequence
  Description of Artificial Sequence: Synthetic oligonucleotide
aacggguucagccaccuuu

SEQ ID NO: 951305 - RNA, 19 nt, Artificial Sequence
  Description of Artificial Sequence: Synthetic oligonucleotide
uuaaaucuaaaugucgcuu

SEQ ID NO: 951306 - RNA, 19 nt, Artificial Sequence
  Description of Artificial Sequence: Synthetic oligonucleotide
ucggucacgaacuagcuuu

SEQ ID NO: 951307 - RNA, 19 nt, Artificial Sequence
  Description of Artificial Sequence: Synthetic oligonucleotide
ucuauaaugucuugccuuu

SEQ ID NO: 951308 - RNA, 19 nt, Artificial Sequence
  Description of Artificial Sequence: Synthetic oligonucleotide
uuacuagaccuguuaauuc

SEQ ID NO: 951309 - RNA, 19 nt, Artificial Sequence
  Description of Artificial Sequence: Synthetic oligonucleotide
aucuauugagcuccugaag

SEQ ID NO: 951310 - RNA, 19 nt, Artificial Sequence
  Description of Artificial Sequence: Synthetic oligonucleotide
ucucugaaccauuuucucu

SEQ ID NO: 951311 - RNA, 19 nt, Artificial Sequence
  Description of Artificial Sequence: Synthetic oligonucleotide
uuuacaccuucauauuccu

SEQ ID NO: 951312 - RNA, 19 nt, Artificial Sequence
  Description of Artificial Sequence: Synthetic oligonucleotide
cugucugaaauuccugggg

SEQ ID NO: 951313 - RNA, 19 nt, Artificial Sequence
  Description of Artificial Sequence: Synthetic oligonucleotide
uacuacugcgaaauuuuac

SEQ ID NO: 951314 - RNA, 19 nt, Artificial Sequence
  Description of Artificial Sequence: Synthetic oligonucleotide
augcuuguuuguaucacgc

SEQ ID NO: 951315 - RNA, 19 nt, Artificial Sequence
  Description of Artificial Sequence: Synthetic oligonucleotide
uucauauuccugccguaca

SEQ ID NO: 951316 - RNA, 19 nt, Artificial Sequence
  Description of Artificial Sequence: Synthetic oligonucleotide
uauccuuccgcucuauaau

SEQ ID NO: 951317 - RNA, 19 nt, Artificial Sequence
  Description of Artificial Sequence: Synthetic oligonucleotide
cguauaaacaguuaaaaga

SEQ ID NO: 951318 - RNA, 19 nt, Artificial Sequence
  Description of Artificial Sequence: Synthetic oligonucleotide
augucuauccuuccgcucu

SEQ ID NO: 951319 - RNA, 19 nt, Artificial Sequence
  Description of Artificial Sequence: Synthetic oligonucleotide
uugauuggauccauacccu

SEQ ID NO: 951320 - RNA, 19 nt, Artificial Sequence
  Description of Artificial Sequence: Synthetic oligonucleotide
uaacaaucucugucuauug

SEQ ID NO: 951321 - RNA, 19 nt, Artificial Sequence
  Description of Artificial Sequence: Synthetic oligonucleotide
aauccuucgccgccgccuc

SEQ ID NO: 951322 - RNA, 19 nt, Artificial Sequence
  Description of Artificial Sequence: Synthetic oligonucleotide
ccuguauucaucuaguuca

SEQ ID NO: 951323 - RNA, 19 nt, Artificial Sequence
  Description of Artificial Sequence: Synthetic oligonucleotide
cacgaacuagcuuuacacc

SEQ ID NO: 951324 - RNA, 19 nt, Artificial Sequence
  Description of Artificial Sequence: Synthetic oligonucleotide
uucggauuccauauuuauc

SEQ ID NO: 951325 - RNA, 19 nt, Artificial Sequence
  Description of Artificial Sequence: Synthetic oligonucleotide
ugaugaggaguuaauucau

SEQ ID NO: 951326 - RNA, 19 nt, Artificial Sequence
  Description of Artificial Sequence: Synthetic oligonucleotide
gacuguuaaggccugcuga

SEQ ID NO: 951327 - RNA, 19 nt, Artificial Sequence
  Description of Artificial Sequence: Synthetic oligonucleotide
cacucggucacgaacuagc

SEQ ID NO: 951328 - RNA, 19 nt, Artificial Sequence
  Description of Artificial Sequence: Synthetic oligonucleotide
acgacgcugccuuucaauc

SEQ ID NO: 951329 - RNA, 19 nt, Artificial Sequence
  Description of Artificial Sequence: Synthetic oligonucleotide
aucuaaaugucgcuuucgu

SEQ ID NO: 951330 - RNA, 19 nt, Artificial Sequence
  Description of Artificial Sequence: Synthetic oligonucleotide
aguuccuuaauaugucuau

SEQ ID NO: 951331 - RNA, 19 nt, Artificial Sequence
  Description of Artificial Sequence: Synthetic oligonucleotide
cuuucacucggucacgaac

SEQ ID NO: 951332 - RNA, 19 nt, Artificial Sequence
  Description of Artificial Sequence: Synthetic oligonucleotide
uuucauuucucugaaccau

SEQ ID NO: 951333 - RNA, 19 nt, Artificial Sequence
  Description of Artificial Sequence: Synthetic oligonucleotide
cauccaauucaaugaacug

SEQ ID NO: 951334 - RNA, 19 nt, Artificial Sequence
  Description of Artificial Sequence: Synthetic oligonucleotide
auucggauuccauauuuau

SEQ ID NO: 951335 - RNA, 19 nt, Artificial Sequence
  Description of Artificial Sequence: Synthetic oligonucleotide
ugauuggauccauacccug

SEQ ID NO: 951336 - RNA, 19 nt, Artificial Sequence
  Description of Artificial Sequence: Synthetic oligonucleotide
auaugucuauccuuccgcu

SEQ ID NO: 951337 - RNA, 19 nt, Artificial Sequence
  Description of Artificial Sequence: Synthetic oligonucleotide
ucauauuccugccguacau

SEQ ID NO: 951338 - RNA, 19 nt, Artificial Sequence
  Description of Artificial Sequence: Synthetic oligonucleotide
cauagaaucuuuccacauc

SEQ ID NO: 951339 - RNA, 19 nt, Artificial Sequence
  Description of Artificial Sequence: Synthetic oligonucleotide
ugcgaaauuuuacucuaau

SEQ ID NO: 951340 - RNA, 19 nt, Artificial Sequence
  Description of Artificial Sequence: Synthetic oligonucleotide
uuuaacggguucagccacc

SEQ ID NO: 951341 - RNA, 19 nt, Artificial Sequence
  Description of Artificial Sequence: Synthetic oligonucleotide
gguugagugaagguaaucc

SEQ ID NO: 951342 - RNA, 19 nt, Artificial Sequence
  Description of Artificial Sequence: Synthetic oligonucleotide
cuuuaacggguucagccac

SEQ ID NO: 951343 - RNA, 19 nt, Artificial Sequence
  Description of Artificial Sequence: Synthetic oligonucleotide
agccuuauacuucccagcu

SEQ ID NO: 951344 - RNA, 19 nt, Artificial Sequence
  Description of Artificial Sequence: Synthetic oligonucleotide
gcaguugaguacuacugcg

SEQ ID NO: 951345 - RNA, 19 nt, Artificial Sequence
  Description of Artificial Sequence: Synthetic oligonucleotide
aaguacugggaaguguucu

SEQ ID NO: 951346 - RNA, 19 nt, Artificial Sequence
  Description of Artificial Sequence: Synthetic oligonucleotide
ucgaguuuccagaguacga

SEQ ID NO: 951347 - RNA, 19 nt, Artificial Sequence
  Description of Artificial Sequence: Synthetic oligonucleotide
cauccacuacucugaaugg

SEQ ID NO: 951348 - RNA, 19 nt, Artificial Sequence
  Description of Artificial Sequence: Synthetic oligonucleotide
uuccagaguacgacgcugc

SEQ ID NO: 951349 - RNA, 19 nt, Artificial Sequence
  Description of Artificial Sequence: Synthetic oligonucleotide
caaucuccucaauucggcg

SEQ ID NO: 951350 - RNA, 19 nt, Artificial Sequence
  Description of Artificial Sequence: Synthetic oligonucleotide
uucguucauagaaucuuuc

SEQ ID NO: 951351 - RNA, 19 nt, Artificial Sequence
  Description of Artificial Sequence: Synthetic oligonucleotide
aaguauccuguuccaucag

SEQ ID NO: 951352 - RNA, 19 nt, Artificial Sequence
  Description of Artificial Sequence: Synthetic oligonucleotide
gauugcaaguauccuguuc

SEQ ID NO: 951353 - RNA, 19 nt, Artificial Sequence
  Description of Artificial Sequence: Synthetic oligonucleotide
ugacuguuaaggccugcug

SEQ ID NO: 951354 - RNA, 19 nt, Artificial Sequence
  Description of Artificial Sequence: Synthetic oligonucleotide
uccuuaaucucaguugccu

SEQ ID NO: 951355 - RNA, 19 nt, Artificial Sequence
  Description of Artificial Sequence: Synthetic oligonucleotide
cuacugcgaaauuuuacuc

SEQ ID NO: 951356 - RNA, 19 nt, Artificial Sequence
  Description of Artificial Sequence: Synthetic oligonucleotide
aguugaguacuacugcgaa

SEQ ID NO: 951357 - RNA, 19 nt, Artificial Sequence
  Description of Artificial Sequence: Synthetic oligonucleotide
guuaauucaugcaguugag

SEQ ID NO: 951358 - RNA, 19 nt, Artificial Sequence
  Description of Artificial Sequence: Synthetic oligonucleotide
augaggaccauuguagaca

SEQ ID NO: 951359 - RNA, 19 nt, Artificial Sequence
  Description of Artificial Sequence: Synthetic oligonucleotide
ugucuauugucauccaauu

SEQ ID NO: 951360 - RNA, 19 nt, Artificial Sequence
  Description of Artificial Sequence: Synthetic oligonucleotide
acugcgaaauuuuacucua

SEQ ID NO: 951361 - RNA, 19 nt, Artificial Sequence
  Description of Artificial Sequence: Synthetic oligonucleotide
agucuuagcucauugucuu

SEQ ID NO: 951362 - RNA, 19 nt, Artificial Sequence
  Description of Artificial Sequence: Synthetic oligonucleotide
agaugaugccauguaaucu

SEQ ID NO: 951363 - RNA, 19 nt, Artificial Sequence
  Description of Artificial Sequence: Synthetic oligonucleotide
uuucguucauagaaucuuu

SEQ ID NO: 951364 - RNA, 19 nt, Artificial Sequence
  Description of Artificial Sequence: Synthetic oligonucleotide
auccuuccgcucuauaaug

SEQ ID NO: 951365 - RNA, 19 nt, Artificial Sequence
  Description of Artificial Sequence: Synthetic oligonucleotide
acuguuaaggccugcugaa

SEQ ID NO: 951366 - RNA, 19 nt, Artificial Sequence
  Description of Artificial Sequence: Synthetic oligonucleotide
ucauaaguuccuugcacuu

SEQ ID NO: 951367 - RNA, 19 nt, Artificial Sequence
  Description of Artificial Sequence: Synthetic oligonucleotide
gaugaggaguuaauucaug

SEQ ID NO: 951368 - RNA, 19 nt, Artificial Sequence
  Description of Artificial Sequence: Synthetic oligonucleotide
aguccucuaucauccugcg

SEQ ID NO: 951369 - RNA, 19 nt, Artificial Sequence
  Description of Artificial Sequence: Synthetic oligonucleotide
uggggaacggcuuggucug

SEQ ID NO: 951370 - RNA, 19 nt, Artificial Sequence
  Description of Artificial Sequence: Synthetic oligonucleotide
ucuaaaugucgcuuucguu

SEQ ID NO: 951371 - RNA, 19 nt, Artificial Sequence
  Description of Artificial Sequence: Synthetic oligonucleotide
acuacucugaauggacauc

SEQ ID NO: 951372 - RNA, 19 nt, Artificial Sequence
  Description of Artificial Sequence: Synthetic oligonucleotide
aggaccauuguagacaaau

SEQ ID NO: 951373 - RNA, 19 nt, Artificial Sequence
  Description of Artificial Sequence: Synthetic oligonucleotide
cacgcaaggccaccaaucc

SEQ ID NO: 951374 - RNA, 19 nt, Artificial Sequence
  Description of Artificial Sequence: Synthetic oligonucleotide
uaacgaguuuugcuuucug

SEQ ID NO: 951375 - RNA, 19 nt, Artificial Sequence
  Description of Artificial Sequence: Synthetic oligonucleotide
uguagaagcuuugguguga

SEQ ID NO: 951376 - RNA, 19 nt, Artificial Sequence
  Description of Artificial Sequence: Synthetic oligonucleotide
uguuuguaucacgcaaggc

SEQ ID NO: 951377 - RNA, 19 nt, Artificial Sequence
  Description of Artificial Sequence: Synthetic oligonucleotide
cugaagggccaucaaguac

SEQ ID NO: 951378 - RNA, 19 nt, Artificial Sequence
  Description of Artificial Sequence: Synthetic oligonucleotide
uucacuugagcgagccaca

SEQ ID NO: 951379 - RNA, 19 nt, Artificial Sequence
  Description of Artificial Sequence: Synthetic oligonucleotide
uaacuguuguauuucuauu

SEQ ID NO: 951380 - RNA, 19 nt, Artificial Sequence
  Description of Artificial Sequence: Synthetic oligonucleotide
aguacuacugcgaaauuuu

SEQ ID NO: 951381 - RNA, 19 nt, Artificial Sequence
  Description of Artificial Sequence: Synthetic oligonucleotide
gaguuaauucaugcaguug

SEQ ID NO: 951382 - RNA, 19 nt, Artificial Sequence
  Description of Artificial Sequence: Synthetic oligonucleotide
uucauuucucugaaccauu

SEQ ID NO: 951383 - RNA, 19 nt, Artificial Sequence
  Description of Artificial Sequence: Synthetic oligonucleotide
agggauuugcccuucuuua

SEQ ID NO: 951384 - RNA, 19 nt, Artificial Sequence
  Description of Artificial Sequence: Synthetic oligonucleotide
uugagcgagccacacguau

SEQ ID NO: 951385 - RNA, 19 nt, Artificial Sequence
  Description of Artificial Sequence: Synthetic oligonucleotide
uucggcgagucauagggau

SEQ ID NO: 951386 - RNA, 19 nt, Artificial Sequence
  Description of Artificial Sequence: Synthetic oligonucleotide
ugggaaguguucucuuuac

SEQ ID NO: 951387 - RNA, 19 nt, Artificial Sequence
  Description of Artificial Sequence: Synthetic oligonucleotide
gaacuagcuuuacaccuuc

SEQ ID NO: 951388 - RNA, 19 nt, Artificial Sequence
  Description of Artificial Sequence: Synthetic oligonucleotide
cucuagauauucaguuuuc

SEQ ID NO: 951389 - RNA, 19 nt, Artificial Sequence
  Description of Artificial Sequence: Synthetic oligonucleotide
ugcuuguuuguaucacgca

SEQ ID NO: 951390 - RNA, 19 nt, Artificial Sequence
  Description of Artificial Sequence: Synthetic oligonucleotide
agguuacauacuugccuag

SEQ ID NO: 951391 - RNA, 19 nt, Artificial Sequence
  Description of Artificial Sequence: Synthetic oligonucleotide
ugauucgaguuuccagagu

SEQ ID NO: 951392 - RNA, 19 nt, Artificial Sequence
  Description of Artificial Sequence: Synthetic oligonucleotide
aaagaggugcaaaucuuua

SEQ ID NO: 951393 - RNA, 19 nt, Artificial Sequence
  Description of Artificial Sequence: Synthetic oligonucleotide
ggauuugcccuucuuuaag

SEQ ID NO: 951394 - RNA, 19 nt, Artificial Sequence
  Description of Artificial Sequence: Synthetic oligonucleotide
ucugcacucagguuacaua

SEQ ID NO: 951395 - RNA, 19 nt, Artificial Sequence
  Description of Artificial Sequence: Synthetic oligonucleotide
uaugucuauccuuccgcuc

SEQ ID NO: 951396 - RNA, 19 nt, Artificial Sequence
  Description of Artificial Sequence: Synthetic oligonucleotide
aucuuggaaagcugucuga

SEQ ID NO: 951397 - RNA, 19 nt, Artificial Sequence
  Description of Artificial Sequence: Synthetic oligonucleotide
uuguaucacgcaaggccac

SEQ ID NO: 951398 - RNA, 19 nt, Artificial Sequence
  Description of Artificial Sequence: Synthetic oligonucleotide
gaggugcaaaucuuuacua

SEQ ID NO: 951399 - RNA, 19 nt, Artificial Sequence
  Description of Artificial Sequence: Synthetic oligonucleotide
ugccucaagcaucucaauu

SEQ ID NO: 951400 - RNA, 19 nt, Artificial Sequence
  Description of Artificial Sequence: Synthetic oligonucleotide
ugcuaacuuuuauucacuu

SEQ ID NO: 951401 - RNA, 19 nt, Artificial Sequence
  Description of Artificial Sequence: Synthetic oligonucleotide
ugccuagcucuccucauaa

SEQ ID NO: 951402 - RNA, 19 nt, Artificial Sequence
  Description of Artificial Sequence: Synthetic oligonucleotide
aggaguuaauucaugcagu

SEQ ID NO: 951403 - RNA, 19 nt, Artificial Sequence
  Description of Artificial Sequence: Synthetic oligonucleotide
ccagauugcaaguauccug

SEQ ID NO: 951404 - RNA, 19 nt, Artificial Sequence
  Description of Artificial Sequence: Synthetic oligonucleotide
gauuggauccauacccuga

SEQ ID NO: 951405 - RNA, 19 nt, Artificial Sequence
  Description of Artificial Sequence: Synthetic oligonucleotide
ggauucaguccugugaagc

SEQ ID NO: 951406 - RNA, 19 nt, Artificial Sequence
  Description of Artificial Sequence: Synthetic oligonucleotide
caauucggcgagucauagg

SEQ ID NO: 951407 - RNA, 19 nt, Artificial Sequence
  Description of Artificial Sequence: Synthetic oligonucleotide
ucaaccacuguaggauuca

SEQ ID NO: 951408 - RNA, 19 nt, Artificial Sequence
  Description of Artificial Sequence: Synthetic oligonucleotide
guauaugcaaagaggugca

SEQ ID NO: 951409 - RNA, 19 nt, Artificial Sequence
  Description of Artificial Sequence: Synthetic oligonucleotide
ucgagaugcuuguuuguau

SEQ ID NO: 951410 - RNA, 19 nt, Artificial Sequence
  Description of Artificial Sequence: Synthetic oligonucleotide
aguacgacgcugccuuuca

SEQ ID NO: 951411 - RNA, 19 nt, Artificial Sequence
  Description of Artificial Sequence: Synthetic oligonucleotide
uccagauugcaaguauccu

SEQ ID NO: 951412 - RNA, 19 nt, Artificial Sequence
  Description of Artificial Sequence: Synthetic oligonucleotide
ucgcuuucguucauagaau

SEQ ID NO: 951413 - RNA, 19 nt, Artificial Sequence
  Description of Artificial Sequence: Synthetic oligonucleotide
uccagaguacgacgcugcc

SEQ ID NO: 951414 - RNA, 19 nt, Artificial Sequence
  Description of Artificial Sequence: Synthetic oligonucleotide
ugaugccauguaaucugcu

SEQ ID NO: 951415 - RNA, 19 nt, Artificial Sequence
  Description of Artificial Sequence: Synthetic oligonucleotide
ucuuugagcucgagaugcu

SEQ ID NO: 951416 - RNA, 19 nt, Artificial Sequence
  Description of Artificial Sequence: Synthetic oligonucleotide
aauucggauuccauauuua

SEQ ID NO: 951417 - RNA, 19 nt, Artificial Sequence
  Description of Artificial Sequence: Synthetic oligonucleotide
guugagugaagguaauccu

SEQ ID NO: 951418 - RNA, 19 nt, Artificial Sequence
  Description of Artificial Sequence: Synthetic oligonucleotide
uguaucacgcaaggccacc

SEQ ID NO: 951419 - RNA, 19 nt, Artificial Sequence
  Description of Artificial Sequence: Synthetic oligonucleotide
uugacuguuaaggccugcu

SEQ ID NO: 951420 - RNA, 19 nt, Artificial Sequence
  Description of Artificial Sequence: Synthetic oligonucleotide
cagauugcaaguauccugu

SEQ ID NO: 951421 - RNA, 19 nt, Artificial Sequence
  Description of Artificial Sequence: Synthetic oligonucleotide
caucuauugagcuccugaa

SEQ ID NO: 951422 - RNA, 19 nt, Artificial Sequence
  Description of Artificial Sequence: Synthetic oligonucleotide
uguauucaucuaguucaac

SEQ ID NO: 951423 - RNA, 19 nt, Artificial Sequence
  Description of Artificial Sequence: Synthetic oligonucleotide
cauaaguuccuugcacuuc

SEQ ID NO: 951424 - RNA, 19 nt, Artificial Sequence
  Description of Artificial Sequence: Synthetic oligonucleotide
cucuaauucggauuccaua

SEQ ID NO: 951425 - RNA, 19 nt, Artificial Sequence
  Description of Artificial Sequence: Synthetic oligonucleotide
guuacauacuugccuagcu

SEQ ID NO: 951426 - RNA, 19 nt, Artificial Sequence
  Description of Artificial Sequence: Synthetic oligonucleotide
uacgacgcugccuuucaau

SEQ ID NO: 951427 - RNA, 19 nt, Artificial Sequence
  Description of Artificial Sequence: Synthetic oligonucleotide
gaagaugaugccauguaau

SEQ ID NO: 951428 - RNA, 19 nt, Artificial Sequence
  Description of Artificial Sequence: Synthetic oligonucleotide
agcuuuacaccuucauauu

SEQ ID NO: 951429 - RNA, 19 nt, Artificial Sequence
  Description of Artificial Sequence: Synthetic oligonucleotide
ugagcgagccacacguaua

SEQ ID NO: 951430 - RNA, 19 nt, Artificial Sequence
  Description of Artificial Sequence: Synthetic oligonucleotide
cuuuaagcuuucugaccuc

SEQ ID NO: 951431 - RNA, 19 nt, Artificial Sequence
  Description of Artificial Sequence: Synthetic oligonucleotide
cucauaaguuccuugcacu

SEQ ID NO: 951432 - RNA, 19 nt, Artificial Sequence
  Description of Artificial Sequence: Synthetic oligonucleotide
gucacgaacuagcuuuaca

SEQ ID NO: 951433 - RNA, 19 nt, Artificial Sequence
  Description of Artificial Sequence: Synthetic oligonucleotide
aagggccaucaaguacagc

SEQ ID NO: 951434 - RNA, 19 nt, Artificial Sequence
  Description of Artificial Sequence: Synthetic oligonucleotide
acacguauaaacaguuaaa

SEQ ID NO: 951435 - RNA, 19 nt, Artificial Sequence
  Description of Artificial Sequence: Synthetic oligonucleotide
uccgcucuauaaugucuug

SEQ ID NO: 951436 - RNA, 19 nt, Artificial Sequence
  Description of Artificial Sequence: Synthetic oligonucleotide
cuagcuuuacaccuucaua

SEQ ID NO: 951437 - RNA, 19 nt, Artificial Sequence
  Description of Artificial Sequence: Synthetic oligonucleotide
gccaucaaguacagcaugg

SEQ ID NO: 951438 - RNA, 19 nt, Artificial Sequence
  Description of Artificial Sequence: Synthetic oligonucleotide
uuaacggguucagccaccu

SEQ ID NO: 951439 - RNA, 19 nt, Artificial Sequence
  Description of Artificial Sequence: Synthetic oligonucleotide
agguugagugaagguaauc

SEQ ID NO: 951440 - RNA, 19 nt, Artificial Sequence
  Description of Artificial Sequence: Synthetic oligonucleotide
gagcgagccacacguauaa

SEQ ID NO: 951441 - RNA, 19 nt, Artificial Sequence
  Description of Artificial Sequence: Synthetic oligonucleotide
ccguacauucucauacucc

SEQ ID NO: 951442 - RNA, 19 nt, Artificial Sequence
  Description of Artificial Sequence: Synthetic oligonucleotide
agcuccuuuaacggguuca

SEQ ID NO: 951443 - RNA, 19 nt, Artificial Sequence
  Description of Artificial Sequence: Synthetic oligonucleotide
cacuugagcgagccacacg

SEQ ID NO: 951444 - RNA, 19 nt, Artificial Sequence
  Description of Artificial Sequence: Synthetic oligonucleotide
caguugaguacuacugcga

SEQ ID NO: 951445 - RNA, 19 nt, Artificial Sequence
  Description of Artificial Sequence: Synthetic oligonucleotide
caguuaauaaugcaucaau

SEQ ID NO: 951446 - RNA, 19 nt, Artificial Sequence
  Description of Artificial Sequence: Synthetic oligonucleotide
ugcggguguugcuuauucu

SEQ ID NO: 951447 - RNA, 19 nt, Artificial Sequence
  Description of Artificial Sequence: Synthetic oligonucleotide
ccucauaaguuccuugcac

SEQ ID NO: 951448 - RNA, 19 nt, Artificial Sequence
  Description of Artificial Sequence: Synthetic oligonucleotide
gagaagguugagugaaggu

SEQ ID NO: 951449 - RNA, 19 nt, Artificial Sequence
  Description of Artificial Sequence: Synthetic oligonucleotide
guugaguacuacugcgaaa

SEQ ID NO: 951450 - RNA, 19 nt, Artificial Sequence
  Description of Artificial Sequence: Synthetic oligonucleotide
cuauaaugucuugccuuug

SEQ ID NO: 951451 - RNA, 19 nt, Artificial Sequence
  Description of Artificial Sequence: Synthetic oligonucleotide
ucuauccuuccgcucuaua

SEQ ID NO: 951452 - RNA, 19 nt, Artificial Sequence
  Description of Artificial Sequence: Synthetic oligonucleotide
aguguucucuuuacaggca

SEQ ID NO: 951453 - RNA, 19 nt, Artificial Sequence
  Description of Artificial Sequence: Synthetic oligonucleotide
ugaguacuacugcgaaauu

SEQ ID NO: 951454 - RNA, 19 nt, Artificial Sequence
  Description of Artificial Sequence: Synthetic oligonucleotide
uucacucggucacgaacua

SEQ ID NO: 951455 - RNA, 19 nt, Artificial Sequence
  Description of Artificial Sequence: Synthetic oligonucleotide
gguuacauacuugccuagc

SEQ ID NO: 951456 - RNA, 19 nt, Artificial Sequence
  Description of Artificial Sequence: Synthetic oligonucleotide
ucacuugagcgagccacac

SEQ ID NO: 951457 - RNA, 19 nt, Artificial Sequence
  Description of Artificial Sequence: Synthetic oligonucleotide
cguacauucucauacucca

SEQ ID NO: 951458 - RNA, 19 nt, Artificial Sequence
  Description of Artificial Sequence: Synthetic oligonucleotide
cuuuacuagaccuguuaau

SEQ ID NO: 951459 - RNA, 19 nt, Artificial Sequence
  Description of Artificial Sequence: Synthetic oligonucleotide
auagggauuugcccuucuu

SEQ ID NO: 951460 - RNA, 19 nt, Artificial Sequence
  Description of Artificial Sequence: Synthetic oligonucleotide
acgcaaggccaccaauccu

SEQ ID NO: 951461 - RNA, 19 nt, Artificial Sequence
  Description of Artificial Sequence: Synthetic oligonucleotide
gcuuggagcugauuuucug

SEQ ID NO: 951462 - RNA, 19 nt, Artificial Sequence
  Description of Artificial Sequence: Synthetic oligonucleotide
agcugauuuucugcuccag

SEQ ID NO: 951463 - RNA, 19 nt, Artificial Sequence
  Description of Artificial Sequence: Synthetic oligonucleotide
cugcggguguugcuuauuc

SEQ ID NO: 951464 - RNA, 19 nt, Artificial Sequence
  Description of Artificial Sequence: Synthetic oligonucleotide
cuacucugaauggacaucu

SEQ ID NO: 951465 - RNA, 19 nt, Artificial Sequence
  Description of Artificial Sequence: Synthetic oligonucleotide
cuguauucaucuaguucaa

SEQ ID NO: 951466 - RNA, 19 nt, Artificial Sequence
  Description of Artificial Sequence: Synthetic oligonucleotide
gcggguguugcuuauucuc

SEQ ID NO: 951467 - RNA, 19 nt, Artificial Sequence
  Description of Artificial Sequence: Synthetic oligonucleotide
gacacgaagcugugaagau

SEQ ID NO: 951468 - RNA, 19 nt, Artificial Sequence
  Description of Artificial Sequence: Synthetic oligonucleotide
acgcugccuuucaaucucc

SEQ ID NO: 951469 - RNA, 19 nt, Artificial Sequence
  Description of Artificial Sequence: Synthetic oligonucleotide
ucuucagucuuagcucauu

SEQ ID NO: 951470 - RNA, 19 nt, Artificial Sequence
  Description of Artificial Sequence: Synthetic oligonucleotide
cuccuuuaacggguucagc

SEQ ID NO: 951471 - RNA, 19 nt, Artificial Sequence
  Description of Artificial Sequence: Synthetic oligonucleotide
cgaguuuugcuuucugaac

SEQ ID NO: 951472 - RNA, 19 nt, Artificial Sequence
  Description of Artificial Sequence: Synthetic oligonucleotide
ggauuccauauuuaucaua

SEQ ID NO: 951473 - RNA, 19 nt, Artificial Sequence
  Description of Artificial Sequence: Synthetic oligonucleotide
guaauccuucgccgccgcc

SEQ ID NO: 951474 - RNA, 19 nt, Artificial Sequence
  Description of Artificial Sequence: Synthetic oligonucleotide
ccuuuaacggguucagcca

SEQ ID NO: 951475 - RNA, 19 nt, Artificial Sequence
  Description of Artificial Sequence: Synthetic oligonucleotide
gaguacgacgcugccuuuc

SEQ ID NO: 951476 - RNA, 19 nt, Artificial Sequence
  Description of Artificial Sequence: Synthetic oligonucleotide
uacuugccuagcucuccuc

SEQ ID NO: 951477 - RNA, 19 nt, Artificial Sequence
  Description of Artificial Sequence: Synthetic oligonucleotide
agauugcaaguauccuguu

SEQ ID NO: 951478 - RNA, 19 nt, Artificial Sequence
  Description of Artificial Sequence: Synthetic oligonucleotide
cuuucguucauagaaucuu

SEQ ID NO: 951479 - RNA, 19 nt, Artificial Sequence
  Description of Artificial Sequence: Synthetic oligonucleotide
ccaauucaaugaacuguug

SEQ ID NO: 951480 - RNA, 19 nt, Artificial Sequence
  Description of Artificial Sequence: Synthetic oligonucleotide
acucuaauucggauuccau

SEQ ID NO: 951481 - RNA, 19 nt, Artificial Sequence
  Description of Artificial Sequence: Synthetic oligonucleotide
ucggcgagucauagggauu

SEQ ID NO: 951482 - RNA, 19 nt, Artificial Sequence
  Description of Artificial Sequence: Synthetic oligonucleotide
gguaauccuucgccgccgc

SEQ ID NO: 951483 - RNA, 19 nt, Artificial Sequence
  Description of Artificial Sequence: Synthetic oligonucleotide
cucaauucggcgagucaua

SEQ ID NO: 951484 - RNA, 19 nt, Artificial Sequence
  Description of Artificial Sequence: Synthetic oligonucleotide
gggaaguguucucuuuaca

SEQ ID NO: 951485 - RNA, 19 nt, Artificial Sequence
  Description of Artificial Sequence: Synthetic oligonucleotide
uagcuccuuuaacggguuc

SEQ ID NO: 951486 - RNA, 19 nt, Artificial Sequence
  Description of Artificial Sequence: Synthetic oligonucleotide
cagaguacgacgcugccuu

SEQ ID NO: 951487 - RNA, 19 nt, Artificial Sequence
  Description of Artificial Sequence: Synthetic oligonucleotide
cgagaugcuuguuuguauc

SEQ ID NO: 951488 - RNA, 19 nt, Artificial Sequence
  Description of Artificial Sequence: Synthetic oligonucleotide
cugcuaacuuuuauucacu

SEQ ID NO: 951489 - RNA, 19 nt, Artificial Sequence
  Description of Artificial Sequence: Synthetic oligonucleotide
guaucacgcaaggccacca

SEQ ID NO: 951490 - RNA, 19 nt, Artificial Sequence
  Description of Artificial Sequence: Synthetic oligonucleotide
cucuaucauccugcgggug

SEQ ID NO: 951491 - RNA, 19 nt, Artificial Sequence
  Description of Artificial Sequence: Synthetic oligonucleotide
acucggucacgaacuagcu

SEQ ID NO: 951492 - RNA, 19 nt, Artificial Sequence
  Description of Artificial Sequence: Synthetic oligonucleotide
gaacggcuuggucugcacu

SEQ ID NO: 951493 - RNA, 19 nt, Artificial Sequence
  Description of Artificial Sequence: Synthetic oligonucleotide
cuguugcucugugacacga

SEQ ID NO: 951494 - RNA, 19 nt, Artificial Sequence
  Description of Artificial Sequence: Synthetic oligonucleotide
gccguacauucucauacuc

SEQ ID NO: 951495 - RNA, 19 nt, Artificial Sequence
  Description of Artificial Sequence: Synthetic oligonucleotide
ggaguuaauucaugcaguu

SEQ ID NO: 951496 - RNA, 19 nt, Artificial Sequence
  Description of Artificial Sequence: Synthetic oligonucleotide
cacuacucugaauggacau

SEQ ID NO: 951497 - RNA, 19 nt, Artificial Sequence
  Description of Artificial Sequence: Synthetic oligonucleotide
cugcgaaauuuuacucuaa

SEQ ID NO: 951498 - RNA, 19 nt, Artificial Sequence
  Description of Artificial Sequence: Synthetic oligonucleotide
cucgagaugcuuguuugua

SEQ ID NO: 951499 - RNA, 19 nt, Artificial Sequence
  Description of Artificial Sequence: Synthetic oligonucleotide
auucggcgagucauaggga

SEQ ID NO: 951500 - RNA, 19 nt, Artificial Sequence
  Description of Artificial Sequence: Synthetic oligonucleotide
acggcuuggucugcacuca

SEQ ID NO: 951501 - RNA, 19 nt, Artificial Sequence
  Description of Artificial Sequence: Synthetic oligonucleotide
cgcuuucguucauagaauc

SEQ ID NO: 951502 - RNA, 19 nt, Artificial Sequence
  Description of Artificial Sequence: Synthetic oligonucleotide
ggcuuggucugcacucagg

SEQ ID NO: 951503 - RNA, 19 nt, Artificial Sequence
  Description of Artificial Sequence: Synthetic oligonucleotide
guaacgaguuuugcuuucu

SEQ ID NO: 951504 - RNA, 19 nt, Artificial Sequence
  Description of Artificial Sequence: Synthetic oligonucleotide
gcgagucauagggauuugc

SEQ ID NO: 951505 - RNA, 19 nt, Artificial Sequence
  Description of Artificial Sequence: Synthetic oligonucleotide
gccuagcucuccucauaag

SEQ ID NO: 951506 - RNA, 19 nt, Artificial Sequence
  Description of Artificial Sequence: Synthetic oligonucleotide
cuaauucggauuccauauu

SEQ ID NO: 951507 - RNA, 19 nt, Artificial Sequence
  Description of Artificial Sequence: Synthetic oligonucleotide
gcgaaauuuuacucuaauu

SEQ ID NO: 951508 - RNA, 19 nt, Artificial Sequence
  Description of Artificial Sequence: Synthetic oligonucleotide
agaguacgacgcugccuuu

SEQ ID NO: 951509 - RNA, 19 nt, Artificial Sequence
  Description of Artificial Sequence: Synthetic oligonucleotide
ccacuacucugaauggaca

SEQ ID NO: 951510 - RNA, 19 nt, Artificial Sequence
  Description of Artificial Sequence: Synthetic oligonucleotide
ccuagcucuccucauaagu

SEQ ID NO: 951511 - RNA, 19 nt, Artificial Sequence
  Description of Artificial Sequence: Synthetic oligonucleotide
uaacggguucagccaccuu

SEQ ID NO: 951512 - RNA, 19 nt, Artificial Sequence
  Description of Artificial Sequence: Synthetic oligonucleotide
cuugagcgagccacacgua

SEQ ID NO: 951513 - RNA, 19 nt, Artificial Sequence
  Description of Artificial Sequence: Synthetic oligonucleotide
ccuuuaaauuccaucgguu

SEQ ID NO: 951514 - RNA, 19 nt, Artificial Sequence
  Description of Artificial Sequence: Synthetic oligonucleotide
gcuuucguucauagaaucu

SEQ ID NO: 951515 - RNA, 19 nt, Artificial Sequence
  Description of Artificial Sequence: Synthetic oligonucleotide
guacgacgcugccuuucaa

SEQ ID NO: 951516 - RNA, 19 nt, Artificial Sequence
  Description of Artificial Sequence: Synthetic oligonucleotide
ggucacgaacuagcuuuac

SEQ ID NO: 951517 - RNA, 19 nt, Artificial Sequence
  Description of Artificial Sequence: Synthetic oligonucleotide
ccacaucuuguuuguaucu

SEQ ID NO: 951518 - RNA, 19 nt, Artificial Sequence
  Description of Artificial Sequence: Synthetic oligonucleotide
cauagggauuugcccuucu

SEQ ID NO: 951519 - RNA, 19 nt, Artificial Sequence
  Description of Artificial Sequence: Synthetic oligonucleotide
cuagcuccuuuaacggguu

SEQ ID NO: 951520 - RNA, 19 nt, Artificial Sequence
  Description of Artificial Sequence: Synthetic oligonucleotide
cauauuccugccguacauu

SEQ ID NO: 951521 - RNA, 19 nt, Artificial Sequence
  Description of Artificial Sequence: Synthetic oligonucleotide
gcucgagaugcuuguuugu

SEQ ID NO: 951522 - RNA, 19 nt, Artificial Sequence
  Description of Artificial Sequence: Synthetic oligonucleotide
cuuugagcucgagaugcuu

SEQ ID NO: 951523 - RNA, 19 nt, Artificial Sequence
  Description of Artificial Sequence: Synthetic oligonucleotide
ggcgagucauagggauuug

SEQ ID NO: 951524 - RNA, 19 nt, Artificial Sequence
  Description of Artificial Sequence: Synthetic oligonucleotide
cucggucacgaacuagcuu

SEQ ID NO: 951525 - RNA, 19 nt, Artificial Sequence
  Description of Artificial Sequence: Synthetic oligonucleotide
guacuugcuuuucguucuu

SEQ ID NO: 951526 - RNA, 19 nt, Artificial Sequence
  Description of Artificial Sequence: Synthetic oligonucleotide
ccacacguauaaacaguua

SEQ ID NO: 951527 - RNA, 19 nt, Artificial Sequence
  Description of Artificial Sequence: Synthetic oligonucleotide
ccuucauauuccugccgua

SEQ ID NO: 951528 - RNA, 19 nt, Artificial Sequence
  Description of Artificial Sequence: Synthetic oligonucleotide
gaggaccauuguagacaaa

SEQ ID NO: 951529 - RNA, 19 nt, Artificial Sequence
  Description of Artificial Sequence: Synthetic oligonucleotide
cgguuuggcuccaacauau

SEQ ID NO: 951530 - RNA, 19 nt, Artificial Sequence
  Description of Artificial Sequence: Synthetic oligonucleotide
ccccuuuaguucuucaguu

SEQ ID NO: 951531 - RNA, 19 nt, Artificial Sequence
  Description of Artificial Sequence: Synthetic oligonucleotide
cuaucauccugcggguguu

SEQ ID NO: 951532 - RNA, 19 nt, Artificial Sequence
  Description of Artificial Sequence: Synthetic oligonucleotide
ccucuaucauccugcgggu

SEQ ID NO: 951533 - RNA, 19 nt, Artificial Sequence
  Description of Artificial Sequence: Synthetic oligonucleotide
cggguguugcuuauucucu

SEQ ID NO: 951534 - RNA, 19 nt, Artificial Sequence
  Description of Artificial Sequence: Synthetic oligonucleotide
ggggaacggcuuggucugc

SEQ ID NO: 951535 - RNA, 19 nt, Artificial Sequence
  Description of Artificial Sequence: Synthetic oligonucleotide
gccauguaaucugcuucua

SEQ ID NO: 951536 - RNA, 19 nt, Artificial Sequence
  Description of Artificial Sequence: Synthetic oligonucleotide
gucuauccuuccgcucuau

SEQ ID NO: 951537 - RNA, 19 nt, Artificial Sequence
  Description of Artificial Sequence: Synthetic oligonucleotide
cgaacuagcuuuacaccuu

SEQ ID NO: 951538 - RNA, 19 nt, Artificial Sequence
  Description of Artificial Sequence: Synthetic oligonucleotide
ccaacauaugaggaccauu

SEQ ID NO: 951539 - RNA, 19 nt, Artificial Sequence
  Description of Artificial Sequence: Synthetic oligonucleotide
gccggucaugcucuucauu

SEQ ID NO: 951540 - RNA, 19 nt, Artificial Sequence
  Description of Artificial Sequence: Synthetic oligonucleotide
cggucacgaacuagcuuua

SEQ ID NO: 951541 - RNA, 19 nt, Artificial Sequence
  Description of Artificial Sequence: Synthetic oligonucleotide
cggcgagucauagggauuu

SEQ ID NO: 951542 - RNA, 19 nt, Artificial Sequence
  Description of Artificial Sequence: Synthetic oligonucleotide
ccgccucugaaaagccuuu

SEQ ID NO: 951543 - RNA, 19 nt, Artificial Sequence
  Description of Artificial Sequence: Synthetic oligonucleotide
ccugcggguguugcuuauu

SEQ ID NO: 951544 - RNA, 19 nt, Artificial Sequence
  Description of Artificial Sequence: Synthetic oligonucleotide
uguacuauagcacaggaac

SEQ ID NO: 951545 - RNA, 19 nt, Artificial Sequence
  Description of Artificial Sequence: Synthetic oligonucleotide
ucuauagugaauuacaaaa

SEQ ID NO: 951546 - RNA, 19 nt, Artificial Sequence
  Description of Artificial Sequence: Synthetic oligonucleotide
uuaaaaucucccuugacag

SEQ ID NO: 951547 - RNA, 19 nt, Artificial Sequence
  Description of Artificial Sequence: Synthetic oligonucleotide
ucaacaaugcucaaguucc

SEQ ID NO: 951548 - RNA, 19 nt, Artificial Sequence
  Description of Artificial Sequence: Synthetic oligonucleotide
aacaauacuaacccuaugu

SEQ ID NO: 951549 - RNA, 19 nt, Artificial Sequence
  Description of Artificial Sequence: Synthetic oligonucleotide
uuaauaccagcaaauacag

SEQ ID NO: 951550 - RNA, 19 nt, Artificial Sequence
  Description of Artificial Sequence: Synthetic oligonucleotide
aauacuaacccuaugugag

SEQ ID NO: 951551 - RNA, 19 nt, Artificial Sequence
  Description of Artificial Sequence: Synthetic oligonucleotide
uugacaguuacauauagga

SEQ ID NO: 951552 - RNA, 19 nt, Artificial Sequence
  Description of Artificial Sequence: Synthetic oligonucleotide
ugucauucuauccuaaaag

SEQ ID NO: 951553 - RNA, 19 nt, Artificial Sequence
  Description of Artificial Sequence: Synthetic oligonucleotide
ucuucaaagagagaaaugc

SEQ ID NO: 951554 - RNA, 19 nt, Artificial Sequence
  Description of Artificial Sequence: Synthetic oligonucleotide
aaauggauaaugcuacuug

SEQ ID NO: 951555 - RNA, 19 nt, Artificial Sequence
  Description of Artificial Sequence: Synthetic oligonucleotide
uaauaugcugcuaugugag

SEQ ID NO: 951556 - RNA, 19 nt, Artificial Sequence
  Description of Artificial Sequence: Synthetic oligonucleotide
auaaugugucauucuaucc

SEQ ID NO: 951557 - RNA, 19 nt, Artificial Sequence
  Description of Artificial Sequence: Synthetic oligonucleotide
gaugguuuagucuacuggc

SEQ ID NO: 951558 - RNA, 19 nt, Artificial Sequence
  Description of Artificial Sequence: Synthetic oligonucleotide
uguaaagcaaacaguaugu

SEQ ID NO: 951559 - RNA, 19 nt, Artificial Sequence
  Description of Artificial Sequence: Synthetic oligonucleotide
aguacuaccucucacacga

SEQ ID NO: 951560 - RNA, 19 nt, Artificial Sequence
  Description of Artificial Sequence: Synthetic oligonucleotide
gucauucuauccuaaaagg

SEQ ID NO: 951561 - RNA, 19 nt, Artificial Sequence
  Description of Artificial Sequence: Synthetic oligonucleotide
agcaaauacagccucauga

SEQ ID NO: 951562 - RNA, 19 nt, Artificial Sequence
  Description of Artificial Sequence: Synthetic oligonucleotide
acaggaaccucguucaucg

SEQ ID NO: 951563 - RNA, 19 nt, Artificial Sequence
  Description of Artificial Sequence: Synthetic oligonucleotide
ugaauguaaagcaaacagu

SEQ ID NO: 951564 - RNA, 19 nt, Artificial Sequence
  Description of Artificial Sequence: Synthetic oligonucleotide
uaaugugucauucuauccu

SEQ ID NO: 951565 - RNA, 19 nt, Artificial Sequence
  Description of Artificial Sequence: Synthetic oligonucleotide
aguagugagccacucuucc

SEQ ID NO: 951566 - RNA, 19 nt, Artificial Sequence
  Description of Artificial Sequence: Synthetic oligonucleotide
ugucaguuaacccugcaug

SEQ ID NO: 951567 - RNA, 19 nt, Artificial Sequence
  Description of Artificial Sequence: Synthetic oligonucleotide
guaggaugcacacagguag

SEQ ID NO: 951568 - RNA, 19 nt, Artificial Sequence
  Description of Artificial Sequence: Synthetic oligonucleotide
cauauaggagcacaguucc

SEQ ID NO: 951569 - RNA, 19 nt, Artificial Sequence
  Description of Artificial Sequence: Synthetic oligonucleotide
acauugagcccuucuaacc

SEQ ID NO: 951570 - RNA, 19 nt, Artificial Sequence
  Description of Artificial Sequence: Synthetic oligonucleotide
augucuagaauugucacac

SEQ ID NO: 951571 - RNA, 19 nt, Artificial Sequence
  Description of Artificial Sequence: Synthetic oligonucleotide
aaugcucaaguuccacagc

SEQ ID NO: 951572 - RNA, 19 nt, Artificial Sequence
  Description of Artificial Sequence: Synthetic oligonucleotide
acagacacaauacaacuug

SEQ ID NO: 951573 - RNA, 19 nt, Artificial Sequence
  Description of Artificial Sequence: Synthetic oligonucleotide
aacauguugaccaaugagu

SEQ ID NO: 951574 - RNA, 19 nt, Artificial Sequence
  Description of Artificial Sequence: Synthetic oligonucleotide
ucuacaucgguuuuagaac

SEQ ID NO: 951575 - RNA, 19 nt, Artificial Sequence
  Description of Artificial Sequence: Synthetic oligonucleotide
cucaugauaguagugagcc

SEQ ID NO: 951576 - RNA, 19 nt, Artificial Sequence
  Description of Artificial Sequence: Synthetic oligonucleotide
aacaguauguucucacucu

SEQ ID NO: 951577 - RNA, 19 nt, Artificial Sequence
  Description of Artificial Sequence: Synthetic oligonucleotide
uauaaugugucauucuauc

SEQ ID NO: 951578 - RNA, 19 nt, Artificial Sequence
  Description of Artificial Sequence: Synthetic oligonucleotide
auaauaugcugcuauguga

SEQ ID NO: 951579 - RNA, 19 nt, Artificial Sequence
  Description of Artificial Sequence: Synthetic oligonucleotide
ucauucuauccuaaaaggu

SEQ ID NO: 951580 - RNA, 19 nt, Artificial Sequence
  Description of Artificial Sequence: Synthetic oligonucleotide
auaguauagacuucaauuu

SEQ ID NO: 951581 - RNA, 19 nt, Artificial Sequence
  Description of Artificial Sequence: Synthetic oligonucleotide
auaccauaagcacacccac

SEQ ID NO: 951582 - RNA, 19 nt, Artificial Sequence
  Description of Artificial Sequence: Synthetic oligonucleotide
ucuacagugaauuccaauu

SEQ ID NO: 951583 - RNA, 19 nt, Artificial Sequence
  Description of Artificial Sequence: Synthetic oligonucleotide
aaaacuuacacaagcauuu

SEQ ID NO: 951584 - RNA, 19 nt, Artificial Sequence
  Description of Artificial Sequence: Synthetic oligonucleotide
cuauagugaauuacaaaac

SEQ ID NO: 951585 - RNA, 19 nt, Artificial Sequence
  Description of Artificial Sequence: Synthetic oligonucleotide
ugacaguuacauauaggag

SEQ ID NO: 951586 - RNA, 19 nt, Artificial Sequence
  Description of Artificial Sequence: Synthetic oligonucleotide
acagguaggagaaaagaac

SEQ ID NO: 951587 - RNA, 19 nt, Artificial Sequence
  Description of Artificial Sequence: Synthetic oligonucleotide
ucucaaauuuaagucaacc

SEQ ID NO: 951588 - RNA, 19 nt, Artificial Sequence
  Description of Artificial Sequence: Synthetic oligonucleotide
acaauacuaacccuaugug

SEQ ID NO: 951589 - RNA, 19 nt, Artificial Sequence
  Description of Artificial Sequence: Synthetic oligonucleotide
caauguagugcccuggugc

SEQ ID NO: 951590 - RNA, 19 nt, Artificial Sequence
  Description of Artificial Sequence: Synthetic oligonucleotide
uuaaaggucauugcuguug

SEQ ID NO: 951591 - RNA, 19 nt, Artificial Sequence
  Description of Artificial Sequence: Synthetic oligonucleotide
agugaauggaguaagguca

SEQ ID NO: 951592 - RNA, 19 nt, Artificial Sequence
  Description of Artificial Sequence: Synthetic oligonucleotide
aauacacagugcgugguuc

SEQ ID NO: 951593 - RNA, 19 nt, Artificial Sequence
  Description of Artificial Sequence: Synthetic oligonucleotide
ucuagaauugucacaccca

SEQ ID NO: 951594 - RNA, 19 nt, Artificial Sequence
  Description of Artificial Sequence: Synthetic oligonucleotide
cugucuagacuaauaaggc

SEQ ID NO: 951595 - RNA, 19 nt, Artificial Sequence
  Description of Artificial Sequence: Synthetic oligonucleotide
guaacagccuuugagaagc

SEQ ID NO: 951596 - RNA, 19 nt, Artificial Sequence
  Description of Artificial Sequence: Synthetic oligonucleotide
ucaauaauaugcugcuaug

SEQ ID NO: 951597 - RNA, 19 nt, Artificial Sequence
  Description of Artificial Sequence: Synthetic oligonucleotide
acugacuuaaaacugucaa

SEQ ID NO: 951598 - RNA, 19 nt, Artificial Sequence
  Description of Artificial Sequence: Synthetic oligonucleotide
acugucaaauggcuaacuc

SEQ ID NO: 951599 - RNA, 19 nt, Artificial Sequence
  Description of Artificial Sequence: Synthetic oligonucleotide
uggauaaugcuacuugcac

SEQ ID NO: 951600 - RNA, 19 nt, Artificial Sequence
  Description of Artificial Sequence: Synthetic oligonucleotide
gcugucuagacuaauaagg

SEQ ID NO: 951601 - RNA, 19 nt, Artificial Sequence
  Description of Artificial Sequence: Synthetic oligonucleotide
aaguacuaccucucacacg

SEQ ID NO: 951602 - RNA, 19 nt, Artificial Sequence
  Description of Artificial Sequence: Synthetic oligonucleotide
agacaaggcuacuuaaaag

SEQ ID NO: 951603 - RNA, 19 nt, Artificial Sequence
  Description of Artificial Sequence: Synthetic oligonucleotide
ucuagacuaauaaggcuac

SEQ ID NO: 951604 - RNA, 19 nt, Artificial Sequence
  Description of Artificial Sequence: Synthetic oligonucleotide
guuauuaccaaccuacucu

SEQ ID NO: 951605 - RNA, 19 nt, Artificial Sequence
  Description of Artificial Sequence: Synthetic oligonucleotide
ucuaaccugcacaaacacc

SEQ ID NO: 951606 - RNA, 19 nt, Artificial Sequence
  Description of Artificial Sequence: Synthetic oligonucleotide
auaugcugcuaugugagcg

SEQ ID NO: 951607 - RNA, 19 nt, Artificial Sequence
  Description of Artificial Sequence: Synthetic oligonucleotide
caacuugcaaaucuaaguc

SEQ ID NO: 951608 - RNA, 19 nt, Artificial Sequence
  Description of Artificial Sequence: Synthetic oligonucleotide
uccaugaucccguuaggag

SEQ ID NO: 951609 - RNA, 19 nt, Artificial Sequence
  Description of Artificial Sequence: Synthetic oligonucleotide
ucucucaaauuuaagucaa

SEQ ID NO: 951610 - RNA, 19 nt, Artificial Sequence
  Description of Artificial Sequence: Synthetic oligonucleotide
uguuauuaccaaccuacuc

SEQ ID NO: 951611 - RNA, 19 nt, Artificial Sequence
  Description of Artificial Sequence: Synthetic oligonucleotide
caaugcucaaguuccacag

SEQ ID NO: 951612 - RNA, 19 nt, Artificial Sequence
  Description of Artificial Sequence: Synthetic oligonucleotide
uuuuagaacugucucucaa

SEQ ID NO: 951613 - RNA, 19 nt, Artificial Sequence
  Description of Artificial Sequence: Synthetic oligonucleotide
aaagagagaaaugccggug

SEQ ID NO: 951614 - RNA, 19 nt, Artificial Sequence
  Description of Artificial Sequence: Synthetic oligonucleotide
agugaauuccaauuccagu

SEQ ID NO: 951615 - RNA, 19 nt, Artificial Sequence
  Description of Artificial Sequence: Synthetic oligonucleotide
gcuaugugagcguagaugc

SEQ ID NO: 951616 - RNA, 19 nt, Artificial Sequence
  Description of Artificial Sequence: Synthetic oligonucleotide
cuauagcacaggaaccucg

SEQ ID NO: 951617 - RNA, 19 nt, Artificial Sequence
  Description of Artificial Sequence: Synthetic oligonucleotide
uugggcuacagaaucaaaa

SEQ ID NO: 951618 - RNA, 19 nt, Artificial Sequence
  Description of Artificial Sequence: Synthetic oligonucleotide
ugcuucuacagauucccag

SEQ ID NO: 951619 - RNA, 19 nt, Artificial Sequence
  Description of Artificial Sequence: Synthetic oligonucleotide
auaaggcuacuuuggaaag

SEQ ID NO: 951620 - RNA, 19 nt, Artificial Sequence
  Description of Artificial Sequence: Synthetic oligonucleotide
aaugugucauucuauccua

SEQ ID NO: 951621 - RNA, 19 nt, Artificial Sequence
  Description of Artificial Sequence: Synthetic oligonucleotide
ucgguuuuagaacugucuc

SEQ ID NO: 951622 - RNA, 19 nt, Artificial Sequence
  Description of Artificial Sequence: Synthetic oligonucleotide
aguuacuccagaacugccc

SEQ ID NO: 951623 - RNA, 19 nt, Artificial Sequence
  Description of Artificial Sequence: Synthetic oligonucleotide
aacaaugcucaaguuccac

SEQ ID NO: 951624 - RNA, 19 nt, Artificial Sequence
  Description of Artificial Sequence: Synthetic oligonucleotide
caugaucccguuaggaggc

SEQ ID NO: 951625 - RNA, 19 nt, Artificial Sequence
  Description of Artificial Sequence: Synthetic oligonucleotide
acauauaggagcacaguuc

SEQ ID NO: 951626 - RNA, 19 nt, Artificial Sequence
  Description of Artificial Sequence: Synthetic oligonucleotide
uagugaauggaguaagguc

SEQ ID NO: 951627 - RNA, 19 nt, Artificial Sequence
  Description of Artificial Sequence: Synthetic oligonucleotide
gaaguuacuccagaacugc

SEQ ID NO: 951628 - RNA, 19 nt, Artificial Sequence
  Description of Artificial Sequence: Synthetic oligonucleotide
gaacaagacucccaagcug

SEQ ID NO: 951629 - RNA, 19 nt, Artificial Sequence
  Description of Artificial Sequence: Synthetic oligonucleotide
uaaugcuacuugcacaaaa

SEQ ID NO: 951630 - RNA, 19 nt, Artificial Sequence
  Description of Artificial Sequence: Synthetic oligonucleotide
ugucuagacuaauaaggcu

SEQ ID NO: 951631 - RNA, 19 nt, Artificial Sequence
  Description of Artificial Sequence: Synthetic oligonucleotide
cacagcauaccauaagcac

SEQ ID NO: 951632 - RNA, 19 nt, Artificial Sequence
  Description of Artificial Sequence: Synthetic oligonucleotide
ucaucgaggagucuccuuc

SEQ ID NO: 951633 - RNA, 19 nt, Artificial Sequence
  Description of Artificial Sequence: Synthetic oligonucleotide
aaacugucaaauggcuaac

SEQ ID NO: 951634 - RNA, 19 nt, Artificial Sequence
  Description of Artificial Sequence: Synthetic oligonucleotide
ucuuguaccucacaaucua

SEQ ID NO: 951635 - RNA, 19 nt, Artificial Sequence
  Description of Artificial Sequence: Synthetic oligonucleotide
accuagaggaagcucuaac

SEQ ID NO: 951636 - RNA, 19 nt, Artificial Sequence
  Description of Artificial Sequence: Synthetic oligonucleotide
aggaagcucuaacacacag

SEQ ID NO: 951637 - RNA, 19 nt, Artificial Sequence
  Description of Artificial Sequence: Synthetic oligonucleotide
auguucuagacuuuucuaa

SEQ ID NO: 951638 - RNA, 19 nt, Artificial Sequence
  Description of Artificial Sequence: Synthetic oligonucleotide
auaguagugagccacucuu

SEQ ID NO: 951639 - RNA, 19 nt, Artificial Sequence
  Description of Artificial Sequence: Synthetic oligonucleotide
uaaaacugucaaauggcua

SEQ ID NO: 951640 - RNA, 19 nt, Artificial Sequence
  Description of Artificial Sequence: Synthetic oligonucleotide
uaugugagcguagaugcug

SEQ ID NO: 951641 - RNA, 19 nt, Artificial Sequence
  Description of Artificial Sequence: Synthetic oligonucleotide
ugcuaugugagcguagaug

SEQ ID NO: 951642 - RNA, 19 nt, Artificial Sequence
  Description of Artificial Sequence: Synthetic oligonucleotide
ggaugguuuagucuacugg

SEQ ID NO: 951643 - RNA, 19 nt, Artificial Sequence
  Description of Artificial Sequence: Synthetic oligonucleotide
cacaauacacagugcgugg

SEQ ID NO: 951644 - RNA, 19 nt, Artificial Sequence
  Description of Artificial Sequence: Synthetic oligonucleotide
ucauaguauagacuucaau

SEQ ID NO: 951645 - RNA, 19 nt, Artificial Sequence
  Description of Artificial Sequence: Synthetic oligonucleotide
uacuauagcacaggaaccu

SEQ ID NO: 951646 - RNA, 19 nt, Artificial Sequence
  Description of Artificial Sequence: Synthetic oligonucleotide
agcugucuagacuaauaag

SEQ ID NO: 951647 - RNA, 19 nt, Artificial Sequence
  Description of Artificial Sequence: Synthetic oligonucleotide
gucucucaaauuuaaguca

SEQ ID NO: 951648 - RNA, 19 nt, Artificial Sequence
  Description of Artificial Sequence: Synthetic oligonucleotide
guuacauauaggagcacag

SEQ ID NO: 951649 - RNA, 19 nt, Artificial Sequence
  Description of Artificial Sequence: Synthetic oligonucleotide
ucccacugacuuaaaacug

SEQ ID NO: 951650 - RNA, 19 nt, Artificial Sequence
  Description of Artificial Sequence: Synthetic oligonucleotide
cucuacaucgguuuuagaa

SEQ ID NO: 951651 - RNA, 19 nt, Artificial Sequence
  Description of Artificial Sequence: Synthetic oligonucleotide
cuacuuuggaaagcuaugc

SEQ ID NO: 951652 - RNA, 19 nt, Artificial Sequence
  Description of Artificial Sequence: Synthetic oligonucleotide
agauguaagaaggcugggg

SEQ ID NO: 951653 - RNA, 19 nt, Artificial Sequence
  Description of Artificial Sequence: Synthetic oligonucleotide
aguuguacuauagcacagg

SEQ ID NO: 951654 - RNA, 19 nt, Artificial Sequence
  Description of Artificial Sequence: Synthetic oligonucleotide
cauaguauagacuucaauu

SEQ ID NO: 951655 - RNA, 19 nt, Artificial Sequence
  Description of Artificial Sequence: Synthetic oligonucleotide
gagaaaugccgguggaagc

SEQ ID NO: 951656 - RNA, 19 nt, Artificial Sequence
  Description of Artificial Sequence: Synthetic oligonucleotide
uauagcacaggaaccucgu

SEQ ID NO: 951657 - RNA, 19 nt, Artificial Sequence
  Description of Artificial Sequence: Synthetic oligonucleotide
acagugcgugguucaaugc

SEQ ID NO: 951658 - RNA, 19 nt, Artificial Sequence
  Description of Artificial Sequence: Synthetic oligonucleotide
caauacuaacccuauguga

SEQ ID NO: 951659 - RNA, 19 nt, Artificial Sequence
  Description of Artificial Sequence: Synthetic oligonucleotide
aaagaacaaggccgacuug

SEQ ID NO: 951660 - RNA, 19 nt, Artificial Sequence
  Description of Artificial Sequence: Synthetic oligonucleotide
cauaccauaagcacaccca

SEQ ID NO: 951661 - RNA, 19 nt, Artificial Sequence
  Description of Artificial Sequence: Synthetic oligonucleotide
gcuguuauuaccaaccuac

SEQ ID NO: 951662 - RNA, 19 nt, Artificial Sequence
  Description of Artificial Sequence: Synthetic oligonucleotide
uccuagaaguuaugaaugu

SEQ ID NO: 951663 - RNA, 19 nt, Artificial Sequence
  Description of Artificial Sequence: Synthetic oligonucleotide
uggccugacaaugacaacu

SEQ ID NO: 951664 - RNA, 19 nt, Artificial Sequence
  Description of Artificial Sequence: Synthetic oligonucleotide
ugaccaaugaguagcucuc

SEQ ID NO: 951665 - RNA, 19 nt, Artificial Sequence
  Description of Artificial Sequence: Synthetic oligonucleotide
cuacagugaauuccaauuc

SEQ ID NO: 951666 - RNA, 19 nt, Artificial Sequence
  Description of Artificial Sequence: Synthetic oligonucleotide
aguuacauauaggagcaca

SEQ ID NO: 951667 - RNA, 19 nt, Artificial Sequence
  Description of Artificial Sequence: Synthetic oligonucleotide
aggaaccucguucaucgag

SEQ ID NO: 951668 - RNA, 19 nt, Artificial Sequence
  Description of Artificial Sequence: Synthetic oligonucleotide
cauguugaccaaugaguag

SEQ ID NO: 951669 - RNA, 19 nt, Artificial Sequence
  Description of Artificial Sequence: Synthetic oligonucleotide
auaggagcacaguuccuag

SEQ ID NO: 951670 - RNA, 19 nt, Artificial Sequence
  Description of Artificial Sequence: Synthetic oligonucleotide
cucuaacacacagggaugg

SEQ ID NO: 951671 - RNA, 19 nt, Artificial Sequence
  Description of Artificial Sequence: Synthetic oligonucleotide
caaguacuaccucucacac

SEQ ID NO: 951672 - RNA, 19 nt, Artificial Sequence
  Description of Artificial Sequence: Synthetic oligonucleotide
acuuacacaagcauuuagu

SEQ ID NO: 951673 - RNA, 19 nt, Artificial Sequence
  Description of Artificial Sequence: Synthetic oligonucleotide
aaauaaguucccacugacu

SEQ ID NO: 951674 - RNA, 19 nt, Artificial Sequence
  Description of Artificial Sequence: Synthetic oligonucleotide
agcuaugcugcuguaacag

SEQ ID NO: 951675 - RNA, 19 nt, Artificial Sequence
  Description of Artificial Sequence: Synthetic oligonucleotide
gguucaaugcuucuccacc

SEQ ID NO: 951676 - RNA, 19 nt, Artificial Sequence
  Description of Artificial Sequence: Synthetic oligonucleotide
uuaccaaccuacucuguaa

SEQ ID NO: 951677 - RNA, 19 nt, Artificial Sequence
  Description of Artificial Sequence: Synthetic oligonucleotide
augaguagcucucaacaau

SEQ ID NO: 951678 - RNA, 19 nt, Artificial Sequence
  Description of Artificial Sequence: Synthetic oligonucleotide
aaguuguacuauagcacag

SEQ ID NO: 951679 - RNA, 19 nt, Artificial Sequence
  Description of Artificial Sequence: Synthetic oligonucleotide
agcauuuaguaaaagcaca

SEQ ID NO: 951680 - RNA, 19 nt, Artificial Sequence
  Description of Artificial Sequence: Synthetic oligonucleotide
ugagucucuacaucgguuu

SEQ ID NO: 951681 - RNA, 19 nt, Artificial Sequence
  Description of Artificial Sequence: Synthetic oligonucleotide
uacuaacccuaugugagug

SEQ ID NO: 951682 - RNA, 19 nt, Artificial Sequence
  Description of Artificial Sequence: Synthetic oligonucleotide
uguugaccaaugaguagcu

SEQ ID NO: 951683 - RNA, 19 nt, Artificial Sequence
  Description of Artificial Sequence: Synthetic oligonucleotide
ugucaaguacuaccucuca

SEQ ID NO: 951684 - RNA, 19 nt, Artificial Sequence
  Description of Artificial Sequence: Synthetic oligonucleotide
uguacucuacagugaauuc

SEQ ID NO: 951685 - RNA, 19 nt, Artificial Sequence
  Description of Artificial Sequence: Synthetic oligonucleotide
aguuaacccugcaugggac

SEQ ID NO: 951686 - RNA, 19 nt, Artificial Sequence
  Description of Artificial Sequence: Synthetic oligonucleotide
caaaagcaacaauacuaac

SEQ ID NO: 951687 - RNA, 19 nt, Artificial Sequence
  Description of Artificial Sequence: Synthetic oligonucleotide
uuguacuauagcacaggaa

SEQ ID NO: 951688 - RNA, 19 nt, Artificial Sequence
  Description of Artificial Sequence: Synthetic oligonucleotide
auuaccaaccuacucugua

SEQ ID NO: 951689 - RNA, 19 nt, Artificial Sequence
  Description of Artificial Sequence: Synthetic oligonucleotide
agcccuucuaaccugcaca

SEQ ID NO: 951690 - RNA, 19 nt, Artificial Sequence
  Description of Artificial Sequence: Synthetic oligonucleotide
aagcaauguagugcccugg

SEQ ID NO: 951691 - RNA, 19 nt, Artificial Sequence
  Description of Artificial Sequence: Synthetic oligonucleotide
uuacauauaggagcacagu

SEQ ID NO: 951692 - RNA, 19 nt, Artificial Sequence
  Description of Artificial Sequence: Synthetic oligonucleotide
aaagaguaggaugcacaca

SEQ ID NO: 951693 - RNA, 19 nt, Artificial Sequence
  Description of Artificial Sequence: Synthetic oligonucleotide
auugagcccuucuaaccug

SEQ ID NO: 951694 - RNA, 19 nt, Artificial Sequence
  Description of Artificial Sequence: Synthetic oligonucleotide
guuguacuauagcacagga

SEQ ID NO: 951695 - RNA, 19 nt, Artificial Sequence
  Description of Artificial Sequence: Synthetic oligonucleotide
guuacuccagaacugccca

SEQ ID NO: 951696 - RNA, 19 nt, Artificial Sequence
  Description of Artificial Sequence: Synthetic oligonucleotide
cuacucuguaaguuaaaca

SEQ ID NO: 951697 - RNA, 19 nt, Artificial Sequence
  Description of Artificial Sequence: Synthetic oligonucleotide
guacuauagcacaggaacc

SEQ ID NO: 951698 - RNA, 19 nt, Artificial Sequence
  Description of Artificial Sequence: Synthetic oligonucleotide
guuccuagaaguuaugaau

SEQ ID NO: 951699 - RNA, 19 nt, Artificial Sequence
  Description of Artificial Sequence: Synthetic oligonucleotide
gcuacuuaaaagacuauac

SEQ ID NO: 951700 - RNA, 19 nt, Artificial Sequence
  Description of Artificial Sequence: Synthetic oligonucleotide
ugcccaacccagcaaucag

SEQ ID NO: 951701 - RNA, 19 nt, Artificial Sequence
  Description of Artificial Sequence: Synthetic oligonucleotide
cuuguaccucacaaucuac

SEQ ID NO: 951702 - RNA, 19 nt, Artificial Sequence
  Description of Artificial Sequence: Synthetic oligonucleotide
ugucuacuccacagcauac

SEQ ID NO: 951703 - RNA, 19 nt, Artificial Sequence
  Description of Artificial Sequence: Synthetic oligonucleotide
auagugaauuacaaaacuu

SEQ ID NO: 951704 - RNA, 19 nt, Artificial Sequence
  Description of Artificial Sequence: Synthetic oligonucleotide
cacagugcgugguucaaug

SEQ ID NO: 951705 - RNA, 19 nt, Artificial Sequence
  Description of Artificial Sequence: Synthetic oligonucleotide
cuucuaaccugcacaaaca

SEQ ID NO: 951706 - RNA, 19 nt, Artificial Sequence
  Description of Artificial Sequence: Synthetic oligonucleotide
cuaacccuaugugagugag

SEQ ID NO: 951707 - RNA, 19 nt, Artificial Sequence
  Description of Artificial Sequence: Synthetic oligonucleotide
acuauagcacaggaaccuc

SEQ ID NO: 951708 - RNA, 19 nt, Artificial Sequence
  Description of Artificial Sequence: Synthetic oligonucleotide
auacuaacccuaugugagu

SEQ ID NO: 951709 - RNA, 19 nt, Artificial Sequence
  Description of Artificial Sequence: Synthetic oligonucleotide
ggcacgcuucaucacaugg

SEQ ID NO: 951710 - RNA, 19 nt, Artificial Sequence
  Description of Artificial Sequence: Synthetic oligonucleotide
uagacuaauaaggcuacuu

SEQ ID NO: 951711 - RNA, 19 nt, Artificial Sequence
  Description of Artificial Sequence: Synthetic oligonucleotide
cacaguggucuauuauccc

SEQ ID NO: 951712 - RNA, 19 nt, Artificial Sequence
  Description of Artificial Sequence: Synthetic oligonucleotide
agagagaaaugccggugga

SEQ ID NO: 951713 - RNA, 19 nt, Artificial Sequence
  Description of Artificial Sequence: Synthetic oligonucleotide
ugcuguugaaugagucucu

SEQ ID NO: 951714 - RNA, 19 nt, Artificial Sequence
  Description of Artificial Sequence: Synthetic oligonucleotide
acuaccucucacacgauca

SEQ ID NO: 951715 - RNA, 19 nt, Artificial Sequence
  Description of Artificial Sequence: Synthetic oligonucleotide
acucuccugcauuauacaa

SEQ ID NO: 951716 - RNA, 19 nt, Artificial Sequence
  Description of Artificial Sequence: Synthetic oligonucleotide
gucuagacuaauaaggcua

SEQ ID NO: 951717 - RNA, 19 nt, Artificial Sequence
  Description of Artificial Sequence: Synthetic oligonucleotide
uacuaccucucacacgauc

SEQ ID NO: 951718 - RNA, 19 nt, Artificial Sequence
  Description of Artificial Sequence: Synthetic oligonucleotide
aguggccugacaaugacaa

SEQ ID NO: 951719 - RNA, 19 nt, Artificial Sequence
  Description of Artificial Sequence: Synthetic oligonucleotide
agcaacaauacuaacccua

SEQ ID NO: 951720 - RNA, 19 nt, Artificial Sequence
  Description of Artificial Sequence: Synthetic oligonucleotide
gucaaguacuaccucucac

SEQ ID NO: 951721 - RNA, 19 nt, Artificial Sequence
  Description of Artificial Sequence: Synthetic oligonucleotide
cucucacacgaucaccagc

SEQ ID NO: 951722 - RNA, 19 nt, Artificial Sequence
  Description of Artificial Sequence: Synthetic oligonucleotide
aacugucaaauggcuaacu

SEQ ID NO: 951723 - RNA, 19 nt, Artificial Sequence
  Description of Artificial Sequence: Synthetic oligonucleotide
aaccucguucaucgaggag

SEQ ID NO: 951724 - RNA, 19 nt, Artificial Sequence
  Description of Artificial Sequence: Synthetic oligonucleotide
ucaccccagacucucuacu

SEQ ID NO: 951725 - RNA, 19 nt, Artificial Sequence
  Description of Artificial Sequence: Synthetic oligonucleotide
ugucuagaauugucacacc

SEQ ID NO: 951726 - RNA, 19 nt, Artificial Sequence
  Description of Artificial Sequence: Synthetic oligonucleotide
ugguucaaugcuucuccac

SEQ ID NO: 951727 - RNA, 19 nt, Artificial Sequence
  Description of Artificial Sequence: Synthetic oligonucleotide
ccuucuaaccugcacaaac

SEQ ID NO: 951728 - RNA, 19 nt, Artificial Sequence
  Description of Artificial Sequence: Synthetic oligonucleotide
uucuaaugucuagaauugu

SEQ ID NO: 951729 - RNA, 19 nt, Artificial Sequence
  Description of Artificial Sequence: Synthetic oligonucleotide
ccacuucagaacaagacuc

SEQ ID NO: 951730 - RNA, 19 nt, Artificial Sequence
  Description of Artificial Sequence: Synthetic oligonucleotide
ucguugggcuacagaauca

SEQ ID NO: 951731 - RNA, 19 nt, Artificial Sequence
  Description of Artificial Sequence: Synthetic oligonucleotide
gguuuuagaacugucucuc

SEQ ID NO: 951732 - RNA, 19 nt, Artificial Sequence
  Description of Artificial Sequence: Synthetic oligonucleotide
acauguugaccaaugagua

SEQ ID NO: 951733 - RNA, 19 nt, Artificial Sequence
  Description of Artificial Sequence: Synthetic oligonucleotide
uagaauugucacacccauc

SEQ ID NO: 951734 - RNA, 19 nt, Artificial Sequence
  Description of Artificial Sequence: Synthetic oligonucleotide
uaguagugagccacucuuc

SEQ ID NO: 951735 - RNA, 19 nt, Artificial Sequence
  Description of Artificial Sequence: Synthetic oligonucleotide
ggaaccucguucaucgagg

SEQ ID NO: 951736 - RNA, 19 nt, Artificial Sequence
  Description of Artificial Sequence: Synthetic oligonucleotide
gaguaggaugcacacaggu

SEQ ID NO: 951737 - RNA, 19 nt, Artificial Sequence
  Description of Artificial Sequence: Synthetic oligonucleotide
agggaguacacaauacaca

SEQ ID NO: 951738 - RNA, 19 nt, Artificial Sequence
  Description of Artificial Sequence: Synthetic oligonucleotide
gguuccagccugcaggacc

SEQ ID NO: 951739 - RNA, 19 nt, Artificial Sequence
  Description of Artificial Sequence: Synthetic oligonucleotide
aaccuacucuguaaguuaa

SEQ ID NO: 951740 - RNA, 19 nt, Artificial Sequence
  Description of Artificial Sequence: Synthetic oligonucleotide
uccggcagcugucuagacu

SEQ ID NO: 951741 - RNA, 19 nt, Artificial Sequence
  Description of Artificial Sequence: Synthetic oligonucleotide
cucucaacaaugcucaagu

SEQ ID NO: 951742 - RNA, 19 nt, Artificial Sequence
  Description of Artificial Sequence: Synthetic oligonucleotide
cccguuaggaggcacagag

SEQ ID NO: 951743 - RNA, 19 nt, Artificial Sequence
  Description of Artificial Sequence: Synthetic oligonucleotide
gugucauucuauccuaaaa

SEQ ID NO: 951744 - RNA, 19 nt, Artificial Sequence
  Description of Artificial Sequence: Synthetic oligonucleotide
ugcugcuaugugagcguag

SEQ ID NO: 951745 - RNA, 19 nt, Artificial Sequence
  Description of Artificial Sequence: Synthetic oligonucleotide
cuguugaaugagucucuac

SEQ ID NO: 951746 - RNA, 19 nt, Artificial Sequence
  Description of Artificial Sequence: Synthetic oligonucleotide
ugacaacugucuacuccac

SEQ ID NO: 951747 - RNA, 19 nt, Artificial Sequence
  Description of Artificial Sequence: Synthetic oligonucleotide
acaauacacagugcguggu

SEQ ID NO: 951748 - RNA, 19 nt, Artificial Sequence
  Description of Artificial Sequence: Synthetic oligonucleotide
agacacaauacaacuugca

SEQ ID NO: 951749 - RNA, 19 nt, Artificial Sequence
  Description of Artificial Sequence: Synthetic oligonucleotide
caacaauacuaacccuaug

SEQ ID NO: 951750 - RNA, 19 nt, Artificial Sequence
  Description of Artificial Sequence: Synthetic oligonucleotide
gaaccucguucaucgagga

SEQ ID NO: 951751 - RNA, 19 nt, Artificial Sequence
  Description of Artificial Sequence: Synthetic oligonucleotide
cugucaaauggcuaacucu

SEQ ID NO: 951752 - RNA, 19 nt, Artificial Sequence
  Description of Artificial Sequence: Synthetic oligonucleotide
gcauuuaguaaaagcacac

SEQ ID NO: 951753 - RNA, 19 nt, Artificial Sequence
  Description of Artificial Sequence: Synthetic oligonucleotide
ucucuacugucaaguacua

SEQ ID NO: 951754 - RNA, 19 nt, Artificial Sequence
  Description of Artificial Sequence: Synthetic oligonucleotide
caucgguuuuagaacuguc

SEQ ID NO: 951755 - RNA, 19 nt, Artificial Sequence
  Description of Artificial Sequence: Synthetic oligonucleotide
cuaccucucacacgaucac

SEQ ID NO: 951756 - RNA, 19 nt, Artificial Sequence
  Description of Artificial Sequence: Synthetic oligonucleotide
agauucccagugcuuggca

SEQ ID NO: 951757 - RNA, 19 nt, Artificial Sequence
  Description of Artificial Sequence: Synthetic oligonucleotide
ggaaagaguaggaugcaca

SEQ ID NO: 951758 - RNA, 19 nt, Artificial Sequence
  Description of Artificial Sequence: Synthetic oligonucleotide
aggccgacuugcugauggc

SEQ ID NO: 951759 - RNA, 19 nt, Artificial Sequence
  Description of Artificial Sequence: Synthetic oligonucleotide
uaacccuaugugagugagu

SEQ ID NO: 951760 - RNA, 19 nt, Artificial Sequence
  Description of Artificial Sequence: Synthetic oligonucleotide
acaucgguuuuagaacugu

SEQ ID NO: 951761 - RNA, 19 nt, Artificial Sequence
  Description of Artificial Sequence: Synthetic oligonucleotide
acugucaguuaacccugca

SEQ ID NO: 951762 - RNA, 19 nt, Artificial Sequence
  Description of Artificial Sequence: Synthetic oligonucleotide
cagcaguaccuagaggaag

SEQ ID NO: 951763 - RNA, 19 nt, Artificial Sequence
  Description of Artificial Sequence: Synthetic oligonucleotide
gaaagcuaugcugcuguaa

SEQ ID NO: 951764 - RNA, 19 nt, Artificial Sequence
  Description of Artificial Sequence: Synthetic oligonucleotide
augguuuagucuacuggca

SEQ ID NO: 951765 - RNA, 19 nt, Artificial Sequence
  Description of Artificial Sequence: Synthetic oligonucleotide
ucucaacaaugcucaaguu

SEQ ID NO: 951766 - RNA, 19 nt, Artificial Sequence
  Description of Artificial Sequence: Synthetic oligonucleotide
guguccggcagcugucuag

SEQ ID NO: 951767 - RNA, 19 nt, Artificial Sequence
  Description of Artificial Sequence: Synthetic oligonucleotide
ggagaaugggaaagaguag

SEQ ID NO: 951768 - RNA, 19 nt, Artificial Sequence
  Description of Artificial Sequence: Synthetic oligonucleotide
agcaacaauguuacacagu

SEQ ID NO: 951769 - RNA, 19 nt, Artificial Sequence
  Description of Artificial Sequence: Synthetic oligonucleotide
cagauguaagaaggcuggg

SEQ ID NO: 951770 - RNA, 19 nt, Artificial Sequence
  Description of Artificial Sequence: Synthetic oligonucleotide
ucugcccaacccagcaauc

SEQ ID NO: 951771 - RNA, 19 nt, Artificial Sequence
  Description of Artificial Sequence: Synthetic oligonucleotide
guagugagccacucuucca

SEQ ID NO: 951772 - RNA, 19 nt, Artificial Sequence
  Description of Artificial Sequence: Synthetic oligonucleotide
caaccuacucuguaaguua

SEQ ID NO: 951773 - RNA, 19 nt, Artificial Sequence
  Description of Artificial Sequence: Synthetic oligonucleotide
ccucaugauaguagugagc

SEQ ID NO: 951774 - RNA, 19 nt, Artificial Sequence
  Description of Artificial Sequence: Synthetic oligonucleotide
ccuuagugaauggaguaag

SEQ ID NO: 951775 - RNA, 19 nt, Artificial Sequence
  Description of Artificial Sequence: Synthetic oligonucleotide
uguccggcagcugucuaga

SEQ ID NO: 951776 - RNA, 19 nt, Artificial Sequence
  Description of Artificial Sequence: Synthetic oligonucleotide
cauugagcccuucuaaccu

SEQ ID NO: 951777 - RNA, 19 nt, Artificial Sequence
  Description of Artificial Sequence: Synthetic oligonucleotide
aaugccgguggaagcagaa

SEQ ID NO: 951778 - RNA, 19 nt, Artificial Sequence
  Description of Artificial Sequence: Synthetic oligonucleotide
cagcugucuagacuaauaa

SEQ ID NO: 951779 - RNA, 19 nt, Artificial Sequence
  Description of Artificial Sequence: Synthetic oligonucleotide
guuaggaggcacagagcug

SEQ ID NO: 951780 - RNA, 19 nt, Artificial Sequence
  Description of Artificial Sequence: Synthetic oligonucleotide
cugucuacuccacagcaua

SEQ ID NO: 951781 - RNA, 19 nt, Artificial Sequence
  Description of Artificial Sequence: Synthetic oligonucleotide
ucucuacaucgguuuuaga

SEQ ID NO: 951782 - RNA, 19 nt, Artificial Sequence
  Description of Artificial Sequence: Synthetic oligonucleotide
ugcgugguucaaugcuucu

SEQ ID NO: 951783 - RNA, 19 nt, Artificial Sequence
  Description of Artificial Sequence: Synthetic oligonucleotide
aucccguuaggaggcacag

SEQ ID NO: 951784 - RNA, 19 nt, Artificial Sequence
  Description of Artificial Sequence: Synthetic oligonucleotide
agcguagaugcugaguguu

SEQ ID NO: 951785 - RNA, 19 nt, Artificial Sequence
  Description of Artificial Sequence: Synthetic oligonucleotide
gagcccuucuaaccugcac

SEQ ID NO: 951786 - RNA, 19 nt, Artificial Sequence
  Description of Artificial Sequence: Synthetic oligonucleotide
caaagagagaaaugccggu

SEQ ID NO: 951787 - RNA, 19 nt, Artificial Sequence
  Description of Artificial Sequence: Synthetic oligonucleotide
aguaggaugcacacaggua

SEQ ID NO: 951788 - RNA, 19 nt, Artificial Sequence
  Description of Artificial Sequence: Synthetic oligonucleotide
cagccucaugauaguagug

SEQ ID NO: 951789 - RNA, 19 nt, Artificial Sequence
  Description of Artificial Sequence: Synthetic oligonucleotide
cuaugugagugagugaagu

SEQ ID NO: 951790 - RNA, 19 nt, Artificial Sequence
  Description of Artificial Sequence: Synthetic oligonucleotide
gggaugguuuagucuacug

SEQ ID NO: 951791 - RNA, 19 nt, Artificial Sequence
  Description of Artificial Sequence: Synthetic oligonucleotide
augauaguagugagccacu

SEQ ID NO: 951792 - RNA, 19 nt, Artificial Sequence
  Description of Artificial Sequence: Synthetic oligonucleotide
uucaucgaggagucuccuu

SEQ ID NO: 951793 - RNA, 19 nt, Artificial Sequence
  Description of Artificial Sequence: Synthetic oligonucleotide
augugagcguagaugcuga

SEQ ID NO: 951794 - RNA, 19 nt, Artificial Sequence
  Description of Artificial Sequence: Synthetic oligonucleotide
acagcccuacaggaaguug

SEQ ID NO: 951795 - RNA, 19 nt, Artificial Sequence
  Description of Artificial Sequence: Synthetic oligonucleotide
gaucccguuaggaggcaca

SEQ ID NO: 951796 - RNA, 19 nt, Artificial Sequence
  Description of Artificial Sequence: Synthetic oligonucleotide
cacaggaaccucguucauc

SEQ ID NO: 951797 - RNA, 19 nt, Artificial Sequence
  Description of Artificial Sequence: Synthetic oligonucleotide
uuuagucuacuggcaguuu

SEQ ID NO: 951798 - RNA, 19 nt, Artificial Sequence
  Description of Artificial Sequence: Synthetic oligonucleotide
cucuacugucaaguacuac

SEQ ID NO: 951799 - RNA, 19 nt, Artificial Sequence
  Description of Artificial Sequence: Synthetic oligonucleotide
cauuuaguaaaagcacacu

SEQ ID NO: 951800 - RNA, 19 nt, Artificial Sequence
  Description of Artificial Sequence: Synthetic oligonucleotide
auauaggagcacaguuccu

SEQ ID NO: 951801 - RNA, 19 nt, Artificial Sequence
  Description of Artificial Sequence: Synthetic oligonucleotide
guucagcuguuauuaccaa

SEQ ID NO: 951802 - RNA, 19 nt, Artificial Sequence
  Description of Artificial Sequence: Synthetic oligonucleotide
auagcacaggaaccucguu

SEQ ID NO: 951803 - RNA, 19 nt, Artificial Sequence
  Description of Artificial Sequence: Synthetic oligonucleotide
agugcgugguucaaugcuu

SEQ ID NO: 951804 - RNA, 19 nt, Artificial Sequence
  Description of Artificial Sequence: Synthetic oligonucleotide
uacacagugcgugguucaa

SEQ ID NO: 951805 - RNA, 19 nt, Artificial Sequence
  Description of Artificial Sequence: Synthetic oligonucleotide
cuccaugaucccguuagga

SEQ ID NO: 951806 - RNA, 19 nt, Artificial Sequence
  Description of Artificial Sequence: Synthetic oligonucleotide
gaccaaugaguagcucuca

SEQ ID NO: 951807 - RNA, 19 nt, Artificial Sequence
  Description of Artificial Sequence: Synthetic oligonucleotide
cagcccuacaggaaguugu

SEQ ID NO: 951808 - RNA, 19 nt, Artificial Sequence
  Description of Artificial Sequence: Synthetic oligonucleotide
cguucaucgaggagucucc

SEQ ID NO: 951809 - RNA, 19 nt, Artificial Sequence
  Description of Artificial Sequence: Synthetic oligonucleotide
agucucuacaucgguuuua

SEQ ID NO: 951810 - RNA, 19 nt, Artificial Sequence
  Description of Artificial Sequence: Synthetic oligonucleotide
ggcuacuuaaaagacuaua

SEQ ID NO: 951811 - RNA, 19 nt, Artificial Sequence
  Description of Artificial Sequence: Synthetic oligonucleotide
uaccuagaggaagcucuaa

SEQ ID NO: 951812 - RNA, 19 nt, Artificial Sequence
  Description of Artificial Sequence: Synthetic oligonucleotide
gcugaguguucauaguaua

SEQ ID NO: 951813 - RNA, 19 nt, Artificial Sequence
  Description of Artificial Sequence: Synthetic oligonucleotide
cuguuauuaccaaccuacu

SEQ ID NO: 951814 - RNA, 19 nt, Artificial Sequence
  Description of Artificial Sequence: Synthetic oligonucleotide
gcucuaacacacagggaug

SEQ ID NO: 951815 - RNA, 19 nt, Artificial Sequence
  Description of Artificial Sequence: Synthetic oligonucleotide
gcuucuacagauucccagu

SEQ ID NO: 951816 - RNA, 19 nt, Artificial Sequence
  Description of Artificial Sequence: Synthetic oligonucleotide
ugaucccguuaggaggcac

SEQ ID NO: 951817 - RNA, 19 nt, Artificial Sequence
  Description of Artificial Sequence: Synthetic oligonucleotide
cuguacucuacagugaauu

SEQ ID NO: 951818 - RNA, 19 nt, Artificial Sequence
  Description of Artificial Sequence: Synthetic oligonucleotide
gguuuagucuacuggcagu

SEQ ID NO: 951819 - RNA, 19 nt, Artificial Sequence
  Description of Artificial Sequence: Synthetic oligonucleotide
ccacagcauaccauaagca

SEQ ID NO: 951820 - RNA, 19 nt, Artificial Sequence
  Description of Artificial Sequence: Synthetic oligonucleotide
auaaugcuacuugcacaaa

SEQ ID NO: 951821 - RNA, 19 nt, Artificial Sequence
  Description of Artificial Sequence: Synthetic oligonucleotide
cacugccacauguucuaga

SEQ ID NO: 951822 - RNA, 19 nt, Artificial Sequence
  Description of Artificial Sequence: Synthetic oligonucleotide
guuuagucuacuggcaguu

SEQ ID NO: 951823 - RNA, 19 nt, Artificial Sequence
  Description of Artificial Sequence: Synthetic oligonucleotide
caguaccuagaggaagcuc

SEQ ID NO: 951824 - RNA, 19 nt, Artificial Sequence
  Description of Artificial Sequence: Synthetic oligonucleotide
gagcguagaugcugagugu

SEQ ID NO: 951825 - RNA, 19 nt, Artificial Sequence
  Description of Artificial Sequence: Synthetic oligonucleotide
cagugcuuggcacgcuuca

SEQ ID NO: 951826 - RNA, 19 nt, Artificial Sequence
  Description of Artificial Sequence: Synthetic oligonucleotide
gccuuugagaagcaaugua

SEQ ID NO: 951827 - RNA, 19 nt, Artificial Sequence
  Description of Artificial Sequence: Synthetic oligonucleotide
cagugcgugguucaaugcu

SEQ ID NO: 951828 - RNA, 19 nt, Artificial Sequence
  Description of Artificial Sequence: Synthetic oligonucleotide
guggccugacaaugacaac

SEQ ID NO: 951829 - RNA, 19 nt, Artificial Sequence
  Description of Artificial Sequence: Synthetic oligonucleotide
gcugcuaugugagcguaga

SEQ ID NO: 951830 - RNA, 19 nt, Artificial Sequence
  Description of Artificial Sequence: Synthetic oligonucleotide
gugcgugguucaaugcuuc

SEQ ID NO: 951831 - RNA, 19 nt, Artificial Sequence
  Description of Artificial Sequence: Synthetic oligonucleotide
cuaugugagcguagaugcu

SEQ ID NO: 951832 - RNA, 19 nt, Artificial Sequence
  Description of Artificial Sequence: Synthetic oligonucleotide
ggcuaacucucucuucaaa

SEQ ID NO: 951833 - RNA, 19 nt, Artificial Sequence
  Description of Artificial Sequence: Synthetic oligonucleotide
ccguuaggaggcacagagc

SEQ ID NO: 951834 - RNA, 19 nt, Artificial Sequence
  Description of Artificial Sequence: Synthetic oligonucleotide
acacagugcgugguucaau

SEQ ID NO: 951835 - RNA, 19 nt, Artificial Sequence
  Description of Artificial Sequence: Synthetic oligonucleotide
gcccuucuaaccugcacaa

SEQ ID NO: 951836 - RNA, 19 nt, Artificial Sequence
  Description of Artificial Sequence: Synthetic oligonucleotide
caucgaggagucuccuucu

SEQ ID NO: 951837 - RNA, 19 nt, Artificial Sequence
  Description of Artificial Sequence: Synthetic oligonucleotide
gagucucuacaucgguuuu

SEQ ID NO: 951838 - RNA, 19 nt, Artificial Sequence
  Description of Artificial Sequence: Synthetic oligonucleotide
cucccuugacaguuacaua

SEQ ID NO: 951839 - RNA, 19 nt, Artificial Sequence
  Description of Artificial Sequence: Synthetic oligonucleotide
accuacucuguaaguuaaa

SEQ ID NO: 951840 - RNA, 19 nt, Artificial Sequence
  Description of Artificial Sequence: Synthetic oligonucleotide
agcccuacaggaaguugua

SEQ ID NO: 951841 - RNA, 19 nt, Artificial Sequence
  Description of Artificial Sequence: Synthetic oligonucleotide
cuacagauucccagugcuu

SEQ ID NO: 951842 - RNA, 19 nt, Artificial Sequence
  Description of Artificial Sequence: Synthetic oligonucleotide
augaucccguuaggaggca

SEQ ID NO: 951843 - RNA, 19 nt, Artificial Sequence
  Description of Artificial Sequence: Synthetic oligonucleotide
guccggcagcugucuagac

SEQ ID NO: 951844 - RNA, 19 nt, Artificial Sequence
  Description of Artificial Sequence: Synthetic oligonucleotide
ggaaagcuaugcugcugua

SEQ ID NO: 951845 - RNA, 19 nt, Artificial Sequence
  Description of Artificial Sequence: Synthetic oligonucleotide
caggaaccucguucaucga

SEQ ID NO: 951846 - RNA, 19 nt, Artificial Sequence
  Description of Artificial Sequence: Synthetic oligonucleotide
cugauuccagugccauucu

SEQ ID NO: 951847 - RNA, 19 nt, Artificial Sequence
  Description of Artificial Sequence: Synthetic oligonucleotide
ggaguacacaauacacagu

SEQ ID NO: 951848 - RNA, 19 nt, Artificial Sequence
  Description of Artificial Sequence: Synthetic oligonucleotide
ccuagaaguuaugaaugua

SEQ ID NO: 951849 - RNA, 19 nt, Artificial Sequence
  Description of Artificial Sequence: Synthetic oligonucleotide
cuagacuaauaaggcuacu

SEQ ID NO: 951850 - RNA, 19 nt, Artificial Sequence
  Description of Artificial Sequence: Synthetic oligonucleotide
cguagaugcugaguguuca

SEQ ID NO: 951851 - RNA, 19 nt, Artificial Sequence
  Description of Artificial Sequence: Synthetic oligonucleotide
gcuguugaaugagucucua

SEQ ID NO: 951852 - RNA, 19 nt, Artificial Sequence
  Description of Artificial Sequence: Synthetic oligonucleotide
ggucaaccuuuucuauagu

SEQ ID NO: 951853 - RNA, 19 nt, Artificial Sequence
  Description of Artificial Sequence: Synthetic oligonucleotide
ucccagugcuuggcacgcu

SEQ ID NO: 951854 - RNA, 19 nt, Artificial Sequence
  Description of Artificial Sequence: Synthetic oligonucleotide
ggccgacuugcugauggca

SEQ ID NO: 951855 - RNA, 19 nt, Artificial Sequence
  Description of Artificial Sequence: Synthetic oligonucleotide
ggccucguugggcuacaga

SEQ ID NO: 951856 - RNA, 19 nt, Artificial Sequence
  Description of Artificial Sequence: Synthetic oligonucleotide
aggcuacuuuggaaagcua

SEQ ID NO: 951857 - RNA, 19 nt, Artificial Sequence
  Description of Artificial Sequence: Synthetic oligonucleotide
gacucccaagcugcuucua

SEQ ID NO: 951858 - RNA, 19 nt, Artificial Sequence
  Description of Artificial Sequence: Synthetic oligonucleotide
cgguuuuagaacugucucu

SEQ ID NO: 951859 - RNA, 19 nt, Artificial Sequence
  Description of Artificial Sequence: Synthetic oligonucleotide
ccaaccuacucuguaaguu

SEQ ID NO: 951860 - RNA, 19 nt, Artificial Sequence
  Description of Artificial Sequence: Synthetic oligonucleotide
cugcuaugugagcguagau

SEQ ID NO: 951861 - RNA, 19 nt, Artificial Sequence
  Description of Artificial Sequence: Synthetic oligonucleotide
ccugcaugggacagcccua

SEQ ID NO: 951862 - RNA, 19 nt, Artificial Sequence
  Description of Artificial Sequence: Synthetic oligonucleotide
cccacacaguggucuauua

SEQ ID NO: 951863 - RNA, 19 nt, Artificial Sequence
  Description of Artificial Sequence: Synthetic oligonucleotide
cacccacauugagcccuuc

SEQ ID NO: 951864 - RNA, 19 nt, Artificial Sequence
  Description of Artificial Sequence: Synthetic oligonucleotide
cucguucaucgaggagucu

SEQ ID NO: 951865 - RNA, 19 nt, Artificial Sequence
  Description of Artificial Sequence: Synthetic oligonucleotide
guacuaccucucacacgau

SEQ ID NO: 951866 - RNA, 19 nt, Artificial Sequence
  Description of Artificial Sequence: Synthetic oligonucleotide
ggcagcugucuagacuaau

SEQ ID NO: 951867 - RNA, 19 nt, Artificial Sequence
  Description of Artificial Sequence: Synthetic oligonucleotide
cgacuugcugauggcagau

SEQ ID NO: 951868 - RNA, 19 nt, Artificial Sequence
  Description of Artificial Sequence: Synthetic oligonucleotide
ccacccacauugagcccuu

SEQ ID NO: 951869 - RNA, 19 nt, Artificial Sequence
  Description of Artificial Sequence: Synthetic oligonucleotide
aagauaagaaaacuugaac

SEQ ID NO: 951870 - RNA, 19 nt, Artificial Sequence
  Description of Artificial Sequence: Synthetic oligonucleotide
agauaagaaaacuugaaca

SEQ ID NO: 951871 - RNA, 19 nt, Artificial Sequence
  Description of Artificial Sequence: Synthetic oligonucleotide
cuuaagacaaucuuuaguc

SEQ ID NO: 951872 - RNA, 19 nt, Artificial Sequence
  Description of Artificial Sequence: Synthetic oligonucleotide
uauacaaacuucaaauagc

SEQ ID NO: 951873 - RNA, 19 nt, Artificial Sequence
  Description of Artificial Sequence: Synthetic oligonucleotide
uaaaugaaagugcucaaag

SEQ ID NO: 951874 - RNA, 19 nt, Artificial Sequence
  Description of Artificial Sequence: Synthetic oligonucleotide
ucaauuuuguguaagcucu

SEQ ID NO: 951875 - RNA, 19 nt, Artificial Sequence
  Description of Artificial Sequence: Synthetic oligonucleotide
ugccccaugaugcugaucg

SEQ ID NO: 951876 - RNA, 19 nt, Artificial Sequence
  Description of Artificial Sequence: Synthetic oligonucleotide
cuauaaagaagucuguggc

SEQ ID NO: 951877 - RNA, 19 nt, Artificial Sequence
  Description of Artificial Sequence: Synthetic oligonucleotide
uaagacaaucuuuagucag

SEQ ID NO: 951878 - RNA, 19 nt, Artificial Sequence
  Description of Artificial Sequence: Synthetic oligonucleotide
ugucuuugggagaaaauag

SEQ ID NO: 951879 - RNA, 19 nt, Artificial Sequence
  Description of Artificial Sequence: Synthetic oligonucleotide
caucgauacaagaaaauag

SEQ ID NO: 951880 - RNA, 19 nt, Artificial Sequence
  Description of Artificial Sequence: Synthetic oligonucleotide
cuaaugaagagcuugccac

SEQ ID NO: 951881 - RNA, 19 nt, Artificial Sequence
  Description of Artificial Sequence: Synthetic oligonucleotide
uugaacauuaacauucuuc

SEQ ID NO: 951882 - RNA, 19 nt, Artificial Sequence
  Description of Artificial Sequence: Synthetic oligonucleotide
uuuuguguaagcucugcag

SEQ ID NO: 951883 - RNA, 19 nt, Artificial Sequence
  Description of Artificial Sequence: Synthetic oligonucleotide
aauuggucaaguguacugg

SEQ ID NO: 951884 - RNA, 19 nt, Artificial Sequence
  Description of Artificial Sequence: Synthetic oligonucleotide
aucaagaccuucuagcaag

SEQ ID NO: 951885 - RNA, 19 nt, Artificial Sequence
  Description of Artificial Sequence: Synthetic oligonucleotide
uggacugccaucuucuagg

SEQ ID NO: 951886 - RNA, 19 nt, Artificial Sequence
  Description of Artificial Sequence: Synthetic oligonucleotide
ugaaagugcucaaaggcca

SEQ ID NO: 951887 - RNA, 19 nt, Artificial Sequence
  Description of Artificial Sequence: Synthetic oligonucleotide
aacaagacccuccuauaag

SEQ ID NO: 951888 - RNA, 19 nt, Artificial Sequence
  Description of Artificial Sequence: Synthetic oligonucleotide
ucuaaacacaagauaagaa

SEQ ID NO: 951889 - RNA, 19 nt, Artificial Sequence
  Description of Artificial Sequence: Synthetic oligonucleotide
ugugauugggccagggagg

SEQ ID NO: 951890 - RNA, 19 nt, Artificial Sequence
  Description of Artificial Sequence: Synthetic oligonucleotide
aucgauacaagaaaauagg

SEQ ID NO: 951891 - RNA, 19 nt, Artificial Sequence
  Description of Artificial Sequence: Synthetic oligonucleotide
ucuuuagucaggguaaaag

SEQ ID NO: 951892 - RNA, 19 nt, Artificial Sequence
  Description of Artificial Sequence: Synthetic oligonucleotide
gauacaagaaaauaggcau

SEQ ID NO: 951893 - RNA, 19 nt, Artificial Sequence
  Description of Artificial Sequence: Synthetic oligonucleotide
guacggaaaauauacaaac

SEQ ID NO: 951894 - RNA, 19 nt, Artificial Sequence
  Description of Artificial Sequence: Synthetic oligonucleotide
cuauaagucauuugaacuc

SEQ ID NO: 951895 - RNA, 19 nt, Artificial Sequence
  Description of Artificial Sequence: Synthetic oligonucleotide
uaaguugugagcugccuag

SEQ ID NO: 951896 - RNA, 19 nt, Artificial Sequence
  Description of Artificial Sequence: Synthetic oligonucleotide
ugaaaugccacuugggaaa

SEQ ID NO: 951897 - RNA, 19 nt, Artificial Sequence
  Description of Artificial Sequence: Synthetic oligonucleotide
aguguaaguugugagcugc

SEQ ID NO: 951898 - RNA, 19 nt, Artificial Sequence
  Description of Artificial Sequence: Synthetic oligonucleotide
auuggucaaguguacuggc

SEQ ID NO: 951899 - RNA, 19 nt, Artificial Sequence
  Description of Artificial Sequence: Synthetic oligonucleotide
gaagcuaaugaagagcuug

SEQ ID NO: 951900 - RNA, 19 nt, Artificial Sequence
  Description of Artificial Sequence: Synthetic oligonucleotide
aguggagaaggucagucuc

SEQ ID NO: 951901 - RNA, 19 nt, Artificial Sequence
  Description of Artificial Sequence: Synthetic oligonucleotide
acaaucuuuagucagggua

SEQ ID NO: 951902 - RNA, 19 nt, Artificial Sequence
  Description of Artificial Sequence: Synthetic oligonucleotide
uuugguagcuccucuagga

SEQ ID NO: 951903 - RNA, 19 nt, Artificial Sequence
  Description of Artificial Sequence: Synthetic oligonucleotide
uuaagacaaucuuuaguca

SEQ ID NO: 951904 - RNA, 19 nt, Artificial Sequence
  Description of Artificial Sequence: Synthetic oligonucleotide
uauggagccacuacaugcc

SEQ ID NO: 951905 - RNA, 19 nt, Artificial Sequence
  Description of Artificial Sequence: Synthetic oligonucleotide
gaauuggucaaguguacug

SEQ ID NO: 951906 - RNA, 19 nt, Artificial Sequence
  Description of Artificial Sequence: Synthetic oligonucleotide
aagaccuucuagcaaguga

SEQ ID NO: 951907 - RNA, 19 nt, Artificial Sequence
  Description of Artificial Sequence: Synthetic oligonucleotide
aagcuaaugaagagcuugc

SEQ ID NO: 951908 - RNA, 19 nt, Artificial Sequence
  Description of Artificial Sequence: Synthetic oligonucleotide
gauaggggagucugggugg

SEQ ID NO: 951909 - RNA, 19 nt, Artificial Sequence
  Description of Artificial Sequence: Synthetic oligonucleotide
gcuauaaagaagucugugg

SEQ ID NO: 951910 - RNA, 19 nt, Artificial Sequence
  Description of Artificial Sequence: Synthetic oligonucleotide
uccuauaagucauuugaac

SEQ ID NO: 951911 - RNA, 19 nt, Artificial Sequence
  Description of Artificial Sequence: Synthetic oligonucleotide
uguuccauaacaagacccu

SEQ ID NO: 951912 - RNA, 19 nt, Artificial Sequence
  Description of Artificial Sequence: Synthetic oligonucleotide
uguaagcucugcaguacgg

SEQ ID NO: 951913 - RNA, 19 nt, Artificial Sequence
  Description of Artificial Sequence: Synthetic oligonucleotide
aagacauagcugugauugg

SEQ ID NO: 951914 - RNA, 19 nt, Artificial Sequence
  Description of Artificial Sequence: Synthetic oligonucleotide
uauaagucauuugaacuca

SEQ ID NO: 951915 - RNA, 19 nt, Artificial Sequence
  Description of Artificial Sequence: Synthetic oligonucleotide
aguguacuggcccugagga

SEQ ID NO: 951916 - RNA, 19 nt, Artificial Sequence
  Description of Artificial Sequence: Synthetic oligonucleotide
ucugcaguacggaaaauau

SEQ ID NO: 951917 - RNA, 19 nt, Artificial Sequence
  Description of Artificial Sequence: Synthetic oligonucleotide
aauagugucuuugggagaa

SEQ ID NO: 951918 - RNA, 19 nt, Artificial Sequence
  Description of Artificial Sequence: Synthetic oligonucleotide
cauuugaacucaucaagac

SEQ ID NO: 951919 - RNA, 19 nt, Artificial Sequence
  Description of Artificial Sequence: Synthetic oligonucleotide
uggucaaguguacuggccc

SEQ ID NO: 951920 - RNA, 19 nt, Artificial Sequence
  Description of Artificial Sequence: Synthetic oligonucleotide
aagacccuccuauaaguca

SEQ ID NO: 951921 - RNA, 19 nt, Artificial Sequence
  Description of Artificial Sequence: Synthetic oligonucleotide
ugacauccaccaaaggacc

SEQ ID NO: 951922 - RNA, 19 nt, Artificial Sequence
  Description of Artificial Sequence: Synthetic oligonucleotide
agugagaugaaaugccacu

SEQ ID NO: 951923 - RNA, 19 nt, Artificial Sequence
  Description of Artificial Sequence: Synthetic oligonucleotide
uccaacccaacccuggagc

SEQ ID NO: 951924 - RNA, 19 nt, Artificial Sequence
  Description of Artificial Sequence: Synthetic oligonucleotide
agcugaauuggucaagugu

SEQ ID NO: 951925 - RNA, 19 nt, Artificial Sequence
  Description of Artificial Sequence: Synthetic oligonucleotide
aagugagaugaaaugccac

SEQ ID NO: 951926 - RNA, 19 nt, Artificial Sequence
  Description of Artificial Sequence: Synthetic oligonucleotide
  modified_base (6)..(6): a, c, u, g, unknown or other
aguggnaccccggugcucc

SEQ ID NO: 951927 - RNA, 19 nt, Artificial Sequence
  Description of Artificial Sequence: Synthetic oligonucleotide
uucuaggaaggcugguugg

SEQ ID NO: 951928 - RNA, 19 nt, Artificial Sequence
  Description of Artificial Sequence: Synthetic oligonucleotide
ugagucgcaggacagggga

SEQ ID NO: 951929 - RNA, 19 nt, Artificial Sequence
  Description of Artificial Sequence: Synthetic oligonucleotide
ggagcuauaaagaagucug

SEQ ID NO: 951930 - RNA, 19 nt, Artificial Sequence
  Description of Artificial Sequence: Synthetic oligonucleotide
aaccucuaaacacaagaua

SEQ ID NO: 951931 - RNA, 19 nt, Artificial Sequence
  Description of Artificial Sequence: Synthetic oligonucleotide
uccauaacaagacccuccu

SEQ ID NO: 951932 - RNA, 19 nt, Artificial Sequence
  Description of Artificial Sequence: Synthetic oligonucleotide
acaagacccuccuauaagu

SEQ ID NO: 951933 - RNA, 19 nt, Artificial Sequence
  Description of Artificial Sequence: Synthetic oligonucleotide
  modified_base (9)..(9): a, c, u, g, unknown or other
cucaguggnaccccggugc

SEQ ID NO: 951934 - RNA, 19 nt, Artificial Sequence
  Description of Artificial Sequence: Synthetic oligonucleotide
uagaguuucuacaucgaua

SEQ ID NO: 951935 - RNA, 19 nt, Artificial Sequence
  Description of Artificial Sequence: Synthetic oligonucleotide
aaagugagaugaaaugcca

SEQ ID NO: 951936 - RNA, 19 nt, Artificial Sequence
  Description of Artificial Sequence: Synthetic oligonucleotide
agaccuucuagcaagugag

SEQ ID NO: 951937 - RNA, 19 nt, Artificial Sequence
  Description of Artificial Sequence: Synthetic oligonucleotide
uccccguacagcauggucu

SEQ ID NO: 951938 - RNA, 19 nt, Artificial Sequence
  Description of Artificial Sequence: Synthetic oligonucleotide
uaacaagacccuccuauaa

SEQ ID NO: 951939 - RNA, 19 nt, Artificial Sequence
  Description of Artificial Sequence: Synthetic oligonucleotide
acuuugguagcuccucuag

SEQ ID NO: 951940 - RNA, 19 nt, Artificial Sequence
  Description of Artificial Sequence: Synthetic oligonucleotide
augaaaugccacuugggaa

SEQ ID NO: 951941 - RNA, 19 nt, Artificial Sequence
  Description of Artificial Sequence: Synthetic oligonucleotide
uuucuacaucgauacaaga

SEQ ID NO: 951942 - RNA, 19 nt, Artificial Sequence
  Description of Artificial Sequence: Synthetic oligonucleotide
accucuaaacacaagauaa

SEQ ID NO: 951943 - RNA, 19 nt, Artificial Sequence
  Description of Artificial Sequence: Synthetic oligonucleotide
uacaucgauacaagaaaau

SEQ ID NO: 951944 - RNA, 19 nt, Artificial Sequence
  Description of Artificial Sequence: Synthetic oligonucleotide
ugggaagcuaaugaagagc

SEQ ID NO: 951945 - RNA, 19 nt, Artificial Sequence
  Description of Artificial Sequence: Synthetic oligonucleotide
gaugcugaucgcuugugca

SEQ ID NO: 951946 - RNA, 19 nt, Artificial Sequence
  Description of Artificial Sequence: Synthetic oligonucleotide
ugcaugcagaagcuggccc

SEQ ID NO: 951947 - RNA, 19 nt, Artificial Sequence
  Description of Artificial Sequence: Synthetic oligonucleotide
ggugaucucuuuucggugg

SEQ ID NO: 951948 - RNA, 19 nt, Artificial Sequence
  Description of Artificial Sequence: Synthetic oligonucleotide
caauccaacccaacccugg

SEQ ID NO: 951949 - RNA, 19 nt, Artificial Sequence
  Description of Artificial Sequence: Synthetic oligonucleotide
uggagaggaggcuuuguca

SEQ ID NO: 951950 - RNA, 19 nt, Artificial Sequence
  Description of Artificial Sequence: Synthetic oligonucleotide
cuucuaggaaggcugguug

SEQ ID NO: 951951 - RNA, 19 nt, Artificial Sequence
  Description of Artificial Sequence: Synthetic oligonucleotide
ugcuauucuguggaggagc

SEQ ID NO: 951952 - RNA, 19 nt, Artificial Sequence
  Description of Artificial Sequence: Synthetic oligonucleotide
uacgucggaccugaggugg

SEQ ID NO: 951953 - RNA, 19 nt, Artificial Sequence
  Description of Artificial Sequence: Synthetic oligonucleotide
aauccaacccaacccugga

SEQ ID NO: 951954 - RNA, 19 nt, Artificial Sequence
  Description of Artificial Sequence: Synthetic oligonucleotide
uggagcuauaaagaagucu

SEQ ID NO: 951955 - RNA, 19 nt, Artificial Sequence
  Description of Artificial Sequence: Synthetic oligonucleotide
accuucuagcaagugaggg

SEQ ID NO: 951956 - RNA, 19 nt, Artificial Sequence
  Description of Artificial Sequence: Synthetic oligonucleotide
agggaccucaaguauccuc

SEQ ID NO: 951957 - RNA, 19 nt, Artificial Sequence
  Description of Artificial Sequence: Synthetic oligonucleotide
gguugaggccuacacaccg

SEQ ID NO: 951958 - RNA, 19 nt, Artificial Sequence
  Description of Artificial Sequence: Synthetic oligonucleotide
auuuguacagcaggugaag

SEQ ID NO: 951959 - RNA, 19 nt, Artificial Sequence
  Description of Artificial Sequence: Synthetic oligonucleotide
agcuauaaagaagucugug

SEQ ID NO: 951960 - RNA, 19 nt, Artificial Sequence
  Description of Artificial Sequence: Synthetic oligonucleotide
ugcagguacacaaguguaa

SEQ ID NO: 951961 - RNA, 19 nt, Artificial Sequence
  Description of Artificial Sequence: Synthetic oligonucleotide
auagaguuucuacaucgau

SEQ ID NO: 951962 - RNA, 19 nt, Artificial Sequence
  Description of Artificial Sequence: Synthetic oligonucleotide
ggcuuugacacaauaaaug

SEQ ID NO: 951963 - RNA, 19 nt, Artificial Sequence
  Description of Artificial Sequence: Synthetic oligonucleotide
uggagauggacugccaucu

SEQ ID NO: 951964 - RNA, 19 nt, Artificial Sequence
  Description of Artificial Sequence: Synthetic oligonucleotide
uuucuggggccaccgaaca

SEQ ID NO: 951965 - RNA, 19 nt, Artificial Sequence
  Description of Artificial Sequence: Synthetic oligonucleotide
agucgcaggacaggggacc

SEQ ID NO: 951966 - RNA, 19 nt, Artificial Sequence
  Description of Artificial Sequence: Synthetic oligonucleotide
caacuguugcuucaacuug

SEQ ID NO: 951967 - RNA, 19 nt, Artificial Sequence
  Description of Artificial Sequence: Synthetic oligonucleotide
ccagggagaauguacgucg

SEQ ID NO: 951968 - RNA, 19 nt, Artificial Sequence
  Description of Artificial Sequence: Synthetic oligonucleotide
aacagcugaauuggucaag

SEQ ID NO: 951969 - RNA, 19 nt, Artificial Sequence
  Description of Artificial Sequence: Synthetic oligonucleotide
uggugaucucuuuucggug

SEQ ID NO: 951970 - RNA, 19 nt, Artificial Sequence
  Description of Artificial Sequence: Synthetic oligonucleotide
gggaccguagcccugagug

SEQ ID NO: 951971 - RNA, 19 nt, Artificial Sequence
  Description of Artificial Sequence: Synthetic oligonucleotide
cugaauuggucaaguguac

SEQ ID NO: 951972 - RNA, 19 nt, Artificial Sequence
  Description of Artificial Sequence: Synthetic oligonucleotide
gccacuacaugccaccugg

SEQ ID NO: 951973 - RNA, 19 nt, Artificial Sequence
  Description of Artificial Sequence: Synthetic oligonucleotide
caucuugggaagcuaauga

SEQ ID NO: 951974 - RNA, 19 nt, Artificial Sequence
  Description of Artificial Sequence: Synthetic oligonucleotide
gguacacaaguguaaguug

SEQ ID NO: 951975 - RNA, 19 nt, Artificial Sequence
  Description of Artificial Sequence: Synthetic oligonucleotide
caguacggaaaauauacaa

SEQ ID NO: 951976 - RNA, 19 nt, Artificial Sequence
  Description of Artificial Sequence: Synthetic oligonucleotide
ugaauuggucaaguguacu

SEQ ID NO: 951977 - RNA, 19 nt, Artificial Sequence
  Description of Artificial Sequence: Synthetic oligonucleotide
guugugagcugccuagcug

SEQ ID NO: 951978 - RNA, 19 nt, Artificial Sequence
  Description of Artificial Sequence: Synthetic oligonucleotide
aguacggaaaauauacaaa

SEQ ID NO: 951979 - RNA, 19 nt, Artificial Sequence
  Description of Artificial Sequence: Synthetic oligonucleotide
uuguguaagcucugcagua

SEQ ID NO: 951980 - RNA, 19 nt, Artificial Sequence
  Description of Artificial Sequence: Synthetic oligonucleotide
acggucacagcugcuauuc

SEQ ID NO: 951981 - RNA, 19 nt, Artificial Sequence
  Description of Artificial Sequence: Synthetic oligonucleotide
caugccaccuggaggaaug

SEQ ID NO: 951982 - RNA, 19 nt, Artificial Sequence
  Description of Artificial Sequence: Synthetic oligonucleotide
cacaccgacuuuucugggg

SEQ ID NO: 951983 - RNA, 19 nt, Artificial Sequence
  Description of Artificial Sequence: Synthetic oligonucleotide
cucuaaacacaagauaaga

SEQ ID NO: 951984 - RNA, 19 nt, Artificial Sequence
  Description of Artificial Sequence: Synthetic oligonucleotide
ggauaggggagucugggug

SEQ ID NO: 951985 - RNA, 19 nt, Artificial Sequence
  Description of Artificial Sequence: Synthetic oligonucleotide
gagaauguacgucggaccu

SEQ ID NO: 951986 - RNA, 19 nt, Artificial Sequence
  Description of Artificial Sequence: Synthetic oligonucleotide
cuuuagucaggguaaaagu

SEQ ID NO: 951987 - RNA, 19 nt, Artificial Sequence
  Description of Artificial Sequence: Synthetic oligonucleotide
auaacaagacccuccuaua

SEQ ID NO: 951988 - RNA, 19 nt, Artificial Sequence
  Description of Artificial Sequence: Synthetic oligonucleotide
gacuuuucuggggccaccg

SEQ ID NO: 951989 - RNA, 19 nt, Artificial Sequence
  Description of Artificial Sequence: Synthetic oligonucleotide
caggcaagggcugagucgc

SEQ ID NO: 951990 - RNA, 19 nt, Artificial Sequence
  Description of Artificial Sequence: Synthetic oligonucleotide
aggcaaggacuggagaugg

SEQ ID NO: 951991 - RNA, 19 nt, Artificial Sequence
  Description of Artificial Sequence: Synthetic oligonucleotide
uaguggagaaggucagucu

SEQ ID NO: 951992 - RNA, 19 nt, Artificial Sequence
  Description of Artificial Sequence: Synthetic oligonucleotide
gagauggacugccaucuuc

SEQ ID NO: 951993 - RNA, 19 nt, Artificial Sequence
  Description of Artificial Sequence: Synthetic oligonucleotide
cauaacaagacccuccuau

SEQ ID NO: 951994 - RNA, 19 nt, Artificial Sequence
  Description of Artificial Sequence: Synthetic oligonucleotide
cuacaucgauacaagaaaa

SEQ ID NO: 951995 - RNA, 19 nt, Artificial Sequence
  Description of Artificial Sequence: Synthetic oligonucleotide
gaauguacgucggaccuga

SEQ ID NO: 951996 - RNA, 19 nt, Artificial Sequence
  Description of Artificial Sequence: Synthetic oligonucleotide
uucuagcaagugagggaag

SEQ ID NO: 951997 - RNA, 19 nt, Artificial Sequence
  Description of Artificial Sequence: Synthetic oligonucleotide
uuucgguggucugugcugc

SEQ ID NO: 951998 - RNA, 19 nt, Artificial Sequence
  Description of Artificial Sequence: Synthetic oligonucleotide
agggcugagucgcaggaca

SEQ ID NO: 951999 - RNA, 19 nt, Artificial Sequence
  Description of Artificial Sequence: Synthetic oligonucleotide
cacggugcccaucagggac

SEQ ID NO: 952000 - RNA, 19 nt, Artificial Sequence
  Description of Artificial Sequence: Synthetic oligonucleotide
uguaaguugugagcugccu

SEQ ID NO: 952001 - RNA, 19 nt, Artificial Sequence
  Description of Artificial Sequence: Synthetic oligonucleotide
uucacccugcuccuucaca

SEQ ID NO: 952002 - RNA, 19 nt, Artificial Sequence
  Description of Artificial Sequence: Synthetic oligonucleotide
gaccguagcccugaguggc

SEQ ID NO: 952003 - RNA, 19 nt, Artificial Sequence
  Description of Artificial Sequence: Synthetic oligonucleotide
cacuacaugccaccuggag

SEQ ID NO: 952004 - RNA, 19 nt, Artificial Sequence
  Description of Artificial Sequence: Synthetic oligonucleotide
agcucugcaguacggaaaa

SEQ ID NO: 952005 - RNA, 19 nt, Artificial Sequence
  Description of Artificial Sequence: Synthetic oligonucleotide
caagacccuccuauaaguc

SEQ ID NO: 952006 - RNA, 19 nt, Artificial Sequence
  Description of Artificial Sequence: Synthetic oligonucleotide
uggggcacggugcccauca

SEQ ID NO: 952007 - RNA, 19 nt, Artificial Sequence
  Description of Artificial Sequence: Synthetic oligonucleotide
gaaccuccgccucugccgc

SEQ ID NO: 952008 - RNA, 19 nt, Artificial Sequence
  Description of Artificial Sequence: Synthetic oligonucleotide
  modified_base (8)..(8): a, c, u, g, unknown or other
ucaguggnaccccggugcu

SEQ ID NO: 952009 - RNA, 19 nt, Artificial Sequence
  Description of Artificial Sequence: Synthetic oligonucleotide
accacuuugguagcuccuc

SEQ ID NO: 952010 - RNA, 19 nt, Artificial Sequence
  Description of Artificial Sequence: Synthetic oligonucleotide
ccuccuauaagucauuuga

SEQ ID NO: 952011 - RNA, 19 nt, Artificial Sequence
  Description of Artificial Sequence: Synthetic oligonucleotide
agauggacugccaucuucu

SEQ ID NO: 952012 - RNA, 19 nt, Artificial Sequence
  Description of Artificial Sequence: Synthetic oligonucleotide
auccaacccaacccuggag

SEQ ID NO: 952013 - RNA, 19 nt, Artificial Sequence
  Description of Artificial Sequence: Synthetic oligonucleotide
agguggagcuauaaagaag

SEQ ID NO: 952014 - RNA, 19 nt, Artificial Sequence
  Description of Artificial Sequence: Synthetic oligonucleotide
cuggggccaccgaacaugg

SEQ ID NO: 952015 - RNA, 19 nt, Artificial Sequence
  Description of Artificial Sequence: Synthetic oligonucleotide
acacaccgacuuuucuggg

SEQ ID NO: 952016 - RNA, 19 nt, Artificial Sequence
  Description of Artificial Sequence: Synthetic oligonucleotide
ucuaggcuucugugcaggc

SEQ ID NO: 952017 - RNA, 19 nt, Artificial Sequence
  Description of Artificial Sequence: Synthetic oligonucleotide
aagggaugcccucccugcu

SEQ ID NO: 952018 - RNA, 19 nt, Artificial Sequence
  Description of Artificial Sequence: Synthetic oligonucleotide
ugcugaucgcuugugcaug

SEQ ID NO: 952019 - RNA, 19 nt, Artificial Sequence
  Description of Artificial Sequence: Synthetic oligonucleotide
acuucggcucagcuuuguc

SEQ ID NO: 952020 - RNA, 19 nt, Artificial Sequence
  Description of Artificial Sequence: Synthetic oligonucleotide
ucucuuuucgguggucugu

SEQ ID NO: 952021 - RNA, 19 nt, Artificial Sequence
  Description of Artificial Sequence: Synthetic oligonucleotide
ugaggaccacuuugguagc

SEQ ID NO: 952022 - RNA, 19 nt, Artificial Sequence
  Description of Artificial Sequence: Synthetic oligonucleotide
acaugggacacuggcugcg

SEQ ID NO: 952023 - RNA, 19 nt, Artificial Sequence
  Description of Artificial Sequence: Synthetic oligonucleotide
acagcugaauuggucaagu

SEQ ID NO: 952024 - RNA, 19 nt, Artificial Sequence
  Description of Artificial Sequence: Synthetic oligonucleotide
gaccucaaguauccucagc

SEQ ID NO: 952025 - RNA, 19 nt, Artificial Sequence
  Description of Artificial Sequence: Synthetic oligonucleotide
ccucuaaacacaagauaag

SEQ ID NO: 952026 - RNA, 19 nt, Artificial Sequence
  Description of Artificial Sequence: Synthetic oligonucleotide
ggcacggugcccaucaggg

SEQ ID NO: 952027 - RNA, 19 nt, Artificial Sequence
  Description of Artificial Sequence: Synthetic oligonucleotide
gcuaaugaagagcuugcca

SEQ ID NO: 952028 - RNA, 19 nt, Artificial Sequence
  Description of Artificial Sequence: Synthetic oligonucleotide
gaccuucuagcaagugagg

SEQ ID NO: 952029 - RNA, 19 nt, Artificial Sequence
  Description of Artificial Sequence: Synthetic oligonucleotide
ucuuuucgguggucugugc

SEQ ID NO: 952030 - RNA, 19 nt, Artificial Sequence
  Description of Artificial Sequence: Synthetic oligonucleotide
agcaucucguggccacugg

SEQ ID NO: 952031 - RNA, 19 nt, Artificial Sequence
  Description of Artificial Sequence: Synthetic oligonucleotide
aggagggaacggucacagc

SEQ ID NO: 952032 - RNA, 19 nt, Artificial Sequence
  Description of Artificial Sequence: Synthetic oligonucleotide
cugccuagcugcuagugga

SEQ ID NO: 952033 - RNA, 19 nt, Artificial Sequence
  Description of Artificial Sequence: Synthetic oligonucleotide
gagggaacggucacagcug

SEQ ID NO: 952034 - RNA, 19 nt, Artificial Sequence
  Description of Artificial Sequence: Synthetic oligonucleotide
guccuucuaggcuucugug

SEQ ID NO: 952035 - RNA, 19 nt, Artificial Sequence
  Description of Artificial Sequence: Synthetic oligonucleotide
ccgaacaugggacacuggc

SEQ ID NO: 952036 - RNA, 19 nt, Artificial Sequence
  Description of Artificial Sequence: Synthetic oligonucleotide
augcugaucgcuugugcau

SEQ ID NO: 952037 - RNA, 19 nt, Artificial Sequence
  Description of Artificial Sequence: Synthetic oligonucleotide
acuauccacuuugggcugg

SEQ ID NO: 952038 - RNA, 19 nt, Artificial Sequence
  Description of Artificial Sequence: Synthetic oligonucleotide
caaguguaaguugugagcu

SEQ ID NO: 952039 - RNA, 19 nt, Artificial Sequence
  Description of Artificial Sequence: Synthetic oligonucleotide
uccugguugaguccuucua

SEQ ID NO: 952040 - RNA, 19 nt, Artificial Sequence
  Description of Artificial Sequence: Synthetic oligonucleotide
agagcauccccgccggaga

SEQ ID NO: 952041 - RNA, 19 nt, Artificial Sequence
  Description of Artificial Sequence: Synthetic oligonucleotide
ccaacccuggagcaggugg

SEQ ID NO: 952042 - RNA, 19 nt, Artificial Sequence
  Description of Artificial Sequence: Synthetic oligonucleotide
caucuccccucucucauuc

SEQ ID NO: 952043 - RNA, 19 nt, Artificial Sequence
  Description of Artificial Sequence: Synthetic oligonucleotide
ucuucuaggaaggcugguu

SEQ ID NO: 952044 - RNA, 19 nt, Artificial Sequence
  Description of Artificial Sequence: Synthetic oligonucleotide
gguggagcuauaaagaagu

SEQ ID NO: 952045 - RNA, 19 nt, Artificial Sequence
  Description of Artificial Sequence: Synthetic oligonucleotide
ucaaguguacuggcccuga

SEQ ID NO: 952046 - RNA, 19 nt, Artificial Sequence
  Description of Artificial Sequence: Synthetic oligonucleotide
ccuauaagucauuugaacu

SEQ ID NO: 952047 - RNA, 19 nt, Artificial Sequence
  Description of Artificial Sequence: Synthetic oligonucleotide
aacggucacagcugcuauu

SEQ ID NO: 952048 - RNA, 19 nt, Artificial Sequence
  Description of Artificial Sequence: Synthetic oligonucleotide
uagugucuuugggagaaaa

SEQ ID NO: 952049 - RNA, 19 nt, Artificial Sequence
  Description of Artificial Sequence: Synthetic oligonucleotide
guaaguugugagcugccua

SEQ ID NO: 952050 - RNA, 19 nt, Artificial Sequence
  Description of Artificial Sequence: Synthetic oligonucleotide
uccggcucuugccaggaua

SEQ ID NO: 952051 - RNA, 19 nt, Artificial Sequence
  Description of Artificial Sequence: Synthetic oligonucleotide
gcagguacacaaguguaag

SEQ ID NO: 952052 - RNA, 19 nt, Artificial Sequence
  Description of Artificial Sequence: Synthetic oligonucleotide
agaauguacgucggaccug

SEQ ID NO: 952053 - RNA, 19 nt, Artificial Sequence
  Description of Artificial Sequence: Synthetic oligonucleotide
cuccuauaagucauuugaa

SEQ ID NO: 952054 - RNA, 19 nt, Artificial Sequence
  Description of Artificial Sequence: Synthetic oligonucleotide
aggauaggggagucugggu

SEQ ID NO: 952055 - RNA, 19 nt, Artificial Sequence
  Description of Artificial Sequence: Synthetic oligonucleotide
ccagaagguaggaacugag

SEQ ID NO: 952056 - RNA, 19 nt, Artificial Sequence
  Description of Artificial Sequence: Synthetic oligonucleotide
ggagggaacggucacagcu

SEQ ID NO: 952057 - RNA, 19 nt, Artificial Sequence
  Description of Artificial Sequence: Synthetic oligonucleotide
ugaggccuacacaccgacu

SEQ ID NO: 952058 - RNA, 19 nt, Artificial Sequence
  Description of Artificial Sequence: Synthetic oligonucleotide
ucucguggccacuggccca

SEQ ID NO: 952059 - RNA, 19 nt, Artificial Sequence
  Description of Artificial Sequence: Synthetic oligonucleotide
ugccaccaaggcacaagac

SEQ ID NO: 952060 - RNA, 19 nt, Artificial Sequence
  Description of Artificial Sequence: Synthetic oligonucleotide
guacgucggaccugaggug

SEQ ID NO: 952061 - RNA, 19 nt, Artificial Sequence
  Description of Artificial Sequence: Synthetic oligonucleotide
ggaacugaggacggugucc

SEQ ID NO: 952062 - RNA, 19 nt, Artificial Sequence
  Description of Artificial Sequence: Synthetic oligonucleotide
agggagaauguacgucgga

SEQ ID NO: 952063 - RNA, 19 nt, Artificial Sequence
  Description of Artificial Sequence: Synthetic oligonucleotide
ggaccacuuugguagcucc

SEQ ID NO: 952064 - RNA, 19 nt, Artificial Sequence
  Description of Artificial Sequence: Synthetic oligonucleotide
caucaagaccuucuagcaa

SEQ ID NO: 952065 - RNA, 19 nt, Artificial Sequence
  Description of Artificial Sequence: Synthetic oligonucleotide
cagcugaauuggucaagug

SEQ ID NO: 952066 - RNA, 19 nt, Artificial Sequence
  Description of Artificial Sequence: Synthetic oligonucleotide
guuccauaacaagacccuc

SEQ ID NO: 952067 - RNA, 19 nt, Artificial Sequence
  Description of Artificial Sequence: Synthetic oligonucleotide
guaagcucugcaguacgga

SEQ ID NO: 952068 - RNA, 19 nt, Artificial Sequence
  Description of Artificial Sequence: Synthetic oligonucleotide
ggaccguagcccugagugg

SEQ ID NO: 952069 - RNA, 19 nt, Artificial Sequence
  Description of Artificial Sequence: Synthetic oligonucleotide
caaguguacuggcccugag

SEQ ID NO: 952070 - RNA, 19 nt, Artificial Sequence
  Description of Artificial Sequence: Synthetic oligonucleotide
caccgaacaugggacacug

SEQ ID NO: 952071 - RNA, 19 nt, Artificial Sequence
  Description of Artificial Sequence: Synthetic oligonucleotide
auguugccuggcuccagga

SEQ ID NO: 952072 - RNA, 19 nt, Artificial Sequence
  Description of Artificial Sequence: Synthetic oligonucleotide
cuguugcuucaacuuggug

SEQ ID NO: 952073 - RNA, 19 nt, Artificial Sequence
  Description of Artificial Sequence: Synthetic oligonucleotide
cucaaaggccaagagggaa

SEQ ID NO: 952074 - RNA, 19 nt, Artificial Sequence
  Description of Artificial Sequence: Synthetic oligonucleotide
caaguauccucagcagcuc

SEQ ID NO: 952075 - RNA, 19 nt, Artificial Sequence
  Description of Artificial Sequence: Synthetic oligonucleotide
guguaaguugugagcugcc

SEQ ID NO: 952076 - RNA, 19 nt, Artificial Sequence
  Description of Artificial Sequence: Synthetic oligonucleotide
cuguggauggaugucagcu

SEQ ID NO: 952077 - RNA, 19 nt, Artificial Sequence
  Description of Artificial Sequence: Synthetic oligonucleotide
cacccggcuaccugcugcc

SEQ ID NO: 952078 - RNA, 19 nt, Artificial Sequence
  Description of Artificial Sequence: Synthetic oligonucleotide
ggggcugacauccaccaaa

SEQ ID NO: 952079 - RNA, 19 nt, Artificial Sequence
  Description of Artificial Sequence: Synthetic oligonucleotide
ggagcuccgcuccuucucc

SEQ ID NO: 952080 - RNA, 19 nt, Artificial Sequence
  Description of Artificial Sequence: Synthetic oligonucleotide
cugcagguacacaagugua

SEQ ID NO: 952081 - RNA, 19 nt, Artificial Sequence
  Description of Artificial Sequence: Synthetic oligonucleotide
ucccacuucggcucagcuu

SEQ ID NO: 952082 - RNA, 19 nt, Artificial Sequence
  Description of Artificial Sequence: Synthetic oligonucleotide
caccgacuuuucuggggcc

SEQ ID NO: 952083 - RNA, 19 nt, Artificial Sequence
  Description of Artificial Sequence: Synthetic oligonucleotide
uucuggggccaccgaacau

SEQ ID NO: 952084 - RNA, 19 nt, Artificial Sequence
  Description of Artificial Sequence: Synthetic oligonucleotide
ggggccaccgaacauggga

SEQ ID NO: 952085 - RNA, 19 nt, Artificial Sequence
  Description of Artificial Sequence: Synthetic oligonucleotide
auaagucauuugaacucau

SEQ ID NO: 952086 - RNA, 19 nt, Artificial Sequence
  Description of Artificial Sequence: Synthetic oligonucleotide
ucuucccacuauccacuuu

SEQ ID NO: 952087 - RNA, 19 nt, Artificial Sequence
  Description of Artificial Sequence: Synthetic oligonucleotide
cugcuauucuguggaggag

SEQ ID NO: 952088 - RNA, 19 nt, Artificial Sequence
  Description of Artificial Sequence: Synthetic oligonucleotide
aauguacgucggaccugag

SEQ ID NO: 952089 - RNA, 19 nt, Artificial Sequence
  Description of Artificial Sequence: Synthetic oligonucleotide
cugcaguacggaaaauaua

SEQ ID NO: 952090 - RNA, 19 nt, Artificial Sequence
  Description of Artificial Sequence: Synthetic oligonucleotide
gauggacugccaucuucua

SEQ ID NO: 952091 - RNA, 19 nt, Artificial Sequence
  Description of Artificial Sequence: Synthetic oligonucleotide
cuuuucgguggucugugcu

SEQ ID NO: 952092 - RNA, 19 nt, Artificial Sequence
  Description of Artificial Sequence: Synthetic oligonucleotide
gaugcccucccugcucccc

SEQ ID NO: 952093 - RNA, 19 nt, Artificial Sequence
  Description of Artificial Sequence: Synthetic oligonucleotide
cuccccguacagcaugguc

SEQ ID NO: 952094 - RNA, 19 nt, Artificial Sequence
  Description of Artificial Sequence: Synthetic oligonucleotide
gcugaucgcuugugcaugc

SEQ ID NO: 952095 - RNA, 19 nt, Artificial Sequence
  Description of Artificial Sequence: Synthetic oligonucleotide
gacacuggcugcgcggcca

SEQ ID NO: 952096 - RNA, 19 nt, Artificial Sequence
  Description of Artificial Sequence: Synthetic oligonucleotide
caugggacacuggcugcgc

SEQ ID NO: 952097 - RNA, 19 nt, Artificial Sequence
  Description of Artificial Sequence: Synthetic oligonucleotide
gacauggcccacccggcua

SEQ ID NO: 952098 - RNA, 19 nt, Artificial Sequence
  Description of Artificial Sequence: Synthetic oligonucleotide
ccuucuagcaagugaggga

SEQ ID NO: 952099 - RNA, 19 nt, Artificial Sequence
  Description of Artificial Sequence: Synthetic oligonucleotide
aaaggaccuggggcuuuga

SEQ ID NO: 952100 - RNA, 19 nt, Artificial Sequence
  Description of Artificial Sequence: Synthetic oligonucleotide
ccaugaugcugaucgcuug

SEQ ID NO: 952101 - RNA, 19 nt, Artificial Sequence
  Description of Artificial Sequence: Synthetic oligonucleotide
cauuaacauucuucaauuu

SEQ ID NO: 952102 - RNA, 19 nt, Artificial Sequence
  Description of Artificial Sequence: Synthetic oligonucleotide
gagcuauaaagaagucugu

SEQ ID NO: 952103 - RNA, 19 nt, Artificial Sequence
  Description of Artificial Sequence: Synthetic oligonucleotide
cuauucuguggaggagcug

SEQ ID NO: 952104 - RNA, 19 nt, Artificial Sequence
  Description of Artificial Sequence: Synthetic oligonucleotide
cucguggccacuggcccag

SEQ ID NO: 952105 - RNA, 19 nt, Artificial Sequence
  Description of Artificial Sequence: Synthetic oligonucleotide
gcccugaggaccacuuugg

SEQ ID NO: 952106 - RNA, 19 nt, Artificial Sequence
  Description of Artificial Sequence: Synthetic oligonucleotide
cucgccuuuggaggggcug

SEQ ID NO: 952107 - RNA, 19 nt, Artificial Sequence
  Description of Artificial Sequence: Synthetic oligonucleotide
uccucgccuuuggaggggc

SEQ ID NO: 952108 - RNA, 19 nt, Artificial Sequence
  Description of Artificial Sequence: Synthetic oligonucleotide
gagaggaggcuuugucacu

SEQ ID NO: 952109 - RNA, 19 nt, Artificial Sequence
  Description of Artificial Sequence: Synthetic oligonucleotide
caugaugcugaucgcuugu

SEQ ID NO: 952110 - RNA, 19 nt, Artificial Sequence
  Description of Artificial Sequence: Synthetic oligonucleotide
gagucgcaggacaggggac

SEQ ID NO: 952111 - RNA, 19 nt, Artificial Sequence
  Description of Artificial Sequence: Synthetic oligonucleotide
guugaggccuacacaccga

SEQ ID NO: 952112 - RNA, 19 nt, Artificial Sequence
  Description of Artificial Sequence: Synthetic oligonucleotide
gucgcaggacaggggaccc

SEQ ID NO: 952113 - RNA, 19 nt, Artificial Sequence
  Description of Artificial Sequence: Synthetic oligonucleotide
ggaggcaucuggucugcuc

SEQ ID NO: 952114 - RNA, 19 nt, Artificial Sequence
  Description of Artificial Sequence: Synthetic oligonucleotide
gaacggucacagcugcuau

SEQ ID NO: 952115 - RNA, 19 nt, Artificial Sequence
  Description of Artificial Sequence: Synthetic oligonucleotide
gucggaccugaggugguug

SEQ ID NO: 952116 - RNA, 19 nt, Artificial Sequence
  Description of Artificial Sequence: Synthetic oligonucleotide
accgaacaugggacacugg

SEQ ID NO: 952117 - RNA, 19 nt, Artificial Sequence
  Description of Artificial Sequence: Synthetic oligonucleotide
cacuuugguagcuccucua

SEQ ID NO: 952118 - RNA, 19 nt, Artificial Sequence
  Description of Artificial Sequence: Synthetic oligonucleotide
cuugccaggauaggggagu

SEQ ID NO: 952119 - RNA, 19 nt, Artificial Sequence
  Description of Artificial Sequence: Synthetic oligonucleotide
uugccaggauaggggaguc

SEQ ID NO: 952120 - RNA, 19 nt, Artificial Sequence
  Description of Artificial Sequence: Synthetic oligonucleotide
  modified_base (10)..(10): a, c, u, g, unknown or other
ccucaguggnaccccggug

SEQ ID NO: 952121 - RNA, 19 nt, Artificial Sequence
  Description of Artificial Sequence: Synthetic oligonucleotide
cccuccuauaagucauuug

SEQ ID NO: 952122 - RNA, 19 nt, Artificial Sequence
  Description of Artificial Sequence: Synthetic oligonucleotide
gugagaugaaaugccacuu

SEQ ID NO: 952123 - RNA, 19 nt, Artificial Sequence
  Description of Artificial Sequence: Synthetic oligonucleotide
cagguacacaaguguaagu

SEQ ID NO: 952124 - RNA, 19 nt, Artificial Sequence
  Description of Artificial Sequence: Synthetic oligonucleotide
guacuggcccugaggacca

SEQ ID NO: 952125 - RNA, 19 nt, Artificial Sequence
  Description of Artificial Sequence: Synthetic oligonucleotide
  modified_base (3)..(3): a, c, u, g, unknown or other
ggnaccccggugcuccuca

SEQ ID NO: 952126 - RNA, 19 nt, Artificial Sequence
  Description of Artificial Sequence: Synthetic oligonucleotide
cagcaucucguggccacug

SEQ ID NO: 952127 - RNA, 19 nt, Artificial Sequence
  Description of Artificial Sequence: Synthetic oligonucleotide
ccuuccggcucuugccagg

SEQ ID NO: 952128 - RNA, 19 nt, Artificial Sequence
  Description of Artificial Sequence: Synthetic oligonucleotide
  modified_base (2)..(2): a, c, u, g, unknown or other
gnaccccggugcuccucac

SEQ ID NO: 952129 - RNA, 19 nt, Artificial Sequence
  Description of Artificial Sequence: Synthetic oligonucleotide
gggccaccgaacaugggac

SEQ ID NO: 952130 - RNA, 19 nt, Artificial Sequence
  Description of Artificial Sequence: Synthetic oligonucleotide
ggcaagggcugagucgcag

SEQ ID NO: 952131 - RNA, 19 nt, Artificial Sequence
  Description of Artificial Sequence: Synthetic oligonucleotide
accaaaggaccuggggcuu

SEQ ID NO: 952132 - RNA, 19 nt, Artificial Sequence
  Description of Artificial Sequence: Synthetic oligonucleotide
ccacccggcuaccugcugc

SEQ ID NO: 952133 - RNA, 19 nt, Artificial Sequence
  Description of Artificial Sequence: Synthetic oligonucleotide
ggaacggucacagcugcua

SEQ ID NO: 952134 - RNA, 19 nt, Artificial Sequence
  Description of Artificial Sequence: Synthetic oligonucleotide
guagcuccucuaggaagga

SEQ ID NO: 952135 - RNA, 19 nt, Artificial Sequence
  Description of Artificial Sequence: Synthetic oligonucleotide
acccuccuauaagucauuu

SEQ ID NO: 952136 - RNA, 19 nt, Artificial Sequence
  Description of Artificial Sequence: Synthetic oligonucleotide
cuagcaagugagggaagcu

SEQ ID NO: 952137 - RNA, 19 nt, Artificial Sequence
  Description of Artificial Sequence: Synthetic oligonucleotide
gagccagcgggcgccggug

SEQ ID NO: 952138 - RNA, 19 nt, Artificial Sequence
  Description of Artificial Sequence: Synthetic oligonucleotide
ccaacccaacccuggagca

SEQ ID NO: 952139 - RNA, 19 nt, Artificial Sequence
  Description of Artificial Sequence: Synthetic oligonucleotide
cuugaacauuaacauucuu

SEQ ID NO: 952140 - RNA, 19 nt, Artificial Sequence
  Description of Artificial Sequence: Synthetic oligonucleotide
aggggaccguagcccugag

SEQ ID NO: 952141 - RNA, 19 nt, Artificial Sequence
  Description of Artificial Sequence: Synthetic oligonucleotide
cuggggcuuugacacaaua

SEQ ID NO: 952142 - RNA, 19 nt, Artificial Sequence
  Description of Artificial Sequence: Synthetic oligonucleotide
  modified_base (7)..(7): a, c, u, g, unknown or other
caguggnaccccggugcuc

SEQ ID NO: 952143 - RNA, 19 nt, Artificial Sequence
  Description of Artificial Sequence: Synthetic oligonucleotide
  modified_base (4)..(4): a, c, u, g, unknown or other
uggnaccccggugcuccuc

SEQ ID NO: 952144 - RNA, 19 nt, Artificial Sequence
  Description of Artificial Sequence: Synthetic oligonucleotide
gccaccgaacaugggacac

SEQ ID NO: 952145 - RNA, 19 nt, Artificial Sequence
  Description of Artificial Sequence: Synthetic oligonucleotide
ugcccucccugcuccccgu

SEQ ID NO: 952146 - RNA, 19 nt, Artificial Sequence
  Description of Artificial Sequence: Synthetic oligonucleotide
cuuccggcucuugccagga

SEQ ID NO: 952147 - RNA, 19 nt, Artificial Sequence
  Description of Artificial Sequence: Synthetic oligonucleotide
gaccacuuugguagcuccu

SEQ ID NO: 952148 - RNA, 19 nt, Artificial Sequence
  Description of Artificial Sequence: Synthetic oligonucleotide
uuccggcucuugccaggau

SEQ ID NO: 952149 - RNA, 19 nt, Artificial Sequence
  Description of Artificial Sequence: Synthetic oligonucleotide
ggccaccgaacaugggaca

SEQ ID NO: 952150 - RNA, 19 nt, Artificial Sequence
  Description of Artificial Sequence: Synthetic oligonucleotide
ucgcaggacaggggacccu

SEQ ID NO: 952151 - RNA, 19 nt, Artificial Sequence
  Description of Artificial Sequence: Synthetic oligonucleotide
gggcuuugacacaauaaau

SEQ ID NO: 952152 - RNA, 19 nt, Artificial Sequence
  Description of Artificial Sequence: Synthetic oligonucleotide
gcuauucuguggaggagcu

SEQ ID NO: 952153 - RNA, 19 nt, Artificial Sequence
  Description of Artificial Sequence: Synthetic oligonucleotide
agcuugccaccaaggcaca

SEQ ID NO: 952154 - RNA, 19 nt, Artificial Sequence
  Description of Artificial Sequence: Synthetic oligonucleotide
ggaugcccucccugcuccc

SEQ ID NO: 952155 - RNA, 19 nt, Artificial Sequence
  Description of Artificial Sequence: Synthetic oligonucleotide
gcgccgguggagagcaucc

SEQ ID NO: 952156 - RNA, 19 nt, Artificial Sequence
  Description of Artificial Sequence: Synthetic oligonucleotide
acgucggaccugagguggu

SEQ ID NO: 952157 - RNA, 19 nt, Artificial Sequence
  Description of Artificial Sequence: Synthetic oligonucleotide
gcacggugcccaucaggga

SEQ ID NO: 952158 - RNA, 19 nt, Artificial Sequence
  Description of Artificial Sequence: Synthetic oligonucleotide
ccccggacauggcccaccc

SEQ ID NO: 952159 - RNA, 19 nt, Artificial Sequence
  Description of Artificial Sequence: Synthetic oligonucleotide
ggcgccgguggagagcauc

SEQ ID NO: 952160 - RNA, 19 nt, Artificial Sequence
  Description of Artificial Sequence: Synthetic oligonucleotide
ccgacuuuucuggggccac

SEQ ID NO: 952161 - RNA, 19 nt, Artificial Sequence
  Description of Artificial Sequence: Synthetic oligonucleotide
cacuggcugcgcggccacc

SEQ ID NO: 952162 - RNA, 19 nt, Artificial Sequence
  Description of Artificial Sequence: Synthetic oligonucleotide
cccggcuaccugcugccuc

SEQ ID NO: 952163 - RNA, 19 nt, Artificial Sequence
  Description of Artificial Sequence: Synthetic oligonucleotide
gguaggaacugaggacggu

SEQ ID NO: 952164 - RNA, 19 nt, Artificial Sequence
  Description of Artificial Sequence: Synthetic oligonucleotide
ccgucccggcacuggugcg

SEQ ID NO: 952165 - RNA, 19 nt, Artificial Sequence
  Description of Artificial Sequence: Synthetic oligonucleotide
aggcaagggcugagucgca

SEQ ID NO: 952166 - RNA, 19 nt, Artificial Sequence
  Description of Artificial Sequence: Synthetic oligonucleotide
cgucccggcacuggugcgg

SEQ ID NO: 952167 - RNA, 19 nt, Artificial Sequence
  Description of Artificial Sequence: Synthetic oligonucleotide
gcuaguggagaaggucagu

SEQ ID NO: 952168 - RNA, 19 nt, Artificial Sequence
  Description of Artificial Sequence: Synthetic oligonucleotide
ccauaacaagacccuccua

SEQ ID NO: 952169 - RNA, 19 nt, Artificial Sequence
  Description of Artificial Sequence: Synthetic oligonucleotide
cccaugaugcugaucgcuu

SEQ ID NO: 952170 - RNA, 19 nt, Artificial Sequence
  Description of Artificial Sequence: Synthetic oligonucleotide
cccucccugcuccccguac

SEQ ID NO: 952171 - RNA, 19 nt, Artificial Sequence
  Description of Artificial Sequence: Synthetic oligonucleotide
  modified_base (5)..(5): a, c, u, g, unknown or other
guggnaccccggugcuccu

SEQ ID NO: 952172 - RNA, 19 nt, Artificial Sequence
  Description of Artificial Sequence: Synthetic oligonucleotide
gacccuccuauaagucauu

SEQ ID NO: 952173 - RNA, 19 nt, Artificial Sequence
  Description of Artificial Sequence: Synthetic oligonucleotide
cucucccucuucccacuau

SEQ ID NO: 952174 - RNA, 19 nt, Artificial Sequence
  Description of Artificial Sequence: Synthetic oligonucleotide
cagcgggcgccgguggaga

SEQ ID NO: 952175 - RNA, 19 nt, Artificial Sequence
  Description of Artificial Sequence: Synthetic oligonucleotide
ucguggccacuggcccaga

SEQ ID NO: 952176 - RNA, 19 nt, Artificial Sequence
  Description of Artificial Sequence: Synthetic oligonucleotide
ccacuuugguagcuccucu

SEQ ID NO: 952177 - RNA, 19 nt, Artificial Sequence
  Description of Artificial Sequence: Synthetic oligonucleotide
ccccgucccggcacuggug

SEQ ID NO: 952178 - RNA, 19 nt, Artificial Sequence
  Description of Artificial Sequence: Synthetic oligonucleotide
cccaucuugggaagcuaau

SEQ ID NO: 952179 - RNA, 19 nt, Artificial Sequence
  Description of Artificial Sequence: Synthetic oligonucleotide
gcgggcgccgguggagagc

SEQ ID NO: 952180 - RNA, 19 nt, Artificial Sequence
  Description of Artificial Sequence: Synthetic oligonucleotide
gccagcgggcgccggugga

SEQ ID NO: 952181 - RNA, 19 nt, Artificial Sequence
  Description of Artificial Sequence: Synthetic oligonucleotide
ggggaccguagcccugagu

SEQ ID NO: 952182 - RNA, 19 nt, Artificial Sequence
  Description of Artificial Sequence: Synthetic oligonucleotide
cccacccggcuaccugcug

SEQ ID NO: 952183 - RNA, 19 nt, Artificial Sequence
  Description of Artificial Sequence: Synthetic oligonucleotide
ggaugcugcuuaagacaau

SEQ ID NO: 952184 - RNA, 19 nt, Artificial Sequence
  Description of Artificial Sequence: Synthetic oligonucleotide
cagggaccucaaguauccu

SEQ ID NO: 952185 - RNA, 19 nt, Artificial Sequence
  Description of Artificial Sequence: Synthetic oligonucleotide
cgggcgccgguggagagca

SEQ ID NO: 952186 - RNA, 19 nt, Artificial Sequence
  Description of Artificial Sequence: Synthetic oligonucleotide
ccaccgaacaugggacacu

SEQ ID NO: 952187 - RNA, 19 nt, Artificial Sequence
  Description of Artificial Sequence: Synthetic oligonucleotide
gcucugcaguacggaaaau

SEQ ID NO: 952188 - RNA, 19 nt, Artificial Sequence
  Description of Artificial Sequence: Synthetic oligonucleotide
cccugccaacagcugaauu

SEQ ID NO: 952189 - RNA, 19 nt, Artificial Sequence
  Description of Artificial Sequence: Synthetic oligonucleotide
cccgccccuccgcgccccg

SEQ ID NO: 952190 - RNA, 19 nt, Artificial Sequence
  Description of Artificial Sequence: Synthetic oligonucleotide
gcuccccguacagcauggu

SEQ ID NO: 952191 - RNA, 19 nt, Artificial Sequence
  Description of Artificial Sequence: Synthetic oligonucleotide
ccccgccccuccgcgcccc

SEQ ID NO: 952192 - RNA, 19 nt, Artificial Sequence
  Description of Artificial Sequence: Synthetic oligonucleotide
gcccacccggcuaccugcu

SEQ ID NO: 952193 - RNA, 19 nt, Artificial Sequence
  Description of Artificial Sequence: Synthetic oligonucleotide
ccgccccuccgcgccccgg

SEQ ID NO: 952194 - RNA, 19 nt, Artificial Sequence
  Description of Artificial Sequence: Synthetic oligonucleotide
cgucggaccugaggugguu

SEQ ID NO: 952195 - RNA, 19 nt, Artificial Sequence
  Description of Artificial Sequence: Synthetic oligonucleotide
uacaaugccacgaagagca

SEQ ID NO: 952196 - RNA, 19 nt, Artificial Sequence
  Description of Artificial Sequence: Synthetic oligonucleotide
ugcuaugacacaaucauag

SEQ ID NO: 952197 - RNA, 19 nt, Artificial Sequence
  Description of Artificial Sequence: Synthetic oligonucleotide
aauagcauaagcugccguc

SEQ ID NO: 952198 - RNA, 19 nt, Artificial Sequence
  Description of Artificial Sequence: Synthetic oligonucleotide
augacacaaucauagaagc

SEQ ID NO: 952199 - RNA, 19 nt, Artificial Sequence
  Description of Artificial Sequence: Synthetic oligonucleotide
uggaguaggaggaagauca

SEQ ID NO: 952200 - RNA, 19 nt, Artificial Sequence
  Description of Artificial Sequence: Synthetic oligonucleotide
ucuaggaaaagacggagcc

SEQ ID NO: 952201 - RNA, 19 nt, Artificial Sequence
  Description of Artificial Sequence: Synthetic oligonucleotide
ucaaaguaugucuugagcu

SEQ ID NO: 952202 - RNA, 19 nt, Artificial Sequence
  Description of Artificial Sequence: Synthetic oligonucleotide
ucagaguguacccacagag

SEQ ID NO: 952203 - RNA, 19 nt, Artificial Sequence
  Description of Artificial Sequence: Synthetic oligonucleotide
aaccggguuauguaguacc

SEQ ID NO: 952204 - RNA, 19 nt, Artificial Sequence
  Description of Artificial Sequence: Synthetic oligonucleotide
cuugaagucacgcaguggg

SEQ ID NO: 952205 - RNA, 19 nt, Artificial Sequence
  Description of Artificial Sequence: Synthetic oligonucleotide
uuaauauucgggauggggu

SEQ ID NO: 952206 - RNA, 19 nt, Artificial Sequence
  Description of Artificial Sequence: Synthetic oligonucleotide
uuuaauauucgggaugggg

SEQ ID NO: 952207 - RNA, 19 nt, Artificial Sequence
  Description of Artificial Sequence: Synthetic oligonucleotide
ugagacauuagccacucgc

SEQ ID NO: 952208 - RNA, 19 nt, Artificial Sequence
  Description of Artificial Sequence: Synthetic oligonucleotide
auagcgaaagcuuucgauc

SEQ ID NO: 952209 - RNA, 19 nt, Artificial Sequence
  Description of Artificial Sequence: Synthetic oligonucleotide
uguacguccucguugaaag

SEQ ID NO: 952210 - RNA, 19 nt, Artificial Sequence
  Description of Artificial Sequence: Synthetic oligonucleotide
uuagucacugaccgcaugg

SEQ ID NO: 952211 - RNA, 19 nt, Artificial Sequence
  Description of Artificial Sequence: Synthetic oligonucleotide
ucuccaucaauacagcucu

SEQ ID NO: 952212 - RNA, 19 nt, Artificial Sequence
  Description of Artificial Sequence: Synthetic oligonucleotide
agguuuaaguuucuuuccc

SEQ ID NO: 952213 - RNA, 19 nt, Artificial Sequence
  Description of Artificial Sequence: Synthetic oligonucleotide
uccauuacaggaccugucg

SEQ ID NO: 952214 - RNA, 19 nt, Artificial Sequence
  Description of Artificial Sequence: Synthetic oligonucleotide
cuuucgaggauguacaaug

SEQ ID NO: 952215 - RNA, 19 nt, Artificial Sequence
  Description of Artificial Sequence: Synthetic oligonucleotide
uuucuuucgaggauguaca

SEQ ID NO: 952216 - RNA, 19 nt, Artificial Sequence
  Description of Artificial Sequence: Synthetic oligonucleotide
aaucagugacagcuugagc

SEQ ID NO: 952217 - RNA, 19 nt, Artificial Sequence
  Description of Artificial Sequence: Synthetic oligonucleotide
ucgucuaucaccagcagcu

SEQ ID NO: 952218 - RNA, 19 nt, Artificial Sequence
  Description of Artificial Sequence: Synthetic oligonucleotide
uaggaaaagacggagccgg

SEQ ID NO: 952219 - RNA, 19 nt, Artificial Sequence
  Description of Artificial Sequence: Synthetic oligonucleotide
aaaguaugucuugagcuuc

SEQ ID NO: 952220 - RNA, 19 nt, Artificial Sequence
  Description of Artificial Sequence: Synthetic oligonucleotide
agcaagacuguucuguggg

SEQ ID NO: 952221 - RNA, 19 nt, Artificial Sequence
  Description of Artificial Sequence: Synthetic oligonucleotide
aauucagcguccucagguc

SEQ ID NO: 952222 - RNA, 19 nt, Artificial Sequence
  Description of Artificial Sequence: Synthetic oligonucleotide
agaguguacccacagagug

SEQ ID NO: 952223 - RNA, 19 nt, Artificial Sequence
  Description of Artificial Sequence: Synthetic oligonucleotide
aaucucgccucucgaaugg

SEQ ID NO: 952224 - RNA, 19 nt, Artificial Sequence
  Description of Artificial Sequence: Synthetic oligonucleotide
ucuccauugagcacacagg

SEQ ID NO: 952225 - RNA, 19 nt, Artificial Sequence
  Description of Artificial Sequence: Synthetic oligonucleotide
aaagcaaggcuuugccccg

SEQ ID NO: 952226 - RNA, 19 nt, Artificial Sequence
  Description of Artificial Sequence: Synthetic oligonucleotide
aaaagacggagccgguaac

SEQ ID NO: 952227 - RNA, 19 nt, Artificial Sequence
  Description of Artificial Sequence: Synthetic oligonucleotide
aaaguugaguacagcagac

SEQ ID NO: 952228 - RNA, 19 nt, Artificial Sequence
  Description of Artificial Sequence: Synthetic oligonucleotide
uguuuagucacugaccgca

SEQ ID NO: 952229 - RNA, 19 nt, Artificial Sequence
  Description of Artificial Sequence: Synthetic oligonucleotide
aagugguuuaauauucggg

SEQ ID NO: 952230 - RNA, 19 nt, Artificial Sequence
  Description of Artificial Sequence: Synthetic oligonucleotide
guguucaaaacccagcggc

SEQ ID NO: 952231 - RNA, 19 nt, Artificial Sequence
  Description of Artificial Sequence: Synthetic oligonucleotide
aaguuucuuuccccugugc

SEQ ID NO: 952232 - RNA, 19 nt, Artificial Sequence
  Description of Artificial Sequence: Synthetic oligonucleotide
gaacugguaggguagcagg

SEQ ID NO: 952233 - RNA, 19 nt, Artificial Sequence
  Description of Artificial Sequence: Synthetic oligonucleotide
uugaguacagcagacacgu

SEQ ID NO: 952234 - RNA, 19 nt, Artificial Sequence
  Description of Artificial Sequence: Synthetic oligonucleotide
ucgaggauguacaaugcca

SEQ ID NO: 952235 - RNA, 19 nt, Artificial Sequence
  Description of Artificial Sequence: Synthetic oligonucleotide
uagguuuaaguuucuuucc

SEQ ID NO: 952236 - RNA, 19 nt, Artificial Sequence
  Description of Artificial Sequence: Synthetic oligonucleotide
agacauuagccacucgcac

SEQ ID NO: 952237 - RNA, 19 nt, Artificial Sequence
  Description of Artificial Sequence: Synthetic oligonucleotide
agcuucgucuaucaccagc

SEQ ID NO: 952238 - RNA, 19 nt, Artificial Sequence
  Description of Artificial Sequence: Synthetic oligonucleotide
aaucuuugccaagcaagac

SEQ ID NO: 952239 - RNA, 19 nt, Artificial Sequence
  Description of Artificial Sequence: Synthetic oligonucleotide
aaggucagaacuaugccug

SEQ ID NO: 952240 - RNA, 19 nt, Artificial Sequence
  Description of Artificial Sequence: Synthetic oligonucleotide
aggacaaggccucucacag

SEQ ID NO: 952241 - RNA, 19 nt, Artificial Sequence
  Description of Artificial Sequence: Synthetic oligonucleotide
agcuuguuccauuacagga

SEQ ID NO: 952242 - RNA, 19 nt, Artificial Sequence
  Description of Artificial Sequence: Synthetic oligonucleotide
aggaauagcauaagcugcc

SEQ ID NO: 952243 - RNA, 19 nt, Artificial Sequence
  Description of Artificial Sequence: Synthetic oligonucleotide
ucucgaauggccuguuuag

SEQ ID NO: 952244 - RNA, 19 nt, Artificial Sequence
  Description of Artificial Sequence: Synthetic oligonucleotide
uguucugugggcagcacga

SEQ ID NO: 952245 - RNA, 19 nt, Artificial Sequence
  Description of Artificial Sequence: Synthetic oligonucleotide
aagacggagccgguaaccc

SEQ ID NO: 952246 - RNA, 19 nt, Artificial Sequence
  Description of Artificial Sequence: Synthetic oligonucleotide
accaucccaagucagcgac

SEQ ID NO: 952247 - RNA, 19 nt, Artificial Sequence
  Description of Artificial Sequence: Synthetic oligonucleotide
uuauguaguaccagcuccu

SEQ ID NO: 952248 - RNA, 19 nt, Artificial Sequence
  Description of Artificial Sequence: Synthetic oligonucleotide
uucccagaugcuuucgagg

SEQ ID NO: 952249 - RNA, 19 nt, Artificial Sequence
  Description of Artificial Sequence: Synthetic oligonucleotide
uucuaggaaaagacggagc

SEQ ID NO: 952250 - RNA, 19 nt, Artificial Sequence
  Description of Artificial Sequence: Synthetic oligonucleotide
acgugguggaagucuaugc

SEQ ID NO: 952251 - RNA, 19 nt, Artificial Sequence
  Description of Artificial Sequence: Synthetic oligonucleotide
ugacacaaucauagaagcc

SEQ ID NO: 952252 - RNA, 19 nt, Artificial Sequence
  Description of Artificial Sequence: Synthetic oligonucleotide
ugguaggguagcaggauag

SEQ ID NO: 952253 - RNA, 19 nt, Artificial Sequence
  Description of Artificial Sequence: Synthetic oligonucleotide
aacugcagcauaggaauag

SEQ ID NO: 952254 - RNA, 19 nt, Artificial Sequence
  Description of Artificial Sequence: Synthetic oligonucleotide
augcuuucgaggcucacag

SEQ ID NO: 952255 - RNA, 19 nt, Artificial Sequence
  Description of Artificial Sequence: Synthetic oligonucleotide
uccgaggcaagugacaaag

SEQ ID NO: 952256 - RNA, 19 nt, Artificial Sequence
  Description of Artificial Sequence: Synthetic oligonucleotide
ucagcguagguugugacca

SEQ ID NO: 952257 - RNA, 19 nt, Artificial Sequence
  Description of Artificial Sequence: Synthetic oligonucleotide
ucccagaugcuuucgaggc

SEQ ID NO: 952258 - RNA, 19 nt, Artificial Sequence
  Description of Artificial Sequence: Synthetic oligonucleotide
uaauauucgggaugggguc

SEQ ID NO: 952259 - RNA, 19 nt, Artificial Sequence
  Description of Artificial Sequence: Synthetic oligonucleotide
gauguacaaugccacgaag

SEQ ID NO: 952260 - RNA, 19 nt, Artificial Sequence
  Description of Artificial Sequence: Synthetic oligonucleotide
uucgaggauguacaaugcc

SEQ ID NO: 952261 - RNA, 19 nt, Artificial Sequence
  Description of Artificial Sequence: Synthetic oligonucleotide
uuucgaggauguacaaugc

SEQ ID NO: 952262 - RNA, 19 nt, Artificial Sequence
  Description of Artificial Sequence: Synthetic oligonucleotide
uucgucuaucaccagcagc

SEQ ID NO: 952263 - RNA, 19 nt, Artificial Sequence
  Description of Artificial Sequence: Synthetic oligonucleotide
acuguucuaggaaaagacg

SEQ ID NO: 952264 - RNA, 19 nt, Artificial Sequence
  Description of Artificial Sequence: Synthetic oligonucleotide
ugaccaucccaagucagcg

SEQ ID NO: 952265 - RNA, 19 nt, Artificial Sequence
  Description of Artificial Sequence: Synthetic oligonucleotide
aaaguggcugacaugagaa

SEQ ID NO: 952266 - RNA, 19 nt, Artificial Sequence
  Description of Artificial Sequence: Synthetic oligonucleotide
uagcgaaagcuuucgaucu

SEQ ID NO: 952267 - RNA, 19 nt, Artificial Sequence
  Description of Artificial Sequence: Synthetic oligonucleotide
guugugaccaucccaaguc

SEQ ID NO: 952268 - RNA, 19 nt, Artificial Sequence
  Description of Artificial Sequence: Synthetic oligonucleotide
aaugccacgaagagcagca

SEQ ID NO: 952269 - RNA, 19 nt, Artificial Sequence
  Description of Artificial Sequence: Synthetic oligonucleotide
ccuguuuagucacugaccg

SEQ ID NO: 952270 - RNA, 19 nt, Artificial Sequence
  Description of Artificial Sequence: Synthetic oligonucleotide
ugugaccaucccaagucag

SEQ ID NO: 952271 - RNA, 19 nt, Artificial Sequence
  Description of Artificial Sequence: Synthetic oligonucleotide
guaaccccucucuagagug

SEQ ID NO: 952272 - RNA, 19 nt, Artificial Sequence
  Description of Artificial Sequence: Synthetic oligonucleotide
uaggguagcaggauagccu

SEQ ID NO: 952273 - RNA, 19 nt, Artificial Sequence
  Description of Artificial Sequence: Synthetic oligonucleotide
aacauaggcuucuggagua

SEQ ID NO: 952274 - RNA, 19 nt, Artificial Sequence
  Description of Artificial Sequence: Synthetic oligonucleotide
ugcagcauaggaauagcau

SEQ ID NO: 952275 - RNA, 19 nt, Artificial Sequence
  Description of Artificial Sequence: Synthetic oligonucleotide
aguggcugacaugagaaag

SEQ ID NO: 952276 - RNA, 19 nt, Artificial Sequence
  Description of Artificial Sequence: Synthetic oligonucleotide
ugcaucauagacugugccu

SEQ ID NO: 952277 - RNA, 19 nt, Artificial Sequence
  Description of Artificial Sequence: Synthetic oligonucleotide
uuucgaggcucacagccug

SEQ ID NO: 952278 - RNA, 19 nt, Artificial Sequence
  Description of Artificial Sequence: Synthetic oligonucleotide
gacacaaucauagaagccu

SEQ ID NO: 952279 - RNA, 19 nt, Artificial Sequence
  Description of Artificial Sequence: Synthetic oligonucleotide
guaggaacaaggacaaggc

SEQ ID NO: 952280 - RNA, 19 nt, Artificial Sequence
  Description of Artificial Sequence: Synthetic oligonucleotide
uagccacucgcacaucccg

SEQ ID NO: 952281 - RNA, 19 nt, Artificial Sequence
  Description of Artificial Sequence: Synthetic oligonucleotide
guugcuaugacacaaucau

SEQ ID NO: 952282 - RNA, 19 nt, Artificial Sequence
  Description of Artificial Sequence: Synthetic oligonucleotide
uucaaaacccagcggcucu

SEQ ID NO: 952283 - RNA, 19 nt, Artificial Sequence
  Description of Artificial Sequence: Synthetic oligonucleotide
aggaacaaggacaaggccu

SEQ ID NO: 952284 - RNA, 19 nt, Artificial Sequence
  Description of Artificial Sequence: Synthetic oligonucleotide
cagagguauagccuuuucc

SEQ ID NO: 952285 - RNA, 19 nt, Artificial Sequence
  Description of Artificial Sequence: Synthetic oligonucleotide
uaaguuucuuuccccugug

SEQ ID NO: 952286 - RNA, 19 nt, Artificial Sequence
  Description of Artificial Sequence: Synthetic oligonucleotide
gaagcugagacuccuguaa

SEQ ID NO: 952287 - RNA, 19 nt, Artificial Sequence
  Description of Artificial Sequence: Synthetic oligonucleotide
aaggcugcuucuccaaagu

SEQ ID NO: 952288 - RNA, 19 nt, Artificial Sequence
  Description of Artificial Sequence: Synthetic oligonucleotide
gaaaguggcugacaugaga

SEQ ID NO: 952289 - RNA, 19 nt, Artificial Sequence
  Description of Artificial Sequence: Synthetic oligonucleotide
acaucccgagcacaguagg

SEQ ID NO: 952290 - RNA, 19 nt, Artificial Sequence
  Description of Artificial Sequence: Synthetic oligonucleotide
ucaaucucgccucucgaau

SEQ ID NO: 952291 - RNA, 19 nt, Artificial Sequence
  Description of Artificial Sequence: Synthetic oligonucleotide
agcgccucaaucuuugcca

SEQ ID NO: 952292 - RNA, 19 nt, Artificial Sequence
  Description of Artificial Sequence: Synthetic oligonucleotide
uuuagucacugaccgcaug

SEQ ID NO: 952293 - RNA, 19 nt, Artificial Sequence
  Description of Artificial Sequence: Synthetic oligonucleotide
guugaguacagcagacacg

SEQ ID NO: 952294 - RNA, 19 nt, Artificial Sequence
  Description of Artificial Sequence: Synthetic oligonucleotide
gacauuagccacucgcaca

SEQ ID NO: 952295 - RNA, 19 nt, Artificial Sequence
  Description of Artificial Sequence: Synthetic oligonucleotide
aggcuuuaccacugcaggg

SEQ ID NO: 952296 - RNA, 19 nt, Artificial Sequence
  Description of Artificial Sequence: Synthetic oligonucleotide
gaaaagacggagccgguaa

SEQ ID NO: 952297 - RNA, 19 nt, Artificial Sequence
  Description of Artificial Sequence: Synthetic oligonucleotide
auagaagccuugguugaac

SEQ ID NO: 952298 - RNA, 19 nt, Artificial Sequence
  Description of Artificial Sequence: Synthetic oligonucleotide
agaacuaugccuggguugu

SEQ ID NO: 952299 - RNA, 19 nt, Artificial Sequence
  Description of Artificial Sequence: Synthetic oligonucleotide
gcuuucgaggcucacagcc

SEQ ID NO: 952300 - RNA, 19 nt, Artificial Sequence
  Description of Artificial Sequence: Synthetic oligonucleotide
ucgaauggccuguuuaguc

SEQ ID NO: 952301 - RNA, 19 nt, Artificial Sequence
  Description of Artificial Sequence: Synthetic oligonucleotide
agacggagccgguaacccc

SEQ ID NO: 952302 - RNA, 19 nt, Artificial Sequence
  Description of Artificial Sequence: Synthetic oligonucleotide
cucacacaccaccugaaac

SEQ ID NO: 952303 - RNA, 19 nt, Artificial Sequence
  Description of Artificial Sequence: Synthetic oligonucleotide
auagccucgcccucuccac

SEQ ID NO: 952304 - RNA, 19 nt, Artificial Sequence
  Description of Artificial Sequence: Synthetic oligonucleotide
ccugggauugucuucaaag

SEQ ID NO: 952305 - RNA, 19 nt, Artificial Sequence
  Description of Artificial Sequence: Synthetic oligonucleotide
cuccuuuggagccucggcc

SEQ ID NO: 952306 - RNA, 19 nt, Artificial Sequence
  Description of Artificial Sequence: Synthetic oligonucleotide
agucucacacaccaccuga

SEQ ID NO: 952307 - RNA, 19 nt, Artificial Sequence
  Description of Artificial Sequence: Synthetic oligonucleotide
uccguuucuuucgaggaug

SEQ ID NO: 952308 - RNA, 19 nt, Artificial Sequence
  Description of Artificial Sequence: Synthetic oligonucleotide
uccauccggaacugguagg

SEQ ID NO: 952309 - RNA, 19 nt, Artificial Sequence
  Description of Artificial Sequence: Synthetic oligonucleotide
acccacagagugguaagcc

SEQ ID NO: 952310 - RNA, 19 nt, Artificial Sequence
  Description of Artificial Sequence: Synthetic oligonucleotide
gguuuaaguuucuuucccc

SEQ ID NO: 952311 - RNA, 19 nt, Artificial Sequence
  Description of Artificial Sequence: Synthetic oligonucleotide
cuaggaaaagacggagccg

SEQ ID NO: 952312 - RNA, 19 nt, Artificial Sequence
  Description of Artificial Sequence: Synthetic oligonucleotide
cagguuucuccaucaauac

SEQ ID NO: 952313 - RNA, 19 nt, Artificial Sequence
  Description of Artificial Sequence: Synthetic oligonucleotide
uguacccacagagugguaa

SEQ ID NO: 952314 - RNA, 19 nt, Artificial Sequence
  Description of Artificial Sequence: Synthetic oligonucleotide
ugacagcuugagcagggca

SEQ ID NO: 952315 - RNA, 19 nt, Artificial Sequence
  Description of Artificial Sequence: Synthetic oligonucleotide
gucacggagcuucaaguug

SEQ ID NO: 952316 - RNA, 19 nt, Artificial Sequence
  Description of Artificial Sequence: Synthetic oligonucleotide
ugagaagcgccucaaucuu

SEQ ID NO: 952317 - RNA, 19 nt, Artificial Sequence
  Description of Artificial Sequence: Synthetic oligonucleotide
cagcuuguuccauuacagg

SEQ ID NO: 952318 - RNA, 19 nt, Artificial Sequence
  Description of Artificial Sequence: Synthetic oligonucleotide
caagucagcgacagccugc

SEQ ID NO: 952319 - RNA, 19 nt, Artificial Sequence
  Description of Artificial Sequence: Synthetic oligonucleotide
gcaucuguugcuaugacac

SEQ ID NO: 952320 - RNA, 19 nt, Artificial Sequence
  Description of Artificial Sequence: Synthetic oligonucleotide
auauucgggaugggguccc

SEQ ID NO: 952321 - RNA, 19 nt, Artificial Sequence
  Description of Artificial Sequence: Synthetic oligonucleotide
cugugaaaugauguggcac

SEQ ID NO: 952322 - RNA, 19 nt, Artificial Sequence
  Description of Artificial Sequence: Synthetic oligonucleotide
uuauucuguuaaguccaag

SEQ ID NO: 952323 - RNA, 19 nt, Artificial Sequence
  Description of Artificial Sequence: Synthetic oligonucleotide
cugcaucauagacugugcc

SEQ ID NO: 952324 - RNA, 19 nt, Artificial Sequence
  Description of Artificial Sequence: Synthetic oligonucleotide
cuccauugagcacacagga

SEQ ID NO: 952325 - RNA, 19 nt, Artificial Sequence
  Description of Artificial Sequence: Synthetic oligonucleotide
uccuguaacuugaggguaa

SEQ ID NO: 952326 - RNA, 19 nt, Artificial Sequence
  Description of Artificial Sequence: Synthetic oligonucleotide
ucgcacaucccgagcacag

SEQ ID NO: 952327 - RNA, 19 nt, Artificial Sequence
  Description of Artificial Sequence: Synthetic oligonucleotide
auagcauaagcugccgucu

SEQ ID NO: 952328 - RNA, 19 nt, Artificial Sequence
  Description of Artificial Sequence: Synthetic oligonucleotide
gauagcgaaagcuuucgau

SEQ ID NO: 952329 - RNA, 19 nt, Artificial Sequence
  Description of Artificial Sequence: Synthetic oligonucleotide
agcgaaagcuuucgaucuc

SEQ ID NO: 952330 - RNA, 19 nt, Artificial Sequence
  Description of Artificial Sequence: Synthetic oligonucleotide
aaguugaguacagcagaca

SEQ ID NO: 952331 - RNA, 19 nt, Artificial Sequence
  Description of Artificial Sequence: Synthetic oligonucleotide
ucuguugcuaugacacaau

SEQ ID NO: 952332 - RNA, 19 nt, Artificial Sequence
  Description of Artificial Sequence: Synthetic oligonucleotide
caaucucgccucucgaaug

SEQ ID NO: 952333 - RNA, 19 nt, Artificial Sequence
  Description of Artificial Sequence: Synthetic oligonucleotide
gaccgcauggcaucccugc

SEQ ID NO: 952334 - RNA, 19 nt, Artificial Sequence
  Description of Artificial Sequence: Synthetic oligonucleotide
cagggcauacagcagcaag

SEQ ID NO: 952335 - RNA, 19 nt, Artificial Sequence
  Description of Artificial Sequence: Synthetic oligonucleotide
uccagcgccagagguauag

SEQ ID NO: 952336 - RNA, 19 nt, Artificial Sequence
  Description of Artificial Sequence: Synthetic oligonucleotide
uguuggcucgagcuguccu

SEQ ID NO: 952337 - RNA, 19 nt, Artificial Sequence
  Description of Artificial Sequence: Synthetic oligonucleotide
ucccgagcacaguaggcag

SEQ ID NO: 952338 - RNA, 19 nt, Artificial Sequence
  Description of Artificial Sequence: Synthetic oligonucleotide
aggucagaacuaugccugg

SEQ ID NO: 952339 - RNA, 19 nt, Artificial Sequence
  Description of Artificial Sequence: Synthetic oligonucleotide
cuccauccggaacugguag

SEQ ID NO: 952340 - RNA, 19 nt, Artificial Sequence
  Description of Artificial Sequence: Synthetic oligonucleotide
gugguaagcccacucacuc

SEQ ID NO: 952341 - RNA, 19 nt, Artificial Sequence
  Description of Artificial Sequence: Synthetic oligonucleotide
ucgaugaacauaggcuucu

SEQ ID NO: 952342 - RNA, 19 nt, Artificial Sequence
  Description of Artificial Sequence: Synthetic oligonucleotide
gagacauuagccacucgca

SEQ ID NO: 952343 - RNA, 19 nt, Artificial Sequence
  Description of Artificial Sequence: Synthetic oligonucleotide
ucucgccucucgaauggcc

SEQ ID NO: 952344 - RNA, 19 nt, Artificial Sequence
  Description of Artificial Sequence: Synthetic oligonucleotide
guaggguagcaggauagcc

SEQ ID NO: 952345 - RNA, 19 nt, Artificial Sequence
  Description of Artificial Sequence: Synthetic oligonucleotide
cagcauaggaauagcauaa

SEQ ID NO: 952346 - RNA, 19 nt, Artificial Sequence
  Description of Artificial Sequence: Synthetic oligonucleotide
acucgcacaucccgagcac

SEQ ID NO: 952347 - RNA, 19 nt, Artificial Sequence
  Description of Artificial Sequence: Synthetic oligonucleotide
ucgcuguagguuuaaguuu

SEQ ID NO: 952348 - RNA, 19 nt, Artificial Sequence
  Description of Artificial Sequence: Synthetic oligonucleotide
aaauccgaggcaagugaca

SEQ ID NO: 952349 - RNA, 19 nt, Artificial Sequence
  Description of Artificial Sequence: Synthetic oligonucleotide
ccccauguguucaaaaccc

SEQ ID NO: 952350 - RNA, 19 nt, Artificial Sequence
  Description of Artificial Sequence: Synthetic oligonucleotide
ugcugcaagugguuuaaua

SEQ ID NO: 952351 - RNA, 19 nt, Artificial Sequence
  Description of Artificial Sequence: Synthetic oligonucleotide
ugccccgaaucagugacag

SEQ ID NO: 952352 - RNA, 19 nt, Artificial Sequence
  Description of Artificial Sequence: Synthetic oligonucleotide
ggccugguaaauccgaggc

SEQ ID NO: 952353 - RNA, 19 nt, Artificial Sequence
  Description of Artificial Sequence: Synthetic oligonucleotide
aaguggcugacaugagaaa

SEQ ID NO: 952354 - RNA, 19 nt, Artificial Sequence
  Description of Artificial Sequence: Synthetic oligonucleotide
gaaagcuuucgaucuccuc

SEQ ID NO: 952355 - RNA, 19 nt, Artificial Sequence
  Description of Artificial Sequence: Synthetic oligonucleotide
ugguaaauccgaggcaagu

SEQ ID NO: 952356 - RNA, 19 nt, Artificial Sequence
  Description of Artificial Sequence: Synthetic oligonucleotide
caucccaagucagcgacag

SEQ ID NO: 952357 - RNA, 19 nt, Artificial Sequence
  Description of Artificial Sequence: Synthetic oligonucleotide
caggaaccaaguagucagg

SEQ ID NO: 952358 - RNA, 19 nt, Artificial Sequence
  Description of Artificial Sequence: Synthetic oligonucleotide
ugucgcuuucuuguggaga

SEQ ID NO: 952359 - RNA, 19 nt, Artificial Sequence
  Description of Artificial Sequence: Synthetic oligonucleotide
ucuccgcuugccuuugacu

SEQ ID NO: 952360 - RNA, 19 nt, Artificial Sequence
  Description of Artificial Sequence: Synthetic oligonucleotide
agcgauagcgaaagcuuuc

SEQ ID NO: 952361 - RNA, 19 nt, Artificial Sequence
  Description of Artificial Sequence: Synthetic oligonucleotide
agcacacaggagggaaugc

SEQ ID NO: 952362 - RNA, 19 nt, Artificial Sequence
  Description of Artificial Sequence: Synthetic oligonucleotide
uugcuaugacacaaucaua

SEQ ID NO: 952363 - RNA, 19 nt, Artificial Sequence
  Description of Artificial Sequence: Synthetic oligonucleotide
uuucuccguuucuuucgag

SEQ ID NO: 952364 - RNA, 19 nt, Artificial Sequence
  Description of Artificial Sequence: Synthetic oligonucleotide
cagcgccagagguauagcc

SEQ ID NO: 952365 - RNA, 19 nt, Artificial Sequence
  Description of Artificial Sequence: Synthetic oligonucleotide
guuggcucgagcuguccug

SEQ ID NO: 952366 - RNA, 19 nt, Artificial Sequence
  Description of Artificial Sequence: Synthetic oligonucleotide
aagucagcgacagccugca

SEQ ID NO: 952367 - RNA, 19 nt, Artificial Sequence
  Description of Artificial Sequence: Synthetic oligonucleotide
cuguuuagucacugaccgc

SEQ ID NO: 952368 - RNA, 19 nt, Artificial Sequence
  Description of Artificial Sequence: Synthetic oligonucleotide
caucccgagcacaguaggc

SEQ ID NO: 952369 - RNA, 19 nt, Artificial Sequence
  Description of Artificial Sequence: Synthetic oligonucleotide
aucagaguguacccacaga

SEQ ID NO: 952370 - RNA, 19 nt, Artificial Sequence
  Description of Artificial Sequence: Synthetic oligonucleotide
aggaccugucgcuuucuug

SEQ ID NO: 952371 - RNA, 19 nt, Artificial Sequence
  Description of Artificial Sequence: Synthetic oligonucleotide
uugaggguaaccggguuau

SEQ ID NO: 952372 - RNA, 19 nt, Artificial Sequence
  Description of Artificial Sequence: Synthetic oligonucleotide
cagcagcugagacauuagc

SEQ ID NO: 952373 - RNA, 19 nt, Artificial Sequence
  Description of Artificial Sequence: Synthetic oligonucleotide
gguaagcccacucacucca

SEQ ID NO: 952374 - RNA, 19 nt, Artificial Sequence
  Description of Artificial Sequence: Synthetic oligonucleotide
ugaagucacgcaguggguu

SEQ ID NO: 952375 - RNA, 19 nt, Artificial Sequence
  Description of Artificial Sequence: Synthetic oligonucleotide
gucgcuuucuuguggagaa

SEQ ID NO: 952376 - RNA, 19 nt, Artificial Sequence
  Description of Artificial Sequence: Synthetic oligonucleotide
gguaaauccgaggcaagug

SEQ ID NO: 952377 - RNA, 19 nt, Artificial Sequence
  Description of Artificial Sequence: Synthetic oligonucleotide
cagggagucacggagcuuc

SEQ ID NO: 952378 - RNA, 19 nt, Artificial Sequence
  Description of Artificial Sequence: Synthetic oligonucleotide
ccagaugaggcuuuaccac

SEQ ID NO: 952379 - RNA, 19 nt, Artificial Sequence
  Description of Artificial Sequence: Synthetic oligonucleotide
acagugagcaucagagugu

SEQ ID NO: 952380 - RNA, 19 nt, Artificial Sequence
  Description of Artificial Sequence: Synthetic oligonucleotide
ggagucacggagcuucaag

SEQ ID NO: 952381 - RNA, 19 nt, Artificial Sequence
  Description of Artificial Sequence: Synthetic oligonucleotide
gguuauguaguaccagcuc

SEQ ID NO: 952382 - RNA, 19 nt, Artificial Sequence
  Description of Artificial Sequence: Synthetic oligonucleotide
uucuuucgaggauguacaa

SEQ ID NO: 952383 - RNA, 19 nt, Artificial Sequence
  Description of Artificial Sequence: Synthetic oligonucleotide
agucacggagcuucaaguu

SEQ ID NO: 952384 - RNA, 19 nt, Artificial Sequence
  Description of Artificial Sequence: Synthetic oligonucleotide
ggaucagcggccuugucuc

SEQ ID NO: 952385 - RNA, 19 nt, Artificial Sequence
  Description of Artificial Sequence: Synthetic oligonucleotide
ucuuucgaggauguacaau

SEQ ID NO: 952386 - RNA, 19 nt, Artificial Sequence
  Description of Artificial Sequence: Synthetic oligonucleotide
ggacauugcccagaugagg

SEQ ID NO: 952387 - RNA, 19 nt, Artificial Sequence
  Description of Artificial Sequence: Synthetic oligonucleotide
acguccucguugaaagugg

SEQ ID NO: 952388 - RNA, 19 nt, Artificial Sequence
  Description of Artificial Sequence: Synthetic oligonucleotide
cauaggcuucuggaguagg

SEQ ID NO: 952389 - RNA, 19 nt, Artificial Sequence
  Description of Artificial Sequence: Synthetic oligonucleotide
agcaacugcagcauaggaa

SEQ ID NO: 952390 - RNA, 19 nt, Artificial Sequence
  Description of Artificial Sequence: Synthetic oligonucleotide
caauucagcguccucaggu

SEQ ID NO: 952391 - RNA, 19 nt, Artificial Sequence
  Description of Artificial Sequence: Synthetic oligonucleotide
ggauugucuucaaaguaug

SEQ ID NO: 952392 - RNA, 19 nt, Artificial Sequence
  Description of Artificial Sequence: Synthetic oligonucleotide
ucucugaguguagaagcuc

SEQ ID NO: 952393 - RNA, 19 nt, Artificial Sequence
  Description of Artificial Sequence: Synthetic oligonucleotide
agacacgugguggaagucu

SEQ ID NO: 952394 - RNA, 19 nt, Artificial Sequence
  Description of Artificial Sequence: Synthetic oligonucleotide
caaugccacgaagagcagc

SEQ ID NO: 952395 - RNA, 19 nt, Artificial Sequence
  Description of Artificial Sequence: Synthetic oligonucleotide
accucaggaaggcuucgcu

SEQ ID NO: 952396 - RNA, 19 nt, Artificial Sequence
  Description of Artificial Sequence: Synthetic oligonucleotide
aagggcagaucauggcgua

SEQ ID NO: 952397 - RNA, 19 nt, Artificial Sequence
  Description of Artificial Sequence: Synthetic oligonucleotide
acauugcccagaugaggcu

SEQ ID NO: 952398 - RNA, 19 nt, Artificial Sequence
  Description of Artificial Sequence: Synthetic oligonucleotide
gaucauggcguagcagcug

SEQ ID NO: 952399 - RNA, 19 nt, Artificial Sequence
  Description of Artificial Sequence: Synthetic oligonucleotide
uuguacguccucguugaaa

SEQ ID NO: 952400 - RNA, 19 nt, Artificial Sequence
  Description of Artificial Sequence: Synthetic oligonucleotide
aggauagccucgcccucuc

SEQ ID NO: 952401 - RNA, 19 nt, Artificial Sequence
  Description of Artificial Sequence: Synthetic oligonucleotide
aucccaagucagcgacagc

SEQ ID NO: 952402 - RNA, 19 nt, Artificial Sequence
  Description of Artificial Sequence: Synthetic oligonucleotide
cuuuuccuggaucagcgua

SEQ ID NO: 952403 - RNA, 19 nt, Artificial Sequence
  Description of Artificial Sequence: Synthetic oligonucleotide
aucccgagcacaguaggca

SEQ ID NO: 952404 - RNA, 19 nt, Artificial Sequence
  Description of Artificial Sequence: Synthetic oligonucleotide
agugguaagcccacucacu

SEQ ID NO: 952405 - RNA, 19 nt, Artificial Sequence
  Description of Artificial Sequence: Synthetic oligonucleotide
uuggcucgagcuguccugc

SEQ ID NO: 952406 - RNA, 19 nt, Artificial Sequence
  Description of Artificial Sequence: Synthetic oligonucleotide
ucgggaugggguccccacc

SEQ ID NO: 952407 - RNA, 19 nt, Artificial Sequence
  Description of Artificial Sequence: Synthetic oligonucleotide
gcuuguacguccucguuga

SEQ ID NO: 952408 - RNA, 19 nt, Artificial Sequence
  Description of Artificial Sequence: Synthetic oligonucleotide
agguugugaccaucccaag

SEQ ID NO: 952409 - RNA, 19 nt, Artificial Sequence
  Description of Artificial Sequence: Synthetic oligonucleotide
gaagcgccucaaucuuugc

SEQ ID NO: 952410 - RNA, 19 nt, Artificial Sequence
  Description of Artificial Sequence: Synthetic oligonucleotide
cucuagaguguugacaaaa

SEQ ID NO: 952411 - RNA, 19 nt, Artificial Sequence
  Description of Artificial Sequence: Synthetic oligonucleotide
ugaguacagcagacacgug

SEQ ID NO: 952412 - RNA, 19 nt, Artificial Sequence
  Description of Artificial Sequence: Synthetic oligonucleotide
gaauagcauaagcugccgu

SEQ ID NO: 952413 - RNA, 19 nt, Artificial Sequence
  Description of Artificial Sequence: Synthetic oligonucleotide
ucucuagaguguugacaaa

SEQ ID NO: 952414 - RNA, 19 nt, Artificial Sequence
  Description of Artificial Sequence: Synthetic oligonucleotide
auccggaacugguagggua

SEQ ID NO: 952415 - RNA, 19 nt, Artificial Sequence
  Description of Artificial Sequence: Synthetic oligonucleotide
gaccugucgcuuucuugug

SEQ ID NO: 952416 - RNA, 19 nt, Artificial Sequence
  Description of Artificial Sequence: Synthetic oligonucleotide
gcaacugcagcauaggaau

SEQ ID NO: 952417 - RNA, 19 nt, Artificial Sequence
  Description of Artificial Sequence: Synthetic oligonucleotide
ggccuguuuagucacugac

SEQ ID NO: 952418 - RNA, 19 nt, Artificial Sequence
  Description of Artificial Sequence: Synthetic oligonucleotide
gguggaagucuaugccccg

SEQ ID NO: 952419 - RNA, 19 nt, Artificial Sequence
  Description of Artificial Sequence: Synthetic oligonucleotide
cauuacaggaccugucgcu

SEQ ID NO: 952420 - RNA, 19 nt, Artificial Sequence
  Description of Artificial Sequence: Synthetic oligonucleotide
gaugcccaauucagcgucc

SEQ ID NO: 952421 - RNA, 19 nt, Artificial Sequence
  Description of Artificial Sequence: Synthetic oligonucleotide
uggaucagcguagguugug

SEQ ID NO: 952422 - RNA, 19 nt, Artificial Sequence
  Description of Artificial Sequence: Synthetic oligonucleotide
acugaccgcauggcauccc

SEQ ID NO: 952423 - RNA, 19 nt, Artificial Sequence
  Description of Artificial Sequence: Synthetic oligonucleotide
ccugcagcgauagcgaaag

SEQ ID NO: 952424 - RNA, 19 nt, Artificial Sequence
  Description of Artificial Sequence: Synthetic oligonucleotide
ugaccgcauggcaucccug

SEQ ID NO: 952425 - RNA, 19 nt, Artificial Sequence
  Description of Artificial Sequence: Synthetic oligonucleotide
cucguugaaaguggcugac

SEQ ID NO: 952426 - RNA, 19 nt, Artificial Sequence
  Description of Artificial Sequence: Synthetic oligonucleotide
aucucgccucucgaauggc

SEQ ID NO: 952427 - RNA, 19 nt, Artificial Sequence
  Description of Artificial Sequence: Synthetic oligonucleotide
uaaccggguuauguaguac

SEQ ID NO: 952428 - RNA, 19 nt, Artificial Sequence
  Description of Artificial Sequence: Synthetic oligonucleotide
ucgccucucgaauggccug

SEQ ID NO: 952429 - RNA, 19 nt, Artificial Sequence
  Description of Artificial Sequence: Synthetic oligonucleotide
gaucagcggccuugucucc

SEQ ID NO: 952430 - RNA, 19 nt, Artificial Sequence
  Description of Artificial Sequence: Synthetic oligonucleotide
cucaaucuuugccaagcaa

SEQ ID NO: 952431 - RNA, 19 nt, Artificial Sequence
  Description of Artificial Sequence: Synthetic oligonucleotide
gcccagaugaggcuuuacc

SEQ ID NO: 952432 - RNA, 19 nt, Artificial Sequence
  Description of Artificial Sequence: Synthetic oligonucleotide
gcgauagcgaaagcuuucg

SEQ ID NO: 952433 - RNA, 19 nt, Artificial Sequence
  Description of Artificial Sequence: Synthetic oligonucleotide
agcguagguugugaccauc

SEQ ID NO: 952434 - RNA, 19 nt, Artificial Sequence
  Description of Artificial Sequence: Synthetic oligonucleotide
agcgccagagguauagccu

SEQ ID NO: 952435 - RNA, 19 nt, Artificial Sequence
  Description of Artificial Sequence: Synthetic oligonucleotide
cugggauugucuucaaagu

SEQ ID NO: 952436 - RNA, 19 nt, Artificial Sequence
  Description of Artificial Sequence: Synthetic oligonucleotide
cuguaacuugaggguaacc

SEQ ID NO: 952437 - RNA, 19 nt, Artificial Sequence
  Description of Artificial Sequence: Synthetic oligonucleotide
cacucgcacaucccgagca

SEQ ID NO: 952438 - RNA, 19 nt, Artificial Sequence
  Description of Artificial Sequence: Synthetic oligonucleotide
ccauuacaggaccugucgc

SEQ ID NO: 952439 - RNA, 19 nt, Artificial Sequence
  Description of Artificial Sequence: Synthetic oligonucleotide
cagucucacacaccaccug

SEQ ID NO: 952440 - RNA, 19 nt, Artificial Sequence
  Description of Artificial Sequence: Synthetic oligonucleotide
gaccaucccaagucagcga

SEQ ID NO: 952441 - RNA, 19 nt, Artificial Sequence
  Description of Artificial Sequence: Synthetic oligonucleotide
uggccuguuuagucacuga

SEQ ID NO: 952442 - RNA, 19 nt, Artificial Sequence
  Description of Artificial Sequence: Synthetic oligonucleotide
cgaggauguacaaugccac

SEQ ID NO: 952443 - RNA, 19 nt, Artificial Sequence
  Description of Artificial Sequence: Synthetic oligonucleotide
cgugccagcuccuuaguag

SEQ ID NO: 952444 - RNA, 19 nt, Artificial Sequence
  Description of Artificial Sequence: Synthetic oligonucleotide
cagcacgaaggucagaacu

SEQ ID NO: 952445 - RNA, 19 nt, Artificial Sequence
  Description of Artificial Sequence: Synthetic oligonucleotide
cggguuauguaguaccagc

SEQ ID NO: 952446 - RNA, 19 nt, Artificial Sequence
  Description of Artificial Sequence: Synthetic oligonucleotide
gugguuuaauauucgggau

SEQ ID NO: 952447 - RNA, 19 nt, Artificial Sequence
  Description of Artificial Sequence: Synthetic oligonucleotide
agccucgcccucuccacug

SEQ ID NO: 952448 - RNA, 19 nt, Artificial Sequence
  Description of Artificial Sequence: Synthetic oligonucleotide
cgugguggaagucuaugcc

SEQ ID NO: 952449 - RNA, 19 nt, Artificial Sequence
  Description of Artificial Sequence: Synthetic oligonucleotide
gcuaugacacaaucauaga

SEQ ID NO: 952450 - RNA, 19 nt, Artificial Sequence
  Description of Artificial Sequence: Synthetic oligonucleotide
ccugacucuggaucagcgg

SEQ ID NO: 952451 - RNA, 19 nt, Artificial Sequence
  Description of Artificial Sequence: Synthetic oligonucleotide
uugccccgaaucagugaca

SEQ ID NO: 952452 - RNA, 19 nt, Artificial Sequence
  Description of Artificial Sequence: Synthetic oligonucleotide
cacgugguggaagucuaug

SEQ ID NO: 952453 - RNA, 19 nt, Artificial Sequence
  Description of Artificial Sequence: Synthetic oligonucleotide
gaggguaaccggguuaugu

SEQ ID NO: 952454 - RNA, 19 nt, Artificial Sequence
  Description of Artificial Sequence: Synthetic oligonucleotide
acgcaguggguucuggguu

SEQ ID NO: 952455 - RNA, 19 nt, Artificial Sequence
  Description of Artificial Sequence: Synthetic oligonucleotide
cugagacauuagccacucg

SEQ ID NO: 952456 - RNA, 19 nt, Artificial Sequence
  Description of Artificial Sequence: Synthetic oligonucleotide
agcacgaaggucagaacua

SEQ ID NO: 952457 - RNA, 19 nt, Artificial Sequence
  Description of Artificial Sequence: Synthetic oligonucleotide
cugucgcuuucuuguggag

SEQ ID NO: 952458 - RNA, 19 nt, Artificial Sequence
  Description of Artificial Sequence: Synthetic oligonucleotide
gagcaucagaguguaccca

SEQ ID NO: 952459 - RNA, 19 nt, Artificial Sequence
  Description of Artificial Sequence: Synthetic oligonucleotide
acugguaggguagcaggau

SEQ ID NO: 952460 - RNA, 19 nt, Artificial Sequence
  Description of Artificial Sequence: Synthetic oligonucleotide
ggauguacaaugccacgaa

SEQ ID NO: 952461 - RNA, 19 nt, Artificial Sequence
  Description of Artificial Sequence: Synthetic oligonucleotide
cgaaggucagaacuaugcc

SEQ ID NO: 952462 - RNA, 19 nt, Artificial Sequence
  Description of Artificial Sequence: Synthetic oligonucleotide
agcuccuuaguaggaacaa

SEQ ID NO: 952463 - RNA, 19 nt, Artificial Sequence
  Description of Artificial Sequence: Synthetic oligonucleotide
cagcaggaaccaaguaguc

SEQ ID NO: 952464 - RNA, 19 nt, Artificial Sequence
  Description of Artificial Sequence: Synthetic oligonucleotide
caucuguugcuaugacaca

SEQ ID NO: 952465 - RNA, 19 nt, Artificial Sequence
  Description of Artificial Sequence: Synthetic oligonucleotide
uuccuggaucagcguaggu

SEQ ID NO: 952466 - RNA, 19 nt, Artificial Sequence
  Description of Artificial Sequence: Synthetic oligonucleotide
cucuccgcuugccuuugac

SEQ ID NO: 952467 - RNA, 19 nt, Artificial Sequence
  Description of Artificial Sequence: Synthetic oligonucleotide
gucuuuccagacagugagc

SEQ ID NO: 952468 - RNA, 19 nt, Artificial Sequence
  Description of Artificial Sequence: Synthetic oligonucleotide
gcggccuugucuccuuugg

SEQ ID NO: 952469 - RNA, 19 nt, Artificial Sequence
  Description of Artificial Sequence: Synthetic oligonucleotide
gcaagacuguucugugggc

SEQ ID NO: 952470 - RNA, 19 nt, Artificial Sequence
  Description of Artificial Sequence: Synthetic oligonucleotide
guaugucuugagcuucucu

SEQ ID NO: 952471 - RNA, 19 nt, Artificial Sequence
  Description of Artificial Sequence: Synthetic oligonucleotide
uuguuggcucgagcugucc

SEQ ID NO: 952472 - RNA, 19 nt, Artificial Sequence
  Description of Artificial Sequence: Synthetic oligonucleotide
gcgaaagcuuucgaucucc

SEQ ID NO: 952473 - RNA, 19 nt, Artificial Sequence
  Description of Artificial Sequence: Synthetic oligonucleotide
ccgaaucagugacagcuug

SEQ ID NO: 952474 - RNA, 19 nt, Artificial Sequence
  Description of Artificial Sequence: Synthetic oligonucleotide
aucccugcagcgauagcga

SEQ ID NO: 952475 - RNA, 19 nt, Artificial Sequence
  Description of Artificial Sequence: Synthetic oligonucleotide
gguaggguagcaggauagc

SEQ ID NO: 952476 - RNA, 19 nt, Artificial Sequence
  Description of Artificial Sequence: Synthetic oligonucleotide
aagcugccgucuugccaga

SEQ ID NO: 952477 - RNA, 19 nt, Artificial Sequence
  Description of Artificial Sequence: Synthetic oligonucleotide
gcuccuuaguaggaacaag

SEQ ID NO: 952478 - RNA, 19 nt, Artificial Sequence
  Description of Artificial Sequence: Synthetic oligonucleotide
gacacgugguggaagucua

SEQ ID NO: 952479 - RNA, 19 nt, Artificial Sequence
  Description of Artificial Sequence: Synthetic oligonucleotide
cacucacuccauccagguc

SEQ ID NO: 952480 - RNA, 19 nt, Artificial Sequence
  Description of Artificial Sequence: Synthetic oligonucleotide
ugaggguaaccggguuaug

SEQ ID NO: 952481 - RNA, 19 nt, Artificial Sequence
  Description of Artificial Sequence: Synthetic oligonucleotide
agggcagaucauggcguag

SEQ ID NO: 952482 - RNA, 19 nt, Artificial Sequence
  Description of Artificial Sequence: Synthetic oligonucleotide
cacugaccgcauggcaucc

SEQ ID NO: 952483 - RNA, 19 nt, Artificial Sequence
  Description of Artificial Sequence: Synthetic oligonucleotide
gucacgcaguggguucugg

SEQ ID NO: 952484 - RNA, 19 nt, Artificial Sequence
  Description of Artificial Sequence: Synthetic oligonucleotide
gacggagccgguaaccccu

SEQ ID NO: 952485 - RNA, 19 nt, Artificial Sequence
  Description of Artificial Sequence: Synthetic oligonucleotide
ggcaucccugcagcgauag

SEQ ID NO: 952486 - RNA, 19 nt, Artificial Sequence
  Description of Artificial Sequence: Synthetic oligonucleotide
gggauugucuucaaaguau

SEQ ID NO: 952487 - RNA, 19 nt, Artificial Sequence
  Description of Artificial Sequence: Synthetic oligonucleotide
cagaguguacccacagagu

SEQ ID NO: 952488 - RNA, 19 nt, Artificial Sequence
  Description of Artificial Sequence: Synthetic oligonucleotide
ccaauucagcguccucagg

SEQ ID NO: 952489 - RNA, 19 nt, Artificial Sequence
  Description of Artificial Sequence: Synthetic oligonucleotide
acaaugccacgaagagcag

SEQ ID NO: 952490 - RNA, 19 nt, Artificial Sequence
  Description of Artificial Sequence: Synthetic oligonucleotide
uggcucgagcuguccugcc

SEQ ID NO: 952491 - RNA, 19 nt, Artificial Sequence
  Description of Artificial Sequence: Synthetic oligonucleotide
gcccaauucagcguccuca

SEQ ID NO: 952492 - RNA, 19 nt, Artificial Sequence
  Description of Artificial Sequence: Synthetic oligonucleotide
uuuggagccucggccucuc

SEQ ID NO: 952493 - RNA, 19 nt, Artificial Sequence
  Description of Artificial Sequence: Synthetic oligonucleotide
gcguagguugugaccaucc

SEQ ID NO: 952494 - RNA, 19 nt, Artificial Sequence
  Description of Artificial Sequence: Synthetic oligonucleotide
uauucgggauggggucccc

SEQ ID NO: 952495 - RNA, 19 nt, Artificial Sequence
  Description of Artificial Sequence: Synthetic oligonucleotide
cugguaggguagcaggaua

SEQ ID NO: 952496 - RNA, 19 nt, Artificial Sequence
  Description of Artificial Sequence: Synthetic oligonucleotide
gucacugaccgcauggcau

SEQ ID NO: 952497 - RNA, 19 nt, Artificial Sequence
  Description of Artificial Sequence: Synthetic oligonucleotide
cacggagcuucaaguuguc

SEQ ID NO: 952498 - RNA, 19 nt, Artificial Sequence
  Description of Artificial Sequence: Synthetic oligonucleotide
gcugagacauuagccacuc

SEQ ID NO: 952499 - RNA, 19 nt, Artificial Sequence
  Description of Artificial Sequence: Synthetic oligonucleotide
cgaauggccuguuuaguca

SEQ ID NO: 952500 - RNA, 19 nt, Artificial Sequence
  Description of Artificial Sequence: Synthetic oligonucleotide
augcccaauucagcguccu

SEQ ID NO: 952501 - RNA, 19 nt, Artificial Sequence
  Description of Artificial Sequence: Synthetic oligonucleotide
agcuuucgaucuccuccau

SEQ ID NO: 952502 - RNA, 19 nt, Artificial Sequence
  Description of Artificial Sequence: Synthetic oligonucleotide
cacgcaguggguucugggu

SEQ ID NO: 952503 - RNA, 19 nt, Artificial Sequence
  Description of Artificial Sequence: Synthetic oligonucleotide
gagggaaugcugaacuguu

SEQ ID NO: 952504 - RNA, 19 nt, Artificial Sequence
  Description of Artificial Sequence: Synthetic oligonucleotide
aggaaaagacggagccggu

SEQ ID NO: 952505 - RNA, 19 nt, Artificial Sequence
  Description of Artificial Sequence: Synthetic oligonucleotide
gccuugguugaacugugaa

SEQ ID NO: 952506 - RNA, 19 nt, Artificial Sequence
  Description of Artificial Sequence: Synthetic oligonucleotide
caucagguuucuccaucaa

SEQ ID NO: 952507 - RNA, 19 nt, Artificial Sequence
  Description of Artificial Sequence: Synthetic oligonucleotide
gguaaccccucucuagagu

SEQ ID NO: 952508 - RNA, 19 nt, Artificial Sequence
  Description of Artificial Sequence: Synthetic oligonucleotide
cucgccucucgaauggccu

SEQ ID NO: 952509 - RNA, 19 nt, Artificial Sequence
  Description of Artificial Sequence: Synthetic oligonucleotide
ccugucgcuuucuugugga

SEQ ID NO: 952510 - RNA, 19 nt, Artificial Sequence
  Description of Artificial Sequence: Synthetic oligonucleotide
ggagggaaugcugaacugu

SEQ ID NO: 952511 - RNA, 19 nt, Artificial Sequence
  Description of Artificial Sequence: Synthetic oligonucleotide
ggaucagcguagguuguga

SEQ ID NO: 952512 - RNA, 19 nt, Artificial Sequence
  Description of Artificial Sequence: Synthetic oligonucleotide
gguuguuggcucgagcugu

SEQ ID NO: 952513 - RNA, 19 nt, Artificial Sequence
  Description of Artificial Sequence: Synthetic oligonucleotide
guuaaguccaaggcugcuu

SEQ ID NO: 952514 - RNA, 19 nt, Artificial Sequence
  Description of Artificial Sequence: Synthetic oligonucleotide
gccugguaaauccgaggca

SEQ ID NO: 952515 - RNA, 19 nt, Artificial Sequence
  Description of Artificial Sequence: Synthetic oligonucleotide
agccacucgcacaucccga

SEQ ID NO: 952516 - RNA, 19 nt, Artificial Sequence
  Description of Artificial Sequence: Synthetic oligonucleotide
ugcccagaugaggcuuuac

SEQ ID NO: 952517 - RNA, 19 nt, Artificial Sequence
  Description of Artificial Sequence: Synthetic oligonucleotide
auucgggauggggucccca

SEQ ID NO: 952518 - RNA, 19 nt, Artificial Sequence
  Description of Artificial Sequence: Synthetic oligonucleotide
ggguuauguaguaccagcu

SEQ ID NO: 952519 - RNA, 19 nt, Artificial Sequence
  Description of Artificial Sequence: Synthetic oligonucleotide
agucacgcaguggguucug

SEQ ID NO: 952520 - RNA, 19 nt, Artificial Sequence
  Description of Artificial Sequence: Synthetic oligonucleotide
cagcagcaagaauuugucu

SEQ ID NO: 952521 - RNA, 19 nt, Artificial Sequence
  Description of Artificial Sequence: Synthetic oligonucleotide
gcacaucccgagcacagua

SEQ ID NO: 952522 - RNA, 19 nt, Artificial Sequence
  Description of Artificial Sequence: Synthetic oligonucleotide
ccaagcaagacuguucugu

SEQ ID NO: 952523 - RNA, 19 nt, Artificial Sequence
  Description of Artificial Sequence: Synthetic oligonucleotide
cccucuccacugagaagcg

SEQ ID NO: 952524 - RNA, 19 nt, Artificial Sequence
  Description of Artificial Sequence: Synthetic oligonucleotide
cucgcacaucccgagcaca

SEQ ID NO: 952525 - RNA, 19 nt, Artificial Sequence
  Description of Artificial Sequence: Synthetic oligonucleotide
cagacacgugguggaaguc

SEQ ID NO: 952526 - RNA, 19 nt, Artificial Sequence
  Description of Artificial Sequence: Synthetic oligonucleotide
gguaaccggguuauguagu

SEQ ID NO: 952527 - RNA, 19 nt, Artificial Sequence
  Description of Artificial Sequence: Synthetic oligonucleotide
ccucucuagaguguugaca

SEQ ID NO: 952528 - RNA, 19 nt, Artificial Sequence
  Description of Artificial Sequence: Synthetic oligonucleotide
uggaggucccugggauugu

SEQ ID NO: 952529 - RNA, 19 nt, Artificial Sequence
  Description of Artificial Sequence: Synthetic oligonucleotide
cccauguguucaaaaccca

SEQ ID NO: 952530 - RNA, 19 nt, Artificial Sequence
  Description of Artificial Sequence: Synthetic oligonucleotide
cgaggcaagugacaaagaa

SEQ ID NO: 952531 - RNA, 19 nt, Artificial Sequence
  Description of Artificial Sequence: Synthetic oligonucleotide
ggauagccucgcccucucc

SEQ ID NO: 952532 - RNA, 19 nt, Artificial Sequence
  Description of Artificial Sequence: Synthetic oligonucleotide
ccccgaaucagugacagcu

SEQ ID NO: 952533 - RNA, 19 nt, Artificial Sequence
  Description of Artificial Sequence: Synthetic oligonucleotide
ggaaaagacggagccggua

SEQ ID NO: 952534 - RNA, 19 nt, Artificial Sequence
  Description of Artificial Sequence: Synthetic oligonucleotide
ccggguuauguaguaccag

SEQ ID NO: 952535 - RNA, 19 nt, Artificial Sequence
  Description of Artificial Sequence: Synthetic oligonucleotide
uuaccacugcagggugcaa

SEQ ID NO: 952536 - RNA, 19 nt, Artificial Sequence
  Description of Artificial Sequence: Synthetic oligonucleotide
cauuagccacucgcacauc

SEQ ID NO: 952537 - RNA, 19 nt, Artificial Sequence
  Description of Artificial Sequence: Synthetic oligonucleotide
guacguccucguugaaagu

SEQ ID NO: 952538 - RNA, 19 nt, Artificial Sequence
  Description of Artificial Sequence: Synthetic oligonucleotide
ccagagguauagccuuuuc

SEQ ID NO: 952539 - RNA, 19 nt, Artificial Sequence
  Description of Artificial Sequence: Synthetic oligonucleotide
cucgaauggccuguuuagu

SEQ ID NO: 952540 - RNA, 19 nt, Artificial Sequence
  Description of Artificial Sequence: Synthetic oligonucleotide
acggagccgguaaccccuc

SEQ ID NO: 952541 - RNA, 19 nt, Artificial Sequence
  Description of Artificial Sequence: Synthetic oligonucleotide
cuggaucagcguagguugu

SEQ ID NO: 952542 - RNA, 19 nt, Artificial Sequence
  Description of Artificial Sequence: Synthetic oligonucleotide
ggcgcgggccaggaggucc

SEQ ID NO: 952543 - RNA, 19 nt, Artificial Sequence
  Description of Artificial Sequence: Synthetic oligonucleotide
agcugccgucuugccagag

SEQ ID NO: 952544 - RNA, 19 nt, Artificial Sequence
  Description of Artificial Sequence: Synthetic oligonucleotide
cuggaucagcggccuuguc

SEQ ID NO: 952545 - RNA, 19 nt, Artificial Sequence
  Description of Artificial Sequence: Synthetic oligonucleotide
ggagaagcaacugcagcau

SEQ ID NO: 952546 - RNA, 19 nt, Artificial Sequence
  Description of Artificial Sequence: Synthetic oligonucleotide
ggcucgagcuguccugcca

SEQ ID NO: 952547 - RNA, 19 nt, Artificial Sequence
  Description of Artificial Sequence: Synthetic oligonucleotide
gaacaaggacaaggccucu

SEQ ID NO: 952548 - RNA, 19 nt, Artificial Sequence
  Description of Artificial Sequence: Synthetic oligonucleotide
cgaaucagugacagcuuga

SEQ ID NO: 952549 - RNA, 19 nt, Artificial Sequence
  Description of Artificial Sequence: Synthetic oligonucleotide
aggccucucacagcuuguu

SEQ ID NO: 952550 - RNA, 19 nt, Artificial Sequence
  Description of Artificial Sequence: Synthetic oligonucleotide
agggagucacggagcuuca

SEQ ID NO: 952551 - RNA, 19 nt, Artificial Sequence
  Description of Artificial Sequence: Synthetic oligonucleotide
cugaccgcauggcaucccu

SEQ ID NO: 952552 - RNA, 19 nt, Artificial Sequence
  Description of Artificial Sequence: Synthetic oligonucleotide
cuuguacguccucguugaa

SEQ ID NO: 952553 - RNA, 19 nt, Artificial Sequence
  Description of Artificial Sequence: Synthetic oligonucleotide
gagaagcgccucaaucuuu

SEQ ID NO: 952554 - RNA, 19 nt, Artificial Sequence
  Description of Artificial Sequence: Synthetic oligonucleotide
acacgugguggaagucuau

SEQ ID NO: 952555 - RNA, 19 nt, Artificial Sequence
  Description of Artificial Sequence: Synthetic oligonucleotide
guuuagucacugaccgcau

SEQ ID NO: 952556 - RNA, 19 nt, Artificial Sequence
  Description of Artificial Sequence: Synthetic oligonucleotide
gcgccucaaucuuugccaa

SEQ ID NO: 952557 - RNA, 19 nt, Artificial Sequence
  Description of Artificial Sequence: Synthetic oligonucleotide
cauugcccagaugaggcuu

SEQ ID NO: 952558 - RNA, 19 nt, Artificial Sequence
  Description of Artificial Sequence: Synthetic oligonucleotide
cagcgacagccugcaggag

SEQ ID NO: 952559 - RNA, 19 nt, Artificial Sequence
  Description of Artificial Sequence: Synthetic oligonucleotide
gcgcagugggaguucucca

SEQ ID NO: 952560 - RNA, 19 nt, Artificial Sequence
  Description of Artificial Sequence: Synthetic oligonucleotide
caggauagccucgcccucu

SEQ ID NO: 952561 - RNA, 19 nt, Artificial Sequence
  Description of Artificial Sequence: Synthetic oligonucleotide
gagcgcagugggaguucuc

SEQ ID NO: 952562 - RNA, 19 nt, Artificial Sequence
  Description of Artificial Sequence: Synthetic oligonucleotide
gccccgaaucagugacagc

SEQ ID NO: 952563 - RNA, 19 nt, Artificial Sequence
  Description of Artificial Sequence: Synthetic oligonucleotide
cugugcgggcgcgggccag

SEQ ID NO: 952564 - RNA, 19 nt, Artificial Sequence
  Description of Artificial Sequence: Synthetic oligonucleotide
cuuuggagccucggccucu

SEQ ID NO: 952565 - RNA, 19 nt, Artificial Sequence
  Description of Artificial Sequence: Synthetic oligonucleotide
ccagcgccagagguauagc

SEQ ID NO: 952566 - RNA, 19 nt, Artificial Sequence
  Description of Artificial Sequence: Synthetic oligonucleotide
cgccucaaucuuugccaag

SEQ ID NO: 952567 - RNA, 19 nt, Artificial Sequence
  Description of Artificial Sequence: Synthetic oligonucleotide
ccgaggcaagugacaaaga

SEQ ID NO: 952568 - RNA, 19 nt, Artificial Sequence
  Description of Artificial Sequence: Synthetic oligonucleotide
cacugagaagcgccucaau

SEQ ID NO: 952569 - RNA, 19 nt, Artificial Sequence
  Description of Artificial Sequence: Synthetic oligonucleotide
cgauagcgaaagcuuucga

SEQ ID NO: 952570 - RNA, 19 nt, Artificial Sequence
  Description of Artificial Sequence: Synthetic oligonucleotide
augccccgggccacaccug

SEQ ID NO: 952571 - RNA, 19 nt, Artificial Sequence
  Description of Artificial Sequence: Synthetic oligonucleotide
cccugcagcgauagcgaaa

SEQ ID NO: 952572 - RNA, 19 nt, Artificial Sequence
  Description of Artificial Sequence: Synthetic oligonucleotide
ccguuucuuucgaggaugu

SEQ ID NO: 952573 - RNA, 19 nt, Artificial Sequence
  Description of Artificial Sequence: Synthetic oligonucleotide
aggcggggauccagcccca

SEQ ID NO: 952574 - RNA, 19 nt, Artificial Sequence
  Description of Artificial Sequence: Synthetic oligonucleotide
ggcuucgcuguagguuuaa

SEQ ID NO: 952575 - RNA, 19 nt, Artificial Sequence
  Description of Artificial Sequence: Synthetic oligonucleotide
cagcguagguugugaccau

SEQ ID NO: 952576 - RNA, 19 nt, Artificial Sequence
  Description of Artificial Sequence: Synthetic oligonucleotide
cgaaagcuuucgaucuccu

SEQ ID NO: 952577 - RNA, 19 nt, Artificial Sequence
  Description of Artificial Sequence: Synthetic oligonucleotide
cccagaugcuuucgaggcu

SEQ ID NO: 952578 - RNA, 19 nt, Artificial Sequence
  Description of Artificial Sequence: Synthetic oligonucleotide
cuccagcgccagagguaua

SEQ ID NO: 952579 - RNA, 19 nt, Artificial Sequence
  Description of Artificial Sequence: Synthetic oligonucleotide
cccgaaucagugacagcuu

SEQ ID NO: 952580 - RNA, 19 nt, Artificial Sequence
  Description of Artificial Sequence: Synthetic oligonucleotide
ccucuccgcuugccuuuga

SEQ ID NO: 952581 - RNA, 19 nt, Artificial Sequence
  Description of Artificial Sequence: Synthetic oligonucleotide
cguuucuuucgaggaugua

SEQ ID NO: 952582 - RNA, 19 nt, Artificial Sequence
  Description of Artificial Sequence: Synthetic oligonucleotide
gccucucgaauggccuguu

SEQ ID NO: 952583 - RNA, 19 nt, Artificial Sequence
  Description of Artificial Sequence: Synthetic oligonucleotide
ggcggggauccagccccau

SEQ ID NO: 952584 - RNA, 19 nt, Artificial Sequence
  Description of Artificial Sequence: Synthetic oligonucleotide
acuauuuccauucugcacc

SEQ ID NO: 952585 - RNA, 19 nt, Artificial Sequence
  Description of Artificial Sequence: Synthetic oligonucleotide
ucaacaaagacgcagcugg

SEQ ID NO: 952586 - RNA, 19 nt, Artificial Sequence
  Description of Artificial Sequence: Synthetic oligonucleotide
uaugauaagacuauuucca

SEQ ID NO: 952587 - RNA, 19 nt, Artificial Sequence
  Description of Artificial Sequence: Synthetic oligonucleotide
aauaaggaguguuggagcg

SEQ ID NO: 952588 - RNA, 19 nt, Artificial Sequence
  Description of Artificial Sequence: Synthetic oligonucleotide
aauuguacauguccagugc

SEQ ID NO: 952589 - RNA, 19 nt, Artificial Sequence
  Description of Artificial Sequence: Synthetic oligonucleotide
aauuuacagcaucagacag

SEQ ID NO: 952590 - RNA, 19 nt, Artificial Sequence
  Description of Artificial Sequence: Synthetic oligonucleotide
uaagaggggauucagguag

SEQ ID NO: 952591 - RNA, 19 nt, Artificial Sequence
  Description of Artificial Sequence: Synthetic oligonucleotide
aagacuauuuccauucugc

SEQ ID NO: 952592 - RNA, 19 nt, Artificial Sequence
  Description of Artificial Sequence: Synthetic oligonucleotide
aauucaacaaagacgcagc

SEQ ID NO: 952593 - RNA, 19 nt, Artificial Sequence
  Description of Artificial Sequence: Synthetic oligonucleotide
uuaugauaagacuauuucc

SEQ ID NO: 952594 - RNA, 19 nt, Artificial Sequence
  Description of Artificial Sequence: Synthetic oligonucleotide
ucuugauggcccaauaagg

SEQ ID NO: 952595 - RNA, 19 nt, Artificial Sequence
  Description of Artificial Sequence: Synthetic oligonucleotide
gauaagacuauuuccauuc

SEQ ID NO: 952596 - RNA, 19 nt, Artificial Sequence
  Description of Artificial Sequence: Synthetic oligonucleotide
uuuaccauguuucugguaa

SEQ ID NO: 952597 - RNA, 19 nt, Artificial Sequence
  Description of Artificial Sequence: Synthetic oligonucleotide
uuuacagaaaaguccuggg

SEQ ID NO: 952598 - RNA, 19 nt, Artificial Sequence
  Description of Artificial Sequence: Synthetic oligonucleotide
auugcaaaauggcuccucc

SEQ ID NO: 952599 - RNA, 19 nt, Artificial Sequence
  Description of Artificial Sequence: Synthetic oligonucleotide
auacaaguaguaguaaccc

SEQ ID NO: 952600 - RNA, 19 nt, Artificial Sequence
  Description of Artificial Sequence: Synthetic oligonucleotide
uucuugauggcccaauaag

SEQ ID NO: 952601 - RNA, 19 nt, Artificial Sequence
  Description of Artificial Sequence: Synthetic oligonucleotide
ucauuuauggacuuggcua

SEQ ID NO: 952602 - RNA, 19 nt, Artificial Sequence
  Description of Artificial Sequence: Synthetic oligonucleotide
guagccuugauauucacug

SEQ ID NO: 952603 - RNA, 19 nt, Artificial Sequence
  Description of Artificial Sequence: Synthetic oligonucleotide
uuuacagcaucagacagag

SEQ ID NO: 952604 - RNA, 19 nt, Artificial Sequence
  Description of Artificial Sequence: Synthetic oligonucleotide
uguaagaggggauucaggu

SEQ ID NO: 952605 - RNA, 19 nt, Artificial Sequence
  Description of Artificial Sequence: Synthetic oligonucleotide
gaaagucucguuuccaugc

SEQ ID NO: 952606 - RNA, 19 nt, Artificial Sequence
  Description of Artificial Sequence: Synthetic oligonucleotide
gauacaaguaguaguaacc

SEQ ID NO: 952607 - RNA, 19 nt, Artificial Sequence
  Description of Artificial Sequence: Synthetic oligonucleotide
uggaucauugcaaaauggc

SEQ ID NO: 952608 - RNA, 19 nt, Artificial Sequence
  Description of Artificial Sequence: Synthetic oligonucleotide
guuaugauaagacuauuuc

SEQ ID NO: 952609 - RNA, 19 nt, Artificial Sequence
  Description of Artificial Sequence: Synthetic oligonucleotide
cauaguauucacaccacag

SEQ ID NO: 952610 - RNA, 19 nt, Artificial Sequence
  Description of Artificial Sequence: Synthetic oligonucleotide
ugcucuguagccuugauau

SEQ ID NO: 952611 - RNA, 19 nt, Artificial Sequence
  Description of Artificial Sequence: Synthetic oligonucleotide
aaagacgcagcugggaaac

SEQ ID NO: 952612 - RNA, 19 nt, Artificial Sequence
  Description of Artificial Sequence: Synthetic oligonucleotide
ugcucuuagagaaggcugg

SEQ ID NO: 952613 - RNA, 19 nt, Artificial Sequence
  Description of Artificial Sequence: Synthetic oligonucleotide
cagagcaugguuuuauugg

SEQ ID NO: 952614 - RNA, 19 nt, Artificial Sequence
  Description of Artificial Sequence: Synthetic oligonucleotide
uaauuguacauguccagug

SEQ ID NO: 952615 - RNA, 19 nt, Artificial Sequence
  Description of Artificial Sequence: Synthetic oligonucleotide
uggucgaugagccaagggc

SEQ ID NO: 952616 - RNA, 19 nt, Artificial Sequence
  Description of Artificial Sequence: Synthetic oligonucleotide
guaaagacagucaagcgcc

SEQ ID NO: 952617 - RNA, 19 nt, Artificial Sequence
  Description of Artificial Sequence: Synthetic oligonucleotide
aggacgacagaucccaggc

SEQ ID NO: 952618 - RNA, 19 nt, Artificial Sequence
  Description of Artificial Sequence: Synthetic oligonucleotide
ugauucauaaguccgguua

SEQ ID NO: 952619 - RNA, 19 nt, Artificial Sequence
  Description of Artificial Sequence: Synthetic oligonucleotide
auuggagggcauuccaccc

SEQ ID NO: 952620 - RNA, 19 nt, Artificial Sequence
  Description of Artificial Sequence: Synthetic oligonucleotide
auuuggaagcugcagagca

SEQ ID NO: 952621 - RNA, 19 nt, Artificial Sequence
  Description of Artificial Sequence: Synthetic oligonucleotide
cucuuuauggcuguguagg

SEQ ID NO: 952622 - RNA, 19 nt, Artificial Sequence
  Description of Artificial Sequence: Synthetic oligonucleotide
ucauaaguccgguuauagg

SEQ ID NO: 952623 - RNA, 19 nt, Artificial Sequence
  Description of Artificial Sequence: Synthetic oligonucleotide
acagguagcaggcacaaca

SEQ ID NO: 952624 - RNA, 19 nt, Artificial Sequence
  Description of Artificial Sequence: Synthetic oligonucleotide
cauuguggcuuccagagag

SEQ ID NO: 952625 - RNA, 19 nt, Artificial Sequence
  Description of Artificial Sequence: Synthetic oligonucleotide
gguaaagacagucaagcgc

SEQ ID NO: 952626 - RNA, 19 nt, Artificial Sequence
  Description of Artificial Sequence: Synthetic oligonucleotide
cuugucgcaauccaagagc

SEQ ID NO: 952627 - RNA, 19 nt, Artificial Sequence
  Description of Artificial Sequence: Synthetic oligonucleotide
agagagaagagagagccuc

SEQ ID NO: 952628 - RNA, 19 nt, Artificial Sequence
  Description of Artificial Sequence: Synthetic oligonucleotide
ucuugucgcaauccaagag

SEQ ID NO: 952629 - RNA, 19 nt, Artificial Sequence
  Description of Artificial Sequence: Synthetic oligonucleotide
acaaguaguaguaacccuc

SEQ ID NO: 952630 - RNA, 19 nt, Artificial Sequence
  Description of Artificial Sequence: Synthetic oligonucleotide
uuccagagagaagagagag

SEQ ID NO: 952631 - RNA, 19 nt, Artificial Sequence
  Description of Artificial Sequence: Synthetic oligonucleotide
cuuggcuagacucaucuug

SEQ ID NO: 952632 - RNA, 19 nt, Artificial Sequence
  Description of Artificial Sequence: Synthetic oligonucleotide
cuggccauaguauucacac

SEQ ID NO: 952633 - RNA, 19 nt, Artificial Sequence
  Description of Artificial Sequence: Synthetic oligonucleotide
ugguaaagacagucaagcg

SEQ ID NO: 952634 - RNA, 19 nt, Artificial Sequence
  Description of Artificial Sequence: Synthetic oligonucleotide
uuguaagaggggauucagg

SEQ ID NO: 952635 - RNA, 19 nt, Artificial Sequence
  Description of Artificial Sequence: Synthetic oligonucleotide
uuggcuagacucaucuugc

SEQ ID NO: 952636 - RNA, 19 nt, Artificial Sequence
  Description of Artificial Sequence: Synthetic oligonucleotide
agaucgguccuuucugggc

SEQ ID NO: 952637 - RNA, 19 nt, Artificial Sequence
  Description of Artificial Sequence: Synthetic oligonucleotide
uccuucacuuuagugaccg

SEQ ID NO: 952638 - RNA, 19 nt, Artificial Sequence
  Description of Artificial Sequence: Synthetic oligonucleotide
ugauggcccaauaaggagu

SEQ ID NO: 952639 - RNA, 19 nt, Artificial Sequence
  Description of Artificial Sequence: Synthetic oligonucleotide
ugagcugaaagucucguuu

SEQ ID NO: 952640 - RNA, 19 nt, Artificial Sequence
  Description of Artificial Sequence: Synthetic oligonucleotide
uuuauuggucacagguagc

SEQ ID NO: 952641 - RNA, 19 nt, Artificial Sequence
  Description of Artificial Sequence: Synthetic oligonucleotide
uucauaaguccgguuauag

SEQ ID NO: 952642 - RNA, 19 nt, Artificial Sequence
  Description of Artificial Sequence: Synthetic oligonucleotide
aagucccucaguucaccac

SEQ ID NO: 952643 - RNA, 19 nt, Artificial Sequence
  Description of Artificial Sequence: Synthetic oligonucleotide
uagguuaugauaagacuau

SEQ ID NO: 952644 - RNA, 19 nt, Artificial Sequence
  Description of Artificial Sequence: Synthetic oligonucleotide
ugagaucgguccuuucugg

SEQ ID NO: 952645 - RNA, 19 nt, Artificial Sequence
  Description of Artificial Sequence: Synthetic oligonucleotide
guagcauguguuuuccuag

SEQ ID NO: 952646 - RNA, 19 nt, Artificial Sequence
  Description of Artificial Sequence: Synthetic oligonucleotide
aacaguggaucauugcaaa

SEQ ID NO: 952647 - RNA, 19 nt, Artificial Sequence
  Description of Artificial Sequence: Synthetic oligonucleotide
auggcgauagaacugcaug

SEQ ID NO: 952648 - RNA, 19 nt, Artificial Sequence
  Description of Artificial Sequence: Synthetic oligonucleotide
aucauuuauggacuuggcu

SEQ ID NO: 952649 - RNA, 19 nt, Artificial Sequence
  Description of Artificial Sequence: Synthetic oligonucleotide
uuauuggucacagguagca

SEQ ID NO: 952650 - RNA, 19 nt, Artificial Sequence
  Description of Artificial Sequence: Synthetic oligonucleotide
cuagguuaugauaagacua

SEQ ID NO: 952651 - RNA, 19 nt, Artificial Sequence
  Description of Artificial Sequence: Synthetic oligonucleotide
caaguaguaguaacccucc

SEQ ID NO: 952652 - RNA, 19 nt, Artificial Sequence
  Description of Artificial Sequence: Synthetic oligonucleotide
agcuagguuaugauaagac

SEQ ID NO: 952653 - RNA, 19 nt, Artificial Sequence
  Description of Artificial Sequence: Synthetic oligonucleotide
caggguaccucuuuauugc

SEQ ID NO: 952654 - RNA, 19 nt, Artificial Sequence
  Description of Artificial Sequence: Synthetic oligonucleotide
guaaucaugaaguccuuga

SEQ ID NO: 952655 - RNA, 19 nt, Artificial Sequence
  Description of Artificial Sequence: Synthetic oligonucleotide
aaggcugguuacaaguuuc

SEQ ID NO: 952656 - RNA, 19 nt, Artificial Sequence
  Description of Artificial Sequence: Synthetic oligonucleotide
uugucgcaauccaagagcu

SEQ ID NO: 952657 - RNA, 19 nt, Artificial Sequence
  Description of Artificial Sequence: Synthetic oligonucleotide
ugaaagucucguuuccaug

SEQ ID NO: 952658 - RNA, 19 nt, Artificial Sequence
  Description of Artificial Sequence: Synthetic oligonucleotide
cuuagagaaggcugguuac

SEQ ID NO: 952659 - RNA, 19 nt, Artificial Sequence
  Description of Artificial Sequence: Synthetic oligonucleotide
cauuggagggcauuccacc

SEQ ID NO: 952660 - RNA, 19 nt, Artificial Sequence
  Description of Artificial Sequence: Synthetic oligonucleotide
auugagcugugccacgguc

SEQ ID NO: 952661 - RNA, 19 nt, Artificial Sequence
  Description of Artificial Sequence: Synthetic oligonucleotide
gaucgguccuuucugggcc

SEQ ID NO: 952662 - RNA, 19 nt, Artificial Sequence
  Description of Artificial Sequence: Synthetic oligonucleotide
agagcaugguuuuauuggu

SEQ ID NO: 952663 - RNA, 19 nt, Artificial Sequence
  Description of Artificial Sequence: Synthetic oligonucleotide
gcuagacucaucuugcugc

SEQ ID NO: 952664 - RNA, 19 nt, Artificial Sequence
  Description of Artificial Sequence: Synthetic oligonucleotide
aagucucguuuccaugcuc

SEQ ID NO: 952665 - RNA, 19 nt, Artificial Sequence
  Description of Artificial Sequence: Synthetic oligonucleotide
gaauucagagcucacugaa

SEQ ID NO: 952666 - RNA, 19 nt, Artificial Sequence
  Description of Artificial Sequence: Synthetic oligonucleotide
cauaaguccgguuauaggu

SEQ ID NO: 952667 - RNA, 19 nt, Artificial Sequence
  Description of Artificial Sequence: Synthetic oligonucleotide
gagccugucccucagccag

SEQ ID NO: 952668 - RNA, 19 nt, Artificial Sequence
  Description of Artificial Sequence: Synthetic oligonucleotide
uugagcugugccacggucc

SEQ ID NO: 952669 - RNA, 19 nt, Artificial Sequence
  Description of Artificial Sequence: Synthetic oligonucleotide
uucccuugauucauaaguc

SEQ ID NO: 952670 - RNA, 19 nt, Artificial Sequence
  Description of Artificial Sequence: Synthetic oligonucleotide
aaagucucguuuccaugcu

SEQ ID NO: 952671 - RNA, 19 nt, Artificial Sequence
  Description of Artificial Sequence: Synthetic oligonucleotide
uacaaguaguaguaacccu

SEQ ID NO: 952672 - RNA, 19 nt, Artificial Sequence
  Description of Artificial Sequence: Synthetic oligonucleotide
cuugauauucacugggcca

SEQ ID NO: 952673 - RNA, 19 nt, Artificial Sequence
  Description of Artificial Sequence: Synthetic oligonucleotide
ucuuuauggcuguguaggc

SEQ ID NO: 952674 - RNA, 19 nt, Artificial Sequence
  Description of Artificial Sequence: Synthetic oligonucleotide
gugaaaggggaccagaaaa

SEQ ID NO: 952675 - RNA, 19 nt, Artificial Sequence
  Description of Artificial Sequence: Synthetic oligonucleotide
cuugauggcccaauaagga

SEQ ID NO: 952676 - RNA, 19 nt, Artificial Sequence
  Description of Artificial Sequence: Synthetic oligonucleotide
aauucagagcucacugaag

SEQ ID NO: 952677 - RNA, 19 nt, Artificial Sequence
  Description of Artificial Sequence: Synthetic oligonucleotide
gaggacgacagaucccagg

SEQ ID NO: 952678 - RNA, 19 nt, Artificial Sequence
  Description of Artificial Sequence: Synthetic oligonucleotide
uguagccuugauauucacu

SEQ ID NO: 952679 - RNA, 19 nt, Artificial Sequence
  Description of Artificial Sequence: Synthetic oligonucleotide
agacuguagucaucuuuac

SEQ ID NO: 952680 - RNA, 19 nt, Artificial Sequence
  Description of Artificial Sequence: Synthetic oligonucleotide
gagaucgguccuuucuggg

SEQ ID NO: 952681 - RNA, 19 nt, Artificial Sequence
  Description of Artificial Sequence: Synthetic oligonucleotide
acucuuuauggcuguguag

SEQ ID NO: 952682 - RNA, 19 nt, Artificial Sequence
  Description of Artificial Sequence: Synthetic oligonucleotide
gucgcaauccaagagcucc

SEQ ID NO: 952683 - RNA, 19 nt, Artificial Sequence
  Description of Artificial Sequence: Synthetic oligonucleotide
aagacuguagucaucuuua

SEQ ID NO: 952684 - RNA, 19 nt, Artificial Sequence
  Description of Artificial Sequence: Synthetic oligonucleotide
aacugcaugccaaaggcau

SEQ ID NO: 952685 - RNA, 19 nt, Artificial Sequence
  Description of Artificial Sequence: Synthetic oligonucleotide
ggcgggaucauuuauggac

SEQ ID NO: 952686 - RNA, 19 nt, Artificial Sequence
  Description of Artificial Sequence: Synthetic oligonucleotide
agagagagccucgacccgc

SEQ ID NO: 952687 - RNA, 19 nt, Artificial Sequence
  Description of Artificial Sequence: Synthetic oligonucleotide
cauauugagcugugccacg

SEQ ID NO: 952688 - RNA, 19 nt, Artificial Sequence
  Description of Artificial Sequence: Synthetic oligonucleotide
guugcaggccugaacauag

SEQ ID NO: 952689 - RNA, 19 nt, Artificial Sequence
  Description of Artificial Sequence: Synthetic oligonucleotide
uggagcgguugccauagcc

SEQ ID NO: 952690 - RNA, 19 nt, Artificial Sequence
  Description of Artificial Sequence: Synthetic oligonucleotide
ucacuuuagugaccgcccc

SEQ ID NO: 952691 - RNA, 19 nt, Artificial Sequence
  Description of Artificial Sequence: Synthetic oligonucleotide
ugauaagacuauuuccauu

SEQ ID NO: 952692 - RNA, 19 nt, Artificial Sequence
  Description of Artificial Sequence: Synthetic oligonucleotide
uccagagagaagagagagc

SEQ ID NO: 952693 - RNA, 19 nt, Artificial Sequence
  Description of Artificial Sequence: Synthetic oligonucleotide
acucaucuugcugccaggc

SEQ ID NO: 952694 - RNA, 19 nt, Artificial Sequence
  Description of Artificial Sequence: Synthetic oligonucleotide
auauugagcugugccacgg

SEQ ID NO: 952695 - RNA, 19 nt, Artificial Sequence
  Description of Artificial Sequence: Synthetic oligonucleotide
auuccacccaagcaggccu

SEQ ID NO: 952696 - RNA, 19 nt, Artificial Sequence
  Description of Artificial Sequence: Synthetic oligonucleotide
auucaacaaagacgcagcu

SEQ ID NO: 952697 - RNA, 19 nt, Artificial Sequence
  Description of Artificial Sequence: Synthetic oligonucleotide
cuagacucaucuugcugcc

SEQ ID NO: 952698 - RNA, 19 nt, Artificial Sequence
  Description of Artificial Sequence: Synthetic oligonucleotide
gccguaauuguacaugucc

SEQ ID NO: 952699 - RNA, 19 nt, Artificial Sequence
  Description of Artificial Sequence: Synthetic oligonucleotide
acaaagacgcagcugggaa

SEQ ID NO: 952700 - RNA, 19 nt, Artificial Sequence
  Description of Artificial Sequence: Synthetic oligonucleotide
ucaguagcauguguuuucc

SEQ ID NO: 952701 - RNA, 19 nt, Artificial Sequence
  Description of Artificial Sequence: Synthetic oligonucleotide
augauaagacuauuuccau

SEQ ID NO: 952702 - RNA, 19 nt, Artificial Sequence
  Description of Artificial Sequence: Synthetic oligonucleotide
ccagagagaagagagagcc

SEQ ID NO: 952703 - RNA, 19 nt, Artificial Sequence
  Description of Artificial Sequence: Synthetic oligonucleotide
uuauggacuuggcuagacu

SEQ ID NO: 952704 - RNA, 19 nt, Artificial Sequence
  Description of Artificial Sequence: Synthetic oligonucleotide
ccucccaaacucuuuaugg

SEQ ID NO: 952705 - RNA, 19 nt, Artificial Sequence
  Description of Artificial Sequence: Synthetic oligonucleotide
aacaaagacgcagcuggga

SEQ ID NO: 952706 - RNA, 19 nt, Artificial Sequence
  Description of Artificial Sequence: Synthetic oligonucleotide
auaagacuauuuccauucu

SEQ ID NO: 952707 - RNA, 19 nt, Artificial Sequence
  Description of Artificial Sequence: Synthetic oligonucleotide
ugcaccuuacccgagccug

SEQ ID NO: 952708 - RNA, 19 nt, Artificial Sequence
  Description of Artificial Sequence: Synthetic oligonucleotide
cacaacaguggaucauugc

SEQ ID NO: 952709 - RNA, 19 nt, Artificial Sequence
  Description of Artificial Sequence: Synthetic oligonucleotide
agcacggccguaauuguac

SEQ ID NO: 952710 - RNA, 19 nt, Artificial Sequence
  Description of Artificial Sequence: Synthetic oligonucleotide
aggaccacugcccggagca

SEQ ID NO: 952711 - RNA, 19 nt, Artificial Sequence
  Description of Artificial Sequence: Synthetic oligonucleotide
aacugagaucgguccuuuc

SEQ ID NO: 952712 - RNA, 19 nt, Artificial Sequence
  Description of Artificial Sequence: Synthetic oligonucleotide
gggcauuccacccaagcag

SEQ ID NO: 952713 - RNA, 19 nt, Artificial Sequence
  Description of Artificial Sequence: Synthetic oligonucleotide
uagcauguguuuuccuagc

SEQ ID NO: 952714 - RNA, 19 nt, Artificial Sequence
  Description of Artificial Sequence: Synthetic oligonucleotide
agagccucgacccgcccgg

SEQ ID NO: 952715 - RNA, 19 nt, Artificial Sequence
  Description of Artificial Sequence: Synthetic oligonucleotide
gauggcccaauaaggagug

SEQ ID NO: 952716 - RNA, 19 nt, Artificial Sequence
  Description of Artificial Sequence: Synthetic oligonucleotide
ggccauaguauucacacca

SEQ ID NO: 952717 - RNA, 19 nt, Artificial Sequence
  Description of Artificial Sequence: Synthetic oligonucleotide
cucacccugagguaccaag

SEQ ID NO: 952718 - RNA, 19 nt, Artificial Sequence
  Description of Artificial Sequence: Synthetic oligonucleotide
aaacucuuuauggcugugu

SEQ ID NO: 952719 - RNA, 19 nt, Artificial Sequence
  Description of Artificial Sequence: Synthetic oligonucleotide
aaggggaccagaaaauuua

SEQ ID NO: 952720 - RNA, 19 nt, Artificial Sequence
  Description of Artificial Sequence: Synthetic oligonucleotide
cacugaaucauugauguaa

SEQ ID NO: 952721 - RNA, 19 nt, Artificial Sequence
  Description of Artificial Sequence: Synthetic oligonucleotide
uccgguuauagguaaucau

SEQ ID NO: 952722 - RNA, 19 nt, Artificial Sequence
  Description of Artificial Sequence: Synthetic oligonucleotide
agcgccacuggguuucuuc

SEQ ID NO: 952723 - RNA, 19 nt, Artificial Sequence
  Description of Artificial Sequence: Synthetic oligonucleotide
cccuugauucauaaguccg

SEQ ID NO: 952724 - RNA, 19 nt, Artificial Sequence
  Description of Artificial Sequence: Synthetic oligonucleotide
ucuuuuguaagaggggauu

SEQ ID NO: 952725 - RNA, 19 nt, Artificial Sequence
  Description of Artificial Sequence: Synthetic oligonucleotide
auggucgaugagccaaggg

SEQ ID NO: 952726 - RNA, 19 nt, Artificial Sequence
  Description of Artificial Sequence: Synthetic oligonucleotide
cacgauacaaguaguagua

SEQ ID NO: 952727 - RNA, 19 nt, Artificial Sequence
  Description of Artificial Sequence: Synthetic oligonucleotide
uggggcgggaucauuuaug

SEQ ID NO: 952728 - RNA, 19 nt, Artificial Sequence
  Description of Artificial Sequence: Synthetic oligonucleotide
guuggagcgguugccauag

SEQ ID NO: 952729 - RNA, 19 nt, Artificial Sequence
  Description of Artificial Sequence: Synthetic oligonucleotide
ggugaucccauauugagcu

SEQ ID NO: 952730 - RNA, 19 nt, Artificial Sequence
  Description of Artificial Sequence: Synthetic oligonucleotide
cugagaucgguccuuucug

SEQ ID NO: 952731 - RNA, 19 nt, Artificial Sequence
  Description of Artificial Sequence: Synthetic oligonucleotide
uucugcaccuuacccgagc

SEQ ID NO: 952732 - RNA, 19 nt, Artificial Sequence
  Description of Artificial Sequence: Synthetic oligonucleotide
uaaggaguguuggagcggu

SEQ ID NO: 952733 - RNA, 19 nt, Artificial Sequence
  Description of Artificial Sequence: Synthetic oligonucleotide
agacaaagcuagguuauga

SEQ ID NO: 952734 - RNA, 19 nt, Artificial Sequence
  Description of Artificial Sequence: Synthetic oligonucleotide
uuuauggacuuggcuagac

SEQ ID NO: 952735 - RNA, 19 nt, Artificial Sequence
  Description of Artificial Sequence: Synthetic oligonucleotide
auaaggaguguuggagcgg

SEQ ID NO: 952736 - RNA, 19 nt, Artificial Sequence
  Description of Artificial Sequence: Synthetic oligonucleotide
uccuagcuuccacaauuca

SEQ ID NO: 952737 - RNA, 19 nt, Artificial Sequence
  Description of Artificial Sequence: Synthetic oligonucleotide
aguccgguuauagguaauc

SEQ ID NO: 952738 - RNA, 19 nt, Artificial Sequence
  Description of Artificial Sequence: Synthetic oligonucleotide
caacaaagacgcagcuggg

SEQ ID NO: 952739 - RNA, 19 nt, Artificial Sequence
  Description of Artificial Sequence: Synthetic oligonucleotide
auguccagugcgaagcggg

SEQ ID NO: 952740 - RNA, 19 nt, Artificial Sequence
  Description of Artificial Sequence: Synthetic oligonucleotide
acgguccaaggccucaauc

SEQ ID NO: 952741 - RNA, 19 nt, Artificial Sequence
  Description of Artificial Sequence: Synthetic oligonucleotide
uggaugugaaaggggacca

SEQ ID NO: 952742 - RNA, 19 nt, Artificial Sequence
  Description of Artificial Sequence: Synthetic oligonucleotide
uauuggucacagguagcag

SEQ ID NO: 952743 - RNA, 19 nt, Artificial Sequence
  Description of Artificial Sequence: Synthetic oligonucleotide
cuuuuguaagaggggauuc

SEQ ID NO: 952744 - RNA, 19 nt, Artificial Sequence
  Description of Artificial Sequence: Synthetic oligonucleotide
auuuacagcaucagacaga

SEQ ID NO: 952745 - RNA, 19 nt, Artificial Sequence
  Description of Artificial Sequence: Synthetic oligonucleotide
uguacauguccagugcgaa

SEQ ID NO: 952746 - RNA, 19 nt, Artificial Sequence
  Description of Artificial Sequence: Synthetic oligonucleotide
cucgucaucggcccagggc

SEQ ID NO: 952747 - RNA, 19 nt, Artificial Sequence
  Description of Artificial Sequence: Synthetic oligonucleotide
gauauucacugggccacag

SEQ ID NO: 952748 - RNA, 19 nt, Artificial Sequence
  Description of Artificial Sequence: Synthetic oligonucleotide
gagagccucgacccgcccg

SEQ ID NO: 952749 - RNA, 19 nt, Artificial Sequence
  Description of Artificial Sequence: Synthetic oligonucleotide
gcaggguaccucuuuauug

SEQ ID NO: 952750 - RNA, 19 nt, Artificial Sequence
  Description of Artificial Sequence: Synthetic oligonucleotide
auggcaacugagaucgguc

SEQ ID NO: 952751 - RNA, 19 nt, Artificial Sequence
  Description of Artificial Sequence: Synthetic oligonucleotide
uguucuugauggcccaaua

SEQ ID NO: 952752 - RNA, 19 nt, Artificial Sequence
  Description of Artificial Sequence: Synthetic oligonucleotide
ccgguuauagguaaucaug

SEQ ID NO: 952753 - RNA, 19 nt, Artificial Sequence
  Description of Artificial Sequence: Synthetic oligonucleotide
ccaauaaggaguguuggag

SEQ ID NO: 952754 - RNA, 19 nt, Artificial Sequence
  Description of Artificial Sequence: Synthetic oligonucleotide
agcauguguuuuccuagcu

SEQ ID NO: 952755 - RNA, 19 nt, Artificial Sequence
  Description of Artificial Sequence: Synthetic oligonucleotide
ggggcgggaucauuuaugg

SEQ ID NO: 952756 - RNA, 19 nt, Artificial Sequence
  Description of Artificial Sequence: Synthetic oligonucleotide
ccucaguucaccacugccg

SEQ ID NO: 952757 - RNA, 19 nt, Artificial Sequence
  Description of Artificial Sequence: Synthetic oligonucleotide
cugaaucauugauguaaac

SEQ ID NO: 952758 - RNA, 19 nt, Artificial Sequence
  Description of Artificial Sequence: Synthetic oligonucleotide
gaugugaaaggggaccaga

SEQ ID NO: 952759 - RNA, 19 nt, Artificial Sequence
  Description of Artificial Sequence: Synthetic oligonucleotide
aggaaugagcugaaagucu

SEQ ID NO: 952760 - RNA, 19 nt, Artificial Sequence
  Description of Artificial Sequence: Synthetic oligonucleotide
aguaacccuccucacccca

SEQ ID NO: 952761 - RNA, 19 nt, Artificial Sequence
  Description of Artificial Sequence: Synthetic oligonucleotide
gacgacagaucccaggccu

SEQ ID NO: 952762 - RNA, 19 nt, Artificial Sequence
  Description of Artificial Sequence: Synthetic oligonucleotide
uucuucccuugauucauaa

SEQ ID NO: 952763 - RNA, 19 nt, Artificial Sequence
  Description of Artificial Sequence: Synthetic oligonucleotide
gagcgguugccauagccca

SEQ ID NO: 952764 - RNA, 19 nt, Artificial Sequence
  Description of Artificial Sequence: Synthetic oligonucleotide
accgccccuuucuuccucc

SEQ ID NO: 952765 - RNA, 19 nt, Artificial Sequence
  Description of Artificial Sequence: Synthetic oligonucleotide
ucaagcgccacuggguuuc

SEQ ID NO: 952766 - RNA, 19 nt, Artificial Sequence
  Description of Artificial Sequence: Synthetic oligonucleotide
aggcugguuacaaguuucc

SEQ ID NO: 952767 - RNA, 19 nt, Artificial Sequence
  Description of Artificial Sequence: Synthetic oligonucleotide
uggccauaguauucacacc

SEQ ID NO: 952768 - RNA, 19 nt, Artificial Sequence
  Description of Artificial Sequence: Synthetic oligonucleotide
uguuucugguaaagacagu

SEQ ID NO: 952769 - RNA, 19 nt, Artificial Sequence
  Description of Artificial Sequence: Synthetic oligonucleotide
agacagucaagcgccacug

SEQ ID NO: 952770 - RNA, 19 nt, Artificial Sequence
  Description of Artificial Sequence: Synthetic oligonucleotide
gauucauaaguccgguuau

SEQ ID NO: 952771 - RNA, 19 nt, Artificial Sequence
  Description of Artificial Sequence: Synthetic oligonucleotide
uggguuucuucccuugauu

SEQ ID NO: 952772 - RNA, 19 nt, Artificial Sequence
  Description of Artificial Sequence: Synthetic oligonucleotide
uuguccaucuugucgcaau

SEQ ID NO: 952773 - RNA, 19 nt, Artificial Sequence
  Description of Artificial Sequence: Synthetic oligonucleotide
ugggcaugagucaggcuaa

SEQ ID NO: 952774 - RNA, 19 nt, Artificial Sequence
  Description of Artificial Sequence: Synthetic oligonucleotide
gagaagagagagccucgac

SEQ ID NO: 952775 - RNA, 19 nt, Artificial Sequence
  Description of Artificial Sequence: Synthetic oligonucleotide
agucaagcgccacuggguu

SEQ ID NO: 952776 - RNA, 19 nt, Artificial Sequence
  Description of Artificial Sequence: Synthetic oligonucleotide
uccucaguagcauguguuu

SEQ ID NO: 952777 - RNA, 19 nt, Artificial Sequence
  Description of Artificial Sequence: Synthetic oligonucleotide
uauugagcugugccacggu

SEQ ID NO: 952778 - RNA, 19 nt, Artificial Sequence
  Description of Artificial Sequence: Synthetic oligonucleotide
cugugacagagaaagccca

SEQ ID NO: 952779 - RNA, 19 nt, Artificial Sequence
  Description of Artificial Sequence: Synthetic oligonucleotide
ucaccccaguuacugcccc

SEQ ID NO: 952780 - RNA, 19 nt, Artificial Sequence
  Description of Artificial Sequence: Synthetic oligonucleotide
gcagagcaugguuuuauug

SEQ ID NO: 952781 - RNA, 19 nt, Artificial Sequence
  Description of Artificial Sequence: Synthetic oligonucleotide
aggcuaaagaaggggccac

SEQ ID NO: 952782 - RNA, 19 nt, Artificial Sequence
  Description of Artificial Sequence: Synthetic oligonucleotide
uuaccauguuucugguaaa

SEQ ID NO: 952783 - RNA, 19 nt, Artificial Sequence
  Description of Artificial Sequence: Synthetic oligonucleotide
ugccgagcuggccauagua

SEQ ID NO: 952784 - RNA, 19 nt, Artificial Sequence
  Description of Artificial Sequence: Synthetic oligonucleotide
uguguuuuccuagcucauc

SEQ ID NO: 952785 - RNA, 19 nt, Artificial Sequence
  Description of Artificial Sequence: Synthetic oligonucleotide
guucuugauggcccaauaa

SEQ ID NO: 952786 - RNA, 19 nt, Artificial Sequence
  Description of Artificial Sequence: Synthetic oligonucleotide
cagcugggaaacuucagga

SEQ ID NO: 952787 - RNA, 19 nt, Artificial Sequence
  Description of Artificial Sequence: Synthetic oligonucleotide
acugaaucauugauguaaa

SEQ ID NO: 952788 - RNA, 19 nt, Artificial Sequence
  Description of Artificial Sequence: Synthetic oligonucleotide
cacagucccuccucaguag

SEQ ID NO: 952789 - RNA, 19 nt, Artificial Sequence
  Description of Artificial Sequence: Synthetic oligonucleotide
aucccauauugagcugugc

SEQ ID NO: 952790 - RNA, 19 nt, Artificial Sequence
  Description of Artificial Sequence: Synthetic oligonucleotide
acggccguaauuguacaug

SEQ ID NO: 952791 - RNA, 19 nt, Artificial Sequence
  Description of Artificial Sequence: Synthetic oligonucleotide
cugcaugccaaaggcauug

SEQ ID NO: 952792 - RNA, 19 nt, Artificial Sequence
  Description of Artificial Sequence: Synthetic oligonucleotide
uaguaacccuccucacccc

SEQ ID NO: 952793 - RNA, 19 nt, Artificial Sequence
  Description of Artificial Sequence: Synthetic oligonucleotide
ucgcaauccaagagcuccu

SEQ ID NO: 952794 - RNA, 19 nt, Artificial Sequence
  Description of Artificial Sequence: Synthetic oligonucleotide
agucucguuuccaugcucu

SEQ ID NO: 952795 - RNA, 19 nt, Artificial Sequence
  Description of Artificial Sequence: Synthetic oligonucleotide
cucaccccaguuacugccc

SEQ ID NO: 952796 - RNA, 19 nt, Artificial Sequence
  Description of Artificial Sequence: Synthetic oligonucleotide
auagcccaccagcagcaca

SEQ ID NO: 952797 - RNA, 19 nt, Artificial Sequence
  Description of Artificial Sequence: Synthetic oligonucleotide
ggcgccagcagcucugagg

SEQ ID NO: 952798 - RNA, 19 nt, Artificial Sequence
  Description of Artificial Sequence: Synthetic oligonucleotide
ugccaggcuucuuuuguaa

SEQ ID NO: 952799 - RNA, 19 nt, Artificial Sequence
  Description of Artificial Sequence: Synthetic oligonucleotide
acaguggaucauugcaaaa

SEQ ID NO: 952800 - RNA, 19 nt, Artificial Sequence
  Description of Artificial Sequence: Synthetic oligonucleotide
aaguuuccuggaugugaaa

SEQ ID NO: 952801 - RNA, 19 nt, Artificial Sequence
  Description of Artificial Sequence: Synthetic oligonucleotide
cuccuagcuuccacaauuc

SEQ ID NO: 952802 - RNA, 19 nt, Artificial Sequence
  Description of Artificial Sequence: Synthetic oligonucleotide
uuggcggggaccgggacca

SEQ ID NO: 952803 - RNA, 19 nt, Artificial Sequence
  Description of Artificial Sequence: Synthetic oligonucleotide
cugaggacgacagauccca

SEQ ID NO: 952804 - RNA, 19 nt, Artificial Sequence
  Description of Artificial Sequence: Synthetic oligonucleotide
gacgcgcccgcguacggcc

SEQ ID NO: 952805 - RNA, 19 nt, Artificial Sequence
  Description of Artificial Sequence: Synthetic oligonucleotide
ucucguuuccaugcucugu

SEQ ID NO: 952806 - RNA, 19 nt, Artificial Sequence
  Description of Artificial Sequence: Synthetic oligonucleotide
uaggcauuggagggcauuc

SEQ ID NO: 952807 - RNA, 19 nt, Artificial Sequence
  Description of Artificial Sequence: Synthetic oligonucleotide
ggaauucagagcucacuga

SEQ ID NO: 952808 - RNA, 19 nt, Artificial Sequence
  Description of Artificial Sequence: Synthetic oligonucleotide
cugagguaccaagagccug

SEQ ID NO: 952809 - RNA, 19 nt, Artificial Sequence
  Description of Artificial Sequence: Synthetic oligonucleotide
agagagccucgacccgccc

SEQ ID NO: 952810 - RNA, 19 nt, Artificial Sequence
  Description of Artificial Sequence: Synthetic oligonucleotide
agugcgaagcgggcgggcg

SEQ ID NO: 952811 - RNA, 19 nt, Artificial Sequence
  Description of Artificial Sequence: Synthetic oligonucleotide
cguaauuguacauguccag

SEQ ID NO: 952812 - RNA, 19 nt, Artificial Sequence
  Description of Artificial Sequence: Synthetic oligonucleotide
ggcgauagaacugcaugcc

SEQ ID NO: 952813 - RNA, 19 nt, Artificial Sequence
  Description of Artificial Sequence: Synthetic oligonucleotide
cauguccagugcgaagcgg

SEQ ID NO: 952814 - RNA, 19 nt, Artificial Sequence
  Description of Artificial Sequence: Synthetic oligonucleotide
cgauacaaguaguaguaac

SEQ ID NO: 952815 - RNA, 19 nt, Artificial Sequence
  Description of Artificial Sequence: Synthetic oligonucleotide
uaacccuccucaccccagu

SEQ ID NO: 952816 - RNA, 19 nt, Artificial Sequence
  Description of Artificial Sequence: Synthetic oligonucleotide
ucgaugagccaagggcugc

SEQ ID NO: 952817 - RNA, 19 nt, Artificial Sequence
  Description of Artificial Sequence: Synthetic oligonucleotide
ugggguaggggcuccucgu

SEQ ID NO: 952818 - RNA, 19 nt, Artificial Sequence
  Description of Artificial Sequence: Synthetic oligonucleotide
ugauggcaacugagaucgg

SEQ ID NO: 952819 - RNA, 19 nt, Artificial Sequence
  Description of Artificial Sequence: Synthetic oligonucleotide
gguaaucaugaaguccuug

SEQ ID NO: 952820 - RNA, 19 nt, Artificial Sequence
  Description of Artificial Sequence: Synthetic oligonucleotide
gaccaggaccacugcccgg

SEQ ID NO: 952821 - RNA, 19 nt, Artificial Sequence
  Description of Artificial Sequence: Synthetic oligonucleotide
ugauauucacugggccaca

SEQ ID NO: 952822 - RNA, 19 nt, Artificial Sequence
  Description of Artificial Sequence: Synthetic oligonucleotide
ugucgcaauccaagagcuc

SEQ ID NO: 952823 - RNA, 19 nt, Artificial Sequence
  Description of Artificial Sequence: Synthetic oligonucleotide
auccuccuagcuuccacaa

SEQ ID NO: 952824 - RNA, 19 nt, Artificial Sequence
  Description of Artificial Sequence: Synthetic oligonucleotide
accuuacccgagccugggg

SEQ ID NO: 952825 - RNA, 19 nt, Artificial Sequence
  Description of Artificial Sequence: Synthetic oligonucleotide
uggacuuggcuagacucau

SEQ ID NO: 952826 - RNA, 19 nt, Artificial Sequence
  Description of Artificial Sequence: Synthetic oligonucleotide
ggagcgguugccauagccc

SEQ ID NO: 952827 - RNA, 19 nt, Artificial Sequence
  Description of Artificial Sequence: Synthetic oligonucleotide
ugcagagcaugguuuuauu

SEQ ID NO: 952828 - RNA, 19 nt, Artificial Sequence
  Description of Artificial Sequence: Synthetic oligonucleotide
cuguagccuugauauucac

SEQ ID NO: 952829 - RNA, 19 nt, Artificial Sequence
  Description of Artificial Sequence: Synthetic oligonucleotide
ccauauugagcugugccac

SEQ ID NO: 952830 - RNA, 19 nt, Artificial Sequence
  Description of Artificial Sequence: Synthetic oligonucleotide
gcuagguuaugauaagacu

SEQ ID NO: 952831 - RNA, 19 nt, Artificial Sequence
  Description of Artificial Sequence: Synthetic oligonucleotide
gucgaugagccaagggcug

SEQ ID NO: 952832 - RNA, 19 nt, Artificial Sequence
  Description of Artificial Sequence: Synthetic oligonucleotide
cugaauuuggugaucccau

SEQ ID NO: 952833 - RNA, 19 nt, Artificial Sequence
  Description of Artificial Sequence: Synthetic oligonucleotide
caaagacgcagcugggaaa

SEQ ID NO: 952834 - RNA, 19 nt, Artificial Sequence
  Description of Artificial Sequence: Synthetic oligonucleotide
gacgcagcugggaaacuuc

SEQ ID NO: 952835 - RNA, 19 nt, Artificial Sequence
  Description of Artificial Sequence: Synthetic oligonucleotide
augcucuguagccuugaua

SEQ ID NO: 952836 - RNA, 19 nt, Artificial Sequence
  Description of Artificial Sequence: Synthetic oligonucleotide
cucguuuccaugcucugua

SEQ ID NO: 952837 - RNA, 19 nt, Artificial Sequence
  Description of Artificial Sequence: Synthetic oligonucleotide
cccagcacggcccucgucc

SEQ ID NO: 952838 - RNA, 19 nt, Artificial Sequence
  Description of Artificial Sequence: Synthetic oligonucleotide
uuauggcuguguaggcauu

SEQ ID NO: 952839 - RNA, 19 nt, Artificial Sequence
  Description of Artificial Sequence: Synthetic oligonucleotide
acugccgagcuggccauag

SEQ ID NO: 952840 - RNA, 19 nt, Artificial Sequence
  Description of Artificial Sequence: Synthetic oligonucleotide
uggcccaauaaggaguguu

SEQ ID NO: 952841 - RNA, 19 nt, Artificial Sequence
  Description of Artificial Sequence: Synthetic oligonucleotide
uaccucuuuauugcucuua

SEQ ID NO: 952842 - RNA, 19 nt, Artificial Sequence
  Description of Artificial Sequence: Synthetic oligonucleotide
accaggaccacugcccgga

SEQ ID NO: 952843 - RNA, 19 nt, Artificial Sequence
  Description of Artificial Sequence: Synthetic oligonucleotide
augugaaaggggaccagaa

SEQ ID NO: 952844 - RNA, 19 nt, Artificial Sequence
  Description of Artificial Sequence: Synthetic oligonucleotide
acgauacaaguaguaguaa

SEQ ID NO: 952845 - RNA, 19 nt, Artificial Sequence
  Description of Artificial Sequence: Synthetic oligonucleotide
gauggcaacugagaucggu

SEQ ID NO: 952846 - RNA, 19 nt, Artificial Sequence
  Description of Artificial Sequence: Synthetic oligonucleotide
gcguuggcuuccaugaaag

SEQ ID NO: 952847 - RNA, 19 nt, Artificial Sequence
  Description of Artificial Sequence: Synthetic oligonucleotide
auucauaaguccgguuaua

SEQ ID NO: 952848 - RNA, 19 nt, Artificial Sequence
  Description of Artificial Sequence: Synthetic oligonucleotide
gaaggcugguuacaaguuu

SEQ ID NO: 952849 - RNA, 19 nt, Artificial Sequence
  Description of Artificial Sequence: Synthetic oligonucleotide
uccuccuagcuuccacaau

SEQ ID NO: 952850 - RNA, 19 nt, Artificial Sequence
  Description of Artificial Sequence: Synthetic oligonucleotide
ccguaauuguacaugucca

SEQ ID NO: 952851 - RNA, 19 nt, Artificial Sequence
  Description of Artificial Sequence: Synthetic oligonucleotide
cccacgauacaaguaguag

SEQ ID NO: 952852 - RNA, 19 nt, Artificial Sequence
  Description of Artificial Sequence: Synthetic oligonucleotide
gccuuuguagcuguaguca

SEQ ID NO: 952853 - RNA, 19 nt, Artificial Sequence
  Description of Artificial Sequence: Synthetic oligonucleotide
agcaucagacagaggaaaa

SEQ ID NO: 952854 - RNA, 19 nt, Artificial Sequence
  Description of Artificial Sequence: Synthetic oligonucleotide
aucgguccuuucugggcca

SEQ ID NO: 952855 - RNA, 19 nt, Artificial Sequence
  Description of Artificial Sequence: Synthetic oligonucleotide
gagagagccucgacccgcc

SEQ ID NO: 952856 - RNA, 19 nt, Artificial Sequence
  Description of Artificial Sequence: Synthetic oligonucleotide
caaacucuuuauggcugug

SEQ ID NO: 952857 - RNA, 19 nt, Artificial Sequence
  Description of Artificial Sequence: Synthetic oligonucleotide
gcaucagacagaggaaaac

SEQ ID NO: 952858 - RNA, 19 nt, Artificial Sequence
  Description of Artificial Sequence: Synthetic oligonucleotide
guccgguuauagguaauca

SEQ ID NO: 952859 - RNA, 19 nt, Artificial Sequence
  Description of Artificial Sequence: Synthetic oligonucleotide
gucacagguagcaggcaca

SEQ ID NO: 952860 - RNA, 19 nt, Artificial Sequence
  Description of Artificial Sequence: Synthetic oligonucleotide
uagacucaucuugcugcca

SEQ ID NO: 952861 - RNA, 19 nt, Artificial Sequence
  Description of Artificial Sequence: Synthetic oligonucleotide
cuuuuaccauguuucuggu

SEQ ID NO: 952862 - RNA, 19 nt, Artificial Sequence
  Description of Artificial Sequence: Synthetic oligonucleotide
ggcuccagacccacgauac

SEQ ID NO: 952863 - RNA, 19 nt, Artificial Sequence
  Description of Artificial Sequence: Synthetic oligonucleotide
cgguuauagguaaucauga

SEQ ID NO: 952864 - RNA, 19 nt, Artificial Sequence
  Description of Artificial Sequence: Synthetic oligonucleotide
uuacccgagccugggguuc

SEQ ID NO: 952865 - RNA, 19 nt, Artificial Sequence
  Description of Artificial Sequence: Synthetic oligonucleotide
ggcccaauaaggaguguug

SEQ ID NO: 952866 - RNA, 19 nt, Artificial Sequence
  Description of Artificial Sequence: Synthetic oligonucleotide
agcgguugccauagcccac

SEQ ID NO: 952867 - RNA, 19 nt, Artificial Sequence
  Description of Artificial Sequence: Synthetic oligonucleotide
ggcauuggagggcauucca

SEQ ID NO: 952868 - RNA, 19 nt, Artificial Sequence
  Description of Artificial Sequence: Synthetic oligonucleotide
cuugauucauaaguccggu

SEQ ID NO: 952869 - RNA, 19 nt, Artificial Sequence
  Description of Artificial Sequence: Synthetic oligonucleotide
guguaggcauuggagggca

SEQ ID NO: 952870 - RNA, 19 nt, Artificial Sequence
  Description of Artificial Sequence: Synthetic oligonucleotide
caccuuacccgagccuggg

SEQ ID NO: 952871 - RNA, 19 nt, Artificial Sequence
  Description of Artificial Sequence: Synthetic oligonucleotide
cccucaguucaccacugcc

SEQ ID NO: 952872 - RNA, 19 nt, Artificial Sequence
  Description of Artificial Sequence: Synthetic oligonucleotide
cugaaagucucguuuccau

SEQ ID NO: 952873 - RNA, 19 nt, Artificial Sequence
  Description of Artificial Sequence: Synthetic oligonucleotide
agguuaugauaagacuauu

SEQ ID NO: 952874 - RNA, 19 nt, Artificial Sequence
  Description of Artificial Sequence: Synthetic oligonucleotide
aagacgcagcugggaaacu

SEQ ID NO: 952875 - RNA, 19 nt, Artificial Sequence
  Description of Artificial Sequence: Synthetic oligonucleotide
auuguggcuuccagagaga

SEQ ID NO: 952876 - RNA, 19 nt, Artificial Sequence
  Description of Artificial Sequence: Synthetic oligonucleotide
gugcuuuuaccauguuucu

SEQ ID NO: 952877 - RNA, 19 nt, Artificial Sequence
  Description of Artificial Sequence: Synthetic oligonucleotide
ccuggaugugaaaggggac

SEQ ID NO: 952878 - RNA, 19 nt, Artificial Sequence
  Description of Artificial Sequence: Synthetic oligonucleotide
gaagcgggcgggcgccagc

SEQ ID NO: 952879 - RNA, 19 nt, Artificial Sequence
  Description of Artificial Sequence: Synthetic oligonucleotide
cacccaagcaggccuuguc

SEQ ID NO: 952880 - RNA, 19 nt, Artificial Sequence
  Description of Artificial Sequence: Synthetic oligonucleotide
agccucgacccgcccggcg

SEQ ID NO: 952881 - RNA, 19 nt, Artificial Sequence
  Description of Artificial Sequence: Synthetic oligonucleotide
cacuggcccuccacauugc

SEQ ID NO: 952882 - RNA, 19 nt, Artificial Sequence
  Description of Artificial Sequence: Synthetic oligonucleotide
gcgauagaacugcaugcca

SEQ ID NO: 952883 - RNA, 19 nt, Artificial Sequence
  Description of Artificial Sequence: Synthetic oligonucleotide
aaguccgguuauagguaau

SEQ ID NO: 952884 - RNA, 19 nt, Artificial Sequence
  Description of Artificial Sequence: Synthetic oligonucleotide
cagacccacgauacaagua

SEQ ID NO: 952885 - RNA, 19 nt, Artificial Sequence
  Description of Artificial Sequence: Synthetic oligonucleotide
ggaugugaaaggggaccag

SEQ ID NO: 952886 - RNA, 19 nt, Artificial Sequence
  Description of Artificial Sequence: Synthetic oligonucleotide
gugcgaagcgggcgggcgc

SEQ ID NO: 952887 - RNA, 19 nt, Artificial Sequence
  Description of Artificial Sequence: Synthetic oligonucleotide
gcgccacuggguuucuucc

SEQ ID NO: 952888 - RNA, 19 nt, Artificial Sequence
  Description of Artificial Sequence: Synthetic oligonucleotide
accacuggcccuccacauu

SEQ ID NO: 952889 - RNA, 19 nt, Artificial Sequence
  Description of Artificial Sequence: Synthetic oligonucleotide
ugaccgccccuuucuuccu

SEQ ID NO: 952890 - RNA, 19 nt, Artificial Sequence
  Description of Artificial Sequence: Synthetic oligonucleotide
agacgcagcugggaaacuu

SEQ ID NO: 952891 - RNA, 19 nt, Artificial Sequence
  Description of Artificial Sequence: Synthetic oligonucleotide
ggucgaugagccaagggcu

SEQ ID NO: 952892 - RNA, 19 nt, Artificial Sequence
  Description of Artificial Sequence: Synthetic oligonucleotide
caguuacugccccagcugu

SEQ ID NO: 952893 - RNA, 19 nt, Artificial Sequence
  Description of Artificial Sequence: Synthetic oligonucleotide
caguggaucauugcaaaau

SEQ ID NO: 952894 - RNA, 19 nt, Artificial Sequence
  Description of Artificial Sequence: Synthetic oligonucleotide
gguuaugauaagacuauuu

SEQ ID NO: 952895 - RNA, 19 nt, Artificial Sequence
  Description of Artificial Sequence: Synthetic oligonucleotide
auguguuuuccuagcucau

SEQ ID NO: 952896 - RNA, 19 nt, Artificial Sequence
  Description of Artificial Sequence: Synthetic oligonucleotide
cagucaagcgccacugggu

SEQ ID NO: 952897 - RNA, 19 nt, Artificial Sequence
  Description of Artificial Sequence: Synthetic oligonucleotide
cccucguccccgcagcacg

SEQ ID NO: 952898 - RNA, 19 nt, Artificial Sequence
  Description of Artificial Sequence: Synthetic oligonucleotide
gccucgacccgcccggcgg

SEQ ID NO: 952899 - RNA, 19 nt, Artificial Sequence
  Description of Artificial Sequence: Synthetic oligonucleotide
uacccgagccugggguucc

SEQ ID NO: 952900 - RNA, 19 nt, Artificial Sequence
  Description of Artificial Sequence: Synthetic oligonucleotide
ccauaguauucacaccaca

SEQ ID NO: 952901 - RNA, 19 nt, Artificial Sequence
  Description of Artificial Sequence: Synthetic oligonucleotide
cagucccuccucaguagca

SEQ ID NO: 952902 - RNA, 19 nt, Artificial Sequence
  Description of Artificial Sequence: Synthetic oligonucleotide
gcacaacaguggaucauug

SEQ ID NO: 952903 - RNA, 19 nt, Artificial Sequence
  Description of Artificial Sequence: Synthetic oligonucleotide
ucgguccuuucugggccag

SEQ ID NO: 952904 - RNA, 19 nt, Artificial Sequence
  Description of Artificial Sequence: Synthetic oligonucleotide
cuagcucauccaggauuug

SEQ ID NO: 952905 - RNA, 19 nt, Artificial Sequence
  Description of Artificial Sequence: Synthetic oligonucleotide
ccacgauacaaguaguagu

SEQ ID NO: 952906 - RNA, 19 nt, Artificial Sequence
  Description of Artificial Sequence: Synthetic oligonucleotide
cccagcguuggcuuccaug

SEQ ID NO: 952907 - RNA, 19 nt, Artificial Sequence
  Description of Artificial Sequence: Synthetic oligonucleotide
gcauuggagggcauuccac

SEQ ID NO: 952908 - RNA, 19 nt, Artificial Sequence
  Description of Artificial Sequence: Synthetic oligonucleotide
gcugaaagucucguuucca

SEQ ID NO: 952909 - RNA, 19 nt, Artificial Sequence
  Description of Artificial Sequence: Synthetic oligonucleotide
cuccucaguagcauguguu

SEQ ID NO: 952910 - RNA, 19 nt, Artificial Sequence
  Description of Artificial Sequence: Synthetic oligonucleotide
acugcaugccaaaggcauu

SEQ ID NO: 952911 - RNA, 19 nt, Artificial Sequence
  Description of Artificial Sequence: Synthetic oligonucleotide
cccucccaaacucuuuaug

SEQ ID NO: 952912 - RNA, 19 nt, Artificial Sequence
  Description of Artificial Sequence: Synthetic oligonucleotide
ucgacccgcccggcggacg

SEQ ID NO: 952913 - RNA, 19 nt, Artificial Sequence
  Description of Artificial Sequence: Synthetic oligonucleotide
gccauaguauucacaccac

SEQ ID NO: 952914 - RNA, 19 nt, Artificial Sequence
  Description of Artificial Sequence: Synthetic oligonucleotide
caugcccugguccuucacu

SEQ ID NO: 952915 - RNA, 19 nt, Artificial Sequence
  Description of Artificial Sequence: Synthetic oligonucleotide
cauagcccaccagcagcac

SEQ ID NO: 952916 - RNA, 19 nt, Artificial Sequence
  Description of Artificial Sequence: Synthetic oligonucleotide
cugugcuuuuaccauguuu

SEQ ID NO: 952917 - RNA, 19 nt, Artificial Sequence
  Description of Artificial Sequence: Synthetic oligonucleotide
cgauagaacugcaugccaa

SEQ ID NO: 952918 - RNA, 19 nt, Artificial Sequence
  Description of Artificial Sequence: Synthetic oligonucleotide
gcaccuuacccgagccugg

SEQ ID NO: 952919 - RNA, 19 nt, Artificial Sequence
  Description of Artificial Sequence: Synthetic oligonucleotide
cauggcgauagaacugcau

SEQ ID NO: 952920 - RNA, 19 nt, Artificial Sequence
  Description of Artificial Sequence: Synthetic oligonucleotide
gaccgccccuuucuuccuc

SEQ ID NO: 952921 - RNA, 19 nt, Artificial Sequence
  Description of Artificial Sequence: Synthetic oligonucleotide
aguuacugccccagcuguu

SEQ ID NO: 952922 - RNA, 19 nt, Artificial Sequence
  Description of Artificial Sequence: Synthetic oligonucleotide
cagagagaagagagagccu

SEQ ID NO: 952923 - RNA, 19 nt, Artificial Sequence
  Description of Artificial Sequence: Synthetic oligonucleotide
ggguaccucuuuauugcuc

SEQ ID NO: 952924 - RNA, 19 nt, Artificial Sequence
  Description of Artificial Sequence: Synthetic oligonucleotide
ggcaacugagaucgguccu

SEQ ID NO: 952925 - RNA, 19 nt, Artificial Sequence
  Description of Artificial Sequence: Synthetic oligonucleotide
cacagguagcaggcacaac

SEQ ID NO: 952926 - RNA, 19 nt, Artificial Sequence
  Description of Artificial Sequence: Synthetic oligonucleotide
ccaucuugucgcaauccaa

SEQ ID NO: 952927 - RNA, 19 nt, Artificial Sequence
  Description of Artificial Sequence: Synthetic oligonucleotide
gcucgucaucggcccaggg

SEQ ID NO: 952928 - RNA, 19 nt, Artificial Sequence
  Description of Artificial Sequence: Synthetic oligonucleotide
agguaaucaugaaguccuu

SEQ ID NO: 952929 - RNA, 19 nt, Artificial Sequence
  Description of Artificial Sequence: Synthetic oligonucleotide
ccuucacuuuagugaccgc

SEQ ID NO: 952930 - RNA, 19 nt, Artificial Sequence
  Description of Artificial Sequence: Synthetic oligonucleotide
cauagccuuuguagcugua

SEQ ID NO: 952931 - RNA, 19 nt, Artificial Sequence
  Description of Artificial Sequence: Synthetic oligonucleotide
ccucguccccgcagcacgg

SEQ ID NO: 952932 - RNA, 19 nt, Artificial Sequence
  Description of Artificial Sequence: Synthetic oligonucleotide
acauugccugugacagaga

SEQ ID NO: 952933 - RNA, 19 nt, Artificial Sequence
  Description of Artificial Sequence: Synthetic oligonucleotide
cucguccccgcagcacggc

SEQ ID NO: 952934 - RNA, 19 nt, Artificial Sequence
  Description of Artificial Sequence: Synthetic oligonucleotide
cuuacccgagccugggguu

SEQ ID NO: 952935 - RNA, 19 nt, Artificial Sequence
  Description of Artificial Sequence: Synthetic oligonucleotide
caucggcccagggcuuggc

SEQ ID NO: 952936 - RNA, 19 nt, Artificial Sequence
  Description of Artificial Sequence: Synthetic oligonucleotide
gcacggccguaauuguaca

SEQ ID NO: 952937 - RNA, 19 nt, Artificial Sequence
  Description of Artificial Sequence: Synthetic oligonucleotide
cauccaggauuuggaagcu

SEQ ID NO: 952938 - RNA, 19 nt, Artificial Sequence
  Description of Artificial Sequence: Synthetic oligonucleotide
ccuccuagcuuccacaauu

SEQ ID NO: 952939 - RNA, 19 nt, Artificial Sequence
  Description of Artificial Sequence: Synthetic oligonucleotide
gacccgcccggcggacgcg

SEQ ID NO: 952940 - RNA, 19 nt, Artificial Sequence
  Description of Artificial Sequence: Synthetic oligonucleotide
ggccguaauuguacauguc

SEQ ID NO: 952941 - RNA, 19 nt, Artificial Sequence
  Description of Artificial Sequence: Synthetic oligonucleotide
cugcagagcaugguuuuau

SEQ ID NO: 952942 - RNA, 19 nt, Artificial Sequence
  Description of Artificial Sequence: Synthetic oligonucleotide
gcggacgcgcccgcguacg

SEQ ID NO: 952943 - RNA, 19 nt, Artificial Sequence
  Description of Artificial Sequence: Synthetic oligonucleotide
guggggcgggaucauuuau

SEQ ID NO: 952944 - RNA, 19 nt, Artificial Sequence
  Description of Artificial Sequence: Synthetic oligonucleotide
ccagacccacgauacaagu

SEQ ID NO: 952945 - RNA, 19 nt, Artificial Sequence
  Description of Artificial Sequence: Synthetic oligonucleotide
guaggcauuggagggcauu

SEQ ID NO: 952946 - RNA, 19 nt, Artificial Sequence
  Description of Artificial Sequence: Synthetic oligonucleotide
ggcacaacaguggaucauu

SEQ ID NO: 952947 - RNA, 19 nt, Artificial Sequence
  Description of Artificial Sequence: Synthetic oligonucleotide
ccuuacccgagccuggggu

SEQ ID NO: 952948 - RNA, 19 nt, Artificial Sequence
  Description of Artificial Sequence: Synthetic oligonucleotide
cagcguuggcuuccaugaa

SEQ ID NO: 952949 - RNA, 19 nt, Artificial Sequence
  Description of Artificial Sequence: Synthetic oligonucleotide
gagccucgacccgcccggc

SEQ ID NO: 952950 - RNA, 19 nt, Artificial Sequence
  Description of Artificial Sequence: Synthetic oligonucleotide
gucaagcgccacuggguuu

SEQ ID NO: 952951 - RNA, 19 nt, Artificial Sequence
  Description of Artificial Sequence: Synthetic oligonucleotide
cccauucagguggggcggg

SEQ ID NO: 952952 - RNA, 19 nt, Artificial Sequence
  Description of Artificial Sequence: Synthetic oligonucleotide
ccauuguggcuuccagaga

SEQ ID NO: 952953 - RNA, 19 nt, Artificial Sequence
  Description of Artificial Sequence: Synthetic oligonucleotide
cacggccguaauuguacau

SEQ ID NO: 952954 - RNA, 19 nt, Artificial Sequence
  Description of Artificial Sequence: Synthetic oligonucleotide
ggacgcgcccgcguacggc

SEQ ID NO: 952955 - RNA, 19 nt, Artificial Sequence
  Description of Artificial Sequence: Synthetic oligonucleotide
gcagcacggccguaauugu

SEQ ID NO: 952956 - RNA, 19 nt, Artificial Sequence
  Description of Artificial Sequence: Synthetic oligonucleotide
cugcaccuuacccgagccu

SEQ ID NO: 952957 - RNA, 19 nt, Artificial Sequence
  Description of Artificial Sequence: Synthetic oligonucleotide
ccccaguuacugccccagc

SEQ ID NO: 952958 - RNA, 19 nt, Artificial Sequence
  Description of Artificial Sequence: Synthetic oligonucleotide
cucuuagagaaggcugguu

SEQ ID NO: 952959 - RNA, 19 nt, Artificial Sequence
  Description of Artificial Sequence: Synthetic oligonucleotide
aagcgccacuggguuucuu

SEQ ID NO: 952960 - RNA, 19 nt, Artificial Sequence
  Description of Artificial Sequence: Synthetic oligonucleotide
ccugagguaccaagagccu

SEQ ID NO: 952961 - RNA, 19 nt, Artificial Sequence
  Description of Artificial Sequence: Synthetic oligonucleotide
gcggggaccgggaccagga

SEQ ID NO: 952962 - RNA, 19 nt, Artificial Sequence
  Description of Artificial Sequence: Synthetic oligonucleotide
gaccgggaccaggaccacu

SEQ ID NO: 952963 - RNA, 19 nt, Artificial Sequence
  Description of Artificial Sequence: Synthetic oligonucleotide
caacugagaucgguccuuu

SEQ ID NO: 952964 - RNA, 19 nt, Artificial Sequence
  Description of Artificial Sequence: Synthetic oligonucleotide
cggccguaauuguacaugu

SEQ ID NO: 952965 - RNA, 19 nt, Artificial Sequence
  Description of Artificial Sequence: Synthetic oligonucleotide
gccgagcuggccauaguau

SEQ ID NO: 952966 - RNA, 19 nt, Artificial Sequence
  Description of Artificial Sequence: Synthetic oligonucleotide
ccgagcuggccauaguauu

SEQ ID NO: 952967 - RNA, 19 nt, Artificial Sequence
  Description of Artificial Sequence: Synthetic oligonucleotide
cacgguccaaggccucaau

SEQ ID NO: 952968 - RNA, 19 nt, Artificial Sequence
  Description of Artificial Sequence: Synthetic oligonucleotide
cggacgcgcccgcguacgg

SEQ ID NO: 952969 - RNA, 19 nt, Artificial Sequence
  Description of Artificial Sequence: Synthetic oligonucleotide
ccucgacccgcccggcgga

SEQ ID NO: 952970 - RNA, 19 nt, Artificial Sequence
  Description of Artificial Sequence: Synthetic oligonucleotide
cggggaccgggaccaggac

SEQ ID NO: 952971 - RNA, 19 nt, Artificial Sequence
  Description of Artificial Sequence: Synthetic oligonucleotide
caagcgccacuggguuucu

SEQ ID NO: 952972 - RNA, 19 nt, Artificial Sequence
  Description of Artificial Sequence: Synthetic oligonucleotide
ccacgguccaaggccucaa

SEQ ID NO: 952973 - RNA, 19 nt, Artificial Sequence
  Description of Artificial Sequence: Synthetic oligonucleotide
cacugccgagcuggccaua

SEQ ID NO: 952974 - RNA, 19 nt, Artificial Sequence
  Description of Artificial Sequence: Synthetic oligonucleotide
ccacugccgagcuggccau

SEQ ID NO: 952975 - RNA, 19 nt, Artificial Sequence
  Description of Artificial Sequence: Synthetic oligonucleotide
gccccagcguuggcuucca

SEQ ID NO: 952976 - RNA, 19 nt, Artificial Sequence
  Description of Artificial Sequence: Synthetic oligonucleotide
ccccgcagcacggccguaa

SEQ ID NO: 952977 - RNA, 19 nt, Artificial Sequence
  Description of Artificial Sequence: Synthetic oligonucleotide
cccgcagcacggccguaau

SEQ ID NO: 952978 - RNA, 19 nt, Artificial Sequence
  Description of Artificial Sequence: Synthetic oligonucleotide
cgucaucggcccagggcuu

SEQ ID NO: 952979 - RNA, 19 nt, Artificial Sequence
  Description of Artificial Sequence: Synthetic oligonucleotide
ccgcagcacggccguaauu

SEQ ID NO: 952980 - RNA, 19 nt, Artificial Sequence
  Description of Artificial Sequence: Synthetic oligonucleotide
cggcggacgcgcccgcgua

SEQ ID NO: 952981 - RNA, 19 nt, Artificial Sequence
  Description of Artificial Sequence: Synthetic oligonucleotide
ccccagcguuggcuuccau

SEQ ID NO: 952982 - RNA, 19 nt, Artificial Sequence
  Description of Artificial Sequence: Synthetic oligonucleotide
uguacuuuaacuuaaccag

SEQ ID NO: 952983 - RNA, 19 nt, Artificial Sequence
  Description of Artificial Sequence: Synthetic oligonucleotide
aaacgaaaggcuuuccucc

SEQ ID NO: 952984 - RNA, 19 nt, Artificial Sequence
  Description of Artificial Sequence: Synthetic oligonucleotide
aaccaaaacagacccaucc

SEQ ID NO: 952985 - RNA, 19 nt, Artificial Sequence
  Description of Artificial Sequence: Synthetic oligonucleotide
aacccgagaaaauuaaagg

SEQ ID NO: 952986 - RNA, 19 nt, Artificial Sequence
  Description of Artificial Sequence: Synthetic oligonucleotide
aaagcccacaguucuaugc

SEQ ID NO: 952987 - RNA, 19 nt, Artificial Sequence
  Description of Artificial Sequence: Synthetic oligonucleotide
agaauaauaacccucuuca

SEQ ID NO: 952988 - RNA, 19 nt, Artificial Sequence
  Description of Artificial Sequence: Synthetic oligonucleotide
ucgaaggucacuuucagag

SEQ ID NO: 952989 - RNA, 19 nt, Artificial Sequence
  Description of Artificial Sequence: Synthetic oligonucleotide
aguaucgcaagccuuacac

SEQ ID NO: 952990 - RNA, 19 nt, Artificial Sequence
  Description of Artificial Sequence: Synthetic oligonucleotide
aaauccucgaguuccacag

SEQ ID NO: 952991 - RNA, 19 nt, Artificial Sequence
  Description of Artificial Sequence: Synthetic oligonucleotide
uuaggaagcaguaugaaua

SEQ ID NO: 952992 - RNA, 19 nt, Artificial Sequence
  Description of Artificial Sequence: Synthetic oligonucleotide
uuuaacuuaaccaguucug

SEQ ID NO: 952993 - RNA, 19 nt, Artificial Sequence
  Description of Artificial Sequence: Synthetic oligonucleotide
guaaaugauggcuucuucg

SEQ ID NO: 952994 - RNA, 19 nt, Artificial Sequence
  Description of Artificial Sequence: Synthetic oligonucleotide
uucuauuaagagaagcuca

SEQ ID NO: 952995 - RNA, 19 nt, Artificial Sequence
  Description of Artificial Sequence: Synthetic oligonucleotide
aaggacuccaaacgaaagg

SEQ ID NO: 952996 - RNA, 19 nt, Artificial Sequence
  Description of Artificial Sequence: Synthetic oligonucleotide
gauguuguggguuggaggc

SEQ ID NO: 952997 - RNA, 19 nt, Artificial Sequence
  Description of Artificial Sequence: Synthetic oligonucleotide
agaugcuagagcugcagcc

SEQ ID NO: 952998 - RNA, 19 nt, Artificial Sequence
  Description of Artificial Sequence: Synthetic oligonucleotide
uucauauuauugcuuagga

SEQ ID NO: 952999 - RNA, 19 nt, Artificial Sequence
  Description of Artificial Sequence: Synthetic oligonucleotide
ucagcaauuuacaggauga

SEQ ID NO: 953000 - RNA, 19 nt, Artificial Sequence
  Description of Artificial Sequence: Synthetic oligonucleotide
aacccauacgaguaaauga

SEQ ID NO: 953001 - RNA, 19 nt, Artificial Sequence
  Description of Artificial Sequence: Synthetic oligonucleotide
aggucgaugucaucuaugc

SEQ ID NO: 953002 - RNA, 19 nt, Artificial Sequence
  Description of Artificial Sequence: Synthetic oligonucleotide
uggucaaccacgaaagacc

SEQ ID NO: 953003 - RNA, 19 nt, Artificial Sequence
  Description of Artificial Sequence: Synthetic oligonucleotide
uuuguacuuuaacuuaacc

SEQ ID NO: 953004 - RNA, 19 nt, Artificial Sequence
  Description of Artificial Sequence: Synthetic oligonucleotide
accacgaaagaccugccgc

SEQ ID NO: 953005 - RNA, 19 nt, Artificial Sequence
  Description of Artificial Sequence: Synthetic oligonucleotide
aggaccauagcccucacag

SEQ ID NO: 953006 - RNA, 19 nt, Artificial Sequence
  Description of Artificial Sequence: Synthetic oligonucleotide
uuuuagaguacgcaggaau

SEQ ID NO: 953007 - RNA, 19 nt, Artificial Sequence
  Description of Artificial Sequence: Synthetic oligonucleotide
gaaacgauguuguaguuga

SEQ ID NO: 953008 - RNA, 19 nt, Artificial Sequence
  Description of Artificial Sequence: Synthetic oligonucleotide
ucuuuagagaugcuagagc

SEQ ID NO: 953009 - RNA, 19 nt, Artificial Sequence
  Description of Artificial Sequence: Synthetic oligonucleotide
ucuauuaagagaagcucac

SEQ ID NO: 953010 - RNA, 19 nt, Artificial Sequence
  Description of Artificial Sequence: Synthetic oligonucleotide
agaaaugccuuguagagau

SEQ ID NO: 953011 - RNA, 19 nt, Artificial Sequence
  Description of Artificial Sequence: Synthetic oligonucleotide
ucucggauucuuuugaucu

SEQ ID NO: 953012 - RNA, 19 nt, Artificial Sequence
  Description of Artificial Sequence: Synthetic oligonucleotide
uaucgcaagccuuacacug

SEQ ID NO: 953013 - RNA, 19 nt, Artificial Sequence
  Description of Artificial Sequence: Synthetic oligonucleotide
acguaugccuucuauguac

SEQ ID NO: 953014 - RNA, 19 nt, Artificial Sequence
  Description of Artificial Sequence: Synthetic oligonucleotide
aguacccuuggccagagag

SEQ ID NO: 953015 - RNA, 19 nt, Artificial Sequence
  Description of Artificial Sequence: Synthetic oligonucleotide
uucauauacaauccuucca

SEQ ID NO: 953016 - RNA, 19 nt, Artificial Sequence
  Description of Artificial Sequence: Synthetic oligonucleotide
aaucgcacuggcuauggug

SEQ ID NO: 953017 - RNA, 19 nt, Artificial Sequence
  Description of Artificial Sequence: Synthetic oligonucleotide
caugaauuuugccaggcgc

SEQ ID NO: 953018 - RNA, 19 nt, Artificial Sequence
  Description of Artificial Sequence: Synthetic oligonucleotide
acgauguuguaguugagag

SEQ ID NO: 953019 - RNA, 19 nt, Artificial Sequence
  Description of Artificial Sequence: Synthetic oligonucleotide
aacuuaaccaguucuggaa

SEQ ID NO: 953020 - RNA, 19 nt, Artificial Sequence
  Description of Artificial Sequence: Synthetic oligonucleotide
ucaaccacgaaagaccugc

SEQ ID NO: 953021 - RNA, 19 nt, Artificial Sequence
  Description of Artificial Sequence: Synthetic oligonucleotide
uugcuuaggaagcaguaug

SEQ ID NO: 953022 - RNA, 19 nt, Artificial Sequence
  Description of Artificial Sequence: Synthetic oligonucleotide
aaccagaaaugccuuguag

SEQ ID NO: 953023 - RNA, 19 nt, Artificial Sequence
  Description of Artificial Sequence: Synthetic oligonucleotide
uuagaguacgcaggaaucg

SEQ ID NO: 953024 - RNA, 19 nt, Artificial Sequence
  Description of Artificial Sequence: Synthetic oligonucleotide
acaccauacuucuuuagag

SEQ ID NO: 953025 - RNA, 19 nt, Artificial Sequence
  Description of Artificial Sequence: Synthetic oligonucleotide
auucauauuauugcuuagg

SEQ ID NO: 953026 - RNA, 19 nt, Artificial Sequence
  Description of Artificial Sequence: Synthetic oligonucleotide
agauggacaucaaaugugc

SEQ ID NO: 953027 - RNA, 19 nt, Artificial Sequence
  Description of Artificial Sequence: Synthetic oligonucleotide
aagagaagcucacauuaga

SEQ ID NO: 953028 - RNA, 19 nt, Artificial Sequence
  Description of Artificial Sequence: Synthetic oligonucleotide
uuuagaguacgcaggaauc

SEQ ID NO: 953029 - RNA, 19 nt, Artificial Sequence
  Description of Artificial Sequence: Synthetic oligonucleotide
aaaacaauguccccucuuu

SEQ ID NO: 953030 - RNA, 19 nt, Artificial Sequence
  Description of Artificial Sequence: Synthetic oligonucleotide
gaagcgucgagucacacga

SEQ ID NO: 953031 - RNA, 19 nt, Artificial Sequence
  Description of Artificial Sequence: Synthetic oligonucleotide
acaacaucaauaaccacuc

SEQ ID NO: 953032 - RNA, 19 nt, Artificial Sequence
  Description of Artificial Sequence: Synthetic oligonucleotide
ugauucauauuauugcuua

SEQ ID NO: 953033 - RNA, 19 nt, Artificial Sequence
  Description of Artificial Sequence: Synthetic oligonucleotide
uaagagaagcucacauuag

SEQ ID NO: 953034 - RNA, 19 nt, Artificial Sequence
  Description of Artificial Sequence: Synthetic oligonucleotide
acaacaaugaagcgucgag

SEQ ID NO: 953035 - RNA, 19 nt, Artificial Sequence
  Description of Artificial Sequence: Synthetic oligonucleotide
acacaaaccaaaacagacc

SEQ ID NO: 953036 - RNA, 19 nt, Artificial Sequence
  Description of Artificial Sequence: Synthetic oligonucleotide
ugugccauaaaauccucga

SEQ ID NO: 953037 - RNA, 19 nt, Artificial Sequence
  Description of Artificial Sequence: Synthetic oligonucleotide
aaacagacccauccccaac

SEQ ID NO: 953038 - RNA, 19 nt, Artificial Sequence
  Description of Artificial Sequence: Synthetic oligonucleotide
caacccgagaaaauuaaag

SEQ ID NO: 953039 - RNA, 19 nt, Artificial Sequence
  Description of Artificial Sequence: Synthetic oligonucleotide
ucaugaauuuugccaggcg

SEQ ID NO: 953040 - RNA, 19 nt, Artificial Sequence
  Description of Artificial Sequence: Synthetic oligonucleotide
uucuuuugaucuucaaucu

SEQ ID NO: 953041 - RNA, 19 nt, Artificial Sequence
  Description of Artificial Sequence: Synthetic oligonucleotide
agucacacgagccuuucuc

SEQ ID NO: 953042 - RNA, 19 nt, Artificial Sequence
  Description of Artificial Sequence: Synthetic oligonucleotide
uguuguaguugagagcagg

SEQ ID NO: 953043 - RNA, 19 nt, Artificial Sequence
  Description of Artificial Sequence: Synthetic oligonucleotide
aucuaugcugaucccauag

SEQ ID NO: 953044 - RNA, 19 nt, Artificial Sequence
  Description of Artificial Sequence: Synthetic oligonucleotide
aaacccauacgaguaaaug

SEQ ID NO: 953045 - RNA, 19 nt, Artificial Sequence
  Description of Artificial Sequence: Synthetic oligonucleotide
uggaaaacccauacgagua

SEQ ID NO: 953046 - RNA, 19 nt, Artificial Sequence
  Description of Artificial Sequence: Synthetic oligonucleotide
uuucuauuaagagaagcuc

SEQ ID NO: 953047 - RNA, 19 nt, Artificial Sequence
  Description of Artificial Sequence: Synthetic oligonucleotide
ucgaugucaucuaugcuga

SEQ ID NO: 953048 - RNA, 19 nt, Artificial Sequence
  Description of Artificial Sequence: Synthetic oligonucleotide
aaccacgaaagaccugccg

SEQ ID NO: 953049 - RNA, 19 nt, Artificial Sequence
  Description of Artificial Sequence: Synthetic oligonucleotide
auggucaaccacgaaagac

SEQ ID NO: 953050 - RNA, 19 nt, Artificial Sequence
  Description of Artificial Sequence: Synthetic oligonucleotide
cuggcuaugguggaaaacc

SEQ ID NO: 953051 - RNA, 19 nt, Artificial Sequence
  Description of Artificial Sequence: Synthetic oligonucleotide
uuauugcuuaggaagcagu

SEQ ID NO: 953052 - RNA, 19 nt, Artificial Sequence
  Description of Artificial Sequence: Synthetic oligonucleotide
gauuuauggauguguuggc

SEQ ID NO: 953053 - RNA, 19 nt, Artificial Sequence
  Description of Artificial Sequence: Synthetic oligonucleotide
ucauauuauugcuuaggaa

SEQ ID NO: 953054 - RNA, 19 nt, Artificial Sequence
  Description of Artificial Sequence: Synthetic oligonucleotide
aacagacccauccccaaca

SEQ ID NO: 953055 - RNA, 19 nt, Artificial Sequence
  Description of Artificial Sequence: Synthetic oligonucleotide
cauacgaguaaaugauggc

SEQ ID NO: 953056 - RNA, 19 nt, Artificial Sequence
  Description of Artificial Sequence: Synthetic oligonucleotide
ucuucgguccucaugaauu

SEQ ID NO: 953057 - RNA, 19 nt, Artificial Sequence
  Description of Artificial Sequence: Synthetic oligonucleotide
ucuggauagcaaagcaggc

SEQ ID NO: 953058 - RNA, 19 nt, Artificial Sequence
  Description of Artificial Sequence: Synthetic oligonucleotide
acgaguaaaugauggcuuc

SEQ ID NO: 953059 - RNA, 19 nt, Artificial Sequence
  Description of Artificial Sequence: Synthetic oligonucleotide
ugcuuaggaagcaguauga

SEQ ID NO: 953060 - RNA, 19 nt, Artificial Sequence
  Description of Artificial Sequence: Synthetic oligonucleotide
uccuccagaaagauucuug

SEQ ID NO: 953061 - RNA, 19 nt, Artificial Sequence
  Description of Artificial Sequence: Synthetic oligonucleotide
uaacuuaaccaguucugga

SEQ ID NO: 953062 - RNA, 19 nt, Artificial Sequence
  Description of Artificial Sequence: Synthetic oligonucleotide
gaauaauaacccucuucac

SEQ ID NO: 953063 - RNA, 19 nt, Artificial Sequence
  Description of Artificial Sequence: Synthetic oligonucleotide
uaaugucacugcgugaugc

SEQ ID NO: 953064 - RNA, 19 nt, Artificial Sequence
  Description of Artificial Sequence: Synthetic oligonucleotide
aucacaaggcacguaugcc

SEQ ID NO: 953065 - RNA, 19 nt, Artificial Sequence
  Description of Artificial Sequence: Synthetic oligonucleotide
ucacaaggcacguaugccu

SEQ ID NO: 953066 - RNA, 19 nt, Artificial Sequence
  Description of Artificial Sequence: Synthetic oligonucleotide
ugaagcgucgagucacacg

SEQ ID NO: 953067 - RNA, 19 nt, Artificial Sequence
  Description of Artificial Sequence: Synthetic oligonucleotide
gacaacaucaauaaccacu

SEQ ID NO: 953068 - RNA, 19 nt, Artificial Sequence
  Description of Artificial Sequence: Synthetic oligonucleotide
aguguucauauacaauccu

SEQ ID NO: 953069 - RNA, 19 nt, Artificial Sequence
  Description of Artificial Sequence: Synthetic oligonucleotide
agcgucgagucacacgagc

SEQ ID NO: 953070 - RNA, 19 nt, Artificial Sequence
  Description of Artificial Sequence: Synthetic oligonucleotide
ugcgugaugccuguaagcc

SEQ ID NO: 953071 - RNA, 19 nt, Artificial Sequence
  Description of Artificial Sequence: Synthetic oligonucleotide
aaaaugccuggauucuccu

SEQ ID NO: 953072 - RNA, 19 nt, Artificial Sequence
  Description of Artificial Sequence: Synthetic oligonucleotide
cuaugcugaucccauagug

SEQ ID NO: 953073 - RNA, 19 nt, Artificial Sequence
  Description of Artificial Sequence: Synthetic oligonucleotide
auacgaguaaaugauggcu

SEQ ID NO: 953074 - RNA, 19 nt, Artificial Sequence
  Description of Artificial Sequence: Synthetic oligonucleotide
aauaaccacuccgugggca

SEQ ID NO: 953075 - RNA, 19 nt, Artificial Sequence
  Description of Artificial Sequence: Synthetic oligonucleotide
ccauacgaguaaaugaugg

SEQ ID NO: 953076 - RNA, 19 nt, Artificial Sequence
  Description of Artificial Sequence: Synthetic oligonucleotide
gaagcucacauuagaaaug

SEQ ID NO: 953077 - RNA, 19 nt, Artificial Sequence
  Description of Artificial Sequence: Synthetic oligonucleotide
ugugcuugaacaacuuaau

SEQ ID NO: 953078 - RNA, 19 nt, Artificial Sequence
  Description of Artificial Sequence: Synthetic oligonucleotide
acaacccugaugcuuggag

SEQ ID NO: 953079 - RNA, 19 nt, Artificial Sequence
  Description of Artificial Sequence: Synthetic oligonucleotide
cagaauaauaacccucuuc

SEQ ID NO: 953080 - RNA, 19 nt, Artificial Sequence
  Description of Artificial Sequence: Synthetic oligonucleotide
cuuuagagaugcuagagcu

SEQ ID NO: 953081 - RNA, 19 nt, Artificial Sequence
  Description of Artificial Sequence: Synthetic oligonucleotide
uacgaguaaaugauggcuu

SEQ ID NO: 953082 - RNA, 19 nt, Artificial Sequence
  Description of Artificial Sequence: Synthetic oligonucleotide
agaggcgagagcguucucc

SEQ ID NO: 953083 - RNA, 19 nt, Artificial Sequence
  Description of Artificial Sequence: Synthetic oligonucleotide
aacgauguuguaguugaga

SEQ ID NO: 953084 - RNA, 19 nt, Artificial Sequence
  Description of Artificial Sequence: Synthetic oligonucleotide
gguuccaguguucauauac

SEQ ID NO: 953085 - RNA, 19 nt, Artificial Sequence
  Description of Artificial Sequence: Synthetic oligonucleotide
uauugcuuaggaagcagua

SEQ ID NO: 953086 - RNA, 19 nt, Artificial Sequence
  Description of Artificial Sequence: Synthetic oligonucleotide
ucaucuaugcugaucccau

SEQ ID NO: 953087 - RNA, 19 nt, Artificial Sequence
  Description of Artificial Sequence: Synthetic oligonucleotide
gaaacaccgggcugcaccc

SEQ ID NO: 953088 - RNA, 19 nt, Artificial Sequence
  Description of Artificial Sequence: Synthetic oligonucleotide
ucgaguuccacagguaccc

SEQ ID NO: 953089 - RNA, 19 nt, Artificial Sequence
  Description of Artificial Sequence: Synthetic oligonucleotide
gucacacgagccuuucucg

SEQ ID NO: 953090 - RNA, 19 nt, Artificial Sequence
  Description of Artificial Sequence: Synthetic oligonucleotide
aucgcacuggcuauggugg

SEQ ID NO: 953091 - RNA, 19 nt, Artificial Sequence
  Description of Artificial Sequence: Synthetic oligonucleotide
aaaugccuuguagagauuu

SEQ ID NO: 953092 - RNA, 19 nt, Artificial Sequence
  Description of Artificial Sequence: Synthetic oligonucleotide
augccuguaagccuuucug

SEQ ID NO: 953093 - RNA, 19 nt, Artificial Sequence
  Description of Artificial Sequence: Synthetic oligonucleotide
auaaccacuccgugggcag

SEQ ID NO: 953094 - RNA, 19 nt, Artificial Sequence
  Description of Artificial Sequence: Synthetic oligonucleotide
gagagcguucuccauguug

SEQ ID NO: 953095 - RNA, 19 nt, Artificial Sequence
  Description of Artificial Sequence: Synthetic oligonucleotide
ucgguccucaugaauuuug

SEQ ID NO: 953096 - RNA, 19 nt, Artificial Sequence
  Description of Artificial Sequence: Synthetic oligonucleotide
ugaucuguauuuggggacc

SEQ ID NO: 953097 - RNA, 19 nt, Artificial Sequence
  Description of Artificial Sequence: Synthetic oligonucleotide
caugaucuguauuugggga

SEQ ID NO: 953098 - RNA, 19 nt, Artificial Sequence
  Description of Artificial Sequence: Synthetic oligonucleotide
ucuaugcugaucccauagu

SEQ ID NO: 953099 - RNA, 19 nt, Artificial Sequence
  Description of Artificial Sequence: Synthetic oligonucleotide
caaggacuccaaacgaaag

SEQ ID NO: 953100 - RNA, 19 nt, Artificial Sequence
  Description of Artificial Sequence: Synthetic oligonucleotide
auuuguacuuuaacuuaac

SEQ ID NO: 953101 - RNA, 19 nt, Artificial Sequence
  Description of Artificial Sequence: Synthetic oligonucleotide
ugccuuguagagauuuaug

SEQ ID NO: 953102 - RNA, 19 nt, Artificial Sequence
  Description of Artificial Sequence: Synthetic oligonucleotide
uggcuaugguggaaaaccc

SEQ ID NO: 953103 - RNA, 19 nt, Artificial Sequence
  Description of Artificial Sequence: Synthetic oligonucleotide
ucuuguucuuucagcaguc

SEQ ID NO: 953104 - RNA, 19 nt, Artificial Sequence
  Description of Artificial Sequence: Synthetic oligonucleotide
cccgagaaaauuaaaggag

SEQ ID NO: 953105 - RNA, 19 nt, Artificial Sequence
  Description of Artificial Sequence: Synthetic oligonucleotide
ugucacugcgugaugccug

SEQ ID NO: 953106 - RNA, 19 nt, Artificial Sequence
  Description of Artificial Sequence: Synthetic oligonucleotide
auaacccucuucacaaaac

SEQ ID NO: 953107 - RNA, 19 nt, Artificial Sequence
  Description of Artificial Sequence: Synthetic oligonucleotide
acgaaagaccugccgcagc

SEQ ID NO: 953108 - RNA, 19 nt, Artificial Sequence
  Description of Artificial Sequence: Synthetic oligonucleotide
uacccuuggccagagaggc

SEQ ID NO: 953109 - RNA, 19 nt, Artificial Sequence
  Description of Artificial Sequence: Synthetic oligonucleotide
acugcgugaugccuguaag

SEQ ID NO: 953110 - RNA, 19 nt, Artificial Sequence
  Description of Artificial Sequence: Synthetic oligonucleotide
auaauguuugauucauauu

SEQ ID NO: 953111 - RNA, 19 nt, Artificial Sequence
  Description of Artificial Sequence: Synthetic oligonucleotide
caaugaagcgucgagucac

SEQ ID NO: 953112 - RNA, 19 nt, Artificial Sequence
  Description of Artificial Sequence: Synthetic oligonucleotide
uaggaagcaguaugaauau

SEQ ID NO: 953113 - RNA, 19 nt, Artificial Sequence
  Description of Artificial Sequence: Synthetic oligonucleotide
caaguagcgcgccugaguc

SEQ ID NO: 953114 - RNA, 19 nt, Artificial Sequence
  Description of Artificial Sequence: Synthetic oligonucleotide
aacaggaccauagcccuca

SEQ ID NO: 953115 - RNA, 19 nt, Artificial Sequence
  Description of Artificial Sequence: Synthetic oligonucleotide
gggaccagaauaauaaccc

SEQ ID NO: 953116 - RNA, 19 nt, Artificial Sequence
  Description of Artificial Sequence: Synthetic oligonucleotide
auuaaaggaggcaaaguuu

SEQ ID NO: 953117 - RNA, 19 nt, Artificial Sequence
  Description of Artificial Sequence: Synthetic oligonucleotide
accagaauaauaacccucu

SEQ ID NO: 953118 - RNA, 19 nt, Artificial Sequence
  Description of Artificial Sequence: Synthetic oligonucleotide
ugcucccaaacaaaaccac

SEQ ID NO: 953119 - RNA, 19 nt, Artificial Sequence
  Description of Artificial Sequence: Synthetic oligonucleotide
gugcuugaacaacuuaaug

SEQ ID NO: 953120 - RNA, 19 nt, Artificial Sequence
  Description of Artificial Sequence: Synthetic oligonucleotide
gaccagaauaauaacccuc

SEQ ID NO: 953121 - RNA, 19 nt, Artificial Sequence
  Description of Artificial Sequence: Synthetic oligonucleotide
caucaauaaccacuccgug

SEQ ID NO: 953122 - RNA, 19 nt, Artificial Sequence
  Description of Artificial Sequence: Synthetic oligonucleotide
cucgaguuccacagguacc

SEQ ID NO: 953123 - RNA, 19 nt, Artificial Sequence
  Description of Artificial Sequence: Synthetic oligonucleotide
uagaguacgcaggaaucgc

SEQ ID NO: 953124 - RNA, 19 nt, Artificial Sequence
  Description of Artificial Sequence: Synthetic oligonucleotide
gaaagauucuugcuuuaua

SEQ ID NO: 953125 - RNA, 19 nt, Artificial Sequence
  Description of Artificial Sequence: Synthetic oligonucleotide
aucgcaagccuuacacugc

SEQ ID NO: 953126 - RNA, 19 nt, Artificial Sequence
  Description of Artificial Sequence: Synthetic oligonucleotide
uacgcaggaaucgcacugg

SEQ ID NO: 953127 - RNA, 19 nt, Artificial Sequence
  Description of Artificial Sequence: Synthetic oligonucleotide
guacgcaggaaucgcacug

SEQ ID NO: 953128 - RNA, 19 nt, Artificial Sequence
  Description of Artificial Sequence: Synthetic oligonucleotide
uggcaaguaucgcaagccu

SEQ ID NO: 953129 - RNA, 19 nt, Artificial Sequence
  Description of Artificial Sequence: Synthetic oligonucleotide
ucccauagugcuccgugac

SEQ ID NO: 953130 - RNA, 19 nt, Artificial Sequence
  Description of Artificial Sequence: Synthetic oligonucleotide
cucaugaauuuugccaggc

SEQ ID NO: 953131 - RNA, 19 nt, Artificial Sequence
  Description of Artificial Sequence: Synthetic oligonucleotide
aaaccgacuagagaauaua

SEQ ID NO: 953132 - RNA, 19 nt, Artificial Sequence
  Description of Artificial Sequence: Synthetic oligonucleotide
cccaacaggaccauagccc

SEQ ID NO: 953133 - RNA, 19 nt, Artificial Sequence
  Description of Artificial Sequence: Synthetic oligonucleotide
aaguaucgcaagccuuaca

SEQ ID NO: 953134 - RNA, 19 nt, Artificial Sequence
  Description of Artificial Sequence: Synthetic oligonucleotide
acgagccuuucucggauuc

SEQ ID NO: 953135 - RNA, 19 nt, Artificial Sequence
  Description of Artificial Sequence: Synthetic oligonucleotide
auagcaaagcaggcugcac

SEQ ID NO: 953136 - RNA, 19 nt, Artificial Sequence
  Description of Artificial Sequence: Synthetic oligonucleotide
acuuaaugucacugcguga

SEQ ID NO: 953137 - RNA, 19 nt, Artificial Sequence
  Description of Artificial Sequence: Synthetic oligonucleotide
aaaaccgacuagagaauau

SEQ ID NO: 953138 - RNA, 19 nt, Artificial Sequence
  Description of Artificial Sequence: Synthetic oligonucleotide
acgcaggaaucgcacuggc

SEQ ID NO: 953139 - RNA, 19 nt, Artificial Sequence
  Description of Artificial Sequence: Synthetic oligonucleotide
ccaaaacagacccaucccc

SEQ ID NO: 953140 - RNA, 19 nt, Artificial Sequence
  Description of Artificial Sequence: Synthetic oligonucleotide
gacuccacgcccgugcucc

SEQ ID NO: 953141 - RNA, 19 nt, Artificial Sequence
  Description of Artificial Sequence: Synthetic oligonucleotide
ugcacccuacagcagcaca

SEQ ID NO: 953142 - RNA, 19 nt, Artificial Sequence
  Description of Artificial Sequence: Synthetic oligonucleotide
cauagugcuccgugacucc

SEQ ID NO: 953143 - RNA, 19 nt, Artificial Sequence
  Description of Artificial Sequence: Synthetic oligonucleotide
ugucaucuaugcugauccc

SEQ ID NO: 953144 - RNA, 19 nt, Artificial Sequence
  Description of Artificial Sequence: Synthetic oligonucleotide
aaccgacuagagaauauau

SEQ ID NO: 953145 - RNA, 19 nt, Artificial Sequence
  Description of Artificial Sequence: Synthetic oligonucleotide
ugacaacaucaauaaccac

SEQ ID NO: 953146 - RNA, 19 nt, Artificial Sequence
  Description of Artificial Sequence: Synthetic oligonucleotide
uccccucuuuuagaguacg

SEQ ID NO: 953147 - RNA, 19 nt, Artificial Sequence
  Description of Artificial Sequence: Synthetic oligonucleotide
cugcgugaugccuguaagc

SEQ ID NO: 953148 - RNA, 19 nt, Artificial Sequence
  Description of Artificial Sequence: Synthetic oligonucleotide
cagugaaugaccauuuccu

SEQ ID NO: 953149 - RNA, 19 nt, Artificial Sequence
  Description of Artificial Sequence: Synthetic oligonucleotide
caguucuaugcucccaaac

SEQ ID NO: 953150 - RNA, 19 nt, Artificial Sequence
  Description of Artificial Sequence: Synthetic oligonucleotide
ucgcaagccuuacacugcu

SEQ ID NO: 953151 - RNA, 19 nt, Artificial Sequence
  Description of Artificial Sequence: Synthetic oligonucleotide
acccauacgaguaaaugau

SEQ ID NO: 953152 - RNA, 19 nt, Artificial Sequence
  Description of Artificial Sequence: Synthetic oligonucleotide
accacaacccugaugcuug

SEQ ID NO: 953153 - RNA, 19 nt, Artificial Sequence
  Description of Artificial Sequence: Synthetic oligonucleotide
ccuccagaaagauucuugc

SEQ ID NO: 953154 - RNA, 19 nt, Artificial Sequence
  Description of Artificial Sequence: Synthetic oligonucleotide
caccauacuucuuuagaga

SEQ ID NO: 953155 - RNA, 19 nt, Artificial Sequence
  Description of Artificial Sequence: Synthetic oligonucleotide
auccccaacaggaccauag

SEQ ID NO: 953156 - RNA, 19 nt, Artificial Sequence
  Description of Artificial Sequence: Synthetic oligonucleotide
uaauaacccucuucacaaa

SEQ ID NO: 953157 - RNA, 19 nt, Artificial Sequence
  Description of Artificial Sequence: Synthetic oligonucleotide
acagacccauccccaacag

SEQ ID NO: 953158 - RNA, 19 nt, Artificial Sequence
  Description of Artificial Sequence: Synthetic oligonucleotide
cucguucaugcagugaaug

SEQ ID NO: 953159 - RNA, 19 nt, Artificial Sequence
  Description of Artificial Sequence: Synthetic oligonucleotide
caaucacaaggcacguaug

SEQ ID NO: 953160 - RNA, 19 nt, Artificial Sequence
  Description of Artificial Sequence: Synthetic oligonucleotide
aaaacccauacgaguaaau

SEQ ID NO: 953161 - RNA, 19 nt, Artificial Sequence
  Description of Artificial Sequence: Synthetic oligonucleotide
cgagaaaauuaaaggaggc

SEQ ID NO: 953162 - RNA, 19 nt, Artificial Sequence
  Description of Artificial Sequence: Synthetic oligonucleotide
uguccaaguagcgcgccug

SEQ ID NO: 953163 - RNA, 19 nt, Artificial Sequence
  Description of Artificial Sequence: Synthetic oligonucleotide
aaguagcgcgccugaguca

SEQ ID NO: 953164 - RNA, 19 nt, Artificial Sequence
  Description of Artificial Sequence: Synthetic oligonucleotide
uucuucgguccucaugaau

SEQ ID NO: 953165 - RNA, 19 nt, Artificial Sequence
  Description of Artificial Sequence: Synthetic oligonucleotide
auugcuuaggaagcaguau

SEQ ID NO: 953166 - RNA, 19 nt, Artificial Sequence
  Description of Artificial Sequence: Synthetic oligonucleotide
gaguuccacagguacccac

SEQ ID NO: 953167 - RNA, 19 nt, Artificial Sequence
  Description of Artificial Sequence: Synthetic oligonucleotide
auacccagggcaugaucug

SEQ ID NO: 953168 - RNA, 19 nt, Artificial Sequence
  Description of Artificial Sequence: Synthetic oligonucleotide
guacccuuggccagagagg

SEQ ID NO: 953169 - RNA, 19 nt, Artificial Sequence
  Description of Artificial Sequence: Synthetic oligonucleotide
ccgacuagagaauauauaa

SEQ ID NO: 953170 - RNA, 19 nt, Artificial Sequence
  Description of Artificial Sequence: Synthetic oligonucleotide
acgguuccaguguucauau

SEQ ID NO: 953171 - RNA, 19 nt, Artificial Sequence
  Description of Artificial Sequence: Synthetic oligonucleotide
gauggucaaccacgaaaga

SEQ ID NO: 953172 - RNA, 19 nt, Artificial Sequence
  Description of Artificial Sequence: Synthetic oligonucleotide
uacagcucgaaggucacuu

SEQ ID NO: 953173 - RNA, 19 nt, Artificial Sequence
  Description of Artificial Sequence: Synthetic oligonucleotide
ccuacagcagcacagccug

SEQ ID NO: 953174 - RNA, 19 nt, Artificial Sequence
  Description of Artificial Sequence: Synthetic oligonucleotide
agcgcgccugagucaaggc

SEQ ID NO: 953175 - RNA, 19 nt, Artificial Sequence
  Description of Artificial Sequence: Synthetic oligonucleotide
cuccgugacuccacgcccg

SEQ ID NO: 953176 - RNA, 19 nt, Artificial Sequence
  Description of Artificial Sequence: Synthetic oligonucleotide
ggaaacgauguuguaguug

SEQ ID NO: 953177 - RNA, 19 nt, Artificial Sequence
  Description of Artificial Sequence: Synthetic oligonucleotide
cugagucaaggcgaugccc

SEQ ID NO: 953178 - RNA, 19 nt, Artificial Sequence
  Description of Artificial Sequence: Synthetic oligonucleotide
uccuggagguuuauuucau

SEQ ID NO: 953179 - RNA, 19 nt, Artificial Sequence
  Description of Artificial Sequence: Synthetic oligonucleotide
agaaagauucuugcuuuau

SEQ ID NO: 953180 - RNA, 19 nt, Artificial Sequence
  Description of Artificial Sequence: Synthetic oligonucleotide
acccucuucacaaaaccga

SEQ ID NO: 953181 - RNA, 19 nt, Artificial Sequence
  Description of Artificial Sequence: Synthetic oligonucleotide
aaugaagcgucgagucaca

SEQ ID NO: 953182 - RNA, 19 nt, Artificial Sequence
  Description of Artificial Sequence: Synthetic oligonucleotide
auagcccucacagcagcag

SEQ ID NO: 953183 - RNA, 19 nt, Artificial Sequence
  Description of Artificial Sequence: Synthetic oligonucleotide
gaccugccgcagcagaagc

SEQ ID NO: 953184 - RNA, 19 nt, Artificial Sequence
  Description of Artificial Sequence: Synthetic oligonucleotide
cuuaaugucacugcgugau

SEQ ID NO: 953185 - RNA, 19 nt, Artificial Sequence
  Description of Artificial Sequence: Synthetic oligonucleotide
gcucacauuagaaaugaca

SEQ ID NO: 953186 - RNA, 19 nt, Artificial Sequence
  Description of Artificial Sequence: Synthetic oligonucleotide
uagagaugcuagagcugca

SEQ ID NO: 953187 - RNA, 19 nt, Artificial Sequence
  Description of Artificial Sequence: Synthetic oligonucleotide
aggucacuuucagagcauc

SEQ ID NO: 953188 - RNA, 19 nt, Artificial Sequence
  Description of Artificial Sequence: Synthetic oligonucleotide
gaaaacccauacgaguaaa

SEQ ID NO: 953189 - RNA, 19 nt, Artificial Sequence
  Description of Artificial Sequence: Synthetic oligonucleotide
gaguacgcaggaaucgcac

SEQ ID NO: 953190 - RNA, 19 nt, Artificial Sequence
  Description of Artificial Sequence: Synthetic oligonucleotide
gggcaugaucuguauuugg

SEQ ID NO: 953191 - RNA, 19 nt, Artificial Sequence
  Description of Artificial Sequence: Synthetic oligonucleotide
ggcacguaugccuucuaug

SEQ ID NO: 953192 - RNA, 19 nt, Artificial Sequence
  Description of Artificial Sequence: Synthetic oligonucleotide
auaaaauccucgaguucca

SEQ ID NO: 953193 - RNA, 19 nt, Artificial Sequence
  Description of Artificial Sequence: Synthetic oligonucleotide
aggcacuucucuuccuugu

SEQ ID NO: 953194 - RNA, 19 nt, Artificial Sequence
  Description of Artificial Sequence: Synthetic oligonucleotide
cccgacagaggcgagagcg

SEQ ID NO: 953195 - RNA, 19 nt, Artificial Sequence
  Description of Artificial Sequence: Synthetic oligonucleotide
guacccacaccauacuucu

SEQ ID NO: 953196 - RNA, 19 nt, Artificial Sequence
  Description of Artificial Sequence: Synthetic oligonucleotide
guuccaguguucauauaca

SEQ ID NO: 953197 - RNA, 19 nt, Artificial Sequence
  Description of Artificial Sequence: Synthetic oligonucleotide
acagaggcgagagcguucu

SEQ ID NO: 953198 - RNA, 19 nt, Artificial Sequence
  Description of Artificial Sequence: Synthetic oligonucleotide
acgauguuguggguuggag

SEQ ID NO: 953199 - RNA, 19 nt, Artificial Sequence
  Description of Artificial Sequence: Synthetic oligonucleotide
acgcccgugcuccccaagg

SEQ ID NO: 953200 - RNA, 19 nt, Artificial Sequence
  Description of Artificial Sequence: Synthetic oligonucleotide
caauaaccacuccgugggc

SEQ ID NO: 953201 - RNA, 19 nt, Artificial Sequence
  Description of Artificial Sequence: Synthetic oligonucleotide
augaagcgucgagucacac

SEQ ID NO: 953202 - RNA, 19 nt, Artificial Sequence
  Description of Artificial Sequence: Synthetic oligonucleotide
agggcaugaucuguauuug

SEQ ID NO: 953203 - RNA, 19 nt, Artificial Sequence
  Description of Artificial Sequence: Synthetic oligonucleotide
uuguccaaguagcgcgccu

SEQ ID NO: 953204 - RNA, 19 nt, Artificial Sequence
  Description of Artificial Sequence: Synthetic oligonucleotide
cugcccgcaggugaugugg

SEQ ID NO: 953205 - RNA, 19 nt, Artificial Sequence
  Description of Artificial Sequence: Synthetic oligonucleotide
caccgugaccacaacccug

SEQ ID NO: 953206 - RNA, 19 nt, Artificial Sequence
  Description of Artificial Sequence: Synthetic oligonucleotide
gcaggaaucgcacuggcua

SEQ ID NO: 953207 - RNA, 19 nt, Artificial Sequence
  Description of Artificial Sequence: Synthetic oligonucleotide
aguagcgcgccugagucaa

SEQ ID NO: 953208 - RNA, 19 nt, Artificial Sequence
  Description of Artificial Sequence: Synthetic oligonucleotide
cuuaggaagcaguaugaau

SEQ ID NO: 953209 - RNA, 19 nt, Artificial Sequence
  Description of Artificial Sequence: Synthetic oligonucleotide
acaaaaccgacuagagaau

SEQ ID NO: 953210 - RNA, 19 nt, Artificial Sequence
  Description of Artificial Sequence: Synthetic oligonucleotide
acacgagccuuucucggau

SEQ ID NO: 953211 - RNA, 19 nt, Artificial Sequence
  Description of Artificial Sequence: Synthetic oligonucleotide
ucugaggcaucagcaauuu

SEQ ID NO: 953212 - RNA, 19 nt, Artificial Sequence
  Description of Artificial Sequence: Synthetic oligonucleotide
uucucccgggacccagugc

SEQ ID NO: 953213 - RNA, 19 nt, Artificial Sequence
  Description of Artificial Sequence: Synthetic oligonucleotide
caaccacgaaagaccugcc

SEQ ID NO: 953214 - RNA, 19 nt, Artificial Sequence
  Description of Artificial Sequence: Synthetic oligonucleotide
ggaggugaagugcugggga

SEQ ID NO: 953215 - RNA, 19 nt, Artificial Sequence
  Description of Artificial Sequence: Synthetic oligonucleotide
cagagaggcgcugaugguc

SEQ ID NO: 953216 - RNA, 19 nt, Artificial Sequence
  Description of Artificial Sequence: Synthetic oligonucleotide
gaugcuagagcugcagccu

SEQ ID NO: 953217 - RNA, 19 nt, Artificial Sequence
  Description of Artificial Sequence: Synthetic oligonucleotide
uuggaggcccggaaacgau

SEQ ID NO: 953218 - RNA, 19 nt, Artificial Sequence
  Description of Artificial Sequence: Synthetic oligonucleotide
gagcguucuccauguuggc

SEQ ID NO: 953219 - RNA, 19 nt, Artificial Sequence
  Description of Artificial Sequence: Synthetic oligonucleotide
aggcccggaaacgauguug

SEQ ID NO: 953220 - RNA, 19 nt, Artificial Sequence
  Description of Artificial Sequence: Synthetic oligonucleotide
ggaaucgcacuggcuaugg

SEQ ID NO: 953221 - RNA, 19 nt, Artificial Sequence
  Description of Artificial Sequence: Synthetic oligonucleotide
agaguacgcaggaaucgca

SEQ ID NO: 953222 - RNA, 19 nt, Artificial Sequence
  Description of Artificial Sequence: Synthetic oligonucleotide
cagcucgaaggucacuuuc

SEQ ID NO: 953223 - RNA, 19 nt, Artificial Sequence
  Description of Artificial Sequence: Synthetic oligonucleotide
agcaacccgagaaaauuaa

SEQ ID NO: 953224 - RNA, 19 nt, Artificial Sequence
  Description of Artificial Sequence: Synthetic oligonucleotide
gacgguuccaguguucaua

SEQ ID NO: 953225 - RNA, 19 nt, Artificial Sequence
  Description of Artificial Sequence: Synthetic oligonucleotide
agcucacauuagaaaugac

SEQ ID NO: 953226 - RNA, 19 nt, Artificial Sequence
  Description of Artificial Sequence: Synthetic oligonucleotide
aacaccgggcugcacccua

SEQ ID NO: 953227 - RNA, 19 nt, Artificial Sequence
  Description of Artificial Sequence: Synthetic oligonucleotide
uccaaguagcgcgccugag

SEQ ID NO: 953228 - RNA, 19 nt, Artificial Sequence
  Description of Artificial Sequence: Synthetic oligonucleotide
acaguucuaugcucccaaa

SEQ ID NO: 953229 - RNA, 19 nt, Artificial Sequence
  Description of Artificial Sequence: Synthetic oligonucleotide
caaguaucgcaagccuuac

SEQ ID NO: 953230 - RNA, 19 nt, Artificial Sequence
  Description of Artificial Sequence: Synthetic oligonucleotide
accgugaccacaacccuga

SEQ ID NO: 953231 - RNA, 19 nt, Artificial Sequence
  Description of Artificial Sequence: Synthetic oligonucleotide
caauguccccucuuuuaga

SEQ ID NO: 953232 - RNA, 19 nt, Artificial Sequence
  Description of Artificial Sequence: Synthetic oligonucleotide
agguacccacaccauacuu

SEQ ID NO: 953233 - RNA, 19 nt, Artificial Sequence
  Description of Artificial Sequence: Synthetic oligonucleotide
gcacugaucaggucgaugu

SEQ ID NO: 953234 - RNA, 19 nt, Artificial Sequence
  Description of Artificial Sequence: Synthetic oligonucleotide
caggugauguggcaggaaa

SEQ ID NO: 953235 - RNA, 19 nt, Artificial Sequence
  Description of Artificial Sequence: Synthetic oligonucleotide
cacgaaagaccugccgcag

SEQ ID NO: 953236 - RNA, 19 nt, Artificial Sequence
  Description of Artificial Sequence: Synthetic oligonucleotide
gccugagucaaggcgaugc

SEQ ID NO: 953237 - RNA, 19 nt, Artificial Sequence
  Description of Artificial Sequence: Synthetic oligonucleotide
ggucagcuacaucauugug

SEQ ID NO: 953238 - RNA, 19 nt, Artificial Sequence
  Description of Artificial Sequence: Synthetic oligonucleotide
gguacccacaccauacuuc

SEQ ID NO: 953239 - RNA, 19 nt, Artificial Sequence
  Description of Artificial Sequence: Synthetic oligonucleotide
auguccccucuuuuagagu

SEQ ID NO: 953240 - RNA, 19 nt, Artificial Sequence
  Description of Artificial Sequence: Synthetic oligonucleotide
auagugcuccgugacucca

SEQ ID NO: 953241 - RNA, 19 nt, Artificial Sequence
  Description of Artificial Sequence: Synthetic oligonucleotide
cacaguucuaugcucccaa

SEQ ID NO: 953242 - RNA, 19 nt, Artificial Sequence
  Description of Artificial Sequence: Synthetic oligonucleotide
ccucgaguuccacagguac

SEQ ID NO: 953243 - RNA, 19 nt, Artificial Sequence
  Description of Artificial Sequence: Synthetic oligonucleotide
ccucaugaauuuugccagg

SEQ ID NO: 953244 - RNA, 19 nt, Artificial Sequence
  Description of Artificial Sequence: Synthetic oligonucleotide
gacccagugcucucuucca

SEQ ID NO: 953245 - RNA, 19 nt, Artificial Sequence
  Description of Artificial Sequence: Synthetic oligonucleotide
cagaaaugccuuguagaga

SEQ ID NO: 953246 - RNA, 19 nt, Artificial Sequence
  Description of Artificial Sequence: Synthetic oligonucleotide
gaucuguauuuggggacca

SEQ ID NO: 953247 - RNA, 19 nt, Artificial Sequence
  Description of Artificial Sequence: Synthetic oligonucleotide
caacuuaaugucacugcgu

SEQ ID NO: 953248 - RNA, 19 nt, Artificial Sequence
  Description of Artificial Sequence: Synthetic oligonucleotide
acagacgguuccaguguuc

SEQ ID NO: 953249 - RNA, 19 nt, Artificial Sequence
  Description of Artificial Sequence: Synthetic oligonucleotide
uacccagggcaugaucugu

SEQ ID NO: 953250 - RNA, 19 nt, Artificial Sequence
  Description of Artificial Sequence: Synthetic oligonucleotide
uggacgcagcccucuccag

SEQ ID NO: 953251 - RNA, 19 nt, Artificial Sequence
  Description of Artificial Sequence: Synthetic oligonucleotide
uccucgaguuccacaggua

SEQ ID NO: 953252 - RNA, 19 nt, Artificial Sequence
  Description of Artificial Sequence: Synthetic oligonucleotide
caguaugaauauuuucuau

SEQ ID NO: 953253 - RNA, 19 nt, Artificial Sequence
  Description of Artificial Sequence: Synthetic oligonucleotide
augucacugcgugaugccu

SEQ ID NO: 953254 - RNA, 19 nt, Artificial Sequence
  Description of Artificial Sequence: Synthetic oligonucleotide
accgacuagagaauauaua

SEQ ID NO: 953255 - RNA, 19 nt, Artificial Sequence
  Description of Artificial Sequence: Synthetic oligonucleotide
aggaaucgcacuggcuaug

SEQ ID NO: 953256 - RNA, 19 nt, Artificial Sequence
  Description of Artificial Sequence: Synthetic oligonucleotide
ucgagucacacgagccuuu

SEQ ID NO: 953257 - RNA, 19 nt, Artificial Sequence
  Description of Artificial Sequence: Synthetic oligonucleotide
cccggaaacgauguuguag

SEQ ID NO: 953258 - RNA, 19 nt, Artificial Sequence
  Description of Artificial Sequence: Synthetic oligonucleotide
cugaucccauagugcuccg

SEQ ID NO: 953259 - RNA, 19 nt, Artificial Sequence
  Description of Artificial Sequence: Synthetic oligonucleotide
uguggguuggaggcccgga

SEQ ID NO: 953260 - RNA, 19 nt, Artificial Sequence
  Description of Artificial Sequence: Synthetic oligonucleotide
gcacguaugccuucuaugu

SEQ ID NO: 953261 - RNA, 19 nt, Artificial Sequence
  Description of Artificial Sequence: Synthetic oligonucleotide
guaucgcaagccuuacacu

SEQ ID NO: 953262 - RNA, 19 nt, Artificial Sequence
  Description of Artificial Sequence: Synthetic oligonucleotide
caaaaccgacuagagaaua

SEQ ID NO: 953263 - RNA, 19 nt, Artificial Sequence
  Description of Artificial Sequence: Synthetic oligonucleotide
cacaacaaugaagcgucga

SEQ ID NO: 953264 - RNA, 19 nt, Artificial Sequence
  Description of Artificial Sequence: Synthetic oligonucleotide
aggcuuuccuccagaaaga

SEQ ID NO: 953265 - RNA, 19 nt, Artificial Sequence
  Description of Artificial Sequence: Synthetic oligonucleotide
cccauacgaguaaaugaug

SEQ ID NO: 953266 - RNA, 19 nt, Artificial Sequence
  Description of Artificial Sequence: Synthetic oligonucleotide
uaaccacuccgugggcagc

SEQ ID NO: 953267 - RNA, 19 nt, Artificial Sequence
  Description of Artificial Sequence: Synthetic oligonucleotide
ucgcacuggcuauggugga

SEQ ID NO: 953268 - RNA, 19 nt, Artificial Sequence
  Description of Artificial Sequence: Synthetic oligonucleotide
cuaugguggaaaacccaua

SEQ ID NO: 953269 - RNA, 19 nt, Artificial Sequence
  Description of Artificial Sequence: Synthetic oligonucleotide
cacacgagccuuucucgga

SEQ ID NO: 953270 - RNA, 19 nt, Artificial Sequence
  Description of Artificial Sequence: Synthetic oligonucleotide
ugcccucguucaugcagug

SEQ ID NO: 953271 - RNA, 19 nt, Artificial Sequence
  Description of Artificial Sequence: Synthetic oligonucleotide
cacuuucagagcauccugu

SEQ ID NO: 953272 - RNA, 19 nt, Artificial Sequence
  Description of Artificial Sequence: Synthetic oligonucleotide
gcacccuacagcagcacag

SEQ ID NO: 953273 - RNA, 19 nt, Artificial Sequence
  Description of Artificial Sequence: Synthetic oligonucleotide
gcgcgccugagucaaggcg

SEQ ID NO: 953274 - RNA, 19 nt, Artificial Sequence
  Description of Artificial Sequence: Synthetic oligonucleotide
uccgugacuccacgcccgu

SEQ ID NO: 953275 - RNA, 19 nt, Artificial Sequence
  Description of Artificial Sequence: Synthetic oligonucleotide
cagcaacccgagaaaauua

SEQ ID NO: 953276 - RNA, 19 nt, Artificial Sequence
  Description of Artificial Sequence: Synthetic oligonucleotide
ccuuguccaaguagcgcgc

SEQ ID NO: 953277 - RNA, 19 nt, Artificial Sequence
  Description of Artificial Sequence: Synthetic oligonucleotide
gccauaaaauccucgaguu

SEQ ID NO: 953278 - RNA, 19 nt, Artificial Sequence
  Description of Artificial Sequence: Synthetic oligonucleotide
aagcgucgagucacacgag

SEQ ID NO: 953279 - RNA, 19 nt, Artificial Sequence
  Description of Artificial Sequence: Synthetic oligonucleotide
caacaggaccauagcccuc

SEQ ID NO: 953280 - RNA, 19 nt, Artificial Sequence
  Description of Artificial Sequence: Synthetic oligonucleotide
gguggacgcagcccucucc

SEQ ID NO: 953281 - RNA, 19 nt, Artificial Sequence
  Description of Artificial Sequence: Synthetic oligonucleotide
gacagaggcgagagcguuc

SEQ ID NO: 953282 - RNA, 19 nt, Artificial Sequence
  Description of Artificial Sequence: Synthetic oligonucleotide
ugaucccauagugcuccgu

SEQ ID NO: 953283 - RNA, 19 nt, Artificial Sequence
  Description of Artificial Sequence: Synthetic oligonucleotide
gaauuuugccaggcgcucu

SEQ ID NO: 953284 - RNA, 19 nt, Artificial Sequence
  Description of Artificial Sequence: Synthetic oligonucleotide
gcuccgugacuccacgccc

SEQ ID NO: 953285 - RNA, 19 nt, Artificial Sequence
  Description of Artificial Sequence: Synthetic oligonucleotide
augcccucguucaugcagu

SEQ ID NO: 953286 - RNA, 19 nt, Artificial Sequence
  Description of Artificial Sequence: Synthetic oligonucleotide
augcagugaaugaccauuu

SEQ ID NO: 953287 - RNA, 19 nt, Artificial Sequence
  Description of Artificial Sequence: Synthetic oligonucleotide
ugacuccacgcccgugcuc

SEQ ID NO: 953288 - RNA, 19 nt, Artificial Sequence
  Description of Artificial Sequence: Synthetic oligonucleotide
aaacaccgggcugcacccu

SEQ ID NO: 953289 - RNA, 19 nt, Artificial Sequence
  Description of Artificial Sequence: Synthetic oligonucleotide
caacaaugaagcgucgagu

SEQ ID NO: 953290 - RNA, 19 nt, Artificial Sequence
  Description of Artificial Sequence: Synthetic oligonucleotide
gccucccugaugguggacg

SEQ ID NO: 953291 - RNA, 19 nt, Artificial Sequence
  Description of Artificial Sequence: Synthetic oligonucleotide
cuggauagcaaagcaggcu

SEQ ID NO: 953292 - RNA, 19 nt, Artificial Sequence
  Description of Artificial Sequence: Synthetic oligonucleotide
guccaaguagcgcgccuga

SEQ ID NO: 953293 - RNA, 19 nt, Artificial Sequence
  Description of Artificial Sequence: Synthetic oligonucleotide
ggaccagaauaauaacccu

SEQ ID NO: 953294 - RNA, 19 nt, Artificial Sequence
  Description of Artificial Sequence: Synthetic oligonucleotide
gcaaguaucgcaagccuua

SEQ ID NO: 953295 - RNA, 19 nt, Artificial Sequence
  Description of Artificial Sequence: Synthetic oligonucleotide
ccugccgcagcagaagccc

SEQ ID NO: 953296 - RNA, 19 nt, Artificial Sequence
  Description of Artificial Sequence: Synthetic oligonucleotide
cacagguacccacaccaua

SEQ ID NO: 953297 - RNA, 19 nt, Artificial Sequence
  Description of Artificial Sequence: Synthetic oligonucleotide
uucgguccucaugaauuuu

SEQ ID NO: 953298 - RNA, 19 nt, Artificial Sequence
  Description of Artificial Sequence: Synthetic oligonucleotide
gucaaccacgaaagaccug

SEQ ID NO: 953299 - RNA, 19 nt, Artificial Sequence
  Description of Artificial Sequence: Synthetic oligonucleotide
gugcuccgugacuccacgc

SEQ ID NO: 953300 - RNA, 19 nt, Artificial Sequence
  Description of Artificial Sequence: Synthetic oligonucleotide
ccaaggacuccaaacgaaa

SEQ ID NO: 953301 - RNA, 19 nt, Artificial Sequence
  Description of Artificial Sequence: Synthetic oligonucleotide
caugcucaccaaggagaac

SEQ ID NO: 953302 - RNA, 19 nt, Artificial Sequence
  Description of Artificial Sequence: Synthetic oligonucleotide
cacguaugccuucuaugua

SEQ ID NO: 953303 - RNA, 19 nt, Artificial Sequence
  Description of Artificial Sequence: Synthetic oligonucleotide
auguggcaggaaacaccgg

SEQ ID NO: 953304 - RNA, 19 nt, Artificial Sequence
  Description of Artificial Sequence: Synthetic oligonucleotide
ggcuaugguggaaaaccca

SEQ ID NO: 953305 - RNA, 19 nt, Artificial Sequence
  Description of Artificial Sequence: Synthetic oligonucleotide
gcgucgagucacacgagcc

SEQ ID NO: 953306 - RNA, 19 nt, Artificial Sequence
  Description of Artificial Sequence: Synthetic oligonucleotide
aggaagcaguaugaauauu

SEQ ID NO: 953307 - RNA, 19 nt, Artificial Sequence
  Description of Artificial Sequence: Synthetic oligonucleotide
ccgggcugcacccuacagc

SEQ ID NO: 953308 - RNA, 19 nt, Artificial Sequence
  Description of Artificial Sequence: Synthetic oligonucleotide
ccggaaacgauguuguagu

SEQ ID NO: 953309 - RNA, 19 nt, Artificial Sequence
  Description of Artificial Sequence: Synthetic oligonucleotide
ugccuggauucuccuccau

SEQ ID NO: 953310 - RNA, 19 nt, Artificial Sequence
  Description of Artificial Sequence: Synthetic oligonucleotide
auggauguguuggcauuuu

SEQ ID NO: 953311 - RNA, 19 nt, Artificial Sequence
  Description of Artificial Sequence: Synthetic oligonucleotide
agcaaucacaaggcacgua

SEQ ID NO: 953312 - RNA, 19 nt, Artificial Sequence
  Description of Artificial Sequence: Synthetic oligonucleotide
ggcgaugcccucguucaug

SEQ ID NO: 953313 - RNA, 19 nt, Artificial Sequence
  Description of Artificial Sequence: Synthetic oligonucleotide
gucacugcgugaugccugu

SEQ ID NO: 953314 - RNA, 19 nt, Artificial Sequence
  Description of Artificial Sequence: Synthetic oligonucleotide
cgguccucaugaauuuugc

SEQ ID NO: 953315 - RNA, 19 nt, Artificial Sequence
  Description of Artificial Sequence: Synthetic oligonucleotide
uacccacaccauacuucuu

SEQ ID NO: 953316 - RNA, 19 nt, Artificial Sequence
  Description of Artificial Sequence: Synthetic oligonucleotide
ggucaaccacgaaagaccu

SEQ ID NO: 953317 - RNA, 19 nt, Artificial Sequence
  Description of Artificial Sequence: Synthetic oligonucleotide
gaaucgcacuggcuauggu

SEQ ID NO: 953318 - RNA, 19 nt, Artificial Sequence
  Description of Artificial Sequence: Synthetic oligonucleotide
caucuaugcugaucccaua

SEQ ID NO: 953319 - RNA, 19 nt, Artificial Sequence
  Description of Artificial Sequence: Synthetic oligonucleotide
auacuucuuuagagaugcu

SEQ ID NO: 953320 - RNA, 19 nt, Artificial Sequence
  Description of Artificial Sequence: Synthetic oligonucleotide
ccaacaggaccauagcccu

SEQ ID NO: 953321 - RNA, 19 nt, Artificial Sequence
  Description of Artificial Sequence: Synthetic oligonucleotide
ccugaugcuuggaggagga

SEQ ID NO: 953322 - RNA, 19 nt, Artificial Sequence
  Description of Artificial Sequence: Synthetic oligonucleotide
gucaaggcgaugcccucgu

SEQ ID NO: 953323 - RNA, 19 nt, Artificial Sequence
  Description of Artificial Sequence: Synthetic oligonucleotide
cuucuucgguccucaugaa

SEQ ID NO: 953324 - RNA, 19 nt, Artificial Sequence
  Description of Artificial Sequence: Synthetic oligonucleotide
gcuuaggaagcaguaugaa

SEQ ID NO: 953325 - RNA, 19 nt, Artificial Sequence
  Description of Artificial Sequence: Synthetic oligonucleotide
guccccucuuuuagaguac

SEQ ID NO: 953326 - RNA, 19 nt, Artificial Sequence
  Description of Artificial Sequence: Synthetic oligonucleotide
cacaaggcacguaugccuu

SEQ ID NO: 953327 - RNA, 19 nt, Artificial Sequence
  Description of Artificial Sequence: Synthetic oligonucleotide
cuucgguccucaugaauuu

SEQ ID NO: 953328 - RNA, 19 nt, Artificial Sequence
  Description of Artificial Sequence: Synthetic oligonucleotide
cccucuuuuagaguacgca

SEQ ID NO: 953329 - RNA, 19 nt, Artificial Sequence
  Description of Artificial Sequence: Synthetic oligonucleotide
aggcgagagcguucuccau

SEQ ID NO: 953330 - RNA, 19 nt, Artificial Sequence
  Description of Artificial Sequence: Synthetic oligonucleotide
ccccucuuuuagaguacgc

SEQ ID NO: 953331 - RNA, 19 nt, Artificial Sequence
  Description of Artificial Sequence: Synthetic oligonucleotide
gcuccauggcaaguaucgc

SEQ ID NO: 953332 - RNA, 19 nt, Artificial Sequence
  Description of Artificial Sequence: Synthetic oligonucleotide
caggaaucgcacuggcuau

SEQ ID NO: 953333 - RNA, 19 nt, Artificial Sequence
  Description of Artificial Sequence: Synthetic oligonucleotide
ccacaacccugaugcuugg

SEQ ID NO: 953334 - RNA, 19 nt, Artificial Sequence
  Description of Artificial Sequence: Synthetic oligonucleotide
cccaaggacuccaaacgaa

SEQ ID NO: 953335 - RNA, 19 nt, Artificial Sequence
  Description of Artificial Sequence: Synthetic oligonucleotide
gcgagagcguucuccaugu

SEQ ID NO: 953336 - RNA, 19 nt, Artificial Sequence
  Description of Artificial Sequence: Synthetic oligonucleotide
gcccgugcuccccaaggac

SEQ ID NO: 953337 - RNA, 19 nt, Artificial Sequence
  Description of Artificial Sequence: Synthetic oligonucleotide
cacgcccgugcuccccaag

SEQ ID NO: 953338 - RNA, 19 nt, Artificial Sequence
  Description of Artificial Sequence: Synthetic oligonucleotide
ccccaaggacuccaaacga

SEQ ID NO: 953339 - RNA, 19 nt, Artificial Sequence
  Description of Artificial Sequence: Synthetic oligonucleotide
ggucgaugucaucuaugcu

SEQ ID NO: 953340 - RNA, 19 nt, Artificial Sequence
  Description of Artificial Sequence: Synthetic oligonucleotide
cugcacccuacagcagcac

SEQ ID NO: 953341 - RNA, 19 nt, Artificial Sequence
  Description of Artificial Sequence: Synthetic oligonucleotide
gcaguacccuuggccagag

SEQ ID NO: 953342 - RNA, 19 nt, Artificial Sequence
  Description of Artificial Sequence: Synthetic oligonucleotide
gcaacccgagaaaauuaaa

SEQ ID NO: 953343 - RNA, 19 nt, Artificial Sequence
  Description of Artificial Sequence: Synthetic oligonucleotide
gugacuccacgcccgugcu

SEQ ID NO: 953344 - RNA, 19 nt, Artificial Sequence
  Description of Artificial Sequence: Synthetic oligonucleotide
cccugaugguggacgcagc

SEQ ID NO: 953345 - RNA, 19 nt, Artificial Sequence
  Description of Artificial Sequence: Synthetic oligonucleotide
cgcgccugagucaaggcga

SEQ ID NO: 953346 - RNA, 19 nt, Artificial Sequence
  Description of Artificial Sequence: Synthetic oligonucleotide
caaggcacguaugccuucu

SEQ ID NO: 953347 - RNA, 19 nt, Artificial Sequence
  Description of Artificial Sequence: Synthetic oligonucleotide
ccaccacuuuuaaaccaga

SEQ ID NO: 953348 - RNA, 19 nt, Artificial Sequence
  Description of Artificial Sequence: Synthetic oligonucleotide
cagccucccugauggugga

SEQ ID NO: 953349 - RNA, 19 nt, Artificial Sequence
  Description of Artificial Sequence: Synthetic oligonucleotide
guagcgcgccugagucaag

SEQ ID NO: 953350 - RNA, 19 nt, Artificial Sequence
  Description of Artificial Sequence: Synthetic oligonucleotide
cacaacccugaugcuugga

SEQ ID NO: 953351 - RNA, 19 nt, Artificial Sequence
  Description of Artificial Sequence: Synthetic oligonucleotide
ggcccggaaacgauguugu

SEQ ID NO: 953352 - RNA, 19 nt, Artificial Sequence
  Description of Artificial Sequence: Synthetic oligonucleotide
gcgugaugccuguaagccu

SEQ ID NO: 953353 - RNA, 19 nt, Artificial Sequence
  Description of Artificial Sequence: Synthetic oligonucleotide
ggaggcccggaaacgaugu

SEQ ID NO: 953354 - RNA, 19 nt, Artificial Sequence
  Description of Artificial Sequence: Synthetic oligonucleotide
ggcaaguaucgcaagccuu

SEQ ID NO: 953355 - RNA, 19 nt, Artificial Sequence
  Description of Artificial Sequence: Synthetic oligonucleotide
cagaggcgagagcguucuc

SEQ ID NO: 953356 - RNA, 19 nt, Artificial Sequence
  Description of Artificial Sequence: Synthetic oligonucleotide
ucacugcgugaugccugua

SEQ ID NO: 953357 - RNA, 19 nt, Artificial Sequence
  Description of Artificial Sequence: Synthetic oligonucleotide
ccaaguagcgcgccugagu

SEQ ID NO: 953358 - RNA, 19 nt, Artificial Sequence
  Description of Artificial Sequence: Synthetic oligonucleotide
cagcaaucacaaggcacgu

SEQ ID NO: 953359 - RNA, 19 nt, Artificial Sequence
  Description of Artificial Sequence: Synthetic oligonucleotide
ccagcaacccgagaaaauu

SEQ ID NO: 953360 - RNA, 19 nt, Artificial Sequence
  Description of Artificial Sequence: Synthetic oligonucleotide
gaggcccggaaacgauguu

SEQ ID NO: 953361 - RNA, 19 nt, Artificial Sequence
  Description of Artificial Sequence: Synthetic oligonucleotide
caguacccuuggccagaga

SEQ ID NO: 953362 - RNA, 19 nt, Artificial Sequence
  Description of Artificial Sequence: Synthetic oligonucleotide
cgagucacacgagccuuuc

SEQ ID NO: 953363 - RNA, 19 nt, Artificial Sequence
  Description of Artificial Sequence: Synthetic oligonucleotide
cccauagugcuccgugacu

SEQ ID NO: 953364 - RNA, 19 nt, Artificial Sequence
  Description of Artificial Sequence: Synthetic oligonucleotide
cacgagccuuucucggauu

SEQ ID NO: 953365 - RNA, 19 nt, Artificial Sequence
  Description of Artificial Sequence: Synthetic oligonucleotide
ccccgacagaggcgagagc

SEQ ID NO: 953366 - RNA, 19 nt, Artificial Sequence
  Description of Artificial Sequence: Synthetic oligonucleotide
cauccccaacaggaccaua

SEQ ID NO: 953367 - RNA, 19 nt, Artificial Sequence
  Description of Artificial Sequence: Synthetic oligonucleotide
cgcaagccuuacacugcuc

SEQ ID NO: 953368 - RNA, 19 nt, Artificial Sequence
  Description of Artificial Sequence: Synthetic oligonucleotide
gcccucguucaugcaguga

SEQ ID NO: 953369 - RNA, 19 nt, Artificial Sequence
  Description of Artificial Sequence: Synthetic oligonucleotide
gcccggaaacgauguugua

SEQ ID NO: 953370 - RNA, 19 nt, Artificial Sequence
  Description of Artificial Sequence: Synthetic oligonucleotide
ccgacagaggcgagagcgu

SEQ ID NO: 953371 - RNA, 19 nt, Artificial Sequence
  Description of Artificial Sequence: Synthetic oligonucleotide
ccucguucaugcagugaau

SEQ ID NO: 953372 - RNA, 19 nt, Artificial Sequence
  Description of Artificial Sequence: Synthetic oligonucleotide
ccgugacuccacgcccgug

SEQ ID NO: 953373 - RNA, 19 nt, Artificial Sequence
  Description of Artificial Sequence: Synthetic oligonucleotide
cgcaggaaucgcacuggcu

SEQ ID NO: 953374 - RNA, 19 nt, Artificial Sequence
  Description of Artificial Sequence: Synthetic oligonucleotide
cgcccgugcuccccaagga

SEQ ID NO: 953375 - RNA, 19 nt, Artificial Sequence
  Description of Artificial Sequence: Synthetic oligonucleotide
gcgccugagucaaggcgau

SEQ ID NO: 953376 - RNA, 19 nt, Artificial Sequence
  Description of Artificial Sequence: Synthetic oligonucleotide
cggaaacgauguuguaguu

SEQ ID NO: 953377 - RNA, 19 nt, Artificial Sequence
  Description of Artificial Sequence: Synthetic oligonucleotide
cgagccuuucucggauucu

SEQ ID NO: 953378 - RNA, 19 nt, Artificial Sequence
  Description of Artificial Sequence: Synthetic oligonucleotide
cgguuccaguguucauaua

SEQ ID NO: 953379 - RNA, 19 nt, Artificial Sequence
  Description of Artificial Sequence: Synthetic oligonucleotide
cgacagaggcgagagcguu

SEQ ID NO: 953380 - RNA, 19 nt, Artificial Sequence
  Description of Artificial Sequence: Synthetic oligonucleotide
ccacgcccgugcuccccaa

SEQ ID NO: 953381 - RNA, 19 nt, Artificial Sequence
  Description of Artificial Sequence: Synthetic oligonucleotide
ccgugaccacaacccugau

SEQ ID NO: 953382 - RNA, 19 nt, Artificial Sequence
  Description of Artificial Sequence: Synthetic oligonucleotide
aaaucuagaggcuagcucc

SEQ ID NO: 953383 - RNA, 19 nt, Artificial Sequence
  Description of Artificial Sequence: Synthetic oligonucleotide
auaauaaugaacaauaucg

SEQ ID NO: 953384 - RNA, 19 nt, Artificial Sequence
  Description of Artificial Sequence: Synthetic oligonucleotide
aauacuacgaaauauagaa

SEQ ID NO: 953385 - RNA, 19 nt, Artificial Sequence
  Description of Artificial Sequence: Synthetic oligonucleotide
aaagcaaacuaauaacgcc

SEQ ID NO: 953386 - RNA, 19 nt, Artificial Sequence
  Description of Artificial Sequence: Synthetic oligonucleotide
aauauagucgaccuuguuc

SEQ ID NO: 953387 - RNA, 19 nt, Artificial Sequence
  Description of Artificial Sequence: Synthetic oligonucleotide
uuagucuaaaucuagaggc

SEQ ID NO: 953388 - RNA, 19 nt, Artificial Sequence
  Description of Artificial Sequence: Synthetic oligonucleotide
ugaaagcaaacuaauaacg

SEQ ID NO: 953389 - RNA, 19 nt, Artificial Sequence
  Description of Artificial Sequence: Synthetic oligonucleotide
uauuuuauagaaaggaccc

SEQ ID NO: 953390 - RNA, 19 nt, Artificial Sequence
  Description of Artificial Sequence: Synthetic oligonucleotide
auauagaauaaauacuacg

SEQ ID NO: 953391 - RNA, 19 nt, Artificial Sequence
  Description of Artificial Sequence: Synthetic oligonucleotide
aaguuaagauuucuugugc

SEQ ID NO: 953392 - RNA, 19 nt, Artificial Sequence
  Description of Artificial Sequence: Synthetic oligonucleotide
aguaacaaaauauaguacu

SEQ ID NO: 953393 - RNA, 19 nt, Artificial Sequence
  Description of Artificial Sequence: Synthetic oligonucleotide
cauguuauaauaaugaaca

SEQ ID NO: 953394 - RNA, 19 nt, Artificial Sequence
  Description of Artificial Sequence: Synthetic oligonucleotide
uauacuggaaucaaccaag

SEQ ID NO: 953395 - RNA, 19 nt, Artificial Sequence
  Description of Artificial Sequence: Synthetic oligonucleotide
ucuaagaggacugcaaucg

SEQ ID NO: 953396 - RNA, 19 nt, Artificial Sequence
  Description of Artificial Sequence: Synthetic oligonucleotide
uuauuuugaaggauagugc

SEQ ID NO: 953397 - RNA, 19 nt, Artificial Sequence
  Description of Artificial Sequence: Synthetic oligonucleotide
auguuauacacuuaaauaa

SEQ ID NO: 953398 - RNA, 19 nt, Artificial Sequence
  Description of Artificial Sequence: Synthetic oligonucleotide
aacuaagcauguuuucuac

SEQ ID NO: 953399 - RNA, 19 nt, Artificial Sequence
  Description of Artificial Sequence: Synthetic oligonucleotide
aauaaugaacaauaucgaa

SEQ ID NO: 953400 - RNA, 19 nt, Artificial Sequence
  Description of Artificial Sequence: Synthetic oligonucleotide
ucuccuuucuauuaaguag

SEQ ID NO: 953401 - RNA, 19 nt, Artificial Sequence
  Description of Artificial Sequence: Synthetic oligonucleotide
auuaaguaguccccaaugg

SEQ ID NO: 953402 - RNA, 19 nt, Artificial Sequence
  Description of Artificial Sequence: Synthetic oligonucleotide
uagaauacuauauagcaau

SEQ ID NO: 953403 - RNA, 19 nt, Artificial Sequence
  Description of Artificial Sequence: Synthetic oligonucleotide
aaauauaguacugaaacua

SEQ ID NO: 953404 - RNA, 19 nt, Artificial Sequence
  Description of Artificial Sequence: Synthetic oligonucleotide
uaauaaugaacaauaucga

SEQ ID NO: 953405 - RNA, 19 nt, Artificial Sequence
  Description of Artificial Sequence: Synthetic oligonucleotide
aagcuuaugacacuggaau

SEQ ID NO: 953406 - RNA, 19 nt, Artificial Sequence
  Description of Artificial Sequence: Synthetic oligonucleotide
auauagucgaccuuguucu

SEQ ID NO: 953407 - RNA, 19 nt, Artificial Sequence
  Description of Artificial Sequence: Synthetic oligonucleotide
uauuaaguaguccccaaug

SEQ ID NO: 953408 - RNA, 19 nt, Artificial Sequence
  Description of Artificial Sequence: Synthetic oligonucleotide
uuauuaugcagaauauaug

SEQ ID NO: 953409 - RNA, 19 nt, Artificial Sequence
  Description of Artificial Sequence: Synthetic oligonucleotide
aucuauacuggaaucaacc

SEQ ID NO: 953410 - RNA, 19 nt, Artificial Sequence
  Description of Artificial Sequence: Synthetic oligonucleotide
uugagaagcaacaacugga

SEQ ID NO: 953411 - RNA, 19 nt, Artificial Sequence
  Description of Artificial Sequence: Synthetic oligonucleotide
acuaauaacgccugcaagu

SEQ ID NO: 953412 - RNA, 19 nt, Artificial Sequence
  Description of Artificial Sequence: Synthetic oligonucleotide
ucuauggucaaguaugacu

SEQ ID NO: 953413 - RNA, 19 nt, Artificial Sequence
  Description of Artificial Sequence: Synthetic oligonucleotide
ugcuaucugacacugcccg

SEQ ID NO: 953414 - RNA, 19 nt, Artificial Sequence
  Description of Artificial Sequence: Synthetic oligonucleotide
uuuaagcaggagauuagag

SEQ ID NO: 953415 - RNA, 19 nt, Artificial Sequence
  Description of Artificial Sequence: Synthetic oligonucleotide
uccucugagacuuaacaag

SEQ ID NO: 953416 - RNA, 19 nt, Artificial Sequence
  Description of Artificial Sequence: Synthetic oligonucleotide
ugaaacaauauauucuuau

SEQ ID NO: 953417 - RNA, 19 nt, Artificial Sequence
  Description of Artificial Sequence: Synthetic oligonucleotide
acaauuaaccuucaguuau

SEQ ID NO: 953418 - RNA, 19 nt, Artificial Sequence
  Description of Artificial Sequence: Synthetic oligonucleotide
ucugagacuuaacaagugc

SEQ ID NO: 953419 - RNA, 19 nt, Artificial Sequence
  Description of Artificial Sequence: Synthetic oligonucleotide
acaacaauauagucgaccu

SEQ ID NO: 953420 - RNA, 19 nt, Artificial Sequence
  Description of Artificial Sequence: Synthetic oligonucleotide
uccaaugucuuacaaacuc

SEQ ID NO: 953421 - RNA, 19 nt, Artificial Sequence
  Description of Artificial Sequence: Synthetic oligonucleotide
agcaaugaaacaaaauuuc

SEQ ID NO: 953422 - RNA, 19 nt, Artificial Sequence
  Description of Artificial Sequence: Synthetic oligonucleotide
uaaagacguguuuugaucu

SEQ ID NO: 953423 - RNA, 19 nt, Artificial Sequence
  Description of Artificial Sequence: Synthetic oligonucleotide
accaaguuaagauuucuug

SEQ ID NO: 953424 - RNA, 19 nt, Artificial Sequence
  Description of Artificial Sequence: Synthetic oligonucleotide
acuggaaucaaccaaguua

SEQ ID NO: 953425 - RNA, 19 nt, Artificial Sequence
  Description of Artificial Sequence: Synthetic oligonucleotide
uuauacuuauuuuaacaaa

SEQ ID NO: 953426 - RNA, 19 nt, Artificial Sequence
  Description of Artificial Sequence: Synthetic oligonucleotide
auauguauuauuaugcaga

SEQ ID NO: 953427 - RNA, 19 nt, Artificial Sequence
  Description of Artificial Sequence: Synthetic oligonucleotide
uacgaaauauagaauacua

SEQ ID NO: 953428 - RNA, 19 nt, Artificial Sequence
  Description of Artificial Sequence: Synthetic oligonucleotide
agaauuagcauccuaugaa

SEQ ID NO: 953429 - RNA, 19 nt, Artificial Sequence
  Description of Artificial Sequence: Synthetic oligonucleotide
uccacuuaccugaaaacca

SEQ ID NO: 953430 - RNA, 19 nt, Artificial Sequence
  Description of Artificial Sequence: Synthetic oligonucleotide
aguuuaagagguguccugc

SEQ ID NO: 953431 - RNA, 19 nt, Artificial Sequence
  Description of Artificial Sequence: Synthetic oligonucleotide
aauuuacuuucaaaucaac

SEQ ID NO: 953432 - RNA, 19 nt, Artificial Sequence
  Description of Artificial Sequence: Synthetic oligonucleotide
aaccauguuauacacuuaa

SEQ ID NO: 953433 - RNA, 19 nt, Artificial Sequence
  Description of Artificial Sequence: Synthetic oligonucleotide
uuaaguaguccccaauggu

SEQ ID NO: 953434 - RNA, 19 nt, Artificial Sequence
  Description of Artificial Sequence: Synthetic oligonucleotide
aaaguggucgccuccugag

SEQ ID NO: 953435 - RNA, 19 nt, Artificial Sequence
  Description of Artificial Sequence: Synthetic oligonucleotide
uguuauaauaaugaacaau

SEQ ID NO: 953436 - RNA, 19 nt, Artificial Sequence
  Description of Artificial Sequence: Synthetic oligonucleotide
aaggcuuuugagaaggaag

SEQ ID NO: 953437 - RNA, 19 nt, Artificial Sequence
  Description of Artificial Sequence: Synthetic oligonucleotide
agauuagagacuacucucc

SEQ ID NO: 953438 - RNA, 19 nt, Artificial Sequence
  Description of Artificial Sequence: Synthetic oligonucleotide
agaauaaauacuacgaaau

SEQ ID NO: 953439 - RNA, 19 nt, Artificial Sequence
  Description of Artificial Sequence: Synthetic oligonucleotide
uguauauaguagcuguuuc

SEQ ID NO: 953440 - RNA, 19 nt, Artificial Sequence
  Description of Artificial Sequence: Synthetic oligonucleotide
aacgccugcaaguuuauau

SEQ ID NO: 953441 - RNA, 19 nt, Artificial Sequence
  Description of Artificial Sequence: Synthetic oligonucleotide
accauucacaacaauauag

SEQ ID NO: 953442 - RNA, 19 nt, Artificial Sequence
  Description of Artificial Sequence: Synthetic oligonucleotide
ucguauugguugcugaacc

SEQ ID NO: 953443 - RNA, 19 nt, Artificial Sequence
  Description of Artificial Sequence: Synthetic oligonucleotide
gagauuagagacuacucuc

SEQ ID NO: 953444 - RNA, 19 nt, Artificial Sequence
  Description of Artificial Sequence: Synthetic oligonucleotide
guuaccggcaccaaguucc

SEQ ID NO: 953445 - RNA, 19 nt, Artificial Sequence
  Description of Artificial Sequence: Synthetic oligonucleotide
uuagagacuacucuccuuu

SEQ ID NO: 953446 - RNA, 19 nt, Artificial Sequence
  Description of Artificial Sequence: Synthetic oligonucleotide
aaucaaccaaguuaagauu

SEQ ID NO: 953447 - RNA, 19 nt, Artificial Sequence
  Description of Artificial Sequence: Synthetic oligonucleotide
ucuacucacagggauauca

SEQ ID NO: 953448 - RNA, 19 nt, Artificial Sequence
  Description of Artificial Sequence: Synthetic oligonucleotide
uggaauuuacuuucaaauc

SEQ ID NO: 953449 - RNA, 19 nt, Artificial Sequence
  Description of Artificial Sequence: Synthetic oligonucleotide
uaugacacuggaauuuacu

SEQ ID NO: 953450 - RNA, 19 nt, Artificial Sequence
  Description of Artificial Sequence: Synthetic oligonucleotide
agcaguuuaagaggugucc

SEQ ID NO: 953451 - RNA, 19 nt, Artificial Sequence
  Description of Artificial Sequence: Synthetic oligonucleotide
uaaacagacuugauugaga

SEQ ID NO: 953452 - RNA, 19 nt, Artificial Sequence
  Description of Artificial Sequence: Synthetic oligonucleotide
uaaaucuagaggcuagcuc

SEQ ID NO: 953453 - RNA, 19 nt, Artificial Sequence
  Description of Artificial Sequence: Synthetic oligonucleotide
aagcaaacuaauaacgccu

SEQ ID NO: 953454 - RNA, 19 nt, Artificial Sequence
  Description of Artificial Sequence: Synthetic oligonucleotide
aacaaugacaaaaccagaa

SEQ ID NO: 953455 - RNA, 19 nt, Artificial Sequence
  Description of Artificial Sequence: Synthetic oligonucleotide
gaauacuauauagcaauug

SEQ ID NO: 953456 - RNA, 19 nt, Artificial Sequence
  Description of Artificial Sequence: Synthetic oligonucleotide
cuaagcauguuuucuacuc

SEQ ID NO: 953457 - RNA, 19 nt, Artificial Sequence
  Description of Artificial Sequence: Synthetic oligonucleotide
gaugaaguaaacagacuug

SEQ ID NO: 953458 - RNA, 19 nt, Artificial Sequence
  Description of Artificial Sequence: Synthetic oligonucleotide
gcuguugaaaaguauagug

SEQ ID NO: 953459 - RNA, 19 nt, Artificial Sequence
  Description of Artificial Sequence: Synthetic oligonucleotide
uuugaucuauacuggaauc

SEQ ID NO: 953460 - RNA, 19 nt, Artificial Sequence
  Description of Artificial Sequence: Synthetic oligonucleotide
aguuaagauuucuugugcu

SEQ ID NO: 953461 - RNA, 19 nt, Artificial Sequence
  Description of Artificial Sequence: Synthetic oligonucleotide
uuuuauagaaaggacccaa

SEQ ID NO: 953462 - RNA, 19 nt, Artificial Sequence
  Description of Artificial Sequence: Synthetic oligonucleotide
acccauuucaaaaguauac

SEQ ID NO: 953463 - RNA, 19 nt, Artificial Sequence
  Description of Artificial Sequence: Synthetic oligonucleotide
aaaucacgcauuuuauuuu

SEQ ID NO: 953464 - RNA, 19 nt, Artificial Sequence
  Description of Artificial Sequence: Synthetic oligonucleotide
gaaucaaccaaguuaagau

SEQ ID NO: 953465 - RNA, 19 nt, Artificial Sequence
  Description of Artificial Sequence: Synthetic oligonucleotide
uguuuugaucuauacugga

SEQ ID NO: 953466 - RNA, 19 nt, Artificial Sequence
  Description of Artificial Sequence: Synthetic oligonucleotide
auaaugaacaauaucgaaa

SEQ ID NO: 953467 - RNA, 19 nt, Artificial Sequence
  Description of Artificial Sequence: Synthetic oligonucleotide
uaaucauccucauaauuua

SEQ ID NO: 953468 - RNA, 19 nt, Artificial Sequence
  Description of Artificial Sequence: Synthetic oligonucleotide
uauauagcaauuggauuug

SEQ ID NO: 953469 - RNA, 19 nt, Artificial Sequence
  Description of Artificial Sequence: Synthetic oligonucleotide
ugaguauccaugucuacaa

SEQ ID NO: 953470 - RNA, 19 nt, Artificial Sequence
  Description of Artificial Sequence: Synthetic oligonucleotide
aauauaguacugaaacuaa

SEQ ID NO: 953471 - RNA, 19 nt, Artificial Sequence
  Description of Artificial Sequence: Synthetic oligonucleotide
ucaggcuauggacaguggc

SEQ ID NO: 953472 - RNA, 19 nt, Artificial Sequence
  Description of Artificial Sequence: Synthetic oligonucleotide
auuuaaucacuguuacugu

SEQ ID NO: 953473 - RNA, 19 nt, Artificial Sequence
  Description of Artificial Sequence: Synthetic oligonucleotide
ugaaaacauucuuuggguc

SEQ ID NO: 953474 - RNA, 19 nt, Artificial Sequence
  Description of Artificial Sequence: Synthetic oligonucleotide
ugagaagcaacaacuggaa

SEQ ID NO: 953475 - RNA, 19 nt, Artificial Sequence
  Description of Artificial Sequence: Synthetic oligonucleotide
uuuaagagguguccugcga

SEQ ID NO: 953476 - RNA, 19 nt, Artificial Sequence
  Description of Artificial Sequence: Synthetic oligonucleotide
gugaaguaacaucagcccc

SEQ ID NO: 953477 - RNA, 19 nt, Artificial Sequence
  Description of Artificial Sequence: Synthetic oligonucleotide
acuguuacuguuuguggug

SEQ ID NO: 953478 - RNA, 19 nt, Artificial Sequence
  Description of Artificial Sequence: Synthetic oligonucleotide
caguuauuuugaaggauag

SEQ ID NO: 953479 - RNA, 19 nt, Artificial Sequence
  Description of Artificial Sequence: Synthetic oligonucleotide
auagcaauuggauuugcua

SEQ ID NO: 953480 - RNA, 19 nt, Artificial Sequence
  Description of Artificial Sequence: Synthetic oligonucleotide
auaaaguacagggaagaca

SEQ ID NO: 953481 - RNA, 19 nt, Artificial Sequence
  Description of Artificial Sequence: Synthetic oligonucleotide
uugaucuauacuggaauca

SEQ ID NO: 953482 - RNA, 19 nt, Artificial Sequence
  Description of Artificial Sequence: Synthetic oligonucleotide
uuuuaagcaggagauuaga

SEQ ID NO: 953483 - RNA, 19 nt, Artificial Sequence
  Description of Artificial Sequence: Synthetic oligonucleotide
auagucgaccuuguucucc

SEQ ID NO: 953484 - RNA, 19 nt, Artificial Sequence
  Description of Artificial Sequence: Synthetic oligonucleotide
uuuaaucacuguuacuguu

SEQ ID NO: 953485 - RNA, 19 nt, Artificial Sequence
  Description of Artificial Sequence: Synthetic oligonucleotide
caugucuacaagcuuauga

SEQ ID NO: 953486 - RNA, 19 nt, Artificial Sequence
  Description of Artificial Sequence: Synthetic oligonucleotide
aauaacgccugcaaguuua

SEQ ID NO: 953487 - RNA, 19 nt, Artificial Sequence
  Description of Artificial Sequence: Synthetic oligonucleotide
aaaguauagugaaguaaca

SEQ ID NO: 953488 - RNA, 19 nt, Artificial Sequence
  Description of Artificial Sequence: Synthetic oligonucleotide
uuaagagguguccugcgau

SEQ ID NO: 953489 - RNA, 19 nt, Artificial Sequence
  Description of Artificial Sequence: Synthetic oligonucleotide
ucuucacauaaaguacagg

SEQ ID NO: 953490 - RNA, 19 nt, Artificial Sequence
  Description of Artificial Sequence: Synthetic oligonucleotide
agacuuaacaagugcuuca

SEQ ID NO: 953491 - RNA, 19 nt, Artificial Sequence
  Description of Artificial Sequence: Synthetic oligonucleotide
uguaaagcucauuucugau

SEQ ID NO: 953492 - RNA, 19 nt, Artificial Sequence
  Description of Artificial Sequence: Synthetic oligonucleotide
auauuuaaucacuguuacu

SEQ ID NO: 953493 - RNA, 19 nt, Artificial Sequence
  Description of Artificial Sequence: Synthetic oligonucleotide
agcaauuggauuugcuaca

SEQ ID NO: 953494 - RNA, 19 nt, Artificial Sequence
  Description of Artificial Sequence: Synthetic oligonucleotide
ugcucccguaacuugacgc

SEQ ID NO: 953495 - RNA, 19 nt, Artificial Sequence
  Description of Artificial Sequence: Synthetic oligonucleotide
gcuucuauggucaaguaug

SEQ ID NO: 953496 - RNA, 19 nt, Artificial Sequence
  Description of Artificial Sequence: Synthetic oligonucleotide
gucuacaagcuuaugacac

SEQ ID NO: 953497 - RNA, 19 nt, Artificial Sequence
  Description of Artificial Sequence: Synthetic oligonucleotide
ucuacaagcuuaugacacu

SEQ ID NO: 953498 - RNA, 19 nt, Artificial Sequence
  Description of Artificial Sequence: Synthetic oligonucleotide
uucuauuaaguagucccca

SEQ ID NO: 953499 - RNA, 19 nt, Artificial Sequence
  Description of Artificial Sequence: Synthetic oligonucleotide
auauaguacugaaacuaag

SEQ ID NO: 953500 - RNA, 19 nt, Artificial Sequence
  Description of Artificial Sequence: Synthetic oligonucleotide
auacucuuacaaaugcuag

SEQ ID NO: 953501 - RNA, 19 nt, Artificial Sequence
  Description of Artificial Sequence: Synthetic oligonucleotide
augucuuacaaacucccau

SEQ ID NO: 953502 - RNA, 19 nt, Artificial Sequence
  Description of Artificial Sequence: Synthetic oligonucleotide
ucuauuaaguaguccccaa

SEQ ID NO: 953503 - RNA, 19 nt, Artificial Sequence
  Description of Artificial Sequence: Synthetic oligonucleotide
agcaugacacuuccuuuuc

SEQ ID NO: 953504 - RNA, 19 nt, Artificial Sequence
  Description of Artificial Sequence: Synthetic oligonucleotide
gagauuguaaagcucauuu

SEQ ID NO: 953505 - RNA, 19 nt, Artificial Sequence
  Description of Artificial Sequence: Synthetic oligonucleotide
agggauaucaugagggcag

SEQ ID NO: 953506 - RNA, 19 nt, Artificial Sequence
  Description of Artificial Sequence: Synthetic oligonucleotide
ugucuuacaaacucccauu

SEQ ID NO: 953507 - RNA, 19 nt, Artificial Sequence
  Description of Artificial Sequence: Synthetic oligonucleotide
uuuguaaaguggucgccuc

SEQ ID NO: 953508 - RNA, 19 nt, Artificial Sequence
  Description of Artificial Sequence: Synthetic oligonucleotide
auacuauauagcaauugga

SEQ ID NO: 953509 - RNA, 19 nt, Artificial Sequence
  Description of Artificial Sequence: Synthetic oligonucleotide
acuugauugagaagcaaca

SEQ ID NO: 953510 - RNA, 19 nt, Artificial Sequence
  Description of Artificial Sequence: Synthetic oligonucleotide
cauuggucguauugguugc

SEQ ID NO: 953511 - RNA, 19 nt, Artificial Sequence
  Description of Artificial Sequence: Synthetic oligonucleotide
acguguuuugaucuauacu

SEQ ID NO: 953512 - RNA, 19 nt, Artificial Sequence
  Description of Artificial Sequence: Synthetic oligonucleotide
augacacuggaauuuacuu

SEQ ID NO: 953513 - RNA, 19 nt, Artificial Sequence
  Description of Artificial Sequence: Synthetic oligonucleotide
gaaguaaacagacuugauu

SEQ ID NO: 953514 - RNA, 19 nt, Artificial Sequence
  Description of Artificial Sequence: Synthetic oligonucleotide
caagcguugcaaaauguca

SEQ ID NO: 953515 - RNA, 19 nt, Artificial Sequence
  Description of Artificial Sequence: Synthetic oligonucleotide
agcacugaagagcuuugug

SEQ ID NO: 953516 - RNA, 19 nt, Artificial Sequence
  Description of Artificial Sequence: Synthetic oligonucleotide
aaacuaaguucaauuuagu

SEQ ID NO: 953517 - RNA, 19 nt, Artificial Sequence
  Description of Artificial Sequence: Synthetic oligonucleotide
acuacucuccuuucuauua

SEQ ID NO: 953518 - RNA, 19 nt, Artificial Sequence
  Description of Artificial Sequence: Synthetic oligonucleotide
ugaucuauacuggaaucaa

SEQ ID NO: 953519 - RNA, 19 nt, Artificial Sequence
  Description of Artificial Sequence: Synthetic oligonucleotide
uguccuaggcagcaguuua

SEQ ID NO: 953520 - RNA, 19 nt, Artificial Sequence
  Description of Artificial Sequence: Synthetic oligonucleotide
cuucagauccgcguagccg

SEQ ID NO: 953521 - RNA, 19 nt, Artificial Sequence
  Description of Artificial Sequence: Synthetic oligonucleotide
acauccaaugucuuacaaa

SEQ ID NO: 953522 - RNA, 19 nt, Artificial Sequence
  Description of Artificial Sequence: Synthetic oligonucleotide
uucacguaucucuugcuua

SEQ ID NO: 953523 - RNA, 19 nt, Artificial Sequence
  Description of Artificial Sequence: Synthetic oligonucleotide
cauccuaugaauccagcga

SEQ ID NO: 953524 - RNA, 19 nt, Artificial Sequence
  Description of Artificial Sequence: Synthetic oligonucleotide
uacccauuucaaaaguaua

SEQ ID NO: 953525 - RNA, 19 nt, Artificial Sequence
  Description of Artificial Sequence: Synthetic oligonucleotide
ucacguaucucuugcuuaa

SEQ ID NO: 953526 - RNA, 19 nt, Artificial Sequence
  Description of Artificial Sequence: Synthetic oligonucleotide
aacuugacgcugcucuggu

SEQ ID NO: 953527 - RNA, 19 nt, Artificial Sequence
  Description of Artificial Sequence: Synthetic oligonucleotide
aaucuaggauuugcucccg

SEQ ID NO: 953528 - RNA, 19 nt, Artificial Sequence
  Description of Artificial Sequence: Synthetic oligonucleotide
aguuucaccaagcguugca

SEQ ID NO: 953529 - RNA, 19 nt, Artificial Sequence
  Description of Artificial Sequence: Synthetic oligonucleotide
gaaacuaagcauguuuucu

SEQ ID NO: 953530 - RNA, 19 nt, Artificial Sequence
  Description of Artificial Sequence: Synthetic oligonucleotide
aaagacguguuuugaucua

SEQ ID NO: 953531 - RNA, 19 nt, Artificial Sequence
  Description of Artificial Sequence: Synthetic oligonucleotide
aaugucuuacaaacuccca

SEQ ID NO: 953532 - RNA, 19 nt, Artificial Sequence
  Description of Artificial Sequence: Synthetic oligonucleotide
uaagaggacugcaaucguu

SEQ ID NO: 953533 - RNA, 19 nt, Artificial Sequence
  Description of Artificial Sequence: Synthetic oligonucleotide
uguaaaguggucgccuccu

SEQ ID NO: 953534 - RNA, 19 nt, Artificial Sequence
  Description of Artificial Sequence: Synthetic oligonucleotide
auuuuauuucaucccugaa

SEQ ID NO: 953535 - RNA, 19 nt, Artificial Sequence
  Description of Artificial Sequence: Synthetic oligonucleotide
aucaaccaaguuaagauuu

SEQ ID NO: 953536 - RNA, 19 nt, Artificial Sequence
  Description of Artificial Sequence: Synthetic oligonucleotide
cuguuacuguuuguggugg

SEQ ID NO: 953537 - RNA, 19 nt, Artificial Sequence
  Description of Artificial Sequence: Synthetic oligonucleotide
caugaaacaauauauucuu

SEQ ID NO: 953538 - RNA, 19 nt, Artificial Sequence
  Description of Artificial Sequence: Synthetic oligonucleotide
agcaacaacuggaaaggag

SEQ ID NO: 953539 - RNA, 19 nt, Artificial Sequence
  Description of Artificial Sequence: Synthetic oligonucleotide
gaguauccaugucuacaag

SEQ ID NO: 953540 - RNA, 19 nt, Artificial Sequence
  Description of Artificial Sequence: Synthetic oligonucleotide
aaacucccauucagcauac

SEQ ID NO: 953541 - RNA, 19 nt, Artificial Sequence
  Description of Artificial Sequence: Synthetic oligonucleotide
caaucguucucuucagauc

SEQ ID NO: 953542 - RNA, 19 nt, Artificial Sequence
  Description of Artificial Sequence: Synthetic oligonucleotide
ugcacucguccuuuuguug

SEQ ID NO: 953543 - RNA, 19 nt, Artificial Sequence
  Description of Artificial Sequence: Synthetic oligonucleotide
auuuuauagaaaggaccca

SEQ ID NO: 953544 - RNA, 19 nt, Artificial Sequence
  Description of Artificial Sequence: Synthetic oligonucleotide
ccauucagcauacagaaca

SEQ ID NO: 953545 - RNA, 19 nt, Artificial Sequence
  Description of Artificial Sequence: Synthetic oligonucleotide
cuuaaaucuaggauuugcu

SEQ ID NO: 953546 - RNA, 19 nt, Artificial Sequence
  Description of Artificial Sequence: Synthetic oligonucleotide
cuauacuggaaucaaccaa

SEQ ID NO: 953547 - RNA, 19 nt, Artificial Sequence
  Description of Artificial Sequence: Synthetic oligonucleotide
gucuuacaaacucccauuc

SEQ ID NO: 953548 - RNA, 19 nt, Artificial Sequence
  Description of Artificial Sequence: Synthetic oligonucleotide
uauugguugcugaaccauu

SEQ ID NO: 953549 - RNA, 19 nt, Artificial Sequence
  Description of Artificial Sequence: Synthetic oligonucleotide
guacagggaagacauuuca

SEQ ID NO: 953550 - RNA, 19 nt, Artificial Sequence
  Description of Artificial Sequence: Synthetic oligonucleotide
gaguccgaacaccagcaac

SEQ ID NO: 953551 - RNA, 19 nt, Artificial Sequence
  Description of Artificial Sequence: Synthetic oligonucleotide
cucugagacuuaacaagug

SEQ ID NO: 953552 - RNA, 19 nt, Artificial Sequence
  Description of Artificial Sequence: Synthetic oligonucleotide
acuuaccugaaaaccaugu

SEQ ID NO: 953553 - RNA, 19 nt, Artificial Sequence
  Description of Artificial Sequence: Synthetic oligonucleotide
ucccguaacuugacgcugc

SEQ ID NO: 953554 - RNA, 19 nt, Artificial Sequence
  Description of Artificial Sequence: Synthetic oligonucleotide
agaaugacucaguaacauu

SEQ ID NO: 953555 - RNA, 19 nt, Artificial Sequence
  Description of Artificial Sequence: Synthetic oligonucleotide
ccauuggucguauugguug

SEQ ID NO: 953556 - RNA, 19 nt, Artificial Sequence
  Description of Artificial Sequence: Synthetic oligonucleotide
gcuuaaaucuaggauuugc

SEQ ID NO: 953557 - RNA, 19 nt, Artificial Sequence
  Description of Artificial Sequence: Synthetic oligonucleotide
cucccggcuuaccacaucc

SEQ ID NO: 953558 - RNA, 19 nt, Artificial Sequence
  Description of Artificial Sequence: Synthetic oligonucleotide
agcaaacuaauaacgccug

SEQ ID NO: 953559 - RNA, 19 nt, Artificial Sequence
  Description of Artificial Sequence: Synthetic oligonucleotide
agcucauuucugaugaagu

SEQ ID NO: 953560 - RNA, 19 nt, Artificial Sequence
  Description of Artificial Sequence: Synthetic oligonucleotide
ugccauuggucguauuggu

SEQ ID NO: 953561 - RNA, 19 nt, Artificial Sequence
  Description of Artificial Sequence: Synthetic oligonucleotide
uggucguauugguugcuga

SEQ ID NO: 953562 - RNA, 19 nt, Artificial Sequence
  Description of Artificial Sequence: Synthetic oligonucleotide
agcauccuaugaauccagc

SEQ ID NO: 953563 - RNA, 19 nt, Artificial Sequence
  Description of Artificial Sequence: Synthetic oligonucleotide
auuagagacuacucuccuu

SEQ ID NO: 953564 - RNA, 19 nt, Artificial Sequence
  Description of Artificial Sequence: Synthetic oligonucleotide
acccaaugucuuucuagug

SEQ ID NO: 953565 - RNA, 19 nt, Artificial Sequence
  Description of Artificial Sequence: Synthetic oligonucleotide
cuucuauggucaaguauga

SEQ ID NO: 953566 - RNA, 19 nt, Artificial Sequence
  Description of Artificial Sequence: Synthetic oligonucleotide
gauuagagacuacucuccu

SEQ ID NO: 953567 - RNA, 19 nt, Artificial Sequence
  Description of Artificial Sequence: Synthetic oligonucleotide
aagacguguuuugaucuau

SEQ ID NO: 953568 - RNA, 19 nt, Artificial Sequence
  Description of Artificial Sequence: Synthetic oligonucleotide
aaguggucgccuccugagu

SEQ ID NO: 953569 - RNA, 19 nt, Artificial Sequence
  Description of Artificial Sequence: Synthetic oligonucleotide
caccaagcguugcaaaaug

SEQ ID NO: 953570 - RNA, 19 nt, Artificial Sequence
  Description of Artificial Sequence: Synthetic oligonucleotide
agacuacucuccuuucuau

SEQ ID NO: 953571 - RNA, 19 nt, Artificial Sequence
  Description of Artificial Sequence: Synthetic oligonucleotide
gacccaaugucuuucuagu

SEQ ID NO: 953572 - RNA, 19 nt, Artificial Sequence
  Description of Artificial Sequence: Synthetic oligonucleotide
cugcuaucugacacugccc

SEQ ID NO: 953573 - RNA, 19 nt, Artificial Sequence
  Description of Artificial Sequence: Synthetic oligonucleotide
agcuuaugacacuggaauu

SEQ ID NO: 953574 - RNA, 19 nt, Artificial Sequence
  Description of Artificial Sequence: Synthetic oligonucleotide
gaugcacucguccuuuugu

SEQ ID NO: 953575 - RNA, 19 nt, Artificial Sequence
  Description of Artificial Sequence: Synthetic oligonucleotide
aggcuauggacaguggcug

SEQ ID NO: 953576 - RNA, 19 nt, Artificial Sequence
  Description of Artificial Sequence: Synthetic oligonucleotide
cagggaagacauuucagaa

SEQ ID NO: 953577 - RNA, 19 nt, Artificial Sequence
  Description of Artificial Sequence: Synthetic oligonucleotide
gagacuacucuccuuucua

SEQ ID NO: 953578 - RNA, 19 nt, Artificial Sequence
  Description of Artificial Sequence: Synthetic oligonucleotide
uccugcgauggauggauuc

SEQ ID NO: 953579 - RNA, 19 nt, Artificial Sequence
  Description of Artificial Sequence: Synthetic oligonucleotide
ucuuugggucuauuucaaa

SEQ ID NO: 953580 - RNA, 19 nt, Artificial Sequence
  Description of Artificial Sequence: Synthetic oligonucleotide
acguaucucuugcuuaaau

SEQ ID NO: 953581 - RNA, 19 nt, Artificial Sequence
  Description of Artificial Sequence: Synthetic oligonucleotide
cacuuaccugaaaaccaug

SEQ ID NO: 953582 - RNA, 19 nt, Artificial Sequence
  Description of Artificial Sequence: Synthetic oligonucleotide
ugcgauggauggauuccac

SEQ ID NO: 953583 - RNA, 19 nt, Artificial Sequence
  Description of Artificial Sequence: Synthetic oligonucleotide
aagcaacaacuggaaagga

SEQ ID NO: 953584 - RNA, 19 nt, Artificial Sequence
  Description of Artificial Sequence: Synthetic oligonucleotide
uacuggaaucaaccaaguu

SEQ ID NO: 953585 - RNA, 19 nt, Artificial Sequence
  Description of Artificial Sequence: Synthetic oligonucleotide
gauuugcuacaaaauauau

SEQ ID NO: 953586 - RNA, 19 nt, Artificial Sequence
  Description of Artificial Sequence: Synthetic oligonucleotide
aguggucgccuccugagua

SEQ ID NO: 953587 - RNA, 19 nt, Artificial Sequence
  Description of Artificial Sequence: Synthetic oligonucleotide
uuaccggcaccaaguuccc

SEQ ID NO: 953588 - RNA, 19 nt, Artificial Sequence
  Description of Artificial Sequence: Synthetic oligonucleotide
guuuugaucuauacuggaa

SEQ ID NO: 953589 - RNA, 19 nt, Artificial Sequence
  Description of Artificial Sequence: Synthetic oligonucleotide
agucuaaaucuagaggcua

SEQ ID NO: 953590 - RNA, 19 nt, Artificial Sequence
  Description of Artificial Sequence: Synthetic oligonucleotide
auggaugccccacugucua

SEQ ID NO: 953591 - RNA, 19 nt, Artificial Sequence
  Description of Artificial Sequence: Synthetic oligonucleotide
aucgaaaacuaaguucaau

SEQ ID NO: 953592 - RNA, 19 nt, Artificial Sequence
  Description of Artificial Sequence: Synthetic oligonucleotide
cuucagacuucaccuagca

SEQ ID NO: 953593 - RNA, 19 nt, Artificial Sequence
  Description of Artificial Sequence: Synthetic oligonucleotide
ucuguccuaggcagcaguu

SEQ ID NO: 953594 - RNA, 19 nt, Artificial Sequence
  Description of Artificial Sequence: Synthetic oligonucleotide
gaggacugcaaucguucuc

SEQ ID NO: 953595 - RNA, 19 nt, Artificial Sequence
  Description of Artificial Sequence: Synthetic oligonucleotide
cacaucagcagccauuaua

SEQ ID NO: 953596 - RNA, 19 nt, Artificial Sequence
  Description of Artificial Sequence: Synthetic oligonucleotide
acgccugcaaguuuauaua

SEQ ID NO: 953597 - RNA, 19 nt, Artificial Sequence
  Description of Artificial Sequence: Synthetic oligonucleotide
cuaggauuugcucccguaa

SEQ ID NO: 953598 - RNA, 19 nt, Artificial Sequence
  Description of Artificial Sequence: Synthetic oligonucleotide
caagcuuaugacacuggaa

SEQ ID NO: 953599 - RNA, 19 nt, Artificial Sequence
  Description of Artificial Sequence: Synthetic oligonucleotide
ucacaacuccucugagacu

SEQ ID NO: 953600 - RNA, 19 nt, Artificial Sequence
  Description of Artificial Sequence: Synthetic oligonucleotide
uucuauggucaaguaugac

SEQ ID NO: 953601 - RNA, 19 nt, Artificial Sequence
  Description of Artificial Sequence: Synthetic oligonucleotide
ugcuuaaaucuaggauuug

SEQ ID NO: 953602 - RNA, 19 nt, Artificial Sequence
  Description of Artificial Sequence: Synthetic oligonucleotide
uuaccacauccaaugucuu

SEQ ID NO: 953603 - RNA, 19 nt, Artificial Sequence
  Description of Artificial Sequence: Synthetic oligonucleotide
uuggucguauugguugcug

SEQ ID NO: 953604 - RNA, 19 nt, Artificial Sequence
  Description of Artificial Sequence: Synthetic oligonucleotide
cuugauugagaagcaacaa

SEQ ID NO: 953605 - RNA, 19 nt, Artificial Sequence
  Description of Artificial Sequence: Synthetic oligonucleotide
ucguucucuucagauccgc

SEQ ID NO: 953606 - RNA, 19 nt, Artificial Sequence
  Description of Artificial Sequence: Synthetic oligonucleotide
ugagauuguaaagcucauu

SEQ ID NO: 953607 - RNA, 19 nt, Artificial Sequence
  Description of Artificial Sequence: Synthetic oligonucleotide
cugaaacuaagcauguuuu

SEQ ID NO: 953608 - RNA, 19 nt, Artificial Sequence
  Description of Artificial Sequence: Synthetic oligonucleotide
auacuacgaaauauagaau

SEQ ID NO: 953609 - RNA, 19 nt, Artificial Sequence
  Description of Artificial Sequence: Synthetic oligonucleotide
acuucaccuagcaaugaaa

SEQ ID NO: 953610 - RNA, 19 nt, Artificial Sequence
  Description of Artificial Sequence: Synthetic oligonucleotide
gucguauugguugcugaac

SEQ ID NO: 953611 - RNA, 19 nt, Artificial Sequence
  Description of Artificial Sequence: Synthetic oligonucleotide
cugcaaguuuauauacaga

SEQ ID NO: 953612 - RNA, 19 nt, Artificial Sequence
  Description of Artificial Sequence: Synthetic oligonucleotide
cagcaguuuaagagguguc

SEQ ID NO: 953613 - RNA, 19 nt, Artificial Sequence
  Description of Artificial Sequence: Synthetic oligonucleotide
cuacccauuucaaaaguau

SEQ ID NO: 953614 - RNA, 19 nt, Artificial Sequence
  Description of Artificial Sequence: Synthetic oligonucleotide
aucuagaggcuagcuccac

SEQ ID NO: 953615 - RNA, 19 nt, Artificial Sequence
  Description of Artificial Sequence: Synthetic oligonucleotide
uagaggcuagcuccacauc

SEQ ID NO: 953616 - RNA, 19 nt, Artificial Sequence
  Description of Artificial Sequence: Synthetic oligonucleotide
gcaaacuaauaacgccugc

SEQ ID NO: 953617 - RNA, 19 nt, Artificial Sequence
  Description of Artificial Sequence: Synthetic oligonucleotide
agaauacuauauagcaauu

SEQ ID NO: 953618 - RNA, 19 nt, Artificial Sequence
  Description of Artificial Sequence: Synthetic oligonucleotide
ccaagcguugcaaaauguc

SEQ ID NO: 953619 - RNA, 19 nt, Artificial Sequence
  Description of Artificial Sequence: Synthetic oligonucleotide
auacuggaaucaaccaagu

SEQ ID NO: 953620 - RNA, 19 nt, Artificial Sequence
  Description of Artificial Sequence: Synthetic oligonucleotide
ugguuaccggcaccaaguu

SEQ ID NO: 953621 - RNA, 19 nt, Artificial Sequence
  Description of Artificial Sequence: Synthetic oligonucleotide
guccgaacaccagcaacag

SEQ ID NO: 953622 - RNA, 19 nt, Artificial Sequence
  Description of Artificial Sequence: Synthetic oligonucleotide
acuugacgcugcucuggug

SEQ ID NO: 953623 - RNA, 19 nt, Artificial Sequence
  Description of Artificial Sequence: Synthetic oligonucleotide
ggucaaguaugacucuguc

SEQ ID NO: 953624 - RNA, 19 nt, Artificial Sequence
  Description of Artificial Sequence: Synthetic oligonucleotide
agauccgcguagccggcca

SEQ ID NO: 953625 - RNA, 19 nt, Artificial Sequence
  Description of Artificial Sequence: Synthetic oligonucleotide
cuacucuccuuucuauuaa

SEQ ID NO: 953626 - RNA, 19 nt, Artificial Sequence
  Description of Artificial Sequence: Synthetic oligonucleotide
accaagcguugcaaaaugu

SEQ ID NO: 953627 - RNA, 19 nt, Artificial Sequence
  Description of Artificial Sequence: Synthetic oligonucleotide
aaaccauguuauacacuua

SEQ ID NO: 953628 - RNA, 19 nt, Artificial Sequence
  Description of Artificial Sequence: Synthetic oligonucleotide
gcaugacacuuccuuuucc

SEQ ID NO: 953629 - RNA, 19 nt, Artificial Sequence
  Description of Artificial Sequence: Synthetic oligonucleotide
ccuuucuauuaaguagucc

SEQ ID NO: 953630 - RNA, 19 nt, Artificial Sequence
  Description of Artificial Sequence: Synthetic oligonucleotide
ccaaguuaagauuucuugu

SEQ ID NO: 953631 - RNA, 19 nt, Artificial Sequence
  Description of Artificial Sequence: Synthetic oligonucleotide
ucccggcuuaccacaucca

SEQ ID NO: 953632 - RNA, 19 nt, Artificial Sequence
  Description of Artificial Sequence: Synthetic oligonucleotide
caggcuauggacaguggcu

SEQ ID NO: 953633 - RNA, 19 nt, Artificial Sequence
  Description of Artificial Sequence: Synthetic oligonucleotide
gacaguggcugcuacccau

SEQ ID NO: 953634 - RNA, 19 nt, Artificial Sequence
  Description of Artificial Sequence: Synthetic oligonucleotide
agucgaccuuguucuccag

SEQ ID NO: 953635 - RNA, 19 nt, Artificial Sequence
  Description of Artificial Sequence: Synthetic oligonucleotide
gaaaggacccaaugucuuu

SEQ ID NO: 953636 - RNA, 19 nt, Artificial Sequence
  Description of Artificial Sequence: Synthetic oligonucleotide
cacauccaaugucuuacaa

SEQ ID NO: 953637 - RNA, 19 nt, Artificial Sequence
  Description of Artificial Sequence: Synthetic oligonucleotide
cugcucauauucugaguaa

SEQ ID NO: 953638 - RNA, 19 nt, Artificial Sequence
  Description of Artificial Sequence: Synthetic oligonucleotide
cuaaaucuagaggcuagcu

SEQ ID NO: 953639 - RNA, 19 nt, Artificial Sequence
  Description of Artificial Sequence: Synthetic oligonucleotide
cuauuaaguaguccccaau

SEQ ID NO: 953640 - RNA, 19 nt, Artificial Sequence
  Description of Artificial Sequence: Synthetic oligonucleotide
aaaguacagggaagacauu

SEQ ID NO: 953641 - RNA, 19 nt, Artificial Sequence
  Description of Artificial Sequence: Synthetic oligonucleotide
uggaugccccacugucuac

SEQ ID NO: 953642 - RNA, 19 nt, Artificial Sequence
  Description of Artificial Sequence: Synthetic oligonucleotide
ggcuauggacaguggcugc

SEQ ID NO: 953643 - RNA, 19 nt, Artificial Sequence
  Description of Artificial Sequence: Synthetic oligonucleotide
ccugcgauggauggauucc

SEQ ID NO: 953644 - RNA, 19 nt, Artificial Sequence
  Description of Artificial Sequence: Synthetic oligonucleotide
gcaaucguucucuucagau

SEQ ID NO: 953645 - RNA, 19 nt, Artificial Sequence
  Description of Artificial Sequence: Synthetic oligonucleotide
gacuacucuccuuucuauu

SEQ ID NO: 953646 - RNA, 19 nt, Artificial Sequence
  Description of Artificial Sequence: Synthetic oligonucleotide
ggucguauugguugcugaa

SEQ ID NO: 953647 - RNA, 19 nt, Artificial Sequence
  Description of Artificial Sequence: Synthetic oligonucleotide
gguuaccggcaccaaguuc

SEQ ID NO: 953648 - RNA, 19 nt, Artificial Sequence
  Description of Artificial Sequence: Synthetic oligonucleotide
acuggugccauuggucgua

SEQ ID NO: 953649 - RNA, 19 nt, Artificial Sequence
  Description of Artificial Sequence: Synthetic oligonucleotide
ccauguuauacacuuaaau

SEQ ID NO: 953650 - RNA, 19 nt, Artificial Sequence
  Description of Artificial Sequence: Synthetic oligonucleotide
cauggaugccccacugucu

SEQ ID NO: 953651 - RNA, 19 nt, Artificial Sequence
  Description of Artificial Sequence: Synthetic oligonucleotide
guauugguugcugaaccau

SEQ ID NO: 953652 - RNA, 19 nt, Artificial Sequence
  Description of Artificial Sequence: Synthetic oligonucleotide
cuuaccugaaaaccauguu

SEQ ID NO: 953653 - RNA, 19 nt, Artificial Sequence
  Description of Artificial Sequence: Synthetic oligonucleotide
cauccucauaauuuauauu

SEQ ID NO: 953654 - RNA, 19 nt, Artificial Sequence
  Description of Artificial Sequence: Synthetic oligonucleotide
caaguaugacucuguccua

SEQ ID NO: 953655 - RNA, 19 nt, Artificial Sequence
  Description of Artificial Sequence: Synthetic oligonucleotide
aacucccauucagcauaca

SEQ ID NO: 953656 - RNA, 19 nt, Artificial Sequence
  Description of Artificial Sequence: Synthetic oligonucleotide
cuguauauaguagcuguuu

SEQ ID NO: 953657 - RNA, 19 nt, Artificial Sequence
  Description of Artificial Sequence: Synthetic oligonucleotide
gcgauggauggauuccaca

SEQ ID NO: 953658 - RNA, 19 nt, Artificial Sequence
  Description of Artificial Sequence: Synthetic oligonucleotide
ggccauggaugccccacug

SEQ ID NO: 953659 - RNA, 19 nt, Artificial Sequence
  Description of Artificial Sequence: Synthetic oligonucleotide
cuacucacagggauaucau

SEQ ID NO: 953660 - RNA, 19 nt, Artificial Sequence
  Description of Artificial Sequence: Synthetic oligonucleotide
cugcgauggauggauucca

SEQ ID NO: 953661 - RNA, 19 nt, Artificial Sequence
  Description of Artificial Sequence: Synthetic oligonucleotide
auaacgccugcaaguuuau

SEQ ID NO: 953662 - RNA, 19 nt, Artificial Sequence
  Description of Artificial Sequence: Synthetic oligonucleotide
gugcuucagacuucaccua

SEQ ID NO: 953663 - RNA, 19 nt, Artificial Sequence
  Description of Artificial Sequence: Synthetic oligonucleotide
gcuuaugacacuggaauuu

SEQ ID NO: 953664 - RNA, 19 nt, Artificial Sequence
  Description of Artificial Sequence: Synthetic oligonucleotide
uucuacucacagggauauc

SEQ ID NO: 953665 - RNA, 19 nt, Artificial Sequence
  Description of Artificial Sequence: Synthetic oligonucleotide
cagcaugacacuuccuuuu

SEQ ID NO: 953666 - RNA, 19 nt, Artificial Sequence
  Description of Artificial Sequence: Synthetic oligonucleotide
cuaucugacacugcccgau

SEQ ID NO: 953667 - RNA, 19 nt, Artificial Sequence
  Description of Artificial Sequence: Synthetic oligonucleotide
agacguguuuugaucuaua

SEQ ID NO: 953668 - RNA, 19 nt, Artificial Sequence
  Description of Artificial Sequence: Synthetic oligonucleotide
ggcuucuauggucaaguau

SEQ ID NO: 953669 - RNA, 19 nt, Artificial Sequence
  Description of Artificial Sequence: Synthetic oligonucleotide
uggucaggcuauggacagu

SEQ ID NO: 953670 - RNA, 19 nt, Artificial Sequence
  Description of Artificial Sequence: Synthetic oligonucleotide
cccaauggucaggcuaugg

SEQ ID NO: 953671 - RNA, 19 nt, Artificial Sequence
  Description of Artificial Sequence: Synthetic oligonucleotide
uaacgccugcaaguuuaua

SEQ ID NO: 953672 - RNA, 19 nt, Artificial Sequence
  Description of Artificial Sequence: Synthetic oligonucleotide
caucagcagccauuauaua

SEQ ID NO: 953673 - RNA, 19 nt, Artificial Sequence
  Description of Artificial Sequence: Synthetic oligonucleotide
gcuaucugacacugcccga

SEQ ID NO: 953674 - RNA, 19 nt, Artificial Sequence
  Description of Artificial Sequence: Synthetic oligonucleotide
gucgaccuuguucuccagu

SEQ ID NO: 953675 - RNA, 19 nt, Artificial Sequence
  Description of Artificial Sequence: Synthetic oligonucleotide
gucgccuccugaguaucca

SEQ ID NO: 953676 - RNA, 19 nt, Artificial Sequence
  Description of Artificial Sequence: Synthetic oligonucleotide
gaugccccacugucuacau

SEQ ID NO: 953677 - RNA, 19 nt, Artificial Sequence
  Description of Artificial Sequence: Synthetic oligonucleotide
gcuacccauuucaaaagua

SEQ ID NO: 953678 - RNA, 19 nt, Artificial Sequence
  Description of Artificial Sequence: Synthetic oligonucleotide
ggaugccccacugucuaca

SEQ ID NO: 953679 - RNA, 19 nt, Artificial Sequence
  Description of Artificial Sequence: Synthetic oligonucleotide
ggcuuuugagaaggaagaa

SEQ ID NO: 953680 - RNA, 19 nt, Artificial Sequence
  Description of Artificial Sequence: Synthetic oligonucleotide
caauguggagggcuucuau

SEQ ID NO: 953681 - RNA, 19 nt, Artificial Sequence
  Description of Artificial Sequence: Synthetic oligonucleotide
ggcuguugaaaaguauagu

SEQ ID NO: 953682 - RNA, 19 nt, Artificial Sequence
  Description of Artificial Sequence: Synthetic oligonucleotide
caauauagucgaccuuguu

SEQ ID NO: 953683 - RNA, 19 nt, Artificial Sequence
  Description of Artificial Sequence: Synthetic oligonucleotide
cuauggacaguggcugcua

SEQ ID NO: 953684 - RNA, 19 nt, Artificial Sequence
  Description of Artificial Sequence: Synthetic oligonucleotide
gggauaucaugagggcaga

SEQ ID NO: 953685 - RNA, 19 nt, Artificial Sequence
  Description of Artificial Sequence: Synthetic oligonucleotide
ggcuuaccacauccaaugu

SEQ ID NO: 953686 - RNA, 19 nt, Artificial Sequence
  Description of Artificial Sequence: Synthetic oligonucleotide
cugaaccauucacaacaau

SEQ ID NO: 953687 - RNA, 19 nt, Artificial Sequence
  Description of Artificial Sequence: Synthetic oligonucleotide
ccuaugaauccagcgagcu

SEQ ID NO: 953688 - RNA, 19 nt, Artificial Sequence
  Description of Artificial Sequence: Synthetic oligonucleotide
ccacuuaccugaaaaccau

SEQ ID NO: 953689 - RNA, 19 nt, Artificial Sequence
  Description of Artificial Sequence: Synthetic oligonucleotide
cacuggugccauuggucgu

SEQ ID NO: 953690 - RNA, 19 nt, Artificial Sequence
  Description of Artificial Sequence: Synthetic oligonucleotide
cgaugcacucguccuuuug

SEQ ID NO: 953691 - RNA, 19 nt, Artificial Sequence
  Description of Artificial Sequence: Synthetic oligonucleotide
uggugccauuggucguauu

SEQ ID NO: 953692 - RNA, 19 nt, Artificial Sequence
  Description of Artificial Sequence: Synthetic oligonucleotide
gauccgcguagccggccau

SEQ ID NO: 953693 - RNA, 19 nt, Artificial Sequence
  Description of Artificial Sequence: Synthetic oligonucleotide
ggagggcuucuauggucaa

SEQ ID NO: 953694 - RNA, 19 nt, Artificial Sequence
  Description of Artificial Sequence: Synthetic oligonucleotide
cccggcuuaccacauccaa

SEQ ID NO: 953695 - RNA, 19 nt, Artificial Sequence
  Description of Artificial Sequence: Synthetic oligonucleotide
gccauggaugccccacugu

SEQ ID NO: 953696 - RNA, 19 nt, Artificial Sequence
  Description of Artificial Sequence: Synthetic oligonucleotide
cuguccuaggcagcaguuu

SEQ ID NO: 953697 - RNA, 19 nt, Artificial Sequence
  Description of Artificial Sequence: Synthetic oligonucleotide
ggauaucaugagggcagau

SEQ ID NO: 953698 - RNA, 19 nt, Artificial Sequence
  Description of Artificial Sequence: Synthetic oligonucleotide
ccggcuuaccacauccaau

SEQ ID NO: 953699 - RNA, 19 nt, Artificial Sequence
  Description of Artificial Sequence: Synthetic oligonucleotide
ccguaacuugacgcugcuc

SEQ ID NO: 953700 - RNA, 19 nt, Artificial Sequence
  Description of Artificial Sequence: Synthetic oligonucleotide
ccucccggcuuaccacauc

SEQ ID NO: 953701 - RNA, 19 nt, Artificial Sequence
  Description of Artificial Sequence: Synthetic oligonucleotide
gccauuggucguauugguu

SEQ ID NO: 953702 - RNA, 19 nt, Artificial Sequence
  Description of Artificial Sequence: Synthetic oligonucleotide
gggcuuucacguaucucuu

SEQ ID NO: 953703 - RNA, 19 nt, Artificial Sequence
  Description of Artificial Sequence: Synthetic oligonucleotide
ccggcaccaaguucccacu

SEQ ID NO: 953704 - RNA, 19 nt, Artificial Sequence
  Description of Artificial Sequence: Synthetic oligonucleotide
cccguaacuugacgcugcu

SEQ ID NO: 953705 - RNA, 19 nt, Artificial Sequence
  Description of Artificial Sequence: Synthetic oligonucleotide
guccugcgauggauggauu

SEQ ID NO: 953706 - RNA, 19 nt, Artificial Sequence
  Description of Artificial Sequence: Synthetic oligonucleotide
ccgaugcacucguccuuuu

SEQ ID NO: 953707 - RNA, 19 nt, Artificial Sequence
  Description of Artificial Sequence: Synthetic oligonucleotide
auuucuuuagcucuggucc

SEQ ID NO: 953708 - RNA, 19 nt, Artificial Sequence
  Description of Artificial Sequence: Synthetic oligonucleotide
aguagauggaaguagaucg

SEQ ID NO: 953709 - RNA, 19 nt, Artificial Sequence
  Description of Artificial Sequence: Synthetic oligonucleotide
uuugggaugaggaaguugg

SEQ ID NO: 953710 - RNA, 19 nt, Artificial Sequence
  Description of Artificial Sequence: Synthetic oligonucleotide
uugacaauaacuuccagag

SEQ ID NO: 953711 - RNA, 19 nt, Artificial Sequence
  Description of Artificial Sequence: Synthetic oligonucleotide
aaugacuuaauuucuuuag

SEQ ID NO: 953712 - RNA, 19 nt, Artificial Sequence
  Description of Artificial Sequence: Synthetic oligonucleotide
uuuaauuugaacugaggcc

SEQ ID NO: 953713 - RNA, 19 nt, Artificial Sequence
  Description of Artificial Sequence: Synthetic oligonucleotide
aacaaaccgucuuaaauuc

SEQ ID NO: 953714 - RNA, 19 nt, Artificial Sequence
  Description of Artificial Sequence: Synthetic oligonucleotide
ggaauaauagcucagaccc

SEQ ID NO: 953715 - RNA, 19 nt, Artificial Sequence
  Description of Artificial Sequence: Synthetic oligonucleotide
aauagguauacaguacucc

SEQ ID NO: 953716 - RNA, 19 nt, Artificial Sequence
  Description of Artificial Sequence: Synthetic oligonucleotide
ucaguuaaaaguuagcuaa

SEQ ID NO: 953717 - RNA, 19 nt, Artificial Sequence
  Description of Artificial Sequence: Synthetic oligonucleotide
uuuacgaggaauuucuucc

SEQ ID NO: 953718 - RNA, 19 nt, Artificial Sequence
  Description of Artificial Sequence: Synthetic oligonucleotide
aaaguuagcuaauauaaaa

SEQ ID NO: 953719 - RNA, 19 nt, Artificial Sequence
  Description of Artificial Sequence: Synthetic oligonucleotide
aauaugacugcagaaacag

SEQ ID NO: 953720 - RNA, 19 nt, Artificial Sequence
  Description of Artificial Sequence: Synthetic oligonucleotide
agcauuugcuauuacgucc

SEQ ID NO: 953721 - RNA, 19 nt, Artificial Sequence
  Description of Artificial Sequence: Synthetic oligonucleotide
uuagguuccauauugugcc

SEQ ID NO: 953722 - RNA, 19 nt, Artificial Sequence
  Description of Artificial Sequence: Synthetic oligonucleotide
uucaguuacugucugaaag

SEQ ID NO: 953723 - RNA, 19 nt, Artificial Sequence
  Description of Artificial Sequence: Synthetic oligonucleotide
uauugauggguuaagaagu

SEQ ID NO: 953724 - RNA, 19 nt, Artificial Sequence
  Description of Artificial Sequence: Synthetic oligonucleotide
ucuccuguuaccacgaggg

SEQ ID NO: 953725 - RNA, 19 nt, Artificial Sequence
  Description of Artificial Sequence: Synthetic oligonucleotide
aauaauagguauacaguac

SEQ ID NO: 953726 - RNA, 19 nt, Artificial Sequence
  Description of Artificial Sequence: Synthetic oligonucleotide
auacugaccacauucacuc

SEQ ID NO: 953727 - RNA, 19 nt, Artificial Sequence
  Description of Artificial Sequence: Synthetic oligonucleotide
agacacaagacucuggagg

SEQ ID NO: 953728 - RNA, 19 nt, Artificial Sequence
  Description of Artificial Sequence: Synthetic oligonucleotide
uugucaagaacacacagcu

SEQ ID NO: 953729 - RNA, 19 nt, Artificial Sequence
  Description of Artificial Sequence: Synthetic oligonucleotide
uuaauuugaacugaggccu

SEQ ID NO: 953730 - RNA, 19 nt, Artificial Sequence
  Description of Artificial Sequence: Synthetic oligonucleotide
agcuaauauaaaaugauac

SEQ ID NO: 953731 - RNA, 19 nt, Artificial Sequence
  Description of Artificial Sequence: Synthetic oligonucleotide
uuuagguuccauauugugc

SEQ ID NO: 953732 - RNA, 19 nt, Artificial Sequence
  Description of Artificial Sequence: Synthetic oligonucleotide
uuucuacuaauucugauuc

SEQ ID NO: 953733 - RNA, 19 nt, Artificial Sequence
  Description of Artificial Sequence: Synthetic oligonucleotide
ucugauuaaaggcauguac

SEQ ID NO: 953734 - RNA, 19 nt, Artificial Sequence
  Description of Artificial Sequence: Synthetic oligonucleotide
ucaguuacugucugaaagg

SEQ ID NO: 953735 - RNA, 19 nt, Artificial Sequence
  Description of Artificial Sequence: Synthetic oligonucleotide
cuauugauggguuaagaag

SEQ ID NO: 953736 - RNA, 19 nt, Artificial Sequence
  Description of Artificial Sequence: Synthetic oligonucleotide
cuaauucugauucuaaaac

SEQ ID NO: 953737 - RNA, 19 nt, Artificial Sequence
  Description of Artificial Sequence: Synthetic oligonucleotide
agaacauaugucaauggcc

SEQ ID NO: 953738 - RNA, 19 nt, Artificial Sequence
  Description of Artificial Sequence: Synthetic oligonucleotide
uuugcuauuacguccucag

SEQ ID NO: 953739 - RNA, 19 nt, Artificial Sequence
  Description of Artificial Sequence: Synthetic oligonucleotide
aacaucaaagagggcaucc

SEQ ID NO: 953740 - RNA, 19 nt, Artificial Sequence
  Description of Artificial Sequence: Synthetic oligonucleotide
aagugugccaucuucuuug

SEQ ID NO: 953741 - RNA, 19 nt, Artificial Sequence
  Description of Artificial Sequence: Synthetic oligonucleotide
ugugccaucaaaauacuuc

SEQ ID NO: 953742 - RNA, 19 nt, Artificial Sequence
  Description of Artificial Sequence: Synthetic oligonucleotide
auaauagguauacaguacu

SEQ ID NO: 953743 - RNA, 19 nt, Artificial Sequence
  Description of Artificial Sequence: Synthetic oligonucleotide
ucaaagagggcauccaaag

SEQ ID NO: 953744 - RNA, 19 nt, Artificial Sequence
  Description of Artificial Sequence: Synthetic oligonucleotide
agagcauccaagcaaugac

SEQ ID NO: 953745 - RNA, 19 nt, Artificial Sequence
  Description of Artificial Sequence: Synthetic oligonucleotide
uaaucaaagguuuccaagu

SEQ ID NO: 953746 - RNA, 19 nt, Artificial Sequence
  Description of Artificial Sequence: Synthetic oligonucleotide
cagaauguauuccauagag

SEQ ID NO: 953747 - RNA, 19 nt, Artificial Sequence
  Description of Artificial Sequence: Synthetic oligonucleotide
uggaauaauagcucagacc

SEQ ID NO: 953748 - RNA, 19 nt, Artificial Sequence
  Description of Artificial Sequence: Synthetic oligonucleotide
agggagugagguuacaugg

SEQ ID NO: 953749 - RNA, 19 nt, Artificial Sequence
  Description of Artificial Sequence: Synthetic oligonucleotide
ucggaaauaaauguuuucc

SEQ ID NO: 953750 - RNA, 19 nt, Artificial Sequence
  Description of Artificial Sequence: Synthetic oligonucleotide
gaauguauuccauagaggu

SEQ ID NO: 953751 - RNA, 19 nt, Artificial Sequence
  Description of Artificial Sequence: Synthetic oligonucleotide
uggaauucuuucaaaguug

SEQ ID NO: 953752 - RNA, 19 nt, Artificial Sequence
  Description of Artificial Sequence: Synthetic oligonucleotide
aauaauagcucagaccccu

SEQ ID NO: 953753 - RNA, 19 nt, Artificial Sequence
  Description of Artificial Sequence: Synthetic oligonucleotide
aaguaggguuccuagaaca

SEQ ID NO: 953754 - RNA, 19 nt, Artificial Sequence
  Description of Artificial Sequence: Synthetic oligonucleotide
aaccgucuuaaauucaucu

SEQ ID NO: 953755 - RNA, 19 nt, Artificial Sequence
  Description of Artificial Sequence: Synthetic oligonucleotide
auaauauccuuuagguucc

SEQ ID NO: 953756 - RNA, 19 nt, Artificial Sequence
  Description of Artificial Sequence: Synthetic oligonucleotide
auggaauaauagcucagac

SEQ ID NO: 953757 - RNA, 19 nt, Artificial Sequence
  Description of Artificial Sequence: Synthetic oligonucleotide
cucaaagcacuacuuaugg

SEQ ID NO: 953758 - RNA, 19 nt, Artificial Sequence
  Description of Artificial Sequence: Synthetic oligonucleotide
uucacucgaaccccgaugc

SEQ ID NO: 953759 - RNA, 19 nt, Artificial Sequence
  Description of Artificial Sequence: Synthetic oligonucleotide
aagcuuauauuuauauuuc

SEQ ID NO: 953760 - RNA, 19 nt, Artificial Sequence
  Description of Artificial Sequence: Synthetic oligonucleotide
cauugcuugcaaaagggcc

SEQ ID NO: 953761 - RNA, 19 nt, Artificial Sequence
  Description of Artificial Sequence: Synthetic oligonucleotide
uuuagcucugguccuauug

SEQ ID NO: 953762 - RNA, 19 nt, Artificial Sequence
  Description of Artificial Sequence: Synthetic oligonucleotide
gucaagaacacacagcuga

SEQ ID NO: 953763 - RNA, 19 nt, Artificial Sequence
  Description of Artificial Sequence: Synthetic oligonucleotide
auuaucuacugagaguaac

SEQ ID NO: 953764 - RNA, 19 nt, Artificial Sequence
  Description of Artificial Sequence: Synthetic oligonucleotide
uuaucuacugagaguaaca

SEQ ID NO: 953765 - RNA, 19 nt, Artificial Sequence
  Description of Artificial Sequence: Synthetic oligonucleotide
aacuaaaucaucaccauua

SEQ ID NO: 953766 - RNA, 19 nt, Artificial Sequence
  Description of Artificial Sequence: Synthetic oligonucleotide
auccccaaaauacugacca

SEQ ID NO: 953767 - RNA, 19 nt, Artificial Sequence
  Description of Artificial Sequence: Synthetic oligonucleotide
cuucaacuaaaucaucacc

SEQ ID NO: 953768 - RNA, 19 nt, Artificial Sequence
  Description of Artificial Sequence: Synthetic oligonucleotide
ugugcaagugucugaagag

SEQ ID NO: 953769 - RNA, 19 nt, Artificial Sequence
  Description of Artificial Sequence: Synthetic oligonucleotide
ugcuauuacguccucaguc

SEQ ID NO: 953770 - RNA, 19 nt, Artificial Sequence
  Description of Artificial Sequence: Synthetic oligonucleotide
aaaagaguaauaauaggua

SEQ ID NO: 953771 - RNA, 19 nt, Artificial Sequence
  Description of Artificial Sequence: Synthetic oligonucleotide
aaguagaucggaaauaaau

SEQ ID NO: 953772 - RNA, 19 nt, Artificial Sequence
  Description of Artificial Sequence: Synthetic oligonucleotide
ugagaguaacaaauucaag

SEQ ID NO: 953773 - RNA, 19 nt, Artificial Sequence
  Description of Artificial Sequence: Synthetic oligonucleotide
uuaagaguuucaagugugc

SEQ ID NO: 953774 - RNA, 19 nt, Artificial Sequence
  Description of Artificial Sequence: Synthetic oligonucleotide
agcaaaaucuggcugagaa

SEQ ID NO: 953775 - RNA, 19 nt, Artificial Sequence
  Description of Artificial Sequence: Synthetic oligonucleotide
auagcucagaccccuguac

SEQ ID NO: 953776 - RNA, 19 nt, Artificial Sequence
  Description of Artificial Sequence: Synthetic oligonucleotide
acauaagggcucuacacug

SEQ ID NO: 953777 - RNA, 19 nt, Artificial Sequence
  Description of Artificial Sequence: Synthetic oligonucleotide
ugucauacacuguggaaug

SEQ ID NO: 953778 - RNA, 19 nt, Artificial Sequence
  Description of Artificial Sequence: Synthetic oligonucleotide
aagggcucuacacugaaua

SEQ ID NO: 953779 - RNA, 19 nt, Artificial Sequence
  Description of Artificial Sequence: Synthetic oligonucleotide
gaacauaugucaauggcca

SEQ ID NO: 953780 - RNA, 19 nt, Artificial Sequence
  Description of Artificial Sequence: Synthetic oligonucleotide
caaaagaguaauaauaggu

SEQ ID NO: 953781 - RNA, 19 nt, Artificial Sequence
  Description of Artificial Sequence: Synthetic oligonucleotide
uuagcucugguccuauuga

SEQ ID NO: 953782 - RNA, 19 nt, Artificial Sequence
  Description of Artificial Sequence: Synthetic oligonucleotide
acuacuuauggcuucuaga

SEQ ID NO: 953783 - RNA, 19 nt, Artificial Sequence
  Description of Artificial Sequence: Synthetic oligonucleotide
uucaguuaaaaguuagcua

SEQ ID NO: 953784 - RNA, 19 nt, Artificial Sequence
  Description of Artificial Sequence: Synthetic oligonucleotide
gaccacauucacucgaacc

SEQ ID NO: 953785 - RNA, 19 nt, Artificial Sequence
  Description of Artificial Sequence: Synthetic oligonucleotide
auuucuacuaauucugauu

SEQ ID NO: 953786 - RNA, 19 nt, Artificial Sequence
  Description of Artificial Sequence: Synthetic oligonucleotide
caaagguuuccaaguaggg

SEQ ID NO: 953787 - RNA, 19 nt, Artificial Sequence
  Description of Artificial Sequence: Synthetic oligonucleotide
acuggcuuuaaagagcauc

SEQ ID NO: 953788 - RNA, 19 nt, Artificial Sequence
  Description of Artificial Sequence: Synthetic oligonucleotide
aaguuagcuaauauaaaau

SEQ ID NO: 953789 - RNA, 19 nt, Artificial Sequence
  Description of Artificial Sequence: Synthetic oligonucleotide
gauggaauaauauccuuua

SEQ ID NO: 953790 - RNA, 19 nt, Artificial Sequence
  Description of Artificial Sequence: Synthetic oligonucleotide
cagcucauuaucuacugag

SEQ ID NO: 953791 - RNA, 19 nt, Artificial Sequence
  Description of Artificial Sequence: Synthetic oligonucleotide
aaucaaagguuuccaagua

SEQ ID NO: 953792 - RNA, 19 nt, Artificial Sequence
  Description of Artificial Sequence: Synthetic oligonucleotide
ugucaguagauggaaguag

SEQ ID NO: 953793 - RNA, 19 nt, Artificial Sequence
  Description of Artificial Sequence: Synthetic oligonucleotide
agccauugcuugcaaaagg

SEQ ID NO: 953794 - RNA, 19 nt, Artificial Sequence
  Description of Artificial Sequence: Synthetic oligonucleotide
agugugaaucucaugggac

SEQ ID NO: 953795 - RNA, 19 nt, Artificial Sequence
  Description of Artificial Sequence: Synthetic oligonucleotide
uucaagugugccaucuucu

SEQ ID NO: 953796 - RNA, 19 nt, Artificial Sequence
  Description of Artificial Sequence: Synthetic oligonucleotide
gaaugacugugucagcagc

SEQ ID NO: 953797 - RNA, 19 nt, Artificial Sequence
  Description of Artificial Sequence: Synthetic oligonucleotide
uggguuaagaagucagucu

SEQ ID NO: 953798 - RNA, 19 nt, Artificial Sequence
  Description of Artificial Sequence: Synthetic oligonucleotide
cuuuagguuccauauugug

SEQ ID NO: 953799 - RNA, 19 nt, Artificial Sequence
  Description of Artificial Sequence: Synthetic oligonucleotide
ucuuaaucaaagguuucca

SEQ ID NO: 953800 - RNA, 19 nt, Artificial Sequence
  Description of Artificial Sequence: Synthetic oligonucleotide
acauaagacagggagugag

SEQ ID NO: 953801 - RNA, 19 nt, Artificial Sequence
  Description of Artificial Sequence: Synthetic oligonucleotide
ucuggacuguauuugcccc

SEQ ID NO: 953802 - RNA, 19 nt, Artificial Sequence
  Description of Artificial Sequence: Synthetic oligonucleotide
uaauagguauacaguacuc

SEQ ID NO: 953803 - RNA, 19 nt, Artificial Sequence
  Description of Artificial Sequence: Synthetic oligonucleotide
acuaugaaugccugcuuug

SEQ ID NO: 953804 - RNA, 19 nt, Artificial Sequence
  Description of Artificial Sequence: Synthetic oligonucleotide
agcacauguugacaauaac

SEQ ID NO: 953805 - RNA, 19 nt, Artificial Sequence
  Description of Artificial Sequence: Synthetic oligonucleotide
agugagguuacauggaaua

SEQ ID NO: 953806 - RNA, 19 nt, Artificial Sequence
  Description of Artificial Sequence: Synthetic oligonucleotide
cugauucuaaaacacauaa

SEQ ID NO: 953807 - RNA, 19 nt, Artificial Sequence
  Description of Artificial Sequence: Synthetic oligonucleotide
uaaagcuuauauuuauauu

SEQ ID NO: 953808 - RNA, 19 nt, Artificial Sequence
  Description of Artificial Sequence: Synthetic oligonucleotide
guauacaguacuccauacc

SEQ ID NO: 953809 - RNA, 19 nt, Artificial Sequence
  Description of Artificial Sequence: Synthetic oligonucleotide
agaauguauuccauagagg

SEQ ID NO: 953810 - RNA, 19 nt, Artificial Sequence
  Description of Artificial Sequence: Synthetic oligonucleotide
uuccaaguaggguuccuag

SEQ ID NO: 953811 - RNA, 19 nt, Artificial Sequence
  Description of Artificial Sequence: Synthetic oligonucleotide
uauugugccugcuaccagu

SEQ ID NO: 953812 - RNA, 19 nt, Artificial Sequence
  Description of Artificial Sequence: Synthetic oligonucleotide
ugaaucucaugggacaggc

SEQ ID NO: 953813 - RNA, 19 nt, Artificial Sequence
  Description of Artificial Sequence: Synthetic oligonucleotide
acaagaucuuuaguauggc

SEQ ID NO: 953814 - RNA, 19 nt, Artificial Sequence
  Description of Artificial Sequence: Synthetic oligonucleotide
uaggguuccuagaacauau

SEQ ID NO: 953815 - RNA, 19 nt, Artificial Sequence
  Description of Artificial Sequence: Synthetic oligonucleotide
cauuuaugauuucugccug

SEQ ID NO: 953816 - RNA, 19 nt, Artificial Sequence
  Description of Artificial Sequence: Synthetic oligonucleotide
ugaggaaguugguaagggc

SEQ ID NO: 953817 - RNA, 19 nt, Artificial Sequence
  Description of Artificial Sequence: Synthetic oligonucleotide
cuacuuauggcuucuagaa

SEQ ID NO: 953818 - RNA, 19 nt, Artificial Sequence
  Description of Artificial Sequence: Synthetic oligonucleotide
ucugauucuaaaacacaua

SEQ ID NO: 953819 - RNA, 19 nt, Artificial Sequence
  Description of Artificial Sequence: Synthetic oligonucleotide
ucaaagcacuacuuauggc

SEQ ID NO: 953820 - RNA, 19 nt, Artificial Sequence
  Description of Artificial Sequence: Synthetic oligonucleotide
ugacaauaacuuccagagc

SEQ ID NO: 953821 - RNA, 19 nt, Artificial Sequence
  Description of Artificial Sequence: Synthetic oligonucleotide
uagaucggaaauaaauguu

SEQ ID NO: 953822 - RNA, 19 nt, Artificial Sequence
  Description of Artificial Sequence: Synthetic oligonucleotide
gggucugucugauuaaagg

SEQ ID NO: 953823 - RNA, 19 nt, Artificial Sequence
  Description of Artificial Sequence: Synthetic oligonucleotide
acagaaugcaauccccuca

SEQ ID NO: 953824 - RNA, 19 nt, Artificial Sequence
  Description of Artificial Sequence: Synthetic oligonucleotide
ccugguaagcaacaaaccg

SEQ ID NO: 953825 - RNA, 19 nt, Artificial Sequence
  Description of Artificial Sequence: Synthetic oligonucleotide
guagaucggaaauaaaugu

SEQ ID NO: 953826 - RNA, 19 nt, Artificial Sequence
  Description of Artificial Sequence: Synthetic oligonucleotide
ucaccauuagcauuugcua

SEQ ID NO: 953827 - RNA, 19 nt, Artificial Sequence
  Description of Artificial Sequence: Synthetic oligonucleotide
ucuacuaauucugauucua

SEQ ID NO: 953828 - RNA, 19 nt, Artificial Sequence
  Description of Artificial Sequence: Synthetic oligonucleotide
ggucugucugauuaaaggc

SEQ ID NO: 953829 - RNA, 19 nt, Artificial Sequence
  Description of Artificial Sequence: Synthetic oligonucleotide
acuagaaagcucuucccau

SEQ ID NO: 953830 - RNA, 19 nt, Artificial Sequence
  Description of Artificial Sequence: Synthetic oligonucleotide
ugucugauuaaaggcaugu

SEQ ID NO: 953831 - RNA, 19 nt, Artificial Sequence
  Description of Artificial Sequence: Synthetic oligonucleotide
agucagucuuuucucaaca

SEQ ID NO: 953832 - RNA, 19 nt, Artificial Sequence
  Description of Artificial Sequence: Synthetic oligonucleotide
cuuuagcagaauguauucc

SEQ ID NO: 953833 - RNA, 19 nt, Artificial Sequence
  Description of Artificial Sequence: Synthetic oligonucleotide
ugcauagugucaucagcug

SEQ ID NO: 953834 - RNA, 19 nt, Artificial Sequence
  Description of Artificial Sequence: Synthetic oligonucleotide
uuagcagaauguauuccau

SEQ ID NO: 953835 - RNA, 19 nt, Artificial Sequence
  Description of Artificial Sequence: Synthetic oligonucleotide
auccccucagcucauuauc

SEQ ID NO: 953836 - RNA, 19 nt, Artificial Sequence
  Description of Artificial Sequence: Synthetic oligonucleotide
caaagcacuacuuauggcu

SEQ ID NO: 953837 - RNA, 19 nt, Artificial Sequence
  Description of Artificial Sequence: Synthetic oligonucleotide
aagaguaauaauagguaua

SEQ ID NO: 953838 - RNA, 19 nt, Artificial Sequence
  Description of Artificial Sequence: Synthetic oligonucleotide
uacuccauaccaaaauauu

SEQ ID NO: 953839 - RNA, 19 nt, Artificial Sequence
  Description of Artificial Sequence: Synthetic oligonucleotide
uuagcaaaaucuggcugag

SEQ ID NO: 953840 - RNA, 19 nt, Artificial Sequence
  Description of Artificial Sequence: Synthetic oligonucleotide
auaaaaugauacuggcuuu

SEQ ID NO: 953841 - RNA, 19 nt, Artificial Sequence
  Description of Artificial Sequence: Synthetic oligonucleotide
auucacucgaaccccgaug

SEQ ID NO: 953842 - RNA, 19 nt, Artificial Sequence
  Description of Artificial Sequence: Synthetic oligonucleotide
cauaugucaauggccauac

SEQ ID NO: 953843 - RNA, 19 nt, Artificial Sequence
  Description of Artificial Sequence: Synthetic oligonucleotide
ugugccugcuaccaguguc

SEQ ID NO: 953844 - RNA, 19 nt, Artificial Sequence
  Description of Artificial Sequence: Synthetic oligonucleotide
cugagaguaacaaauucaa

SEQ ID NO: 953845 - RNA, 19 nt, Artificial Sequence
  Description of Artificial Sequence: Synthetic oligonucleotide
acucgaaccccgaugcugc

SEQ ID NO: 953846 - RNA, 19 nt, Artificial Sequence
  Description of Artificial Sequence: Synthetic oligonucleotide
uacuaugaaugccugcuuu

SEQ ID NO: 953847 - RNA, 19 nt, Artificial Sequence
  Description of Artificial Sequence: Synthetic oligonucleotide
guagauggaaguagaucgg

SEQ ID NO: 953848 - RNA, 19 nt, Artificial Sequence
  Description of Artificial Sequence: Synthetic oligonucleotide
guuacugucugaaaggcaa

SEQ ID NO: 953849 - RNA, 19 nt, Artificial Sequence
  Description of Artificial Sequence: Synthetic oligonucleotide
uguuuucaaccucuggguu

SEQ ID NO: 953850 - RNA, 19 nt, Artificial Sequence
  Description of Artificial Sequence: Synthetic oligonucleotide
uaauagcucagaccccugu

SEQ ID NO: 953851 - RNA, 19 nt, Artificial Sequence
  Description of Artificial Sequence: Synthetic oligonucleotide
caaagagggcauccaaagc

SEQ ID NO: 953852 - RNA, 19 nt, Artificial Sequence
  Description of Artificial Sequence: Synthetic oligonucleotide
agaucuuuaguauggcauu

SEQ ID NO: 953853 - RNA, 19 nt, Artificial Sequence
  Description of Artificial Sequence: Synthetic oligonucleotide
auugauggguuaagaaguc

SEQ ID NO: 953854 - RNA, 19 nt, Artificial Sequence
  Description of Artificial Sequence: Synthetic oligonucleotide
ugucaagaacacacagcug

SEQ ID NO: 953855 - RNA, 19 nt, Artificial Sequence
  Description of Artificial Sequence: Synthetic oligonucleotide
augucaauggccauacugu

SEQ ID NO: 953856 - RNA, 19 nt, Artificial Sequence
  Description of Artificial Sequence: Synthetic oligonucleotide
gcuuuaaagagcauccaag

SEQ ID NO: 953857 - RNA, 19 nt, Artificial Sequence
  Description of Artificial Sequence: Synthetic oligonucleotide
caauuucuuaaucaaaggu

SEQ ID NO: 953858 - RNA, 19 nt, Artificial Sequence
  Description of Artificial Sequence: Synthetic oligonucleotide
uuccuagaacauaugucaa

SEQ ID NO: 953859 - RNA, 19 nt, Artificial Sequence
  Description of Artificial Sequence: Synthetic oligonucleotide
auaugacugcagaaacagc

SEQ ID NO: 953860 - RNA, 19 nt, Artificial Sequence
  Description of Artificial Sequence: Synthetic oligonucleotide
aaaccgucuuaaauucauc

SEQ ID NO: 953861 - RNA, 19 nt, Artificial Sequence
  Description of Artificial Sequence: Synthetic oligonucleotide
ucaguagauggaaguagau

SEQ ID NO: 953862 - RNA, 19 nt, Artificial Sequence
  Description of Artificial Sequence: Synthetic oligonucleotide
ugagguuacauggaauaau

SEQ ID NO: 953863 - RNA, 19 nt, Artificial Sequence
  Description of Artificial Sequence: Synthetic oligonucleotide
aauccccucagcucauuau

SEQ ID NO: 953864 - RNA, 19 nt, Artificial Sequence
  Description of Artificial Sequence: Synthetic oligonucleotide
aaaaugauacuggcuuuaa

SEQ ID NO: 953865 - RNA, 19 nt, Artificial Sequence
  Description of Artificial Sequence: Synthetic oligonucleotide
gaauaauagcucagacccc

SEQ ID NO: 953866 - RNA, 19 nt, Artificial Sequence
  Description of Artificial Sequence: Synthetic oligonucleotide
uucuuuggcuaggacacug

SEQ ID NO: 953867 - RNA, 19 nt, Artificial Sequence
  Description of Artificial Sequence: Synthetic oligonucleotide
gucagucuuuucucaacag

SEQ ID NO: 953868 - RNA, 19 nt, Artificial Sequence
  Description of Artificial Sequence: Synthetic oligonucleotide
agcucagaccccuguacag

SEQ ID NO: 953869 - RNA, 19 nt, Artificial Sequence
  Description of Artificial Sequence: Synthetic oligonucleotide
agggcucuacacugaauag

SEQ ID NO: 953870 - RNA, 19 nt, Artificial Sequence
  Description of Artificial Sequence: Synthetic oligonucleotide
uucuacuaauucugauucu

SEQ ID NO: 953871 - RNA, 19 nt, Artificial Sequence
  Description of Artificial Sequence: Synthetic oligonucleotide
uccaaguaggguuccuaga

SEQ ID NO: 953872 - RNA, 19 nt, Artificial Sequence
  Description of Artificial Sequence: Synthetic oligonucleotide
uagaggugacaggacaaag

SEQ ID NO: 953873 - RNA, 19 nt, Artificial Sequence
  Description of Artificial Sequence: Synthetic oligonucleotide
uccuagaacauaugucaau

SEQ ID NO: 953874 - RNA, 19 nt, Artificial Sequence
  Description of Artificial Sequence: Synthetic oligonucleotide
accauuagcauuugcuauu

SEQ ID NO: 953875 - RNA, 19 nt, Artificial Sequence
  Description of Artificial Sequence: Synthetic oligonucleotide
auauugugccugcuaccag

SEQ ID NO: 953876 - RNA, 19 nt, Artificial Sequence
  Description of Artificial Sequence: Synthetic oligonucleotide
aguuucaagugugccaucu

SEQ ID NO: 953877 - RNA, 19 nt, Artificial Sequence
  Description of Artificial Sequence: Synthetic oligonucleotide
auacuggcuuuaaagagca

SEQ ID NO: 953878 - RNA, 19 nt, Artificial Sequence
  Description of Artificial Sequence: Synthetic oligonucleotide
uagauggaaguagaucgga

SEQ ID NO: 953879 - RNA, 19 nt, Artificial Sequence
  Description of Artificial Sequence: Synthetic oligonucleotide
uacugaccacauucacucg

SEQ ID NO: 953880 - RNA, 19 nt, Artificial Sequence
  Description of Artificial Sequence: Synthetic oligonucleotide
ucugguccuauugaugggu

SEQ ID NO: 953881 - RNA, 19 nt, Artificial Sequence
  Description of Artificial Sequence: Synthetic oligonucleotide
aagagggcauccaaagccu

SEQ ID NO: 953882 - RNA, 19 nt, Artificial Sequence
  Description of Artificial Sequence: Synthetic oligonucleotide
acaauaacuuccagagcag

SEQ ID NO: 953883 - RNA, 19 nt, Artificial Sequence
  Description of Artificial Sequence: Synthetic oligonucleotide
ugcuacuaugaaugccugc

SEQ ID NO: 953884 - RNA, 19 nt, Artificial Sequence
  Description of Artificial Sequence: Synthetic oligonucleotide
uccccucagcucauuaucu

SEQ ID NO: 953885 - RNA, 19 nt, Artificial Sequence
  Description of Artificial Sequence: Synthetic oligonucleotide
agaucggaaauaaauguuu

SEQ ID NO: 953886 - RNA, 19 nt, Artificial Sequence
  Description of Artificial Sequence: Synthetic oligonucleotide
ugacucuuagauggaauaa

SEQ ID NO: 953887 - RNA, 19 nt, Artificial Sequence
  Description of Artificial Sequence: Synthetic oligonucleotide
caaguaggguuccuagaac

SEQ ID NO: 953888 - RNA, 19 nt, Artificial Sequence
  Description of Artificial Sequence: Synthetic oligonucleotide
cagggagugagguuacaug

SEQ ID NO: 953889 - RNA, 19 nt, Artificial Sequence
  Description of Artificial Sequence: Synthetic oligonucleotide
cacuacuuauggcuucuag

SEQ ID NO: 953890 - RNA, 19 nt, Artificial Sequence
  Description of Artificial Sequence: Synthetic oligonucleotide
ugucaauggccauacuguu

SEQ ID NO: 953891 - RNA, 19 nt, Artificial Sequence
  Description of Artificial Sequence: Synthetic oligonucleotide
gcuuagcaaaaucuggcug

SEQ ID NO: 953892 - RNA, 19 nt, Artificial Sequence
  Description of Artificial Sequence: Synthetic oligonucleotide
uccuauugauggguuaaga

SEQ ID NO: 953893 - RNA, 19 nt, Artificial Sequence
  Description of Artificial Sequence: Synthetic oligonucleotide
cauaaaggcuucacuuuca

SEQ ID NO: 953894 - RNA, 19 nt, Artificial Sequence
  Description of Artificial Sequence: Synthetic oligonucleotide
acguccucagucucugaag

SEQ ID NO: 953895 - RNA, 19 nt, Artificial Sequence
  Description of Artificial Sequence: Synthetic oligonucleotide
agguuacauggaauaauag

SEQ ID NO: 953896 - RNA, 19 nt, Artificial Sequence
  Description of Artificial Sequence: Synthetic oligonucleotide
uugauggguuaagaaguca

SEQ ID NO: 953897 - RNA, 19 nt, Artificial Sequence
  Description of Artificial Sequence: Synthetic oligonucleotide
acauggaauaauagcucag

SEQ ID NO: 953898 - RNA, 19 nt, Artificial Sequence
  Description of Artificial Sequence: Synthetic oligonucleotide
uuaccacgagggaaggguc

SEQ ID NO: 953899 - RNA, 19 nt, Artificial Sequence
  Description of Artificial Sequence: Synthetic oligonucleotide
gagguuacauggaauaaua

SEQ ID NO: 953900 - RNA, 19 nt, Artificial Sequence
  Description of Artificial Sequence: Synthetic oligonucleotide
agauggaauaauauccuuu

SEQ ID NO: 953901 - RNA, 19 nt, Artificial Sequence
  Description of Artificial Sequence: Synthetic oligonucleotide
cuugucaguagauggaagu

SEQ ID NO: 953902 - RNA, 19 nt, Artificial Sequence
  Description of Artificial Sequence: Synthetic oligonucleotide
aaagggcccucaaagcacu

SEQ ID NO: 953903 - RNA, 19 nt, Artificial Sequence
  Description of Artificial Sequence: Synthetic oligonucleotide
gcacauaagggcucuacac

SEQ ID NO: 953904 - RNA, 19 nt, Artificial Sequence
  Description of Artificial Sequence: Synthetic oligonucleotide
uuccauauugugccugcua

SEQ ID NO: 953905 - RNA, 19 nt, Artificial Sequence
  Description of Artificial Sequence: Synthetic oligonucleotide
gcauuuaugauuucugccu

SEQ ID NO: 953906 - RNA, 19 nt, Artificial Sequence
  Description of Artificial Sequence: Synthetic oligonucleotide
auaagggcucuacacugaa

SEQ ID NO: 953907 - RNA, 19 nt, Artificial Sequence
  Description of Artificial Sequence: Synthetic oligonucleotide
caguagauggaaguagauc

SEQ ID NO: 953908 - RNA, 19 nt, Artificial Sequence
  Description of Artificial Sequence: Synthetic oligonucleotide
accgucuuaaauucaucuu

SEQ ID NO: 953909 - RNA, 19 nt, Artificial Sequence
  Description of Artificial Sequence: Synthetic oligonucleotide
uugcuauuacguccucagu

SEQ ID NO: 953910 - RNA, 19 nt, Artificial Sequence
  Description of Artificial Sequence: Synthetic oligonucleotide
uuauggcuucuagaaaauc

SEQ ID NO: 953911 - RNA, 19 nt, Artificial Sequence
  Description of Artificial Sequence: Synthetic oligonucleotide
aacuucagacaagaucuuu

SEQ ID NO: 953912 - RNA, 19 nt, Artificial Sequence
  Description of Artificial Sequence: Synthetic oligonucleotide
gcauagugucaucagcugc

SEQ ID NO: 953913 - RNA, 19 nt, Artificial Sequence
  Description of Artificial Sequence: Synthetic oligonucleotide
ggcucuacacugaauagug

SEQ ID NO: 953914 - RNA, 19 nt, Artificial Sequence
  Description of Artificial Sequence: Synthetic oligonucleotide
ccuagaacauaugucaaug

SEQ ID NO: 953915 - RNA, 19 nt, Artificial Sequence
  Description of Artificial Sequence: Synthetic oligonucleotide
uccaagcaaugacuuaauu

SEQ ID NO: 953916 - RNA, 19 nt, Artificial Sequence
  Description of Artificial Sequence: Synthetic oligonucleotide
ugcuaccagugucuuuagc

SEQ ID NO: 953917 - RNA, 19 nt, Artificial Sequence
  Description of Artificial Sequence: Synthetic oligonucleotide
uaccacgagggaagggucu

SEQ ID NO: 953918 - RNA, 19 nt, Artificial Sequence
  Description of Artificial Sequence: Synthetic oligonucleotide
cauggaauaauagcucaga

SEQ ID NO: 953919 - RNA, 19 nt, Artificial Sequence
  Description of Artificial Sequence: Synthetic oligonucleotide
caaagccucuccuguuacc

SEQ ID NO: 953920 - RNA, 19 nt, Artificial Sequence
  Description of Artificial Sequence: Synthetic oligonucleotide
uuacugucugaaaggcaau

SEQ ID NO: 953921 - RNA, 19 nt, Artificial Sequence
  Description of Artificial Sequence: Synthetic oligonucleotide
aggcacauaagggcucuac

SEQ ID NO: 953922 - RNA, 19 nt, Artificial Sequence
  Description of Artificial Sequence: Synthetic oligonucleotide
cugguaagcaacaaaccgu

SEQ ID NO: 953923 - RNA, 19 nt, Artificial Sequence
  Description of Artificial Sequence: Synthetic oligonucleotide
caacaaaccgucuuaaauu

SEQ ID NO: 953924 - RNA, 19 nt, Artificial Sequence
  Description of Artificial Sequence: Synthetic oligonucleotide
cuauuacguccucagucuc

SEQ ID NO: 953925 - RNA, 19 nt, Artificial Sequence
  Description of Artificial Sequence: Synthetic oligonucleotide
agaccccuguacagaaugc

SEQ ID NO: 953926 - RNA, 19 nt, Artificial Sequence
  Description of Artificial Sequence: Synthetic oligonucleotide
ugugacaggugcugugcaa

SEQ ID NO: 953927 - RNA, 19 nt, Artificial Sequence
  Description of Artificial Sequence: Synthetic oligonucleotide
cauagugucaucagcugcu

SEQ ID NO: 953928 - RNA, 19 nt, Artificial Sequence
  Description of Artificial Sequence: Synthetic oligonucleotide
caaaauacuucaggagcuc

SEQ ID NO: 953929 - RNA, 19 nt, Artificial Sequence
  Description of Artificial Sequence: Synthetic oligonucleotide
uccuugucaguagauggaa

SEQ ID NO: 953930 - RNA, 19 nt, Artificial Sequence
  Description of Artificial Sequence: Synthetic oligonucleotide
cuacuaauucugauucuaa

SEQ ID NO: 953931 - RNA, 19 nt, Artificial Sequence
  Description of Artificial Sequence: Synthetic oligonucleotide
ccgucuuaaauucaucuuc

SEQ ID NO: 953932 - RNA, 19 nt, Artificial Sequence
  Description of Artificial Sequence: Synthetic oligonucleotide
auguugacaauaacuucca

SEQ ID NO: 953933 - RNA, 19 nt, Artificial Sequence
  Description of Artificial Sequence: Synthetic oligonucleotide
guugguaagggcaguguga

SEQ ID NO: 953934 - RNA, 19 nt, Artificial Sequence
  Description of Artificial Sequence: Synthetic oligonucleotide
uacacugaauaguguucaa

SEQ ID NO: 953935 - RNA, 19 nt, Artificial Sequence
  Description of Artificial Sequence: Synthetic oligonucleotide
auauuucaguuaaaaguua

SEQ ID NO: 953936 - RNA, 19 nt, Artificial Sequence
  Description of Artificial Sequence: Synthetic oligonucleotide
ggaaguagaucggaaauaa

SEQ ID NO: 953937 - RNA, 19 nt, Artificial Sequence
  Description of Artificial Sequence: Synthetic oligonucleotide
cugucugauuaaaggcaug

SEQ ID NO: 953938 - RNA, 19 nt, Artificial Sequence
  Description of Artificial Sequence: Synthetic oligonucleotide
ccucaaagcacuacuuaug

SEQ ID NO: 953939 - RNA, 19 nt, Artificial Sequence
  Description of Artificial Sequence: Synthetic oligonucleotide
aauuugaacugaggccuuu

SEQ ID NO: 953940 - RNA, 19 nt, Artificial Sequence
  Description of Artificial Sequence: Synthetic oligonucleotide
aaaccuucuuugggaugag

SEQ ID NO: 953941 - RNA, 19 nt, Artificial Sequence
  Description of Artificial Sequence: Synthetic oligonucleotide
gaguaauaauagguauaca

SEQ ID NO: 953942 - RNA, 19 nt, Artificial Sequence
  Description of Artificial Sequence: Synthetic oligonucleotide
gugacaggacaaagcaaag

SEQ ID NO: 953943 - RNA, 19 nt, Artificial Sequence
  Description of Artificial Sequence: Synthetic oligonucleotide
uccccaaaauacugaccac

SEQ ID NO: 953944 - RNA, 19 nt, Artificial Sequence
  Description of Artificial Sequence: Synthetic oligonucleotide
acauaugucaauggccaua

SEQ ID NO: 953945 - RNA, 19 nt, Artificial Sequence
  Description of Artificial Sequence: Synthetic oligonucleotide
gcaugcuuagcaaaaucug

SEQ ID NO: 953946 - RNA, 19 nt, Artificial Sequence
  Description of Artificial Sequence: Synthetic oligonucleotide
ugcacucauugaaggaguu

SEQ ID NO: 953947 - RNA, 19 nt, Artificial Sequence
  Description of Artificial Sequence: Synthetic oligonucleotide
ggcaauaugacugcagaaa

SEQ ID NO: 953948 - RNA, 19 nt, Artificial Sequence
  Description of Artificial Sequence: Synthetic oligonucleotide
uagcucugguccuauugau

SEQ ID NO: 953949 - RNA, 19 nt, Artificial Sequence
  Description of Artificial Sequence: Synthetic oligonucleotide
cuguuuucaaccucugggu

SEQ ID NO: 953950 - RNA, 19 nt, Artificial Sequence
  Description of Artificial Sequence: Synthetic oligonucleotide
aauauccuuuagguuccau

SEQ ID NO: 953951 - RNA, 19 nt, Artificial Sequence
  Description of Artificial Sequence: Synthetic oligonucleotide
guuaccacgagggaagggu

SEQ ID NO: 953952 - RNA, 19 nt, Artificial Sequence
  Description of Artificial Sequence: Synthetic oligonucleotide
cagcauucaucuccagaac

SEQ ID NO: 953953 - RNA, 19 nt, Artificial Sequence
  Description of Artificial Sequence: Synthetic oligonucleotide
agcucauuaucuacugaga

SEQ ID NO: 953954 - RNA, 19 nt, Artificial Sequence
  Description of Artificial Sequence: Synthetic oligonucleotide
uugcuugcaaaagggcccu

SEQ ID NO: 953955 - RNA, 19 nt, Artificial Sequence
  Description of Artificial Sequence: Synthetic oligonucleotide
cuccuugucaguagaugga

SEQ ID NO: 953956 - RNA, 19 nt, Artificial Sequence
  Description of Artificial Sequence: Synthetic oligonucleotide
guaagcaacaaaccgucuu

SEQ ID NO: 953957 - RNA, 19 nt, Artificial Sequence
  Description of Artificial Sequence: Synthetic oligonucleotide
gguuucagccucuuucauc

SEQ ID NO: 953958 - RNA, 19 nt, Artificial Sequence
  Description of Artificial Sequence: Synthetic oligonucleotide
aaagcacccaauggucuua

SEQ ID NO: 953959 - RNA, 19 nt, Artificial Sequence
  Description of Artificial Sequence: Synthetic oligonucleotide
acgaggaauuucuuccauu

SEQ ID NO: 953960 - RNA, 19 nt, Artificial Sequence
  Description of Artificial Sequence: Synthetic oligonucleotide
auugugccugcuaccagug

SEQ ID NO: 953961 - RNA, 19 nt, Artificial Sequence
  Description of Artificial Sequence: Synthetic oligonucleotide
ggugcugugcaagugucug

SEQ ID NO: 953962 - RNA, 19 nt, Artificial Sequence
  Description of Artificial Sequence: Synthetic oligonucleotide
ugcagcacauguugacaau

SEQ ID NO: 953963 - RNA, 19 nt, Artificial Sequence
  Description of Artificial Sequence: Synthetic oligonucleotide
cacauaagggcucuacacu

SEQ ID NO: 953964 - RNA, 19 nt, Artificial Sequence
  Description of Artificial Sequence: Synthetic oligonucleotide
agcauccaagcaaugacuu

SEQ ID NO: 953965 - RNA, 19 nt, Artificial Sequence
  Description of Artificial Sequence: Synthetic oligonucleotide
agcacuacuuauggcuucu

SEQ ID NO: 953966 - RNA, 19 nt, Artificial Sequence
  Description of Artificial Sequence: Synthetic oligonucleotide
gcuauuacguccucagucu

SEQ ID NO: 953967 - RNA, 19 nt, Artificial Sequence
  Description of Artificial Sequence: Synthetic oligonucleotide
acaaaccgucuuaaauuca

SEQ ID NO: 953968 - RNA, 19 nt, Artificial Sequence
  Description of Artificial Sequence: Synthetic oligonucleotide
gaaguagaucggaaauaaa

SEQ ID NO: 953969 - RNA, 19 nt, Artificial Sequence
  Description of Artificial Sequence: Synthetic oligonucleotide
agacagggagugagguuac

SEQ ID NO: 953970 - RNA, 19 nt, Artificial Sequence
  Description of Artificial Sequence: Synthetic oligonucleotide
uggcuggaauucuuucaaa

SEQ ID NO: 953971 - RNA, 19 nt, Artificial Sequence
  Description of Artificial Sequence: Synthetic oligonucleotide
ccauauugugccugcuacc

SEQ ID NO: 953972 - RNA, 19 nt, Artificial Sequence
  Description of Artificial Sequence: Synthetic oligonucleotide
ggcuuuaaagagcauccaa

SEQ ID NO: 953973 - RNA, 19 nt, Artificial Sequence
  Description of Artificial Sequence: Synthetic oligonucleotide
agggcccucaaagcacuac

SEQ ID NO: 953974 - RNA, 19 nt, Artificial Sequence
  Description of Artificial Sequence: Synthetic oligonucleotide
gugauccccaaaauacuga

SEQ ID NO: 953975 - RNA, 19 nt, Artificial Sequence
  Description of Artificial Sequence: Synthetic oligonucleotide
agggucugucugauuaaag

SEQ ID NO: 953976 - RNA, 19 nt, Artificial Sequence
  Description of Artificial Sequence: Synthetic oligonucleotide
aguaggguuccuagaacau

SEQ ID NO: 953977 - RNA, 19 nt, Artificial Sequence
  Description of Artificial Sequence: Synthetic oligonucleotide
guccuauugauggguuaag

SEQ ID NO: 953978 - RNA, 19 nt, Artificial Sequence
  Description of Artificial Sequence: Synthetic oligonucleotide
ugccugacucuuagaugga

SEQ ID NO: 953979 - RNA, 19 nt, Artificial Sequence
  Description of Artificial Sequence: Synthetic oligonucleotide
ccuauugauggguuaagaa

SEQ ID NO: 953980 - RNA, 19 nt, Artificial Sequence
  Description of Artificial Sequence: Synthetic oligonucleotide
gaccccuguacagaaugca

SEQ ID NO: 953981 - RNA, 19 nt, Artificial Sequence
  Description of Artificial Sequence: Synthetic oligonucleotide
auaugucaauggccauacu

SEQ ID NO: 953982 - RNA, 19 nt, Artificial Sequence
  Description of Artificial Sequence: Synthetic oligonucleotide
uugugccugcuaccagugu

SEQ ID NO: 953983 - RNA, 19 nt, Artificial Sequence
  Description of Artificial Sequence: Synthetic oligonucleotide
ggagugagguuacauggaa

SEQ ID NO: 953984 - RNA, 19 nt, Artificial Sequence
  Description of Artificial Sequence: Synthetic oligonucleotide
acagggagugagguuacau

SEQ ID NO: 953985 - RNA, 19 nt, Artificial Sequence
  Description of Artificial Sequence: Synthetic oligonucleotide
cccuguacagaaugcaauc

SEQ ID NO: 953986 - RNA, 19 nt, Artificial Sequence
  Description of Artificial Sequence: Synthetic oligonucleotide
gaucggaaauaaauguuuu

SEQ ID NO: 953987 - RNA, 19 nt, Artificial Sequence
  Description of Artificial Sequence: Synthetic oligonucleotide
gcauguaccaccaggccca

SEQ ID NO: 953988 - RNA, 19 nt, Artificial Sequence
  Description of Artificial Sequence: Synthetic oligonucleotide
guacuccauaccaaaauau

SEQ ID NO: 953989 - RNA, 19 nt, Artificial Sequence
  Description of Artificial Sequence: Synthetic oligonucleotide
gcuacuaugaaugccugcu

SEQ ID NO: 953990 - RNA, 19 nt, Artificial Sequence
  Description of Artificial Sequence: Synthetic oligonucleotide
ggcacauaagggcucuaca

SEQ ID NO: 953991 - RNA, 19 nt, Artificial Sequence
  Description of Artificial Sequence: Synthetic oligonucleotide
caccauuagcauuugcuau

SEQ ID NO: 953992 - RNA, 19 nt, Artificial Sequence
  Description of Artificial Sequence: Synthetic oligonucleotide
gugcugugccaucaaaaua

SEQ ID NO: 953993 - RNA, 19 nt, Artificial Sequence
  Description of Artificial Sequence: Synthetic oligonucleotide
ccaagaugguccaugucca

SEQ ID NO: 953994 - RNA, 19 nt, Artificial Sequence
  Description of Artificial Sequence: Synthetic oligonucleotide
acuucacaaaagaguaaua

SEQ ID NO: 953995 - RNA, 19 nt, Artificial Sequence
  Description of Artificial Sequence: Synthetic oligonucleotide
acguugucaagaacacaca

SEQ ID NO: 953996 - RNA, 19 nt, Artificial Sequence
  Description of Artificial Sequence: Synthetic oligonucleotide
guauuugccccuccccucu

SEQ ID NO: 953997 - RNA, 19 nt, Artificial Sequence
  Description of Artificial Sequence: Synthetic oligonucleotide
agcacccaauggucuuaag

SEQ ID NO: 953998 - RNA, 19 nt, Artificial Sequence
  Description of Artificial Sequence: Synthetic oligonucleotide
ggguuaagaagucagucuu

SEQ ID NO: 953999 - RNA, 19 nt, Artificial Sequence
  Description of Artificial Sequence: Synthetic oligonucleotide
gugagguuacauggaauaa

SEQ ID NO: 954000 - RNA, 19 nt, Artificial Sequence
  Description of Artificial Sequence: Synthetic oligonucleotide
accccgaugcugcuacuau

SEQ ID NO: 954001 - RNA, 19 nt, Artificial Sequence
  Description of Artificial Sequence: Synthetic oligonucleotide
aagcacccaauggucuuaa

SEQ ID NO: 954002 - RNA, 19 nt, Artificial Sequence
  Description of Artificial Sequence: Synthetic oligonucleotide
cagugauccccaaaauacu

SEQ ID NO: 954003 - RNA, 19 nt, Artificial Sequence
  Description of Artificial Sequence: Synthetic oligonucleotide
guacagaaugcaauccccu

SEQ ID NO: 954004 - RNA, 19 nt, Artificial Sequence
  Description of Artificial Sequence: Synthetic oligonucleotide
gaaucucaugggacaggca

SEQ ID NO: 954005 - RNA, 19 nt, Artificial Sequence
  Description of Artificial Sequence: Synthetic oligonucleotide
aaccccgaugcugcuacua

SEQ ID NO: 954006 - RNA, 19 nt, Artificial Sequence
  Description of Artificial Sequence: Synthetic oligonucleotide
cauuugcuauuacguccuc

SEQ ID NO: 954007 - RNA, 19 nt, Artificial Sequence
  Description of Artificial Sequence: Synthetic oligonucleotide
ggguuccuagaacauaugu

SEQ ID NO: 954008 - RNA, 19 nt, Artificial Sequence
  Description of Artificial Sequence: Synthetic oligonucleotide
acacgcagugcugugccau

SEQ ID NO: 954009 - RNA, 19 nt, Artificial Sequence
  Description of Artificial Sequence: Synthetic oligonucleotide
cacucauugaaggaguuuu

SEQ ID NO: 954010 - RNA, 19 nt, Artificial Sequence
  Description of Artificial Sequence: Synthetic oligonucleotide
guaggguuccuagaacaua

SEQ ID NO: 954011 - RNA, 19 nt, Artificial Sequence
  Description of Artificial Sequence: Synthetic oligonucleotide
ugguaagggcagugugaau

SEQ ID NO: 954012 - RNA, 19 nt, Artificial Sequence
  Description of Artificial Sequence: Synthetic oligonucleotide
gguccuauugauggguuaa

SEQ ID NO: 954013 - RNA, 19 nt, Artificial Sequence
  Description of Artificial Sequence: Synthetic oligonucleotide
uauuugccccuccccucuu

SEQ ID NO: 954014 - RNA, 19 nt, Artificial Sequence
  Description of Artificial Sequence: Synthetic oligonucleotide
cuagaaagcucuucccauu

SEQ ID NO: 954015 - RNA, 19 nt, Artificial Sequence
  Description of Artificial Sequence: Synthetic oligonucleotide
ccaagcaaugacuuaauuu

SEQ ID NO: 954016 - RNA, 19 nt, Artificial Sequence
  Description of Artificial Sequence: Synthetic oligonucleotide
cugcacucauugaaggagu

SEQ ID NO: 954017 - RNA, 19 nt, Artificial Sequence
  Description of Artificial Sequence: Synthetic oligonucleotide
aggguuccuagaacauaug

SEQ ID NO: 954018 - RNA, 19 nt, Artificial Sequence
  Description of Artificial Sequence: Synthetic oligonucleotide
cccgaugcugcuacuauga

SEQ ID NO: 954019 - RNA, 19 nt, Artificial Sequence
  Description of Artificial Sequence: Synthetic oligonucleotide
uacuggcuuuaaagagcau

SEQ ID NO: 954020 - RNA, 19 nt, Artificial Sequence
  Description of Artificial Sequence: Synthetic oligonucleotide
gugcugugcaagugucuga

SEQ ID NO: 954021 - RNA, 19 nt, Artificial Sequence
  Description of Artificial Sequence: Synthetic oligonucleotide
auccaagcaaugacuuaau

SEQ ID NO: 954022 - RNA, 19 nt, Artificial Sequence
  Description of Artificial Sequence: Synthetic oligonucleotide
acauucacucgaaccccga

SEQ ID NO: 954023 - RNA, 19 nt, Artificial Sequence
  Description of Artificial Sequence: Synthetic oligonucleotide
cacgcagugcugugccauc

SEQ ID NO: 954024 - RNA, 19 nt, Artificial Sequence
  Description of Artificial Sequence: Synthetic oligonucleotide
gucugauuaaaggcaugua

SEQ ID NO: 954025 - RNA, 19 nt, Artificial Sequence
  Description of Artificial Sequence: Synthetic oligonucleotide
ggcccagcuauuucuacua

SEQ ID NO: 954026 - RNA, 19 nt, Artificial Sequence
  Description of Artificial Sequence: Synthetic oligonucleotide
cacauaagacagggaguga

SEQ ID NO: 954027 - RNA, 19 nt, Artificial Sequence
  Description of Artificial Sequence: Synthetic oligonucleotide
cuuuccguaucuucaucuu

SEQ ID NO: 954028 - RNA, 19 nt, Artificial Sequence
  Description of Artificial Sequence: Synthetic oligonucleotide
cauguaccaccaggcccag

SEQ ID NO: 954029 - RNA, 19 nt, Artificial Sequence
  Description of Artificial Sequence: Synthetic oligonucleotide
cuccuguuaccacgaggga

SEQ ID NO: 954030 - RNA, 19 nt, Artificial Sequence
  Description of Artificial Sequence: Synthetic oligonucleotide
cuaggacacugccagugau

SEQ ID NO: 954031 - RNA, 19 nt, Artificial Sequence
  Description of Artificial Sequence: Synthetic oligonucleotide
gggagugagguuacaugga

SEQ ID NO: 954032 - RNA, 19 nt, Artificial Sequence
  Description of Artificial Sequence: Synthetic oligonucleotide
ucgaaccccgaugcugcua

SEQ ID NO: 954033 - RNA, 19 nt, Artificial Sequence
  Description of Artificial Sequence: Synthetic oligonucleotide
gacagggagugagguuaca

SEQ ID NO: 954034 - RNA, 19 nt, Artificial Sequence
  Description of Artificial Sequence: Synthetic oligonucleotide
cccaauggucuuaagaguu

SEQ ID NO: 954035 - RNA, 19 nt, Artificial Sequence
  Description of Artificial Sequence: Synthetic oligonucleotide
gggcagugugaaucucaug

SEQ ID NO: 954036 - RNA, 19 nt, Artificial Sequence
  Description of Artificial Sequence: Synthetic oligonucleotide
cagggucugucugauuaaa

SEQ ID NO: 954037 - RNA, 19 nt, Artificial Sequence
  Description of Artificial Sequence: Synthetic oligonucleotide
gcccucaaagcacuacuua

SEQ ID NO: 954038 - RNA, 19 nt, Artificial Sequence
  Description of Artificial Sequence: Synthetic oligonucleotide
agacagggucugucugauu

SEQ ID NO: 954039 - RNA, 19 nt, Artificial Sequence
  Description of Artificial Sequence: Synthetic oligonucleotide
gcauccaagcaaugacuua

SEQ ID NO: 954040 - RNA, 19 nt, Artificial Sequence
  Description of Artificial Sequence: Synthetic oligonucleotide
gcagcacauguugacaaua

SEQ ID NO: 954041 - RNA, 19 nt, Artificial Sequence
  Description of Artificial Sequence: Synthetic oligonucleotide
cacacgcagugcugugcca

SEQ ID NO: 954042 - RNA, 19 nt, Artificial Sequence
  Description of Artificial Sequence: Synthetic oligonucleotide
cuacuaugaaugccugcuu

SEQ ID NO: 954043 - RNA, 19 nt, Artificial Sequence
  Description of Artificial Sequence: Synthetic oligonucleotide
uccccucuuuccguaucuu

SEQ ID NO: 954044 - RNA, 19 nt, Artificial Sequence
  Description of Artificial Sequence: Synthetic oligonucleotide
gggcucuacacugaauagu

SEQ ID NO: 954045 - RNA, 19 nt, Artificial Sequence
  Description of Artificial Sequence: Synthetic oligonucleotide
cccaaaauacugaccacau

SEQ ID NO: 954046 - RNA, 19 nt, Artificial Sequence
  Description of Artificial Sequence: Synthetic oligonucleotide
cauucacucgaaccccgau

SEQ ID NO: 954047 - RNA, 19 nt, Artificial Sequence
  Description of Artificial Sequence: Synthetic oligonucleotide
cccucaaagcacuacuuau

SEQ ID NO: 954048 - RNA, 19 nt, Artificial Sequence
  Description of Artificial Sequence: Synthetic oligonucleotide
cugugccaucaaaauacuu

SEQ ID NO: 954049 - RNA, 19 nt, Artificial Sequence
  Description of Artificial Sequence: Synthetic oligonucleotide
aagggcccucaaagcacua

SEQ ID NO: 954050 - RNA, 19 nt, Artificial Sequence
  Description of Artificial Sequence: Synthetic oligonucleotide
cugguccuauugauggguu

SEQ ID NO: 954051 - RNA, 19 nt, Artificial Sequence
  Description of Artificial Sequence: Synthetic oligonucleotide
gguaagcaacaaaccgucu

SEQ ID NO: 954052 - RNA, 19 nt, Artificial Sequence
  Description of Artificial Sequence: Synthetic oligonucleotide
ccauuagcauuugcuauua

SEQ ID NO: 954053 - RNA, 19 nt, Artificial Sequence
  Description of Artificial Sequence: Synthetic oligonucleotide
ccugacucuuagauggaau

SEQ ID NO: 954054 - RNA, 19 nt, Artificial Sequence
  Description of Artificial Sequence: Synthetic oligonucleotide
gaaccccgaugcugcuacu

SEQ ID NO: 954055 - RNA, 19 nt, Artificial Sequence
  Description of Artificial Sequence: Synthetic oligonucleotide
gaggcacauaagggcucua

SEQ ID NO: 954056 - RNA, 19 nt, Artificial Sequence
  Description of Artificial Sequence: Synthetic oligonucleotide
gcucuacacugaauagugu

SEQ ID NO: 954057 - RNA, 19 nt, Artificial Sequence
  Description of Artificial Sequence: Synthetic oligonucleotide
ccaaaauacugaccacauu

SEQ ID NO: 954058 - RNA, 19 nt, Artificial Sequence
  Description of Artificial Sequence: Synthetic oligonucleotide
ccccucagcucauuaucua

SEQ ID NO: 954059 - RNA, 19 nt, Artificial Sequence
  Description of Artificial Sequence: Synthetic oligonucleotide
cgaugcugcuacuaugaau

SEQ ID NO: 954060 - RNA, 19 nt, Artificial Sequence
  Description of Artificial Sequence: Synthetic oligonucleotide
ccgaugcugcuacuaugaa

SEQ ID NO: 954061 - RNA, 19 nt, Artificial Sequence
  Description of Artificial Sequence: Synthetic oligonucleotide
gcacucauugaaggaguuu

SEQ ID NO: 954062 - RNA, 19 nt, Artificial Sequence
  Description of Artificial Sequence: Synthetic oligonucleotide
gccccuccccucuuuccgu

SEQ ID NO: 954063 - RNA, 19 nt, Artificial Sequence
  Description of Artificial Sequence: Synthetic oligonucleotide
gccugcuaccagugucuuu

SEQ ID NO: 954064 - RNA, 19 nt, Artificial Sequence
  Description of Artificial Sequence: Synthetic oligonucleotide
cccuccccucuuuccguau

SEQ ID NO: 954065 - RNA, 19 nt, Artificial Sequence
  Description of Artificial Sequence: Synthetic oligonucleotide
ccacgagggaagggucuuu

SEQ ID NO: 954066 - RNA, 19 nt, Artificial Sequence
  Description of Artificial Sequence: Synthetic oligonucleotide
uuaacgaaaaccaaugagg

SEQ ID NO: 954067 - RNA, 19 nt, Artificial Sequence
  Description of Artificial Sequence: Synthetic oligonucleotide
acaacgauaauuccuaugc

SEQ ID NO: 954068 - RNA, 19 nt, Artificial Sequence
  Description of Artificial Sequence: Synthetic oligonucleotide
aagcaauagaaauaagccc

SEQ ID NO: 954069 - RNA, 19 nt, Artificial Sequence
  Description of Artificial Sequence: Synthetic oligonucleotide
uugauagucccuaagaucc

SEQ ID NO: 954070 - RNA, 19 nt, Artificial Sequence
  Description of Artificial Sequence: Synthetic oligonucleotide
uccaaacucaguaagagcc

SEQ ID NO: 954071 - RNA, 19 nt, Artificial Sequence
  Description of Artificial Sequence: Synthetic oligonucleotide
aauacuuacaggaagguug

SEQ ID NO: 954072 - RNA, 19 nt, Artificial Sequence
  Description of Artificial Sequence: Synthetic oligonucleotide
uuauaaagaauguaggcga

SEQ ID NO: 954073 - RNA, 19 nt, Artificial Sequence
  Description of Artificial Sequence: Synthetic oligonucleotide
uacgaaauggaccagaggu

SEQ ID NO: 954074 - RNA, 19 nt, Artificial Sequence
  Description of Artificial Sequence: Synthetic oligonucleotide
aacgauaauuccuaugcag

SEQ ID NO: 954075 - RNA, 19 nt, Artificial Sequence
  Description of Artificial Sequence: Synthetic oligonucleotide
aauguaggcgaugaguacc

SEQ ID NO: 954076 - RNA, 19 nt, Artificial Sequence
  Description of Artificial Sequence: Synthetic oligonucleotide
gauauugcgaugaugauug

SEQ ID NO: 954077 - RNA, 19 nt, Artificial Sequence
  Description of Artificial Sequence: Synthetic oligonucleotide
aguaccacguauuuccucc

SEQ ID NO: 954078 - RNA, 19 nt, Artificial Sequence
  Description of Artificial Sequence: Synthetic oligonucleotide
uguauuccagccuacaagc

SEQ ID NO: 954079 - RNA, 19 nt, Artificial Sequence
  Description of Artificial Sequence: Synthetic oligonucleotide
agaacgacgagccauuggg

SEQ ID NO: 954080 - RNA, 19 nt, Artificial Sequence
  Description of Artificial Sequence: Synthetic oligonucleotide
uuuuacguccacaaccggg

SEQ ID NO: 954081 - RNA, 19 nt, Artificial Sequence
  Description of Artificial Sequence: Synthetic oligonucleotide
ucccauaauaaauacaaac

SEQ ID NO: 954082 - RNA, 19 nt, Artificial Sequence
  Description of Artificial Sequence: Synthetic oligonucleotide
ugacauacgaaauggacca

SEQ ID NO: 954083 - RNA, 19 nt, Artificial Sequence
  Description of Artificial Sequence: Synthetic oligonucleotide
uaacgaaaaccaaugagga

SEQ ID NO: 954084 - RNA, 19 nt, Artificial Sequence
  Description of Artificial Sequence: Synthetic oligonucleotide
guuaacgaaaaccaaugag

SEQ ID NO: 954085 - RNA, 19 nt, Artificial Sequence
  Description of Artificial Sequence: Synthetic oligonucleotide
uaguuaacgaaaaccaaug

SEQ ID NO: 954086 - RNA, 19 nt, Artificial Sequence
  Description of Artificial Sequence: Synthetic oligonucleotide
aauuaggugcucuuugugu

SEQ ID NO: 954087 - RNA, 19 nt, Artificial Sequence
  Description of Artificial Sequence: Synthetic oligonucleotide
ugucugauccuuauaauac

SEQ ID NO: 954088 - RNA, 19 nt, Artificial Sequence
  Description of Artificial Sequence: Synthetic oligonucleotide
uccuaugcagauuaacagg

SEQ ID NO: 954089 - RNA, 19 nt, Artificial Sequence
  Description of Artificial Sequence: Synthetic oligonucleotide
ucugauccuuauaauacag

SEQ ID NO: 954090 - RNA, 19 nt, Artificial Sequence
  Description of Artificial Sequence: Synthetic oligonucleotide
acaaugaggguacuucccc

SEQ ID NO: 954091 - RNA, 19 nt, Artificial Sequence
  Description of Artificial Sequence: Synthetic oligonucleotide
auaguuuccaaauucucca

SEQ ID NO: 954092 - RNA, 19 nt, Artificial Sequence
  Description of Artificial Sequence: Synthetic oligonucleotide
aauuccuaugcagauuaac

SEQ ID NO: 954093 - RNA, 19 nt, Artificial Sequence
  Description of Artificial Sequence: Synthetic oligonucleotide
cugacauacgaaauggacc

SEQ ID NO: 954094 - RNA, 19 nt, Artificial Sequence
  Description of Artificial Sequence: Synthetic oligonucleotide
aauucuccaaauuuguauu

SEQ ID NO: 954095 - RNA, 19 nt, Artificial Sequence
  Description of Artificial Sequence: Synthetic oligonucleotide
agaaauaagcccaaggaug

SEQ ID NO: 954096 - RNA, 19 nt, Artificial Sequence
  Description of Artificial Sequence: Synthetic oligonucleotide
aguggaggcaugcuguacc

SEQ ID NO: 954097 - RNA, 19 nt, Artificial Sequence
  Description of Artificial Sequence: Synthetic oligonucleotide
ugugcugacauacgaaaug

SEQ ID NO: 954098 - RNA, 19 nt, Artificial Sequence
  Description of Artificial Sequence: Synthetic oligonucleotide
ugcuagaccaacaaggaau

SEQ ID NO: 954099 - RNA, 19 nt, Artificial Sequence
  Description of Artificial Sequence: Synthetic oligonucleotide
aguacaaugaggguacuuc

SEQ ID NO: 954100 - RNA, 19 nt, Artificial Sequence
  Description of Artificial Sequence: Synthetic oligonucleotide
ugugucguguuucugguug

SEQ ID NO: 954101 - RNA, 19 nt, Artificial Sequence
  Description of Artificial Sequence: Synthetic oligonucleotide
ugacaacuaggucacaggc

SEQ ID NO: 954102 - RNA, 19 nt, Artificial Sequence
  Description of Artificial Sequence: Synthetic oligonucleotide
gaggaugagagcuaucccc

SEQ ID NO: 954103 - RNA, 19 nt, Artificial Sequence
  Description of Artificial Sequence: Synthetic oligonucleotide
acgaaaaccaaugaggaug

SEQ ID NO: 954104 - RNA, 19 nt, Artificial Sequence
  Description of Artificial Sequence: Synthetic oligonucleotide
ugaugucucgaagagaaag

SEQ ID NO: 954105 - RNA, 19 nt, Artificial Sequence
  Description of Artificial Sequence: Synthetic oligonucleotide
agcaauagaaauaagccca

SEQ ID NO: 954106 - RNA, 19 nt, Artificial Sequence
  Description of Artificial Sequence: Synthetic oligonucleotide
aguaugucacucccaaccg

SEQ ID NO: 954107 - RNA, 19 nt, Artificial Sequence
  Description of Artificial Sequence: Synthetic oligonucleotide
ugaguuccaacacagcgac

SEQ ID NO: 954108 - RNA, 19 nt, Artificial Sequence
  Description of Artificial Sequence: Synthetic oligonucleotide
caaggaaugcaauacuuac

SEQ ID NO: 954109 - RNA, 19 nt, Artificial Sequence
  Description of Artificial Sequence: Synthetic oligonucleotide
uuuacguccacaaccgggu

SEQ ID NO: 954110 - RNA, 19 nt, Artificial Sequence
  Description of Artificial Sequence: Synthetic oligonucleotide
aacugaagaucccauaaua

SEQ ID NO: 954111 - RNA, 19 nt, Artificial Sequence
  Description of Artificial Sequence: Synthetic oligonucleotide
auuaggugcucuuugugug

SEQ ID NO: 954112 - RNA, 19 nt, Artificial Sequence
  Description of Artificial Sequence: Synthetic oligonucleotide
uugacaacgauaauuccua

SEQ ID NO: 954113 - RNA, 19 nt, Artificial Sequence
  Description of Artificial Sequence: Synthetic oligonucleotide
aaaccaugggaagacgagg

SEQ ID NO: 954114 - RNA, 19 nt, Artificial Sequence
  Description of Artificial Sequence: Synthetic oligonucleotide
uaagaucccuucugggucg

SEQ ID NO: 954115 - RNA, 19 nt, Artificial Sequence
  Description of Artificial Sequence: Synthetic oligonucleotide
uccaguacaaugaggguac

SEQ ID NO: 954116 - RNA, 19 nt, Artificial Sequence
  Description of Artificial Sequence: Synthetic oligonucleotide
aaagguagcuucuuuccaa

SEQ ID NO: 954117 - RNA, 19 nt, Artificial Sequence
  Description of Artificial Sequence: Synthetic oligonucleotide
agggauccgcaccuuaucc

SEQ ID NO: 954118 - RNA, 19 nt, Artificial Sequence
  Description of Artificial Sequence: Synthetic oligonucleotide
uccuccauaguuaacgaaa

SEQ ID NO: 954119 - RNA, 19 nt, Artificial Sequence
  Description of Artificial Sequence: Synthetic oligonucleotide
gaugucucgaagagaaagg

SEQ ID NO: 954120 - RNA, 19 nt, Artificial Sequence
  Description of Artificial Sequence: Synthetic oligonucleotide
caccucgugaccaacauac

SEQ ID NO: 954121 - RNA, 19 nt, Artificial Sequence
  Description of Artificial Sequence: Synthetic oligonucleotide
agcaauacaugucagugaa

SEQ ID NO: 954122 - RNA, 19 nt, Artificial Sequence
  Description of Artificial Sequence: Synthetic oligonucleotide
caacacagcgaccacaaag

SEQ ID NO: 954123 - RNA, 19 nt, Artificial Sequence
  Description of Artificial Sequence: Synthetic oligonucleotide
auacuuacaggaagguugc

SEQ ID NO: 954124 - RNA, 19 nt, Artificial Sequence
  Description of Artificial Sequence: Synthetic oligonucleotide
gucauugauaagaaaacug

SEQ ID NO: 954125 - RNA, 19 nt, Artificial Sequence
  Description of Artificial Sequence: Synthetic oligonucleotide
uuuguaaguaccacguauu

SEQ ID NO: 954126 - RNA, 19 nt, Artificial Sequence
  Description of Artificial Sequence: Synthetic oligonucleotide
agacaauggaccaaggcag

SEQ ID NO: 954127 - RNA, 19 nt, Artificial Sequence
  Description of Artificial Sequence: Synthetic oligonucleotide
uacaaugaggguacuuccc

SEQ ID NO: 954128 - RNA, 19 nt, Artificial Sequence
  Description of Artificial Sequence: Synthetic oligonucleotide
gaaguaguccucaaacacc

SEQ ID NO: 954129 - RNA, 19 nt, Artificial Sequence
  Description of Artificial Sequence: Synthetic oligonucleotide
ugggucguaggccaccugg

SEQ ID NO: 954130 - RNA, 19 nt, Artificial Sequence
  Description of Artificial Sequence: Synthetic oligonucleotide
auacaugucagugaaugug

SEQ ID NO: 954131 - RNA, 19 nt, Artificial Sequence
  Description of Artificial Sequence: Synthetic oligonucleotide
caaggaugcagcaccaggc

SEQ ID NO: 954132 - RNA, 19 nt, Artificial Sequence
  Description of Artificial Sequence: Synthetic oligonucleotide
cacaaaguaugucacuccc

SEQ ID NO: 954133 - RNA, 19 nt, Artificial Sequence
  Description of Artificial Sequence: Synthetic oligonucleotide
gagagcuauccccugaaug

SEQ ID NO: 954134 - RNA, 19 nt, Artificial Sequence
  Description of Artificial Sequence: Synthetic oligonucleotide
accacguauuuccuccucc

SEQ ID NO: 954135 - RNA, 19 nt, Artificial Sequence
  Description of Artificial Sequence: Synthetic oligonucleotide
aaggcaguaauugggguug

SEQ ID NO: 954136 - RNA, 19 nt, Artificial Sequence
  Description of Artificial Sequence: Synthetic oligonucleotide
aggcaauuucacugguucc

SEQ ID NO: 954137 - RNA, 19 nt, Artificial Sequence
  Description of Artificial Sequence: Synthetic oligonucleotide
uuuguauuccagccuacaa

SEQ ID NO: 954138 - RNA, 19 nt, Artificial Sequence
  Description of Artificial Sequence: Synthetic oligonucleotide
uccaaggcacaucugucag

SEQ ID NO: 954139 - RNA, 19 nt, Artificial Sequence
  Description of Artificial Sequence: Synthetic oligonucleotide
ucucgagagguuauugucu

SEQ ID NO: 954140 - RNA, 19 nt, Artificial Sequence
  Description of Artificial Sequence: Synthetic oligonucleotide
gaugaguacccagagacca

SEQ ID NO: 954141 - RNA, 19 nt, Artificial Sequence
  Description of Artificial Sequence: Synthetic oligonucleotide
acagcgaccacaaaguaug

SEQ ID NO: 954142 - RNA, 19 nt, Artificial Sequence
  Description of Artificial Sequence: Synthetic oligonucleotide
uguaccaaaagggaauagu

SEQ ID NO: 954143 - RNA, 19 nt, Artificial Sequence
  Description of Artificial Sequence: Synthetic oligonucleotide
gaauuaggugcucuuugug

SEQ ID NO: 954144 - RNA, 19 nt, Artificial Sequence
  Description of Artificial Sequence: Synthetic oligonucleotide
ugaauuaggugcucuuugu

SEQ ID NO: 954145 - RNA, 19 nt, Artificial Sequence
  Description of Artificial Sequence: Synthetic oligonucleotide
aguugauagucccuaagau

SEQ ID NO: 954146 - RNA, 19 nt, Artificial Sequence
  Description of Artificial Sequence: Synthetic oligonucleotide
cauacgaaauggaccagag

SEQ ID NO: 954147 - RNA, 19 nt, Artificial Sequence
  Description of Artificial Sequence: Synthetic oligonucleotide
uauaaagaauguaggcgau

SEQ ID NO: 954148 - RNA, 19 nt, Artificial Sequence
  Description of Artificial Sequence: Synthetic oligonucleotide
aguuaacgaaaaccaauga

SEQ ID NO: 954149 - RNA, 19 nt, Artificial Sequence
  Description of Artificial Sequence: Synthetic oligonucleotide
uuccaguauacaguaaggc

SEQ ID NO: 954150 - RNA, 19 nt, Artificial Sequence
  Description of Artificial Sequence: Synthetic oligonucleotide
uugucugauccuuauaaua

SEQ ID NO: 954151 - RNA, 19 nt, Artificial Sequence
  Description of Artificial Sequence: Synthetic oligonucleotide
ugguugacagucaccacug

SEQ ID NO: 954152 - RNA, 19 nt, Artificial Sequence
  Description of Artificial Sequence: Synthetic oligonucleotide
auacgaaauggaccagagg

SEQ ID NO: 954153 - RNA, 19 nt, Artificial Sequence
  Description of Artificial Sequence: Synthetic oligonucleotide
aguacccagagaccagugg

SEQ ID NO: 954154 - RNA, 19 nt, Artificial Sequence
  Description of Artificial Sequence: Synthetic oligonucleotide
uccuagcucagaauugaug

SEQ ID NO: 954155 - RNA, 19 nt, Artificial Sequence
  Description of Artificial Sequence: Synthetic oligonucleotide
ugcuguaccaaaagggaau

SEQ ID NO: 954156 - RNA, 19 nt, Artificial Sequence
  Description of Artificial Sequence: Synthetic oligonucleotide
gaaagauauugcgaugaug

SEQ ID NO: 954157 - RNA, 19 nt, Artificial Sequence
  Description of Artificial Sequence: Synthetic oligonucleotide
guacaaugaggguacuucc

SEQ ID NO: 954158 - RNA, 19 nt, Artificial Sequence
  Description of Artificial Sequence: Synthetic oligonucleotide
guacagaugauugucuccc

SEQ ID NO: 954159 - RNA, 19 nt, Artificial Sequence
  Description of Artificial Sequence: Synthetic oligonucleotide
aacgaaaaccaaugaggau

SEQ ID NO: 954160 - RNA, 19 nt, Artificial Sequence
  Description of Artificial Sequence: Synthetic oligonucleotide
agacaucuuugucaaagca

SEQ ID NO: 954161 - RNA, 19 nt, Artificial Sequence
  Description of Artificial Sequence: Synthetic oligonucleotide
gaguugauagucccuaaga

SEQ ID NO: 954162 - RNA, 19 nt, Artificial Sequence
  Description of Artificial Sequence: Synthetic oligonucleotide
ucucgaagagaaagguagc

SEQ ID NO: 954163 - RNA, 19 nt, Artificial Sequence
  Description of Artificial Sequence: Synthetic oligonucleotide
uuucucgagagguuauugu

SEQ ID NO: 954164 - RNA, 19 nt, Artificial Sequence
  Description of Artificial Sequence: Synthetic oligonucleotide
agagguuauugucuuagaa

SEQ ID NO: 954165 - RNA, 19 nt, Artificial Sequence
  Description of Artificial Sequence: Synthetic oligonucleotide
auaguuaacgaaaaccaau

SEQ ID NO: 954166 - RNA, 19 nt, Artificial Sequence
  Description of Artificial Sequence: Synthetic oligonucleotide
ugucaaagccagccaaaug

SEQ ID NO: 954167 - RNA, 19 nt, Artificial Sequence
  Description of Artificial Sequence: Synthetic oligonucleotide
auuccuaugcagauuaaca

SEQ ID NO: 954168 - RNA, 19 nt, Artificial Sequence
  Description of Artificial Sequence: Synthetic oligonucleotide
cugaauuaggugcucuuug

SEQ ID NO: 954169 - RNA, 19 nt, Artificial Sequence
  Description of Artificial Sequence: Synthetic oligonucleotide
uucucgagagguuauuguc

SEQ ID NO: 954170 - RNA, 19 nt, Artificial Sequence
  Description of Artificial Sequence: Synthetic oligonucleotide
acagaugauugucucccag

SEQ ID NO: 954171 - RNA, 19 nt, Artificial Sequence
  Description of Artificial Sequence: Synthetic oligonucleotide
uugcgaugaugauugcuag

SEQ ID NO: 954172 - RNA, 19 nt, Artificial Sequence
  Description of Artificial Sequence: Synthetic oligonucleotide
aggguacuuccccaugucg

SEQ ID NO: 954173 - RNA, 19 nt, Artificial Sequence
  Description of Artificial Sequence: Synthetic oligonucleotide
uucgagaagaugaguucca

SEQ ID NO: 954174 - RNA, 19 nt, Artificial Sequence
  Description of Artificial Sequence: Synthetic oligonucleotide
ccuuuuacguccacaaccg

SEQ ID NO: 954175 - RNA, 19 nt, Artificial Sequence
  Description of Artificial Sequence: Synthetic oligonucleotide
ccaauuacugaagucaucc

SEQ ID NO: 954176 - RNA, 19 nt, Artificial Sequence
  Description of Artificial Sequence: Synthetic oligonucleotide
uauuggaauaaagccuuca

SEQ ID NO: 954177 - RNA, 19 nt, Artificial Sequence
  Description of Artificial Sequence: Synthetic oligonucleotide
gaacuuugaacauccucga

SEQ ID NO: 954178 - RNA, 19 nt, Artificial Sequence
  Description of Artificial Sequence: Synthetic oligonucleotide
aacaaggaaugcaauacuu

SEQ ID NO: 954179 - RNA, 19 nt, Artificial Sequence
  Description of Artificial Sequence: Synthetic oligonucleotide
uuugucugauccuuauaau

SEQ ID NO: 954180 - RNA, 19 nt, Artificial Sequence
  Description of Artificial Sequence: Synthetic oligonucleotide
ugaggguacuuccccaugu

SEQ ID NO: 954181 - RNA, 19 nt, Artificial Sequence
  Description of Artificial Sequence: Synthetic oligonucleotide
augauugcuagaccaacaa

SEQ ID NO: 954182 - RNA, 19 nt, Artificial Sequence
  Description of Artificial Sequence: Synthetic oligonucleotide
auguuuguaaguaccacgu

SEQ ID NO: 954183 - RNA, 19 nt, Artificial Sequence
  Description of Artificial Sequence: Synthetic oligonucleotide
aagacgaggucagccacag

SEQ ID NO: 954184 - RNA, 19 nt, Artificial Sequence
  Description of Artificial Sequence: Synthetic oligonucleotide
auguaggcgaugaguaccc

SEQ ID NO: 954185 - RNA, 19 nt, Artificial Sequence
  Description of Artificial Sequence: Synthetic oligonucleotide
uuguaaguaccacguauuu

SEQ ID NO: 954186 - RNA, 19 nt, Artificial Sequence
  Description of Artificial Sequence: Synthetic oligonucleotide
cauugauaagaaaacugaa

SEQ ID NO: 954187 - RNA, 19 nt, Artificial Sequence
  Description of Artificial Sequence: Synthetic oligonucleotide
ugauagucccuaagauccc

SEQ ID NO: 954188 - RNA, 19 nt, Artificial Sequence
  Description of Artificial Sequence: Synthetic oligonucleotide
aaccggguacaggaugagc

SEQ ID NO: 954189 - RNA, 19 nt, Artificial Sequence
  Description of Artificial Sequence: Synthetic oligonucleotide
ggcagugaaucucaucagg

SEQ ID NO: 954190 - RNA, 19 nt, Artificial Sequence
  Description of Artificial Sequence: Synthetic oligonucleotide
acaucuuugucaaagcaau

SEQ ID NO: 954191 - RNA, 19 nt, Artificial Sequence
  Description of Artificial Sequence: Synthetic oligonucleotide
uguaaguaccacguauuuc

SEQ ID NO: 954192 - RNA, 19 nt, Artificial Sequence
  Description of Artificial Sequence: Synthetic oligonucleotide
cuacaucuggcuccgcccg

SEQ ID NO: 954193 - RNA, 19 nt, Artificial Sequence
  Description of Artificial Sequence: Synthetic oligonucleotide
aacaccucgugaccaacau

SEQ ID NO: 954194 - RNA, 19 nt, Artificial Sequence
  Description of Artificial Sequence: Synthetic oligonucleotide
acgauaauuccuaugcaga

SEQ ID NO: 954195 - RNA, 19 nt, Artificial Sequence
  Description of Artificial Sequence: Synthetic oligonucleotide
ugaugauugcuagaccaac

SEQ ID NO: 954196 - RNA, 19 nt, Artificial Sequence
  Description of Artificial Sequence: Synthetic oligonucleotide
auugcuagaccaacaagga

SEQ ID NO: 954197 - RNA, 19 nt, Artificial Sequence
  Description of Artificial Sequence: Synthetic oligonucleotide
uacaaaccaugggaagacg

SEQ ID NO: 954198 - RNA, 19 nt, Artificial Sequence
  Description of Artificial Sequence: Synthetic oligonucleotide
auauugcgaugaugauugc

SEQ ID NO: 954199 - RNA, 19 nt, Artificial Sequence
  Description of Artificial Sequence: Synthetic oligonucleotide
uagccaguagggcacccag

SEQ ID NO: 954200 - RNA, 19 nt, Artificial Sequence
  Description of Artificial Sequence: Synthetic oligonucleotide
aaaugccaucacaauggag

SEQ ID NO: 954201 - RNA, 19 nt, Artificial Sequence
  Description of Artificial Sequence: Synthetic oligonucleotide
ucgauguagggcagaaguc

SEQ ID NO: 954202 - RNA, 19 nt, Artificial Sequence
  Description of Artificial Sequence: Synthetic oligonucleotide
ugucgccaauaccaccagg

SEQ ID NO: 954203 - RNA, 19 nt, Artificial Sequence
  Description of Artificial Sequence: Synthetic oligonucleotide
uauugcgaugaugauugcu

SEQ ID NO: 954204 - RNA, 19 nt, Artificial Sequence
  Description of Artificial Sequence: Synthetic oligonucleotide
cauaguuaacgaaaaccaa

SEQ ID NO: 954205 - RNA, 19 nt, Artificial Sequence
  Description of Artificial Sequence: Synthetic oligonucleotide
aauguagccagaggcuccu

SEQ ID NO: 954206 - RNA, 19 nt, Artificial Sequence
  Description of Artificial Sequence: Synthetic oligonucleotide
ggugugauaaaggacggug

SEQ ID NO: 954207 - RNA, 19 nt, Artificial Sequence
  Description of Artificial Sequence: Synthetic oligonucleotide
accuuaucccaagacaaug

SEQ ID NO: 954208 - RNA, 19 nt, Artificial Sequence
  Description of Artificial Sequence: Synthetic oligonucleotide
gacgguggaggaugggugc

SEQ ID NO: 954209 - RNA, 19 nt, Artificial Sequence
  Description of Artificial Sequence: Synthetic oligonucleotide
auaaagaauguaggcgaug

SEQ ID NO: 954210 - RNA, 19 nt, Artificial Sequence
  Description of Artificial Sequence: Synthetic oligonucleotide
gauccuagcucagaauuga

SEQ ID NO: 954211 - RNA, 19 nt, Artificial Sequence
  Description of Artificial Sequence: Synthetic oligonucleotide
agcugcaagugaugucucg

SEQ ID NO: 954212 - RNA, 19 nt, Artificial Sequence
  Description of Artificial Sequence: Synthetic oligonucleotide
uugcuagaccaacaaggaa

SEQ ID NO: 954213 - RNA, 19 nt, Artificial Sequence
  Description of Artificial Sequence: Synthetic oligonucleotide
gaugauugcuagaccaaca

SEQ ID NO: 954214 - RNA, 19 nt, Artificial Sequence
  Description of Artificial Sequence: Synthetic oligonucleotide
gagaccaguggcaacuaug

SEQ ID NO: 954215 - RNA, 19 nt, Artificial Sequence
  Description of Artificial Sequence: Synthetic oligonucleotide
cuuuuacguccacaaccgg

SEQ ID NO: 954216 - RNA, 19 nt, Artificial Sequence
  Description of Artificial Sequence: Synthetic oligonucleotide
aacuaggucacaggcaauu

SEQ ID NO: 954217 - RNA, 19 nt, Artificial Sequence
  Description of Artificial Sequence: Synthetic oligonucleotide
guagguggucaauguagcc

SEQ ID NO: 954218 - RNA, 19 nt, Artificial Sequence
  Description of Artificial Sequence: Synthetic oligonucleotide
guaugucacucccaaccgc

SEQ ID NO: 954219 - RNA, 19 nt, Artificial Sequence
  Description of Artificial Sequence: Synthetic oligonucleotide
agauauugcgaugaugauu

SEQ ID NO: 954220 - RNA, 19 nt, Artificial Sequence
  Description of Artificial Sequence: Synthetic oligonucleotide
ggggaaguaguccucaaac

SEQ ID NO: 954221 - RNA, 19 nt, Artificial Sequence
  Description of Artificial Sequence: Synthetic oligonucleotide
ugucucgaagagaaaggua

SEQ ID NO: 954222 - RNA, 19 nt, Artificial Sequence
  Description of Artificial Sequence: Synthetic oligonucleotide
uccaauuacugaagucauc

SEQ ID NO: 954223 - RNA, 19 nt, Artificial Sequence
  Description of Artificial Sequence: Synthetic oligonucleotide
agaugaguuccaacacagc

SEQ ID NO: 954224 - RNA, 19 nt, Artificial Sequence
  Description of Artificial Sequence: Synthetic oligonucleotide
ccuagcucagaauugauga

SEQ ID NO: 954225 - RNA, 19 nt, Artificial Sequence
  Description of Artificial Sequence: Synthetic oligonucleotide
auugcgaugaugauugcua

SEQ ID NO: 954226 - RNA, 19 nt, Artificial Sequence
  Description of Artificial Sequence: Synthetic oligonucleotide
guuuguaaguaccacguau

SEQ ID NO: 954227 - RNA, 19 nt, Artificial Sequence
  Description of Artificial Sequence: Synthetic oligonucleotide
gguauggcaaggcagaugu

SEQ ID NO: 954228 - RNA, 19 nt, Artificial Sequence
  Description of Artificial Sequence: Synthetic oligonucleotide
caggcuucgagaagaugag

SEQ ID NO: 954229 - RNA, 19 nt, Artificial Sequence
  Description of Artificial Sequence: Synthetic oligonucleotide
gucugauccuuauaauaca

SEQ ID NO: 954230 - RNA, 19 nt, Artificial Sequence
  Description of Artificial Sequence: Synthetic oligonucleotide
gucccuaagaucccuucug

SEQ ID NO: 954231 - RNA, 19 nt, Artificial Sequence
  Description of Artificial Sequence: Synthetic oligonucleotide
agcccuuuuacguccacaa

SEQ ID NO: 954232 - RNA, 19 nt, Artificial Sequence
  Description of Artificial Sequence: Synthetic oligonucleotide
ugcgaugaugauugcuaga

SEQ ID NO: 954233 - RNA, 19 nt, Artificial Sequence
  Description of Artificial Sequence: Synthetic oligonucleotide
gugauaaaggacgguggag

SEQ ID NO: 954234 - RNA, 19 nt, Artificial Sequence
  Description of Artificial Sequence: Synthetic oligonucleotide
ugugacuggucauccucca

SEQ ID NO: 954235 - RNA, 19 nt, Artificial Sequence
  Description of Artificial Sequence: Synthetic oligonucleotide
uacaucuggcuccgcccgg

SEQ ID NO: 954236 - RNA, 19 nt, Artificial Sequence
  Description of Artificial Sequence: Synthetic oligonucleotide
augucucgaagagaaaggu

SEQ ID NO: 954237 - RNA, 19 nt, Artificial Sequence
  Description of Artificial Sequence: Synthetic oligonucleotide
aaauaagcccaaggaugca

SEQ ID NO: 954238 - RNA, 19 nt, Artificial Sequence
  Description of Artificial Sequence: Synthetic oligonucleotide
aggcagugaaucucaucag

SEQ ID NO: 954239 - RNA, 19 nt, Artificial Sequence
  Description of Artificial Sequence: Synthetic oligonucleotide
aauucaucccuggguaaaa

SEQ ID NO: 954240 - RNA, 19 nt, Artificial Sequence
  Description of Artificial Sequence: Synthetic oligonucleotide
guuucucgagagguuauug

SEQ ID NO: 954241 - RNA, 19 nt, Artificial Sequence
  Description of Artificial Sequence: Synthetic oligonucleotide
gagacgguauggcaaggca

SEQ ID NO: 954242 - RNA, 19 nt, Artificial Sequence
  Description of Artificial Sequence: Synthetic oligonucleotide
ggaguugauagucccuaag

SEQ ID NO: 954243 - RNA, 19 nt, Artificial Sequence
  Description of Artificial Sequence: Synthetic oligonucleotide
agacgguauggcaaggcag

SEQ ID NO: 954244 - RNA, 19 nt, Artificial Sequence
  Description of Artificial Sequence: Synthetic oligonucleotide
gaucccuucugggucguag

SEQ ID NO: 954245 - RNA, 19 nt, Artificial Sequence
  Description of Artificial Sequence: Synthetic oligonucleotide
aguggcaacuauguucuga

SEQ ID NO: 954246 - RNA, 19 nt, Artificial Sequence
  Description of Artificial Sequence: Synthetic oligonucleotide
agaccaguggcaacuaugu

SEQ ID NO: 954247 - RNA, 19 nt, Artificial Sequence
  Description of Artificial Sequence: Synthetic oligonucleotide
cucgauguagggcagaagu

SEQ ID NO: 954248 - RNA, 19 nt, Artificial Sequence
  Description of Artificial Sequence: Synthetic oligonucleotide
aacagcgcggccagcgccg

SEQ ID NO: 954249 - RNA, 19 nt, Artificial Sequence
  Description of Artificial Sequence: Synthetic oligonucleotide
gaaguagguggucaaugua

SEQ ID NO: 954250 - RNA, 19 nt, Artificial Sequence
  Description of Artificial Sequence: Synthetic oligonucleotide
accggguacaggaugagca

SEQ ID NO: 954251 - RNA, 19 nt, Artificial Sequence
  Description of Artificial Sequence: Synthetic oligonucleotide
gcaacuauguucugaauua

SEQ ID NO: 954252 - RNA, 19 nt, Artificial Sequence
  Description of Artificial Sequence: Synthetic oligonucleotide
caugucagugaaugugguc

SEQ ID NO: 954253 - RNA, 19 nt, Artificial Sequence
  Description of Artificial Sequence: Synthetic oligonucleotide
gguugacaacgauaauucc

SEQ ID NO: 954254 - RNA, 19 nt, Artificial Sequence
  Description of Artificial Sequence: Synthetic oligonucleotide
cagaacgacgagccauugg

SEQ ID NO: 954255 - RNA, 19 nt, Artificial Sequence
  Description of Artificial Sequence: Synthetic oligonucleotide
gacgguauggcaaggcaga

SEQ ID NO: 954256 - RNA, 19 nt, Artificial Sequence
  Description of Artificial Sequence: Synthetic oligonucleotide
agaucccauaauaaauaca

SEQ ID NO: 954257 - RNA, 19 nt, Artificial Sequence
  Description of Artificial Sequence: Synthetic oligonucleotide
agggaauaguuuccaaauu

SEQ ID NO: 954258 - RNA, 19 nt, Artificial Sequence
  Description of Artificial Sequence: Synthetic oligonucleotide
ccuaugcagauuaacagga

SEQ ID NO: 954259 - RNA, 19 nt, Artificial Sequence
  Description of Artificial Sequence: Synthetic oligonucleotide
caauagaaauaagcccaag

SEQ ID NO: 954260 - RNA, 19 nt, Artificial Sequence
  Description of Artificial Sequence: Synthetic oligonucleotide
guaaggcuuguucccaaca

SEQ ID NO: 954261 - RNA, 19 nt, Artificial Sequence
  Description of Artificial Sequence: Synthetic oligonucleotide
aacauacaccagaauggaa

SEQ ID NO: 954262 - RNA, 19 nt, Artificial Sequence
  Description of Artificial Sequence: Synthetic oligonucleotide
aggaugagagcuauccccu

SEQ ID NO: 954263 - RNA, 19 nt, Artificial Sequence
  Description of Artificial Sequence: Synthetic oligonucleotide
gcugacauacgaaauggac

SEQ ID NO: 954264 - RNA, 19 nt, Artificial Sequence
  Description of Artificial Sequence: Synthetic oligonucleotide
caguaagagccucaggaaa

SEQ ID NO: 954265 - RNA, 19 nt, Artificial Sequence
  Description of Artificial Sequence: Synthetic oligonucleotide
acaaggaaugcaauacuua

SEQ ID NO: 954266 - RNA, 19 nt, Artificial Sequence
  Description of Artificial Sequence: Synthetic oligonucleotide
augaggguacuuccccaug

SEQ ID NO: 954267 - RNA, 19 nt, Artificial Sequence
  Description of Artificial Sequence: Synthetic oligonucleotide
gacauacgaaauggaccag

SEQ ID NO: 954268 - RNA, 19 nt, Artificial Sequence
  Description of Artificial Sequence: Synthetic oligonucleotide
caacauacaccagaaugga

SEQ ID NO: 954269 - RNA, 19 nt, Artificial Sequence
  Description of Artificial Sequence: Synthetic oligonucleotide
gcgaugaugauugcuagac

SEQ ID NO: 954270 - RNA, 19 nt, Artificial Sequence
  Description of Artificial Sequence: Synthetic oligonucleotide
gcuagaccaacaaggaaug

SEQ ID NO: 954271 - RNA, 19 nt, Artificial Sequence
  Description of Artificial Sequence: Synthetic oligonucleotide
aagagccucaggaaagaua

SEQ ID NO: 954272 - RNA, 19 nt, Artificial Sequence
  Description of Artificial Sequence: Synthetic oligonucleotide
gaugugugucguguuucug

SEQ ID NO: 954273 - RNA, 19 nt, Artificial Sequence
  Description of Artificial Sequence: Synthetic oligonucleotide
gagagguuauugucuuaga

SEQ ID NO: 954274 - RNA, 19 nt, Artificial Sequence
  Description of Artificial Sequence: Synthetic oligonucleotide
ugacaacgauaauuccuau

SEQ ID NO: 954275 - RNA, 19 nt, Artificial Sequence
  Description of Artificial Sequence: Synthetic oligonucleotide
acaaccggguacaggauga

SEQ ID NO: 954276 - RNA, 19 nt, Artificial Sequence
  Description of Artificial Sequence: Synthetic oligonucleotide
acaaaguaugucacuccca

SEQ ID NO: 954277 - RNA, 19 nt, Artificial Sequence
  Description of Artificial Sequence: Synthetic oligonucleotide
ugagagcuauccccugaau

SEQ ID NO: 954278 - RNA, 19 nt, Artificial Sequence
  Description of Artificial Sequence: Synthetic oligonucleotide
caacagcgcggccagcgcc

SEQ ID NO: 954279 - RNA, 19 nt, Artificial Sequence
  Description of Artificial Sequence: Synthetic oligonucleotide
cucaaacaccucgugacca

SEQ ID NO: 954280 - RNA, 19 nt, Artificial Sequence
  Description of Artificial Sequence: Synthetic oligonucleotide
caacgauaauuccuaugca

SEQ ID NO: 954281 - RNA, 19 nt, Artificial Sequence
  Description of Artificial Sequence: Synthetic oligonucleotide
cugucagggacaggcuucg

SEQ ID NO: 954282 - RNA, 19 nt, Artificial Sequence
  Description of Artificial Sequence: Synthetic oligonucleotide
auccaauuacugaagucau

SEQ ID NO: 954283 - RNA, 19 nt, Artificial Sequence
  Description of Artificial Sequence: Synthetic oligonucleotide
uggaguugauagucccuaa

SEQ ID NO: 954284 - RNA, 19 nt, Artificial Sequence
  Description of Artificial Sequence: Synthetic oligonucleotide
uccgcaccuuaucccaaga

SEQ ID NO: 954285 - RNA, 19 nt, Artificial Sequence
  Description of Artificial Sequence: Synthetic oligonucleotide
ucagaacgacgagccauug

SEQ ID NO: 954286 - RNA, 19 nt, Artificial Sequence
  Description of Artificial Sequence: Synthetic oligonucleotide
gcucagaauugaugaggcg

SEQ ID NO: 954287 - RNA, 19 nt, Artificial Sequence
  Description of Artificial Sequence: Synthetic oligonucleotide
cagaugugugucguguuuc

SEQ ID NO: 954288 - RNA, 19 nt, Artificial Sequence
  Description of Artificial Sequence: Synthetic oligonucleotide
ucgagaagaugaguuccaa

SEQ ID NO: 954289 - RNA, 19 nt, Artificial Sequence
  Description of Artificial Sequence: Synthetic oligonucleotide
gcuucgagaagaugaguuc

SEQ ID NO: 954290 - RNA, 19 nt, Artificial Sequence
  Description of Artificial Sequence: Synthetic oligonucleotide
ggcaauuucacugguucca

SEQ ID NO: 954291 - RNA, 19 nt, Artificial Sequence
  Description of Artificial Sequence: Synthetic oligonucleotide
ggguacuuccccaugucgc

SEQ ID NO: 954292 - RNA, 19 nt, Artificial Sequence
  Description of Artificial Sequence: Synthetic oligonucleotide
uaccacguauuuccuccuc

SEQ ID NO: 954293 - RNA, 19 nt, Artificial Sequence
  Description of Artificial Sequence: Synthetic oligonucleotide
auaaaggacgguggaggau

SEQ ID NO: 954294 - RNA, 19 nt, Artificial Sequence
  Description of Artificial Sequence: Synthetic oligonucleotide
aggacgguggaggaugggu

SEQ ID NO: 954295 - RNA, 19 nt, Artificial Sequence
  Description of Artificial Sequence: Synthetic oligonucleotide
uacuuccccaugucgccaa

SEQ ID NO: 954296 - RNA, 19 nt, Artificial Sequence
  Description of Artificial Sequence: Synthetic oligonucleotide
uccugccugaacuccuaaa

SEQ ID NO: 954297 - RNA, 19 nt, Artificial Sequence
  Description of Artificial Sequence: Synthetic oligonucleotide
augaguacccagagaccag

SEQ ID NO: 954298 - RNA, 19 nt, Artificial Sequence
  Description of Artificial Sequence: Synthetic oligonucleotide
uaagagccucaggaaagau

SEQ ID NO: 954299 - RNA, 19 nt, Artificial Sequence
  Description of Artificial Sequence: Synthetic oligonucleotide
cugcuuccaguauacagua

SEQ ID NO: 954300 - RNA, 19 nt, Artificial Sequence
  Description of Artificial Sequence: Synthetic oligonucleotide
uuacguccacaaccgggua

SEQ ID NO: 954301 - RNA, 19 nt, Artificial Sequence
  Description of Artificial Sequence: Synthetic oligonucleotide
ggauccuagcucagaauug

SEQ ID NO: 954302 - RNA, 19 nt, Artificial Sequence
  Description of Artificial Sequence: Synthetic oligonucleotide
caucggagacgguauggca

SEQ ID NO: 954303 - RNA, 19 nt, Artificial Sequence
  Description of Artificial Sequence: Synthetic oligonucleotide
augcuguaccaaaagggaa

SEQ ID NO: 954304 - RNA, 19 nt, Artificial Sequence
  Description of Artificial Sequence: Synthetic oligonucleotide
ccagccuacaagcugcuuc

SEQ ID NO: 954305 - RNA, 19 nt, Artificial Sequence
  Description of Artificial Sequence: Synthetic oligonucleotide
acacagcgaccacaaagua

SEQ ID NO: 954306 - RNA, 19 nt, Artificial Sequence
  Description of Artificial Sequence: Synthetic oligonucleotide
gcaauuucacugguuccag

SEQ ID NO: 954307 - RNA, 19 nt, Artificial Sequence
  Description of Artificial Sequence: Synthetic oligonucleotide
gaguacccagagaccagug

SEQ ID NO: 954308 - RNA, 19 nt, Artificial Sequence
  Description of Artificial Sequence: Synthetic oligonucleotide
gggaagacgaggucagcca

SEQ ID NO: 954309 - RNA, 19 nt, Artificial Sequence
  Description of Artificial Sequence: Synthetic oligonucleotide
ucccucggggagcugcgcu

SEQ ID NO: 954310 - RNA, 19 nt, Artificial Sequence
  Description of Artificial Sequence: Synthetic oligonucleotide
ugucguguuucugguugac

SEQ ID NO: 954311 - RNA, 19 nt, Artificial Sequence
  Description of Artificial Sequence: Synthetic oligonucleotide
caugccgccugccgccucc

SEQ ID NO: 954312 - RNA, 19 nt, Artificial Sequence
  Description of Artificial Sequence: Synthetic oligonucleotide
ucugggucguaggccaccu

SEQ ID NO: 954313 - RNA, 19 nt, Artificial Sequence
  Description of Artificial Sequence: Synthetic oligonucleotide
acgaaauggaccagagguu

SEQ ID NO: 954314 - RNA, 19 nt, Artificial Sequence
  Description of Artificial Sequence: Synthetic oligonucleotide
acgaggucagccacaguca

SEQ ID NO: 954315 - RNA, 19 nt, Artificial Sequence
  Description of Artificial Sequence: Synthetic oligonucleotide
cucccaaccgcugcaggac

SEQ ID NO: 954316 - RNA, 19 nt, Artificial Sequence
  Description of Artificial Sequence: Synthetic oligonucleotide
aaccgcugcaggacaccag

SEQ ID NO: 954317 - RNA, 19 nt, Artificial Sequence
  Description of Artificial Sequence: Synthetic oligonucleotide
agcguggcgcucagcaccg

SEQ ID NO: 954318 - RNA, 19 nt, Artificial Sequence
  Description of Artificial Sequence: Synthetic oligonucleotide
cugauccuuauaauacagu

SEQ ID NO: 954319 - RNA, 19 nt, Artificial Sequence
  Description of Artificial Sequence: Synthetic oligonucleotide
agcuauccccugaaugugu

SEQ ID NO: 954320 - RNA, 19 nt, Artificial Sequence
  Description of Artificial Sequence: Synthetic oligonucleotide
ccaaggcacaucugucagg

SEQ ID NO: 954321 - RNA, 19 nt, Artificial Sequence
  Description of Artificial Sequence: Synthetic oligonucleotide
ucgagagguuauugucuua

SEQ ID NO: 954322 - RNA, 19 nt, Artificial Sequence
  Description of Artificial Sequence: Synthetic oligonucleotide
cagggauccgcaccuuauc

SEQ ID NO: 954323 - RNA, 19 nt, Artificial Sequence
  Description of Artificial Sequence: Synthetic oligonucleotide
ucccaagacaauggaccaa

SEQ ID NO: 954324 - RNA, 19 nt, Artificial Sequence
  Description of Artificial Sequence: Synthetic oligonucleotide
acgcaucggagacgguaug

SEQ ID NO: 954325 - RNA, 19 nt, Artificial Sequence
  Description of Artificial Sequence: Synthetic oligonucleotide
cagugugcugacauacgaa

SEQ ID NO: 954326 - RNA, 19 nt, Artificial Sequence
  Description of Artificial Sequence: Synthetic oligonucleotide
gcaguaauugggguugaca

SEQ ID NO: 954327 - RNA, 19 nt, Artificial Sequence
  Description of Artificial Sequence: Synthetic oligonucleotide
cuuccaccggaaggggaag

SEQ ID NO: 954328 - RNA, 19 nt, Artificial Sequence
  Description of Artificial Sequence: Synthetic oligonucleotide
uacuuacaggaagguugcu

SEQ ID NO: 954329 - RNA, 19 nt, Artificial Sequence
  Description of Artificial Sequence: Synthetic oligonucleotide
caauggaccaaggcaguaa

SEQ ID NO: 954330 - RNA, 19 nt, Artificial Sequence
  Description of Artificial Sequence: Synthetic oligonucleotide
gggauccuagcucagaauu

SEQ ID NO: 954331 - RNA, 19 nt, Artificial Sequence
  Description of Artificial Sequence: Synthetic oligonucleotide
gaguuccaacacagcgacc

SEQ ID NO: 954332 - RNA, 19 nt, Artificial Sequence
  Description of Artificial Sequence: Synthetic oligonucleotide
gcaucggagacgguauggc

SEQ ID NO: 954333 - RNA, 19 nt, Artificial Sequence
  Description of Artificial Sequence: Synthetic oligonucleotide
uuccaccggaaggggaagu

SEQ ID NO: 954334 - RNA, 19 nt, Artificial Sequence
  Description of Artificial Sequence: Synthetic oligonucleotide
uccaccggaaggggaagua

SEQ ID NO: 954335 - RNA, 19 nt, Artificial Sequence
  Description of Artificial Sequence: Synthetic oligonucleotide
accagggauccgcaccuua

SEQ ID NO: 954336 - RNA, 19 nt, Artificial Sequence
  Description of Artificial Sequence: Synthetic oligonucleotide
cgaugaguacccagagacc

SEQ ID NO: 954337 - RNA, 19 nt, Artificial Sequence
  Description of Artificial Sequence: Synthetic oligonucleotide
ccggguacaggaugagcag

SEQ ID NO: 954338 - RNA, 19 nt, Artificial Sequence
  Description of Artificial Sequence: Synthetic oligonucleotide
aggcuucgagaagaugagu

SEQ ID NO: 954339 - RNA, 19 nt, Artificial Sequence
  Description of Artificial Sequence: Synthetic oligonucleotide
gcaauagaaauaagcccaa

SEQ ID NO: 954340 - RNA, 19 nt, Artificial Sequence
  Description of Artificial Sequence: Synthetic oligonucleotide
cgaugaugauugcuagacc

SEQ ID NO: 954341 - RNA, 19 nt, Artificial Sequence
  Description of Artificial Sequence: Synthetic oligonucleotide
ccuccauaguuaacgaaaa

SEQ ID NO: 954342 - RNA, 19 nt, Artificial Sequence
  Description of Artificial Sequence: Synthetic oligonucleotide
guacuuccccaugucgcca

SEQ ID NO: 954343 - RNA, 19 nt, Artificial Sequence
  Description of Artificial Sequence: Synthetic oligonucleotide
gcugcaagugaugucucga

SEQ ID NO: 954344 - RNA, 19 nt, Artificial Sequence
  Description of Artificial Sequence: Synthetic oligonucleotide
ccccugaauguguccacgc

SEQ ID NO: 954345 - RNA, 19 nt, Artificial Sequence
  Description of Artificial Sequence: Synthetic oligonucleotide
uggaggcaugcuguaccaa

SEQ ID NO: 954346 - RNA, 19 nt, Artificial Sequence
  Description of Artificial Sequence: Synthetic oligonucleotide
auagucccuaagaucccuu

SEQ ID NO: 954347 - RNA, 19 nt, Artificial Sequence
  Description of Artificial Sequence: Synthetic oligonucleotide
caucugcagacaucuuugu

SEQ ID NO: 954348 - RNA, 19 nt, Artificial Sequence
  Description of Artificial Sequence: Synthetic oligonucleotide
guagccaguagggcaccca

SEQ ID NO: 954349 - RNA, 19 nt, Artificial Sequence
  Description of Artificial Sequence: Synthetic oligonucleotide
guauuccagccuacaagcu

SEQ ID NO: 954350 - RNA, 19 nt, Artificial Sequence
  Description of Artificial Sequence: Synthetic oligonucleotide
gauccgcaccuuaucccaa

SEQ ID NO: 954351 - RNA, 19 nt, Artificial Sequence
  Description of Artificial Sequence: Synthetic oligonucleotide
cgauguagggcagaaguca

SEQ ID NO: 954352 - RNA, 19 nt, Artificial Sequence
  Description of Artificial Sequence: Synthetic oligonucleotide
gaaauggaccagagguuuu

SEQ ID NO: 954353 - RNA, 19 nt, Artificial Sequence
  Description of Artificial Sequence: Synthetic oligonucleotide
gcccuuuuacguccacaac

SEQ ID NO: 954354 - RNA, 19 nt, Artificial Sequence
  Description of Artificial Sequence: Synthetic oligonucleotide
cacgcaucggagacgguau

SEQ ID NO: 954355 - RNA, 19 nt, Artificial Sequence
  Description of Artificial Sequence: Synthetic oligonucleotide
gcuauccccugaauguguc

SEQ ID NO: 954356 - RNA, 19 nt, Artificial Sequence
  Description of Artificial Sequence: Synthetic oligonucleotide
gcaaagcagcucagugugc

SEQ ID NO: 954357 - RNA, 19 nt, Artificial Sequence
  Description of Artificial Sequence: Synthetic oligonucleotide
caauacuuacaggaagguu

SEQ ID NO: 954358 - RNA, 19 nt, Artificial Sequence
  Description of Artificial Sequence: Synthetic oligonucleotide
ccacguauuuccuccucca

SEQ ID NO: 954359 - RNA, 19 nt, Artificial Sequence
  Description of Artificial Sequence: Synthetic oligonucleotide
aggcaguaauugggguuga

SEQ ID NO: 954360 - RNA, 19 nt, Artificial Sequence
  Description of Artificial Sequence: Synthetic oligonucleotide
ggcuucgagaagaugaguu

SEQ ID NO: 954361 - RNA, 19 nt, Artificial Sequence
  Description of Artificial Sequence: Synthetic oligonucleotide
agccuacaagcugcuucca

SEQ ID NO: 954362 - RNA, 19 nt, Artificial Sequence
  Description of Artificial Sequence: Synthetic oligonucleotide
uccacgcaucggagacggu

SEQ ID NO: 954363 - RNA, 19 nt, Artificial Sequence
  Description of Artificial Sequence: Synthetic oligonucleotide
cugggucguaggccaccug

SEQ ID NO: 954364 - RNA, 19 nt, Artificial Sequence
  Description of Artificial Sequence: Synthetic oligonucleotide
ggauucucauugacaacua

SEQ ID NO: 954365 - RNA, 19 nt, Artificial Sequence
  Description of Artificial Sequence: Synthetic oligonucleotide
gugaugucucgaagagaaa

SEQ ID NO: 954366 - RNA, 19 nt, Artificial Sequence
  Description of Artificial Sequence: Synthetic oligonucleotide
cagcccuuuuacguccaca

SEQ ID NO: 954367 - RNA, 19 nt, Artificial Sequence
  Description of Artificial Sequence: Synthetic oligonucleotide
guuccaguggaggcaugcu

SEQ ID NO: 954368 - RNA, 19 nt, Artificial Sequence
  Description of Artificial Sequence: Synthetic oligonucleotide
ggcaguaauugggguugac

SEQ ID NO: 954369 - RNA, 19 nt, Artificial Sequence
  Description of Artificial Sequence: Synthetic oligonucleotide
cacguauuuccuccuccau

SEQ ID NO: 954370 - RNA, 19 nt, Artificial Sequence
  Description of Artificial Sequence: Synthetic oligonucleotide
cccugaauguguccacgca

SEQ ID NO: 954371 - RNA, 19 nt, Artificial Sequence
  Description of Artificial Sequence: Synthetic oligonucleotide
cccagaaguagguggucaa

SEQ ID NO: 954372 - RNA, 19 nt, Artificial Sequence
  Description of Artificial Sequence: Synthetic oligonucleotide
cgauaauuccuaugcagau

SEQ ID NO: 954373 - RNA, 19 nt, Artificial Sequence
  Description of Artificial Sequence: Synthetic oligonucleotide
gcagaugugugucguguuu

SEQ ID NO: 954374 - RNA, 19 nt, Artificial Sequence
  Description of Artificial Sequence: Synthetic oligonucleotide
cccucggggagcugcgcug

SEQ ID NO: 954375 - RNA, 19 nt, Artificial Sequence
  Description of Artificial Sequence: Synthetic oligonucleotide
caacuaggucacaggcaau

SEQ ID NO: 954376 - RNA, 19 nt, Artificial Sequence
  Description of Artificial Sequence: Synthetic oligonucleotide
cagcgaccacaaaguaugu

SEQ ID NO: 954377 - RNA, 19 nt, Artificial Sequence
  Description of Artificial Sequence: Synthetic oligonucleotide
ccacgcaucggagacggua

SEQ ID NO: 954378 - RNA, 19 nt, Artificial Sequence
  Description of Artificial Sequence: Synthetic oligonucleotide
cuccgcccggcggcugggg

SEQ ID NO: 954379 - RNA, 19 nt, Artificial Sequence
  Description of Artificial Sequence: Synthetic oligonucleotide
caguacaaugaggguacuu

SEQ ID NO: 954380 - RNA, 19 nt, Artificial Sequence
  Description of Artificial Sequence: Synthetic oligonucleotide
gcaccgacccugccagcaa

SEQ ID NO: 954381 - RNA, 19 nt, Artificial Sequence
  Description of Artificial Sequence: Synthetic oligonucleotide
gcaauacaugucagugaau

SEQ ID NO: 954382 - RNA, 19 nt, Artificial Sequence
  Description of Artificial Sequence: Synthetic oligonucleotide
agaucccuucugggucgua

SEQ ID NO: 954383 - RNA, 19 nt, Artificial Sequence
  Description of Artificial Sequence: Synthetic oligonucleotide
cgacgagccauuggggcca

SEQ ID NO: 954384 - RNA, 19 nt, Artificial Sequence
  Description of Artificial Sequence: Synthetic oligonucleotide
ccaugccgccugccgccuc

SEQ ID NO: 954385 - RNA, 19 nt, Artificial Sequence
  Description of Artificial Sequence: Synthetic oligonucleotide
ccgcugccgagccgcgcuc

SEQ ID NO: 954386 - RNA, 19 nt, Artificial Sequence
  Description of Artificial Sequence: Synthetic oligonucleotide
cgccgggcccgcgcccaug

SEQ ID NO: 954387 - RNA, 19 nt, Artificial Sequence
  Description of Artificial Sequence: Synthetic oligonucleotide
agcaauaacagacacauuc

SEQ ID NO: 954388 - RNA, 19 nt, Artificial Sequence
  Description of Artificial Sequence: Synthetic oligonucleotide
aaguuauagggcuugaagg

SEQ ID NO: 954389 - RNA, 19 nt, Artificial Sequence
  Description of Artificial Sequence: Synthetic oligonucleotide
aaaaugcccacuuuauuac

SEQ ID NO: 954390 - RNA, 19 nt, Artificial Sequence
  Description of Artificial Sequence: Synthetic oligonucleotide
agaguugccaacuucuacc

SEQ ID NO: 954391 - RNA, 19 nt, Artificial Sequence
  Description of Artificial Sequence: Synthetic oligonucleotide
ugagcuaagcaguagagag

SEQ ID NO: 954392 - RNA, 19 nt, Artificial Sequence
  Description of Artificial Sequence: Synthetic oligonucleotide
aauaucagaggucacuucu

SEQ ID NO: 954393 - RNA, 19 nt, Artificial Sequence
  Description of Artificial Sequence: Synthetic oligonucleotide
uuuauuacagcagaugacc

SEQ ID NO: 954394 - RNA, 19 nt, Artificial Sequence
  Description of Artificial Sequence: Synthetic oligonucleotide
aguuauagggcuugaaggg

SEQ ID NO: 954395 - RNA, 19 nt, Artificial Sequence
  Description of Artificial Sequence: Synthetic oligonucleotide
ucuuaaauaucagagguca

SEQ ID NO: 954396 - RNA, 19 nt, Artificial Sequence
  Description of Artificial Sequence: Synthetic oligonucleotide
aagagugcgucaaaguucc

SEQ ID NO: 954397 - RNA, 19 nt, Artificial Sequence
  Description of Artificial Sequence: Synthetic oligonucleotide
agcuaugacacccucaauc

SEQ ID NO: 954398 - RNA, 19 nt, Artificial Sequence
  Description of Artificial Sequence: Synthetic oligonucleotide
uuucaagcauacuauaggc

SEQ ID NO: 954399 - RNA, 19 nt, Artificial Sequence
  Description of Artificial Sequence: Synthetic oligonucleotide
uguauucuuguccacucgg

SEQ ID NO: 954400 - RNA, 19 nt, Artificial Sequence
  Description of Artificial Sequence: Synthetic oligonucleotide
gaaguuauagggcuugaag

SEQ ID NO: 954401 - RNA, 19 nt, Artificial Sequence
  Description of Artificial Sequence: Synthetic oligonucleotide
cauacuugaucauugucgg

SEQ ID NO: 954402 - RNA, 19 nt, Artificial Sequence
  Description of Artificial Sequence: Synthetic oligonucleotide
uccaacacaggauugucgg

SEQ ID NO: 954403 - RNA, 19 nt, Artificial Sequence
  Description of Artificial Sequence: Synthetic oligonucleotide
uuauugaugccauacuuga

SEQ ID NO: 954404 - RNA, 19 nt, Artificial Sequence
  Description of Artificial Sequence: Synthetic oligonucleotide
ucaagcauacuauaggcac

SEQ ID NO: 954405 - RNA, 19 nt, Artificial Sequence
  Description of Artificial Sequence: Synthetic oligonucleotide
gacacccucaaucuggugg

SEQ ID NO: 954406 - RNA, 19 nt, Artificial Sequence
  Description of Artificial Sequence: Synthetic oligonucleotide
agcaguagagaguucgggc

SEQ ID NO: 954407 - RNA, 19 nt, Artificial Sequence
  Description of Artificial Sequence: Synthetic oligonucleotide
uuagauaugcuugugcuga

SEQ ID NO: 954408 - RNA, 19 nt, Artificial Sequence
  Description of Artificial Sequence: Synthetic oligonucleotide
aggauugucggccaugccg

SEQ ID NO: 954409 - RNA, 19 nt, Artificial Sequence
  Description of Artificial Sequence: Synthetic oligonucleotide
aaccacgugaggcaaaaug

SEQ ID NO: 954410 - RNA, 19 nt, Artificial Sequence
  Description of Artificial Sequence: Synthetic oligonucleotide
uauacuuguagcccuguga

SEQ ID NO: 954411 - RNA, 19 nt, Artificial Sequence
  Description of Artificial Sequence: Synthetic oligonucleotide
uagcugaacacuuccaugc

SEQ ID NO: 954412 - RNA, 19 nt, Artificial Sequence
  Description of Artificial Sequence: Synthetic oligonucleotide
aaaggaaccacgugaggca

SEQ ID NO: 954413 - RNA, 19 nt, Artificial Sequence
  Description of Artificial Sequence: Synthetic oligonucleotide
cuaagcaguagagaguucg

SEQ ID NO: 954414 - RNA, 19 nt, Artificial Sequence
  Description of Artificial Sequence: Synthetic oligonucleotide
acucggauccacuuguugg

SEQ ID NO: 954415 - RNA, 19 nt, Artificial Sequence
  Description of Artificial Sequence: Synthetic oligonucleotide
uguaggcugguuugaagcg

SEQ ID NO: 954416 - RNA, 19 nt, Artificial Sequence
  Description of Artificial Sequence: Synthetic oligonucleotide
uccugcuuagauaugcuug

SEQ ID NO: 954417 - RNA, 19 nt, Artificial Sequence
  Description of Artificial Sequence: Synthetic oligonucleotide
ucugagcuaagcaguagag

SEQ ID NO: 954418 - RNA, 19 nt, Artificial Sequence
  Description of Artificial Sequence: Synthetic oligonucleotide
cuggacauaguccauuggg

SEQ ID NO: 954419 - RNA, 19 nt, Artificial Sequence
  Description of Artificial Sequence: Synthetic oligonucleotide
cucucaguaugcuugggcg

SEQ ID NO: 954420 - RNA, 19 nt, Artificial Sequence
  Description of Artificial Sequence: Synthetic oligonucleotide
accacuaaaggccagcaca

SEQ ID NO: 954421 - RNA, 19 nt, Artificial Sequence
  Description of Artificial Sequence: Synthetic oligonucleotide
uucagcgggaucuuucagg

SEQ ID NO: 954422 - RNA, 19 nt, Artificial Sequence
  Description of Artificial Sequence: Synthetic oligonucleotide
accccaagcaauaacagac

SEQ ID NO: 954423 - RNA, 19 nt, Artificial Sequence
  Description of Artificial Sequence: Synthetic oligonucleotide
ggaucuuucaggaagaaug

SEQ ID NO: 954424 - RNA, 19 nt, Artificial Sequence
  Description of Artificial Sequence: Synthetic oligonucleotide
uguuauugaugccauacuu

SEQ ID NO: 954425 - RNA, 19 nt, Artificial Sequence
  Description of Artificial Sequence: Synthetic oligonucleotide
cuauaggcaccacuaaagg

SEQ ID NO: 954426 - RNA, 19 nt, Artificial Sequence
  Description of Artificial Sequence: Synthetic oligonucleotide
ugugguaugugugcgaagc

SEQ ID NO: 954427 - RNA, 19 nt, Artificial Sequence
  Description of Artificial Sequence: Synthetic oligonucleotide
agagggaugcuucuaaaca

SEQ ID NO: 954428 - RNA, 19 nt, Artificial Sequence
  Description of Artificial Sequence: Synthetic oligonucleotide
ccauacuugaucauugucg

SEQ ID NO: 954429 - RNA, 19 nt, Artificial Sequence
  Description of Artificial Sequence: Synthetic oligonucleotide
cuggagaucaucucugggc

SEQ ID NO: 954430 - RNA, 19 nt, Artificial Sequence
  Description of Artificial Sequence: Synthetic oligonucleotide
uuugaagcgcagcugggug

SEQ ID NO: 954431 - RNA, 19 nt, Artificial Sequence
  Description of Artificial Sequence: Synthetic oligonucleotide
ugucugggagcacaccucg

SEQ ID NO: 954432 - RNA, 19 nt, Artificial Sequence
  Description of Artificial Sequence: Synthetic oligonucleotide
gacauaguccauugggagc

SEQ ID NO: 954433 - RNA, 19 nt, Artificial Sequence
  Description of Artificial Sequence: Synthetic oligonucleotide
uaagcaguagagaguucgg

SEQ ID NO: 954434 - RNA, 19 nt, Artificial Sequence
  Description of Artificial Sequence: Synthetic oligonucleotide
gggcagagaaguuauaggg

SEQ ID NO: 954435 - RNA, 19 nt, Artificial Sequence
  Description of Artificial Sequence: Synthetic oligonucleotide
acuauaggcaccacuaaag

SEQ ID NO: 954436 - RNA, 19 nt, Artificial Sequence
  Description of Artificial Sequence: Synthetic oligonucleotide
aacuccgcgcuguccaggc

SEQ ID NO: 954437 - RNA, 19 nt, Artificial Sequence
  Description of Artificial Sequence: Synthetic oligonucleotide
uaaggaaaggaaccacgug

SEQ ID NO: 954438 - RNA, 19 nt, Artificial Sequence
  Description of Artificial Sequence: Synthetic oligonucleotide
ugucgggcgcuccagagag

SEQ ID NO: 954439 - RNA, 19 nt, Artificial Sequence
  Description of Artificial Sequence: Synthetic oligonucleotide
uucugagcuaagcaguaga

SEQ ID NO: 954440 - RNA, 19 nt, Artificial Sequence
  Description of Artificial Sequence: Synthetic oligonucleotide
aaacccaccuuucaagcau

SEQ ID NO: 954441 - RNA, 19 nt, Artificial Sequence
  Description of Artificial Sequence: Synthetic oligonucleotide
acuugaucauugucgggcg

SEQ ID NO: 954442 - RNA, 19 nt, Artificial Sequence
  Description of Artificial Sequence: Synthetic oligonucleotide
acuaaaggccagcacaaga

SEQ ID NO: 954443 - RNA, 19 nt, Artificial Sequence
  Description of Artificial Sequence: Synthetic oligonucleotide
gcgucaaaguuccagaagg

SEQ ID NO: 954444 - RNA, 19 nt, Artificial Sequence
  Description of Artificial Sequence: Synthetic oligonucleotide
guuauugaugccauacuug

SEQ ID NO: 954445 - RNA, 19 nt, Artificial Sequence
  Description of Artificial Sequence: Synthetic oligonucleotide
uguaucauguuggucacgu

SEQ ID NO: 954446 - RNA, 19 nt, Artificial Sequence
  Description of Artificial Sequence: Synthetic oligonucleotide
gauacacagguacuggaca

SEQ ID NO: 954447 - RNA, 19 nt, Artificial Sequence
  Description of Artificial Sequence: Synthetic oligonucleotide
gagggaugcuucuaaacac

SEQ ID NO: 954448 - RNA, 19 nt, Artificial Sequence
  Description of Artificial Sequence: Synthetic oligonucleotide
ucggauguuauugaugcca

SEQ ID NO: 954449 - RNA, 19 nt, Artificial Sequence
  Description of Artificial Sequence: Synthetic oligonucleotide
agagaccccaagcaauaac

SEQ ID NO: 954450 - RNA, 19 nt, Artificial Sequence
  Description of Artificial Sequence: Synthetic oligonucleotide
ugugugacgcagaggagug

SEQ ID NO: 954451 - RNA, 19 nt, Artificial Sequence
  Description of Artificial Sequence: Synthetic oligonucleotide
acggucagcuaugacaccc

SEQ ID NO: 954452 - RNA, 19 nt, Artificial Sequence
  Description of Artificial Sequence: Synthetic oligonucleotide
ugcgucaaaguuccagaag

SEQ ID NO: 954453 - RNA, 19 nt, Artificial Sequence
  Description of Artificial Sequence: Synthetic oligonucleotide
uacuauaggcaccacuaaa

SEQ ID NO: 954454 - RNA, 19 nt, Artificial Sequence
  Description of Artificial Sequence: Synthetic oligonucleotide
uugucgguaggcaucucag

SEQ ID NO: 954455 - RNA, 19 nt, Artificial Sequence
  Description of Artificial Sequence: Synthetic oligonucleotide
cuuagauaugcuugugcug

SEQ ID NO: 954456 - RNA, 19 nt, Artificial Sequence
  Description of Artificial Sequence: Synthetic oligonucleotide
acgaucaauggagaaguac

SEQ ID NO: 954457 - RNA, 19 nt, Artificial Sequence
  Description of Artificial Sequence: Synthetic oligonucleotide
gaagaacucccucagcaca

SEQ ID NO: 954458 - RNA, 19 nt, Artificial Sequence
  Description of Artificial Sequence: Synthetic oligonucleotide
cuugguggaacgaagcuca

SEQ ID NO: 954459 - RNA, 19 nt, Artificial Sequence
  Description of Artificial Sequence: Synthetic oligonucleotide
cuacccacuucuuuaggcc

SEQ ID NO: 954460 - RNA, 19 nt, Artificial Sequence
  Description of Artificial Sequence: Synthetic oligonucleotide
ucagcgggaucuuucagga

SEQ ID NO: 954461 - RNA, 19 nt, Artificial Sequence
  Description of Artificial Sequence: Synthetic oligonucleotide
caagcauacuauaggcacc

SEQ ID NO: 954462 - RNA, 19 nt, Artificial Sequence
  Description of Artificial Sequence: Synthetic oligonucleotide
ugcuugggcgugcaggccg

SEQ ID NO: 954463 - RNA, 19 nt, Artificial Sequence
  Description of Artificial Sequence: Synthetic oligonucleotide
ugggagcggaccuugagca

SEQ ID NO: 954464 - RNA, 19 nt, Artificial Sequence
  Description of Artificial Sequence: Synthetic oligonucleotide
augcccacuuuauuacagc

SEQ ID NO: 954465 - RNA, 19 nt, Artificial Sequence
  Description of Artificial Sequence: Synthetic oligonucleotide
cauacuauaggcaccacua

SEQ ID NO: 954466 - RNA, 19 nt, Artificial Sequence
  Description of Artificial Sequence: Synthetic oligonucleotide
gaagaucugucggaacugg

SEQ ID NO: 954467 - RNA, 19 nt, Artificial Sequence
  Description of Artificial Sequence: Synthetic oligonucleotide
acaggauugucggccaugc

SEQ ID NO: 954468 - RNA, 19 nt, Artificial Sequence
  Description of Artificial Sequence: Synthetic oligonucleotide
aagcauacuauaggcacca

SEQ ID NO: 954469 - RNA, 19 nt, Artificial Sequence
  Description of Artificial Sequence: Synthetic oligonucleotide
agugcgucaaaguuccaga

SEQ ID NO: 954470 - RNA, 19 nt, Artificial Sequence
  Description of Artificial Sequence: Synthetic oligonucleotide
caauaacagacacauucuc

SEQ ID NO: 954471 - RNA, 19 nt, Artificial Sequence
  Description of Artificial Sequence: Synthetic oligonucleotide
ugaagaacucccucagcac

SEQ ID NO: 954472 - RNA, 19 nt, Artificial Sequence
  Description of Artificial Sequence: Synthetic oligonucleotide
acacgaucaauggagaagu

SEQ ID NO: 954473 - RNA, 19 nt, Artificial Sequence
  Description of Artificial Sequence: Synthetic oligonucleotide
agagaguucgggcgcuggc

SEQ ID NO: 954474 - RNA, 19 nt, Artificial Sequence
  Description of Artificial Sequence: Synthetic oligonucleotide
ugugacgcagaggagugag

SEQ ID NO: 954475 - RNA, 19 nt, Artificial Sequence
  Description of Artificial Sequence: Synthetic oligonucleotide
agucgcaugagcucacucu

SEQ ID NO: 954476 - RNA, 19 nt, Artificial Sequence
  Description of Artificial Sequence: Synthetic oligonucleotide
ucacccaguagguuuucag

SEQ ID NO: 954477 - RNA, 19 nt, Artificial Sequence
  Description of Artificial Sequence: Synthetic oligonucleotide
ucgggcagagaaguuauag

SEQ ID NO: 954478 - RNA, 19 nt, Artificial Sequence
  Description of Artificial Sequence: Synthetic oligonucleotide
guauccaggcggcacacag

SEQ ID NO: 954479 - RNA, 19 nt, Artificial Sequence
  Description of Artificial Sequence: Synthetic oligonucleotide
auacuugaucauugucggg

SEQ ID NO: 954480 - RNA, 19 nt, Artificial Sequence
  Description of Artificial Sequence: Synthetic oligonucleotide
ggacauaguccauugggag

SEQ ID NO: 954481 - RNA, 19 nt, Artificial Sequence
  Description of Artificial Sequence: Synthetic oligonucleotide
gagagggaugcuucuaaac

SEQ ID NO: 954482 - RNA, 19 nt, Artificial Sequence
  Description of Artificial Sequence: Synthetic oligonucleotide
cauuccggaacacacgauc

SEQ ID NO: 954483 - RNA, 19 nt, Artificial Sequence
  Description of Artificial Sequence: Synthetic oligonucleotide
ugcguagccaacuccgcgc

SEQ ID NO: 954484 - RNA, 19 nt, Artificial Sequence
  Description of Artificial Sequence: Synthetic oligonucleotide
ugcccacuuuauuacagca

SEQ ID NO: 954485 - RNA, 19 nt, Artificial Sequence
  Description of Artificial Sequence: Synthetic oligonucleotide
auguuauugaugccauacu

SEQ ID NO: 954486 - RNA, 19 nt, Artificial Sequence
  Description of Artificial Sequence: Synthetic oligonucleotide
cacgugaggcaaaaugccc

SEQ ID NO: 954487 - RNA, 19 nt, Artificial Sequence
  Description of Artificial Sequence: Synthetic oligonucleotide
auccgcugccuccagucgc

SEQ ID NO: 954488 - RNA, 19 nt, Artificial Sequence
  Description of Artificial Sequence: Synthetic oligonucleotide
cuaaaggccagcacaagaa

SEQ ID NO: 954489 - RNA, 19 nt, Artificial Sequence
  Description of Artificial Sequence: Synthetic oligonucleotide
ugaccugcagggccaaacc

SEQ ID NO: 954490 - RNA, 19 nt, Artificial Sequence
  Description of Artificial Sequence: Synthetic oligonucleotide
uaggcaccacuaaaggcca

SEQ ID NO: 954491 - RNA, 19 nt, Artificial Sequence
  Description of Artificial Sequence: Synthetic oligonucleotide
aguagucagcucccagcac

SEQ ID NO: 954492 - RNA, 19 nt, Artificial Sequence
  Description of Artificial Sequence: Synthetic oligonucleotide
auaggcaggagcaucucag

SEQ ID NO: 954493 - RNA, 19 nt, Artificial Sequence
  Description of Artificial Sequence: Synthetic oligonucleotide
ucgguaggcaucucaguga

SEQ ID NO: 954494 - RNA, 19 nt, Artificial Sequence
  Description of Artificial Sequence: Synthetic oligonucleotide
agguuuucagggucacuuc

SEQ ID NO: 954495 - RNA, 19 nt, Artificial Sequence
  Description of Artificial Sequence: Synthetic oligonucleotide
auugucgggcgcuccagag

SEQ ID NO: 954496 - RNA, 19 nt, Artificial Sequence
  Description of Artificial Sequence: Synthetic oligonucleotide
ggccucuuaaauaucagag

SEQ ID NO: 954497 - RNA, 19 nt, Artificial Sequence
  Description of Artificial Sequence: Synthetic oligonucleotide
cacacgaucaauggagaag

SEQ ID NO: 954498 - RNA, 19 nt, Artificial Sequence
  Description of Artificial Sequence: Synthetic oligonucleotide
gagaccccaagcaauaaca

SEQ ID NO: 954499 - RNA, 19 nt, Artificial Sequence
  Description of Artificial Sequence: Synthetic oligonucleotide
ucuucugagcuaagcagua

SEQ ID NO: 954500 - RNA, 19 nt, Artificial Sequence
  Description of Artificial Sequence: Synthetic oligonucleotide
caaugaaguugucgguagg

SEQ ID NO: 954501 - RNA, 19 nt, Artificial Sequence
  Description of Artificial Sequence: Synthetic oligonucleotide
caggagguagcccaggguc

SEQ ID NO: 954502 - RNA, 19 nt, Artificial Sequence
  Description of Artificial Sequence: Synthetic oligonucleotide
cauguuggucacgugcugg

SEQ ID NO: 954503 - RNA, 19 nt, Artificial Sequence
  Description of Artificial Sequence: Synthetic oligonucleotide
gagugcgucaaaguuccag

SEQ ID NO: 954504 - RNA, 19 nt, Artificial Sequence
  Description of Artificial Sequence: Synthetic oligonucleotide
ucgagagggaugcuucuaa

SEQ ID NO: 954505 - RNA, 19 nt, Artificial Sequence
  Description of Artificial Sequence: Synthetic oligonucleotide
aaguugucgguaggcaucu

SEQ ID NO: 954506 - RNA, 19 nt, Artificial Sequence
  Description of Artificial Sequence: Synthetic oligonucleotide
ggagcucucaaugaaguug

SEQ ID NO: 954507 - RNA, 19 nt, Artificial Sequence
  Description of Artificial Sequence: Synthetic oligonucleotide
agcugcguagccaacuccg

SEQ ID NO: 954508 - RNA, 19 nt, Artificial Sequence
  Description of Artificial Sequence: Synthetic oligonucleotide
uguaucaggcagccuccug

SEQ ID NO: 954509 - RNA, 19 nt, Artificial Sequence
  Description of Artificial Sequence: Synthetic oligonucleotide
cuuuaggccuuggugguag

SEQ ID NO: 954510 - RNA, 19 nt, Artificial Sequence
  Description of Artificial Sequence: Synthetic oligonucleotide
acccgcuggacauagucca

SEQ ID NO: 954511 - RNA, 19 nt, Artificial Sequence
  Description of Artificial Sequence: Synthetic oligonucleotide
ucacccucaguagucagcu

SEQ ID NO: 954512 - RNA, 19 nt, Artificial Sequence
  Description of Artificial Sequence: Synthetic oligonucleotide
augugugcgaagcacguuu

SEQ ID NO: 954513 - RNA, 19 nt, Artificial Sequence
  Description of Artificial Sequence: Synthetic oligonucleotide
auaguccauugggagcugc

SEQ ID NO: 954514 - RNA, 19 nt, Artificial Sequence
  Description of Artificial Sequence: Synthetic oligonucleotide
caguagagaguucgggcgc

SEQ ID NO: 954515 - RNA, 19 nt, Artificial Sequence
  Description of Artificial Sequence: Synthetic oligonucleotide
cucauuccggaacacacga

SEQ ID NO: 954516 - RNA, 19 nt, Artificial Sequence
  Description of Artificial Sequence: Synthetic oligonucleotide
uugaucauugucgggcgcu

SEQ ID NO: 954517 - RNA, 19 nt, Artificial Sequence
  Description of Artificial Sequence: Synthetic oligonucleotide
cucauggcugcccucccgg

SEQ ID NO: 954518 - RNA, 19 nt, Artificial Sequence
  Description of Artificial Sequence: Synthetic oligonucleotide
ggauugucggccaugccgg

SEQ ID NO: 954519 - RNA, 19 nt, Artificial Sequence
  Description of Artificial Sequence: Synthetic oligonucleotide
auacuauaggcaccacuaa

SEQ ID NO: 954520 - RNA, 19 nt, Artificial Sequence
  Description of Artificial Sequence: Synthetic oligonucleotide
agcgcagcugggugauucc

SEQ ID NO: 954521 - RNA, 19 nt, Artificial Sequence
  Description of Artificial Sequence: Synthetic oligonucleotide
agaggccucuuaaauauca

SEQ ID NO: 954522 - RNA, 19 nt, Artificial Sequence
  Description of Artificial Sequence: Synthetic oligonucleotide
cagaguugccaacuucuac

SEQ ID NO: 954523 - RNA, 19 nt, Artificial Sequence
  Description of Artificial Sequence: Synthetic oligonucleotide
agggcggaagaccccagag

SEQ ID NO: 954524 - RNA, 19 nt, Artificial Sequence
  Description of Artificial Sequence: Synthetic oligonucleotide
agcgucucauuccggaaca

SEQ ID NO: 954525 - RNA, 19 nt, Artificial Sequence
  Description of Artificial Sequence: Synthetic oligonucleotide
cuaugacacccucaaucug

SEQ ID NO: 954526 - RNA, 19 nt, Artificial Sequence
  Description of Artificial Sequence: Synthetic oligonucleotide
agcagaugaccugcagggc

SEQ ID NO: 954527 - RNA, 19 nt, Artificial Sequence
  Description of Artificial Sequence: Synthetic oligonucleotide
cuugaucauugucgggcgc

SEQ ID NO: 954528 - RNA, 19 nt, Artificial Sequence
  Description of Artificial Sequence: Synthetic oligonucleotide
uguguggcguccagcgucu

SEQ ID NO: 954529 - RNA, 19 nt, Artificial Sequence
  Description of Artificial Sequence: Synthetic oligonucleotide
auucccagcuuggugaaga

SEQ ID NO: 954530 - RNA, 19 nt, Artificial Sequence
  Description of Artificial Sequence: Synthetic oligonucleotide
guauacuuguagcccugug

SEQ ID NO: 954531 - RNA, 19 nt, Artificial Sequence
  Description of Artificial Sequence: Synthetic oligonucleotide
guugucgguaggcaucuca

SEQ ID NO: 954532 - RNA, 19 nt, Artificial Sequence
  Description of Artificial Sequence: Synthetic oligonucleotide
cugcguagccaacuccgcg

SEQ ID NO: 954533 - RNA, 19 nt, Artificial Sequence
  Description of Artificial Sequence: Synthetic oligonucleotide
agcucucggauguuauuga

SEQ ID NO: 954534 - RNA, 19 nt, Artificial Sequence
  Description of Artificial Sequence: Synthetic oligonucleotide
augccauacuugaucauug

SEQ ID NO: 954535 - RNA, 19 nt, Artificial Sequence
  Description of Artificial Sequence: Synthetic oligonucleotide
ccaaacccaccuuucaagc

SEQ ID NO: 954536 - RNA, 19 nt, Artificial Sequence
  Description of Artificial Sequence: Synthetic oligonucleotide
uugccaacuucuacccacu

SEQ ID NO: 954537 - RNA, 19 nt, Artificial Sequence
  Description of Artificial Sequence: Synthetic oligonucleotide
uaguccauugggagcugca

SEQ ID NO: 954538 - RNA, 19 nt, Artificial Sequence
  Description of Artificial Sequence: Synthetic oligonucleotide
ggaaaggaaccacgugagg

SEQ ID NO: 954539 - RNA, 19 nt, Artificial Sequence
  Description of Artificial Sequence: Synthetic oligonucleotide
auuccggaacacacgauca

SEQ ID NO: 954540 - RNA, 19 nt, Artificial Sequence
  Description of Artificial Sequence: Synthetic oligonucleotide
cacacgggccucauggcug

SEQ ID NO: 954541 - RNA, 19 nt, Artificial Sequence
  Description of Artificial Sequence: Synthetic oligonucleotide
augcuucuaaacacacggg

SEQ ID NO: 954542 - RNA, 19 nt, Artificial Sequence
  Description of Artificial Sequence: Synthetic oligonucleotide
cagugaaccccaucuccag

SEQ ID NO: 954543 - RNA, 19 nt, Artificial Sequence
  Description of Artificial Sequence: Synthetic oligonucleotide
gcugcaaccgccucuguac

SEQ ID NO: 954544 - RNA, 19 nt, Artificial Sequence
  Description of Artificial Sequence: Synthetic oligonucleotide
aucauugucgggcgcucca

SEQ ID NO: 954545 - RNA, 19 nt, Artificial Sequence
  Description of Artificial Sequence: Synthetic oligonucleotide
agaccccaagcaauaacag

SEQ ID NO: 954546 - RNA, 19 nt, Artificial Sequence
  Description of Artificial Sequence: Synthetic oligonucleotide
agauaugcuugugcugaag

SEQ ID NO: 954547 - RNA, 19 nt, Artificial Sequence
  Description of Artificial Sequence: Synthetic oligonucleotide
cacccgcuggacauagucc

SEQ ID NO: 954548 - RNA, 19 nt, Artificial Sequence
  Description of Artificial Sequence: Synthetic oligonucleotide
guagucagcucccagcacu

SEQ ID NO: 954549 - RNA, 19 nt, Artificial Sequence
  Description of Artificial Sequence: Synthetic oligonucleotide
cacaccucgggcagagaag

SEQ ID NO: 954550 - RNA, 19 nt, Artificial Sequence
  Description of Artificial Sequence: Synthetic oligonucleotide
gcucucaaugaaguugucg

SEQ ID NO: 954551 - RNA, 19 nt, Artificial Sequence
  Description of Artificial Sequence: Synthetic oligonucleotide
cagcucucggauguuauug

SEQ ID NO: 954552 - RNA, 19 nt, Artificial Sequence
  Description of Artificial Sequence: Synthetic oligonucleotide
guguguggcguccagcguc

SEQ ID NO: 954553 - RNA, 19 nt, Artificial Sequence
  Description of Artificial Sequence: Synthetic oligonucleotide
aguccauugggagcugcag

SEQ ID NO: 954554 - RNA, 19 nt, Artificial Sequence
  Description of Artificial Sequence: Synthetic oligonucleotide
uugucgggcgcuccagaga

SEQ ID NO: 954555 - RNA, 19 nt, Artificial Sequence
  Description of Artificial Sequence: Synthetic oligonucleotide
agggguuguaggcugguuu

SEQ ID NO: 954556 - RNA, 19 nt, Artificial Sequence
  Description of Artificial Sequence: Synthetic oligonucleotide
uugucggccaugccggcuc

SEQ ID NO: 954557 - RNA, 19 nt, Artificial Sequence
  Description of Artificial Sequence: Synthetic oligonucleotide
ugugugcgaagcacguuuu

SEQ ID NO: 954558 - RNA, 19 nt, Artificial Sequence
  Description of Artificial Sequence: Synthetic oligonucleotide
cucggauguuauugaugcc

SEQ ID NO: 954559 - RNA, 19 nt, Artificial Sequence
  Description of Artificial Sequence: Synthetic oligonucleotide
cuugagcaaggggugcagg

SEQ ID NO: 954560 - RNA, 19 nt, Artificial Sequence
  Description of Artificial Sequence: Synthetic oligonucleotide
acacacgaucaauggagaa

SEQ ID NO: 954561 - RNA, 19 nt, Artificial Sequence
  Description of Artificial Sequence: Synthetic oligonucleotide
caaacccaccuuucaagca

SEQ ID NO: 954562 - RNA, 19 nt, Artificial Sequence
  Description of Artificial Sequence: Synthetic oligonucleotide
cucggauccacuuguugga

SEQ ID NO: 954563 - RNA, 19 nt, Artificial Sequence
  Description of Artificial Sequence: Synthetic oligonucleotide
aguaugcuugggcgugcag

SEQ ID NO: 954564 - RNA, 19 nt, Artificial Sequence
  Description of Artificial Sequence: Synthetic oligonucleotide
ucauugucgggcgcuccag

SEQ ID NO: 954565 - RNA, 19 nt, Artificial Sequence
  Description of Artificial Sequence: Synthetic oligonucleotide
agucgccgcaacaacagcu

SEQ ID NO: 954566 - RNA, 19 nt, Artificial Sequence
  Description of Artificial Sequence: Synthetic oligonucleotide
guaucaggcagccuccugu

SEQ ID NO: 954567 - RNA, 19 nt, Artificial Sequence
  Description of Artificial Sequence: Synthetic oligonucleotide
ugcugugguaugugugcga

SEQ ID NO: 954568 - RNA, 19 nt, Artificial Sequence
  Description of Artificial Sequence: Synthetic oligonucleotide
acucggccagguguguggc

SEQ ID NO: 954569 - RNA, 19 nt, Artificial Sequence
  Description of Artificial Sequence: Synthetic oligonucleotide
cuucagcgggaucuuucag

SEQ ID NO: 954570 - RNA, 19 nt, Artificial Sequence
  Description of Artificial Sequence: Synthetic oligonucleotide
guguuuguggggaccuggg

SEQ ID NO: 954571 - RNA, 19 nt, Artificial Sequence
  Description of Artificial Sequence: Synthetic oligonucleotide
uguggcguccagcgucuca

SEQ ID NO: 954572 - RNA, 19 nt, Artificial Sequence
  Description of Artificial Sequence: Synthetic oligonucleotide
uagauaugcuugugcugaa

SEQ ID NO: 954573 - RNA, 19 nt, Artificial Sequence
  Description of Artificial Sequence: Synthetic oligonucleotide
ucauuccggaacacacgau

SEQ ID NO: 954574 - RNA, 19 nt, Artificial Sequence
  Description of Artificial Sequence: Synthetic oligonucleotide
gggcccaucagcuguauuc

SEQ ID NO: 954575 - RNA, 19 nt, Artificial Sequence
  Description of Artificial Sequence: Synthetic oligonucleotide
cuucugagcuaagcaguag

SEQ ID NO: 954576 - RNA, 19 nt, Artificial Sequence
  Description of Artificial Sequence: Synthetic oligonucleotide
gguccguuucacccgcugg

SEQ ID NO: 954577 - RNA, 19 nt, Artificial Sequence
  Description of Artificial Sequence: Synthetic oligonucleotide
cggaacacacgaucaaugg

SEQ ID NO: 954578 - RNA, 19 nt, Artificial Sequence
  Description of Artificial Sequence: Synthetic oligonucleotide
cauccgcugccuccagucg

SEQ ID NO: 954579 - RNA, 19 nt, Artificial Sequence
  Description of Artificial Sequence: Synthetic oligonucleotide
ggaugcuucuaaacacacg

SEQ ID NO: 954580 - RNA, 19 nt, Artificial Sequence
  Description of Artificial Sequence: Synthetic oligonucleotide
guaucauguuggucacgug

SEQ ID NO: 954581 - RNA, 19 nt, Artificial Sequence
  Description of Artificial Sequence: Synthetic oligonucleotide
ggggauacacagguacugg

SEQ ID NO: 954582 - RNA, 19 nt, Artificial Sequence
  Description of Artificial Sequence: Synthetic oligonucleotide
gaucauugucgggcgcucc

SEQ ID NO: 954583 - RNA, 19 nt, Artificial Sequence
  Description of Artificial Sequence: Synthetic oligonucleotide
cugucugggagcacaccuc

SEQ ID NO: 954584 - RNA, 19 nt, Artificial Sequence
  Description of Artificial Sequence: Synthetic oligonucleotide
gagcggaccuugagcaagg

SEQ ID NO: 954585 - RNA, 19 nt, Artificial Sequence
  Description of Artificial Sequence: Synthetic oligonucleotide
auguaucauguuggucacg

SEQ ID NO: 954586 - RNA, 19 nt, Artificial Sequence
  Description of Artificial Sequence: Synthetic oligonucleotide
gcucucaguaugcuugggc

SEQ ID NO: 954587 - RNA, 19 nt, Artificial Sequence
  Description of Artificial Sequence: Synthetic oligonucleotide
agaaguuauagggcuugaa

SEQ ID NO: 954588 - RNA, 19 nt, Artificial Sequence
  Description of Artificial Sequence: Synthetic oligonucleotide
aguagagaguucgggcgcu

SEQ ID NO: 954589 - RNA, 19 nt, Artificial Sequence
  Description of Artificial Sequence: Synthetic oligonucleotide
gcuggacauaguccauugg

SEQ ID NO: 954590 - RNA, 19 nt, Artificial Sequence
  Description of Artificial Sequence: Synthetic oligonucleotide
ucggaacugggagcggacc

SEQ ID NO: 954591 - RNA, 19 nt, Artificial Sequence
  Description of Artificial Sequence: Synthetic oligonucleotide
gagaaguacuuggcaggug

SEQ ID NO: 954592 - RNA, 19 nt, Artificial Sequence
  Description of Artificial Sequence: Synthetic oligonucleotide
uuaggccuuggugguagcu

SEQ ID NO: 954593 - RNA, 19 nt, Artificial Sequence
  Description of Artificial Sequence: Synthetic oligonucleotide
agggccaaacccaccuuuc

SEQ ID NO: 954594 - RNA, 19 nt, Artificial Sequence
  Description of Artificial Sequence: Synthetic oligonucleotide
cccaagcaauaacagacac

SEQ ID NO: 954595 - RNA, 19 nt, Artificial Sequence
  Description of Artificial Sequence: Synthetic oligonucleotide
cagccuguaucaggcagcc

SEQ ID NO: 954596 - RNA, 19 nt, Artificial Sequence
  Description of Artificial Sequence: Synthetic oligonucleotide
cugugguaugugugcgaag

SEQ ID NO: 954597 - RNA, 19 nt, Artificial Sequence
  Description of Artificial Sequence: Synthetic oligonucleotide
ggagcggaccuugagcaag

SEQ ID NO: 954598 - RNA, 19 nt, Artificial Sequence
  Description of Artificial Sequence: Synthetic oligonucleotide
ugugagccauagccgcccu

SEQ ID NO: 954599 - RNA, 19 nt, Artificial Sequence
  Description of Artificial Sequence: Synthetic oligonucleotide
guggguccguuucacccgc

SEQ ID NO: 954600 - RNA, 19 nt, Artificial Sequence
  Description of Artificial Sequence: Synthetic oligonucleotide
augcuugggcgugcaggcc

SEQ ID NO: 954601 - RNA, 19 nt, Artificial Sequence
  Description of Artificial Sequence: Synthetic oligonucleotide
ccggaacacacgaucaaug

SEQ ID NO: 954602 - RNA, 19 nt, Artificial Sequence
  Description of Artificial Sequence: Synthetic oligonucleotide
ucggccagguguguggcgu

SEQ ID NO: 954603 - RNA, 19 nt, Artificial Sequence
  Description of Artificial Sequence: Synthetic oligonucleotide
ucggauccacuuguuggac

SEQ ID NO: 954604 - RNA, 19 nt, Artificial Sequence
  Description of Artificial Sequence: Synthetic oligonucleotide
agccauagccgcccuggga

SEQ ID NO: 954605 - RNA, 19 nt, Artificial Sequence
  Description of Artificial Sequence: Synthetic oligonucleotide
cagcugcguagccaacucc

SEQ ID NO: 954606 - RNA, 19 nt, Artificial Sequence
  Description of Artificial Sequence: Synthetic oligonucleotide
caccacuaaaggccagcac

SEQ ID NO: 954607 - RNA, 19 nt, Artificial Sequence
  Description of Artificial Sequence: Synthetic oligonucleotide
ccgccucuguacuucaucc

SEQ ID NO: 954608 - RNA, 19 nt, Artificial Sequence
  Description of Artificial Sequence: Synthetic oligonucleotide
cugagcuaagcaguagaga

SEQ ID NO: 954609 - RNA, 19 nt, Artificial Sequence
  Description of Artificial Sequence: Synthetic oligonucleotide
agcauacuauaggcaccac

SEQ ID NO: 954610 - RNA, 19 nt, Artificial Sequence
  Description of Artificial Sequence: Synthetic oligonucleotide
cacuaaaggccagcacaag

SEQ ID NO: 954611 - RNA, 19 nt, Artificial Sequence
  Description of Artificial Sequence: Synthetic oligonucleotide
gcagcugggugauucccag

SEQ ID NO: 954612 - RNA, 19 nt, Artificial Sequence
  Description of Artificial Sequence: Synthetic oligonucleotide
agagagaccccaagcaaua

SEQ ID NO: 954613 - RNA, 19 nt, Artificial Sequence
  Description of Artificial Sequence: Synthetic oligonucleotide
cagguauacuuguagcccu

SEQ ID NO: 954614 - RNA, 19 nt, Artificial Sequence
  Description of Artificial Sequence: Synthetic oligonucleotide
ucccgggcaaucuccucac

SEQ ID NO: 954615 - RNA, 19 nt, Artificial Sequence
  Description of Artificial Sequence: Synthetic oligonucleotide
ugaucauugucgggcgcuc

SEQ ID NO: 954616 - RNA, 19 nt, Artificial Sequence
  Description of Artificial Sequence: Synthetic oligonucleotide
gugcgucaaaguuccagaa

SEQ ID NO: 954617 - RNA, 19 nt, Artificial Sequence
  Description of Artificial Sequence: Synthetic oligonucleotide
ccaccuuucaagcauacua

SEQ ID NO: 954618 - RNA, 19 nt, Artificial Sequence
  Description of Artificial Sequence: Synthetic oligonucleotide
agguauacuuguagcccug

SEQ ID NO: 954619 - RNA, 19 nt, Artificial Sequence
  Description of Artificial Sequence: Synthetic oligonucleotide
gccauacuugaucauuguc

SEQ ID NO: 954620 - RNA, 19 nt, Artificial Sequence
  Description of Artificial Sequence: Synthetic oligonucleotide
caucucagugaaccccauc

SEQ ID NO: 954621 - RNA, 19 nt, Artificial Sequence
  Description of Artificial Sequence: Synthetic oligonucleotide
gggcgcuccagagagagac

SEQ ID NO: 954622 - RNA, 19 nt, Artificial Sequence
  Description of Artificial Sequence: Synthetic oligonucleotide
cagaggccucuuaaauauc

SEQ ID NO: 954623 - RNA, 19 nt, Artificial Sequence
  Description of Artificial Sequence: Synthetic oligonucleotide
gaacacccggggcccauca

SEQ ID NO: 954624 - RNA, 19 nt, Artificial Sequence
  Description of Artificial Sequence: Synthetic oligonucleotide
agcugcaaccgccucugua

SEQ ID NO: 954625 - RNA, 19 nt, Artificial Sequence
  Description of Artificial Sequence: Synthetic oligonucleotide
cgggcagagaaguuauagg

SEQ ID NO: 954626 - RNA, 19 nt, Artificial Sequence
  Description of Artificial Sequence: Synthetic oligonucleotide
acccaccuuucaagcauac

SEQ ID NO: 954627 - RNA, 19 nt, Artificial Sequence
  Description of Artificial Sequence: Synthetic oligonucleotide
cacuuguuggacauggcuu

SEQ ID NO: 954628 - RNA, 19 nt, Artificial Sequence
  Description of Artificial Sequence: Synthetic oligonucleotide
ccuuaaggaaaggaaccac

SEQ ID NO: 954629 - RNA, 19 nt, Artificial Sequence
  Description of Artificial Sequence: Synthetic oligonucleotide
cagucgccgcaacaacagc

SEQ ID NO: 954630 - RNA, 19 nt, Artificial Sequence
  Description of Artificial Sequence: Synthetic oligonucleotide
cacaggauugucggccaug

SEQ ID NO: 954631 - RNA, 19 nt, Artificial Sequence
  Description of Artificial Sequence: Synthetic oligonucleotide
caggauugucggccaugcc

SEQ ID NO: 954632 - RNA, 19 nt, Artificial Sequence
  Description of Artificial Sequence: Synthetic oligonucleotide
cauagccgcccugggagug

SEQ ID NO: 954633 - RNA, 19 nt, Artificial Sequence
  Description of Artificial Sequence: Synthetic oligonucleotide
gggaugcuucuaaacacac

SEQ ID NO: 954634 - RNA, 19 nt, Artificial Sequence
  Description of Artificial Sequence: Synthetic oligonucleotide
gcccacuuuauuacagcag

SEQ ID NO: 954635 - RNA, 19 nt, Artificial Sequence
  Description of Artificial Sequence: Synthetic oligonucleotide
cuuguccacucggauccac

SEQ ID NO: 954636 - RNA, 19 nt, Artificial Sequence
  Description of Artificial Sequence: Synthetic oligonucleotide
auugucggccaugccggcu

SEQ ID NO: 954637 - RNA, 19 nt, Artificial Sequence
  Description of Artificial Sequence: Synthetic oligonucleotide
gagcuaagcaguagagagu

SEQ ID NO: 954638 - RNA, 19 nt, Artificial Sequence
  Description of Artificial Sequence: Synthetic oligonucleotide
ugccaacuucuacccacuu

SEQ ID NO: 954639 - RNA, 19 nt, Artificial Sequence
  Description of Artificial Sequence: Synthetic oligonucleotide
aacccaccuuucaagcaua

SEQ ID NO: 954640 - RNA, 19 nt, Artificial Sequence
  Description of Artificial Sequence: Synthetic oligonucleotide
uucgggcgcuggcugcugu

SEQ ID NO: 954641 - RNA, 19 nt, Artificial Sequence
  Description of Artificial Sequence: Synthetic oligonucleotide
cagucgcaugagcucacuc

SEQ ID NO: 954642 - RNA, 19 nt, Artificial Sequence
  Description of Artificial Sequence: Synthetic oligonucleotide
ucggccaugccggcucuca

SEQ ID NO: 954643 - RNA, 19 nt, Artificial Sequence
  Description of Artificial Sequence: Synthetic oligonucleotide
gucgccgcaacaacagcuc

SEQ ID NO: 954644 - RNA, 19 nt, Artificial Sequence
  Description of Artificial Sequence: Synthetic oligonucleotide
cagguguguggcguccagc

SEQ ID NO: 954645 - RNA, 19 nt, Artificial Sequence
  Description of Artificial Sequence: Synthetic oligonucleotide
ugucggccaugccggcucu

SEQ ID NO: 954646 - RNA, 19 nt, Artificial Sequence
  Description of Artificial Sequence: Synthetic oligonucleotide
gccaacuucuacccacuuc

SEQ ID NO: 954647 - RNA, 19 nt, Artificial Sequence
  Description of Artificial Sequence: Synthetic oligonucleotide
guaugugugcgaagcacgu

SEQ ID NO: 954648 - RNA, 19 nt, Artificial Sequence
  Description of Artificial Sequence: Synthetic oligonucleotide
agcggaccuugagcaaggg

SEQ ID NO: 954649 - RNA, 19 nt, Artificial Sequence
  Description of Artificial Sequence: Synthetic oligonucleotide
cgaucaauggagaaguacu

SEQ ID NO: 954650 - RNA, 19 nt, Artificial Sequence
  Description of Artificial Sequence: Synthetic oligonucleotide
gcccugugagccauagccg

SEQ ID NO: 954651 - RNA, 19 nt, Artificial Sequence
  Description of Artificial Sequence: Synthetic oligonucleotide
cuccuguguuuguggggac

SEQ ID NO: 954652 - RNA, 19 nt, Artificial Sequence
  Description of Artificial Sequence: Synthetic oligonucleotide
auagggcuugaagggccug

SEQ ID NO: 954653 - RNA, 19 nt, Artificial Sequence
  Description of Artificial Sequence: Synthetic oligonucleotide
uagccaacuccgcgcuguc

SEQ ID NO: 954654 - RNA, 19 nt, Artificial Sequence
  Description of Artificial Sequence: Synthetic oligonucleotide
gcgcuccagagagagaccc

SEQ ID NO: 954655 - RNA, 19 nt, Artificial Sequence
  Description of Artificial Sequence: Synthetic oligonucleotide
cauugucgggcgcuccaga

SEQ ID NO: 954656 - RNA, 19 nt, Artificial Sequence
  Description of Artificial Sequence: Synthetic oligonucleotide
cucagggcggaagacccca

SEQ ID NO: 954657 - RNA, 19 nt, Artificial Sequence
  Description of Artificial Sequence: Synthetic oligonucleotide
guagagaguucgggcgcug

SEQ ID NO: 954658 - RNA, 19 nt, Artificial Sequence
  Description of Artificial Sequence: Synthetic oligonucleotide
ggugguagcugaacacuuc

SEQ ID NO: 954659 - RNA, 19 nt, Artificial Sequence
  Description of Artificial Sequence: Synthetic oligonucleotide
ccacuaaaggccagcacaa

SEQ ID NO: 954660 - RNA, 19 nt, Artificial Sequence
  Description of Artificial Sequence: Synthetic oligonucleotide
guagccaacuccgcgcugu

SEQ ID NO: 954661 - RNA, 19 nt, Artificial Sequence
  Description of Artificial Sequence: Synthetic oligonucleotide
gugacgcagaggagugagc

SEQ ID NO: 954662 - RNA, 19 nt, Artificial Sequence
  Description of Artificial Sequence: Synthetic oligonucleotide
aguauccaggcggcacaca

SEQ ID NO: 954663 - RNA, 19 nt, Artificial Sequence
  Description of Artificial Sequence: Synthetic oligonucleotide
gugagccauagccgcccug

SEQ ID NO: 954664 - RNA, 19 nt, Artificial Sequence
  Description of Artificial Sequence: Synthetic oligonucleotide
gccgccauccgcugccucc

SEQ ID NO: 954665 - RNA, 19 nt, Artificial Sequence
  Description of Artificial Sequence: Synthetic oligonucleotide
gaacgaagcucagccucaa

SEQ ID NO: 954666 - RNA, 19 nt, Artificial Sequence
  Description of Artificial Sequence: Synthetic oligonucleotide
aguugucgguaggcaucuc

SEQ ID NO: 954667 - RNA, 19 nt, Artificial Sequence
  Description of Artificial Sequence: Synthetic oligonucleotide
ggccucauggcugcccucc

SEQ ID NO: 954668 - RNA, 19 nt, Artificial Sequence
  Description of Artificial Sequence: Synthetic oligonucleotide
ggucagcuaugacacccuc

SEQ ID NO: 954669 - RNA, 19 nt, Artificial Sequence
  Description of Artificial Sequence: Synthetic oligonucleotide
ccugcuuagauaugcuugu

SEQ ID NO: 954670 - RNA, 19 nt, Artificial Sequence
  Description of Artificial Sequence: Synthetic oligonucleotide
ggcugguuugaagcgcagc

SEQ ID NO: 954671 - RNA, 19 nt, Artificial Sequence
  Description of Artificial Sequence: Synthetic oligonucleotide
ucacugcgcccaccaccac

SEQ ID NO: 954672 - RNA, 19 nt, Artificial Sequence
  Description of Artificial Sequence: Synthetic oligonucleotide
ggaaccacgugaggcaaaa

SEQ ID NO: 954673 - RNA, 19 nt, Artificial Sequence
  Description of Artificial Sequence: Synthetic oligonucleotide
uggucacgugcugggugcu

SEQ ID NO: 954674 - RNA, 19 nt, Artificial Sequence
  Description of Artificial Sequence: Synthetic oligonucleotide
cuucaguuagcagcuuccu

SEQ ID NO: 954675 - RNA, 19 nt, Artificial Sequence
  Description of Artificial Sequence: Synthetic oligonucleotide
ggcaaaaugcccacuuuau

SEQ ID NO: 954676 - RNA, 19 nt, Artificial Sequence
  Description of Artificial Sequence: Synthetic oligonucleotide
uggguccguuucacccgcu

SEQ ID NO: 954677 - RNA, 19 nt, Artificial Sequence
  Description of Artificial Sequence: Synthetic oligonucleotide
gcccuugcucacccaguag

SEQ ID NO: 954678 - RNA, 19 nt, Artificial Sequence
  Description of Artificial Sequence: Synthetic oligonucleotide
gggcagucgcaugagcuca

SEQ ID NO: 954679 - RNA, 19 nt, Artificial Sequence
  Description of Artificial Sequence: Synthetic oligonucleotide
ggguccguuucacccgcug

SEQ ID NO: 954680 - RNA, 19 nt, Artificial Sequence
  Description of Artificial Sequence: Synthetic oligonucleotide
ggcaaucuccucacccuca

SEQ ID NO: 954681 - RNA, 19 nt, Artificial Sequence
  Description of Artificial Sequence: Synthetic oligonucleotide
cacgaucaauggagaagua

SEQ ID NO: 954682 - RNA, 19 nt, Artificial Sequence
  Description of Artificial Sequence: Synthetic oligonucleotide
gcugcguagccaacuccgc

SEQ ID NO: 954683 - RNA, 19 nt, Artificial Sequence
  Description of Artificial Sequence: Synthetic oligonucleotide
cagcacuugguggaacgaa

SEQ ID NO: 954684 - RNA, 19 nt, Artificial Sequence
  Description of Artificial Sequence: Synthetic oligonucleotide
uagggguuguaggcugguu

SEQ ID NO: 954685 - RNA, 19 nt, Artificial Sequence
  Description of Artificial Sequence: Synthetic oligonucleotide
gccaugccggcucucagua

SEQ ID NO: 954686 - RNA, 19 nt, Artificial Sequence
  Description of Artificial Sequence: Synthetic oligonucleotide
ccacuuguuggacauggcu

SEQ ID NO: 954687 - RNA, 19 nt, Artificial Sequence
  Description of Artificial Sequence: Synthetic oligonucleotide
cuuugcugaagcccaccuu

SEQ ID NO: 954688 - RNA, 19 nt, Artificial Sequence
  Description of Artificial Sequence: Synthetic oligonucleotide
gcgggaucuuucaggaaga

SEQ ID NO: 954689 - RNA, 19 nt, Artificial Sequence
  Description of Artificial Sequence: Synthetic oligonucleotide
cacccggggcccaucagcu

SEQ ID NO: 954690 - RNA, 19 nt, Artificial Sequence
  Description of Artificial Sequence: Synthetic oligonucleotide
gugugacgcagaggaguga

SEQ ID NO: 954691 - RNA, 19 nt, Artificial Sequence
  Description of Artificial Sequence: Synthetic oligonucleotide
cugcaaccgccucuguacu

SEQ ID NO: 954692 - RNA, 19 nt, Artificial Sequence
  Description of Artificial Sequence: Synthetic oligonucleotide
cuugggcgugcaggccgcc

SEQ ID NO: 954693 - RNA, 19 nt, Artificial Sequence
  Description of Artificial Sequence: Synthetic oligonucleotide
cucgagagggaugcuucua

SEQ ID NO: 954694 - RNA, 19 nt, Artificial Sequence
  Description of Artificial Sequence: Synthetic oligonucleotide
cccauaggcaggagcaucu

SEQ ID NO: 954695 - RNA, 19 nt, Artificial Sequence
  Description of Artificial Sequence: Synthetic oligonucleotide
gguauacuuguagcccugu

SEQ ID NO: 954696 - RNA, 19 nt, Artificial Sequence
  Description of Artificial Sequence: Synthetic oligonucleotide
cucgggcagagaaguuaua

SEQ ID NO: 954697 - RNA, 19 nt, Artificial Sequence
  Description of Artificial Sequence: Synthetic oligonucleotide
ccugugugugugacgcaga

SEQ ID NO: 954698 - RNA, 19 nt, Artificial Sequence
  Description of Artificial Sequence: Synthetic oligonucleotide
cuccacgcccagcugcgua

SEQ ID NO: 954699 - RNA, 19 nt, Artificial Sequence
  Description of Artificial Sequence: Synthetic oligonucleotide
gcuugggcgugcaggccgc

SEQ ID NO: 954700 - RNA, 19 nt, Artificial Sequence
  Description of Artificial Sequence: Synthetic oligonucleotide
guucgggcgcuggcugcug

SEQ ID NO: 954701 - RNA, 19 nt, Artificial Sequence
  Description of Artificial Sequence: Synthetic oligonucleotide
agagugcgucaaaguucca

SEQ ID NO: 954702 - RNA, 19 nt, Artificial Sequence
  Description of Artificial Sequence: Synthetic oligonucleotide
agccuguaucaggcagccu

SEQ ID NO: 954703 - RNA, 19 nt, Artificial Sequence
  Description of Artificial Sequence: Synthetic oligonucleotide
gcuaagcaguagagaguuc

SEQ ID NO: 954704 - RNA, 19 nt, Artificial Sequence
  Description of Artificial Sequence: Synthetic oligonucleotide
cccaguagguuuucagggu

SEQ ID NO: 954705 - RNA, 19 nt, Artificial Sequence
  Description of Artificial Sequence: Synthetic oligonucleotide
guagggguuguaggcuggu

SEQ ID NO: 954706 - RNA, 19 nt, Artificial Sequence
  Description of Artificial Sequence: Synthetic oligonucleotide
ggcagucgcaugagcucac

SEQ ID NO: 954707 - RNA, 19 nt, Artificial Sequence
  Description of Artificial Sequence: Synthetic oligonucleotide
ccuugcucacccaguaggu

SEQ ID NO: 954708 - RNA, 19 nt, Artificial Sequence
  Description of Artificial Sequence: Synthetic oligonucleotide
gggagcggaccuugagcaa

SEQ ID NO: 954709 - RNA, 19 nt, Artificial Sequence
  Description of Artificial Sequence: Synthetic oligonucleotide
gguguguggcguccagcgu

SEQ ID NO: 954710 - RNA, 19 nt, Artificial Sequence
  Description of Artificial Sequence: Synthetic oligonucleotide
gcguagccaacuccgcgcu

SEQ ID NO: 954711 - RNA, 19 nt, Artificial Sequence
  Description of Artificial Sequence: Synthetic oligonucleotide
gaaccacgugaggcaaaau

SEQ ID NO: 954712 - RNA, 19 nt, Artificial Sequence
  Description of Artificial Sequence: Synthetic oligonucleotide
cuguaucaggcagccuccu

SEQ ID NO: 954713 - RNA, 19 nt, Artificial Sequence
  Description of Artificial Sequence: Synthetic oligonucleotide
cacgggccucauggcugcc

SEQ ID NO: 954714 - RNA, 19 nt, Artificial Sequence
  Description of Artificial Sequence: Synthetic oligonucleotide
ccuugccacugggcagucg

SEQ ID NO: 954715 - RNA, 19 nt, Artificial Sequence
  Description of Artificial Sequence: Synthetic oligonucleotide
gcccacggucagcuaugac

SEQ ID NO: 954716 - RNA, 19 nt, Artificial Sequence
  Description of Artificial Sequence: Synthetic oligonucleotide
ccuguguuuguggggaccu

SEQ ID NO: 954717 - RNA, 19 nt, Artificial Sequence
  Description of Artificial Sequence: Synthetic oligonucleotide
cgccgcaacaacagcucca

SEQ ID NO: 954718 - RNA, 19 nt, Artificial Sequence
  Description of Artificial Sequence: Synthetic oligonucleotide
ccacgcccagcugcguagc

SEQ ID NO: 954719 - RNA, 19 nt, Artificial Sequence
  Description of Artificial Sequence: Synthetic oligonucleotide
cguagccaacuccgcgcug

SEQ ID NO: 954720 - RNA, 19 nt, Artificial Sequence
  Description of Artificial Sequence: Synthetic oligonucleotide
gggcgugcaggccgcccga

SEQ ID NO: 954721 - RNA, 19 nt, Artificial Sequence
  Description of Artificial Sequence: Synthetic oligonucleotide
gcucacccaguagguuuuc

SEQ ID NO: 954722 - RNA, 19 nt, Artificial Sequence
  Description of Artificial Sequence: Synthetic oligonucleotide
gcugcccucccgggcaauc

SEQ ID NO: 954723 - RNA, 19 nt, Artificial Sequence
  Description of Artificial Sequence: Synthetic oligonucleotide
gucggccaugccggcucuc

SEQ ID NO: 954724 - RNA, 19 nt, Artificial Sequence
  Description of Artificial Sequence: Synthetic oligonucleotide
guguggcguccagcgucuc

SEQ ID NO: 954725 - RNA, 19 nt, Artificial Sequence
  Description of Artificial Sequence: Synthetic oligonucleotide
ggcgugcaggccgcccgac

SEQ ID NO: 954726 - RNA, 19 nt, Artificial Sequence
  Description of Artificial Sequence: Synthetic oligonucleotide
gccggcucucaguaugcuu

SEQ ID NO: 954727 - RNA, 19 nt, Artificial Sequence
  Description of Artificial Sequence: Synthetic oligonucleotide
ggccgccauccgcugccuc

SEQ ID NO: 954728 - RNA, 19 nt, Artificial Sequence
  Description of Artificial Sequence: Synthetic oligonucleotide
gccauccgcugccuccagu

SEQ ID NO: 954729 - RNA, 19 nt, Artificial Sequence
  Description of Artificial Sequence: Synthetic oligonucleotide
gggccucuucuagcuucca

SEQ ID NO: 954730 - RNA, 19 nt, Artificial Sequence
  Description of Artificial Sequence: Synthetic oligonucleotide
caggugugaagggcuucuu

SEQ ID NO: 954731 - RNA, 19 nt, Artificial Sequence
  Description of Artificial Sequence: Synthetic oligonucleotide
gcucuguguagggguugua

SEQ ID NO: 954732 - RNA, 19 nt, Artificial Sequence
  Description of Artificial Sequence: Synthetic oligonucleotide
cggccagguguguggcguc

SEQ ID NO: 954733 - RNA, 19 nt, Artificial Sequence
  Description of Artificial Sequence: Synthetic oligonucleotide
ccugggaguggguccguuu

SEQ ID NO: 954734 - RNA, 19 nt, Artificial Sequence
  Description of Artificial Sequence: Synthetic oligonucleotide
cccaccuuucaagcauacu

SEQ ID NO: 954735 - RNA, 19 nt, Artificial Sequence
  Description of Artificial Sequence: Synthetic oligonucleotide
gcccucgagagggaugcuu

SEQ ID NO: 954736 - RNA, 19 nt, Artificial Sequence
  Description of Artificial Sequence: Synthetic oligonucleotide
cgccauccgcugccuccag

SEQ ID NO: 954737 - RNA, 19 nt, Artificial Sequence
  Description of Artificial Sequence: Synthetic oligonucleotide
gccccauaggcaggagcau

SEQ ID NO: 954738 - RNA, 19 nt, Artificial Sequence
  Description of Artificial Sequence: Synthetic oligonucleotide
ccggggcccaucagcugua

SEQ ID NO: 954739 - RNA, 19 nt, Artificial Sequence
  Description of Artificial Sequence: Synthetic oligonucleotide
cccgcuggacauaguccau

SEQ ID NO: 954740 - RNA, 19 nt, Artificial Sequence
  Description of Artificial Sequence: Synthetic oligonucleotide
ccaugccggcucucaguau

SEQ ID NO: 954741 - RNA, 19 nt, Artificial Sequence
  Description of Artificial Sequence: Synthetic oligonucleotide
ccgcuggacauaguccauu

SEQ ID NO: 954742 - RNA, 19 nt, Artificial Sequence
  Description of Artificial Sequence: Synthetic oligonucleotide
cgggcgcuccagagagaga

SEQ ID NO: 954743 - RNA, 19 nt, Artificial Sequence
  Description of Artificial Sequence: Synthetic oligonucleotide
ggcccucgagagggaugcu

SEQ ID NO: 954744 - RNA, 19 nt, Artificial Sequence
  Description of Artificial Sequence: Synthetic oligonucleotide
cccugggaguggguccguu

SEQ ID NO: 954745 - RNA, 19 nt, Artificial Sequence
  Description of Artificial Sequence: Synthetic oligonucleotide
uauacuuuuauuauucacc

SEQ ID NO: 954746 - RNA, 19 nt, Artificial Sequence
  Description of Artificial Sequence: Synthetic oligonucleotide
uaauaugcgaaucacgagc

SEQ ID NO: 954747 - RNA, 19 nt, Artificial Sequence
  Description of Artificial Sequence: Synthetic oligonucleotide
uggggaauaaucaaaucgg

SEQ ID NO: 954748 - RNA, 19 nt, Artificial Sequence
  Description of Artificial Sequence: Synthetic oligonucleotide
auauauaauauauauacuu

SEQ ID NO: 954749 - RNA, 19 nt, Artificial Sequence
  Description of Artificial Sequence: Synthetic oligonucleotide
aacccaaccaguuuccgac

SEQ ID NO: 954750 - RNA, 19 nt, Artificial Sequence
  Description of Artificial Sequence: Synthetic oligonucleotide
aauacaucgaacccuuuca

SEQ ID NO: 954751 - RNA, 19 nt, Artificial Sequence
  Description of Artificial Sequence: Synthetic oligonucleotide
cuggggaauaaucaaaucg

SEQ ID NO: 954752 - RNA, 19 nt, Artificial Sequence
  Description of Artificial Sequence: Synthetic oligonucleotide
uauauauaauauauauacu

SEQ ID NO: 954753 - RNA, 19 nt, Artificial Sequence
  Description of Artificial Sequence: Synthetic oligonucleotide
uauauaauauauauacuuu

SEQ ID NO: 954754 - RNA, 19 nt, Artificial Sequence
  Description of Artificial Sequence: Synthetic oligonucleotide
aaaggugacaucacgcagc

SEQ ID NO: 954755 - RNA, 19 nt, Artificial Sequence
  Description of Artificial Sequence: Synthetic oligonucleotide
agucgguagagcuucaugg

SEQ ID NO: 954756 - RNA, 19 nt, Artificial Sequence
  Description of Artificial Sequence: Synthetic oligonucleotide
aguguaaacagcuuggaaa

SEQ ID NO: 954757 - RNA, 19 nt, Artificial Sequence
  Description of Artificial Sequence: Synthetic oligonucleotide
uguacuacuggaauguccu

SEQ ID NO: 954758 - RNA, 19 nt, Artificial Sequence
  Description of Artificial Sequence: Synthetic oligonucleotide
aaggugacaucacgcagcc

SEQ ID NO: 954759 - RNA, 19 nt, Artificial Sequence
  Description of Artificial Sequence: Synthetic oligonucleotide
aacccaaccuucucggccc

SEQ ID NO: 954760 - RNA, 19 nt, Artificial Sequence
  Description of Artificial Sequence: Synthetic oligonucleotide
aggguuuagggaccgaugc

SEQ ID NO: 954761 - RNA, 19 nt, Artificial Sequence
  Description of Artificial Sequence: Synthetic oligonucleotide
uuauucacccgucaacucc

SEQ ID NO: 954762 - RNA, 19 nt, Artificial Sequence
  Description of Artificial Sequence: Synthetic oligonucleotide
aacccuuucauuuuggcua

SEQ ID NO: 954763 - RNA, 19 nt, Artificial Sequence
  Description of Artificial Sequence: Synthetic oligonucleotide
ucaaaucggaacauguugu

SEQ ID NO: 954764 - RNA, 19 nt, Artificial Sequence
  Description of Artificial Sequence: Synthetic oligonucleotide
agugucauuggcuggacuc

SEQ ID NO: 954765 - RNA, 19 nt, Artificial Sequence
  Description of Artificial Sequence: Synthetic oligonucleotide
cauaauaugcgaaucacga

SEQ ID NO: 954766 - RNA, 19 nt, Artificial Sequence
  Description of Artificial Sequence: Synthetic oligonucleotide
uucaaucagcuuccgaggg

SEQ ID NO: 954767 - RNA, 19 nt, Artificial Sequence
  Description of Artificial Sequence: Synthetic oligonucleotide
cuuguggacacacaggaag

SEQ ID NO: 954768 - RNA, 19 nt, Artificial Sequence
  Description of Artificial Sequence: Synthetic oligonucleotide
uaucucucggaucaaaacu

SEQ ID NO: 954769 - RNA, 19 nt, Artificial Sequence
  Description of Artificial Sequence: Synthetic oligonucleotide
cauuuuggcuagaacaagg

SEQ ID NO: 954770 - RNA, 19 nt, Artificial Sequence
  Description of Artificial Sequence: Synthetic oligonucleotide
uuauuauucacccgucaac

SEQ ID NO: 954771 - RNA, 19 nt, Artificial Sequence
  Description of Artificial Sequence: Synthetic oligonucleotide
uaggguauagggcuccugg

SEQ ID NO: 954772 - RNA, 19 nt, Artificial Sequence
  Description of Artificial Sequence: Synthetic oligonucleotide
aaucggaacauguugucau

SEQ ID NO: 954773 - RNA, 19 nt, Artificial Sequence
  Description of Artificial Sequence: Synthetic oligonucleotide
uauuauucacccgucaacu

SEQ ID NO: 954774 - RNA, 19 nt, Artificial Sequence
  Description of Artificial Sequence: Synthetic oligonucleotide
cauugaauacaucgaaccc

SEQ ID NO: 954775 - RNA, 19 nt, Artificial Sequence
  Description of Artificial Sequence: Synthetic oligonucleotide
auaauaugcgaaucacgag

SEQ ID NO: 954776 - RNA, 19 nt, Artificial Sequence
  Description of Artificial Sequence: Synthetic oligonucleotide
acucgaaccccgcagugcc

SEQ ID NO: 954777 - RNA, 19 nt, Artificial Sequence
  Description of Artificial Sequence: Synthetic oligonucleotide
ucuuuuagcacaccacggu

SEQ ID NO: 954778 - RNA, 19 nt, Artificial Sequence
  Description of Artificial Sequence: Synthetic oligonucleotide
aacuccauaauaugcgaau

SEQ ID NO: 954779 - RNA, 19 nt, Artificial Sequence
  Description of Artificial Sequence: Synthetic oligonucleotide
aguggugggauuccguuuc

SEQ ID NO: 954780 - RNA, 19 nt, Artificial Sequence
  Description of Artificial Sequence: Synthetic oligonucleotide
uugucaaguucgcuggcgg

SEQ ID NO: 954781 - RNA, 19 nt, Artificial Sequence
  Description of Artificial Sequence: Synthetic oligonucleotide
gucaacuccauaauaugcg

SEQ ID NO: 954782 - RNA, 19 nt, Artificial Sequence
  Description of Artificial Sequence: Synthetic oligonucleotide
auugaauacaucgaacccu

SEQ ID NO: 954783 - RNA, 19 nt, Artificial Sequence
  Description of Artificial Sequence: Synthetic oligonucleotide
agaacaagggcaucgcuca

SEQ ID NO: 954784 - RNA, 19 nt, Artificial Sequence
  Description of Artificial Sequence: Synthetic oligonucleotide
uuuccguucccuuccauca

SEQ ID NO: 954785 - RNA, 19 nt, Artificial Sequence
  Description of Artificial Sequence: Synthetic oligonucleotide
uaugcgaaucacgagcuag

SEQ ID NO: 954786 - RNA, 19 nt, Artificial Sequence
  Description of Artificial Sequence: Synthetic oligonucleotide
aauaugcgaaucacgagcu

SEQ ID NO: 954787 - RNA, 19 nt, Artificial Sequence
  Description of Artificial Sequence: Synthetic oligonucleotide
auuauucacccgucaacuc

SEQ ID NO: 954788 - RNA, 19 nt, Artificial Sequence
  Description of Artificial Sequence: Synthetic oligonucleotide
uauuuaccacuucacccag

SEQ ID NO: 954789 - RNA, 19 nt, Artificial Sequence
  Description of Artificial Sequence: Synthetic oligonucleotide
aacaggcuuuggcaauacc

SEQ ID NO: 954790 - RNA, 19 nt, Artificial Sequence
  Description of Artificial Sequence: Synthetic oligonucleotide
acaucacgcagccuacacc

SEQ ID NO: 954791 - RNA, 19 nt, Artificial Sequence
  Description of Artificial Sequence: Synthetic oligonucleotide
gcucauaaggucuagaaga

SEQ ID NO: 954792 - RNA, 19 nt, Artificial Sequence
  Description of Artificial Sequence: Synthetic oligonucleotide
gaucacggcugcaugaggg

SEQ ID NO: 954793 - RNA, 19 nt, Artificial Sequence
  Description of Artificial Sequence: Synthetic oligonucleotide
uagaacaagggcaucgcuc

SEQ ID NO: 954794 - RNA, 19 nt, Artificial Sequence
  Description of Artificial Sequence: Synthetic oligonucleotide
uauucacccgucaacucca

SEQ ID NO: 954795 - RNA, 19 nt, Artificial Sequence
  Description of Artificial Sequence: Synthetic oligonucleotide
acaucgaacccuuucauuu

SEQ ID NO: 954796 - RNA, 19 nt, Artificial Sequence
  Description of Artificial Sequence: Synthetic oligonucleotide
uggcgguuugguaaagccg

SEQ ID NO: 954797 - RNA, 19 nt, Artificial Sequence
  Description of Artificial Sequence: Synthetic oligonucleotide
acguaguucucauucagga

SEQ ID NO: 954798 - RNA, 19 nt, Artificial Sequence
  Description of Artificial Sequence: Synthetic oligonucleotide
aguuggaccaacaaguggu

SEQ ID NO: 954799 - RNA, 19 nt, Artificial Sequence
  Description of Artificial Sequence: Synthetic oligonucleotide
agcuagguucagcaguuac

SEQ ID NO: 954800 - RNA, 19 nt, Artificial Sequence
  Description of Artificial Sequence: Synthetic oligonucleotide
uugaauacaucgaacccuu

SEQ ID NO: 954801 - RNA, 19 nt, Artificial Sequence
  Description of Artificial Sequence: Synthetic oligonucleotide
uuggcuagaacaagggcau

SEQ ID NO: 954802 - RNA, 19 nt, Artificial Sequence
  Description of Artificial Sequence: Synthetic oligonucleotide
ucacccgucaacuccauaa

SEQ ID NO: 954803 - RNA, 19 nt, Artificial Sequence
  Description of Artificial Sequence: Synthetic oligonucleotide
aaaguuggaccaacaagug

SEQ ID NO: 954804 - RNA, 19 nt, Artificial Sequence
  Description of Artificial Sequence: Synthetic oligonucleotide
caugguuuuggcagguccc

SEQ ID NO: 954805 - RNA, 19 nt, Artificial Sequence
  Description of Artificial Sequence: Synthetic oligonucleotide
uucaaguaccuggugagca

SEQ ID NO: 954806 - RNA, 19 nt, Artificial Sequence
  Description of Artificial Sequence: Synthetic oligonucleotide
uucgcuggcgguuugguaa

SEQ ID NO: 954807 - RNA, 19 nt, Artificial Sequence
  Description of Artificial Sequence: Synthetic oligonucleotide
aaucucacaggcaacuggu

SEQ ID NO: 954808 - RNA, 19 nt, Artificial Sequence
  Description of Artificial Sequence: Synthetic oligonucleotide
uccauaauaugcgaaucac

SEQ ID NO: 954809 - RNA, 19 nt, Artificial Sequence
  Description of Artificial Sequence: Synthetic oligonucleotide
ccaguuuccgacuugagac

SEQ ID NO: 954810 - RNA, 19 nt, Artificial Sequence
  Description of Artificial Sequence: Synthetic oligonucleotide
uuugguaaagccgguucag

SEQ ID NO: 954811 - RNA, 19 nt, Artificial Sequence
  Description of Artificial Sequence: Synthetic oligonucleotide
uccccuaugccgaauuuga

SEQ ID NO: 954812 - RNA, 19 nt, Artificial Sequence
  Description of Artificial Sequence: Synthetic oligonucleotide
ugcaugaggguguuauuca

SEQ ID NO: 954813 - RNA, 19 nt, Artificial Sequence
  Description of Artificial Sequence: Synthetic oligonucleotide
aguaccugcaggugccaac

SEQ ID NO: 954814 - RNA, 19 nt, Artificial Sequence
  Description of Artificial Sequence: Synthetic oligonucleotide
guuauucauugaaaacagg

SEQ ID NO: 954815 - RNA, 19 nt, Artificial Sequence
  Description of Artificial Sequence: Synthetic oligonucleotide
aacaaguggugggauuccg

SEQ ID NO: 954816 - RNA, 19 nt, Artificial Sequence
  Description of Artificial Sequence: Synthetic oligonucleotide
aaggucuagaagagggguc

SEQ ID NO: 954817 - RNA, 19 nt, Artificial Sequence
  Description of Artificial Sequence: Synthetic oligonucleotide
acuccauaauaugcgaauc

SEQ ID NO: 954818 - RNA, 19 nt, Artificial Sequence
  Description of Artificial Sequence: Synthetic oligonucleotide
ucgaacccuuucauuuugg

SEQ ID NO: 954819 - RNA, 19 nt, Artificial Sequence
  Description of Artificial Sequence: Synthetic oligonucleotide
ugggugugaacguuguaga

SEQ ID NO: 954820 - RNA, 19 nt, Artificial Sequence
  Description of Artificial Sequence: Synthetic oligonucleotide
agggaaguguauaaaagcu

SEQ ID NO: 954821 - RNA, 19 nt, Artificial Sequence
  Description of Artificial Sequence: Synthetic oligonucleotide
uuggucggagcccagcugu

SEQ ID NO: 954822 - RNA, 19 nt, Artificial Sequence
  Description of Artificial Sequence: Synthetic oligonucleotide
aggaguaagcagcuuucag

SEQ ID NO: 954823 - RNA, 19 nt, Artificial Sequence
  Description of Artificial Sequence: Synthetic oligonucleotide
aauaccacgccagcagugu

SEQ ID NO: 954824 - RNA, 19 nt, Artificial Sequence
  Description of Artificial Sequence: Synthetic oligonucleotide
acgccagcaguguaaacag

SEQ ID NO: 954825 - RNA, 19 nt, Artificial Sequence
  Description of Artificial Sequence: Synthetic oligonucleotide
ugaucacggcugcaugagg

SEQ ID NO: 954826 - RNA, 19 nt, Artificial Sequence
  Description of Artificial Sequence: Synthetic oligonucleotide
agugcucauggccguuucc

SEQ ID NO: 954827 - RNA, 19 nt, Artificial Sequence
  Description of Artificial Sequence: Synthetic oligonucleotide
acgagcuagguucagcagu

SEQ ID NO: 954828 - RNA, 19 nt, Artificial Sequence
  Description of Artificial Sequence: Synthetic oligonucleotide
uuggcaauaccacgccagc

SEQ ID NO: 954829 - RNA, 19 nt, Artificial Sequence
  Description of Artificial Sequence: Synthetic oligonucleotide
cuggcgguuugguaaagcc

SEQ ID NO: 954830 - RNA, 19 nt, Artificial Sequence
  Description of Artificial Sequence: Synthetic oligonucleotide
acagcuuggaaaaugcccu

SEQ ID NO: 954831 - RNA, 19 nt, Artificial Sequence
  Description of Artificial Sequence: Synthetic oligonucleotide
uacagguaauacugcaggu

SEQ ID NO: 954832 - RNA, 19 nt, Artificial Sequence
  Description of Artificial Sequence: Synthetic oligonucleotide
caucacgcagccuacacca

SEQ ID NO: 954833 - RNA, 19 nt, Artificial Sequence
  Description of Artificial Sequence: Synthetic oligonucleotide
auaaggucuagaagagggg

SEQ ID NO: 954834 - RNA, 19 nt, Artificial Sequence
  Description of Artificial Sequence: Synthetic oligonucleotide
uguaauugucaaguucgcu

SEQ ID NO: 954835 - RNA, 19 nt, Artificial Sequence
  Description of Artificial Sequence: Synthetic oligonucleotide
aucucucggaucaaaacug

SEQ ID NO: 954836 - RNA, 19 nt, Artificial Sequence
  Description of Artificial Sequence: Synthetic oligonucleotide
aucggaacauguugucauc

SEQ ID NO: 954837 - RNA, 19 nt, Artificial Sequence
  Description of Artificial Sequence: Synthetic oligonucleotide
ggguguacaguucuuuuag

SEQ ID NO: 954838 - RNA, 19 nt, Artificial Sequence
  Description of Artificial Sequence: Synthetic oligonucleotide
cgaaucacgagcuagguuc

SEQ ID NO: 954839 - RNA, 19 nt, Artificial Sequence
  Description of Artificial Sequence: Synthetic oligonucleotide
ucgcucauaaggucuagaa

SEQ ID NO: 954840 - RNA, 19 nt, Artificial Sequence
  Description of Artificial Sequence: Synthetic oligonucleotide
aucgaacccuuucauuuug

SEQ ID NO: 954841 - RNA, 19 nt, Artificial Sequence
  Description of Artificial Sequence: Synthetic oligonucleotide
ccauaauaugcgaaucacg

SEQ ID NO: 954842 - RNA, 19 nt, Artificial Sequence
  Description of Artificial Sequence: Synthetic oligonucleotide
agugcauugaauacaucga

SEQ ID NO: 954843 - RNA, 19 nt, Artificial Sequence
  Description of Artificial Sequence: Synthetic oligonucleotide
aggucccugacccacugag

SEQ ID NO: 954844 - RNA, 19 nt, Artificial Sequence
  Description of Artificial Sequence: Synthetic oligonucleotide
uugaucacggcugcaugag

SEQ ID NO: 954845 - RNA, 19 nt, Artificial Sequence
  Description of Artificial Sequence: Synthetic oligonucleotide
agggaccgaugccaguacc

SEQ ID NO: 954846 - RNA, 19 nt, Artificial Sequence
  Description of Artificial Sequence: Synthetic oligonucleotide
aucgucuuccacguaguuc

SEQ ID NO: 954847 - RNA, 19 nt, Artificial Sequence
  Description of Artificial Sequence: Synthetic oligonucleotide
cucgcaaucgcugcagugc

SEQ ID NO: 954848 - RNA, 19 nt, Artificial Sequence
  Description of Artificial Sequence: Synthetic oligonucleotide
caccaacccaaccuucucg

SEQ ID NO: 954849 - RNA, 19 nt, Artificial Sequence
  Description of Artificial Sequence: Synthetic oligonucleotide
gacuugagaccacucgaac

SEQ ID NO: 954850 - RNA, 19 nt, Artificial Sequence
  Description of Artificial Sequence: Synthetic oligonucleotide
caaaucggaacauguuguc

SEQ ID NO: 954851 - RNA, 19 nt, Artificial Sequence
  Description of Artificial Sequence: Synthetic oligonucleotide
caguuuccgacuugagacc

SEQ ID NO: 954852 - RNA, 19 nt, Artificial Sequence
  Description of Artificial Sequence: Synthetic oligonucleotide
agguugccguccccuaugc

SEQ ID NO: 954853 - RNA, 19 nt, Artificial Sequence
  Description of Artificial Sequence: Synthetic oligonucleotide
aacuggagccacccucuug

SEQ ID NO: 954854 - RNA, 19 nt, Artificial Sequence
  Description of Artificial Sequence: Synthetic oligonucleotide
gacaucacgcagccuacac

SEQ ID NO: 954855 - RNA, 19 nt, Artificial Sequence
  Description of Artificial Sequence: Synthetic oligonucleotide
gaccacucgaaccccgcag

SEQ ID NO: 954856 - RNA, 19 nt, Artificial Sequence
  Description of Artificial Sequence: Synthetic oligonucleotide
ugaacccaaccaguuuccg

SEQ ID NO: 954857 - RNA, 19 nt, Artificial Sequence
  Description of Artificial Sequence: Synthetic oligonucleotide
ugguuacuguaacaccaac

SEQ ID NO: 954858 - RNA, 19 nt, Artificial Sequence
  Description of Artificial Sequence: Synthetic oligonucleotide
ggguauuuaccacuucacc

SEQ ID NO: 954859 - RNA, 19 nt, Artificial Sequence
  Description of Artificial Sequence: Synthetic oligonucleotide
ugaugaacccaaccaguuu

SEQ ID NO: 954860 - RNA, 19 nt, Artificial Sequence
  Description of Artificial Sequence: Synthetic oligonucleotide
gugagagaacuucacuuca

SEQ ID NO: 954861 - RNA, 19 nt, Artificial Sequence
  Description of Artificial Sequence: Synthetic oligonucleotide
gaaaacagggagaccagaa

SEQ ID NO: 954862 - RNA, 19 nt, Artificial Sequence
  Description of Artificial Sequence: Synthetic oligonucleotide
ucguucucgcaaucgcugc

SEQ ID NO: 954863 - RNA, 19 nt, Artificial Sequence
  Description of Artificial Sequence: Synthetic oligonucleotide
cuccauaauaugcgaauca

SEQ ID NO: 954864 - RNA, 19 nt, Artificial Sequence
  Description of Artificial Sequence: Synthetic oligonucleotide
gguuacuguaacaccaacc

SEQ ID NO: 954865 - RNA, 19 nt, Artificial Sequence
  Description of Artificial Sequence: Synthetic oligonucleotide
ucucgcaaucgcugcagug

SEQ ID NO: 954866 - RNA, 19 nt, Artificial Sequence
  Description of Artificial Sequence: Synthetic oligonucleotide
ucaugacuggcgugaggag

SEQ ID NO: 954867 - RNA, 19 nt, Artificial Sequence
  Description of Artificial Sequence: Synthetic oligonucleotide
ucgcaaucgcugcagugcu

SEQ ID NO: 954868 - RNA, 19 nt, Artificial Sequence
  Description of Artificial Sequence: Synthetic oligonucleotide
aaggaguaagcagcuuuca

SEQ ID NO: 954869 - RNA, 19 nt, Artificial Sequence
  Description of Artificial Sequence: Synthetic oligonucleotide
uccggguuaucucucggau

SEQ ID NO: 954870 - RNA, 19 nt, Artificial Sequence
  Description of Artificial Sequence: Synthetic oligonucleotide
gaaccagugcucuaccucu

SEQ ID NO: 954871 - RNA, 19 nt, Artificial Sequence
  Description of Artificial Sequence: Synthetic oligonucleotide
cacgcagccuacaccauug

SEQ ID NO: 954872 - RNA, 19 nt, Artificial Sequence
  Description of Artificial Sequence: Synthetic oligonucleotide
uagcacaccacggucuccc

SEQ ID NO: 954873 - RNA, 19 nt, Artificial Sequence
  Description of Artificial Sequence: Synthetic oligonucleotide
ggcuagaacaagggcaucg

SEQ ID NO: 954874 - RNA, 19 nt, Artificial Sequence
  Description of Artificial Sequence: Synthetic oligonucleotide
uuagggaccgaugccagua

SEQ ID NO: 954875 - RNA, 19 nt, Artificial Sequence
  Description of Artificial Sequence: Synthetic oligonucleotide
aguuuccgacuugagacca

SEQ ID NO: 954876 - RNA, 19 nt, Artificial Sequence
  Description of Artificial Sequence: Synthetic oligonucleotide
ugucaaguucgcuggcggu

SEQ ID NO: 954877 - RNA, 19 nt, Artificial Sequence
  Description of Artificial Sequence: Synthetic oligonucleotide
aaucgcugcagugcucaug

SEQ ID NO: 954878 - RNA, 19 nt, Artificial Sequence
  Description of Artificial Sequence: Synthetic oligonucleotide
cugcaugaggguguuauuc

SEQ ID NO: 954879 - RNA, 19 nt, Artificial Sequence
  Description of Artificial Sequence: Synthetic oligonucleotide
augccaccccgguuguagc

SEQ ID NO: 954880 - RNA, 19 nt, Artificial Sequence
  Description of Artificial Sequence: Synthetic oligonucleotide
guuuccguucccuuccauc

SEQ ID NO: 954881 - RNA, 19 nt, Artificial Sequence
  Description of Artificial Sequence: Synthetic oligonucleotide
augcgaaucacgagcuagg

SEQ ID NO: 954882 - RNA, 19 nt, Artificial Sequence
  Description of Artificial Sequence: Synthetic oligonucleotide
ugaggguguuauucauuga

SEQ ID NO: 954883 - RNA, 19 nt, Artificial Sequence
  Description of Artificial Sequence: Synthetic oligonucleotide
auuggucggagcccagcug

SEQ ID NO: 954884 - RNA, 19 nt, Artificial Sequence
  Description of Artificial Sequence: Synthetic oligonucleotide
gaacccaaccaguuuccga

SEQ ID NO: 954885 - RNA, 19 nt, Artificial Sequence
  Description of Artificial Sequence: Synthetic oligonucleotide
ggcacugaugaacccaacc

SEQ ID NO: 954886 - RNA, 19 nt, Artificial Sequence
  Description of Artificial Sequence: Synthetic oligonucleotide
augagauccagugcauuga

SEQ ID NO: 954887 - RNA, 19 nt, Artificial Sequence
  Description of Artificial Sequence: Synthetic oligonucleotide
ugaacccuccggguuaucu

SEQ ID NO: 954888 - RNA, 19 nt, Artificial Sequence
  Description of Artificial Sequence: Synthetic oligonucleotide
uuucagacucuuguggguu

SEQ ID NO: 954889 - RNA, 19 nt, Artificial Sequence
  Description of Artificial Sequence: Synthetic oligonucleotide
cgucaacuccauaauaugc

SEQ ID NO: 954890 - RNA, 19 nt, Artificial Sequence
  Description of Artificial Sequence: Synthetic oligonucleotide
uuuagggaccgaugccagu

SEQ ID NO: 954891 - RNA, 19 nt, Artificial Sequence
  Description of Artificial Sequence: Synthetic oligonucleotide
auacugcagguugccgucc

SEQ ID NO: 954892 - RNA, 19 nt, Artificial Sequence
  Description of Artificial Sequence: Synthetic oligonucleotide
caugccaccccgguuguag

SEQ ID NO: 954893 - RNA, 19 nt, Artificial Sequence
  Description of Artificial Sequence: Synthetic oligonucleotide
gauuccguuuccugguuua

SEQ ID NO: 954894 - RNA, 19 nt, Artificial Sequence
  Description of Artificial Sequence: Synthetic oligonucleotide
caugcuagggcacuuccaa

SEQ ID NO: 954895 - RNA, 19 nt, Artificial Sequence
  Description of Artificial Sequence: Synthetic oligonucleotide
cccuaugccgaauuugagc

SEQ ID NO: 954896 - RNA, 19 nt, Artificial Sequence
  Description of Artificial Sequence: Synthetic oligonucleotide
uaccacgccagcaguguaa

SEQ ID NO: 954897 - RNA, 19 nt, Artificial Sequence
  Description of Artificial Sequence: Synthetic oligonucleotide
aaguucgcuggcgguuugg

SEQ ID NO: 954898 - RNA, 19 nt, Artificial Sequence
  Description of Artificial Sequence: Synthetic oligonucleotide
uuccauuggucggagccca

SEQ ID NO: 954899 - RNA, 19 nt, Artificial Sequence
  Description of Artificial Sequence: Synthetic oligonucleotide
ccgaauuugagcuucucca

SEQ ID NO: 954900 - RNA, 19 nt, Artificial Sequence
  Description of Artificial Sequence: Synthetic oligonucleotide
agucaccucaccguuggca

SEQ ID NO: 954901 - RNA, 19 nt, Artificial Sequence
  Description of Artificial Sequence: Synthetic oligonucleotide
gaacccuccggguuaucuc

SEQ ID NO: 954902 - RNA, 19 nt, Artificial Sequence
  Description of Artificial Sequence: Synthetic oligonucleotide
accacucgaaccccgcagu

SEQ ID NO: 954903 - RNA, 19 nt, Artificial Sequence
  Description of Artificial Sequence: Synthetic oligonucleotide
ccaauuguacagguaauac

SEQ ID NO: 954904 - RNA, 19 nt, Artificial Sequence
  Description of Artificial Sequence: Synthetic oligonucleotide
uccgaggguuuagggaccg

SEQ ID NO: 954905 - RNA, 19 nt, Artificial Sequence
  Description of Artificial Sequence: Synthetic oligonucleotide
aaucacgagcuagguucag

SEQ ID NO: 954906 - RNA, 19 nt, Artificial Sequence
  Description of Artificial Sequence: Synthetic oligonucleotide
gaggguuuagggaccgaug

SEQ ID NO: 954907 - RNA, 19 nt, Artificial Sequence
  Description of Artificial Sequence: Synthetic oligonucleotide
cuggcgugaggagaaacug

SEQ ID NO: 954908 - RNA, 19 nt, Artificial Sequence
  Description of Artificial Sequence: Synthetic oligonucleotide
aucugcggcagcgaaggug

SEQ ID NO: 954909 - RNA, 19 nt, Artificial Sequence
  Description of Artificial Sequence: Synthetic oligonucleotide
ugcgaaucacgagcuaggu

SEQ ID NO: 954910 - RNA, 19 nt, Artificial Sequence
  Description of Artificial Sequence: Synthetic oligonucleotide
cacgagcuagguucagcag

SEQ ID NO: 954911 - RNA, 19 nt, Artificial Sequence
  Description of Artificial Sequence: Synthetic oligonucleotide
gaaucacgagcuagguuca

SEQ ID NO: 954912 - RNA, 19 nt, Artificial Sequence
  Description of Artificial Sequence: Synthetic oligonucleotide
uggcaauaccacgccagca

SEQ ID NO: 954913 - RNA, 19 nt, Artificial Sequence
  Description of Artificial Sequence: Synthetic oligonucleotide
guuggaccaacaaguggug

SEQ ID NO: 954914 - RNA, 19 nt, Artificial Sequence
  Description of Artificial Sequence: Synthetic oligonucleotide
uagggaccgaugccaguac

SEQ ID NO: 954915 - RNA, 19 nt, Artificial Sequence
  Description of Artificial Sequence: Synthetic oligonucleotide
uagggcuccuggcgaaugu

SEQ ID NO: 954916 - RNA, 19 nt, Artificial Sequence
  Description of Artificial Sequence: Synthetic oligonucleotide
ggcaacugguuacuguaac

SEQ ID NO: 954917 - RNA, 19 nt, Artificial Sequence
  Description of Artificial Sequence: Synthetic oligonucleotide
aaccaguuuccgacuugag

SEQ ID NO: 954918 - RNA, 19 nt, Artificial Sequence
  Description of Artificial Sequence: Synthetic oligonucleotide
agcuucgcuugcuggccuc

SEQ ID NO: 954919 - RNA, 19 nt, Artificial Sequence
  Description of Artificial Sequence: Synthetic oligonucleotide
ucacgcagccuacaccauu

SEQ ID NO: 954920 - RNA, 19 nt, Artificial Sequence
  Description of Artificial Sequence: Synthetic oligonucleotide
agccuacaccauugcaaug

SEQ ID NO: 954921 - RNA, 19 nt, Artificial Sequence
  Description of Artificial Sequence: Synthetic oligonucleotide
caacaaguggugggauucc

SEQ ID NO: 954922 - RNA, 19 nt, Artificial Sequence
  Description of Artificial Sequence: Synthetic oligonucleotide
caggcaacugguuacugua

SEQ ID NO: 954923 - RNA, 19 nt, Artificial Sequence
  Description of Artificial Sequence: Synthetic oligonucleotide
caacuccauaauaugcgaa

SEQ ID NO: 954924 - RNA, 19 nt, Artificial Sequence
  Description of Artificial Sequence: Synthetic oligonucleotide
gggaaguguauaaaagcuc

SEQ ID NO: 954925 - RNA, 19 nt, Artificial Sequence
  Description of Artificial Sequence: Synthetic oligonucleotide
aaggugccggcagcuucac

SEQ ID NO: 954926 - RNA, 19 nt, Artificial Sequence
  Description of Artificial Sequence: Synthetic oligonucleotide
uagcuucgcuugcuggccu

SEQ ID NO: 954927 - RNA, 19 nt, Artificial Sequence
  Description of Artificial Sequence: Synthetic oligonucleotide
uccauuggucggagcccag

SEQ ID NO: 954928 - RNA, 19 nt, Artificial Sequence
  Description of Artificial Sequence: Synthetic oligonucleotide
ggcccauggguauuuacca

SEQ ID NO: 954929 - RNA, 19 nt, Artificial Sequence
  Description of Artificial Sequence: Synthetic oligonucleotide
ucaaguucgcuggcgguuu

SEQ ID NO: 954930 - RNA, 19 nt, Artificial Sequence
  Description of Artificial Sequence: Synthetic oligonucleotide
cuuuggcaauaccacgcca

SEQ ID NO: 954931 - RNA, 19 nt, Artificial Sequence
  Description of Artificial Sequence: Synthetic oligonucleotide
aaccccgcagugccacugu

SEQ ID NO: 954932 - RNA, 19 nt, Artificial Sequence
  Description of Artificial Sequence: Synthetic oligonucleotide
aggguguuauucauugaaa

SEQ ID NO: 954933 - RNA, 19 nt, Artificial Sequence
  Description of Artificial Sequence: Synthetic oligonucleotide
ccuaugccgaauuugagcu

SEQ ID NO: 954934 - RNA, 19 nt, Artificial Sequence
  Description of Artificial Sequence: Synthetic oligonucleotide
cacucgaaccccgcagugc

SEQ ID NO: 954935 - RNA, 19 nt, Artificial Sequence
  Description of Artificial Sequence: Synthetic oligonucleotide
ggguuuagggaccgaugcc

SEQ ID NO: 954936 - RNA, 19 nt, Artificial Sequence
  Description of Artificial Sequence: Synthetic oligonucleotide
guccccuaugccgaauuug

SEQ ID NO: 954937 - RNA, 19 nt, Artificial Sequence
  Description of Artificial Sequence: Synthetic oligonucleotide
uuccguucccuuccaucau

SEQ ID NO: 954938 - RNA, 19 nt, Artificial Sequence
  Description of Artificial Sequence: Synthetic oligonucleotide
gcaacugguuacuguaaca

SEQ ID NO: 954939 - RNA, 19 nt, Artificial Sequence
  Description of Artificial Sequence: Synthetic oligonucleotide
auguggauguuugcuggga

SEQ ID NO: 954940 - RNA, 19 nt, Artificial Sequence
  Description of Artificial Sequence: Synthetic oligonucleotide
cuggcccauggguauuuac

SEQ ID NO: 954941 - RNA, 19 nt, Artificial Sequence
  Description of Artificial Sequence: Synthetic oligonucleotide
guaccugcaggugccaaca

SEQ ID NO: 954942 - RNA, 19 nt, Artificial Sequence
  Description of Artificial Sequence: Synthetic oligonucleotide
ccgucaacuccauaauaug

SEQ ID NO: 954943 - RNA, 19 nt, Artificial Sequence
  Description of Artificial Sequence: Synthetic oligonucleotide
gcagcgaaggugccggcag

SEQ ID NO: 954944 - RNA, 19 nt, Artificial Sequence
  Description of Artificial Sequence: Synthetic oligonucleotide
caguguaaacagcuuggaa

SEQ ID NO: 954945 - RNA, 19 nt, Artificial Sequence
  Description of Artificial Sequence: Synthetic oligonucleotide
cuagguucagcaguuacau

SEQ ID NO: 954946 - RNA, 19 nt, Artificial Sequence
  Description of Artificial Sequence: Synthetic oligonucleotide
ugccaccccgguuguagcu

SEQ ID NO: 954947 - RNA, 19 nt, Artificial Sequence
  Description of Artificial Sequence: Synthetic oligonucleotide
ggcaucccaagugaagccc

SEQ ID NO: 954948 - RNA, 19 nt, Artificial Sequence
  Description of Artificial Sequence: Synthetic oligonucleotide
acccgucaacuccauaaua

SEQ ID NO: 954949 - RNA, 19 nt, Artificial Sequence
  Description of Artificial Sequence: Synthetic oligonucleotide
caaccaguuuccgacuuga

SEQ ID NO: 954950 - RNA, 19 nt, Artificial Sequence
  Description of Artificial Sequence: Synthetic oligonucleotide
augcuagggcacuuccaau

SEQ ID NO: 954951 - RNA, 19 nt, Artificial Sequence
  Description of Artificial Sequence: Synthetic oligonucleotide
gaaccccgcagugccacug

SEQ ID NO: 954952 - RNA, 19 nt, Artificial Sequence
  Description of Artificial Sequence: Synthetic oligonucleotide
auaugcgaaucacgagcua

SEQ ID NO: 954953 - RNA, 19 nt, Artificial Sequence
  Description of Artificial Sequence: Synthetic oligonucleotide
ggggaauaaucaaaucgga

SEQ ID NO: 954954 - RNA, 19 nt, Artificial Sequence
  Description of Artificial Sequence: Synthetic oligonucleotide
acaaguggugggauuccgu

SEQ ID NO: 954955 - RNA, 19 nt, Artificial Sequence
  Description of Artificial Sequence: Synthetic oligonucleotide
gugucauuggcuggacuca

SEQ ID NO: 954956 - RNA, 19 nt, Artificial Sequence
  Description of Artificial Sequence: Synthetic oligonucleotide
guauagggcuccuggcgaa

SEQ ID NO: 954957 - RNA, 19 nt, Artificial Sequence
  Description of Artificial Sequence: Synthetic oligonucleotide
gucgguagagcuucauggu

SEQ ID NO: 954958 - RNA, 19 nt, Artificial Sequence
  Description of Artificial Sequence: Synthetic oligonucleotide
aucgcucauaaggucuaga

SEQ ID NO: 954959 - RNA, 19 nt, Artificial Sequence
  Description of Artificial Sequence: Synthetic oligonucleotide
cauucccuugaucacggcu

SEQ ID NO: 954960 - RNA, 19 nt, Artificial Sequence
  Description of Artificial Sequence: Synthetic oligonucleotide
cgcucauaaggucuagaag

SEQ ID NO: 954961 - RNA, 19 nt, Artificial Sequence
  Description of Artificial Sequence: Synthetic oligonucleotide
gcuagguucagcaguuaca

SEQ ID NO: 954962 - RNA, 19 nt, Artificial Sequence
  Description of Artificial Sequence: Synthetic oligonucleotide
aguucgcuggcgguuuggu

SEQ ID NO: 954963 - RNA, 19 nt, Artificial Sequence
  Description of Artificial Sequence: Synthetic oligonucleotide
auaccacgccagcagugua

SEQ ID NO: 954964 - RNA, 19 nt, Artificial Sequence
  Description of Artificial Sequence: Synthetic oligonucleotide
caaguucgcuggcgguuug

SEQ ID NO: 954965 - RNA, 19 nt, Artificial Sequence
  Description of Artificial Sequence: Synthetic oligonucleotide
uauagggcuccuggcgaau

SEQ ID NO: 954966 - RNA, 19 nt, Artificial Sequence
  Description of Artificial Sequence: Synthetic oligonucleotide
gcucaugacuggcgugagg

SEQ ID NO: 954967 - RNA, 19 nt, Artificial Sequence
  Description of Artificial Sequence: Synthetic oligonucleotide
caagggcaucgcucauaag

SEQ ID NO: 954968 - RNA, 19 nt, Artificial Sequence
  Description of Artificial Sequence: Synthetic oligonucleotide
uggugcgcugcauggucau

SEQ ID NO: 954969 - RNA, 19 nt, Artificial Sequence
  Description of Artificial Sequence: Synthetic oligonucleotide
guaggguauagggcuccug

SEQ ID NO: 954970 - RNA, 19 nt, Artificial Sequence
  Description of Artificial Sequence: Synthetic oligonucleotide
cagcgaaggugccggcagc

SEQ ID NO: 954971 - RNA, 19 nt, Artificial Sequence
  Description of Artificial Sequence: Synthetic oligonucleotide
cuccggguuaucucucgga

SEQ ID NO: 954972 - RNA, 19 nt, Artificial Sequence
  Description of Artificial Sequence: Synthetic oligonucleotide
agacucuuguggguuggau

SEQ ID NO: 954973 - RNA, 19 nt, Artificial Sequence
  Description of Artificial Sequence: Synthetic oligonucleotide
uggucggagcccagcuguc

SEQ ID NO: 954974 - RNA, 19 nt, Artificial Sequence
  Description of Artificial Sequence: Synthetic oligonucleotide
gcugguguacuacuggaau

SEQ ID NO: 954975 - RNA, 19 nt, Artificial Sequence
  Description of Artificial Sequence: Synthetic oligonucleotide
accacgccagcaguguaaa

SEQ ID NO: 954976 - RNA, 19 nt, Artificial Sequence
  Description of Artificial Sequence: Synthetic oligonucleotide
cagugcucauggccguuuc

SEQ ID NO: 954977 - RNA, 19 nt, Artificial Sequence
  Description of Artificial Sequence: Synthetic oligonucleotide
caauggccuucuguauuuc

SEQ ID NO: 954978 - RNA, 19 nt, Artificial Sequence
  Description of Artificial Sequence: Synthetic oligonucleotide
caaguggugggauuccguu

SEQ ID NO: 954979 - RNA, 19 nt, Artificial Sequence
  Description of Artificial Sequence: Synthetic oligonucleotide
cauuggucggagcccagcu

SEQ ID NO: 954980 - RNA, 19 nt, Artificial Sequence
  Description of Artificial Sequence: Synthetic oligonucleotide
accccgcagugccacugug

SEQ ID NO: 954981 - RNA, 19 nt, Artificial Sequence
  Description of Artificial Sequence: Synthetic oligonucleotide
ccgacuugagaccacucga

SEQ ID NO: 954982 - RNA, 19 nt, Artificial Sequence
  Description of Artificial Sequence: Synthetic oligonucleotide
uggccguuuccguucccuu

SEQ ID NO: 954983 - RNA, 19 nt, Artificial Sequence
  Description of Artificial Sequence: Synthetic oligonucleotide
gccuacaccauugcaaugu

SEQ ID NO: 954984 - RNA, 19 nt, Artificial Sequence
  Description of Artificial Sequence: Synthetic oligonucleotide
aggcaacugguuacuguaa

SEQ ID NO: 954985 - RNA, 19 nt, Artificial Sequence
  Description of Artificial Sequence: Synthetic oligonucleotide
accccgguuguagcuguug

SEQ ID NO: 954986 - RNA, 19 nt, Artificial Sequence
  Description of Artificial Sequence: Synthetic oligonucleotide
ccccuaugccgaauuugag

SEQ ID NO: 954987 - RNA, 19 nt, Artificial Sequence
  Description of Artificial Sequence: Synthetic oligonucleotide
ccaaccaguuuccgacuug

SEQ ID NO: 954988 - RNA, 19 nt, Artificial Sequence
  Description of Artificial Sequence: Synthetic oligonucleotide
ggcgugaggagaaacugcu

SEQ ID NO: 954989 - RNA, 19 nt, Artificial Sequence
  Description of Artificial Sequence: Synthetic oligonucleotide
ggucuagaagaggggucug

SEQ ID NO: 954990 - RNA, 19 nt, Artificial Sequence
  Description of Artificial Sequence: Synthetic oligonucleotide
guucgcuggcgguuuggua

SEQ ID NO: 954991 - RNA, 19 nt, Artificial Sequence
  Description of Artificial Sequence: Synthetic oligonucleotide
ccggguuaucucucggauc

SEQ ID NO: 954992 - RNA, 19 nt, Artificial Sequence
  Description of Artificial Sequence: Synthetic oligonucleotide
ccuccggguuaucucucgg

SEQ ID NO: 954993 - RNA, 19 nt, Artificial Sequence
  Description of Artificial Sequence: Synthetic oligonucleotide
cccuccggguuaucucucg

SEQ ID NO: 954994 - RNA, 19 nt, Artificial Sequence
  Description of Artificial Sequence: Synthetic oligonucleotide
cccgucaacuccauaauau

SEQ ID NO: 954995 - RNA, 19 nt, Artificial Sequence
  Description of Artificial Sequence: Synthetic oligonucleotide
gcaauguaauugucaaguu

SEQ ID NO: 954996 - RNA, 19 nt, Artificial Sequence
  Description of Artificial Sequence: Synthetic oligonucleotide
gcuggcgguuugguaaagc

SEQ ID NO: 954997 - RNA, 19 nt, Artificial Sequence
  Description of Artificial Sequence: Synthetic oligonucleotide
cucgaaccccgcagugcca

SEQ ID NO: 954998 - RNA, 19 nt, Artificial Sequence
  Description of Artificial Sequence: Synthetic oligonucleotide
gaacaagggcaucgcucau

SEQ ID NO: 954999 - RNA, 19 nt, Artificial Sequence
  Description of Artificial Sequence: Synthetic oligonucleotide
augccgaauuugagcuucu

SEQ ID NO: 955000 - RNA, 19 nt, Artificial Sequence
  Description of Artificial Sequence: Synthetic oligonucleotide
cccauggguauuuaccacu

SEQ ID NO: 955001 - RNA, 19 nt, Artificial Sequence
  Description of Artificial Sequence: Synthetic oligonucleotide
ggcucaugacuggcgugag

SEQ ID NO: 955002 - RNA, 19 nt, Artificial Sequence
  Description of Artificial Sequence: Synthetic oligonucleotide
gucaaguucgcuggcgguu

SEQ ID NO: 955003 - RNA, 19 nt, Artificial Sequence
  Description of Artificial Sequence: Synthetic oligonucleotide
aggugccggcagcuucacu

SEQ ID NO: 955004 - RNA, 19 nt, Artificial Sequence
  Description of Artificial Sequence: Synthetic oligonucleotide
cucauccgccaucuugggu

SEQ ID NO: 955005 - RNA, 19 nt, Artificial Sequence
  Description of Artificial Sequence: Synthetic oligonucleotide
gugcgcugcauggucauau

SEQ ID NO: 955006 - RNA, 19 nt, Artificial Sequence
  Description of Artificial Sequence: Synthetic oligonucleotide
aucacgcagccuacaccau

SEQ ID NO: 955007 - RNA, 19 nt, Artificial Sequence
  Description of Artificial Sequence: Synthetic oligonucleotide
caccacggucucccagguc

SEQ ID NO: 955008 - RNA, 19 nt, Artificial Sequence
  Description of Artificial Sequence: Synthetic oligonucleotide
auucacccgucaacuccau

SEQ ID NO: 955009 - RNA, 19 nt, Artificial Sequence
  Description of Artificial Sequence: Synthetic oligonucleotide
caggugaacccuccggguu

SEQ ID NO: 955010 - RNA, 19 nt, Artificial Sequence
  Description of Artificial Sequence: Synthetic oligonucleotide
cuaugccgaauuugagcuu

SEQ ID NO: 955011 - RNA, 19 nt, Artificial Sequence
  Description of Artificial Sequence: Synthetic oligonucleotide
gccaccccgguuguagcug

SEQ ID NO: 955012 - RNA, 19 nt, Artificial Sequence
  Description of Artificial Sequence: Synthetic oligonucleotide
cacccgucaacuccauaau

SEQ ID NO: 955013 - RNA, 19 nt, Artificial Sequence
  Description of Artificial Sequence: Synthetic oligonucleotide
cgacuugagaccacucgaa

SEQ ID NO: 955014 - RNA, 19 nt, Artificial Sequence
  Description of Artificial Sequence: Synthetic oligonucleotide
acggcugcaugaggguguu

SEQ ID NO: 955015 - RNA, 19 nt, Artificial Sequence
  Description of Artificial Sequence: Synthetic oligonucleotide
gagcuagguucagcaguua

SEQ ID NO: 955016 - RNA, 19 nt, Artificial Sequence
  Description of Artificial Sequence: Synthetic oligonucleotide
ucaugccaccccgguugua

SEQ ID NO: 955017 - RNA, 19 nt, Artificial Sequence
  Description of Artificial Sequence: Synthetic oligonucleotide
cugcagugcucauggccgu

SEQ ID NO: 955018 - RNA, 19 nt, Artificial Sequence
  Description of Artificial Sequence: Synthetic oligonucleotide
ggguagaaccagugcucua

SEQ ID NO: 955019 - RNA, 19 nt, Artificial Sequence
  Description of Artificial Sequence: Synthetic oligonucleotide
gccacccucuuggagcgca

SEQ ID NO: 955020 - RNA, 19 nt, Artificial Sequence
  Description of Artificial Sequence: Synthetic oligonucleotide
ggauuccguuuccugguuu

SEQ ID NO: 955021 - RNA, 19 nt, Artificial Sequence
  Description of Artificial Sequence: Synthetic oligonucleotide
caucgucuuccacguaguu

SEQ ID NO: 955022 - RNA, 19 nt, Artificial Sequence
  Description of Artificial Sequence: Synthetic oligonucleotide
cguucucgcaaucgcugca

SEQ ID NO: 955023 - RNA, 19 nt, Artificial Sequence
  Description of Artificial Sequence: Synthetic oligonucleotide
gcgaaucacgagcuagguu

SEQ ID NO: 955024 - RNA, 19 nt, Artificial Sequence
  Description of Artificial Sequence: Synthetic oligonucleotide
ccacgccagcaguguaaac

SEQ ID NO: 955025 - RNA, 19 nt, Artificial Sequence
  Description of Artificial Sequence: Synthetic oligonucleotide
ccguucccuuccaucaucu

SEQ ID NO: 955026 - RNA, 19 nt, Artificial Sequence
  Description of Artificial Sequence: Synthetic oligonucleotide
gugaacccuccggguuauc

SEQ ID NO: 955027 - RNA, 19 nt, Artificial Sequence
  Description of Artificial Sequence: Synthetic oligonucleotide
gcugcaugaggguguuauu

SEQ ID NO: 955028 - RNA, 19 nt, Artificial Sequence
  Description of Artificial Sequence: Synthetic oligonucleotide
gggauuccguuuccugguu

SEQ ID NO: 955029 - RNA, 19 nt, Artificial Sequence
  Description of Artificial Sequence: Synthetic oligonucleotide
ccucaccguuggcauucuc

SEQ ID NO: 955030 - RNA, 19 nt, Artificial Sequence
  Description of Artificial Sequence: Synthetic oligonucleotide
cacggucucccagguccaa

SEQ ID NO: 955031 - RNA, 19 nt, Artificial Sequence
  Description of Artificial Sequence: Synthetic oligonucleotide
ccguuuccguucccuucca

SEQ ID NO: 955032 - RNA, 19 nt, Artificial Sequence
  Description of Artificial Sequence: Synthetic oligonucleotide
gcgguuugguaaagccggu

SEQ ID NO: 955033 - RNA, 19 nt, Artificial Sequence
  Description of Artificial Sequence: Synthetic oligonucleotide
ggugcgcugcauggucaua

SEQ ID NO: 955034 - RNA, 19 nt, Artificial Sequence
  Description of Artificial Sequence: Synthetic oligonucleotide
gcagucgguagagcuucau

SEQ ID NO: 955035 - RNA, 19 nt, Artificial Sequence
  Description of Artificial Sequence: Synthetic oligonucleotide
ccaugagauccagugcauu

SEQ ID NO: 955036 - RNA, 19 nt, Artificial Sequence
  Description of Artificial Sequence: Synthetic oligonucleotide
cgcuggcgguuugguaaag

SEQ ID NO: 955037 - RNA, 19 nt, Artificial Sequence
  Description of Artificial Sequence: Synthetic oligonucleotide
cgaggguuuagggaccgau

SEQ ID NO: 955038 - RNA, 19 nt, Artificial Sequence
  Description of Artificial Sequence: Synthetic oligonucleotide
gcgugaggagaaacugcuu

SEQ ID NO: 955039 - RNA, 19 nt, Artificial Sequence
  Description of Artificial Sequence: Synthetic oligonucleotide
caccccgguuguagcuguu

SEQ ID NO: 955040 - RNA, 19 nt, Artificial Sequence
  Description of Artificial Sequence: Synthetic oligonucleotide
ccguccccuaugccgaauu

SEQ ID NO: 955041 - RNA, 19 nt, Artificial Sequence
  Description of Artificial Sequence: Synthetic oligonucleotide
ccgaggguuuagggaccga

SEQ ID NO: 955042 - RNA, 19 nt, Artificial Sequence
  Description of Artificial Sequence: Synthetic oligonucleotide
cguuuccguucccuuccau

SEQ ID NO: 955043 - RNA, 19 nt, Artificial Sequence
  Description of Artificial Sequence: Synthetic oligonucleotide
cguccccuaugccgaauuu

SEQ ID NO: 955044 - RNA, 19 nt, Artificial Sequence
  Description of Artificial Sequence: Synthetic oligonucleotide
cgguuugguaaagccgguu

SEQ ID NO: 955045 - RNA, 19 nt, Artificial Sequence
  Description of Artificial Sequence: Synthetic oligonucleotide
cgaaccccgcagugccacu

SEQ ID NO: 955046 - RNA, 19 nt, Artificial Sequence
  Description of Artificial Sequence: Synthetic oligonucleotide
auauguaacacucaaaagg

SEQ ID NO: 955047 - RNA, 19 nt, Artificial Sequence
  Description of Artificial Sequence: Synthetic oligonucleotide
auuaagaaauucaagaucc

SEQ ID NO: 955048 - RNA, 19 nt, Artificial Sequence
  Description of Artificial Sequence: Synthetic oligonucleotide
aaaauuucaggacauuugg

SEQ ID NO: 955049 - RNA, 19 nt, Artificial Sequence
  Description of Artificial Sequence: Synthetic oligonucleotide
uauguaacacucaaaaggg

SEQ ID NO: 955050 - RNA, 19 nt, Artificial Sequence
  Description of Artificial Sequence: Synthetic oligonucleotide
aagagauuagcucuuuuac

SEQ ID NO: 955051 - RNA, 19 nt, Artificial Sequence
  Description of Artificial Sequence: Synthetic oligonucleotide
ucucucuaaaucaagaacc

SEQ ID NO: 955052 - RNA, 19 nt, Artificial Sequence
  Description of Artificial Sequence: Synthetic oligonucleotide
aauaacaucugucacuucu

SEQ ID NO: 955053 - RNA, 19 nt, Artificial Sequence
  Description of Artificial Sequence: Synthetic oligonucleotide
gauuaaaaguaucuuaagc

SEQ ID NO: 955054 - RNA, 19 nt, Artificial Sequence
  Description of Artificial Sequence: Synthetic oligonucleotide
uaaaucauaagcaggauaa

SEQ ID NO: 955055 - RNA, 19 nt, Artificial Sequence
  Description of Artificial Sequence: Synthetic oligonucleotide
uuaaugaggacacugugcc

SEQ ID NO: 955056 - RNA, 19 nt, Artificial Sequence
  Description of Artificial Sequence: Synthetic oligonucleotide
aauggaaagccacugaacu

SEQ ID NO: 955057 - RNA, 19 nt, Artificial Sequence
  Description of Artificial Sequence: Synthetic oligonucleotide
aaaucugcuucauugugac

SEQ ID NO: 955058 - RNA, 19 nt, Artificial Sequence
  Description of Artificial Sequence: Synthetic oligonucleotide
ucuguuguaaagcaguuug

SEQ ID NO: 955059 - RNA, 19 nt, Artificial Sequence
  Description of Artificial Sequence: Synthetic oligonucleotide
acugaacugacccacauuc

SEQ ID NO: 955060 - RNA, 19 nt, Artificial Sequence
  Description of Artificial Sequence: Synthetic oligonucleotide
aacuauagaaagcaaagaa

SEQ ID NO: 955061 - RNA, 19 nt, Artificial Sequence
  Description of Artificial Sequence: Synthetic oligonucleotide
ugcucuaaaaugaugaacu

SEQ ID NO: 955062 - RNA, 19 nt, Artificial Sequence
  Description of Artificial Sequence: Synthetic oligonucleotide
gagauuagcucuuuuacag

SEQ ID NO: 955063 - RNA, 19 nt, Artificial Sequence
  Description of Artificial Sequence: Synthetic oligonucleotide
aaaucagaucuucaaaucu

SEQ ID NO: 955064 - RNA, 19 nt, Artificial Sequence
  Description of Artificial Sequence: Synthetic oligonucleotide
aaaauuaacaauaguucag

SEQ ID NO: 955065 - RNA, 19 nt, Artificial Sequence
  Description of Artificial Sequence: Synthetic oligonucleotide
aaaaugaugaacugccacu

SEQ ID NO: 955066 - RNA, 19 nt, Artificial Sequence
  Description of Artificial Sequence: Synthetic oligonucleotide
auauauguaacacucaaaa

SEQ ID NO: 955067 - RNA, 19 nt, Artificial Sequence
  Description of Artificial Sequence: Synthetic oligonucleotide
uugauuaaaaguaucuuaa

SEQ ID NO: 955068 - RNA, 19 nt, Artificial Sequence
  Description of Artificial Sequence: Synthetic oligonucleotide
aguuuaagagauuagcucu

SEQ ID NO: 955069 - RNA, 19 nt, Artificial Sequence
  Description of Artificial Sequence: Synthetic oligonucleotide
aaugguucaucaucagaac

SEQ ID NO: 955070 - RNA, 19 nt, Artificial Sequence
  Description of Artificial Sequence: Synthetic oligonucleotide
uucaaaucugagaacaagc

SEQ ID NO: 955071 - RNA, 19 nt, Artificial Sequence
  Description of Artificial Sequence: Synthetic oligonucleotide
aaaaguuccaacucgguua

SEQ ID NO: 955072 - RNA, 19 nt, Artificial Sequence
  Description of Artificial Sequence: Synthetic oligonucleotide
uuuaaugaggacacugugc

SEQ ID NO: 955073 - RNA, 19 nt, Artificial Sequence
  Description of Artificial Sequence: Synthetic oligonucleotide
uuaaaaguaucuuaagcaa

SEQ ID NO: 955074 - RNA, 19 nt, Artificial Sequence
  Description of Artificial Sequence: Synthetic oligonucleotide
uaguucagaaaucugaccu

SEQ ID NO: 955075 - RNA, 19 nt, Artificial Sequence
  Description of Artificial Sequence: Synthetic oligonucleotide
uaaugguucaucaucagaa

SEQ ID NO: 955076 - RNA, 19 nt, Artificial Sequence
  Description of Artificial Sequence: Synthetic oligonucleotide
uuguaaauggcucucuuug

SEQ ID NO: 955077 - RNA, 19 nt, Artificial Sequence
  Description of Artificial Sequence: Synthetic oligonucleotide
aaucuuuccgcucaguuaa

SEQ ID NO: 955078 - RNA, 19 nt, Artificial Sequence
  Description of Artificial Sequence: Synthetic oligonucleotide
auuuaaaacagcaagcuca

SEQ ID NO: 955079 - RNA, 19 nt, Artificial Sequence
  Description of Artificial Sequence: Synthetic oligonucleotide
ugaacugccacuaaguuuu

SEQ ID NO: 955080 - RNA, 19 nt, Artificial Sequence
  Description of Artificial Sequence: Synthetic oligonucleotide
aaauguauccuuucaauuu

SEQ ID NO: 955081 - RNA, 19 nt, Artificial Sequence
  Description of Artificial Sequence: Synthetic oligonucleotide
uuucauauaccucuuugca

SEQ ID NO: 955082 - RNA, 19 nt, Artificial Sequence
  Description of Artificial Sequence: Synthetic oligonucleotide
aacacugacauucuuuagu

SEQ ID NO: 955083 - RNA, 19 nt, Artificial Sequence
  Description of Artificial Sequence: Synthetic oligonucleotide
auauacaacaaauugguuu

SEQ ID NO: 955084 - RNA, 19 nt, Artificial Sequence
  Description of Artificial Sequence: Synthetic oligonucleotide
cucuuuguaaggaagacac

SEQ ID NO: 955085 - RNA, 19 nt, Artificial Sequence
  Description of Artificial Sequence: Synthetic oligonucleotide
acuaguucacuguucacac

SEQ ID NO: 955086 - RNA, 19 nt, Artificial Sequence
  Description of Artificial Sequence: Synthetic oligonucleotide
acuauagaaagcaaagaac

SEQ ID NO: 955087 - RNA, 19 nt, Artificial Sequence
  Description of Artificial Sequence: Synthetic oligonucleotide
uuugauuaaaaguaucuua

SEQ ID NO: 955088 - RNA, 19 nt, Artificial Sequence
  Description of Artificial Sequence: Synthetic oligonucleotide
ucuaguuuaagagauuagc

SEQ ID NO: 955089 - RNA, 19 nt, Artificial Sequence
  Description of Artificial Sequence: Synthetic oligonucleotide
caacuugacauauauacac

SEQ ID NO: 955090 - RNA, 19 nt, Artificial Sequence
  Description of Artificial Sequence: Synthetic oligonucleotide
auaguucagaaaucugacc

SEQ ID NO: 955091 - RNA, 19 nt, Artificial Sequence
  Description of Artificial Sequence: Synthetic oligonucleotide
agcaaagaacaauuacugc

SEQ ID NO: 955092 - RNA, 19 nt, Artificial Sequence
  Description of Artificial Sequence: Synthetic oligonucleotide
caagcuaacauuaagugca

SEQ ID NO: 955093 - RNA, 19 nt, Artificial Sequence
  Description of Artificial Sequence: Synthetic oligonucleotide
acugacagaagauguauuc

SEQ ID NO: 955094 - RNA, 19 nt, Artificial Sequence
  Description of Artificial Sequence: Synthetic oligonucleotide
aauuucaggacauuugguu

SEQ ID NO: 955095 - RNA, 19 nt, Artificial Sequence
  Description of Artificial Sequence: Synthetic oligonucleotide
uaaaaugaugaacugccac

SEQ ID NO: 955096 - RNA, 19 nt, Artificial Sequence
  Description of Artificial Sequence: Synthetic oligonucleotide
acuaaauacugcaauaguc

SEQ ID NO: 955097 - RNA, 19 nt, Artificial Sequence
  Description of Artificial Sequence: Synthetic oligonucleotide
acuaaaauuaacaauaguu

SEQ ID NO: 955098 - RNA, 19 nt, Artificial Sequence
  Description of Artificial Sequence: Synthetic oligonucleotide
uuuccgcucaguuaaauca

SEQ ID NO: 955099 - RNA, 19 nt, Artificial Sequence
  Description of Artificial Sequence: Synthetic oligonucleotide
uuuguguagauuucuaagu

SEQ ID NO: 955100 - RNA, 19 nt, Artificial Sequence
  Description of Artificial Sequence: Synthetic oligonucleotide
aagaaauccaaaauguaca

SEQ ID NO: 955101 - RNA, 19 nt, Artificial Sequence
  Description of Artificial Sequence: Synthetic oligonucleotide
uuuagcauggcauuucuaa

SEQ ID NO: 955102 - RNA, 19 nt, Artificial Sequence
  Description of Artificial Sequence: Synthetic oligonucleotide
uaagcaagcuaacauuaag

SEQ ID NO: 955103 - RNA, 19 nt, Artificial Sequence
  Description of Artificial Sequence: Synthetic oligonucleotide
uucauauacuaaauacugc

SEQ ID NO: 955104 - RNA, 19 nt, Artificial Sequence
  Description of Artificial Sequence: Synthetic oligonucleotide
uuaaugaaaucuuuccgcu

SEQ ID NO: 955105 - RNA, 19 nt, Artificial Sequence
  Description of Artificial Sequence: Synthetic oligonucleotide
aaauuaacaauaguucaga

SEQ ID NO: 955106 - RNA, 19 nt, Artificial Sequence
  Description of Artificial Sequence: Synthetic oligonucleotide
uauacaacaaauugguuuu

SEQ ID NO: 955107 - RNA, 19 nt, Artificial Sequence
  Description of Artificial Sequence: Synthetic oligonucleotide
ugaccuuacaauaaagaaa

SEQ ID NO: 955108 - RNA, 19 nt, Artificial Sequence
  Description of Artificial Sequence: Synthetic oligonucleotide
uguaaagcaguuuguguag

SEQ ID NO: 955109 - RNA, 19 nt, Artificial Sequence
  Description of Artificial Sequence: Synthetic oligonucleotide
uuagccaguaauuucuuca

SEQ ID NO: 955110 - RNA, 19 nt, Artificial Sequence
  Description of Artificial Sequence: Synthetic oligonucleotide
aacucgguuaucugaacag

SEQ ID NO: 955111 - RNA, 19 nt, Artificial Sequence
  Description of Artificial Sequence: Synthetic oligonucleotide
ucuuugcugguauaaauca

SEQ ID NO: 955112 - RNA, 19 nt, Artificial Sequence
  Description of Artificial Sequence: Synthetic oligonucleotide
aaauggcucucuuuguaag

SEQ ID NO: 955113 - RNA, 19 nt, Artificial Sequence
  Description of Artificial Sequence: Synthetic oligonucleotide
ucugaccuuacaauaaaga

SEQ ID NO: 955114 - RNA, 19 nt, Artificial Sequence
  Description of Artificial Sequence: Synthetic oligonucleotide
ugauuaaaaguaucuuaag

SEQ ID NO: 955115 - RNA, 19 nt, Artificial Sequence
  Description of Artificial Sequence: Synthetic oligonucleotide
aagcaaagaacaauuacug

SEQ ID NO: 955116 - RNA, 19 nt, Artificial Sequence
  Description of Artificial Sequence: Synthetic oligonucleotide
uauaccucuuugcaaaucu

SEQ ID NO: 955117 - RNA, 19 nt, Artificial Sequence
  Description of Artificial Sequence: Synthetic oligonucleotide
uuuuguacuggguacugcc

SEQ ID NO: 955118 - RNA, 19 nt, Artificial Sequence
  Description of Artificial Sequence: Synthetic oligonucleotide
ucugacaaaauuucaggac

SEQ ID NO: 955119 - RNA, 19 nt, Artificial Sequence
  Description of Artificial Sequence: Synthetic oligonucleotide
uucacuaguucacuguuca

SEQ ID NO: 955120 - RNA, 19 nt, Artificial Sequence
  Description of Artificial Sequence: Synthetic oligonucleotide
aacaauuacugccaugcaa

SEQ ID NO: 955121 - RNA, 19 nt, Artificial Sequence
  Description of Artificial Sequence: Synthetic oligonucleotide
cucaguuaaaucauaagca

SEQ ID NO: 955122 - RNA, 19 nt, Artificial Sequence
  Description of Artificial Sequence: Synthetic oligonucleotide
acuucugucaugcugacaa

SEQ ID NO: 955123 - RNA, 19 nt, Artificial Sequence
  Description of Artificial Sequence: Synthetic oligonucleotide
caguuaaaucauaagcagg

SEQ ID NO: 955124 - RNA, 19 nt, Artificial Sequence
  Description of Artificial Sequence: Synthetic oligonucleotide
gcaaagaacaauuacugcc

SEQ ID NO: 955125 - RNA, 19 nt, Artificial Sequence
  Description of Artificial Sequence: Synthetic oligonucleotide
uuuguaaggaagacacuug

SEQ ID NO: 955126 - RNA, 19 nt, Artificial Sequence
  Description of Artificial Sequence: Synthetic oligonucleotide
uuuaacucuucaucuguag

SEQ ID NO: 955127 - RNA, 19 nt, Artificial Sequence
  Description of Artificial Sequence: Synthetic oligonucleotide
cucaaaagggucagcagcg

SEQ ID NO: 955128 - RNA, 19 nt, Artificial Sequence
  Description of Artificial Sequence: Synthetic oligonucleotide
uaguuuaagagauuagcuc

SEQ ID NO: 955129 - RNA, 19 nt, Artificial Sequence
  Description of Artificial Sequence: Synthetic oligonucleotide
uaguucacuguucacaccu

SEQ ID NO: 955130 - RNA, 19 nt, Artificial Sequence
  Description of Artificial Sequence: Synthetic oligonucleotide
agcauuagccaguaauuuc

SEQ ID NO: 955131 - RNA, 19 nt, Artificial Sequence
  Description of Artificial Sequence: Synthetic oligonucleotide
aauuacugccaugcaagac

SEQ ID NO: 955132 - RNA, 19 nt, Artificial Sequence
  Description of Artificial Sequence: Synthetic oligonucleotide
aaauggaaagccacugaac

SEQ ID NO: 955133 - RNA, 19 nt, Artificial Sequence
  Description of Artificial Sequence: Synthetic oligonucleotide
acaacuauagaaagcaaag

SEQ ID NO: 955134 - RNA, 19 nt, Artificial Sequence
  Description of Artificial Sequence: Synthetic oligonucleotide
uuaaugguucaucaucaga

SEQ ID NO: 955135 - RNA, 19 nt, Artificial Sequence
  Description of Artificial Sequence: Synthetic oligonucleotide
uuaagugcacuaaaauuaa

SEQ ID NO: 955136 - RNA, 19 nt, Artificial Sequence
  Description of Artificial Sequence: Synthetic oligonucleotide
aagaaccucacagaugcuc

SEQ ID NO: 955137 - RNA, 19 nt, Artificial Sequence
  Description of Artificial Sequence: Synthetic oligonucleotide
auacuaaauacugcaauag

SEQ ID NO: 955138 - RNA, 19 nt, Artificial Sequence
  Description of Artificial Sequence: Synthetic oligonucleotide
uugaucugcacaaaagaaa

SEQ ID NO: 955139 - RNA, 19 nt, Artificial Sequence
  Description of Artificial Sequence: Synthetic oligonucleotide
uuguaaagcaguuugugua

SEQ ID NO: 955140 - RNA, 19 nt, Artificial Sequence
  Description of Artificial Sequence: Synthetic oligonucleotide
ucuuacucagaaagaaaug

SEQ ID NO: 955141 - RNA, 19 nt, Artificial Sequence
  Description of Artificial Sequence: Synthetic oligonucleotide
ugaucucucuaaaucaaga

SEQ ID NO: 955142 - RNA, 19 nt, Artificial Sequence
  Description of Artificial Sequence: Synthetic oligonucleotide
uaaaucagaucuucaaauc

SEQ ID NO: 955143 - RNA, 19 nt, Artificial Sequence
  Description of Artificial Sequence: Synthetic oligonucleotide
agugcacuaaaauuaacaa

SEQ ID NO: 955144 - RNA, 19 nt, Artificial Sequence
  Description of Artificial Sequence: Synthetic oligonucleotide
uccaaaauguacaacuaua

SEQ ID NO: 955145 - RNA, 19 nt, Artificial Sequence
  Description of Artificial Sequence: Synthetic oligonucleotide
aguaucuuaagcaagcuaa

SEQ ID NO: 955146 - RNA, 19 nt, Artificial Sequence
  Description of Artificial Sequence: Synthetic oligonucleotide
ugcauugucaaucuuucua

SEQ ID NO: 955147 - RNA, 19 nt, Artificial Sequence
  Description of Artificial Sequence: Synthetic oligonucleotide
ugaugaacugccacuaagu

SEQ ID NO: 955148 - RNA, 19 nt, Artificial Sequence
  Description of Artificial Sequence: Synthetic oligonucleotide
gcucaguuaaaucauaagc

SEQ ID NO: 955149 - RNA, 19 nt, Artificial Sequence
  Description of Artificial Sequence: Synthetic oligonucleotide
aagugcacuaaaauuaaca

SEQ ID NO: 955150 - RNA, 19 nt, Artificial Sequence
  Description of Artificial Sequence: Synthetic oligonucleotide
ugucaugcugacaacuuga

SEQ ID NO: 955151 - RNA, 19 nt, Artificial Sequence
  Description of Artificial Sequence: Synthetic oligonucleotide
cugagaagaaaccucgcgc

SEQ ID NO: 955152 - RNA, 19 nt, Artificial Sequence
  Description of Artificial Sequence: Synthetic oligonucleotide
agaacaagccaucuguccu

SEQ ID NO: 955153 - RNA, 19 nt, Artificial Sequence
  Description of Artificial Sequence: Synthetic oligonucleotide
uuaauuaaugguucaucau

SEQ ID NO: 955154 - RNA, 19 nt, Artificial Sequence
  Description of Artificial Sequence: Synthetic oligonucleotide
uucagauucagacucuuuu

SEQ ID NO: 955155 - RNA, 19 nt, Artificial Sequence
  Description of Artificial Sequence: Synthetic oligonucleotide
uccagaacuguuccguucc

SEQ ID NO: 955156 - RNA, 19 nt, Artificial Sequence
  Description of Artificial Sequence: Synthetic oligonucleotide
uuuuaauuaaugguucauc

SEQ ID NO: 955157 - RNA, 19 nt, Artificial Sequence
  Description of Artificial Sequence: Synthetic oligonucleotide
uuagcauuagccaguaauu

SEQ ID NO: 955158 - RNA, 19 nt, Artificial Sequence
  Description of Artificial Sequence: Synthetic oligonucleotide
ucuaccaacaauagacuua

SEQ ID NO: 955159 - RNA, 19 nt, Artificial Sequence
  Description of Artificial Sequence: Synthetic oligonucleotide
ugcaauuguaaauggcucu

SEQ ID NO: 955160 - RNA, 19 nt, Artificial Sequence
  Description of Artificial Sequence: Synthetic oligonucleotide
ugccagaaggcuuuggaug

SEQ ID NO: 955161 - RNA, 19 nt, Artificial Sequence
  Description of Artificial Sequence: Synthetic oligonucleotide
aaaguuccaacucgguuau

SEQ ID NO: 955162 - RNA, 19 nt, Artificial Sequence
  Description of Artificial Sequence: Synthetic oligonucleotide
aaaucuuuccgcucaguua

SEQ ID NO: 955163 - RNA, 19 nt, Artificial Sequence
  Description of Artificial Sequence: Synthetic oligonucleotide
ugaacacugacauucuuua

SEQ ID NO: 955164 - RNA, 19 nt, Artificial Sequence
  Description of Artificial Sequence: Synthetic oligonucleotide
ucagaaaucugaccuuaca

SEQ ID NO: 955165 - RNA, 19 nt, Artificial Sequence
  Description of Artificial Sequence: Synthetic oligonucleotide
agagauuagcucuuuuaca

SEQ ID NO: 955166 - RNA, 19 nt, Artificial Sequence
  Description of Artificial Sequence: Synthetic oligonucleotide
uguccucuaguuuaagaga

SEQ ID NO: 955167 - RNA, 19 nt, Artificial Sequence
  Description of Artificial Sequence: Synthetic oligonucleotide
acauuaagugcacuaaaau

SEQ ID NO: 955168 - RNA, 19 nt, Artificial Sequence
  Description of Artificial Sequence: Synthetic oligonucleotide
aucuuaagcaagcuaacau

SEQ ID NO: 955169 - RNA, 19 nt, Artificial Sequence
  Description of Artificial Sequence: Synthetic oligonucleotide
uacugcaauagucucugca

SEQ ID NO: 955170 - RNA, 19 nt, Artificial Sequence
  Description of Artificial Sequence: Synthetic oligonucleotide
uauaaaugcugguuauagu

SEQ ID NO: 955171 - RNA, 19 nt, Artificial Sequence
  Description of Artificial Sequence: Synthetic oligonucleotide
aaucugaccuuacaauaaa

SEQ ID NO: 955172 - RNA, 19 nt, Artificial Sequence
  Description of Artificial Sequence: Synthetic oligonucleotide
uguaaggaagacacuugca

SEQ ID NO: 955173 - RNA, 19 nt, Artificial Sequence
  Description of Artificial Sequence: Synthetic oligonucleotide
cuugcauugucaaucuuuc

SEQ ID NO: 955174 - RNA, 19 nt, Artificial Sequence
  Description of Artificial Sequence: Synthetic oligonucleotide
uucauauaccucuuugcaa

SEQ ID NO: 955175 - RNA, 19 nt, Artificial Sequence
  Description of Artificial Sequence: Synthetic oligonucleotide
auuaaugguucaucaucag

SEQ ID NO: 955176 - RNA, 19 nt, Artificial Sequence
  Description of Artificial Sequence: Synthetic oligonucleotide
uuacugccaugcaagacug

SEQ ID NO: 955177 - RNA, 19 nt, Artificial Sequence
  Description of Artificial Sequence: Synthetic oligonucleotide
uugugcaauuguaaauggc

SEQ ID NO: 955178 - RNA, 19 nt, Artificial Sequence
  Description of Artificial Sequence: Synthetic oligonucleotide
caaagaacaauuacugcca

SEQ ID NO: 955179 - RNA, 19 nt, Artificial Sequence
  Description of Artificial Sequence: Synthetic oligonucleotide
gagaagaaaccucgcgccg

SEQ ID NO: 955180 - RNA, 19 nt, Artificial Sequence
  Description of Artificial Sequence: Synthetic oligonucleotide
cugacaaaauuucaggaca

SEQ ID NO: 955181 - RNA, 19 nt, Artificial Sequence
  Description of Artificial Sequence: Synthetic oligonucleotide
aaucauaagcaggauaauu

SEQ ID NO: 955182 - RNA, 19 nt, Artificial Sequence
  Description of Artificial Sequence: Synthetic oligonucleotide
auuagccaguaauuucuuc

SEQ ID NO: 955183 - RNA, 19 nt, Artificial Sequence
  Description of Artificial Sequence: Synthetic oligonucleotide
agauuucuaaguucaucug

SEQ ID NO: 955184 - RNA, 19 nt, Artificial Sequence
  Description of Artificial Sequence: Synthetic oligonucleotide
cuaaauacugcaauagucu

SEQ ID NO: 955185 - RNA, 19 nt, Artificial Sequence
  Description of Artificial Sequence: Synthetic oligonucleotide
ugguucaucaucagaacua

SEQ ID NO: 955186 - RNA, 19 nt, Artificial Sequence
  Description of Artificial Sequence: Synthetic oligonucleotide
ugccacuaaguuuucacac

SEQ ID NO: 955187 - RNA, 19 nt, Artificial Sequence
  Description of Artificial Sequence: Synthetic oligonucleotide
uuguguagauuucuaaguu

SEQ ID NO: 955188 - RNA, 19 nt, Artificial Sequence
  Description of Artificial Sequence: Synthetic oligonucleotide
uaguuacaaguguaaagac

SEQ ID NO: 955189 - RNA, 19 nt, Artificial Sequence
  Description of Artificial Sequence: Synthetic oligonucleotide
acuagauucaucugacaaa

SEQ ID NO: 955190 - RNA, 19 nt, Artificial Sequence
  Description of Artificial Sequence: Synthetic oligonucleotide
agaagaaaccucgcgccgc

SEQ ID NO: 955191 - RNA, 19 nt, Artificial Sequence
  Description of Artificial Sequence: Synthetic oligonucleotide
ugaagacucuuccuuauuu

SEQ ID NO: 955192 - RNA, 19 nt, Artificial Sequence
  Description of Artificial Sequence: Synthetic oligonucleotide
aauuguaaauggcucucuu

SEQ ID NO: 955193 - RNA, 19 nt, Artificial Sequence
  Description of Artificial Sequence: Synthetic oligonucleotide
aaauacugcaauagucucu

SEQ ID NO: 955194 - RNA, 19 nt, Artificial Sequence
  Description of Artificial Sequence: Synthetic oligonucleotide
aacauuaagugcacuaaaa

SEQ ID NO: 955195 - RNA, 19 nt, Artificial Sequence
  Description of Artificial Sequence: Synthetic oligonucleotide
uguaaauggcucucuuugu

SEQ ID NO: 955196 - RNA, 19 nt, Artificial Sequence
  Description of Artificial Sequence: Synthetic oligonucleotide
uaacaauaguucagaaauc

SEQ ID NO: 955197 - RNA, 19 nt, Artificial Sequence
  Description of Artificial Sequence: Synthetic oligonucleotide
aauauauguaacacucaaa

SEQ ID NO: 955198 - RNA, 19 nt, Artificial Sequence
  Description of Artificial Sequence: Synthetic oligonucleotide
augguucaucaucagaacu

SEQ ID NO: 955199 - RNA, 19 nt, Artificial Sequence
  Description of Artificial Sequence: Synthetic oligonucleotide
ugcaaggaaaugcaauuua

SEQ ID NO: 955200 - RNA, 19 nt, Artificial Sequence
  Description of Artificial Sequence: Synthetic oligonucleotide
cuucaaaucugagaacaag

SEQ ID NO: 955201 - RNA, 19 nt, Artificial Sequence
  Description of Artificial Sequence: Synthetic oligonucleotide
ucgguuaucugaacagcug

SEQ ID NO: 955202 - RNA, 19 nt, Artificial Sequence
  Description of Artificial Sequence: Synthetic oligonucleotide
uacaaguguaaagacacau

SEQ ID NO: 955203 - RNA, 19 nt, Artificial Sequence
  Description of Artificial Sequence: Synthetic oligonucleotide
acuuuuagcagcagcuuuc

SEQ ID NO: 955204 - RNA, 19 nt, Artificial Sequence
  Description of Artificial Sequence: Synthetic oligonucleotide
agaaaccucgcgccgccgc

SEQ ID NO: 955205 - RNA, 19 nt, Artificial Sequence
  Description of Artificial Sequence: Synthetic oligonucleotide
cuuaagcaagcuaacauua

SEQ ID NO: 955206 - RNA, 19 nt, Artificial Sequence
  Description of Artificial Sequence: Synthetic oligonucleotide
uaccuuugcuugaagauuu

SEQ ID NO: 955207 - RNA, 19 nt, Artificial Sequence
  Description of Artificial Sequence: Synthetic oligonucleotide
agcauggcauuucuaaacu

SEQ ID NO: 955208 - RNA, 19 nt, Artificial Sequence
  Description of Artificial Sequence: Synthetic oligonucleotide
gaccuuacaauaaagaaau

SEQ ID NO: 955209 - RNA, 19 nt, Artificial Sequence
  Description of Artificial Sequence: Synthetic oligonucleotide
acugcaaggaaaugcaauu

SEQ ID NO: 955210 - RNA, 19 nt, Artificial Sequence
  Description of Artificial Sequence: Synthetic oligonucleotide
uccaacucgguuaucugaa

SEQ ID NO: 955211 - RNA, 19 nt, Artificial Sequence
  Description of Artificial Sequence: Synthetic oligonucleotide
ucuguccucuaguuuaaga

SEQ ID NO: 955212 - RNA, 19 nt, Artificial Sequence
  Description of Artificial Sequence: Synthetic oligonucleotide
uuagcauggcauuucuaaa

SEQ ID NO: 955213 - RNA, 19 nt, Artificial Sequence
  Description of Artificial Sequence: Synthetic oligonucleotide
uuuguacuggguacugccu

SEQ ID NO: 955214 - RNA, 19 nt, Artificial Sequence
  Description of Artificial Sequence: Synthetic oligonucleotide
uguauccuuucaauuucac

SEQ ID NO: 955215 - RNA, 19 nt, Artificial Sequence
  Description of Artificial Sequence: Synthetic oligonucleotide
gaucucucuaaaucaagaa

SEQ ID NO: 955216 - RNA, 19 nt, Artificial Sequence
  Description of Artificial Sequence: Synthetic oligonucleotide
guuagcauuagccaguaau

SEQ ID NO: 955217 - RNA, 19 nt, Artificial Sequence
  Description of Artificial Sequence: Synthetic oligonucleotide
cugaccuuacaauaaagaa

SEQ ID NO: 955218 - RNA, 19 nt, Artificial Sequence
  Description of Artificial Sequence: Synthetic oligonucleotide
aucauaagcaggauaauuu

SEQ ID NO: 955219 - RNA, 19 nt, Artificial Sequence
  Description of Artificial Sequence: Synthetic oligonucleotide
aaaagggucagcagcgagu

SEQ ID NO: 955220 - RNA, 19 nt, Artificial Sequence
  Description of Artificial Sequence: Synthetic oligonucleotide
auguauaaaugcugguuau

SEQ ID NO: 955221 - RNA, 19 nt, Artificial Sequence
  Description of Artificial Sequence: Synthetic oligonucleotide
gcaagcuaacauuaagugc

SEQ ID NO: 955222 - RNA, 19 nt, Artificial Sequence
  Description of Artificial Sequence: Synthetic oligonucleotide
caagcucaaauauauguaa

SEQ ID NO: 955223 - RNA, 19 nt, Artificial Sequence
  Description of Artificial Sequence: Synthetic oligonucleotide
ccaaguuagcauuagccag

SEQ ID NO: 955224 - RNA, 19 nt, Artificial Sequence
  Description of Artificial Sequence: Synthetic oligonucleotide
cugaucucucuaaaucaag

SEQ ID NO: 955225 - RNA, 19 nt, Artificial Sequence
  Description of Artificial Sequence: Synthetic oligonucleotide
cauguauaaaugcugguua

SEQ ID NO: 955226 - RNA, 19 nt, Artificial Sequence
  Description of Artificial Sequence: Synthetic oligonucleotide
guguagauuucuaaguuca

SEQ ID NO: 955227 - RNA, 19 nt, Artificial Sequence
  Description of Artificial Sequence: Synthetic oligonucleotide
cuaguuuaagagauuagcu

SEQ ID NO: 955228 - RNA, 19 nt, Artificial Sequence
  Description of Artificial Sequence: Synthetic oligonucleotide
auugaucugcacaaaagaa

SEQ ID NO: 955229 - RNA, 19 nt, Artificial Sequence
  Description of Artificial Sequence: Synthetic oligonucleotide
aagcuaacauuaagugcac

SEQ ID NO: 955230 - RNA, 19 nt, Artificial Sequence
  Description of Artificial Sequence: Synthetic oligonucleotide
agauuagcucuuuuacagu

SEQ ID NO: 955231 - RNA, 19 nt, Artificial Sequence
  Description of Artificial Sequence: Synthetic oligonucleotide
ugugcucuaaaaugaugaa

SEQ ID NO: 955232 - RNA, 19 nt, Artificial Sequence
  Description of Artificial Sequence: Synthetic oligonucleotide
uagccaguaauuucuucac

SEQ ID NO: 955233 - RNA, 19 nt, Artificial Sequence
  Description of Artificial Sequence: Synthetic oligonucleotide
uccgccuucuucacauuag

SEQ ID NO: 955234 - RNA, 19 nt, Artificial Sequence
  Description of Artificial Sequence: Synthetic oligonucleotide
cacuacuagauucaucuga

SEQ ID NO: 955235 - RNA, 19 nt, Artificial Sequence
  Description of Artificial Sequence: Synthetic oligonucleotide
gcugagaagaaaccucgcg

SEQ ID NO: 955236 - RNA, 19 nt, Artificial Sequence
  Description of Artificial Sequence: Synthetic oligonucleotide
gaagaaaccucgcgccgcc

SEQ ID NO: 955237 - RNA, 19 nt, Artificial Sequence
  Description of Artificial Sequence: Synthetic oligonucleotide
uucuugguggugcugcuau

SEQ ID NO: 955238 - RNA, 19 nt, Artificial Sequence
  Description of Artificial Sequence: Synthetic oligonucleotide
ugaacagcugugcucuaaa

SEQ ID NO: 955239 - RNA, 19 nt, Artificial Sequence
  Description of Artificial Sequence: Synthetic oligonucleotide
ugcauguauaaaugcuggu

SEQ ID NO: 955240 - RNA, 19 nt, Artificial Sequence
  Description of Artificial Sequence: Synthetic oligonucleotide
caaaucugcuucauuguga

SEQ ID NO: 955241 - RNA, 19 nt, Artificial Sequence
  Description of Artificial Sequence: Synthetic oligonucleotide
cuuccaaguuagcauuagc

SEQ ID NO: 955242 - RNA, 19 nt, Artificial Sequence
  Description of Artificial Sequence: Synthetic oligonucleotide
guaacacucaaaaggguca

SEQ ID NO: 955243 - RNA, 19 nt, Artificial Sequence
  Description of Artificial Sequence: Synthetic oligonucleotide
gaaauguauccuuucaauu

SEQ ID NO: 955244 - RNA, 19 nt, Artificial Sequence
  Description of Artificial Sequence: Synthetic oligonucleotide
cauauacuaaauacugcaa

SEQ ID NO: 955245 - RNA, 19 nt, Artificial Sequence
  Description of Artificial Sequence: Synthetic oligonucleotide
ucgggcuccuucucggacg

SEQ ID NO: 955246 - RNA, 19 nt, Artificial Sequence
  Description of Artificial Sequence: Synthetic oligonucleotide
gcauugucaaucuuucuac

SEQ ID NO: 955247 - RNA, 19 nt, Artificial Sequence
  Description of Artificial Sequence: Synthetic oligonucleotide
ucuuccaaguuagcauuag

SEQ ID NO: 955248 - RNA, 19 nt, Artificial Sequence
  Description of Artificial Sequence: Synthetic oligonucleotide
auauaccucuuugcaaauc

SEQ ID NO: 955249 - RNA, 19 nt, Artificial Sequence
  Description of Artificial Sequence: Synthetic oligonucleotide
uucugucaugcugacaacu

SEQ ID NO: 955250 - RNA, 19 nt, Artificial Sequence
  Description of Artificial Sequence: Synthetic oligonucleotide
acacuugcauugucaaucu

SEQ ID NO: 955251 - RNA, 19 nt, Artificial Sequence
  Description of Artificial Sequence: Synthetic oligonucleotide
ucccuugugcaauuguaaa

SEQ ID NO: 955252 - RNA, 19 nt, Artificial Sequence
  Description of Artificial Sequence: Synthetic oligonucleotide
gaaaccucgcgccgccgcg

SEQ ID NO: 955253 - RNA, 19 nt, Artificial Sequence
  Description of Artificial Sequence: Synthetic oligonucleotide
acaacuugacauauauaca

SEQ ID NO: 955254 - RNA, 19 nt, Artificial Sequence
  Description of Artificial Sequence: Synthetic oligonucleotide
aggacacugugccuggucu

SEQ ID NO: 955255 - RNA, 19 nt, Artificial Sequence
  Description of Artificial Sequence: Synthetic oligonucleotide
guauccuuucaauuucaca

SEQ ID NO: 955256 - RNA, 19 nt, Artificial Sequence
  Description of Artificial Sequence: Synthetic oligonucleotide
acaaguguaaagacacaug

SEQ ID NO: 955257 - RNA, 19 nt, Artificial Sequence
  Description of Artificial Sequence: Synthetic oligonucleotide
ucacuacuagauucaucug

SEQ ID NO: 955258 - RNA, 19 nt, Artificial Sequence
  Description of Artificial Sequence: Synthetic oligonucleotide
augaaaucuuuccgcucag

SEQ ID NO: 955259 - RNA, 19 nt, Artificial Sequence
  Description of Artificial Sequence: Synthetic oligonucleotide
cugcaauagucucugcaug

SEQ ID NO: 955260 - RNA, 19 nt, Artificial Sequence
  Description of Artificial Sequence: Synthetic oligonucleotide
agaacuguuccguuccuuu

SEQ ID NO: 955261 - RNA, 19 nt, Artificial Sequence
  Description of Artificial Sequence: Synthetic oligonucleotide
cuuuccgcucaguuaaauc

SEQ ID NO: 955262 - RNA, 19 nt, Artificial Sequence
  Description of Artificial Sequence: Synthetic oligonucleotide
cucacucucgucccugggg

SEQ ID NO: 955263 - RNA, 19 nt, Artificial Sequence
  Description of Artificial Sequence: Synthetic oligonucleotide
aaagggucagcagcgaguu

SEQ ID NO: 955264 - RNA, 19 nt, Artificial Sequence
  Description of Artificial Sequence: Synthetic oligonucleotide
cucaaauauauguaacacu

SEQ ID NO: 955265 - RNA, 19 nt, Artificial Sequence
  Description of Artificial Sequence: Synthetic oligonucleotide
cuaaaaugaugaacugcca

SEQ ID NO: 955266 - RNA, 19 nt, Artificial Sequence
  Description of Artificial Sequence: Synthetic oligonucleotide
uaaagcaguuuguguagau

SEQ ID NO: 955267 - RNA, 19 nt, Artificial Sequence
  Description of Artificial Sequence: Synthetic oligonucleotide
gauuagcucuuuuacaguu

SEQ ID NO: 955268 - RNA, 19 nt, Artificial Sequence
  Description of Artificial Sequence: Synthetic oligonucleotide
uuuucucucuugccuucca

SEQ ID NO: 955269 - RNA, 19 nt, Artificial Sequence
  Description of Artificial Sequence: Synthetic oligonucleotide
ugcucuuuagcauggcauu

SEQ ID NO: 955270 - RNA, 19 nt, Artificial Sequence
  Description of Artificial Sequence: Synthetic oligonucleotide
guuguaaagcaguuugugu

SEQ ID NO: 955271 - RNA, 19 nt, Artificial Sequence
  Description of Artificial Sequence: Synthetic oligonucleotide
ugacccacauucuucuuua

SEQ ID NO: 955272 - RNA, 19 nt, Artificial Sequence
  Description of Artificial Sequence: Synthetic oligonucleotide
ucacaaaguuucuggcccu

SEQ ID NO: 955273 - RNA, 19 nt, Artificial Sequence
  Description of Artificial Sequence: Synthetic oligonucleotide
auacugcaauagucucugc

SEQ ID NO: 955274 - RNA, 19 nt, Artificial Sequence
  Description of Artificial Sequence: Synthetic oligonucleotide
guuucuggcccuucccuug

SEQ ID NO: 955275 - RNA, 19 nt, Artificial Sequence
  Description of Artificial Sequence: Synthetic oligonucleotide
uguauaaaugcugguuaua

SEQ ID NO: 955276 - RNA, 19 nt, Artificial Sequence
  Description of Artificial Sequence: Synthetic oligonucleotide
cauuaagugcacuaaaauu

SEQ ID NO: 955277 - RNA, 19 nt, Artificial Sequence
  Description of Artificial Sequence: Synthetic oligonucleotide
auaacaucugucacuucug

SEQ ID NO: 955278 - RNA, 19 nt, Artificial Sequence
  Description of Artificial Sequence: Synthetic oligonucleotide
auuucuaaguucaucuguu

SEQ ID NO: 955279 - RNA, 19 nt, Artificial Sequence
  Description of Artificial Sequence: Synthetic oligonucleotide
uucacuguucacaccugau

SEQ ID NO: 955280 - RNA, 19 nt, Artificial Sequence
  Description of Artificial Sequence: Synthetic oligonucleotide
uuccgcucaguuaaaucau

SEQ ID NO: 955281 - RNA, 19 nt, Artificial Sequence
  Description of Artificial Sequence: Synthetic oligonucleotide
agcgaguucuaccaacaau

SEQ ID NO: 955282 - RNA, 19 nt, Artificial Sequence
  Description of Artificial Sequence: Synthetic oligonucleotide
aaucugcuucauugugacu

SEQ ID NO: 955283 - RNA, 19 nt, Artificial Sequence
  Description of Artificial Sequence: Synthetic oligonucleotide
gcucaaauauauguaacac

SEQ ID NO: 955284 - RNA, 19 nt, Artificial Sequence
  Description of Artificial Sequence: Synthetic oligonucleotide
ugacaacuugacauauaua

SEQ ID NO: 955285 - RNA, 19 nt, Artificial Sequence
  Description of Artificial Sequence: Synthetic oligonucleotide
uuguuguuccagaacuguu

SEQ ID NO: 955286 - RNA, 19 nt, Artificial Sequence
  Description of Artificial Sequence: Synthetic oligonucleotide
guaaauggcucucuuugua

SEQ ID NO: 955287 - RNA, 19 nt, Artificial Sequence
  Description of Artificial Sequence: Synthetic oligonucleotide
aagauguauucaaaauauu

SEQ ID NO: 955288 - RNA, 19 nt, Artificial Sequence
  Description of Artificial Sequence: Synthetic oligonucleotide
cugucaugcugacaacuug

SEQ ID NO: 955289 - RNA, 19 nt, Artificial Sequence
  Description of Artificial Sequence: Synthetic oligonucleotide
cuucacuaguucacuguuc

SEQ ID NO: 955290 - RNA, 19 nt, Artificial Sequence
  Description of Artificial Sequence: Synthetic oligonucleotide
aaaccucgcgccgccgcgc

SEQ ID NO: 955291 - RNA, 19 nt, Artificial Sequence
  Description of Artificial Sequence: Synthetic oligonucleotide
uuuuggcaaugguuugcca

SEQ ID NO: 955292 - RNA, 19 nt, Artificial Sequence
  Description of Artificial Sequence: Synthetic oligonucleotide
ugcugguauaaaucagauc

SEQ ID NO: 955293 - RNA, 19 nt, Artificial Sequence
  Description of Artificial Sequence: Synthetic oligonucleotide
uugccagaaggcuuuggau

SEQ ID NO: 955294 - RNA, 19 nt, Artificial Sequence
  Description of Artificial Sequence: Synthetic oligonucleotide
uuggaacuguuuugauucu

SEQ ID NO: 955295 - RNA, 19 nt, Artificial Sequence
  Description of Artificial Sequence: Synthetic oligonucleotide
ucucuaaaucaagaaccuc

SEQ ID NO: 955296 - RNA, 19 nt, Artificial Sequence
  Description of Artificial Sequence: Synthetic oligonucleotide
aucugaccuuacaauaaag

SEQ ID NO: 955297 - RNA, 19 nt, Artificial Sequence
  Description of Artificial Sequence: Synthetic oligonucleotide
agaaccucacagaugcucu

SEQ ID NO: 955298 - RNA, 19 nt, Artificial Sequence
  Description of Artificial Sequence: Synthetic oligonucleotide
guaucuuaagcaagcuaac

SEQ ID NO: 955299 - RNA, 19 nt, Artificial Sequence
  Description of Artificial Sequence: Synthetic oligonucleotide
acuugcauugucaaucuuu

SEQ ID NO: 955300 - RNA, 19 nt, Artificial Sequence
  Description of Artificial Sequence: Synthetic oligonucleotide
aucaagaaccucacagaug

SEQ ID NO: 955301 - RNA, 19 nt, Artificial Sequence
  Description of Artificial Sequence: Synthetic oligonucleotide
ccuugugcaauuguaaaug

SEQ ID NO: 955302 - RNA, 19 nt, Artificial Sequence
  Description of Artificial Sequence: Synthetic oligonucleotide
cacuaguucacuguucaca

SEQ ID NO: 955303 - RNA, 19 nt, Artificial Sequence
  Description of Artificial Sequence: Synthetic oligonucleotide
gaaaucuuuccgcucaguu

SEQ ID NO: 955304 - RNA, 19 nt, Artificial Sequence
  Description of Artificial Sequence: Synthetic oligonucleotide
caacuauagaaagcaaaga

SEQ ID NO: 955305 - RNA, 19 nt, Artificial Sequence
  Description of Artificial Sequence: Synthetic oligonucleotide
uuuaagagauuagcucuuu

SEQ ID NO: 955306 - RNA, 19 nt, Artificial Sequence
  Description of Artificial Sequence: Synthetic oligonucleotide
aagggucagcagcgaguuc

SEQ ID NO: 955307 - RNA, 19 nt, Artificial Sequence
  Description of Artificial Sequence: Synthetic oligonucleotide
cugcuauccgccuucuuca

SEQ ID NO: 955308 - RNA, 19 nt, Artificial Sequence
  Description of Artificial Sequence: Synthetic oligonucleotide
gcucuaaaaugaugaacug

SEQ ID NO: 955309 - RNA, 19 nt, Artificial Sequence
  Description of Artificial Sequence: Synthetic oligonucleotide
auggcucucuuuguaagga

SEQ ID NO: 955310 - RNA, 19 nt, Artificial Sequence
  Description of Artificial Sequence: Synthetic oligonucleotide
cacuguuuccuuuaacucu

SEQ ID NO: 955311 - RNA, 19 nt, Artificial Sequence
  Description of Artificial Sequence: Synthetic oligonucleotide
ugugccuggucuguuguaa

SEQ ID NO: 955312 - RNA, 19 nt, Artificial Sequence
  Description of Artificial Sequence: Synthetic oligonucleotide
gaugaacugccacuaaguu

SEQ ID NO: 955313 - RNA, 19 nt, Artificial Sequence
  Description of Artificial Sequence: Synthetic oligonucleotide
ucacuaguucacuguucac

SEQ ID NO: 955314 - RNA, 19 nt, Artificial Sequence
  Description of Artificial Sequence: Synthetic oligonucleotide
gcuaacauuaagugcacua

SEQ ID NO: 955315 - RNA, 19 nt, Artificial Sequence
  Description of Artificial Sequence: Synthetic oligonucleotide
uagauucaucugacaaaau

SEQ ID NO: 955316 - RNA, 19 nt, Artificial Sequence
  Description of Artificial Sequence: Synthetic oligonucleotide
uggaugcauuaagaaauuc

SEQ ID NO: 955317 - RNA, 19 nt, Artificial Sequence
  Description of Artificial Sequence: Synthetic oligonucleotide
caacucgguuaucugaaca

SEQ ID NO: 955318 - RNA, 19 nt, Artificial Sequence
  Description of Artificial Sequence: Synthetic oligonucleotide
gcugcuauccgccuucuuc

SEQ ID NO: 955319 - RNA, 19 nt, Artificial Sequence
  Description of Artificial Sequence: Synthetic oligonucleotide
aacuaucuucagauucaga

SEQ ID NO: 955320 - RNA, 19 nt, Artificial Sequence
  Description of Artificial Sequence: Synthetic oligonucleotide
aagaaaccucgcgccgccg

SEQ ID NO: 955321 - RNA, 19 nt, Artificial Sequence
  Description of Artificial Sequence: Synthetic oligonucleotide
caauuacugccaugcaaga

SEQ ID NO: 955322 - RNA, 19 nt, Artificial Sequence
  Description of Artificial Sequence: Synthetic oligonucleotide
cugacaacuugacauauau

SEQ ID NO: 955323 - RNA, 19 nt, Artificial Sequence
  Description of Artificial Sequence: Synthetic oligonucleotide
guucacuguucacaccuga

SEQ ID NO: 955324 - RNA, 19 nt, Artificial Sequence
  Description of Artificial Sequence: Synthetic oligonucleotide
gguauaaaucagaucuuca

SEQ ID NO: 955325 - RNA, 19 nt, Artificial Sequence
  Description of Artificial Sequence: Synthetic oligonucleotide
gcauuaagaaauucaagau

SEQ ID NO: 955326 - RNA, 19 nt, Artificial Sequence
  Description of Artificial Sequence: Synthetic oligonucleotide
ugcugacaacuugacauau

SEQ ID NO: 955327 - RNA, 19 nt, Artificial Sequence
  Description of Artificial Sequence: Synthetic oligonucleotide
cuuuaacucuucaucugua

SEQ ID NO: 955328 - RNA, 19 nt, Artificial Sequence
  Description of Artificial Sequence: Synthetic oligonucleotide
aguuucuggcccuucccuu

SEQ ID NO: 955329 - RNA, 19 nt, Artificial Sequence
  Description of Artificial Sequence: Synthetic oligonucleotide
aaguuagcauuagccagua

SEQ ID NO: 955330 - RNA, 19 nt, Artificial Sequence
  Description of Artificial Sequence: Synthetic oligonucleotide
cugccacuaaguuuucaca

SEQ ID NO: 955331 - RNA, 19 nt, Artificial Sequence
  Description of Artificial Sequence: Synthetic oligonucleotide
ucacuucugucaugcugac

SEQ ID NO: 955332 - RNA, 19 nt, Artificial Sequence
  Description of Artificial Sequence: Synthetic oligonucleotide
gugcacuaaaauuaacaau

SEQ ID NO: 955333 - RNA, 19 nt, Artificial Sequence
  Description of Artificial Sequence: Synthetic oligonucleotide
ucaucacuacuagauucau

SEQ ID NO: 955334 - RNA, 19 nt, Artificial Sequence
  Description of Artificial Sequence: Synthetic oligonucleotide
gacaugcugggugccgcgg

SEQ ID NO: 955335 - RNA, 19 nt, Artificial Sequence
  Description of Artificial Sequence: Synthetic oligonucleotide
cagcaagcucaaauauaug

SEQ ID NO: 955336 - RNA, 19 nt, Artificial Sequence
  Description of Artificial Sequence: Synthetic oligonucleotide
cuucugucaugcugacaac

SEQ ID NO: 955337 - RNA, 19 nt, Artificial Sequence
  Description of Artificial Sequence: Synthetic oligonucleotide
auaccucuuugcaaaucug

SEQ ID NO: 955338 - RNA, 19 nt, Artificial Sequence
  Description of Artificial Sequence: Synthetic oligonucleotide
gguuaucugaacagcugug

SEQ ID NO: 955339 - RNA, 19 nt, Artificial Sequence
  Description of Artificial Sequence: Synthetic oligonucleotide
guaaagcaguuuguguaga

SEQ ID NO: 955340 - RNA, 19 nt, Artificial Sequence
  Description of Artificial Sequence: Synthetic oligonucleotide
accuuacaauaaagaaauc

SEQ ID NO: 955341 - RNA, 19 nt, Artificial Sequence
  Description of Artificial Sequence: Synthetic oligonucleotide
uccucuaguuuaagagauu

SEQ ID NO: 955342 - RNA, 19 nt, Artificial Sequence
  Description of Artificial Sequence: Synthetic oligonucleotide
gguggugcugcuauccgcc

SEQ ID NO: 955343 - RNA, 19 nt, Artificial Sequence
  Description of Artificial Sequence: Synthetic oligonucleotide
ugcuauccgccuucuucac

SEQ ID NO: 955344 - RNA, 19 nt, Artificial Sequence
  Description of Artificial Sequence: Synthetic oligonucleotide
cacuaaaauuaacaauagu

SEQ ID NO: 955345 - RNA, 19 nt, Artificial Sequence
  Description of Artificial Sequence: Synthetic oligonucleotide
ucuuuccgcucaguuaaau

SEQ ID NO: 955346 - RNA, 19 nt, Artificial Sequence
  Description of Artificial Sequence: Synthetic oligonucleotide
aggaagacacuugcauugu

SEQ ID NO: 955347 - RNA, 19 nt, Artificial Sequence
  Description of Artificial Sequence: Synthetic oligonucleotide
gaggacacugugccugguc

SEQ ID NO: 955348 - RNA, 19 nt, Artificial Sequence
  Description of Artificial Sequence: Synthetic oligonucleotide
gucaugcugacaacuugac

SEQ ID NO: 955349 - RNA, 19 nt, Artificial Sequence
  Description of Artificial Sequence: Synthetic oligonucleotide
cucgguuaucugaacagcu

SEQ ID NO: 955350 - RNA, 19 nt, Artificial Sequence
  Description of Artificial Sequence: Synthetic oligonucleotide
cagaaagaaauguauccuu

SEQ ID NO: 955351 - RNA, 19 nt, Artificial Sequence
  Description of Artificial Sequence: Synthetic oligonucleotide
gcgaguucuaccaacaaua

SEQ ID NO: 955352 - RNA, 19 nt, Artificial Sequence
  Description of Artificial Sequence: Synthetic oligonucleotide
ggaacuguuuugauucuuc

SEQ ID NO: 955353 - RNA, 19 nt, Artificial Sequence
  Description of Artificial Sequence: Synthetic oligonucleotide
aaccucacagaugcucuuu

SEQ ID NO: 955354 - RNA, 19 nt, Artificial Sequence
  Description of Artificial Sequence: Synthetic oligonucleotide
gcaauuguaaauggcucuc

SEQ ID NO: 955355 - RNA, 19 nt, Artificial Sequence
  Description of Artificial Sequence: Synthetic oligonucleotide
cgaguucuaccaacaauag

SEQ ID NO: 955356 - RNA, 19 nt, Artificial Sequence
  Description of Artificial Sequence: Synthetic oligonucleotide
uucucggacgcgggcugcg

SEQ ID NO: 955357 - RNA, 19 nt, Artificial Sequence
  Description of Artificial Sequence: Synthetic oligonucleotide
cauugucaaucuuucuacu

SEQ ID NO: 955358 - RNA, 19 nt, Artificial Sequence
  Description of Artificial Sequence: Synthetic oligonucleotide
ucggacgcgggcugcgcug

SEQ ID NO: 955359 - RNA, 19 nt, Artificial Sequence
  Description of Artificial Sequence: Synthetic oligonucleotide
uggaacuguuuugauucuu

SEQ ID NO: 955360 - RNA, 19 nt, Artificial Sequence
  Description of Artificial Sequence: Synthetic oligonucleotide
ucuugguggugcugcuauc

SEQ ID NO: 955361 - RNA, 19 nt, Artificial Sequence
  Description of Artificial Sequence: Synthetic oligonucleotide
gaucugcacaaaagaaaua

SEQ ID NO: 955362 - RNA, 19 nt, Artificial Sequence
  Description of Artificial Sequence: Synthetic oligonucleotide
agcuaacauuaagugcacu

SEQ ID NO: 955363 - RNA, 19 nt, Artificial Sequence
  Description of Artificial Sequence: Synthetic oligonucleotide
ggugcgcacgaggaggccg

SEQ ID NO: 955364 - RNA, 19 nt, Artificial Sequence
  Description of Artificial Sequence: Synthetic oligonucleotide
guccucuaguuuaagagau

SEQ ID NO: 955365 - RNA, 19 nt, Artificial Sequence
  Description of Artificial Sequence: Synthetic oligonucleotide
ggcuccuucucggacgcgg

SEQ ID NO: 955366 - RNA, 19 nt, Artificial Sequence
  Description of Artificial Sequence: Synthetic oligonucleotide
cucgggcuccuucucggac

SEQ ID NO: 955367 - RNA, 19 nt, Artificial Sequence
  Description of Artificial Sequence: Synthetic oligonucleotide
ccuggucuguuguaaagca

SEQ ID NO: 955368 - RNA, 19 nt, Artificial Sequence
  Description of Artificial Sequence: Synthetic oligonucleotide
acgaggaggccgccgcuga

SEQ ID NO: 955369 - RNA, 19 nt, Artificial Sequence
  Description of Artificial Sequence: Synthetic oligonucleotide
cuuuagcauggcauuucua

SEQ ID NO: 955370 - RNA, 19 nt, Artificial Sequence
  Description of Artificial Sequence: Synthetic oligonucleotide
ggacacugugccuggucug

SEQ ID NO: 955371 - RNA, 19 nt, Artificial Sequence
  Description of Artificial Sequence: Synthetic oligonucleotide
aguuagcauuagccaguaa

SEQ ID NO: 955372 - RNA, 19 nt, Artificial Sequence
  Description of Artificial Sequence: Synthetic oligonucleotide
cgcucaguuaaaucauaag

SEQ ID NO: 955373 - RNA, 19 nt, Artificial Sequence
  Description of Artificial Sequence: Synthetic oligonucleotide
gcgggugcgcacgaggagg

SEQ ID NO: 955374 - RNA, 19 nt, Artificial Sequence
  Description of Artificial Sequence: Synthetic oligonucleotide
guuuaagagauuagcucuu

SEQ ID NO: 955375 - RNA, 19 nt, Artificial Sequence
  Description of Artificial Sequence: Synthetic oligonucleotide
acugacccacauucuucuu

SEQ ID NO: 955376 - RNA, 19 nt, Artificial Sequence
  Description of Artificial Sequence: Synthetic oligonucleotide
ggugccgcgggugcgcacg

SEQ ID NO: 955377 - RNA, 19 nt, Artificial Sequence
  Description of Artificial Sequence: Synthetic oligonucleotide
gugguugcuccucuucacu

SEQ ID NO: 955378 - RNA, 19 nt, Artificial Sequence
  Description of Artificial Sequence: Synthetic oligonucleotide
cauauaccucuuugcaaau

SEQ ID NO: 955379 - RNA, 19 nt, Artificial Sequence
  Description of Artificial Sequence: Synthetic oligonucleotide
cugaacugacccacauucu

SEQ ID NO: 955380 - RNA, 19 nt, Artificial Sequence
  Description of Artificial Sequence: Synthetic oligonucleotide
gccgccgcugagaagaaac

SEQ ID NO: 955381 - RNA, 19 nt, Artificial Sequence
  Description of Artificial Sequence: Synthetic oligonucleotide
gccacuaaguuuucacacu

SEQ ID NO: 955382 - RNA, 19 nt, Artificial Sequence
  Description of Artificial Sequence: Synthetic oligonucleotide
gccgcugagaagaaaccuc

SEQ ID NO: 955383 - RNA, 19 nt, Artificial Sequence
  Description of Artificial Sequence: Synthetic oligonucleotide
ugaggacacugugccuggu

SEQ ID NO: 955384 - RNA, 19 nt, Artificial Sequence
  Description of Artificial Sequence: Synthetic oligonucleotide
caauuguaaauggcucucu

SEQ ID NO: 955385 - RNA, 19 nt, Artificial Sequence
  Description of Artificial Sequence: Synthetic oligonucleotide
ccaacucgguuaucugaac

SEQ ID NO: 955386 - RNA, 19 nt, Artificial Sequence
  Description of Artificial Sequence: Synthetic oligonucleotide
cuaccuuugcuugaagauu

SEQ ID NO: 955387 - RNA, 19 nt, Artificial Sequence
  Description of Artificial Sequence: Synthetic oligonucleotide
ccucuaguuuaagagauua

SEQ ID NO: 955388 - RNA, 19 nt, Artificial Sequence
  Description of Artificial Sequence: Synthetic oligonucleotide
gugcgcacgaggaggccgc

SEQ ID NO: 955389 - RNA, 19 nt, Artificial Sequence
  Description of Artificial Sequence: Synthetic oligonucleotide
ucucggacgcgggcugcgc

SEQ ID NO: 955390 - RNA, 19 nt, Artificial Sequence
  Description of Artificial Sequence: Synthetic oligonucleotide
gcagcgaguucuaccaaca

SEQ ID NO: 955391 - RNA, 19 nt, Artificial Sequence
  Description of Artificial Sequence: Synthetic oligonucleotide
gccgcgggugcgcacgagg

SEQ ID NO: 955392 - RNA, 19 nt, Artificial Sequence
  Description of Artificial Sequence: Synthetic oligonucleotide
gcuauccgccuucuucaca

SEQ ID NO: 955393 - RNA, 19 nt, Artificial Sequence
  Description of Artificial Sequence: Synthetic oligonucleotide
cugaacagcugugcucuaa

SEQ ID NO: 955394 - RNA, 19 nt, Artificial Sequence
  Description of Artificial Sequence: Synthetic oligonucleotide
cugggugccgcgggugcgc

SEQ ID NO: 955395 - RNA, 19 nt, Artificial Sequence
  Description of Artificial Sequence: Synthetic oligonucleotide
cugacccacauucuucuuu

SEQ ID NO: 955396 - RNA, 19 nt, Artificial Sequence
  Description of Artificial Sequence: Synthetic oligonucleotide
ccgccgcugagaagaaacc

SEQ ID NO: 955397 - RNA, 19 nt, Artificial Sequence
  Description of Artificial Sequence: Synthetic oligonucleotide
ccgccgacaugcugggugc

SEQ ID NO: 955398 - RNA, 19 nt, Artificial Sequence
  Description of Artificial Sequence: Synthetic oligonucleotide
cagcgaguucuaccaacaa

SEQ ID NO: 955399 - RNA, 19 nt, Artificial Sequence
  Description of Artificial Sequence: Synthetic oligonucleotide
cacugacagaagauguauu

SEQ ID NO: 955400 - RNA, 19 nt, Artificial Sequence
  Description of Artificial Sequence: Synthetic oligonucleotide
gccgacaugcugggugccg

SEQ ID NO: 955401 - RNA, 19 nt, Artificial Sequence
  Description of Artificial Sequence: Synthetic oligonucleotide
gcaauagucucugcaugua

SEQ ID NO: 955402 - RNA, 19 nt, Artificial Sequence
  Description of Artificial Sequence: Synthetic oligonucleotide
ugcgcacgaggaggccgcc

SEQ ID NO: 955403 - RNA, 19 nt, Artificial Sequence
  Description of Artificial Sequence: Synthetic oligonucleotide
gguuugccagaaggcuuug

SEQ ID NO: 955404 - RNA, 19 nt, Artificial Sequence
  Description of Artificial Sequence: Synthetic oligonucleotide
aucuuuccgcucaguuaaa

SEQ ID NO: 955405 - RNA, 19 nt, Artificial Sequence
  Description of Artificial Sequence: Synthetic oligonucleotide
gucuguuguaaagcaguuu

SEQ ID NO: 955406 - RNA, 19 nt, Artificial Sequence
  Description of Artificial Sequence: Synthetic oligonucleotide
ccgacaugcugggugccgc

SEQ ID NO: 955407 - RNA, 19 nt, Artificial Sequence
  Description of Artificial Sequence: Synthetic oligonucleotide
gcugggugccgcgggugcg

SEQ ID NO: 955408 - RNA, 19 nt, Artificial Sequence
  Description of Artificial Sequence: Synthetic oligonucleotide
cugaagacucuuccuuauu

SEQ ID NO: 955409 - RNA, 19 nt, Artificial Sequence
  Description of Artificial Sequence: Synthetic oligonucleotide
cuuugacuuccuuguuguu

SEQ ID NO: 955410 - RNA, 19 nt, Artificial Sequence
  Description of Artificial Sequence: Synthetic oligonucleotide
caugcugggugccgcgggu

SEQ ID NO: 955411 - RNA, 19 nt, Artificial Sequence
  Description of Artificial Sequence: Synthetic oligonucleotide
cgggugcgcacgaggaggc

SEQ ID NO: 955412 - RNA, 19 nt, Artificial Sequence
  Description of Artificial Sequence: Synthetic oligonucleotide
ggucagcagcgaguucuac

SEQ ID NO: 955413 - RNA, 19 nt, Artificial Sequence
  Description of Artificial Sequence: Synthetic oligonucleotide
cacugaacugacccacauu

SEQ ID NO: 955414 - RNA, 19 nt, Artificial Sequence
  Description of Artificial Sequence: Synthetic oligonucleotide
gcugacaacuugacauaua

SEQ ID NO: 955415 - RNA, 19 nt, Artificial Sequence
  Description of Artificial Sequence: Synthetic oligonucleotide
gccacugaacugacccaca

SEQ ID NO: 955416 - RNA, 19 nt, Artificial Sequence
  Description of Artificial Sequence: Synthetic oligonucleotide
guacuggguacugccuuuu

SEQ ID NO: 955417 - RNA, 19 nt, Artificial Sequence
  Description of Artificial Sequence: Synthetic oligonucleotide
cucggacgcgggcugcgcu

SEQ ID NO: 955418 - RNA, 19 nt, Artificial Sequence
  Description of Artificial Sequence: Synthetic oligonucleotide
gcgcacgaggaggccgccg

SEQ ID NO: 955419 - RNA, 19 nt, Artificial Sequence
  Description of Artificial Sequence: Synthetic oligonucleotide
ccgcgggugcgcacgagga

SEQ ID NO: 955420 - RNA, 19 nt, Artificial Sequence
  Description of Artificial Sequence: Synthetic oligonucleotide
cagaacuguuccguuccuu

SEQ ID NO: 955421 - RNA, 19 nt, Artificial Sequence
  Description of Artificial Sequence: Synthetic oligonucleotide
gugccgcgggugcgcacga

SEQ ID NO: 955422 - RNA, 19 nt, Artificial Sequence
  Description of Artificial Sequence: Synthetic oligonucleotide
ggcccuucccuugugcaau

SEQ ID NO: 955423 - RNA, 19 nt, Artificial Sequence
  Description of Artificial Sequence: Synthetic oligonucleotide
gggugcgcacgaggaggcc

SEQ ID NO: 955424 - RNA, 19 nt, Artificial Sequence
  Description of Artificial Sequence: Synthetic oligonucleotide
gggcguccucucccuccgc

SEQ ID NO: 955425 - RNA, 19 nt, Artificial Sequence
  Description of Artificial Sequence: Synthetic oligonucleotide
gggcuccuucucggacgcg

SEQ ID NO: 955426 - RNA, 19 nt, Artificial Sequence
  Description of Artificial Sequence: Synthetic oligonucleotide
cugcgcuggggcguccucu

SEQ ID NO: 955427 - RNA, 19 nt, Artificial Sequence
  Description of Artificial Sequence: Synthetic oligonucleotide
cggacgcgggcugcgcugg

SEQ ID NO: 955428 - RNA, 19 nt, Artificial Sequence
  Description of Artificial Sequence: Synthetic oligonucleotide
gggucagcagcgaguucua

SEQ ID NO: 955429 - RNA, 19 nt, Artificial Sequence
  Description of Artificial Sequence: Synthetic oligonucleotide
gugcugcuauccgccuucu

SEQ ID NO: 955430 - RNA, 19 nt, Artificial Sequence
  Description of Artificial Sequence: Synthetic oligonucleotide
ccagaacuguuccguuccu

SEQ ID NO: 955431 - RNA, 19 nt, Artificial Sequence
  Description of Artificial Sequence: Synthetic oligonucleotide
ccgcgcgcuccucgcuccg

SEQ ID NO: 955432 - RNA, 19 nt, Artificial Sequence
  Description of Artificial Sequence: Synthetic oligonucleotide
gcacgaggaggccgccgcu

SEQ ID NO: 955433 - RNA, 19 nt, Artificial Sequence
  Description of Artificial Sequence: Synthetic oligonucleotide
cgccgacaugcugggugcc

SEQ ID NO: 955434 - RNA, 19 nt, Artificial Sequence
  Description of Artificial Sequence: Synthetic oligonucleotide
ggccgccgcugagaagaaa

SEQ ID NO: 955435 - RNA, 19 nt, Artificial Sequence
  Description of Artificial Sequence: Synthetic oligonucleotide
cgcgcgcuccucgcuccgc

SEQ ID NO: 955436 - RNA, 19 nt, Artificial Sequence
  Description of Artificial Sequence: Synthetic oligonucleotide
cccggcaucucgggcuccu

SEQ ID NO: 955437 - RNA, 19 nt, Artificial Sequence
  Description of Artificial Sequence: Synthetic oligonucleotide
aauuauuuugcuauuauag

SEQ ID NO: 955438 - RNA, 19 nt, Artificial Sequence
  Description of Artificial Sequence: Synthetic oligonucleotide
uuuccuauuacuuaguacu

SEQ ID NO: 955439 - RNA, 19 nt, Artificial Sequence
  Description of Artificial Sequence: Synthetic oligonucleotide
agauuuaucacuuaauagu

SEQ ID NO: 955440 - RNA, 19 nt, Artificial Sequence
  Description of Artificial Sequence: Synthetic oligonucleotide
uuuucuguaucaaaaggag

SEQ ID NO: 955441 - RNA, 19 nt, Artificial Sequence
  Description of Artificial Sequence: Synthetic oligonucleotide
uuugauguguaacaguggc

SEQ ID NO: 955442 - RNA, 19 nt, Artificial Sequence
  Description of Artificial Sequence: Synthetic oligonucleotide
aaagcucuguaucuuaauc

SEQ ID NO: 955443 - RNA, 19 nt, Artificial Sequence
  Description of Artificial Sequence: Synthetic oligonucleotide
ucuaggucaauuuucacca

SEQ ID NO: 955444 - RNA, 19 nt, Artificial Sequence
  Description of Artificial Sequence: Synthetic oligonucleotide
ucucguagucuuuagauag

SEQ ID NO: 955445 - RNA, 19 nt, Artificial Sequence
  Description of Artificial Sequence: Synthetic oligonucleotide
uauuacuuaguacuuguug

SEQ ID NO: 955446 - RNA, 19 nt, Artificial Sequence
  Description of Artificial Sequence: Synthetic oligonucleotide
aauacgugacaucucaucu

SEQ ID NO: 955447 - RNA, 19 nt, Artificial Sequence
  Description of Artificial Sequence: Synthetic oligonucleotide
ucauauaguaaccucuuug

SEQ ID NO: 955448 - RNA, 19 nt, Artificial Sequence
  Description of Artificial Sequence: Synthetic oligonucleotide
uuuaguuuccuucucccag

SEQ ID NO: 955449 - RNA, 19 nt, Artificial Sequence
  Description of Artificial Sequence: Synthetic oligonucleotide
uucuuuauagggcacagcu

SEQ ID NO: 955450 - RNA, 19 nt, Artificial Sequence
  Description of Artificial Sequence: Synthetic oligonucleotide
aguucucacaagcugauuc

SEQ ID NO: 955451 - RNA, 19 nt, Artificial Sequence
  Description of Artificial Sequence: Synthetic oligonucleotide
ugauuucagauaauguucc

SEQ ID NO: 955452 - RNA, 19 nt, Artificial Sequence
  Description of Artificial Sequence: Synthetic oligonucleotide
cauauaguaaccucuuugc

SEQ ID NO: 955453 - RNA, 19 nt, Artificial Sequence
  Description of Artificial Sequence: Synthetic oligonucleotide
uuuaucacuuaauagucga

SEQ ID NO: 955454 - RNA, 19 nt, Artificial Sequence
  Description of Artificial Sequence: Synthetic oligonucleotide
agccauuucaaacuuauug

SEQ ID NO: 955455 - RNA, 19 nt, Artificial Sequence
  Description of Artificial Sequence: Synthetic oligonucleotide
uuauucacuuggcaaaugc

SEQ ID NO: 955456 - RNA, 19 nt, Artificial Sequence
  Description of Artificial Sequence: Synthetic oligonucleotide
uguacaaugccacugccac

SEQ ID NO: 955457 - RNA, 19 nt, Artificial Sequence
  Description of Artificial Sequence: Synthetic oligonucleotide
auaguaaccucuuugcaug

SEQ ID NO: 955458 - RNA, 19 nt, Artificial Sequence
  Description of Artificial Sequence: Synthetic oligonucleotide
aauguuccaacucuuuaca

SEQ ID NO: 955459 - RNA, 19 nt, Artificial Sequence
  Description of Artificial Sequence: Synthetic oligonucleotide
ugaauucaagcacucauac

SEQ ID NO: 955460 - RNA, 19 nt, Artificial Sequence
  Description of Artificial Sequence: Synthetic oligonucleotide
ugauucauuuaucauggca

SEQ ID NO: 955461 - RNA, 19 nt, Artificial Sequence
  Description of Artificial Sequence: Synthetic oligonucleotide
uugaauacgugacaucuca

SEQ ID NO: 955462 - RNA, 19 nt, Artificial Sequence
  Description of Artificial Sequence: Synthetic oligonucleotide
aacgccacuuuguacugcc

SEQ ID NO: 955463 - RNA, 19 nt, Artificial Sequence
  Description of Artificial Sequence: Synthetic oligonucleotide
ugagauuuaucacuuaaua

SEQ ID NO: 955464 - RNA, 19 nt, Artificial Sequence
  Description of Artificial Sequence: Synthetic oligonucleotide
ucagcuuuucacuugagaa

SEQ ID NO: 955465 - RNA, 19 nt, Artificial Sequence
  Description of Artificial Sequence: Synthetic oligonucleotide
ucaauagagaaugaauuca

SEQ ID NO: 955466 - RNA, 19 nt, Artificial Sequence
  Description of Artificial Sequence: Synthetic oligonucleotide
guuguucuccaucauauag

SEQ ID NO: 955467 - RNA, 19 nt, Artificial Sequence
  Description of Artificial Sequence: Synthetic oligonucleotide
aaguuugagguucucuaag

SEQ ID NO: 955468 - RNA, 19 nt, Artificial Sequence
  Description of Artificial Sequence: Synthetic oligonucleotide
uuuugauguguaacagugg

SEQ ID NO: 955469 - RNA, 19 nt, Artificial Sequence
  Description of Artificial Sequence: Synthetic oligonucleotide
uuuagaaucugccccaguc

SEQ ID NO: 955470 - RNA, 19 nt, Artificial Sequence
  Description of Artificial Sequence: Synthetic oligonucleotide
uuuccauccuuauauauuc

SEQ ID NO: 955471 - RNA, 19 nt, Artificial Sequence
  Description of Artificial Sequence: Synthetic oligonucleotide
auggcaauuauuuugcuau

SEQ ID NO: 955472 - RNA, 19 nt, Artificial Sequence
  Description of Artificial Sequence: Synthetic oligonucleotide
aaagguuuccucaaagucu

SEQ ID NO: 955473 - RNA, 19 nt, Artificial Sequence
  Description of Artificial Sequence: Synthetic oligonucleotide
uuugaugguccuuuucuag

SEQ ID NO: 955474 - RNA, 19 nt, Artificial Sequence
  Description of Artificial Sequence: Synthetic oligonucleotide
ucuaggggcaguaugugug

SEQ ID NO: 955475 - RNA, 19 nt, Artificial Sequence
  Description of Artificial Sequence: Synthetic oligonucleotide
ggcaauuuccucaauaugg

SEQ ID NO: 955476 - RNA, 19 nt, Artificial Sequence
  Description of Artificial Sequence: Synthetic oligonucleotide
uuugggagacuuuggagag

SEQ ID NO: 955477 - RNA, 19 nt, Artificial Sequence
  Description of Artificial Sequence: Synthetic oligonucleotide
uuacaagcuguucauuuug

SEQ ID NO: 955478 - RNA, 19 nt, Artificial Sequence
  Description of Artificial Sequence: Synthetic oligonucleotide
ucaauauggagauccauau

SEQ ID NO: 955479 - RNA, 19 nt, Artificial Sequence
  Description of Artificial Sequence: Synthetic oligonucleotide
aauuuccucaauauggaga

SEQ ID NO: 955480 - RNA, 19 nt, Artificial Sequence
  Description of Artificial Sequence: Synthetic oligonucleotide
gauuuaucacuuaauaguc

SEQ ID NO: 955481 - RNA, 19 nt, Artificial Sequence
  Description of Artificial Sequence: Synthetic oligonucleotide
ggaguauucauccaucucc

SEQ ID NO: 955482 - RNA, 19 nt, Artificial Sequence
  Description of Artificial Sequence: Synthetic oligonucleotide
uagggcacagcuccuaacg

SEQ ID NO: 955483 - RNA, 19 nt, Artificial Sequence
  Description of Artificial Sequence: Synthetic oligonucleotide
aacaucugugguuuguagu

SEQ ID NO: 955484 - RNA, 19 nt, Artificial Sequence
  Description of Artificial Sequence: Synthetic oligonucleotide
uuuauagcaagugccagcu

SEQ ID NO: 955485 - RNA, 19 nt, Artificial Sequence
  Description of Artificial Sequence: Synthetic oligonucleotide
uacgugacaucucaucugc

SEQ ID NO: 955486 - RNA, 19 nt, Artificial Sequence
  Description of Artificial Sequence: Synthetic oligonucleotide
gacagucaaagucucguag

SEQ ID NO: 955487 - RNA, 19 nt, Artificial Sequence
  Description of Artificial Sequence: Synthetic oligonucleotide
ucuaagauuuucucucagc

SEQ ID NO: 955488 - RNA, 19 nt, Artificial Sequence
  Description of Artificial Sequence: Synthetic oligonucleotide
auuuccucaauauggagau

SEQ ID NO: 955489 - RNA, 19 nt, Artificial Sequence
  Description of Artificial Sequence: Synthetic oligonucleotide
cauuguuucaagcuucuug

SEQ ID NO: 955490 - RNA, 19 nt, Artificial Sequence
  Description of Artificial Sequence: Synthetic oligonucleotide
uguugaaagcucuguaucu

SEQ ID NO: 955491 - RNA, 19 nt, Artificial Sequence
  Description of Artificial Sequence: Synthetic oligonucleotide
cagaauaagggcuuuugug

SEQ ID NO: 955492 - RNA, 19 nt, Artificial Sequence
  Description of Artificial Sequence: Synthetic oligonucleotide
ucggagacagucaaagucu

SEQ ID NO: 955493 - RNA, 19 nt, Artificial Sequence
  Description of Artificial Sequence: Synthetic oligonucleotide
uuagaaucugccccaguca

SEQ ID NO: 955494 - RNA, 19 nt, Artificial Sequence
  Description of Artificial Sequence: Synthetic oligonucleotide
aauagucgauuauuuugcu

SEQ ID NO: 955495 - RNA, 19 nt, Artificial Sequence
  Description of Artificial Sequence: Synthetic oligonucleotide
gacgauagucuccuggugc

SEQ ID NO: 955496 - RNA, 19 nt, Artificial Sequence
  Description of Artificial Sequence: Synthetic oligonucleotide
gauucauuuaucauggcaa

SEQ ID NO: 955497 - RNA, 19 nt, Artificial Sequence
  Description of Artificial Sequence: Synthetic oligonucleotide
agcuuuucacuugagaaag

SEQ ID NO: 955498 - RNA, 19 nt, Artificial Sequence
  Description of Artificial Sequence: Synthetic oligonucleotide
uuuucgaauuccuuggcau

SEQ ID NO: 955499 - RNA, 19 nt, Artificial Sequence
  Description of Artificial Sequence: Synthetic oligonucleotide
cauugagguauccugggcc

SEQ ID NO: 955500 - RNA, 19 nt, Artificial Sequence
  Description of Artificial Sequence: Synthetic oligonucleotide
uggacaaaagccauuucaa

SEQ ID NO: 955501 - RNA, 19 nt, Artificial Sequence
  Description of Artificial Sequence: Synthetic oligonucleotide
ugcauguuuuacuauuucu

SEQ ID NO: 955502 - RNA, 19 nt, Artificial Sequence
  Description of Artificial Sequence: Synthetic oligonucleotide
ucuccaucauauaguaacc

SEQ ID NO: 955503 - RNA, 19 nt, Artificial Sequence
  Description of Artificial Sequence: Synthetic oligonucleotide
agauuuucucucagcaucc

SEQ ID NO: 955504 - RNA, 19 nt, Artificial Sequence
  Description of Artificial Sequence: Synthetic oligonucleotide
uuuaaggcucuccuucagc

SEQ ID NO: 955505 - RNA, 19 nt, Artificial Sequence
  Description of Artificial Sequence: Synthetic oligonucleotide
uuacuuaguacuuguugga

SEQ ID NO: 955506 - RNA, 19 nt, Artificial Sequence
  Description of Artificial Sequence: Synthetic oligonucleotide
ucgauuauuuugcuuuaca

SEQ ID NO: 955507 - RNA, 19 nt, Artificial Sequence
  Description of Artificial Sequence: Synthetic oligonucleotide
uuucuuuuauccugaggca

SEQ ID NO: 955508 - RNA, 19 nt, Artificial Sequence
  Description of Artificial Sequence: Synthetic oligonucleotide
cuaagauuuucucucagca

SEQ ID NO: 955509 - RNA, 19 nt, Artificial Sequence
  Description of Artificial Sequence: Synthetic oligonucleotide
gucaauagagaaugaauuc

SEQ ID NO: 955510 - RNA, 19 nt, Artificial Sequence
  Description of Artificial Sequence: Synthetic oligonucleotide
auuuaucacuuaauagucg

SEQ ID NO: 955511 - RNA, 19 nt, Artificial Sequence
  Description of Artificial Sequence: Synthetic oligonucleotide
uauccugaggcacuuuucu

SEQ ID NO: 955512 - RNA, 19 nt, Artificial Sequence
  Description of Artificial Sequence: Synthetic oligonucleotide
ucucugagacugacgauag

SEQ ID NO: 955513 - RNA, 19 nt, Artificial Sequence
  Description of Artificial Sequence: Synthetic oligonucleotide
agaaguuauucacuuggca

SEQ ID NO: 955514 - RNA, 19 nt, Artificial Sequence
  Description of Artificial Sequence: Synthetic oligonucleotide
uugaugguccuuuucuagc

SEQ ID NO: 955515 - RNA, 19 nt, Artificial Sequence
  Description of Artificial Sequence: Synthetic oligonucleotide
uagaaucugccccagucac

SEQ ID NO: 955516 - RNA, 19 nt, Artificial Sequence
  Description of Artificial Sequence: Synthetic oligonucleotide
uccuggcuaaguuugaggu

SEQ ID NO: 955517 - RNA, 19 nt, Artificial Sequence
  Description of Artificial Sequence: Synthetic oligonucleotide
gauggaauaucauaaacuu

SEQ ID NO: 955518 - RNA, 19 nt, Artificial Sequence
  Description of Artificial Sequence: Synthetic oligonucleotide
ugguuuguaguaagaagcu

SEQ ID NO: 955519 - RNA, 19 nt, Artificial Sequence
  Description of Artificial Sequence: Synthetic oligonucleotide
auauaguaaccucuuugca

SEQ ID NO: 955520 - RNA, 19 nt, Artificial Sequence
  Description of Artificial Sequence: Synthetic oligonucleotide
uuuaugguggggaauccau

SEQ ID NO: 955521 - RNA, 19 nt, Artificial Sequence
  Description of Artificial Sequence: Synthetic oligonucleotide
agaucggagacagucaaag

SEQ ID NO: 955522 - RNA, 19 nt, Artificial Sequence
  Description of Artificial Sequence: Synthetic oligonucleotide
uucacuuggcaaaugcuau

SEQ ID NO: 955523 - RNA, 19 nt, Artificial Sequence
  Description of Artificial Sequence: Synthetic oligonucleotide
ucugagacugacgauaguc

SEQ ID NO: 955524 - RNA, 19 nt, Artificial Sequence
  Description of Artificial Sequence: Synthetic oligonucleotide
gaauacgugacaucucauc

SEQ ID NO: 955525 - RNA, 19 nt, Artificial Sequence
  Description of Artificial Sequence: Synthetic oligonucleotide
acucauuacccauuuucug

SEQ ID NO: 955526 - RNA, 19 nt, Artificial Sequence
  Description of Artificial Sequence: Synthetic oligonucleotide
uaagaagcuuuucaaucuc

SEQ ID NO: 955527 - RNA, 19 nt, Artificial Sequence
  Description of Artificial Sequence: Synthetic oligonucleotide
uuagcagacacgcucucuc

SEQ ID NO: 955528 - RNA, 19 nt, Artificial Sequence
  Description of Artificial Sequence: Synthetic oligonucleotide
gcuauuauagaaguuauuc

SEQ ID NO: 955529 - RNA, 19 nt, Artificial Sequence
  Description of Artificial Sequence: Synthetic oligonucleotide
auacuuaagcuucuucaga

SEQ ID NO: 955530 - RNA, 19 nt, Artificial Sequence
  Description of Artificial Sequence: Synthetic oligonucleotide
ugguuuguggguguggaag

SEQ ID NO: 955531 - RNA, 19 nt, Artificial Sequence
  Description of Artificial Sequence: Synthetic oligonucleotide
gacacgcucucucugagac

SEQ ID NO: 955532 - RNA, 19 nt, Artificial Sequence
  Description of Artificial Sequence: Synthetic oligonucleotide
uuuaaggguucuuuccuuc

SEQ ID NO: 955533 - RNA, 19 nt, Artificial Sequence
  Description of Artificial Sequence: Synthetic oligonucleotide
gaagguguguucugucucc

SEQ ID NO: 955534 - RNA, 19 nt, Artificial Sequence
  Description of Artificial Sequence: Synthetic oligonucleotide
uaagucuuuggauggaaua

SEQ ID NO: 955535 - RNA, 19 nt, Artificial Sequence
  Description of Artificial Sequence: Synthetic oligonucleotide
cuuaauccucaguucauuc

SEQ ID NO: 955536 - RNA, 19 nt, Artificial Sequence
  Description of Artificial Sequence: Synthetic oligonucleotide
cuugagcucagcuuuucac

SEQ ID NO: 955537 - RNA, 19 nt, Artificial Sequence
  Description of Artificial Sequence: Synthetic oligonucleotide
gugauuucagauaauguuc

SEQ ID NO: 955538 - RNA, 19 nt, Artificial Sequence
  Description of Artificial Sequence: Synthetic oligonucleotide
cuuguaauguggcucaaca

SEQ ID NO: 955539 - RNA, 19 nt, Artificial Sequence
  Description of Artificial Sequence: Synthetic oligonucleotide
guaguaagaagcuuuucaa

SEQ ID NO: 955540 - RNA, 19 nt, Artificial Sequence
  Description of Artificial Sequence: Synthetic oligonucleotide
uucuuuuauccugaggcac

SEQ ID NO: 955541 - RNA, 19 nt, Artificial Sequence
  Description of Artificial Sequence: Synthetic oligonucleotide
ucuuuagauaguuguuagu

SEQ ID NO: 955542 - RNA, 19 nt, Artificial Sequence
  Description of Artificial Sequence: Synthetic oligonucleotide
acagucaaagucucguagu

SEQ ID NO: 955543 - RNA, 19 nt, Artificial Sequence
  Description of Artificial Sequence: Synthetic oligonucleotide
uccaucauauaguaaccuc

SEQ ID NO: 955544 - RNA, 19 nt, Artificial Sequence
  Description of Artificial Sequence: Synthetic oligonucleotide
ugauguguaacaguggcuu

SEQ ID NO: 955545 - RNA, 19 nt, Artificial Sequence
  Description of Artificial Sequence: Synthetic oligonucleotide
uaguaagaagcuuuucaau

SEQ ID NO: 955546 - RNA, 19 nt, Artificial Sequence
  Description of Artificial Sequence: Synthetic oligonucleotide
uucauuguuucaagcuucu

SEQ ID NO: 955547 - RNA, 19 nt, Artificial Sequence
  Description of Artificial Sequence: Synthetic oligonucleotide
aggaguauucauccaucuc

SEQ ID NO: 955548 - RNA, 19 nt, Artificial Sequence
  Description of Artificial Sequence: Synthetic oligonucleotide
ugccuuagcagacacgcuc

SEQ ID NO: 955549 - RNA, 19 nt, Artificial Sequence
  Description of Artificial Sequence: Synthetic oligonucleotide
uaucauaaacuuguugaaa

SEQ ID NO: 955550 - RNA, 19 nt, Artificial Sequence
  Description of Artificial Sequence: Synthetic oligonucleotide
aagcugauucucuguaagu

SEQ ID NO: 955551 - RNA, 19 nt, Artificial Sequence
  Description of Artificial Sequence: Synthetic oligonucleotide
uggugguaugaacaugggc

SEQ ID NO: 955552 - RNA, 19 nt, Artificial Sequence
  Description of Artificial Sequence: Synthetic oligonucleotide
caaucucuuugguuugugg

SEQ ID NO: 955553 - RNA, 19 nt, Artificial Sequence
  Description of Artificial Sequence: Synthetic oligonucleotide
ugaugguccuuuucuagcu

SEQ ID NO: 955554 - RNA, 19 nt, Artificial Sequence
  Description of Artificial Sequence: Synthetic oligonucleotide
uuaaggguucuuuccuuca

SEQ ID NO: 955555 - RNA, 19 nt, Artificial Sequence
  Description of Artificial Sequence: Synthetic oligonucleotide
aacucuguugauucauuua

SEQ ID NO: 955556 - RNA, 19 nt, Artificial Sequence
  Description of Artificial Sequence: Synthetic oligonucleotide
uguguuguucuccaucaua

SEQ ID NO: 955557 - RNA, 19 nt, Artificial Sequence
  Description of Artificial Sequence: Synthetic oligonucleotide
auaauguuccaacucuuua

SEQ ID NO: 955558 - RNA, 19 nt, Artificial Sequence
  Description of Artificial Sequence: Synthetic oligonucleotide
uucuuugcuacagauccca

SEQ ID NO: 955559 - RNA, 19 nt, Artificial Sequence
  Description of Artificial Sequence: Synthetic oligonucleotide
ucuucuuuauagggcacag

SEQ ID NO: 955560 - RNA, 19 nt, Artificial Sequence
  Description of Artificial Sequence: Synthetic oligonucleotide
auacgugacaucucaucug

SEQ ID NO: 955561 - RNA, 19 nt, Artificial Sequence
  Description of Artificial Sequence: Synthetic oligonucleotide
ugaaagcucuguaucuuaa

SEQ ID NO: 955562 - RNA, 19 nt, Artificial Sequence
  Description of Artificial Sequence: Synthetic oligonucleotide
aucucuuugguuugugggu

SEQ ID NO: 955563 - RNA, 19 nt, Artificial Sequence
  Description of Artificial Sequence: Synthetic oligonucleotide
ugugugcuaaguccccuug

SEQ ID NO: 955564 - RNA, 19 nt, Artificial Sequence
  Description of Artificial Sequence: Synthetic oligonucleotide
agguucucuaagucuuugg

SEQ ID NO: 955565 - RNA, 19 nt, Artificial Sequence
  Description of Artificial Sequence: Synthetic oligonucleotide
uuugguuugugggugugga

SEQ ID NO: 955566 - RNA, 19 nt, Artificial Sequence
  Description of Artificial Sequence: Synthetic oligonucleotide
uaaguccccuugaauacgu

SEQ ID NO: 955567 - RNA, 19 nt, Artificial Sequence
  Description of Artificial Sequence: Synthetic oligonucleotide
agauccauauccuggcuaa

SEQ ID NO: 955568 - RNA, 19 nt, Artificial Sequence
  Description of Artificial Sequence: Synthetic oligonucleotide
uuaucauggcaauuauuuu

SEQ ID NO: 955569 - RNA, 19 nt, Artificial Sequence
  Description of Artificial Sequence: Synthetic oligonucleotide
ucucuuugguuugugggug

SEQ ID NO: 955570 - RNA, 19 nt, Artificial Sequence
  Description of Artificial Sequence: Synthetic oligonucleotide
guauucauccaucucccca

SEQ ID NO: 955571 - RNA, 19 nt, Artificial Sequence
  Description of Artificial Sequence: Synthetic oligonucleotide
uccuauuacuuaguacuug

SEQ ID NO: 955572 - RNA, 19 nt, Artificial Sequence
  Description of Artificial Sequence: Synthetic oligonucleotide
cuauuauuuucucuuugga

SEQ ID NO: 955573 - RNA, 19 nt, Artificial Sequence
  Description of Artificial Sequence: Synthetic oligonucleotide
uuuauagggcacagcuccu

SEQ ID NO: 955574 - RNA, 19 nt, Artificial Sequence
  Description of Artificial Sequence: Synthetic oligonucleotide
ugagagucgggcucugaca

SEQ ID NO: 955575 - RNA, 19 nt, Artificial Sequence
  Description of Artificial Sequence: Synthetic oligonucleotide
ggagagcugagauuuauca

SEQ ID NO: 955576 - RNA, 19 nt, Artificial Sequence
  Description of Artificial Sequence: Synthetic oligonucleotide
uugcauguuuuacuauuuc

SEQ ID NO: 955577 - RNA, 19 nt, Artificial Sequence
  Description of Artificial Sequence: Synthetic oligonucleotide
caauagagaaugaauucaa

SEQ ID NO: 955578 - RNA, 19 nt, Artificial Sequence
  Description of Artificial Sequence: Synthetic oligonucleotide
uuuuaaggguucuuuccuu

SEQ ID NO: 955579 - RNA, 19 nt, Artificial Sequence
  Description of Artificial Sequence: Synthetic oligonucleotide
uuugcuuuacaagcuguuc

SEQ ID NO: 955580 - RNA, 19 nt, Artificial Sequence
  Description of Artificial Sequence: Synthetic oligonucleotide
gagacugacgauagucucc

SEQ ID NO: 955581 - RNA, 19 nt, Artificial Sequence
  Description of Artificial Sequence: Synthetic oligonucleotide
cuaaguccccuugaauacg

SEQ ID NO: 955582 - RNA, 19 nt, Artificial Sequence
  Description of Artificial Sequence: Synthetic oligonucleotide
uccauauccuggcuaaguu

SEQ ID NO: 955583 - RNA, 19 nt, Artificial Sequence
  Description of Artificial Sequence: Synthetic oligonucleotide
guaucaaaaggaguauuca

SEQ ID NO: 955584 - RNA, 19 nt, Artificial Sequence
  Description of Artificial Sequence: Synthetic oligonucleotide
ugacgauagucuccuggug

SEQ ID NO: 955585 - RNA, 19 nt, Artificial Sequence
  Description of Artificial Sequence: Synthetic oligonucleotide
uguggaagugagagcuuug

SEQ ID NO: 955586 - RNA, 19 nt, Artificial Sequence
  Description of Artificial Sequence: Synthetic oligonucleotide
uuuuaugguggggaaucca

SEQ ID NO: 955587 - RNA, 19 nt, Artificial Sequence
  Description of Artificial Sequence: Synthetic oligonucleotide
uguguaacaguggcuuuug

SEQ ID NO: 955588 - RNA, 19 nt, Artificial Sequence
  Description of Artificial Sequence: Synthetic oligonucleotide
gacuuuggagaguucucac

SEQ ID NO: 955589 - RNA, 19 nt, Artificial Sequence
  Description of Artificial Sequence: Synthetic oligonucleotide
uuuuagaaucugccccagu

SEQ ID NO: 955590 - RNA, 19 nt, Artificial Sequence
  Description of Artificial Sequence: Synthetic oligonucleotide
cucaauauggagauccaua

SEQ ID NO: 955591 - RNA, 19 nt, Artificial Sequence
  Description of Artificial Sequence: Synthetic oligonucleotide
cuuuaaggcucuccuucag

SEQ ID NO: 955592 - RNA, 19 nt, Artificial Sequence
  Description of Artificial Sequence: Synthetic oligonucleotide
auuucagauaauguuccaa

SEQ ID NO: 955593 - RNA, 19 nt, Artificial Sequence
  Description of Artificial Sequence: Synthetic oligonucleotide
agagucgggcucugacacc

SEQ ID NO: 955594 - RNA, 19 nt, Artificial Sequence
  Description of Artificial Sequence: Synthetic oligonucleotide
uuccuauuacuuaguacuu

SEQ ID NO: 955595 - RNA, 19 nt, Artificial Sequence
  Description of Artificial Sequence: Synthetic oligonucleotide
caagcacucauacucauua

SEQ ID NO: 955596 - RNA, 19 nt, Artificial Sequence
  Description of Artificial Sequence: Synthetic oligonucleotide
ucgaaggcuuucuguacug

SEQ ID NO: 955597 - RNA, 19 nt, Artificial Sequence
  Description of Artificial Sequence: Synthetic oligonucleotide
uugauucauuuaucauggc

SEQ ID NO: 955598 - RNA, 19 nt, Artificial Sequence
  Description of Artificial Sequence: Synthetic oligonucleotide
uucuaggggcaguaugugu

SEQ ID NO: 955599 - RNA, 19 nt, Artificial Sequence
  Description of Artificial Sequence: Synthetic oligonucleotide
agcuccuaacgccacuuug

SEQ ID NO: 955600 - RNA, 19 nt, Artificial Sequence
  Description of Artificial Sequence: Synthetic oligonucleotide
uuucgaauuccuuggcauu

SEQ ID NO: 955601 - RNA, 19 nt, Artificial Sequence
  Description of Artificial Sequence: Synthetic oligonucleotide
aguccccuugaauacguga

SEQ ID NO: 955602 - RNA, 19 nt, Artificial Sequence
  Description of Artificial Sequence: Synthetic oligonucleotide
ugaauacgugacaucucau

SEQ ID NO: 955603 - RNA, 19 nt, Artificial Sequence
  Description of Artificial Sequence: Synthetic oligonucleotide
uccccuugaauacgugaca

SEQ ID NO: 955604 - RNA, 19 nt, Artificial Sequence
  Description of Artificial Sequence: Synthetic oligonucleotide
uuccaacucuuuacauuug

SEQ ID NO: 955605 - RNA, 19 nt, Artificial Sequence
  Description of Artificial Sequence: Synthetic oligonucleotide
ucuuugcauguuuuacuau

SEQ ID NO: 955606 - RNA, 19 nt, Artificial Sequence
  Description of Artificial Sequence: Synthetic oligonucleotide
ugcuauuauagaaguuauu

SEQ ID NO: 955607 - RNA, 19 nt, Artificial Sequence
  Description of Artificial Sequence: Synthetic oligonucleotide
uucucuguaagugucucuu

SEQ ID NO: 955608 - RNA, 19 nt, Artificial Sequence
  Description of Artificial Sequence: Synthetic oligonucleotide
uccucaauauggagaucca

SEQ ID NO: 955609 - RNA, 19 nt, Artificial Sequence
  Description of Artificial Sequence: Synthetic oligonucleotide
auagucgauuauuuugcuu

SEQ ID NO: 955610 - RNA, 19 nt, Artificial Sequence
  Description of Artificial Sequence: Synthetic oligonucleotide
cagucaaagucucguaguc

SEQ ID NO: 955611 - RNA, 19 nt, Artificial Sequence
  Description of Artificial Sequence: Synthetic oligonucleotide
ggggaauccauuuucugca

SEQ ID NO: 955612 - RNA, 19 nt, Artificial Sequence
  Description of Artificial Sequence: Synthetic oligonucleotide
uaaggguucuuuccuucau

SEQ ID NO: 955613 - RNA, 19 nt, Artificial Sequence
  Description of Artificial Sequence: Synthetic oligonucleotide
ugaugaacucauguugcuc

SEQ ID NO: 955614 - RNA, 19 nt, Artificial Sequence
  Description of Artificial Sequence: Synthetic oligonucleotide
cuucuaagauuuucucuca

SEQ ID NO: 955615 - RNA, 19 nt, Artificial Sequence
  Description of Artificial Sequence: Synthetic oligonucleotide
cuaacgccacuuuguacug

SEQ ID NO: 955616 - RNA, 19 nt, Artificial Sequence
  Description of Artificial Sequence: Synthetic oligonucleotide
uuaugguggggaauccauu

SEQ ID NO: 955617 - RNA, 19 nt, Artificial Sequence
  Description of Artificial Sequence: Synthetic oligonucleotide
uccuaacgccacuuuguac

SEQ ID NO: 955618 - RNA, 19 nt, Artificial Sequence
  Description of Artificial Sequence: Synthetic oligonucleotide
uuguacugcccuguguaga

SEQ ID NO: 955619 - RNA, 19 nt, Artificial Sequence
  Description of Artificial Sequence: Synthetic oligonucleotide
cuaggucaauuuucaccag

SEQ ID NO: 955620 - RNA, 19 nt, Artificial Sequence
  Description of Artificial Sequence: Synthetic oligonucleotide
agacugacgauagucuccu

SEQ ID NO: 955621 - RNA, 19 nt, Artificial Sequence
  Description of Artificial Sequence: Synthetic oligonucleotide
gguucucuaagucuuugga

SEQ ID NO: 955622 - RNA, 19 nt, Artificial Sequence
  Description of Artificial Sequence: Synthetic oligonucleotide
uaguaaccucuuugcaugu

SEQ ID NO: 955623 - RNA, 19 nt, Artificial Sequence
  Description of Artificial Sequence: Synthetic oligonucleotide
auucaagcacucauacuca

SEQ ID NO: 955624 - RNA, 19 nt, Artificial Sequence
  Description of Artificial Sequence: Synthetic oligonucleotide
aguuauucacuuggcaaau

SEQ ID NO: 955625 - RNA, 19 nt, Artificial Sequence
  Description of Artificial Sequence: Synthetic oligonucleotide
gcacucauacucauuaccc

SEQ ID NO: 955626 - RNA, 19 nt, Artificial Sequence
  Description of Artificial Sequence: Synthetic oligonucleotide
cauaaacuuguugaaagcu

SEQ ID NO: 955627 - RNA, 19 nt, Artificial Sequence
  Description of Artificial Sequence: Synthetic oligonucleotide
aggcgcuccuccaaacucc

SEQ ID NO: 955628 - RNA, 19 nt, Artificial Sequence
  Description of Artificial Sequence: Synthetic oligonucleotide
uucgaauuccuuggcauuu

SEQ ID NO: 955629 - RNA, 19 nt, Artificial Sequence
  Description of Artificial Sequence: Synthetic oligonucleotide
cugagagucgggcucugac

SEQ ID NO: 955630 - RNA, 19 nt, Artificial Sequence
  Description of Artificial Sequence: Synthetic oligonucleotide
ugcacacgagccacucuca

SEQ ID NO: 955631 - RNA, 19 nt, Artificial Sequence
  Description of Artificial Sequence: Synthetic oligonucleotide
cacucauacucauuaccca

SEQ ID NO: 955632 - RNA, 19 nt, Artificial Sequence
  Description of Artificial Sequence: Synthetic oligonucleotide
cugaguaucuuuucaggua

SEQ ID NO: 955633 - RNA, 19 nt, Artificial Sequence
  Description of Artificial Sequence: Synthetic oligonucleotide
auguuccaacucuuuacau

SEQ ID NO: 955634 - RNA, 19 nt, Artificial Sequence
  Description of Artificial Sequence: Synthetic oligonucleotide
gagauccauauccuggcua

SEQ ID NO: 955635 - RNA, 19 nt, Artificial Sequence
  Description of Artificial Sequence: Synthetic oligonucleotide
guacaaugccacugccacc

SEQ ID NO: 955636 - RNA, 19 nt, Artificial Sequence
  Description of Artificial Sequence: Synthetic oligonucleotide
cuucuuuauagggcacagc

SEQ ID NO: 955637 - RNA, 19 nt, Artificial Sequence
  Description of Artificial Sequence: Synthetic oligonucleotide
agucgauuauuuugcuuua

SEQ ID NO: 955638 - RNA, 19 nt, Artificial Sequence
  Description of Artificial Sequence: Synthetic oligonucleotide
cucucucuacugugaggcg

SEQ ID NO: 955639 - RNA, 19 nt, Artificial Sequence
  Description of Artificial Sequence: Synthetic oligonucleotide
gagacagucaaagucucgu

SEQ ID NO: 955640 - RNA, 19 nt, Artificial Sequence
  Description of Artificial Sequence: Synthetic oligonucleotide
auccauauccuggcuaagu

SEQ ID NO: 955641 - RNA, 19 nt, Artificial Sequence
  Description of Artificial Sequence: Synthetic oligonucleotide
cuuaauagucgauuauuuu

SEQ ID NO: 955642 - RNA, 19 nt, Artificial Sequence
  Description of Artificial Sequence: Synthetic oligonucleotide
ugggagacuuuggagaguu

SEQ ID NO: 955643 - RNA, 19 nt, Artificial Sequence
  Description of Artificial Sequence: Synthetic oligonucleotide
gcugagauuuaucacuuaa

SEQ ID NO: 955644 - RNA, 19 nt, Artificial Sequence
  Description of Artificial Sequence: Synthetic oligonucleotide
cauggcaauuauuuugcua

SEQ ID NO: 955645 - RNA, 19 nt, Artificial Sequence
  Description of Artificial Sequence: Synthetic oligonucleotide
ucacuuggcaaaugcuauu

SEQ ID NO: 955646 - RNA, 19 nt, Artificial Sequence
  Description of Artificial Sequence: Synthetic oligonucleotide
ggauggaauaucauaaacu

SEQ ID NO: 955647 - RNA, 19 nt, Artificial Sequence
  Description of Artificial Sequence: Synthetic oligonucleotide
gagacuuuggagaguucuc

SEQ ID NO: 955648 - RNA, 19 nt, Artificial Sequence
  Description of Artificial Sequence: Synthetic oligonucleotide
ugucucuuuuaaggguucu

SEQ ID NO: 955649 - RNA, 19 nt, Artificial Sequence
  Description of Artificial Sequence: Synthetic oligonucleotide
guucucacaagcugauucu

SEQ ID NO: 955650 - RNA, 19 nt, Artificial Sequence
  Description of Artificial Sequence: Synthetic oligonucleotide
gaugccacuuuuaagcuuu

SEQ ID NO: 955651 - RNA, 19 nt, Artificial Sequence
  Description of Artificial Sequence: Synthetic oligonucleotide
cucuugcagaugcacacga

SEQ ID NO: 955652 - RNA, 19 nt, Artificial Sequence
  Description of Artificial Sequence: Synthetic oligonucleotide
gauccauauccuggcuaag

SEQ ID NO: 955653 - RNA, 19 nt, Artificial Sequence
  Description of Artificial Sequence: Synthetic oligonucleotide
aguggcuuuuguagaaaga

SEQ ID NO: 955654 - RNA, 19 nt, Artificial Sequence
  Description of Artificial Sequence: Synthetic oligonucleotide
cagucaauagagaaugaau

SEQ ID NO: 955655 - RNA, 19 nt, Artificial Sequence
  Description of Artificial Sequence: Synthetic oligonucleotide
gcuuuuauagcaagugcca

SEQ ID NO: 955656 - RNA, 19 nt, Artificial Sequence
  Description of Artificial Sequence: Synthetic oligonucleotide
agacagucaaagucucgua

SEQ ID NO: 955657 - RNA, 19 nt, Artificial Sequence
  Description of Artificial Sequence: Synthetic oligonucleotide
cagacacgcucucucugag

SEQ ID NO: 955658 - RNA, 19 nt, Artificial Sequence
  Description of Artificial Sequence: Synthetic oligonucleotide
gagucgggcucugacacca

SEQ ID NO: 955659 - RNA, 19 nt, Artificial Sequence
  Description of Artificial Sequence: Synthetic oligonucleotide
cucaaacucuguugauuca

SEQ ID NO: 955660 - RNA, 19 nt, Artificial Sequence
  Description of Artificial Sequence: Synthetic oligonucleotide
guucucuaagucuuuggau

SEQ ID NO: 955661 - RNA, 19 nt, Artificial Sequence
  Description of Artificial Sequence: Synthetic oligonucleotide
uuauagggcacagcuccua

SEQ ID NO: 955662 - RNA, 19 nt, Artificial Sequence
  Description of Artificial Sequence: Synthetic oligonucleotide
gucucguagucuuuagaua

SEQ ID NO: 955663 - RNA, 19 nt, Artificial Sequence
  Description of Artificial Sequence: Synthetic oligonucleotide
uugguuuguggguguggaa

SEQ ID NO: 955664 - RNA, 19 nt, Artificial Sequence
  Description of Artificial Sequence: Synthetic oligonucleotide
auaagggcuuuugugcuuu

SEQ ID NO: 955665 - RNA, 19 nt, Artificial Sequence
  Description of Artificial Sequence: Synthetic oligonucleotide
cugagacugacgauagucu

SEQ ID NO: 955666 - RNA, 19 nt, Artificial Sequence
  Description of Artificial Sequence: Synthetic oligonucleotide
gcaauuuccucaauaugga

SEQ ID NO: 955667 - RNA, 19 nt, Artificial Sequence
  Description of Artificial Sequence: Synthetic oligonucleotide
cucucugagacugacgaua

SEQ ID NO: 955668 - RNA, 19 nt, Artificial Sequence
  Description of Artificial Sequence: Synthetic oligonucleotide
uggcaauuauuuugcuauu

SEQ ID NO: 955669 - RNA, 19 nt, Artificial Sequence
  Description of Artificial Sequence: Synthetic oligonucleotide
ccuuuagccuuguaaugug

SEQ ID NO: 955670 - RNA, 19 nt, Artificial Sequence
  Description of Artificial Sequence: Synthetic oligonucleotide
gcuuuugugcuuuguacaa

SEQ ID NO: 955671 - RNA, 19 nt, Artificial Sequence
  Description of Artificial Sequence: Synthetic oligonucleotide
auguguaacaguggcuuuu

SEQ ID NO: 955672 - RNA, 19 nt, Artificial Sequence
  Description of Artificial Sequence: Synthetic oligonucleotide
uaacgccacuuuguacugc

SEQ ID NO: 955673 - RNA, 19 nt, Artificial Sequence
  Description of Artificial Sequence: Synthetic oligonucleotide
ccuaacgccacuuuguacu

SEQ ID NO: 955674 - RNA, 19 nt, Artificial Sequence
  Description of Artificial Sequence: Synthetic oligonucleotide
gucgauuauuuugcuuuac

SEQ ID NO: 955675 - RNA, 19 nt, Artificial Sequence
  Description of Artificial Sequence: Synthetic oligonucleotide
augaacucauguugcucuu

SEQ ID NO: 955676 - RNA, 19 nt, Artificial Sequence
  Description of Artificial Sequence: Synthetic oligonucleotide
ucuuuacauuuggcauucc

SEQ ID NO: 955677 - RNA, 19 nt, Artificial Sequence
  Description of Artificial Sequence: Synthetic oligonucleotide
agaccucuaguugcugucu

SEQ ID NO: 955678 - RNA, 19 nt, Artificial Sequence
  Description of Artificial Sequence: Synthetic oligonucleotide
agacacgcucucucugaga

SEQ ID NO: 955679 - RNA, 19 nt, Artificial Sequence
  Description of Artificial Sequence: Synthetic oligonucleotide
ccuuuuagaaucugcccca

SEQ ID NO: 955680 - RNA, 19 nt, Artificial Sequence
  Description of Artificial Sequence: Synthetic oligonucleotide
cacaagcugauucucugua

SEQ ID NO: 955681 - RNA, 19 nt, Artificial Sequence
  Description of Artificial Sequence: Synthetic oligonucleotide
caguaugugugugugcuaa

SEQ ID NO: 955682 - RNA, 19 nt, Artificial Sequence
  Description of Artificial Sequence: Synthetic oligonucleotide
cugacgauagucuccuggu

SEQ ID NO: 955683 - RNA, 19 nt, Artificial Sequence
  Description of Artificial Sequence: Synthetic oligonucleotide
uauccugggccuguugauu

SEQ ID NO: 955684 - RNA, 19 nt, Artificial Sequence
  Description of Artificial Sequence: Synthetic oligonucleotide
gaucggagacagucaaagu

SEQ ID NO: 955685 - RNA, 19 nt, Artificial Sequence
  Description of Artificial Sequence: Synthetic oligonucleotide
acuccuaagcucaucucuu

SEQ ID NO: 955686 - RNA, 19 nt, Artificial Sequence
  Description of Artificial Sequence: Synthetic oligonucleotide
cuuggcaaaugcuauuauu

SEQ ID NO: 955687 - RNA, 19 nt, Artificial Sequence
  Description of Artificial Sequence: Synthetic oligonucleotide
aucugccuuagcagacacg

SEQ ID NO: 955688 - RNA, 19 nt, Artificial Sequence
  Description of Artificial Sequence: Synthetic oligonucleotide
ggcucaacacauacuuaag

SEQ ID NO: 955689 - RNA, 19 nt, Artificial Sequence
  Description of Artificial Sequence: Synthetic oligonucleotide
uggugcucuugcagaugca

SEQ ID NO: 955690 - RNA, 19 nt, Artificial Sequence
  Description of Artificial Sequence: Synthetic oligonucleotide
gggcagucagaucggagac

SEQ ID NO: 955691 - RNA, 19 nt, Artificial Sequence
  Description of Artificial Sequence: Synthetic oligonucleotide
ggugcucuugcagaugcac

SEQ ID NO: 955692 - RNA, 19 nt, Artificial Sequence
  Description of Artificial Sequence: Synthetic oligonucleotide
gugugcuaaguccccuuga

SEQ ID NO: 955693 - RNA, 19 nt, Artificial Sequence
  Description of Artificial Sequence: Synthetic oligonucleotide
cauuuaucauggcaauuau

SEQ ID NO: 955694 - RNA, 19 nt, Artificial Sequence
  Description of Artificial Sequence: Synthetic oligonucleotide
guguggugguaugaacaug

SEQ ID NO: 955695 - RNA, 19 nt, Artificial Sequence
  Description of Artificial Sequence: Synthetic oligonucleotide
aaguccccuugaauacgug

SEQ ID NO: 955696 - RNA, 19 nt, Artificial Sequence
  Description of Artificial Sequence: Synthetic oligonucleotide
uugggagacuuuggagagu

SEQ ID NO: 955697 - RNA, 19 nt, Artificial Sequence
  Description of Artificial Sequence: Synthetic oligonucleotide
ccuauuacuuaguacuugu

SEQ ID NO: 955698 - RNA, 19 nt, Artificial Sequence
  Description of Artificial Sequence: Synthetic oligonucleotide
ggggcaguaugugugugug

SEQ ID NO: 955699 - RNA, 19 nt, Artificial Sequence
  Description of Artificial Sequence: Synthetic oligonucleotide
ucgaauuccuuggcauuuu

SEQ ID NO: 955700 - RNA, 19 nt, Artificial Sequence
  Description of Artificial Sequence: Synthetic oligonucleotide
cuaagucuuuggauggaau

SEQ ID NO: 955701 - RNA, 19 nt, Artificial Sequence
  Description of Artificial Sequence: Synthetic oligonucleotide
cucgaaggcuuucuguacu

SEQ ID NO: 955702 - RNA, 19 nt, Artificial Sequence
  Description of Artificial Sequence: Synthetic oligonucleotide
guacugcccuguguagaag

SEQ ID NO: 955703 - RNA, 19 nt, Artificial Sequence
  Description of Artificial Sequence: Synthetic oligonucleotide
ucauuguuucaagcuucuu

SEQ ID NO: 955704 - RNA, 19 nt, Artificial Sequence
  Description of Artificial Sequence: Synthetic oligonucleotide
acagcuccuaacgccacuu

SEQ ID NO: 955705 - RNA, 19 nt, Artificial Sequence
  Description of Artificial Sequence: Synthetic oligonucleotide
gacugacgauagucuccug

SEQ ID NO: 955706 - RNA, 19 nt, Artificial Sequence
  Description of Artificial Sequence: Synthetic oligonucleotide
cguagucuuuagauaguug

SEQ ID NO: 955707 - RNA, 19 nt, Artificial Sequence
  Description of Artificial Sequence: Synthetic oligonucleotide
ggcaguaugugugugugcu

SEQ ID NO: 955708 - RNA, 19 nt, Artificial Sequence
  Description of Artificial Sequence: Synthetic oligonucleotide
gaugcacacgagccacucu

SEQ ID NO: 955709 - RNA, 19 nt, Artificial Sequence
  Description of Artificial Sequence: Synthetic oligonucleotide
aguaaccucuuugcauguu

SEQ ID NO: 955710 - RNA, 19 nt, Artificial Sequence
  Description of Artificial Sequence: Synthetic oligonucleotide
cucuaagucuuuggaugga

SEQ ID NO: 955711 - RNA, 19 nt, Artificial Sequence
  Description of Artificial Sequence: Synthetic oligonucleotide
cucauacucauuacccauu

SEQ ID NO: 955712 - RNA, 19 nt, Artificial Sequence
  Description of Artificial Sequence: Synthetic oligonucleotide
cuccaucauauaguaaccu

SEQ ID NO: 955713 - RNA, 19 nt, Artificial Sequence
  Description of Artificial Sequence: Synthetic oligonucleotide
cucguagucuuuagauagu

SEQ ID NO: 955714 - RNA, 19 nt, Artificial Sequence
  Description of Artificial Sequence: Synthetic oligonucleotide
gggcaguaugugugugugc

SEQ ID NO: 955715 - RNA, 19 nt, Artificial Sequence
  Description of Artificial Sequence: Synthetic oligonucleotide
gcuuuuguagaaagaauuu

SEQ ID NO: 955716 - RNA, 19 nt, Artificial Sequence
  Description of Artificial Sequence: Synthetic oligonucleotide
guauccugggccuguugau

SEQ ID NO: 955717 - RNA, 19 nt, Artificial Sequence
  Description of Artificial Sequence: Synthetic oligonucleotide
ccauccuuauauauucacu

SEQ ID NO: 955718 - RNA, 19 nt, Artificial Sequence
  Description of Artificial Sequence: Synthetic oligonucleotide
cccuugaauacgugacauc

SEQ ID NO: 955719 - RNA, 19 nt, Artificial Sequence
  Description of Artificial Sequence: Synthetic oligonucleotide
ggaacaucugugguuugua

SEQ ID NO: 955720 - RNA, 19 nt, Artificial Sequence
  Description of Artificial Sequence: Synthetic oligonucleotide
ccacaguuuccuugagcuc

SEQ ID NO: 955721 - RNA, 19 nt, Artificial Sequence
  Description of Artificial Sequence: Synthetic oligonucleotide
cuguaucaaaaggaguauu

SEQ ID NO: 955722 - RNA, 19 nt, Artificial Sequence
  Description of Artificial Sequence: Synthetic oligonucleotide
guggcucaacacauacuua

SEQ ID NO: 955723 - RNA, 19 nt, Artificial Sequence
  Description of Artificial Sequence: Synthetic oligonucleotide
caguuuccuugagcucagc

SEQ ID NO: 955724 - RNA, 19 nt, Artificial Sequence
  Description of Artificial Sequence: Synthetic oligonucleotide
cugugaggcgcuccuccaa

SEQ ID NO: 955725 - RNA, 19 nt, Artificial Sequence
  Description of Artificial Sequence: Synthetic oligonucleotide
cugaggcacuuuucucgaa

SEQ ID NO: 955726 - RNA, 19 nt, Artificial Sequence
  Description of Artificial Sequence: Synthetic oligonucleotide
gcuccuaacgccacuuugu

SEQ ID NO: 955727 - RNA, 19 nt, Artificial Sequence
  Description of Artificial Sequence: Synthetic oligonucleotide
agguuuccucaaagucuga

SEQ ID NO: 955728 - RNA, 19 nt, Artificial Sequence
  Description of Artificial Sequence: Synthetic oligonucleotide
cccagucaauagagaauga

SEQ ID NO: 955729 - RNA, 19 nt, Artificial Sequence
  Description of Artificial Sequence: Synthetic oligonucleotide
ggaugccacuuuuaagcuu

SEQ ID NO: 955730 - RNA, 19 nt, Artificial Sequence
  Description of Artificial Sequence: Synthetic oligonucleotide
gugugugcuaaguccccuu

SEQ ID NO: 955731 - RNA, 19 nt, Artificial Sequence
  Description of Artificial Sequence: Synthetic oligonucleotide
gcaguaugugugugugcua

SEQ ID NO: 955732 - RNA, 19 nt, Artificial Sequence
  Description of Artificial Sequence: Synthetic oligonucleotide
ccauauccuggcuaaguuu

SEQ ID NO: 955733 - RNA, 19 nt, Artificial Sequence
  Description of Artificial Sequence: Synthetic oligonucleotide
cccuguguagaaggcugug

SEQ ID NO: 955734 - RNA, 19 nt, Artificial Sequence
  Description of Artificial Sequence: Synthetic oligonucleotide
cucugagacugacgauagu

SEQ ID NO: 955735 - RNA, 19 nt, Artificial Sequence
  Description of Artificial Sequence: Synthetic oligonucleotide
ggcuaaguuugagguucuc

SEQ ID NO: 955736 - RNA, 19 nt, Artificial Sequence
  Description of Artificial Sequence: Synthetic oligonucleotide
cugcccuguguagaaggcu

SEQ ID NO: 955737 - RNA, 19 nt, Artificial Sequence
  Description of Artificial Sequence: Synthetic oligonucleotide
gucgggcucugacaccauu

SEQ ID NO: 955738 - RNA, 19 nt, Artificial Sequence
  Description of Artificial Sequence: Synthetic oligonucleotide
cagucagaucggagacagu

SEQ ID NO: 955739 - RNA, 19 nt, Artificial Sequence
  Description of Artificial Sequence: Synthetic oligonucleotide
agucgggcucugacaccau

SEQ ID NO: 955740 - RNA, 19 nt, Artificial Sequence
  Description of Artificial Sequence: Synthetic oligonucleotide
ccuggcuaaguuugagguu

SEQ ID NO: 955741 - RNA, 19 nt, Artificial Sequence
  Description of Artificial Sequence: Synthetic oligonucleotide
gagguauccugggccuguu

SEQ ID NO: 955742 - RNA, 19 nt, Artificial Sequence
  Description of Artificial Sequence: Synthetic oligonucleotide
ccucaauauggagauccau

SEQ ID NO: 955743 - RNA, 19 nt, Artificial Sequence
  Description of Artificial Sequence: Synthetic oligonucleotide
cugggccuguugauuucuu

SEQ ID NO: 955744 - RNA, 19 nt, Artificial Sequence
  Description of Artificial Sequence: Synthetic oligonucleotide
cagcuccuaacgccacuuu

SEQ ID NO: 955745 - RNA, 19 nt, Artificial Sequence
  Description of Artificial Sequence: Synthetic oligonucleotide
gccuuguaauguggcucaa

SEQ ID NO: 955746 - RNA, 19 nt, Artificial Sequence
  Description of Artificial Sequence: Synthetic oligonucleotide
uaauuaucaaaguagagcg

SEQ ID NO: 955747 - RNA, 19 nt, Artificial Sequence
  Description of Artificial Sequence: Synthetic oligonucleotide
aaagcuauuggucucuucc

SEQ ID NO: 955748 - RNA, 19 nt, Artificial Sequence
  Description of Artificial Sequence: Synthetic oligonucleotide
aaaaccuuuaugcuguaac

SEQ ID NO: 955749 - RNA, 19 nt, Artificial Sequence
  Description of Artificial Sequence: Synthetic oligonucleotide
uuaauuaucaaaguagagc

SEQ ID NO: 955750 - RNA, 19 nt, Artificial Sequence
  Description of Artificial Sequence: Synthetic oligonucleotide
uauagugagaaagagaaga

SEQ ID NO: 955751 - RNA, 19 nt, Artificial Sequence
  Description of Artificial Sequence: Synthetic oligonucleotide
gaugugacugucuagguag

SEQ ID NO: 955752 - RNA, 19 nt, Artificial Sequence
  Description of Artificial Sequence: Synthetic oligonucleotide
aacaugaaauuucuaauga

SEQ ID NO: 955753 - RNA, 19 nt, Artificial Sequence
  Description of Artificial Sequence: Synthetic oligonucleotide
aauauuaggagcugcuucu

SEQ ID NO: 955754 - RNA, 19 nt, Artificial Sequence
  Description of Artificial Sequence: Synthetic oligonucleotide
agucucuaaacauagcuuc

SEQ ID NO: 955755 - RNA, 19 nt, Artificial Sequence
  Description of Artificial Sequence: Synthetic oligonucleotide
uuuguggguaaacaaaacc

SEQ ID NO: 955756 - RNA, 19 nt, Artificial Sequence
  Description of Artificial Sequence: Synthetic oligonucleotide
uucaaguuguuccaggugc

SEQ ID NO: 955757 - RNA, 19 nt, Artificial Sequence
  Description of Artificial Sequence: Synthetic oligonucleotide
uuauuggccucuucgaugg

SEQ ID NO: 955758 - RNA, 19 nt, Artificial Sequence
  Description of Artificial Sequence: Synthetic oligonucleotide
aauuucuaaugaaugcccc

SEQ ID NO: 955759 - RNA, 19 nt, Artificial Sequence
  Description of Artificial Sequence: Synthetic oligonucleotide
agcuugaauaaauauagug

SEQ ID NO: 955760 - RNA, 19 nt, Artificial Sequence
  Description of Artificial Sequence: Synthetic oligonucleotide
auauagugaucucaagugg

SEQ ID NO: 955761 - RNA, 19 nt, Artificial Sequence
  Description of Artificial Sequence: Synthetic oligonucleotide
ucauccaggugucugaucc

SEQ ID NO: 955762 - RNA, 19 nt, Artificial Sequence
  Description of Artificial Sequence: Synthetic oligonucleotide
uaaguuauagugagaaaga

SEQ ID NO: 955763 - RNA, 19 nt, Artificial Sequence
  Description of Artificial Sequence: Synthetic oligonucleotide
ucaagugguccaaucaagg

SEQ ID NO: 955764 - RNA, 19 nt, Artificial Sequence
  Description of Artificial Sequence: Synthetic oligonucleotide
auagcuuccacaaccaggc

SEQ ID NO: 955765 - RNA, 19 nt, Artificial Sequence
  Description of Artificial Sequence: Synthetic oligonucleotide
auaugguaggguuggaugg

SEQ ID NO: 955766 - RNA, 19 nt, Artificial Sequence
  Description of Artificial Sequence: Synthetic oligonucleotide
ucagaaugcaacuacucug

SEQ ID NO: 955767 - RNA, 19 nt, Artificial Sequence
  Description of Artificial Sequence: Synthetic oligonucleotide
acagcuugaauaaauauag

SEQ ID NO: 955768 - RNA, 19 nt, Artificial Sequence
  Description of Artificial Sequence: Synthetic oligonucleotide
aacaaggaaucagugaauc

SEQ ID NO: 955769 - RNA, 19 nt, Artificial Sequence
  Description of Artificial Sequence: Synthetic oligonucleotide
agacucuuaagucacuggg

SEQ ID NO: 955770 - RNA, 19 nt, Artificial Sequence
  Description of Artificial Sequence: Synthetic oligonucleotide
ugaaucagaaugcaacuac

SEQ ID NO: 955771 - RNA, 19 nt, Artificial Sequence
  Description of Artificial Sequence: Synthetic oligonucleotide
uauaugguaggguuggaug

SEQ ID NO: 955772 - RNA, 19 nt, Artificial Sequence
  Description of Artificial Sequence: Synthetic oligonucleotide
aagcugcaauauuaggagc

SEQ ID NO: 955773 - RNA, 19 nt, Artificial Sequence
  Description of Artificial Sequence: Synthetic oligonucleotide
uacaccaugucuacgagga

SEQ ID NO: 955774 - RNA, 19 nt, Artificial Sequence
  Description of Artificial Sequence: Synthetic oligonucleotide
uugccugagauucccaugg

SEQ ID NO: 955775 - RNA, 19 nt, Artificial Sequence
  Description of Artificial Sequence: Synthetic oligonucleotide
guuauagugagaaagagaa

SEQ ID NO: 955776 - RNA, 19 nt, Artificial Sequence
  Description of Artificial Sequence: Synthetic oligonucleotide
ugaugacucuauaugguag

SEQ ID NO: 955777 - RNA, 19 nt, Artificial Sequence
  Description of Artificial Sequence: Synthetic oligonucleotide
caugcuaggaaucuuuccc

SEQ ID NO: 955778 - RNA, 19 nt, Artificial Sequence
  Description of Artificial Sequence: Synthetic oligonucleotide
uauagugaucucaaguggu

SEQ ID NO: 955779 - RNA, 19 nt, Artificial Sequence
  Description of Artificial Sequence: Synthetic oligonucleotide
ucagcguuuucuuugaggu

SEQ ID NO: 955780 - RNA, 19 nt, Artificial Sequence
  Description of Artificial Sequence: Synthetic oligonucleotide
aaaccuuuaugcuguaaca

SEQ ID NO: 955781 - RNA, 19 nt, Artificial Sequence
  Description of Artificial Sequence: Synthetic oligonucleotide
aagugguccaaucaaggca

SEQ ID NO: 955782 - RNA, 19 nt, Artificial Sequence
  Description of Artificial Sequence: Synthetic oligonucleotide
aaguuauagugagaaagag

SEQ ID NO: 955783 - RNA, 19 nt, Artificial Sequence
  Description of Artificial Sequence: Synthetic oligonucleotide
uacgaggaagcaaucauca

SEQ ID NO: 955784 - RNA, 19 nt, Artificial Sequence
  Description of Artificial Sequence: Synthetic oligonucleotide
auuaucaaaguagagcgug

SEQ ID NO: 955785 - RNA, 19 nt, Artificial Sequence
  Description of Artificial Sequence: Synthetic oligonucleotide
cagaaugcaacuacucugg

SEQ ID NO: 955786 - RNA, 19 nt, Artificial Sequence
  Description of Artificial Sequence: Synthetic oligonucleotide
ugcugugaauacuuugugg

SEQ ID NO: 955787 - RNA, 19 nt, Artificial Sequence
  Description of Artificial Sequence: Synthetic oligonucleotide
aagcacgugccucugagug

SEQ ID NO: 955788 - RNA, 19 nt, Artificial Sequence
  Description of Artificial Sequence: Synthetic oligonucleotide
ugucaaguaguccaaccug

SEQ ID NO: 955789 - RNA, 19 nt, Artificial Sequence
  Description of Artificial Sequence: Synthetic oligonucleotide
aaucagaaugcaacuacuc

SEQ ID NO: 955790 - RNA, 19 nt, Artificial Sequence
  Description of Artificial Sequence: Synthetic oligonucleotide
gcugugaauacuuuguggg

SEQ ID NO: 955791 - RNA, 19 nt, Artificial Sequence
  Description of Artificial Sequence: Synthetic oligonucleotide
gugacuagacuccucaucc

SEQ ID NO: 955792 - RNA, 19 nt, Artificial Sequence
  Description of Artificial Sequence: Synthetic oligonucleotide
ucugauccgcucucgaagg

SEQ ID NO: 955793 - RNA, 19 nt, Artificial Sequence
  Description of Artificial Sequence: Synthetic oligonucleotide
ugacugucuagguaguucc

SEQ ID NO: 955794 - RNA, 19 nt, Artificial Sequence
  Description of Artificial Sequence: Synthetic oligonucleotide
caaggaaucagugaaucag

SEQ ID NO: 955795 - RNA, 19 nt, Artificial Sequence
  Description of Artificial Sequence: Synthetic oligonucleotide
aaguaguccaaccugcuuu

SEQ ID NO: 955796 - RNA, 19 nt, Artificial Sequence
  Description of Artificial Sequence: Synthetic oligonucleotide
ucuaaacauagcuuccaca

SEQ ID NO: 955797 - RNA, 19 nt, Artificial Sequence
  Description of Artificial Sequence: Synthetic oligonucleotide
ucaaaguagagcgugcgug

SEQ ID NO: 955798 - RNA, 19 nt, Artificial Sequence
  Description of Artificial Sequence: Synthetic oligonucleotide
aguccaaccugcuuuguag

SEQ ID NO: 955799 - RNA, 19 nt, Artificial Sequence
  Description of Artificial Sequence: Synthetic oligonucleotide
uuauagugagaaagagaag

SEQ ID NO: 955800 - RNA, 19 nt, Artificial Sequence
  Description of Artificial Sequence: Synthetic oligonucleotide
aggagagagcacugcaugc

SEQ ID NO: 955801 - RNA, 19 nt, Artificial Sequence
  Description of Artificial Sequence: Synthetic oligonucleotide
uuuacaccaugucuacgag

SEQ ID NO: 955802 - RNA, 19 nt, Artificial Sequence
  Description of Artificial Sequence: Synthetic oligonucleotide
ucugcaaucuccccugaca

SEQ ID NO: 955803 - RNA, 19 nt, Artificial Sequence
  Description of Artificial Sequence: Synthetic oligonucleotide
aaaacaaaugaugacucua

SEQ ID NO: 955804 - RNA, 19 nt, Artificial Sequence
  Description of Artificial Sequence: Synthetic oligonucleotide
ugagaaaccgacagguccu

SEQ ID NO: 955805 - RNA, 19 nt, Artificial Sequence
  Description of Artificial Sequence: Synthetic oligonucleotide
uacuuuguggguaaacaaa

SEQ ID NO: 955806 - RNA, 19 nt, Artificial Sequence
  Description of Artificial Sequence: Synthetic oligonucleotide
aauauaugugauguggguu

SEQ ID NO: 955807 - RNA, 19 nt, Artificial Sequence
  Description of Artificial Sequence: Synthetic oligonucleotide
gaaaccgacagguccuggg

SEQ ID NO: 955808 - RNA, 19 nt, Artificial Sequence
  Description of Artificial Sequence: Synthetic oligonucleotide
aagaucgcagcccacucca

SEQ ID NO: 955809 - RNA, 19 nt, Artificial Sequence
  Description of Artificial Sequence: Synthetic oligonucleotide
aacaugaaauggcuaaaua

SEQ ID NO: 955810 - RNA, 19 nt, Artificial Sequence
  Description of Artificial Sequence: Synthetic oligonucleotide
uuuguaguucguuauucuc

SEQ ID NO: 955811 - RNA, 19 nt, Artificial Sequence
  Description of Artificial Sequence: Synthetic oligonucleotide
ucuacgaggaagcaaucau

SEQ ID NO: 955812 - RNA, 19 nt, Artificial Sequence
  Description of Artificial Sequence: Synthetic oligonucleotide
uugagcagccucuaacugc

SEQ ID NO: 955813 - RNA, 19 nt, Artificial Sequence
  Description of Artificial Sequence: Synthetic oligonucleotide
ucuagguaguuccuucuga

SEQ ID NO: 955814 - RNA, 19 nt, Artificial Sequence
  Description of Artificial Sequence: Synthetic oligonucleotide
uuuccauuugagcagccuc

SEQ ID NO: 955815 - RNA, 19 nt, Artificial Sequence
  Description of Artificial Sequence: Synthetic oligonucleotide
aauacuaccucguguccaa

SEQ ID NO: 955816 - RNA, 19 nt, Artificial Sequence
  Description of Artificial Sequence: Synthetic oligonucleotide
acuaccucguguccaaguc

SEQ ID NO: 955817 - RNA, 19 nt, Artificial Sequence
  Description of Artificial Sequence: Synthetic oligonucleotide
aaaguagagcgugcgugac

SEQ ID NO: 955818 - RNA, 19 nt, Artificial Sequence
  Description of Artificial Sequence: Synthetic oligonucleotide
caaccugcuuuguaguucg

SEQ ID NO: 955819 - RNA, 19 nt, Artificial Sequence
  Description of Artificial Sequence: Synthetic oligonucleotide
gaaauacuaccucgugucc

SEQ ID NO: 955820 - RNA, 19 nt, Artificial Sequence
  Description of Artificial Sequence: Synthetic oligonucleotide
ucucaagugguccaaucaa

SEQ ID NO: 955821 - RNA, 19 nt, Artificial Sequence
  Description of Artificial Sequence: Synthetic oligonucleotide
ggcaucaugauuucacggg

SEQ ID NO: 955822 - RNA, 19 nt, Artificial Sequence
  Description of Artificial Sequence: Synthetic oligonucleotide
uuagccuccacuugccuga

SEQ ID NO: 955823 - RNA, 19 nt, Artificial Sequence
  Description of Artificial Sequence: Synthetic oligonucleotide
cuagguaguuccuucugag

SEQ ID NO: 955824 - RNA, 19 nt, Artificial Sequence
  Description of Artificial Sequence: Synthetic oligonucleotide
uguaguucguuauucucuc

SEQ ID NO: 955825 - RNA, 19 nt, Artificial Sequence
  Description of Artificial Sequence: Synthetic oligonucleotide
uguucucuuagccuccacu

SEQ ID NO: 955826 - RNA, 19 nt, Artificial Sequence
  Description of Artificial Sequence: Synthetic oligonucleotide
uaguucguuauucucuccu

SEQ ID NO: 955827 - RNA, 19 nt, Artificial Sequence
  Description of Artificial Sequence: Synthetic oligonucleotide
uaaacauagcuuccacaac

SEQ ID NO: 955828 - RNA, 19 nt, Artificial Sequence
  Description of Artificial Sequence: Synthetic oligonucleotide
cucuauaugguaggguugg

SEQ ID NO: 955829 - RNA, 19 nt, Artificial Sequence
  Description of Artificial Sequence: Synthetic oligonucleotide
cuuuacaccaugucuacga

SEQ ID NO: 955830 - RNA, 19 nt, Artificial Sequence
  Description of Artificial Sequence: Synthetic oligonucleotide
augaaauggcuaaauauca

SEQ ID NO: 955831 - RNA, 19 nt, Artificial Sequence
  Description of Artificial Sequence: Synthetic oligonucleotide
auuucuaaugaaugccccu

SEQ ID NO: 955832 - RNA, 19 nt, Artificial Sequence
  Description of Artificial Sequence: Synthetic oligonucleotide
ugcugcaaaugucugauuu

SEQ ID NO: 955833 - RNA, 19 nt, Artificial Sequence
  Description of Artificial Sequence: Synthetic oligonucleotide
uucuuauuggccucuucga

SEQ ID NO: 955834 - RNA, 19 nt, Artificial Sequence
  Description of Artificial Sequence: Synthetic oligonucleotide
ugcgugacuagacuccuca

SEQ ID NO: 955835 - RNA, 19 nt, Artificial Sequence
  Description of Artificial Sequence: Synthetic oligonucleotide
uggguagaagaucgcagcc

SEQ ID NO: 955836 - RNA, 19 nt, Artificial Sequence
  Description of Artificial Sequence: Synthetic oligonucleotide
caagugguccaaucaaggc

SEQ ID NO: 955837 - RNA, 19 nt, Artificial Sequence
  Description of Artificial Sequence: Synthetic oligonucleotide
uacgggguguaacuccugg

SEQ ID NO: 955838 - RNA, 19 nt, Artificial Sequence
  Description of Artificial Sequence: Synthetic oligonucleotide
cuggguagaagaucgcagc

SEQ ID NO: 955839 - RNA, 19 nt, Artificial Sequence
  Description of Artificial Sequence: Synthetic oligonucleotide
aagcuauuggucucuucca

SEQ ID NO: 955840 - RNA, 19 nt, Artificial Sequence
  Description of Artificial Sequence: Synthetic oligonucleotide
ucuuauuggccucuucgau

SEQ ID NO: 955841 - RNA, 19 nt, Artificial Sequence
  Description of Artificial Sequence: Synthetic oligonucleotide
aguaguccaaccugcuuug

SEQ ID NO: 955842 - RNA, 19 nt, Artificial Sequence
  Description of Artificial Sequence: Synthetic oligonucleotide
uuccauucgcucaaucaac

SEQ ID NO: 955843 - RNA, 19 nt, Artificial Sequence
  Description of Artificial Sequence: Synthetic oligonucleotide
aauuaucaaaguagagcgu

SEQ ID NO: 955844 - RNA, 19 nt, Artificial Sequence
  Description of Artificial Sequence: Synthetic oligonucleotide
gauucccauggcuuuacac

SEQ ID NO: 955845 - RNA, 19 nt, Artificial Sequence
  Description of Artificial Sequence: Synthetic oligonucleotide
auacuuuguggguaaacaa

SEQ ID NO: 955846 - RNA, 19 nt, Artificial Sequence
  Description of Artificial Sequence: Synthetic oligonucleotide
aacaaaugaugacucuaua

SEQ ID NO: 955847 - RNA, 19 nt, Artificial Sequence
  Description of Artificial Sequence: Synthetic oligonucleotide
agcgugcgugacuagacuc

SEQ ID NO: 955848 - RNA, 19 nt, Artificial Sequence
  Description of Artificial Sequence: Synthetic oligonucleotide
aaccuuuaugcuguaacaa

SEQ ID NO: 955849 - RNA, 19 nt, Artificial Sequence
  Description of Artificial Sequence: Synthetic oligonucleotide
caugccggagaaauacugc

SEQ ID NO: 955850 - RNA, 19 nt, Artificial Sequence
  Description of Artificial Sequence: Synthetic oligonucleotide
uguacgggguguaacuccu

SEQ ID NO: 955851 - RNA, 19 nt, Artificial Sequence
  Description of Artificial Sequence: Synthetic oligonucleotide
agugaucucaaguggucca

SEQ ID NO: 955852 - RNA, 19 nt, Artificial Sequence
  Description of Artificial Sequence: Synthetic oligonucleotide
gucugauccgcucucgaag

SEQ ID NO: 955853 - RNA, 19 nt, Artificial Sequence
  Description of Artificial Sequence: Synthetic oligonucleotide
uucauggcauugaagcuau

SEQ ID NO: 955854 - RNA, 19 nt, Artificial Sequence
  Description of Artificial Sequence: Synthetic oligonucleotide
cugagugccuaagucagcg

SEQ ID NO: 955855 - RNA, 19 nt, Artificial Sequence
  Description of Artificial Sequence: Synthetic oligonucleotide
aguuauagugagaaagaga

SEQ ID NO: 955856 - RNA, 19 nt, Artificial Sequence
  Description of Artificial Sequence: Synthetic oligonucleotide
gcuugaauaaauauaguga

SEQ ID NO: 955857 - RNA, 19 nt, Artificial Sequence
  Description of Artificial Sequence: Synthetic oligonucleotide
ucaaguaguccaaccugcu

SEQ ID NO: 955858 - RNA, 19 nt, Artificial Sequence
  Description of Artificial Sequence: Synthetic oligonucleotide
uaccucguguccaaguccu

SEQ ID NO: 955859 - RNA, 19 nt, Artificial Sequence
  Description of Artificial Sequence: Synthetic oligonucleotide
ucaacuccaggacucgcgu

SEQ ID NO: 955860 - RNA, 19 nt, Artificial Sequence
  Description of Artificial Sequence: Synthetic oligonucleotide
gagucagacgccaaugcug

SEQ ID NO: 955861 - RNA, 19 nt, Artificial Sequence
  Description of Artificial Sequence: Synthetic oligonucleotide
acguggaaaacaaaugaug

SEQ ID NO: 955862 - RNA, 19 nt, Artificial Sequence
  Description of Artificial Sequence: Synthetic oligonucleotide
uucuaaaagcugcaauauu

SEQ ID NO: 955863 - RNA, 19 nt, Artificial Sequence
  Description of Artificial Sequence: Synthetic oligonucleotide
gaaugcaacuacucuggca

SEQ ID NO: 955864 - RNA, 19 nt, Artificial Sequence
  Description of Artificial Sequence: Synthetic oligonucleotide
auagugaucucaagugguc

SEQ ID NO: 955865 - RNA, 19 nt, Artificial Sequence
  Description of Artificial Sequence: Synthetic oligonucleotide
caaccuguccaguuccccg

SEQ ID NO: 955866 - RNA, 19 nt, Artificial Sequence
  Description of Artificial Sequence: Synthetic oligonucleotide
aacauccacguggaaaaca

SEQ ID NO: 955867 - RNA, 19 nt, Artificial Sequence
  Description of Artificial Sequence: Synthetic oligonucleotide
aaccgacagguccugggug

SEQ ID NO: 955868 - RNA, 19 nt, Artificial Sequence
  Description of Artificial Sequence: Synthetic oligonucleotide
accuuuaugcuguaacaaa

SEQ ID NO: 955869 - RNA, 19 nt, Artificial Sequence
  Description of Artificial Sequence: Synthetic oligonucleotide
cugugcuuggaugugacug

SEQ ID NO: 955870 - RNA, 19 nt, Artificial Sequence
  Description of Artificial Sequence: Synthetic oligonucleotide
cuuagccuccacuugccug

SEQ ID NO: 955871 - RNA, 19 nt, Artificial Sequence
  Description of Artificial Sequence: Synthetic oligonucleotide
acgaggaagcaaucaucac

SEQ ID NO: 955872 - RNA, 19 nt, Artificial Sequence
  Description of Artificial Sequence: Synthetic oligonucleotide
uugaagcuauccagggcug

SEQ ID NO: 955873 - RNA, 19 nt, Artificial Sequence
  Description of Artificial Sequence: Synthetic oligonucleotide
cuacgaggaagcaaucauc

SEQ ID NO: 955874 - RNA, 19 nt, Artificial Sequence
  Description of Artificial Sequence: Synthetic oligonucleotide
augccggagaaauacugcu

SEQ ID NO: 955875 - RNA, 19 nt, Artificial Sequence
  Description of Artificial Sequence: Synthetic oligonucleotide
augaugacucuauauggua

SEQ ID NO: 955876 - RNA, 19 nt, Artificial Sequence
  Description of Artificial Sequence: Synthetic oligonucleotide
guuccaggaccuuucagca

SEQ ID NO: 955877 - RNA, 19 nt, Artificial Sequence
  Description of Artificial Sequence: Synthetic oligonucleotide
augacucuauaugguaggg

SEQ ID NO: 955878 - RNA, 19 nt, Artificial Sequence
  Description of Artificial Sequence: Synthetic oligonucleotide
gacgccaaugcugaguuca

SEQ ID NO: 955879 - RNA, 19 nt, Artificial Sequence
  Description of Artificial Sequence: Synthetic oligonucleotide
uccaggacucgcguguacg

SEQ ID NO: 955880 - RNA, 19 nt, Artificial Sequence
  Description of Artificial Sequence: Synthetic oligonucleotide
caggccaacagagucagac

SEQ ID NO: 955881 - RNA, 19 nt, Artificial Sequence
  Description of Artificial Sequence: Synthetic oligonucleotide
auucgcucaaucaaccugu

SEQ ID NO: 955882 - RNA, 19 nt, Artificial Sequence
  Description of Artificial Sequence: Synthetic oligonucleotide
ggcauugaagcuauccagg

SEQ ID NO: 955883 - RNA, 19 nt, Artificial Sequence
  Description of Artificial Sequence: Synthetic oligonucleotide
caauguaccaugucaucca

SEQ ID NO: 955884 - RNA, 19 nt, Artificial Sequence
  Description of Artificial Sequence: Synthetic oligonucleotide
ugccggagaaauacugcug

SEQ ID NO: 955885 - RNA, 19 nt, Artificial Sequence
  Description of Artificial Sequence: Synthetic oligonucleotide
auuaggagcugcuucuguu

SEQ ID NO: 955886 - RNA, 19 nt, Artificial Sequence
  Description of Artificial Sequence: Synthetic oligonucleotide
uuucuaaugaaugccccuu

SEQ ID NO: 955887 - RNA, 19 nt, Artificial Sequence
  Description of Artificial Sequence: Synthetic oligonucleotide
aaguagagcgugcgugacu

SEQ ID NO: 955888 - RNA, 19 nt, Artificial Sequence
  Description of Artificial Sequence: Synthetic oligonucleotide
cucguguccaaguccuugc

SEQ ID NO: 955889 - RNA, 19 nt, Artificial Sequence
  Description of Artificial Sequence: Synthetic oligonucleotide
augucuacgaggaagcaau

SEQ ID NO: 955890 - RNA, 19 nt, Artificial Sequence
  Description of Artificial Sequence: Synthetic oligonucleotide
aucaaaguagagcgugcgu

SEQ ID NO: 955891 - RNA, 19 nt, Artificial Sequence
  Description of Artificial Sequence: Synthetic oligonucleotide
cuaccucguguccaagucc

SEQ ID NO: 955892 - RNA, 19 nt, Artificial Sequence
  Description of Artificial Sequence: Synthetic oligonucleotide
acuuuguggguaaacaaaa

SEQ ID NO: 955893 - RNA, 19 nt, Artificial Sequence
  Description of Artificial Sequence: Synthetic oligonucleotide
uaugugauguggguuuuaa

SEQ ID NO: 955894 - RNA, 19 nt, Artificial Sequence
  Description of Artificial Sequence: Synthetic oligonucleotide
gggugucugaaauacuacc

SEQ ID NO: 955895 - RNA, 19 nt, Artificial Sequence
  Description of Artificial Sequence: Synthetic oligonucleotide
uagaagaucgcagcccacu

SEQ ID NO: 955896 - RNA, 19 nt, Artificial Sequence
  Description of Artificial Sequence: Synthetic oligonucleotide
gcaauguaccaugucaucc

SEQ ID NO: 955897 - RNA, 19 nt, Artificial Sequence
  Description of Artificial Sequence: Synthetic oligonucleotide
guguacgggguguaacucc

SEQ ID NO: 955898 - RNA, 19 nt, Artificial Sequence
  Description of Artificial Sequence: Synthetic oligonucleotide
uucucccgaagcuuaucca

SEQ ID NO: 955899 - RNA, 19 nt, Artificial Sequence
  Description of Artificial Sequence: Synthetic oligonucleotide
aucgcagcccacuccaacu

SEQ ID NO: 955900 - RNA, 19 nt, Artificial Sequence
  Description of Artificial Sequence: Synthetic oligonucleotide
ucaagacucuuaagucacu

SEQ ID NO: 955901 - RNA, 19 nt, Artificial Sequence
  Description of Artificial Sequence: Synthetic oligonucleotide
cucuuaagucacuggguuc

SEQ ID NO: 955902 - RNA, 19 nt, Artificial Sequence
  Description of Artificial Sequence: Synthetic oligonucleotide
caaaguagagcgugcguga

SEQ ID NO: 955903 - RNA, 19 nt, Artificial Sequence
  Description of Artificial Sequence: Synthetic oligonucleotide
cacggguccugccuguugg

SEQ ID NO: 955904 - RNA, 19 nt, Artificial Sequence
  Description of Artificial Sequence: Synthetic oligonucleotide
cauggcuuuacaccauguc

SEQ ID NO: 955905 - RNA, 19 nt, Artificial Sequence
  Description of Artificial Sequence: Synthetic oligonucleotide
cauaggucugcugcaaaug

SEQ ID NO: 955906 - RNA, 19 nt, Artificial Sequence
  Description of Artificial Sequence: Synthetic oligonucleotide
ugauuucacggguccugcc

SEQ ID NO: 955907 - RNA, 19 nt, Artificial Sequence
  Description of Artificial Sequence: Synthetic oligonucleotide
cugucuagguaguuccuuc

SEQ ID NO: 955908 - RNA, 19 nt, Artificial Sequence
  Description of Artificial Sequence: Synthetic oligonucleotide
gucucuaaacauagcuucc

SEQ ID NO: 955909 - RNA, 19 nt, Artificial Sequence
  Description of Artificial Sequence: Synthetic oligonucleotide
uuuuccauuugagcagccu

SEQ ID NO: 955910 - RNA, 19 nt, Artificial Sequence
  Description of Artificial Sequence: Synthetic oligonucleotide
agagcgugcgugacuagac

SEQ ID NO: 955911 - RNA, 19 nt, Artificial Sequence
  Description of Artificial Sequence: Synthetic oligonucleotide
uggcguuccuuuuccauuc

SEQ ID NO: 955912 - RNA, 19 nt, Artificial Sequence
  Description of Artificial Sequence: Synthetic oligonucleotide
uccuugauguugcuauuuu

SEQ ID NO: 955913 - RNA, 19 nt, Artificial Sequence
  Description of Artificial Sequence: Synthetic oligonucleotide
aguuccccgauccucuggu

SEQ ID NO: 955914 - RNA, 19 nt, Artificial Sequence
  Description of Artificial Sequence: Synthetic oligonucleotide
ugcaaaugucugauuugau

SEQ ID NO: 955915 - RNA, 19 nt, Artificial Sequence
  Description of Artificial Sequence: Synthetic oligonucleotide
acuucaacauccacgugga

SEQ ID NO: 955916 - RNA, 19 nt, Artificial Sequence
  Description of Artificial Sequence: Synthetic oligonucleotide
guaguuccuucugagcuug

SEQ ID NO: 955917 - RNA, 19 nt, Artificial Sequence
  Description of Artificial Sequence: Synthetic oligonucleotide
cugugaaaccugaacuuca

SEQ ID NO: 955918 - RNA, 19 nt, Artificial Sequence
  Description of Artificial Sequence: Synthetic oligonucleotide
ugcaagaagcacgugccuc

SEQ ID NO: 955919 - RNA, 19 nt, Artificial Sequence
  Description of Artificial Sequence: Synthetic oligonucleotide
ucagacgccaaugcugagu

SEQ ID NO: 955920 - RNA, 19 nt, Artificial Sequence
  Description of Artificial Sequence: Synthetic oligonucleotide
caacuacucuggcacacac

SEQ ID NO: 955921 - RNA, 19 nt, Artificial Sequence
  Description of Artificial Sequence: Synthetic oligonucleotide
gaggucaacuccaggacuc

SEQ ID NO: 955922 - RNA, 19 nt, Artificial Sequence
  Description of Artificial Sequence: Synthetic oligonucleotide
agucagacgccaaugcuga

SEQ ID NO: 955923 - RNA, 19 nt, Artificial Sequence
  Description of Artificial Sequence: Synthetic oligonucleotide
uggaugugacugucuaggu

SEQ ID NO: 955924 - RNA, 19 nt, Artificial Sequence
  Description of Artificial Sequence: Synthetic oligonucleotide
ucgcucaaucaaccugucc

SEQ ID NO: 955925 - RNA, 19 nt, Artificial Sequence
  Description of Artificial Sequence: Synthetic oligonucleotide
uccccugacauuucuguuu

SEQ ID NO: 955926 - RNA, 19 nt, Artificial Sequence
  Description of Artificial Sequence: Synthetic oligonucleotide
ugcaacuacucuggcacac

SEQ ID NO: 955927 - RNA, 19 nt, Artificial Sequence
  Description of Artificial Sequence: Synthetic oligonucleotide
uccaugccggagaaauacu

SEQ ID NO: 955928 - RNA, 19 nt, Artificial Sequence
  Description of Artificial Sequence: Synthetic oligonucleotide
aguagagcgugcgugacua

SEQ ID NO: 955929 - RNA, 19 nt, Artificial Sequence
  Description of Artificial Sequence: Synthetic oligonucleotide
ugcuuuguaguucguuauu

SEQ ID NO: 955930 - RNA, 19 nt, Artificial Sequence
  Description of Artificial Sequence: Synthetic oligonucleotide
ugacucuauaugguagggu

SEQ ID NO: 955931 - RNA, 19 nt, Artificial Sequence
  Description of Artificial Sequence: Synthetic oligonucleotide
ugucugauccgcucucgaa

SEQ ID NO: 955932 - RNA, 19 nt, Artificial Sequence
  Description of Artificial Sequence: Synthetic oligonucleotide
cuaggaaucuuucccucca

SEQ ID NO: 955933 - RNA, 19 nt, Artificial Sequence
  Description of Artificial Sequence: Synthetic oligonucleotide
gcucaaucaaccuguccag

SEQ ID NO: 955934 - RNA, 19 nt, Artificial Sequence
  Description of Artificial Sequence: Synthetic oligonucleotide
guaguucguuauucucucc

SEQ ID NO: 955935 - RNA, 19 nt, Artificial Sequence
  Description of Artificial Sequence: Synthetic oligonucleotide
gaucgcagcccacuccaac

SEQ ID NO: 955936 - RNA, 19 nt, Artificial Sequence
  Description of Artificial Sequence: Synthetic oligonucleotide
cugcaauauuaggagcugc

SEQ ID NO: 955937 - RNA, 19 nt, Artificial Sequence
  Description of Artificial Sequence: Synthetic oligonucleotide
gaaagcuauuggucucuuc

SEQ ID NO: 955938 - RNA, 19 nt, Artificial Sequence
  Description of Artificial Sequence: Synthetic oligonucleotide
uggcgaaucuucugccucu

SEQ ID NO: 955939 - RNA, 19 nt, Artificial Sequence
  Description of Artificial Sequence: Synthetic oligonucleotide
auauuaggagcugcuucug

SEQ ID NO: 955940 - RNA, 19 nt, Artificial Sequence
  Description of Artificial Sequence: Synthetic oligonucleotide
ucgaaggcuggcugaugcc

SEQ ID NO: 955941 - RNA, 19 nt, Artificial Sequence
  Description of Artificial Sequence: Synthetic oligonucleotide
gcugcaaaugucugauuug

SEQ ID NO: 955942 - RNA, 19 nt, Artificial Sequence
  Description of Artificial Sequence: Synthetic oligonucleotide
cugcaaaugucugauuuga

SEQ ID NO: 955943 - RNA, 19 nt, Artificial Sequence
  Description of Artificial Sequence: Synthetic oligonucleotide
gauuucacggguccugccu

SEQ ID NO: 955944 - RNA, 19 nt, Artificial Sequence
  Description of Artificial Sequence: Synthetic oligonucleotide
cguggaaaacaaaugauga

SEQ ID NO: 955945 - RNA, 19 nt, Artificial Sequence
  Description of Artificial Sequence: Synthetic oligonucleotide
aguucguuauucucuccuu

SEQ ID NO: 955946 - RNA, 19 nt, Artificial Sequence
  Description of Artificial Sequence: Synthetic oligonucleotide
uagagcgugcgugacuaga

SEQ ID NO: 955947 - RNA, 19 nt, Artificial Sequence
  Description of Artificial Sequence: Synthetic oligonucleotide
uggaugcuucauaggucug

SEQ ID NO: 955948 - RNA, 19 nt, Artificial Sequence
  Description of Artificial Sequence: Synthetic oligonucleotide
uaguccaaccugcuuugua

SEQ ID NO: 955949 - RNA, 19 nt, Artificial Sequence
  Description of Artificial Sequence: Synthetic oligonucleotide
gggguguaacuccuggaag

SEQ ID NO: 955950 - RNA, 19 nt, Artificial Sequence
  Description of Artificial Sequence: Synthetic oligonucleotide
ucguguccaaguccuugcu

SEQ ID NO: 955951 - RNA, 19 nt, Artificial Sequence
  Description of Artificial Sequence: Synthetic oligonucleotide
cacuccaacuucucugguc

SEQ ID NO: 955952 - RNA, 19 nt, Artificial Sequence
  Description of Artificial Sequence: Synthetic oligonucleotide
auggcguuccuuuuccauu

SEQ ID NO: 955953 - RNA, 19 nt, Artificial Sequence
  Description of Artificial Sequence: Synthetic oligonucleotide
gcuaggaaucuuucccucc

SEQ ID NO: 955954 - RNA, 19 nt, Artificial Sequence
  Description of Artificial Sequence: Synthetic oligonucleotide
cugaaauacuaccucgugu

SEQ ID NO: 955955 - RNA, 19 nt, Artificial Sequence
  Description of Artificial Sequence: Synthetic oligonucleotide
ugucuacgaggaagcaauc

SEQ ID NO: 955956 - RNA, 19 nt, Artificial Sequence
  Description of Artificial Sequence: Synthetic oligonucleotide
ugaagcuauccagggcuga

SEQ ID NO: 955957 - RNA, 19 nt, Artificial Sequence
  Description of Artificial Sequence: Synthetic oligonucleotide
ggaagcaaucaucacccuc

SEQ ID NO: 955958 - RNA, 19 nt, Artificial Sequence
  Description of Artificial Sequence: Synthetic oligonucleotide
ugacugugcuuggauguga

SEQ ID NO: 955959 - RNA, 19 nt, Artificial Sequence
  Description of Artificial Sequence: Synthetic oligonucleotide
guaccuguccuugucagaa

SEQ ID NO: 955960 - RNA, 19 nt, Artificial Sequence
  Description of Artificial Sequence: Synthetic oligonucleotide
agucagcguuuucuuugag

SEQ ID NO: 955961 - RNA, 19 nt, Artificial Sequence
  Description of Artificial Sequence: Synthetic oligonucleotide
uggaugggugucugaaaua

SEQ ID NO: 955962 - RNA, 19 nt, Artificial Sequence
  Description of Artificial Sequence: Synthetic oligonucleotide
uauaugugauguggguuuu

SEQ ID NO: 955963 - RNA, 19 nt, Artificial Sequence
  Description of Artificial Sequence: Synthetic oligonucleotide
uuucacggguccugccugu

SEQ ID NO: 955964 - RNA, 19 nt, Artificial Sequence
  Description of Artificial Sequence: Synthetic oligonucleotide
agcuuauccauggaugcuu

SEQ ID NO: 955965 - RNA, 19 nt, Artificial Sequence
  Description of Artificial Sequence: Synthetic oligonucleotide
acacaagucucuaaacaua

SEQ ID NO: 955966 - RNA, 19 nt, Artificial Sequence
  Description of Artificial Sequence: Synthetic oligonucleotide
ugugcuugcgcugggccuc

SEQ ID NO: 955967 - RNA, 19 nt, Artificial Sequence
  Description of Artificial Sequence: Synthetic oligonucleotide
gacuccucauccguuuaac

SEQ ID NO: 955968 - RNA, 19 nt, Artificial Sequence
  Description of Artificial Sequence: Synthetic oligonucleotide
ucuauaugguaggguugga

SEQ ID NO: 955969 - RNA, 19 nt, Artificial Sequence
  Description of Artificial Sequence: Synthetic oligonucleotide
ugagugccuaagucagcgu

SEQ ID NO: 955970 - RNA, 19 nt, Artificial Sequence
  Description of Artificial Sequence: Synthetic oligonucleotide
aggucaacuccaggacucg

SEQ ID NO: 955971 - RNA, 19 nt, Artificial Sequence
  Description of Artificial Sequence: Synthetic oligonucleotide
uucugucaaguaguccaac

SEQ ID NO: 955972 - RNA, 19 nt, Artificial Sequence
  Description of Artificial Sequence: Synthetic oligonucleotide
aucacagcuugaauaaaua

SEQ ID NO: 955973 - RNA, 19 nt, Artificial Sequence
  Description of Artificial Sequence: Synthetic oligonucleotide
agaaaccgacagguccugg

SEQ ID NO: 955974 - RNA, 19 nt, Artificial Sequence
  Description of Artificial Sequence: Synthetic oligonucleotide
uccgcgcugugcuugcgcu

SEQ ID NO: 955975 - RNA, 19 nt, Artificial Sequence
  Description of Artificial Sequence: Synthetic oligonucleotide
augugauguggguuuuaau

SEQ ID NO: 955976 - RNA, 19 nt, Artificial Sequence
  Description of Artificial Sequence: Synthetic oligonucleotide
ccacguggaaaacaaauga

SEQ ID NO: 955977 - RNA, 19 nt, Artificial Sequence
  Description of Artificial Sequence: Synthetic oligonucleotide
uucgcucaaucaaccuguc

SEQ ID NO: 955978 - RNA, 19 nt, Artificial Sequence
  Description of Artificial Sequence: Synthetic oligonucleotide
cugauccgcucucgaaggc

SEQ ID NO: 955979 - RNA, 19 nt, Artificial Sequence
  Description of Artificial Sequence: Synthetic oligonucleotide
ggcuuuacaccaugucuac

SEQ ID NO: 955980 - RNA, 19 nt, Artificial Sequence
  Description of Artificial Sequence: Synthetic oligonucleotide
gagaaaccgacagguccug

SEQ ID NO: 955981 - RNA, 19 nt, Artificial Sequence
  Description of Artificial Sequence: Synthetic oligonucleotide
uauuggccucuucgauggc

SEQ ID NO: 955982 - RNA, 19 nt, Artificial Sequence
  Description of Artificial Sequence: Synthetic oligonucleotide
augcaacuacucuggcaca

SEQ ID NO: 955983 - RNA, 19 nt, Artificial Sequence
  Description of Artificial Sequence: Synthetic oligonucleotide
gagaaauacugcugugaau

SEQ ID NO: 955984 - RNA, 19 nt, Artificial Sequence
  Description of Artificial Sequence: Synthetic oligonucleotide
cugucaaguaguccaaccu

SEQ ID NO: 955985 - RNA, 19 nt, Artificial Sequence
  Description of Artificial Sequence: Synthetic oligonucleotide
gucuacgaggaagcaauca

SEQ ID NO: 955986 - RNA, 19 nt, Artificial Sequence
  Description of Artificial Sequence: Synthetic oligonucleotide
agacuccucauccguuuaa

SEQ ID NO: 955987 - RNA, 19 nt, Artificial Sequence
  Description of Artificial Sequence: Synthetic oligonucleotide
gauggcguuccuuuuccau

SEQ ID NO: 955988 - RNA, 19 nt, Artificial Sequence
  Description of Artificial Sequence: Synthetic oligonucleotide
ccaugccggagaaauacug

SEQ ID NO: 955989 - RNA, 19 nt, Artificial Sequence
  Description of Artificial Sequence: Synthetic oligonucleotide
ggcuuucagaaagcuauug

SEQ ID NO: 955990 - RNA, 19 nt, Artificial Sequence
  Description of Artificial Sequence: Synthetic oligonucleotide
caggacucgcguguacggg

SEQ ID NO: 955991 - RNA, 19 nt, Artificial Sequence
  Description of Artificial Sequence: Synthetic oligonucleotide
uggaguugauggcguuccu

SEQ ID NO: 955992 - RNA, 19 nt, Artificial Sequence
  Description of Artificial Sequence: Synthetic oligonucleotide
ugcaaucuccccugacauu

SEQ ID NO: 955993 - RNA, 19 nt, Artificial Sequence
  Description of Artificial Sequence: Synthetic oligonucleotide
cuugagaugacuccaccuu

SEQ ID NO: 955994 - RNA, 19 nt, Artificial Sequence
  Description of Artificial Sequence: Synthetic oligonucleotide
caguuccccgauccucugg

SEQ ID NO: 955995 - RNA, 19 nt, Artificial Sequence
  Description of Artificial Sequence: Synthetic oligonucleotide
acggguccugccuguuggg

SEQ ID NO: 955996 - RNA, 19 nt, Artificial Sequence
  Description of Artificial Sequence: Synthetic oligonucleotide
gugaaucagaaugcaacua

SEQ ID NO: 955997 - RNA, 19 nt, Artificial Sequence
  Description of Artificial Sequence: Synthetic oligonucleotide
uucuccgcgcugugcuugc

SEQ ID NO: 955998 - RNA, 19 nt, Artificial Sequence
  Description of Artificial Sequence: Synthetic oligonucleotide
ggcaauguaccaugucauc

SEQ ID NO: 955999 - RNA, 19 nt, Artificial Sequence
  Description of Artificial Sequence: Synthetic oligonucleotide
acgggguguaacuccugga

SEQ ID NO: 956000 - RNA, 19 nt, Artificial Sequence
  Description of Artificial Sequence: Synthetic oligonucleotide
uuccaggaccuuucagcau

SEQ ID NO: 956001 - RNA, 19 nt, Artificial Sequence
  Description of Artificial Sequence: Synthetic oligonucleotide
cacacacccuccugaccag

SEQ ID NO: 956002 - RNA, 19 nt, Artificial Sequence
  Description of Artificial Sequence: Synthetic oligonucleotide
cacguggaaaacaaaugau

SEQ ID NO: 956003 - RNA, 19 nt, Artificial Sequence
  Description of Artificial Sequence: Synthetic oligonucleotide
acugucuagguaguuccuu

SEQ ID NO: 956004 - RNA, 19 nt, Artificial Sequence
  Description of Artificial Sequence: Synthetic oligonucleotide
cuucuccgcgcugugcuug

SEQ ID NO: 956005 - RNA, 19 nt, Artificial Sequence
  Description of Artificial Sequence: Synthetic oligonucleotide
caugucuacgaggaagcaa

SEQ ID NO: 956006 - RNA, 19 nt, Artificial Sequence
  Description of Artificial Sequence: Synthetic oligonucleotide
gagugccuaagucagcguu

SEQ ID NO: 956007 - RNA, 19 nt, Artificial Sequence
  Description of Artificial Sequence: Synthetic oligonucleotide
guagagcgugcgugacuag

SEQ ID NO: 956008 - RNA, 19 nt, Artificial Sequence
  Description of Artificial Sequence: Synthetic oligonucleotide
ggugucugauccgcucucg

SEQ ID NO: 956009 - RNA, 19 nt, Artificial Sequence
  Description of Artificial Sequence: Synthetic oligonucleotide
augguaggguuggaugggu

SEQ ID NO: 956010 - RNA, 19 nt, Artificial Sequence
  Description of Artificial Sequence: Synthetic oligonucleotide
auacuaccucguguccaag

SEQ ID NO: 956011 - RNA, 19 nt, Artificial Sequence
  Description of Artificial Sequence: Synthetic oligonucleotide
gucagacgccaaugcugag

SEQ ID NO: 956012 - RNA, 19 nt, Artificial Sequence
  Description of Artificial Sequence: Synthetic oligonucleotide
agugccuaagucagcguuu

SEQ ID NO: 956013 - RNA, 19 nt, Artificial Sequence
  Description of Artificial Sequence: Synthetic oligonucleotide
ggaugugacugucuaggua

SEQ ID NO: 956014 - RNA, 19 nt, Artificial Sequence
  Description of Artificial Sequence: Synthetic oligonucleotide
caacauccacguggaaaac

SEQ ID NO: 956015 - RNA, 19 nt, Artificial Sequence
  Description of Artificial Sequence: Synthetic oligonucleotide
gacucgcguguacggggug

SEQ ID NO: 956016 - RNA, 19 nt, Artificial Sequence
  Description of Artificial Sequence: Synthetic oligonucleotide
cuccagguucaaguuguuc

SEQ ID NO: 956017 - RNA, 19 nt, Artificial Sequence
  Description of Artificial Sequence: Synthetic oligonucleotide
uuccacaaccaggcacaca

SEQ ID NO: 956018 - RNA, 19 nt, Artificial Sequence
  Description of Artificial Sequence: Synthetic oligonucleotide
ugccuaagucagcguuuuc

SEQ ID NO: 956019 - RNA, 19 nt, Artificial Sequence
  Description of Artificial Sequence: Synthetic oligonucleotide
gugucugauccgcucucga

SEQ ID NO: 956020 - RNA, 19 nt, Artificial Sequence
  Description of Artificial Sequence: Synthetic oligonucleotide
guagaagaucgcagcccac

SEQ ID NO: 956021 - RNA, 19 nt, Artificial Sequence
  Description of Artificial Sequence: Synthetic oligonucleotide
guccaguuccccgauccuc

SEQ ID NO: 956022 - RNA, 19 nt, Artificial Sequence
  Description of Artificial Sequence: Synthetic oligonucleotide
ggguuccaggaccuuucag

SEQ ID NO: 956023 - RNA, 19 nt, Artificial Sequence
  Description of Artificial Sequence: Synthetic oligonucleotide
gcaucaugauuucacgggu

SEQ ID NO: 956024 - RNA, 19 nt, Artificial Sequence
  Description of Artificial Sequence: Synthetic oligonucleotide
cuccgcgcugugcuugcgc

SEQ ID NO: 956025 - RNA, 19 nt, Artificial Sequence
  Description of Artificial Sequence: Synthetic oligonucleotide
guccaaccugcuuuguagu

SEQ ID NO: 956026 - RNA, 19 nt, Artificial Sequence
  Description of Artificial Sequence: Synthetic oligonucleotide
cugcaaucuccccugacau

SEQ ID NO: 956027 - RNA, 19 nt, Artificial Sequence
  Description of Artificial Sequence: Synthetic oligonucleotide
acucgcguguacggggugu

SEQ ID NO: 956028 - RNA, 19 nt, Artificial Sequence
  Description of Artificial Sequence: Synthetic oligonucleotide
gccggagaaauacugcugu

SEQ ID NO: 956029 - RNA, 19 nt, Artificial Sequence
  Description of Artificial Sequence: Synthetic oligonucleotide
aucacccucucaagacucu

SEQ ID NO: 956030 - RNA, 19 nt, Artificial Sequence
  Description of Artificial Sequence: Synthetic oligonucleotide
cagcuugaauaaauauagu

SEQ ID NO: 956031 - RNA, 19 nt, Artificial Sequence
  Description of Artificial Sequence: Synthetic oligonucleotide
gagcgugcgugacuagacu

SEQ ID NO: 956032 - RNA, 19 nt, Artificial Sequence
  Description of Artificial Sequence: Synthetic oligonucleotide
cuuguucucuuagccucca

SEQ ID NO: 956033 - RNA, 19 nt, Artificial Sequence
  Description of Artificial Sequence: Synthetic oligonucleotide
gugaucucaagugguccaa

SEQ ID NO: 956034 - RNA, 19 nt, Artificial Sequence
  Description of Artificial Sequence: Synthetic oligonucleotide
cgugacuagacuccucauc

SEQ ID NO: 956035 - RNA, 19 nt, Artificial Sequence
  Description of Artificial Sequence: Synthetic oligonucleotide
ucacccucucaagacucuu

SEQ ID NO: 956036 - RNA, 19 nt, Artificial Sequence
  Description of Artificial Sequence: Synthetic oligonucleotide
auaugugauguggguuuua

SEQ ID NO: 956037 - RNA, 19 nt, Artificial Sequence
  Description of Artificial Sequence: Synthetic oligonucleotide
gcgugcgugacuagacucc

SEQ ID NO: 956038 - RNA, 19 nt, Artificial Sequence
  Description of Artificial Sequence: Synthetic oligonucleotide
cuagacuccucauccguuu

SEQ ID NO: 956039 - RNA, 19 nt, Artificial Sequence
  Description of Artificial Sequence: Synthetic oligonucleotide
ucuccgcgcugugcuugcg

SEQ ID NO: 956040 - RNA, 19 nt, Artificial Sequence
  Description of Artificial Sequence: Synthetic oligonucleotide
gcuggcaauguaccauguc

SEQ ID NO: 956041 - RNA, 19 nt, Artificial Sequence
  Description of Artificial Sequence: Synthetic oligonucleotide
gugcuuggaugugacuguc

SEQ ID NO: 956042 - RNA, 19 nt, Artificial Sequence
  Description of Artificial Sequence: Synthetic oligonucleotide
caaaaccuuuaugcuguaa

SEQ ID NO: 956043 - RNA, 19 nt, Artificial Sequence
  Description of Artificial Sequence: Synthetic oligonucleotide
cuauaugguaggguuggau

SEQ ID NO: 956044 - RNA, 19 nt, Artificial Sequence
  Description of Artificial Sequence: Synthetic oligonucleotide
ggagcaccuccuucuccgc

SEQ ID NO: 956045 - RNA, 19 nt, Artificial Sequence
  Description of Artificial Sequence: Synthetic oligonucleotide
ggucaacuccaggacucgc

SEQ ID NO: 956046 - RNA, 19 nt, Artificial Sequence
  Description of Artificial Sequence: Synthetic oligonucleotide
auacugcugugaauacuuu

SEQ ID NO: 956047 - RNA, 19 nt, Artificial Sequence
  Description of Artificial Sequence: Synthetic oligonucleotide
ccggagaaauacugcugug

SEQ ID NO: 956048 - RNA, 19 nt, Artificial Sequence
  Description of Artificial Sequence: Synthetic oligonucleotide
guuccccgauccucugguc

SEQ ID NO: 956049 - RNA, 19 nt, Artificial Sequence
  Description of Artificial Sequence: Synthetic oligonucleotide
caacagagucagacgccaa

SEQ ID NO: 956050 - RNA, 19 nt, Artificial Sequence
  Description of Artificial Sequence: Synthetic oligonucleotide
gcucaaggagcuggaguug

SEQ ID NO: 956051 - RNA, 19 nt, Artificial Sequence
  Description of Artificial Sequence: Synthetic oligonucleotide
caucugcaagaagcacgug

SEQ ID NO: 956052 - RNA, 19 nt, Artificial Sequence
  Description of Artificial Sequence: Synthetic oligonucleotide
caggugucugauccgcucu

SEQ ID NO: 956053 - RNA, 19 nt, Artificial Sequence
  Description of Artificial Sequence: Synthetic oligonucleotide
guacgggguguaacuccug

SEQ ID NO: 956054 - RNA, 19 nt, Artificial Sequence
  Description of Artificial Sequence: Synthetic oligonucleotide
gguaguuccuucugagcuu

SEQ ID NO: 956055 - RNA, 19 nt, Artificial Sequence
  Description of Artificial Sequence: Synthetic oligonucleotide
cacccucucaagacucuua

SEQ ID NO: 956056 - RNA, 19 nt, Artificial Sequence
  Description of Artificial Sequence: Synthetic oligonucleotide
cugugcuugcgcugggccu

SEQ ID NO: 956057 - RNA, 19 nt, Artificial Sequence
  Description of Artificial Sequence: Synthetic oligonucleotide
cucaaucaaccuguccagu

SEQ ID NO: 956058 - RNA, 19 nt, Artificial Sequence
  Description of Artificial Sequence: Synthetic oligonucleotide
caaguaguccaaccugcuu

SEQ ID NO: 956059 - RNA, 19 nt, Artificial Sequence
  Description of Artificial Sequence: Synthetic oligonucleotide
gcguguacgggguguaacu

SEQ ID NO: 956060 - RNA, 19 nt, Artificial Sequence
  Description of Artificial Sequence: Synthetic oligonucleotide
ccgcaucaccucagcauug

SEQ ID NO: 956061 - RNA, 19 nt, Artificial Sequence
  Description of Artificial Sequence: Synthetic oligonucleotide
gcaacuacucuggcacaca

SEQ ID NO: 956062 - RNA, 19 nt, Artificial Sequence
  Description of Artificial Sequence: Synthetic oligonucleotide
ucgcguguacgggguguaa

SEQ ID NO: 956063 - RNA, 19 nt, Artificial Sequence
  Description of Artificial Sequence: Synthetic oligonucleotide
ggguuuucugcaggccaac

SEQ ID NO: 956064 - RNA, 19 nt, Artificial Sequence
  Description of Artificial Sequence: Synthetic oligonucleotide
cucaaccaucugcuugacu

SEQ ID NO: 956065 - RNA, 19 nt, Artificial Sequence
  Description of Artificial Sequence: Synthetic oligonucleotide
cgcgcugugcuugcgcugg

SEQ ID NO: 956066 - RNA, 19 nt, Artificial Sequence
  Description of Artificial Sequence: Synthetic oligonucleotide
gcuggcgaaucuucugccu

SEQ ID NO: 956067 - RNA, 19 nt, Artificial Sequence
  Description of Artificial Sequence: Synthetic oligonucleotide
ggguccugccuguugggcu

SEQ ID NO: 956068 - RNA, 19 nt, Artificial Sequence
  Description of Artificial Sequence: Synthetic oligonucleotide
acgccaaugcugaguucau

SEQ ID NO: 956069 - RNA, 19 nt, Artificial Sequence
  Description of Artificial Sequence: Synthetic oligonucleotide
ggugcccaugcugcaugug

SEQ ID NO: 956070 - RNA, 19 nt, Artificial Sequence
  Description of Artificial Sequence: Synthetic oligonucleotide
ggcuggguuucugucaagu

SEQ ID NO: 956071 - RNA, 19 nt, Artificial Sequence
  Description of Artificial Sequence: Synthetic oligonucleotide
ggcgaaucuucugccucuc

SEQ ID NO: 956072 - RNA, 19 nt, Artificial Sequence
  Description of Artificial Sequence: Synthetic oligonucleotide
cguguacgggguguaacuc

SEQ ID NO: 956073 - RNA, 19 nt, Artificial Sequence
  Description of Artificial Sequence: Synthetic oligonucleotide
gugcgugacuagacuccuc

SEQ ID NO: 956074 - RNA, 19 nt, Artificial Sequence
  Description of Artificial Sequence: Synthetic oligonucleotide
acgugccucugagugccua

SEQ ID NO: 956075 - RNA, 19 nt, Artificial Sequence
  Description of Artificial Sequence: Synthetic oligonucleotide
cguuccuuuuccauucgcu

SEQ ID NO: 956076 - RNA, 19 nt, Artificial Sequence
  Description of Artificial Sequence: Synthetic oligonucleotide
guaguccaaccugcuuugu

SEQ ID NO: 956077 - RNA, 19 nt, Artificial Sequence
  Description of Artificial Sequence: Synthetic oligonucleotide
cgggguguaacuccuggaa

SEQ ID NO: 956078 - RNA, 19 nt, Artificial Sequence
  Description of Artificial Sequence: Synthetic oligonucleotide
ccauucgcucaaucaaccu

SEQ ID NO: 956079 - RNA, 19 nt, Artificial Sequence
  Description of Artificial Sequence: Synthetic oligonucleotide
cucgcguguacggggugua

SEQ ID NO: 956080 - RNA, 19 nt, Artificial Sequence
  Description of Artificial Sequence: Synthetic oligonucleotide
cgcguguacgggguguaac

SEQ ID NO: 956081 - RNA, 19 nt, Artificial Sequence
  Description of Artificial Sequence: Synthetic oligonucleotide
ccaugucuacgaggaagca

SEQ ID NO: 956082 - RNA, 19 nt, Artificial Sequence
  Description of Artificial Sequence: Synthetic oligonucleotide
ccucaaccaucugcuugac

SEQ ID NO: 956083 - RNA, 19 nt, Artificial Sequence
  Description of Artificial Sequence: Synthetic oligonucleotide
cccgcaucaccucagcauu

SEQ ID NO: 956084 - RNA, 19 nt, Artificial Sequence
  Description of Artificial Sequence: Synthetic oligonucleotide
ccgcgcugugcuugcgcug

SEQ ID NO: 956085 - RNA, 19 nt, Artificial Sequence
  Description of Artificial Sequence: Synthetic oligonucleotide
cuucagucuugggcugggu

SEQ ID NO: 956086 - RNA, 19 nt, Artificial Sequence
  Description of Artificial Sequence: Synthetic oligonucleotide
cggguccugccuguugggc

SEQ ID NO: 956087 - RNA, 19 nt, Artificial Sequence
  Description of Artificial Sequence: Synthetic oligonucleotide
gcgugacuagacuccucau

SEQ ID NO: 956088 - RNA, 19 nt, Artificial Sequence
  Description of Artificial Sequence: Synthetic oligonucleotide
cccgauccucuggucuuuc

SEQ ID NO: 956089 - RNA, 19 nt, Artificial Sequence
  Description of Artificial Sequence: Synthetic oligonucleotide
cacgugccucugagugccu

SEQ ID NO: 956090 - RNA, 19 nt, Artificial Sequence
  Description of Artificial Sequence: Synthetic oligonucleotide
cgugcgugacuagacuccu

SEQ ID NO: 956091 - RNA, 19 nt, Artificial Sequence
  Description of Artificial Sequence: Synthetic oligonucleotide
ccgcucucgaaggcuggcu

SEQ ID NO: 956092 - RNA, 19 nt, Artificial Sequence
  Description of Artificial Sequence: Synthetic oligonucleotide
ccccgauccucuggucuuu

SEQ ID NO: 956093 - RNA, 19 nt, Artificial Sequence
  Description of Artificial Sequence: Synthetic oligonucleotide
cuuuacaucaauaagcucc

SEQ ID NO: 956094 - RNA, 19 nt, Artificial Sequence
  Description of Artificial Sequence: Synthetic oligonucleotide
aaggaaaacaauuagcgcu

SEQ ID NO: 956095 - RNA, 19 nt, Artificial Sequence
  Description of Artificial Sequence: Synthetic oligonucleotide
aaguauaauugauaguccg

SEQ ID NO: 956096 - RNA, 19 nt, Artificial Sequence
  Description of Artificial Sequence: Synthetic oligonucleotide
aaacauaagucccuaagag

SEQ ID NO: 956097 - RNA, 19 nt, Artificial Sequence
  Description of Artificial Sequence: Synthetic oligonucleotide
uaugaugcaggcaacauag

SEQ ID NO: 956098 - RNA, 19 nt, Artificial Sequence
  Description of Artificial Sequence: Synthetic oligonucleotide
uauuauaccaguaagcaaa

SEQ ID NO: 956099 - RNA, 19 nt, Artificial Sequence
  Description of Artificial Sequence: Synthetic oligonucleotide
uuaaguaagacucuucugu

SEQ ID NO: 956100 - RNA, 19 nt, Artificial Sequence
  Description of Artificial Sequence: Synthetic oligonucleotide
agcaauagcauuuaggaug

SEQ ID NO: 956101 - RNA, 19 nt, Artificial Sequence
  Description of Artificial Sequence: Synthetic oligonucleotide
uauuugauuagugucaagg

SEQ ID NO: 956102 - RNA, 19 nt, Artificial Sequence
  Description of Artificial Sequence: Synthetic oligonucleotide
uguaguguaacuaacuccu

SEQ ID NO: 956103 - RNA, 19 nt, Artificial Sequence
  Description of Artificial Sequence: Synthetic oligonucleotide
auuugauuagugucaaggc

SEQ ID NO: 956104 - RNA, 19 nt, Artificial Sequence
  Description of Artificial Sequence: Synthetic oligonucleotide
guaacuaacuccuagagca

SEQ ID NO: 956105 - RNA, 19 nt, Artificial Sequence
  Description of Artificial Sequence: Synthetic oligonucleotide
uuuaggaugacuguaaaca

SEQ ID NO: 956106 - RNA, 19 nt, Artificial Sequence
  Description of Artificial Sequence: Synthetic oligonucleotide
aaaguuauuucuccaucac

SEQ ID NO: 956107 - RNA, 19 nt, Artificial Sequence
  Description of Artificial Sequence: Synthetic oligonucleotide
uguacacuaguguagaaag

SEQ ID NO: 956108 - RNA, 19 nt, Artificial Sequence
  Description of Artificial Sequence: Synthetic oligonucleotide
uccuuaugcauccauaucc

SEQ ID NO: 956109 - RNA, 19 nt, Artificial Sequence
  Description of Artificial Sequence: Synthetic oligonucleotide
uuuuauguuaaguccacag

SEQ ID NO: 956110 - RNA, 19 nt, Artificial Sequence
  Description of Artificial Sequence: Synthetic oligonucleotide
aagaugucaaauuauuaca

SEQ ID NO: 956111 - RNA, 19 nt, Artificial Sequence
  Description of Artificial Sequence: Synthetic oligonucleotide
uauuauguuaagaucgccc

SEQ ID NO: 956112 - RNA, 19 nt, Artificial Sequence
  Description of Artificial Sequence: Synthetic oligonucleotide
aaucuacacacuuuaccac

SEQ ID NO: 956113 - RNA, 19 nt, Artificial Sequence
  Description of Artificial Sequence: Synthetic oligonucleotide
ugaaacaauaauuacuccu

SEQ ID NO: 956114 - RNA, 19 nt, Artificial Sequence
  Description of Artificial Sequence: Synthetic oligonucleotide
cacuuuaccacaacgaccg

SEQ ID NO: 956115 - RNA, 19 nt, Artificial Sequence
  Description of Artificial Sequence: Synthetic oligonucleotide
aaacaauuagcgcuuaagu

SEQ ID NO: 956116 - RNA, 19 nt, Artificial Sequence
  Description of Artificial Sequence: Synthetic oligonucleotide
uauaccaguaagcaaaggu

SEQ ID NO: 956117 - RNA, 19 nt, Artificial Sequence
  Description of Artificial Sequence: Synthetic oligonucleotide
aauaagcuccacucucugc

SEQ ID NO: 956118 - RNA, 19 nt, Artificial Sequence
  Description of Artificial Sequence: Synthetic oligonucleotide
agaacuuuacaucaauaag

SEQ ID NO: 956119 - RNA, 19 nt, Artificial Sequence
  Description of Artificial Sequence: Synthetic oligonucleotide
ucuguguaagacaucuugg

SEQ ID NO: 956120 - RNA, 19 nt, Artificial Sequence
  Description of Artificial Sequence: Synthetic oligonucleotide
caagaugucaaauuauuac

SEQ ID NO: 956121 - RNA, 19 nt, Artificial Sequence
  Description of Artificial Sequence: Synthetic oligonucleotide
guaacagcaagccugacug

SEQ ID NO: 956122 - RNA, 19 nt, Artificial Sequence
  Description of Artificial Sequence: Synthetic oligonucleotide
aaauuccccaccuaggaga

SEQ ID NO: 956123 - RNA, 19 nt, Artificial Sequence
  Description of Artificial Sequence: Synthetic oligonucleotide
uaugcauacuccuauguca

SEQ ID NO: 956124 - RNA, 19 nt, Artificial Sequence
  Description of Artificial Sequence: Synthetic oligonucleotide
guggaaguauaauugauag

SEQ ID NO: 956125 - RNA, 19 nt, Artificial Sequence
  Description of Artificial Sequence: Synthetic oligonucleotide
acaauuagcgcuuaaguaa

SEQ ID NO: 956126 - RNA, 19 nt, Artificial Sequence
  Description of Artificial Sequence: Synthetic oligonucleotide
aggaaaguacuccugagag

SEQ ID NO: 956127 - RNA, 19 nt, Artificial Sequence
  Description of Artificial Sequence: Synthetic oligonucleotide
aaaacaauuagcgcuuaag

SEQ ID NO: 956128 - RNA, 19 nt, Artificial Sequence
  Description of Artificial Sequence: Synthetic oligonucleotide
agacuuaaagggcuuuucc

SEQ ID NO: 956129 - RNA, 19 nt, Artificial Sequence
  Description of Artificial Sequence: Synthetic oligonucleotide
aguguaguguaacuaacuc

SEQ ID NO: 956130 - RNA, 19 nt, Artificial Sequence
  Description of Artificial Sequence: Synthetic oligonucleotide
gaaucuacacacuuuacca

SEQ ID NO: 956131 - RNA, 19 nt, Artificial Sequence
  Description of Artificial Sequence: Synthetic oligonucleotide
uggacauucacuguaacgc

SEQ ID NO: 956132 - RNA, 19 nt, Artificial Sequence
  Description of Artificial Sequence: Synthetic oligonucleotide
ucugcguugauuauaaaua

SEQ ID NO: 956133 - RNA, 19 nt, Artificial Sequence
  Description of Artificial Sequence: Synthetic oligonucleotide
uccucuauguauuugauua

SEQ ID NO: 956134 - RNA, 19 nt, Artificial Sequence
  Description of Artificial Sequence: Synthetic oligonucleotide
ugugccuuacucuaggacc

SEQ ID NO: 956135 - RNA, 19 nt, Artificial Sequence
  Description of Artificial Sequence: Synthetic oligonucleotide
auaauugauaguccguaag

SEQ ID NO: 956136 - RNA, 19 nt, Artificial Sequence
  Description of Artificial Sequence: Synthetic oligonucleotide
aucaauaagcuccacucuc

SEQ ID NO: 956137 - RNA, 19 nt, Artificial Sequence
  Description of Artificial Sequence: Synthetic oligonucleotide
aacauaagucccuaagagu

SEQ ID NO: 956138 - RNA, 19 nt, Artificial Sequence
  Description of Artificial Sequence: Synthetic oligonucleotide
aacaucacguucuuguaca

SEQ ID NO: 956139 - RNA, 19 nt, Artificial Sequence
  Description of Artificial Sequence: Synthetic oligonucleotide
aaaauggacauucacugua

SEQ ID NO: 956140 - RNA, 19 nt, Artificial Sequence
  Description of Artificial Sequence: Synthetic oligonucleotide
ucuacuaaucaguauuuca

SEQ ID NO: 956141 - RNA, 19 nt, Artificial Sequence
  Description of Artificial Sequence: Synthetic oligonucleotide
aacaauuagcgcuuaagua

SEQ ID NO: 956142 - RNA, 19 nt, Artificial Sequence
  Description of Artificial Sequence: Synthetic oligonucleotide
uuaugucaaguuuauuucc

SEQ ID NO: 956143 - RNA, 19 nt, Artificial Sequence
  Description of Artificial Sequence: Synthetic oligonucleotide
cuacuaaucaguauuucac

SEQ ID NO: 956144 - RNA, 19 nt, Artificial Sequence
  Description of Artificial Sequence: Synthetic oligonucleotide
aaaauuccccaccuaggag

SEQ ID NO: 956145 - RNA, 19 nt, Artificial Sequence
  Description of Artificial Sequence: Synthetic oligonucleotide
uguaacuaacuccuagagc

SEQ ID NO: 956146 - RNA, 19 nt, Artificial Sequence
  Description of Artificial Sequence: Synthetic oligonucleotide
uguacaacuuacauucucu

SEQ ID NO: 956147 - RNA, 19 nt, Artificial Sequence
  Description of Artificial Sequence: Synthetic oligonucleotide
auuuaggaugacuguaaac

SEQ ID NO: 956148 - RNA, 19 nt, Artificial Sequence
  Description of Artificial Sequence: Synthetic oligonucleotide
auuauuauguuaagaucgc

SEQ ID NO: 956149 - RNA, 19 nt, Artificial Sequence
  Description of Artificial Sequence: Synthetic oligonucleotide
aauggacauucacuguaac

SEQ ID NO: 956150 - RNA, 19 nt, Artificial Sequence
  Description of Artificial Sequence: Synthetic oligonucleotide
ugaugagauguacacagca

SEQ ID NO: 956151 - RNA, 19 nt, Artificial Sequence
  Description of Artificial Sequence: Synthetic oligonucleotide
aauugauaguccguaagug

SEQ ID NO: 956152 - RNA, 19 nt, Artificial Sequence
  Description of Artificial Sequence: Synthetic oligonucleotide
uccaucgaagauuuaauga

SEQ ID NO: 956153 - RNA, 19 nt, Artificial Sequence
  Description of Artificial Sequence: Synthetic oligonucleotide
uccauuuagagugugguug

SEQ ID NO: 956154 - RNA, 19 nt, Artificial Sequence
  Description of Artificial Sequence: Synthetic oligonucleotide
uaauugauaguccguaagu

SEQ ID NO: 956155 - RNA, 19 nt, Artificial Sequence
  Description of Artificial Sequence: Synthetic oligonucleotide
uaaaagguggaaucuacac

SEQ ID NO: 956156 - RNA, 19 nt, Artificial Sequence
  Description of Artificial Sequence: Synthetic oligonucleotide
augucaaauuauuacagga

SEQ ID NO: 956157 - RNA, 19 nt, Artificial Sequence
  Description of Artificial Sequence: Synthetic oligonucleotide
aagaguacaucuauucuag

SEQ ID NO: 956158 - RNA, 19 nt, Artificial Sequence
  Description of Artificial Sequence: Synthetic oligonucleotide
uagcgcuuaaguaagacuc

SEQ ID NO: 956159 - RNA, 19 nt, Artificial Sequence
  Description of Artificial Sequence: Synthetic oligonucleotide
agaucuaucuucagguucc

SEQ ID NO: 956160 - RNA, 19 nt, Artificial Sequence
  Description of Artificial Sequence: Synthetic oligonucleotide
ugcauuucgaagaauuuuc

SEQ ID NO: 956161 - RNA, 19 nt, Artificial Sequence
  Description of Artificial Sequence: Synthetic oligonucleotide
aggaccgagaauauuauac

SEQ ID NO: 956162 - RNA, 19 nt, Artificial Sequence
  Description of Artificial Sequence: Synthetic oligonucleotide
ugucaaauuauuacaggaa

SEQ ID NO: 956163 - RNA, 19 nt, Artificial Sequence
  Description of Artificial Sequence: Synthetic oligonucleotide
uuuucagauuaagacaaag

SEQ ID NO: 956164 - RNA, 19 nt, Artificial Sequence
  Description of Artificial Sequence: Synthetic oligonucleotide
acuuauuuguguuuaugca

SEQ ID NO: 956165 - RNA, 19 nt, Artificial Sequence
  Description of Artificial Sequence: Synthetic oligonucleotide
uucucuauaacaccacagu

SEQ ID NO: 956166 - RNA, 19 nt, Artificial Sequence
  Description of Artificial Sequence: Synthetic oligonucleotide
guuaugucaaguuuauuuc

SEQ ID NO: 956167 - RNA, 19 nt, Artificial Sequence
  Description of Artificial Sequence: Synthetic oligonucleotide
uaguguaacuaacuccuag

SEQ ID NO: 956168 - RNA, 19 nt, Artificial Sequence
  Description of Artificial Sequence: Synthetic oligonucleotide
uuuaccacaacgaccggcu

SEQ ID NO: 956169 - RNA, 19 nt, Artificial Sequence
  Description of Artificial Sequence: Synthetic oligonucleotide
aguuauuucuccaucacug

SEQ ID NO: 956170 - RNA, 19 nt, Artificial Sequence
  Description of Artificial Sequence: Synthetic oligonucleotide
ggaaguauaauugauaguc

SEQ ID NO: 956171 - RNA, 19 nt, Artificial Sequence
  Description of Artificial Sequence: Synthetic oligonucleotide
gacaucuuggaaaauauuc

SEQ ID NO: 956172 - RNA, 19 nt, Artificial Sequence
  Description of Artificial Sequence: Synthetic oligonucleotide
uaagaguacaucuauucua

SEQ ID NO: 956173 - RNA, 19 nt, Artificial Sequence
  Description of Artificial Sequence: Synthetic oligonucleotide
cuuaauuucucagcuagag

SEQ ID NO: 956174 - RNA, 19 nt, Artificial Sequence
  Description of Artificial Sequence: Synthetic oligonucleotide
aacgaguaggaacugugca

SEQ ID NO: 956175 - RNA, 19 nt, Artificial Sequence
  Description of Artificial Sequence: Synthetic oligonucleotide
uugauuagugucaaggcuu

SEQ ID NO: 956176 - RNA, 19 nt, Artificial Sequence
  Description of Artificial Sequence: Synthetic oligonucleotide
aguacaucuauucuaggaa

SEQ ID NO: 956177 - RNA, 19 nt, Artificial Sequence
  Description of Artificial Sequence: Synthetic oligonucleotide
aguucauaagcuauccugg

SEQ ID NO: 956178 - RNA, 19 nt, Artificial Sequence
  Description of Artificial Sequence: Synthetic oligonucleotide
aaggacauauaacaguguu

SEQ ID NO: 956179 - RNA, 19 nt, Artificial Sequence
  Description of Artificial Sequence: Synthetic oligonucleotide
aaaacagaccacugaauuu

SEQ ID NO: 956180 - RNA, 19 nt, Artificial Sequence
  Description of Artificial Sequence: Synthetic oligonucleotide
auggacauucacuguaacg

SEQ ID NO: 956181 - RNA, 19 nt, Artificial Sequence
  Description of Artificial Sequence: Synthetic oligonucleotide
caauuagcgcuuaaguaag

SEQ ID NO: 956182 - RNA, 19 nt, Artificial Sequence
  Description of Artificial Sequence: Synthetic oligonucleotide
aauggaagaccugauccag

SEQ ID NO: 956183 - RNA, 19 nt, Artificial Sequence
  Description of Artificial Sequence: Synthetic oligonucleotide
uuaugcauccauauccuuc

SEQ ID NO: 956184 - RNA, 19 nt, Artificial Sequence
  Description of Artificial Sequence: Synthetic oligonucleotide
aacgcugcaccugacacuc

SEQ ID NO: 956185 - RNA, 19 nt, Artificial Sequence
  Description of Artificial Sequence: Synthetic oligonucleotide
auaaauauauucucccuuu

SEQ ID NO: 956186 - RNA, 19 nt, Artificial Sequence
  Description of Artificial Sequence: Synthetic oligonucleotide
cuuuggagcccaaaugugc

SEQ ID NO: 956187 - RNA, 19 nt, Artificial Sequence
  Description of Artificial Sequence: Synthetic oligonucleotide
uacuaaucaguauuucaca

SEQ ID NO: 956188 - RNA, 19 nt, Artificial Sequence
  Description of Artificial Sequence: Synthetic oligonucleotide
uuagugucaaggcuuuucu

SEQ ID NO: 956189 - RNA, 19 nt, Artificial Sequence
  Description of Artificial Sequence: Synthetic oligonucleotide
uucuuauuccuuuuguaaa

SEQ ID NO: 956190 - RNA, 19 nt, Artificial Sequence
  Description of Artificial Sequence: Synthetic oligonucleotide
ucauuagaacaucacguuc

SEQ ID NO: 956191 - RNA, 19 nt, Artificial Sequence
  Description of Artificial Sequence: Synthetic oligonucleotide
auaauagcaccuaagaaaa

SEQ ID NO: 956192 - RNA, 19 nt, Artificial Sequence
  Description of Artificial Sequence: Synthetic oligonucleotide
aucgaagauuuaaugaaac

SEQ ID NO: 956193 - RNA, 19 nt, Artificial Sequence
  Description of Artificial Sequence: Synthetic oligonucleotide
ucuuauuccuuuuguaaaa

SEQ ID NO: 956194 - RNA, 19 nt, Artificial Sequence
  Description of Artificial Sequence: Synthetic oligonucleotide
guucuuaugaugcaggcaa

SEQ ID NO: 956195 - RNA, 19 nt, Artificial Sequence
  Description of Artificial Sequence: Synthetic oligonucleotide
uguaacagcaagccugacu

SEQ ID NO: 956196 - RNA, 19 nt, Artificial Sequence
  Description of Artificial Sequence: Synthetic oligonucleotide
acuaaaagguggaaucuac

SEQ ID NO: 956197 - RNA, 19 nt, Artificial Sequence
  Description of Artificial Sequence: Synthetic oligonucleotide
acaacuuacauucucuaua

SEQ ID NO: 956198 - RNA, 19 nt, Artificial Sequence
  Description of Artificial Sequence: Synthetic oligonucleotide
agucccuaagaguacaucu

SEQ ID NO: 956199 - RNA, 19 nt, Artificial Sequence
  Description of Artificial Sequence: Synthetic oligonucleotide
aagaguguaggccuggcuu

SEQ ID NO: 956200 - RNA, 19 nt, Artificial Sequence
  Description of Artificial Sequence: Synthetic oligonucleotide
uacaucaauaagcuccacu

SEQ ID NO: 956201 - RNA, 19 nt, Artificial Sequence
  Description of Artificial Sequence: Synthetic oligonucleotide
acacuuuaccacaacgacc

SEQ ID NO: 956202 - RNA, 19 nt, Artificial Sequence
  Description of Artificial Sequence: Synthetic oligonucleotide
gaaguauaauugauagucc

SEQ ID NO: 956203 - RNA, 19 nt, Artificial Sequence
  Description of Artificial Sequence: Synthetic oligonucleotide
ucaauaagcuccacucucu

SEQ ID NO: 956204 - RNA, 19 nt, Artificial Sequence
  Description of Artificial Sequence: Synthetic oligonucleotide
uauguuaagaucgcccucu

SEQ ID NO: 956205 - RNA, 19 nt, Artificial Sequence
  Description of Artificial Sequence: Synthetic oligonucleotide
ucgaagauuuaaugaaaca

SEQ ID NO: 956206 - RNA, 19 nt, Artificial Sequence
  Description of Artificial Sequence: Synthetic oligonucleotide
uuccaucgaagauuuaaug

SEQ ID NO: 956207 - RNA, 19 nt, Artificial Sequence
  Description of Artificial Sequence: Synthetic oligonucleotide
guguaguguaacuaacucc

SEQ ID NO: 956208 - RNA, 19 nt, Artificial Sequence
  Description of Artificial Sequence: Synthetic oligonucleotide
gaugaaagaguguaggccu

SEQ ID NO: 956209 - RNA, 19 nt, Artificial Sequence
  Description of Artificial Sequence: Synthetic oligonucleotide
aguaucucuguguaagaca

SEQ ID NO: 956210 - RNA, 19 nt, Artificial Sequence
  Description of Artificial Sequence: Synthetic oligonucleotide
guguaacuaacuccuagag

SEQ ID NO: 956211 - RNA, 19 nt, Artificial Sequence
  Description of Artificial Sequence: Synthetic oligonucleotide
acaaguguaguguaacuaa

SEQ ID NO: 956212 - RNA, 19 nt, Artificial Sequence
  Description of Artificial Sequence: Synthetic oligonucleotide
uguguguuaaucugucaac

SEQ ID NO: 956213 - RNA, 19 nt, Artificial Sequence
  Description of Artificial Sequence: Synthetic oligonucleotide
gaguacaucuauucuagga

SEQ ID NO: 956214 - RNA, 19 nt, Artificial Sequence
  Description of Artificial Sequence: Synthetic oligonucleotide
gaugacuguaaacauaagu

SEQ ID NO: 956215 - RNA, 19 nt, Artificial Sequence
  Description of Artificial Sequence: Synthetic oligonucleotide
ugccauaauagcaccuaag

SEQ ID NO: 956216 - RNA, 19 nt, Artificial Sequence
  Description of Artificial Sequence: Synthetic oligonucleotide
uguguuaaucugucaacac

SEQ ID NO: 956217 - RNA, 19 nt, Artificial Sequence
  Description of Artificial Sequence: Synthetic oligonucleotide
cuuaaguaagacucuucug

SEQ ID NO: 956218 - RNA, 19 nt, Artificial Sequence
  Description of Artificial Sequence: Synthetic oligonucleotide
ugcguugauuauaaauaug

SEQ ID NO: 956219 - RNA, 19 nt, Artificial Sequence
  Description of Artificial Sequence: Synthetic oligonucleotide
auuagcgcuuaaguaagac

SEQ ID NO: 956220 - RNA, 19 nt, Artificial Sequence
  Description of Artificial Sequence: Synthetic oligonucleotide
ucaacacugcucuaucaca

SEQ ID NO: 956221 - RNA, 19 nt, Artificial Sequence
  Description of Artificial Sequence: Synthetic oligonucleotide
uuaagaucgcccucugcug

SEQ ID NO: 956222 - RNA, 19 nt, Artificial Sequence
  Description of Artificial Sequence: Synthetic oligonucleotide
uacaucuauucuaggaaaa

SEQ ID NO: 956223 - RNA, 19 nt, Artificial Sequence
  Description of Artificial Sequence: Synthetic oligonucleotide
caacacugcucuaucacag

SEQ ID NO: 956224 - RNA, 19 nt, Artificial Sequence
  Description of Artificial Sequence: Synthetic oligonucleotide
aacagaccacugaauuugc

SEQ ID NO: 956225 - RNA, 19 nt, Artificial Sequence
  Description of Artificial Sequence: Synthetic oligonucleotide
aucugcguugauuauaaau

SEQ ID NO: 956226 - RNA, 19 nt, Artificial Sequence
  Description of Artificial Sequence: Synthetic oligonucleotide
uuagcaguuaugucaaguu

SEQ ID NO: 956227 - RNA, 19 nt, Artificial Sequence
  Description of Artificial Sequence: Synthetic oligonucleotide
cacacuuuaccacaacgac

SEQ ID NO: 956228 - RNA, 19 nt, Artificial Sequence
  Description of Artificial Sequence: Synthetic oligonucleotide
agagccauuauuauguuaa

SEQ ID NO: 956229 - RNA, 19 nt, Artificial Sequence
  Description of Artificial Sequence: Synthetic oligonucleotide
uuauuauguuaagaucgcc

SEQ ID NO: 956230 - RNA, 19 nt, Artificial Sequence
  Description of Artificial Sequence: Synthetic oligonucleotide
aaauuugauggggugggga

SEQ ID NO: 956231 - RNA, 19 nt, Artificial Sequence
  Description of Artificial Sequence: Synthetic oligonucleotide
agcuuuaagugugggacac

SEQ ID NO: 956232 - RNA, 19 nt, Artificial Sequence
  Description of Artificial Sequence: Synthetic oligonucleotide
ugcaaggaaaguacuccug

SEQ ID NO: 956233 - RNA, 19 nt, Artificial Sequence
  Description of Artificial Sequence: Synthetic oligonucleotide
ucuuguacacuaguguaga

SEQ ID NO: 956234 - RNA, 19 nt, Artificial Sequence
  Description of Artificial Sequence: Synthetic oligonucleotide
cuuuuccgaauaaugugug

SEQ ID NO: 956235 - RNA, 19 nt, Artificial Sequence
  Description of Artificial Sequence: Synthetic oligonucleotide
uuauuuccuaucauucaua

SEQ ID NO: 956236 - RNA, 19 nt, Artificial Sequence
  Description of Artificial Sequence: Synthetic oligonucleotide
uccugugacaaguguagug

SEQ ID NO: 956237 - RNA, 19 nt, Artificial Sequence
  Description of Artificial Sequence: Synthetic oligonucleotide
uaagaucgcccucugcugu

SEQ ID NO: 956238 - RNA, 19 nt, Artificial Sequence
  Description of Artificial Sequence: Synthetic oligonucleotide
ugucuguggaaguauaauu

SEQ ID NO: 956239 - RNA, 19 nt, Artificial Sequence
  Description of Artificial Sequence: Synthetic oligonucleotide
uccguaagugcuucggucu

SEQ ID NO: 956240 - RNA, 19 nt, Artificial Sequence
  Description of Artificial Sequence: Synthetic oligonucleotide
gaccgagaauauuauacca

SEQ ID NO: 956241 - RNA, 19 nt, Artificial Sequence
  Description of Artificial Sequence: Synthetic oligonucleotide
aaagaguguaggccuggcu

SEQ ID NO: 956242 - RNA, 19 nt, Artificial Sequence
  Description of Artificial Sequence: Synthetic oligonucleotide
guguaaagcuuuaagugug

SEQ ID NO: 956243 - RNA, 19 nt, Artificial Sequence
  Description of Artificial Sequence: Synthetic oligonucleotide
cauacuccuaugucaacac

SEQ ID NO: 956244 - RNA, 19 nt, Artificial Sequence
  Description of Artificial Sequence: Synthetic oligonucleotide
uucauaagcuauccugguc

SEQ ID NO: 956245 - RNA, 19 nt, Artificial Sequence
  Description of Artificial Sequence: Synthetic oligonucleotide
caaguguaguguaacuaac

SEQ ID NO: 956246 - RNA, 19 nt, Artificial Sequence
  Description of Artificial Sequence: Synthetic oligonucleotide
ugggacacuaaaaggugga

SEQ ID NO: 956247 - RNA, 19 nt, Artificial Sequence
  Description of Artificial Sequence: Synthetic oligonucleotide
agugcuucggucuccauuu

SEQ ID NO: 956248 - RNA, 19 nt, Artificial Sequence
  Description of Artificial Sequence: Synthetic oligonucleotide
ucguccucuauguauuuga

SEQ ID NO: 956249 - RNA, 19 nt, Artificial Sequence
  Description of Artificial Sequence: Synthetic oligonucleotide
ugcguaucguccucuaugu

SEQ ID NO: 956250 - RNA, 19 nt, Artificial Sequence
  Description of Artificial Sequence: Synthetic oligonucleotide
agaguacaucuauucuagg

SEQ ID NO: 956251 - RNA, 19 nt, Artificial Sequence
  Description of Artificial Sequence: Synthetic oligonucleotide
aaugugccuuacucuagga

SEQ ID NO: 956252 - RNA, 19 nt, Artificial Sequence
  Description of Artificial Sequence: Synthetic oligonucleotide
agcuacuguaacagcaagc

SEQ ID NO: 956253 - RNA, 19 nt, Artificial Sequence
  Description of Artificial Sequence: Synthetic oligonucleotide
auucucuauaacaccacag

SEQ ID NO: 956254 - RNA, 19 nt, Artificial Sequence
  Description of Artificial Sequence: Synthetic oligonucleotide
augucaacacugcucuauc

SEQ ID NO: 956255 - RNA, 19 nt, Artificial Sequence
  Description of Artificial Sequence: Synthetic oligonucleotide
guaacgcugcaccugacac

SEQ ID NO: 956256 - RNA, 19 nt, Artificial Sequence
  Description of Artificial Sequence: Synthetic oligonucleotide
uggggucaaauuucucccg

SEQ ID NO: 956257 - RNA, 19 nt, Artificial Sequence
  Description of Artificial Sequence: Synthetic oligonucleotide
guuaagaucgcccucugcu

SEQ ID NO: 956258 - RNA, 19 nt, Artificial Sequence
  Description of Artificial Sequence: Synthetic oligonucleotide
uggaaguauaauugauagu

SEQ ID NO: 956259 - RNA, 19 nt, Artificial Sequence
  Description of Artificial Sequence: Synthetic oligonucleotide
cauguaucugcguugauua

SEQ ID NO: 956260 - RNA, 19 nt, Artificial Sequence
  Description of Artificial Sequence: Synthetic oligonucleotide
uggaguucauaagcuaucc

SEQ ID NO: 956261 - RNA, 19 nt, Artificial Sequence
  Description of Artificial Sequence: Synthetic oligonucleotide
aucucauguaucugcguug

SEQ ID NO: 956262 - RNA, 19 nt, Artificial Sequence
  Description of Artificial Sequence: Synthetic oligonucleotide
acuguaacgcugcaccuga

SEQ ID NO: 956263 - RNA, 19 nt, Artificial Sequence
  Description of Artificial Sequence: Synthetic oligonucleotide
aaguguaguguaacuaacu

SEQ ID NO: 956264 - RNA, 19 nt, Artificial Sequence
  Description of Artificial Sequence: Synthetic oligonucleotide
caucuauucuaggaaaaug

SEQ ID NO: 956265 - RNA, 19 nt, Artificial Sequence
  Description of Artificial Sequence: Synthetic oligonucleotide
uguuaagaucgcccucugc

SEQ ID NO: 956266 - RNA, 19 nt, Artificial Sequence
  Description of Artificial Sequence: Synthetic oligonucleotide
uaugucaacacugcucuau

SEQ ID NO: 956267 - RNA, 19 nt, Artificial Sequence
  Description of Artificial Sequence: Synthetic oligonucleotide
cauaagucccuaagaguac

SEQ ID NO: 956268 - RNA, 19 nt, Artificial Sequence
  Description of Artificial Sequence: Synthetic oligonucleotide
gcuacuguaacagcaagcc

SEQ ID NO: 956269 - RNA, 19 nt, Artificial Sequence
  Description of Artificial Sequence: Synthetic oligonucleotide
aagucccuaagaguacauc

SEQ ID NO: 956270 - RNA, 19 nt, Artificial Sequence
  Description of Artificial Sequence: Synthetic oligonucleotide
cugcuguuaagucaagauc

SEQ ID NO: 956271 - RNA, 19 nt, Artificial Sequence
  Description of Artificial Sequence: Synthetic oligonucleotide
ugacaaguguaguguaacu

SEQ ID NO: 956272 - RNA, 19 nt, Artificial Sequence
  Description of Artificial Sequence: Synthetic oligonucleotide
accacaacgaccggcuugg

SEQ ID NO: 956273 - RNA, 19 nt, Artificial Sequence
  Description of Artificial Sequence: Synthetic oligonucleotide
cauuagaacaucacguucu

SEQ ID NO: 956274 - RNA, 19 nt, Artificial Sequence
  Description of Artificial Sequence: Synthetic oligonucleotide
aguauaauugauaguccgu

SEQ ID NO: 956275 - RNA, 19 nt, Artificial Sequence
  Description of Artificial Sequence: Synthetic oligonucleotide
uguucuuaugaugcaggca

SEQ ID NO: 956276 - RNA, 19 nt, Artificial Sequence
  Description of Artificial Sequence: Synthetic oligonucleotide
uuuccgaauaauguguguu

SEQ ID NO: 956277 - RNA, 19 nt, Artificial Sequence
  Description of Artificial Sequence: Synthetic oligonucleotide
ccuaagaguacaucuauuc

SEQ ID NO: 956278 - RNA, 19 nt, Artificial Sequence
  Description of Artificial Sequence: Synthetic oligonucleotide
uuguacacuaguguagaaa

SEQ ID NO: 956279 - RNA, 19 nt, Artificial Sequence
  Description of Artificial Sequence: Synthetic oligonucleotide
aggaugacuguaaacauaa

SEQ ID NO: 956280 - RNA, 19 nt, Artificial Sequence
  Description of Artificial Sequence: Synthetic oligonucleotide
cuuuaccacaacgaccggc

SEQ ID NO: 956281 - RNA, 19 nt, Artificial Sequence
  Description of Artificial Sequence: Synthetic oligonucleotide
ucucauguaucugcguuga

SEQ ID NO: 956282 - RNA, 19 nt, Artificial Sequence
  Description of Artificial Sequence: Synthetic oligonucleotide
ugauuagugucaaggcuuu

SEQ ID NO: 956283 - RNA, 19 nt, Artificial Sequence
  Description of Artificial Sequence: Synthetic oligonucleotide
agcuauccuggucagugug

SEQ ID NO: 956284 - RNA, 19 nt, Artificial Sequence
  Description of Artificial Sequence: Synthetic oligonucleotide
acggagcuacuguaacagc

SEQ ID NO: 956285 - RNA, 19 nt, Artificial Sequence
  Description of Artificial Sequence: Synthetic oligonucleotide
ggaccgagaauauuauacc

SEQ ID NO: 956286 - RNA, 19 nt, Artificial Sequence
  Description of Artificial Sequence: Synthetic oligonucleotide
gugccuuacucuaggaccg

SEQ ID NO: 956287 - RNA, 19 nt, Artificial Sequence
  Description of Artificial Sequence: Synthetic oligonucleotide
gacauucacuguaacgcug

SEQ ID NO: 956288 - RNA, 19 nt, Artificial Sequence
  Description of Artificial Sequence: Synthetic oligonucleotide
ucucccuuuuauguuaagu

SEQ ID NO: 956289 - RNA, 19 nt, Artificial Sequence
  Description of Artificial Sequence: Synthetic oligonucleotide
agaacgaguaggaacugug

SEQ ID NO: 956290 - RNA, 19 nt, Artificial Sequence
  Description of Artificial Sequence: Synthetic oligonucleotide
uuuaagugugggacacuaa

SEQ ID NO: 956291 - RNA, 19 nt, Artificial Sequence
  Description of Artificial Sequence: Synthetic oligonucleotide
uaguccguaagugcuucgg

SEQ ID NO: 956292 - RNA, 19 nt, Artificial Sequence
  Description of Artificial Sequence: Synthetic oligonucleotide
acucugacccugaucuucc

SEQ ID NO: 956293 - RNA, 19 nt, Artificial Sequence
  Description of Artificial Sequence: Synthetic oligonucleotide
uuccuuaugcauccauauc

SEQ ID NO: 956294 - RNA, 19 nt, Artificial Sequence
  Description of Artificial Sequence: Synthetic oligonucleotide
gagccauuauuauguuaag

SEQ ID NO: 956295 - RNA, 19 nt, Artificial Sequence
  Description of Artificial Sequence: Synthetic oligonucleotide
cugcguaucguccucuaug

SEQ ID NO: 956296 - RNA, 19 nt, Artificial Sequence
  Description of Artificial Sequence: Synthetic oligonucleotide
uuugccauaauagcaccua

SEQ ID NO: 956297 - RNA, 19 nt, Artificial Sequence
  Description of Artificial Sequence: Synthetic oligonucleotide
cuguacaacuuacauucuc

SEQ ID NO: 956298 - RNA, 19 nt, Artificial Sequence
  Description of Artificial Sequence: Synthetic oligonucleotide
uguaucugcguugauuaua

SEQ ID NO: 956299 - RNA, 19 nt, Artificial Sequence
  Description of Artificial Sequence: Synthetic oligonucleotide
cccgcuguucuuaugaugc

SEQ ID NO: 956300 - RNA, 19 nt, Artificial Sequence
  Description of Artificial Sequence: Synthetic oligonucleotide
cuuauuuguguuuaugcau

SEQ ID NO: 956301 - RNA, 19 nt, Artificial Sequence
  Description of Artificial Sequence: Synthetic oligonucleotide
gaacgaguaggaacugugc

SEQ ID NO: 956302 - RNA, 19 nt, Artificial Sequence
  Description of Artificial Sequence: Synthetic oligonucleotide
guacuccugagagacaggc

SEQ ID NO: 956303 - RNA, 19 nt, Artificial Sequence
  Description of Artificial Sequence: Synthetic oligonucleotide
ucucugugccuuccaaaac

SEQ ID NO: 956304 - RNA, 19 nt, Artificial Sequence
  Description of Artificial Sequence: Synthetic oligonucleotide
acgaguaggaacugugcaa

SEQ ID NO: 956305 - RNA, 19 nt, Artificial Sequence
  Description of Artificial Sequence: Synthetic oligonucleotide
gaaacaauaauuacuccuu

SEQ ID NO: 956306 - RNA, 19 nt, Artificial Sequence
  Description of Artificial Sequence: Synthetic oligonucleotide
aaauggacauucacuguaa

SEQ ID NO: 956307 - RNA, 19 nt, Artificial Sequence
  Description of Artificial Sequence: Synthetic oligonucleotide
ucgaagaauuuucuccauu

SEQ ID NO: 956308 - RNA, 19 nt, Artificial Sequence
  Description of Artificial Sequence: Synthetic oligonucleotide
agaguaucucuguguaaga

SEQ ID NO: 956309 - RNA, 19 nt, Artificial Sequence
  Description of Artificial Sequence: Synthetic oligonucleotide
auaagucccuaagaguaca

SEQ ID NO: 956310 - RNA, 19 nt, Artificial Sequence
  Description of Artificial Sequence: Synthetic oligonucleotide
auaguccguaagugcuucg

SEQ ID NO: 956311 - RNA, 19 nt, Artificial Sequence
  Description of Artificial Sequence: Synthetic oligonucleotide
uccugaucuuagcaguuau

SEQ ID NO: 956312 - RNA, 19 nt, Artificial Sequence
  Description of Artificial Sequence: Synthetic oligonucleotide
uugccauaauagcaccuaa

SEQ ID NO: 956313 - RNA, 19 nt, Artificial Sequence
  Description of Artificial Sequence: Synthetic oligonucleotide
ucuucagguuccgaagaga

SEQ ID NO: 956314 - RNA, 19 nt, Artificial Sequence
  Description of Artificial Sequence: Synthetic oligonucleotide
gccauaauagcaccuaaga

SEQ ID NO: 956315 - RNA, 19 nt, Artificial Sequence
  Description of Artificial Sequence: Synthetic oligonucleotide
cugugcaaggaaaguacuc

SEQ ID NO: 956316 - RNA, 19 nt, Artificial Sequence
  Description of Artificial Sequence: Synthetic oligonucleotide
acaggccagguuucaaaug

SEQ ID NO: 956317 - RNA, 19 nt, Artificial Sequence
  Description of Artificial Sequence: Synthetic oligonucleotide
uucggucuccauuuccagu

SEQ ID NO: 956318 - RNA, 19 nt, Artificial Sequence
  Description of Artificial Sequence: Synthetic oligonucleotide
caucgaagauuuaaugaaa

SEQ ID NO: 956319 - RNA, 19 nt, Artificial Sequence
  Description of Artificial Sequence: Synthetic oligonucleotide
ggacauauaacaguguuua

SEQ ID NO: 956320 - RNA, 19 nt, Artificial Sequence
  Description of Artificial Sequence: Synthetic oligonucleotide
agcucugaucucauguauc

SEQ ID NO: 956321 - RNA, 19 nt, Artificial Sequence
  Description of Artificial Sequence: Synthetic oligonucleotide
gacaaguguaguguaacua

SEQ ID NO: 956322 - RNA, 19 nt, Artificial Sequence
  Description of Artificial Sequence: Synthetic oligonucleotide
gauaguccguaagugcuuc

SEQ ID NO: 956323 - RNA, 19 nt, Artificial Sequence
  Description of Artificial Sequence: Synthetic oligonucleotide
auacuccuaugucaacacu

SEQ ID NO: 956324 - RNA, 19 nt, Artificial Sequence
  Description of Artificial Sequence: Synthetic oligonucleotide
agccuuccugaucuuagca

SEQ ID NO: 956325 - RNA, 19 nt, Artificial Sequence
  Description of Artificial Sequence: Synthetic oligonucleotide
ucuuagcaguuaugucaag

SEQ ID NO: 956326 - RNA, 19 nt, Artificial Sequence
  Description of Artificial Sequence: Synthetic oligonucleotide
uuacucuaggaccgagaau

SEQ ID NO: 956327 - RNA, 19 nt, Artificial Sequence
  Description of Artificial Sequence: Synthetic oligonucleotide
gaucuaucuucagguuccg

SEQ ID NO: 956328 - RNA, 19 nt, Artificial Sequence
  Description of Artificial Sequence: Synthetic oligonucleotide
agaacucuacuaaucagua

SEQ ID NO: 956329 - RNA, 19 nt, Artificial Sequence
  Description of Artificial Sequence: Synthetic oligonucleotide
agaguguaggccuggcuua

SEQ ID NO: 956330 - RNA, 19 nt, Artificial Sequence
  Description of Artificial Sequence: Synthetic oligonucleotide
agcaagaugucaaauuauu

SEQ ID NO: 956331 - RNA, 19 nt, Artificial Sequence
  Description of Artificial Sequence: Synthetic oligonucleotide
cacuaguguagaaaggucu

SEQ ID NO: 956332 - RNA, 19 nt, Artificial Sequence
  Description of Artificial Sequence: Synthetic oligonucleotide
cuaagaguacaucuauucu

SEQ ID NO: 956333 - RNA, 19 nt, Artificial Sequence
  Description of Artificial Sequence: Synthetic oligonucleotide
gaaaacaauuagcgcuuaa

SEQ ID NO: 956334 - RNA, 19 nt, Artificial Sequence
  Description of Artificial Sequence: Synthetic oligonucleotide
guaucugcguugauuauaa

SEQ ID NO: 956335 - RNA, 19 nt, Artificial Sequence
  Description of Artificial Sequence: Synthetic oligonucleotide
aucuuagcaguuaugucaa

SEQ ID NO: 956336 - RNA, 19 nt, Artificial Sequence
  Description of Artificial Sequence: Synthetic oligonucleotide
acaucuauucuaggaaaau

SEQ ID NO: 956337 - RNA, 19 nt, Artificial Sequence
  Description of Artificial Sequence: Synthetic oligonucleotide
cuaucacagaacucuacua

SEQ ID NO: 956338 - RNA, 19 nt, Artificial Sequence
  Description of Artificial Sequence: Synthetic oligonucleotide
aauuagcgcuuaaguaaga

SEQ ID NO: 956339 - RNA, 19 nt, Artificial Sequence
  Description of Artificial Sequence: Synthetic oligonucleotide
aguccguaagugcuucggu

SEQ ID NO: 956340 - RNA, 19 nt, Artificial Sequence
  Description of Artificial Sequence: Synthetic oligonucleotide
aauuccccaccuaggagaa

SEQ ID NO: 956341 - RNA, 19 nt, Artificial Sequence
  Description of Artificial Sequence: Synthetic oligonucleotide
ggcaacauaggaaaacaca

SEQ ID NO: 956342 - RNA, 19 nt, Artificial Sequence
  Description of Artificial Sequence: Synthetic oligonucleotide
ugacugugaugagauguac

SEQ ID NO: 956343 - RNA, 19 nt, Artificial Sequence
  Description of Artificial Sequence: Synthetic oligonucleotide
gaagaacgaguaggaacug

SEQ ID NO: 956344 - RNA, 19 nt, Artificial Sequence
  Description of Artificial Sequence: Synthetic oligonucleotide
gaucucauguaucugcguu

SEQ ID NO: 956345 - RNA, 19 nt, Artificial Sequence
  Description of Artificial Sequence: Synthetic oligonucleotide
aggaaaacaauuagcgcuu

SEQ ID NO: 956346 - RNA, 19 nt, Artificial Sequence
  Description of Artificial Sequence: Synthetic oligonucleotide
ugacacucugacccugauc

SEQ ID NO: 956347 - RNA, 19 nt, Artificial Sequence
  Description of Artificial Sequence: Synthetic oligonucleotide
gacugugaugagauguaca

SEQ ID NO: 956348 - RNA, 19 nt, Artificial Sequence
  Description of Artificial Sequence: Synthetic oligonucleotide
ccaccuaggagaaaggaca

SEQ ID NO: 956349 - RNA, 19 nt, Artificial Sequence
  Description of Artificial Sequence: Synthetic oligonucleotide
ccuccugugacaaguguag

SEQ ID NO: 956350 - RNA, 19 nt, Artificial Sequence
  Description of Artificial Sequence: Synthetic oligonucleotide
guccguaagugcuucgguc

SEQ ID NO: 956351 - RNA, 19 nt, Artificial Sequence
  Description of Artificial Sequence: Synthetic oligonucleotide
cuuggaguucauaagcuau

SEQ ID NO: 956352 - RNA, 19 nt, Artificial Sequence
  Description of Artificial Sequence: Synthetic oligonucleotide
gaaagcagcaagaagccuu

SEQ ID NO: 956353 - RNA, 19 nt, Artificial Sequence
  Description of Artificial Sequence: Synthetic oligonucleotide
cuauccuggucagugugug

SEQ ID NO: 956354 - RNA, 19 nt, Artificial Sequence
  Description of Artificial Sequence: Synthetic oligonucleotide
auagcacuggggucaaauu

SEQ ID NO: 956355 - RNA, 19 nt, Artificial Sequence
  Description of Artificial Sequence: Synthetic oligonucleotide
guacaacuuacauucucua

SEQ ID NO: 956356 - RNA, 19 nt, Artificial Sequence
  Description of Artificial Sequence: Synthetic oligonucleotide
gcuuaaguaagacucuucu

SEQ ID NO: 956357 - RNA, 19 nt, Artificial Sequence
  Description of Artificial Sequence: Synthetic oligonucleotide
cuggcuuaauuucucagcu

SEQ ID NO: 956358 - RNA, 19 nt, Artificial Sequence
  Description of Artificial Sequence: Synthetic oligonucleotide
ccaucgaagauuuaaugaa

SEQ ID NO: 956359 - RNA, 19 nt, Artificial Sequence
  Description of Artificial Sequence: Synthetic oligonucleotide
ugcauacuccuaugucaac

SEQ ID NO: 956360 - RNA, 19 nt, Artificial Sequence
  Description of Artificial Sequence: Synthetic oligonucleotide
acuaacuccuagagcagga

SEQ ID NO: 956361 - RNA, 19 nt, Artificial Sequence
  Description of Artificial Sequence: Synthetic oligonucleotide
gcuuucaucuguguagaug

SEQ ID NO: 956362 - RNA, 19 nt, Artificial Sequence
  Description of Artificial Sequence: Synthetic oligonucleotide
ucugcguaucguccucuau

SEQ ID NO: 956363 - RNA, 19 nt, Artificial Sequence
  Description of Artificial Sequence: Synthetic oligonucleotide
augcauacuccuaugucaa

SEQ ID NO: 956364 - RNA, 19 nt, Artificial Sequence
  Description of Artificial Sequence: Synthetic oligonucleotide
uaggaccgagaauauuaua

SEQ ID NO: 956365 - RNA, 19 nt, Artificial Sequence
  Description of Artificial Sequence: Synthetic oligonucleotide
guaagacucuucuguguaa

SEQ ID NO: 956366 - RNA, 19 nt, Artificial Sequence
  Description of Artificial Sequence: Synthetic oligonucleotide
gcguugauuauaaauaugu

SEQ ID NO: 956367 - RNA, 19 nt, Artificial Sequence
  Description of Artificial Sequence: Synthetic oligonucleotide
uggcuuaauuucucagcua

SEQ ID NO: 956368 - RNA, 19 nt, Artificial Sequence
  Description of Artificial Sequence: Synthetic oligonucleotide
ucgcccucugcuguuaagu

SEQ ID NO: 956369 - RNA, 19 nt, Artificial Sequence
  Description of Artificial Sequence: Synthetic oligonucleotide
agauuaagacaaagaacuu

SEQ ID NO: 956370 - RNA, 19 nt, Artificial Sequence
  Description of Artificial Sequence: Synthetic oligonucleotide
ggaaaguacuccugagaga

SEQ ID NO: 956371 - RNA, 19 nt, Artificial Sequence
  Description of Artificial Sequence: Synthetic oligonucleotide
aaguaccuguucugucuuu

SEQ ID NO: 956372 - RNA, 19 nt, Artificial Sequence
  Description of Artificial Sequence: Synthetic oligonucleotide
acucuacuaaucaguauuu

SEQ ID NO: 956373 - RNA, 19 nt, Artificial Sequence
  Description of Artificial Sequence: Synthetic oligonucleotide
gguuucaaauggaagaccu

SEQ ID NO: 956374 - RNA, 19 nt, Artificial Sequence
  Description of Artificial Sequence: Synthetic oligonucleotide
uauccuggucagugugugu

SEQ ID NO: 956375 - RNA, 19 nt, Artificial Sequence
  Description of Artificial Sequence: Synthetic oligonucleotide
cacuguaacgcugcaccug

SEQ ID NO: 956376 - RNA, 19 nt, Artificial Sequence
  Description of Artificial Sequence: Synthetic oligonucleotide
augaugcaggcaacauagg

SEQ ID NO: 956377 - RNA, 19 nt, Artificial Sequence
  Description of Artificial Sequence: Synthetic oligonucleotide
aggacauauaacaguguuu

SEQ ID NO: 956378 - RNA, 19 nt, Artificial Sequence
  Description of Artificial Sequence: Synthetic oligonucleotide
aucguccucuauguauuug

SEQ ID NO: 956379 - RNA, 19 nt, Artificial Sequence
  Description of Artificial Sequence: Synthetic oligonucleotide
cucugcauuucgaagaauu

SEQ ID NO: 956380 - RNA, 19 nt, Artificial Sequence
  Description of Artificial Sequence: Synthetic oligonucleotide
agcgcuuaaguaagacucu

SEQ ID NO: 956381 - RNA, 19 nt, Artificial Sequence
  Description of Artificial Sequence: Synthetic oligonucleotide
cucugaucucauguaucug

SEQ ID NO: 956382 - RNA, 19 nt, Artificial Sequence
  Description of Artificial Sequence: Synthetic oligonucleotide
uucuaggaaaauggacauu

SEQ ID NO: 956383 - RNA, 19 nt, Artificial Sequence
  Description of Artificial Sequence: Synthetic oligonucleotide
cugcguugauuauaaauau

SEQ ID NO: 956384 - RNA, 19 nt, Artificial Sequence
  Description of Artificial Sequence: Synthetic oligonucleotide
aucgcccucugcuguuaag

SEQ ID NO: 956385 - RNA, 19 nt, Artificial Sequence
  Description of Artificial Sequence: Synthetic oligonucleotide
agugggagguagaaacuaa

SEQ ID NO: 956386 - RNA, 19 nt, Artificial Sequence
  Description of Artificial Sequence: Synthetic oligonucleotide
gaacucuacuaaucaguau

SEQ ID NO: 956387 - RNA, 19 nt, Artificial Sequence
  Description of Artificial Sequence: Synthetic oligonucleotide
cccaccuaggagaaaggac

SEQ ID NO: 956388 - RNA, 19 nt, Artificial Sequence
  Description of Artificial Sequence: Synthetic oligonucleotide
acuccuagagcaggaugcu

SEQ ID NO: 956389 - RNA, 19 nt, Artificial Sequence
  Description of Artificial Sequence: Synthetic oligonucleotide
aacgaccggcuuggaguuc

SEQ ID NO: 956390 - RNA, 19 nt, Artificial Sequence
  Description of Artificial Sequence: Synthetic oligonucleotide
uuccugaucuuagcaguua

SEQ ID NO: 956391 - RNA, 19 nt, Artificial Sequence
  Description of Artificial Sequence: Synthetic oligonucleotide
uuacaucaauaagcuccac

SEQ ID NO: 956392 - RNA, 19 nt, Artificial Sequence
  Description of Artificial Sequence: Synthetic oligonucleotide
cuuguacacuaguguagaa

SEQ ID NO: 956393 - RNA, 19 nt, Artificial Sequence
  Description of Artificial Sequence: Synthetic oligonucleotide
gugcaaggaaaguacuccu

SEQ ID NO: 956394 - RNA, 19 nt, Artificial Sequence
  Description of Artificial Sequence: Synthetic oligonucleotide
uaucugcguugauuauaaa

SEQ ID NO: 956395 - RNA, 19 nt, Artificial Sequence
  Description of Artificial Sequence: Synthetic oligonucleotide
gaagugggagguagaaacu

SEQ ID NO: 956396 - RNA, 19 nt, Artificial Sequence
  Description of Artificial Sequence: Synthetic oligonucleotide
ccagcaagaugucaaauua

SEQ ID NO: 956397 - RNA, 19 nt, Artificial Sequence
  Description of Artificial Sequence: Synthetic oligonucleotide
uuaccacaacgaccggcuu

SEQ ID NO: 956398 - RNA, 19 nt, Artificial Sequence
  Description of Artificial Sequence: Synthetic oligonucleotide
uucucccgcuguucuuaug

SEQ ID NO: 956399 - RNA, 19 nt, Artificial Sequence
  Description of Artificial Sequence: Synthetic oligonucleotide
ccggcuuggaguucauaag

SEQ ID NO: 956400 - RNA, 19 nt, Artificial Sequence
  Description of Artificial Sequence: Synthetic oligonucleotide
acgaccggcuuggaguuca

SEQ ID NO: 956401 - RNA, 19 nt, Artificial Sequence
  Description of Artificial Sequence: Synthetic oligonucleotide
gcucugaucucauguaucu

SEQ ID NO: 956402 - RNA, 19 nt, Artificial Sequence
  Description of Artificial Sequence: Synthetic oligonucleotide
uucugcguaucguccucua

SEQ ID NO: 956403 - RNA, 19 nt, Artificial Sequence
  Description of Artificial Sequence: Synthetic oligonucleotide
cuaggaccgagaauauuau

SEQ ID NO: 956404 - RNA, 19 nt, Artificial Sequence
  Description of Artificial Sequence: Synthetic oligonucleotide
cugugacaaguguagugua

SEQ ID NO: 956405 - RNA, 19 nt, Artificial Sequence
  Description of Artificial Sequence: Synthetic oligonucleotide
cucagcuagagccauuauu

SEQ ID NO: 956406 - RNA, 19 nt, Artificial Sequence
  Description of Artificial Sequence: Synthetic oligonucleotide
accuccugugacaagugua

SEQ ID NO: 956407 - RNA, 19 nt, Artificial Sequence
  Description of Artificial Sequence: Synthetic oligonucleotide
ggacauucacuguaacgcu

SEQ ID NO: 956408 - RNA, 19 nt, Artificial Sequence
  Description of Artificial Sequence: Synthetic oligonucleotide
cuguaacgcugcaccugac

SEQ ID NO: 956409 - RNA, 19 nt, Artificial Sequence
  Description of Artificial Sequence: Synthetic oligonucleotide
aucuaucuucagguuccga

SEQ ID NO: 956410 - RNA, 19 nt, Artificial Sequence
  Description of Artificial Sequence: Synthetic oligonucleotide
gcuuggaguucauaagcua

SEQ ID NO: 956411 - RNA, 19 nt, Artificial Sequence
  Description of Artificial Sequence: Synthetic oligonucleotide
cagcaagaugucaaauuau

SEQ ID NO: 956412 - RNA, 19 nt, Artificial Sequence
  Description of Artificial Sequence: Synthetic oligonucleotide
agguuccgaagagacuuaa

SEQ ID NO: 956413 - RNA, 19 nt, Artificial Sequence
  Description of Artificial Sequence: Synthetic oligonucleotide
ugccuuacucuaggaccga

SEQ ID NO: 956414 - RNA, 19 nt, Artificial Sequence
  Description of Artificial Sequence: Synthetic oligonucleotide
uaagugcuucggucuccau

SEQ ID NO: 956415 - RNA, 19 nt, Artificial Sequence
  Description of Artificial Sequence: Synthetic oligonucleotide
acucuaggaccgagaauau

SEQ ID NO: 956416 - RNA, 19 nt, Artificial Sequence
  Description of Artificial Sequence: Synthetic oligonucleotide
caagaucuaucuucagguu

SEQ ID NO: 956417 - RNA, 19 nt, Artificial Sequence
  Description of Artificial Sequence: Synthetic oligonucleotide
cauuuccaguuuccaucga

SEQ ID NO: 956418 - RNA, 19 nt, Artificial Sequence
  Description of Artificial Sequence: Synthetic oligonucleotide
gacccugaucuuccauucu

SEQ ID NO: 956419 - RNA, 19 nt, Artificial Sequence
  Description of Artificial Sequence: Synthetic oligonucleotide
gaucgcccucugcuguuaa

SEQ ID NO: 956420 - RNA, 19 nt, Artificial Sequence
  Description of Artificial Sequence: Synthetic oligonucleotide
ggaguucauaagcuauccu

SEQ ID NO: 956421 - RNA, 19 nt, Artificial Sequence
  Description of Artificial Sequence: Synthetic oligonucleotide
cuuaugcauccauauccuu

SEQ ID NO: 956422 - RNA, 19 nt, Artificial Sequence
  Description of Artificial Sequence: Synthetic oligonucleotide
ccugacugugaugagaugu

SEQ ID NO: 956423 - RNA, 19 nt, Artificial Sequence
  Description of Artificial Sequence: Synthetic oligonucleotide
ccuuaugcauccauauccu

SEQ ID NO: 956424 - RNA, 19 nt, Artificial Sequence
  Description of Artificial Sequence: Synthetic oligonucleotide
gcuuuuccccuucugcgua

SEQ ID NO: 956425 - RNA, 19 nt, Artificial Sequence
  Description of Artificial Sequence: Synthetic oligonucleotide
ccuaggagaaaggacauau

SEQ ID NO: 956426 - RNA, 19 nt, Artificial Sequence
  Description of Artificial Sequence: Synthetic oligonucleotide
cuaugucaacacugcucua

SEQ ID NO: 956427 - RNA, 19 nt, Artificial Sequence
  Description of Artificial Sequence: Synthetic oligonucleotide
ccugugacaaguguagugu

SEQ ID NO: 956428 - RNA, 19 nt, Artificial Sequence
  Description of Artificial Sequence: Synthetic oligonucleotide
cgcuuaaguaagacucuuc

SEQ ID NO: 956429 - RNA, 19 nt, Artificial Sequence
  Description of Artificial Sequence: Synthetic oligonucleotide
ggcuuggaguucauaagcu

SEQ ID NO: 956430 - RNA, 19 nt, Artificial Sequence
  Description of Artificial Sequence: Synthetic oligonucleotide
cugucuguggaaguauaau

SEQ ID NO: 956431 - RNA, 19 nt, Artificial Sequence
  Description of Artificial Sequence: Synthetic oligonucleotide
cuguuaagucaagaucuau

SEQ ID NO: 956432 - RNA, 19 nt, Artificial Sequence
  Description of Artificial Sequence: Synthetic oligonucleotide
cgagaauauuauaccagua

SEQ ID NO: 956433 - RNA, 19 nt, Artificial Sequence
  Description of Artificial Sequence: Synthetic oligonucleotide
ccguaagugcuucggucuc

SEQ ID NO: 956434 - RNA, 19 nt, Artificial Sequence
  Description of Artificial Sequence: Synthetic oligonucleotide
cagguuccgaagagacuua

SEQ ID NO: 956435 - RNA, 19 nt, Artificial Sequence
  Description of Artificial Sequence: Synthetic oligonucleotide
caacgaccggcuuggaguu

SEQ ID NO: 956436 - RNA, 19 nt, Artificial Sequence
  Description of Artificial Sequence: Synthetic oligonucleotide
agaucgcccucugcuguua

SEQ ID NO: 956437 - RNA, 19 nt, Artificial Sequence
  Description of Artificial Sequence: Synthetic oligonucleotide
cagcaagccugacugugau

SEQ ID NO: 956438 - RNA, 19 nt, Artificial Sequence
  Description of Artificial Sequence: Synthetic oligonucleotide
gguuccgaagagacuuaaa

SEQ ID NO: 956439 - RNA, 19 nt, Artificial Sequence
  Description of Artificial Sequence: Synthetic oligonucleotide
ggagcccaaaugugccuua

SEQ ID NO: 956440 - RNA, 19 nt, Artificial Sequence
  Description of Artificial Sequence: Synthetic oligonucleotide
gcuauccuggucagugugu

SEQ ID NO: 956441 - RNA, 19 nt, Artificial Sequence
  Description of Artificial Sequence: Synthetic oligonucleotide
cuccugugacaaguguagu

SEQ ID NO: 956442 - RNA, 19 nt, Artificial Sequence
  Description of Artificial Sequence: Synthetic oligonucleotide
cucccgcuguucuuaugau

SEQ ID NO: 956443 - RNA, 19 nt, Artificial Sequence
  Description of Artificial Sequence: Synthetic oligonucleotide
ccgaauaauguguguuaau

SEQ ID NO: 956444 - RNA, 19 nt, Artificial Sequence
  Description of Artificial Sequence: Synthetic oligonucleotide
gaccggcuuggaguucaua

SEQ ID NO: 956445 - RNA, 19 nt, Artificial Sequence
  Description of Artificial Sequence: Synthetic oligonucleotide
ccgcuguucuuaugaugca

SEQ ID NO: 956446 - RNA, 19 nt, Artificial Sequence
  Description of Artificial Sequence: Synthetic oligonucleotide
gcguaucguccucuaugua

SEQ ID NO: 956447 - RNA, 19 nt, Artificial Sequence
  Description of Artificial Sequence: Synthetic oligonucleotide
caguuaugucaaguuuauu

SEQ ID NO: 956448 - RNA, 19 nt, Artificial Sequence
  Description of Artificial Sequence: Synthetic oligonucleotide
cccuaagaguacaucuauu

SEQ ID NO: 956449 - RNA, 19 nt, Artificial Sequence
  Description of Artificial Sequence: Synthetic oligonucleotide
gcgcuuaaguaagacucuu

SEQ ID NO: 956450 - RNA, 19 nt, Artificial Sequence
  Description of Artificial Sequence: Synthetic oligonucleotide
cgaccggcuuggaguucau

SEQ ID NO: 956451 - RNA, 19 nt, Artificial Sequence
  Description of Artificial Sequence: Synthetic oligonucleotide
aauaaguuaaagggcaagg

SEQ ID NO: 956452 - RNA, 19 nt, Artificial Sequence
  Description of Artificial Sequence: Synthetic oligonucleotide
acgguuauugcauaguaac

SEQ ID NO: 956453 - RNA, 19 nt, Artificial Sequence
  Description of Artificial Sequence: Synthetic oligonucleotide
acaagauucaagcucggac

SEQ ID NO: 956454 - RNA, 19 nt, Artificial Sequence
  Description of Artificial Sequence: Synthetic oligonucleotide
ugccucaucaaccauaagc

SEQ ID NO: 956455 - RNA, 19 nt, Artificial Sequence
  Description of Artificial Sequence: Synthetic oligonucleotide
uccacuucgaggaagcggg

SEQ ID NO: 956456 - RNA, 19 nt, Artificial Sequence
  Description of Artificial Sequence: Synthetic oligonucleotide
cuagcuuggggcaagaggc

SEQ ID NO: 956457 - RNA, 19 nt, Artificial Sequence
  Description of Artificial Sequence: Synthetic oligonucleotide
gaggauacugcuaacagag

SEQ ID NO: 956458 - RNA, 19 nt, Artificial Sequence
  Description of Artificial Sequence: Synthetic oligonucleotide
uuuauucagucccaauaag

SEQ ID NO: 956459 - RNA, 19 nt, Artificial Sequence
  Description of Artificial Sequence: Synthetic oligonucleotide
acgcagaacauccuggggc

SEQ ID NO: 956460 - RNA, 19 nt, Artificial Sequence
  Description of Artificial Sequence: Synthetic oligonucleotide
aagacaacguaaagcaccc

SEQ ID NO: 956461 - RNA, 19 nt, Artificial Sequence
  Description of Artificial Sequence: Synthetic oligonucleotide
uuauucagucccaauaagu

SEQ ID NO: 956462 - RNA, 19 nt, Artificial Sequence
  Description of Artificial Sequence: Synthetic oligonucleotide
uuauugcauaguaacagcu

SEQ ID NO: 956463 - RNA, 19 nt, Artificial Sequence
  Description of Artificial Sequence: Synthetic oligonucleotide
uagggcauuaucauuggcc

SEQ ID NO: 956464 - RNA, 19 nt, Artificial Sequence
  Description of Artificial Sequence: Synthetic oligonucleotide
aguaaagaaggcguucugc

SEQ ID NO: 956465 - RNA, 19 nt, Artificial Sequence
  Description of Artificial Sequence: Synthetic oligonucleotide
gaaccaggcacucugauca

SEQ ID NO: 956466 - RNA, 19 nt, Artificial Sequence
  Description of Artificial Sequence: Synthetic oligonucleotide
aagguuagccacgccaucc

SEQ ID NO: 956467 - RNA, 19 nt, Artificial Sequence
  Description of Artificial Sequence: Synthetic oligonucleotide
gaagcgggcacacaguucc

SEQ ID NO: 956468 - RNA, 19 nt, Artificial Sequence
  Description of Artificial Sequence: Synthetic oligonucleotide
guuggguucaggcaggcgg

SEQ ID NO: 956469 - RNA, 19 nt, Artificial Sequence
  Description of Artificial Sequence: Synthetic oligonucleotide
uuagccacgccauccaagg

SEQ ID NO: 956470 - RNA, 19 nt, Artificial Sequence
  Description of Artificial Sequence: Synthetic oligonucleotide
uucagucccaauaaguuaa

SEQ ID NO: 956471 - RNA, 19 nt, Artificial Sequence
  Description of Artificial Sequence: Synthetic oligonucleotide
aagauucaagcucggacug

SEQ ID NO: 956472 - RNA, 19 nt, Artificial Sequence
  Description of Artificial Sequence: Synthetic oligonucleotide
acguaaagcacccagggcu

SEQ ID NO: 956473 - RNA, 19 nt, Artificial Sequence
  Description of Artificial Sequence: Synthetic oligonucleotide
uuaggguucacacguagac

SEQ ID NO: 956474 - RNA, 19 nt, Artificial Sequence
  Description of Artificial Sequence: Synthetic oligonucleotide
ucccaauaaguuaaagggc

SEQ ID NO: 956475 - RNA, 19 nt, Artificial Sequence
  Description of Artificial Sequence: Synthetic oligonucleotide
gacaacguaaagcacccag

SEQ ID NO: 956476 - RNA, 19 nt, Artificial Sequence
  Description of Artificial Sequence: Synthetic oligonucleotide
ucggagacgauuaugugac

SEQ ID NO: 956477 - RNA, 19 nt, Artificial Sequence
  Description of Artificial Sequence: Synthetic oligonucleotide
acuagcuuggggcaagagg

SEQ ID NO: 956478 - RNA, 19 nt, Artificial Sequence
  Description of Artificial Sequence: Synthetic oligonucleotide
uagaugagugaccaagagc

SEQ ID NO: 956479 - RNA, 19 nt, Artificial Sequence
  Description of Artificial Sequence: Synthetic oligonucleotide
uauucagucccaauaaguu

SEQ ID NO: 956480 - RNA, 19 nt, Artificial Sequence
  Description of Artificial Sequence: Synthetic oligonucleotide
acaaaucgccgguaguccc

SEQ ID NO: 956481 - RNA, 19 nt, Artificial Sequence
  Description of Artificial Sequence: Synthetic oligonucleotide
ugcagcuacaaaucgccgg

SEQ ID NO: 956482 - RNA, 19 nt, Artificial Sequence
  Description of Artificial Sequence: Synthetic oligonucleotide
aggguuggcucccagaauc

SEQ ID NO: 956483 - RNA, 19 nt, Artificial Sequence
  Description of Artificial Sequence: Synthetic oligonucleotide
gacacgaaaggugugcugg

SEQ ID NO: 956484 - RNA, 19 nt, Artificial Sequence
  Description of Artificial Sequence: Synthetic oligonucleotide
aguacguuuucagggaggc

SEQ ID NO: 956485 - RNA, 19 nt, Artificial Sequence
  Description of Artificial Sequence: Synthetic oligonucleotide
aguucuaacacugacucgu

SEQ ID NO: 956486 - RNA, 19 nt, Artificial Sequence
  Description of Artificial Sequence: Synthetic oligonucleotide
ggauacugcuaacagaggg

SEQ ID NO: 956487 - RNA, 19 nt, Artificial Sequence
  Description of Artificial Sequence: Synthetic oligonucleotide
gagacgauuaugugacagg

SEQ ID NO: 956488 - RNA, 19 nt, Artificial Sequence
  Description of Artificial Sequence: Synthetic oligonucleotide
ucccguucuagccuuuugg

SEQ ID NO: 956489 - RNA, 19 nt, Artificial Sequence
  Description of Artificial Sequence: Synthetic oligonucleotide
acgaaaggugugcuggggc

SEQ ID NO: 956490 - RNA, 19 nt, Artificial Sequence
  Description of Artificial Sequence: Synthetic oligonucleotide
agcagugaaaguuccgcuc

SEQ ID NO: 956491 - RNA, 19 nt, Artificial Sequence
  Description of Artificial Sequence: Synthetic oligonucleotide
uggcuugucaguucuaaca

SEQ ID NO: 956492 - RNA, 19 nt, Artificial Sequence
  Description of Artificial Sequence: Synthetic oligonucleotide
ucuagaugagugaccaaga

SEQ ID NO: 956493 - RNA, 19 nt, Artificial Sequence
  Description of Artificial Sequence: Synthetic oligonucleotide
acguagacagcucucuagg

SEQ ID NO: 956494 - RNA, 19 nt, Artificial Sequence
  Description of Artificial Sequence: Synthetic oligonucleotide
agucaaacgcuccaagaug

SEQ ID NO: 956495 - RNA, 19 nt, Artificial Sequence
  Description of Artificial Sequence: Synthetic oligonucleotide
cauccaaguaggcugcucg

SEQ ID NO: 956496 - RNA, 19 nt, Artificial Sequence
  Description of Artificial Sequence: Synthetic oligonucleotide
aggacuuaggguucacacg

SEQ ID NO: 956497 - RNA, 19 nt, Artificial Sequence
  Description of Artificial Sequence: Synthetic oligonucleotide
uucagucaaacgcuccaag

SEQ ID NO: 956498 - RNA, 19 nt, Artificial Sequence
  Description of Artificial Sequence: Synthetic oligonucleotide
uauugcauaguaacagcuc

SEQ ID NO: 956499 - RNA, 19 nt, Artificial Sequence
  Description of Artificial Sequence: Synthetic oligonucleotide
uucaagcucggacuguagc

SEQ ID NO: 956500 - RNA, 19 nt, Artificial Sequence
  Description of Artificial Sequence: Synthetic oligonucleotide
acugcuaacagagggcaac

SEQ ID NO: 956501 - RNA, 19 nt, Artificial Sequence
  Description of Artificial Sequence: Synthetic oligonucleotide
uaggacuuaggguucacac

SEQ ID NO: 956502 - RNA, 19 nt, Artificial Sequence
  Description of Artificial Sequence: Synthetic oligonucleotide
ucuagggcauuaucauugg

SEQ ID NO: 956503 - RNA, 19 nt, Artificial Sequence
  Description of Artificial Sequence: Synthetic oligonucleotide
gauacugcuaacagagggc

SEQ ID NO: 956504 - RNA, 19 nt, Artificial Sequence
  Description of Artificial Sequence: Synthetic oligonucleotide
uacguuuucagggaggcgu

SEQ ID NO: 956505 - RNA, 19 nt, Artificial Sequence
  Description of Artificial Sequence: Synthetic oligonucleotide
uucacacguagacagcucu

SEQ ID NO: 956506 - RNA, 19 nt, Artificial Sequence
  Description of Artificial Sequence: Synthetic oligonucleotide
ucaagcucggacuguagca

SEQ ID NO: 956507 - RNA, 19 nt, Artificial Sequence
  Description of Artificial Sequence: Synthetic oligonucleotide
ucgcauuggguccacagcu

SEQ ID NO: 956508 - RNA, 19 nt, Artificial Sequence
  Description of Artificial Sequence: Synthetic oligonucleotide
ugccgcuucuggaagacag

SEQ ID NO: 956509 - RNA, 19 nt, Artificial Sequence
  Description of Artificial Sequence: Synthetic oligonucleotide
ucauccacuucgaggaagc

SEQ ID NO: 956510 - RNA, 19 nt, Artificial Sequence
  Description of Artificial Sequence: Synthetic oligonucleotide
ucuggaguccuccacucca

SEQ ID NO: 956511 - RNA, 19 nt, Artificial Sequence
  Description of Artificial Sequence: Synthetic oligonucleotide
ucuuucagcaguacguuuu

SEQ ID NO: 956512 - RNA, 19 nt, Artificial Sequence
  Description of Artificial Sequence: Synthetic oligonucleotide
gucuagaugagugaccaag

SEQ ID NO: 956513 - RNA, 19 nt, Artificial Sequence
  Description of Artificial Sequence: Synthetic oligonucleotide
gaugacacgaaaggugugc

SEQ ID NO: 956514 - RNA, 19 nt, Artificial Sequence
  Description of Artificial Sequence: Synthetic oligonucleotide
aaguuccgggugaugaggc

SEQ ID NO: 956515 - RNA, 19 nt, Artificial Sequence
  Description of Artificial Sequence: Synthetic oligonucleotide
ucaagacaacguaaagcac

SEQ ID NO: 956516 - RNA, 19 nt, Artificial Sequence
  Description of Artificial Sequence: Synthetic oligonucleotide
uuacaagauucaagcucgg

SEQ ID NO: 956517 - RNA, 19 nt, Artificial Sequence
  Description of Artificial Sequence: Synthetic oligonucleotide
uaaagaaggcguucugcac

SEQ ID NO: 956518 - RNA, 19 nt, Artificial Sequence
  Description of Artificial Sequence: Synthetic oligonucleotide
cucggcgacaguuccauag

SEQ ID NO: 956519 - RNA, 19 nt, Artificial Sequence
  Description of Artificial Sequence: Synthetic oligonucleotide
gacucguccagcucgccag

SEQ ID NO: 956520 - RNA, 19 nt, Artificial Sequence
  Description of Artificial Sequence: Synthetic oligonucleotide
ucucuuucucauagaggag

SEQ ID NO: 956521 - RNA, 19 nt, Artificial Sequence
  Description of Artificial Sequence: Synthetic oligonucleotide
ggacgagaaaagcagacug

SEQ ID NO: 956522 - RNA, 19 nt, Artificial Sequence
  Description of Artificial Sequence: Synthetic oligonucleotide
agacaggccucaucgcggc

SEQ ID NO: 956523 - RNA, 19 nt, Artificial Sequence
  Description of Artificial Sequence: Synthetic oligonucleotide
ucggcgacaguuccauagg

SEQ ID NO: 956524 - RNA, 19 nt, Artificial Sequence
  Description of Artificial Sequence: Synthetic oligonucleotide
acuggucguugagagaggc

SEQ ID NO: 956525 - RNA, 19 nt, Artificial Sequence
  Description of Artificial Sequence: Synthetic oligonucleotide
agcggugauagaaccaggc

SEQ ID NO: 956526 - RNA, 19 nt, Artificial Sequence
  Description of Artificial Sequence: Synthetic oligonucleotide
agcacacacuccuucuggg

SEQ ID NO: 956527 - RNA, 19 nt, Artificial Sequence
  Description of Artificial Sequence: Synthetic oligonucleotide
ugagugaccaagagcaguu

SEQ ID NO: 956528 - RNA, 19 nt, Artificial Sequence
  Description of Artificial Sequence: Synthetic oligonucleotide
caacgcagaacauccuggg

SEQ ID NO: 956529 - RNA, 19 nt, Artificial Sequence
  Description of Artificial Sequence: Synthetic oligonucleotide
uacaaaucgccgguagucc

SEQ ID NO: 956530 - RNA, 19 nt, Artificial Sequence
  Description of Artificial Sequence: Synthetic oligonucleotide
aggacucuagggcauuauc

SEQ ID NO: 956531 - RNA, 19 nt, Artificial Sequence
  Description of Artificial Sequence: Synthetic oligonucleotide
agcuacaaaucgccgguag

SEQ ID NO: 956532 - RNA, 19 nt, Artificial Sequence
  Description of Artificial Sequence: Synthetic oligonucleotide
acaacguaaagcacccagg

SEQ ID NO: 956533 - RNA, 19 nt, Artificial Sequence
  Description of Artificial Sequence: Synthetic oligonucleotide
cacguagacagcucucuag

SEQ ID NO: 956534 - RNA, 19 nt, Artificial Sequence
  Description of Artificial Sequence: Synthetic oligonucleotide
uccuuacaagauucaagcu

SEQ ID NO: 956535 - RNA, 19 nt, Artificial Sequence
  Description of Artificial Sequence: Synthetic oligonucleotide
agcaguacguuuucaggga

SEQ ID NO: 956536 - RNA, 19 nt, Artificial Sequence
  Description of Artificial Sequence: Synthetic oligonucleotide
aucuggaguccuccacucc

SEQ ID NO: 956537 - RNA, 19 nt, Artificial Sequence
  Description of Artificial Sequence: Synthetic oligonucleotide
uccauaggguggcaaaauc

SEQ ID NO: 956538 - RNA, 19 nt, Artificial Sequence
  Description of Artificial Sequence: Synthetic oligonucleotide
agaggcggcaggcagguca

SEQ ID NO: 956539 - RNA, 19 nt, Artificial Sequence
  Description of Artificial Sequence: Synthetic oligonucleotide
auucagucccaauaaguua

SEQ ID NO: 956540 - RNA, 19 nt, Artificial Sequence
  Description of Artificial Sequence: Synthetic oligonucleotide
uuggguucaggcaggcggc

SEQ ID NO: 956541 - RNA, 19 nt, Artificial Sequence
  Description of Artificial Sequence: Synthetic oligonucleotide
accucaagacaacguaaag

SEQ ID NO: 956542 - RNA, 19 nt, Artificial Sequence
  Description of Artificial Sequence: Synthetic oligonucleotide
agacgauuaugugacaggu

SEQ ID NO: 956543 - RNA, 19 nt, Artificial Sequence
  Description of Artificial Sequence: Synthetic oligonucleotide
agccugugcagcuacaaau

SEQ ID NO: 956544 - RNA, 19 nt, Artificial Sequence
  Description of Artificial Sequence: Synthetic oligonucleotide
agugaccaagagcaguugu

SEQ ID NO: 956545 - RNA, 19 nt, Artificial Sequence
  Description of Artificial Sequence: Synthetic oligonucleotide
uccagaugacacgaaaggu

SEQ ID NO: 956546 - RNA, 19 nt, Artificial Sequence
  Description of Artificial Sequence: Synthetic oligonucleotide
cucggcauacuccaucuug

SEQ ID NO: 956547 - RNA, 19 nt, Artificial Sequence
  Description of Artificial Sequence: Synthetic oligonucleotide
ucaaacgcuccaagaugcc

SEQ ID NO: 956548 - RNA, 19 nt, Artificial Sequence
  Description of Artificial Sequence: Synthetic oligonucleotide
cucggagacgauuauguga

SEQ ID NO: 956549 - RNA, 19 nt, Artificial Sequence
  Description of Artificial Sequence: Synthetic oligonucleotide
cuacaaaucgccgguaguc

SEQ ID NO: 956550 - RNA, 19 nt, Artificial Sequence
  Description of Artificial Sequence: Synthetic oligonucleotide
guagucccagcagugaaag

SEQ ID NO: 956551 - RNA, 19 nt, Artificial Sequence
  Description of Artificial Sequence: Synthetic oligonucleotide
acacgaaaggugugcuggg

SEQ ID NO: 956552 - RNA, 19 nt, Artificial Sequence
  Description of Artificial Sequence: Synthetic oligonucleotide
ccagaugacacgaaaggug

SEQ ID NO: 956553 - RNA, 19 nt, Artificial Sequence
  Description of Artificial Sequence: Synthetic oligonucleotide
aggucuagaugagugacca

SEQ ID NO: 956554 - RNA, 19 nt, Artificial Sequence
  Description of Artificial Sequence: Synthetic oligonucleotide
caagauucaagcucggacu

SEQ ID NO: 956555 - RNA, 19 nt, Artificial Sequence
  Description of Artificial Sequence: Synthetic oligonucleotide
cuaguuccucugcaggagc

SEQ ID NO: 956556 - RNA, 19 nt, Artificial Sequence
  Description of Artificial Sequence: Synthetic oligonucleotide
caguacguuuucagggagg

SEQ ID NO: 956557 - RNA, 19 nt, Artificial Sequence
  Description of Artificial Sequence: Synthetic oligonucleotide
cuagccuuuuggcuucugc

SEQ ID NO: 956558 - RNA, 19 nt, Artificial Sequence
  Description of Artificial Sequence: Synthetic oligonucleotide
guuggcucccagaaucugg

SEQ ID NO: 956559 - RNA, 19 nt, Artificial Sequence
  Description of Artificial Sequence: Synthetic oligonucleotide
cuuggcacagugaguugcc

SEQ ID NO: 956560 - RNA, 19 nt, Artificial Sequence
  Description of Artificial Sequence: Synthetic oligonucleotide
ugaccaagagcaguuguuc

SEQ ID NO: 956561 - RNA, 19 nt, Artificial Sequence
  Description of Artificial Sequence: Synthetic oligonucleotide
cauacuccaucuugaggac

SEQ ID NO: 956562 - RNA, 19 nt, Artificial Sequence
  Description of Artificial Sequence: Synthetic oligonucleotide
ggcaccauuuauucucagg

SEQ ID NO: 956563 - RNA, 19 nt, Artificial Sequence
  Description of Artificial Sequence: Synthetic oligonucleotide
uuuucagggaggcgucccu

SEQ ID NO: 956564 - RNA, 19 nt, Artificial Sequence
  Description of Artificial Sequence: Synthetic oligonucleotide
accgacagcucacaccuga

SEQ ID NO: 956565 - RNA, 19 nt, Artificial Sequence
  Description of Artificial Sequence: Synthetic oligonucleotide
ugcaggucgaggaggacua

SEQ ID NO: 956566 - RNA, 19 nt, Artificial Sequence
  Description of Artificial Sequence: Synthetic oligonucleotide
cccaauaaguuaaagggca

SEQ ID NO: 956567 - RNA, 19 nt, Artificial Sequence
  Description of Artificial Sequence: Synthetic oligonucleotide
ugacacgaaaggugugcug

SEQ ID NO: 956568 - RNA, 19 nt, Artificial Sequence
  Description of Artificial Sequence: Synthetic oligonucleotide
cucgcauuggguccacagc

SEQ ID NO: 956569 - RNA, 19 nt, Artificial Sequence
  Description of Artificial Sequence: Synthetic oligonucleotide
agacgguuauugcauagua

SEQ ID NO: 956570 - RNA, 19 nt, Artificial Sequence
  Description of Artificial Sequence: Synthetic oligonucleotide
cucagcgucggggacagag

SEQ ID NO: 956571 - RNA, 19 nt, Artificial Sequence
  Description of Artificial Sequence: Synthetic oligonucleotide
cauccuggggcuccgcccg

SEQ ID NO: 956572 - RNA, 19 nt, Artificial Sequence
  Description of Artificial Sequence: Synthetic oligonucleotide
aaaguuccgcucauccacu

SEQ ID NO: 956573 - RNA, 19 nt, Artificial Sequence
  Description of Artificial Sequence: Synthetic oligonucleotide
gcgacaguuccauagggug

SEQ ID NO: 956574 - RNA, 19 nt, Artificial Sequence
  Description of Artificial Sequence: Synthetic oligonucleotide
aaaucgccgguagucccag

SEQ ID NO: 956575 - RNA, 19 nt, Artificial Sequence
  Description of Artificial Sequence: Synthetic oligonucleotide
ugacucguccagcucgcca

SEQ ID NO: 956576 - RNA, 19 nt, Artificial Sequence
  Description of Artificial Sequence: Synthetic oligonucleotide
augagugaccaagagcagu

SEQ ID NO: 956577 - RNA, 19 nt, Artificial Sequence
  Description of Artificial Sequence: Synthetic oligonucleotide
ccucaagacaacguaaagc

SEQ ID NO: 956578 - RNA, 19 nt, Artificial Sequence
  Description of Artificial Sequence: Synthetic oligonucleotide
cagcaggcaccauuuauuc

SEQ ID NO: 956579 - RNA, 19 nt, Artificial Sequence
  Description of Artificial Sequence: Synthetic oligonucleotide
aaucgccgguagucccagc

SEQ ID NO: 956580 - RNA, 19 nt, Artificial Sequence
  Description of Artificial Sequence: Synthetic oligonucleotide
aggguggcaaaaucagggu

SEQ ID NO: 956581 - RNA, 19 nt, Artificial Sequence
  Description of Artificial Sequence: Synthetic oligonucleotide
gcgcaggucauccaaguag

SEQ ID NO: 956582 - RNA, 19 nt, Artificial Sequence
  Description of Artificial Sequence: Synthetic oligonucleotide
caucgcggcucacauguag

SEQ ID NO: 956583 - RNA, 19 nt, Artificial Sequence
  Description of Artificial Sequence: Synthetic oligonucleotide
aaugguagccuggcagccu

SEQ ID NO: 956584 - RNA, 19 nt, Artificial Sequence
  Description of Artificial Sequence: Synthetic oligonucleotide
uacaagauucaagcucgga

SEQ ID NO: 956585 - RNA, 19 nt, Artificial Sequence
  Description of Artificial Sequence: Synthetic oligonucleotide
cuagggcauuaucauuggc

SEQ ID NO: 956586 - RNA, 19 nt, Artificial Sequence
  Description of Artificial Sequence: Synthetic oligonucleotide
gaaggcguucugcaccaac

SEQ ID NO: 956587 - RNA, 19 nt, Artificial Sequence
  Description of Artificial Sequence: Synthetic oligonucleotide
uggagcacuucucggcgac

SEQ ID NO: 956588 - RNA, 19 nt, Artificial Sequence
  Description of Artificial Sequence: Synthetic oligonucleotide
ggaauaguuggagaaguuc

SEQ ID NO: 956589 - RNA, 19 nt, Artificial Sequence
  Description of Artificial Sequence: Synthetic oligonucleotide
cugucagauccuugugagc

SEQ ID NO: 956590 - RNA, 19 nt, Artificial Sequence
  Description of Artificial Sequence: Synthetic oligonucleotide
cucuaggaagccuagcucu

SEQ ID NO: 956591 - RNA, 19 nt, Artificial Sequence
  Description of Artificial Sequence: Synthetic oligonucleotide
ucgcggcucacauguaggc

SEQ ID NO: 956592 - RNA, 19 nt, Artificial Sequence
  Description of Artificial Sequence: Synthetic oligonucleotide
aucgccgguagucccagca

SEQ ID NO: 956593 - RNA, 19 nt, Artificial Sequence
  Description of Artificial Sequence: Synthetic oligonucleotide
uucagacgucuucaccuuc

SEQ ID NO: 956594 - RNA, 19 nt, Artificial Sequence
  Description of Artificial Sequence: Synthetic oligonucleotide
uuucagucaaacgcuccaa

SEQ ID NO: 956595 - RNA, 19 nt, Artificial Sequence
  Description of Artificial Sequence: Synthetic oligonucleotide
uggcacagugaguugcccu

SEQ ID NO: 956596 - RNA, 19 nt, Artificial Sequence
  Description of Artificial Sequence: Synthetic oligonucleotide
ucacacguagacagcucuc

SEQ ID NO: 956597 - RNA, 19 nt, Artificial Sequence
  Description of Artificial Sequence: Synthetic oligonucleotide
guuaaagggcaagggcgag

SEQ ID NO: 956598 - RNA, 19 nt, Artificial Sequence
  Description of Artificial Sequence: Synthetic oligonucleotide
guaaugccaggaggaauag

SEQ ID NO: 956599 - RNA, 19 nt, Artificial Sequence
  Description of Artificial Sequence: Synthetic oligonucleotide
cccaguuggguucaggcag

SEQ ID NO: 956600 - RNA, 19 nt, Artificial Sequence
  Description of Artificial Sequence: Synthetic oligonucleotide
cucggcaccagcacuccug

SEQ ID NO: 956601 - RNA, 19 nt, Artificial Sequence
  Description of Artificial Sequence: Synthetic oligonucleotide
cucaucgcggcucacaugu

SEQ ID NO: 956602 - RNA, 19 nt, Artificial Sequence
  Description of Artificial Sequence: Synthetic oligonucleotide
gccucaucaaccauaagca

SEQ ID NO: 956603 - RNA, 19 nt, Artificial Sequence
  Description of Artificial Sequence: Synthetic oligonucleotide
caagcucggacuguagcac

SEQ ID NO: 956604 - RNA, 19 nt, Artificial Sequence
  Description of Artificial Sequence: Synthetic oligonucleotide
uccaaguaggcugcucgca

SEQ ID NO: 956605 - RNA, 19 nt, Artificial Sequence
  Description of Artificial Sequence: Synthetic oligonucleotide
cuuaggguucacacguaga

SEQ ID NO: 956606 - RNA, 19 nt, Artificial Sequence
  Description of Artificial Sequence: Synthetic oligonucleotide
ucaguggcugagucucggc

SEQ ID NO: 956607 - RNA, 19 nt, Artificial Sequence
  Description of Artificial Sequence: Synthetic oligonucleotide
caguaaagaaggcguucug

SEQ ID NO: 956608 - RNA, 19 nt, Artificial Sequence
  Description of Artificial Sequence: Synthetic oligonucleotide
cuccgcccgacccaggagc

SEQ ID NO: 956609 - RNA, 19 nt, Artificial Sequence
  Description of Artificial Sequence: Synthetic oligonucleotide
gcuccuuacaagauucaag

SEQ ID NO: 956610 - RNA, 19 nt, Artificial Sequence
  Description of Artificial Sequence: Synthetic oligonucleotide
ggacuuaggguucacacgu

SEQ ID NO: 956611 - RNA, 19 nt, Artificial Sequence
  Description of Artificial Sequence: Synthetic oligonucleotide
cacacacuccuucugggca

SEQ ID NO: 956612 - RNA, 19 nt, Artificial Sequence
  Description of Artificial Sequence: Synthetic oligonucleotide
ggagcgguaaugccaggag

SEQ ID NO: 956613 - RNA, 19 nt, Artificial Sequence
  Description of Artificial Sequence: Synthetic oligonucleotide
aacuggucguugagagagg

SEQ ID NO: 956614 - RNA, 19 nt, Artificial Sequence
  Description of Artificial Sequence: Synthetic oligonucleotide
ggcacagugaguugcccug

SEQ ID NO: 956615 - RNA, 19 nt, Artificial Sequence
  Description of Artificial Sequence: Synthetic oligonucleotide
aucgcggcucacauguagg

SEQ ID NO: 956616 - RNA, 19 nt, Artificial Sequence
  Description of Artificial Sequence: Synthetic oligonucleotide
ugauagaaccaggcacucu

SEQ ID NO: 956617 - RNA, 19 nt, Artificial Sequence
  Description of Artificial Sequence: Synthetic oligonucleotide
uggugucggcucagcgucg

SEQ ID NO: 956618 - RNA, 19 nt, Artificial Sequence
  Description of Artificial Sequence: Synthetic oligonucleotide
gcuggagacgguuauugca

SEQ ID NO: 956619 - RNA, 19 nt, Artificial Sequence
  Description of Artificial Sequence: Synthetic oligonucleotide
gccgguuccugccaucugg

SEQ ID NO: 956620 - RNA, 19 nt, Artificial Sequence
  Description of Artificial Sequence: Synthetic oligonucleotide
cacgaaaggugugcugggg

SEQ ID NO: 956621 - RNA, 19 nt, Artificial Sequence
  Description of Artificial Sequence: Synthetic oligonucleotide
ucguugagagaggcggcag

SEQ ID NO: 956622 - RNA, 19 nt, Artificial Sequence
  Description of Artificial Sequence: Synthetic oligonucleotide
augacacgaaaggugugcu

SEQ ID NO: 956623 - RNA, 19 nt, Artificial Sequence
  Description of Artificial Sequence: Synthetic oligonucleotide
aggauacugcuaacagagg

SEQ ID NO: 956624 - RNA, 19 nt, Artificial Sequence
  Description of Artificial Sequence: Synthetic oligonucleotide
gacgguuauugcauaguaa

SEQ ID NO: 956625 - RNA, 19 nt, Artificial Sequence
  Description of Artificial Sequence: Synthetic oligonucleotide
uuccgggugaugaggcuau

SEQ ID NO: 956626 - RNA, 19 nt, Artificial Sequence
  Description of Artificial Sequence: Synthetic oligonucleotide
aggaagccuagcucugccu

SEQ ID NO: 956627 - RNA, 19 nt, Artificial Sequence
  Description of Artificial Sequence: Synthetic oligonucleotide
gcaguacguuuucagggag

SEQ ID NO: 956628 - RNA, 19 nt, Artificial Sequence
  Description of Artificial Sequence: Synthetic oligonucleotide
aagaggcaagaggcuguag

SEQ ID NO: 956629 - RNA, 19 nt, Artificial Sequence
  Description of Artificial Sequence: Synthetic oligonucleotide
gauucaagcucggacugua

SEQ ID NO: 956630 - RNA, 19 nt, Artificial Sequence
  Description of Artificial Sequence: Synthetic oligonucleotide
uacugcuaacagagggcaa

SEQ ID NO: 956631 - RNA, 19 nt, Artificial Sequence
  Description of Artificial Sequence: Synthetic oligonucleotide
auaggacuuaggguucaca

SEQ ID NO: 956632 - RNA, 19 nt, Artificial Sequence
  Description of Artificial Sequence: Synthetic oligonucleotide
caccucaagacaacguaaa

SEQ ID NO: 956633 - RNA, 19 nt, Artificial Sequence
  Description of Artificial Sequence: Synthetic oligonucleotide
acugucaggggacgagaaa

SEQ ID NO: 956634 - RNA, 19 nt, Artificial Sequence
  Description of Artificial Sequence: Synthetic oligonucleotide
uucucggcgacaguuccau

SEQ ID NO: 956635 - RNA, 19 nt, Artificial Sequence
  Description of Artificial Sequence: Synthetic oligonucleotide
uccgcccgacccaggagcc

SEQ ID NO: 956636 - RNA, 19 nt, Artificial Sequence
  Description of Artificial Sequence: Synthetic oligonucleotide
cagcggugauagaaccagg

SEQ ID NO: 956637 - RNA, 19 nt, Artificial Sequence
  Description of Artificial Sequence: Synthetic oligonucleotide
aaguuccgcucauccacuu

SEQ ID NO: 956638 - RNA, 19 nt, Artificial Sequence
  Description of Artificial Sequence: Synthetic oligonucleotide
gguaaugccaggaggaaua

SEQ ID NO: 956639 - RNA, 19 nt, Artificial Sequence
  Description of Artificial Sequence: Synthetic oligonucleotide
uuccgcucauccacuucga

SEQ ID NO: 956640 - RNA, 19 nt, Artificial Sequence
  Description of Artificial Sequence: Synthetic oligonucleotide
ccucaucaaccauaagcag

SEQ ID NO: 956641 - RNA, 19 nt, Artificial Sequence
  Description of Artificial Sequence: Synthetic oligonucleotide
cacuucucggcgacaguuc

SEQ ID NO: 956642 - RNA, 19 nt, Artificial Sequence
  Description of Artificial Sequence: Synthetic oligonucleotide
caaaucgccgguaguccca

SEQ ID NO: 956643 - RNA, 19 nt, Artificial Sequence
  Description of Artificial Sequence: Synthetic oligonucleotide
acguuuucagggaggcguc

SEQ ID NO: 956644 - RNA, 19 nt, Artificial Sequence
  Description of Artificial Sequence: Synthetic oligonucleotide
uggagacgguuauugcaua

SEQ ID NO: 956645 - RNA, 19 nt, Artificial Sequence
  Description of Artificial Sequence: Synthetic oligonucleotide
cggugauagaaccaggcac

SEQ ID NO: 956646 - RNA, 19 nt, Artificial Sequence
  Description of Artificial Sequence: Synthetic oligonucleotide
aggacuagcuuggggcaag

SEQ ID NO: 956647 - RNA, 19 nt, Artificial Sequence
  Description of Artificial Sequence: Synthetic oligonucleotide
ccgcucauccacuucgagg

SEQ ID NO: 956648 - RNA, 19 nt, Artificial Sequence
  Description of Artificial Sequence: Synthetic oligonucleotide
guacguuuucagggaggcg

SEQ ID NO: 956649 - RNA, 19 nt, Artificial Sequence
  Description of Artificial Sequence: Synthetic oligonucleotide
auacuccaucuugaggaca

SEQ ID NO: 956650 - RNA, 19 nt, Artificial Sequence
  Description of Artificial Sequence: Synthetic oligonucleotide
gagugaccaagagcaguug

SEQ ID NO: 956651 - RNA, 19 nt, Artificial Sequence
  Description of Artificial Sequence: Synthetic oligonucleotide
gugcagcuacaaaucgccg

SEQ ID NO: 956652 - RNA, 19 nt, Artificial Sequence
  Description of Artificial Sequence: Synthetic oligonucleotide
aguuggguucaggcaggcg

SEQ ID NO: 956653 - RNA, 19 nt, Artificial Sequence
  Description of Artificial Sequence: Synthetic oligonucleotide
agauucaagcucggacugu

SEQ ID NO: 956654 - RNA, 19 nt, Artificial Sequence
  Description of Artificial Sequence: Synthetic oligonucleotide
uucgaggaagcgggcacac

SEQ ID NO: 956655 - RNA, 19 nt, Artificial Sequence
  Description of Artificial Sequence: Synthetic oligonucleotide
gcuaguuccucugcaggag

SEQ ID NO: 956656 - RNA, 19 nt, Artificial Sequence
  Description of Artificial Sequence: Synthetic oligonucleotide
gacuagcuuggggcaagag

SEQ ID NO: 956657 - RNA, 19 nt, Artificial Sequence
  Description of Artificial Sequence: Synthetic oligonucleotide
auucaagcucggacuguag

SEQ ID NO: 956658 - RNA, 19 nt, Artificial Sequence
  Description of Artificial Sequence: Synthetic oligonucleotide
aggagcgguaaugccagga

SEQ ID NO: 956659 - RNA, 19 nt, Artificial Sequence
  Description of Artificial Sequence: Synthetic oligonucleotide
agccggggaagguuagcca

SEQ ID NO: 956660 - RNA, 19 nt, Artificial Sequence
  Description of Artificial Sequence: Synthetic oligonucleotide
agcuccuuacaagauucaa

SEQ ID NO: 956661 - RNA, 19 nt, Artificial Sequence
  Description of Artificial Sequence: Synthetic oligonucleotide
caggcgcccaugcauggug

SEQ ID NO: 956662 - RNA, 19 nt, Artificial Sequence
  Description of Artificial Sequence: Synthetic oligonucleotide
ggcuaguuccucugcagga

SEQ ID NO: 956663 - RNA, 19 nt, Artificial Sequence
  Description of Artificial Sequence: Synthetic oligonucleotide
ugcccgcaucagcaggaug

SEQ ID NO: 956664 - RNA, 19 nt, Artificial Sequence
  Description of Artificial Sequence: Synthetic oligonucleotide
cugaucauuggggucagua

SEQ ID NO: 956665 - RNA, 19 nt, Artificial Sequence
  Description of Artificial Sequence: Synthetic oligonucleotide
uggggcuccgcccgaccca

SEQ ID NO: 956666 - RNA, 19 nt, Artificial Sequence
  Description of Artificial Sequence: Synthetic oligonucleotide
agauggcagagcacuguca

SEQ ID NO: 956667 - RNA, 19 nt, Artificial Sequence
  Description of Artificial Sequence: Synthetic oligonucleotide
acacguagacagcucucua

SEQ ID NO: 956668 - RNA, 19 nt, Artificial Sequence
  Description of Artificial Sequence: Synthetic oligonucleotide
cuggagacgguuauugcau

SEQ ID NO: 956669 - RNA, 19 nt, Artificial Sequence
  Description of Artificial Sequence: Synthetic oligonucleotide
ucucggcaccagcacuccu

SEQ ID NO: 956670 - RNA, 19 nt, Artificial Sequence
  Description of Artificial Sequence: Synthetic oligonucleotide
gcgucggggacagaggaag

SEQ ID NO: 956671 - RNA, 19 nt, Artificial Sequence
  Description of Artificial Sequence: Synthetic oligonucleotide
ggggcaacuggucguugag

SEQ ID NO: 956672 - RNA, 19 nt, Artificial Sequence
  Description of Artificial Sequence: Synthetic oligonucleotide
gccggggaagguuagccac

SEQ ID NO: 956673 - RNA, 19 nt, Artificial Sequence
  Description of Artificial Sequence: Synthetic oligonucleotide
gggucaguaaagaaggcgu

SEQ ID NO: 956674 - RNA, 19 nt, Artificial Sequence
  Description of Artificial Sequence: Synthetic oligonucleotide
ggggacgagaaaagcagac

SEQ ID NO: 956675 - RNA, 19 nt, Artificial Sequence
  Description of Artificial Sequence: Synthetic oligonucleotide
gaggcgucccugugggcca

SEQ ID NO: 956676 - RNA, 19 nt, Artificial Sequence
  Description of Artificial Sequence: Synthetic oligonucleotide
gucagcaggcaccauuuau

SEQ ID NO: 956677 - RNA, 19 nt, Artificial Sequence
  Description of Artificial Sequence: Synthetic oligonucleotide
gcucggagacgauuaugug

SEQ ID NO: 956678 - RNA, 19 nt, Artificial Sequence
  Description of Artificial Sequence: Synthetic oligonucleotide
gucguugagagaggcggca

SEQ ID NO: 956679 - RNA, 19 nt, Artificial Sequence
  Description of Artificial Sequence: Synthetic oligonucleotide
uggguucaggcaggcggcc

SEQ ID NO: 956680 - RNA, 19 nt, Artificial Sequence
  Description of Artificial Sequence: Synthetic oligonucleotide
gagacgguuauugcauagu

SEQ ID NO: 956681 - RNA, 19 nt, Artificial Sequence
  Description of Artificial Sequence: Synthetic oligonucleotide
agagcacugucagauccuu

SEQ ID NO: 956682 - RNA, 19 nt, Artificial Sequence
  Description of Artificial Sequence: Synthetic oligonucleotide
cauaggacuuaggguucac

SEQ ID NO: 956683 - RNA, 19 nt, Artificial Sequence
  Description of Artificial Sequence: Synthetic oligonucleotide
gcucacauguaggcaacgc

SEQ ID NO: 956684 - RNA, 19 nt, Artificial Sequence
  Description of Artificial Sequence: Synthetic oligonucleotide
guucacacguagacagcuc

SEQ ID NO: 956685 - RNA, 19 nt, Artificial Sequence
  Description of Artificial Sequence: Synthetic oligonucleotide
cagggcucggagacgauua

SEQ ID NO: 956686 - RNA, 19 nt, Artificial Sequence
  Description of Artificial Sequence: Synthetic oligonucleotide
cuucucggcgacaguucca

SEQ ID NO: 956687 - RNA, 19 nt, Artificial Sequence
  Description of Artificial Sequence: Synthetic oligonucleotide
ggugccucaucaaccauaa

SEQ ID NO: 956688 - RNA, 19 nt, Artificial Sequence
  Description of Artificial Sequence: Synthetic oligonucleotide
ccuggcggccuuugaaaag

SEQ ID NO: 956689 - RNA, 19 nt, Artificial Sequence
  Description of Artificial Sequence: Synthetic oligonucleotide
cagaaucuggcuugucagu

SEQ ID NO: 956690 - RNA, 19 nt, Artificial Sequence
  Description of Artificial Sequence: Synthetic oligonucleotide
caggagcgguaaugccagg

SEQ ID NO: 956691 - RNA, 19 nt, Artificial Sequence
  Description of Artificial Sequence: Synthetic oligonucleotide
gaagacagcuugaguggcu

SEQ ID NO: 956692 - RNA, 19 nt, Artificial Sequence
  Description of Artificial Sequence: Synthetic oligonucleotide
ggugucggcucagcgucgg

SEQ ID NO: 956693 - RNA, 19 nt, Artificial Sequence
  Description of Artificial Sequence: Synthetic oligonucleotide
ggcucacauguaggcaacg

SEQ ID NO: 956694 - RNA, 19 nt, Artificial Sequence
  Description of Artificial Sequence: Synthetic oligonucleotide
gaggacuagcuuggggcaa

SEQ ID NO: 956695 - RNA, 19 nt, Artificial Sequence
  Description of Artificial Sequence: Synthetic oligonucleotide
agacaacguaaagcaccca

SEQ ID NO: 956696 - RNA, 19 nt, Artificial Sequence
  Description of Artificial Sequence: Synthetic oligonucleotide
ucaucgcggcucacaugua

SEQ ID NO: 956697 - RNA, 19 nt, Artificial Sequence
  Description of Artificial Sequence: Synthetic oligonucleotide
ggcucggagacgauuaugu

SEQ ID NO: 956698 - RNA, 19 nt, Artificial Sequence
  Description of Artificial Sequence: Synthetic oligonucleotide
agcucgccagccugccgcu

SEQ ID NO: 956699 - RNA, 19 nt, Artificial Sequence
  Description of Artificial Sequence: Synthetic oligonucleotide
cuugaguggcugacuggua

SEQ ID NO: 956700 - RNA, 19 nt, Artificial Sequence
  Description of Artificial Sequence: Synthetic oligonucleotide
ggucguugagagaggcggc

SEQ ID NO: 956701 - RNA, 19 nt, Artificial Sequence
  Description of Artificial Sequence: Synthetic oligonucleotide
cacuucgaggaagcgggca

SEQ ID NO: 956702 - RNA, 19 nt, Artificial Sequence
  Description of Artificial Sequence: Synthetic oligonucleotide
aggugccauaggacuuagg

SEQ ID NO: 956703 - RNA, 19 nt, Artificial Sequence
  Description of Artificial Sequence: Synthetic oligonucleotide
gcuacaaaucgccgguagu

SEQ ID NO: 956704 - RNA, 19 nt, Artificial Sequence
  Description of Artificial Sequence: Synthetic oligonucleotide
cgguuauugcauaguaaca

SEQ ID NO: 956705 - RNA, 19 nt, Artificial Sequence
  Description of Artificial Sequence: Synthetic oligonucleotide
gguagucccagcagugaaa

SEQ ID NO: 956706 - RNA, 19 nt, Artificial Sequence
  Description of Artificial Sequence: Synthetic oligonucleotide
cugacucguccagcucgcc

SEQ ID NO: 956707 - RNA, 19 nt, Artificial Sequence
  Description of Artificial Sequence: Synthetic oligonucleotide
gcaccucaagacaacguaa

SEQ ID NO: 956708 - RNA, 19 nt, Artificial Sequence
  Description of Artificial Sequence: Synthetic oligonucleotide
gacuuaggguucacacgua

SEQ ID NO: 956709 - RNA, 19 nt, Artificial Sequence
  Description of Artificial Sequence: Synthetic oligonucleotide
cuucagacgucuucaccuu

SEQ ID NO: 956710 - RNA, 19 nt, Artificial Sequence
  Description of Artificial Sequence: Synthetic oligonucleotide
ccuaggugaggauacugcu

SEQ ID NO: 956711 - RNA, 19 nt, Artificial Sequence
  Description of Artificial Sequence: Synthetic oligonucleotide
gcgcccaugcauggugucg

SEQ ID NO: 956712 - RNA, 19 nt, Artificial Sequence
  Description of Artificial Sequence: Synthetic oligonucleotide
gccauaggacuuaggguuc

SEQ ID NO: 956713 - RNA, 19 nt, Artificial Sequence
  Description of Artificial Sequence: Synthetic oligonucleotide
cgaaaggugugcuggggca

SEQ ID NO: 956714 - RNA, 19 nt, Artificial Sequence
  Description of Artificial Sequence: Synthetic oligonucleotide
cucuuucagcaguacguuu

SEQ ID NO: 956715 - RNA, 19 nt, Artificial Sequence
  Description of Artificial Sequence: Synthetic oligonucleotide
caggccucaucgcggcuca

SEQ ID NO: 956716 - RNA, 19 nt, Artificial Sequence
  Description of Artificial Sequence: Synthetic oligonucleotide
ugggccgguuccugccauc

SEQ ID NO: 956717 - RNA, 19 nt, Artificial Sequence
  Description of Artificial Sequence: Synthetic oligonucleotide
ucucggcgacaguuccaua

SEQ ID NO: 956718 - RNA, 19 nt, Artificial Sequence
  Description of Artificial Sequence: Synthetic oligonucleotide
cccgagcccaguuggguuc

SEQ ID NO: 956719 - RNA, 19 nt, Artificial Sequence
  Description of Artificial Sequence: Synthetic oligonucleotide
caccgacagcucacaccug

SEQ ID NO: 956720 - RNA, 19 nt, Artificial Sequence
  Description of Artificial Sequence: Synthetic oligonucleotide
gggcucggagacgauuaug

SEQ ID NO: 956721 - RNA, 19 nt, Artificial Sequence
  Description of Artificial Sequence: Synthetic oligonucleotide
aggcgcccaugcauggugu

SEQ ID NO: 956722 - RNA, 19 nt, Artificial Sequence
  Description of Artificial Sequence: Synthetic oligonucleotide
ugcucgcauuggguccaca

SEQ ID NO: 956723 - RNA, 19 nt, Artificial Sequence
  Description of Artificial Sequence: Synthetic oligonucleotide
gaguugcccugcaggucga

SEQ ID NO: 956724 - RNA, 19 nt, Artificial Sequence
  Description of Artificial Sequence: Synthetic oligonucleotide
cguagacagcucucuagga

SEQ ID NO: 956725 - RNA, 19 nt, Artificial Sequence
  Description of Artificial Sequence: Synthetic oligonucleotide
gggacgagaaaagcagacu

SEQ ID NO: 956726 - RNA, 19 nt, Artificial Sequence
  Description of Artificial Sequence: Synthetic oligonucleotide
cgcccaugcauggugucgg

SEQ ID NO: 956727 - RNA, 19 nt, Artificial Sequence
  Description of Artificial Sequence: Synthetic oligonucleotide
ccucaucgcggcucacaug

SEQ ID NO: 956728 - RNA, 19 nt, Artificial Sequence
  Description of Artificial Sequence: Synthetic oligonucleotide
auccuggggcuccgcccga

SEQ ID NO: 956729 - RNA, 19 nt, Artificial Sequence
  Description of Artificial Sequence: Synthetic oligonucleotide
caguuccauaggguggcaa

SEQ ID NO: 956730 - RNA, 19 nt, Artificial Sequence
  Description of Artificial Sequence: Synthetic oligonucleotide
agcgucggggacagaggaa

SEQ ID NO: 956731 - RNA, 19 nt, Artificial Sequence
  Description of Artificial Sequence: Synthetic oligonucleotide
cuggggcaagaggcaggag

SEQ ID NO: 956732 - RNA, 19 nt, Artificial Sequence
  Description of Artificial Sequence: Synthetic oligonucleotide
ggcggccuuugaaaagcac

SEQ ID NO: 956733 - RNA, 19 nt, Artificial Sequence
  Description of Artificial Sequence: Synthetic oligonucleotide
gcccaugcauggugucggc

SEQ ID NO: 956734 - RNA, 19 nt, Artificial Sequence
  Description of Artificial Sequence: Synthetic oligonucleotide
gcggccuagcagccagcag

SEQ ID NO: 956735 - RNA, 19 nt, Artificial Sequence
  Description of Artificial Sequence: Synthetic oligonucleotide
ccugccgcuucuggaagac

SEQ ID NO: 956736 - RNA, 19 nt, Artificial Sequence
  Description of Artificial Sequence: Synthetic oligonucleotide
ggcgacaguuccauagggu

SEQ ID NO: 956737 - RNA, 19 nt, Artificial Sequence
  Description of Artificial Sequence: Synthetic oligonucleotide
uccgggugaugaggcuauc

SEQ ID NO: 956738 - RNA, 19 nt, Artificial Sequence
  Description of Artificial Sequence: Synthetic oligonucleotide
aggccucaucgcggcucac

SEQ ID NO: 956739 - RNA, 19 nt, Artificial Sequence
  Description of Artificial Sequence: Synthetic oligonucleotide
aggcgucccugugggccag

SEQ ID NO: 956740 - RNA, 19 nt, Artificial Sequence
  Description of Artificial Sequence: Synthetic oligonucleotide
cagugaaaguuccgcucau

SEQ ID NO: 956741 - RNA, 19 nt, Artificial Sequence
  Description of Artificial Sequence: Synthetic oligonucleotide
ggcgcccaugcaugguguc

SEQ ID NO: 956742 - RNA, 19 nt, Artificial Sequence
  Description of Artificial Sequence: Synthetic oligonucleotide
ggucaguaaagaaggcguu

SEQ ID NO: 956743 - RNA, 19 nt, Artificial Sequence
  Description of Artificial Sequence: Synthetic oligonucleotide
gcaggucgaggaggacuag

SEQ ID NO: 956744 - RNA, 19 nt, Artificial Sequence
  Description of Artificial Sequence: Synthetic oligonucleotide
acgcgcaccucggcauacu

SEQ ID NO: 956745 - RNA, 19 nt, Artificial Sequence
  Description of Artificial Sequence: Synthetic oligonucleotide
ccgguuccugccaucugga

SEQ ID NO: 956746 - RNA, 19 nt, Artificial Sequence
  Description of Artificial Sequence: Synthetic oligonucleotide
agcacuccuggcggccuuu

SEQ ID NO: 956747 - RNA, 19 nt, Artificial Sequence
  Description of Artificial Sequence: Synthetic oligonucleotide
ggcggccuagcagccagca

SEQ ID NO: 956748 - RNA, 19 nt, Artificial Sequence
  Description of Artificial Sequence: Synthetic oligonucleotide
ccacgccauccaaggacuc

SEQ ID NO: 956749 - RNA, 19 nt, Artificial Sequence
  Description of Artificial Sequence: Synthetic oligonucleotide
ggacuagcuuggggcaaga

SEQ ID NO: 956750 - RNA, 19 nt, Artificial Sequence
  Description of Artificial Sequence: Synthetic oligonucleotide
cugccgcuucuggaagaca

SEQ ID NO: 956751 - RNA, 19 nt, Artificial Sequence
  Description of Artificial Sequence: Synthetic oligonucleotide
cauggcugggccgguuccu

SEQ ID NO: 956752 - RNA, 19 nt, Artificial Sequence
  Description of Artificial Sequence: Synthetic oligonucleotide
ccgggugaugaggcuauca

SEQ ID NO: 956753 - RNA, 19 nt, Artificial Sequence
  Description of Artificial Sequence: Synthetic oligonucleotide
cucccagaaucuggcuugu

SEQ ID NO: 956754 - RNA, 19 nt, Artificial Sequence
  Description of Artificial Sequence: Synthetic oligonucleotide
cgguagucccagcagugaa

SEQ ID NO: 956755 - RNA, 19 nt, Artificial Sequence
  Description of Artificial Sequence: Synthetic oligonucleotide
gcacuccuggcggccuuug

SEQ ID NO: 956756 - RNA, 19 nt, Artificial Sequence
  Description of Artificial Sequence: Synthetic oligonucleotide
ccgcaucagcaggaugaug

SEQ ID NO: 956757 - RNA, 19 nt, Artificial Sequence
  Description of Artificial Sequence: Synthetic oligonucleotide
ccgguagucccagcaguga

SEQ ID NO: 956758 - RNA, 19 nt, Artificial Sequence
  Description of Artificial Sequence: Synthetic oligonucleotide
ccgacagcucacaccugaa

SEQ ID NO: 956759 - RNA, 19 nt, Artificial Sequence
  Description of Artificial Sequence: Synthetic oligonucleotide
cgcccgacccaggagccag

SEQ ID NO: 956760 - RNA, 19 nt, Artificial Sequence
  Description of Artificial Sequence: Synthetic oligonucleotide
cgcgcaccucggcauacuc

SEQ ID NO: 956761 - RNA, 19 nt, Artificial Sequence
  Description of Artificial Sequence: Synthetic oligonucleotide
cugggccgguuccugccau

SEQ ID NO: 956762 - RNA, 19 nt, Artificial Sequence
  Description of Artificial Sequence: Synthetic oligonucleotide
gcucggacuguagcacugu

SEQ ID NO: 956763 - RNA, 19 nt, Artificial Sequence
  Description of Artificial Sequence: Synthetic oligonucleotide
gcccgacccaggagccagc

SEQ ID NO: 956764 - RNA, 19 nt, Artificial Sequence
  Description of Artificial Sequence: Synthetic oligonucleotide
ccgagcccaguuggguuca

SEQ ID NO: 956765 - RNA, 19 nt, Artificial Sequence
  Description of Artificial Sequence: Synthetic oligonucleotide
gugcccgcaucagcaggau

SEQ ID NO: 956766 - RNA, 19 nt, Artificial Sequence
  Description of Artificial Sequence: Synthetic oligonucleotide
gggccuccuaggugaggau

SEQ ID NO: 956767 - RNA, 19 nt, Artificial Sequence
  Description of Artificial Sequence: Synthetic oligonucleotide
cuguagcacuguggacuuu

SEQ ID NO: 956768 - RNA, 19 nt, Artificial Sequence
  Description of Artificial Sequence: Synthetic oligonucleotide
gcucccguucuagccuuuu

SEQ ID NO: 956769 - RNA, 19 nt, Artificial Sequence
  Description of Artificial Sequence: Synthetic oligonucleotide
ccgcccgacccaggagcca

SEQ ID NO: 956770 - RNA, 19 nt, Artificial Sequence
  Description of Artificial Sequence: Synthetic oligonucleotide
aaaauugccagauauucag

SEQ ID NO: 956771 - RNA, 19 nt, Artificial Sequence
  Description of Artificial Sequence: Synthetic oligonucleotide
auauaaagcucacagaaac

SEQ ID NO: 956772 - RNA, 19 nt, Artificial Sequence
  Description of Artificial Sequence: Synthetic oligonucleotide
ucagagaucauauaaagcu

SEQ ID NO: 956773 - RNA, 19 nt, Artificial Sequence
  Description of Artificial Sequence: Synthetic oligonucleotide
uuuauuggcauucucguag

SEQ ID NO: 956774 - RNA, 19 nt, Artificial Sequence
  Description of Artificial Sequence: Synthetic oligonucleotide
aaacaaacgcaguuaagac

SEQ ID NO: 956775 - RNA, 19 nt, Artificial Sequence
  Description of Artificial Sequence: Synthetic oligonucleotide
aaaaucuagaaaggcaacc

SEQ ID NO: 956776 - RNA, 19 nt, Artificial Sequence
  Description of Artificial Sequence: Synthetic oligonucleotide
uuuaacucgguuaugauau

SEQ ID NO: 956777 - RNA, 19 nt, Artificial Sequence
  Description of Artificial Sequence: Synthetic oligonucleotide
gaacaauggacucugagag

SEQ ID NO: 956778 - RNA, 19 nt, Artificial Sequence
  Description of Artificial Sequence: Synthetic oligonucleotide
uuauacuccaagaagacgu

SEQ ID NO: 956779 - RNA, 19 nt, Artificial Sequence
  Description of Artificial Sequence: Synthetic oligonucleotide
aacaaacgagaguugaagg

SEQ ID NO: 956780 - RNA, 19 nt, Artificial Sequence
  Description of Artificial Sequence: Synthetic oligonucleotide
ugauucauagguaaauaag

SEQ ID NO: 956781 - RNA, 19 nt, Artificial Sequence
  Description of Artificial Sequence: Synthetic oligonucleotide
acaaacgagaguugaaggc

SEQ ID NO: 956782 - RNA, 19 nt, Artificial Sequence
  Description of Artificial Sequence: Synthetic oligonucleotide
agaaaggcaaccuuuauca

SEQ ID NO: 956783 - RNA, 19 nt, Artificial Sequence
  Description of Artificial Sequence: Synthetic oligonucleotide
uguucguucaugcucaaag

SEQ ID NO: 956784 - RNA, 19 nt, Artificial Sequence
  Description of Artificial Sequence: Synthetic oligonucleotide
uuugcauauaucuguagag

SEQ ID NO: 956785 - RNA, 19 nt, Artificial Sequence
  Description of Artificial Sequence: Synthetic oligonucleotide
guuccuaaagcauauaaug

SEQ ID NO: 956786 - RNA, 19 nt, Artificial Sequence
  Description of Artificial Sequence: Synthetic oligonucleotide
ugucagauuuagcagaugc

SEQ ID NO: 956787 - RNA, 19 nt, Artificial Sequence
  Description of Artificial Sequence: Synthetic oligonucleotide
uaccccaaauuccagagcg

SEQ ID NO: 956788 - RNA, 19 nt, Artificial Sequence
  Description of Artificial Sequence: Synthetic oligonucleotide
uggagaucuacauuuauug

SEQ ID NO: 956789 - RNA, 19 nt, Artificial Sequence
  Description of Artificial Sequence: Synthetic oligonucleotide
aaaaccgcaaggcaguucu

SEQ ID NO: 956790 - RNA, 19 nt, Artificial Sequence
  Description of Artificial Sequence: Synthetic oligonucleotide
ucuacguucauuaauucaa

SEQ ID NO: 956791 - RNA, 19 nt, Artificial Sequence
  Description of Artificial Sequence: Synthetic oligonucleotide
caaaaucaggucuuggugg

SEQ ID NO: 956792 - RNA, 19 nt, Artificial Sequence
  Description of Artificial Sequence: Synthetic oligonucleotide
ucuuguuuuaucaaacagu

SEQ ID NO: 956793 - RNA, 19 nt, Artificial Sequence
  Description of Artificial Sequence: Synthetic oligonucleotide
uaucaaacaguuccgaaac

SEQ ID NO: 956794 - RNA, 19 nt, Artificial Sequence
  Description of Artificial Sequence: Synthetic oligonucleotide
uucuauuguaaucaucagc

SEQ ID NO: 956795 - RNA, 19 nt, Artificial Sequence
  Description of Artificial Sequence: Synthetic oligonucleotide
uccguuuaaaaccgcaagg

SEQ ID NO: 956796 - RNA, 19 nt, Artificial Sequence
  Description of Artificial Sequence: Synthetic oligonucleotide
uuaguucuaguucugcaag

SEQ ID NO: 956797 - RNA, 19 nt, Artificial Sequence
  Description of Artificial Sequence: Synthetic oligonucleotide
aggagcauggaguuaaaac

SEQ ID NO: 956798 - RNA, 19 nt, Artificial Sequence
  Description of Artificial Sequence: Synthetic oligonucleotide
ucaaaucuugauuauacuc

SEQ ID NO: 956799 - RNA, 19 nt, Artificial Sequence
  Description of Artificial Sequence: Synthetic oligonucleotide
ggagcauggaguuaaaacg

SEQ ID NO: 956800 - RNA, 19 nt, Artificial Sequence
  Description of Artificial Sequence: Synthetic oligonucleotide
agguaaauaaggcuggcag

SEQ ID NO: 956801 - RNA, 19 nt, Artificial Sequence
  Description of Artificial Sequence: Synthetic oligonucleotide
aacaaacgcaguuaagaca

SEQ ID NO: 956802 - RNA, 19 nt, Artificial Sequence
  Description of Artificial Sequence: Synthetic oligonucleotide
aaacaaacgagaguugaag

SEQ ID NO: 956803 - RNA, 19 nt, Artificial Sequence
  Description of Artificial Sequence: Synthetic oligonucleotide
aaguccgcggucuuccucc

SEQ ID NO: 956804 - RNA, 19 nt, Artificial Sequence
  Description of Artificial Sequence: Synthetic oligonucleotide
agaguguuaaaacuggaca

SEQ ID NO: 956805 - RNA, 19 nt, Artificial Sequence
  Description of Artificial Sequence: Synthetic oligonucleotide
uuaaaacuggacaagugau

SEQ ID NO: 956806 - RNA, 19 nt, Artificial Sequence
  Description of Artificial Sequence: Synthetic oligonucleotide
agauuuagcagaugcaucu

SEQ ID NO: 956807 - RNA, 19 nt, Artificial Sequence
  Description of Artificial Sequence: Synthetic oligonucleotide
uaaguaguacuugagcagg

SEQ ID NO: 956808 - RNA, 19 nt, Artificial Sequence
  Description of Artificial Sequence: Synthetic oligonucleotide
uuccuaaagcauauaauga

SEQ ID NO: 956809 - RNA, 19 nt, Artificial Sequence
  Description of Artificial Sequence: Synthetic oligonucleotide
auucuaaaaggaauguucg

SEQ ID NO: 956810 - RNA, 19 nt, Artificial Sequence
  Description of Artificial Sequence: Synthetic oligonucleotide
gguuaugauauucuaaaag

SEQ ID NO: 956811 - RNA, 19 nt, Artificial Sequence
  Description of Artificial Sequence: Synthetic oligonucleotide
cauagguaaauaaggcugg

SEQ ID NO: 956812 - RNA, 19 nt, Artificial Sequence
  Description of Artificial Sequence: Synthetic oligonucleotide
caugagaucgcuacgcagg

SEQ ID NO: 956813 - RNA, 19 nt, Artificial Sequence
  Description of Artificial Sequence: Synthetic oligonucleotide
cauggagccagauaaauuc

SEQ ID NO: 956814 - RNA, 19 nt, Artificial Sequence
  Description of Artificial Sequence: Synthetic oligonucleotide
ugaccuucuauagaggagg

SEQ ID NO: 956815 - RNA, 19 nt, Artificial Sequence
  Description of Artificial Sequence: Synthetic oligonucleotide
uccagagcgauacaaggag

SEQ ID NO: 956816 - RNA, 19 nt, Artificial Sequence
  Description of Artificial Sequence: Synthetic oligonucleotide
aaacgcaguuaagacaggc

SEQ ID NO: 956817 - RNA, 19 nt, Artificial Sequence
  Description of Artificial Sequence: Synthetic oligonucleotide
accuuuaucaugugugaac

SEQ ID NO: 956818 - RNA, 19 nt, Artificial Sequence
  Description of Artificial Sequence: Synthetic oligonucleotide
uguuaaaacuggacaagug

SEQ ID NO: 956819 - RNA, 19 nt, Artificial Sequence
  Description of Artificial Sequence: Synthetic oligonucleotide
guuuaaaaccgcaaggcag

SEQ ID NO: 956820 - RNA, 19 nt, Artificial Sequence
  Description of Artificial Sequence: Synthetic oligonucleotide
auugcuuuaaguccgcggu

SEQ ID NO: 956821 - RNA, 19 nt, Artificial Sequence
  Description of Artificial Sequence: Synthetic oligonucleotide
uuaguccacgaguuuaagg

SEQ ID NO: 956822 - RNA, 19 nt, Artificial Sequence
  Description of Artificial Sequence: Synthetic oligonucleotide
aaaaucaggucuugguggu

SEQ ID NO: 956823 - RNA, 19 nt, Artificial Sequence
  Description of Artificial Sequence: Synthetic oligonucleotide
ucaauuaagaagguuuaca

SEQ ID NO: 956824 - RNA, 19 nt, Artificial Sequence
  Description of Artificial Sequence: Synthetic oligonucleotide
uuaaaagagaguugaacuu

SEQ ID NO: 956825 - RNA, 19 nt, Artificial Sequence
  Description of Artificial Sequence: Synthetic oligonucleotide
aguuucagccuguagaaca

SEQ ID NO: 956826 - RNA, 19 nt, Artificial Sequence
  Description of Artificial Sequence: Synthetic oligonucleotide
uauugcuuuaaguccgcgg

SEQ ID NO: 956827 - RNA, 19 nt, Artificial Sequence
  Description of Artificial Sequence: Synthetic oligonucleotide
gauuuauuaucgcuacccc

SEQ ID NO: 956828 - RNA, 19 nt, Artificial Sequence
  Description of Artificial Sequence: Synthetic oligonucleotide
agacaggcuacuuaaaaga

SEQ ID NO: 956829 - RNA, 19 nt, Artificial Sequence
  Description of Artificial Sequence: Synthetic oligonucleotide
uccuaaagcauauaaugaa

SEQ ID NO: 956830 - RNA, 19 nt, Artificial Sequence
  Description of Artificial Sequence: Synthetic oligonucleotide
cuacgcaggaaacaaacgc

SEQ ID NO: 956831 - RNA, 19 nt, Artificial Sequence
  Description of Artificial Sequence: Synthetic oligonucleotide
uauugguuuaguccacgag

SEQ ID NO: 956832 - RNA, 19 nt, Artificial Sequence
  Description of Artificial Sequence: Synthetic oligonucleotide
uuuaguucuaguucugcaa

SEQ ID NO: 956833 - RNA, 19 nt, Artificial Sequence
  Description of Artificial Sequence: Synthetic oligonucleotide
aaacgcaggacacaggaua

SEQ ID NO: 956834 - RNA, 19 nt, Artificial Sequence
  Description of Artificial Sequence: Synthetic oligonucleotide
augugucuccguuuaaaac

SEQ ID NO: 956835 - RNA, 19 nt, Artificial Sequence
  Description of Artificial Sequence: Synthetic oligonucleotide
auuuauuaucgcuacccca

SEQ ID NO: 956836 - RNA, 19 nt, Artificial Sequence
  Description of Artificial Sequence: Synthetic oligonucleotide
uucgcuaagagcauccgaa

SEQ ID NO: 956837 - RNA, 19 nt, Artificial Sequence
  Description of Artificial Sequence: Synthetic oligonucleotide
acgaguuuaaggcaaacau

SEQ ID NO: 956838 - RNA, 19 nt, Artificial Sequence
  Description of Artificial Sequence: Synthetic oligonucleotide
acuccugaaacgaugacuc

SEQ ID NO: 956839 - RNA, 19 nt, Artificial Sequence
  Description of Artificial Sequence: Synthetic oligonucleotide
uacgcaggaaacaaacgca

SEQ ID NO: 956840 - RNA, 19 nt, Artificial Sequence
  Description of Artificial Sequence: Synthetic oligonucleotide
uccuccgagaggaagucgg

SEQ ID NO: 956841 - RNA, 19 nt, Artificial Sequence
  Description of Artificial Sequence: Synthetic oligonucleotide
uaucgcuaccccaaauucc

SEQ ID NO: 956842 - RNA, 19 nt, Artificial Sequence
  Description of Artificial Sequence: Synthetic oligonucleotide
gacguggaaauuuaaaucu

SEQ ID NO: 956843 - RNA, 19 nt, Artificial Sequence
  Description of Artificial Sequence: Synthetic oligonucleotide
uuaucgcuaccccaaauuc

SEQ ID NO: 956844 - RNA, 19 nt, Artificial Sequence
  Description of Artificial Sequence: Synthetic oligonucleotide
uucaacggaaggccgagug

SEQ ID NO: 956845 - RNA, 19 nt, Artificial Sequence
  Description of Artificial Sequence: Synthetic oligonucleotide
guuaagacaggcuacuuaa

SEQ ID NO: 956846 - RNA, 19 nt, Artificial Sequence
  Description of Artificial Sequence: Synthetic oligonucleotide
uuaagaagguuuacacgga

SEQ ID NO: 956847 - RNA, 19 nt, Artificial Sequence
  Description of Artificial Sequence: Synthetic oligonucleotide
ucucaauuaagaagguuua

SEQ ID NO: 956848 - RNA, 19 nt, Artificial Sequence
  Description of Artificial Sequence: Synthetic oligonucleotide
cauggaguuaaaacgccgc

SEQ ID NO: 956849 - RNA, 19 nt, Artificial Sequence
  Description of Artificial Sequence: Synthetic oligonucleotide
aaguaaagucucaauuaag

SEQ ID NO: 956850 - RNA, 19 nt, Artificial Sequence
  Description of Artificial Sequence: Synthetic oligonucleotide
acugacccaaaacucuacg

SEQ ID NO: 956851 - RNA, 19 nt, Artificial Sequence
  Description of Artificial Sequence: Synthetic oligonucleotide
aaccgcaaggcaguucugc

SEQ ID NO: 956852 - RNA, 19 nt, Artificial Sequence
  Description of Artificial Sequence: Synthetic oligonucleotide
agaugcaucuuuaacucgg

SEQ ID NO: 956853 - RNA, 19 nt, Artificial Sequence
  Description of Artificial Sequence: Synthetic oligonucleotide
uccugucagauuuagcaga

SEQ ID NO: 956854 - RNA, 19 nt, Artificial Sequence
  Description of Artificial Sequence: Synthetic oligonucleotide
aauuccagagcgauacaag

SEQ ID NO: 956855 - RNA, 19 nt, Artificial Sequence
  Description of Artificial Sequence: Synthetic oligonucleotide
uuuaaguccgcggucuucc

SEQ ID NO: 956856 - RNA, 19 nt, Artificial Sequence
  Description of Artificial Sequence: Synthetic oligonucleotide
auaucuguagaguccugag

SEQ ID NO: 956857 - RNA, 19 nt, Artificial Sequence
  Description of Artificial Sequence: Synthetic oligonucleotide
uuaucccuuucgcuaagag

SEQ ID NO: 956858 - RNA, 19 nt, Artificial Sequence
  Description of Artificial Sequence: Synthetic oligonucleotide
ucagauuuagcagaugcau

SEQ ID NO: 956859 - RNA, 19 nt, Artificial Sequence
  Description of Artificial Sequence: Synthetic oligonucleotide
ucuuaaaaucuaucaguuc

SEQ ID NO: 956860 - RNA, 19 nt, Artificial Sequence
  Description of Artificial Sequence: Synthetic oligonucleotide
ugucgaacgacugaaaauu

SEQ ID NO: 956861 - RNA, 19 nt, Artificial Sequence
  Description of Artificial Sequence: Synthetic oligonucleotide
aaacaguuccgaaacuuug

SEQ ID NO: 956862 - RNA, 19 nt, Artificial Sequence
  Description of Artificial Sequence: Synthetic oligonucleotide
acaguuccgaaacuuugag

SEQ ID NO: 956863 - RNA, 19 nt, Artificial Sequence
  Description of Artificial Sequence: Synthetic oligonucleotide
gauacaaggagcauggagu

SEQ ID NO: 956864 - RNA, 19 nt, Artificial Sequence
  Description of Artificial Sequence: Synthetic oligonucleotide
uccaccagugaccuugacc

SEQ ID NO: 956865 - RNA, 19 nt, Artificial Sequence
  Description of Artificial Sequence: Synthetic oligonucleotide
ucgaacgacugaaaauuca

SEQ ID NO: 956866 - RNA, 19 nt, Artificial Sequence
  Description of Artificial Sequence: Synthetic oligonucleotide
uucucaaaauaggaugugc

SEQ ID NO: 956867 - RNA, 19 nt, Artificial Sequence
  Description of Artificial Sequence: Synthetic oligonucleotide
cucgucuuaaaaucuauca

SEQ ID NO: 956868 - RNA, 19 nt, Artificial Sequence
  Description of Artificial Sequence: Synthetic oligonucleotide
agcgauacaaggagcaugg

SEQ ID NO: 956869 - RNA, 19 nt, Artificial Sequence
  Description of Artificial Sequence: Synthetic oligonucleotide
ucuaucaguucuuguuuug

SEQ ID NO: 956870 - RNA, 19 nt, Artificial Sequence
  Description of Artificial Sequence: Synthetic oligonucleotide
uccccagugagcuuagaug

SEQ ID NO: 956871 - RNA, 19 nt, Artificial Sequence
  Description of Artificial Sequence: Synthetic oligonucleotide
cuauagaggagguccuuag

SEQ ID NO: 956872 - RNA, 19 nt, Artificial Sequence
  Description of Artificial Sequence: Synthetic oligonucleotide
uuccagagcgauacaagga

SEQ ID NO: 956873 - RNA, 19 nt, Artificial Sequence
  Description of Artificial Sequence: Synthetic oligonucleotide
aacaauggacucugagagu

SEQ ID NO: 956874 - RNA, 19 nt, Artificial Sequence
  Description of Artificial Sequence: Synthetic oligonucleotide
ucuucgugugaacagugaa

SEQ ID NO: 956875 - RNA, 19 nt, Artificial Sequence
  Description of Artificial Sequence: Synthetic oligonucleotide
aaacgagaguugaaggcag

SEQ ID NO: 956876 - RNA, 19 nt, Artificial Sequence
  Description of Artificial Sequence: Synthetic oligonucleotide
uuucccgugaagcaucaaa

SEQ ID NO: 956877 - RNA, 19 nt, Artificial Sequence
  Description of Artificial Sequence: Synthetic oligonucleotide
acucuacguucauuaauuc

SEQ ID NO: 956878 - RNA, 19 nt, Artificial Sequence
  Description of Artificial Sequence: Synthetic oligonucleotide
gacccaaaacucuacguuc

SEQ ID NO: 956879 - RNA, 19 nt, Artificial Sequence
  Description of Artificial Sequence: Synthetic oligonucleotide
ugcgacucccuuaaguagu

SEQ ID NO: 956880 - RNA, 19 nt, Artificial Sequence
  Description of Artificial Sequence: Synthetic oligonucleotide
ucguaguccaccagugacc

SEQ ID NO: 956881 - RNA, 19 nt, Artificial Sequence
  Description of Artificial Sequence: Synthetic oligonucleotide
agccaugagaucgcuacgc

SEQ ID NO: 956882 - RNA, 19 nt, Artificial Sequence
  Description of Artificial Sequence: Synthetic oligonucleotide
agagaucauauaaagcuca

SEQ ID NO: 956883 - RNA, 19 nt, Artificial Sequence
  Description of Artificial Sequence: Synthetic oligonucleotide
uaugugucuccguuuaaaa

SEQ ID NO: 956884 - RNA, 19 nt, Artificial Sequence
  Description of Artificial Sequence: Synthetic oligonucleotide
ggugggauaauguaaccug

SEQ ID NO: 956885 - RNA, 19 nt, Artificial Sequence
  Description of Artificial Sequence: Synthetic oligonucleotide
ugggauaauguaaccugca

SEQ ID NO: 956886 - RNA, 19 nt, Artificial Sequence
  Description of Artificial Sequence: Synthetic oligonucleotide
ugacccaaaacucuacguu

SEQ ID NO: 956887 - RNA, 19 nt, Artificial Sequence
  Description of Artificial Sequence: Synthetic oligonucleotide
auuaucgcuaccccaaauu

SEQ ID NO: 956888 - RNA, 19 nt, Artificial Sequence
  Description of Artificial Sequence: Synthetic oligonucleotide
uuuggagaucuacauuuau

SEQ ID NO: 956889 - RNA, 19 nt, Artificial Sequence
  Description of Artificial Sequence: Synthetic oligonucleotide
uucccgugaagcaucaaaa

SEQ ID NO: 956890 - RNA, 19 nt, Artificial Sequence
  Description of Artificial Sequence: Synthetic oligonucleotide
auuuucaacgaaggaauca

SEQ ID NO: 956891 - RNA, 19 nt, Artificial Sequence
  Description of Artificial Sequence: Synthetic oligonucleotide
augauauucuaaaaggaau

SEQ ID NO: 956892 - RNA, 19 nt, Artificial Sequence
  Description of Artificial Sequence: Synthetic oligonucleotide
ucccuuaaguaguacuuga

SEQ ID NO: 956893 - RNA, 19 nt, Artificial Sequence
  Description of Artificial Sequence: Synthetic oligonucleotide
uugcgacucccuuaaguag

SEQ ID NO: 956894 - RNA, 19 nt, Artificial Sequence
  Description of Artificial Sequence: Synthetic oligonucleotide
aucuuuaacucgguuauga

SEQ ID NO: 956895 - RNA, 19 nt, Artificial Sequence
  Description of Artificial Sequence: Synthetic oligonucleotide
gaagucggggccgucaucc

SEQ ID NO: 956896 - RNA, 19 nt, Artificial Sequence
  Description of Artificial Sequence: Synthetic oligonucleotide
cagagaucauauaaagcuc

SEQ ID NO: 956897 - RNA, 19 nt, Artificial Sequence
  Description of Artificial Sequence: Synthetic oligonucleotide
cuugaccuucuauagagga

SEQ ID NO: 956898 - RNA, 19 nt, Artificial Sequence
  Description of Artificial Sequence: Synthetic oligonucleotide
aaacgccgcugguaucgcc

SEQ ID NO: 956899 - RNA, 19 nt, Artificial Sequence
  Description of Artificial Sequence: Synthetic oligonucleotide
aguagauuuauuaucgcua

SEQ ID NO: 956900 - RNA, 19 nt, Artificial Sequence
  Description of Artificial Sequence: Synthetic oligonucleotide
uuucgcuaagagcauccga

SEQ ID NO: 956901 - RNA, 19 nt, Artificial Sequence
  Description of Artificial Sequence: Synthetic oligonucleotide
cuccguuuaaaaccgcaag

SEQ ID NO: 956902 - RNA, 19 nt, Artificial Sequence
  Description of Artificial Sequence: Synthetic oligonucleotide
auaggaugugcugccacac

SEQ ID NO: 956903 - RNA, 19 nt, Artificial Sequence
  Description of Artificial Sequence: Synthetic oligonucleotide
ugucauugacccuuccccu

SEQ ID NO: 956904 - RNA, 19 nt, Artificial Sequence
  Description of Artificial Sequence: Synthetic oligonucleotide
uuuucaacggaaggccgag

SEQ ID NO: 956905 - RNA, 19 nt, Artificial Sequence
  Description of Artificial Sequence: Synthetic oligonucleotide
cucguaguccaccagugac

SEQ ID NO: 956906 - RNA, 19 nt, Artificial Sequence
  Description of Artificial Sequence: Synthetic oligonucleotide
aguuaagacaggcuacuua

SEQ ID NO: 956907 - RNA, 19 nt, Artificial Sequence
  Description of Artificial Sequence: Synthetic oligonucleotide
ucuacguccuucacuccug

SEQ ID NO: 956908 - RNA, 19 nt, Artificial Sequence
  Description of Artificial Sequence: Synthetic oligonucleotide
gugucuccguuuaaaaccg

SEQ ID NO: 956909 - RNA, 19 nt, Artificial Sequence
  Description of Artificial Sequence: Synthetic oligonucleotide
gacagcacaacuguuggga

SEQ ID NO: 956910 - RNA, 19 nt, Artificial Sequence
  Description of Artificial Sequence: Synthetic oligonucleotide
aacgagaguugaaggcagc

SEQ ID NO: 956911 - RNA, 19 nt, Artificial Sequence
  Description of Artificial Sequence: Synthetic oligonucleotide
gcuaagagcauccgaaaug

SEQ ID NO: 956912 - RNA, 19 nt, Artificial Sequence
  Description of Artificial Sequence: Synthetic oligonucleotide
uuagcagaugcaucuuuaa

SEQ ID NO: 956913 - RNA, 19 nt, Artificial Sequence
  Description of Artificial Sequence: Synthetic oligonucleotide
caaacuuuugacagcacaa

SEQ ID NO: 956914 - RNA, 19 nt, Artificial Sequence
  Description of Artificial Sequence: Synthetic oligonucleotide
uuauuggcauucucguagu

SEQ ID NO: 956915 - RNA, 19 nt, Artificial Sequence
  Description of Artificial Sequence: Synthetic oligonucleotide
aacaguuccgaaacuuuga

SEQ ID NO: 956916 - RNA, 19 nt, Artificial Sequence
  Description of Artificial Sequence: Synthetic oligonucleotide
auccgaaauguccacuuga

SEQ ID NO: 956917 - RNA, 19 nt, Artificial Sequence
  Description of Artificial Sequence: Synthetic oligonucleotide
uccgaaauguccacuugaa

SEQ ID NO: 956918 - RNA, 19 nt, Artificial Sequence
  Description of Artificial Sequence: Synthetic oligonucleotide
acgagaguugaaggcagcc

SEQ ID NO: 956919 - RNA, 19 nt, Artificial Sequence
  Description of Artificial Sequence: Synthetic oligonucleotide
aacucgguuaugauauucu

SEQ ID NO: 956920 - RNA, 19 nt, Artificial Sequence
  Description of Artificial Sequence: Synthetic oligonucleotide
uuucucaaaauaggaugug

SEQ ID NO: 956921 - RNA, 19 nt, Artificial Sequence
  Description of Artificial Sequence: Synthetic oligonucleotide
caguuccgaaacuuugagg

SEQ ID NO: 956922 - RNA, 19 nt, Artificial Sequence
  Description of Artificial Sequence: Synthetic oligonucleotide
uucgugugaacagugaauu

SEQ ID NO: 956923 - RNA, 19 nt, Artificial Sequence
  Description of Artificial Sequence: Synthetic oligonucleotide
aaaacaaacgagaguugaa

SEQ ID NO: 956924 - RNA, 19 nt, Artificial Sequence
  Description of Artificial Sequence: Synthetic oligonucleotide
gaguagauuuauuaucgcu

SEQ ID NO: 956925 - RNA, 19 nt, Artificial Sequence
  Description of Artificial Sequence: Synthetic oligonucleotide
uuaagacaggcuacuuaaa

SEQ ID NO: 956926 - RNA, 19 nt, Artificial Sequence
  Description of Artificial Sequence: Synthetic oligonucleotide
aaaacgccgcugguaucgc

SEQ ID NO: 956927 - RNA, 19 nt, Artificial Sequence
  Description of Artificial Sequence: Synthetic oligonucleotide
ucuccguuuaaaaccgcaa

SEQ ID NO: 956928 - RNA, 19 nt, Artificial Sequence
  Description of Artificial Sequence: Synthetic oligonucleotide
cagauuuagcagaugcauc

SEQ ID NO: 956929 - RNA, 19 nt, Artificial Sequence
  Description of Artificial Sequence: Synthetic oligonucleotide
uggaguuaaaacgccgcug

SEQ ID NO: 956930 - RNA, 19 nt, Artificial Sequence
  Description of Artificial Sequence: Synthetic oligonucleotide
acgacugaaaauucauuuu

SEQ ID NO: 956931 - RNA, 19 nt, Artificial Sequence
  Description of Artificial Sequence: Synthetic oligonucleotide
gagaucgcuacgcaggaaa

SEQ ID NO: 956932 - RNA, 19 nt, Artificial Sequence
  Description of Artificial Sequence: Synthetic oligonucleotide
gguuuacacggauacauga

SEQ ID NO: 956933 - RNA, 19 nt, Artificial Sequence
  Description of Artificial Sequence: Synthetic oligonucleotide
aacgccgcugguaucgccg

SEQ ID NO: 956934 - RNA, 19 nt, Artificial Sequence
  Description of Artificial Sequence: Synthetic oligonucleotide
uccugaguuccuaaagcau

SEQ ID NO: 956935 - RNA, 19 nt, Artificial Sequence
  Description of Artificial Sequence: Synthetic oligonucleotide
gcaaccuuuaucaugugug

SEQ ID NO: 956936 - RNA, 19 nt, Artificial Sequence
  Description of Artificial Sequence: Synthetic oligonucleotide
uauuaucgcuaccccaaau

SEQ ID NO: 956937 - RNA, 19 nt, Artificial Sequence
  Description of Artificial Sequence: Synthetic oligonucleotide
acauguaacgcaucugcuu

SEQ ID NO: 956938 - RNA, 19 nt, Artificial Sequence
  Description of Artificial Sequence: Synthetic oligonucleotide
auggaguuaaaacgccgcu

SEQ ID NO: 956939 - RNA, 19 nt, Artificial Sequence
  Description of Artificial Sequence: Synthetic oligonucleotide
ucaacggaaggccgagugu

SEQ ID NO: 956940 - RNA, 19 nt, Artificial Sequence
  Description of Artificial Sequence: Synthetic oligonucleotide
uuauuaucgcuaccccaaa

SEQ ID NO: 956941 - RNA, 19 nt, Artificial Sequence
  Description of Artificial Sequence: Synthetic oligonucleotide
uuccgaaacuuugaggaaa

SEQ ID NO: 956942 - RNA, 19 nt, Artificial Sequence
  Description of Artificial Sequence: Synthetic oligonucleotide
cuuuaacucgguuaugaua

SEQ ID NO: 956943 - RNA, 19 nt, Artificial Sequence
  Description of Artificial Sequence: Synthetic oligonucleotide
guccacuugaagaacagca

SEQ ID NO: 956944 - RNA, 19 nt, Artificial Sequence
  Description of Artificial Sequence: Synthetic oligonucleotide
ggacaagugauucauaggu

SEQ ID NO: 956945 - RNA, 19 nt, Artificial Sequence
  Description of Artificial Sequence: Synthetic oligonucleotide
cucgaacacucaaaucuug

SEQ ID NO: 956946 - RNA, 19 nt, Artificial Sequence
  Description of Artificial Sequence: Synthetic oligonucleotide
guugucgaacgacugaaaa

SEQ ID NO: 956947 - RNA, 19 nt, Artificial Sequence
  Description of Artificial Sequence: Synthetic oligonucleotide
uggugggauaauguaaccu

SEQ ID NO: 956948 - RNA, 19 nt, Artificial Sequence
  Description of Artificial Sequence: Synthetic oligonucleotide
agccagauaaauuccucau

SEQ ID NO: 956949 - RNA, 19 nt, Artificial Sequence
  Description of Artificial Sequence: Synthetic oligonucleotide
aagacccaauucuauugua

SEQ ID NO: 956950 - RNA, 19 nt, Artificial Sequence
  Description of Artificial Sequence: Synthetic oligonucleotide
aguguggccuaugugucuc

SEQ ID NO: 956951 - RNA, 19 nt, Artificial Sequence
  Description of Artificial Sequence: Synthetic oligonucleotide
guuaaaacgccgcugguau

SEQ ID NO: 956952 - RNA, 19 nt, Artificial Sequence
  Description of Artificial Sequence: Synthetic oligonucleotide
augaagacccaauucuauu

SEQ ID NO: 956953 - RNA, 19 nt, Artificial Sequence
  Description of Artificial Sequence: Synthetic oligonucleotide
cucuacguucauuaauuca

SEQ ID NO: 956954 - RNA, 19 nt, Artificial Sequence
  Description of Artificial Sequence: Synthetic oligonucleotide
cugaaugcggccacucuuc

SEQ ID NO: 956955 - RNA, 19 nt, Artificial Sequence
  Description of Artificial Sequence: Synthetic oligonucleotide
aacgcaguuaagacaggcu

SEQ ID NO: 956956 - RNA, 19 nt, Artificial Sequence
  Description of Artificial Sequence: Synthetic oligonucleotide
gggcguuuuacaauauugg

SEQ ID NO: 956957 - RNA, 19 nt, Artificial Sequence
  Description of Artificial Sequence: Synthetic oligonucleotide
caaacgagaguugaaggca

SEQ ID NO: 956958 - RNA, 19 nt, Artificial Sequence
  Description of Artificial Sequence: Synthetic oligonucleotide
guccuuagcugcuugcgac

SEQ ID NO: 956959 - RNA, 19 nt, Artificial Sequence
  Description of Artificial Sequence: Synthetic oligonucleotide
cucaauuaagaagguuuac

SEQ ID NO: 956960 - RNA, 19 nt, Artificial Sequence
  Description of Artificial Sequence: Synthetic oligonucleotide
gaagacguggaaauuuaaa

SEQ ID NO: 956961 - RNA, 19 nt, Artificial Sequence
  Description of Artificial Sequence: Synthetic oligonucleotide
aguuccuaaagcauauaau

SEQ ID NO: 956962 - RNA, 19 nt, Artificial Sequence
  Description of Artificial Sequence: Synthetic oligonucleotide
gcagccaugagaucgcuac

SEQ ID NO: 956963 - RNA, 19 nt, Artificial Sequence
  Description of Artificial Sequence: Synthetic oligonucleotide
uguaaccugcauagucuuc

SEQ ID NO: 956964 - RNA, 19 nt, Artificial Sequence
  Description of Artificial Sequence: Synthetic oligonucleotide
acgacacaggaacaccuca

SEQ ID NO: 956965 - RNA, 19 nt, Artificial Sequence
  Description of Artificial Sequence: Synthetic oligonucleotide
aucgcuaccccaaauucca

SEQ ID NO: 956966 - RNA, 19 nt, Artificial Sequence
  Description of Artificial Sequence: Synthetic oligonucleotide
augagaucgcuacgcagga

SEQ ID NO: 956967 - RNA, 19 nt, Artificial Sequence
  Description of Artificial Sequence: Synthetic oligonucleotide
cuugcgacucccuuaagua

SEQ ID NO: 956968 - RNA, 19 nt, Artificial Sequence
  Description of Artificial Sequence: Synthetic oligonucleotide
aaccuuuaucaugugugaa

SEQ ID NO: 956969 - RNA, 19 nt, Artificial Sequence
  Description of Artificial Sequence: Synthetic oligonucleotide
gcauauaucuguagagucc

SEQ ID NO: 956970 - RNA, 19 nt, Artificial Sequence
  Description of Artificial Sequence: Synthetic oligonucleotide
ugaaugcggccacucuucu

SEQ ID NO: 956971 - RNA, 19 nt, Artificial Sequence
  Description of Artificial Sequence: Synthetic oligonucleotide
agugauucauagguaaaua

SEQ ID NO: 956972 - RNA, 19 nt, Artificial Sequence
  Description of Artificial Sequence: Synthetic oligonucleotide
aacggaaggccgagugugg

SEQ ID NO: 956973 - RNA, 19 nt, Artificial Sequence
  Description of Artificial Sequence: Synthetic oligonucleotide
agaucauauaaagcucaca

SEQ ID NO: 956974 - RNA, 19 nt, Artificial Sequence
  Description of Artificial Sequence: Synthetic oligonucleotide
ucuauagaggagguccuua

SEQ ID NO: 956975 - RNA, 19 nt, Artificial Sequence
  Description of Artificial Sequence: Synthetic oligonucleotide
gagaucauauaaagcucac

SEQ ID NO: 956976 - RNA, 19 nt, Artificial Sequence
  Description of Artificial Sequence: Synthetic oligonucleotide
uccucauguugucgaacga

SEQ ID NO: 956977 - RNA, 19 nt, Artificial Sequence
  Description of Artificial Sequence: Synthetic oligonucleotide
uguugucgaacgacugaaa

SEQ ID NO: 956978 - RNA, 19 nt, Artificial Sequence
  Description of Artificial Sequence: Synthetic oligonucleotide
caacggaaggccgagugug

SEQ ID NO: 956979 - RNA, 19 nt, Artificial Sequence
  Description of Artificial Sequence: Synthetic oligonucleotide
agaucgcuacgcaggaaac

SEQ ID NO: 956980 - RNA, 19 nt, Artificial Sequence
  Description of Artificial Sequence: Synthetic oligonucleotide
ggacacaggauacuuaaaa

SEQ ID NO: 956981 - RNA, 19 nt, Artificial Sequence
  Description of Artificial Sequence: Synthetic oligonucleotide
caaccuuuaucauguguga

SEQ ID NO: 956982 - RNA, 19 nt, Artificial Sequence
  Description of Artificial Sequence: Synthetic oligonucleotide
acgaugacuccaucugcug

SEQ ID NO: 956983 - RNA, 19 nt, Artificial Sequence
  Description of Artificial Sequence: Synthetic oligonucleotide
uuaaaacgccgcugguauc

SEQ ID NO: 956984 - RNA, 19 nt, Artificial Sequence
  Description of Artificial Sequence: Synthetic oligonucleotide
auguaaccugcauagucuu

SEQ ID NO: 956985 - RNA, 19 nt, Artificial Sequence
  Description of Artificial Sequence: Synthetic oligonucleotide
augugcugccacacgacac

SEQ ID NO: 956986 - RNA, 19 nt, Artificial Sequence
  Description of Artificial Sequence: Synthetic oligonucleotide
agguccuuagcugcuugcg

SEQ ID NO: 956987 - RNA, 19 nt, Artificial Sequence
  Description of Artificial Sequence: Synthetic oligonucleotide
ucccgugaagcaucaaaau

SEQ ID NO: 956988 - RNA, 19 nt, Artificial Sequence
  Description of Artificial Sequence: Synthetic oligonucleotide
acggaaggccgaguguggc

SEQ ID NO: 956989 - RNA, 19 nt, Artificial Sequence
  Description of Artificial Sequence: Synthetic oligonucleotide
gagguccuuagcugcuugc

SEQ ID NO: 956990 - RNA, 19 nt, Artificial Sequence
  Description of Artificial Sequence: Synthetic oligonucleotide
cucgguuaugauauucuaa

SEQ ID NO: 956991 - RNA, 19 nt, Artificial Sequence
  Description of Artificial Sequence: Synthetic oligonucleotide
aaguaguacuugagcaggu

SEQ ID NO: 956992 - RNA, 19 nt, Artificial Sequence
  Description of Artificial Sequence: Synthetic oligonucleotide
aguuaaaacgccgcuggua

SEQ ID NO: 956993 - RNA, 19 nt, Artificial Sequence
  Description of Artificial Sequence: Synthetic oligonucleotide
cuaccccaaauuccagagc

SEQ ID NO: 956994 - RNA, 19 nt, Artificial Sequence
  Description of Artificial Sequence: Synthetic oligonucleotide
aaaucaggucuugguggug

SEQ ID NO: 956995 - RNA, 19 nt, Artificial Sequence
  Description of Artificial Sequence: Synthetic oligonucleotide
aucgcuacgcaggaaacaa

SEQ ID NO: 956996 - RNA, 19 nt, Artificial Sequence
  Description of Artificial Sequence: Synthetic oligonucleotide
uggccuaugugucuccguu

SEQ ID NO: 956997 - RNA, 19 nt, Artificial Sequence
  Description of Artificial Sequence: Synthetic oligonucleotide
uauuggcauucucguaguc

SEQ ID NO: 956998 - RNA, 19 nt, Artificial Sequence
  Description of Artificial Sequence: Synthetic oligonucleotide
caaacgcaguuaagacagg

SEQ ID NO: 956999 - RNA, 19 nt, Artificial Sequence
  Description of Artificial Sequence: Synthetic oligonucleotide
ugucuccguuuaaaaccgc

SEQ ID NO: 957000 - RNA, 19 nt, Artificial Sequence
  Description of Artificial Sequence: Synthetic oligonucleotide
auguugucgaacgacugaa

SEQ ID NO: 957001 - RNA, 19 nt, Artificial Sequence
  Description of Artificial Sequence: Synthetic oligonucleotide
ucgcuaagagcauccgaaa

SEQ ID NO: 957002 - RNA, 19 nt, Artificial Sequence
  Description of Artificial Sequence: Synthetic oligonucleotide
cacacgacacaggaacacc

SEQ ID NO: 957003 - RNA, 19 nt, Artificial Sequence
  Description of Artificial Sequence: Synthetic oligonucleotide
cguucauuaauucaaagua

SEQ ID NO: 957004 - RNA, 19 nt, Artificial Sequence
  Description of Artificial Sequence: Synthetic oligonucleotide
gacucccuuaaguaguacu

SEQ ID NO: 957005 - RNA, 19 nt, Artificial Sequence
  Description of Artificial Sequence: Synthetic oligonucleotide
cauauaucuguagaguccu

SEQ ID NO: 957006 - RNA, 19 nt, Artificial Sequence
  Description of Artificial Sequence: Synthetic oligonucleotide
aucgccgggcguuuuacaa

SEQ ID NO: 957007 - RNA, 19 nt, Artificial Sequence
  Description of Artificial Sequence: Synthetic oligonucleotide
gccagauaaauuccucaug

SEQ ID NO: 957008 - RNA, 19 nt, Artificial Sequence
  Description of Artificial Sequence: Synthetic oligonucleotide
acccaaaacucuacguuca

SEQ ID NO: 957009 - RNA, 19 nt, Artificial Sequence
  Description of Artificial Sequence: Synthetic oligonucleotide
caagugauucauagguaaa

SEQ ID NO: 957010 - RNA, 19 nt, Artificial Sequence
  Description of Artificial Sequence: Synthetic oligonucleotide
gaagguuuacacggauaca

SEQ ID NO: 957011 - RNA, 19 nt, Artificial Sequence
  Description of Artificial Sequence: Synthetic oligonucleotide
aaaacgcaggacacaggau

SEQ ID NO: 957012 - RNA, 19 nt, Artificial Sequence
  Description of Artificial Sequence: Synthetic oligonucleotide
gucagauuuagcagaugca

SEQ ID NO: 957013 - RNA, 19 nt, Artificial Sequence
  Description of Artificial Sequence: Synthetic oligonucleotide
ucgcuaccccaaauuccag

SEQ ID NO: 957014 - RNA, 19 nt, Artificial Sequence
  Description of Artificial Sequence: Synthetic oligonucleotide
agucggggccgucauccag

SEQ ID NO: 957015 - RNA, 19 nt, Artificial Sequence
  Description of Artificial Sequence: Synthetic oligonucleotide
gcauggaguuaaaacgccg

SEQ ID NO: 957016 - RNA, 19 nt, Artificial Sequence
  Description of Artificial Sequence: Synthetic oligonucleotide
acacgacacaggaacaccu

SEQ ID NO: 957017 - RNA, 19 nt, Artificial Sequence
  Description of Artificial Sequence: Synthetic oligonucleotide
cuacguucauuaauucaaa

SEQ ID NO: 957018 - RNA, 19 nt, Artificial Sequence
  Description of Artificial Sequence: Synthetic oligonucleotide
ugccccguggccagugagc

SEQ ID NO: 957019 - RNA, 19 nt, Artificial Sequence
  Description of Artificial Sequence: Synthetic oligonucleotide
agacccaauucuauuguaa

SEQ ID NO: 957020 - RNA, 19 nt, Artificial Sequence
  Description of Artificial Sequence: Synthetic oligonucleotide
agguuuacacggauacaug

SEQ ID NO: 957021 - RNA, 19 nt, Artificial Sequence
  Description of Artificial Sequence: Synthetic oligonucleotide
cacucuucucgucuuaaaa

SEQ ID NO: 957022 - RNA, 19 nt, Artificial Sequence
  Description of Artificial Sequence: Synthetic oligonucleotide
cuaguucugcaaguuccac

SEQ ID NO: 957023 - RNA, 19 nt, Artificial Sequence
  Description of Artificial Sequence: Synthetic oligonucleotide
uuaaguccgcggucuuccu

SEQ ID NO: 957024 - RNA, 19 nt, Artificial Sequence
  Description of Artificial Sequence: Synthetic oligonucleotide
gaucgcuacgcaggaaaca

SEQ ID NO: 957025 - RNA, 19 nt, Artificial Sequence
  Description of Artificial Sequence: Synthetic oligonucleotide
cacgacacaggaacaccuc

SEQ ID NO: 957026 - RNA, 19 nt, Artificial Sequence
  Description of Artificial Sequence: Synthetic oligonucleotide
gcuacgcaggaaacaaacg

SEQ ID NO: 957027 - RNA, 19 nt, Artificial Sequence
  Description of Artificial Sequence: Synthetic oligonucleotide
cuccgagaggaagucgggg

SEQ ID NO: 957028 - RNA, 19 nt, Artificial Sequence
  Description of Artificial Sequence: Synthetic oligonucleotide
cucauguugucgaacgacu

SEQ ID NO: 957029 - RNA, 19 nt, Artificial Sequence
  Description of Artificial Sequence: Synthetic oligonucleotide
uaaaaccgcaaggcaguuc

SEQ ID NO: 957030 - RNA, 19 nt, Artificial Sequence
  Description of Artificial Sequence: Synthetic oligonucleotide
guuggagguugcccuuugc

SEQ ID NO: 957031 - RNA, 19 nt, Artificial Sequence
  Description of Artificial Sequence: Synthetic oligonucleotide
gaguugaacuuugggcuuc

SEQ ID NO: 957032 - RNA, 19 nt, Artificial Sequence
  Description of Artificial Sequence: Synthetic oligonucleotide
caucuacguccuucacucc

SEQ ID NO: 957033 - RNA, 19 nt, Artificial Sequence
  Description of Artificial Sequence: Synthetic oligonucleotide
cgauacaaggagcauggag

SEQ ID NO: 957034 - RNA, 19 nt, Artificial Sequence
  Description of Artificial Sequence: Synthetic oligonucleotide
ucgugugaacagugaauuu

SEQ ID NO: 957035 - RNA, 19 nt, Artificial Sequence
  Description of Artificial Sequence: Synthetic oligonucleotide
aggcaaacauguaacgcau

SEQ ID NO: 957036 - RNA, 19 nt, Artificial Sequence
  Description of Artificial Sequence: Synthetic oligonucleotide
gucggggccgucauccagg

SEQ ID NO: 957037 - RNA, 19 nt, Artificial Sequence
  Description of Artificial Sequence: Synthetic oligonucleotide
uuaacucgguuaugauauu

SEQ ID NO: 957038 - RNA, 19 nt, Artificial Sequence
  Description of Artificial Sequence: Synthetic oligonucleotide
cccuuaaguaguacuugag

SEQ ID NO: 957039 - RNA, 19 nt, Artificial Sequence
  Description of Artificial Sequence: Synthetic oligonucleotide
cauguaacgcaucugcuuu

SEQ ID NO: 957040 - RNA, 19 nt, Artificial Sequence
  Description of Artificial Sequence: Synthetic oligonucleotide
uuaaaaccgcaaggcaguu

SEQ ID NO: 957041 - RNA, 19 nt, Artificial Sequence
  Description of Artificial Sequence: Synthetic oligonucleotide
uaucgccgggcguuuuaca

SEQ ID NO: 957042 - RNA, 19 nt, Artificial Sequence
  Description of Artificial Sequence: Synthetic oligonucleotide
agucucaauuaagaagguu

SEQ ID NO: 957043 - RNA, 19 nt, Artificial Sequence
  Description of Artificial Sequence: Synthetic oligonucleotide
cccgugaagcaucaaaauc

SEQ ID NO: 957044 - RNA, 19 nt, Artificial Sequence
  Description of Artificial Sequence: Synthetic oligonucleotide
ucgcuacgcaggaaacaaa

SEQ ID NO: 957045 - RNA, 19 nt, Artificial Sequence
  Description of Artificial Sequence: Synthetic oligonucleotide
ggcguuuuacaauauuggu

SEQ ID NO: 957046 - RNA, 19 nt, Artificial Sequence
  Description of Artificial Sequence: Synthetic oligonucleotide
ggcaaugaacucuucgugu

SEQ ID NO: 957047 - RNA, 19 nt, Artificial Sequence
  Description of Artificial Sequence: Synthetic oligonucleotide
cuaugugucuccguuuaaa

SEQ ID NO: 957048 - RNA, 19 nt, Artificial Sequence
  Description of Artificial Sequence: Synthetic oligonucleotide
cacgaguuuaaggcaaaca

SEQ ID NO: 957049 - RNA, 19 nt, Artificial Sequence
  Description of Artificial Sequence: Synthetic oligonucleotide
gggaaguuucagccuguag

SEQ ID NO: 957050 - RNA, 19 nt, Artificial Sequence
  Description of Artificial Sequence: Synthetic oligonucleotide
aagucggggccgucaucca

SEQ ID NO: 957051 - RNA, 19 nt, Artificial Sequence
  Description of Artificial Sequence: Synthetic oligonucleotide
gucgaacgacugaaaauuc

SEQ ID NO: 957052 - RNA, 19 nt, Artificial Sequence
  Description of Artificial Sequence: Synthetic oligonucleotide
agcauccgaaauguccacu

SEQ ID NO: 957053 - RNA, 19 nt, Artificial Sequence
  Description of Artificial Sequence: Synthetic oligonucleotide
acgccgcugguaucgccgg

SEQ ID NO: 957054 - RNA, 19 nt, Artificial Sequence
  Description of Artificial Sequence: Synthetic oligonucleotide
ggucaaguguggguggcag

SEQ ID NO: 957055 - RNA, 19 nt, Artificial Sequence
  Description of Artificial Sequence: Synthetic oligonucleotide
gugagccgcaccgugccag

SEQ ID NO: 957056 - RNA, 19 nt, Artificial Sequence
  Description of Artificial Sequence: Synthetic oligonucleotide
cugaaacgaugacuccauc

SEQ ID NO: 957057 - RNA, 19 nt, Artificial Sequence
  Description of Artificial Sequence: Synthetic oligonucleotide
gaaaggcaaccuuuaucau

SEQ ID NO: 957058 - RNA, 19 nt, Artificial Sequence
  Description of Artificial Sequence: Synthetic oligonucleotide
ucccuuucgcuaagagcau

SEQ ID NO: 957059 - RNA, 19 nt, Artificial Sequence
  Description of Artificial Sequence: Synthetic oligonucleotide
cuucuauagaggagguccu

SEQ ID NO: 957060 - RNA, 19 nt, Artificial Sequence
  Description of Artificial Sequence: Synthetic oligonucleotide
gucuccguuuaaaaccgca

SEQ ID NO: 957061 - RNA, 19 nt, Artificial Sequence
  Description of Artificial Sequence: Synthetic oligonucleotide
ucggggccgucauccaggc

SEQ ID NO: 957062 - RNA, 19 nt, Artificial Sequence
  Description of Artificial Sequence: Synthetic oligonucleotide
uucuauagaggagguccuu

SEQ ID NO: 957063 - RNA, 19 nt, Artificial Sequence
  Description of Artificial Sequence: Synthetic oligonucleotide
augcaucuuuaacucgguu

SEQ ID NO: 957064 - RNA, 19 nt, Artificial Sequence
  Description of Artificial Sequence: Synthetic oligonucleotide
aggaagucggggccgucau

SEQ ID NO: 957065 - RNA, 19 nt, Artificial Sequence
  Description of Artificial Sequence: Synthetic oligonucleotide
ccgaaauguccacuugaag

SEQ ID NO: 957066 - RNA, 19 nt, Artificial Sequence
  Description of Artificial Sequence: Synthetic oligonucleotide
uuucaacggaaggccgagu

SEQ ID NO: 957067 - RNA, 19 nt, Artificial Sequence
  Description of Artificial Sequence: Synthetic oligonucleotide
cuuccuccgagaggaaguc

SEQ ID NO: 957068 - RNA, 19 nt, Artificial Sequence
  Description of Artificial Sequence: Synthetic oligonucleotide
ugcuugcgacucccuuaag

SEQ ID NO: 957069 - RNA, 19 nt, Artificial Sequence
  Description of Artificial Sequence: Synthetic oligonucleotide
cugacccaaaacucuacgu

SEQ ID NO: 957070 - RNA, 19 nt, Artificial Sequence
  Description of Artificial Sequence: Synthetic oligonucleotide
cacccgggccucuauuuuc

SEQ ID NO: 957071 - RNA, 19 nt, Artificial Sequence
  Description of Artificial Sequence: Synthetic oligonucleotide
cgcuacgcaggaaacaaac

SEQ ID NO: 957072 - RNA, 19 nt, Artificial Sequence
  Description of Artificial Sequence: Synthetic oligonucleotide
cuucgugugaacagugaau

SEQ ID NO: 957073 - RNA, 19 nt, Artificial Sequence
  Description of Artificial Sequence: Synthetic oligonucleotide
gcugacuuaaccauguuuu

SEQ ID NO: 957074 - RNA, 19 nt, Artificial Sequence
  Description of Artificial Sequence: Synthetic oligonucleotide
ucgccgggcguuuuacaau

SEQ ID NO: 957075 - RNA, 19 nt, Artificial Sequence
  Description of Artificial Sequence: Synthetic oligonucleotide
guccacgaguuuaaggcaa

SEQ ID NO: 957076 - RNA, 19 nt, Artificial Sequence
  Description of Artificial Sequence: Synthetic oligonucleotide
caagaagacguggaaauuu

SEQ ID NO: 957077 - RNA, 19 nt, Artificial Sequence
  Description of Artificial Sequence: Synthetic oligonucleotide
aaaccgcaaggcaguucug

SEQ ID NO: 957078 - RNA, 19 nt, Artificial Sequence
  Description of Artificial Sequence: Synthetic oligonucleotide
cgucuuaaaaucuaucagu

SEQ ID NO: 957079 - RNA, 19 nt, Artificial Sequence
  Description of Artificial Sequence: Synthetic oligonucleotide
ccucauguugucgaacgac

SEQ ID NO: 957080 - RNA, 19 nt, Artificial Sequence
  Description of Artificial Sequence: Synthetic oligonucleotide
cugcuugcgacucccuuaa

SEQ ID NO: 957081 - RNA, 19 nt, Artificial Sequence
  Description of Artificial Sequence: Synthetic oligonucleotide
gaugcaucuuuaacucggu

SEQ ID NO: 957082 - RNA, 19 nt, Artificial Sequence
  Description of Artificial Sequence: Synthetic oligonucleotide
gguccuuagcugcuugcga

SEQ ID NO: 957083 - RNA, 19 nt, Artificial Sequence
  Description of Artificial Sequence: Synthetic oligonucleotide
ugagaucgcuacgcaggaa

SEQ ID NO: 957084 - RNA, 19 nt, Artificial Sequence
  Description of Artificial Sequence: Synthetic oligonucleotide
guaucgccgggcguuuuac

SEQ ID NO: 957085 - RNA, 19 nt, Artificial Sequence
  Description of Artificial Sequence: Synthetic oligonucleotide
acacccgggccucuauuuu

SEQ ID NO: 957086 - RNA, 19 nt, Artificial Sequence
  Description of Artificial Sequence: Synthetic oligonucleotide
cguuuaaaaccgcaaggca

SEQ ID NO: 957087 - RNA, 19 nt, Artificial Sequence
  Description of Artificial Sequence: Synthetic oligonucleotide
cacucaaaucuugauuaua

SEQ ID NO: 957088 - RNA, 19 nt, Artificial Sequence
  Description of Artificial Sequence: Synthetic oligonucleotide
gaacgacugaaaauucauu

SEQ ID NO: 957089 - RNA, 19 nt, Artificial Sequence
  Description of Artificial Sequence: Synthetic oligonucleotide
cugccccguggccagugag

SEQ ID NO: 957090 - RNA, 19 nt, Artificial Sequence
  Description of Artificial Sequence: Synthetic oligonucleotide
ccgaguguggccuaugugu

SEQ ID NO: 957091 - RNA, 19 nt, Artificial Sequence
  Description of Artificial Sequence: Synthetic oligonucleotide
cuacguccuucacuccuga

SEQ ID NO: 957092 - RNA, 19 nt, Artificial Sequence
  Description of Artificial Sequence: Synthetic oligonucleotide
ccgcaaggcaguucugcag

SEQ ID NO: 957093 - RNA, 19 nt, Artificial Sequence
  Description of Artificial Sequence: Synthetic oligonucleotide
gcuugcgacucccuuaagu

SEQ ID NO: 957094 - RNA, 19 nt, Artificial Sequence
  Description of Artificial Sequence: Synthetic oligonucleotide
ccuccgagaggaagucggg

SEQ ID NO: 957095 - RNA, 19 nt, Artificial Sequence
  Description of Artificial Sequence: Synthetic oligonucleotide
agacacccgggccucuauu

SEQ ID NO: 957096 - RNA, 19 nt, Artificial Sequence
  Description of Artificial Sequence: Synthetic oligonucleotide
gauuuagcagaugcaucuu

SEQ ID NO: 957097 - RNA, 19 nt, Artificial Sequence
  Description of Artificial Sequence: Synthetic oligonucleotide
ggcaaccuuuaucaugugu

SEQ ID NO: 957098 - RNA, 19 nt, Artificial Sequence
  Description of Artificial Sequence: Synthetic oligonucleotide
cccguggccagugagccgc

SEQ ID NO: 957099 - RNA, 19 nt, Artificial Sequence
  Description of Artificial Sequence: Synthetic oligonucleotide
gacacccgggccucuauuu

SEQ ID NO: 957100 - RNA, 19 nt, Artificial Sequence
  Description of Artificial Sequence: Synthetic oligonucleotide
gccgaguguggccuaugug

SEQ ID NO: 957101 - RNA, 19 nt, Artificial Sequence
  Description of Artificial Sequence: Synthetic oligonucleotide
gccaugagaucgcuacgca

SEQ ID NO: 957102 - RNA, 19 nt, Artificial Sequence
  Description of Artificial Sequence: Synthetic oligonucleotide
cgaguguggccuauguguc

SEQ ID NO: 957103 - RNA, 19 nt, Artificial Sequence
  Description of Artificial Sequence: Synthetic oligonucleotide
augcggccacucuucucgu

SEQ ID NO: 957104 - RNA, 19 nt, Artificial Sequence
  Description of Artificial Sequence: Synthetic oligonucleotide
aggacacaggauacuuaaa

SEQ ID NO: 957105 - RNA, 19 nt, Artificial Sequence
  Description of Artificial Sequence: Synthetic oligonucleotide
acgcaggacacaggauacu

SEQ ID NO: 957106 - RNA, 19 nt, Artificial Sequence
  Description of Artificial Sequence: Synthetic oligonucleotide
uuuucccgugaagcaucaa

SEQ ID NO: 957107 - RNA, 19 nt, Artificial Sequence
  Description of Artificial Sequence: Synthetic oligonucleotide
gcugcuugcgacucccuua

SEQ ID NO: 957108 - RNA, 19 nt, Artificial Sequence
  Description of Artificial Sequence: Synthetic oligonucleotide
gaccuucuauagaggaggu

SEQ ID NO: 957109 - RNA, 19 nt, Artificial Sequence
  Description of Artificial Sequence: Synthetic oligonucleotide
gcaguuaagacaggcuacu

SEQ ID NO: 957110 - RNA, 19 nt, Artificial Sequence
  Description of Artificial Sequence: Synthetic oligonucleotide
uggcagccaugagaucgcu

SEQ ID NO: 957111 - RNA, 19 nt, Artificial Sequence
  Description of Artificial Sequence: Synthetic oligonucleotide
cacuuuggagaucuacauu

SEQ ID NO: 957112 - RNA, 19 nt, Artificial Sequence
  Description of Artificial Sequence: Synthetic oligonucleotide
gcagaccgcugccccgugg

SEQ ID NO: 957113 - RNA, 19 nt, Artificial Sequence
  Description of Artificial Sequence: Synthetic oligonucleotide
caggaacaccucaugcauu

SEQ ID NO: 957114 - RNA, 19 nt, Artificial Sequence
  Description of Artificial Sequence: Synthetic oligonucleotide
cauugacccuuccccuucu

SEQ ID NO: 957115 - RNA, 19 nt, Artificial Sequence
  Description of Artificial Sequence: Synthetic oligonucleotide
gccgcugguaucgccgggc

SEQ ID NO: 957116 - RNA, 19 nt, Artificial Sequence
  Description of Artificial Sequence: Synthetic oligonucleotide
cugcaaguuccaccaaauu

SEQ ID NO: 957117 - RNA, 19 nt, Artificial Sequence
  Description of Artificial Sequence: Synthetic oligonucleotide
guggccuaugugucuccgu

SEQ ID NO: 957118 - RNA, 19 nt, Artificial Sequence
  Description of Artificial Sequence: Synthetic oligonucleotide
cgguuaugauauucuaaaa

SEQ ID NO: 957119 - RNA, 19 nt, Artificial Sequence
  Description of Artificial Sequence: Synthetic oligonucleotide
cgaacgacugaaaauucau

SEQ ID NO: 957120 - RNA, 19 nt, Artificial Sequence
  Description of Artificial Sequence: Synthetic oligonucleotide
ccugucagauuuagcagau

SEQ ID NO: 957121 - RNA, 19 nt, Artificial Sequence
  Description of Artificial Sequence: Synthetic oligonucleotide
aggccgaguguggccuaug

SEQ ID NO: 957122 - RNA, 19 nt, Artificial Sequence
  Description of Artificial Sequence: Synthetic oligonucleotide
cccuuucgcuaagagcauc

SEQ ID NO: 957123 - RNA, 19 nt, Artificial Sequence
  Description of Artificial Sequence: Synthetic oligonucleotide
cgcuaccccaaauuccaga

SEQ ID NO: 957124 - RNA, 19 nt, Artificial Sequence
  Description of Artificial Sequence: Synthetic oligonucleotide
cgaacacucaaaucuugau

SEQ ID NO: 957125 - RNA, 19 nt, Artificial Sequence
  Description of Artificial Sequence: Synthetic oligonucleotide
ccuaugugucuccguuuaa

SEQ ID NO: 957126 - RNA, 19 nt, Artificial Sequence
  Description of Artificial Sequence: Synthetic oligonucleotide
cacaacuguugggaaguuu

SEQ ID NO: 957127 - RNA, 19 nt, Artificial Sequence
  Description of Artificial Sequence: Synthetic oligonucleotide
ccccguggccagugagccg

SEQ ID NO: 957128 - RNA, 19 nt, Artificial Sequence
  Description of Artificial Sequence: Synthetic oligonucleotide
ggccgaguguggccuaugu

SEQ ID NO: 957129 - RNA, 19 nt, Artificial Sequence
  Description of Artificial Sequence: Synthetic oligonucleotide
ggcagaccgcugccccgug

SEQ ID NO: 957130 - RNA, 19 nt, Artificial Sequence
  Description of Artificial Sequence: Synthetic oligonucleotide
guccgcggucuuccuccga

SEQ ID NO: 957131 - RNA, 19 nt, Artificial Sequence
  Description of Artificial Sequence: Synthetic oligonucleotide
gccgcaccgugccagcugu

SEQ ID NO: 957132 - RNA, 19 nt, Artificial Sequence
  Description of Artificial Sequence: Synthetic oligonucleotide
gcgauacaaggagcaugga

SEQ ID NO: 957133 - RNA, 19 nt, Artificial Sequence
  Description of Artificial Sequence: Synthetic oligonucleotide
cguaguccaccagugaccu

SEQ ID NO: 957134 - RNA, 19 nt, Artificial Sequence
  Description of Artificial Sequence: Synthetic oligonucleotide
gcgacucccuuaaguagua

SEQ ID NO: 957135 - RNA, 19 nt, Artificial Sequence
  Description of Artificial Sequence: Synthetic oligonucleotide
ggccuaugugucuccguuu

SEQ ID NO: 957136 - RNA, 19 nt, Artificial Sequence
  Description of Artificial Sequence: Synthetic oligonucleotide
cgccgggcguuuuacaaua

SEQ ID NO: 957137 - RNA, 19 nt, Artificial Sequence
  Description of Artificial Sequence: Synthetic oligonucleotide
cgcuaagagcauccgaaau

SEQ ID NO: 957138 - RNA, 19 nt, Artificial Sequence
  Description of Artificial Sequence: Synthetic oligonucleotide
cgcaggaaacaaacgcagu

SEQ ID NO: 957139 - RNA, 19 nt, Artificial Sequence
  Description of Artificial Sequence: Synthetic oligonucleotide
cagacacccgggccucuau

SEQ ID NO: 957140 - RNA, 19 nt, Artificial Sequence
  Description of Artificial Sequence: Synthetic oligonucleotide
cgacucccuuaaguaguac

SEQ ID NO: 957141 - RNA, 19 nt, Artificial Sequence
  Description of Artificial Sequence: Synthetic oligonucleotide
gguugcccuuugcaugcuu

SEQ ID NO: 957142 - RNA, 19 nt, Artificial Sequence
  Description of Artificial Sequence: Synthetic oligonucleotide
cccaaaacucuacguucau

SEQ ID NO: 957143 - RNA, 19 nt, Artificial Sequence
  Description of Artificial Sequence: Synthetic oligonucleotide
cgccgcugguaucgccggg

SEQ ID NO: 957144 - RNA, 19 nt, Artificial Sequence
  Description of Artificial Sequence: Synthetic oligonucleotide
cugguaucgccgggcguuu

SEQ ID NO: 957145 - RNA, 19 nt, Artificial Sequence
  Description of Artificial Sequence: Synthetic oligonucleotide
ccgggcguuuuacaauauu

SEQ ID NO: 957146 - RNA, 19 nt, Artificial Sequence
  Description of Artificial Sequence: Synthetic oligonucleotide
ccguggccagugagccgca

SEQ ID NO: 957147 - RNA, 19 nt, Artificial Sequence
  Description of Artificial Sequence: Synthetic oligonucleotide
gccgggcguuuuacaauau

SEQ ID NO: 957148 - RNA, 19 nt, Artificial Sequence
  Description of Artificial Sequence: Synthetic oligonucleotide
gggccgucauccaggccuu

SEQ ID NO: 957149 - RNA, 19 nt, Artificial Sequence
  Description of Artificial Sequence: Synthetic oligonucleotide
ccgcaccgugccagcuguu

SEQ ID NO: 957150 - RNA, 19 nt, Artificial Sequence
  Description of Artificial Sequence: Synthetic oligonucleotide
uuuaauaucaggaucacag

SEQ ID NO: 957151 - RNA, 19 nt, Artificial Sequence
  Description of Artificial Sequence: Synthetic oligonucleotide
aauaauauguucuugauaa

SEQ ID NO: 957152 - RNA, 19 nt, Artificial Sequence
  Description of Artificial Sequence: Synthetic oligonucleotide
aauagaauuagaaaugaac

SEQ ID NO: 957153 - RNA, 19 nt, Artificial Sequence
  Description of Artificial Sequence: Synthetic oligonucleotide
aaagugacgaccucaaaac

SEQ ID NO: 957154 - RNA, 19 nt, Artificial Sequence
  Description of Artificial Sequence: Synthetic oligonucleotide
uuuaauuugcuauauaggu

SEQ ID NO: 957155 - RNA, 19 nt, Artificial Sequence
  Description of Artificial Sequence: Synthetic oligonucleotide
uuggaauugauucaacugg

SEQ ID NO: 957156 - RNA, 19 nt, Artificial Sequence
  Description of Artificial Sequence: Synthetic oligonucleotide
aauugguguacccagauca

SEQ ID NO: 957157 - RNA, 19 nt, Artificial Sequence
  Description of Artificial Sequence: Synthetic oligonucleotide
gauucaacugguuucaggg

SEQ ID NO: 957158 - RNA, 19 nt, Artificial Sequence
  Description of Artificial Sequence: Synthetic oligonucleotide
agaaguauguuccauaaag

SEQ ID NO: 957159 - RNA, 19 nt, Artificial Sequence
  Description of Artificial Sequence: Synthetic oligonucleotide
agauuaacaguccaaauag

SEQ ID NO: 957160 - RNA, 19 nt, Artificial Sequence
  Description of Artificial Sequence: Synthetic oligonucleotide
ucaauaucccaaaagguag

SEQ ID NO: 957161 - RNA, 19 nt, Artificial Sequence
  Description of Artificial Sequence: Synthetic oligonucleotide
ugggguauggcccaaagcg

SEQ ID NO: 957162 - RNA, 19 nt, Artificial Sequence
  Description of Artificial Sequence: Synthetic oligonucleotide
aacuauucuaucuagcacu

SEQ ID NO: 957163 - RNA, 19 nt, Artificial Sequence
  Description of Artificial Sequence: Synthetic oligonucleotide
aaacuauucuaucuagcac

SEQ ID NO: 957164 - RNA, 19 nt, Artificial Sequence
  Description of Artificial Sequence: Synthetic oligonucleotide
ucauauaacuucuuguucc

SEQ ID NO: 957165 - RNA, 19 nt, Artificial Sequence
  Description of Artificial Sequence: Synthetic oligonucleotide
acgaauuuuaguuaaaacu

SEQ ID NO: 957166 - RNA, 19 nt, Artificial Sequence
  Description of Artificial Sequence: Synthetic oligonucleotide
uucuugauaaucauaacac

SEQ ID NO: 957167 - RNA, 19 nt, Artificial Sequence
  Description of Artificial Sequence: Synthetic oligonucleotide
cuacuaacaacaaaagggg

SEQ ID NO: 957168 - RNA, 19 nt, Artificial Sequence
  Description of Artificial Sequence: Synthetic oligonucleotide
uguucuaccagccacuuug

SEQ ID NO: 957169 - RNA, 19 nt, Artificial Sequence
  Description of Artificial Sequence: Synthetic oligonucleotide
ccuacuaacaacaaaaggg

SEQ ID NO: 957170 - RNA, 19 nt, Artificial Sequence
  Description of Artificial Sequence: Synthetic oligonucleotide
aguaccaaaagugacgacc

SEQ ID NO: 957171 - RNA, 19 nt, Artificial Sequence
  Description of Artificial Sequence: Synthetic oligonucleotide
aauucguuaauagaauuag

SEQ ID NO: 957172 - RNA, 19 nt, Artificial Sequence
  Description of Artificial Sequence: Synthetic oligonucleotide
gaugcuuucaccugggaag

SEQ ID NO: 957173 - RNA, 19 nt, Artificial Sequence
  Description of Artificial Sequence: Synthetic oligonucleotide
ucuagcacuauuucaaucc

SEQ ID NO: 957174 - RNA, 19 nt, Artificial Sequence
  Description of Artificial Sequence: Synthetic oligonucleotide
cauaguaauauucuauugc

SEQ ID NO: 957175 - RNA, 19 nt, Artificial Sequence
  Description of Artificial Sequence: Synthetic oligonucleotide
aacuaacuguucuaccagc

SEQ ID NO: 957176 - RNA, 19 nt, Artificial Sequence
  Description of Artificial Sequence: Synthetic oligonucleotide
aguggcagaaccaugaccc

SEQ ID NO: 957177 - RNA, 19 nt, Artificial Sequence
  Description of Artificial Sequence: Synthetic oligonucleotide
aauuaaccugcucuagaac

SEQ ID NO: 957178 - RNA, 19 nt, Artificial Sequence
  Description of Artificial Sequence: Synthetic oligonucleotide
ucuaaaauucguuaauaga

SEQ ID NO: 957179 - RNA, 19 nt, Artificial Sequence
  Description of Artificial Sequence: Synthetic oligonucleotide
auaaucaagggcuagggca

SEQ ID NO: 957180 - RNA, 19 nt, Artificial Sequence
  Description of Artificial Sequence: Synthetic oligonucleotide
cuuagugucucuuuccucg

SEQ ID NO: 957181 - RNA, 19 nt, Artificial Sequence
  Description of Artificial Sequence: Synthetic oligonucleotide
aaaagugacgaccucaaaa

SEQ ID NO: 957182 - RNA, 19 nt, Artificial Sequence
  Description of Artificial Sequence: Synthetic oligonucleotide
aaaccuccuguauaaauag

SEQ ID NO: 957183 - RNA, 19 nt, Artificial Sequence
  Description of Artificial Sequence: Synthetic oligonucleotide
uuuggaauugauucaacug

SEQ ID NO: 957184 - RNA, 19 nt, Artificial Sequence
  Description of Artificial Sequence: Synthetic oligonucleotide
uaauuugcuauauagguau

SEQ ID NO: 957185 - RNA, 19 nt, Artificial Sequence
  Description of Artificial Sequence: Synthetic oligonucleotide
uucguuaauagaauuagaa

SEQ ID NO: 957186 - RNA, 19 nt, Artificial Sequence
  Description of Artificial Sequence: Synthetic oligonucleotide
aaguaguguuucaauaucc

SEQ ID NO: 957187 - RNA, 19 nt, Artificial Sequence
  Description of Artificial Sequence: Synthetic oligonucleotide
aagagcacgaauuuuaguu

SEQ ID NO: 957188 - RNA, 19 nt, Artificial Sequence
  Description of Artificial Sequence: Synthetic oligonucleotide
auaguaauauucuauugcu

SEQ ID NO: 957189 - RNA, 19 nt, Artificial Sequence
  Description of Artificial Sequence: Synthetic oligonucleotide
ugucaugcuaaccaugaag

SEQ ID NO: 957190 - RNA, 19 nt, Artificial Sequence
  Description of Artificial Sequence: Synthetic oligonucleotide
uguauaaauagcaauuguu

SEQ ID NO: 957191 - RNA, 19 nt, Artificial Sequence
  Description of Artificial Sequence: Synthetic oligonucleotide
aguauguuccauaaagagc

SEQ ID NO: 957192 - RNA, 19 nt, Artificial Sequence
  Description of Artificial Sequence: Synthetic oligonucleotide
ugcuauauagguauucuac

SEQ ID NO: 957193 - RNA, 19 nt, Artificial Sequence
  Description of Artificial Sequence: Synthetic oligonucleotide
auuaaccugcucuagaacu

SEQ ID NO: 957194 - RNA, 19 nt, Artificial Sequence
  Description of Artificial Sequence: Synthetic oligonucleotide
auaaucauauaacuucuug

SEQ ID NO: 957195 - RNA, 19 nt, Artificial Sequence
  Description of Artificial Sequence: Synthetic oligonucleotide
ucaacuaacuguucuacca

SEQ ID NO: 957196 - RNA, 19 nt, Artificial Sequence
  Description of Artificial Sequence: Synthetic oligonucleotide
uaaucauauaacuucuugu

SEQ ID NO: 957197 - RNA, 19 nt, Artificial Sequence
  Description of Artificial Sequence: Synthetic oligonucleotide
uuaauagaauuagaaauga

SEQ ID NO: 957198 - RNA, 19 nt, Artificial Sequence
  Description of Artificial Sequence: Synthetic oligonucleotide
uggaacauugacauuugag

SEQ ID NO: 957199 - RNA, 19 nt, Artificial Sequence
  Description of Artificial Sequence: Synthetic oligonucleotide
aaauuaaccugcucuagaa

SEQ ID NO: 957200 - RNA, 19 nt, Artificial Sequence
  Description of Artificial Sequence: Synthetic oligonucleotide
ugcugaaucaucugacugg

SEQ ID NO: 957201 - RNA, 19 nt, Artificial Sequence
  Description of Artificial Sequence: Synthetic oligonucleotide
aaaauucguuaauagaauu

SEQ ID NO: 957202 - RNA, 19 nt, Artificial Sequence
  Description of Artificial Sequence: Synthetic oligonucleotide
uagaacucaaucaauuagu

SEQ ID NO: 957203 - RNA, 19 nt, Artificial Sequence
  Description of Artificial Sequence: Synthetic oligonucleotide
aaaagguagcaccugcuca

SEQ ID NO: 957204 - RNA, 19 nt, Artificial Sequence
  Description of Artificial Sequence: Synthetic oligonucleotide
cuagaacucaaucaauuag

SEQ ID NO: 957205 - RNA, 19 nt, Artificial Sequence
  Description of Artificial Sequence: Synthetic oligonucleotide
uuuaccuuuccucugaauu

SEQ ID NO: 957206 - RNA, 19 nt, Artificial Sequence
  Description of Artificial Sequence: Synthetic oligonucleotide
cuuuauauccacugugacc

SEQ ID NO: 957207 - RNA, 19 nt, Artificial Sequence
  Description of Artificial Sequence: Synthetic oligonucleotide
agguauucuacccuaagug

SEQ ID NO: 957208 - RNA, 19 nt, Artificial Sequence
  Description of Artificial Sequence: Synthetic oligonucleotide
uauauagguauucuacccu

SEQ ID NO: 957209 - RNA, 19 nt, Artificial Sequence
  Description of Artificial Sequence: Synthetic oligonucleotide
acccuaagugauuaauugc

SEQ ID NO: 957210 - RNA, 19 nt, Artificial Sequence
  Description of Artificial Sequence: Synthetic oligonucleotide
gaacucaaucaauuagugg

SEQ ID NO: 957211 - RNA, 19 nt, Artificial Sequence
  Description of Artificial Sequence: Synthetic oligonucleotide
aaauaaucucuucaagaaa

SEQ ID NO: 957212 - RNA, 19 nt, Artificial Sequence
  Description of Artificial Sequence: Synthetic oligonucleotide
ucuaucuagcacuauuuca

SEQ ID NO: 957213 - RNA, 19 nt, Artificial Sequence
  Description of Artificial Sequence: Synthetic oligonucleotide
uugaguaccaaaguuaagu

SEQ ID NO: 957214 - RNA, 19 nt, Artificial Sequence
  Description of Artificial Sequence: Synthetic oligonucleotide
uguuccauaaagagcacga

SEQ ID NO: 957215 - RNA, 19 nt, Artificial Sequence
  Description of Artificial Sequence: Synthetic oligonucleotide
uauguuuucgggauuccug

SEQ ID NO: 957216 - RNA, 19 nt, Artificial Sequence
  Description of Artificial Sequence: Synthetic oligonucleotide
uaaagagcacgaauuuuag

SEQ ID NO: 957217 - RNA, 19 nt, Artificial Sequence
  Description of Artificial Sequence: Synthetic oligonucleotide
gguuauaucccugagaagc

SEQ ID NO: 957218 - RNA, 19 nt, Artificial Sequence
  Description of Artificial Sequence: Synthetic oligonucleotide
uugauaaucauaacacaaa

SEQ ID NO: 957219 - RNA, 19 nt, Artificial Sequence
  Description of Artificial Sequence: Synthetic oligonucleotide
ucaaacuauucuaucuagc

SEQ ID NO: 957220 - RNA, 19 nt, Artificial Sequence
  Description of Artificial Sequence: Synthetic oligonucleotide
uuaacaguccaaauaggaa

SEQ ID NO: 957221 - RNA, 19 nt, Artificial Sequence
  Description of Artificial Sequence: Synthetic oligonucleotide
uacccuaagugauuaauug

SEQ ID NO: 957222 - RNA, 19 nt, Artificial Sequence
  Description of Artificial Sequence: Synthetic oligonucleotide
aaagcggaagccaggaaac

SEQ ID NO: 957223 - RNA, 19 nt, Artificial Sequence
  Description of Artificial Sequence: Synthetic oligonucleotide
ucuacucaguaccaaaagu

SEQ ID NO: 957224 - RNA, 19 nt, Artificial Sequence
  Description of Artificial Sequence: Synthetic oligonucleotide
guucuugauaaucauaaca

SEQ ID NO: 957225 - RNA, 19 nt, Artificial Sequence
  Description of Artificial Sequence: Synthetic oligonucleotide
gaguaccaaaguuaaguag

SEQ ID NO: 957226 - RNA, 19 nt, Artificial Sequence
  Description of Artificial Sequence: Synthetic oligonucleotide
uaauaucaggaucacagua

SEQ ID NO: 957227 - RNA, 19 nt, Artificial Sequence
  Description of Artificial Sequence: Synthetic oligonucleotide
uuaauuugcuauauaggua

SEQ ID NO: 957228 - RNA, 19 nt, Artificial Sequence
  Description of Artificial Sequence: Synthetic oligonucleotide
uugucaaacuauucuaucu

SEQ ID NO: 957229 - RNA, 19 nt, Artificial Sequence
  Description of Artificial Sequence: Synthetic oligonucleotide
ucuugauaaucauaacaca

SEQ ID NO: 957230 - RNA, 19 nt, Artificial Sequence
  Description of Artificial Sequence: Synthetic oligonucleotide
guaagcauccuccauuugc

SEQ ID NO: 957231 - RNA, 19 nt, Artificial Sequence
  Description of Artificial Sequence: Synthetic oligonucleotide
aaaguuaaguaguguuuca

SEQ ID NO: 957232 - RNA, 19 nt, Artificial Sequence
  Description of Artificial Sequence: Synthetic oligonucleotide
ucauaaucaagggcuaggg

SEQ ID NO: 957233 - RNA, 19 nt, Artificial Sequence
  Description of Artificial Sequence: Synthetic oligonucleotide
ugcucuagaacucaaucaa

SEQ ID NO: 957234 - RNA, 19 nt, Artificial Sequence
  Description of Artificial Sequence: Synthetic oligonucleotide
ugggaugucagcauaguaa

SEQ ID NO: 957235 - RNA, 19 nt, Artificial Sequence
  Description of Artificial Sequence: Synthetic oligonucleotide
gaucauuacugauuucagc

SEQ ID NO: 957236 - RNA, 19 nt, Artificial Sequence
  Description of Artificial Sequence: Synthetic oligonucleotide
aguaguguuucaauauccc

SEQ ID NO: 957237 - RNA, 19 nt, Artificial Sequence
  Description of Artificial Sequence: Synthetic oligonucleotide
uucuacucaguaccaaaag

SEQ ID NO: 957238 - RNA, 19 nt, Artificial Sequence
  Description of Artificial Sequence: Synthetic oligonucleotide
cuugauaaucauaacacaa

SEQ ID NO: 957239 - RNA, 19 nt, Artificial Sequence
  Description of Artificial Sequence: Synthetic oligonucleotide
uaaguaguguuucaauauc

SEQ ID NO: 957240 - RNA, 19 nt, Artificial Sequence
  Description of Artificial Sequence: Synthetic oligonucleotide
uacuagaaguuccaguuuc

SEQ ID NO: 957241 - RNA, 19 nt, Artificial Sequence
  Description of Artificial Sequence: Synthetic oligonucleotide
uguuccaggauuuagccuu

SEQ ID NO: 957242 - RNA, 19 nt, Artificial Sequence
  Description of Artificial Sequence: Synthetic oligonucleotide
acucacuugaggaaucugc

SEQ ID NO: 957243 - RNA, 19 nt, Artificial Sequence
  Description of Artificial Sequence: Synthetic oligonucleotide
aacauuccaauugguguac

SEQ ID NO: 957244 - RNA, 19 nt, Artificial Sequence
  Description of Artificial Sequence: Synthetic oligonucleotide
aguaccaaaguuaaguagu

SEQ ID NO: 957245 - RNA, 19 nt, Artificial Sequence
  Description of Artificial Sequence: Synthetic oligonucleotide
gauuaacaguccaaauagg

SEQ ID NO: 957246 - RNA, 19 nt, Artificial Sequence
  Description of Artificial Sequence: Synthetic oligonucleotide
ugucagcauaguaauauuc

SEQ ID NO: 957247 - RNA, 19 nt, Artificial Sequence
  Description of Artificial Sequence: Synthetic oligonucleotide
agaagcguguuucauuuug

SEQ ID NO: 957248 - RNA, 19 nt, Artificial Sequence
  Description of Artificial Sequence: Synthetic oligonucleotide
gagauuaacaguccaaaua

SEQ ID NO: 957249 - RNA, 19 nt, Artificial Sequence
  Description of Artificial Sequence: Synthetic oligonucleotide
uuaauaucaggaucacagu

SEQ ID NO: 957250 - RNA, 19 nt, Artificial Sequence
  Description of Artificial Sequence: Synthetic oligonucleotide
uggaauugauucaacuggu

SEQ ID NO: 957251 - RNA, 19 nt, Artificial Sequence
  Description of Artificial Sequence: Synthetic oligonucleotide
caaacuauucuaucuagca

SEQ ID NO: 957252 - RNA, 19 nt, Artificial Sequence
  Description of Artificial Sequence: Synthetic oligonucleotide
auuaacaguccaaauagga

SEQ ID NO: 957253 - RNA, 19 nt, Artificial Sequence
  Description of Artificial Sequence: Synthetic oligonucleotide
ugugguuguuuccuuuucc

SEQ ID NO: 957254 - RNA, 19 nt, Artificial Sequence
  Description of Artificial Sequence: Synthetic oligonucleotide
gguaauaucuugcugguca

SEQ ID NO: 957255 - RNA, 19 nt, Artificial Sequence
  Description of Artificial Sequence: Synthetic oligonucleotide
aaagagcacgaauuuuagu

SEQ ID NO: 957256 - RNA, 19 nt, Artificial Sequence
  Description of Artificial Sequence: Synthetic oligonucleotide
cuucaagaaaccuuaacaa

SEQ ID NO: 957257 - RNA, 19 nt, Artificial Sequence
  Description of Artificial Sequence: Synthetic oligonucleotide
gaacauugacauuugagua

SEQ ID NO: 957258 - RNA, 19 nt, Artificial Sequence
  Description of Artificial Sequence: Synthetic oligonucleotide
aaagguaucuguggcagga

SEQ ID NO: 957259 - RNA, 19 nt, Artificial Sequence
  Description of Artificial Sequence: Synthetic oligonucleotide
ucaguaccaaaagugacga

SEQ ID NO: 957260 - RNA, 19 nt, Artificial Sequence
  Description of Artificial Sequence: Synthetic oligonucleotide
uuucuggguacuuuaauuu

SEQ ID NO: 957261 - RNA, 19 nt, Artificial Sequence
  Description of Artificial Sequence: Synthetic oligonucleotide
uucuggguacuuuaauuug

SEQ ID NO: 957262 - RNA, 19 nt, Artificial Sequence
  Description of Artificial Sequence: Synthetic oligonucleotide
ucuagaacucaaucaauua

SEQ ID NO: 957263 - RNA, 19 nt, Artificial Sequence
  Description of Artificial Sequence: Synthetic oligonucleotide
uauucuauugcuggugucu

SEQ ID NO: 957264 - RNA, 19 nt, Artificial Sequence
  Description of Artificial Sequence: Synthetic oligonucleotide
uuugaguaccaaaguuaag

SEQ ID NO: 957265 - RNA, 19 nt, Artificial Sequence
  Description of Artificial Sequence: Synthetic oligonucleotide
cacgaauuuuaguuaaaac

SEQ ID NO: 957266 - RNA, 19 nt, Artificial Sequence
  Description of Artificial Sequence: Synthetic oligonucleotide
accaaaguuaaguaguguu

SEQ ID NO: 957267 - RNA, 19 nt, Artificial Sequence
  Description of Artificial Sequence: Synthetic oligonucleotide
aggauuuagccuuaagaaa

SEQ ID NO: 957268 - RNA, 19 nt, Artificial Sequence
  Description of Artificial Sequence: Synthetic oligonucleotide
ugacaaugucacuuuaccu

SEQ ID NO: 957269 - RNA, 19 nt, Artificial Sequence
  Description of Artificial Sequence: Synthetic oligonucleotide
cuaucuagcacuauuucaa

SEQ ID NO: 957270 - RNA, 19 nt, Artificial Sequence
  Description of Artificial Sequence: Synthetic oligonucleotide
agcauaguaauauucuauu

SEQ ID NO: 957271 - RNA, 19 nt, Artificial Sequence
  Description of Artificial Sequence: Synthetic oligonucleotide
uccgacuugagcugcuggg

SEQ ID NO: 957272 - RNA, 19 nt, Artificial Sequence
  Description of Artificial Sequence: Synthetic oligonucleotide
aaauucguuaauagaauua

SEQ ID NO: 957273 - RNA, 19 nt, Artificial Sequence
  Description of Artificial Sequence: Synthetic oligonucleotide
auagguauucuacccuaag

SEQ ID NO: 957274 - RNA, 19 nt, Artificial Sequence
  Description of Artificial Sequence: Synthetic oligonucleotide
guuauaucccugagaagcg

SEQ ID NO: 957275 - RNA, 19 nt, Artificial Sequence
  Description of Artificial Sequence: Synthetic oligonucleotide
caggauuuagccuuaagaa

SEQ ID NO: 957276 - RNA, 19 nt, Artificial Sequence
  Description of Artificial Sequence: Synthetic oligonucleotide
uucuaucuagcacuauuuc

SEQ ID NO: 957277 - RNA, 19 nt, Artificial Sequence
  Description of Artificial Sequence: Synthetic oligonucleotide
auaucuugcuggucacuac

SEQ ID NO: 957278 - RNA, 19 nt, Artificial Sequence
  Description of Artificial Sequence: Synthetic oligonucleotide
acaacucugaccuccgacu

SEQ ID NO: 957279 - RNA, 19 nt, Artificial Sequence
  Description of Artificial Sequence: Synthetic oligonucleotide
ugggcagaugcuuucaccu

SEQ ID NO: 957280 - RNA, 19 nt, Artificial Sequence
  Description of Artificial Sequence: Synthetic oligonucleotide
ggagguuaaauuaaccugc

SEQ ID NO: 957281 - RNA, 19 nt, Artificial Sequence
  Description of Artificial Sequence: Synthetic oligonucleotide
cuguacuucaggguuagcc

SEQ ID NO: 957282 - RNA, 19 nt, Artificial Sequence
  Description of Artificial Sequence: Synthetic oligonucleotide
aaacuauaaaaugccacuu

SEQ ID NO: 957283 - RNA, 19 nt, Artificial Sequence
  Description of Artificial Sequence: Synthetic oligonucleotide
gcuauauagguauucuacc

SEQ ID NO: 957284 - RNA, 19 nt, Artificial Sequence
  Description of Artificial Sequence: Synthetic oligonucleotide
ugaguaccaaaguuaagua

SEQ ID NO: 957285 - RNA, 19 nt, Artificial Sequence
  Description of Artificial Sequence: Synthetic oligonucleotide
auauucuauugcugguguc

SEQ ID NO: 957286 - RNA, 19 nt, Artificial Sequence
  Description of Artificial Sequence: Synthetic oligonucleotide
uccguagccacuuuccagu

SEQ ID NO: 957287 - RNA, 19 nt, Artificial Sequence
  Description of Artificial Sequence: Synthetic oligonucleotide
auugauucaacugguuuca

SEQ ID NO: 957288 - RNA, 19 nt, Artificial Sequence
  Description of Artificial Sequence: Synthetic oligonucleotide
agcaauuguuuccuuguca

SEQ ID NO: 957289 - RNA, 19 nt, Artificial Sequence
  Description of Artificial Sequence: Synthetic oligonucleotide
auuaguggcagaaccauga

SEQ ID NO: 957290 - RNA, 19 nt, Artificial Sequence
  Description of Artificial Sequence: Synthetic oligonucleotide
cauaaucaagggcuagggc

SEQ ID NO: 957291 - RNA, 19 nt, Artificial Sequence
  Description of Artificial Sequence: Synthetic oligonucleotide
aauuagaaaugaacaggga

SEQ ID NO: 957292 - RNA, 19 nt, Artificial Sequence
  Description of Artificial Sequence: Synthetic oligonucleotide
acucaguaccaaaagugac

SEQ ID NO: 957293 - RNA, 19 nt, Artificial Sequence
  Description of Artificial Sequence: Synthetic oligonucleotide
uugguaauaucuugcuggu

SEQ ID NO: 957294 - RNA, 19 nt, Artificial Sequence
  Description of Artificial Sequence: Synthetic oligonucleotide
ugagauuaacaguccaaau

SEQ ID NO: 957295 - RNA, 19 nt, Artificial Sequence
  Description of Artificial Sequence: Synthetic oligonucleotide
uauggcccaaagcggaagc

SEQ ID NO: 957296 - RNA, 19 nt, Artificial Sequence
  Description of Artificial Sequence: Synthetic oligonucleotide
uuuuaauaucaggaucaca

SEQ ID NO: 957297 - RNA, 19 nt, Artificial Sequence
  Description of Artificial Sequence: Synthetic oligonucleotide
gaagcguguuucauuuugg

SEQ ID NO: 957298 - RNA, 19 nt, Artificial Sequence
  Description of Artificial Sequence: Synthetic oligonucleotide
aaucugcuguuauguccac

SEQ ID NO: 957299 - RNA, 19 nt, Artificial Sequence
  Description of Artificial Sequence: Synthetic oligonucleotide
aagcguguuucauuuugga

SEQ ID NO: 957300 - RNA, 19 nt, Artificial Sequence
  Description of Artificial Sequence: Synthetic oligonucleotide
agaacucaaucaauuagug

SEQ ID NO: 957301 - RNA, 19 nt, Artificial Sequence
  Description of Artificial Sequence: Synthetic oligonucleotide
cucauaaucaagggcuagg

SEQ ID NO: 957302 - RNA, 19 nt, Artificial Sequence
  Description of Artificial Sequence: Synthetic oligonucleotide
ucccacuuagucauccucu

SEQ ID NO: 957303 - RNA, 19 nt, Artificial Sequence
  Description of Artificial Sequence: Synthetic oligonucleotide
ucaucuagggccccagaaa

SEQ ID NO: 957304 - RNA, 19 nt, Artificial Sequence
  Description of Artificial Sequence: Synthetic oligonucleotide
gacaaugucacuuuaccuu

SEQ ID NO: 957305 - RNA, 19 nt, Artificial Sequence
  Description of Artificial Sequence: Synthetic oligonucleotide
uuuccugguacuagaaguu

SEQ ID NO: 957306 - RNA, 19 nt, Artificial Sequence
  Description of Artificial Sequence: Synthetic oligonucleotide
auauagguauucuacccua

SEQ ID NO: 957307 - RNA, 19 nt, Artificial Sequence
  Description of Artificial Sequence: Synthetic oligonucleotide
ugggaaguagcccuuucuc

SEQ ID NO: 957308 - RNA, 19 nt, Artificial Sequence
  Description of Artificial Sequence: Synthetic oligonucleotide
ugguacuagaaguuccagu

SEQ ID NO: 957309 - RNA, 19 nt, Artificial Sequence
  Description of Artificial Sequence: Synthetic oligonucleotide
gcuacuuucccacuuaguc

SEQ ID NO: 957310 - RNA, 19 nt, Artificial Sequence
  Description of Artificial Sequence: Synthetic oligonucleotide
uauagguauucuacccuaa

SEQ ID NO: 957311 - RNA, 19 nt, Artificial Sequence
  Description of Artificial Sequence: Synthetic oligonucleotide
gguaccguguuccuucugg

SEQ ID NO: 957312 - RNA, 19 nt, Artificial Sequence
  Description of Artificial Sequence: Synthetic oligonucleotide
agguuaaauuaaccugcuc

SEQ ID NO: 957313 - RNA, 19 nt, Artificial Sequence
  Description of Artificial Sequence: Synthetic oligonucleotide
aauuaguggcagaaccaug

SEQ ID NO: 957314 - RNA, 19 nt, Artificial Sequence
  Description of Artificial Sequence: Synthetic oligonucleotide
aggauacaacucuuuauau

SEQ ID NO: 957315 - RNA, 19 nt, Artificial Sequence
  Description of Artificial Sequence: Synthetic oligonucleotide
gacaacucugaccuccgac

SEQ ID NO: 957316 - RNA, 19 nt, Artificial Sequence
  Description of Artificial Sequence: Synthetic oligonucleotide
gaaauaauauguucuugau

SEQ ID NO: 957317 - RNA, 19 nt, Artificial Sequence
  Description of Artificial Sequence: Synthetic oligonucleotide
gucaacuaacuguucuacc

SEQ ID NO: 957318 - RNA, 19 nt, Artificial Sequence
  Description of Artificial Sequence: Synthetic oligonucleotide
ucacuuuaccuuuccucug

SEQ ID NO: 957319 - RNA, 19 nt, Artificial Sequence
  Description of Artificial Sequence: Synthetic oligonucleotide
guuuucgggauuccugggc

SEQ ID NO: 957320 - RNA, 19 nt, Artificial Sequence
  Description of Artificial Sequence: Synthetic oligonucleotide
gguauucuacccuaaguga

SEQ ID NO: 957321 - RNA, 19 nt, Artificial Sequence
  Description of Artificial Sequence: Synthetic oligonucleotide
uagcagggagaaauaauau

SEQ ID NO: 957322 - RNA, 19 nt, Artificial Sequence
  Description of Artificial Sequence: Synthetic oligonucleotide
guaguguuucaauauccca

SEQ ID NO: 957323 - RNA, 19 nt, Artificial Sequence
  Description of Artificial Sequence: Synthetic oligonucleotide
cagggagguuaaauuaacc

SEQ ID NO: 957324 - RNA, 19 nt, Artificial Sequence
  Description of Artificial Sequence: Synthetic oligonucleotide
auuuuggaauugauucaac

SEQ ID NO: 957325 - RNA, 19 nt, Artificial Sequence
  Description of Artificial Sequence: Synthetic oligonucleotide
uauuagaaguauguuccau

SEQ ID NO: 957326 - RNA, 19 nt, Artificial Sequence
  Description of Artificial Sequence: Synthetic oligonucleotide
accaucacuucucauccga

SEQ ID NO: 957327 - RNA, 19 nt, Artificial Sequence
  Description of Artificial Sequence: Synthetic oligonucleotide
caggguuagccacaggaac

SEQ ID NO: 957328 - RNA, 19 nt, Artificial Sequence
  Description of Artificial Sequence: Synthetic oligonucleotide
auccguagccacuuuccag

SEQ ID NO: 957329 - RNA, 19 nt, Artificial Sequence
  Description of Artificial Sequence: Synthetic oligonucleotide
agagcacgaauuuuaguua

SEQ ID NO: 957330 - RNA, 19 nt, Artificial Sequence
  Description of Artificial Sequence: Synthetic oligonucleotide
gcauaguaauauucuauug

SEQ ID NO: 957331 - RNA, 19 nt, Artificial Sequence
  Description of Artificial Sequence: Synthetic oligonucleotide
auaucccaaaagguagcac

SEQ ID NO: 957332 - RNA, 19 nt, Artificial Sequence
  Description of Artificial Sequence: Synthetic oligonucleotide
ugcuuucuacucaguacca

SEQ ID NO: 957333 - RNA, 19 nt, Artificial Sequence
  Description of Artificial Sequence: Synthetic oligonucleotide
aacaacagggcugggguau

SEQ ID NO: 957334 - RNA, 19 nt, Artificial Sequence
  Description of Artificial Sequence: Synthetic oligonucleotide
agaucauuacugauuucag

SEQ ID NO: 957335 - RNA, 19 nt, Artificial Sequence
  Description of Artificial Sequence: Synthetic oligonucleotide
ggauuuagccuuaagaaaa

SEQ ID NO: 957336 - RNA, 19 nt, Artificial Sequence
  Description of Artificial Sequence: Synthetic oligonucleotide
uugaggaaucugcuguuau

SEQ ID NO: 957337 - RNA, 19 nt, Artificial Sequence
  Description of Artificial Sequence: Synthetic oligonucleotide
gggguuauaucccugagaa

SEQ ID NO: 957338 - RNA, 19 nt, Artificial Sequence
  Description of Artificial Sequence: Synthetic oligonucleotide
gaaaccuccuguauaaaua

SEQ ID NO: 957339 - RNA, 19 nt, Artificial Sequence
  Description of Artificial Sequence: Synthetic oligonucleotide
uagaaguauguuccauaaa

SEQ ID NO: 957340 - RNA, 19 nt, Artificial Sequence
  Description of Artificial Sequence: Synthetic oligonucleotide
ugucuggcauguuggauuc

SEQ ID NO: 957341 - RNA, 19 nt, Artificial Sequence
  Description of Artificial Sequence: Synthetic oligonucleotide
auuccaauugguguaccca

SEQ ID NO: 957342 - RNA, 19 nt, Artificial Sequence
  Description of Artificial Sequence: Synthetic oligonucleotide
uccaggauuuagccuuaag

SEQ ID NO: 957343 - RNA, 19 nt, Artificial Sequence
  Description of Artificial Sequence: Synthetic oligonucleotide
uucaauccuccuucauccc

SEQ ID NO: 957344 - RNA, 19 nt, Artificial Sequence
  Description of Artificial Sequence: Synthetic oligonucleotide
agaacugcuagcugcugaa

SEQ ID NO: 957345 - RNA, 19 nt, Artificial Sequence
  Description of Artificial Sequence: Synthetic oligonucleotide
uuguuccaggauuuagccu

SEQ ID NO: 957346 - RNA, 19 nt, Artificial Sequence
  Description of Artificial Sequence: Synthetic oligonucleotide
gagcacgaauuuuaguuaa

SEQ ID NO: 957347 - RNA, 19 nt, Artificial Sequence
  Description of Artificial Sequence: Synthetic oligonucleotide
aaguaggccagggagguua

SEQ ID NO: 957348 - RNA, 19 nt, Artificial Sequence
  Description of Artificial Sequence: Synthetic oligonucleotide
cugcucuagaacucaauca

SEQ ID NO: 957349 - RNA, 19 nt, Artificial Sequence
  Description of Artificial Sequence: Synthetic oligonucleotide
uuagugucucuuuccucga

SEQ ID NO: 957350 - RNA, 19 nt, Artificial Sequence
  Description of Artificial Sequence: Synthetic oligonucleotide
uuucgggauuccugggcag

SEQ ID NO: 957351 - RNA, 19 nt, Artificial Sequence
  Description of Artificial Sequence: Synthetic oligonucleotide
agaacucacuugaggaauc

SEQ ID NO: 957352 - RNA, 19 nt, Artificial Sequence
  Description of Artificial Sequence: Synthetic oligonucleotide
guaccaaaguuaaguagug

SEQ ID NO: 957353 - RNA, 19 nt, Artificial Sequence
  Description of Artificial Sequence: Synthetic oligonucleotide
guauaaauagcaauuguuu

SEQ ID NO: 957354 - RNA, 19 nt, Artificial Sequence
  Description of Artificial Sequence: Synthetic oligonucleotide
uucccacuuagucauccuc

SEQ ID NO: 957355 - RNA, 19 nt, Artificial Sequence
  Description of Artificial Sequence: Synthetic oligonucleotide
caggauacaacucuuuaua

SEQ ID NO: 957356 - RNA, 19 nt, Artificial Sequence
  Description of Artificial Sequence: Synthetic oligonucleotide
cagaccuugcauccguagc

SEQ ID NO: 957357 - RNA, 19 nt, Artificial Sequence
  Description of Artificial Sequence: Synthetic oligonucleotide
acugggaaguagcccuuuc

SEQ ID NO: 957358 - RNA, 19 nt, Artificial Sequence
  Description of Artificial Sequence: Synthetic oligonucleotide
caaagcggaagccaggaaa

SEQ ID NO: 957359 - RNA, 19 nt, Artificial Sequence
  Description of Artificial Sequence: Synthetic oligonucleotide
cuucugguccccugguaag

SEQ ID NO: 957360 - RNA, 19 nt, Artificial Sequence
  Description of Artificial Sequence: Synthetic oligonucleotide
ucaugcuaaccaugaagua

SEQ ID NO: 957361 - RNA, 19 nt, Artificial Sequence
  Description of Artificial Sequence: Synthetic oligonucleotide
acauuccaauugguguacc

SEQ ID NO: 957362 - RNA, 19 nt, Artificial Sequence
  Description of Artificial Sequence: Synthetic oligonucleotide
ggcaggacaacucugaccu

SEQ ID NO: 957363 - RNA, 19 nt, Artificial Sequence
  Description of Artificial Sequence: Synthetic oligonucleotide
acucaaucaauuaguggca

SEQ ID NO: 957364 - RNA, 19 nt, Artificial Sequence
  Description of Artificial Sequence: Synthetic oligonucleotide
ugacgaccucaaaacaaaa

SEQ ID NO: 957365 - RNA, 19 nt, Artificial Sequence
  Description of Artificial Sequence: Synthetic oligonucleotide
cuuucuacucaguaccaaa

SEQ ID NO: 957366 - RNA, 19 nt, Artificial Sequence
  Description of Artificial Sequence: Synthetic oligonucleotide
accagauucccuacuaaca

SEQ ID NO: 957367 - RNA, 19 nt, Artificial Sequence
  Description of Artificial Sequence: Synthetic oligonucleotide
agcguguuucauuuuggaa

SEQ ID NO: 957368 - RNA, 19 nt, Artificial Sequence
  Description of Artificial Sequence: Synthetic oligonucleotide
aaacaacagggcuggggua

SEQ ID NO: 957369 - RNA, 19 nt, Artificial Sequence
  Description of Artificial Sequence: Synthetic oligonucleotide
uuauauccacugugacccc

SEQ ID NO: 957370 - RNA, 19 nt, Artificial Sequence
  Description of Artificial Sequence: Synthetic oligonucleotide
uuggauucauaaucauaua

SEQ ID NO: 957371 - RNA, 19 nt, Artificial Sequence
  Description of Artificial Sequence: Synthetic oligonucleotide
gggauuccugggcagaugc

SEQ ID NO: 957372 - RNA, 19 nt, Artificial Sequence
  Description of Artificial Sequence: Synthetic oligonucleotide
uccaguagucucugugacu

SEQ ID NO: 957373 - RNA, 19 nt, Artificial Sequence
  Description of Artificial Sequence: Synthetic oligonucleotide
caacauuccaauuggugua

SEQ ID NO: 957374 - RNA, 19 nt, Artificial Sequence
  Description of Artificial Sequence: Synthetic oligonucleotide
ugcucauaaucaagggcua

SEQ ID NO: 957375 - RNA, 19 nt, Artificial Sequence
  Description of Artificial Sequence: Synthetic oligonucleotide
ugcuacuuucccacuuagu

SEQ ID NO: 957376 - RNA, 19 nt, Artificial Sequence
  Description of Artificial Sequence: Synthetic oligonucleotide
uucuaccagccacuuugca

SEQ ID NO: 957377 - RNA, 19 nt, Artificial Sequence
  Description of Artificial Sequence: Synthetic oligonucleotide
aacucacuugaggaaucug

SEQ ID NO: 957378 - RNA, 19 nt, Artificial Sequence
  Description of Artificial Sequence: Synthetic oligonucleotide
aucuguggcaggacaacuc

SEQ ID NO: 957379 - RNA, 19 nt, Artificial Sequence
  Description of Artificial Sequence: Synthetic oligonucleotide
guacccagaucauuacuga

SEQ ID NO: 957380 - RNA, 19 nt, Artificial Sequence
  Description of Artificial Sequence: Synthetic oligonucleotide
caacucugaccuccgacug

SEQ ID NO: 957381 - RNA, 19 nt, Artificial Sequence
  Description of Artificial Sequence: Synthetic oligonucleotide
cauuuuggaauugauucaa

SEQ ID NO: 957382 - RNA, 19 nt, Artificial Sequence
  Description of Artificial Sequence: Synthetic oligonucleotide
auaccagauucccuacuaa

SEQ ID NO: 957383 - RNA, 19 nt, Artificial Sequence
  Description of Artificial Sequence: Synthetic oligonucleotide
accaugacccacaugaguu

SEQ ID NO: 957384 - RNA, 19 nt, Artificial Sequence
  Description of Artificial Sequence: Synthetic oligonucleotide
ugcucguccucuccuguac

SEQ ID NO: 957385 - RNA, 19 nt, Artificial Sequence
  Description of Artificial Sequence: Synthetic oligonucleotide
uuacugauuucagcuuucu

SEQ ID NO: 957386 - RNA, 19 nt, Artificial Sequence
  Description of Artificial Sequence: Synthetic oligonucleotide
auucguuaauagaauuaga

SEQ ID NO: 957387 - RNA, 19 nt, Artificial Sequence
  Description of Artificial Sequence: Synthetic oligonucleotide
caggaaaccuccuguauaa

SEQ ID NO: 957388 - RNA, 19 nt, Artificial Sequence
  Description of Artificial Sequence: Synthetic oligonucleotide
cacaguauagcagggagaa

SEQ ID NO: 957389 - RNA, 19 nt, Artificial Sequence
  Description of Artificial Sequence: Synthetic oligonucleotide
aauccuccuucaucccaga

SEQ ID NO: 957390 - RNA, 19 nt, Artificial Sequence
  Description of Artificial Sequence: Synthetic oligonucleotide
aaaugccacuucaugggau

SEQ ID NO: 957391 - RNA, 19 nt, Artificial Sequence
  Description of Artificial Sequence: Synthetic oligonucleotide
auggaacauugacauuuga

SEQ ID NO: 957392 - RNA, 19 nt, Artificial Sequence
  Description of Artificial Sequence: Synthetic oligonucleotide
cguuaauagaauuagaaau

SEQ ID NO: 957393 - RNA, 19 nt, Artificial Sequence
  Description of Artificial Sequence: Synthetic oligonucleotide
augcuaaccaugaaguauu

SEQ ID NO: 957394 - RNA, 19 nt, Artificial Sequence
  Description of Artificial Sequence: Synthetic oligonucleotide
uacccagaucauuacugau

SEQ ID NO: 957395 - RNA, 19 nt, Artificial Sequence
  Description of Artificial Sequence: Synthetic oligonucleotide
ucccugagaagcguguuuc

SEQ ID NO: 957396 - RNA, 19 nt, Artificial Sequence
  Description of Artificial Sequence: Synthetic oligonucleotide
cugggguauggcccaaagc

SEQ ID NO: 957397 - RNA, 19 nt, Artificial Sequence
  Description of Artificial Sequence: Synthetic oligonucleotide
cccuaagugauuaauugca

SEQ ID NO: 957398 - RNA, 19 nt, Artificial Sequence
  Description of Artificial Sequence: Synthetic oligonucleotide
ccaggauuuagccuuaaga

SEQ ID NO: 957399 - RNA, 19 nt, Artificial Sequence
  Description of Artificial Sequence: Synthetic oligonucleotide
gucagcauaguaauauucu

SEQ ID NO: 957400 - RNA, 19 nt, Artificial Sequence
  Description of Artificial Sequence: Synthetic oligonucleotide
caauugguguacccagauc

SEQ ID NO: 957401 - RNA, 19 nt, Artificial Sequence
  Description of Artificial Sequence: Synthetic oligonucleotide
auucuacccuaagugauua

SEQ ID NO: 957402 - RNA, 19 nt, Artificial Sequence
  Description of Artificial Sequence: Synthetic oligonucleotide
uuccugguacuagaaguuc

SEQ ID NO: 957403 - RNA, 19 nt, Artificial Sequence
  Description of Artificial Sequence: Synthetic oligonucleotide
cacuuuaccuuuccucuga

SEQ ID NO: 957404 - RNA, 19 nt, Artificial Sequence
  Description of Artificial Sequence: Synthetic oligonucleotide
acaucuggccaacuaugua

SEQ ID NO: 957405 - RNA, 19 nt, Artificial Sequence
  Description of Artificial Sequence: Synthetic oligonucleotide
ugguccccugguaagcauc

SEQ ID NO: 957406 - RNA, 19 nt, Artificial Sequence
  Description of Artificial Sequence: Synthetic oligonucleotide
aauuugcuauauagguauu

SEQ ID NO: 957407 - RNA, 19 nt, Artificial Sequence
  Description of Artificial Sequence: Synthetic oligonucleotide
augcuuucaccugggaagu

SEQ ID NO: 957408 - RNA, 19 nt, Artificial Sequence
  Description of Artificial Sequence: Synthetic oligonucleotide
acuauucuaucuagcacua

SEQ ID NO: 957409 - RNA, 19 nt, Artificial Sequence
  Description of Artificial Sequence: Synthetic oligonucleotide
uggguacuuuaauuugcua

SEQ ID NO: 957410 - RNA, 19 nt, Artificial Sequence
  Description of Artificial Sequence: Synthetic oligonucleotide
ucccaaaagguagcaccug

SEQ ID NO: 957411 - RNA, 19 nt, Artificial Sequence
  Description of Artificial Sequence: Synthetic oligonucleotide
acacaaaguaagacuggga

SEQ ID NO: 957412 - RNA, 19 nt, Artificial Sequence
  Description of Artificial Sequence: Synthetic oligonucleotide
ggguacuuuaauuugcuau

SEQ ID NO: 957413 - RNA, 19 nt, Artificial Sequence
  Description of Artificial Sequence: Synthetic oligonucleotide
guauggcccaaagcggaag

SEQ ID NO: 957414 - RNA, 19 nt, Artificial Sequence
  Description of Artificial Sequence: Synthetic oligonucleotide
cugguacuagaaguuccag

SEQ ID NO: 957415 - RNA, 19 nt, Artificial Sequence
  Description of Artificial Sequence: Synthetic oligonucleotide
ugcuaaccaugaaguauuu

SEQ ID NO: 957416 - RNA, 19 nt, Artificial Sequence
  Description of Artificial Sequence: Synthetic oligonucleotide
caguauagcagggagaaau

SEQ ID NO: 957417 - RNA, 19 nt, Artificial Sequence
  Description of Artificial Sequence: Synthetic oligonucleotide
cuuucuggguacuuuaauu

SEQ ID NO: 957418 - RNA, 19 nt, Artificial Sequence
  Description of Artificial Sequence: Synthetic oligonucleotide
ccugcucuagaacucaauc

SEQ ID NO: 957419 - RNA, 19 nt, Artificial Sequence
  Description of Artificial Sequence: Synthetic oligonucleotide
cccaaaagguagcaccugc

SEQ ID NO: 957420 - RNA, 19 nt, Artificial Sequence
  Description of Artificial Sequence: Synthetic oligonucleotide
guaucuguggcaggacaac

SEQ ID NO: 957421 - RNA, 19 nt, Artificial Sequence
  Description of Artificial Sequence: Synthetic oligonucleotide
acuuuaccuuuccucugaa

SEQ ID NO: 957422 - RNA, 19 nt, Artificial Sequence
  Description of Artificial Sequence: Synthetic oligonucleotide
cucuagaacucaaucaauu

SEQ ID NO: 957423 - RNA, 19 nt, Artificial Sequence
  Description of Artificial Sequence: Synthetic oligonucleotide
aggacaacucugaccuccg

SEQ ID NO: 957424 - RNA, 19 nt, Artificial Sequence
  Description of Artificial Sequence: Synthetic oligonucleotide
ccuccgacugggaagcagg

SEQ ID NO: 957425 - RNA, 19 nt, Artificial Sequence
  Description of Artificial Sequence: Synthetic oligonucleotide
gugacgaccucaaaacaaa

SEQ ID NO: 957426 - RNA, 19 nt, Artificial Sequence
  Description of Artificial Sequence: Synthetic oligonucleotide
aguauagcagggagaaaua

SEQ ID NO: 957427 - RNA, 19 nt, Artificial Sequence
  Description of Artificial Sequence: Synthetic oligonucleotide
auaucccugagaagcgugu

SEQ ID NO: 957428 - RNA, 19 nt, Artificial Sequence
  Description of Artificial Sequence: Synthetic oligonucleotide
caugcuaaccaugaaguau

SEQ ID NO: 957429 - RNA, 19 nt, Artificial Sequence
  Description of Artificial Sequence: Synthetic oligonucleotide
ccaacauuccaauuggugu

SEQ ID NO: 957430 - RNA, 19 nt, Artificial Sequence
  Description of Artificial Sequence: Synthetic oligonucleotide
cagcauaguaauauucuau

SEQ ID NO: 957431 - RNA, 19 nt, Artificial Sequence
  Description of Artificial Sequence: Synthetic oligonucleotide
cagaacugcuagcugcuga

SEQ ID NO: 957432 - RNA, 19 nt, Artificial Sequence
  Description of Artificial Sequence: Synthetic oligonucleotide
ggguuauaucccugagaag

SEQ ID NO: 957433 - RNA, 19 nt, Artificial Sequence
  Description of Artificial Sequence: Synthetic oligonucleotide
uucuacccuaagugauuaa

SEQ ID NO: 957434 - RNA, 19 nt, Artificial Sequence
  Description of Artificial Sequence: Synthetic oligonucleotide
gauucccuacuaacaacaa

SEQ ID NO: 957435 - RNA, 19 nt, Artificial Sequence
  Description of Artificial Sequence: Synthetic oligonucleotide
cuccuguauaaauagcaau

SEQ ID NO: 957436 - RNA, 19 nt, Artificial Sequence
  Description of Artificial Sequence: Synthetic oligonucleotide
agguagcaccugcucauaa

SEQ ID NO: 957437 - RNA, 19 nt, Artificial Sequence
  Description of Artificial Sequence: Synthetic oligonucleotide
gaccccaucugucuggcau

SEQ ID NO: 957438 - RNA, 19 nt, Artificial Sequence
  Description of Artificial Sequence: Synthetic oligonucleotide
ugguaauaucuugcugguc

SEQ ID NO: 957439 - RNA, 19 nt, Artificial Sequence
  Description of Artificial Sequence: Synthetic oligonucleotide
caauuguuuccuugucaaa

SEQ ID NO: 957440 - RNA, 19 nt, Artificial Sequence
  Description of Artificial Sequence: Synthetic oligonucleotide
acccagaucauuacugauu

SEQ ID NO: 957441 - RNA, 19 nt, Artificial Sequence
  Description of Artificial Sequence: Synthetic oligonucleotide
gaccuugcauccguagcca

SEQ ID NO: 957442 - RNA, 19 nt, Artificial Sequence
  Description of Artificial Sequence: Synthetic oligonucleotide
gcuagggcacaucuggcca

SEQ ID NO: 957443 - RNA, 19 nt, Artificial Sequence
  Description of Artificial Sequence: Synthetic oligonucleotide
ccagggagguuaaauuaac

SEQ ID NO: 957444 - RNA, 19 nt, Artificial Sequence
  Description of Artificial Sequence: Synthetic oligonucleotide
gcagaccuugcauccguag

SEQ ID NO: 957445 - RNA, 19 nt, Artificial Sequence
  Description of Artificial Sequence: Synthetic oligonucleotide
acccugacaaugucacuuu

SEQ ID NO: 957446 - RNA, 19 nt, Artificial Sequence
  Description of Artificial Sequence: Synthetic oligonucleotide
caguaccaaaagugacgac

SEQ ID NO: 957447 - RNA, 19 nt, Artificial Sequence
  Description of Artificial Sequence: Synthetic oligonucleotide
gagguuaaauuaaccugcu

SEQ ID NO: 957448 - RNA, 19 nt, Artificial Sequence
  Description of Artificial Sequence: Synthetic oligonucleotide
uggguaccguguuccuucu

SEQ ID NO: 957449 - RNA, 19 nt, Artificial Sequence
  Description of Artificial Sequence: Synthetic oligonucleotide
auugguguacccagaucau

SEQ ID NO: 957450 - RNA, 19 nt, Artificial Sequence
  Description of Artificial Sequence: Synthetic oligonucleotide
ugacugggaaguagcccuu

SEQ ID NO: 957451 - RNA, 19 nt, Artificial Sequence
  Description of Artificial Sequence: Synthetic oligonucleotide
cauccguagccacuuucca

SEQ ID NO: 957452 - RNA, 19 nt, Artificial Sequence
  Description of Artificial Sequence: Synthetic oligonucleotide
gcauccguagccacuuucc

SEQ ID NO: 957453 - RNA, 19 nt, Artificial Sequence
  Description of Artificial Sequence: Synthetic oligonucleotide
gggaugucagcauaguaau

SEQ ID NO: 957454 - RNA, 19 nt, Artificial Sequence
  Description of Artificial Sequence: Synthetic oligonucleotide
gggugagauuaacagucca

SEQ ID NO: 957455 - RNA, 19 nt, Artificial Sequence
  Description of Artificial Sequence: Synthetic oligonucleotide
gguaagcauccuccauuug

SEQ ID NO: 957456 - RNA, 19 nt, Artificial Sequence
  Description of Artificial Sequence: Synthetic oligonucleotide
ccguuugguuuucuuagug

SEQ ID NO: 957457 - RNA, 19 nt, Artificial Sequence
  Description of Artificial Sequence: Synthetic oligonucleotide
aucuggccaacuauguauu

SEQ ID NO: 957458 - RNA, 19 nt, Artificial Sequence
  Description of Artificial Sequence: Synthetic oligonucleotide
ccagauucccuacuaacaa

SEQ ID NO: 957459 - RNA, 19 nt, Artificial Sequence
  Description of Artificial Sequence: Synthetic oligonucleotide
cucagaacugcuagcugcu

SEQ ID NO: 957460 - RNA, 19 nt, Artificial Sequence
  Description of Artificial Sequence: Synthetic oligonucleotide
cauugacauuugaguacca

SEQ ID NO: 957461 - RNA, 19 nt, Artificial Sequence
  Description of Artificial Sequence: Synthetic oligonucleotide
ggaaaccuccuguauaaau

SEQ ID NO: 957462 - RNA, 19 nt, Artificial Sequence
  Description of Artificial Sequence: Synthetic oligonucleotide
ucguccucuccuguacuuc

SEQ ID NO: 957463 - RNA, 19 nt, Artificial Sequence
  Description of Artificial Sequence: Synthetic oligonucleotide
cacaucuggccaacuaugu

SEQ ID NO: 957464 - RNA, 19 nt, Artificial Sequence
  Description of Artificial Sequence: Synthetic oligonucleotide
uccgacugggaagcaggac

SEQ ID NO: 957465 - RNA, 19 nt, Artificial Sequence
  Description of Artificial Sequence: Synthetic oligonucleotide
cuacccuaagugauuaauu

SEQ ID NO: 957466 - RNA, 19 nt, Artificial Sequence
  Description of Artificial Sequence: Synthetic oligonucleotide
ggccagggagguuaaauua

SEQ ID NO: 957467 - RNA, 19 nt, Artificial Sequence
  Description of Artificial Sequence: Synthetic oligonucleotide
gcugggguauggcccaaag

SEQ ID NO: 957468 - RNA, 19 nt, Artificial Sequence
  Description of Artificial Sequence: Synthetic oligonucleotide
cauaaucauauaacuucuu

SEQ ID NO: 957469 - RNA, 19 nt, Artificial Sequence
  Description of Artificial Sequence: Synthetic oligonucleotide
cugucuggcauguuggauu

SEQ ID NO: 957470 - RNA, 19 nt, Artificial Sequence
  Description of Artificial Sequence: Synthetic oligonucleotide
caagggcuagggcacaucu

SEQ ID NO: 957471 - RNA, 19 nt, Artificial Sequence
  Description of Artificial Sequence: Synthetic oligonucleotide
gggcagaugcuuucaccug

SEQ ID NO: 957472 - RNA, 19 nt, Artificial Sequence
  Description of Artificial Sequence: Synthetic oligonucleotide
uugcucguccucuccugua

SEQ ID NO: 957473 - RNA, 19 nt, Artificial Sequence
  Description of Artificial Sequence: Synthetic oligonucleotide
cuagggcacaucuggccaa

SEQ ID NO: 957474 - RNA, 19 nt, Artificial Sequence
  Description of Artificial Sequence: Synthetic oligonucleotide
augccacuucaugggaugu

SEQ ID NO: 957475 - RNA, 19 nt, Artificial Sequence
  Description of Artificial Sequence: Synthetic oligonucleotide
uagggcacaucuggccaac

SEQ ID NO: 957476 - RNA, 19 nt, Artificial Sequence
  Description of Artificial Sequence: Synthetic oligonucleotide
ccaaaagugacgaccucaa

SEQ ID NO: 957477 - RNA, 19 nt, Artificial Sequence
  Description of Artificial Sequence: Synthetic oligonucleotide
gaacucacuugaggaaucu

SEQ ID NO: 957478 - RNA, 19 nt, Artificial Sequence
  Description of Artificial Sequence: Synthetic oligonucleotide
aaaguaggccagggagguu

SEQ ID NO: 957479 - RNA, 19 nt, Artificial Sequence
  Description of Artificial Sequence: Synthetic oligonucleotide
uggucacuacugucuguuu

SEQ ID NO: 957480 - RNA, 19 nt, Artificial Sequence
  Description of Artificial Sequence: Synthetic oligonucleotide
ggguauggcccaaagcgga

SEQ ID NO: 957481 - RNA, 19 nt, Artificial Sequence
  Description of Artificial Sequence: Synthetic oligonucleotide
gcacgaauuuuaguuaaaa

SEQ ID NO: 957482 - RNA, 19 nt, Artificial Sequence
  Description of Artificial Sequence: Synthetic oligonucleotide
ccguguuccuucugguccc

SEQ ID NO: 957483 - RNA, 19 nt, Artificial Sequence
  Description of Artificial Sequence: Synthetic oligonucleotide
ggggugagauuaacagucc

SEQ ID NO: 957484 - RNA, 19 nt, Artificial Sequence
  Description of Artificial Sequence: Synthetic oligonucleotide
agcacgaauuuuaguuaaa

SEQ ID NO: 957485 - RNA, 19 nt, Artificial Sequence
  Description of Artificial Sequence: Synthetic oligonucleotide
ucgggauuccugggcagau

SEQ ID NO: 957486 - RNA, 19 nt, Artificial Sequence
  Description of Artificial Sequence: Synthetic oligonucleotide
gacugcuacuuucccacuu

SEQ ID NO: 957487 - RNA, 19 nt, Artificial Sequence
  Description of Artificial Sequence: Synthetic oligonucleotide
aggaaaccuccuguauaaa

SEQ ID NO: 957488 - RNA, 19 nt, Artificial Sequence
  Description of Artificial Sequence: Synthetic oligonucleotide
cugagaagcguguuucauu

SEQ ID NO: 957489 - RNA, 19 nt, Artificial Sequence
  Description of Artificial Sequence: Synthetic oligonucleotide
ccuccuguauaaauagcaa

SEQ ID NO: 957490 - RNA, 19 nt, Artificial Sequence
  Description of Artificial Sequence: Synthetic oligonucleotide
guaccguguuccuucuggu

SEQ ID NO: 957491 - RNA, 19 nt, Artificial Sequence
  Description of Artificial Sequence: Synthetic oligonucleotide
cugggaaguagcccuuucu

SEQ ID NO: 957492 - RNA, 19 nt, Artificial Sequence
  Description of Artificial Sequence: Synthetic oligonucleotide
cuccgacugggaagcagga

SEQ ID NO: 957493 - RNA, 19 nt, Artificial Sequence
  Description of Artificial Sequence: Synthetic oligonucleotide
ccaaauccaacauuccaau

SEQ ID NO: 957494 - RNA, 19 nt, Artificial Sequence
  Description of Artificial Sequence: Synthetic oligonucleotide
caccugggaaguauguuuu

SEQ ID NO: 957495 - RNA, 19 nt, Artificial Sequence
  Description of Artificial Sequence: Synthetic oligonucleotide
ccaggaaaccuccuguaua

SEQ ID NO: 957496 - RNA, 19 nt, Artificial Sequence
  Description of Artificial Sequence: Synthetic oligonucleotide
uugcauccguagccacuuu

SEQ ID NO: 957497 - RNA, 19 nt, Artificial Sequence
  Description of Artificial Sequence: Synthetic oligonucleotide
gcggaagccaggaaaccuc

SEQ ID NO: 957498 - RNA, 19 nt, Artificial Sequence
  Description of Artificial Sequence: Synthetic oligonucleotide
cuuuaccuuuccucugaau

SEQ ID NO: 957499 - RNA, 19 nt, Artificial Sequence
  Description of Artificial Sequence: Synthetic oligonucleotide
gcugcuggguaccguguuc

SEQ ID NO: 957500 - RNA, 19 nt, Artificial Sequence
  Description of Artificial Sequence: Synthetic oligonucleotide
accugcucuagaacucaau

SEQ ID NO: 957501 - RNA, 19 nt, Artificial Sequence
  Description of Artificial Sequence: Synthetic oligonucleotide
gguuagccacaggaacaug

SEQ ID NO: 957502 - RNA, 19 nt, Artificial Sequence
  Description of Artificial Sequence: Synthetic oligonucleotide
cuugcauccguagccacuu

SEQ ID NO: 957503 - RNA, 19 nt, Artificial Sequence
  Description of Artificial Sequence: Synthetic oligonucleotide
aguaggccagggagguuaa

SEQ ID NO: 957504 - RNA, 19 nt, Artificial Sequence
  Description of Artificial Sequence: Synthetic oligonucleotide
cuugugugguuguuuccuu

SEQ ID NO: 957505 - RNA, 19 nt, Artificial Sequence
  Description of Artificial Sequence: Synthetic oligonucleotide
ccaaaagguagcaccugcu

SEQ ID NO: 957506 - RNA, 19 nt, Artificial Sequence
  Description of Artificial Sequence: Synthetic oligonucleotide
ggacaacucugaccuccga

SEQ ID NO: 957507 - RNA, 19 nt, Artificial Sequence
  Description of Artificial Sequence: Synthetic oligonucleotide
gguauggcccaaagcggaa

SEQ ID NO: 957508 - RNA, 19 nt, Artificial Sequence
  Description of Artificial Sequence: Synthetic oligonucleotide
ggccaacuauguauuuuaa

SEQ ID NO: 957509 - RNA, 19 nt, Artificial Sequence
  Description of Artificial Sequence: Synthetic oligonucleotide
ggaugucagcauaguaaua

SEQ ID NO: 957510 - RNA, 19 nt, Artificial Sequence
  Description of Artificial Sequence: Synthetic oligonucleotide
cguguuucauuuuggaauu

SEQ ID NO: 957511 - RNA, 19 nt, Artificial Sequence
  Description of Artificial Sequence: Synthetic oligonucleotide
ggaauugauucaacugguu

SEQ ID NO: 957512 - RNA, 19 nt, Artificial Sequence
  Description of Artificial Sequence: Synthetic oligonucleotide
ggguaccguguuccuucug

SEQ ID NO: 957513 - RNA, 19 nt, Artificial Sequence
  Description of Artificial Sequence: Synthetic oligonucleotide
ccaauugguguacccagau

SEQ ID NO: 957514 - RNA, 19 nt, Artificial Sequence
  Description of Artificial Sequence: Synthetic oligonucleotide
cuauucuaucuagcacuau

SEQ ID NO: 957515 - RNA, 19 nt, Artificial Sequence
  Description of Artificial Sequence: Synthetic oligonucleotide
cccugagaagcguguuuca

SEQ ID NO: 957516 - RNA, 19 nt, Artificial Sequence
  Description of Artificial Sequence: Synthetic oligonucleotide
gaccuccgacugggaagca

SEQ ID NO: 957517 - RNA, 19 nt, Artificial Sequence
  Description of Artificial Sequence: Synthetic oligonucleotide
ccugcgcuugcucguccuc

SEQ ID NO: 957518 - RNA, 19 nt, Artificial Sequence
  Description of Artificial Sequence: Synthetic oligonucleotide
guaggccagggagguuaaa

SEQ ID NO: 957519 - RNA, 19 nt, Artificial Sequence
  Description of Artificial Sequence: Synthetic oligonucleotide
gcuaaccaugaaguauuuu

SEQ ID NO: 957520 - RNA, 19 nt, Artificial Sequence
  Description of Artificial Sequence: Synthetic oligonucleotide
ccugguaagcauccuccau

SEQ ID NO: 957521 - RNA, 19 nt, Artificial Sequence
  Description of Artificial Sequence: Synthetic oligonucleotide
ccacuuugcagugguauuu

SEQ ID NO: 957522 - RNA, 19 nt, Artificial Sequence
  Description of Artificial Sequence: Synthetic oligonucleotide
cgacuugagcugcugggua

SEQ ID NO: 957523 - RNA, 19 nt, Artificial Sequence
  Description of Artificial Sequence: Synthetic oligonucleotide
guccccugguaagcauccu

SEQ ID NO: 957524 - RNA, 19 nt, Artificial Sequence
  Description of Artificial Sequence: Synthetic oligonucleotide
ccguagccacuuuccaguu

SEQ ID NO: 957525 - RNA, 19 nt, Artificial Sequence
  Description of Artificial Sequence: Synthetic oligonucleotide
ucuagcauguaauaaaugg

SEQ ID NO: 957526 - RNA, 19 nt, Artificial Sequence
  Description of Artificial Sequence: Synthetic oligonucleotide
aagacaugaagccagccuc

SEQ ID NO: 957527 - RNA, 19 nt, Artificial Sequence
  Description of Artificial Sequence: Synthetic oligonucleotide
uguauuagggguaauggug

SEQ ID NO: 957528 - RNA, 19 nt, Artificial Sequence
  Description of Artificial Sequence: Synthetic oligonucleotide
cuggcaaccacaaagauac

SEQ ID NO: 957529 - RNA, 19 nt, Artificial Sequence
  Description of Artificial Sequence: Synthetic oligonucleotide
aagguccagucauugaagc

SEQ ID NO: 957530 - RNA, 19 nt, Artificial Sequence
  Description of Artificial Sequence: Synthetic oligonucleotide
  modified_base (6)..(6): a, c, u, g, unknown or other
agcaunagggcuaucaugc

SEQ ID NO: 957531 - RNA, 19 nt, Artificial Sequence
  Description of Artificial Sequence: Synthetic oligonucleotide
uauauuucuagcauguaau

SEQ ID NO: 957532 - RNA, 19 nt, Artificial Sequence
  Description of Artificial Sequence: Synthetic oligonucleotide
uauucaccaauccucaacc

SEQ ID NO: 957533 - RNA, 19 nt, Artificial Sequence
  Description of Artificial Sequence: Synthetic oligonucleotide
aauguaacugccagcaugg

SEQ ID NO: 957534 - RNA, 19 nt, Artificial Sequence
  Description of Artificial Sequence: Synthetic oligonucleotide
uucugaucaacaaucagcu

SEQ ID NO: 957535 - RNA, 19 nt, Artificial Sequence
  Description of Artificial Sequence: Synthetic oligonucleotide
auagccagucuguaggugc

SEQ ID NO: 957536 - RNA, 19 nt, Artificial Sequence
  Description of Artificial Sequence: Synthetic oligonucleotide
aaaagguccagucauugaa

SEQ ID NO: 957537 - RNA, 19 nt, Artificial Sequence
  Description of Artificial Sequence: Synthetic oligonucleotide
ucauuggugagccagucug

SEQ ID NO: 957538 - RNA, 19 nt, Artificial Sequence
  Description of Artificial Sequence: Synthetic oligonucleotide
guaacugccagcauggagg

SEQ ID NO: 957539 - RNA, 19 nt, Artificial Sequence
  Description of Artificial Sequence: Synthetic oligonucleotide
gaauguaacugccagcaug

SEQ ID NO: 957540 - RNA, 19 nt, Artificial Sequence
  Description of Artificial Sequence: Synthetic oligonucleotide
ucuugaguguauuaggggu

SEQ ID NO: 957541 - RNA, 19 nt, Artificial Sequence
  Description of Artificial Sequence: Synthetic oligonucleotide
guaaggaagguagaggugg

SEQ ID NO: 957542 - RNA, 19 nt, Artificial Sequence
  Description of Artificial Sequence: Synthetic oligonucleotide
uguauaacucacgaauggg

SEQ ID NO: 957543 - RNA, 19 nt, Artificial Sequence
  Description of Artificial Sequence: Synthetic oligonucleotide
ugaucaacaaucagcucag

SEQ ID NO: 957544 - RNA, 19 nt, Artificial Sequence
  Description of Artificial Sequence: Synthetic oligonucleotide
auaacucacgaaugggugg

SEQ ID NO: 957545 - RNA, 19 nt, Artificial Sequence
  Description of Artificial Sequence: Synthetic oligonucleotide
aguguauuagggguaaugg

SEQ ID NO: 957546 - RNA, 19 nt, Artificial Sequence
  Description of Artificial Sequence: Synthetic oligonucleotide
cugauagccagucuguagg

SEQ ID NO: 957547 - RNA, 19 nt, Artificial Sequence
  Description of Artificial Sequence: Synthetic oligonucleotide
uagcauguaauaaaugguc

SEQ ID NO: 957548 - RNA, 19 nt, Artificial Sequence
  Description of Artificial Sequence: Synthetic oligonucleotide
agcauguaauaaauggucc

SEQ ID NO: 957549 - RNA, 19 nt, Artificial Sequence
  Description of Artificial Sequence: Synthetic oligonucleotide
accuguauaacucacgaau

SEQ ID NO: 957550 - RNA, 19 nt, Artificial Sequence
  Description of Artificial Sequence: Synthetic oligonucleotide
cuguauaacucacgaaugg

SEQ ID NO: 957551 - RNA, 19 nt, Artificial Sequence
  Description of Artificial Sequence: Synthetic oligonucleotide
aaauguugcugugaaaagu

SEQ ID NO: 957552 - RNA, 19 nt, Artificial Sequence
  Description of Artificial Sequence: Synthetic oligonucleotide
uuaggauccgaguccaugc

SEQ ID NO: 957553 - RNA, 19 nt, Artificial Sequence
  Description of Artificial Sequence: Synthetic oligonucleotide
cugaucaacaaucagcuca

SEQ ID NO: 957554 - RNA, 19 nt, Artificial Sequence
  Description of Artificial Sequence: Synthetic oligonucleotide
uuaggucccagucaguggu

SEQ ID NO: 957555 - RNA, 19 nt, Artificial Sequence
  Description of Artificial Sequence: Synthetic oligonucleotide
caugaugauccucauacug

SEQ ID NO: 957556 - RNA, 19 nt, Artificial Sequence
  Description of Artificial Sequence: Synthetic oligonucleotide
acaucagugucucagcucu

SEQ ID NO: 957557 - RNA, 19 nt, Artificial Sequence
  Description of Artificial Sequence: Synthetic oligonucleotide
agccauuaggauccgaguc

SEQ ID NO: 957558 - RNA, 19 nt, Artificial Sequence
  Description of Artificial Sequence: Synthetic oligonucleotide
auagcacuuucuaacagac

SEQ ID NO: 957559 - RNA, 19 nt, Artificial Sequence
  Description of Artificial Sequence: Synthetic oligonucleotide
ucaccaauccucaaccacu

SEQ ID NO: 957560 - RNA, 19 nt, Artificial Sequence
  Description of Artificial Sequence: Synthetic oligonucleotide
guaaccauccuccucagga

SEQ ID NO: 957561 - RNA, 19 nt, Artificial Sequence
  Description of Artificial Sequence: Synthetic oligonucleotide
uauuuuggaaaagcugugc

SEQ ID NO: 957562 - RNA, 19 nt, Artificial Sequence
  Description of Artificial Sequence: Synthetic oligonucleotide
agcccauauucaccaaucc

SEQ ID NO: 957563 - RNA, 19 nt, Artificial Sequence
  Description of Artificial Sequence: Synthetic oligonucleotide
ugauccucauacuggguag

SEQ ID NO: 957564 - RNA, 19 nt, Artificial Sequence
  Description of Artificial Sequence: Synthetic oligonucleotide
augaugauccucauacugg

SEQ ID NO: 957565 - RNA, 19 nt, Artificial Sequence
  Description of Artificial Sequence: Synthetic oligonucleotide
gaagccauuaggauccgag

SEQ ID NO: 957566 - RNA, 19 nt, Artificial Sequence
  Description of Artificial Sequence: Synthetic oligonucleotide
aaaagucaggcagauggcu

SEQ ID NO: 957567 - RNA, 19 nt, Artificial Sequence
  Description of Artificial Sequence: Synthetic oligonucleotide
uucaccaauccucaaccac

SEQ ID NO: 957568 - RNA, 19 nt, Artificial Sequence
  Description of Artificial Sequence: Synthetic oligonucleotide
gucuugaguguauuagggg

SEQ ID NO: 957569 - RNA, 19 nt, Artificial Sequence
  Description of Artificial Sequence: Synthetic oligonucleotide
cagucaguggucacaaugc

SEQ ID NO: 957570 - RNA, 19 nt, Artificial Sequence
  Description of Artificial Sequence: Synthetic oligonucleotide
uguaggugccucuugcucu

SEQ ID NO: 957571 - RNA, 19 nt, Artificial Sequence
  Description of Artificial Sequence: Synthetic oligonucleotide
auugugcuggccccguuac

SEQ ID NO: 957572 - RNA, 19 nt, Artificial Sequence
  Description of Artificial Sequence: Synthetic oligonucleotide
uacuggacuccacauggag

SEQ ID NO: 957573 - RNA, 19 nt, Artificial Sequence
  Description of Artificial Sequence: Synthetic oligonucleotide
uggagugcauuccugggca

SEQ ID NO: 957574 - RNA, 19 nt, Artificial Sequence
  Description of Artificial Sequence: Synthetic oligonucleotide
gauacucccaaagccuugg

SEQ ID NO: 957575 - RNA, 19 nt, Artificial Sequence
  Description of Artificial Sequence: Synthetic oligonucleotide
cuccgaauccacuccaucc

SEQ ID NO: 957576 - RNA, 19 nt, Artificial Sequence
  Description of Artificial Sequence: Synthetic oligonucleotide
aaauucugaucaacaauca

SEQ ID NO: 957577 - RNA, 19 nt, Artificial Sequence
  Description of Artificial Sequence: Synthetic oligonucleotide
  modified_base (3)..(3): a, c, u, g, unknown or other
aunagggcuaucaugccag

SEQ ID NO: 957578 - RNA, 19 nt, Artificial Sequence
  Description of Artificial Sequence: Synthetic oligonucleotide
gcaguugucauugugcugg

SEQ ID NO: 957579 - RNA, 19 nt, Artificial Sequence
  Description of Artificial Sequence: Synthetic oligonucleotide
ggaauuuucagcccaggug

SEQ ID NO: 957580 - RNA, 19 nt, Artificial Sequence
  Description of Artificial Sequence: Synthetic oligonucleotide
aaagguccagucauugaag

SEQ ID NO: 957581 - RNA, 19 nt, Artificial Sequence
  Description of Artificial Sequence: Synthetic oligonucleotide
gaagcaucuugucuccacc

SEQ ID NO: 957582 - RNA, 19 nt, Artificial Sequence
  Description of Artificial Sequence: Synthetic oligonucleotide
guugcaguugucauugugc

SEQ ID NO: 957583 - RNA, 19 nt, Artificial Sequence
  Description of Artificial Sequence: Synthetic oligonucleotide
  modified_base (7)..(7): a, c, u, g, unknown or other
cagcaunagggcuaucaug

SEQ ID NO: 957584 - RNA, 19 nt, Artificial Sequence
  Description of Artificial Sequence: Synthetic oligonucleotide
auuuuccacucauagcacu

SEQ ID NO: 957585 - RNA, 19 nt, Artificial Sequence
  Description of Artificial Sequence: Synthetic oligonucleotide
  modified_base (9)..(9): a, c, u, g, unknown or other
ugcagcaunagggcuauca

SEQ ID NO: 957586 - RNA, 19 nt, Artificial Sequence
  Description of Artificial Sequence: Synthetic oligonucleotide
uggguagcugugaagacaa

SEQ ID NO: 957587 - RNA, 19 nt, Artificial Sequence
  Description of Artificial Sequence: Synthetic oligonucleotide
uugcaguugucauugugcu

SEQ ID NO: 957588 - RNA, 19 nt, Artificial Sequence
  Description of Artificial Sequence: Synthetic oligonucleotide
aauuuucagcccagguggg

SEQ ID NO: 957589 - RNA, 19 nt, Artificial Sequence
  Description of Artificial Sequence: Synthetic oligonucleotide
uccgaauccacuccauccu

SEQ ID NO: 957590 - RNA, 19 nt, Artificial Sequence
  Description of Artificial Sequence: Synthetic oligonucleotide
agcaucuugucuccaccac

SEQ ID NO: 957591 - RNA, 19 nt, Artificial Sequence
  Description of Artificial Sequence: Synthetic oligonucleotide
ugcuguugcauagaggcac

SEQ ID NO: 957592 - RNA, 19 nt, Artificial Sequence
  Description of Artificial Sequence: Synthetic oligonucleotide
uccuugcuguugcauagag

SEQ ID NO: 957593 - RNA, 19 nt, Artificial Sequence
  Description of Artificial Sequence: Synthetic oligonucleotide
ggcucaaguauauuucuag

SEQ ID NO: 957594 - RNA, 19 nt, Artificial Sequence
  Description of Artificial Sequence: Synthetic oligonucleotide
cauccgucccuccucaucc

SEQ ID NO: 957595 - RNA, 19 nt, Artificial Sequence
  Description of Artificial Sequence: Synthetic oligonucleotide
cuguccgaggcuuaacagc

SEQ ID NO: 957596 - RNA, 19 nt, Artificial Sequence
  Description of Artificial Sequence: Synthetic oligonucleotide
uuagggguaaugguguaac

SEQ ID NO: 957597 - RNA, 19 nt, Artificial Sequence
  Description of Artificial Sequence: Synthetic oligonucleotide
caccacugaauguaacugc

SEQ ID NO: 957598 - RNA, 19 nt, Artificial Sequence
  Description of Artificial Sequence: Synthetic oligonucleotide
gguguaaccauccuccuca

SEQ ID NO: 957599 - RNA, 19 nt, Artificial Sequence
  Description of Artificial Sequence: Synthetic oligonucleotide
gggaaugaaggccauuucc

SEQ ID NO: 957600 - RNA, 19 nt, Artificial Sequence
  Description of Artificial Sequence: Synthetic oligonucleotide
cugaggguaccaagaaugc

SEQ ID NO: 957601 - RNA, 19 nt, Artificial Sequence
  Description of Artificial Sequence: Synthetic oligonucleotide
acuggguagcugugaagac

SEQ ID NO: 957602 - RNA, 19 nt, Artificial Sequence
  Description of Artificial Sequence: Synthetic oligonucleotide
cuccgaagcaucuugucuc

SEQ ID NO: 957603 - RNA, 19 nt, Artificial Sequence
  Description of Artificial Sequence: Synthetic oligonucleotide
cauucuccgaauccacucc

SEQ ID NO: 957604 - RNA, 19 nt, Artificial Sequence
  Description of Artificial Sequence: Synthetic oligonucleotide
auauuucuagcauguaaua

SEQ ID NO: 957605 - RNA, 19 nt, Artificial Sequence
  Description of Artificial Sequence: Synthetic oligonucleotide
ccugaggguaccaagaaug

SEQ ID NO: 957606 - RNA, 19 nt, Artificial Sequence
  Description of Artificial Sequence: Synthetic oligonucleotide
aaucagcucagaagauggg

SEQ ID NO: 957607 - RNA, 19 nt, Artificial Sequence
  Description of Artificial Sequence: Synthetic oligonucleotide
augucuacuggacuccaca

SEQ ID NO: 957608 - RNA, 19 nt, Artificial Sequence
  Description of Artificial Sequence: Synthetic oligonucleotide
ucaagauggcccucacccc

SEQ ID NO: 957609 - RNA, 19 nt, Artificial Sequence
  Description of Artificial Sequence: Synthetic oligonucleotide
ugcaaccuugaguggaagc

SEQ ID NO: 957610 - RNA, 19 nt, Artificial Sequence
  Description of Artificial Sequence: Synthetic oligonucleotide
ggucacaaugcuccgaagc

SEQ ID NO: 957611 - RNA, 19 nt, Artificial Sequence
  Description of Artificial Sequence: Synthetic oligonucleotide
gaauggguggagguccugg

SEQ ID NO: 957612 - RNA, 19 nt, Artificial Sequence
  Description of Artificial Sequence: Synthetic oligonucleotide
ggucuugaguguauuaggg

SEQ ID NO: 957613 - RNA, 19 nt, Artificial Sequence
  Description of Artificial Sequence: Synthetic oligonucleotide
cauagcacuuucuaacaga

SEQ ID NO: 957614 - RNA, 19 nt, Artificial Sequence
  Description of Artificial Sequence: Synthetic oligonucleotide
augauccucauacugggua

SEQ ID NO: 957615 - RNA, 19 nt, Artificial Sequence
  Description of Artificial Sequence: Synthetic oligonucleotide
auuaggauccgaguccaug

SEQ ID NO: 957616 - RNA, 19 nt, Artificial Sequence
  Description of Artificial Sequence: Synthetic oligonucleotide
uccucaaccacugcucuca

SEQ ID NO: 957617 - RNA, 19 nt, Artificial Sequence
  Description of Artificial Sequence: Synthetic oligonucleotide
gaaaagguccagucauuga

SEQ ID NO: 957618 - RNA, 19 nt, Artificial Sequence
  Description of Artificial Sequence: Synthetic oligonucleotide
ggcaguacagcuuccauuc

SEQ ID NO: 957619 - RNA, 19 nt, Artificial Sequence
  Description of Artificial Sequence: Synthetic oligonucleotide
uuaccacuggcaaccacaa

SEQ ID NO: 957620 - RNA, 19 nt, Artificial Sequence
  Description of Artificial Sequence: Synthetic oligonucleotide
uugaugucuacuggacucc

SEQ ID NO: 957621 - RNA, 19 nt, Artificial Sequence
  Description of Artificial Sequence: Synthetic oligonucleotide
uaacucacgaaugggugga

SEQ ID NO: 957622 - RNA, 19 nt, Artificial Sequence
  Description of Artificial Sequence: Synthetic oligonucleotide
uuguguggagugcauuccu

SEQ ID NO: 957623 - RNA, 19 nt, Artificial Sequence
  Description of Artificial Sequence: Synthetic oligonucleotide
uccgaagcaucuugucucc

SEQ ID NO: 957624 - RNA, 19 nt, Artificial Sequence
  Description of Artificial Sequence: Synthetic oligonucleotide
cugagcaaccucagagggg

SEQ ID NO: 957625 - RNA, 19 nt, Artificial Sequence
  Description of Artificial Sequence: Synthetic oligonucleotide
uccacucauagcacuuucu

SEQ ID NO: 957626 - RNA, 19 nt, Artificial Sequence
  Description of Artificial Sequence: Synthetic oligonucleotide
cacgaauggguggaggucc

SEQ ID NO: 957627 - RNA, 19 nt, Artificial Sequence
  Description of Artificial Sequence: Synthetic oligonucleotide
  modified_base (4)..(4): a, c, u, g, unknown or other
caunagggcuaucaugcca

SEQ ID NO: 957628 - RNA, 19 nt, Artificial Sequence
  Description of Artificial Sequence: Synthetic oligonucleotide
agugcauuccugggcacac

SEQ ID NO: 957629 - RNA, 19 nt, Artificial Sequence
  Description of Artificial Sequence: Synthetic oligonucleotide
accaauccucaaccacugc

SEQ ID NO: 957630 - RNA, 19 nt, Artificial Sequence
  Description of Artificial Sequence: Synthetic oligonucleotide
cacaaugcuccgaagcauc

SEQ ID NO: 957631 - RNA, 19 nt, Artificial Sequence
  Description of Artificial Sequence: Synthetic oligonucleotide
gggucuugaguguauuagg

SEQ ID NO: 957632 - RNA, 19 nt, Artificial Sequence
  Description of Artificial Sequence: Synthetic oligonucleotide
ugauagccagucuguaggu

SEQ ID NO: 957633 - RNA, 19 nt, Artificial Sequence
  Description of Artificial Sequence: Synthetic oligonucleotide
cagacuuugucuguccuug

SEQ ID NO: 957634 - RNA, 19 nt, Artificial Sequence
  Description of Artificial Sequence: Synthetic oligonucleotide
agggguaaugguguaacca

SEQ ID NO: 957635 - RNA, 19 nt, Artificial Sequence
  Description of Artificial Sequence: Synthetic oligonucleotide
cauuggugagccagucugc

SEQ ID NO: 957636 - RNA, 19 nt, Artificial Sequence
  Description of Artificial Sequence: Synthetic oligonucleotide
agugacacuuguguggagu

SEQ ID NO: 957637 - RNA, 19 nt, Artificial Sequence
  Description of Artificial Sequence: Synthetic oligonucleotide
auguaauaaaugguccaga

SEQ ID NO: 957638 - RNA, 19 nt, Artificial Sequence
  Description of Artificial Sequence: Synthetic oligonucleotide
guacagcuuccauucuccg

SEQ ID NO: 957639 - RNA, 19 nt, Artificial Sequence
  Description of Artificial Sequence: Synthetic oligonucleotide
augucccgccaugugaggc

SEQ ID NO: 957640 - RNA, 19 nt, Artificial Sequence
  Description of Artificial Sequence: Synthetic oligonucleotide
agcuuccauucuccgaauc

SEQ ID NO: 957641 - RNA, 19 nt, Artificial Sequence
  Description of Artificial Sequence: Synthetic oligonucleotide
ugucuacuggacuccacau

SEQ ID NO: 957642 - RNA, 19 nt, Artificial Sequence
  Description of Artificial Sequence: Synthetic oligonucleotide
auucaccaauccucaacca

SEQ ID NO: 957643 - RNA, 19 nt, Artificial Sequence
  Description of Artificial Sequence: Synthetic oligonucleotide
gaagacagugaagcagccc

SEQ ID NO: 957644 - RNA, 19 nt, Artificial Sequence
  Description of Artificial Sequence: Synthetic oligonucleotide
gaugucccgccaugugagg

SEQ ID NO: 957645 - RNA, 19 nt, Artificial Sequence
  Description of Artificial Sequence: Synthetic oligonucleotide
cuagaggagcccauauuca

SEQ ID NO: 957646 - RNA, 19 nt, Artificial Sequence
  Description of Artificial Sequence: Synthetic oligonucleotide
ccuguauaacucacgaaug

SEQ ID NO: 957647 - RNA, 19 nt, Artificial Sequence
  Description of Artificial Sequence: Synthetic oligonucleotide
ugucauugugcuggccccg

SEQ ID NO: 957648 - RNA, 19 nt, Artificial Sequence
  Description of Artificial Sequence: Synthetic oligonucleotide
uccgaggcuuaacagcaaa

SEQ ID NO: 957649 - RNA, 19 nt, Artificial Sequence
  Description of Artificial Sequence: Synthetic oligonucleotide
ucgcacaguggaaaagguc

SEQ ID NO: 957650 - RNA, 19 nt, Artificial Sequence
  Description of Artificial Sequence: Synthetic oligonucleotide
caccaauccucaaccacug

SEQ ID NO: 957651 - RNA, 19 nt, Artificial Sequence
  Description of Artificial Sequence: Synthetic oligonucleotide
uguugcauagaggcacuga

SEQ ID NO: 957652 - RNA, 19 nt, Artificial Sequence
  Description of Artificial Sequence: Synthetic oligonucleotide
uccucuggcucaaguauau

SEQ ID NO: 957653 - RNA, 19 nt, Artificial Sequence
  Description of Artificial Sequence: Synthetic oligonucleotide
uuccacucauagcacuuuc

SEQ ID NO: 957654 - RNA, 19 nt, Artificial Sequence
  Description of Artificial Sequence: Synthetic oligonucleotide
uugaguguauuagggguaa

SEQ ID NO: 957655 - RNA, 19 nt, Artificial Sequence
  Description of Artificial Sequence: Synthetic oligonucleotide
uccugccaaccaauguccc

SEQ ID NO: 957656 - RNA, 19 nt, Artificial Sequence
  Description of Artificial Sequence: Synthetic oligonucleotide
aguguagauggaguuggca

SEQ ID NO: 957657 - RNA, 19 nt, Artificial Sequence
  Description of Artificial Sequence: Synthetic oligonucleotide
uuuggagcaggugcacagc

SEQ ID NO: 957658 - RNA, 19 nt, Artificial Sequence
  Description of Artificial Sequence: Synthetic oligonucleotide
gauagccagucuguaggug

SEQ ID NO: 957659 - RNA, 19 nt, Artificial Sequence
  Description of Artificial Sequence: Synthetic oligonucleotide
aggguaccaagaaugccuc

SEQ ID NO: 957660 - RNA, 19 nt, Artificial Sequence
  Description of Artificial Sequence: Synthetic oligonucleotide
gcaaccuugaguggaagcc

SEQ ID NO: 957661 - RNA, 19 nt, Artificial Sequence
  Description of Artificial Sequence: Synthetic oligonucleotide
uugcauagaggcacugauu

SEQ ID NO: 957662 - RNA, 19 nt, Artificial Sequence
  Description of Artificial Sequence: Synthetic oligonucleotide
uagaggcacugauucuagc

SEQ ID NO: 957663 - RNA, 19 nt, Artificial Sequence
  Description of Artificial Sequence: Synthetic oligonucleotide
uagcacuuucuaacagacu

SEQ ID NO: 957664 - RNA, 19 nt, Artificial Sequence
  Description of Artificial Sequence: Synthetic oligonucleotide
  modified_base (2)..(2): a, c, u, g, unknown or other
unagggcuaucaugccagc

SEQ ID NO: 957665 - RNA, 19 nt, Artificial Sequence
  Description of Artificial Sequence: Synthetic oligonucleotide
acucacgaauggguggagg

SEQ ID NO: 957666 - RNA, 19 nt, Artificial Sequence
  Description of Artificial Sequence: Synthetic oligonucleotide
uggcucaaguauauuucua

SEQ ID NO: 957667 - RNA, 19 nt, Artificial Sequence
  Description of Artificial Sequence: Synthetic oligonucleotide
ugucccgccaugugaggca

SEQ ID NO: 957668 - RNA, 19 nt, Artificial Sequence
  Description of Artificial Sequence: Synthetic oligonucleotide
ugacacuuguguggagugc

SEQ ID NO: 957669 - RNA, 19 nt, Artificial Sequence
  Description of Artificial Sequence: Synthetic oligonucleotide
aucuccuacaucccugaua

SEQ ID NO: 957670 - RNA, 19 nt, Artificial Sequence
  Description of Artificial Sequence: Synthetic oligonucleotide
cuugaguguauuaggggua

SEQ ID NO: 957671 - RNA, 19 nt, Artificial Sequence
  Description of Artificial Sequence: Synthetic oligonucleotide
ucacaaugcuccgaagcau

SEQ ID NO: 957672 - RNA, 19 nt, Artificial Sequence
  Description of Artificial Sequence: Synthetic oligonucleotide
ccagucaguggucacaaug

SEQ ID NO: 957673 - RNA, 19 nt, Artificial Sequence
  Description of Artificial Sequence: Synthetic oligonucleotide
caaccaauguccccaguga

SEQ ID NO: 957674 - RNA, 19 nt, Artificial Sequence
  Description of Artificial Sequence: Synthetic oligonucleotide
accuauugugacaguguag

SEQ ID NO: 957675 - RNA, 19 nt, Artificial Sequence
  Description of Artificial Sequence: Synthetic oligonucleotide
ccacauggagccauacagg

SEQ ID NO: 957676 - RNA, 19 nt, Artificial Sequence
  Description of Artificial Sequence: Synthetic oligonucleotide
aggcagauggcuggccucg

SEQ ID NO: 957677 - RNA, 19 nt, Artificial Sequence
  Description of Artificial Sequence: Synthetic oligonucleotide
guguauuagggguaauggu

SEQ ID NO: 957678 - RNA, 19 nt, Artificial Sequence
  Description of Artificial Sequence: Synthetic oligonucleotide
agcaucgcacaguggaaaa

SEQ ID NO: 957679 - RNA, 19 nt, Artificial Sequence
  Description of Artificial Sequence: Synthetic oligonucleotide
caucauaguugcaguuguc

SEQ ID NO: 957680 - RNA, 19 nt, Artificial Sequence
  Description of Artificial Sequence: Synthetic oligonucleotide
ccuauugugacaguguaga

SEQ ID NO: 957681 - RNA, 19 nt, Artificial Sequence
  Description of Artificial Sequence: Synthetic oligonucleotide
augguguaaccauccuccu

SEQ ID NO: 957682 - RNA, 19 nt, Artificial Sequence
  Description of Artificial Sequence: Synthetic oligonucleotide
uguccagguucuugccagc

SEQ ID NO: 957683 - RNA, 19 nt, Artificial Sequence
  Description of Artificial Sequence: Synthetic oligonucleotide
agauggcuggccucgggaa

SEQ ID NO: 957684 - RNA, 19 nt, Artificial Sequence
  Description of Artificial Sequence: Synthetic oligonucleotide
aacucacgaauggguggag

SEQ ID NO: 957685 - RNA, 19 nt, Artificial Sequence
  Description of Artificial Sequence: Synthetic oligonucleotide
gcccuuaggucccagucag

SEQ ID NO: 957686 - RNA, 19 nt, Artificial Sequence
  Description of Artificial Sequence: Synthetic oligonucleotide
caggaauuuucagcccagg

SEQ ID NO: 957687 - RNA, 19 nt, Artificial Sequence
  Description of Artificial Sequence: Synthetic oligonucleotide
cucccaaguugucuuugac

SEQ ID NO: 957688 - RNA, 19 nt, Artificial Sequence
  Description of Artificial Sequence: Synthetic oligonucleotide
gggcgcgccaaucaaagac

SEQ ID NO: 957689 - RNA, 19 nt, Artificial Sequence
  Description of Artificial Sequence: Synthetic oligonucleotide
ggaugucccgccaugugag

SEQ ID NO: 957690 - RNA, 19 nt, Artificial Sequence
  Description of Artificial Sequence: Synthetic oligonucleotide
cugccagcggagcugcagc

SEQ ID NO: 957691 - RNA, 19 nt, Artificial Sequence
  Description of Artificial Sequence: Synthetic oligonucleotide
ucacgaauggguggagguc

SEQ ID NO: 957692 - RNA, 19 nt, Artificial Sequence
  Description of Artificial Sequence: Synthetic oligonucleotide
gccuaggucacugagcaac

SEQ ID NO: 957693 - RNA, 19 nt, Artificial Sequence
  Description of Artificial Sequence: Synthetic oligonucleotide
cccguuaccacuggcaacc

SEQ ID NO: 957694 - RNA, 19 nt, Artificial Sequence
  Description of Artificial Sequence: Synthetic oligonucleotide
auuagggguaaugguguaa

SEQ ID NO: 957695 - RNA, 19 nt, Artificial Sequence
  Description of Artificial Sequence: Synthetic oligonucleotide
cucaaccacugcucucaag

SEQ ID NO: 957696 - RNA, 19 nt, Artificial Sequence
  Description of Artificial Sequence: Synthetic oligonucleotide
aggagcaccaccauuccuu

SEQ ID NO: 957697 - RNA, 19 nt, Artificial Sequence
  Description of Artificial Sequence: Synthetic oligonucleotide
ggaguuggcauagccauca

SEQ ID NO: 957698 - RNA, 19 nt, Artificial Sequence
  Description of Artificial Sequence: Synthetic oligonucleotide
agcuagaggagcccauauu

SEQ ID NO: 957699 - RNA, 19 nt, Artificial Sequence
  Description of Artificial Sequence: Synthetic oligonucleotide
uucuccgaauccacuccau

SEQ ID NO: 957700 - RNA, 19 nt, Artificial Sequence
  Description of Artificial Sequence: Synthetic oligonucleotide
aggcaccuguauaacucac

SEQ ID NO: 957701 - RNA, 19 nt, Artificial Sequence
  Description of Artificial Sequence: Synthetic oligonucleotide
guaggugccucuugcucuc

SEQ ID NO: 957702 - RNA, 19 nt, Artificial Sequence
  Description of Artificial Sequence: Synthetic oligonucleotide
gcugaacccuguccgaggc

SEQ ID NO: 957703 - RNA, 19 nt, Artificial Sequence
  Description of Artificial Sequence: Synthetic oligonucleotide
ccauauucaccaauccuca

SEQ ID NO: 957704 - RNA, 19 nt, Artificial Sequence
  Description of Artificial Sequence: Synthetic oligonucleotide
gugcccuuaggucccaguc

SEQ ID NO: 957705 - RNA, 19 nt, Artificial Sequence
  Description of Artificial Sequence: Synthetic oligonucleotide
agauacucccaaagccuug

SEQ ID NO: 957706 - RNA, 19 nt, Artificial Sequence
  Description of Artificial Sequence: Synthetic oligonucleotide
gccaucauaguugcaguug

SEQ ID NO: 957707 - RNA, 19 nt, Artificial Sequence
  Description of Artificial Sequence: Synthetic oligonucleotide
caguugucauugugcuggc

SEQ ID NO: 957708 - RNA, 19 nt, Artificial Sequence
  Description of Artificial Sequence: Synthetic oligonucleotide
  modified_base (5)..(5): a, c, u, g, unknown or other
gcaunagggcuaucaugcc

SEQ ID NO: 957709 - RNA, 19 nt, Artificial Sequence
  Description of Artificial Sequence: Synthetic oligonucleotide
ccuugcuguugcauagagg

SEQ ID NO: 957710 - RNA, 19 nt, Artificial Sequence
  Description of Artificial Sequence: Synthetic oligonucleotide
aucgcacaguggaaaaggu

SEQ ID NO: 957711 - RNA, 19 nt, Artificial Sequence
  Description of Artificial Sequence: Synthetic oligonucleotide
uccgucccuccucauccac

SEQ ID NO: 957712 - RNA, 19 nt, Artificial Sequence
  Description of Artificial Sequence: Synthetic oligonucleotide
cuggcucaaguauauuucu

SEQ ID NO: 957713 - RNA, 19 nt, Artificial Sequence
  Description of Artificial Sequence: Synthetic oligonucleotide
caccuauugugacagugua

SEQ ID NO: 957714 - RNA, 19 nt, Artificial Sequence
  Description of Artificial Sequence: Synthetic oligonucleotide
ggugccucuugcucucucc

SEQ ID NO: 957715 - RNA, 19 nt, Artificial Sequence
  Description of Artificial Sequence: Synthetic oligonucleotide
ugccagcggagcugcagcu

SEQ ID NO: 957716 - RNA, 19 nt, Artificial Sequence
  Description of Artificial Sequence: Synthetic oligonucleotide
ugacaacaucagugucuca

SEQ ID NO: 957717 - RNA, 19 nt, Artificial Sequence
  Description of Artificial Sequence: Synthetic oligonucleotide
ugcggggcgcgccaaucaa

SEQ ID NO: 957718 - RNA, 19 nt, Artificial Sequence
  Description of Artificial Sequence: Synthetic oligonucleotide
ugaagccauuaggauccga

SEQ ID NO: 957719 - RNA, 19 nt, Artificial Sequence
  Description of Artificial Sequence: Synthetic oligonucleotide
cucuggcucaaguauauuu

SEQ ID NO: 957720 - RNA, 19 nt, Artificial Sequence
  Description of Artificial Sequence: Synthetic oligonucleotide
ggugagccagucugcauga

SEQ ID NO: 957721 - RNA, 19 nt, Artificial Sequence
  Description of Artificial Sequence: Synthetic oligonucleotide
acauggagccauacagggu

SEQ ID NO: 957722 - RNA, 19 nt, Artificial Sequence
  Description of Artificial Sequence: Synthetic oligonucleotide
cucucaagauggcccucac

SEQ ID NO: 957723 - RNA, 19 nt, Artificial Sequence
  Description of Artificial Sequence: Synthetic oligonucleotide
guaggcauguccagguucu

SEQ ID NO: 957724 - RNA, 19 nt, Artificial Sequence
  Description of Artificial Sequence: Synthetic oligonucleotide
ccuguguggccuuccgugc

SEQ ID NO: 957725 - RNA, 19 nt, Artificial Sequence
  Description of Artificial Sequence: Synthetic oligonucleotide
accccugaggguaccaaga

SEQ ID NO: 957726 - RNA, 19 nt, Artificial Sequence
  Description of Artificial Sequence: Synthetic oligonucleotide
cuacuggacuccacaugga

SEQ ID NO: 957727 - RNA, 19 nt, Artificial Sequence
  Description of Artificial Sequence: Synthetic oligonucleotide
cagauggcuggccucggga

SEQ ID NO: 957728 - RNA, 19 nt, Artificial Sequence
  Description of Artificial Sequence: Synthetic oligonucleotide
ccgaggcuuaacagcaaag

SEQ ID NO: 957729 - RNA, 19 nt, Artificial Sequence
  Description of Artificial Sequence: Synthetic oligonucleotide
ggagcggcucaucuccuac

SEQ ID NO: 957730 - RNA, 19 nt, Artificial Sequence
  Description of Artificial Sequence: Synthetic oligonucleotide
cuccuacaucccugauagc

SEQ ID NO: 957731 - RNA, 19 nt, Artificial Sequence
  Description of Artificial Sequence: Synthetic oligonucleotide
uggcaaccacaaagauacu

SEQ ID NO: 957732 - RNA, 19 nt, Artificial Sequence
  Description of Artificial Sequence: Synthetic oligonucleotide
aacccuguccgaggcuuaa

SEQ ID NO: 957733 - RNA, 19 nt, Artificial Sequence
  Description of Artificial Sequence: Synthetic oligonucleotide
uggccccguuaccacuggc

SEQ ID NO: 957734 - RNA, 19 nt, Artificial Sequence
  Description of Artificial Sequence: Synthetic oligonucleotide
ucccgccaugugaggcagg

SEQ ID NO: 957735 - RNA, 19 nt, Artificial Sequence
  Description of Artificial Sequence: Synthetic oligonucleotide
cugcaaccuugaguggaag

SEQ ID NO: 957736 - RNA, 19 nt, Artificial Sequence
  Description of Artificial Sequence: Synthetic oligonucleotide
caccuguauaacucacgaa

SEQ ID NO: 957737 - RNA, 19 nt, Artificial Sequence
  Description of Artificial Sequence: Synthetic oligonucleotide
  modified_base (12)..(12): a, c, u, g, unknown or other
accugcagcaunagggcua

SEQ ID NO: 957738 - RNA, 19 nt, Artificial Sequence
  Description of Artificial Sequence: Synthetic oligonucleotide
gggguaaugguguaaccau

SEQ ID NO: 957739 - RNA, 19 nt, Artificial Sequence
  Description of Artificial Sequence: Synthetic oligonucleotide
caucagugucucagcucuc

SEQ ID NO: 957740 - RNA, 19 nt, Artificial Sequence
  Description of Artificial Sequence: Synthetic oligonucleotide
gagcaccaccauuccuuca

SEQ ID NO: 957741 - RNA, 19 nt, Artificial Sequence
  Description of Artificial Sequence: Synthetic oligonucleotide
gaguggaagccauguuccu

SEQ ID NO: 957742 - RNA, 19 nt, Artificial Sequence
  Description of Artificial Sequence: Synthetic oligonucleotide
ucauugugcuggccccguu

SEQ ID NO: 957743 - RNA, 19 nt, Artificial Sequence
  Description of Artificial Sequence: Synthetic oligonucleotide
ggguaaugguguaaccauc

SEQ ID NO: 957744 - RNA, 19 nt, Artificial Sequence
  Description of Artificial Sequence: Synthetic oligonucleotide
auccgucccuccucaucca

SEQ ID NO: 957745 - RNA, 19 nt, Artificial Sequence
  Description of Artificial Sequence: Synthetic oligonucleotide
gcagauggcuggccucggg

SEQ ID NO: 957746 - RNA, 19 nt, Artificial Sequence
  Description of Artificial Sequence: Synthetic oligonucleotide
gcuaucaugccagcugcca

SEQ ID NO: 957747 - RNA, 19 nt, Artificial Sequence
  Description of Artificial Sequence: Synthetic oligonucleotide
cuggccccguuaccacugg

SEQ ID NO: 957748 - RNA, 19 nt, Artificial Sequence
  Description of Artificial Sequence: Synthetic oligonucleotide
ggcacacuccucugcauaa

SEQ ID NO: 957749 - RNA, 19 nt, Artificial Sequence
  Description of Artificial Sequence: Synthetic oligonucleotide
cauugugcuggccccguua

SEQ ID NO: 957750 - RNA, 19 nt, Artificial Sequence
  Description of Artificial Sequence: Synthetic oligonucleotide
acccuguccgaggcuuaac

SEQ ID NO: 957751 - RNA, 19 nt, Artificial Sequence
  Description of Artificial Sequence: Synthetic oligonucleotide
uggagcggcucaucuccua

SEQ ID NO: 957752 - RNA, 19 nt, Artificial Sequence
  Description of Artificial Sequence: Synthetic oligonucleotide
gaucaagggcugccugugu

SEQ ID NO: 957753 - RNA, 19 nt, Artificial Sequence
  Description of Artificial Sequence: Synthetic oligonucleotide
gucccgccaugugaggcag

SEQ ID NO: 957754 - RNA, 19 nt, Artificial Sequence
  Description of Artificial Sequence: Synthetic oligonucleotide
uccgugcagccagugcccu

SEQ ID NO: 957755 - RNA, 19 nt, Artificial Sequence
  Description of Artificial Sequence: Synthetic oligonucleotide
gugcuggccccguuaccac

SEQ ID NO: 957756 - RNA, 19 nt, Artificial Sequence
  Description of Artificial Sequence: Synthetic oligonucleotide
guaaugaaggcagcugcuu

SEQ ID NO: 957757 - RNA, 19 nt, Artificial Sequence
  Description of Artificial Sequence: Synthetic oligonucleotide
aggagcccauauucaccaa

SEQ ID NO: 957758 - RNA, 19 nt, Artificial Sequence
  Description of Artificial Sequence: Synthetic oligonucleotide
gcccauauucaccaauccu

SEQ ID NO: 957759 - RNA, 19 nt, Artificial Sequence
  Description of Artificial Sequence: Synthetic oligonucleotide
ccgaauccacuccauccug

SEQ ID NO: 957760 - RNA, 19 nt, Artificial Sequence
  Description of Artificial Sequence: Synthetic oligonucleotide
accuugaguggaagccaug

SEQ ID NO: 957761 - RNA, 19 nt, Artificial Sequence
  Description of Artificial Sequence: Synthetic oligonucleotide
uccagucauugaagccauu

SEQ ID NO: 957762 - RNA, 19 nt, Artificial Sequence
  Description of Artificial Sequence: Synthetic oligonucleotide
acgaauggguggagguccu

SEQ ID NO: 957763 - RNA, 19 nt, Artificial Sequence
  Description of Artificial Sequence: Synthetic oligonucleotide
ggcgcgccaaucaaagaca

SEQ ID NO: 957764 - RNA, 19 nt, Artificial Sequence
  Description of Artificial Sequence: Synthetic oligonucleotide
ggagugcauuccugggcac

SEQ ID NO: 957765 - RNA, 19 nt, Artificial Sequence
  Description of Artificial Sequence: Synthetic oligonucleotide
cacugccggaggaugccca

SEQ ID NO: 957766 - RNA, 19 nt, Artificial Sequence
  Description of Artificial Sequence: Synthetic oligonucleotide
ccaauccucaaccacugcu

SEQ ID NO: 957767 - RNA, 19 nt, Artificial Sequence
  Description of Artificial Sequence: Synthetic oligonucleotide
  modified_base (13)..(13): a, c, u, g, unknown or other
caccugcagcaunagggcu

SEQ ID NO: 957768 - RNA, 19 nt, Artificial Sequence
  Description of Artificial Sequence: Synthetic oligonucleotide
cugccggaggaugcccacc

SEQ ID NO: 957769 - RNA, 19 nt, Artificial Sequence
  Description of Artificial Sequence: Synthetic oligonucleotide
gcauccgucccuccucauc

SEQ ID NO: 957770 - RNA, 19 nt, Artificial Sequence
  Description of Artificial Sequence: Synthetic oligonucleotide
cccgccaugugaggcaggg

SEQ ID NO: 957771 - RNA, 19 nt, Artificial Sequence
  Description of Artificial Sequence: Synthetic oligonucleotide
ccaugugaggcagggccgc

SEQ ID NO: 957772 - RNA, 19 nt, Artificial Sequence
  Description of Artificial Sequence: Synthetic oligonucleotide
cugcaugaugauccucaua

SEQ ID NO: 957773 - RNA, 19 nt, Artificial Sequence
  Description of Artificial Sequence: Synthetic oligonucleotide
cucagaggggugagaucaa

SEQ ID NO: 957774 - RNA, 19 nt, Artificial Sequence
  Description of Artificial Sequence: Synthetic oligonucleotide
cggggcgcgccaaucaaag

SEQ ID NO: 957775 - RNA, 19 nt, Artificial Sequence
  Description of Artificial Sequence: Synthetic oligonucleotide
ggagcccauauucaccaau

SEQ ID NO: 957776 - RNA, 19 nt, Artificial Sequence
  Description of Artificial Sequence: Synthetic oligonucleotide
gccccguuaccacuggcaa

SEQ ID NO: 957777 - RNA, 19 nt, Artificial Sequence
  Description of Artificial Sequence: Synthetic oligonucleotide
ccgaguccaugcugcgggg

SEQ ID NO: 957778 - RNA, 19 nt, Artificial Sequence
  Description of Artificial Sequence: Synthetic oligonucleotide
cugcggggcgcgccaauca

SEQ ID NO: 957779 - RNA, 19 nt, Artificial Sequence
  Description of Artificial Sequence: Synthetic oligonucleotide
ccccguuaccacuggcaac

SEQ ID NO: 957780 - RNA, 19 nt, Artificial Sequence
  Description of Artificial Sequence: Synthetic oligonucleotide
cccuguccgaggcuuaaca

SEQ ID NO: 957781 - RNA, 19 nt, Artificial Sequence
  Description of Artificial Sequence: Synthetic oligonucleotide
  modified_base (8)..(8): a, c, u, g, unknown or other
gcagcaunagggcuaucau

SEQ ID NO: 957782 - RNA, 19 nt, Artificial Sequence
  Description of Artificial Sequence: Synthetic oligonucleotide
gcuuucaggguaggcaugu

SEQ ID NO: 957783 - RNA, 19 nt, Artificial Sequence
  Description of Artificial Sequence: Synthetic oligonucleotide
ccucauuggugagccaguc

SEQ ID NO: 957784 - RNA, 19 nt, Artificial Sequence
  Description of Artificial Sequence: Synthetic oligonucleotide
ccacaaagauacucccaaa

SEQ ID NO: 957785 - RNA, 19 nt, Artificial Sequence
  Description of Artificial Sequence: Synthetic oligonucleotide
ggccccguuaccacuggca

SEQ ID NO: 957786 - RNA, 19 nt, Artificial Sequence
  Description of Artificial Sequence: Synthetic oligonucleotide
caccuggagcggcucaucu

SEQ ID NO: 957787 - RNA, 19 nt, Artificial Sequence
  Description of Artificial Sequence: Synthetic oligonucleotide
gacuccacauggagccaua

SEQ ID NO: 957788 - RNA, 19 nt, Artificial Sequence
  Description of Artificial Sequence: Synthetic oligonucleotide
gaacccuguccgaggcuua

SEQ ID NO: 957789 - RNA, 19 nt, Artificial Sequence
  Description of Artificial Sequence: Synthetic oligonucleotide
caggagcaccaccauuccu

SEQ ID NO: 957790 - RNA, 19 nt, Artificial Sequence
  Description of Artificial Sequence: Synthetic oligonucleotide
gaguuggcauagccaucau

SEQ ID NO: 957791 - RNA, 19 nt, Artificial Sequence
  Description of Artificial Sequence: Synthetic oligonucleotide
agggccgcaccugcagcau

SEQ ID NO: 957792 - RNA, 19 nt, Artificial Sequence
  Description of Artificial Sequence: Synthetic oligonucleotide
gucauugugcuggccccgu

SEQ ID NO: 957793 - RNA, 19 nt, Artificial Sequence
  Description of Artificial Sequence: Synthetic oligonucleotide
ccuugaguggaagccaugu

SEQ ID NO: 957794 - RNA, 19 nt, Artificial Sequence
  Description of Artificial Sequence: Synthetic oligonucleotide
cguuaccacuggcaaccac

SEQ ID NO: 957795 - RNA, 19 nt, Artificial Sequence
  Description of Artificial Sequence: Synthetic oligonucleotide
cucaccccugaggguacca

SEQ ID NO: 957796 - RNA, 19 nt, Artificial Sequence
  Description of Artificial Sequence: Synthetic oligonucleotide
ggggcgcgccaaucaaaga

SEQ ID NO: 957797 - RNA, 19 nt, Artificial Sequence
  Description of Artificial Sequence: Synthetic oligonucleotide
gcggcucaucuccuacauc

SEQ ID NO: 957798 - RNA, 19 nt, Artificial Sequence
  Description of Artificial Sequence: Synthetic oligonucleotide
cauuaggauccgaguccau

SEQ ID NO: 957799 - RNA, 19 nt, Artificial Sequence
  Description of Artificial Sequence: Synthetic oligonucleotide
cagugcccuuaggucccag

SEQ ID NO: 957800 - RNA, 19 nt, Artificial Sequence
  Description of Artificial Sequence: Synthetic oligonucleotide
cugaacccuguccgaggcu

SEQ ID NO: 957801 - RNA, 19 nt, Artificial Sequence
  Description of Artificial Sequence: Synthetic oligonucleotide
guccgaggcuuaacagcaa

SEQ ID NO: 957802 - RNA, 19 nt, Artificial Sequence
  Description of Artificial Sequence: Synthetic oligonucleotide
cgcgccaaucaaagacaug

SEQ ID NO: 957803 - RNA, 19 nt, Artificial Sequence
  Description of Artificial Sequence: Synthetic oligonucleotide
caucuccuacaucccugau

SEQ ID NO: 957804 - RNA, 19 nt, Artificial Sequence
  Description of Artificial Sequence: Synthetic oligonucleotide
cacuuguguggagugcauu

SEQ ID NO: 957805 - RNA, 19 nt, Artificial Sequence
  Description of Artificial Sequence: Synthetic oligonucleotide
gcacacuccucugcauaaa

SEQ ID NO: 957806 - RNA, 19 nt, Artificial Sequence
  Description of Artificial Sequence: Synthetic oligonucleotide
ggacuccacauggagccau

SEQ ID NO: 957807 - RNA, 19 nt, Artificial Sequence
  Description of Artificial Sequence: Synthetic oligonucleotide
cagcaccuauugugacagu

SEQ ID NO: 957808 - RNA, 19 nt, Artificial Sequence
  Description of Artificial Sequence: Synthetic oligonucleotide
  modified_base (19)..(19): a, c, u, g, unknown or other
gggccgcaccugcagcaun

SEQ ID NO: 957809 - RNA, 19 nt, Artificial Sequence
  Description of Artificial Sequence: Synthetic oligonucleotide
gcgcgccaaucaaagacau

SEQ ID NO: 957810 - RNA, 19 nt, Artificial Sequence
  Description of Artificial Sequence: Synthetic oligonucleotide
cccugaggguaccaagaau

SEQ ID NO: 957811 - RNA, 19 nt, Artificial Sequence
  Description of Artificial Sequence: Synthetic oligonucleotide
gcggggcgcgccaaucaaa

SEQ ID NO: 957812 - RNA, 19 nt, Artificial Sequence
  Description of Artificial Sequence: Synthetic oligonucleotide
ccucauccacagcaccuau

SEQ ID NO: 957813 - RNA, 19 nt, Artificial Sequence
  Description of Artificial Sequence: Synthetic oligonucleotide
ccguuaccacuggcaacca

SEQ ID NO: 957814 - RNA, 19 nt, Artificial Sequence
  Description of Artificial Sequence: Synthetic oligonucleotide
ggcauccgucccuccucau

SEQ ID NO: 957815 - RNA, 19 nt, Artificial Sequence
  Description of Artificial Sequence: Synthetic oligonucleotide
caagggugcuggggaccau

SEQ ID NO: 957816 - RNA, 19 nt, Artificial Sequence
  Description of Artificial Sequence: Synthetic oligonucleotide
ggguagcugugaagacaau

SEQ ID NO: 957817 - RNA, 19 nt, Artificial Sequence
  Description of Artificial Sequence: Synthetic oligonucleotide
ggccuuccgugcagccagu

SEQ ID NO: 957818 - RNA, 19 nt, Artificial Sequence
  Description of Artificial Sequence: Synthetic oligonucleotide
ccucuggcucaaguauauu

SEQ ID NO: 957819 - RNA, 19 nt, Artificial Sequence
  Description of Artificial Sequence: Synthetic oligonucleotide
ccgugcagccagugcccuu

SEQ ID NO: 957820 - RNA, 19 nt, Artificial Sequence
  Description of Artificial Sequence: Synthetic oligonucleotide
aaaauagccuguccaaugc

SEQ ID NO: 957821 - RNA, 19 nt, Artificial Sequence
  Description of Artificial Sequence: Synthetic oligonucleotide
auccaaauaagcaaggacc

SEQ ID NO: 957822 - RNA, 19 nt, Artificial Sequence
  Description of Artificial Sequence: Synthetic oligonucleotide
cacaaaacuacauugggcc

SEQ ID NO: 957823 - RNA, 19 nt, Artificial Sequence
  Description of Artificial Sequence: Synthetic oligonucleotide
uuuaaaccaacucacggca

SEQ ID NO: 957824 - RNA, 19 nt, Artificial Sequence
  Description of Artificial Sequence: Synthetic oligonucleotide
aaguaugagguuuuaaagu

SEQ ID NO: 957825 - RNA, 19 nt, Artificial Sequence
  Description of Artificial Sequence: Synthetic oligonucleotide
agcagcauaaauuucguag

SEQ ID NO: 957826 - RNA, 19 nt, Artificial Sequence
  Description of Artificial Sequence: Synthetic oligonucleotide
ucagguaaaaccagguuag

SEQ ID NO: 957827 - RNA, 19 nt, Artificial Sequence
  Description of Artificial Sequence: Synthetic oligonucleotide
uaaaucagguaaaaccagg

SEQ ID NO: 957828 - RNA, 19 nt, Artificial Sequence
  Description of Artificial Sequence: Synthetic oligonucleotide
uuuaugaaggauuuucucu

SEQ ID NO: 957829 - RNA, 19 nt, Artificial Sequence
  Description of Artificial Sequence: Synthetic oligonucleotide
acaaaugccaccauuggcc

SEQ ID NO: 957830 - RNA, 19 nt, Artificial Sequence
  Description of Artificial Sequence: Synthetic oligonucleotide
uuagaauguacacuggaga

SEQ ID NO: 957831 - RNA, 19 nt, Artificial Sequence
  Description of Artificial Sequence: Synthetic oligonucleotide
aacuuaaugacaucaccug

SEQ ID NO: 957832 - RNA, 19 nt, Artificial Sequence
  Description of Artificial Sequence: Synthetic oligonucleotide
aaauauucggucuaucaaa

SEQ ID NO: 957833 - RNA, 19 nt, Artificial Sequence
  Description of Artificial Sequence: Synthetic oligonucleotide
aaauaacugugccccaucg

SEQ ID NO: 957834 - RNA, 19 nt, Artificial Sequence
  Description of Artificial Sequence: Synthetic oligonucleotide
uuaguauacagccauccca

SEQ ID NO: 957835 - RNA, 19 nt, Artificial Sequence
  Description of Artificial Sequence: Synthetic oligonucleotide
auuguaucugaccugagug

SEQ ID NO: 957836 - RNA, 19 nt, Artificial Sequence
  Description of Artificial Sequence: Synthetic oligonucleotide
acagcuaaaagugacaaag

SEQ ID NO: 957837 - RNA, 19 nt, Artificial Sequence
  Description of Artificial Sequence: Synthetic oligonucleotide
uguuaauugcacuugcuga

SEQ ID NO: 957838 - RNA, 19 nt, Artificial Sequence
  Description of Artificial Sequence: Synthetic oligonucleotide
aauuucguaguauucacuu

SEQ ID NO: 957839 - RNA, 19 nt, Artificial Sequence
  Description of Artificial Sequence: Synthetic oligonucleotide
cuuuaaaccaacucacggc

SEQ ID NO: 957840 - RNA, 19 nt, Artificial Sequence
  Description of Artificial Sequence: Synthetic oligonucleotide
uaugagguuuuaaaguuca

SEQ ID NO: 957841 - RNA, 19 nt, Artificial Sequence
  Description of Artificial Sequence: Synthetic oligonucleotide
aaaacaaguauccccgagu

SEQ ID NO: 957842 - RNA, 19 nt, Artificial Sequence
  Description of Artificial Sequence: Synthetic oligonucleotide
uugccuuuaaaccaacuca

SEQ ID NO: 957843 - RNA, 19 nt, Artificial Sequence
  Description of Artificial Sequence: Synthetic oligonucleotide
aaauaagcaaggaccaagg

SEQ ID NO: 957844 - RNA, 19 nt, Artificial Sequence
  Description of Artificial Sequence: Synthetic oligonucleotide
uuuagauucccaccucggg

SEQ ID NO: 957845 - RNA, 19 nt, Artificial Sequence
  Description of Artificial Sequence: Synthetic oligonucleotide
caaguaugagguuuuaaag

SEQ ID NO: 957846 - RNA, 19 nt, Artificial Sequence
  Description of Artificial Sequence: Synthetic oligonucleotide
uccaaauaagcaaggacca

SEQ ID NO: 957847 - RNA, 19 nt, Artificial Sequence
  Description of Artificial Sequence: Synthetic oligonucleotide
uauacagccaucccaugag

SEQ ID NO: 957848 - RNA, 19 nt, Artificial Sequence
  Description of Artificial Sequence: Synthetic oligonucleotide
uuuacgucagucaacuuaa

SEQ ID NO: 957849 - RNA, 19 nt, Artificial Sequence
  Description of Artificial Sequence: Synthetic oligonucleotide
uaaauauuccacccagagc

SEQ ID NO: 957850 - RNA, 19 nt, Artificial Sequence
  Description of Artificial Sequence: Synthetic oligonucleotide
acgucagucaacuuaauga

SEQ ID NO: 957851 - RNA, 19 nt, Artificial Sequence
  Description of Artificial Sequence: Synthetic oligonucleotide
uuagauucccaccucgggc

SEQ ID NO: 957852 - RNA, 19 nt, Artificial Sequence
  Description of Artificial Sequence: Synthetic oligonucleotide
acaaguauccccgaguauc

SEQ ID NO: 957853 - RNA, 19 nt, Artificial Sequence
  Description of Artificial Sequence: Synthetic oligonucleotide
ugaaagacacuuuuauugu

SEQ ID NO: 957854 - RNA, 19 nt, Artificial Sequence
  Description of Artificial Sequence: Synthetic oligonucleotide
auaugcaguucccagcugg

SEQ ID NO: 957855 - RNA, 19 nt, Artificial Sequence
  Description of Artificial Sequence: Synthetic oligonucleotide
ucagucaacuuaaugacau

SEQ ID NO: 957856 - RNA, 19 nt, Artificial Sequence
  Description of Artificial Sequence: Synthetic oligonucleotide
ugaaagggaauauugccac

SEQ ID NO: 957857 - RNA, 19 nt, Artificial Sequence
  Description of Artificial Sequence: Synthetic oligonucleotide
ucacuaacaaaccaauguc

SEQ ID NO: 957858 - RNA, 19 nt, Artificial Sequence
  Description of Artificial Sequence: Synthetic oligonucleotide
uggacaaagccugugagag

SEQ ID NO: 957859 - RNA, 19 nt, Artificial Sequence
  Description of Artificial Sequence: Synthetic oligonucleotide
caucguauuccaaauauuc

SEQ ID NO: 957860 - RNA, 19 nt, Artificial Sequence
  Description of Artificial Sequence: Synthetic oligonucleotide
uuguaucugaccugagugg

SEQ ID NO: 957861 - RNA, 19 nt, Artificial Sequence
  Description of Artificial Sequence: Synthetic oligonucleotide
uguacacuggagaacacac

SEQ ID NO: 957862 - RNA, 19 nt, Artificial Sequence
  Description of Artificial Sequence: Synthetic oligonucleotide
uuuguacauacauugugcu

SEQ ID NO: 957863 - RNA, 19 nt, Artificial Sequence
  Description of Artificial Sequence: Synthetic oligonucleotide
uguccaaugcaaacaaagc

SEQ ID NO: 957864 - RNA, 19 nt, Artificial Sequence
  Description of Artificial Sequence: Synthetic oligonucleotide
uaaauuucguaguauucac

SEQ ID NO: 957865 - RNA, 19 nt, Artificial Sequence
  Description of Artificial Sequence: Synthetic oligonucleotide
ugacaaucuaaggaggagg

SEQ ID NO: 957866 - RNA, 19 nt, Artificial Sequence
  Description of Artificial Sequence: Synthetic oligonucleotide
cuguccaaugcaaacaaag

SEQ ID NO: 957867 - RNA, 19 nt, Artificial Sequence
  Description of Artificial Sequence: Synthetic oligonucleotide
acacauagcaauccauggg

SEQ ID NO: 957868 - RNA, 19 nt, Artificial Sequence
  Description of Artificial Sequence: Synthetic oligonucleotide
ugggcaacugcuaaggacu

SEQ ID NO: 957869 - RNA, 19 nt, Artificial Sequence
  Description of Artificial Sequence: Synthetic oligonucleotide
uccgaauuucuccaugaag

SEQ ID NO: 957870 - RNA, 19 nt, Artificial Sequence
  Description of Artificial Sequence: Synthetic oligonucleotide
ugggccaagaauaccaggc

SEQ ID NO: 957871 - RNA, 19 nt, Artificial Sequence
  Description of Artificial Sequence: Synthetic oligonucleotide
aauccgaauuucuccauga

SEQ ID NO: 957872 - RNA, 19 nt, Artificial Sequence
  Description of Artificial Sequence: Synthetic oligonucleotide
gaguaauuuagauucccac

SEQ ID NO: 957873 - RNA, 19 nt, Artificial Sequence
  Description of Artificial Sequence: Synthetic oligonucleotide
ggaaaugacggccagcccg

SEQ ID NO: 957874 - RNA, 19 nt, Artificial Sequence
  Description of Artificial Sequence: Synthetic oligonucleotide
acgcagagaagcuucaauc

SEQ ID NO: 957875 - RNA, 19 nt, Artificial Sequence
  Description of Artificial Sequence: Synthetic oligonucleotide
ucuuaguauacagccaucc

SEQ ID NO: 957876 - RNA, 19 nt, Artificial Sequence
  Description of Artificial Sequence: Synthetic oligonucleotide
agaaacacaggcaaugaag

SEQ ID NO: 957877 - RNA, 19 nt, Artificial Sequence
  Description of Artificial Sequence: Synthetic oligonucleotide
ugccuuuaaaccaacucac

SEQ ID NO: 957878 - RNA, 19 nt, Artificial Sequence
  Description of Artificial Sequence: Synthetic oligonucleotide
guuaauugcacuugcugac

SEQ ID NO: 957879 - RNA, 19 nt, Artificial Sequence
  Description of Artificial Sequence: Synthetic oligonucleotide
acacaaaacuacauugggc

SEQ ID NO: 957880 - RNA, 19 nt, Artificial Sequence
  Description of Artificial Sequence: Synthetic oligonucleotide
aaauccgaauuucuccaug

SEQ ID NO: 957881 - RNA, 19 nt, Artificial Sequence
  Description of Artificial Sequence: Synthetic oligonucleotide
aagugacaaagaaacacag

SEQ ID NO: 957882 - RNA, 19 nt, Artificial Sequence
  Description of Artificial Sequence: Synthetic oligonucleotide
aaacaaguauccccgagua

SEQ ID NO: 957883 - RNA, 19 nt, Artificial Sequence
  Description of Artificial Sequence: Synthetic oligonucleotide
aaauuacucggaaugagaa

SEQ ID NO: 957884 - RNA, 19 nt, Artificial Sequence
  Description of Artificial Sequence: Synthetic oligonucleotide
uccaguaucaugccagcca

SEQ ID NO: 957885 - RNA, 19 nt, Artificial Sequence
  Description of Artificial Sequence: Synthetic oligonucleotide
auagugaaagaaugcacgu

SEQ ID NO: 957886 - RNA, 19 nt, Artificial Sequence
  Description of Artificial Sequence: Synthetic oligonucleotide
ugcucuccgauccaaauaa

SEQ ID NO: 957887 - RNA, 19 nt, Artificial Sequence
  Description of Artificial Sequence: Synthetic oligonucleotide
uccuguuuaaccugagucu

SEQ ID NO: 957888 - RNA, 19 nt, Artificial Sequence
  Description of Artificial Sequence: Synthetic oligonucleotide
gaauauugccacguaguag

SEQ ID NO: 957889 - RNA, 19 nt, Artificial Sequence
  Description of Artificial Sequence: Synthetic oligonucleotide
caaauaagcaaggaccaag

SEQ ID NO: 957890 - RNA, 19 nt, Artificial Sequence
  Description of Artificial Sequence: Synthetic oligonucleotide
aaagggaauauugccacgu

SEQ ID NO: 957891 - RNA, 19 nt, Artificial Sequence
  Description of Artificial Sequence: Synthetic oligonucleotide
agcuaaaagugacaaagaa

SEQ ID NO: 957892 - RNA, 19 nt, Artificial Sequence
  Description of Artificial Sequence: Synthetic oligonucleotide
uaguauacagccaucccau

SEQ ID NO: 957893 - RNA, 19 nt, Artificial Sequence
  Description of Artificial Sequence: Synthetic oligonucleotide
gcuaccgaagccaagaagg

SEQ ID NO: 957894 - RNA, 19 nt, Artificial Sequence
  Description of Artificial Sequence: Synthetic oligonucleotide
uacgucagucaacuuaaug

SEQ ID NO: 957895 - RNA, 19 nt, Artificial Sequence
  Description of Artificial Sequence: Synthetic oligonucleotide
aagcaaauccgaauuucuc

SEQ ID NO: 957896 - RNA, 19 nt, Artificial Sequence
  Description of Artificial Sequence: Synthetic oligonucleotide
guuagaauguacacuggag

SEQ ID NO: 957897 - RNA, 19 nt, Artificial Sequence
  Description of Artificial Sequence: Synthetic oligonucleotide
aaauagccuguccaaugca

SEQ ID NO: 957898 - RNA, 19 nt, Artificial Sequence
  Description of Artificial Sequence: Synthetic oligonucleotide
aucguauuccaaauauucg

SEQ ID NO: 957899 - RNA, 19 nt, Artificial Sequence
  Description of Artificial Sequence: Synthetic oligonucleotide
auugccacguaguagcaga

SEQ ID NO: 957900 - RNA, 19 nt, Artificial Sequence
  Description of Artificial Sequence: Synthetic oligonucleotide
ucgggcacgauucaccaca

SEQ ID NO: 957901 - RNA, 19 nt, Artificial Sequence
  Description of Artificial Sequence: Synthetic oligonucleotide
agcaccacgagccggugcg

SEQ ID NO: 957902 - RNA, 19 nt, Artificial Sequence
  Description of Artificial Sequence: Synthetic oligonucleotide
cuguuaauugcacuugcug

SEQ ID NO: 957903 - RNA, 19 nt, Artificial Sequence
  Description of Artificial Sequence: Synthetic oligonucleotide
ucuaaggaggaggaaacac

SEQ ID NO: 957904 - RNA, 19 nt, Artificial Sequence
  Description of Artificial Sequence: Synthetic oligonucleotide
aauauucggucuaucaaaa

SEQ ID NO: 957905 - RNA, 19 nt, Artificial Sequence
  Description of Artificial Sequence: Synthetic oligonucleotide
agggaauauugccacguag

SEQ ID NO: 957906 - RNA, 19 nt, Artificial Sequence
  Description of Artificial Sequence: Synthetic oligonucleotide
aggagaaguccuuuacguc

SEQ ID NO: 957907 - RNA, 19 nt, Artificial Sequence
  Description of Artificial Sequence: Synthetic oligonucleotide
aaaccagguuagaauguac

SEQ ID NO: 957908 - RNA, 19 nt, Artificial Sequence
  Description of Artificial Sequence: Synthetic oligonucleotide
gaguguuacucccaggauc

SEQ ID NO: 957909 - RNA, 19 nt, Artificial Sequence
  Description of Artificial Sequence: Synthetic oligonucleotide
uggagcugacaaucuaagg

SEQ ID NO: 957910 - RNA, 19 nt, Artificial Sequence
  Description of Artificial Sequence: Synthetic oligonucleotide
caaguauccccgaguaucc

SEQ ID NO: 957911 - RNA, 19 nt, Artificial Sequence
  Description of Artificial Sequence: Synthetic oligonucleotide
uacgcacccaaucaugagu

SEQ ID NO: 957912 - RNA, 19 nt, Artificial Sequence
  Description of Artificial Sequence: Synthetic oligonucleotide
cuacauugggccaagaaua

SEQ ID NO: 957913 - RNA, 19 nt, Artificial Sequence
  Description of Artificial Sequence: Synthetic oligonucleotide
aaaacuacauugggccaag

SEQ ID NO: 957914 - RNA, 19 nt, Artificial Sequence
  Description of Artificial Sequence: Synthetic oligonucleotide
cuguaggagaaggaaauag

SEQ ID NO: 957915 - RNA, 19 nt, Artificial Sequence
  Description of Artificial Sequence: Synthetic oligonucleotide
agaauaccaggcauacagc

SEQ ID NO: 957916 - RNA, 19 nt, Artificial Sequence
  Description of Artificial Sequence: Synthetic oligonucleotide
auuucguaguauucacuug

SEQ ID NO: 957917 - RNA, 19 nt, Artificial Sequence
  Description of Artificial Sequence: Synthetic oligonucleotide
gaaugcacguuacgcaccc

SEQ ID NO: 957918 - RNA, 19 nt, Artificial Sequence
  Description of Artificial Sequence: Synthetic oligonucleotide
ccaaugaaagggaauauug

SEQ ID NO: 957919 - RNA, 19 nt, Artificial Sequence
  Description of Artificial Sequence: Synthetic oligonucleotide
ggagcugacaaucuaagga

SEQ ID NO: 957920 - RNA, 19 nt, Artificial Sequence
  Description of Artificial Sequence: Synthetic oligonucleotide
cacguaguagcagacacag

SEQ ID NO: 957921 - RNA, 19 nt, Artificial Sequence
  Description of Artificial Sequence: Synthetic oligonucleotide
ccuuuaaaccaacucacgg

SEQ ID NO: 957922 - RNA, 19 nt, Artificial Sequence
  Description of Artificial Sequence: Synthetic oligonucleotide
aguccuuuacgucagucaa

SEQ ID NO: 957923 - RNA, 19 nt, Artificial Sequence
  Description of Artificial Sequence: Synthetic oligonucleotide
ugcuaccgaagccaagaag

SEQ ID NO: 957924 - RNA, 19 nt, Artificial Sequence
  Description of Artificial Sequence: Synthetic oligonucleotide
aacgcagagaagcuucaau

SEQ ID NO: 957925 - RNA, 19 nt, Artificial Sequence
  Description of Artificial Sequence: Synthetic oligonucleotide
aaauuucguaguauucacu

SEQ ID NO: 957926 - RNA, 19 nt, Artificial Sequence
  Description of Artificial Sequence: Synthetic oligonucleotide
ugggaucgcacagagcggg

SEQ ID NO: 957927 - RNA, 19 nt, Artificial Sequence
  Description of Artificial Sequence: Synthetic oligonucleotide
acaaaacuacauugggcca

SEQ ID NO: 957928 - RNA, 19 nt, Artificial Sequence
  Description of Artificial Sequence: Synthetic oligonucleotide
aaugacggccagcccgagg

SEQ ID NO: 957929 - RNA, 19 nt, Artificial Sequence
  Description of Artificial Sequence: Synthetic oligonucleotide
accaacucacggcauaugu

SEQ ID NO: 957930 - RNA, 19 nt, Artificial Sequence
  Description of Artificial Sequence: Synthetic oligonucleotide
acucacggcauauguguuc

SEQ ID NO: 957931 - RNA, 19 nt, Artificial Sequence
  Description of Artificial Sequence: Synthetic oligonucleotide
auugcuaccgaagccaaga

SEQ ID NO: 957932 - RNA, 19 nt, Artificial Sequence
  Description of Artificial Sequence: Synthetic oligonucleotide
uucguaguauucacuugca

SEQ ID NO: 957933 - RNA, 19 nt, Artificial Sequence
  Description of Artificial Sequence: Synthetic oligonucleotide
aguguuacucccaggauca

SEQ ID NO: 957934 - RNA, 19 nt, Artificial Sequence
  Description of Artificial Sequence: Synthetic oligonucleotide
guaggagaaggaaauagca

SEQ ID NO: 957935 - RNA, 19 nt, Artificial Sequence
  Description of Artificial Sequence: Synthetic oligonucleotide
gagccggugcgccaggugg

SEQ ID NO: 957936 - RNA, 19 nt, Artificial Sequence
  Description of Artificial Sequence: Synthetic oligonucleotide
aauguacacuggagaacac

SEQ ID NO: 957937 - RNA, 19 nt, Artificial Sequence
  Description of Artificial Sequence: Synthetic oligonucleotide
uaaaccaacucacggcaua

SEQ ID NO: 957938 - RNA, 19 nt, Artificial Sequence
  Description of Artificial Sequence: Synthetic oligonucleotide
agaaugcacguuacgcacc

SEQ ID NO: 957939 - RNA, 19 nt, Artificial Sequence
  Description of Artificial Sequence: Synthetic oligonucleotide
cuaccgaagccaagaaggc

SEQ ID NO: 957940 - RNA, 19 nt, Artificial Sequence
  Description of Artificial Sequence: Synthetic oligonucleotide
ggagaaguccuuuacguca

SEQ ID NO: 957941 - RNA, 19 nt, Artificial Sequence
  Description of Artificial Sequence: Synthetic oligonucleotide
cuuuacgucagucaacuua

SEQ ID NO: 957942 - RNA, 19 nt, Artificial Sequence
  Description of Artificial Sequence: Synthetic oligonucleotide
caaauauucggucuaucaa

SEQ ID NO: 957943 - RNA, 19 nt, Artificial Sequence
  Description of Artificial Sequence: Synthetic oligonucleotide
uuacucggaaugagaaagu

SEQ ID NO: 957944 - RNA, 19 nt, Artificial Sequence
  Description of Artificial Sequence: Synthetic oligonucleotide
auagacaucauggauugua

SEQ ID NO: 957945 - RNA, 19 nt, Artificial Sequence
  Description of Artificial Sequence: Synthetic oligonucleotide
ggcacgauucaccacauac

SEQ ID NO: 957946 - RNA, 19 nt, Artificial Sequence
  Description of Artificial Sequence: Synthetic oligonucleotide
cagaguaauuuagauuccc

SEQ ID NO: 957947 - RNA, 19 nt, Artificial Sequence
  Description of Artificial Sequence: Synthetic oligonucleotide
aaaaccagguuagaaugua

SEQ ID NO: 957948 - RNA, 19 nt, Artificial Sequence
  Description of Artificial Sequence: Synthetic oligonucleotide
aggggcaggcacauaaccc

SEQ ID NO: 957949 - RNA, 19 nt, Artificial Sequence
  Description of Artificial Sequence: Synthetic oligonucleotide
agacacauagcaauccaug

SEQ ID NO: 957950 - RNA, 19 nt, Artificial Sequence
  Description of Artificial Sequence: Synthetic oligonucleotide
uuacgcacccaaucaugag

SEQ ID NO: 957951 - RNA, 19 nt, Artificial Sequence
  Description of Artificial Sequence: Synthetic oligonucleotide
aacaaguauccccgaguau

SEQ ID NO: 957952 - RNA, 19 nt, Artificial Sequence
  Description of Artificial Sequence: Synthetic oligonucleotide
acacgagggugguagcgac

SEQ ID NO: 957953 - RNA, 19 nt, Artificial Sequence
  Description of Artificial Sequence: Synthetic oligonucleotide
ugcuaaggacucuccacca

SEQ ID NO: 957954 - RNA, 19 nt, Artificial Sequence
  Description of Artificial Sequence: Synthetic oligonucleotide
caacuuaaugacaucaccu

SEQ ID NO: 957955 - RNA, 19 nt, Artificial Sequence
  Description of Artificial Sequence: Synthetic oligonucleotide
aucaugccagccaggaugg

SEQ ID NO: 957956 - RNA, 19 nt, Artificial Sequence
  Description of Artificial Sequence: Synthetic oligonucleotide
gaguauccaguaucaugcc

SEQ ID NO: 957957 - RNA, 19 nt, Artificial Sequence
  Description of Artificial Sequence: Synthetic oligonucleotide
uuaaaccaacucacggcau

SEQ ID NO: 957958 - RNA, 19 nt, Artificial Sequence
  Description of Artificial Sequence: Synthetic oligonucleotide
uguuuaaccugagucugaa

SEQ ID NO: 957959 - RNA, 19 nt, Artificial Sequence
  Description of Artificial Sequence: Synthetic oligonucleotide
uaugcaguucccagcuggu

SEQ ID NO: 957960 - RNA, 19 nt, Artificial Sequence
  Description of Artificial Sequence: Synthetic oligonucleotide
uaacugugccccaucguau

SEQ ID NO: 957961 - RNA, 19 nt, Artificial Sequence
  Description of Artificial Sequence: Synthetic oligonucleotide
gaucgcacagagcgggcag

SEQ ID NO: 957962 - RNA, 19 nt, Artificial Sequence
  Description of Artificial Sequence: Synthetic oligonucleotide
uuauugucuuuaagagaaa

SEQ ID NO: 957963 - RNA, 19 nt, Artificial Sequence
  Description of Artificial Sequence: Synthetic oligonucleotide
acugugccccaucguauuc

SEQ ID NO: 957964 - RNA, 19 nt, Artificial Sequence
  Description of Artificial Sequence: Synthetic oligonucleotide
ugaguguuacucccaggau

SEQ ID NO: 957965 - RNA, 19 nt, Artificial Sequence
  Description of Artificial Sequence: Synthetic oligonucleotide
auuaaauauuccacccaga

SEQ ID NO: 957966 - RNA, 19 nt, Artificial Sequence
  Description of Artificial Sequence: Synthetic oligonucleotide
caaucuuaguauacagcca

SEQ ID NO: 957967 - RNA, 19 nt, Artificial Sequence
  Description of Artificial Sequence: Synthetic oligonucleotide
gauuguaucugaccugagu

SEQ ID NO: 957968 - RNA, 19 nt, Artificial Sequence
  Description of Artificial Sequence: Synthetic oligonucleotide
uguuacucccaggaucaug

SEQ ID NO: 957969 - RNA, 19 nt, Artificial Sequence
  Description of Artificial Sequence: Synthetic oligonucleotide
uuuauccaccaggagucca

SEQ ID NO: 957970 - RNA, 19 nt, Artificial Sequence
  Description of Artificial Sequence: Synthetic oligonucleotide
agaguaauuuagauuccca

SEQ ID NO: 957971 - RNA, 19 nt, Artificial Sequence
  Description of Artificial Sequence: Synthetic oligonucleotide
aguauacagccaucccaug

SEQ ID NO: 957972 - RNA, 19 nt, Artificial Sequence
  Description of Artificial Sequence: Synthetic oligonucleotide
auugugcuaggcacugugg

SEQ ID NO: 957973 - RNA, 19 nt, Artificial Sequence
  Description of Artificial Sequence: Synthetic oligonucleotide
uucacuugcauguccuguu

SEQ ID NO: 957974 - RNA, 19 nt, Artificial Sequence
  Description of Artificial Sequence: Synthetic oligonucleotide
uuuuauccaccaggagucc

SEQ ID NO: 957975 - RNA, 19 nt, Artificial Sequence
  Description of Artificial Sequence: Synthetic oligonucleotide
ugguagcgacagcacacag

SEQ ID NO: 957976 - RNA, 19 nt, Artificial Sequence
  Description of Artificial Sequence: Synthetic oligonucleotide
gguuagaauguacacugga

SEQ ID NO: 957977 - RNA, 19 nt, Artificial Sequence
  Description of Artificial Sequence: Synthetic oligonucleotide
aguccaaacacuggcgaca

SEQ ID NO: 957978 - RNA, 19 nt, Artificial Sequence
  Description of Artificial Sequence: Synthetic oligonucleotide
aaaccaacucacggcauau

SEQ ID NO: 957979 - RNA, 19 nt, Artificial Sequence
  Description of Artificial Sequence: Synthetic oligonucleotide
aacugugccccaucguauu

SEQ ID NO: 957980 - RNA, 19 nt, Artificial Sequence
  Description of Artificial Sequence: Synthetic oligonucleotide
cguaguauucacuugcaug

SEQ ID NO: 957981 - RNA, 19 nt, Artificial Sequence
  Description of Artificial Sequence: Synthetic oligonucleotide
agcauaaauuucguaguau

SEQ ID NO: 957982 - RNA, 19 nt, Artificial Sequence
  Description of Artificial Sequence: Synthetic oligonucleotide
gcaagcaaugaguaggaga

SEQ ID NO: 957983 - RNA, 19 nt, Artificial Sequence
  Description of Artificial Sequence: Synthetic oligonucleotide
agacagaccacagcuaaaa

SEQ ID NO: 957984 - RNA, 19 nt, Artificial Sequence
  Description of Artificial Sequence: Synthetic oligonucleotide
ucguaguauucacuugcau

SEQ ID NO: 957985 - RNA, 19 nt, Artificial Sequence
  Description of Artificial Sequence: Synthetic oligonucleotide
gguaaaaccagguuagaau

SEQ ID NO: 957986 - RNA, 19 nt, Artificial Sequence
  Description of Artificial Sequence: Synthetic oligonucleotide
uacagacagaccacagcua

SEQ ID NO: 957987 - RNA, 19 nt, Artificial Sequence
  Description of Artificial Sequence: Synthetic oligonucleotide
gucaacuuaaugacaucac

SEQ ID NO: 957988 - RNA, 19 nt, Artificial Sequence
  Description of Artificial Sequence: Synthetic oligonucleotide
accucgggcacgauucacc

SEQ ID NO: 957989 - RNA, 19 nt, Artificial Sequence
  Description of Artificial Sequence: Synthetic oligonucleotide
cacguuacgcacccaauca

SEQ ID NO: 957990 - RNA, 19 nt, Artificial Sequence
  Description of Artificial Sequence: Synthetic oligonucleotide
aagggaauauugccacgua

SEQ ID NO: 957991 - RNA, 19 nt, Artificial Sequence
  Description of Artificial Sequence: Synthetic oligonucleotide
guaugagguuuuaaaguuc

SEQ ID NO: 957992 - RNA, 19 nt, Artificial Sequence
  Description of Artificial Sequence: Synthetic oligonucleotide
guuacgcacccaaucauga

SEQ ID NO: 957993 - RNA, 19 nt, Artificial Sequence
  Description of Artificial Sequence: Synthetic oligonucleotide
acgagggugguagcgacag

SEQ ID NO: 957994 - RNA, 19 nt, Artificial Sequence
  Description of Artificial Sequence: Synthetic oligonucleotide
uacauacauugugcuaggc

SEQ ID NO: 957995 - RNA, 19 nt, Artificial Sequence
  Description of Artificial Sequence: Synthetic oligonucleotide
agguaaaaccagguuagaa

SEQ ID NO: 957996 - RNA, 19 nt, Artificial Sequence
  Description of Artificial Sequence: Synthetic oligonucleotide
gaaaugacggccagcccga

SEQ ID NO: 957997 - RNA, 19 nt, Artificial Sequence
  Description of Artificial Sequence: Synthetic oligonucleotide
cacaaauuccucacaaagu

SEQ ID NO: 957998 - RNA, 19 nt, Artificial Sequence
  Description of Artificial Sequence: Synthetic oligonucleotide
auaacccauuuauaacauu

SEQ ID NO: 957999 - RNA, 19 nt, Artificial Sequence
  Description of Artificial Sequence: Synthetic oligonucleotide
caacucacggcauaugugu

SEQ ID NO: 958000 - RNA, 19 nt, Artificial Sequence
  Description of Artificial Sequence: Synthetic oligonucleotide
guuacucccaggaucaugu

SEQ ID NO: 958001 - RNA, 19 nt, Artificial Sequence
  Description of Artificial Sequence: Synthetic oligonucleotide
auguacacuggagaacaca

SEQ ID NO: 958002 - RNA, 19 nt, Artificial Sequence
  Description of Artificial Sequence: Synthetic oligonucleotide
gagcgggcagagcacgcgg

SEQ ID NO: 958003 - RNA, 19 nt, Artificial Sequence
  Description of Artificial Sequence: Synthetic oligonucleotide
auugggccaagaauaccag

SEQ ID NO: 958004 - RNA, 19 nt, Artificial Sequence
  Description of Artificial Sequence: Synthetic oligonucleotide
uaccgaagccaagaaggca

SEQ ID NO: 958005 - RNA, 19 nt, Artificial Sequence
  Description of Artificial Sequence: Synthetic oligonucleotide
ucggaaugagaaaguuuua

SEQ ID NO: 958006 - RNA, 19 nt, Artificial Sequence
  Description of Artificial Sequence: Synthetic oligonucleotide
agguuagaauguacacugg

SEQ ID NO: 958007 - RNA, 19 nt, Artificial Sequence
  Description of Artificial Sequence: Synthetic oligonucleotide
aucuuaguauacagccauc

SEQ ID NO: 958008 - RNA, 19 nt, Artificial Sequence
  Description of Artificial Sequence: Synthetic oligonucleotide
caugugggacacgagggug

SEQ ID NO: 958009 - RNA, 19 nt, Artificial Sequence
  Description of Artificial Sequence: Synthetic oligonucleotide
acgcacccaaucaugagug

SEQ ID NO: 958010 - RNA, 19 nt, Artificial Sequence
  Description of Artificial Sequence: Synthetic oligonucleotide
cugggaucgcacagagcgg

SEQ ID NO: 958011 - RNA, 19 nt, Artificial Sequence
  Description of Artificial Sequence: Synthetic oligonucleotide
acuguuaauugcacuugcu

SEQ ID NO: 958012 - RNA, 19 nt, Artificial Sequence
  Description of Artificial Sequence: Synthetic oligonucleotide
gguagcgacagcacacagg

SEQ ID NO: 958013 - RNA, 19 nt, Artificial Sequence
  Description of Artificial Sequence: Synthetic oligonucleotide
cagcuaaaagugacaaaga

SEQ ID NO: 958014 - RNA, 19 nt, Artificial Sequence
  Description of Artificial Sequence: Synthetic oligonucleotide
uugcacuugcugacuggga

SEQ ID NO: 958015 - RNA, 19 nt, Artificial Sequence
  Description of Artificial Sequence: Synthetic oligonucleotide
uugcuaccgaagccaagaa

SEQ ID NO: 958016 - RNA, 19 nt, Artificial Sequence
  Description of Artificial Sequence: Synthetic oligonucleotide
uagugaaagaaugcacguu

SEQ ID NO: 958017 - RNA, 19 nt, Artificial Sequence
  Description of Artificial Sequence: Synthetic oligonucleotide
uugccacguaguagcagac

SEQ ID NO: 958018 - RNA, 19 nt, Artificial Sequence
  Description of Artificial Sequence: Synthetic oligonucleotide
augcacguuacgcacccaa

SEQ ID NO: 958019 - RNA, 19 nt, Artificial Sequence
  Description of Artificial Sequence: Synthetic oligonucleotide
acguuacgcacccaaucau

SEQ ID NO: 958020 - RNA, 19 nt, Artificial Sequence
  Description of Artificial Sequence: Synthetic oligonucleotide
ccgaguauccaguaucaug

SEQ ID NO: 958021 - RNA, 19 nt, Artificial Sequence
  Description of Artificial Sequence: Synthetic oligonucleotide
uggguuccaaaaggugaag

SEQ ID NO: 958022 - RNA, 19 nt, Artificial Sequence
  Description of Artificial Sequence: Synthetic oligonucleotide
ugcacguuacgcacccaau

SEQ ID NO: 958023 - RNA, 19 nt, Artificial Sequence
  Description of Artificial Sequence: Synthetic oligonucleotide
agccuguccaaugcaaaca

SEQ ID NO: 958024 - RNA, 19 nt, Artificial Sequence
  Description of Artificial Sequence: Synthetic oligonucleotide
ggaguccaaacacuggcga

SEQ ID NO: 958025 - RNA, 19 nt, Artificial Sequence
  Description of Artificial Sequence: Synthetic oligonucleotide
ggaauauugccacguagua

SEQ ID NO: 958026 - RNA, 19 nt, Artificial Sequence
  Description of Artificial Sequence: Synthetic oligonucleotide
ccgauccaaauaagcaagg

SEQ ID NO: 958027 - RNA, 19 nt, Artificial Sequence
  Description of Artificial Sequence: Synthetic oligonucleotide
cauaugcaguucccagcug

SEQ ID NO: 958028 - RNA, 19 nt, Artificial Sequence
  Description of Artificial Sequence: Synthetic oligonucleotide
gccuuuaaaccaacucacg

SEQ ID NO: 958029 - RNA, 19 nt, Artificial Sequence
  Description of Artificial Sequence: Synthetic oligonucleotide
cauaacccauuuauaacau

SEQ ID NO: 958030 - RNA, 19 nt, Artificial Sequence
  Description of Artificial Sequence: Synthetic oligonucleotide
accacagcuaaaagugaca

SEQ ID NO: 958031 - RNA, 19 nt, Artificial Sequence
  Description of Artificial Sequence: Synthetic oligonucleotide
gauucaccacauacagaca

SEQ ID NO: 958032 - RNA, 19 nt, Artificial Sequence
  Description of Artificial Sequence: Synthetic oligonucleotide
caugcugaguuggagucca

SEQ ID NO: 958033 - RNA, 19 nt, Artificial Sequence
  Description of Artificial Sequence: Synthetic oligonucleotide
gcagcauaaauuucguagu

SEQ ID NO: 958034 - RNA, 19 nt, Artificial Sequence
  Description of Artificial Sequence: Synthetic oligonucleotide
gggagcugauaugacauac

SEQ ID NO: 958035 - RNA, 19 nt, Artificial Sequence
  Description of Artificial Sequence: Synthetic oligonucleotide
uuacgucagucaacuuaau

SEQ ID NO: 958036 - RNA, 19 nt, Artificial Sequence
  Description of Artificial Sequence: Synthetic oligonucleotide
agggugguagcgacagcac

SEQ ID NO: 958037 - RNA, 19 nt, Artificial Sequence
  Description of Artificial Sequence: Synthetic oligonucleotide
uauccccgaguauccagua

SEQ ID NO: 958038 - RNA, 19 nt, Artificial Sequence
  Description of Artificial Sequence: Synthetic oligonucleotide
gacacgagggugguagcga

SEQ ID NO: 958039 - RNA, 19 nt, Artificial Sequence
  Description of Artificial Sequence: Synthetic oligonucleotide
cuguggauacauucacuaa

SEQ ID NO: 958040 - RNA, 19 nt, Artificial Sequence
  Description of Artificial Sequence: Synthetic oligonucleotide
ccaacucacggcauaugug

SEQ ID NO: 958041 - RNA, 19 nt, Artificial Sequence
  Description of Artificial Sequence: Synthetic oligonucleotide
aaaugacggccagcccgag

SEQ ID NO: 958042 - RNA, 19 nt, Artificial Sequence
  Description of Artificial Sequence: Synthetic oligonucleotide
gguucauauucacugugcu

SEQ ID NO: 958043 - RNA, 19 nt, Artificial Sequence
  Description of Artificial Sequence: Synthetic oligonucleotide
acaaucuaaggaggaggaa

SEQ ID NO: 958044 - RNA, 19 nt, Artificial Sequence
  Description of Artificial Sequence: Synthetic oligonucleotide
cacccaaucaugaguguua

SEQ ID NO: 958045 - RNA, 19 nt, Artificial Sequence
  Description of Artificial Sequence: Synthetic oligonucleotide
aggcaagcaaugaguagga

SEQ ID NO: 958046 - RNA, 19 nt, Artificial Sequence
  Description of Artificial Sequence: Synthetic oligonucleotide
acugggaagcaaauccgaa

SEQ ID NO: 958047 - RNA, 19 nt, Artificial Sequence
  Description of Artificial Sequence: Synthetic oligonucleotide
cagcauaaauuucguagua

SEQ ID NO: 958048 - RNA, 19 nt, Artificial Sequence
  Description of Artificial Sequence: Synthetic oligonucleotide
ugccacguaguagcagaca

SEQ ID NO: 958049 - RNA, 19 nt, Artificial Sequence
  Description of Artificial Sequence: Synthetic oligonucleotide
aacucacggcauauguguu

SEQ ID NO: 958050 - RNA, 19 nt, Artificial Sequence
  Description of Artificial Sequence: Synthetic oligonucleotide
ggacacgagggugguagcg

SEQ ID NO: 958051 - RNA, 19 nt, Artificial Sequence
  Description of Artificial Sequence: Synthetic oligonucleotide
ccucacaaagugaggugag

SEQ ID NO: 958052 - RNA, 19 nt, Artificial Sequence
  Description of Artificial Sequence: Synthetic oligonucleotide
acuguaggagaaggaaaua

SEQ ID NO: 958053 - RNA, 19 nt, Artificial Sequence
  Description of Artificial Sequence: Synthetic oligonucleotide
auauugccacguaguagca

SEQ ID NO: 958054 - RNA, 19 nt, Artificial Sequence
  Description of Artificial Sequence: Synthetic oligonucleotide
aucugaccugaguggucug

SEQ ID NO: 958055 - RNA, 19 nt, Artificial Sequence
  Description of Artificial Sequence: Synthetic oligonucleotide
gcagaguaauuuagauucc

SEQ ID NO: 958056 - RNA, 19 nt, Artificial Sequence
  Description of Artificial Sequence: Synthetic oligonucleotide
gcacguuacgcacccaauc

SEQ ID NO: 958057 - RNA, 19 nt, Artificial Sequence
  Description of Artificial Sequence: Synthetic oligonucleotide
acgauucaccacauacaga

SEQ ID NO: 958058 - RNA, 19 nt, Artificial Sequence
  Description of Artificial Sequence: Synthetic oligonucleotide
gcaaugaguaggagagacc

SEQ ID NO: 958059 - RNA, 19 nt, Artificial Sequence
  Description of Artificial Sequence: Synthetic oligonucleotide
aaugcacguuacgcaccca

SEQ ID NO: 958060 - RNA, 19 nt, Artificial Sequence
  Description of Artificial Sequence: Synthetic oligonucleotide
cuuugcccagcccaaugaa

SEQ ID NO: 958061 - RNA, 19 nt, Artificial Sequence
  Description of Artificial Sequence: Synthetic oligonucleotide
guccuuuacgucagucaac

SEQ ID NO: 958062 - RNA, 19 nt, Artificial Sequence
  Description of Artificial Sequence: Synthetic oligonucleotide
agccggugcgccagguggc

SEQ ID NO: 958063 - RNA, 19 nt, Artificial Sequence
  Description of Artificial Sequence: Synthetic oligonucleotide
ucacggcauauguguucug

SEQ ID NO: 958064 - RNA, 19 nt, Artificial Sequence
  Description of Artificial Sequence: Synthetic oligonucleotide
gggaauauugccacguagu

SEQ ID NO: 958065 - RNA, 19 nt, Artificial Sequence
  Description of Artificial Sequence: Synthetic oligonucleotide
auccccgaguauccaguau

SEQ ID NO: 958066 - RNA, 19 nt, Artificial Sequence
  Description of Artificial Sequence: Synthetic oligonucleotide
cguuacgcacccaaucaug

SEQ ID NO: 958067 - RNA, 19 nt, Artificial Sequence
  Description of Artificial Sequence: Synthetic oligonucleotide
cccgggacugcguuguccc

SEQ ID NO: 958068 - RNA, 19 nt, Artificial Sequence
  Description of Artificial Sequence: Synthetic oligonucleotide
cucgggcacgauucaccac

SEQ ID NO: 958069 - RNA, 19 nt, Artificial Sequence
  Description of Artificial Sequence: Synthetic oligonucleotide
ucggggcgguccccaagca

SEQ ID NO: 958070 - RNA, 19 nt, Artificial Sequence
  Description of Artificial Sequence: Synthetic oligonucleotide
gugguagcgacagcacaca

SEQ ID NO: 958071 - RNA, 19 nt, Artificial Sequence
  Description of Artificial Sequence: Synthetic oligonucleotide
cggcauauguguucugggc

SEQ ID NO: 958072 - RNA, 19 nt, Artificial Sequence
  Description of Artificial Sequence: Synthetic oligonucleotide
caagaauaccaggcauaca

SEQ ID NO: 958073 - RNA, 19 nt, Artificial Sequence
  Description of Artificial Sequence: Synthetic oligonucleotide
ggagcugauaugacauaca

SEQ ID NO: 958074 - RNA, 19 nt, Artificial Sequence
  Description of Artificial Sequence: Synthetic oligonucleotide
gaaugguucugggcuggaa

SEQ ID NO: 958075 - RNA, 19 nt, Artificial Sequence
  Description of Artificial Sequence: Synthetic oligonucleotide
caggacugucauagcaaaa

SEQ ID NO: 958076 - RNA, 19 nt, Artificial Sequence
  Description of Artificial Sequence: Synthetic oligonucleotide
gcgacaugggagcugauau

SEQ ID NO: 958077 - RNA, 19 nt, Artificial Sequence
  Description of Artificial Sequence: Synthetic oligonucleotide
cuaggcacuguggauacau

SEQ ID NO: 958078 - RNA, 19 nt, Artificial Sequence
  Description of Artificial Sequence: Synthetic oligonucleotide
ggcaagcaaugaguaggag

SEQ ID NO: 958079 - RNA, 19 nt, Artificial Sequence
  Description of Artificial Sequence: Synthetic oligonucleotide
agaaugguucugggcugga

SEQ ID NO: 958080 - RNA, 19 nt, Artificial Sequence
  Description of Artificial Sequence: Synthetic oligonucleotide
ggauuguaucugaccugag

SEQ ID NO: 958081 - RNA, 19 nt, Artificial Sequence
  Description of Artificial Sequence: Synthetic oligonucleotide
caaauccgaauuucuccau

SEQ ID NO: 958082 - RNA, 19 nt, Artificial Sequence
  Description of Artificial Sequence: Synthetic oligonucleotide
guauccccgaguauccagu

SEQ ID NO: 958083 - RNA, 19 nt, Artificial Sequence
  Description of Artificial Sequence: Synthetic oligonucleotide
cacuugcauguccuguuua

SEQ ID NO: 958084 - RNA, 19 nt, Artificial Sequence
  Description of Artificial Sequence: Synthetic oligonucleotide
cagguaaaaccagguuaga

SEQ ID NO: 958085 - RNA, 19 nt, Artificial Sequence
  Description of Artificial Sequence: Synthetic oligonucleotide
gcuaaggacucuccaccaa

SEQ ID NO: 958086 - RNA, 19 nt, Artificial Sequence
  Description of Artificial Sequence: Synthetic oligonucleotide
cacgagggugguagcgaca

SEQ ID NO: 958087 - RNA, 19 nt, Artificial Sequence
  Description of Artificial Sequence: Synthetic oligonucleotide
cccaucguauuccaaauau

SEQ ID NO: 958088 - RNA, 19 nt, Artificial Sequence
  Description of Artificial Sequence: Synthetic oligonucleotide
ggccaagaauaccaggcau

SEQ ID NO: 958089 - RNA, 19 nt, Artificial Sequence
  Description of Artificial Sequence: Synthetic oligonucleotide
gggacacgagggugguagc

SEQ ID NO: 958090 - RNA, 19 nt, Artificial Sequence
  Description of Artificial Sequence: Synthetic oligonucleotide
acguaguagcagacacaga

SEQ ID NO: 958091 - RNA, 19 nt, Artificial Sequence
  Description of Artificial Sequence: Synthetic oligonucleotide
guaucaugccagccaggau

SEQ ID NO: 958092 - RNA, 19 nt, Artificial Sequence
  Description of Artificial Sequence: Synthetic oligonucleotide
cagagcacgcggggcgccc

SEQ ID NO: 958093 - RNA, 19 nt, Artificial Sequence
  Description of Artificial Sequence: Synthetic oligonucleotide
ccacguaguagcagacaca

SEQ ID NO: 958094 - RNA, 19 nt, Artificial Sequence
  Description of Artificial Sequence: Synthetic oligonucleotide
ggaucgcacagagcgggca

SEQ ID NO: 958095 - RNA, 19 nt, Artificial Sequence
  Description of Artificial Sequence: Synthetic oligonucleotide
ccccgaguauccaguauca

SEQ ID NO: 958096 - RNA, 19 nt, Artificial Sequence
  Description of Artificial Sequence: Synthetic oligonucleotide
ccgagguucugaauggacu

SEQ ID NO: 958097 - RNA, 19 nt, Artificial Sequence
  Description of Artificial Sequence: Synthetic oligonucleotide
gcaauccauggguuccaaa

SEQ ID NO: 958098 - RNA, 19 nt, Artificial Sequence
  Description of Artificial Sequence: Synthetic oligonucleotide
gggcaacugcuaaggacuc

SEQ ID NO: 958099 - RNA, 19 nt, Artificial Sequence
  Description of Artificial Sequence: Synthetic oligonucleotide
ggugcgccagguggcuggg

SEQ ID NO: 958100 - RNA, 19 nt, Artificial Sequence
  Description of Artificial Sequence: Synthetic oligonucleotide
ccgaagccaagaaggcaca

SEQ ID NO: 958101 - RNA, 19 nt, Artificial Sequence
  Description of Artificial Sequence: Synthetic oligonucleotide
gggaucgcacagagcgggc

SEQ ID NO: 958102 - RNA, 19 nt, Artificial Sequence
  Description of Artificial Sequence: Synthetic oligonucleotide
ggcgacaugggagcugaua

SEQ ID NO: 958103 - RNA, 19 nt, Artificial Sequence
  Description of Artificial Sequence: Synthetic oligonucleotide
ggacugcaugaauccauau

SEQ ID NO: 958104 - RNA, 19 nt, Artificial Sequence
  Description of Artificial Sequence: Synthetic oligonucleotide
ggugaacgcagagaagcuu

SEQ ID NO: 958105 - RNA, 19 nt, Artificial Sequence
  Description of Artificial Sequence: Synthetic oligonucleotide
augccaccauuggccacaa

SEQ ID NO: 958106 - RNA, 19 nt, Artificial Sequence
  Description of Artificial Sequence: Synthetic oligonucleotide
gcccgggacugcguugucc

SEQ ID NO: 958107 - RNA, 19 nt, Artificial Sequence
  Description of Artificial Sequence: Synthetic oligonucleotide
ccaucguauuccaaauauu

SEQ ID NO: 958108 - RNA, 19 nt, Artificial Sequence
  Description of Artificial Sequence: Synthetic oligonucleotide
ccgggacugcguugucccc

SEQ ID NO: 958109 - RNA, 19 nt, Artificial Sequence
  Description of Artificial Sequence: Synthetic oligonucleotide
gcagagcacgcggggcgcc

SEQ ID NO: 958110 - RNA, 19 nt, Artificial Sequence
  Description of Artificial Sequence: Synthetic oligonucleotide
gcacccaaucaugaguguu

SEQ ID NO: 958111 - RNA, 19 nt, Artificial Sequence
  Description of Artificial Sequence: Synthetic oligonucleotide
gcccaaugaaagggaauau

SEQ ID NO: 958112 - RNA, 19 nt, Artificial Sequence
  Description of Artificial Sequence: Synthetic oligonucleotide
ccccaucguauuccaaaua

SEQ ID NO: 958113 - RNA, 19 nt, Artificial Sequence
  Description of Artificial Sequence: Synthetic oligonucleotide
gcuaggcacuguggauaca

SEQ ID NO: 958114 - RNA, 19 nt, Artificial Sequence
  Description of Artificial Sequence: Synthetic oligonucleotide
cgggcagagcacgcggggc

SEQ ID NO: 958115 - RNA, 19 nt, Artificial Sequence
  Description of Artificial Sequence: Synthetic oligonucleotide
ggccaaguaugagguuuua

SEQ ID NO: 958116 - RNA, 19 nt, Artificial Sequence
  Description of Artificial Sequence: Synthetic oligonucleotide
cacuggcgacaugggagcu

SEQ ID NO: 958117 - RNA, 19 nt, Artificial Sequence
  Description of Artificial Sequence: Synthetic oligonucleotide
guguuacucccaggaucau

SEQ ID NO: 958118 - RNA, 19 nt, Artificial Sequence
  Description of Artificial Sequence: Synthetic oligonucleotide
gggcacgauucaccacaua

SEQ ID NO: 958119 - RNA, 19 nt, Artificial Sequence
  Description of Artificial Sequence: Synthetic oligonucleotide
gcgcccgggacugcguugu

SEQ ID NO: 958120 - RNA, 19 nt, Artificial Sequence
  Description of Artificial Sequence: Synthetic oligonucleotide
ccggugcgccagguggcug

SEQ ID NO: 958121 - RNA, 19 nt, Artificial Sequence
  Description of Artificial Sequence: Synthetic oligonucleotide
ccuuuacgucagucaacuu

SEQ ID NO: 958122 - RNA, 19 nt, Artificial Sequence
  Description of Artificial Sequence: Synthetic oligonucleotide
gccggugcgccagguggcu

SEQ ID NO: 958123 - RNA, 19 nt, Artificial Sequence
  Description of Artificial Sequence: Synthetic oligonucleotide
cgggcacgauucaccacau

SEQ ID NO: 958124 - RNA, 19 nt, Artificial Sequence
  Description of Artificial Sequence: Synthetic oligonucleotide
aauugcaucaguuaaagug

SEQ ID NO: 958125 - RNA, 19 nt, Artificial Sequence
  Description of Artificial Sequence: Synthetic oligonucleotide
uuauuuaugaagcaguaug

SEQ ID NO: 958126 - RNA, 19 nt, Artificial Sequence
  Description of Artificial Sequence: Synthetic oligonucleotide
agagucagaaaccugauac

SEQ ID NO: 958127 - RNA, 19 nt, Artificial Sequence
  Description of Artificial Sequence: Synthetic oligonucleotide
aaacuaaucauuggggucc

SEQ ID NO: 958128 - RNA, 19 nt, Artificial Sequence
  Description of Artificial Sequence: Synthetic oligonucleotide
aaguuaaaauugcuguucc

SEQ ID NO: 958129 - RNA, 19 nt, Artificial Sequence
  Description of Artificial Sequence: Synthetic oligonucleotide
ucuauuagagaaaaggcug

SEQ ID NO: 958130 - RNA, 19 nt, Artificial Sequence
  Description of Artificial Sequence: Synthetic oligonucleotide
uauuuaugaagcaguaugg

SEQ ID NO: 958131 - RNA, 19 nt, Artificial Sequence
  Description of Artificial Sequence: Synthetic oligonucleotide
uauuagaaggcuauccugg

SEQ ID NO: 958132 - RNA, 19 nt, Artificial Sequence
  Description of Artificial Sequence: Synthetic oligonucleotide
agcaauaggaagcaaaagg

SEQ ID NO: 958133 - RNA, 19 nt, Artificial Sequence
  Description of Artificial Sequence: Synthetic oligonucleotide
aauauuucaguguccguuc

SEQ ID NO: 958134 - RNA, 19 nt, Artificial Sequence
  Description of Artificial Sequence: Synthetic oligonucleotide
ucucgaaagagucagaaac

SEQ ID NO: 958135 - RNA, 19 nt, Artificial Sequence
  Description of Artificial Sequence: Synthetic oligonucleotide
uauuuuaagaggaaugggu

SEQ ID NO: 958136 - RNA, 19 nt, Artificial Sequence
  Description of Artificial Sequence: Synthetic oligonucleotide
aauacguucucuuucuuca

SEQ ID NO: 958137 - RNA, 19 nt, Artificial Sequence
  Description of Artificial Sequence: Synthetic oligonucleotide
aguuauagcaaacacuuug

SEQ ID NO: 958138 - RNA, 19 nt, Artificial Sequence
  Description of Artificial Sequence: Synthetic oligonucleotide
aauucaugcacacucagaa

SEQ ID NO: 958139 - RNA, 19 nt, Artificial Sequence
  Description of Artificial Sequence: Synthetic oligonucleotide
ugcaguaugagcaugagua

SEQ ID NO: 958140 - RNA, 19 nt, Artificial Sequence
  Description of Artificial Sequence: Synthetic oligonucleotide
cacaauuggaugaacaccg

SEQ ID NO: 958141 - RNA, 19 nt, Artificial Sequence
  Description of Artificial Sequence: Synthetic oligonucleotide
uuaugaagcaguaugguuc

SEQ ID NO: 958142 - RNA, 19 nt, Artificial Sequence
  Description of Artificial Sequence: Synthetic oligonucleotide
uguccguucacacacaagc

SEQ ID NO: 958143 - RNA, 19 nt, Artificial Sequence
  Description of Artificial Sequence: Synthetic oligonucleotide
auuguuaggccuuugaaga

SEQ ID NO: 958144 - RNA, 19 nt, Artificial Sequence
  Description of Artificial Sequence: Synthetic oligonucleotide
aggucuuauauuuuaagag

SEQ ID NO: 958145 - RNA, 19 nt, Artificial Sequence
  Description of Artificial Sequence: Synthetic oligonucleotide
aaauacguucucuuucuuc

SEQ ID NO: 958146 - RNA, 19 nt, Artificial Sequence
  Description of Artificial Sequence: Synthetic oligonucleotide
auauuaucugccucuaaac

SEQ ID NO: 958147 - RNA, 19 nt, Artificial Sequence
  Description of Artificial Sequence: Synthetic oligonucleotide
uguggugcaaacauaagcu

SEQ ID NO: 958148 - RNA, 19 nt, Artificial Sequence
  Description of Artificial Sequence: Synthetic oligonucleotide
uguucaucaguuaaggggu

SEQ ID NO: 958149 - RNA, 19 nt, Artificial Sequence
  Description of Artificial Sequence: Synthetic oligonucleotide
uuauuugcaggguuaacag

SEQ ID NO: 958150 - RNA, 19 nt, Artificial Sequence
  Description of Artificial Sequence: Synthetic oligonucleotide
aucaguuaaagugaggcgg

SEQ ID NO: 958151 - RNA, 19 nt, Artificial Sequence
  Description of Artificial Sequence: Synthetic oligonucleotide
aaucauugggguccugugg

SEQ ID NO: 958152 - RNA, 19 nt, Artificial Sequence
  Description of Artificial Sequence: Synthetic oligonucleotide
ucgcuuuggaccuuggugg

SEQ ID NO: 958153 - RNA, 19 nt, Artificial Sequence
  Description of Artificial Sequence: Synthetic oligonucleotide
auauugaauauauuaucug

SEQ ID NO: 958154 - RNA, 19 nt, Artificial Sequence
  Description of Artificial Sequence: Synthetic oligonucleotide
uaaacaguccaagauaaug

SEQ ID NO: 958155 - RNA, 19 nt, Artificial Sequence
  Description of Artificial Sequence: Synthetic oligonucleotide
acaacaacagauuguuagg

SEQ ID NO: 958156 - RNA, 19 nt, Artificial Sequence
  Description of Artificial Sequence: Synthetic oligonucleotide
agacaugaaauauucauau

SEQ ID NO: 958157 - RNA, 19 nt, Artificial Sequence
  Description of Artificial Sequence: Synthetic oligonucleotide
aagaucacuucuuaaacua

SEQ ID NO: 958158 - RNA, 19 nt, Artificial Sequence
  Description of Artificial Sequence: Synthetic oligonucleotide
uugcuauucaguuuauuug

SEQ ID NO: 958159 - RNA, 19 nt, Artificial Sequence
  Description of Artificial Sequence: Synthetic oligonucleotide
uuugguaggucuucagggg

SEQ ID NO: 958160 - RNA, 19 nt, Artificial Sequence
  Description of Artificial Sequence: Synthetic oligonucleotide
caugaauagcuaacuaucc

SEQ ID NO: 958161 - RNA, 19 nt, Artificial Sequence
  Description of Artificial Sequence: Synthetic oligonucleotide
aagaugucaauucuggcuu

SEQ ID NO: 958162 - RNA, 19 nt, Artificial Sequence
  Description of Artificial Sequence: Synthetic oligonucleotide
ugauaaguuuuguucugcg

SEQ ID NO: 958163 - RNA, 19 nt, Artificial Sequence
  Description of Artificial Sequence: Synthetic oligonucleotide
gaauggguuacuuagcaga

SEQ ID NO: 958164 - RNA, 19 nt, Artificial Sequence
  Description of Artificial Sequence: Synthetic oligonucleotide
aaauugcuguuccugauaa

SEQ ID NO: 958165 - RNA, 19 nt, Artificial Sequence
  Description of Artificial Sequence: Synthetic oligonucleotide
cucaguguccaguaggacg

SEQ ID NO: 958166 - RNA, 19 nt, Artificial Sequence
  Description of Artificial Sequence: Synthetic oligonucleotide
ucccacaucaccaggugcg

SEQ ID NO: 958167 - RNA, 19 nt, Artificial Sequence
  Description of Artificial Sequence: Synthetic oligonucleotide
auauuguccgugcagaggu

SEQ ID NO: 958168 - RNA, 19 nt, Artificial Sequence
  Description of Artificial Sequence: Synthetic oligonucleotide
aguuaagggguauuagaag

SEQ ID NO: 958169 - RNA, 19 nt, Artificial Sequence
  Description of Artificial Sequence: Synthetic oligonucleotide
aaauauuucaguguccguu

SEQ ID NO: 958170 - RNA, 19 nt, Artificial Sequence
  Description of Artificial Sequence: Synthetic oligonucleotide
uuccugauaaguuuuguuc

SEQ ID NO: 958171 - RNA, 19 nt, Artificial Sequence
  Description of Artificial Sequence: Synthetic oligonucleotide
aaacaguccaagauaauga

SEQ ID NO: 958172 - RNA, 19 nt, Artificial Sequence
  Description of Artificial Sequence: Synthetic oligonucleotide
aauuggaugaacaccggug

SEQ ID NO: 958173 - RNA, 19 nt, Artificial Sequence
  Description of Artificial Sequence: Synthetic oligonucleotide
  modified_base (3)..(3): a, c, u, g, unknown or other
ucnguuuugaagacuccca

SEQ ID NO: 958174 - RNA, 19 nt, Artificial Sequence
  Description of Artificial Sequence: Synthetic oligonucleotide
agcaguaugguucagcaau

SEQ ID NO: 958175 - RNA, 19 nt, Artificial Sequence
  Description of Artificial Sequence: Synthetic oligonucleotide
aauagcuaacuauccauuu

SEQ ID NO: 958176 - RNA, 19 nt, Artificial Sequence
  Description of Artificial Sequence: Synthetic oligonucleotide
agauaaugaguuuaugaaa

SEQ ID NO: 958177 - RNA, 19 nt, Artificial Sequence
  Description of Artificial Sequence: Synthetic oligonucleotide
uccugauaaguuuuguucu

SEQ ID NO: 958178 - RNA, 19 nt, Artificial Sequence
  Description of Artificial Sequence: Synthetic oligonucleotide
uaucagaggucuuauauuu

SEQ ID NO: 958179 - RNA, 19 nt, Artificial Sequence
  Description of Artificial Sequence: Synthetic oligonucleotide
acugggauauuguccgugc

SEQ ID NO: 958180 - RNA, 19 nt, Artificial Sequence
  Description of Artificial Sequence: Synthetic oligonucleotide
uuuaagaggaauggguuac

SEQ ID NO: 958181 - RNA, 19 nt, Artificial Sequence
  Description of Artificial Sequence: Synthetic oligonucleotide
ucuaaacuuccucaguguc

SEQ ID NO: 958182 - RNA, 19 nt, Artificial Sequence
  Description of Artificial Sequence: Synthetic oligonucleotide
gauucagggucucuauuag

SEQ ID NO: 958183 - RNA, 19 nt, Artificial Sequence
  Description of Artificial Sequence: Synthetic oligonucleotide
auuggaugaacaccggugu

SEQ ID NO: 958184 - RNA, 19 nt, Artificial Sequence
  Description of Artificial Sequence: Synthetic oligonucleotide
  modified_base (4)..(4): a, c, u, g, unknown or other
uucnguuuugaagacuccc

SEQ ID NO: 958185 - RNA, 19 nt, Artificial Sequence
  Description of Artificial Sequence: Synthetic oligonucleotide
uagacggauauacugucca

SEQ ID NO: 958186 - RNA, 19 nt, Artificial Sequence
  Description of Artificial Sequence: Synthetic oligonucleotide
agaguuauagcaaacacuu

SEQ ID NO: 958187 - RNA, 19 nt, Artificial Sequence
  Description of Artificial Sequence: Synthetic oligonucleotide
cucgaaagagucagaaacc

SEQ ID NO: 958188 - RNA, 19 nt, Artificial Sequence
  Description of Artificial Sequence: Synthetic oligonucleotide
gacgaaagcuccuucacca

SEQ ID NO: 958189 - RNA, 19 nt, Artificial Sequence
  Description of Artificial Sequence: Synthetic oligonucleotide
uagcuaacuauccauuuuc

SEQ ID NO: 958190 - RNA, 19 nt, Artificial Sequence
  Description of Artificial Sequence: Synthetic oligonucleotide
uagacugaaucacccauga

SEQ ID NO: 958191 - RNA, 19 nt, Artificial Sequence
  Description of Artificial Sequence: Synthetic oligonucleotide
guuuucauaaugacauggg

SEQ ID NO: 958192 - RNA, 19 nt, Artificial Sequence
  Description of Artificial Sequence: Synthetic oligonucleotide
aaucucagggcagccauuc

SEQ ID NO: 958193 - RNA, 19 nt, Artificial Sequence
  Description of Artificial Sequence: Synthetic oligonucleotide
aucgcuuuggaccuuggug

SEQ ID NO: 958194 - RNA, 19 nt, Artificial Sequence
  Description of Artificial Sequence: Synthetic oligonucleotide
gauauuguccgugcagagg

SEQ ID NO: 958195 - RNA, 19 nt, Artificial Sequence
  Description of Artificial Sequence: Synthetic oligonucleotide
caucaguuaaagugaggcg

SEQ ID NO: 958196 - RNA, 19 nt, Artificial Sequence
  Description of Artificial Sequence: Synthetic oligonucleotide
aauggguuacuuagcagag

SEQ ID NO: 958197 - RNA, 19 nt, Artificial Sequence
  Description of Artificial Sequence: Synthetic oligonucleotide
cuggauuccggcuuacagg

SEQ ID NO: 958198 - RNA, 19 nt, Artificial Sequence
  Description of Artificial Sequence: Synthetic oligonucleotide
uccugcaauucccagaaaa

SEQ ID NO: 958199 - RNA, 19 nt, Artificial Sequence
  Description of Artificial Sequence: Synthetic oligonucleotide
uuuaugaagcaguaugguu

SEQ ID NO: 958200 - RNA, 19 nt, Artificial Sequence
  Description of Artificial Sequence: Synthetic oligonucleotide
aguaggacguggaagcgcc

SEQ ID NO: 958201 - RNA, 19 nt, Artificial Sequence
  Description of Artificial Sequence: Synthetic oligonucleotide
ugaaucacccaugaauagc

SEQ ID NO: 958202 - RNA, 19 nt, Artificial Sequence
  Description of Artificial Sequence: Synthetic oligonucleotide
uuuuaagaggaauggguua

SEQ ID NO: 958203 - RNA, 19 nt, Artificial Sequence
  Description of Artificial Sequence: Synthetic oligonucleotide
gaagaugucaauucuggcu

SEQ ID NO: 958204 - RNA, 19 nt, Artificial Sequence
  Description of Artificial Sequence: Synthetic oligonucleotide
aaaccugauacugggauau

SEQ ID NO: 958205 - RNA, 19 nt, Artificial Sequence
  Description of Artificial Sequence: Synthetic oligonucleotide
ucaguuaaagugaggcggu

SEQ ID NO: 958206 - RNA, 19 nt, Artificial Sequence
  Description of Artificial Sequence: Synthetic oligonucleotide
acaacaucuccucugacuu

SEQ ID NO: 958207 - RNA, 19 nt, Artificial Sequence
  Description of Artificial Sequence: Synthetic oligonucleotide
  modified_base (9)..(9): a, c, u, g, unknown or other
gcaguuucnguuuugaaga

SEQ ID NO: 958208 - RNA, 19 nt, Artificial Sequence
  Description of Artificial Sequence: Synthetic oligonucleotide
augguucagcaauaggaag

SEQ ID NO: 958209 - RNA, 19 nt, Artificial Sequence
  Description of Artificial Sequence: Synthetic oligonucleotide
aaacgcaugcuggauuccg

SEQ ID NO: 958210 - RNA, 19 nt, Artificial Sequence
  Description of Artificial Sequence: Synthetic oligonucleotide
aauuauuuaugaagcagua

SEQ ID NO: 958211 - RNA, 19 nt, Artificial Sequence
  Description of Artificial Sequence: Synthetic oligonucleotide
ugacgaaagcuccuucacc

SEQ ID NO: 958212 - RNA, 19 nt, Artificial Sequence
  Description of Artificial Sequence: Synthetic oligonucleotide
ucccagaaaauauuucagu

SEQ ID NO: 958213 - RNA, 19 nt, Artificial Sequence
  Description of Artificial Sequence: Synthetic oligonucleotide
ucuggaucgcuuuggaccu

SEQ ID NO: 958214 - RNA, 19 nt, Artificial Sequence
  Description of Artificial Sequence: Synthetic oligonucleotide
gagugagagacgcuccccg

SEQ ID NO: 958215 - RNA, 19 nt, Artificial Sequence
  Description of Artificial Sequence: Synthetic oligonucleotide
cagcacaacauuuauaaaa

SEQ ID NO: 958216 - RNA, 19 nt, Artificial Sequence
  Description of Artificial Sequence: Synthetic oligonucleotide
ucgaaagagucagaaaccu

SEQ ID NO: 958217 - RNA, 19 nt, Artificial Sequence
  Description of Artificial Sequence: Synthetic oligonucleotide
  modified_base (5)..(5): a, c, u, g, unknown or other
uuucnguuuugaagacucc

SEQ ID NO: 958218 - RNA, 19 nt, Artificial Sequence
  Description of Artificial Sequence: Synthetic oligonucleotide
agcuaacuauccauuuucc

SEQ ID NO: 958219 - RNA, 19 nt, Artificial Sequence
  Description of Artificial Sequence: Synthetic oligonucleotide
agugacgaaagcuccuuca

SEQ ID NO: 958220 - RNA, 19 nt, Artificial Sequence
  Description of Artificial Sequence: Synthetic oligonucleotide
  modified_base (6)..(6): a, c, u, g, unknown or other
guuucnguuuugaagacuc

SEQ ID NO: 958221 - RNA, 19 nt, Artificial Sequence
  Description of Artificial Sequence: Synthetic oligonucleotide
cuaagagugagagacgcuc

SEQ ID NO: 958222 - RNA, 19 nt, Artificial Sequence
  Description of Artificial Sequence: Synthetic oligonucleotide
aagcgccuaagagugagag

SEQ ID NO: 958223 - RNA, 19 nt, Artificial Sequence
  Description of Artificial Sequence: Synthetic oligonucleotide
gacugaaucacccaugaau

SEQ ID NO: 958224 - RNA, 19 nt, Artificial Sequence
  Description of Artificial Sequence: Synthetic oligonucleotide
  modified_base (2)..(2): a, c, u, g, unknown or other
cnguuuugaagacucccag

SEQ ID NO: 958225 - RNA, 19 nt, Artificial Sequence
  Description of Artificial Sequence: Synthetic oligonucleotide
auuuaugaagcaguauggu

SEQ ID NO: 958226 - RNA, 19 nt, Artificial Sequence
  Description of Artificial Sequence: Synthetic oligonucleotide
guggaagcgccuaagagug

SEQ ID NO: 958227 - RNA, 19 nt, Artificial Sequence
  Description of Artificial Sequence: Synthetic oligonucleotide
uguuaggccuuugaagagc

SEQ ID NO: 958228 - RNA, 19 nt, Artificial Sequence
  Description of Artificial Sequence: Synthetic oligonucleotide
uucagcaaacaaaauuauu

SEQ ID NO: 958229 - RNA, 19 nt, Artificial Sequence
  Description of Artificial Sequence: Synthetic oligonucleotide
cugaaucacccaugaauag

SEQ ID NO: 958230 - RNA, 19 nt, Artificial Sequence
  Description of Artificial Sequence: Synthetic oligonucleotide
aaggcuauccuggacucug

SEQ ID NO: 958231 - RNA, 19 nt, Artificial Sequence
  Description of Artificial Sequence: Synthetic oligonucleotide
guugaagcugguguggugc

SEQ ID NO: 958232 - RNA, 19 nt, Artificial Sequence
  Description of Artificial Sequence: Synthetic oligonucleotide
cuauuagagaaaaggcuga

SEQ ID NO: 958233 - RNA, 19 nt, Artificial Sequence
  Description of Artificial Sequence: Synthetic oligonucleotide
gcaucaguuaaagugaggc

SEQ ID NO: 958234 - RNA, 19 nt, Artificial Sequence
  Description of Artificial Sequence: Synthetic oligonucleotide
acgcaugcuggauuccggc

SEQ ID NO: 958235 - RNA, 19 nt, Artificial Sequence
  Description of Artificial Sequence: Synthetic oligonucleotide
agauuguuaggccuuugaa

SEQ ID NO: 958236 - RNA, 19 nt, Artificial Sequence
  Description of Artificial Sequence: Synthetic oligonucleotide
ugccucuaaacuuccucag

SEQ ID NO: 958237 - RNA, 19 nt, Artificial Sequence
  Description of Artificial Sequence: Synthetic oligonucleotide
aagguucagcugugaagag

SEQ ID NO: 958238 - RNA, 19 nt, Artificial Sequence
  Description of Artificial Sequence: Synthetic oligonucleotide
uauggcguuccuucuugag

SEQ ID NO: 958239 - RNA, 19 nt, Artificial Sequence
  Description of Artificial Sequence: Synthetic oligonucleotide
gaauagacugaaucaccca

SEQ ID NO: 958240 - RNA, 19 nt, Artificial Sequence
  Description of Artificial Sequence: Synthetic oligonucleotide
ugcaggguuaacagcacaa

SEQ ID NO: 958241 - RNA, 19 nt, Artificial Sequence
  Description of Artificial Sequence: Synthetic oligonucleotide
aaacuuuugcacaaucauu

SEQ ID NO: 958242 - RNA, 19 nt, Artificial Sequence
  Description of Artificial Sequence: Synthetic oligonucleotide
aagaggaauggguuacuua

SEQ ID NO: 958243 - RNA, 19 nt, Artificial Sequence
  Description of Artificial Sequence: Synthetic oligonucleotide
ggaacuugucagcagaaac

SEQ ID NO: 958244 - RNA, 19 nt, Artificial Sequence
  Description of Artificial Sequence: Synthetic oligonucleotide
caagguucagcugugaaga

SEQ ID NO: 958245 - RNA, 19 nt, Artificial Sequence
  Description of Artificial Sequence: Synthetic oligonucleotide
aguaugagcaugaguagca

SEQ ID NO: 958246 - RNA, 19 nt, Artificial Sequence
  Description of Artificial Sequence: Synthetic oligonucleotide
uggcguuccuucuugagau

SEQ ID NO: 958247 - RNA, 19 nt, Artificial Sequence
  Description of Artificial Sequence: Synthetic oligonucleotide
cucuauuagagaaaaggcu

SEQ ID NO: 958248 - RNA, 19 nt, Artificial Sequence
  Description of Artificial Sequence: Synthetic oligonucleotide
acuguccaacacccagucc

SEQ ID NO: 958249 - RNA, 19 nt, Artificial Sequence
  Description of Artificial Sequence: Synthetic oligonucleotide
uggaugaacaccgguguca

SEQ ID NO: 958250 - RNA, 19 nt, Artificial Sequence
  Description of Artificial Sequence: Synthetic oligonucleotide
agugagagacgcuccccgg

SEQ ID NO: 958251 - RNA, 19 nt, Artificial Sequence
  Description of Artificial Sequence: Synthetic oligonucleotide
auagcuaacuauccauuuu

SEQ ID NO: 958252 - RNA, 19 nt, Artificial Sequence
  Description of Artificial Sequence: Synthetic oligonucleotide
acgaaagcuccuucaccac

SEQ ID NO: 958253 - RNA, 19 nt, Artificial Sequence
  Description of Artificial Sequence: Synthetic oligonucleotide
auagcuauaaacaguccaa

SEQ ID NO: 958254 - RNA, 19 nt, Artificial Sequence
  Description of Artificial Sequence: Synthetic oligonucleotide
cugauacugggauauuguc

SEQ ID NO: 958255 - RNA, 19 nt, Artificial Sequence
  Description of Artificial Sequence: Synthetic oligonucleotide
aaaauacguucucuuucuu

SEQ ID NO: 958256 - RNA, 19 nt, Artificial Sequence
  Description of Artificial Sequence: Synthetic oligonucleotide
cccagaaaauauuucagug

SEQ ID NO: 958257 - RNA, 19 nt, Artificial Sequence
  Description of Artificial Sequence: Synthetic oligonucleotide
caguaugagcaugaguagc

SEQ ID NO: 958258 - RNA, 19 nt, Artificial Sequence
  Description of Artificial Sequence: Synthetic oligonucleotide
uuaggggacucagauucag

SEQ ID NO: 958259 - RNA, 19 nt, Artificial Sequence
  Description of Artificial Sequence: Synthetic oligonucleotide
gauuccagauuccagguau

SEQ ID NO: 958260 - RNA, 19 nt, Artificial Sequence
  Description of Artificial Sequence: Synthetic oligonucleotide
ccaugaauagcuaacuauc

SEQ ID NO: 958261 - RNA, 19 nt, Artificial Sequence
  Description of Artificial Sequence: Synthetic oligonucleotide
ucccgacaccgguagacgg

SEQ ID NO: 958262 - RNA, 19 nt, Artificial Sequence
  Description of Artificial Sequence: Synthetic oligonucleotide
auauuucaguguccguuca

SEQ ID NO: 958263 - RNA, 19 nt, Artificial Sequence
  Description of Artificial Sequence: Synthetic oligonucleotide
  modified_base (7)..(7): a, c, u, g, unknown or other
aguuucnguuuugaagacu

SEQ ID NO: 958264 - RNA, 19 nt, Artificial Sequence
  Description of Artificial Sequence: Synthetic oligonucleotide
gacggauauacuguccaac

SEQ ID NO: 958265 - RNA, 19 nt, Artificial Sequence
  Description of Artificial Sequence: Synthetic oligonucleotide
ugccaacggagauuuaaaa

SEQ ID NO: 958266 - RNA, 19 nt, Artificial Sequence
  Description of Artificial Sequence: Synthetic oligonucleotide
gauaaguuuuguucugcgu

SEQ ID NO: 958267 - RNA, 19 nt, Artificial Sequence
  Description of Artificial Sequence: Synthetic oligonucleotide
gugagagacgcuccccggg

SEQ ID NO: 958268 - RNA, 19 nt, Artificial Sequence
  Description of Artificial Sequence: Synthetic oligonucleotide
cauaucagaggucuuauau

SEQ ID NO: 958269 - RNA, 19 nt, Artificial Sequence
  Description of Artificial Sequence: Synthetic oligonucleotide
auucuguaccagguaggcg

SEQ ID NO: 958270 - RNA, 19 nt, Artificial Sequence
  Description of Artificial Sequence: Synthetic oligonucleotide
uucauaucagaggucuuau

SEQ ID NO: 958271 - RNA, 19 nt, Artificial Sequence
  Description of Artificial Sequence: Synthetic oligonucleotide
uuaaagugaggcgguauuu

SEQ ID NO: 958272 - RNA, 19 nt, Artificial Sequence
  Description of Artificial Sequence: Synthetic oligonucleotide
auucauaucagaggucuua

SEQ ID NO: 958273 - RNA, 19 nt, Artificial Sequence
  Description of Artificial Sequence: Synthetic oligonucleotide
uuggaugaacaccgguguc

SEQ ID NO: 958274 - RNA, 19 nt, Artificial Sequence
  Description of Artificial Sequence: Synthetic oligonucleotide
  modified_base (16)..(16): a, c, u, g, unknown or other
gagaugggcaguuucnguu

SEQ ID NO: 958275 - RNA, 19 nt, Artificial Sequence
  Description of Artificial Sequence: Synthetic oligonucleotide
uacuuuguacagucagguc

SEQ ID NO: 958276 - RNA, 19 nt, Artificial Sequence
  Description of Artificial Sequence: Synthetic oligonucleotide
uggucaaucucagggcagc

SEQ ID NO: 958277 - RNA, 19 nt, Artificial Sequence
  Description of Artificial Sequence: Synthetic oligonucleotide
gugacgaaagcuccuucac

SEQ ID NO: 958278 - RNA, 19 nt, Artificial Sequence
  Description of Artificial Sequence: Synthetic oligonucleotide
gggacucagauucaggguc

SEQ ID NO: 958279 - RNA, 19 nt, Artificial Sequence
  Description of Artificial Sequence: Synthetic oligonucleotide
uaaagugaggcgguauuuu

SEQ ID NO: 958280 - RNA, 19 nt, Artificial Sequence
  Description of Artificial Sequence: Synthetic oligonucleotide
cagaucccgacaccgguag

SEQ ID NO: 958281 - RNA, 19 nt, Artificial Sequence
  Description of Artificial Sequence: Synthetic oligonucleotide
gcuggauuccggcuuacag

SEQ ID NO: 958282 - RNA, 19 nt, Artificial Sequence
  Description of Artificial Sequence: Synthetic oligonucleotide
  modified_base (8)..(8): a, c, u, g, unknown or other
caguuucnguuuugaagac

SEQ ID NO: 958283 - RNA, 19 nt, Artificial Sequence
  Description of Artificial Sequence: Synthetic oligonucleotide
cuacugccugccaacggag

SEQ ID NO: 958284 - RNA, 19 nt, Artificial Sequence
  Description of Artificial Sequence: Synthetic oligonucleotide
acaauuggaugaacaccgg

SEQ ID NO: 958285 - RNA, 19 nt, Artificial Sequence
  Description of Artificial Sequence: Synthetic oligonucleotide
gaucccgacaccgguagac

SEQ ID NO: 958286 - RNA, 19 nt, Artificial Sequence
  Description of Artificial Sequence: Synthetic oligonucleotide
gcgccuaagagugagagac

SEQ ID NO: 958287 - RNA, 19 nt, Artificial Sequence
  Description of Artificial Sequence: Synthetic oligonucleotide
auuguccgugcagagguug

SEQ ID NO: 958288 - RNA, 19 nt, Artificial Sequence
  Description of Artificial Sequence: Synthetic oligonucleotide
accuacugccugccaacgg

SEQ ID NO: 958289 - RNA, 19 nt, Artificial Sequence
  Description of Artificial Sequence: Synthetic oligonucleotide
uuuucacugcuggaacugu

SEQ ID NO: 958290 - RNA, 19 nt, Artificial Sequence
  Description of Artificial Sequence: Synthetic oligonucleotide
agaccuaguccuuccaaua

SEQ ID NO: 958291 - RNA, 19 nt, Artificial Sequence
  Description of Artificial Sequence: Synthetic oligonucleotide
caccgguagacggauauac

SEQ ID NO: 958292 - RNA, 19 nt, Artificial Sequence
  Description of Artificial Sequence: Synthetic oligonucleotide
ggacucucgaaagagucag

SEQ ID NO: 958293 - RNA, 19 nt, Artificial Sequence
  Description of Artificial Sequence: Synthetic oligonucleotide
ccucuaaacuuccucagug

SEQ ID NO: 958294 - RNA, 19 nt, Artificial Sequence
  Description of Artificial Sequence: Synthetic oligonucleotide
uaggcguccagaucccgac

SEQ ID NO: 958295 - RNA, 19 nt, Artificial Sequence
  Description of Artificial Sequence: Synthetic oligonucleotide
ggauauuguccgugcagag

SEQ ID NO: 958296 - RNA, 19 nt, Artificial Sequence
  Description of Artificial Sequence: Synthetic oligonucleotide
gcaguaugagcaugaguag

SEQ ID NO: 958297 - RNA, 19 nt, Artificial Sequence
  Description of Artificial Sequence: Synthetic oligonucleotide
gaagaccuaguccuuccaa

SEQ ID NO: 958298 - RNA, 19 nt, Artificial Sequence
  Description of Artificial Sequence: Synthetic oligonucleotide
cugccucuaaacuuccuca

SEQ ID NO: 958299 - RNA, 19 nt, Artificial Sequence
  Description of Artificial Sequence: Synthetic oligonucleotide
gguagacggauauacuguc

SEQ ID NO: 958300 - RNA, 19 nt, Artificial Sequence
  Description of Artificial Sequence: Synthetic oligonucleotide
gguauggcguuccuucuug

SEQ ID NO: 958301 - RNA, 19 nt, Artificial Sequence
  Description of Artificial Sequence: Synthetic oligonucleotide
ucauaucagaggucuuaua

SEQ ID NO: 958302 - RNA, 19 nt, Artificial Sequence
  Description of Artificial Sequence: Synthetic oligonucleotide
guagacggauauacugucc

SEQ ID NO: 958303 - RNA, 19 nt, Artificial Sequence
  Description of Artificial Sequence: Synthetic oligonucleotide
caggguuaacagcacaaca

SEQ ID NO: 958304 - RNA, 19 nt, Artificial Sequence
  Description of Artificial Sequence: Synthetic oligonucleotide
cuuacaggauuuucauuaa

SEQ ID NO: 958305 - RNA, 19 nt, Artificial Sequence
  Description of Artificial Sequence: Synthetic oligonucleotide
aacaccggugucaggggug

SEQ ID NO: 958306 - RNA, 19 nt, Artificial Sequence
  Description of Artificial Sequence: Synthetic oligonucleotide
aguuaaagugaggcgguau

SEQ ID NO: 958307 - RNA, 19 nt, Artificial Sequence
  Description of Artificial Sequence: Synthetic oligonucleotide
ucacaacaacagauuguua

SEQ ID NO: 958308 - RNA, 19 nt, Artificial Sequence
  Description of Artificial Sequence: Synthetic oligonucleotide
ccgguagacggauauacug

SEQ ID NO: 958309 - RNA, 19 nt, Artificial Sequence
  Description of Artificial Sequence: Synthetic oligonucleotide
gacguggaagcgccuaaga

SEQ ID NO: 958310 - RNA, 19 nt, Artificial Sequence
  Description of Artificial Sequence: Synthetic oligonucleotide
caguaugguucagcaauag

SEQ ID NO: 958311 - RNA, 19 nt, Artificial Sequence
  Description of Artificial Sequence: Synthetic oligonucleotide
cacggaagccccacacagc

SEQ ID NO: 958312 - RNA, 19 nt, Artificial Sequence
  Description of Artificial Sequence: Synthetic oligonucleotide
agggguauuagaaggcuau

SEQ ID NO: 958313 - RNA, 19 nt, Artificial Sequence
  Description of Artificial Sequence: Synthetic oligonucleotide
ugcugucguggccaugggu

SEQ ID NO: 958314 - RNA, 19 nt, Artificial Sequence
  Description of Artificial Sequence: Synthetic oligonucleotide
uacugccugccaacggaga

SEQ ID NO: 958315 - RNA, 19 nt, Artificial Sequence
  Description of Artificial Sequence: Synthetic oligonucleotide
gaaacgcaugcuggauucc

SEQ ID NO: 958316 - RNA, 19 nt, Artificial Sequence
  Description of Artificial Sequence: Synthetic oligonucleotide
gcugucguggccaugggug

SEQ ID NO: 958317 - RNA, 19 nt, Artificial Sequence
  Description of Artificial Sequence: Synthetic oligonucleotide
acaccaccauggauauucc

SEQ ID NO: 958318 - RNA, 19 nt, Artificial Sequence
  Description of Artificial Sequence: Synthetic oligonucleotide
gccuuugaagagcuuuucc

SEQ ID NO: 958319 - RNA, 19 nt, Artificial Sequence
  Description of Artificial Sequence: Synthetic oligonucleotide
cagauuguuaggccuuuga

SEQ ID NO: 958320 - RNA, 19 nt, Artificial Sequence
  Description of Artificial Sequence: Synthetic oligonucleotide
aacagauuguuaggccuuu

SEQ ID NO: 958321 - RNA, 19 nt, Artificial Sequence
  Description of Artificial Sequence: Synthetic oligonucleotide
ugcguuugguaggucuuca

SEQ ID NO: 958322 - RNA, 19 nt, Artificial Sequence
  Description of Artificial Sequence: Synthetic oligonucleotide
cauggaagaucacuucuua

SEQ ID NO: 958323 - RNA, 19 nt, Artificial Sequence
  Description of Artificial Sequence: Synthetic oligonucleotide
caguaggacguggaagcgc

SEQ ID NO: 958324 - RNA, 19 nt, Artificial Sequence
  Description of Artificial Sequence: Synthetic oligonucleotide
aucccgacaccgguagacg

SEQ ID NO: 958325 - RNA, 19 nt, Artificial Sequence
  Description of Artificial Sequence: Synthetic oligonucleotide
cucaguaauugcaucaguu

SEQ ID NO: 958326 - RNA, 19 nt, Artificial Sequence
  Description of Artificial Sequence: Synthetic oligonucleotide
gagugacgaaagcuccuuc

SEQ ID NO: 958327 - RNA, 19 nt, Artificial Sequence
  Description of Artificial Sequence: Synthetic oligonucleotide
ugagugacgaaagcuccuu

SEQ ID NO: 958328 - RNA, 19 nt, Artificial Sequence
  Description of Artificial Sequence: Synthetic oligonucleotide
agacggauauacuguccaa

SEQ ID NO: 958329 - RNA, 19 nt, Artificial Sequence
  Description of Artificial Sequence: Synthetic oligonucleotide
cacaacaucuccucugacu

SEQ ID NO: 958330 - RNA, 19 nt, Artificial Sequence
  Description of Artificial Sequence: Synthetic oligonucleotide
auacuguccaacacccagu

SEQ ID NO: 958331 - RNA, 19 nt, Artificial Sequence
  Description of Artificial Sequence: Synthetic oligonucleotide
guccccuugcuguucuagc

SEQ ID NO: 958332 - RNA, 19 nt, Artificial Sequence
  Description of Artificial Sequence: Synthetic oligonucleotide
accacggaagccccacaca

SEQ ID NO: 958333 - RNA, 19 nt, Artificial Sequence
  Description of Artificial Sequence: Synthetic oligonucleotide
ucaucaguuaagggguauu

SEQ ID NO: 958334 - RNA, 19 nt, Artificial Sequence
  Description of Artificial Sequence: Synthetic oligonucleotide
guuaaagugaggcgguauu

SEQ ID NO: 958335 - RNA, 19 nt, Artificial Sequence
  Description of Artificial Sequence: Synthetic oligonucleotide
agaugucaauucuggcuuu

SEQ ID NO: 958336 - RNA, 19 nt, Artificial Sequence
  Description of Artificial Sequence: Synthetic oligonucleotide
uggaucgcuuuggaccuug

SEQ ID NO: 958337 - RNA, 19 nt, Artificial Sequence
  Description of Artificial Sequence: Synthetic oligonucleotide
cguuugguaggucuucagg

SEQ ID NO: 958338 - RNA, 19 nt, Artificial Sequence
  Description of Artificial Sequence: Synthetic oligonucleotide
gacaccgguagacggauau

SEQ ID NO: 958339 - RNA, 19 nt, Artificial Sequence
  Description of Artificial Sequence: Synthetic oligonucleotide
agcgccuaagagugagaga

SEQ ID NO: 958340 - RNA, 19 nt, Artificial Sequence
  Description of Artificial Sequence: Synthetic oligonucleotide
ugccugccaacggagauuu

SEQ ID NO: 958341 - RNA, 19 nt, Artificial Sequence
  Description of Artificial Sequence: Synthetic oligonucleotide
cucuaaacuuccucagugu

SEQ ID NO: 958342 - RNA, 19 nt, Artificial Sequence
  Description of Artificial Sequence: Synthetic oligonucleotide
uccggcuuacaggauuuuc

SEQ ID NO: 958343 - RNA, 19 nt, Artificial Sequence
  Description of Artificial Sequence: Synthetic oligonucleotide
agacugaaucacccaugaa

SEQ ID NO: 958344 - RNA, 19 nt, Artificial Sequence
  Description of Artificial Sequence: Synthetic oligonucleotide
uauuguccgugcagagguu

SEQ ID NO: 958345 - RNA, 19 nt, Artificial Sequence
  Description of Artificial Sequence: Synthetic oligonucleotide
gguuacuuagcagaguuau

SEQ ID NO: 958346 - RNA, 19 nt, Artificial Sequence
  Description of Artificial Sequence: Synthetic oligonucleotide
gaagcugguguggugcaaa

SEQ ID NO: 958347 - RNA, 19 nt, Artificial Sequence
  Description of Artificial Sequence: Synthetic oligonucleotide
aguccuuccaauagcuaua

SEQ ID NO: 958348 - RNA, 19 nt, Artificial Sequence
  Description of Artificial Sequence: Synthetic oligonucleotide
caccuacugccugccaacg

SEQ ID NO: 958349 - RNA, 19 nt, Artificial Sequence
  Description of Artificial Sequence: Synthetic oligonucleotide
cgaaagcuccuucaccacg

SEQ ID NO: 958350 - RNA, 19 nt, Artificial Sequence
  Description of Artificial Sequence: Synthetic oligonucleotide
acagauuguuaggccuuug

SEQ ID NO: 958351 - RNA, 19 nt, Artificial Sequence
  Description of Artificial Sequence: Synthetic oligonucleotide
gguugaagcugguguggug

SEQ ID NO: 958352 - RNA, 19 nt, Artificial Sequence
  Description of Artificial Sequence: Synthetic oligonucleotide
ccggacucucgaaagaguc

SEQ ID NO: 958353 - RNA, 19 nt, Artificial Sequence
  Description of Artificial Sequence: Synthetic oligonucleotide
cucucgaaagagucagaaa

SEQ ID NO: 958354 - RNA, 19 nt, Artificial Sequence
  Description of Artificial Sequence: Synthetic oligonucleotide
guaccagguaggcguccag

SEQ ID NO: 958355 - RNA, 19 nt, Artificial Sequence
  Description of Artificial Sequence: Synthetic oligonucleotide
auggguuacuuagcagagu

SEQ ID NO: 958356 - RNA, 19 nt, Artificial Sequence
  Description of Artificial Sequence: Synthetic oligonucleotide
agacgcuccccgggcaugg

SEQ ID NO: 958357 - RNA, 19 nt, Artificial Sequence
  Description of Artificial Sequence: Synthetic oligonucleotide
cugccaacggagauuuaaa

SEQ ID NO: 958358 - RNA, 19 nt, Artificial Sequence
  Description of Artificial Sequence: Synthetic oligonucleotide
agagacgcuccccgggcau

SEQ ID NO: 958359 - RNA, 19 nt, Artificial Sequence
  Description of Artificial Sequence: Synthetic oligonucleotide
gagagacgcuccccgggca

SEQ ID NO: 958360 - RNA, 19 nt, Artificial Sequence
  Description of Artificial Sequence: Synthetic oligonucleotide
aggacguggaagcgccuaa

SEQ ID NO: 958361 - RNA, 19 nt, Artificial Sequence
  Description of Artificial Sequence: Synthetic oligonucleotide
cuggagcuuuaucagguua

SEQ ID NO: 958362 - RNA, 19 nt, Artificial Sequence
  Description of Artificial Sequence: Synthetic oligonucleotide
guuaggccuuugaagagcu

SEQ ID NO: 958363 - RNA, 19 nt, Artificial Sequence
  Description of Artificial Sequence: Synthetic oligonucleotide
cuaaucauugggguccugu

SEQ ID NO: 958364 - RNA, 19 nt, Artificial Sequence
  Description of Artificial Sequence: Synthetic oligonucleotide
guauggcguuccuucuuga

SEQ ID NO: 958365 - RNA, 19 nt, Artificial Sequence
  Description of Artificial Sequence: Synthetic oligonucleotide
gucaaucucagggcagcca

SEQ ID NO: 958366 - RNA, 19 nt, Artificial Sequence
  Description of Artificial Sequence: Synthetic oligonucleotide
caauuggaugaacaccggu

SEQ ID NO: 958367 - RNA, 19 nt, Artificial Sequence
  Description of Artificial Sequence: Synthetic oligonucleotide
caucaguuaagggguauua

SEQ ID NO: 958368 - RNA, 19 nt, Artificial Sequence
  Description of Artificial Sequence: Synthetic oligonucleotide
cugggauauuguccgugca

SEQ ID NO: 958369 - RNA, 19 nt, Artificial Sequence
  Description of Artificial Sequence: Synthetic oligonucleotide
ggcgagggaagaccuaguc

SEQ ID NO: 958370 - RNA, 19 nt, Artificial Sequence
  Description of Artificial Sequence: Synthetic oligonucleotide
cugucguggccauggguga

SEQ ID NO: 958371 - RNA, 19 nt, Artificial Sequence
  Description of Artificial Sequence: Synthetic oligonucleotide
ccggcuuacaggauuuuca

SEQ ID NO: 958372 - RNA, 19 nt, Artificial Sequence
  Description of Artificial Sequence: Synthetic oligonucleotide
accgguagacggauauacu

SEQ ID NO: 958373 - RNA, 19 nt, Artificial Sequence
  Description of Artificial Sequence: Synthetic oligonucleotide
auuccggcuuacaggauuu

SEQ ID NO: 958374 - RNA, 19 nt, Artificial Sequence
  Description of Artificial Sequence: Synthetic oligonucleotide
gaucgcuuuggaccuuggu

SEQ ID NO: 958375 - RNA, 19 nt, Artificial Sequence
  Description of Artificial Sequence: Synthetic oligonucleotide
agggucucuauuagagaaa

SEQ ID NO: 958376 - RNA, 19 nt, Artificial Sequence
  Description of Artificial Sequence: Synthetic oligonucleotide
gcaccuacugccugccaac

SEQ ID NO: 958377 - RNA, 19 nt, Artificial Sequence
  Description of Artificial Sequence: Synthetic oligonucleotide
agaucccgacaccgguaga

SEQ ID NO: 958378 - RNA, 19 nt, Artificial Sequence
  Description of Artificial Sequence: Synthetic oligonucleotide
gacucagauucagggucuc

SEQ ID NO: 958379 - RNA, 19 nt, Artificial Sequence
  Description of Artificial Sequence: Synthetic oligonucleotide
uccagguauggcguuccuu

SEQ ID NO: 958380 - RNA, 19 nt, Artificial Sequence
  Description of Artificial Sequence: Synthetic oligonucleotide
acaccggugucagggguga

SEQ ID NO: 958381 - RNA, 19 nt, Artificial Sequence
  Description of Artificial Sequence: Synthetic oligonucleotide
gcguuugguaggucuucag

SEQ ID NO: 958382 - RNA, 19 nt, Artificial Sequence
  Description of Artificial Sequence: Synthetic oligonucleotide
ccuacugccugccaacgga

SEQ ID NO: 958383 - RNA, 19 nt, Artificial Sequence
  Description of Artificial Sequence: Synthetic oligonucleotide
guaggcguccagaucccga

SEQ ID NO: 958384 - RNA, 19 nt, Artificial Sequence
  Description of Artificial Sequence: Synthetic oligonucleotide
cugcugucguggccauggg

SEQ ID NO: 958385 - RNA, 19 nt, Artificial Sequence
  Description of Artificial Sequence: Synthetic oligonucleotide
gagacgcuccccgggcaug

SEQ ID NO: 958386 - RNA, 19 nt, Artificial Sequence
  Description of Artificial Sequence: Synthetic oligonucleotide
ucguggccaugggugauau

SEQ ID NO: 958387 - RNA, 19 nt, Artificial Sequence
  Description of Artificial Sequence: Synthetic oligonucleotide
ggguuaacagcacaacauu

SEQ ID NO: 958388 - RNA, 19 nt, Artificial Sequence
  Description of Artificial Sequence: Synthetic oligonucleotide
cccaugaauagcuaacuau

SEQ ID NO: 958389 - RNA, 19 nt, Artificial Sequence
  Description of Artificial Sequence: Synthetic oligonucleotide
ugucguggccaugggugau

SEQ ID NO: 958390 - RNA, 19 nt, Artificial Sequence
  Description of Artificial Sequence: Synthetic oligonucleotide
aaccugauacugggauauu

SEQ ID NO: 958391 - RNA, 19 nt, Artificial Sequence
  Description of Artificial Sequence: Synthetic oligonucleotide
ggucaaucucagggcagcc

SEQ ID NO: 958392 - RNA, 19 nt, Artificial Sequence
  Description of Artificial Sequence: Synthetic oligonucleotide
gacucccagagcggcugug

SEQ ID NO: 958393 - RNA, 19 nt, Artificial Sequence
  Description of Artificial Sequence: Synthetic oligonucleotide
gcaugaguagcagccggac

SEQ ID NO: 958394 - RNA, 19 nt, Artificial Sequence
  Description of Artificial Sequence: Synthetic oligonucleotide
ggacguggaagcgccuaag

SEQ ID NO: 958395 - RNA, 19 nt, Artificial Sequence
  Description of Artificial Sequence: Synthetic oligonucleotide
gcacuuggcuguacaauca

SEQ ID NO: 958396 - RNA, 19 nt, Artificial Sequence
  Description of Artificial Sequence: Synthetic oligonucleotide
ggugaagggcucacaacaa

SEQ ID NO: 958397 - RNA, 19 nt, Artificial Sequence
  Description of Artificial Sequence: Synthetic oligonucleotide
caccauggauauuccuuua

SEQ ID NO: 958398 - RNA, 19 nt, Artificial Sequence
  Description of Artificial Sequence: Synthetic oligonucleotide
cagccggacucucgaaaga

SEQ ID NO: 958399 - RNA, 19 nt, Artificial Sequence
  Description of Artificial Sequence: Synthetic oligonucleotide
gcuauccuggacucuggua

SEQ ID NO: 958400 - RNA, 19 nt, Artificial Sequence
  Description of Artificial Sequence: Synthetic oligonucleotide
cagaaacgcaugcuggauu

SEQ ID NO: 958401 - RNA, 19 nt, Artificial Sequence
  Description of Artificial Sequence: Synthetic oligonucleotide
gaguuauagcaaacacuuu

SEQ ID NO: 958402 - RNA, 19 nt, Artificial Sequence
  Description of Artificial Sequence: Synthetic oligonucleotide
gggacccaucauuuacaga

SEQ ID NO: 958403 - RNA, 19 nt, Artificial Sequence
  Description of Artificial Sequence: Synthetic oligonucleotide
cguggaagcgccuaagagu

SEQ ID NO: 958404 - RNA, 19 nt, Artificial Sequence
  Description of Artificial Sequence: Synthetic oligonucleotide
gugagugacgaaagcuccu

SEQ ID NO: 958405 - RNA, 19 nt, Artificial Sequence
  Description of Artificial Sequence: Synthetic oligonucleotide
gggguauuagaaggcuauc

SEQ ID NO: 958406 - RNA, 19 nt, Artificial Sequence
  Description of Artificial Sequence: Synthetic oligonucleotide
cagguauggcguuccuucu

SEQ ID NO: 958407 - RNA, 19 nt, Artificial Sequence
  Description of Artificial Sequence: Synthetic oligonucleotide
cgccuaagagugagagacg

SEQ ID NO: 958408 - RNA, 19 nt, Artificial Sequence
  Description of Artificial Sequence: Synthetic oligonucleotide
ggaucgcuuuggaccuugg

SEQ ID NO: 958409 - RNA, 19 nt, Artificial Sequence
  Description of Artificial Sequence: Synthetic oligonucleotide
ccugccaacggagauuuaa

SEQ ID NO: 958410 - RNA, 19 nt, Artificial Sequence
  Description of Artificial Sequence: Synthetic oligonucleotide
gcguccagaucccgacacc

SEQ ID NO: 958411 - RNA, 19 nt, Artificial Sequence
  Description of Artificial Sequence: Synthetic oligonucleotide
  modified_base (11)..(11): a, c, u, g, unknown or other
gggcaguuucnguuuugaa

SEQ ID NO: 958412 - RNA, 19 nt, Artificial Sequence
  Description of Artificial Sequence: Synthetic oligonucleotide
gguccuguggcucgcugcu

SEQ ID NO: 958413 - RNA, 19 nt, Artificial Sequence
  Description of Artificial Sequence: Synthetic oligonucleotide
acaccgguagacggauaua

SEQ ID NO: 958414 - RNA, 19 nt, Artificial Sequence
  Description of Artificial Sequence: Synthetic oligonucleotide
gcaguaugguucagcaaua

SEQ ID NO: 958415 - RNA, 19 nt, Artificial Sequence
  Description of Artificial Sequence: Synthetic oligonucleotide
caugcacacucagaaguuu

SEQ ID NO: 958416 - RNA, 19 nt, Artificial Sequence
  Description of Artificial Sequence: Synthetic oligonucleotide
cccagagcggcugugugca

SEQ ID NO: 958417 - RNA, 19 nt, Artificial Sequence
  Description of Artificial Sequence: Synthetic oligonucleotide
cccacaucaccaggugcgc

SEQ ID NO: 958418 - RNA, 19 nt, Artificial Sequence
  Description of Artificial Sequence: Synthetic oligonucleotide
caguuaaagugaggcggua

SEQ ID NO: 958419 - RNA, 19 nt, Artificial Sequence
  Description of Artificial Sequence: Synthetic oligonucleotide
gggucaagccugacaccac

SEQ ID NO: 958420 - RNA, 19 nt, Artificial Sequence
  Description of Artificial Sequence: Synthetic oligonucleotide
gguagucuccucaguaauu

SEQ ID NO: 958421 - RNA, 19 nt, Artificial Sequence
  Description of Artificial Sequence: Synthetic oligonucleotide
cccgacaccgguagacgga

SEQ ID NO: 958422 - RNA, 19 nt, Artificial Sequence
  Description of Artificial Sequence: Synthetic oligonucleotide
cgguagacggauauacugu

SEQ ID NO: 958423 - RNA, 19 nt, Artificial Sequence
  Description of Artificial Sequence: Synthetic oligonucleotide
ggcuauccuggacucuggu

SEQ ID NO: 958424 - RNA, 19 nt, Artificial Sequence
  Description of Artificial Sequence: Synthetic oligonucleotide
ccuaagagugagagacgcu

SEQ ID NO: 958425 - RNA, 19 nt, Artificial Sequence
  Description of Artificial Sequence: Synthetic oligonucleotide
ccgugcagagguugaagcu

SEQ ID NO: 958426 - RNA, 19 nt, Artificial Sequence
  Description of Artificial Sequence: Synthetic oligonucleotide
ccucaguaauugcaucagu

SEQ ID NO: 958427 - RNA, 19 nt, Artificial Sequence
  Description of Artificial Sequence: Synthetic oligonucleotide
caccggugucaggggugag

SEQ ID NO: 958428 - RNA, 19 nt, Artificial Sequence
  Description of Artificial Sequence: Synthetic oligonucleotide
guaggacguggaagcgccu

SEQ ID NO: 958429 - RNA, 19 nt, Artificial Sequence
  Description of Artificial Sequence: Synthetic oligonucleotide
ccgggcauggaagaucacu

SEQ ID NO: 958430 - RNA, 19 nt, Artificial Sequence
  Description of Artificial Sequence: Synthetic oligonucleotide
cggcuuacaggauuuucau

SEQ ID NO: 958431 - RNA, 19 nt, Artificial Sequence
  Description of Artificial Sequence: Synthetic oligonucleotide
ccuucccuugacucuuuau

SEQ ID NO: 958432 - RNA, 19 nt, Artificial Sequence
  Description of Artificial Sequence: Synthetic oligonucleotide
gggcgagggaagaccuagu

SEQ ID NO: 958433 - RNA, 19 nt, Artificial Sequence
  Description of Artificial Sequence: Synthetic oligonucleotide
ccgacaccgguagacggau

SEQ ID NO: 958434 - RNA, 19 nt, Artificial Sequence
  Description of Artificial Sequence: Synthetic oligonucleotide
cuggaucgcuuuggaccuu

SEQ ID NO: 958435 - RNA, 19 nt, Artificial Sequence
  Description of Artificial Sequence: Synthetic oligonucleotide
cgacaccgguagacggaua

SEQ ID NO: 958436 - RNA, 19 nt, Artificial Sequence
  Description of Artificial Sequence: Synthetic oligonucleotide
gccugccaacggagauuua

SEQ ID NO: 958437 - RNA, 19 nt, Artificial Sequence
  Description of Artificial Sequence: Synthetic oligonucleotide
aaugcgguuaccuacugcc

SEQ ID NO: 958438 - RNA, 19 nt, Artificial Sequence
  Description of Artificial Sequence: Synthetic oligonucleotide
ucaagauccaaacagaagc

SEQ ID NO: 958439 - RNA, 19 nt, Artificial Sequence
  Description of Artificial Sequence: Synthetic oligonucleotide
aaaggaucaccacagcucc

SEQ ID NO: 958440 - RNA, 19 nt, Artificial Sequence
  Description of Artificial Sequence: Synthetic oligonucleotide
ugagacuaagaaaugaagg

SEQ ID NO: 958441 - RNA, 19 nt, Artificial Sequence
  Description of Artificial Sequence: Synthetic oligonucleotide
ucaauugucaucuuggugu

SEQ ID NO: 958442 - RNA, 19 nt, Artificial Sequence
  Description of Artificial Sequence: Synthetic oligonucleotide
aaugcuuguucuuagaggu

SEQ ID NO: 958443 - RNA, 19 nt, Artificial Sequence
  Description of Artificial Sequence: Synthetic oligonucleotide
aauacucacuaacagucac

SEQ ID NO: 958444 - RNA, 19 nt, Artificial Sequence
  Description of Artificial Sequence: Synthetic oligonucleotide
ucuaccuucccauagaggc

SEQ ID NO: 958445 - RNA, 19 nt, Artificial Sequence
  Description of Artificial Sequence: Synthetic oligonucleotide
aaccgaaagaaaucggggc

SEQ ID NO: 958446 - RNA, 19 nt, Artificial Sequence
  Description of Artificial Sequence: Synthetic oligonucleotide
gagacuaagaaaugaaggc

SEQ ID NO: 958447 - RNA, 19 nt, Artificial Sequence
  Description of Artificial Sequence: Synthetic oligonucleotide
uucccaacuaaauucaaag

SEQ ID NO: 958448 - RNA, 19 nt, Artificial Sequence
  Description of Artificial Sequence: Synthetic oligonucleotide
aaaucggggccguugaagg

SEQ ID NO: 958449 - RNA, 19 nt, Artificial Sequence
  Description of Artificial Sequence: Synthetic oligonucleotide
gaagcguacacguaagucc

SEQ ID NO: 958450 - RNA, 19 nt, Artificial Sequence
  Description of Artificial Sequence: Synthetic oligonucleotide
gacauuaacacagucuuag

SEQ ID NO: 958451 - RNA, 19 nt, Artificial Sequence
  Description of Artificial Sequence: Synthetic oligonucleotide
accgaaagaaaucggggcc

SEQ ID NO: 958452 - RNA, 19 nt, Artificial Sequence
  Description of Artificial Sequence: Synthetic oligonucleotide
aaagcucacauauugguuu

SEQ ID NO: 958453 - RNA, 19 nt, Artificial Sequence
  Description of Artificial Sequence: Synthetic oligonucleotide
uguucugagauguagcacu

SEQ ID NO: 958454 - RNA, 19 nt, Artificial Sequence
  Description of Artificial Sequence: Synthetic oligonucleotide
gaugacuaguuccuugggg

SEQ ID NO: 958455 - RNA, 19 nt, Artificial Sequence
  Description of Artificial Sequence: Synthetic oligonucleotide
agacuaagaaaugaaggcg

SEQ ID NO: 958456 - RNA, 19 nt, Artificial Sequence
  Description of Artificial Sequence: Synthetic oligonucleotide
ugucuuagggcucuuggcc

SEQ ID NO: 958457 - RNA, 19 nt, Artificial Sequence
  Description of Artificial Sequence: Synthetic oligonucleotide
uccacggucguuaagaaau

SEQ ID NO: 958458 - RNA, 19 nt, Artificial Sequence
  Description of Artificial Sequence: Synthetic oligonucleotide
uuauacacucuaaagcagu

SEQ ID NO: 958459 - RNA, 19 nt, Artificial Sequence
  Description of Artificial Sequence: Synthetic oligonucleotide
gauagcgucauaguggagc

SEQ ID NO: 958460 - RNA, 19 nt, Artificial Sequence
  Description of Artificial Sequence: Synthetic oligonucleotide
ucaaagcucacauauuggu

SEQ ID NO: 958461 - RNA, 19 nt, Artificial Sequence
  Description of Artificial Sequence: Synthetic oligonucleotide
uuggauaggcaauuuaacu

SEQ ID NO: 958462 - RNA, 19 nt, Artificial Sequence
  Description of Artificial Sequence: Synthetic oligonucleotide
uuucuaugcuccacgagug

SEQ ID NO: 958463 - RNA, 19 nt, Artificial Sequence
  Description of Artificial Sequence: Synthetic oligonucleotide
gugaaaccgaaagaaaucg

SEQ ID NO: 958464 - RNA, 19 nt, Artificial Sequence
  Description of Artificial Sequence: Synthetic oligonucleotide
acagucuuaguuucugagg

SEQ ID NO: 958465 - RNA, 19 nt, Artificial Sequence
  Description of Artificial Sequence: Synthetic oligonucleotide
uuaacacagucuuaguuuc

SEQ ID NO: 958466 - RNA, 19 nt, Artificial Sequence
  Description of Artificial Sequence: Synthetic oligonucleotide
auaccggccacccuuguac

SEQ ID NO: 958467 - RNA, 19 nt, Artificial Sequence
  Description of Artificial Sequence: Synthetic oligonucleotide
auaguggagcuccaccacc

SEQ ID NO: 958468 - RNA, 19 nt, Artificial Sequence
  Description of Artificial Sequence: Synthetic oligonucleotide
ugaggcguggcuaucaaac

SEQ ID NO: 958469 - RNA, 19 nt, Artificial Sequence
  Description of Artificial Sequence: Synthetic oligonucleotide
uugucaaugaagcguacac

SEQ ID NO: 958470 - RNA, 19 nt, Artificial Sequence
  Description of Artificial Sequence: Synthetic oligonucleotide
agcgucauaguggagcucc

SEQ ID NO: 958471 - RNA, 19 nt, Artificial Sequence
  Description of Artificial Sequence: Synthetic oligonucleotide
acugucccgacucagaagu

SEQ ID NO: 958472 - RNA, 19 nt, Artificial Sequence
  Description of Artificial Sequence: Synthetic oligonucleotide
augucuuagggcucuuggc

SEQ ID NO: 958473 - RNA, 19 nt, Artificial Sequence
  Description of Artificial Sequence: Synthetic oligonucleotide
ugggaaacagguuguaggc

SEQ ID NO: 958474 - RNA, 19 nt, Artificial Sequence
  Description of Artificial Sequence: Synthetic oligonucleotide
uguucuuagagguugcuuu

SEQ ID NO: 958475 - RNA, 19 nt, Artificial Sequence
  Description of Artificial Sequence: Synthetic oligonucleotide
agacgugcgagugaaaccg

SEQ ID NO: 958476 - RNA, 19 nt, Artificial Sequence
  Description of Artificial Sequence: Synthetic oligonucleotide
gaugagagcuaguggaggc

SEQ ID NO: 958477 - RNA, 19 nt, Artificial Sequence
  Description of Artificial Sequence: Synthetic oligonucleotide
uuguaccaaacccugacuc

SEQ ID NO: 958478 - RNA, 19 nt, Artificial Sequence
  Description of Artificial Sequence: Synthetic oligonucleotide
ugucaaugaagcguacacg

SEQ ID NO: 958479 - RNA, 19 nt, Artificial Sequence
  Description of Artificial Sequence: Synthetic oligonucleotide
ucucacgcuuucuagaacu

SEQ ID NO: 958480 - RNA, 19 nt, Artificial Sequence
  Description of Artificial Sequence: Synthetic oligonucleotide
auuggauaggcaauuuaac

SEQ ID NO: 958481 - RNA, 19 nt, Artificial Sequence
  Description of Artificial Sequence: Synthetic oligonucleotide
uggauaggcaauuuaacuu

SEQ ID NO: 958482 - RNA, 19 nt, Artificial Sequence
  Description of Artificial Sequence: Synthetic oligonucleotide
agugaaaccgaaagaaauc

SEQ ID NO: 958483 - RNA, 19 nt, Artificial Sequence
  Description of Artificial Sequence: Synthetic oligonucleotide
cugaaaguauugccgaugc

SEQ ID NO: 958484 - RNA, 19 nt, Artificial Sequence
  Description of Artificial Sequence: Synthetic oligonucleotide
ucguuaagaaaucuuucuc

SEQ ID NO: 958485 - RNA, 19 nt, Artificial Sequence
  Description of Artificial Sequence: Synthetic oligonucleotide
aaagaaaucggggccguug

SEQ ID NO: 958486 - RNA, 19 nt, Artificial Sequence
  Description of Artificial Sequence: Synthetic oligonucleotide
guaggcaauacucacuaac

SEQ ID NO: 958487 - RNA, 19 nt, Artificial Sequence
  Description of Artificial Sequence: Synthetic oligonucleotide
ucccaacuaaauucaaagc

SEQ ID NO: 958488 - RNA, 19 nt, Artificial Sequence
  Description of Artificial Sequence: Synthetic oligonucleotide
aggcguuucuaccucaguc

SEQ ID NO: 958489 - RNA, 19 nt, Artificial Sequence
  Description of Artificial Sequence: Synthetic oligonucleotide
aacuaaauucaaagcucac

SEQ ID NO: 958490 - RNA, 19 nt, Artificial Sequence
  Description of Artificial Sequence: Synthetic oligonucleotide
ggauaggcaauuuaacuug

SEQ ID NO: 958491 - RNA, 19 nt, Artificial Sequence
  Description of Artificial Sequence: Synthetic oligonucleotide
acuaacagucacaaugcgg

SEQ ID NO: 958492 - RNA, 19 nt, Artificial Sequence
  Description of Artificial Sequence: Synthetic oligonucleotide
aagaaaucggggccguuga

SEQ ID NO: 958493 - RNA, 19 nt, Artificial Sequence
  Description of Artificial Sequence: Synthetic oligonucleotide
aaaguauugccgaugcccu

SEQ ID NO: 958494 - RNA, 19 nt, Artificial Sequence
  Description of Artificial Sequence: Synthetic oligonucleotide
aaugaagcguacacguaag

SEQ ID NO: 958495 - RNA, 19 nt, Artificial Sequence
  Description of Artificial Sequence: Synthetic oligonucleotide
uuagagaguugacccgggg

SEQ ID NO: 958496 - RNA, 19 nt, Artificial Sequence
  Description of Artificial Sequence: Synthetic oligonucleotide
auuauacacucuaaagcag

SEQ ID NO: 958497 - RNA, 19 nt, Artificial Sequence
  Description of Artificial Sequence: Synthetic oligonucleotide
ggaucaugggaauagugag

SEQ ID NO: 958498 - RNA, 19 nt, Artificial Sequence
  Description of Artificial Sequence: Synthetic oligonucleotide
uucuaccuucccauagagg

SEQ ID NO: 958499 - RNA, 19 nt, Artificial Sequence
  Description of Artificial Sequence: Synthetic oligonucleotide
ugaugagagcuaguggagg

SEQ ID NO: 958500 - RNA, 19 nt, Artificial Sequence
  Description of Artificial Sequence: Synthetic oligonucleotide
uuaacuugucuugaacucu

SEQ ID NO: 958501 - RNA, 19 nt, Artificial Sequence
  Description of Artificial Sequence: Synthetic oligonucleotide
cacgcuuucuagaacucgg

SEQ ID NO: 958502 - RNA, 19 nt, Artificial Sequence
  Description of Artificial Sequence: Synthetic oligonucleotide
uggaucaaugggaugacua

SEQ ID NO: 958503 - RNA, 19 nt, Artificial Sequence
  Description of Artificial Sequence: Synthetic oligonucleotide
ugcgguuaccuacugccag

SEQ ID NO: 958504 - RNA, 19 nt, Artificial Sequence
  Description of Artificial Sequence: Synthetic oligonucleotide
aaucggggccguugaaggg

SEQ ID NO: 958505 - RNA, 19 nt, Artificial Sequence
  Description of Artificial Sequence: Synthetic oligonucleotide
ugagcguggggucaacacc

SEQ ID NO: 958506 - RNA, 19 nt, Artificial Sequence
  Description of Artificial Sequence: Synthetic oligonucleotide
acuaaauucaaagcucaca

SEQ ID NO: 958507 - RNA, 19 nt, Artificial Sequence
  Description of Artificial Sequence: Synthetic oligonucleotide
ugguguuguaauaccggcc

SEQ ID NO: 958508 - RNA, 19 nt, Artificial Sequence
  Description of Artificial Sequence: Synthetic oligonucleotide
cuuucucacucuuugccac

SEQ ID NO: 958509 - RNA, 19 nt, Artificial Sequence
  Description of Artificial Sequence: Synthetic oligonucleotide
gauguagcacuggagauuc

SEQ ID NO: 958510 - RNA, 19 nt, Artificial Sequence
  Description of Artificial Sequence: Synthetic oligonucleotide
uuaagaaaucuuucuccuc

SEQ ID NO: 958511 - RNA, 19 nt, Artificial Sequence
  Description of Artificial Sequence: Synthetic oligonucleotide
gugcgagugaaaccgaaag

SEQ ID NO: 958512 - RNA, 19 nt, Artificial Sequence
  Description of Artificial Sequence: Synthetic oligonucleotide
cuugacacugucccgacuc

SEQ ID NO: 958513 - RNA, 19 nt, Artificial Sequence
  Description of Artificial Sequence: Synthetic oligonucleotide
ugcgagugaaaccgaaaga

SEQ ID NO: 958514 - RNA, 19 nt, Artificial Sequence
  Description of Artificial Sequence: Synthetic oligonucleotide
caucaacccuuccuuaucc

SEQ ID NO: 958515 - RNA, 19 nt, Artificial Sequence
  Description of Artificial Sequence: Synthetic oligonucleotide
ucuaugcuccacgagugag

SEQ ID NO: 958516 - RNA, 19 nt, Artificial Sequence
  Description of Artificial Sequence: Synthetic oligonucleotide
uuggcacccaguccuaagc

SEQ ID NO: 958517 - RNA, 19 nt, Artificial Sequence
  Description of Artificial Sequence: Synthetic oligonucleotide
auagaggccccggaaaggg

SEQ ID NO: 958518 - RNA, 19 nt, Artificial Sequence
  Description of Artificial Sequence: Synthetic oligonucleotide
augaaggcguuucuaccuc

SEQ ID NO: 958519 - RNA, 19 nt, Artificial Sequence
  Description of Artificial Sequence: Synthetic oligonucleotide
gcagauagcgucauagugg

SEQ ID NO: 958520 - RNA, 19 nt, Artificial Sequence
  Description of Artificial Sequence: Synthetic oligonucleotide
uacacguaagucccugugu

SEQ ID NO: 958521 - RNA, 19 nt, Artificial Sequence
  Description of Artificial Sequence: Synthetic oligonucleotide
gaagguuugcucacguggc

SEQ ID NO: 958522 - RNA, 19 nt, Artificial Sequence
  Description of Artificial Sequence: Synthetic oligonucleotide
cauucaagauccaaacaga

SEQ ID NO: 958523 - RNA, 19 nt, Artificial Sequence
  Description of Artificial Sequence: Synthetic oligonucleotide
agucgucccaccuuuccag

SEQ ID NO: 958524 - RNA, 19 nt, Artificial Sequence
  Description of Artificial Sequence: Synthetic oligonucleotide
cacguacuggcagauagcg

SEQ ID NO: 958525 - RNA, 19 nt, Artificial Sequence
  Description of Artificial Sequence: Synthetic oligonucleotide
gaaaucggggccguugaag

SEQ ID NO: 958526 - RNA, 19 nt, Artificial Sequence
  Description of Artificial Sequence: Synthetic oligonucleotide
aucuguccgacacacacaa

SEQ ID NO: 958527 - RNA, 19 nt, Artificial Sequence
  Description of Artificial Sequence: Synthetic oligonucleotide
gaagucgucccaccuuucc

SEQ ID NO: 958528 - RNA, 19 nt, Artificial Sequence
  Description of Artificial Sequence: Synthetic oligonucleotide
gugguugccuccgagagcc

SEQ ID NO: 958529 - RNA, 19 nt, Artificial Sequence
  Description of Artificial Sequence: Synthetic oligonucleotide
cuucuaccuucccauagag

SEQ ID NO: 958530 - RNA, 19 nt, Artificial Sequence
  Description of Artificial Sequence: Synthetic oligonucleotide
guuaccuacugccagccga

SEQ ID NO: 958531 - RNA, 19 nt, Artificial Sequence
  Description of Artificial Sequence: Synthetic oligonucleotide
cuggcagauagcgucauag

SEQ ID NO: 958532 - RNA, 19 nt, Artificial Sequence
  Description of Artificial Sequence: Synthetic oligonucleotide
cagucuuaguuucugagga

SEQ ID NO: 958533 - RNA, 19 nt, Artificial Sequence
  Description of Artificial Sequence: Synthetic oligonucleotide
ugggaugacuaguuccuug

SEQ ID NO: 958534 - RNA, 19 nt, Artificial Sequence
  Description of Artificial Sequence: Synthetic oligonucleotide
uacucacuaacagucacaa

SEQ ID NO: 958535 - RNA, 19 nt, Artificial Sequence
  Description of Artificial Sequence: Synthetic oligonucleotide
ggccuuagagaguugaccc

SEQ ID NO: 958536 - RNA, 19 nt, Artificial Sequence
  Description of Artificial Sequence: Synthetic oligonucleotide
guuucuaugcuccacgagu

SEQ ID NO: 958537 - RNA, 19 nt, Artificial Sequence
  Description of Artificial Sequence: Synthetic oligonucleotide
ucacgcuuucuagaacucg

SEQ ID NO: 958538 - RNA, 19 nt, Artificial Sequence
  Description of Artificial Sequence: Synthetic oligonucleotide
gacuugacugaaaguauug

SEQ ID NO: 958539 - RNA, 19 nt, Artificial Sequence
  Description of Artificial Sequence: Synthetic oligonucleotide
ucuaaagcagugguccaca

SEQ ID NO: 958540 - RNA, 19 nt, Artificial Sequence
  Description of Artificial Sequence: Synthetic oligonucleotide
gcaauacucacuaacaguc

SEQ ID NO: 958541 - RNA, 19 nt, Artificial Sequence
  Description of Artificial Sequence: Synthetic oligonucleotide
aagucgucccaccuuucca

SEQ ID NO: 958542 - RNA, 19 nt, Artificial Sequence
  Description of Artificial Sequence: Synthetic oligonucleotide
gggaugacuaguuccuugg

SEQ ID NO: 958543 - RNA, 19 nt, Artificial Sequence
  Description of Artificial Sequence: Synthetic oligonucleotide
ugaagcguacacguaaguc

SEQ ID NO: 958544 - RNA, 19 nt, Artificial Sequence
  Description of Artificial Sequence: Synthetic oligonucleotide
cuaugcuccacgagugagc

SEQ ID NO: 958545 - RNA, 19 nt, Artificial Sequence
  Description of Artificial Sequence: Synthetic oligonucleotide
ucucucacgcuuucuagaa

SEQ ID NO: 958546 - RNA, 19 nt, Artificial Sequence
  Description of Artificial Sequence: Synthetic oligonucleotide
cuuagagaguugacccggg

SEQ ID NO: 958547 - RNA, 19 nt, Artificial Sequence
  Description of Artificial Sequence: Synthetic oligonucleotide
augagagcuaguggaggcc

SEQ ID NO: 958548 - RNA, 19 nt, Artificial Sequence
  Description of Artificial Sequence: Synthetic oligonucleotide
acugaaaguauugccgaug

SEQ ID NO: 958549 - RNA, 19 nt, Artificial Sequence
  Description of Artificial Sequence: Synthetic oligonucleotide
cacacgacggcccucuccc

SEQ ID NO: 958550 - RNA, 19 nt, Artificial Sequence
  Description of Artificial Sequence: Synthetic oligonucleotide
ugugccaucucuggggucu

SEQ ID NO: 958551 - RNA, 19 nt, Artificial Sequence
  Description of Artificial Sequence: Synthetic oligonucleotide
ggcagauagcgucauagug

SEQ ID NO: 958552 - RNA, 19 nt, Artificial Sequence
  Description of Artificial Sequence: Synthetic oligonucleotide
uggccuuagagaguugacc

SEQ ID NO: 958553 - RNA, 19 nt, Artificial Sequence
  Description of Artificial Sequence: Synthetic oligonucleotide
cuaccuucccauagaggcc

SEQ ID NO: 958554 - RNA, 19 nt, Artificial Sequence
  Description of Artificial Sequence: Synthetic oligonucleotide
gguguuguaauaccggcca

SEQ ID NO: 958555 - RNA, 19 nt, Artificial Sequence
  Description of Artificial Sequence: Synthetic oligonucleotide
ugucagucgccuccgggca

SEQ ID NO: 958556 - RNA, 19 nt, Artificial Sequence
  Description of Artificial Sequence: Synthetic oligonucleotide
gagguucgcugucuguucc

SEQ ID NO: 958557 - RNA, 19 nt, Artificial Sequence
  Description of Artificial Sequence: Synthetic oligonucleotide
ucaaugaagcguacacgua

SEQ ID NO: 958558 - RNA, 19 nt, Artificial Sequence
  Description of Artificial Sequence: Synthetic oligonucleotide
uuaccuacugccagccgaa

SEQ ID NO: 958559 - RNA, 19 nt, Artificial Sequence
  Description of Artificial Sequence: Synthetic oligonucleotide
caaugaagcguacacguaa

SEQ ID NO: 958560 - RNA, 19 nt, Artificial Sequence
  Description of Artificial Sequence: Synthetic oligonucleotide
acauuaacacagucuuagu

SEQ ID NO: 958561 - RNA, 19 nt, Artificial Sequence
  Description of Artificial Sequence: Synthetic oligonucleotide
gacuaagaaaugaaggcgu

SEQ ID NO: 958562 - RNA, 19 nt, Artificial Sequence
  Description of Artificial Sequence: Synthetic oligonucleotide
uucuaugcuccacgaguga

SEQ ID NO: 958563 - RNA, 19 nt, Artificial Sequence
  Description of Artificial Sequence: Synthetic oligonucleotide
ucugcggaguguuuccgcu

SEQ ID NO: 958564 - RNA, 19 nt, Artificial Sequence
  Description of Artificial Sequence: Synthetic oligonucleotide
uggagauucuauaguguuu

SEQ ID NO: 958565 - RNA, 19 nt, Artificial Sequence
  Description of Artificial Sequence: Synthetic oligonucleotide
acaccaucugacauuaaca

SEQ ID NO: 958566 - RNA, 19 nt, Artificial Sequence
  Description of Artificial Sequence: Synthetic oligonucleotide
gucguuaagaaaucuuucu

SEQ ID NO: 958567 - RNA, 19 nt, Artificial Sequence
  Description of Artificial Sequence: Synthetic oligonucleotide
uguccgacacacacaagua

SEQ ID NO: 958568 - RNA, 19 nt, Artificial Sequence
  Description of Artificial Sequence: Synthetic oligonucleotide
aagcucacauauugguuuu

SEQ ID NO: 958569 - RNA, 19 nt, Artificial Sequence
  Description of Artificial Sequence: Synthetic oligonucleotide
uagagguugcuuucucacu

SEQ ID NO: 958570 - RNA, 19 nt, Artificial Sequence
  Description of Artificial Sequence: Synthetic oligonucleotide
cagacgugcgagugaaacc

SEQ ID NO: 958571 - RNA, 19 nt, Artificial Sequence
  Description of Artificial Sequence: Synthetic oligonucleotide
gguuguaggcaauacucac

SEQ ID NO: 958572 - RNA, 19 nt, Artificial Sequence
  Description of Artificial Sequence: Synthetic oligonucleotide
acacguaagucccugugua

SEQ ID NO: 958573 - RNA, 19 nt, Artificial Sequence
  Description of Artificial Sequence: Synthetic oligonucleotide
aaagaaagauaugggccuu

SEQ ID NO: 958574 - RNA, 19 nt, Artificial Sequence
  Description of Artificial Sequence: Synthetic oligonucleotide
ugggaauagugagcguggg

SEQ ID NO: 958575 - RNA, 19 nt, Artificial Sequence
  Description of Artificial Sequence: Synthetic oligonucleotide
cuagaacucggccuucauc

SEQ ID NO: 958576 - RNA, 19 nt, Artificial Sequence
  Description of Artificial Sequence: Synthetic oligonucleotide
uucugagauguagcacugg

SEQ ID NO: 958577 - RNA, 19 nt, Artificial Sequence
  Description of Artificial Sequence: Synthetic oligonucleotide
cacguaagucccuguguag

SEQ ID NO: 958578 - RNA, 19 nt, Artificial Sequence
  Description of Artificial Sequence: Synthetic oligonucleotide
cacgacuugacugaaagua

SEQ ID NO: 958579 - RNA, 19 nt, Artificial Sequence
  Description of Artificial Sequence: Synthetic oligonucleotide
uguagcacuggagauucua

SEQ ID NO: 958580 - RNA, 19 nt, Artificial Sequence
  Description of Artificial Sequence: Synthetic oligonucleotide
gagcuaguggaggccaagg

SEQ ID NO: 958581 - RNA, 19 nt, Artificial Sequence
  Description of Artificial Sequence: Synthetic oligonucleotide
uggaagguuugcucacgug

SEQ ID NO: 958582 - RNA, 19 nt, Artificial Sequence
  Description of Artificial Sequence: Synthetic oligonucleotide
uaagucccuguguagccaa

SEQ ID NO: 958583 - RNA, 19 nt, Artificial Sequence
  Description of Artificial Sequence: Synthetic oligonucleotide
gugaugagagcuaguggag

SEQ ID NO: 958584 - RNA, 19 nt, Artificial Sequence
  Description of Artificial Sequence: Synthetic oligonucleotide
guccgacacacacaaguac

SEQ ID NO: 958585 - RNA, 19 nt, Artificial Sequence
  Description of Artificial Sequence: Synthetic oligonucleotide
aaggcguuucuaccucagu

SEQ ID NO: 958586 - RNA, 19 nt, Artificial Sequence
  Description of Artificial Sequence: Synthetic oligonucleotide
ucacgacuugacugaaagu

SEQ ID NO: 958587 - RNA, 19 nt, Artificial Sequence
  Description of Artificial Sequence: Synthetic oligonucleotide
uaugggccuuugaaagcca

SEQ ID NO: 958588 - RNA, 19 nt, Artificial Sequence
  Description of Artificial Sequence: Synthetic oligonucleotide
ugcggaguguuuccgcuuc

SEQ ID NO: 958589 - RNA, 19 nt, Artificial Sequence
  Description of Artificial Sequence: Synthetic oligonucleotide
aacucugagcagggaaaug

SEQ ID NO: 958590 - RNA, 19 nt, Artificial Sequence
  Description of Artificial Sequence: Synthetic oligonucleotide
ucaucucaguucccaacua

SEQ ID NO: 958591 - RNA, 19 nt, Artificial Sequence
  Description of Artificial Sequence: Synthetic oligonucleotide
uuggccuuagagaguugac

SEQ ID NO: 958592 - RNA, 19 nt, Artificial Sequence
  Description of Artificial Sequence: Synthetic oligonucleotide
acgcuuucuagaacucggc

SEQ ID NO: 958593 - RNA, 19 nt, Artificial Sequence
  Description of Artificial Sequence: Synthetic oligonucleotide
ccacaugucaguuuucauc

SEQ ID NO: 958594 - RNA, 19 nt, Artificial Sequence
  Description of Artificial Sequence: Synthetic oligonucleotide
aauaccggccacccuugua

SEQ ID NO: 958595 - RNA, 19 nt, Artificial Sequence
  Description of Artificial Sequence: Synthetic oligonucleotide
caauacucacuaacaguca

SEQ ID NO: 958596 - RNA, 19 nt, Artificial Sequence
  Description of Artificial Sequence: Synthetic oligonucleotide
cucagccugagguucgcug

SEQ ID NO: 958597 - RNA, 19 nt, Artificial Sequence
  Description of Artificial Sequence: Synthetic oligonucleotide
caaugcgguuaccuacugc

SEQ ID NO: 958598 - RNA, 19 nt, Artificial Sequence
  Description of Artificial Sequence: Synthetic oligonucleotide
ugcucacguggccuggcug

SEQ ID NO: 958599 - RNA, 19 nt, Artificial Sequence
  Description of Artificial Sequence: Synthetic oligonucleotide
uguauuggauaggcaauuu

SEQ ID NO: 958600 - RNA, 19 nt, Artificial Sequence
  Description of Artificial Sequence: Synthetic oligonucleotide
acaaugcgguuaccuacug

SEQ ID NO: 958601 - RNA, 19 nt, Artificial Sequence
  Description of Artificial Sequence: Synthetic oligonucleotide
guauuggauaggcaauuua

SEQ ID NO: 958602 - RNA, 19 nt, Artificial Sequence
  Description of Artificial Sequence: Synthetic oligonucleotide
ggaugacuaguuccuuggg

SEQ ID NO: 958603 - RNA, 19 nt, Artificial Sequence
  Description of Artificial Sequence: Synthetic oligonucleotide
cccauaggccuccacaggg

SEQ ID NO: 958604 - RNA, 19 nt, Artificial Sequence
  Description of Artificial Sequence: Synthetic oligonucleotide
uggcccguacauugucagg

SEQ ID NO: 958605 - RNA, 19 nt, Artificial Sequence
  Description of Artificial Sequence: Synthetic oligonucleotide
ucuggaucaaugggaugac

SEQ ID NO: 958606 - RNA, 19 nt, Artificial Sequence
  Description of Artificial Sequence: Synthetic oligonucleotide
gccuuagagaguugacccg

SEQ ID NO: 958607 - RNA, 19 nt, Artificial Sequence
  Description of Artificial Sequence: Synthetic oligonucleotide
ugugaggcguggcuaucaa

SEQ ID NO: 958608 - RNA, 19 nt, Artificial Sequence
  Description of Artificial Sequence: Synthetic oligonucleotide
ccaguccuaagccuuuugg

SEQ ID NO: 958609 - RNA, 19 nt, Artificial Sequence
  Description of Artificial Sequence: Synthetic oligonucleotide
aucaaugggaugacuaguu

SEQ ID NO: 958610 - RNA, 19 nt, Artificial Sequence
  Description of Artificial Sequence: Synthetic oligonucleotide
ggcguuucuaccucaguca

SEQ ID NO: 958611 - RNA, 19 nt, Artificial Sequence
  Description of Artificial Sequence: Synthetic oligonucleotide
agguuguaggcaauacuca

SEQ ID NO: 958612 - RNA, 19 nt, Artificial Sequence
  Description of Artificial Sequence: Synthetic oligonucleotide
gugagcguggggucaacac

SEQ ID NO: 958613 - RNA, 19 nt, Artificial Sequence
  Description of Artificial Sequence: Synthetic oligonucleotide
cuguccgacacacacaagu

SEQ ID NO: 958614 - RNA, 19 nt, Artificial Sequence
  Description of Artificial Sequence: Synthetic oligonucleotide
gagauguagcacuggagau

SEQ ID NO: 958615 - RNA, 19 nt, Artificial Sequence
  Description of Artificial Sequence: Synthetic oligonucleotide
cagaggcccguccugugcc

SEQ ID NO: 958616 - RNA, 19 nt, Artificial Sequence
  Description of Artificial Sequence: Synthetic oligonucleotide
guacauugucaggaucaag

SEQ ID NO: 958617 - RNA, 19 nt, Artificial Sequence
  Description of Artificial Sequence: Synthetic oligonucleotide
guaauaccggccacccuug

SEQ ID NO: 958618 - RNA, 19 nt, Artificial Sequence
  Description of Artificial Sequence: Synthetic oligonucleotide
auacucacuaacagucaca

SEQ ID NO: 958619 - RNA, 19 nt, Artificial Sequence
  Description of Artificial Sequence: Synthetic oligonucleotide
uccacgagugagcucugua

SEQ ID NO: 958620 - RNA, 19 nt, Artificial Sequence
  Description of Artificial Sequence: Synthetic oligonucleotide
uuccacggucguuaagaaa

SEQ ID NO: 958621 - RNA, 19 nt, Artificial Sequence
  Description of Artificial Sequence: Synthetic oligonucleotide
uagccaaugcuuguucuua

SEQ ID NO: 958622 - RNA, 19 nt, Artificial Sequence
  Description of Artificial Sequence: Synthetic oligonucleotide
ucgucccaccuuuccagug

SEQ ID NO: 958623 - RNA, 19 nt, Artificial Sequence
  Description of Artificial Sequence: Synthetic oligonucleotide
gucaucucaguucccaacu

SEQ ID NO: 958624 - RNA, 19 nt, Artificial Sequence
  Description of Artificial Sequence: Synthetic oligonucleotide
uccgagagccauucuggau

SEQ ID NO: 958625 - RNA, 19 nt, Artificial Sequence
  Description of Artificial Sequence: Synthetic oligonucleotide
guauugccgaugcccuugc

SEQ ID NO: 958626 - RNA, 19 nt, Artificial Sequence
  Description of Artificial Sequence: Synthetic oligonucleotide
gccuucgaagaccaggcug

SEQ ID NO: 958627 - RNA, 19 nt, Artificial Sequence
  Description of Artificial Sequence: Synthetic oligonucleotide
cacaguuucuaugcuccac

SEQ ID NO: 958628 - RNA, 19 nt, Artificial Sequence
  Description of Artificial Sequence: Synthetic oligonucleotide
cucacgcuuucuagaacuc

SEQ ID NO: 958629 - RNA, 19 nt, Artificial Sequence
  Description of Artificial Sequence: Synthetic oligonucleotide
cccaacuaaauucaaagcu

SEQ ID NO: 958630 - RNA, 19 nt, Artificial Sequence
  Description of Artificial Sequence: Synthetic oligonucleotide
uaauaccggccacccuugu

SEQ ID NO: 958631 - RNA, 19 nt, Artificial Sequence
  Description of Artificial Sequence: Synthetic oligonucleotide
agagcuaguggaggccaag

SEQ ID NO: 958632 - RNA, 19 nt, Artificial Sequence
  Description of Artificial Sequence: Synthetic oligonucleotide
ucaugggaauagugagcgu

SEQ ID NO: 958633 - RNA, 19 nt, Artificial Sequence
  Description of Artificial Sequence: Synthetic oligonucleotide
ggcaauacucacuaacagu

SEQ ID NO: 958634 - RNA, 19 nt, Artificial Sequence
  Description of Artificial Sequence: Synthetic oligonucleotide
gcgagugaaaccgaaagaa

SEQ ID NO: 958635 - RNA, 19 nt, Artificial Sequence
  Description of Artificial Sequence: Synthetic oligonucleotide
uuugcucacguggccuggc

SEQ ID NO: 958636 - RNA, 19 nt, Artificial Sequence
  Description of Artificial Sequence: Synthetic oligonucleotide
acgacuugacugaaaguau

SEQ ID NO: 958637 - RNA, 19 nt, Artificial Sequence
  Description of Artificial Sequence: Synthetic oligonucleotide
ggucguuaagaaaucuuuc

SEQ ID NO: 958638 - RNA, 19 nt, Artificial Sequence
  Description of Artificial Sequence: Synthetic oligonucleotide
gucugcggaguguuuccgc

SEQ ID NO: 958639 - RNA, 19 nt, Artificial Sequence
  Description of Artificial Sequence: Synthetic oligonucleotide
ccgaaagaaaucggggccg

SEQ ID NO: 958640 - RNA, 19 nt, Artificial Sequence
  Description of Artificial Sequence: Synthetic oligonucleotide
gguuugcucacguggccug

SEQ ID NO: 958641 - RNA, 19 nt, Artificial Sequence
  Description of Artificial Sequence: Synthetic oligonucleotide
cuuccugauucuggagggc

SEQ ID NO: 958642 - RNA, 19 nt, Artificial Sequence
  Description of Artificial Sequence: Synthetic oligonucleotide
ugacccggggcuucacgac

SEQ ID NO: 958643 - RNA, 19 nt, Artificial Sequence
  Description of Artificial Sequence: Synthetic oligonucleotide
gccacccuuguacaguuug

SEQ ID NO: 958644 - RNA, 19 nt, Artificial Sequence
  Description of Artificial Sequence: Synthetic oligonucleotide
uaccggccacccuuguaca

SEQ ID NO: 958645 - RNA, 19 nt, Artificial Sequence
  Description of Artificial Sequence: Synthetic oligonucleotide
cuucaauugucaucuuggu

SEQ ID NO: 958646 - RNA, 19 nt, Artificial Sequence
  Description of Artificial Sequence: Synthetic oligonucleotide
caucucaguucccaacuaa

SEQ ID NO: 958647 - RNA, 19 nt, Artificial Sequence
  Description of Artificial Sequence: Synthetic oligonucleotide
agaaaucggggccguugaa

SEQ ID NO: 958648 - RNA, 19 nt, Artificial Sequence
  Description of Artificial Sequence: Synthetic oligonucleotide
gauuucaccuuuccacuuu

SEQ ID NO: 958649 - RNA, 19 nt, Artificial Sequence
  Description of Artificial Sequence: Synthetic oligonucleotide
guuguaccaaacccugacu

SEQ ID NO: 958650 - RNA, 19 nt, Artificial Sequence
  Description of Artificial Sequence: Synthetic oligonucleotide
gcagauuucacaguuucua

SEQ ID NO: 958651 - RNA, 19 nt, Artificial Sequence
  Description of Artificial Sequence: Synthetic oligonucleotide
gcagacgugcgagugaaac

SEQ ID NO: 958652 - RNA, 19 nt, Artificial Sequence
  Description of Artificial Sequence: Synthetic oligonucleotide
uggggucaacaccugcauu

SEQ ID NO: 958653 - RNA, 19 nt, Artificial Sequence
  Description of Artificial Sequence: Synthetic oligonucleotide
uugcucacguggccuggcu

SEQ ID NO: 958654 - RNA, 19 nt, Artificial Sequence
  Description of Artificial Sequence: Synthetic oligonucleotide
cacccuuguacaguuuguc

SEQ ID NO: 958655 - RNA, 19 nt, Artificial Sequence
  Description of Artificial Sequence: Synthetic oligonucleotide
agucccuguguagccaaug

SEQ ID NO: 958656 - RNA, 19 nt, Artificial Sequence
  Description of Artificial Sequence: Synthetic oligonucleotide
guaagucccuguguagcca

SEQ ID NO: 958657 - RNA, 19 nt, Artificial Sequence
  Description of Artificial Sequence: Synthetic oligonucleotide
agaagucgucccaccuuuc

SEQ ID NO: 958658 - RNA, 19 nt, Artificial Sequence
  Description of Artificial Sequence: Synthetic oligonucleotide
gguuaccuacugccagccg

SEQ ID NO: 958659 - RNA, 19 nt, Artificial Sequence
  Description of Artificial Sequence: Synthetic oligonucleotide
uugccuccgagagccauuc

SEQ ID NO: 958660 - RNA, 19 nt, Artificial Sequence
  Description of Artificial Sequence: Synthetic oligonucleotide
agguucgcugucuguuccu

SEQ ID NO: 958661 - RNA, 19 nt, Artificial Sequence
  Description of Artificial Sequence: Synthetic oligonucleotide
cagcccauaggccuccaca

SEQ ID NO: 958662 - RNA, 19 nt, Artificial Sequence
  Description of Artificial Sequence: Synthetic oligonucleotide
gucagucgccuccgggcag

SEQ ID NO: 958663 - RNA, 19 nt, Artificial Sequence
  Description of Artificial Sequence: Synthetic oligonucleotide
cacaaugcgguuaccuacu

SEQ ID NO: 958664 - RNA, 19 nt, Artificial Sequence
  Description of Artificial Sequence: Synthetic oligonucleotide
uucgaagaccaggcuguuc

SEQ ID NO: 958665 - RNA, 19 nt, Artificial Sequence
  Description of Artificial Sequence: Synthetic oligonucleotide
ucccgacucagaagucguc

SEQ ID NO: 958666 - RNA, 19 nt, Artificial Sequence
  Description of Artificial Sequence: Synthetic oligonucleotide
gaggcguggcuaucaaacu

SEQ ID NO: 958667 - RNA, 19 nt, Artificial Sequence
  Description of Artificial Sequence: Synthetic oligonucleotide
ccgacucagaagucguccc

SEQ ID NO: 958668 - RNA, 19 nt, Artificial Sequence
  Description of Artificial Sequence: Synthetic oligonucleotide
gcgguuaccuacugccagc

SEQ ID NO: 958669 - RNA, 19 nt, Artificial Sequence
  Description of Artificial Sequence: Synthetic oligonucleotide
gcaucaacccuuccuuauc

SEQ ID NO: 958670 - RNA, 19 nt, Artificial Sequence
  Description of Artificial Sequence: Synthetic oligonucleotide
aucacacgacggcccucuc

SEQ ID NO: 958671 - RNA, 19 nt, Artificial Sequence
  Description of Artificial Sequence: Synthetic oligonucleotide
ggcccguacauugucagga

SEQ ID NO: 958672 - RNA, 19 nt, Artificial Sequence
  Description of Artificial Sequence: Synthetic oligonucleotide
guucgcugucuguuccuuc

SEQ ID NO: 958673 - RNA, 19 nt, Artificial Sequence
  Description of Artificial Sequence: Synthetic oligonucleotide
cuccgggcagacgugcgag

SEQ ID NO: 958674 - RNA, 19 nt, Artificial Sequence
  Description of Artificial Sequence: Synthetic oligonucleotide
auagugagcguggggucaa

SEQ ID NO: 958675 - RNA, 19 nt, Artificial Sequence
  Description of Artificial Sequence: Synthetic oligonucleotide
acggucguuaagaaaucuu

SEQ ID NO: 958676 - RNA, 19 nt, Artificial Sequence
  Description of Artificial Sequence: Synthetic oligonucleotide
gacggcccucucccuuggg

SEQ ID NO: 958677 - RNA, 19 nt, Artificial Sequence
  Description of Artificial Sequence: Synthetic oligonucleotide
ugcccuugccagguuucca

SEQ ID NO: 958678 - RNA, 19 nt, Artificial Sequence
  Description of Artificial Sequence: Synthetic oligonucleotide
ccuuccacggucguuaaga

SEQ ID NO: 958679 - RNA, 19 nt, Artificial Sequence
  Description of Artificial Sequence: Synthetic oligonucleotide
ccacguacuggcagauagc

SEQ ID NO: 958680 - RNA, 19 nt, Artificial Sequence
  Description of Artificial Sequence: Synthetic oligonucleotide
gccagccgaaccauggccc

SEQ ID NO: 958681 - RNA, 19 nt, Artificial Sequence
  Description of Artificial Sequence: Synthetic oligonucleotide
cccgacucagaagucgucc

SEQ ID NO: 958682 - RNA, 19 nt, Artificial Sequence
  Description of Artificial Sequence: Synthetic oligonucleotide
uacuggcagauagcgucau

SEQ ID NO: 958683 - RNA, 19 nt, Artificial Sequence
  Description of Artificial Sequence: Synthetic oligonucleotide
agauagcgucauaguggag

SEQ ID NO: 958684 - RNA, 19 nt, Artificial Sequence
  Description of Artificial Sequence: Synthetic oligonucleotide
guggaagguuugcucacgu

SEQ ID NO: 958685 - RNA, 19 nt, Artificial Sequence
  Description of Artificial Sequence: Synthetic oligonucleotide
cugucccgacucagaaguc

SEQ ID NO: 958686 - RNA, 19 nt, Artificial Sequence
  Description of Artificial Sequence: Synthetic oligonucleotide
gcucacauauugguuuuga

SEQ ID NO: 958687 - RNA, 19 nt, Artificial Sequence
  Description of Artificial Sequence: Synthetic oligonucleotide
acguacuggcagauagcgu

SEQ ID NO: 958688 - RNA, 19 nt, Artificial Sequence
  Description of Artificial Sequence: Synthetic oligonucleotide
gacgugcgagugaaaccga

SEQ ID NO: 958689 - RNA, 19 nt, Artificial Sequence
  Description of Artificial Sequence: Synthetic oligonucleotide
uaccuacugccagccgaac

SEQ ID NO: 958690 - RNA, 19 nt, Artificial Sequence
  Description of Artificial Sequence: Synthetic oligonucleotide
guaccaaacccugacucuu

SEQ ID NO: 958691 - RNA, 19 nt, Artificial Sequence
  Description of Artificial Sequence: Synthetic oligonucleotide
cagaagucgucccaccuuu

SEQ ID NO: 958692 - RNA, 19 nt, Artificial Sequence
  Description of Artificial Sequence: Synthetic oligonucleotide
gacccggggcuucacgacu

SEQ ID NO: 958693 - RNA, 19 nt, Artificial Sequence
  Description of Artificial Sequence: Synthetic oligonucleotide
cacgagugagcucuguauu

SEQ ID NO: 958694 - RNA, 19 nt, Artificial Sequence
  Description of Artificial Sequence: Synthetic oligonucleotide
guagcacuggagauucuau

SEQ ID NO: 958695 - RNA, 19 nt, Artificial Sequence
  Description of Artificial Sequence: Synthetic oligonucleotide
cucacguggccuggcugug

SEQ ID NO: 958696 - RNA, 19 nt, Artificial Sequence
  Description of Artificial Sequence: Synthetic oligonucleotide
ggagggccuucgaagacca

SEQ ID NO: 958697 - RNA, 19 nt, Artificial Sequence
  Description of Artificial Sequence: Synthetic oligonucleotide
acacgacggcccucucccu

SEQ ID NO: 958698 - RNA, 19 nt, Artificial Sequence
  Description of Artificial Sequence: Synthetic oligonucleotide
ggcaucaacccuuccuuau

SEQ ID NO: 958699 - RNA, 19 nt, Artificial Sequence
  Description of Artificial Sequence: Synthetic oligonucleotide
aagucccuguguagccaau

SEQ ID NO: 958700 - RNA, 19 nt, Artificial Sequence
  Description of Artificial Sequence: Synthetic oligonucleotide
ugccggucugcggaguguu

SEQ ID NO: 958701 - RNA, 19 nt, Artificial Sequence
  Description of Artificial Sequence: Synthetic oligonucleotide
acgugcgagugaaaccgaa

SEQ ID NO: 958702 - RNA, 19 nt, Artificial Sequence
  Description of Artificial Sequence: Synthetic oligonucleotide
cccguacauugucaggauc

SEQ ID NO: 958703 - RNA, 19 nt, Artificial Sequence
  Description of Artificial Sequence: Synthetic oligonucleotide
gagagcuaguggaggccaa

SEQ ID NO: 958704 - RNA, 19 nt, Artificial Sequence
  Description of Artificial Sequence: Synthetic oligonucleotide
cagggacugccucauaguu

SEQ ID NO: 958705 - RNA, 19 nt, Artificial Sequence
  Description of Artificial Sequence: Synthetic oligonucleotide
ccacggucguuaagaaauc

SEQ ID NO: 958706 - RNA, 19 nt, Artificial Sequence
  Description of Artificial Sequence: Synthetic oligonucleotide
caucacacgacggcccucu

SEQ ID NO: 958707 - RNA, 19 nt, Artificial Sequence
  Description of Artificial Sequence: Synthetic oligonucleotide
ggggccguugaaggggcag

SEQ ID NO: 958708 - RNA, 19 nt, Artificial Sequence
  Description of Artificial Sequence: Synthetic oligonucleotide
gagggccuucgaagaccag

SEQ ID NO: 958709 - RNA, 19 nt, Artificial Sequence
  Description of Artificial Sequence: Synthetic oligonucleotide
agccgaaccauggcccgua

SEQ ID NO: 958710 - RNA, 19 nt, Artificial Sequence
  Description of Artificial Sequence: Synthetic oligonucleotide
cacggucguuaagaaaucu

SEQ ID NO: 958711 - RNA, 19 nt, Artificial Sequence
  Description of Artificial Sequence: Synthetic oligonucleotide
gcggaguguuuccgcuucc

SEQ ID NO: 958712 - RNA, 19 nt, Artificial Sequence
  Description of Artificial Sequence: Synthetic oligonucleotide
uccugccggucugcggagu

SEQ ID NO: 958713 - RNA, 19 nt, Artificial Sequence
  Description of Artificial Sequence: Synthetic oligonucleotide
gaaccauggcccguacauu

SEQ ID NO: 958714 - RNA, 19 nt, Artificial Sequence
  Description of Artificial Sequence: Synthetic oligonucleotide
cccaguccuaagccuuuug

SEQ ID NO: 958715 - RNA, 19 nt, Artificial Sequence
  Description of Artificial Sequence: Synthetic oligonucleotide
gucccgacucagaagucgu

SEQ ID NO: 958716 - RNA, 19 nt, Artificial Sequence
  Description of Artificial Sequence: Synthetic oligonucleotide
cucucccaaguuguaccaa

SEQ ID NO: 958717 - RNA, 19 nt, Artificial Sequence
  Description of Artificial Sequence: Synthetic oligonucleotide
ccucuggcacugucucagc

SEQ ID NO: 958718 - RNA, 19 nt, Artificial Sequence
  Description of Artificial Sequence: Synthetic oligonucleotide
gggcagacgugcgagugaa

SEQ ID NO: 958719 - RNA, 19 nt, Artificial Sequence
  Description of Artificial Sequence: Synthetic oligonucleotide
gccguugaaggggcagccc

SEQ ID NO: 958720 - RNA, 19 nt, Artificial Sequence
  Description of Artificial Sequence: Synthetic oligonucleotide
cccuguguagccaaugcuu

SEQ ID NO: 958721 - RNA, 19 nt, Artificial Sequence
  Description of Artificial Sequence: Synthetic oligonucleotide
ccugccggucugcggagug

SEQ ID NO: 958722 - RNA, 19 nt, Artificial Sequence
  Description of Artificial Sequence: Synthetic oligonucleotide
gcuucacgacuugacugaa

SEQ ID NO: 958723 - RNA, 19 nt, Artificial Sequence
  Description of Artificial Sequence: Synthetic oligonucleotide
gcccuugccagguuuccau

SEQ ID NO: 958724 - RNA, 19 nt, Artificial Sequence
  Description of Artificial Sequence: Synthetic oligonucleotide
gccgaaccauggcccguac

SEQ ID NO: 958725 - RNA, 19 nt, Artificial Sequence
  Description of Artificial Sequence: Synthetic oligonucleotide
cgacucagaagucguccca

SEQ ID NO: 958726 - RNA, 19 nt, Artificial Sequence
  Description of Artificial Sequence: Synthetic oligonucleotide
cgugcgagugaaaccgaaa

SEQ ID NO: 958727 - RNA, 19 nt, Artificial Sequence
  Description of Artificial Sequence: Synthetic oligonucleotide
cugcggaguguuuccgcuu

SEQ ID NO: 958728 - RNA, 19 nt, Artificial Sequence
  Description of Artificial Sequence: Synthetic oligonucleotide
cgacuugacugaaaguauu

SEQ ID NO: 958729 - RNA, 19 nt, Artificial Sequence
  Description of Artificial Sequence: Synthetic oligonucleotide
cguacauugucaggaucaa

SEQ ID NO: 958730 - RNA, 19 nt, Artificial Sequence
  Description of Artificial Sequence: Synthetic oligonucleotide
cacgacggcccucucccuu

SEQ ID NO: 958731 - RNA, 19 nt, Artificial Sequence
  Description of Artificial Sequence: Synthetic oligonucleotide
ccgaaccauggcccguaca

SEQ ID NO: 958732 - RNA, 19 nt, Artificial Sequence
  Description of Artificial Sequence: Synthetic oligonucleotide
ggcccucucccuugggaau

SEQ ID NO: 958733 - RNA, 19 nt, Artificial Sequence
  Description of Artificial Sequence: Synthetic oligonucleotide
ccacccuuguacaguuugu

SEQ ID NO: 958734 - RNA, 19 nt, Artificial Sequence
  Description of Artificial Sequence: Synthetic oligonucleotide
ccuccgggcagacgugcga

SEQ ID NO: 958735 - RNA, 19 nt, Artificial Sequence
  Description of Artificial Sequence: Synthetic oligonucleotide
cgacggcccucucccuugg

SEQ ID NO: 958736 - RNA, 19 nt, Artificial Sequence
  Description of Artificial Sequence: Synthetic oligonucleotide
gcccguacauugucaggau

SEQ ID NO: 958737 - RNA, 19 nt, Artificial Sequence
  Description of Artificial Sequence: Synthetic oligonucleotide
cuucgaagaccaggcuguu

SEQ ID NO: 958738 - RNA, 19 nt, Artificial Sequence
  Description of Artificial Sequence: Synthetic oligonucleotide
cccggggcuucacgacuug

SEQ ID NO: 958739 - RNA, 19 nt, Artificial Sequence
  Description of Artificial Sequence: Synthetic oligonucleotide
gguucgcugucuguuccuu

SEQ ID NO: 958740 - RNA, 19 nt, Artificial Sequence
  Description of Artificial Sequence: Synthetic oligonucleotide
cuccacgagugagcucugu

SEQ ID NO: 958741 - RNA, 19 nt, Artificial Sequence
  Description of Artificial Sequence: Synthetic oligonucleotide
cccguccugugccaucucu

SEQ ID NO: 958742 - RNA, 19 nt, Artificial Sequence
  Description of Artificial Sequence: Synthetic oligonucleotide
ggggcagauuucacaguuu

SEQ ID NO: 958743 - RNA, 19 nt, Artificial Sequence
  Description of Artificial Sequence: Synthetic oligonucleotide
cugccggucugcggagugu

SEQ ID NO: 958744 - RNA, 19 nt, Artificial Sequence
  Description of Artificial Sequence: Synthetic oligonucleotide
ggcagacgugcgagugaaa

SEQ ID NO: 958745 - RNA, 19 nt, Artificial Sequence
  Description of Artificial Sequence: Synthetic oligonucleotide
cgaaagaaaucggggccgu

SEQ ID NO: 958746 - RNA, 19 nt, Artificial Sequence
  Description of Artificial Sequence: Synthetic oligonucleotide
ccggggcuucacgacuuga

SEQ ID NO: 958747 - RNA, 19 nt, Artificial Sequence
  Description of Artificial Sequence: Synthetic oligonucleotide
ccggccacccuuguacagu

SEQ ID NO: 958748 - RNA, 19 nt, Artificial Sequence
  Description of Artificial Sequence: Synthetic oligonucleotide
gcccacguacuggcagaua

SEQ ID NO: 958749 - RNA, 19 nt, Artificial Sequence
  Description of Artificial Sequence: Synthetic oligonucleotide
ccacagggacugccucaua

SEQ ID NO: 958750 - RNA, 19 nt, Artificial Sequence
  Description of Artificial Sequence: Synthetic oligonucleotide
cggaguguuuccgcuuccu

SEQ ID NO: 958751 - RNA, 19 nt, Artificial Sequence
  Description of Artificial Sequence: Synthetic oligonucleotide
gccggucugcggaguguuu

SEQ ID NO: 958752 - RNA, 19 nt, Artificial Sequence
  Description of Artificial Sequence: Synthetic oligonucleotide
auaguuacaguucucaagc

SEQ ID NO: 958753 - RNA, 19 nt, Artificial Sequence
  Description of Artificial Sequence: Synthetic oligonucleotide
ugacaugucaaucagacag

SEQ ID NO: 958754 - RNA, 19 nt, Artificial Sequence
  Description of Artificial Sequence: Synthetic oligonucleotide
uccggaaucacauauaacg

SEQ ID NO: 958755 - RNA, 19 nt, Artificial Sequence
  Description of Artificial Sequence: Synthetic oligonucleotide
uauuuugaaacccaggcag

SEQ ID NO: 958756 - RNA, 19 nt, Artificial Sequence
  Description of Artificial Sequence: Synthetic oligonucleotide
uuuugguaaguuuucaugg

SEQ ID NO: 958757 - RNA, 19 nt, Artificial Sequence
  Description of Artificial Sequence: Synthetic oligonucleotide
uuagcauuaguucacaaug

SEQ ID NO: 958758 - RNA, 19 nt, Artificial Sequence
  Description of Artificial Sequence: Synthetic oligonucleotide
uucacuaaugcauagggag

SEQ ID NO: 958759 - RNA, 19 nt, Artificial Sequence
  Description of Artificial Sequence: Synthetic oligonucleotide
aucauaaucaguguguacc

SEQ ID NO: 958760 - RNA, 19 nt, Artificial Sequence
  Description of Artificial Sequence: Synthetic oligonucleotide
aguggaucuauucaaauuc

SEQ ID NO: 958761 - RNA, 19 nt, Artificial Sequence
  Description of Artificial Sequence: Synthetic oligonucleotide
auauuauuggcacauaucu

SEQ ID NO: 958762 - RNA, 19 nt, Artificial Sequence
  Description of Artificial Sequence: Synthetic oligonucleotide
acaaauaugcucuuuccgg

SEQ ID NO: 958763 - RNA, 19 nt, Artificial Sequence
  Description of Artificial Sequence: Synthetic oligonucleotide
agauccacugcauaguuac

SEQ ID NO: 958764 - RNA, 19 nt, Artificial Sequence
  Description of Artificial Sequence: Synthetic oligonucleotide
ucagacuaaggucacaacc

SEQ ID NO: 958765 - RNA, 19 nt, Artificial Sequence
  Description of Artificial Sequence: Synthetic oligonucleotide
gaaauugcuuaucuagugg

SEQ ID NO: 958766 - RNA, 19 nt, Artificial Sequence
  Description of Artificial Sequence: Synthetic oligonucleotide
agggacauauauuauuggc

SEQ ID NO: 958767 - RNA, 19 nt, Artificial Sequence
  Description of Artificial Sequence: Synthetic oligonucleotide
ugugaaagcauuuggguga

SEQ ID NO: 958768 - RNA, 19 nt, Artificial Sequence
  Description of Artificial Sequence: Synthetic oligonucleotide
uuuuccaagugguaguuag

SEQ ID NO: 958769 - RNA, 19 nt, Artificial Sequence
  Description of Artificial Sequence: Synthetic oligonucleotide
uugacauccagcuacagau

SEQ ID NO: 958770 - RNA, 19 nt, Artificial Sequence
  Description of Artificial Sequence: Synthetic oligonucleotide
agugcgauuuccuucauug

SEQ ID NO: 958771 - RNA, 19 nt, Artificial Sequence
  Description of Artificial Sequence: Synthetic oligonucleotide
auaaucaguguguaccuuc

SEQ ID NO: 958772 - RNA, 19 nt, Artificial Sequence
  Description of Artificial Sequence: Synthetic oligonucleotide
ugcgauuuccuucauugag

SEQ ID NO: 958773 - RNA, 19 nt, Artificial Sequence
  Description of Artificial Sequence: Synthetic oligonucleotide
uugggaauaagucuuucac

SEQ ID NO: 958774 - RNA, 19 nt, Artificial Sequence
  Description of Artificial Sequence: Synthetic oligonucleotide
uauugcuaaggauaguaga

SEQ ID NO: 958775 - RNA, 19 nt, Artificial Sequence
  Description of Artificial Sequence: Synthetic oligonucleotide
auaacgucuccaugguucc

SEQ ID NO: 958776 - RNA, 19 nt, Artificial Sequence
  Description of Artificial Sequence: Synthetic oligonucleotide
aagucaagagccugcaucu

SEQ ID NO: 958777 - RNA, 19 nt, Artificial Sequence
  Description of Artificial Sequence: Synthetic oligonucleotide
uauauuauuggcacauauc

SEQ ID NO: 958778 - RNA, 19 nt, Artificial Sequence
  Description of Artificial Sequence: Synthetic oligonucleotide
uaucuaguggaucuauuca

SEQ ID NO: 958779 - RNA, 19 nt, Artificial Sequence
  Description of Artificial Sequence: Synthetic oligonucleotide
cauaguuacaguucucaag

SEQ ID NO: 958780 - RNA, 19 nt, Artificial Sequence
  Description of Artificial Sequence: Synthetic oligonucleotide
aaaguagugccaaugugag

SEQ ID NO: 958781 - RNA, 19 nt, Artificial Sequence
  Description of Artificial Sequence: Synthetic oligonucleotide
cauucuacucuugacaucc

SEQ ID NO: 958782 - RNA, 19 nt, Artificial Sequence
  Description of Artificial Sequence: Synthetic oligonucleotide
  modified_base (3)..(3): a, c, u, g, unknown or other
ucngcugauucaaugucag

SEQ ID NO: 958783 - RNA, 19 nt, Artificial Sequence
  Description of Artificial Sequence: Synthetic oligonucleotide
cuauccccaaggaagauag

SEQ ID NO: 958784 - RNA, 19 nt, Artificial Sequence
  Description of Artificial Sequence: Synthetic oligonucleotide
ugcauuuuccaagugguag

SEQ ID NO: 958785 - RNA, 19 nt, Artificial Sequence
  Description of Artificial Sequence: Synthetic oligonucleotide
cuuggccgaacaaauaugc

SEQ ID NO: 958786 - RNA, 19 nt, Artificial Sequence
  Description of Artificial Sequence: Synthetic oligonucleotide
gaucuauucaaauucauau

SEQ ID NO: 958787 - RNA, 19 nt, Artificial Sequence
  Description of Artificial Sequence: Synthetic oligonucleotide
  modified_base (17)..(17): a, c, u, g, unknown or other
aucagagcuucauuucngc

SEQ ID NO: 958788 - RNA, 19 nt, Artificial Sequence
  Description of Artificial Sequence: Synthetic oligonucleotide
ugauuuuguugcaaccugc

SEQ ID NO: 958789 - RNA, 19 nt, Artificial Sequence
  Description of Artificial Sequence: Synthetic oligonucleotide
uuuacucuguuccagucaa

SEQ ID NO: 958790 - RNA, 19 nt, Artificial Sequence
  Description of Artificial Sequence: Synthetic oligonucleotide
  modified_base (7)..(7): a, c, u, g, unknown or other
ugcccunuggaugucaucc

SEQ ID NO: 958791 - RNA, 19 nt, Artificial Sequence
  Description of Artificial Sequence: Synthetic oligonucleotide
uuaucuaguggaucuauuc

SEQ ID NO: 958792 - RNA, 19 nt, Artificial Sequence
  Description of Artificial Sequence: Synthetic oligonucleotide
  modified_base (6)..(6): a, c, u, g, unknown or other
auuucngcugauucaaugu

SEQ ID NO: 958793 - RNA, 19 nt, Artificial Sequence
  Description of Artificial Sequence: Synthetic oligonucleotide
aaugugagagugcgauuuc

SEQ ID NO: 958794 - RNA, 19 nt, Artificial Sequence
  Description of Artificial Sequence: Synthetic oligonucleotide
ugaggagacauagaguuca

SEQ ID NO: 958795 - RNA, 19 nt, Artificial Sequence
  Description of Artificial Sequence: Synthetic oligonucleotide
  modified_base (4)..(4): a, c, u, g, unknown or other
uucngcugauucaauguca

SEQ ID NO: 958796 - RNA, 19 nt, Artificial Sequence
  Description of Artificial Sequence: Synthetic oligonucleotide
  modified_base (7)..(7): a, c, u, g, unknown or other
cauuucngcugauucaaug

SEQ ID NO: 958797 - RNA, 19 nt, Artificial Sequence
  Description of Artificial Sequence: Synthetic oligonucleotide
  modified_base (5)..(5): a, c, u, g, unknown or other
aaagngcaaucagagcuuc

SEQ ID NO: 958798 - RNA, 19 nt, Artificial Sequence
  Description of Artificial Sequence: Synthetic oligonucleotide
guucccucggacaacaucg

SEQ ID NO: 958799 - RNA, 19 nt, Artificial Sequence
  Description of Artificial Sequence: Synthetic oligonucleotide
agauucagcagagauacug

SEQ ID NO: 958800 - RNA, 19 nt, Artificial Sequence
  Description of Artificial Sequence: Synthetic oligonucleotide
ugaauguccgcucuucccu

SEQ ID NO: 958801 - RNA, 19 nt, Artificial Sequence
  Description of Artificial Sequence: Synthetic oligonucleotide
uucaucgccuuuuggagcc

SEQ ID NO: 958802 - RNA, 19 nt, Artificial Sequence
  Description of Artificial Sequence: Synthetic oligonucleotide
uugcuuaucuaguggaucu

SEQ ID NO: 958803 - RNA, 19 nt, Artificial Sequence
  Description of Artificial Sequence: Synthetic oligonucleotide
gaggaagggacauauauua

SEQ ID NO: 958804 - RNA, 19 nt, Artificial Sequence
  Description of Artificial Sequence: Synthetic oligonucleotide
  modified_base (8)..(8): a, c, u, g, unknown or other
ucucccunaguccugacau

SEQ ID NO: 958805 - RNA, 19 nt, Artificial Sequence
  Description of Artificial Sequence: Synthetic oligonucleotide
aucauucuacucuugacau

SEQ ID NO: 958806 - RNA, 19 nt, Artificial Sequence
  Description of Artificial Sequence: Synthetic oligonucleotide
uaaugcauagggaguuuag

SEQ ID NO: 958807 - RNA, 19 nt, Artificial Sequence
  Description of Artificial Sequence: Synthetic oligonucleotide
ucuuucacuaaugcauagg

SEQ ID NO: 958808 - RNA, 19 nt, Artificial Sequence
  Description of Artificial Sequence: Synthetic oligonucleotide
uuucacuaaugcauaggga

SEQ ID NO: 958809 - RNA, 19 nt, Artificial Sequence
  Description of Artificial Sequence: Synthetic oligonucleotide
uuagcuugauucuucccca

SEQ ID NO: 958810 - RNA, 19 nt, Artificial Sequence
  Description of Artificial Sequence: Synthetic oligonucleotide
aaucagacagcgggauucc

SEQ ID NO: 958811 - RNA, 19 nt, Artificial Sequence
  Description of Artificial Sequence: Synthetic oligonucleotide
ugguaguuagcccaccgca

SEQ ID NO: 958812 - RNA, 19 nt, Artificial Sequence
  Description of Artificial Sequence: Synthetic oligonucleotide
  modified_base (5)..(5): a, c, u, g, unknown or other
uuucngcugauucaauguc

SEQ ID NO: 958813 - RNA, 19 nt, Artificial Sequence
  Description of Artificial Sequence: Synthetic oligonucleotide
auaguagaagcuacuuggc

SEQ ID NO: 958814 - RNA, 19 nt, Artificial Sequence
  Description of Artificial Sequence: Synthetic oligonucleotide
uacuuggccgaacaaauau

SEQ ID NO: 958815 - RNA, 19 nt, Artificial Sequence
  Description of Artificial Sequence: Synthetic oligonucleotide
uccagcgaugccaaccagg

SEQ ID NO: 958816 - RNA, 19 nt, Artificial Sequence
  Description of Artificial Sequence: Synthetic oligonucleotide
ucauaaucaguguguaccu

SEQ ID NO: 958817 - RNA, 19 nt, Artificial Sequence
  Description of Artificial Sequence: Synthetic oligonucleotide
aaagagucauuuauuggcu

SEQ ID NO: 958818 - RNA, 19 nt, Artificial Sequence
  Description of Artificial Sequence: Synthetic oligonucleotide
ugguaauaagcuuuugaau

SEQ ID NO: 958819 - RNA, 19 nt, Artificial Sequence
  Description of Artificial Sequence: Synthetic oligonucleotide
ugacucgaggguuaacucc

SEQ ID NO: 958820 - RNA, 19 nt, Artificial Sequence
  Description of Artificial Sequence: Synthetic oligonucleotide
auugcuuaucuaguggauc

SEQ ID NO: 958821 - RNA, 19 nt, Artificial Sequence
  Description of Artificial Sequence: Synthetic oligonucleotide
agcgaugccaaccagggaa

SEQ ID NO: 958822 - RNA, 19 nt, Artificial Sequence
  Description of Artificial Sequence: Synthetic oligonucleotide
ucacuaaugcauagggagu

SEQ ID NO: 958823 - RNA, 19 nt, Artificial Sequence
  Description of Artificial Sequence: Synthetic oligonucleotide
aaugauugacucgaggguu

SEQ ID NO: 958824 - RNA, 19 nt, Artificial Sequence
  Description of Artificial Sequence: Synthetic oligonucleotide
ggacauauauuauuggcac

SEQ ID NO: 958825 - RNA, 19 nt, Artificial Sequence
  Description of Artificial Sequence: Synthetic oligonucleotide
auaugcucuuuccggaauc

SEQ ID NO: 958826 - RNA, 19 nt, Artificial Sequence
  Description of Artificial Sequence: Synthetic oligonucleotide
uccagcuacagauguaugu

SEQ ID NO: 958827 - RNA, 19 nt, Artificial Sequence
  Description of Artificial Sequence: Synthetic oligonucleotide
ugggaauaagucuuucacu

SEQ ID NO: 958828 - RNA, 19 nt, Artificial Sequence
  Description of Artificial Sequence: Synthetic oligonucleotide
cauuaguucacaaugcucu

SEQ ID NO: 958829 - RNA, 19 nt, Artificial Sequence
  Description of Artificial Sequence: Synthetic oligonucleotide
aaauaugcucuuuccggaa

SEQ ID NO: 958830 - RNA, 19 nt, Artificial Sequence
  Description of Artificial Sequence: Synthetic oligonucleotide
aguguguaccuucucauaa

SEQ ID NO: 958831 - RNA, 19 nt, Artificial Sequence
  Description of Artificial Sequence: Synthetic oligonucleotide
  modified_base (9)..(9): a, c, u, g, unknown or other
uucauuucngcugauucaa

SEQ ID NO: 958832 - RNA, 19 nt, Artificial Sequence
  Description of Artificial Sequence: Synthetic oligonucleotide
aauaugcucuuuccggaau

SEQ ID NO: 958833 - RNA, 19 nt, Artificial Sequence
  Description of Artificial Sequence: Synthetic oligonucleotide
cuaguaaucauucuacucu

SEQ ID NO: 958834 - RNA, 19 nt, Artificial Sequence
  Description of Artificial Sequence: Synthetic oligonucleotide
agugguaguuagcccaccg

SEQ ID NO: 958835 - RNA, 19 nt, Artificial Sequence
  Description of Artificial Sequence: Synthetic oligonucleotide
ugguaaguuuucauggaaa

SEQ ID NO: 958836 - RNA, 19 nt, Artificial Sequence
  Description of Artificial Sequence: Synthetic oligonucleotide
ucacauauaacgucuccau

SEQ ID NO: 958837 - RNA, 19 nt, Artificial Sequence
  Description of Artificial Sequence: Synthetic oligonucleotide
uucuacucuugacauccag

SEQ ID NO: 958838 - RNA, 19 nt, Artificial Sequence
  Description of Artificial Sequence: Synthetic oligonucleotide
auacuuagcauuguugagu

SEQ ID NO: 958839 - RNA, 19 nt, Artificial Sequence
  Description of Artificial Sequence: Synthetic oligonucleotide
gauggggaaacaccauuug

SEQ ID NO: 958840 - RNA, 19 nt, Artificial Sequence
  Description of Artificial Sequence: Synthetic oligonucleotide
auuaguucacaaugcucug

SEQ ID NO: 958841 - RNA, 19 nt, Artificial Sequence
  Description of Artificial Sequence: Synthetic oligonucleotide
guaaucauucuacucuuga

SEQ ID NO: 958842 - RNA, 19 nt, Artificial Sequence
  Description of Artificial Sequence: Synthetic oligonucleotide
auugacucgaggguuaacu

SEQ ID NO: 958843 - RNA, 19 nt, Artificial Sequence
  Description of Artificial Sequence: Synthetic oligonucleotide
uggccgaacaaauaugcuc

SEQ ID NO: 958844 - RNA, 19 nt, Artificial Sequence
  Description of Artificial Sequence: Synthetic oligonucleotide
aucuaguggaucuauucaa

SEQ ID NO: 958845 - RNA, 19 nt, Artificial Sequence
  Description of Artificial Sequence: Synthetic oligonucleotide
uuaucgugggagcacccug

SEQ ID NO: 958846 - RNA, 19 nt, Artificial Sequence
  Description of Artificial Sequence: Synthetic oligonucleotide
gagagugcgauuuccuuca

SEQ ID NO: 958847 - RNA, 19 nt, Artificial Sequence
  Description of Artificial Sequence: Synthetic oligonucleotide
cuucaucgccuuuuggagc

SEQ ID NO: 958848 - RNA, 19 nt, Artificial Sequence
  Description of Artificial Sequence: Synthetic oligonucleotide
uguugcaaccugcauuuuc

SEQ ID NO: 958849 - RNA, 19 nt, Artificial Sequence
  Description of Artificial Sequence: Synthetic oligonucleotide
uguccagcgaugccaacca

SEQ ID NO: 958850 - RNA, 19 nt, Artificial Sequence
  Description of Artificial Sequence: Synthetic oligonucleotide
gaagcuacuuggccgaaca

SEQ ID NO: 958851 - RNA, 19 nt, Artificial Sequence
  Description of Artificial Sequence: Synthetic oligonucleotide
ugucaaucagacagcggga

SEQ ID NO: 958852 - RNA, 19 nt, Artificial Sequence
  Description of Artificial Sequence: Synthetic oligonucleotide
uacuuagcauuguugaguu

SEQ ID NO: 958853 - RNA, 19 nt, Artificial Sequence
  Description of Artificial Sequence: Synthetic oligonucleotide
uuugggugaggaagggaca

SEQ ID NO: 958854 - RNA, 19 nt, Artificial Sequence
  Description of Artificial Sequence: Synthetic oligonucleotide
auugcuaaggauaguagaa

SEQ ID NO: 958855 - RNA, 19 nt, Artificial Sequence
  Description of Artificial Sequence: Synthetic oligonucleotide
cugaauguccgcucuuccc

SEQ ID NO: 958856 - RNA, 19 nt, Artificial Sequence
  Description of Artificial Sequence: Synthetic oligonucleotide
ucgaggguuaacucccaag

SEQ ID NO: 958857 - RNA, 19 nt, Artificial Sequence
  Description of Artificial Sequence: Synthetic oligonucleotide
uccuaguaaucauucuacu

SEQ ID NO: 958858 - RNA, 19 nt, Artificial Sequence
  Description of Artificial Sequence: Synthetic oligonucleotide
uuuuaucgugggagcaccc

SEQ ID NO: 958859 - RNA, 19 nt, Artificial Sequence
  Description of Artificial Sequence: Synthetic oligonucleotide
caaauaugcucuuuccgga

SEQ ID NO: 958860 - RNA, 19 nt, Artificial Sequence
  Description of Artificial Sequence: Synthetic oligonucleotide
guaguuagcccaccgcagc

SEQ ID NO: 958861 - RNA, 19 nt, Artificial Sequence
  Description of Artificial Sequence: Synthetic oligonucleotide
gacucgaggguuaacuccc

SEQ ID NO: 958862 - RNA, 19 nt, Artificial Sequence
  Description of Artificial Sequence: Synthetic oligonucleotide
uauggagguuuguuuacuc

SEQ ID NO: 958863 - RNA, 19 nt, Artificial Sequence
  Description of Artificial Sequence: Synthetic oligonucleotide
aucacauauaacgucucca

SEQ ID NO: 958864 - RNA, 19 nt, Artificial Sequence
  Description of Artificial Sequence: Synthetic oligonucleotide
gggaguuuagcauuaguuc

SEQ ID NO: 958865 - RNA, 19 nt, Artificial Sequence
  Description of Artificial Sequence: Synthetic oligonucleotide
  modified_base (9)..(9): a, c, u, g, unknown or other
uucucccunaguccugaca

SEQ ID NO: 958866 - RNA, 19 nt, Artificial Sequence
  Description of Artificial Sequence: Synthetic oligonucleotide
  modified_base (6)..(6): a, c, u, g, unknown or other
aaaagngcaaucagagcuu

SEQ ID NO: 958867 - RNA, 19 nt, Artificial Sequence
  Description of Artificial Sequence: Synthetic oligonucleotide
caguuccuaguaaucauuc

SEQ ID NO: 958868 - RNA, 19 nt, Artificial Sequence
  Description of Artificial Sequence: Synthetic oligonucleotide
aguuccuaguaaucauucu

SEQ ID NO: 958869 - RNA, 19 nt, Artificial Sequence
  Description of Artificial Sequence: Synthetic oligonucleotide
gucuuucacuaaugcauag

SEQ ID NO: 958870 - RNA, 19 nt, Artificial Sequence
  Description of Artificial Sequence: Synthetic oligonucleotide
aacaccgucaugaccauuu

SEQ ID NO: 958871 - RNA, 19 nt, Artificial Sequence
  Description of Artificial Sequence: Synthetic oligonucleotide
ugucagcaaacacccaauc

SEQ ID NO: 958872 - RNA, 19 nt, Artificial Sequence
  Description of Artificial Sequence: Synthetic oligonucleotide
ccaguugacaauaauguca

SEQ ID NO: 958873 - RNA, 19 nt, Artificial Sequence
  Description of Artificial Sequence: Synthetic oligonucleotide
aaggauaguagaagcuacu

SEQ ID NO: 958874 - RNA, 19 nt, Artificial Sequence
  Description of Artificial Sequence: Synthetic oligonucleotide
  modified_base (6)..(6): a, c, u, g, unknown or other
ucccunaguccugacaugu

SEQ ID NO: 958875 - RNA, 19 nt, Artificial Sequence
  Description of Artificial Sequence: Synthetic oligonucleotide
gauuuuguugcaaccugca

SEQ ID NO: 958876 - RNA, 19 nt, Artificial Sequence
  Description of Artificial Sequence: Synthetic oligonucleotide
  modified_base (19)..(19): a, c, u, g, unknown or other
caaucagagcuucauuucn

SEQ ID NO: 958877 - RNA, 19 nt, Artificial Sequence
  Description of Artificial Sequence: Synthetic oligonucleotide
acaucgguggcugugacaa

SEQ ID NO: 958878 - RNA, 19 nt, Artificial Sequence
  Description of Artificial Sequence: Synthetic oligonucleotide
uugacucgaggguuaacuc

SEQ ID NO: 958879 - RNA, 19 nt, Artificial Sequence
  Description of Artificial Sequence: Synthetic oligonucleotide
ugccaaaguagugccaaug

SEQ ID NO: 958880 - RNA, 19 nt, Artificial Sequence
  Description of Artificial Sequence: Synthetic oligonucleotide
acauagaguucagacuaag

SEQ ID NO: 958881 - RNA, 19 nt, Artificial Sequence
  Description of Artificial Sequence: Synthetic oligonucleotide
aaguagugccaaugugaga

SEQ ID NO: 958882 - RNA, 19 nt, Artificial Sequence
  Description of Artificial Sequence: Synthetic oligonucleotide
ggugguaauaagcuuuuga

SEQ ID NO: 958883 - RNA, 19 nt, Artificial Sequence
  Description of Artificial Sequence: Synthetic oligonucleotide
aaacaccauuugaggagac

SEQ ID NO: 958884 - RNA, 19 nt, Artificial Sequence
  Description of Artificial Sequence: Synthetic oligonucleotide
aauugcuuaucuaguggau

SEQ ID NO: 958885 - RNA, 19 nt, Artificial Sequence
  Description of Artificial Sequence: Synthetic oligonucleotide
cauauugcuaaggauagua

SEQ ID NO: 958886 - RNA, 19 nt, Artificial Sequence
  Description of Artificial Sequence: Synthetic oligonucleotide
uaguuacaguucucaagcu

SEQ ID NO: 958887 - RNA, 19 nt, Artificial Sequence
  Description of Artificial Sequence: Synthetic oligonucleotide
uuggccgaacaaauaugcu

SEQ ID NO: 958888 - RNA, 19 nt, Artificial Sequence
  Description of Artificial Sequence: Synthetic oligonucleotide
ccuuacacccucuucauuc

SEQ ID NO: 958889 - RNA, 19 nt, Artificial Sequence
  Description of Artificial Sequence: Synthetic oligonucleotide
agacuaaggucacaaccaa

SEQ ID NO: 958890 - RNA, 19 nt, Artificial Sequence
  Description of Artificial Sequence: Synthetic oligonucleotide
ccucggacaacaucggugg

SEQ ID NO: 958891 - RNA, 19 nt, Artificial Sequence
  Description of Artificial Sequence: Synthetic oligonucleotide
acaccauuugaggagacau

SEQ ID NO: 958892 - RNA, 19 nt, Artificial Sequence
  Description of Artificial Sequence: Synthetic oligonucleotide
uucagacuaaggucacaac

SEQ ID NO: 958893 - RNA, 19 nt, Artificial Sequence
  Description of Artificial Sequence: Synthetic oligonucleotide
uugaggagacauagaguuc

SEQ ID NO: 958894 - RNA, 19 nt, Artificial Sequence
  Description of Artificial Sequence: Synthetic oligonucleotide
gacaacaucgguggcugug

SEQ ID NO: 958895 - RNA, 19 nt, Artificial Sequence
  Description of Artificial Sequence: Synthetic oligonucleotide
gugaugcacauauugcuaa

SEQ ID NO: 958896 - RNA, 19 nt, Artificial Sequence
  Description of Artificial Sequence: Synthetic oligonucleotide
uuccggaaucacauauaac

SEQ ID NO: 958897 - RNA, 19 nt, Artificial Sequence
  Description of Artificial Sequence: Synthetic oligonucleotide
uagugccaaugugagagug

SEQ ID NO: 958898 - RNA, 19 nt, Artificial Sequence
  Description of Artificial Sequence: Synthetic oligonucleotide
cagacagcgggauuccuuc

SEQ ID NO: 958899 - RNA, 19 nt, Artificial Sequence
  Description of Artificial Sequence: Synthetic oligonucleotide
  modified_base (2)..(2): a, c, u, g, unknown or other
unaguccugacaugucaau

SEQ ID NO: 958900 - RNA, 19 nt, Artificial Sequence
  Description of Artificial Sequence: Synthetic oligonucleotide
  modified_base (3)..(3): a, c, u, g, unknown or other
agngcaaucagagcuucau

SEQ ID NO: 958901 - RNA, 19 nt, Artificial Sequence
  Description of Artificial Sequence: Synthetic oligonucleotide
caagugguaguuagcccac

SEQ ID NO: 958902 - RNA, 19 nt, Artificial Sequence
  Description of Artificial Sequence: Synthetic oligonucleotide
uuuaucgugggagcacccu

SEQ ID NO: 958903 - RNA, 19 nt, Artificial Sequence
  Description of Artificial Sequence: Synthetic oligonucleotide
uuuugaaacccaggcaguu

SEQ ID NO: 958904 - RNA, 19 nt, Artificial Sequence
  Description of Artificial Sequence: Synthetic oligonucleotide
ccuaguaaucauucuacuc

SEQ ID NO: 958905 - RNA, 19 nt, Artificial Sequence
  Description of Artificial Sequence: Synthetic oligonucleotide
agcuacagauguaugugug

SEQ ID NO: 958906 - RNA, 19 nt, Artificial Sequence
  Description of Artificial Sequence: Synthetic oligonucleotide
gccuuuuggagccaccugc

SEQ ID NO: 958907 - RNA, 19 nt, Artificial Sequence
  Description of Artificial Sequence: Synthetic oligonucleotide
aggaagggcauacacucuu

SEQ ID NO: 958908 - RNA, 19 nt, Artificial Sequence
  Description of Artificial Sequence: Synthetic oligonucleotide
  modified_base (2)..(2): a, c, u, g, unknown or other
unuggaugucauccuucuc

SEQ ID NO: 958909 - RNA, 19 nt, Artificial Sequence
  Description of Artificial Sequence: Synthetic oligonucleotide
aaccugcauuuuccaagug

SEQ ID NO: 958910 - RNA, 19 nt, Artificial Sequence
  Description of Artificial Sequence: Synthetic oligonucleotide
ucacaaugcucugugguuu

SEQ ID NO: 958911 - RNA, 19 nt, Artificial Sequence
  Description of Artificial Sequence: Synthetic oligonucleotide
auuuugaaacccaggcagu

SEQ ID NO: 958912 - RNA, 19 nt, Artificial Sequence
  Description of Artificial Sequence: Synthetic oligonucleotide
gugguaguuagcccaccgc

SEQ ID NO: 958913 - RNA, 19 nt, Artificial Sequence
  Description of Artificial Sequence: Synthetic oligonucleotide
cuaaggauaguagaagcua

SEQ ID NO: 958914 - RNA, 19 nt, Artificial Sequence
  Description of Artificial Sequence: Synthetic oligonucleotide
acacucuugcaccaauuuu

SEQ ID NO: 958915 - RNA, 19 nt, Artificial Sequence
  Description of Artificial Sequence: Synthetic oligonucleotide
ccagcgaugccaaccaggg

SEQ ID NO: 958916 - RNA, 19 nt, Artificial Sequence
  Description of Artificial Sequence: Synthetic oligonucleotide
gaaucacauauaacgucuc

SEQ ID NO: 958917 - RNA, 19 nt, Artificial Sequence
  Description of Artificial Sequence: Synthetic oligonucleotide
caaucuugaugacuugcca

SEQ ID NO: 958918 - RNA, 19 nt, Artificial Sequence
  Description of Artificial Sequence: Synthetic oligonucleotide
  modified_base (3)..(3): a, c, u, g, unknown or other
cunaguccugacaugucaa

SEQ ID NO: 958919 - RNA, 19 nt, Artificial Sequence
  Description of Artificial Sequence: Synthetic oligonucleotide
auaagcugccaaaguagug

SEQ ID NO: 958920 - RNA, 19 nt, Artificial Sequence
  Description of Artificial Sequence: Synthetic oligonucleotide
  modified_base (8)..(8): a, c, u, g, unknown or other
ucauuucngcugauucaau

SEQ ID NO: 958921 - RNA, 19 nt, Artificial Sequence
  Description of Artificial Sequence: Synthetic oligonucleotide
aguaaucauucuacucuug

SEQ ID NO: 958922 - RNA, 19 nt, Artificial Sequence
  Description of Artificial Sequence: Synthetic oligonucleotide
cgaggguuaacucccaagg

SEQ ID NO: 958923 - RNA, 19 nt, Artificial Sequence
  Description of Artificial Sequence: Synthetic oligonucleotide
ucggacaacaucgguggcu

SEQ ID NO: 958924 - RNA, 19 nt, Artificial Sequence
  Description of Artificial Sequence: Synthetic oligonucleotide
  modified_base (12)..(12): a, c, u, g, unknown or other
cauucugcccunuggaugu

SEQ ID NO: 958925 - RNA, 19 nt, Artificial Sequence
  Description of Artificial Sequence: Synthetic oligonucleotide
ggggcuuuggaauggcuug

SEQ ID NO: 958926 - RNA, 19 nt, Artificial Sequence
  Description of Artificial Sequence: Synthetic oligonucleotide
  modified_base (7)..(7): a, c, u, g, unknown or other
cucccunaguccugacaug

SEQ ID NO: 958927 - RNA, 19 nt, Artificial Sequence
  Description of Artificial Sequence: Synthetic oligonucleotide
agaagcuacuuggccgaac

SEQ ID NO: 958928 - RNA, 19 nt, Artificial Sequence
  Description of Artificial Sequence: Synthetic oligonucleotide
acuuggccgaacaaauaug

SEQ ID NO: 958929 - RNA, 19 nt, Artificial Sequence
  Description of Artificial Sequence: Synthetic oligonucleotide
  modified_base (9)..(9): a, c, u, g, unknown or other
ucugcccunuggaugucau

SEQ ID NO: 958930 - RNA, 19 nt, Artificial Sequence
  Description of Artificial Sequence: Synthetic oligonucleotide
ggguauuuguuaaagaggu

SEQ ID NO: 958931 - RNA, 19 nt, Artificial Sequence
  Description of Artificial Sequence: Synthetic oligonucleotide
uggcauacuuagcauuguu

SEQ ID NO: 958932 - RNA, 19 nt, Artificial Sequence
  Description of Artificial Sequence: Synthetic oligonucleotide
ugaagucaagagccugcau

SEQ ID NO: 958933 - RNA, 19 nt, Artificial Sequence
  Description of Artificial Sequence: Synthetic oligonucleotide
auccgcuaagucacuguac

SEQ ID NO: 958934 - RNA, 19 nt, Artificial Sequence
  Description of Artificial Sequence: Synthetic oligonucleotide
acaaacugccggcagccua

SEQ ID NO: 958935 - RNA, 19 nt, Artificial Sequence
  Description of Artificial Sequence: Synthetic oligonucleotide
auauaacgucuccaugguu

SEQ ID NO: 958936 - RNA, 19 nt, Artificial Sequence
  Description of Artificial Sequence: Synthetic oligonucleotide
ucucaccuuccagagcccc

SEQ ID NO: 958937 - RNA, 19 nt, Artificial Sequence
  Description of Artificial Sequence: Synthetic oligonucleotide
guggaucuauucaaauuca

SEQ ID NO: 958938 - RNA, 19 nt, Artificial Sequence
  Description of Artificial Sequence: Synthetic oligonucleotide
agugaugcacauauugcua

SEQ ID NO: 958939 - RNA, 19 nt, Artificial Sequence
  Description of Artificial Sequence: Synthetic oligonucleotide
aagcuacuuggccgaacaa

SEQ ID NO: 958940 - RNA, 19 nt, Artificial Sequence
  Description of Artificial Sequence: Synthetic oligonucleotide
gagaccacugccaaggaau

SEQ ID NO: 958941 - RNA, 19 nt, Artificial Sequence
  Description of Artificial Sequence: Synthetic oligonucleotide
ucgguggcugugacaaacu

SEQ ID NO: 958942 - RNA, 19 nt, Artificial Sequence
  Description of Artificial Sequence: Synthetic oligonucleotide
ugaccauuuugggauucac

SEQ ID NO: 958943 - RNA, 19 nt, Artificial Sequence
  Description of Artificial Sequence: Synthetic oligonucleotide
acacccaaucuugaugacu

SEQ ID NO: 958944 - RNA, 19 nt, Artificial Sequence
  Description of Artificial Sequence: Synthetic oligonucleotide
uuacucuguuccagucaac

SEQ ID NO: 958945 - RNA, 19 nt, Artificial Sequence
  Description of Artificial Sequence: Synthetic oligonucleotide
  modified_base (2)..(2): a, c, u, g, unknown or other
cngcugauucaaugucagc

SEQ ID NO: 958946 - RNA, 19 nt, Artificial Sequence
  Description of Artificial Sequence: Synthetic oligonucleotide
ggaaucacauauaacgucu

SEQ ID NO: 958947 - RNA, 19 nt, Artificial Sequence
  Description of Artificial Sequence: Synthetic oligonucleotide
uaacgucuccaugguuccg

SEQ ID NO: 958948 - RNA, 19 nt, Artificial Sequence
  Description of Artificial Sequence: Synthetic oligonucleotide
gguaguuagcccaccgcag

SEQ ID NO: 958949 - RNA, 19 nt, Artificial Sequence
  Description of Artificial Sequence: Synthetic oligonucleotide
guuuagcauuaguucacaa

SEQ ID NO: 958950 - RNA, 19 nt, Artificial Sequence
  Description of Artificial Sequence: Synthetic oligonucleotide
gggauucacuucaaccagg

SEQ ID NO: 958951 - RNA, 19 nt, Artificial Sequence
  Description of Artificial Sequence: Synthetic oligonucleotide
uccaucacucccugcuauc

SEQ ID NO: 958952 - RNA, 19 nt, Artificial Sequence
  Description of Artificial Sequence: Synthetic oligonucleotide
cauagggaguuuagcauua

SEQ ID NO: 958953 - RNA, 19 nt, Artificial Sequence
  Description of Artificial Sequence: Synthetic oligonucleotide
ugggccuuacacccucuuc

SEQ ID NO: 958954 - RNA, 19 nt, Artificial Sequence
  Description of Artificial Sequence: Synthetic oligonucleotide
  modified_base (4)..(4): a, c, u, g, unknown or other
aagngcaaucagagcuuca

SEQ ID NO: 958955 - RNA, 19 nt, Artificial Sequence
  Description of Artificial Sequence: Synthetic oligonucleotide
gggccuuacacccucuuca

SEQ ID NO: 958956 - RNA, 19 nt, Artificial Sequence
  Description of Artificial Sequence: Synthetic oligonucleotide
ucccugcuauccccaagga

SEQ ID NO: 958957 - RNA, 19 nt, Artificial Sequence
  Description of Artificial Sequence: Synthetic oligonucleotide
agucuuucacuaaugcaua

SEQ ID NO: 958958 - RNA, 19 nt, Artificial Sequence
  Description of Artificial Sequence: Synthetic oligonucleotide
  modified_base (3)..(3): a, c, u, g, unknown or other
cunuggaugucauccuucu

SEQ ID NO: 958959 - RNA, 19 nt, Artificial Sequence
  Description of Artificial Sequence: Synthetic oligonucleotide
cauauaacgucuccauggu

SEQ ID NO: 958960 - RNA, 19 nt, Artificial Sequence
  Description of Artificial Sequence: Synthetic oligonucleotide
  modified_base (4)..(4): a, c, u, g, unknown or other
ccunuggaugucauccuuc

SEQ ID NO: 958961 - RNA, 19 nt, Artificial Sequence
  Description of Artificial Sequence: Synthetic oligonucleotide
gcuggaaagagucauuuau

SEQ ID NO: 958962 - RNA, 19 nt, Artificial Sequence
  Description of Artificial Sequence: Synthetic oligonucleotide
ucgccuuuuggagccaccu

SEQ ID NO: 958963 - RNA, 19 nt, Artificial Sequence
  Description of Artificial Sequence: Synthetic oligonucleotide
cauggagauggcauacuua

SEQ ID NO: 958964 - RNA, 19 nt, Artificial Sequence
  Description of Artificial Sequence: Synthetic oligonucleotide
guuaacucccaaggaguuc

SEQ ID NO: 958965 - RNA, 19 nt, Artificial Sequence
  Description of Artificial Sequence: Synthetic oligonucleotide
  modified_base (4)..(4): a, c, u, g, unknown or other
ccunaguccugacauguca

SEQ ID NO: 958966 - RNA, 19 nt, Artificial Sequence
  Description of Artificial Sequence: Synthetic oligonucleotide
ugauugacucgaggguuaa

SEQ ID NO: 958967 - RNA, 19 nt, Artificial Sequence
  Description of Artificial Sequence: Synthetic oligonucleotide
ucccucggacaacaucggu

SEQ ID NO: 958968 - RNA, 19 nt, Artificial Sequence
  Description of Artificial Sequence: Synthetic oligonucleotide
ugccaaugugagagugcga

SEQ ID NO: 958969 - RNA, 19 nt, Artificial Sequence
  Description of Artificial Sequence: Synthetic oligonucleotide
agaccacugccaaggaaug

SEQ ID NO: 958970 - RNA, 19 nt, Artificial Sequence
  Description of Artificial Sequence: Synthetic oligonucleotide
agccuagccucuccgccug

SEQ ID NO: 958971 - RNA, 19 nt, Artificial Sequence
  Description of Artificial Sequence: Synthetic oligonucleotide
gauagacaccuugggaaua

SEQ ID NO: 958972 - RNA, 19 nt, Artificial Sequence
  Description of Artificial Sequence: Synthetic oligonucleotide
agcgggauuccuucuucau

SEQ ID NO: 958973 - RNA, 19 nt, Artificial Sequence
  Description of Artificial Sequence: Synthetic oligonucleotide
gaugaucagggcauccgcu

SEQ ID NO: 958974 - RNA, 19 nt, Artificial Sequence
  Description of Artificial Sequence: Synthetic oligonucleotide
cuuuccggaaucacauaua

SEQ ID NO: 958975 - RNA, 19 nt, Artificial Sequence
  Description of Artificial Sequence: Synthetic oligonucleotide
aucgccuuuuggagccacc

SEQ ID NO: 958976 - RNA, 19 nt, Artificial Sequence
  Description of Artificial Sequence: Synthetic oligonucleotide
gacuaaggucacaaccaaa

SEQ ID NO: 958977 - RNA, 19 nt, Artificial Sequence
  Description of Artificial Sequence: Synthetic oligonucleotide
cuaguggaucuauucaaau

SEQ ID NO: 958978 - RNA, 19 nt, Artificial Sequence
  Description of Artificial Sequence: Synthetic oligonucleotide
gacauagaguucagacuaa

SEQ ID NO: 958979 - RNA, 19 nt, Artificial Sequence
  Description of Artificial Sequence: Synthetic oligonucleotide
gugcgauuuccuucauuga

SEQ ID NO: 958980 - RNA, 19 nt, Artificial Sequence
  Description of Artificial Sequence: Synthetic oligonucleotide
agucaagagccugcaucug

SEQ ID NO: 958981 - RNA, 19 nt, Artificial Sequence
  Description of Artificial Sequence: Synthetic oligonucleotide
cccucggacaacaucggug

SEQ ID NO: 958982 - RNA, 19 nt, Artificial Sequence
  Description of Artificial Sequence: Synthetic oligonucleotide
caacaucgguggcugugac

SEQ ID NO: 958983 - RNA, 19 nt, Artificial Sequence
  Description of Artificial Sequence: Synthetic oligonucleotide
ugguuccggggcuuuggaa

SEQ ID NO: 958984 - RNA, 19 nt, Artificial Sequence
  Description of Artificial Sequence: Synthetic oligonucleotide
cucggacaacaucgguggc

SEQ ID NO: 958985 - RNA, 19 nt, Artificial Sequence
  Description of Artificial Sequence: Synthetic oligonucleotide
cugcaucugcacugcuuug

SEQ ID NO: 958986 - RNA, 19 nt, Artificial Sequence
  Description of Artificial Sequence: Synthetic oligonucleotide
aggaagggacauauauuau

SEQ ID NO: 958987 - RNA, 19 nt, Artificial Sequence
  Description of Artificial Sequence: Synthetic oligonucleotide
uacugguugggagcuggaa

SEQ ID NO: 958988 - RNA, 19 nt, Artificial Sequence
  Description of Artificial Sequence: Synthetic oligonucleotide
ugcuuaucuaguggaucua

SEQ ID NO: 958989 - RNA, 19 nt, Artificial Sequence
  Description of Artificial Sequence: Synthetic oligonucleotide
cacccaaucuugaugacuu

SEQ ID NO: 958990 - RNA, 19 nt, Artificial Sequence
  Description of Artificial Sequence: Synthetic oligonucleotide
ggaucuauucaaauucaua

SEQ ID NO: 958991 - RNA, 19 nt, Artificial Sequence
  Description of Artificial Sequence: Synthetic oligonucleotide
gauugacucgaggguuaac

SEQ ID NO: 958992 - RNA, 19 nt, Artificial Sequence
  Description of Artificial Sequence: Synthetic oligonucleotide
acuaaugcauagggaguuu

SEQ ID NO: 958993 - RNA, 19 nt, Artificial Sequence
  Description of Artificial Sequence: Synthetic oligonucleotide
cuaaugcauagggaguuua

SEQ ID NO: 958994 - RNA, 19 nt, Artificial Sequence
  Description of Artificial Sequence: Synthetic oligonucleotide
gguucccucggacaacauc

SEQ ID NO: 958995 - RNA, 19 nt, Artificial Sequence
  Description of Artificial Sequence: Synthetic oligonucleotide
uguccgcucuucccuuguc

SEQ ID NO: 958996 - RNA, 19 nt, Artificial Sequence
  Description of Artificial Sequence: Synthetic oligonucleotide
gcgauuuccuucauugaga

SEQ ID NO: 958997 - RNA, 19 nt, Artificial Sequence
  Description of Artificial Sequence: Synthetic oligonucleotide
cauuugggugaggaaggga

SEQ ID NO: 958998 - RNA, 19 nt, Artificial Sequence
  Description of Artificial Sequence: Synthetic oligonucleotide
guccagcgaugccaaccag

SEQ ID NO: 958999 - RNA, 19 nt, Artificial Sequence
  Description of Artificial Sequence: Synthetic oligonucleotide
cagcuacagauguaugugu

SEQ ID NO: 959000 - RNA, 19 nt, Artificial Sequence
  Description of Artificial Sequence: Synthetic oligonucleotide
ugcuauccccaaggaagau

SEQ ID NO: 959001 - RNA, 19 nt, Artificial Sequence
  Description of Artificial Sequence: Synthetic oligonucleotide
caccauuugaggagacaua

SEQ ID NO: 959002 - RNA, 19 nt, Artificial Sequence
  Description of Artificial Sequence: Synthetic oligonucleotide
cuuaucuaguggaucuauu

SEQ ID NO: 959003 - RNA, 19 nt, Artificial Sequence
  Description of Artificial Sequence: Synthetic oligonucleotide
gagcuggaaagagucauuu

SEQ ID NO: 959004 - RNA, 19 nt, Artificial Sequence
  Description of Artificial Sequence: Synthetic oligonucleotide
gguuccggggcuuuggaau

SEQ ID NO: 959005 - RNA, 19 nt, Artificial Sequence
  Description of Artificial Sequence: Synthetic oligonucleotide
gcgggauuccuucuucauc

SEQ ID NO: 959006 - RNA, 19 nt, Artificial Sequence
  Description of Artificial Sequence: Synthetic oligonucleotide
ggguuaacucccaaggagu

SEQ ID NO: 959007 - RNA, 19 nt, Artificial Sequence
  Description of Artificial Sequence: Synthetic oligonucleotide
cagauccacugcauaguua

SEQ ID NO: 959008 - RNA, 19 nt, Artificial Sequence
  Description of Artificial Sequence: Synthetic oligonucleotide
  modified_base (2)..(2): a, c, u, g, unknown or other
gngcaaucagagcuucauu

SEQ ID NO: 959009 - RNA, 19 nt, Artificial Sequence
  Description of Artificial Sequence: Synthetic oligonucleotide
gcugccaaaguagugccaa

SEQ ID NO: 959010 - RNA, 19 nt, Artificial Sequence
  Description of Artificial Sequence: Synthetic oligonucleotide
cauacacucuugcaccaau

SEQ ID NO: 959011 - RNA, 19 nt, Artificial Sequence
  Description of Artificial Sequence: Synthetic oligonucleotide
agagugcgauuuccuucau

SEQ ID NO: 959012 - RNA, 19 nt, Artificial Sequence
  Description of Artificial Sequence: Synthetic oligonucleotide
gggaaaauuuagcuugauu

SEQ ID NO: 959013 - RNA, 19 nt, Artificial Sequence
  Description of Artificial Sequence: Synthetic oligonucleotide
gcuugauucuuccccagau

SEQ ID NO: 959014 - RNA, 19 nt, Artificial Sequence
  Description of Artificial Sequence: Synthetic oligonucleotide
gcauagggaguuuagcauu

SEQ ID NO: 959015 - RNA, 19 nt, Artificial Sequence
  Description of Artificial Sequence: Synthetic oligonucleotide
guagugccaaugugagagu

SEQ ID NO: 959016 - RNA, 19 nt, Artificial Sequence
  Description of Artificial Sequence: Synthetic oligonucleotide
cacuaaugcauagggaguu

SEQ ID NO: 959017 - RNA, 19 nt, Artificial Sequence
  Description of Artificial Sequence: Synthetic oligonucleotide
caaugaaagccagguucaa

SEQ ID NO: 959018 - RNA, 19 nt, Artificial Sequence
  Description of Artificial Sequence: Synthetic oligonucleotide
caucuguagaagaguggau

SEQ ID NO: 959019 - RNA, 19 nt, Artificial Sequence
  Description of Artificial Sequence: Synthetic oligonucleotide
ccggaaucacauauaacgu

SEQ ID NO: 959020 - RNA, 19 nt, Artificial Sequence
  Description of Artificial Sequence: Synthetic oligonucleotide
gguucaacuugggguuccc

SEQ ID NO: 959021 - RNA, 19 nt, Artificial Sequence
  Description of Artificial Sequence: Synthetic oligonucleotide
ggcauccgcuaagucacug

SEQ ID NO: 959022 - RNA, 19 nt, Artificial Sequence
  Description of Artificial Sequence: Synthetic oligonucleotide
ggaauggcuuguauguccu

SEQ ID NO: 959023 - RNA, 19 nt, Artificial Sequence
  Description of Artificial Sequence: Synthetic oligonucleotide
cucuuuccggaaucacaua

SEQ ID NO: 959024 - RNA, 19 nt, Artificial Sequence
  Description of Artificial Sequence: Synthetic oligonucleotide
auacugguugggagcugga

SEQ ID NO: 959025 - RNA, 19 nt, Artificial Sequence
  Description of Artificial Sequence: Synthetic oligonucleotide
acucgaggguuaacuccca

SEQ ID NO: 959026 - RNA, 19 nt, Artificial Sequence
  Description of Artificial Sequence: Synthetic oligonucleotide
cucgaggguuaacucccaa

SEQ ID NO: 959027 - RNA, 19 nt, Artificial Sequence
  Description of Artificial Sequence: Synthetic oligonucleotide
  modified_base (5)..(5): a, c, u, g, unknown or other
cccunaguccugacauguc

SEQ ID NO: 959028 - RNA, 19 nt, Artificial Sequence
  Description of Artificial Sequence: Synthetic oligonucleotide
uuguugcaaccugcauuuu

SEQ ID NO: 959029 - RNA, 19 nt, Artificial Sequence
  Description of Artificial Sequence: Synthetic oligonucleotide
gagugcgauuuccuucauu

SEQ ID NO: 959030 - RNA, 19 nt, Artificial Sequence
  Description of Artificial Sequence: Synthetic oligonucleotide
gcuauccccaaggaagaua

SEQ ID NO: 959031 - RNA, 19 nt, Artificial Sequence
  Description of Artificial Sequence: Synthetic oligonucleotide
agcuuaggguauggagguu

SEQ ID NO: 959032 - RNA, 19 nt, Artificial Sequence
  Description of Artificial Sequence: Synthetic oligonucleotide
gcuuaucuaguggaucuau

SEQ ID NO: 959033 - RNA, 19 nt, Artificial Sequence
  Description of Artificial Sequence: Synthetic oligonucleotide
caggauggggaaacaccau

SEQ ID NO: 959034 - RNA, 19 nt, Artificial Sequence
  Description of Artificial Sequence: Synthetic oligonucleotide
gcauccgcuaagucacugu

SEQ ID NO: 959035 - RNA, 19 nt, Artificial Sequence
  Description of Artificial Sequence: Synthetic oligonucleotide
ccuuuuggagccaccugcu

SEQ ID NO: 959036 - RNA, 19 nt, Artificial Sequence
  Description of Artificial Sequence: Synthetic oligonucleotide
cagauucagcagagauacu

SEQ ID NO: 959037 - RNA, 19 nt, Artificial Sequence
  Description of Artificial Sequence: Synthetic oligonucleotide
caucgguggcugugacaaa

SEQ ID NO: 959038 - RNA, 19 nt, Artificial Sequence
  Description of Artificial Sequence: Synthetic oligonucleotide
  modified_base (6)..(6): a, c, u, g, unknown or other
gcccunuggaugucauccu

SEQ ID NO: 959039 - RNA, 19 nt, Artificial Sequence
  Description of Artificial Sequence: Synthetic oligonucleotide
ccgcuaagucacuguacaa

SEQ ID NO: 959040 - RNA, 19 nt, Artificial Sequence
  Description of Artificial Sequence: Synthetic oligonucleotide
gccuagccucuccgccugc

SEQ ID NO: 959041 - RNA, 19 nt, Artificial Sequence
  Description of Artificial Sequence: Synthetic oligonucleotide
  modified_base (5)..(5): a, c, u, g, unknown or other
cccunuggaugucauccuu

SEQ ID NO: 959042 - RNA, 19 nt, Artificial Sequence
  Description of Artificial Sequence: Synthetic oligonucleotide
ccaaugugagagugcgauu

SEQ ID NO: 959043 - RNA, 19 nt, Artificial Sequence
  Description of Artificial Sequence: Synthetic oligonucleotide
gccggcagccuagccucuc

SEQ ID NO: 959044 - RNA, 19 nt, Artificial Sequence
  Description of Artificial Sequence: Synthetic oligonucleotide
cggggcuuuggaauggcuu

SEQ ID NO: 959045 - RNA, 19 nt, Artificial Sequence
  Description of Artificial Sequence: Synthetic oligonucleotide
ccgaacaaauaugcucuuu

SEQ ID NO: 959046 - RNA, 19 nt, Artificial Sequence
  Description of Artificial Sequence: Synthetic oligonucleotide
gggcauccgcuaagucacu

SEQ ID NO: 959047 - RNA, 19 nt, Artificial Sequence
  Description of Artificial Sequence: Synthetic oligonucleotide
uuaaauauagguccuaagg

SEQ ID NO: 959048 - RNA, 19 nt, Artificial Sequence
  Description of Artificial Sequence: Synthetic oligonucleotide
aaauauagguccuaagggg

SEQ ID NO: 959049 - RNA, 19 nt, Artificial Sequence
  Description of Artificial Sequence: Synthetic oligonucleotide
uaaauauagguccuaaggg

SEQ ID NO: 959050 - RNA, 19 nt, Artificial Sequence
  Description of Artificial Sequence: Synthetic oligonucleotide
aauaccuuggacuucagcu

SEQ ID NO: 959051 - RNA, 19 nt, Artificial Sequence
  Description of Artificial Sequence: Synthetic oligonucleotide
ugucuuauuaaauauaggu

SEQ ID NO: 959052 - RNA, 19 nt, Artificial Sequence
  Description of Artificial Sequence: Synthetic oligonucleotide
aaauagacacuucuuuugg

SEQ ID NO: 959053 - RNA, 19 nt, Artificial Sequence
  Description of Artificial Sequence: Synthetic oligonucleotide
aggagaaucaaacuuuggc

SEQ ID NO: 959054 - RNA, 19 nt, Artificial Sequence
  Description of Artificial Sequence: Synthetic oligonucleotide
aauauaaacuggauagccc

SEQ ID NO: 959055 - RNA, 19 nt, Artificial Sequence
  Description of Artificial Sequence: Synthetic oligonucleotide
cuuauaguaggccagcucc

SEQ ID NO: 959056 - RNA, 19 nt, Artificial Sequence
  Description of Artificial Sequence: Synthetic oligonucleotide
uuugguuuuggcaucaggu

SEQ ID NO: 959057 - RNA, 19 nt, Artificial Sequence
  Description of Artificial Sequence: Synthetic oligonucleotide
aaaucaacaaggucuggcu

SEQ ID NO: 959058 - RNA, 19 nt, Artificial Sequence
  Description of Artificial Sequence: Synthetic oligonucleotide
aaucaaacuuuggcgacgc

SEQ ID NO: 959059 - RNA, 19 nt, Artificial Sequence
  Description of Artificial Sequence: Synthetic oligonucleotide
uaaacagucgcuugauucc

SEQ ID NO: 959060 - RNA, 19 nt, Artificial Sequence
  Description of Artificial Sequence: Synthetic oligonucleotide
ucgagaaucuccaggaccc

SEQ ID NO: 959061 - RNA, 19 nt, Artificial Sequence
  Description of Artificial Sequence: Synthetic oligonucleotide
agaaucaaacuuuggcgac

SEQ ID NO: 959062 - RNA, 19 nt, Artificial Sequence
  Description of Artificial Sequence: Synthetic oligonucleotide
cuaaacagucgcuugauuc

SEQ ID NO: 959063 - RNA, 19 nt, Artificial Sequence
  Description of Artificial Sequence: Synthetic oligonucleotide
uguguacccaucaucucgg

SEQ ID NO: 959064 - RNA, 19 nt, Artificial Sequence
  Description of Artificial Sequence: Synthetic oligonucleotide
uagcccugcagauaaauag

SEQ ID NO: 959065 - RNA, 19 nt, Artificial Sequence
  Description of Artificial Sequence: Synthetic oligonucleotide
ucaaacuuuggcgacgccg

SEQ ID NO: 959066 - RNA, 19 nt, Artificial Sequence
  Description of Artificial Sequence: Synthetic oligonucleotide
uaacucguggaacuugggg

SEQ ID NO: 959067 - RNA, 19 nt, Artificial Sequence
  Description of Artificial Sequence: Synthetic oligonucleotide
cuugauuccagacuccggc

SEQ ID NO: 959068 - RNA, 19 nt, Artificial Sequence
  Description of Artificial Sequence: Synthetic oligonucleotide
gagaaucaaacuuuggcga

SEQ ID NO: 959069 - RNA, 19 nt, Artificial Sequence
  Description of Artificial Sequence: Synthetic oligonucleotide
agcaggaauaccuuggacu

SEQ ID NO: 959070 - RNA, 19 nt, Artificial Sequence
  Description of Artificial Sequence: Synthetic oligonucleotide
acgaccuugggcaugaggc

SEQ ID NO: 959071 - RNA, 19 nt, Artificial Sequence
  Description of Artificial Sequence: Synthetic oligonucleotide
aauauagguccuaaggggu

SEQ ID NO: 959072 - RNA, 19 nt, Artificial Sequence
  Description of Artificial Sequence: Synthetic oligonucleotide
uguugaggcagccacccag

SEQ ID NO: 959073 - RNA, 19 nt, Artificial Sequence
  Description of Artificial Sequence: Synthetic oligonucleotide
aguauuugcccacuggcca

SEQ ID NO: 959074 - RNA, 19 nt, Artificial Sequence
  Description of Artificial Sequence: Synthetic oligonucleotide
acuugcagcuccgacaagc

SEQ ID NO: 959075 - RNA, 19 nt, Artificial Sequence
  Description of Artificial Sequence: Synthetic oligonucleotide
guccuaaggggucagaggc

SEQ ID NO: 959076 - RNA, 19 nt, Artificial Sequence
  Description of Artificial Sequence: Synthetic oligonucleotide
uggauagcccugcagauaa

SEQ ID NO: 959077 - RNA, 19 nt, Artificial Sequence
  Description of Artificial Sequence: Synthetic oligonucleotide
ucacucuuauaguaggcca

SEQ ID NO: 959078 - RNA, 19 nt, Artificial Sequence
  Description of Artificial Sequence: Synthetic oligonucleotide
agacaguucguuugagggg

SEQ ID NO: 959079 - RNA, 19 nt, Artificial Sequence
  Description of Artificial Sequence: Synthetic oligonucleotide
aagcuaaacagucgcuuga

SEQ ID NO: 959080 - RNA, 19 nt, Artificial Sequence
  Description of Artificial Sequence: Synthetic oligonucleotide
cucgcagccguguuggucg

SEQ ID NO: 959081 - RNA, 19 nt, Artificial Sequence
  Description of Artificial Sequence: Synthetic oligonucleotide
gaacucguggcccacgagc

SEQ ID NO: 959082 - RNA, 19 nt, Artificial Sequence
  Description of Artificial Sequence: Synthetic oligonucleotide
gaaucaaacuuuggcgacg

SEQ ID NO: 959083 - RNA, 19 nt, Artificial Sequence
  Description of Artificial Sequence: Synthetic oligonucleotide
uaugaugggcggagguugg

SEQ ID NO: 959084 - RNA, 19 nt, Artificial Sequence
  Description of Artificial Sequence: Synthetic oligonucleotide
ucgaugacccucucgaacu

SEQ ID NO: 959085 - RNA, 19 nt, Artificial Sequence
  Description of Artificial Sequence: Synthetic oligonucleotide
uucacucuuauaguaggcc

SEQ ID NO: 959086 - RNA, 19 nt, Artificial Sequence
  Description of Artificial Sequence: Synthetic oligonucleotide
aaaagcuaaacagucgcuu

SEQ ID NO: 959087 - RNA, 19 nt, Artificial Sequence
  Description of Artificial Sequence: Synthetic oligonucleotide
uuggguguaugaugggcgg

SEQ ID NO: 959088 - RNA, 19 nt, Artificial Sequence
  Description of Artificial Sequence: Synthetic oligonucleotide
guacccaucaucucgguga

SEQ ID NO: 959089 - RNA, 19 nt, Artificial Sequence
  Description of Artificial Sequence: Synthetic oligonucleotide
agauccuugucuuauuaaa

SEQ ID NO: 959090 - RNA, 19 nt, Artificial Sequence
  Description of Artificial Sequence: Synthetic oligonucleotide
acuuuggcgacgccgagug

SEQ ID NO: 959091 - RNA, 19 nt, Artificial Sequence
  Description of Artificial Sequence: Synthetic oligonucleotide
aaucaacaaggucuggcuu

SEQ ID NO: 959092 - RNA, 19 nt, Artificial Sequence
  Description of Artificial Sequence: Synthetic oligonucleotide
cuugaauauaaacuggaua

SEQ ID NO: 959093 - RNA, 19 nt, Artificial Sequence
  Description of Artificial Sequence: Synthetic oligonucleotide
augucguacacguccauga

SEQ ID NO: 959094 - RNA, 19 nt, Artificial Sequence
  Description of Artificial Sequence: Synthetic oligonucleotide
aaggacucauggaugugcg

SEQ ID NO: 959095 - RNA, 19 nt, Artificial Sequence
  Description of Artificial Sequence: Synthetic oligonucleotide
uucuauuucuucacucuua

SEQ ID NO: 959096 - RNA, 19 nt, Artificial Sequence
  Description of Artificial Sequence: Synthetic oligonucleotide
gucgcuugauuccagacuc

SEQ ID NO: 959097 - RNA, 19 nt, Artificial Sequence
  Description of Artificial Sequence: Synthetic oligonucleotide
ucucggugaguauuugccc

SEQ ID NO: 959098 - RNA, 19 nt, Artificial Sequence
  Description of Artificial Sequence: Synthetic oligonucleotide
agcucguccagcucgggag

SEQ ID NO: 959099 - RNA, 19 nt, Artificial Sequence
  Description of Artificial Sequence: Synthetic oligonucleotide
ugcuuauucuccucuugca

SEQ ID NO: 959100 - RNA, 19 nt, Artificial Sequence
  Description of Artificial Sequence: Synthetic oligonucleotide
cagaaccucgagaaucucc

SEQ ID NO: 959101 - RNA, 19 nt, Artificial Sequence
  Description of Artificial Sequence: Synthetic oligonucleotide
ugcagcgugaaccgagggc

SEQ ID NO: 959102 - RNA, 19 nt, Artificial Sequence
  Description of Artificial Sequence: Synthetic oligonucleotide
gaauaccuuggacuucagc

SEQ ID NO: 959103 - RNA, 19 nt, Artificial Sequence
  Description of Artificial Sequence: Synthetic oligonucleotide
uuggcaucagguuuucauc

SEQ ID NO: 959104 - RNA, 19 nt, Artificial Sequence
  Description of Artificial Sequence: Synthetic oligonucleotide
ucaccugccgcucacgcuc

SEQ ID NO: 959105 - RNA, 19 nt, Artificial Sequence
  Description of Artificial Sequence: Synthetic oligonucleotide
auccuugucuuauuaaaua

SEQ ID NO: 959106 - RNA, 19 nt, Artificial Sequence
  Description of Artificial Sequence: Synthetic oligonucleotide
uuuggcgacgccgagugac

SEQ ID NO: 959107 - RNA, 19 nt, Artificial Sequence
  Description of Artificial Sequence: Synthetic oligonucleotide
acguccuugugguugaggu

SEQ ID NO: 959108 - RNA, 19 nt, Artificial Sequence
  Description of Artificial Sequence: Synthetic oligonucleotide
uuugcccacuggccaaagg

SEQ ID NO: 959109 - RNA, 19 nt, Artificial Sequence
  Description of Artificial Sequence: Synthetic oligonucleotide
uucguuugaggggucaaug

SEQ ID NO: 959110 - RNA, 19 nt, Artificial Sequence
  Description of Artificial Sequence: Synthetic oligonucleotide
cucaaugcgguccauccuc

SEQ ID NO: 959111 - RNA, 19 nt, Artificial Sequence
  Description of Artificial Sequence: Synthetic oligonucleotide
uguacccaucaucucggug

SEQ ID NO: 959112 - RNA, 19 nt, Artificial Sequence
  Description of Artificial Sequence: Synthetic oligonucleotide
agucgcuugauuccagacu

SEQ ID NO: 959113 - RNA, 19 nt, Artificial Sequence
  Description of Artificial Sequence: Synthetic oligonucleotide
uucauuagccucgucugcu

SEQ ID NO: 959114 - RNA, 19 nt, Artificial Sequence
  Description of Artificial Sequence: Synthetic oligonucleotide
augacggucagcuccgcca

SEQ ID NO: 959115 - RNA, 19 nt, Artificial Sequence
  Description of Artificial Sequence: Synthetic oligonucleotide
ugggguauucgauucuccu

SEQ ID NO: 959116 - RNA, 19 nt, Artificial Sequence
  Description of Artificial Sequence: Synthetic oligonucleotide
aaacagucgcuugauucca

SEQ ID NO: 959117 - RNA, 19 nt, Artificial Sequence
  Description of Artificial Sequence: Synthetic oligonucleotide
ucucucgaagcuucccgag

SEQ ID NO: 959118 - RNA, 19 nt, Artificial Sequence
  Description of Artificial Sequence: Synthetic oligonucleotide
guccacucgggguaacucg

SEQ ID NO: 959119 - RNA, 19 nt, Artificial Sequence
  Description of Artificial Sequence: Synthetic oligonucleotide
gacgugggcuuggagaggg

SEQ ID NO: 959120 - RNA, 19 nt, Artificial Sequence
  Description of Artificial Sequence: Synthetic oligonucleotide
guaugaugggcggagguug

SEQ ID NO: 959121 - RNA, 19 nt, Artificial Sequence
  Description of Artificial Sequence: Synthetic oligonucleotide
auauagguccuaagggguc

SEQ ID NO: 959122 - RNA, 19 nt, Artificial Sequence
  Description of Artificial Sequence: Synthetic oligonucleotide
caaacuuuggcgacgccga

SEQ ID NO: 959123 - RNA, 19 nt, Artificial Sequence
  Description of Artificial Sequence: Synthetic oligonucleotide
aguaggugguaggcggucc

SEQ ID NO: 959124 - RNA, 19 nt, Artificial Sequence
  Description of Artificial Sequence: Synthetic oligonucleotide
uauagguccuaagggguca

SEQ ID NO: 959125 - RNA, 19 nt, Artificial Sequence
  Description of Artificial Sequence: Synthetic oligonucleotide
agcuuaggaggcuuguuau

SEQ ID NO: 959126 - RNA, 19 nt, Artificial Sequence
  Description of Artificial Sequence: Synthetic oligonucleotide
ucucgaagcuucccgaguu

SEQ ID NO: 959127 - RNA, 19 nt, Artificial Sequence
  Description of Artificial Sequence: Synthetic oligonucleotide
uccuaaggggucagaggcc

SEQ ID NO: 959128 - RNA, 19 nt, Artificial Sequence
  Description of Artificial Sequence: Synthetic oligonucleotide
uuaggaggcuuguuauuaa

SEQ ID NO: 959129 - RNA, 19 nt, Artificial Sequence
  Description of Artificial Sequence: Synthetic oligonucleotide
ugugcgugggucucugugu

SEQ ID NO: 959130 - RNA, 19 nt, Artificial Sequence
  Description of Artificial Sequence: Synthetic oligonucleotide
acaagcagcgauggagacg

SEQ ID NO: 959131 - RNA, 19 nt, Artificial Sequence
  Description of Artificial Sequence: Synthetic oligonucleotide
gaugacccucucgaacucg

SEQ ID NO: 959132 - RNA, 19 nt, Artificial Sequence
  Description of Artificial Sequence: Synthetic oligonucleotide
guugcagagccucaacguc

SEQ ID NO: 959133 - RNA, 19 nt, Artificial Sequence
  Description of Artificial Sequence: Synthetic oligonucleotide
agaggggacgcgcgucucc

SEQ ID NO: 959134 - RNA, 19 nt, Artificial Sequence
  Description of Artificial Sequence: Synthetic oligonucleotide
ugugguugagguuggucau

SEQ ID NO: 959135 - RNA, 19 nt, Artificial Sequence
  Description of Artificial Sequence: Synthetic oligonucleotide
ucaaugcgguccauccucu

SEQ ID NO: 959136 - RNA, 19 nt, Artificial Sequence
  Description of Artificial Sequence: Synthetic oligonucleotide
aucaaacuuuggcgacgcc

SEQ ID NO: 959137 - RNA, 19 nt, Artificial Sequence
  Description of Artificial Sequence: Synthetic oligonucleotide
ugucguacacguccaugac

SEQ ID NO: 959138 - RNA, 19 nt, Artificial Sequence
  Description of Artificial Sequence: Synthetic oligonucleotide
gacgcgaugucguacacgu

SEQ ID NO: 959139 - RNA, 19 nt, Artificial Sequence
  Description of Artificial Sequence: Synthetic oligonucleotide
gguaacucguggaacuugg

SEQ ID NO: 959140 - RNA, 19 nt, Artificial Sequence
  Description of Artificial Sequence: Synthetic oligonucleotide
gucgaugacccucucgaac

SEQ ID NO: 959141 - RNA, 19 nt, Artificial Sequence
  Description of Artificial Sequence: Synthetic oligonucleotide
agcuccgccacguucuucu

SEQ ID NO: 959142 - RNA, 19 nt, Artificial Sequence
  Description of Artificial Sequence: Synthetic oligonucleotide
gcagcgugaaccgagggcg

SEQ ID NO: 959143 - RNA, 19 nt, Artificial Sequence
  Description of Artificial Sequence: Synthetic oligonucleotide
uggcucguaucucaucccu

SEQ ID NO: 959144 - RNA, 19 nt, Artificial Sequence
  Description of Artificial Sequence: Synthetic oligonucleotide
gacgcuacgaggcgacgug

SEQ ID NO: 959145 - RNA, 19 nt, Artificial Sequence
  Description of Artificial Sequence: Synthetic oligonucleotide
gaaccgagggcgguugggg

SEQ ID NO: 959146 - RNA, 19 nt, Artificial Sequence
  Description of Artificial Sequence: Synthetic oligonucleotide
gacaagcagcgauggagac

SEQ ID NO: 959147 - RNA, 19 nt, Artificial Sequence
  Description of Artificial Sequence: Synthetic oligonucleotide
ugaugggcggagguugggg

SEQ ID NO: 959148 - RNA, 19 nt, Artificial Sequence
  Description of Artificial Sequence: Synthetic oligonucleotide
gguccuaaggggucagagg

SEQ ID NO: 959149 - RNA, 19 nt, Artificial Sequence
  Description of Artificial Sequence: Synthetic oligonucleotide
uuggcucguaucucauccc

SEQ ID NO: 959150 - RNA, 19 nt, Artificial Sequence
  Description of Artificial Sequence: Synthetic oligonucleotide
ugaaccgagggcgguuggg

SEQ ID NO: 959151 - RNA, 19 nt, Artificial Sequence
  Description of Artificial Sequence: Synthetic oligonucleotide
ucgaacucguggcccacga

SEQ ID NO: 959152 - RNA, 19 nt, Artificial Sequence
  Description of Artificial Sequence: Synthetic oligonucleotide
cucggugaguauuugccca

SEQ ID NO: 959153 - RNA, 19 nt, Artificial Sequence
  Description of Artificial Sequence: Synthetic oligonucleotide
ugacggucagcuccgccac

SEQ ID NO: 959154 - RNA, 19 nt, Artificial Sequence
  Description of Artificial Sequence: Synthetic oligonucleotide
gaccuugggcaugaggcgc

SEQ ID NO: 959155 - RNA, 19 nt, Artificial Sequence
  Description of Artificial Sequence: Synthetic oligonucleotide
ucggugaguauuugcccac

SEQ ID NO: 959156 - RNA, 19 nt, Artificial Sequence
  Description of Artificial Sequence: Synthetic oligonucleotide
ugcagccucucucgaagcu

SEQ ID NO: 959157 - RNA, 19 nt, Artificial Sequence
  Description of Artificial Sequence: Synthetic oligonucleotide
ggccuugaauauaaacugg

SEQ ID NO: 959158 - RNA, 19 nt, Artificial Sequence
  Description of Artificial Sequence: Synthetic oligonucleotide
agcgacgcgaugucguaca

SEQ ID NO: 959159 - RNA, 19 nt, Artificial Sequence
  Description of Artificial Sequence: Synthetic oligonucleotide
cacucgggguaacucgugg

SEQ ID NO: 959160 - RNA, 19 nt, Artificial Sequence
  Description of Artificial Sequence: Synthetic oligonucleotide
agguccuaaggggucagag

SEQ ID NO: 959161 - RNA, 19 nt, Artificial Sequence
  Description of Artificial Sequence: Synthetic oligonucleotide
gacaguucguuugaggggu

SEQ ID NO: 959162 - RNA, 19 nt, Artificial Sequence
  Description of Artificial Sequence: Synthetic oligonucleotide
agcagcgauggagacgcgg

SEQ ID NO: 959163 - RNA, 19 nt, Artificial Sequence
  Description of Artificial Sequence: Synthetic oligonucleotide
caugaggcgcgcgauggcc

SEQ ID NO: 959164 - RNA, 19 nt, Artificial Sequence
  Description of Artificial Sequence: Synthetic oligonucleotide
ucgcuugauuccagacucc

SEQ ID NO: 959165 - RNA, 19 nt, Artificial Sequence
  Description of Artificial Sequence: Synthetic oligonucleotide
gacguucuuggguguauga

SEQ ID NO: 959166 - RNA, 19 nt, Artificial Sequence
  Description of Artificial Sequence: Synthetic oligonucleotide
uguaugaugggcggagguu

SEQ ID NO: 959167 - RNA, 19 nt, Artificial Sequence
  Description of Artificial Sequence: Synthetic oligonucleotide
aacuuuggcgacgccgagu

SEQ ID NO: 959168 - RNA, 19 nt, Artificial Sequence
  Description of Artificial Sequence: Synthetic oligonucleotide
agcgauggagacgcggguc

SEQ ID NO: 959169 - RNA, 19 nt, Artificial Sequence
  Description of Artificial Sequence: Synthetic oligonucleotide
ucacgcucugacaugccuu

SEQ ID NO: 959170 - RNA, 19 nt, Artificial Sequence
  Description of Artificial Sequence: Synthetic oligonucleotide
guccuuguucuguguaccc

SEQ ID NO: 959171 - RNA, 19 nt, Artificial Sequence
  Description of Artificial Sequence: Synthetic oligonucleotide
acagucgcuugauuccaga

SEQ ID NO: 959172 - RNA, 19 nt, Artificial Sequence
  Description of Artificial Sequence: Synthetic oligonucleotide
cacgaccuugggcaugagg

SEQ ID NO: 959173 - RNA, 19 nt, Artificial Sequence
  Description of Artificial Sequence: Synthetic oligonucleotide
cagucgcuugauuccagac

SEQ ID NO: 959174 - RNA, 19 nt, Artificial Sequence
  Description of Artificial Sequence: Synthetic oligonucleotide
uggagcaccgcggggagga

SEQ ID NO: 959175 - RNA, 19 nt, Artificial Sequence
  Description of Artificial Sequence: Synthetic oligonucleotide
gcgacgugggcuuggagag

SEQ ID NO: 959176 - RNA, 19 nt, Artificial Sequence
  Description of Artificial Sequence: Synthetic oligonucleotide
cuuaggaggcuuguuauua

SEQ ID NO: 959177 - RNA, 19 nt, Artificial Sequence
  Description of Artificial Sequence: Synthetic oligonucleotide
guaacucguggaacuuggg

SEQ ID NO: 959178 - RNA, 19 nt, Artificial Sequence
  Description of Artificial Sequence: Synthetic oligonucleotide
gagucugagaggcacuccu

SEQ ID NO: 959179 - RNA, 19 nt, Artificial Sequence
  Description of Artificial Sequence: Synthetic oligonucleotide
gauggagacgcggguccgg

SEQ ID NO: 959180 - RNA, 19 nt, Artificial Sequence
  Description of Artificial Sequence: Synthetic oligonucleotide
uuggagaggggacgcgcgu

SEQ ID NO: 959181 - RNA, 19 nt, Artificial Sequence
  Description of Artificial Sequence: Synthetic oligonucleotide
acucgggguaacucgugga

SEQ ID NO: 959182 - RNA, 19 nt, Artificial Sequence
  Description of Artificial Sequence: Synthetic oligonucleotide
uccagcucgggagcgacgu

SEQ ID NO: 959183 - RNA, 19 nt, Artificial Sequence
  Description of Artificial Sequence: Synthetic oligonucleotide
caaucagggccuuccccug

SEQ ID NO: 959184 - RNA, 19 nt, Artificial Sequence
  Description of Artificial Sequence: Synthetic oligonucleotide
cgcgaugucguacacgucc

SEQ ID NO: 959185 - RNA, 19 nt, Artificial Sequence
  Description of Artificial Sequence: Synthetic oligonucleotide
uggucggcuccuccccgcg

SEQ ID NO: 959186 - RNA, 19 nt, Artificial Sequence
  Description of Artificial Sequence: Synthetic oligonucleotide
gcaucagguuuucaucacc

SEQ ID NO: 959187 - RNA, 19 nt, Artificial Sequence
  Description of Artificial Sequence: Synthetic oligonucleotide
ccguguuggucgaugaccc

SEQ ID NO: 959188 - RNA, 19 nt, Artificial Sequence
  Description of Artificial Sequence: Synthetic oligonucleotide
gaggggacgcgcgucuccg

SEQ ID NO: 959189 - RNA, 19 nt, Artificial Sequence
  Description of Artificial Sequence: Synthetic oligonucleotide
guauuugcccacuggccaa

SEQ ID NO: 959190 - RNA, 19 nt, Artificial Sequence
  Description of Artificial Sequence: Synthetic oligonucleotide
ggcaugaggcgcgcgaugg

SEQ ID NO: 959191 - RNA, 19 nt, Artificial Sequence
  Description of Artificial Sequence: Synthetic oligonucleotide
acccucaaagcagacaguu

SEQ ID NO: 959192 - RNA, 19 nt, Artificial Sequence
  Description of Artificial Sequence: Synthetic oligonucleotide
auuccagacuccggcuggg

SEQ ID NO: 959193 - RNA, 19 nt, Artificial Sequence
  Description of Artificial Sequence: Synthetic oligonucleotide
caugacggucagcuccgcc

SEQ ID NO: 959194 - RNA, 19 nt, Artificial Sequence
  Description of Artificial Sequence: Synthetic oligonucleotide
ucgggguaacucguggaac

SEQ ID NO: 959195 - RNA, 19 nt, Artificial Sequence
  Description of Artificial Sequence: Synthetic oligonucleotide
ccgacaagcagcgauggag

SEQ ID NO: 959196 - RNA, 19 nt, Artificial Sequence
  Description of Artificial Sequence: Synthetic oligonucleotide
uacgaggcgacgugggcuu

SEQ ID NO: 959197 - RNA, 19 nt, Artificial Sequence
  Description of Artificial Sequence: Synthetic oligonucleotide
guacacguccaugacgguc

SEQ ID NO: 959198 - RNA, 19 nt, Artificial Sequence
  Description of Artificial Sequence: Synthetic oligonucleotide
ugacccucucgaacucgug

SEQ ID NO: 959199 - RNA, 19 nt, Artificial Sequence
  Description of Artificial Sequence: Synthetic oligonucleotide
gacgccgagugacuccgac

SEQ ID NO: 959200 - RNA, 19 nt, Artificial Sequence
  Description of Artificial Sequence: Synthetic oligonucleotide
ggcgacgugggcuuggaga

SEQ ID NO: 959201 - RNA, 19 nt, Artificial Sequence
  Description of Artificial Sequence: Synthetic oligonucleotide
aucacccucaaagcagaca

SEQ ID NO: 959202 - RNA, 19 nt, Artificial Sequence
  Description of Artificial Sequence: Synthetic oligonucleotide
cuucccgaguucugcccgc

SEQ ID NO: 959203 - RNA, 19 nt, Artificial Sequence
  Description of Artificial Sequence: Synthetic oligonucleotide
cugagucugagaggcacuc

SEQ ID NO: 959204 - RNA, 19 nt, Artificial Sequence
  Description of Artificial Sequence: Synthetic oligonucleotide
auagguccuaaggggucag

SEQ ID NO: 959205 - RNA, 19 nt, Artificial Sequence
  Description of Artificial Sequence: Synthetic oligonucleotide
cucguaucucaucccucug

SEQ ID NO: 959206 - RNA, 19 nt, Artificial Sequence
  Description of Artificial Sequence: Synthetic oligonucleotide
agcuaaacagucgcuugau

SEQ ID NO: 959207 - RNA, 19 nt, Artificial Sequence
  Description of Artificial Sequence: Synthetic oligonucleotide
cagauccuugucuuauuaa

SEQ ID NO: 959208 - RNA, 19 nt, Artificial Sequence
  Description of Artificial Sequence: Synthetic oligonucleotide
cagcgugaaccgagggcgg

SEQ ID NO: 959209 - RNA, 19 nt, Artificial Sequence
  Description of Artificial Sequence: Synthetic oligonucleotide
gugaaccgagggcgguugg

SEQ ID NO: 959210 - RNA, 19 nt, Artificial Sequence
  Description of Artificial Sequence: Synthetic oligonucleotide
ggccccgagacuccuaccc

SEQ ID NO: 959211 - RNA, 19 nt, Artificial Sequence
  Description of Artificial Sequence: Synthetic oligonucleotide
acgcgcgucuccguucccc

SEQ ID NO: 959212 - RNA, 19 nt, Artificial Sequence
  Description of Artificial Sequence: Synthetic oligonucleotide
cacccagaguaggugguag

SEQ ID NO: 959213 - RNA, 19 nt, Artificial Sequence
  Description of Artificial Sequence: Synthetic oligonucleotide
agcgacgugguggcggcuc

SEQ ID NO: 959214 - RNA, 19 nt, Artificial Sequence
  Description of Artificial Sequence: Synthetic oligonucleotide
accuugggcaugaggcgcg

SEQ ID NO: 959215 - RNA, 19 nt, Artificial Sequence
  Description of Artificial Sequence: Synthetic oligonucleotide
cucccgacuugcagcuccg

SEQ ID NO: 959216 - RNA, 19 nt, Artificial Sequence
  Description of Artificial Sequence: Synthetic oligonucleotide
cucgaagcuucccgaguuc

SEQ ID NO: 959217 - RNA, 19 nt, Artificial Sequence
  Description of Artificial Sequence: Synthetic oligonucleotide
acguucuuggguguaugau

SEQ ID NO: 959218 - RNA, 19 nt, Artificial Sequence
  Description of Artificial Sequence: Synthetic oligonucleotide
uggguguaugaugggcgga

SEQ ID NO: 959219 - RNA, 19 nt, Artificial Sequence
  Description of Artificial Sequence: Synthetic oligonucleotide
agcgccgacagggcggcgg

SEQ ID NO: 959220 - RNA, 19 nt, Artificial Sequence
  Description of Artificial Sequence: Synthetic oligonucleotide
gacuccgacuggucggcuc

SEQ ID NO: 959221 - RNA, 19 nt, Artificial Sequence
  Description of Artificial Sequence: Synthetic oligonucleotide
acgcuacgaggcgacgugg

SEQ ID NO: 959222 - RNA, 19 nt, Artificial Sequence
  Description of Artificial Sequence: Synthetic oligonucleotide
ggcaucagguuuucaucac

SEQ ID NO: 959223 - RNA, 19 nt, Artificial Sequence
  Description of Artificial Sequence: Synthetic oligonucleotide
aucaucucggugaguauuu

SEQ ID NO: 959224 - RNA, 19 nt, Artificial Sequence
  Description of Artificial Sequence: Synthetic oligonucleotide
gggaccgcggccccgagac

SEQ ID NO: 959225 - RNA, 19 nt, Artificial Sequence
  Description of Artificial Sequence: Synthetic oligonucleotide
gcgggaggcgacccuagcg

SEQ ID NO: 959226 - RNA, 19 nt, Artificial Sequence
  Description of Artificial Sequence: Synthetic oligonucleotide
cacgagcgacgcgaugucg

SEQ ID NO: 959227 - RNA, 19 nt, Artificial Sequence
  Description of Artificial Sequence: Synthetic oligonucleotide
gugacuccgacuggucggc

SEQ ID NO: 959228 - RNA, 19 nt, Artificial Sequence
  Description of Artificial Sequence: Synthetic oligonucleotide
aggcgacccuagcggcucc

SEQ ID NO: 959229 - RNA, 19 nt, Artificial Sequence
  Description of Artificial Sequence: Synthetic oligonucleotide
ccagaguaggugguaggcg

SEQ ID NO: 959230 - RNA, 19 nt, Artificial Sequence
  Description of Artificial Sequence: Synthetic oligonucleotide
ggcaaguggcgcccggugc

SEQ ID NO: 959231 - RNA, 19 nt, Artificial Sequence
  Description of Artificial Sequence: Synthetic oligonucleotide
ugacccggugccgaagguc

SEQ ID NO: 959232 - RNA, 19 nt, Artificial Sequence
  Description of Artificial Sequence: Synthetic oligonucleotide
guugaggcagccacccaga

SEQ ID NO: 959233 - RNA, 19 nt, Artificial Sequence
  Description of Artificial Sequence: Synthetic oligonucleotide
acgccgagugacuccgacu

SEQ ID NO: 959234 - RNA, 19 nt, Artificial Sequence
  Description of Artificial Sequence: Synthetic oligonucleotide
acgagcgacgcgaugucgu

SEQ ID NO: 959235 - RNA, 19 nt, Artificial Sequence
  Description of Artificial Sequence: Synthetic oligonucleotide
gacgugguggcggcucacc

SEQ ID NO: 959236 - RNA, 19 nt, Artificial Sequence
  Description of Artificial Sequence: Synthetic oligonucleotide
auuugcccacuggccaaag

SEQ ID NO: 959237 - RNA, 19 nt, Artificial Sequence
  Description of Artificial Sequence: Synthetic oligonucleotide
ccgaguucugcccgcaggc

SEQ ID NO: 959238 - RNA, 19 nt, Artificial Sequence
  Description of Artificial Sequence: Synthetic oligonucleotide
guguaugaugggcggaggu

SEQ ID NO: 959239 - RNA, 19 nt, Artificial Sequence
  Description of Artificial Sequence: Synthetic oligonucleotide
auagcccugcagauaaaua

SEQ ID NO: 959240 - RNA, 19 nt, Artificial Sequence
  Description of Artificial Sequence: Synthetic oligonucleotide
cucgggguaacucguggaa

SEQ ID NO: 959241 - RNA, 19 nt, Artificial Sequence
  Description of Artificial Sequence: Synthetic oligonucleotide
ugaggcgcgcgauggccuc

SEQ ID NO: 959242 - RNA, 19 nt, Artificial Sequence
  Description of Artificial Sequence: Synthetic oligonucleotide
ccuugucuuauuaaauaua

SEQ ID NO: 959243 - RNA, 19 nt, Artificial Sequence
  Description of Artificial Sequence: Synthetic oligonucleotide
aguucguuugaggggucaa

SEQ ID NO: 959244 - RNA, 19 nt, Artificial Sequence
  Description of Artificial Sequence: Synthetic oligonucleotide
ccucccgacuugcagcucc

SEQ ID NO: 959245 - RNA, 19 nt, Artificial Sequence
  Description of Artificial Sequence: Synthetic oligonucleotide
aagggaccgcggccccgag

SEQ ID NO: 959246 - RNA, 19 nt, Artificial Sequence
  Description of Artificial Sequence: Synthetic oligonucleotide
ggagcgacgugguggcggc

SEQ ID NO: 959247 - RNA, 19 nt, Artificial Sequence
  Description of Artificial Sequence: Synthetic oligonucleotide
ucaggccgagcucccuguc

SEQ ID NO: 959248 - RNA, 19 nt, Artificial Sequence
  Description of Artificial Sequence: Synthetic oligonucleotide
caggaauaccuuggacuuc

SEQ ID NO: 959249 - RNA, 19 nt, Artificial Sequence
  Description of Artificial Sequence: Synthetic oligonucleotide
acaguucguuugagggguc

SEQ ID NO: 959250 - RNA, 19 nt, Artificial Sequence
  Description of Artificial Sequence: Synthetic oligonucleotide
ggcagccacccagaguagg

SEQ ID NO: 959251 - RNA, 19 nt, Artificial Sequence
  Description of Artificial Sequence: Synthetic oligonucleotide
uggagaggggacgcgcguc

SEQ ID NO: 959252 - RNA, 19 nt, Artificial Sequence
  Description of Artificial Sequence: Synthetic oligonucleotide
gcuacgaggcgacgugggc

SEQ ID NO: 959253 - RNA, 19 nt, Artificial Sequence
  Description of Artificial Sequence: Synthetic oligonucleotide
ggacccucacgaccuuggg

SEQ ID NO: 959254 - RNA, 19 nt, Artificial Sequence
  Description of Artificial Sequence: Synthetic oligonucleotide
gaggcgacccuagcggcuc

SEQ ID NO: 959255 - RNA, 19 nt, Artificial Sequence
  Description of Artificial Sequence: Synthetic oligonucleotide
ccccgagacuccuacccgg

SEQ ID NO: 959256 - RNA, 19 nt, Artificial Sequence
  Description of Artificial Sequence: Synthetic oligonucleotide
ggguaacucguggaacuug

SEQ ID NO: 959257 - RNA, 19 nt, Artificial Sequence
  Description of Artificial Sequence: Synthetic oligonucleotide
caaugcgguccauccucuc

SEQ ID NO: 959258 - RNA, 19 nt, Artificial Sequence
  Description of Artificial Sequence: Synthetic oligonucleotide
gcccugcagauaaauagac

SEQ ID NO: 959259 - RNA, 19 nt, Artificial Sequence
  Description of Artificial Sequence: Synthetic oligonucleotide
ggacgcgcgucuccguucc

SEQ ID NO: 959260 - RNA, 19 nt, Artificial Sequence
  Description of Artificial Sequence: Synthetic oligonucleotide
cuugggcaugaggcgcgcg

SEQ ID NO: 959261 - RNA, 19 nt, Artificial Sequence
  Description of Artificial Sequence: Synthetic oligonucleotide
gguugagguuggucaucag

SEQ ID NO: 959262 - RNA, 19 nt, Artificial Sequence
  Description of Artificial Sequence: Synthetic oligonucleotide
ggugcccgaagggaccgcg

SEQ ID NO: 959263 - RNA, 19 nt, Artificial Sequence
  Description of Artificial Sequence: Synthetic oligonucleotide
gcgacgccgagugacuccg

SEQ ID NO: 959264 - RNA, 19 nt, Artificial Sequence
  Description of Artificial Sequence: Synthetic oligonucleotide
cagccacccagaguaggug

SEQ ID NO: 959265 - RNA, 19 nt, Artificial Sequence
  Description of Artificial Sequence: Synthetic oligonucleotide
cgggaggcgacccuagcgg

SEQ ID NO: 959266 - RNA, 19 nt, Artificial Sequence
  Description of Artificial Sequence: Synthetic oligonucleotide
gcuuggagaggggacgcgc

SEQ ID NO: 959267 - RNA, 19 nt, Artificial Sequence
  Description of Artificial Sequence: Synthetic oligonucleotide
gccccgagacuccuacccg

SEQ ID NO: 959268 - RNA, 19 nt, Artificial Sequence
  Description of Artificial Sequence: Synthetic oligonucleotide
acccuagcggcuccuccau

SEQ ID NO: 959269 - RNA, 19 nt, Artificial Sequence
  Description of Artificial Sequence: Synthetic oligonucleotide
cgccgagugacuccgacug

SEQ ID NO: 959270 - RNA, 19 nt, Artificial Sequence
  Description of Artificial Sequence: Synthetic oligonucleotide
augaggcgcgcgauggccu

SEQ ID NO: 959271 - RNA, 19 nt, Artificial Sequence
  Description of Artificial Sequence: Synthetic oligonucleotide
gaagggaccgcggccccga

SEQ ID NO: 959272 - RNA, 19 nt, Artificial Sequence
  Description of Artificial Sequence: Synthetic oligonucleotide
ccgacuugcagcuccgaca

SEQ ID NO: 959273 - RNA, 19 nt, Artificial Sequence
  Description of Artificial Sequence: Synthetic oligonucleotide
cuccccgcggggacgcuac

SEQ ID NO: 959274 - RNA, 19 nt, Artificial Sequence
  Description of Artificial Sequence: Synthetic oligonucleotide
agggcgguugggguccuug

SEQ ID NO: 959275 - RNA, 19 nt, Artificial Sequence
  Description of Artificial Sequence: Synthetic oligonucleotide
uagguccuaaggggucaga

SEQ ID NO: 959276 - RNA, 19 nt, Artificial Sequence
  Description of Artificial Sequence: Synthetic oligonucleotide
uucccgaguucugcccgca

SEQ ID NO: 959277 - RNA, 19 nt, Artificial Sequence
  Description of Artificial Sequence: Synthetic oligonucleotide
cgcggggacgcuacgaggc

SEQ ID NO: 959278 - RNA, 19 nt, Artificial Sequence
  Description of Artificial Sequence: Synthetic oligonucleotide
gcucguaucucaucccucu

SEQ ID NO: 959279 - RNA, 19 nt, Artificial Sequence
  Description of Artificial Sequence: Synthetic oligonucleotide
cccgagacuccuacccggg

SEQ ID NO: 959280 - RNA, 19 nt, Artificial Sequence
  Description of Artificial Sequence: Synthetic oligonucleotide
gcggagguugggguauucg

SEQ ID NO: 959281 - RNA, 19 nt, Artificial Sequence
  Description of Artificial Sequence: Synthetic oligonucleotide
aggcgacgugggcuuggag

SEQ ID NO: 959282 - RNA, 19 nt, Artificial Sequence
  Description of Artificial Sequence: Synthetic oligonucleotide
ggcgacgccgagugacucc

SEQ ID NO: 959283 - RNA, 19 nt, Artificial Sequence
  Description of Artificial Sequence: Synthetic oligonucleotide
caggcgcuucuugucccgg

SEQ ID NO: 959284 - RNA, 19 nt, Artificial Sequence
  Description of Artificial Sequence: Synthetic oligonucleotide
ucaccccgccacacauccu

SEQ ID NO: 959285 - RNA, 19 nt, Artificial Sequence
  Description of Artificial Sequence: Synthetic oligonucleotide
agcgugaaccgagggcggu

SEQ ID NO: 959286 - RNA, 19 nt, Artificial Sequence
  Description of Artificial Sequence: Synthetic oligonucleotide
ccgaaggucaugguugauc

SEQ ID NO: 959287 - RNA, 19 nt, Artificial Sequence
  Description of Artificial Sequence: Synthetic oligonucleotide
gucagaggccuugaauaua

SEQ ID NO: 959288 - RNA, 19 nt, Artificial Sequence
  Description of Artificial Sequence: Synthetic oligonucleotide
gcgguugggguccuugaga

SEQ ID NO: 959289 - RNA, 19 nt, Artificial Sequence
  Description of Artificial Sequence: Synthetic oligonucleotide
gccgagugacuccgacugg

SEQ ID NO: 959290 - RNA, 19 nt, Artificial Sequence
  Description of Artificial Sequence: Synthetic oligonucleotide
cgcuugauuccagacuccg

SEQ ID NO: 959291 - RNA, 19 nt, Artificial Sequence
  Description of Artificial Sequence: Synthetic oligonucleotide
uccccgcggggacgcuacg

SEQ ID NO: 959292 - RNA, 19 nt, Artificial Sequence
  Description of Artificial Sequence: Synthetic oligonucleotide
ucgcagccguguuggucga

SEQ ID NO: 959293 - RNA, 19 nt, Artificial Sequence
  Description of Artificial Sequence: Synthetic oligonucleotide
cugugacccggugccgaag

SEQ ID NO: 959294 - RNA, 19 nt, Artificial Sequence
  Description of Artificial Sequence: Synthetic oligonucleotide
ggcgcccggugcccgaagg

SEQ ID NO: 959295 - RNA, 19 nt, Artificial Sequence
  Description of Artificial Sequence: Synthetic oligonucleotide
cuguagggcuuccuguccu

SEQ ID NO: 959296 - RNA, 19 nt, Artificial Sequence
  Description of Artificial Sequence: Synthetic oligonucleotide
ccggugccgaaggucaugg

SEQ ID NO: 959297 - RNA, 19 nt, Artificial Sequence
  Description of Artificial Sequence: Synthetic oligonucleotide
gcggggacgcuacgaggcg

SEQ ID NO: 959298 - RNA, 19 nt, Artificial Sequence
  Description of Artificial Sequence: Synthetic oligonucleotide
aagcagcgauggagacgcg

SEQ ID NO: 959299 - RNA, 19 nt, Artificial Sequence
  Description of Artificial Sequence: Synthetic oligonucleotide
uggcgacgccgagugacuc

SEQ ID NO: 959300 - RNA, 19 nt, Artificial Sequence
  Description of Artificial Sequence: Synthetic oligonucleotide
gguggcggcucaccagaac

SEQ ID NO: 959301 - RNA, 19 nt, Artificial Sequence
  Description of Artificial Sequence: Synthetic oligonucleotide
cuacgaggcgacgugggcu

SEQ ID NO: 959302 - RNA, 19 nt, Artificial Sequence
  Description of Artificial Sequence: Synthetic oligonucleotide
cgacaagcagcgauggaga

SEQ ID NO: 959303 - RNA, 19 nt, Artificial Sequence
  Description of Artificial Sequence: Synthetic oligonucleotide
cuggauagcccugcagaua

SEQ ID NO: 959304 - RNA, 19 nt, Artificial Sequence
  Description of Artificial Sequence: Synthetic oligonucleotide
gaaggucaugguugaucuu

SEQ ID NO: 959305 - RNA, 19 nt, Artificial Sequence
  Description of Artificial Sequence: Synthetic oligonucleotide
caguucguuugagggguca

SEQ ID NO: 959306 - RNA, 19 nt, Artificial Sequence
  Description of Artificial Sequence: Synthetic oligonucleotide
ggaauaccuuggacuucag

SEQ ID NO: 959307 - RNA, 19 nt, Artificial Sequence
  Description of Artificial Sequence: Synthetic oligonucleotide
ggcuuggagaggggacgcg

SEQ ID NO: 959308 - RNA, 19 nt, Artificial Sequence
  Description of Artificial Sequence: Synthetic oligonucleotide
cucucgaagcuucccgagu

SEQ ID NO: 959309 - RNA, 19 nt, Artificial Sequence
  Description of Artificial Sequence: Synthetic oligonucleotide
cgcuacgaggcgacguggg

SEQ ID NO: 959310 - RNA, 19 nt, Artificial Sequence
  Description of Artificial Sequence: Synthetic oligonucleotide
uggcgcccggugcccgaag

SEQ ID NO: 959311 - RNA, 19 nt, Artificial Sequence
  Description of Artificial Sequence: Synthetic oligonucleotide
ucuccacgcgcagccgguc

SEQ ID NO: 959312 - RNA, 19 nt, Artificial Sequence
  Description of Artificial Sequence: Synthetic oligonucleotide
acgcgaugucguacacguc

SEQ ID NO: 959313 - RNA, 19 nt, Artificial Sequence
  Description of Artificial Sequence: Synthetic oligonucleotide
gccgcucacgcucugacau

SEQ ID NO: 959314 - RNA, 19 nt, Artificial Sequence
  Description of Artificial Sequence: Synthetic oligonucleotide
gacgcgcgucuccguuccc

SEQ ID NO: 959315 - RNA, 19 nt, Artificial Sequence
  Description of Artificial Sequence: Synthetic oligonucleotide
ccuugaauauaaacuggau

SEQ ID NO: 959316 - RNA, 19 nt, Artificial Sequence
  Description of Artificial Sequence: Synthetic oligonucleotide
gcgucuccguuccccgggg

SEQ ID NO: 959317 - RNA, 19 nt, Artificial Sequence
  Description of Artificial Sequence: Synthetic oligonucleotide
gagaggggacgcgcgucuc

SEQ ID NO: 959318 - RNA, 19 nt, Artificial Sequence
  Description of Artificial Sequence: Synthetic oligonucleotide
ccgagacuccuacccgggg

SEQ ID NO: 959319 - RNA, 19 nt, Artificial Sequence
  Description of Artificial Sequence: Synthetic oligonucleotide
aggggacgcgcgucuccgu

SEQ ID NO: 959320 - RNA, 19 nt, Artificial Sequence
  Description of Artificial Sequence: Synthetic oligonucleotide
cccgacuugcagcuccgac

SEQ ID NO: 959321 - RNA, 19 nt, Artificial Sequence
  Description of Artificial Sequence: Synthetic oligonucleotide
ggucgaugacccucucgaa

SEQ ID NO: 959322 - RNA, 19 nt, Artificial Sequence
  Description of Artificial Sequence: Synthetic oligonucleotide
cgacuggucggcuccuccc

SEQ ID NO: 959323 - RNA, 19 nt, Artificial Sequence
  Description of Artificial Sequence: Synthetic oligonucleotide
gacgcggguccggccuggg

SEQ ID NO: 959324 - RNA, 19 nt, Artificial Sequence
  Description of Artificial Sequence: Synthetic oligonucleotide
ccgacuggucggcuccucc

SEQ ID NO: 959325 - RNA, 19 nt, Artificial Sequence
  Description of Artificial Sequence: Synthetic oligonucleotide
cuccuacccggggaggaga

SEQ ID NO: 959326 - RNA, 19 nt, Artificial Sequence
  Description of Artificial Sequence: Synthetic oligonucleotide
ucccgacuugcagcuccga

SEQ ID NO: 959327 - RNA, 19 nt, Artificial Sequence
  Description of Artificial Sequence: Synthetic oligonucleotide
cgcucacgcucugacaugc

SEQ ID NO: 959328 - RNA, 19 nt, Artificial Sequence
  Description of Artificial Sequence: Synthetic oligonucleotide
uccucucgugcagcacauc

SEQ ID NO: 959329 - RNA, 19 nt, Artificial Sequence
  Description of Artificial Sequence: Synthetic oligonucleotide
cccgcggggacgcuacgag

SEQ ID NO: 959330 - RNA, 19 nt, Artificial Sequence
  Description of Artificial Sequence: Synthetic oligonucleotide
cacguccaugacggucagc

SEQ ID NO: 959331 - RNA, 19 nt, Artificial Sequence
  Description of Artificial Sequence: Synthetic oligonucleotide
ccgcggggacgcuacgagg

SEQ ID NO: 959332 - RNA, 19 nt, Artificial Sequence
  Description of Artificial Sequence: Synthetic oligonucleotide
gcgaugucguacacgucca

SEQ ID NO: 959333 - RNA, 19 nt, Artificial Sequence
  Description of Artificial Sequence: Synthetic oligonucleotide
cuuuggcgacgccgaguga

SEQ ID NO: 959334 - RNA, 19 nt, Artificial Sequence
  Description of Artificial Sequence: Synthetic oligonucleotide
cgaagcuucccgaguucug

SEQ ID NO: 959335 - RNA, 19 nt, Artificial Sequence
  Description of Artificial Sequence: Synthetic oligonucleotide
gccguccguccacucgggg

SEQ ID NO: 959336 - RNA, 19 nt, Artificial Sequence
  Description of Artificial Sequence: Synthetic oligonucleotide
ggcucguaucucaucccuc

SEQ ID NO: 959337 - RNA, 19 nt, Artificial Sequence
  Description of Artificial Sequence: Synthetic oligonucleotide
guucguuugaggggucaau

SEQ ID NO: 959338 - RNA, 19 nt, Artificial Sequence
  Description of Artificial Sequence: Synthetic oligonucleotide
uucugcccgcaggcugccc

SEQ ID NO: 959339 - RNA, 19 nt, Artificial Sequence
  Description of Artificial Sequence: Synthetic oligonucleotide
gcgcgcgauggccucgcag

SEQ ID NO: 959340 - RNA, 19 nt, Artificial Sequence
  Description of Artificial Sequence: Synthetic oligonucleotide
gggacgcgcgucuccguuc

SEQ ID NO: 959341 - RNA, 19 nt, Artificial Sequence
  Description of Artificial Sequence: Synthetic oligonucleotide
ccgagggcgguuggggucc

SEQ ID NO: 959342 - RNA, 19 nt, Artificial Sequence
  Description of Artificial Sequence: Synthetic oligonucleotide
ggggacgcuacgaggcgac

SEQ ID NO: 959343 - RNA, 19 nt, Artificial Sequence
  Description of Artificial Sequence: Synthetic oligonucleotide
ggagaggggacgcgcgucu

SEQ ID NO: 959344 - RNA, 19 nt, Artificial Sequence
  Description of Artificial Sequence: Synthetic oligonucleotide
uccgacuggucggcuccuc

SEQ ID NO: 959345 - RNA, 19 nt, Artificial Sequence
  Description of Artificial Sequence: Synthetic oligonucleotide
uccguccacucgggguaac

SEQ ID NO: 959346 - RNA, 19 nt, Artificial Sequence
  Description of Artificial Sequence: Synthetic oligonucleotide
cggagguugggguauucga

SEQ ID NO: 959347 - RNA, 19 nt, Artificial Sequence
  Description of Artificial Sequence: Synthetic oligonucleotide
gcgcgucuccguuccccgg

SEQ ID NO: 959348 - RNA, 19 nt, Artificial Sequence
  Description of Artificial Sequence: Synthetic oligonucleotide
cgcgucuccguuccccggg

SEQ ID NO: 959349 - RNA, 19 nt, Artificial Sequence
  Description of Artificial Sequence: Synthetic oligonucleotide
gggacgcuacgaggcgacg

SEQ ID NO: 959350 - RNA, 19 nt, Artificial Sequence
  Description of Artificial Sequence: Synthetic oligonucleotide
cugacaugccuuccugcuu

SEQ ID NO: 959351 - RNA, 19 nt, Artificial Sequence
  Description of Artificial Sequence: Synthetic oligonucleotide
gcuaaacagucgcuugauu

SEQ ID NO: 959352 - RNA, 19 nt, Artificial Sequence
  Description of Artificial Sequence: Synthetic oligonucleotide
cgcgcgucuccguuccccg

SEQ ID NO: 959353 - RNA, 19 nt, Artificial Sequence
  Description of Artificial Sequence: Synthetic oligonucleotide
ccggugcccgaagggaccg

SEQ ID NO: 959354 - RNA, 19 nt, Artificial Sequence
  Description of Artificial Sequence: Synthetic oligonucleotide
cucuccacgcgcagccggu

SEQ ID NO: 959355 - RNA, 19 nt, Artificial Sequence
  Description of Artificial Sequence: Synthetic oligonucleotide
cgagacuccuacccgggga

SEQ ID NO: 959356 - RNA, 19 nt, Artificial Sequence
  Description of Artificial Sequence: Synthetic oligonucleotide
gcgacgcgaugucguacac

SEQ ID NO: 959357 - RNA, 19 nt, Artificial Sequence
  Description of Artificial Sequence: Synthetic oligonucleotide
cgacgcgaugucguacacg

SEQ ID NO: 959358 - RNA, 19 nt, Artificial Sequence
  Description of Artificial Sequence: Synthetic oligonucleotide
cgugaaccgagggcgguug

SEQ ID NO: 959359 - RNA, 19 nt, Artificial Sequence
  Description of Artificial Sequence: Synthetic oligonucleotide
cgaugacccucucgaacuc

SEQ ID NO: 959360 - RNA, 19 nt, Artificial Sequence
  Description of Artificial Sequence: Synthetic oligonucleotide
gugacccggugccgaaggu

SEQ ID NO: 959361 - RNA, 19 nt, Artificial Sequence
  Description of Artificial Sequence: Synthetic oligonucleotide
ccgcucacgcucugacaug

SEQ ID NO: 959362 - RNA, 19 nt, Artificial Sequence
  Description of Artificial Sequence: Synthetic oligonucleotide
caggccgagcucccugucu

SEQ ID NO: 959363 - RNA, 19 nt, Artificial Sequence
  Description of Artificial Sequence: Synthetic oligonucleotide
ggguggcaaguggcgcccg

SEQ ID NO: 959364 - RNA, 19 nt, Artificial Sequence
  Description of Artificial Sequence: Synthetic oligonucleotide
ccucgcagccguguugguc

SEQ ID NO: 959365 - RNA, 19 nt, Artificial Sequence
  Description of Artificial Sequence: Synthetic oligonucleotide
gcucacgcucugacaugcc

SEQ ID NO: 959366 - RNA, 19 nt, Artificial Sequence
  Description of Artificial Sequence: Synthetic oligonucleotide
ccucacgaccuugggcaug

SEQ ID NO: 959367 - RNA, 19 nt, Artificial Sequence
  Description of Artificial Sequence: Synthetic oligonucleotide
ggacgcuacgaggcgacgu

SEQ ID NO: 959368 - RNA, 19 nt, Artificial Sequence
  Description of Artificial Sequence: Synthetic oligonucleotide
cccacgagcgacgcgaugu

SEQ ID NO: 959369 - RNA, 19 nt, Artificial Sequence
  Description of Artificial Sequence: Synthetic oligonucleotide
gguuggucaucaguugcuu

SEQ ID NO: 959370 - RNA, 19 nt, Artificial Sequence
  Description of Artificial Sequence: Synthetic oligonucleotide
gcgacgugguggcggcuca

SEQ ID NO: 959371 - RNA, 19 nt, Artificial Sequence
  Description of Artificial Sequence: Synthetic oligonucleotide
ccuugggcaugaggcgcgc

SEQ ID NO: 959372 - RNA, 19 nt, Artificial Sequence
  Description of Artificial Sequence: Synthetic oligonucleotide
gcccacgagcgacgcgaug

SEQ ID NO: 959373 - RNA, 19 nt, Artificial Sequence
  Description of Artificial Sequence: Synthetic oligonucleotide
cuaaggggucagaggccuu

SEQ ID NO: 959374 - RNA, 19 nt, Artificial Sequence
  Description of Artificial Sequence: Synthetic oligonucleotide
ccgcggggaggauggcgag

SEQ ID NO: 959375 - RNA, 19 nt, Artificial Sequence
  Description of Artificial Sequence: Synthetic oligonucleotide
cccuagcggcuccuccaug

SEQ ID NO: 959376 - RNA, 19 nt, Artificial Sequence
  Description of Artificial Sequence: Synthetic oligonucleotide
gagccucaacguccucauu

SEQ ID NO: 959377 - RNA, 19 nt, Artificial Sequence
  Description of Artificial Sequence: Synthetic oligonucleotide
gcggcgccucccgacuugc

SEQ ID NO: 959378 - RNA, 19 nt, Artificial Sequence
  Description of Artificial Sequence: Synthetic oligonucleotide
ggauagcccugcagauaaa

SEQ ID NO: 959379 - RNA, 19 nt, Artificial Sequence
  Description of Artificial Sequence: Synthetic oligonucleotide
cgaggcgacgugggcuugg

SEQ ID NO: 959380 - RNA, 19 nt, Artificial Sequence
  Description of Artificial Sequence: Synthetic oligonucleotide
acccggugccgaaggucau

SEQ ID NO: 959381 - RNA, 19 nt, Artificial Sequence
  Description of Artificial Sequence: Synthetic oligonucleotide
cccggugccgaaggucaug

SEQ ID NO: 959382 - RNA, 19 nt, Artificial Sequence
  Description of Artificial Sequence: Synthetic oligonucleotide
ggcggagguugggguauuc

SEQ ID NO: 959383 - RNA, 19 nt, Artificial Sequence
  Description of Artificial Sequence: Synthetic oligonucleotide
ggaggcgacccuagcggcu

SEQ ID NO: 959384 - RNA, 19 nt, Artificial Sequence
  Description of Artificial Sequence: Synthetic oligonucleotide
cguggcccacgagcgacgc

SEQ ID NO: 959385 - RNA, 19 nt, Artificial Sequence
  Description of Artificial Sequence: Synthetic oligonucleotide
cgguugggguccuugagau

SEQ ID NO: 959386 - RNA, 19 nt, Artificial Sequence
  Description of Artificial Sequence: Synthetic oligonucleotide
ccacaacuuccuucagccu

SEQ ID NO: 959387 - RNA, 19 nt, Artificial Sequence
  Description of Artificial Sequence: Synthetic oligonucleotide
cgaagggaccgcggccccg

SEQ ID NO: 959388 - RNA, 19 nt, Artificial Sequence
  Description of Artificial Sequence: Synthetic oligonucleotide
ggggacguucuugggugua

SEQ ID NO: 959389 - RNA, 19 nt, Artificial Sequence
  Description of Artificial Sequence: Synthetic oligonucleotide
ccguccguccacucggggu

SEQ ID NO: 959390 - RNA, 19 nt, Artificial Sequence
  Description of Artificial Sequence: Synthetic oligonucleotide
cccggcgccguccguccac

SEQ ID NO: 959391 - RNA, 19 nt, Artificial Sequence
  Description of Artificial Sequence: Synthetic oligonucleotide
gggguaacucguggaacuu

SEQ ID NO: 959392 - RNA, 19 nt, Artificial Sequence
  Description of Artificial Sequence: Synthetic oligonucleotide
gggacguucuuggguguau

SEQ ID NO: 959393 - RNA, 19 nt, Artificial Sequence
  Description of Artificial Sequence: Synthetic oligonucleotide
cagcgccgacagggcggcg

SEQ ID NO: 959394 - RNA, 19 nt, Artificial Sequence
  Description of Artificial Sequence: Synthetic oligonucleotide
ggggacgcgcgucuccguu

SEQ ID NO: 959395 - RNA, 19 nt, Artificial Sequence
  Description of Artificial Sequence: Synthetic oligonucleotide
guggcgcccggugcccgaa

SEQ ID NO: 959396 - RNA, 19 nt, Artificial Sequence
  Description of Artificial Sequence: Synthetic oligonucleotide
gcgacccuagcggcuccuc

SEQ ID NO: 959397 - RNA, 19 nt, Artificial Sequence
  Description of Artificial Sequence: Synthetic oligonucleotide
cgagcgacgcgaugucgua

SEQ ID NO: 959398 - RNA, 19 nt, Artificial Sequence
  Description of Artificial Sequence: Synthetic oligonucleotide
gagcgacgugguggcggcu

SEQ ID NO: 959399 - RNA, 19 nt, Artificial Sequence
  Description of Artificial Sequence: Synthetic oligonucleotide
cagcuccgacaagcagcga

SEQ ID NO: 959400 - RNA, 19 nt, Artificial Sequence
  Description of Artificial Sequence: Synthetic oligonucleotide
cgccugcgcaggcccgcgg

SEQ ID NO: 959401 - RNA, 19 nt, Artificial Sequence
  Description of Artificial Sequence: Synthetic oligonucleotide
ggcgcgcgauggccucgca

SEQ ID NO: 959402 - RNA, 19 nt, Artificial Sequence
  Description of Artificial Sequence: Synthetic oligonucleotide
ggguccggccuggguggca

SEQ ID NO: 959403 - RNA, 19 nt, Artificial Sequence
  Description of Artificial Sequence: Synthetic oligonucleotide
ggccgagcucccugucuuu

SEQ ID NO: 959404 - RNA, 19 nt, Artificial Sequence
  Description of Artificial Sequence: Synthetic oligonucleotide
cggggacgcuacgaggcga

SEQ ID NO: 959405 - RNA, 19 nt, Artificial Sequence
  Description of Artificial Sequence: Synthetic oligonucleotide
cgacgugguggcggcucac

SEQ ID NO: 959406 - RNA, 19 nt, Artificial Sequence
  Description of Artificial Sequence: Synthetic oligonucleotide
ggaccgcggccccgagacu

SEQ ID NO: 959407 - RNA, 19 nt, Artificial Sequence
  Description of Artificial Sequence: Synthetic oligonucleotide
cguacacguccaugacggu

SEQ ID NO: 959408 - RNA, 19 nt, Artificial Sequence
  Description of Artificial Sequence: Synthetic oligonucleotide
cccucacgaccuugggcau

SEQ ID NO: 959409 - RNA, 19 nt, Artificial Sequence
  Description of Artificial Sequence: Synthetic oligonucleotide
ggcgacccuagcggcuccu

SEQ ID NO: 959410 - RNA, 19 nt, Artificial Sequence
  Description of Artificial Sequence: Synthetic oligonucleotide
ccccgcggggacgcuacga

SEQ ID NO: 959411 - RNA, 19 nt, Artificial Sequence
  Description of Artificial Sequence: Synthetic oligonucleotide
gcgugaaccgagggcgguu

SEQ ID NO: 959412 - RNA, 19 nt, Artificial Sequence
  Description of Artificial Sequence: Synthetic oligonucleotide
gccucgcagccguguuggu

SEQ ID NO: 959413 - RNA, 19 nt, Artificial Sequence
  Description of Artificial Sequence: Synthetic oligonucleotide
cggugaguauuugcccacu

SEQ ID NO: 959414 - RNA, 19 nt, Artificial Sequence
  Description of Artificial Sequence: Synthetic oligonucleotide
ggcccacgagcgacgcgau

SEQ ID NO: 959415 - RNA, 19 nt, Artificial Sequence
  Description of Artificial Sequence: Synthetic oligonucleotide
cgacgccgagugacuccga

SEQ ID NO: 959416 - RNA, 19 nt, Artificial Sequence
  Description of Artificial Sequence: Synthetic oligonucleotide
cggcgccguccguccacuc

SEQ ID NO: 959417 - RNA, 19 nt, Artificial Sequence
  Description of Artificial Sequence: Synthetic oligonucleotide
ccuccccgcggggacgcua

SEQ ID NO: 959418 - RNA, 19 nt, Artificial Sequence
  Description of Artificial Sequence: Synthetic oligonucleotide
ccuacccggggaggagaau

SEQ ID NO: 959419 - RNA, 19 nt, Artificial Sequence
  Description of Artificial Sequence: Synthetic oligonucleotide
ccggcgccguccguccacu

SEQ ID NO: 959420 - RNA, 19 nt, Artificial Sequence
  Description of Artificial Sequence: Synthetic oligonucleotide
ccgcggcgccucccgacuu

SEQ ID NO: 959421 - RNA, 19 nt, Artificial Sequence
  Description of Artificial Sequence: Synthetic oligonucleotide
cgcagccguguuggucgau

SEQ ID NO: 959422 - RNA, 19 nt, Artificial Sequence
  Description of Artificial Sequence: Synthetic oligonucleotide
aaaaucucaggccagaccc

SEQ ID NO: 959423 - RNA, 19 nt, Artificial Sequence
  Description of Artificial Sequence: Synthetic oligonucleotide
uggaugacacuaaugaugg

SEQ ID NO: 959424 - RNA, 19 nt, Artificial Sequence
  Description of Artificial Sequence: Synthetic oligonucleotide
aaagcauccagcuggaucu

SEQ ID NO: 959425 - RNA, 19 nt, Artificial Sequence
  Description of Artificial Sequence: Synthetic oligonucleotide
cuagaaguguaguagaucc

SEQ ID NO: 959426 - RNA, 19 nt, Artificial Sequence
  Description of Artificial Sequence: Synthetic oligonucleotide
aaguuuacauucuugugag

SEQ ID NO: 959427 - RNA, 19 nt, Artificial Sequence
  Description of Artificial Sequence: Synthetic oligonucleotide
aaaagcauccagcuggauc

SEQ ID NO: 959428 - RNA, 19 nt, Artificial Sequence
  Description of Artificial Sequence: Synthetic oligonucleotide
aaccgauaagguuaggcac

SEQ ID NO: 959429 - RNA, 19 nt, Artificial Sequence
  Description of Artificial Sequence: Synthetic oligonucleotide
acuaggaccucuuaggagg

SEQ ID NO: 959430 - RNA, 19 nt, Artificial Sequence
  Description of Artificial Sequence: Synthetic oligonucleotide
agggacauaaagcaggugg

SEQ ID NO: 959431 - RNA, 19 nt, Artificial Sequence
  Description of Artificial Sequence: Synthetic oligonucleotide
gauaacaccaaacagaggu

SEQ ID NO: 959432 - RNA, 19 nt, Artificial Sequence
  Description of Artificial Sequence: Synthetic oligonucleotide
uauuagagcccgcagggcg

SEQ ID NO: 959433 - RNA, 19 nt, Artificial Sequence
  Description of Artificial Sequence: Synthetic oligonucleotide
agacaauccgggcauaacc

SEQ ID NO: 959434 - RNA, 19 nt, Artificial Sequence
  Description of Artificial Sequence: Synthetic oligonucleotide
aguuauuagagcccgcagg

SEQ ID NO: 959435 - RNA, 19 nt, Artificial Sequence
  Description of Artificial Sequence: Synthetic oligonucleotide
gaaguuuacauucuuguga

SEQ ID NO: 959436 - RNA, 19 nt, Artificial Sequence
  Description of Artificial Sequence: Synthetic oligonucleotide
guuauuagagcccgcaggg

SEQ ID NO: 959437 - RNA, 19 nt, Artificial Sequence
  Description of Artificial Sequence: Synthetic oligonucleotide
uugauuaagggcucgagcu

SEQ ID NO: 959438 - RNA, 19 nt, Artificial Sequence
  Description of Artificial Sequence: Synthetic oligonucleotide
gauaagguuaggcacgaag

SEQ ID NO: 959439 - RNA, 19 nt, Artificial Sequence
  Description of Artificial Sequence: Synthetic oligonucleotide
gacacuaggaccucuuagg

SEQ ID NO: 959440 - RNA, 19 nt, Artificial Sequence
  Description of Artificial Sequence: Synthetic oligonucleotide
uccaugaguauuuauuaag

SEQ ID NO: 959441 - RNA, 19 nt, Artificial Sequence
  Description of Artificial Sequence: Synthetic oligonucleotide
aguagauagaaggaggagg

SEQ ID NO: 959442 - RNA, 19 nt, Artificial Sequence
  Description of Artificial Sequence: Synthetic oligonucleotide
aaggucacuagaaugacag

SEQ ID NO: 959443 - RNA, 19 nt, Artificial Sequence
  Description of Artificial Sequence: Synthetic oligonucleotide
uuaagcagcuaccacauuc

SEQ ID NO: 959444 - RNA, 19 nt, Artificial Sequence
  Description of Artificial Sequence: Synthetic oligonucleotide
auaaccgauaagguuaggc

SEQ ID NO: 959445 - RNA, 19 nt, Artificial Sequence
  Description of Artificial Sequence: Synthetic oligonucleotide
aggguucccagauaggucg

SEQ ID NO: 959446 - RNA, 19 nt, Artificial Sequence
  Description of Artificial Sequence: Synthetic oligonucleotide
guagauccgaagcacaggg

SEQ ID NO: 959447 - RNA, 19 nt, Artificial Sequence
  Description of Artificial Sequence: Synthetic oligonucleotide
accaaacagaggucgaccc

SEQ ID NO: 959448 - RNA, 19 nt, Artificial Sequence
  Description of Artificial Sequence: Synthetic oligonucleotide
aagaguucguuuccagcac

SEQ ID NO: 959449 - RNA, 19 nt, Artificial Sequence
  Description of Artificial Sequence: Synthetic oligonucleotide
ugaguagauagaaggagga

SEQ ID NO: 959450 - RNA, 19 nt, Artificial Sequence
  Description of Artificial Sequence: Synthetic oligonucleotide
agugaaaguggccagccag

SEQ ID NO: 959451 - RNA, 19 nt, Artificial Sequence
  Description of Artificial Sequence: Synthetic oligonucleotide
aaguguaguagauccgaag

SEQ ID NO: 959452 - RNA, 19 nt, Artificial Sequence
  Description of Artificial Sequence: Synthetic oligonucleotide
agguggaugacacuaauga

SEQ ID NO: 959453 - RNA, 19 nt, Artificial Sequence
  Description of Artificial Sequence: Synthetic oligonucleotide
aaggaaaugauggcgaaga

SEQ ID NO: 959454 - RNA, 19 nt, Artificial Sequence
  Description of Artificial Sequence: Synthetic oligonucleotide
uuuauacccaguuccuucc

SEQ ID NO: 959455 - RNA, 19 nt, Artificial Sequence
  Description of Artificial Sequence: Synthetic oligonucleotide
agugauaacaccaaacaga

SEQ ID NO: 959456 - RNA, 19 nt, Artificial Sequence
  Description of Artificial Sequence: Synthetic oligonucleotide
aucgaaggcgucuagaagu

SEQ ID NO: 959457 - RNA, 19 nt, Artificial Sequence
  Description of Artificial Sequence: Synthetic oligonucleotide
uaaccgauaagguuaggca

SEQ ID NO: 959458 - RNA, 19 nt, Artificial Sequence
  Description of Artificial Sequence: Synthetic oligonucleotide
ucacuagaaugacagggag

SEQ ID NO: 959459 - RNA, 19 nt, Artificial Sequence
  Description of Artificial Sequence: Synthetic oligonucleotide
uaggcuuacucuucugucg

SEQ ID NO: 959460 - RNA, 19 nt, Artificial Sequence
  Description of Artificial Sequence: Synthetic oligonucleotide
aacagagcgggccuagaag

SEQ ID NO: 959461 - RNA, 19 nt, Artificial Sequence
  Description of Artificial Sequence: Synthetic oligonucleotide
gaagaguucguuuccagca

SEQ ID NO: 959462 - RNA, 19 nt, Artificial Sequence
  Description of Artificial Sequence: Synthetic oligonucleotide
acguuaacagcaucggagg

SEQ ID NO: 959463 - RNA, 19 nt, Artificial Sequence
  Description of Artificial Sequence: Synthetic oligonucleotide
agaggaguuugccucaggg

SEQ ID NO: 959464 - RNA, 19 nt, Artificial Sequence
  Description of Artificial Sequence: Synthetic oligonucleotide
uuuuauacccaguuccuuc

SEQ ID NO: 959465 - RNA, 19 nt, Artificial Sequence
  Description of Artificial Sequence: Synthetic oligonucleotide
acauaaagcaggugggcag

SEQ ID NO: 959466 - RNA, 19 nt, Artificial Sequence
  Description of Artificial Sequence: Synthetic oligonucleotide
gaaauugaacagguaaagc

SEQ ID NO: 959467 - RNA, 19 nt, Artificial Sequence
  Description of Artificial Sequence: Synthetic oligonucleotide
agacaagaaaggcauacgu

SEQ ID NO: 959468 - RNA, 19 nt, Artificial Sequence
  Description of Artificial Sequence: Synthetic oligonucleotide
gacaauccgggcauaaccg

SEQ ID NO: 959469 - RNA, 19 nt, Artificial Sequence
  Description of Artificial Sequence: Synthetic oligonucleotide
agagcgguguuuuaaauau

SEQ ID NO: 959470 - RNA, 19 nt, Artificial Sequence
  Description of Artificial Sequence: Synthetic oligonucleotide
gacacaugguggaacaacg

SEQ ID NO: 959471 - RNA, 19 nt, Artificial Sequence
  Description of Artificial Sequence: Synthetic oligonucleotide
cuugauuaagggcucgagc

SEQ ID NO: 959472 - RNA, 19 nt, Artificial Sequence
  Description of Artificial Sequence: Synthetic oligonucleotide
uaguagauccgaagcacag

SEQ ID NO: 959473 - RNA, 19 nt, Artificial Sequence
  Description of Artificial Sequence: Synthetic oligonucleotide
uggaacaacgguccgucag

SEQ ID NO: 959474 - RNA, 19 nt, Artificial Sequence
  Description of Artificial Sequence: Synthetic oligonucleotide
aacuaguggucccucggag

SEQ ID NO: 959475 - RNA, 19 nt, Artificial Sequence
  Description of Artificial Sequence: Synthetic oligonucleotide
auucggaagagccccacag

SEQ ID NO: 959476 - RNA, 19 nt, Artificial Sequence
  Description of Artificial Sequence: Synthetic oligonucleotide
aaggcauacgucugcucuc

SEQ ID NO: 959477 - RNA, 19 nt, Artificial Sequence
  Description of Artificial Sequence: Synthetic oligonucleotide
ucggagaaauugaacaggu

SEQ ID NO: 959478 - RNA, 19 nt, Artificial Sequence
  Description of Artificial Sequence: Synthetic oligonucleotide
ucagcgcggaacaucagcc

SEQ ID NO: 959479 - RNA, 19 nt, Artificial Sequence
  Description of Artificial Sequence: Synthetic oligonucleotide
uuucgugcagcugugacga

SEQ ID NO: 959480 - RNA, 19 nt, Artificial Sequence
  Description of Artificial Sequence: Synthetic oligonucleotide
ugcguguccaucgaaggcg

SEQ ID NO: 959481 - RNA, 19 nt, Artificial Sequence
  Description of Artificial Sequence: Synthetic oligonucleotide
uuuauuauggaggcuucca

SEQ ID NO: 959482 - RNA, 19 nt, Artificial Sequence
  Description of Artificial Sequence: Synthetic oligonucleotide
uacgucugcucucaugaag

SEQ ID NO: 959483 - RNA, 19 nt, Artificial Sequence
  Description of Artificial Sequence: Synthetic oligonucleotide
uaggucgaucaucuugugg

SEQ ID NO: 959484 - RNA, 19 nt, Artificial Sequence
  Description of Artificial Sequence: Synthetic oligonucleotide
ugauuaagggcucgagcug

SEQ ID NO: 959485 - RNA, 19 nt, Artificial Sequence
  Description of Artificial Sequence: Synthetic oligonucleotide
uauuauggaggcuuccaaa

SEQ ID NO: 959486 - RNA, 19 nt, Artificial Sequence
  Description of Artificial Sequence: Synthetic oligonucleotide
uuauuauggaggcuuccaa

SEQ ID NO: 959487 - RNA, 19 nt, Artificial Sequence
  Description of Artificial Sequence: Synthetic oligonucleotide
acaacgguccgucagcaug

SEQ ID NO: 959488 - RNA, 19 nt, Artificial Sequence
  Description of Artificial Sequence: Synthetic oligonucleotide
uugugagggaagaaaacau

SEQ ID NO: 959489 - RNA, 19 nt, Artificial Sequence
  Description of Artificial Sequence: Synthetic oligonucleotide
guuucgugcagcugugacg

SEQ ID NO: 959490 - RNA, 19 nt, Artificial Sequence
  Description of Artificial Sequence: Synthetic oligonucleotide
gacuugagcagggcgaugg

SEQ ID NO: 959491 - RNA, 19 nt, Artificial Sequence
  Description of Artificial Sequence: Synthetic oligonucleotide
cagugauaacaccaaacag

SEQ ID NO: 959492 - RNA, 19 nt, Artificial Sequence
  Description of Artificial Sequence: Synthetic oligonucleotide
agcgcggaacaucagccgc

SEQ ID NO: 959493 - RNA, 19 nt, Artificial Sequence
  Description of Artificial Sequence: Synthetic oligonucleotide
ucgaggguacagaagggcc

SEQ ID NO: 959494 - RNA, 19 nt, Artificial Sequence
  Description of Artificial Sequence: Synthetic oligonucleotide
cacguggcacaguagaugc

SEQ ID NO: 959495 - RNA, 19 nt, Artificial Sequence
  Description of Artificial Sequence: Synthetic oligonucleotide
acccaauccucagacaggc

SEQ ID NO: 959496 - RNA, 19 nt, Artificial Sequence
  Description of Artificial Sequence: Synthetic oligonucleotide
gauuaagggcucgagcugc

SEQ ID NO: 959497 - RNA, 19 nt, Artificial Sequence
  Description of Artificial Sequence: Synthetic oligonucleotide
acagugaaaguggccagcc

SEQ ID NO: 959498 - RNA, 19 nt, Artificial Sequence
  Description of Artificial Sequence: Synthetic oligonucleotide
aaaccggguuccuugauua

SEQ ID NO: 959499 - RNA, 19 nt, Artificial Sequence
  Description of Artificial Sequence: Synthetic oligonucleotide
caggcaguagaagaguucg

SEQ ID NO: 959500 - RNA, 19 nt, Artificial Sequence
  Description of Artificial Sequence: Synthetic oligonucleotide
auacccaguuccuuccaac

SEQ ID NO: 959501 - RNA, 19 nt, Artificial Sequence
  Description of Artificial Sequence: Synthetic oligonucleotide
aaaucucaggccagacccc

SEQ ID NO: 959502 - RNA, 19 nt, Artificial Sequence
  Description of Artificial Sequence: Synthetic oligonucleotide
ugccucucaccacagaacu

SEQ ID NO: 959503 - RNA, 19 nt, Artificial Sequence
  Description of Artificial Sequence: Synthetic oligonucleotide
uucagcgcggaacaucagc

SEQ ID NO: 959504 - RNA, 19 nt, Artificial Sequence
  Description of Artificial Sequence: Synthetic oligonucleotide
cacuagaaugacagggagg

SEQ ID NO: 959505 - RNA, 19 nt, Artificial Sequence
  Description of Artificial Sequence: Synthetic oligonucleotide
ucgagcugcguguccaucg

SEQ ID NO: 959506 - RNA, 19 nt, Artificial Sequence
  Description of Artificial Sequence: Synthetic oligonucleotide
auaagguuaggcacgaaga

SEQ ID NO: 959507 - RNA, 19 nt, Artificial Sequence
  Description of Artificial Sequence: Synthetic oligonucleotide
cauacgucugcucucauga

SEQ ID NO: 959508 - RNA, 19 nt, Artificial Sequence
  Description of Artificial Sequence: Synthetic oligonucleotide
aacccuaggcuucaucuaa

SEQ ID NO: 959509 - RNA, 19 nt, Artificial Sequence
  Description of Artificial Sequence: Synthetic oligonucleotide
auggcgaagacaauccggg

SEQ ID NO: 959510 - RNA, 19 nt, Artificial Sequence
  Description of Artificial Sequence: Synthetic oligonucleotide
ucccagucucaccagcgcg

SEQ ID NO: 959511 - RNA, 19 nt, Artificial Sequence
  Description of Artificial Sequence: Synthetic oligonucleotide
uccgucagcaugucaagca

SEQ ID NO: 959512 - RNA, 19 nt, Artificial Sequence
  Description of Artificial Sequence: Synthetic oligonucleotide
acaugguggaacaacgguc

SEQ ID NO: 959513 - RNA, 19 nt, Artificial Sequence
  Description of Artificial Sequence: Synthetic oligonucleotide
ucuuuauuauggaggcuuc

SEQ ID NO: 959514 - RNA, 19 nt, Artificial Sequence
  Description of Artificial Sequence: Synthetic oligonucleotide
ucaagguuacagugaaagu

SEQ ID NO: 959515 - RNA, 19 nt, Artificial Sequence
  Description of Artificial Sequence: Synthetic oligonucleotide
caagaaaggcauacgucug

SEQ ID NO: 959516 - RNA, 19 nt, Artificial Sequence
  Description of Artificial Sequence: Synthetic oligonucleotide
aggcccauucggaagagcc

SEQ ID NO: 959517 - RNA, 19 nt, Artificial Sequence
  Description of Artificial Sequence: Synthetic oligonucleotide
acacuaaugauggacuuga

SEQ ID NO: 959518 - RNA, 19 nt, Artificial Sequence
  Description of Artificial Sequence: Synthetic oligonucleotide
cugucggggacguuaacag

SEQ ID NO: 959519 - RNA, 19 nt, Artificial Sequence
  Description of Artificial Sequence: Synthetic oligonucleotide
agaaguguaguagauccga

SEQ ID NO: 959520 - RNA, 19 nt, Artificial Sequence
  Description of Artificial Sequence: Synthetic oligonucleotide
accgauaagguuaggcacg

SEQ ID NO: 959521 - RNA, 19 nt, Artificial Sequence
  Description of Artificial Sequence: Synthetic oligonucleotide
agguuagagaacacaagag

SEQ ID NO: 959522 - RNA, 19 nt, Artificial Sequence
  Description of Artificial Sequence: Synthetic oligonucleotide
ucucuaaggucacuagaau

SEQ ID NO: 959523 - RNA, 19 nt, Artificial Sequence
  Description of Artificial Sequence: Synthetic oligonucleotide
uuacucuucugucggggac

SEQ ID NO: 959524 - RNA, 19 nt, Artificial Sequence
  Description of Artificial Sequence: Synthetic oligonucleotide
uacucuucugucggggacg

SEQ ID NO: 959525 - RNA, 19 nt, Artificial Sequence
  Description of Artificial Sequence: Synthetic oligonucleotide
cuuucagcgcggaacauca

SEQ ID NO: 959526 - RNA, 19 nt, Artificial Sequence
  Description of Artificial Sequence: Synthetic oligonucleotide
ucaccuuucagcgcggaac

SEQ ID NO: 959527 - RNA, 19 nt, Artificial Sequence
  Description of Artificial Sequence: Synthetic oligonucleotide
ucuaguuggccccucccuc

SEQ ID NO: 959528 - RNA, 19 nt, Artificial Sequence
  Description of Artificial Sequence: Synthetic oligonucleotide
aagcauggccccaaaccgg

SEQ ID NO: 959529 - RNA, 19 nt, Artificial Sequence
  Description of Artificial Sequence: Synthetic oligonucleotide
auaacaccaaacagagguc

SEQ ID NO: 959530 - RNA, 19 nt, Artificial Sequence
  Description of Artificial Sequence: Synthetic oligonucleotide
gagggucauuucuuccugg

SEQ ID NO: 959531 - RNA, 19 nt, Artificial Sequence
  Description of Artificial Sequence: Synthetic oligonucleotide
uccaggcuaguucucacuc

SEQ ID NO: 959532 - RNA, 19 nt, Artificial Sequence
  Description of Artificial Sequence: Synthetic oligonucleotide
ucugucggggacguuaaca

SEQ ID NO: 959533 - RNA, 19 nt, Artificial Sequence
  Description of Artificial Sequence: Synthetic oligonucleotide
ucauuucuuccuggcacgg

SEQ ID NO: 959534 - RNA, 19 nt, Artificial Sequence
  Description of Artificial Sequence: Synthetic oligonucleotide
cuaggcuuacucuucuguc

SEQ ID NO: 959535 - RNA, 19 nt, Artificial Sequence
  Description of Artificial Sequence: Synthetic oligonucleotide
gacacuaaugauggacuug

SEQ ID NO: 959536 - RNA, 19 nt, Artificial Sequence
  Description of Artificial Sequence: Synthetic oligonucleotide
gaguagauagaaggaggag

SEQ ID NO: 959537 - RNA, 19 nt, Artificial Sequence
  Description of Artificial Sequence: Synthetic oligonucleotide
guuaggcacgaagaggaag

SEQ ID NO: 959538 - RNA, 19 nt, Artificial Sequence
  Description of Artificial Sequence: Synthetic oligonucleotide
agcugucgucuccagcagc

SEQ ID NO: 959539 - RNA, 19 nt, Artificial Sequence
  Description of Artificial Sequence: Synthetic oligonucleotide
gacauaaagcaggugggca

SEQ ID NO: 959540 - RNA, 19 nt, Artificial Sequence
  Description of Artificial Sequence: Synthetic oligonucleotide
uuauacccaguuccuucca

SEQ ID NO: 959541 - RNA, 19 nt, Artificial Sequence
  Description of Artificial Sequence: Synthetic oligonucleotide
aacacccaauccucagaca

SEQ ID NO: 959542 - RNA, 19 nt, Artificial Sequence
  Description of Artificial Sequence: Synthetic oligonucleotide
guguaguagauccgaagca

SEQ ID NO: 959543 - RNA, 19 nt, Artificial Sequence
  Description of Artificial Sequence: Synthetic oligonucleotide
acaggguucccagauaggu

SEQ ID NO: 959544 - RNA, 19 nt, Artificial Sequence
  Description of Artificial Sequence: Synthetic oligonucleotide
gugaaaguggccagccagg

SEQ ID NO: 959545 - RNA, 19 nt, Artificial Sequence
  Description of Artificial Sequence: Synthetic oligonucleotide
aaucucaggccagacccca

SEQ ID NO: 959546 - RNA, 19 nt, Artificial Sequence
  Description of Artificial Sequence: Synthetic oligonucleotide
cuggcgguuccccuugucg

SEQ ID NO: 959547 - RNA, 19 nt, Artificial Sequence
  Description of Artificial Sequence: Synthetic oligonucleotide
gcuaguucucacucuaggc

SEQ ID NO: 959548 - RNA, 19 nt, Artificial Sequence
  Description of Artificial Sequence: Synthetic oligonucleotide
aagcagcuaccacauucca

SEQ ID NO: 959549 - RNA, 19 nt, Artificial Sequence
  Description of Artificial Sequence: Synthetic oligonucleotide
ccgggcauaaccgauaagg

SEQ ID NO: 959550 - RNA, 19 nt, Artificial Sequence
  Description of Artificial Sequence: Synthetic oligonucleotide
aaggcgucuagaaguccac

SEQ ID NO: 959551 - RNA, 19 nt, Artificial Sequence
  Description of Artificial Sequence: Synthetic oligonucleotide
ucgaaggcgucuagaaguc

SEQ ID NO: 959552 - RNA, 19 nt, Artificial Sequence
  Description of Artificial Sequence: Synthetic oligonucleotide
ucgugcagcugugacgagg

SEQ ID NO: 959553 - RNA, 19 nt, Artificial Sequence
  Description of Artificial Sequence: Synthetic oligonucleotide
uggcgguuccccuugucgc

SEQ ID NO: 959554 - RNA, 19 nt, Artificial Sequence
  Description of Artificial Sequence: Synthetic oligonucleotide
aagguccccucuuuauuau

SEQ ID NO: 959555 - RNA, 19 nt, Artificial Sequence
  Description of Artificial Sequence: Synthetic oligonucleotide
cccucuuuauuauggaggc

SEQ ID NO: 959556 - RNA, 19 nt, Artificial Sequence
  Description of Artificial Sequence: Synthetic oligonucleotide
ugucggggacguuaacagc

SEQ ID NO: 959557 - RNA, 19 nt, Artificial Sequence
  Description of Artificial Sequence: Synthetic oligonucleotide
ugacacuaaugauggacuu

SEQ ID NO: 959558 - RNA, 19 nt, Artificial Sequence
  Description of Artificial Sequence: Synthetic oligonucleotide
augguggaacaacgguccg

SEQ ID NO: 959559 - RNA, 19 nt, Artificial Sequence
  Description of Artificial Sequence: Synthetic oligonucleotide
caguuauuagagcccgcag

SEQ ID NO: 959560 - RNA, 19 nt, Artificial Sequence
  Description of Artificial Sequence: Synthetic oligonucleotide
agcgguguuuuaaauauaa

SEQ ID NO: 959561 - RNA, 19 nt, Artificial Sequence
  Description of Artificial Sequence: Synthetic oligonucleotide
gaaggcgucuagaagucca

SEQ ID NO: 959562 - RNA, 19 nt, Artificial Sequence
  Description of Artificial Sequence: Synthetic oligonucleotide
gagagcgguguuuuaaaua

SEQ ID NO: 959563 - RNA, 19 nt, Artificial Sequence
  Description of Artificial Sequence: Synthetic oligonucleotide
uuccuugauuaagggcucg

SEQ ID NO: 959564 - RNA, 19 nt, Artificial Sequence
  Description of Artificial Sequence: Synthetic oligonucleotide
cucgaggguacagaagggc

SEQ ID NO: 959565 - RNA, 19 nt, Artificial Sequence
  Description of Artificial Sequence: Synthetic oligonucleotide
acacaugguggaacaacgg

SEQ ID NO: 959566 - RNA, 19 nt, Artificial Sequence
  Description of Artificial Sequence: Synthetic oligonucleotide
ggcauaaccgauaagguua

SEQ ID NO: 959567 - RNA, 19 nt, Artificial Sequence
  Description of Artificial Sequence: Synthetic oligonucleotide
agagagcgguguuuuaaau

SEQ ID NO: 959568 - RNA, 19 nt, Artificial Sequence
  Description of Artificial Sequence: Synthetic oligonucleotide
caucuaagaauaucucaaa

SEQ ID NO: 959569 - RNA, 19 nt, Artificial Sequence
  Description of Artificial Sequence: Synthetic oligonucleotide
ggaacaacgguccgucagc

SEQ ID NO: 959570 - RNA, 19 nt, Artificial Sequence
  Description of Artificial Sequence: Synthetic oligonucleotide
aggcgagggucauuucuuc

SEQ ID NO: 959571 - RNA, 19 nt, Artificial Sequence
  Description of Artificial Sequence: Synthetic oligonucleotide
agcauggccccaaaccggg

SEQ ID NO: 959572 - RNA, 19 nt, Artificial Sequence
  Description of Artificial Sequence: Synthetic oligonucleotide
uagauccgaagcacagggu

SEQ ID NO: 959573 - RNA, 19 nt, Artificial Sequence
  Description of Artificial Sequence: Synthetic oligonucleotide
gagguggaugacacuaaug

SEQ ID NO: 959574 - RNA, 19 nt, Artificial Sequence
  Description of Artificial Sequence: Synthetic oligonucleotide
gacgagguggaugacacua

SEQ ID NO: 959575 - RNA, 19 nt, Artificial Sequence
  Description of Artificial Sequence: Synthetic oligonucleotide
aacaccaaacagaggucga

SEQ ID NO: 959576 - RNA, 19 nt, Artificial Sequence
  Description of Artificial Sequence: Synthetic oligonucleotide
cugcguguccaucgaaggc

SEQ ID NO: 959577 - RNA, 19 nt, Artificial Sequence
  Description of Artificial Sequence: Synthetic oligonucleotide
caccaaacagaggucgacc

SEQ ID NO: 959578 - RNA, 19 nt, Artificial Sequence
  Description of Artificial Sequence: Synthetic oligonucleotide
gauguguggcaacacccaa

SEQ ID NO: 959579 - RNA, 19 nt, Artificial Sequence
  Description of Artificial Sequence: Synthetic oligonucleotide
agcaucggaggaaggagag

SEQ ID NO: 959580 - RNA, 19 nt, Artificial Sequence
  Description of Artificial Sequence: Synthetic oligonucleotide
gucggggacguuaacagca

SEQ ID NO: 959581 - RNA, 19 nt, Artificial Sequence
  Description of Artificial Sequence: Synthetic oligonucleotide
gagagagcgguguuuuaaa

SEQ ID NO: 959582 - RNA, 19 nt, Artificial Sequence
  Description of Artificial Sequence: Synthetic oligonucleotide
cugccucucaccacagaac

SEQ ID NO: 959583 - RNA, 19 nt, Artificial Sequence
  Description of Artificial Sequence: Synthetic oligonucleotide
uuucagcgcggaacaucag

SEQ ID NO: 959584 - RNA, 19 nt, Artificial Sequence
  Description of Artificial Sequence: Synthetic oligonucleotide
uccuggcacggucugccgc

SEQ ID NO: 959585 - RNA, 19 nt, Artificial Sequence
  Description of Artificial Sequence: Synthetic oligonucleotide
acgucugcucucaugaagu

SEQ ID NO: 959586 - RNA, 19 nt, Artificial Sequence
  Description of Artificial Sequence: Synthetic oligonucleotide
gacuugucccagucucacc

SEQ ID NO: 959587 - RNA, 19 nt, Artificial Sequence
  Description of Artificial Sequence: Synthetic oligonucleotide
gcuuugcagggccaggucc

SEQ ID NO: 959588 - RNA, 19 nt, Artificial Sequence
  Description of Artificial Sequence: Synthetic oligonucleotide
aucggaggaaggagagagc

SEQ ID NO: 959589 - RNA, 19 nt, Artificial Sequence
  Description of Artificial Sequence: Synthetic oligonucleotide
uccaucgaaggcgucuaga

SEQ ID NO: 959590 - RNA, 19 nt, Artificial Sequence
  Description of Artificial Sequence: Synthetic oligonucleotide
gcaaccccaguuauuagag

SEQ ID NO: 959591 - RNA, 19 nt, Artificial Sequence
  Description of Artificial Sequence: Synthetic oligonucleotide
auuaagggcucgagcugcg

SEQ ID NO: 959592 - RNA, 19 nt, Artificial Sequence
  Description of Artificial Sequence: Synthetic oligonucleotide
gggccuagaaguguaguag

SEQ ID NO: 959593 - RNA, 19 nt, Artificial Sequence
  Description of Artificial Sequence: Synthetic oligonucleotide
ggcgucuagaaguccacug

SEQ ID NO: 959594 - RNA, 19 nt, Artificial Sequence
  Description of Artificial Sequence: Synthetic oligonucleotide
uggcgaagacaauccgggc

SEQ ID NO: 959595 - RNA, 19 nt, Artificial Sequence
  Description of Artificial Sequence: Synthetic oligonucleotide
cacuaaugauggacuugag

SEQ ID NO: 959596 - RNA, 19 nt, Artificial Sequence
  Description of Artificial Sequence: Synthetic oligonucleotide
ggguuccuugauuaagggc

SEQ ID NO: 959597 - RNA, 19 nt, Artificial Sequence
  Description of Artificial Sequence: Synthetic oligonucleotide
cuuacucuucugucgggga

SEQ ID NO: 959598 - RNA, 19 nt, Artificial Sequence
  Description of Artificial Sequence: Synthetic oligonucleotide
agcagcuaccacauuccag

SEQ ID NO: 959599 - RNA, 19 nt, Artificial Sequence
  Description of Artificial Sequence: Synthetic oligonucleotide
cagcgcggaacaucagccg

SEQ ID NO: 959600 - RNA, 19 nt, Artificial Sequence
  Description of Artificial Sequence: Synthetic oligonucleotide
cuaguggucccucggagaa

SEQ ID NO: 959601 - RNA, 19 nt, Artificial Sequence
  Description of Artificial Sequence: Synthetic oligonucleotide
ggcgaagacaauccgggca

SEQ ID NO: 959602 - RNA, 19 nt, Artificial Sequence
  Description of Artificial Sequence: Synthetic oligonucleotide
aacaacgguccgucagcau

SEQ ID NO: 959603 - RNA, 19 nt, Artificial Sequence
  Description of Artificial Sequence: Synthetic oligonucleotide
ucccagauaggucgaucau

SEQ ID NO: 959604 - RNA, 19 nt, Artificial Sequence
  Description of Artificial Sequence: Synthetic oligonucleotide
guagcugaggccccuuuaa

SEQ ID NO: 959605 - RNA, 19 nt, Artificial Sequence
  Description of Artificial Sequence: Synthetic oligonucleotide
gcuuacucuucugucgggg

SEQ ID NO: 959606 - RNA, 19 nt, Artificial Sequence
  Description of Artificial Sequence: Synthetic oligonucleotide
gcuaccacauuccaggcua

SEQ ID NO: 959607 - RNA, 19 nt, Artificial Sequence
  Description of Artificial Sequence: Synthetic oligonucleotide
ccaacuaguggucccucgg

SEQ ID NO: 959608 - RNA, 19 nt, Artificial Sequence
  Description of Artificial Sequence: Synthetic oligonucleotide
cccuuuaaggucugccugc

SEQ ID NO: 959609 - RNA, 19 nt, Artificial Sequence
  Description of Artificial Sequence: Synthetic oligonucleotide
gaagagaaggguggcucga

SEQ ID NO: 959610 - RNA, 19 nt, Artificial Sequence
  Description of Artificial Sequence: Synthetic oligonucleotide
aaccggguuccuugauuaa

SEQ ID NO: 959611 - RNA, 19 nt, Artificial Sequence
  Description of Artificial Sequence: Synthetic oligonucleotide
uccgggcauaaccgauaag

SEQ ID NO: 959612 - RNA, 19 nt, Artificial Sequence
  Description of Artificial Sequence: Synthetic oligonucleotide
gaacaacgguccgucagca

SEQ ID NO: 959613 - RNA, 19 nt, Artificial Sequence
  Description of Artificial Sequence: Synthetic oligonucleotide
gcauaaccgauaagguuag

SEQ ID NO: 959614 - RNA, 19 nt, Artificial Sequence
  Description of Artificial Sequence: Synthetic oligonucleotide
gaagacaauccgggcauaa

SEQ ID NO: 959615 - RNA, 19 nt, Artificial Sequence
  Description of Artificial Sequence: Synthetic oligonucleotide
ggaguuugccucagggaag

SEQ ID NO: 959616 - RNA, 19 nt, Artificial Sequence
  Description of Artificial Sequence: Synthetic oligonucleotide
ggcacggucugccgcaucc

SEQ ID NO: 959617 - RNA, 19 nt, Artificial Sequence
  Description of Artificial Sequence: Synthetic oligonucleotide
cuaggaccucuuaggagga

SEQ ID NO: 959618 - RNA, 19 nt, Artificial Sequence
  Description of Artificial Sequence: Synthetic oligonucleotide
caccuuucagcgcggaaca

SEQ ID NO: 959619 - RNA, 19 nt, Artificial Sequence
  Description of Artificial Sequence: Synthetic oligonucleotide
aauccgggcauaaccgaua

SEQ ID NO: 959620 - RNA, 19 nt, Artificial Sequence
  Description of Artificial Sequence: Synthetic oligonucleotide
ugguggaacaacgguccgu

SEQ ID NO: 959621 - RNA, 19 nt, Artificial Sequence
  Description of Artificial Sequence: Synthetic oligonucleotide
uguccaucgaaggcgucua

SEQ ID NO: 959622 - RNA, 19 nt, Artificial Sequence
  Description of Artificial Sequence: Synthetic oligonucleotide
gaggccgugaaggggcagc

SEQ ID NO: 959623 - RNA, 19 nt, Artificial Sequence
  Description of Artificial Sequence: Synthetic oligonucleotide
uccccuugucgcccuggcc

SEQ ID NO: 959624 - RNA, 19 nt, Artificial Sequence
  Description of Artificial Sequence: Synthetic oligonucleotide
gguaaagcaggcaguagaa

SEQ ID NO: 959625 - RNA, 19 nt, Artificial Sequence
  Description of Artificial Sequence: Synthetic oligonucleotide
ucggggacguuaacagcau

SEQ ID NO: 959626 - RNA, 19 nt, Artificial Sequence
  Description of Artificial Sequence: Synthetic oligonucleotide
acguggcacaguagaugcc

SEQ ID NO: 959627 - RNA, 19 nt, Artificial Sequence
  Description of Artificial Sequence: Synthetic oligonucleotide
gguggaacaacgguccguc

SEQ ID NO: 959628 - RNA, 19 nt, Artificial Sequence
  Description of Artificial Sequence: Synthetic oligonucleotide
gccaacuaguggucccucg

SEQ ID NO: 959629 - RNA, 19 nt, Artificial Sequence
  Description of Artificial Sequence: Synthetic oligonucleotide
cauaaccgauaagguuagg

SEQ ID NO: 959630 - RNA, 19 nt, Artificial Sequence
  Description of Artificial Sequence: Synthetic oligonucleotide
cccagucucaccagcgcgg

SEQ ID NO: 959631 - RNA, 19 nt, Artificial Sequence
  Description of Artificial Sequence: Synthetic oligonucleotide
auacgucugcucucaugaa

SEQ ID NO: 959632 - RNA, 19 nt, Artificial Sequence
  Description of Artificial Sequence: Synthetic oligonucleotide
ggcgagggucauuucuucc

SEQ ID NO: 959633 - RNA, 19 nt, Artificial Sequence
  Description of Artificial Sequence: Synthetic oligonucleotide
caacuaguggucccucgga

SEQ ID NO: 959634 - RNA, 19 nt, Artificial Sequence
  Description of Artificial Sequence: Synthetic oligonucleotide
auuaagcagcuaccacauu

SEQ ID NO: 959635 - RNA, 19 nt, Artificial Sequence
  Description of Artificial Sequence: Synthetic oligonucleotide
ugacgagguggaugacacu

SEQ ID NO: 959636 - RNA, 19 nt, Artificial Sequence
  Description of Artificial Sequence: Synthetic oligonucleotide
aggcauacgucugcucuca

SEQ ID NO: 959637 - RNA, 19 nt, Artificial Sequence
  Description of Artificial Sequence: Synthetic oligonucleotide
ggcuuacucuucugucggg

SEQ ID NO: 959638 - RNA, 19 nt, Artificial Sequence
  Description of Artificial Sequence: Synthetic oligonucleotide
ggaucuaguuggccccucc

SEQ ID NO: 959639 - RNA, 19 nt, Artificial Sequence
  Description of Artificial Sequence: Synthetic oligonucleotide
ucccucacauguccccaaa

SEQ ID NO: 959640 - RNA, 19 nt, Artificial Sequence
  Description of Artificial Sequence: Synthetic oligonucleotide
gugaaccucaagagccagc

SEQ ID NO: 959641 - RNA, 19 nt, Artificial Sequence
  Description of Artificial Sequence: Synthetic oligonucleotide
gcauacgucugcucucaug

SEQ ID NO: 959642 - RNA, 19 nt, Artificial Sequence
  Description of Artificial Sequence: Synthetic oligonucleotide
agguugaccaagagacaca

SEQ ID NO: 959643 - RNA, 19 nt, Artificial Sequence
  Description of Artificial Sequence: Synthetic oligonucleotide
uucugucggggacguuaac

SEQ ID NO: 959644 - RNA, 19 nt, Artificial Sequence
  Description of Artificial Sequence: Synthetic oligonucleotide
guccgucagcaugucaagc

SEQ ID NO: 959645 - RNA, 19 nt, Artificial Sequence
  Description of Artificial Sequence: Synthetic oligonucleotide
acaugacacuaggaccucu

SEQ ID NO: 959646 - RNA, 19 nt, Artificial Sequence
  Description of Artificial Sequence: Synthetic oligonucleotide
aguccacugaguagauaga

SEQ ID NO: 959647 - RNA, 19 nt, Artificial Sequence
  Description of Artificial Sequence: Synthetic oligonucleotide
gcgucuagaaguccacuga

SEQ ID NO: 959648 - RNA, 19 nt, Artificial Sequence
  Description of Artificial Sequence: Synthetic oligonucleotide
cgucuagaaguccacugag

SEQ ID NO: 959649 - RNA, 19 nt, Artificial Sequence
  Description of Artificial Sequence: Synthetic oligonucleotide
gcccauucggaagagcccc

SEQ ID NO: 959650 - RNA, 19 nt, Artificial Sequence
  Description of Artificial Sequence: Synthetic oligonucleotide
uuaagggcucgagcugcgu

SEQ ID NO: 959651 - RNA, 19 nt, Artificial Sequence
  Description of Artificial Sequence: Synthetic oligonucleotide
agccaacuaguggucccuc

SEQ ID NO: 959652 - RNA, 19 nt, Artificial Sequence
  Description of Artificial Sequence: Synthetic oligonucleotide
agcgcggccucaccuuuca

SEQ ID NO: 959653 - RNA, 19 nt, Artificial Sequence
  Description of Artificial Sequence: Synthetic oligonucleotide
ccuagaaguguaguagauc

SEQ ID NO: 959654 - RNA, 19 nt, Artificial Sequence
  Description of Artificial Sequence: Synthetic oligonucleotide
guccaucgaaggcgucuag

SEQ ID NO: 959655 - RNA, 19 nt, Artificial Sequence
  Description of Artificial Sequence: Synthetic oligonucleotide
cuucugucggggacguuaa

SEQ ID NO: 959656 - RNA, 19 nt, Artificial Sequence
  Description of Artificial Sequence: Synthetic oligonucleotide
uucgugcagcugugacgag

SEQ ID NO: 959657 - RNA, 19 nt, Artificial Sequence
  Description of Artificial Sequence: Synthetic oligonucleotide
guugaccaagagacacaug

SEQ ID NO: 959658 - RNA, 19 nt, Artificial Sequence
  Description of Artificial Sequence: Synthetic oligonucleotide
ccccaguuauuagagcccg

SEQ ID NO: 959659 - RNA, 19 nt, Artificial Sequence
  Description of Artificial Sequence: Synthetic oligonucleotide
ggcgguuccccuugucgcc

SEQ ID NO: 959660 - RNA, 19 nt, Artificial Sequence
  Description of Artificial Sequence: Synthetic oligonucleotide
augucaagcauggccccaa

SEQ ID NO: 959661 - RNA, 19 nt, Artificial Sequence
  Description of Artificial Sequence: Synthetic oligonucleotide
ggauguguggcaacaccca

SEQ ID NO: 959662 - RNA, 19 nt, Artificial Sequence
  Description of Artificial Sequence: Synthetic oligonucleotide
uauuuuccucuggcauccu

SEQ ID NO: 959663 - RNA, 19 nt, Artificial Sequence
  Description of Artificial Sequence: Synthetic oligonucleotide
guucccagauaggucgauc

SEQ ID NO: 959664 - RNA, 19 nt, Artificial Sequence
  Description of Artificial Sequence: Synthetic oligonucleotide
ugcgcccggcuccccuagg

SEQ ID NO: 959665 - RNA, 19 nt, Artificial Sequence
  Description of Artificial Sequence: Synthetic oligonucleotide
gggucauuucuuccuggca

SEQ ID NO: 959666 - RNA, 19 nt, Artificial Sequence
  Description of Artificial Sequence: Synthetic oligonucleotide
gaggagccacguggcacag

SEQ ID NO: 959667 - RNA, 19 nt, Artificial Sequence
  Description of Artificial Sequence: Synthetic oligonucleotide
cggguuccuugauuaaggg

SEQ ID NO: 959668 - RNA, 19 nt, Artificial Sequence
  Description of Artificial Sequence: Synthetic oligonucleotide
caacccuaggcuucaucua

SEQ ID NO: 959669 - RNA, 19 nt, Artificial Sequence
  Description of Artificial Sequence: Synthetic oligonucleotide
gguggaugacacuaaugau

SEQ ID NO: 959670 - RNA, 19 nt, Artificial Sequence
  Description of Artificial Sequence: Synthetic oligonucleotide
aguuggccccucccucaca

SEQ ID NO: 959671 - RNA, 19 nt, Artificial Sequence
  Description of Artificial Sequence: Synthetic oligonucleotide
ccaacccuaggcuucaucu

SEQ ID NO: 959672 - RNA, 19 nt, Artificial Sequence
  Description of Artificial Sequence: Synthetic oligonucleotide
ggucccucggagaaauuga

SEQ ID NO: 959673 - RNA, 19 nt, Artificial Sequence
  Description of Artificial Sequence: Synthetic oligonucleotide
aggcgucuagaaguccacu

SEQ ID NO: 959674 - RNA, 19 nt, Artificial Sequence
  Description of Artificial Sequence: Synthetic oligonucleotide
gagccacguggcacaguag

SEQ ID NO: 959675 - RNA, 19 nt, Artificial Sequence
  Description of Artificial Sequence: Synthetic oligonucleotide
accagcgcggccucaccuu

SEQ ID NO: 959676 - RNA, 19 nt, Artificial Sequence
  Description of Artificial Sequence: Synthetic oligonucleotide
cagugaaaguggccagcca

SEQ ID NO: 959677 - RNA, 19 nt, Artificial Sequence
  Description of Artificial Sequence: Synthetic oligonucleotide
cuugucgcccuggcccagc

SEQ ID NO: 959678 - RNA, 19 nt, Artificial Sequence
  Description of Artificial Sequence: Synthetic oligonucleotide
cagucucaccagcgcggcc

SEQ ID NO: 959679 - RNA, 19 nt, Artificial Sequence
  Description of Artificial Sequence: Synthetic oligonucleotide
gggcgcaggacgccccugg

SEQ ID NO: 959680 - RNA, 19 nt, Artificial Sequence
  Description of Artificial Sequence: Synthetic oligonucleotide
ccaguuauuagagcccgca

SEQ ID NO: 959681 - RNA, 19 nt, Artificial Sequence
  Description of Artificial Sequence: Synthetic oligonucleotide
ccacguggcacaguagaug

SEQ ID NO: 959682 - RNA, 19 nt, Artificial Sequence
  Description of Artificial Sequence: Synthetic oligonucleotide
caaagguccccucuuuauu

SEQ ID NO: 959683 - RNA, 19 nt, Artificial Sequence
  Description of Artificial Sequence: Synthetic oligonucleotide
gucccucggagaaauugaa

SEQ ID NO: 959684 - RNA, 19 nt, Artificial Sequence
  Description of Artificial Sequence: Synthetic oligonucleotide
aggcaguagaagaguucgu

SEQ ID NO: 959685 - RNA, 19 nt, Artificial Sequence
  Description of Artificial Sequence: Synthetic oligonucleotide
caauccgggcauaaccgau

SEQ ID NO: 959686 - RNA, 19 nt, Artificial Sequence
  Description of Artificial Sequence: Synthetic oligonucleotide
agcgggccuagaaguguag

SEQ ID NO: 959687 - RNA, 19 nt, Artificial Sequence
  Description of Artificial Sequence: Synthetic oligonucleotide
gggcaugaaguagaaggaa

SEQ ID NO: 959688 - RNA, 19 nt, Artificial Sequence
  Description of Artificial Sequence: Synthetic oligonucleotide
gguugaccaagagacacau

SEQ ID NO: 959689 - RNA, 19 nt, Artificial Sequence
  Description of Artificial Sequence: Synthetic oligonucleotide
gggcauaaccgauaagguu

SEQ ID NO: 959690 - RNA, 19 nt, Artificial Sequence
  Description of Artificial Sequence: Synthetic oligonucleotide
ggcuccccuaggcuuacuc

SEQ ID NO: 959691 - RNA, 19 nt, Artificial Sequence
  Description of Artificial Sequence: Synthetic oligonucleotide
guuugccucagggaaggau

SEQ ID NO: 959692 - RNA, 19 nt, Artificial Sequence
  Description of Artificial Sequence: Synthetic oligonucleotide
gagcgguguuuuaaauaua

SEQ ID NO: 959693 - RNA, 19 nt, Artificial Sequence
  Description of Artificial Sequence: Synthetic oligonucleotide
cccaguuauuagagcccgc

SEQ ID NO: 959694 - RNA, 19 nt, Artificial Sequence
  Description of Artificial Sequence: Synthetic oligonucleotide
ggcgcaggacgccccuggg

SEQ ID NO: 959695 - RNA, 19 nt, Artificial Sequence
  Description of Artificial Sequence: Synthetic oligonucleotide
gcgcaaccccaguuauuag

SEQ ID NO: 959696 - RNA, 19 nt, Artificial Sequence
  Description of Artificial Sequence: Synthetic oligonucleotide
gcgagggucauuucuuccu

SEQ ID NO: 959697 - RNA, 19 nt, Artificial Sequence
  Description of Artificial Sequence: Synthetic oligonucleotide
cucgagcugcguguccauc

SEQ ID NO: 959698 - RNA, 19 nt, Artificial Sequence
  Description of Artificial Sequence: Synthetic oligonucleotide
ggucgaucaucuuguggcu

SEQ ID NO: 959699 - RNA, 19 nt, Artificial Sequence
  Description of Artificial Sequence: Synthetic oligonucleotide
cguccaagcucaugcugag

SEQ ID NO: 959700 - RNA, 19 nt, Artificial Sequence
  Description of Artificial Sequence: Synthetic oligonucleotide
cgcaaccccaguuauuaga

SEQ ID NO: 959701 - RNA, 19 nt, Artificial Sequence
  Description of Artificial Sequence: Synthetic oligonucleotide
cucaccuuucagcgcggaa

SEQ ID NO: 959702 - RNA, 19 nt, Artificial Sequence
  Description of Artificial Sequence: Synthetic oligonucleotide
caaaccggguuccuugauu

SEQ ID NO: 959703 - RNA, 19 nt, Artificial Sequence
  Description of Artificial Sequence: Synthetic oligonucleotide
acgcaccccuggccuuccg

SEQ ID NO: 959704 - RNA, 19 nt, Artificial Sequence
  Description of Artificial Sequence: Synthetic oligonucleotide
ccagucucaccagcgcggc

SEQ ID NO: 959705 - RNA, 19 nt, Artificial Sequence
  Description of Artificial Sequence: Synthetic oligonucleotide
ccuaggcuuacucuucugu

SEQ ID NO: 959706 - RNA, 19 nt, Artificial Sequence
  Description of Artificial Sequence: Synthetic oligonucleotide
cccuaggcuucaucuaaga

SEQ ID NO: 959707 - RNA, 19 nt, Artificial Sequence
  Description of Artificial Sequence: Synthetic oligonucleotide
cgguccgucagcaugucaa

SEQ ID NO: 959708 - RNA, 19 nt, Artificial Sequence
  Description of Artificial Sequence: Synthetic oligonucleotide
ggaaugggucugguccuca

SEQ ID NO: 959709 - RNA, 19 nt, Artificial Sequence
  Description of Artificial Sequence: Synthetic oligonucleotide
cccuaggcuuacucuucug

SEQ ID NO: 959710 - RNA, 19 nt, Artificial Sequence
  Description of Artificial Sequence: Synthetic oligonucleotide
gcggaacaucagccgcucc

SEQ ID NO: 959711 - RNA, 19 nt, Artificial Sequence
  Description of Artificial Sequence: Synthetic oligonucleotide
gcuccccuaggcuuacucu

SEQ ID NO: 959712 - RNA, 19 nt, Artificial Sequence
  Description of Artificial Sequence: Synthetic oligonucleotide
gcgguguuuuaaauauaaa

SEQ ID NO: 959713 - RNA, 19 nt, Artificial Sequence
  Description of Artificial Sequence: Synthetic oligonucleotide
cacgcaccccuggccuucc

SEQ ID NO: 959714 - RNA, 19 nt, Artificial Sequence
  Description of Artificial Sequence: Synthetic oligonucleotide
cccaaaccggguuccuuga

SEQ ID NO: 959715 - RNA, 19 nt, Artificial Sequence
  Description of Artificial Sequence: Synthetic oligonucleotide
gcgguuccccuugucgccc

SEQ ID NO: 959716 - RNA, 19 nt, Artificial Sequence
  Description of Artificial Sequence: Synthetic oligonucleotide
cuggacggguggggccucc

SEQ ID NO: 959717 - RNA, 19 nt, Artificial Sequence
  Description of Artificial Sequence: Synthetic oligonucleotide
ggacuugagcagggcgaug

SEQ ID NO: 959718 - RNA, 19 nt, Artificial Sequence
  Description of Artificial Sequence: Synthetic oligonucleotide
gguuaggcacgaagaggaa

SEQ ID NO: 959719 - RNA, 19 nt, Artificial Sequence
  Description of Artificial Sequence: Synthetic oligonucleotide
ccucacauguccccaaaau

SEQ ID NO: 959720 - RNA, 19 nt, Artificial Sequence
  Description of Artificial Sequence: Synthetic oligonucleotide
ggugaacagagcgggccua

SEQ ID NO: 959721 - RNA, 19 nt, Artificial Sequence
  Description of Artificial Sequence: Synthetic oligonucleotide
ccgauaagguuaggcacga

SEQ ID NO: 959722 - RNA, 19 nt, Artificial Sequence
  Description of Artificial Sequence: Synthetic oligonucleotide
gggcucgagcugcgugucc

SEQ ID NO: 959723 - RNA, 19 nt, Artificial Sequence
  Description of Artificial Sequence: Synthetic oligonucleotide
caggacgccccugggcgca

SEQ ID NO: 959724 - RNA, 19 nt, Artificial Sequence
  Description of Artificial Sequence: Synthetic oligonucleotide
uagagcccgcagggcgcca

SEQ ID NO: 959725 - RNA, 19 nt, Artificial Sequence
  Description of Artificial Sequence: Synthetic oligonucleotide
cgaaggcgucuagaagucc

SEQ ID NO: 959726 - RNA, 19 nt, Artificial Sequence
  Description of Artificial Sequence: Synthetic oligonucleotide
ggguucccagauaggucga

SEQ ID NO: 959727 - RNA, 19 nt, Artificial Sequence
  Description of Artificial Sequence: Synthetic oligonucleotide
cgggcauaaccgauaaggu

SEQ ID NO: 959728 - RNA, 19 nt, Artificial Sequence
  Description of Artificial Sequence: Synthetic oligonucleotide
cgcgcaaccccaguuauua

SEQ ID NO: 959729 - RNA, 19 nt, Artificial Sequence
  Description of Artificial Sequence: Synthetic oligonucleotide
ggccuuccgaugggcagga

SEQ ID NO: 959730 - RNA, 19 nt, Artificial Sequence
  Description of Artificial Sequence: Synthetic oligonucleotide
cugagccagcaggaugugu

SEQ ID NO: 959731 - RNA, 19 nt, Artificial Sequence
  Description of Artificial Sequence: Synthetic oligonucleotide
cggccucaccuuucagcgc

SEQ ID NO: 959732 - RNA, 19 nt, Artificial Sequence
  Description of Artificial Sequence: Synthetic oligonucleotide
ccuggcgguuccccuuguc

SEQ ID NO: 959733 - RNA, 19 nt, Artificial Sequence
  Description of Artificial Sequence: Synthetic oligonucleotide
cggagaaauugaacaggua

SEQ ID NO: 959734 - RNA, 19 nt, Artificial Sequence
  Description of Artificial Sequence: Synthetic oligonucleotide
cccucacauguccccaaaa

SEQ ID NO: 959735 - RNA, 19 nt, Artificial Sequence
  Description of Artificial Sequence: Synthetic oligonucleotide
gcaccccuggccuuccgau

SEQ ID NO: 959736 - RNA, 19 nt, Artificial Sequence
  Description of Artificial Sequence: Synthetic oligonucleotide
gcgcggccucaccuuucag

SEQ ID NO: 959737 - RNA, 19 nt, Artificial Sequence
  Description of Artificial Sequence: Synthetic oligonucleotide
cgagcugcguguccaucga

SEQ ID NO: 959738 - RNA, 19 nt, Artificial Sequence
  Description of Artificial Sequence: Synthetic oligonucleotide
cgcggaacaucagccgcuc

SEQ ID NO: 959739 - RNA, 19 nt, Artificial Sequence
  Description of Artificial Sequence: Synthetic oligonucleotide
gccacguggcacaguagau

SEQ ID NO: 959740 - RNA, 19 nt, Artificial Sequence
  Description of Artificial Sequence: Synthetic oligonucleotide
gcgggccuagaaguguagu

SEQ ID NO: 959741 - RNA, 19 nt, Artificial Sequence
  Description of Artificial Sequence: Synthetic oligonucleotide
gguucccagauaggucgau

SEQ ID NO: 959742 - RNA, 19 nt, Artificial Sequence
  Description of Artificial Sequence: Synthetic oligonucleotide
ccccuaggcuuacucuucu

SEQ ID NO: 959743 - RNA, 19 nt, Artificial Sequence
  Description of Artificial Sequence: Synthetic oligonucleotide
cugagcccggggcccaguu

SEQ ID NO: 959744 - RNA, 19 nt, Artificial Sequence
  Description of Artificial Sequence: Synthetic oligonucleotide
cgagguggaugacacuaau

SEQ ID NO: 959745 - RNA, 19 nt, Artificial Sequence
  Description of Artificial Sequence: Synthetic oligonucleotide
gcacgaagaggaagauauu

SEQ ID NO: 959746 - RNA, 19 nt, Artificial Sequence
  Description of Artificial Sequence: Synthetic oligonucleotide
ccucaccuuucagcgcgga

SEQ ID NO: 959747 - RNA, 19 nt, Artificial Sequence
  Description of Artificial Sequence: Synthetic oligonucleotide
cccgcgcaaccccaguuau

SEQ ID NO: 959748 - RNA, 19 nt, Artificial Sequence
  Description of Artificial Sequence: Synthetic oligonucleotide
ccaaaccggguuccuugau

SEQ ID NO: 959749 - RNA, 19 nt, Artificial Sequence
  Description of Artificial Sequence: Synthetic oligonucleotide
cgcaccccuggccuuccga

SEQ ID NO: 959750 - RNA, 19 nt, Artificial Sequence
  Description of Artificial Sequence: Synthetic oligonucleotide
ccagcgcggccucaccuuu

SEQ ID NO: 959751 - RNA, 19 nt, Artificial Sequence
  Description of Artificial Sequence: Synthetic oligonucleotide
cgauaagguuaggcacgaa

SEQ ID NO: 959752 - RNA, 19 nt, Artificial Sequence
  Description of Artificial Sequence: Synthetic oligonucleotide
ccgcgcaaccccaguuauu

SEQ ID NO: 959753 - RNA, 19 nt, Artificial Sequence
  Description of Artificial Sequence: Synthetic oligonucleotide
aaaugaaccaaauucaagc

SEQ ID NO: 959754 - RNA, 19 nt, Artificial Sequence
  Description of Artificial Sequence: Synthetic oligonucleotide
cuuacuuuaaaguaauucg

SEQ ID NO: 959755 - RNA, 19 nt, Artificial Sequence
  Description of Artificial Sequence: Synthetic oligonucleotide
acuaguacaugccauaagc

SEQ ID NO: 959756 - RNA, 19 nt, Artificial Sequence
  Description of Artificial Sequence: Synthetic oligonucleotide
auaaguugcauguuuagac

SEQ ID NO: 959757 - RNA, 19 nt, Artificial Sequence
  Description of Artificial Sequence: Synthetic oligonucleotide
augaggaacauuuagcuac

SEQ ID NO: 959758 - RNA, 19 nt, Artificial Sequence
  Description of Artificial Sequence: Synthetic oligonucleotide
agcauaaagauccaguaac

SEQ ID NO: 959759 - RNA, 19 nt, Artificial Sequence
  Description of Artificial Sequence: Synthetic oligonucleotide
cuaacaaacauuugaagcc

SEQ ID NO: 959760 - RNA, 19 nt, Artificial Sequence
  Description of Artificial Sequence: Synthetic oligonucleotide
auaaaucaaauauugaaca

SEQ ID NO: 959761 - RNA, 19 nt, Artificial Sequence
  Description of Artificial Sequence: Synthetic oligonucleotide
ugaauaccaaggaagaucc

SEQ ID NO: 959762 - RNA, 19 nt, Artificial Sequence
  Description of Artificial Sequence: Synthetic oligonucleotide
aaauugaagaucucuaagu

SEQ ID NO: 959763 - RNA, 19 nt, Artificial Sequence
  Description of Artificial Sequence: Synthetic oligonucleotide
agauauaacuuccuaaguc

SEQ ID NO: 959764 - RNA, 19 nt, Artificial Sequence
  Description of Artificial Sequence: Synthetic oligonucleotide
cagaauauaauccaagggc

SEQ ID NO: 959765 - RNA, 19 nt, Artificial Sequence
  Description of Artificial Sequence: Synthetic oligonucleotide
aaagagagaagaaugauca

SEQ ID NO: 959766 - RNA, 19 nt, Artificial Sequence
  Description of Artificial Sequence: Synthetic oligonucleotide
aauucgucccucuaugagg

SEQ ID NO: 959767 - RNA, 19 nt, Artificial Sequence
  Description of Artificial Sequence: Synthetic oligonucleotide
uacuaagugacaaaauaag

SEQ ID NO: 959768 - RNA, 19 nt, Artificial Sequence
  Description of Artificial Sequence: Synthetic oligonucleotide
uucuaaugcaguuguaucg

SEQ ID NO: 959769 - RNA, 19 nt, Artificial Sequence
  Description of Artificial Sequence: Synthetic oligonucleotide
auugguagggccuuguaac

SEQ ID NO: 959770 - RNA, 19 nt, Artificial Sequence
  Description of Artificial Sequence: Synthetic oligonucleotide
guuccuagcauaaagaucc

SEQ ID NO: 959771 - RNA, 19 nt, Artificial Sequence
  Description of Artificial Sequence: Synthetic oligonucleotide
agauaaaucaaauauugaa

SEQ ID NO: 959772 - RNA, 19 nt, Artificial Sequence
  Description of Artificial Sequence: Synthetic oligonucleotide
gauaaaucaaauauugaac

SEQ ID NO: 959773 - RNA, 19 nt, Artificial Sequence
  Description of Artificial Sequence: Synthetic oligonucleotide
ucuauauugguaauggcaa

SEQ ID NO: 959774 - RNA, 19 nt, Artificial Sequence
  Description of Artificial Sequence: Synthetic oligonucleotide
cauguuuagacucugacuc

SEQ ID NO: 959775 - RNA, 19 nt, Artificial Sequence
  Description of Artificial Sequence: Synthetic oligonucleotide
ucaucuauauugguaaugg

SEQ ID NO: 959776 - RNA, 19 nt, Artificial Sequence
  Description of Artificial Sequence: Synthetic oligonucleotide
aauauaauccaagggcaac

SEQ ID NO: 959777 - RNA, 19 nt, Artificial Sequence
  Description of Artificial Sequence: Synthetic oligonucleotide
uugguaauggcaaagaguu

SEQ ID NO: 959778 - RNA, 19 nt, Artificial Sequence
  Description of Artificial Sequence: Synthetic oligonucleotide
aaguugcauguuuagacuc

SEQ ID NO: 959779 - RNA, 19 nt, Artificial Sequence
  Description of Artificial Sequence: Synthetic oligonucleotide
aaagggagauauaacuucc

SEQ ID NO: 959780 - RNA, 19 nt, Artificial Sequence
  Description of Artificial Sequence: Synthetic oligonucleotide
ucuauucuaaugcaguugu

SEQ ID NO: 959781 - RNA, 19 nt, Artificial Sequence
  Description of Artificial Sequence: Synthetic oligonucleotide
uauggauguacuaagugac

SEQ ID NO: 959782 - RNA, 19 nt, Artificial Sequence
  Description of Artificial Sequence: Synthetic oligonucleotide
aggacacacguuuagauuc

SEQ ID NO: 959783 - RNA, 19 nt, Artificial Sequence
  Description of Artificial Sequence: Synthetic oligonucleotide
uuacuuuaaaguaauucgu

SEQ ID NO: 959784 - RNA, 19 nt, Artificial Sequence
  Description of Artificial Sequence: Synthetic oligonucleotide
uaagcaacauccuacuaag

SEQ ID NO: 959785 - RNA, 19 nt, Artificial Sequence
  Description of Artificial Sequence: Synthetic oligonucleotide
uguacuaagugacaaaaua

SEQ ID NO: 959786 - RNA, 19 nt, Artificial Sequence
  Description of Artificial Sequence: Synthetic oligonucleotide
ugucuauaagcuauggaug

SEQ ID NO: 959787 - RNA, 19 nt, Artificial Sequence
  Description of Artificial Sequence: Synthetic oligonucleotide
uguuugaagacaucauuag

SEQ ID NO: 959788 - RNA, 19 nt, Artificial Sequence
  Description of Artificial Sequence: Synthetic oligonucleotide
uaaguaagcgaguucaugu

SEQ ID NO: 959789 - RNA, 19 nt, Artificial Sequence
  Description of Artificial Sequence: Synthetic oligonucleotide
cuacauguccguuugacag

SEQ ID NO: 959790 - RNA, 19 nt, Artificial Sequence
  Description of Artificial Sequence: Synthetic oligonucleotide
uguaguagcagcuugccaa

SEQ ID NO: 959791 - RNA, 19 nt, Artificial Sequence
  Description of Artificial Sequence: Synthetic oligonucleotide
aguguuaccaauaaggccu

SEQ ID NO: 959792 - RNA, 19 nt, Artificial Sequence
  Description of Artificial Sequence: Synthetic oligonucleotide
aucaugacaccucugugac

SEQ ID NO: 959793 - RNA, 19 nt, Artificial Sequence
  Description of Artificial Sequence: Synthetic oligonucleotide
uuaugcaagcucuaugcag

SEQ ID NO: 959794 - RNA, 19 nt, Artificial Sequence
  Description of Artificial Sequence: Synthetic oligonucleotide
uaugcaagcucuaugcaga

SEQ ID NO: 959795 - RNA, 19 nt, Artificial Sequence
  Description of Artificial Sequence: Synthetic oligonucleotide
aggaaagggagauauaacu

SEQ ID NO: 959796 - RNA, 19 nt, Artificial Sequence
  Description of Artificial Sequence: Synthetic oligonucleotide
ugggccaacccuuugaaag

SEQ ID NO: 959797 - RNA, 19 nt, Artificial Sequence
  Description of Artificial Sequence: Synthetic oligonucleotide
gcuaacaaacauuugaagc

SEQ ID NO: 959798 - RNA, 19 nt, Artificial Sequence
  Description of Artificial Sequence: Synthetic oligonucleotide
auuucuacccaucugaaua

SEQ ID NO: 959799 - RNA, 19 nt, Artificial Sequence
  Description of Artificial Sequence: Synthetic oligonucleotide
uauacgucucuguauaucu

SEQ ID NO: 959800 - RNA, 19 nt, Artificial Sequence
  Description of Artificial Sequence: Synthetic oligonucleotide
ugauaaaauuguuucugug

SEQ ID NO: 959801 - RNA, 19 nt, Artificial Sequence
  Description of Artificial Sequence: Synthetic oligonucleotide
aaagcuaggaugaauucug

SEQ ID NO: 959802 - RNA, 19 nt, Artificial Sequence
  Description of Artificial Sequence: Synthetic oligonucleotide
gaaagggagauauaacuuc

SEQ ID NO: 959803 - RNA, 19 nt, Artificial Sequence
  Description of Artificial Sequence: Synthetic oligonucleotide
agcucuggaaauucuggcc

SEQ ID NO: 959804 - RNA, 19 nt, Artificial Sequence
  Description of Artificial Sequence: Synthetic oligonucleotide
ggagauauaacuuccuaag

SEQ ID NO: 959805 - RNA, 19 nt, Artificial Sequence
  Description of Artificial Sequence: Synthetic oligonucleotide
cauuagacuugcucaaugg

SEQ ID NO: 959806 - RNA, 19 nt, Artificial Sequence
  Description of Artificial Sequence: Synthetic oligonucleotide
uuaaccucuacauuguaua

SEQ ID NO: 959807 - RNA, 19 nt, Artificial Sequence
  Description of Artificial Sequence: Synthetic oligonucleotide
uaauucgucccucuaugag

SEQ ID NO: 959808 - RNA, 19 nt, Artificial Sequence
  Description of Artificial Sequence: Synthetic oligonucleotide
aaccagucaguauguauag

SEQ ID NO: 959809 - RNA, 19 nt, Artificial Sequence
  Description of Artificial Sequence: Synthetic oligonucleotide
uaagcaacucacuuagaug

SEQ ID NO: 959810 - RNA, 19 nt, Artificial Sequence
  Description of Artificial Sequence: Synthetic oligonucleotide
aguaauucgucccucuaug

SEQ ID NO: 959811 - RNA, 19 nt, Artificial Sequence
  Description of Artificial Sequence: Synthetic oligonucleotide
uguuagugaauacaucaaa

SEQ ID NO: 959812 - RNA, 19 nt, Artificial Sequence
  Description of Artificial Sequence: Synthetic oligonucleotide
ucuugugaagaaaagucau

SEQ ID NO: 959813 - RNA, 19 nt, Artificial Sequence
  Description of Artificial Sequence: Synthetic oligonucleotide
aggugacagaauauaaucc

SEQ ID NO: 959814 - RNA, 19 nt, Artificial Sequence
  Description of Artificial Sequence: Synthetic oligonucleotide
aggaguauauuauuuucug

SEQ ID NO: 959815 - RNA, 19 nt, Artificial Sequence
  Description of Artificial Sequence: Synthetic oligonucleotide
aauaaguugcauguuuaga

SEQ ID NO: 959816 - RNA, 19 nt, Artificial Sequence
  Description of Artificial Sequence: Synthetic oligonucleotide
ugaggaacauuuagcuacg

SEQ ID NO: 959817 - RNA, 19 nt, Artificial Sequence
  Description of Artificial Sequence: Synthetic oligonucleotide
agcgaguucauguuugaag

SEQ ID NO: 959818 - RNA, 19 nt, Artificial Sequence
  Description of Artificial Sequence: Synthetic oligonucleotide
auaaucaguaagaagagaa

SEQ ID NO: 959819 - RNA, 19 nt, Artificial Sequence
  Description of Artificial Sequence: Synthetic oligonucleotide
aacauuuagcuacgguuca

SEQ ID NO: 959820 - RNA, 19 nt, Artificial Sequence
  Description of Artificial Sequence: Synthetic oligonucleotide
agaauauaauccaagggca

SEQ ID NO: 959821 - RNA, 19 nt, Artificial Sequence
  Description of Artificial Sequence: Synthetic oligonucleotide
ugagugagcagaucuaccu

SEQ ID NO: 959822 - RNA, 19 nt, Artificial Sequence
  Description of Artificial Sequence: Synthetic oligonucleotide
ucuauauacgucucuguau

SEQ ID NO: 959823 - RNA, 19 nt, Artificial Sequence
  Description of Artificial Sequence: Synthetic oligonucleotide
ucuauuccuggcaaagaga

SEQ ID NO: 959824 - RNA, 19 nt, Artificial Sequence
  Description of Artificial Sequence: Synthetic oligonucleotide
uggaaauucuggccaaacc

SEQ ID NO: 959825 - RNA, 19 nt, Artificial Sequence
  Description of Artificial Sequence: Synthetic oligonucleotide
aauuucuacauguccguuu

SEQ ID NO: 959826 - RNA, 19 nt, Artificial Sequence
  Description of Artificial Sequence: Synthetic oligonucleotide
aauaccaaggaagauccaa

SEQ ID NO: 959827 - RNA, 19 nt, Artificial Sequence
  Description of Artificial Sequence: Synthetic oligonucleotide
cagucaguauguauagugg

SEQ ID NO: 959828 - RNA, 19 nt, Artificial Sequence
  Description of Artificial Sequence: Synthetic oligonucleotide
uugucuuuaggugacagaa

SEQ ID NO: 959829 - RNA, 19 nt, Artificial Sequence
  Description of Artificial Sequence: Synthetic oligonucleotide
ugcauucuuaaccucuaca

SEQ ID NO: 959830 - RNA, 19 nt, Artificial Sequence
  Description of Artificial Sequence: Synthetic oligonucleotide
aaaccuucaacuugcuuuu

SEQ ID NO: 959831 - RNA, 19 nt, Artificial Sequence
  Description of Artificial Sequence: Synthetic oligonucleotide
uacauuguauacaggcugu

SEQ ID NO: 959832 - RNA, 19 nt, Artificial Sequence
  Description of Artificial Sequence: Synthetic oligonucleotide
gucuauuccuggcaaagag

SEQ ID NO: 959833 - RNA, 19 nt, Artificial Sequence
  Description of Artificial Sequence: Synthetic oligonucleotide
uacgguucagcucuggaaa

SEQ ID NO: 959834 - RNA, 19 nt, Artificial Sequence
  Description of Artificial Sequence: Synthetic oligonucleotide
cauaguuacaggcuucaug

SEQ ID NO: 959835 - RNA, 19 nt, Artificial Sequence
  Description of Artificial Sequence: Synthetic oligonucleotide
ugcaacggcguccagccag

SEQ ID NO: 959836 - RNA, 19 nt, Artificial Sequence
  Description of Artificial Sequence: Synthetic oligonucleotide
uguuccuagcauaaagauc

SEQ ID NO: 959837 - RNA, 19 nt, Artificial Sequence
  Description of Artificial Sequence: Synthetic oligonucleotide
cacacguuuagauucucag

SEQ ID NO: 959838 - RNA, 19 nt, Artificial Sequence
  Description of Artificial Sequence: Synthetic oligonucleotide
auuagacuugcucaauggu

SEQ ID NO: 959839 - RNA, 19 nt, Artificial Sequence
  Description of Artificial Sequence: Synthetic oligonucleotide
gaacauuuagcuacgguuc

SEQ ID NO: 959840 - RNA, 19 nt, Artificial Sequence
  Description of Artificial Sequence: Synthetic oligonucleotide
uuuaaggauugcuucugcu

SEQ ID NO: 959841 - RNA, 19 nt, Artificial Sequence
  Description of Artificial Sequence: Synthetic oligonucleotide
uguuuccccuuuuagauua

SEQ ID NO: 959842 - RNA, 19 nt, Artificial Sequence
  Description of Artificial Sequence: Synthetic oligonucleotide
gacagugcaucaugcaaag

SEQ ID NO: 959843 - RNA, 19 nt, Artificial Sequence
  Description of Artificial Sequence: Synthetic oligonucleotide
aaguaauucgucccucuau

SEQ ID NO: 959844 - RNA, 19 nt, Artificial Sequence
  Description of Artificial Sequence: Synthetic oligonucleotide
uauucuaaugcaguuguau

SEQ ID NO: 959845 - RNA, 19 nt, Artificial Sequence
  Description of Artificial Sequence: Synthetic oligonucleotide
agucaguauguauaguggu

SEQ ID NO: 959846 - RNA, 19 nt, Artificial Sequence
  Description of Artificial Sequence: Synthetic oligonucleotide
uggcauaaucaguaagaag

SEQ ID NO: 959847 - RNA, 19 nt, Artificial Sequence
  Description of Artificial Sequence: Synthetic oligonucleotide
aacccuuugaaagcuagga

SEQ ID NO: 959848 - RNA, 19 nt, Artificial Sequence
  Description of Artificial Sequence: Synthetic oligonucleotide
ucggaaucacauuucuacc

SEQ ID NO: 959849 - RNA, 19 nt, Artificial Sequence
  Description of Artificial Sequence: Synthetic oligonucleotide
ucuaugaggcuuucaauua

SEQ ID NO: 959850 - RNA, 19 nt, Artificial Sequence
  Description of Artificial Sequence: Synthetic oligonucleotide
ucuaaguucuugugaagaa

SEQ ID NO: 959851 - RNA, 19 nt, Artificial Sequence
  Description of Artificial Sequence: Synthetic oligonucleotide
gcuaggaugaauucugaag

SEQ ID NO: 959852 - RNA, 19 nt, Artificial Sequence
  Description of Artificial Sequence: Synthetic oligonucleotide
uuaccaauaaggccucagu

SEQ ID NO: 959853 - RNA, 19 nt, Artificial Sequence
  Description of Artificial Sequence: Synthetic oligonucleotide
uuagauuaguuuugugaaa

SEQ ID NO: 959854 - RNA, 19 nt, Artificial Sequence
  Description of Artificial Sequence: Synthetic oligonucleotide
cacguuuagauucucagga

SEQ ID NO: 959855 - RNA, 19 nt, Artificial Sequence
  Description of Artificial Sequence: Synthetic oligonucleotide
aucccagucaguaaguaag

SEQ ID NO: 959856 - RNA, 19 nt, Artificial Sequence
  Description of Artificial Sequence: Synthetic oligonucleotide
uagcauaaagauccaguaa

SEQ ID NO: 959857 - RNA, 19 nt, Artificial Sequence
  Description of Artificial Sequence: Synthetic oligonucleotide
aagggcaacuccccuuuag

SEQ ID NO: 959858 - RNA, 19 nt, Artificial Sequence
  Description of Artificial Sequence: Synthetic oligonucleotide
aacuccccuuuagaguucc

SEQ ID NO: 959859 - RNA, 19 nt, Artificial Sequence
  Description of Artificial Sequence: Synthetic oligonucleotide
gcaguuguaucguacagcc

SEQ ID NO: 959860 - RNA, 19 nt, Artificial Sequence
  Description of Artificial Sequence: Synthetic oligonucleotide
uggacaacguugcaaaauu

SEQ ID NO: 959861 - RNA, 19 nt, Artificial Sequence
  Description of Artificial Sequence: Synthetic oligonucleotide
auauacgucucuguauauc

SEQ ID NO: 959862 - RNA, 19 nt, Artificial Sequence
  Description of Artificial Sequence: Synthetic oligonucleotide
guaucguacagccugagcu

SEQ ID NO: 959863 - RNA, 19 nt, Artificial Sequence
  Description of Artificial Sequence: Synthetic oligonucleotide
ucuacccaucugaauacca

SEQ ID NO: 959864 - RNA, 19 nt, Artificial Sequence
  Description of Artificial Sequence: Synthetic oligonucleotide
cacauuucuacccaucuga

SEQ ID NO: 959865 - RNA, 19 nt, Artificial Sequence
  Description of Artificial Sequence: Synthetic oligonucleotide
aaucccagucaguaaguaa

SEQ ID NO: 959866 - RNA, 19 nt, Artificial Sequence
  Description of Artificial Sequence: Synthetic oligonucleotide
caauggcauaaucaguaag

SEQ ID NO: 959867 - RNA, 19 nt, Artificial Sequence
  Description of Artificial Sequence: Synthetic oligonucleotide
cuauaagcuauggauguac

SEQ ID NO: 959868 - RNA, 19 nt, Artificial Sequence
  Description of Artificial Sequence: Synthetic oligonucleotide
uuuagcuacgguucagcuc

SEQ ID NO: 959869 - RNA, 19 nt, Artificial Sequence
  Description of Artificial Sequence: Synthetic oligonucleotide
ugaugucuauuccuggcaa

SEQ ID NO: 959870 - RNA, 19 nt, Artificial Sequence
  Description of Artificial Sequence: Synthetic oligonucleotide
uacgucucuguauaucugu

SEQ ID NO: 959871 - RNA, 19 nt, Artificial Sequence
  Description of Artificial Sequence: Synthetic oligonucleotide
auuuagcuacgguucagcu

SEQ ID NO: 959872 - RNA, 19 nt, Artificial Sequence
  Description of Artificial Sequence: Synthetic oligonucleotide
uguaucguacagccugagc

SEQ ID NO: 959873 - RNA, 19 nt, Artificial Sequence
  Description of Artificial Sequence: Synthetic oligonucleotide
ggugacagaauauaaucca

SEQ ID NO: 959874 - RNA, 19 nt, Artificial Sequence
  Description of Artificial Sequence: Synthetic oligonucleotide
acaggcuguuuaucuauuc

SEQ ID NO: 959875 - RNA, 19 nt, Artificial Sequence
  Description of Artificial Sequence: Synthetic oligonucleotide
agagagaagaaugaucaau

SEQ ID NO: 959876 - RNA, 19 nt, Artificial Sequence
  Description of Artificial Sequence: Synthetic oligonucleotide
aaguaagcgaguucauguu

SEQ ID NO: 959877 - RNA, 19 nt, Artificial Sequence
  Description of Artificial Sequence: Synthetic oligonucleotide
agugcaucaugcaaaggag

SEQ ID NO: 959878 - RNA, 19 nt, Artificial Sequence
  Description of Artificial Sequence: Synthetic oligonucleotide
aguuacaggcuucaugcaa

SEQ ID NO: 959879 - RNA, 19 nt, Artificial Sequence
  Description of Artificial Sequence: Synthetic oligonucleotide
uaucuauucuaaugcaguu

SEQ ID NO: 959880 - RNA, 19 nt, Artificial Sequence
  Description of Artificial Sequence: Synthetic oligonucleotide
auaaggccucaguaugcac

SEQ ID NO: 959881 - RNA, 19 nt, Artificial Sequence
  Description of Artificial Sequence: Synthetic oligonucleotide
ucaguaaguaagcgaguuc

SEQ ID NO: 959882 - RNA, 19 nt, Artificial Sequence
  Description of Artificial Sequence: Synthetic oligonucleotide
auauaauccaagggcaacu

SEQ ID NO: 959883 - RNA, 19 nt, Artificial Sequence
  Description of Artificial Sequence: Synthetic oligonucleotide
acauuugggagcuucuuua

SEQ ID NO: 959884 - RNA, 19 nt, Artificial Sequence
  Description of Artificial Sequence: Synthetic oligonucleotide
cacguuugucuugacaucc

SEQ ID NO: 959885 - RNA, 19 nt, Artificial Sequence
  Description of Artificial Sequence: Synthetic oligonucleotide
uauguauagugguggguuc

SEQ ID NO: 959886 - RNA, 19 nt, Artificial Sequence
  Description of Artificial Sequence: Synthetic oligonucleotide
uccccuuuuagauuaguuu

SEQ ID NO: 959887 - RNA, 19 nt, Artificial Sequence
  Description of Artificial Sequence: Synthetic oligonucleotide
aucuauucuaaugcaguug

SEQ ID NO: 959888 - RNA, 19 nt, Artificial Sequence
  Description of Artificial Sequence: Synthetic oligonucleotide
ugccauaagcaacucacuu

SEQ ID NO: 959889 - RNA, 19 nt, Artificial Sequence
  Description of Artificial Sequence: Synthetic oligonucleotide
caucaugacaccucuguga

SEQ ID NO: 959890 - RNA, 19 nt, Artificial Sequence
  Description of Artificial Sequence: Synthetic oligonucleotide
agcuaagcaacauccuacu

SEQ ID NO: 959891 - RNA, 19 nt, Artificial Sequence
  Description of Artificial Sequence: Synthetic oligonucleotide
ugugucggaaucacauuuc

SEQ ID NO: 959892 - RNA, 19 nt, Artificial Sequence
  Description of Artificial Sequence: Synthetic oligonucleotide
aaaggucgcuggccgaucu

SEQ ID NO: 959893 - RNA, 19 nt, Artificial Sequence
  Description of Artificial Sequence: Synthetic oligonucleotide
caucaugcaaaggagucac

SEQ ID NO: 959894 - RNA, 19 nt, Artificial Sequence
  Description of Artificial Sequence: Synthetic oligonucleotide
cuccaagaaucccagucag

SEQ ID NO: 959895 - RNA, 19 nt, Artificial Sequence
  Description of Artificial Sequence: Synthetic oligonucleotide
gucaucagacaugugucgg

SEQ ID NO: 959896 - RNA, 19 nt, Artificial Sequence
  Description of Artificial Sequence: Synthetic oligonucleotide
cuaguacaugccauaagca

SEQ ID NO: 959897 - RNA, 19 nt, Artificial Sequence
  Description of Artificial Sequence: Synthetic oligonucleotide
agagaagaaugaucaauuu

SEQ ID NO: 959898 - RNA, 19 nt, Artificial Sequence
  Description of Artificial Sequence: Synthetic oligonucleotide
aagagagaagaaugaucaa

SEQ ID NO: 959899 - RNA, 19 nt, Artificial Sequence
  Description of Artificial Sequence: Synthetic oligonucleotide
uaucguacagccugagcuc

SEQ ID NO: 959900 - RNA, 19 nt, Artificial Sequence
  Description of Artificial Sequence: Synthetic oligonucleotide
augugucggaaucacauuu

SEQ ID NO: 959901 - RNA, 19 nt, Artificial Sequence
  Description of Artificial Sequence: Synthetic oligonucleotide
gucuuuaggugacagaaua

SEQ ID NO: 959902 - RNA, 19 nt, Artificial Sequence
  Description of Artificial Sequence: Synthetic oligonucleotide
uuuagauucucaggaaguu

SEQ ID NO: 959903 - RNA, 19 nt, Artificial Sequence
  Description of Artificial Sequence: Synthetic oligonucleotide
uuaaaguaauucgucccuc

SEQ ID NO: 959904 - RNA, 19 nt, Artificial Sequence
  Description of Artificial Sequence: Synthetic oligonucleotide
augcaguuguaucguacag

SEQ ID NO: 959905 - RNA, 19 nt, Artificial Sequence
  Description of Artificial Sequence: Synthetic oligonucleotide
agaucuaccucuggacaac

SEQ ID NO: 959906 - RNA, 19 nt, Artificial Sequence
  Description of Artificial Sequence: Synthetic oligonucleotide
ccaguguuaccaauaaggc

SEQ ID NO: 959907 - RNA, 19 nt, Artificial Sequence
  Description of Artificial Sequence: Synthetic oligonucleotide
guaagcgaguucauguuug

SEQ ID NO: 959908 - RNA, 19 nt, Artificial Sequence
  Description of Artificial Sequence: Synthetic oligonucleotide
aaccaaauucaagcuguug

SEQ ID NO: 959909 - RNA, 19 nt, Artificial Sequence
  Description of Artificial Sequence: Synthetic oligonucleotide
ucuaccucuggacaacguu

SEQ ID NO: 959910 - RNA, 19 nt, Artificial Sequence
  Description of Artificial Sequence: Synthetic oligonucleotide
uccuuggaacacaacaauu

SEQ ID NO: 959911 - RNA, 19 nt, Artificial Sequence
  Description of Artificial Sequence: Synthetic oligonucleotide
gaagaaugaucaauuucuc

SEQ ID NO: 959912 - RNA, 19 nt, Artificial Sequence
  Description of Artificial Sequence: Synthetic oligonucleotide
guaaguaagcgaguucaug

SEQ ID NO: 959913 - RNA, 19 nt, Artificial Sequence
  Description of Artificial Sequence: Synthetic oligonucleotide
aagcucuaugcagagcugu

SEQ ID NO: 959914 - RNA, 19 nt, Artificial Sequence
  Description of Artificial Sequence: Synthetic oligonucleotide
caccccguccacuugagug

SEQ ID NO: 959915 - RNA, 19 nt, Artificial Sequence
  Description of Artificial Sequence: Synthetic oligonucleotide
cauuuagcuacgguucagc

SEQ ID NO: 959916 - RNA, 19 nt, Artificial Sequence
  Description of Artificial Sequence: Synthetic oligonucleotide
gcuguuggugauaaaauug

SEQ ID NO: 959917 - RNA, 19 nt, Artificial Sequence
  Description of Artificial Sequence: Synthetic oligonucleotide
guuacaggcuucaugcaac

SEQ ID NO: 959918 - RNA, 19 nt, Artificial Sequence
  Description of Artificial Sequence: Synthetic oligonucleotide
aguaagcgaguucauguuu

SEQ ID NO: 959919 - RNA, 19 nt, Artificial Sequence
  Description of Artificial Sequence: Synthetic oligonucleotide
gucuauaagcuauggaugu

SEQ ID NO: 959920 - RNA, 19 nt, Artificial Sequence
  Description of Artificial Sequence: Synthetic oligonucleotide
aggaacauuuagcuacggu

SEQ ID NO: 959921 - RNA, 19 nt, Artificial Sequence
  Description of Artificial Sequence: Synthetic oligonucleotide
gucaucuauauugguaaug

SEQ ID NO: 959922 - RNA, 19 nt, Artificial Sequence
  Description of Artificial Sequence: Synthetic oligonucleotide
auguuuagacucugacucu

SEQ ID NO: 959923 - RNA, 19 nt, Artificial Sequence
  Description of Artificial Sequence: Synthetic oligonucleotide
uacauguccguuugacagu

SEQ ID NO: 959924 - RNA, 19 nt, Artificial Sequence
  Description of Artificial Sequence: Synthetic oligonucleotide
ggcaaauaggaguauauua

SEQ ID NO: 959925 - RNA, 19 nt, Artificial Sequence
  Description of Artificial Sequence: Synthetic oligonucleotide
ucaugcaacggcguccagc

SEQ ID NO: 959926 - RNA, 19 nt, Artificial Sequence
  Description of Artificial Sequence: Synthetic oligonucleotide
agcucuauauacgucucug

SEQ ID NO: 959927 - RNA, 19 nt, Artificial Sequence
  Description of Artificial Sequence: Synthetic oligonucleotide
uauauacgucucuguauau

SEQ ID NO: 959928 - RNA, 19 nt, Artificial Sequence
  Description of Artificial Sequence: Synthetic oligonucleotide
gucaguauguauaguggug

SEQ ID NO: 959929 - RNA, 19 nt, Artificial Sequence
  Description of Artificial Sequence: Synthetic oligonucleotide
uccguuugacagugcauca

SEQ ID NO: 959930 - RNA, 19 nt, Artificial Sequence
  Description of Artificial Sequence: Synthetic oligonucleotide
uaagcgaguucauguuuga

SEQ ID NO: 959931 - RNA, 19 nt, Artificial Sequence
  Description of Artificial Sequence: Synthetic oligonucleotide
auguccguuugacagugca

SEQ ID NO: 959932 - RNA, 19 nt, Artificial Sequence
  Description of Artificial Sequence: Synthetic oligonucleotide
aaccaaagaggggcaguuc

SEQ ID NO: 959933 - RNA, 19 nt, Artificial Sequence
  Description of Artificial Sequence: Synthetic oligonucleotide
gaucuaccucuggacaacg

SEQ ID NO: 959934 - RNA, 19 nt, Artificial Sequence
  Description of Artificial Sequence: Synthetic oligonucleotide
uugcuucugcuaacaaaca

SEQ ID NO: 959935 - RNA, 19 nt, Artificial Sequence
  Description of Artificial Sequence: Synthetic oligonucleotide
agauuaguuuugugaaaau

SEQ ID NO: 959936 - RNA, 19 nt, Artificial Sequence
  Description of Artificial Sequence: Synthetic oligonucleotide
caacauccuacuaaguaaa

SEQ ID NO: 959937 - RNA, 19 nt, Artificial Sequence
  Description of Artificial Sequence: Synthetic oligonucleotide
aguucauguuugaagacau

SEQ ID NO: 959938 - RNA, 19 nt, Artificial Sequence
  Description of Artificial Sequence: Synthetic oligonucleotide
gagauauaacuuccuaagu

SEQ ID NO: 959939 - RNA, 19 nt, Artificial Sequence
  Description of Artificial Sequence: Synthetic oligonucleotide
cugaucucuguaaugcaca

SEQ ID NO: 959940 - RNA, 19 nt, Artificial Sequence
  Description of Artificial Sequence: Synthetic oligonucleotide
uugccaauuucuacauguc

SEQ ID NO: 959941 - RNA, 19 nt, Artificial Sequence
  Description of Artificial Sequence: Synthetic oligonucleotide
ugaucucuguaaugcacau

SEQ ID NO: 959942 - RNA, 19 nt, Artificial Sequence
  Description of Artificial Sequence: Synthetic oligonucleotide
uccaguaaccagucaguau

SEQ ID NO: 959943 - RNA, 19 nt, Artificial Sequence
  Description of Artificial Sequence: Synthetic oligonucleotide
caaaggagucaccccgucc

SEQ ID NO: 959944 - RNA, 19 nt, Artificial Sequence
  Description of Artificial Sequence: Synthetic oligonucleotide
guaauucgucccucuauga

SEQ ID NO: 959945 - RNA, 19 nt, Artificial Sequence
  Description of Artificial Sequence: Synthetic oligonucleotide
gcgaguucauguuugaaga

SEQ ID NO: 959946 - RNA, 19 nt, Artificial Sequence
  Description of Artificial Sequence: Synthetic oligonucleotide
agagagaguuggcucggug

SEQ ID NO: 959947 - RNA, 19 nt, Artificial Sequence
  Description of Artificial Sequence: Synthetic oligonucleotide
uguauagugguggguucug

SEQ ID NO: 959948 - RNA, 19 nt, Artificial Sequence
  Description of Artificial Sequence: Synthetic oligonucleotide
augcaagcucuaugcagag

SEQ ID NO: 959949 - RNA, 19 nt, Artificial Sequence
  Description of Artificial Sequence: Synthetic oligonucleotide
caguaugcacuccaggaca

SEQ ID NO: 959950 - RNA, 19 nt, Artificial Sequence
  Description of Artificial Sequence: Synthetic oligonucleotide
uaguuacaggcuucaugca

SEQ ID NO: 959951 - RNA, 19 nt, Artificial Sequence
  Description of Artificial Sequence: Synthetic oligonucleotide
ucuuaaccucuacauugua

SEQ ID NO: 959952 - RNA, 19 nt, Artificial Sequence
  Description of Artificial Sequence: Synthetic oligonucleotide
uccuagcauaaagauccag

SEQ ID NO: 959953 - RNA, 19 nt, Artificial Sequence
  Description of Artificial Sequence: Synthetic oligonucleotide
caucauuagacuugcucaa

SEQ ID NO: 959954 - RNA, 19 nt, Artificial Sequence
  Description of Artificial Sequence: Synthetic oligonucleotide
ucacuuagaugggccaacc

SEQ ID NO: 959955 - RNA, 19 nt, Artificial Sequence
  Description of Artificial Sequence: Synthetic oligonucleotide
auggcauaaucaguaagaa

SEQ ID NO: 959956 - RNA, 19 nt, Artificial Sequence
  Description of Artificial Sequence: Synthetic oligonucleotide
uuagaugggccaacccuuu

SEQ ID NO: 959957 - RNA, 19 nt, Artificial Sequence
  Description of Artificial Sequence: Synthetic oligonucleotide
cacaacaauucuccuucug

SEQ ID NO: 959958 - RNA, 19 nt, Artificial Sequence
  Description of Artificial Sequence: Synthetic oligonucleotide
cugagcucuauauacgucu

SEQ ID NO: 959959 - RNA, 19 nt, Artificial Sequence
  Description of Artificial Sequence: Synthetic oligonucleotide
agggcaacuccccuuuaga

SEQ ID NO: 959960 - RNA, 19 nt, Artificial Sequence
  Description of Artificial Sequence: Synthetic oligonucleotide
cacuuagaugggccaaccc

SEQ ID NO: 959961 - RNA, 19 nt, Artificial Sequence
  Description of Artificial Sequence: Synthetic oligonucleotide
ugucggaaucacauuucua

SEQ ID NO: 959962 - RNA, 19 nt, Artificial Sequence
  Description of Artificial Sequence: Synthetic oligonucleotide
acguuuagauucucaggaa

SEQ ID NO: 959963 - RNA, 19 nt, Artificial Sequence
  Description of Artificial Sequence: Synthetic oligonucleotide
gaguuggcucggugcaagg

SEQ ID NO: 959964 - RNA, 19 nt, Artificial Sequence
  Description of Artificial Sequence: Synthetic oligonucleotide
ggaacauuuagcuacgguu

SEQ ID NO: 959965 - RNA, 19 nt, Artificial Sequence
  Description of Artificial Sequence: Synthetic oligonucleotide
acauuuagcuacgguucag

SEQ ID NO: 959966 - RNA, 19 nt, Artificial Sequence
  Description of Artificial Sequence: Synthetic oligonucleotide
guuagugaauacaucaaau

SEQ ID NO: 959967 - RNA, 19 nt, Artificial Sequence
  Description of Artificial Sequence: Synthetic oligonucleotide
cuguuagugaauacaucaa

SEQ ID NO: 959968 - RNA, 19 nt, Artificial Sequence
  Description of Artificial Sequence: Synthetic oligonucleotide
cucuauauacgucucugua

SEQ ID NO: 959969 - RNA, 19 nt, Artificial Sequence
  Description of Artificial Sequence: Synthetic oligonucleotide
gaggaacauuuagcuacgg

SEQ ID NO: 959970 - RNA, 19 nt, Artificial Sequence
  Description of Artificial Sequence: Synthetic oligonucleotide
gagagaagaaugaucaauu

SEQ ID NO: 959971 - RNA, 19 nt, Artificial Sequence
  Description of Artificial Sequence: Synthetic oligonucleotide
ucuauaagcuauggaugua

SEQ ID NO: 959972 - RNA, 19 nt, Artificial Sequence
  Description of Artificial Sequence: Synthetic oligonucleotide
aguugcauguuuagacucu

SEQ ID NO: 959973 - RNA, 19 nt, Artificial Sequence
  Description of Artificial Sequence: Synthetic oligonucleotide
agcaacucacuuagauggg

SEQ ID NO: 959974 - RNA, 19 nt, Artificial Sequence
  Description of Artificial Sequence: Synthetic oligonucleotide
gguucuguguggucacuag

SEQ ID NO: 959975 - RNA, 19 nt, Artificial Sequence
  Description of Artificial Sequence: Synthetic oligonucleotide
accccguccacuugaguga

SEQ ID NO: 959976 - RNA, 19 nt, Artificial Sequence
  Description of Artificial Sequence: Synthetic oligonucleotide
cguuuagauucucaggaag

SEQ ID NO: 959977 - RNA, 19 nt, Artificial Sequence
  Description of Artificial Sequence: Synthetic oligonucleotide
cggaaucacauuucuaccc

SEQ ID NO: 959978 - RNA, 19 nt, Artificial Sequence
  Description of Artificial Sequence: Synthetic oligonucleotide
ugcaaggcauugguagggc

SEQ ID NO: 959979 - RNA, 19 nt, Artificial Sequence
  Description of Artificial Sequence: Synthetic oligonucleotide
gcaagcucuaugcagagcu

SEQ ID NO: 959980 - RNA, 19 nt, Artificial Sequence
  Description of Artificial Sequence: Synthetic oligonucleotide
gucuuuauguuccuagcau

SEQ ID NO: 959981 - RNA, 19 nt, Artificial Sequence
  Description of Artificial Sequence: Synthetic oligonucleotide
cauugguagggccuuguaa

SEQ ID NO: 959982 - RNA, 19 nt, Artificial Sequence
  Description of Artificial Sequence: Synthetic oligonucleotide
caucuuucuagcccuaugu

SEQ ID NO: 959983 - RNA, 19 nt, Artificial Sequence
  Description of Artificial Sequence: Synthetic oligonucleotide
uuauuucggugagacccac

SEQ ID NO: 959984 - RNA, 19 nt, Artificial Sequence
  Description of Artificial Sequence: Synthetic oligonucleotide
cuaaguucuugugaagaaa

SEQ ID NO: 959985 - RNA, 19 nt, Artificial Sequence
  Description of Artificial Sequence: Synthetic oligonucleotide
caagcucuaugcagagcug

SEQ ID NO: 959986 - RNA, 19 nt, Artificial Sequence
  Description of Artificial Sequence: Synthetic oligonucleotide
uacaggcuguuuaucuauu

SEQ ID NO: 959987 - RNA, 19 nt, Artificial Sequence
  Description of Artificial Sequence: Synthetic oligonucleotide
ucaugacaccucugugacu

SEQ ID NO: 959988 - RNA, 19 nt, Artificial Sequence
  Description of Artificial Sequence: Synthetic oligonucleotide
cuacccaucugaauaccaa

SEQ ID NO: 959989 - RNA, 19 nt, Artificial Sequence
  Description of Artificial Sequence: Synthetic oligonucleotide
gaaauucuggccaaaccuu

SEQ ID NO: 959990 - RNA, 19 nt, Artificial Sequence
  Description of Artificial Sequence: Synthetic oligonucleotide
cucacuuagaugggccaac

SEQ ID NO: 959991 - RNA, 19 nt, Artificial Sequence
  Description of Artificial Sequence: Synthetic oligonucleotide
augaggcuuucaauuaagu

SEQ ID NO: 959992 - RNA, 19 nt, Artificial Sequence
  Description of Artificial Sequence: Synthetic oligonucleotide
cuuaaccucuacauuguau

SEQ ID NO: 959993 - RNA, 19 nt, Artificial Sequence
  Description of Artificial Sequence: Synthetic oligonucleotide
auacgucucuguauaucug

SEQ ID NO: 959994 - RNA, 19 nt, Artificial Sequence
  Description of Artificial Sequence: Synthetic oligonucleotide
cuaagucaucagacaugug

SEQ ID NO: 959995 - RNA, 19 nt, Artificial Sequence
  Description of Artificial Sequence: Synthetic oligonucleotide
aagcaacauccuacuaagu

SEQ ID NO: 959996 - RNA, 19 nt, Artificial Sequence
  Description of Artificial Sequence: Synthetic oligonucleotide
ucucccaaacuuggcaaau

SEQ ID NO: 959997 - RNA, 19 nt, Artificial Sequence
  Description of Artificial Sequence: Synthetic oligonucleotide
gggccaacccuuugaaagc

SEQ ID NO: 959998 - RNA, 19 nt, Artificial Sequence
  Description of Artificial Sequence: Synthetic oligonucleotide
auggauguacuaagugaca

SEQ ID NO: 959999 - RNA, 19 nt, Artificial Sequence
  Description of Artificial Sequence: Synthetic oligonucleotide
uaaugucuuuauguuccua

SEQ ID NO: 960000 - RNA, 19 nt, Artificial Sequence
  Description of Artificial Sequence: Synthetic oligonucleotide
cggugcaaggcauugguag

SEQ ID NO: 960001 - RNA, 19 nt, Artificial Sequence
  Description of Artificial Sequence: Synthetic oligonucleotide
cugcauucuuaaccucuac

SEQ ID NO: 960002 - RNA, 19 nt, Artificial Sequence
  Description of Artificial Sequence: Synthetic oligonucleotide
aucauuagacuugcucaau

SEQ ID NO: 960003 - RNA, 19 nt, Artificial Sequence
  Description of Artificial Sequence: Synthetic oligonucleotide
guauguauagugguggguu

SEQ ID NO: 960004 - RNA, 19 nt, Artificial Sequence
  Description of Artificial Sequence: Synthetic oligonucleotide
gauccaguaaccagucagu

SEQ ID NO: 960005 - RNA, 19 nt, Artificial Sequence
  Description of Artificial Sequence: Synthetic oligonucleotide
acauuucuacccaucugaa

SEQ ID NO: 960006 - RNA, 19 nt, Artificial Sequence
  Description of Artificial Sequence: Synthetic oligonucleotide
cuuagaugggccaacccuu

SEQ ID NO: 960007 - RNA, 19 nt, Artificial Sequence
  Description of Artificial Sequence: Synthetic oligonucleotide
aagcgaguucauguuugaa

SEQ ID NO: 960008 - RNA, 19 nt, Artificial Sequence
  Description of Artificial Sequence: Synthetic oligonucleotide
guuguaucguacagccuga

SEQ ID NO: 960009 - RNA, 19 nt, Artificial Sequence
  Description of Artificial Sequence: Synthetic oligonucleotide
ucggugcaaggcauuggua

SEQ ID NO: 960010 - RNA, 19 nt, Artificial Sequence
  Description of Artificial Sequence: Synthetic oligonucleotide
gaccgacacaucauuucca

SEQ ID NO: 960011 - RNA, 19 nt, Artificial Sequence
  Description of Artificial Sequence: Synthetic oligonucleotide
aguaaguaagcgaguucau

SEQ ID NO: 960012 - RNA, 19 nt, Artificial Sequence
  Description of Artificial Sequence: Synthetic oligonucleotide
gcuucaugcaacggcgucc

SEQ ID NO: 960013 - RNA, 19 nt, Artificial Sequence
  Description of Artificial Sequence: Synthetic oligonucleotide
gcaacucacuuagaugggc

SEQ ID NO: 960014 - RNA, 19 nt, Artificial Sequence
  Description of Artificial Sequence: Synthetic oligonucleotide
aacggcguccagccagcau

SEQ ID NO: 960015 - RNA, 19 nt, Artificial Sequence
  Description of Artificial Sequence: Synthetic oligonucleotide
cucaauggucuuacuuuaa

SEQ ID NO: 960016 - RNA, 19 nt, Artificial Sequence
  Description of Artificial Sequence: Synthetic oligonucleotide
acacacguuuagauucuca

SEQ ID NO: 960017 - RNA, 19 nt, Artificial Sequence
  Description of Artificial Sequence: Synthetic oligonucleotide
gggccuuguaaccacaacu

SEQ ID NO: 960018 - RNA, 19 nt, Artificial Sequence
  Description of Artificial Sequence: Synthetic oligonucleotide
gugucggaaucacauuucu

SEQ ID NO: 960019 - RNA, 19 nt, Artificial Sequence
  Description of Artificial Sequence: Synthetic oligonucleotide
augccauaagcaacucacu

SEQ ID NO: 960020 - RNA, 19 nt, Artificial Sequence
  Description of Artificial Sequence: Synthetic oligonucleotide
agcccuauguauguccauu

SEQ ID NO: 960021 - RNA, 19 nt, Artificial Sequence
  Description of Artificial Sequence: Synthetic oligonucleotide
ggcuguuuaucuauucuaa

SEQ ID NO: 960022 - RNA, 19 nt, Artificial Sequence
  Description of Artificial Sequence: Synthetic oligonucleotide
accucuggacaacguugca

SEQ ID NO: 960023 - RNA, 19 nt, Artificial Sequence
  Description of Artificial Sequence: Synthetic oligonucleotide
uucuagcccuauguauguc

SEQ ID NO: 960024 - RNA, 19 nt, Artificial Sequence
  Description of Artificial Sequence: Synthetic oligonucleotide
ccuagcauaaagauccagu

SEQ ID NO: 960025 - RNA, 19 nt, Artificial Sequence
  Description of Artificial Sequence: Synthetic oligonucleotide
acugaccgacacaucauuu

SEQ ID NO: 960026 - RNA, 19 nt, Artificial Sequence
  Description of Artificial Sequence: Synthetic oligonucleotide
cguuugacagugcaucaug

SEQ ID NO: 960027 - RNA, 19 nt, Artificial Sequence
  Description of Artificial Sequence: Synthetic oligonucleotide
ucaccccguccacuugagu

SEQ ID NO: 960028 - RNA, 19 nt, Artificial Sequence
  Description of Artificial Sequence: Synthetic oligonucleotide
guacuucugauugugucau

SEQ ID NO: 960029 - RNA, 19 nt, Artificial Sequence
  Description of Artificial Sequence: Synthetic oligonucleotide
agcuacgguucagcucugg

SEQ ID NO: 960030 - RNA, 19 nt, Artificial Sequence
  Description of Artificial Sequence: Synthetic oligonucleotide
cuauucuaaugcaguugua

SEQ ID NO: 960031 - RNA, 19 nt, Artificial Sequence
  Description of Artificial Sequence: Synthetic oligonucleotide
ucgucccucuaugaggcuu

SEQ ID NO: 960032 - RNA, 19 nt, Artificial Sequence
  Description of Artificial Sequence: Synthetic oligonucleotide
acauuguauacaggcuguu

SEQ ID NO: 960033 - RNA, 19 nt, Artificial Sequence
  Description of Artificial Sequence: Synthetic oligonucleotide
aaggucgcuggccgaucuu

SEQ ID NO: 960034 - RNA, 19 nt, Artificial Sequence
  Description of Artificial Sequence: Synthetic oligonucleotide
gucaguaaguaagcgaguu

SEQ ID NO: 960035 - RNA, 19 nt, Artificial Sequence
  Description of Artificial Sequence: Synthetic oligonucleotide
guguuaccaauaaggccuc

SEQ ID NO: 960036 - RNA, 19 nt, Artificial Sequence
  Description of Artificial Sequence: Synthetic oligonucleotide
guaguagcagcuugccaau

SEQ ID NO: 960037 - RNA, 19 nt, Artificial Sequence
  Description of Artificial Sequence: Synthetic oligonucleotide
caugaaaguuguccacugu

SEQ ID NO: 960038 - RNA, 19 nt, Artificial Sequence
  Description of Artificial Sequence: Synthetic oligonucleotide
gacugaccgacacaucauu

SEQ ID NO: 960039 - RNA, 19 nt, Artificial Sequence
  Description of Artificial Sequence: Synthetic oligonucleotide
ucucacuuuccagcaucau

SEQ ID NO: 960040 - RNA, 19 nt, Artificial Sequence
  Description of Artificial Sequence: Synthetic oligonucleotide
uagcccuauguauguccau

SEQ ID NO: 960041 - RNA, 19 nt, Artificial Sequence
  Description of Artificial Sequence: Synthetic oligonucleotide
caacuccccuuuagaguuc

SEQ ID NO: 960042 - RNA, 19 nt, Artificial Sequence
  Description of Artificial Sequence: Synthetic oligonucleotide
uucgucccucuaugaggcu

SEQ ID NO: 960043 - RNA, 19 nt, Artificial Sequence
  Description of Artificial Sequence: Synthetic oligonucleotide
ccugagcucuauauacguc

SEQ ID NO: 960044 - RNA, 19 nt, Artificial Sequence
  Description of Artificial Sequence: Synthetic oligonucleotide
acguuugucuugacauccu

SEQ ID NO: 960045 - RNA, 19 nt, Artificial Sequence
  Description of Artificial Sequence: Synthetic oligonucleotide
uagcuacgguucagcucug

SEQ ID NO: 960046 - RNA, 19 nt, Artificial Sequence
  Description of Artificial Sequence: Synthetic oligonucleotide
ggcuucaugcaacggcguc

SEQ ID NO: 960047 - RNA, 19 nt, Artificial Sequence
  Description of Artificial Sequence: Synthetic oligonucleotide
aucuaccucuggacaacgu

SEQ ID NO: 960048 - RNA, 19 nt, Artificial Sequence
  Description of Artificial Sequence: Synthetic oligonucleotide
cugauugugucauguucau

SEQ ID NO: 960049 - RNA, 19 nt, Artificial Sequence
  Description of Artificial Sequence: Synthetic oligonucleotide
ucccucuaugaggcuuuca

SEQ ID NO: 960050 - RNA, 19 nt, Artificial Sequence
  Description of Artificial Sequence: Synthetic oligonucleotide
cccucuaugaggcuuucaa

SEQ ID NO: 960051 - RNA, 19 nt, Artificial Sequence
  Description of Artificial Sequence: Synthetic oligonucleotide
ccacguuugucuugacauc

SEQ ID NO: 960052 - RNA, 19 nt, Artificial Sequence
  Description of Artificial Sequence: Synthetic oligonucleotide
gaacauuugggagcuucuu

SEQ ID NO: 960053 - RNA, 19 nt, Artificial Sequence
  Description of Artificial Sequence: Synthetic oligonucleotide
guagggccuuguaaccaca

SEQ ID NO: 960054 - RNA, 19 nt, Artificial Sequence
  Description of Artificial Sequence: Synthetic oligonucleotide
acgucucuguauaucuguu

SEQ ID NO: 960055 - RNA, 19 nt, Artificial Sequence
  Description of Artificial Sequence: Synthetic oligonucleotide
gcucuauauacgucucugu

SEQ ID NO: 960056 - RNA, 19 nt, Artificial Sequence
  Description of Artificial Sequence: Synthetic oligonucleotide
aggucgcuggccgaucuuu

SEQ ID NO: 960057 - RNA, 19 nt, Artificial Sequence
  Description of Artificial Sequence: Synthetic oligonucleotide
ccuuguaaccacaacuuuu

SEQ ID NO: 960058 - RNA, 19 nt, Artificial Sequence
  Description of Artificial Sequence: Synthetic oligonucleotide
gcuaagcaacauccuacua

SEQ ID NO: 960059 - RNA, 19 nt, Artificial Sequence
  Description of Artificial Sequence: Synthetic oligonucleotide
caugugucggaaucacauu

SEQ ID NO: 960060 - RNA, 19 nt, Artificial Sequence
  Description of Artificial Sequence: Synthetic oligonucleotide
cuugcucaauggucuuacu

SEQ ID NO: 960061 - RNA, 19 nt, Artificial Sequence
  Description of Artificial Sequence: Synthetic oligonucleotide
caguuguaucguacagccu

SEQ ID NO: 960062 - RNA, 19 nt, Artificial Sequence
  Description of Artificial Sequence: Synthetic oligonucleotide
ggccuuguaaccacaacuu

SEQ ID NO: 960063 - RNA, 19 nt, Artificial Sequence
  Description of Artificial Sequence: Synthetic oligonucleotide
ccuuuuagauuaguuuugu

SEQ ID NO: 960064 - RNA, 19 nt, Artificial Sequence
  Description of Artificial Sequence: Synthetic oligonucleotide
caauuucuacauguccguu

SEQ ID NO: 960065 - RNA, 19 nt, Artificial Sequence
  Description of Artificial Sequence: Synthetic oligonucleotide
ggacacacguuuagauucu

SEQ ID NO: 960066 - RNA, 19 nt, Artificial Sequence
  Description of Artificial Sequence: Synthetic oligonucleotide
ccucuggacaacguugcaa

SEQ ID NO: 960067 - RNA, 19 nt, Artificial Sequence
  Description of Artificial Sequence: Synthetic oligonucleotide
gccuuguaaccacaacuuu

SEQ ID NO: 960068 - RNA, 19 nt, Artificial Sequence
  Description of Artificial Sequence: Synthetic oligonucleotide
ccccguccacuugagugag

SEQ ID NO: 960069 - RNA, 19 nt, Artificial Sequence
  Description of Artificial Sequence: Synthetic oligonucleotide
ggaaaggucgcuggccgau

SEQ ID NO: 960070 - RNA, 19 nt, Artificial Sequence
  Description of Artificial Sequence: Synthetic oligonucleotide
gcccuauguauguccauuu

SEQ ID NO: 960071 - RNA, 19 nt, Artificial Sequence
  Description of Artificial Sequence: Synthetic oligonucleotide
ggacaacguugcaaaauuu

SEQ ID NO: 960072 - RNA, 19 nt, Artificial Sequence
  Description of Artificial Sequence: Synthetic oligonucleotide
ggguucuguguggucacua

SEQ ID NO: 960073 - RNA, 19 nt, Artificial Sequence
  Description of Artificial Sequence: Synthetic oligonucleotide
cggcguccagccagcauug

SEQ ID NO: 960074 - RNA, 19 nt, Artificial Sequence
  Description of Artificial Sequence: Synthetic oligonucleotide
caacggcguccagccagca

SEQ ID NO: 960075 - RNA, 19 nt, Artificial Sequence
  Description of Artificial Sequence: Synthetic oligonucleotide
ccguuugacagugcaucau

SEQ ID NO: 960076 - RNA, 19 nt, Artificial Sequence
  Description of Artificial Sequence: Synthetic oligonucleotide
cgucccucuaugaggcuuu

SEQ ID NO: 960077 - RNA, 19 nt, Artificial Sequence
  Description of Artificial Sequence: Synthetic oligonucleotide
aagauaagcaaagaggaac

SEQ ID NO: 960078 - RNA, 19 nt, Artificial Sequence
  Description of Artificial Sequence: Synthetic oligonucleotide
aagccaaucaccugugucc

SEQ ID NO: 960079 - RNA, 19 nt, Artificial Sequence
  Description of Artificial Sequence: Synthetic oligonucleotide
uacuaaaaggggcauaugg

SEQ ID NO: 960080 - RNA, 19 nt, Artificial Sequence
  Description of Artificial Sequence: Synthetic oligonucleotide
uuagauaacaguaggguac

SEQ ID NO: 960081 - RNA, 19 nt, Artificial Sequence
  Description of Artificial Sequence: Synthetic oligonucleotide
ugaaauaggagcacugcgg

SEQ ID NO: 960082 - RNA, 19 nt, Artificial Sequence
  Description of Artificial Sequence: Synthetic oligonucleotide
uugcaauucuacuaaaagg

SEQ ID NO: 960083 - RNA, 19 nt, Artificial Sequence
  Description of Artificial Sequence: Synthetic oligonucleotide
auugcagguacacauaauc

SEQ ID NO: 960084 - RNA, 19 nt, Artificial Sequence
  Description of Artificial Sequence: Synthetic oligonucleotide
guaauuaagggacuguuag

SEQ ID NO: 960085 - RNA, 19 nt, Artificial Sequence
  Description of Artificial Sequence: Synthetic oligonucleotide
gaguaugcaacguagaaac

SEQ ID NO: 960086 - RNA, 19 nt, Artificial Sequence
  Description of Artificial Sequence: Synthetic oligonucleotide
auaaucucgagcuagucug

SEQ ID NO: 960087 - RNA, 19 nt, Artificial Sequence
  Description of Artificial Sequence: Synthetic oligonucleotide
aaagauaggcaccuguuga

SEQ ID NO: 960088 - RNA, 19 nt, Artificial Sequence
  Description of Artificial Sequence: Synthetic oligonucleotide
gaaauaggagcacugcggg

SEQ ID NO: 960089 - RNA, 19 nt, Artificial Sequence
  Description of Artificial Sequence: Synthetic oligonucleotide
aauuaagggacuguuagga

SEQ ID NO: 960090 - RNA, 19 nt, Artificial Sequence
  Description of Artificial Sequence: Synthetic oligonucleotide
agacuuagaagccaaucac

SEQ ID NO: 960091 - RNA, 19 nt, Artificial Sequence
  Description of Artificial Sequence: Synthetic oligonucleotide
gauaauucauggccaaagg

SEQ ID NO: 960092 - RNA, 19 nt, Artificial Sequence
  Description of Artificial Sequence: Synthetic oligonucleotide
aaugugaaccuauggcggg

SEQ ID NO: 960093 - RNA, 19 nt, Artificial Sequence
  Description of Artificial Sequence: Synthetic oligonucleotide
gacucuagaaucaucaaag

SEQ ID NO: 960094 - RNA, 19 nt, Artificial Sequence
  Description of Artificial Sequence: Synthetic oligonucleotide
aaggaccaaaauuuggcag

SEQ ID NO: 960095 - RNA, 19 nt, Artificial Sequence
  Description of Artificial Sequence: Synthetic oligonucleotide
ucuccuaaugcuuagcaug

SEQ ID NO: 960096 - RNA, 19 nt, Artificial Sequence
  Description of Artificial Sequence: Synthetic oligonucleotide
uuaggaaucuccuaaugcu

SEQ ID NO: 960097 - RNA, 19 nt, Artificial Sequence
  Description of Artificial Sequence: Synthetic oligonucleotide
cauacuaggguuuucuccc

SEQ ID NO: 960098 - RNA, 19 nt, Artificial Sequence
  Description of Artificial Sequence: Synthetic oligonucleotide
acaucccuuagauagcagc

SEQ ID NO: 960099 - RNA, 19 nt, Artificial Sequence
  Description of Artificial Sequence: Synthetic oligonucleotide
uaaauacacagcuucucag

SEQ ID NO: 960100 - RNA, 19 nt, Artificial Sequence
  Description of Artificial Sequence: Synthetic oligonucleotide
aauuuggcaggcuugggga

SEQ ID NO: 960101 - RNA, 19 nt, Artificial Sequence
  Description of Artificial Sequence: Synthetic oligonucleotide
uccuaauaagggauuaaag

SEQ ID NO: 960102 - RNA, 19 nt, Artificial Sequence
  Description of Artificial Sequence: Synthetic oligonucleotide
aguuucaaagcagaauggc

SEQ ID NO: 960103 - RNA, 19 nt, Artificial Sequence
  Description of Artificial Sequence: Synthetic oligonucleotide
agauaagcaaagaggaacc

SEQ ID NO: 960104 - RNA, 19 nt, Artificial Sequence
  Description of Artificial Sequence: Synthetic oligonucleotide
caauucuacuaaaaggggc

SEQ ID NO: 960105 - RNA, 19 nt, Artificial Sequence
  Description of Artificial Sequence: Synthetic oligonucleotide
ucgguguaaauacacagcu

SEQ ID NO: 960106 - RNA, 19 nt, Artificial Sequence
  Description of Artificial Sequence: Synthetic oligonucleotide
acagcaagaguaugcaacg

SEQ ID NO: 960107 - RNA, 19 nt, Artificial Sequence
  Description of Artificial Sequence: Synthetic oligonucleotide
aauucuacuaaaaggggca

SEQ ID NO: 960108 - RNA, 19 nt, Artificial Sequence
  Description of Artificial Sequence: Synthetic oligonucleotide
uaugcaacguagaaacccc

SEQ ID NO: 960109 - RNA, 19 nt, Artificial Sequence
  Description of Artificial Sequence: Synthetic oligonucleotide
cuaaaaggggcauauggac

SEQ ID NO: 960110 - RNA, 19 nt, Artificial Sequence
  Description of Artificial Sequence: Synthetic oligonucleotide
aaucuccuaaugcuuagca

SEQ ID NO: 960111 - RNA, 19 nt, Artificial Sequence
  Description of Artificial Sequence: Synthetic oligonucleotide
uguuuagacucuagaauca

SEQ ID NO: 960112 - RNA, 19 nt, Artificial Sequence
  Description of Artificial Sequence: Synthetic oligonucleotide
uaagggauuaaagaucacc

SEQ ID NO: 960113 - RNA, 19 nt, Artificial Sequence
  Description of Artificial Sequence: Synthetic oligonucleotide
ccugauuuuguacaaaugg

SEQ ID NO: 960114 - RNA, 19 nt, Artificial Sequence
  Description of Artificial Sequence: Synthetic oligonucleotide
auaacaguaggguacgccu

SEQ ID NO: 960115 - RNA, 19 nt, Artificial Sequence
  Description of Artificial Sequence: Synthetic oligonucleotide
guaggguacgccuacaaug

SEQ ID NO: 960116 - RNA, 19 nt, Artificial Sequence
  Description of Artificial Sequence: Synthetic oligonucleotide
aagggauuaaagaucaccu

SEQ ID NO: 960117 - RNA, 19 nt, Artificial Sequence
  Description of Artificial Sequence: Synthetic oligonucleotide
uuucggauucugcuugugg

SEQ ID NO: 960118 - RNA, 19 nt, Artificial Sequence
  Description of Artificial Sequence: Synthetic oligonucleotide
uuugcaaccuaaucaugcc

SEQ ID NO: 960119 - RNA, 19 nt, Artificial Sequence
  Description of Artificial Sequence: Synthetic oligonucleotide
aagaguaugcaacguagaa

SEQ ID NO: 960120 - RNA, 19 nt, Artificial Sequence
  Description of Artificial Sequence: Synthetic oligonucleotide
uguuaggaaucuccuaaug

SEQ ID NO: 960121 - RNA, 19 nt, Artificial Sequence
  Description of Artificial Sequence: Synthetic oligonucleotide
agucugcaccgauaaaagc

SEQ ID NO: 960122 - RNA, 19 nt, Artificial Sequence
  Description of Artificial Sequence: Synthetic oligonucleotide
ucgucaaaccagcagcucc

SEQ ID NO: 960123 - RNA, 19 nt, Artificial Sequence
  Description of Artificial Sequence: Synthetic oligonucleotide
gaguugucgguguaaauac

SEQ ID NO: 960124 - RNA, 19 nt, Artificial Sequence
  Description of Artificial Sequence: Synthetic oligonucleotide
agacauauacaucccuuag

SEQ ID NO: 960125 - RNA, 19 nt, Artificial Sequence
  Description of Artificial Sequence: Synthetic oligonucleotide
aaugcuuagcauguuauuu

SEQ ID NO: 960126 - RNA, 19 nt, Artificial Sequence
  Description of Artificial Sequence: Synthetic oligonucleotide
acaugugguaaggaagucc

SEQ ID NO: 960127 - RNA, 19 nt, Artificial Sequence
  Description of Artificial Sequence: Synthetic oligonucleotide
guaaggaagucccaacacc

SEQ ID NO: 960128 - RNA, 19 nt, Artificial Sequence
  Description of Artificial Sequence: Synthetic oligonucleotide
auuagauaacaguagggua

SEQ ID NO: 960129 - RNA, 19 nt, Artificial Sequence
  Description of Artificial Sequence: Synthetic oligonucleotide
gguguaaauacacagcuuc

SEQ ID NO: 960130 - RNA, 19 nt, Artificial Sequence
  Description of Artificial Sequence: Synthetic oligonucleotide
uagauaacaguaggguacg

SEQ ID NO: 960131 - RNA, 19 nt, Artificial Sequence
  Description of Artificial Sequence: Synthetic oligonucleotide
auauggacuaguucacaag

SEQ ID NO: 960132 - RNA, 19 nt, Artificial Sequence
  Description of Artificial Sequence: Synthetic oligonucleotide
guaugcaacguagaaaccc

SEQ ID NO: 960133 - RNA, 19 nt, Artificial Sequence
  Description of Artificial Sequence: Synthetic oligonucleotide
cauguauggcugaaugucc

SEQ ID NO: 960134 - RNA, 19 nt, Artificial Sequence
  Description of Artificial Sequence: Synthetic oligonucleotide
acuuacggggacuucacug

SEQ ID NO: 960135 - RNA, 19 nt, Artificial Sequence
  Description of Artificial Sequence: Synthetic oligonucleotide
uaggguacgccuacaauga

SEQ ID NO: 960136 - RNA, 19 nt, Artificial Sequence
  Description of Artificial Sequence: Synthetic oligonucleotide
gauccaaaaugguucaguc

SEQ ID NO: 960137 - RNA, 19 nt, Artificial Sequence
  Description of Artificial Sequence: Synthetic oligonucleotide
uccuaccugauuuuguaca

SEQ ID NO: 960138 - RNA, 19 nt, Artificial Sequence
  Description of Artificial Sequence: Synthetic oligonucleotide
aaccuaaucaugccuuccu

SEQ ID NO: 960139 - RNA, 19 nt, Artificial Sequence
  Description of Artificial Sequence: Synthetic oligonucleotide
ucuuauugcuaccuccagu

SEQ ID NO: 960140 - RNA, 19 nt, Artificial Sequence
  Description of Artificial Sequence: Synthetic oligonucleotide
ucgauggucaacagguucu

SEQ ID NO: 960141 - RNA, 19 nt, Artificial Sequence
  Description of Artificial Sequence: Synthetic oligonucleotide
uacaaauggaugugugagc

SEQ ID NO: 960142 - RNA, 19 nt, Artificial Sequence
  Description of Artificial Sequence: Synthetic oligonucleotide
uggacuaguucacaagcac

SEQ ID NO: 960143 - RNA, 19 nt, Artificial Sequence
  Description of Artificial Sequence: Synthetic oligonucleotide
cuaauaagggauuaaagau

SEQ ID NO: 960144 - RNA, 19 nt, Artificial Sequence
  Description of Artificial Sequence: Synthetic oligonucleotide
aaccgccccagccuguccc

SEQ ID NO: 960145 - RNA, 19 nt, Artificial Sequence
  Description of Artificial Sequence: Synthetic oligonucleotide
cuacaaugaaccagguuug

SEQ ID NO: 960146 - RNA, 19 nt, Artificial Sequence
  Description of Artificial Sequence: Synthetic oligonucleotide
guagaaaccccaugcuagg

SEQ ID NO: 960147 - RNA, 19 nt, Artificial Sequence
  Description of Artificial Sequence: Synthetic oligonucleotide
ucuacuaaaaggggcauau

SEQ ID NO: 960148 - RNA, 19 nt, Artificial Sequence
  Description of Artificial Sequence: Synthetic oligonucleotide
acaaauggaugugugagcu

SEQ ID NO: 960149 - RNA, 19 nt, Artificial Sequence
  Description of Artificial Sequence: Synthetic oligonucleotide
gacuuagaagccaaucacc

SEQ ID NO: 960150 - RNA, 19 nt, Artificial Sequence
  Description of Artificial Sequence: Synthetic oligonucleotide
uucggauucugcuuguggu

SEQ ID NO: 960151 - RNA, 19 nt, Artificial Sequence
  Description of Artificial Sequence: Synthetic oligonucleotide
cuuggggaacaacuuagcc

SEQ ID NO: 960152 - RNA, 19 nt, Artificial Sequence
  Description of Artificial Sequence: Synthetic oligonucleotide
uacgccuacaaugaaccag

SEQ ID NO: 960153 - RNA, 19 nt, Artificial Sequence
  Description of Artificial Sequence: Synthetic oligonucleotide
guucccauauugcagguac

SEQ ID NO: 960154 - RNA, 19 nt, Artificial Sequence
  Description of Artificial Sequence: Synthetic oligonucleotide
uggucaacagguucugcag

SEQ ID NO: 960155 - RNA, 19 nt, Artificial Sequence
  Description of Artificial Sequence: Synthetic oligonucleotide
gaaggaccaaaauuuggca

SEQ ID NO: 960156 - RNA, 19 nt, Artificial Sequence
  Description of Artificial Sequence: Synthetic oligonucleotide
aaaauuuggcaggcuuggg

SEQ ID NO: 960157 - RNA, 19 nt, Artificial Sequence
  Description of Artificial Sequence: Synthetic oligonucleotide
ucuuacgauccaaaauggu

SEQ ID NO: 960158 - RNA, 19 nt, Artificial Sequence
  Description of Artificial Sequence: Synthetic oligonucleotide
accgcuuugcaaccuaauc

SEQ ID NO: 960159 - RNA, 19 nt, Artificial Sequence
  Description of Artificial Sequence: Synthetic oligonucleotide
aagguuugacugucuaaga

SEQ ID NO: 960160 - RNA, 19 nt, Artificial Sequence
  Description of Artificial Sequence: Synthetic oligonucleotide
cugauuuuguacaaaugga

SEQ ID NO: 960161 - RNA, 19 nt, Artificial Sequence
  Description of Artificial Sequence: Synthetic oligonucleotide
aggagucgggacuccagcc

SEQ ID NO: 960162 - RNA, 19 nt, Artificial Sequence
  Description of Artificial Sequence: Synthetic oligonucleotide
uuuagacucuagaaucauc

SEQ ID NO: 960163 - RNA, 19 nt, Artificial Sequence
  Description of Artificial Sequence: Synthetic oligonucleotide
uacgauccaaaaugguuca

SEQ ID NO: 960164 - RNA, 19 nt, Artificial Sequence
  Description of Artificial Sequence: Synthetic oligonucleotide
uuccgcaccaccucacagg

SEQ ID NO: 960165 - RNA, 19 nt, Artificial Sequence
  Description of Artificial Sequence: Synthetic oligonucleotide
ccuaauaagggauuaaaga

SEQ ID NO: 960166 - RNA, 19 nt, Artificial Sequence
  Description of Artificial Sequence: Synthetic oligonucleotide
uuuguuucggauucugcuu

SEQ ID NO: 960167 - RNA, 19 nt, Artificial Sequence
  Description of Artificial Sequence: Synthetic oligonucleotide
caaagauaggcaccuguug

SEQ ID NO: 960168 - RNA, 19 nt, Artificial Sequence
  Description of Artificial Sequence: Synthetic oligonucleotide
uacauaagaaaagcuuugu

SEQ ID NO: 960169 - RNA, 19 nt, Artificial Sequence
  Description of Artificial Sequence: Synthetic oligonucleotide
aucaaggcgcuucuuacga

SEQ ID NO: 960170 - RNA, 19 nt, Artificial Sequence
  Description of Artificial Sequence: Synthetic oligonucleotide
agacucuagaaucaucaaa

SEQ ID NO: 960171 - RNA, 19 nt, Artificial Sequence
  Description of Artificial Sequence: Synthetic oligonucleotide
uuaggagucgggacuccag

SEQ ID NO: 960172 - RNA, 19 nt, Artificial Sequence
  Description of Artificial Sequence: Synthetic oligonucleotide
aggauuuggucaaaacagg

SEQ ID NO: 960173 - RNA, 19 nt, Artificial Sequence
  Description of Artificial Sequence: Synthetic oligonucleotide
uguaaguguauuuguugau

SEQ ID NO: 960174 - RNA, 19 nt, Artificial Sequence
  Description of Artificial Sequence: Synthetic oligonucleotide
cuagucggcgaccacuccg

SEQ ID NO: 960175 - RNA, 19 nt, Artificial Sequence
  Description of Artificial Sequence: Synthetic oligonucleotide
uagucggcgaccacuccgg

SEQ ID NO: 960176 - RNA, 19 nt, Artificial Sequence
  Description of Artificial Sequence: Synthetic oligonucleotide
gaagccaaucaccuguguc

SEQ ID NO: 960177 - RNA, 19 nt, Artificial Sequence
  Description of Artificial Sequence: Synthetic oligonucleotide
uugacuuacggggacuuca

SEQ ID NO: 960178 - RNA, 19 nt, Artificial Sequence
  Description of Artificial Sequence: Synthetic oligonucleotide
uugcaaccuaaucaugccu

SEQ ID NO: 960179 - RNA, 19 nt, Artificial Sequence
  Description of Artificial Sequence: Synthetic oligonucleotide
uacaaugaaccagguuugg

SEQ ID NO: 960180 - RNA, 19 nt, Artificial Sequence
  Description of Artificial Sequence: Synthetic oligonucleotide
ugcaaccuaaucaugccuu

SEQ ID NO: 960181 - RNA, 19 nt, Artificial Sequence
  Description of Artificial Sequence: Synthetic oligonucleotide
agagucugcaccgauaaaa

SEQ ID NO: 960182 - RNA, 19 nt, Artificial Sequence
  Description of Artificial Sequence: Synthetic oligonucleotide
acuaaaaggggcauaugga

SEQ ID NO: 960183 - RNA, 19 nt, Artificial Sequence
  Description of Artificial Sequence: Synthetic oligonucleotide
ucugcaccgauaaaagcuu

SEQ ID NO: 960184 - RNA, 19 nt, Artificial Sequence
  Description of Artificial Sequence: Synthetic oligonucleotide
gugcaaugugaaccuaugg

SEQ ID NO: 960185 - RNA, 19 nt, Artificial Sequence
  Description of Artificial Sequence: Synthetic oligonucleotide
accaaaauuuggcaggcuu

SEQ ID NO: 960186 - RNA, 19 nt, Artificial Sequence
  Description of Artificial Sequence: Synthetic oligonucleotide
aguaugcaacguagaaacc

SEQ ID NO: 960187 - RNA, 19 nt, Artificial Sequence
  Description of Artificial Sequence: Synthetic oligonucleotide
cugucugguaauuaaggga

SEQ ID NO: 960188 - RNA, 19 nt, Artificial Sequence
  Description of Artificial Sequence: Synthetic oligonucleotide
cauucagaugaguuugguc

SEQ ID NO: 960189 - RNA, 19 nt, Artificial Sequence
  Description of Artificial Sequence: Synthetic oligonucleotide
cuuggguucaccgcuuugc

SEQ ID NO: 960190 - RNA, 19 nt, Artificial Sequence
  Description of Artificial Sequence: Synthetic oligonucleotide
gguacgccuacaaugaacc

SEQ ID NO: 960191 - RNA, 19 nt, Artificial Sequence
  Description of Artificial Sequence: Synthetic oligonucleotide
acgccuacaaugaaccagg

SEQ ID NO: 960192 - RNA, 19 nt, Artificial Sequence
  Description of Artificial Sequence: Synthetic oligonucleotide
ugucccuucuugcuucuga

SEQ ID NO: 960193 - RNA, 19 nt, Artificial Sequence
  Description of Artificial Sequence: Synthetic oligonucleotide
cuuguugacuuacggggac

SEQ ID NO: 960194 - RNA, 19 nt, Artificial Sequence
  Description of Artificial Sequence: Synthetic oligonucleotide
agguacacauaaucucgag

SEQ ID NO: 960195 - RNA, 19 nt, Artificial Sequence
  Description of Artificial Sequence: Synthetic oligonucleotide
uaaucucgagcuagucuga

SEQ ID NO: 960196 - RNA, 19 nt, Artificial Sequence
  Description of Artificial Sequence: Synthetic oligonucleotide
ucagaugaguuuggucagg

SEQ ID NO: 960197 - RNA, 19 nt, Artificial Sequence
  Description of Artificial Sequence: Synthetic oligonucleotide
uccugcgcauguauggcug

SEQ ID NO: 960198 - RNA, 19 nt, Artificial Sequence
  Description of Artificial Sequence: Synthetic oligonucleotide
caccaaauaugagacuuag

SEQ ID NO: 960199 - RNA, 19 nt, Artificial Sequence
  Description of Artificial Sequence: Synthetic oligonucleotide
auuaagggacuguuaggaa

SEQ ID NO: 960200 - RNA, 19 nt, Artificial Sequence
  Description of Artificial Sequence: Synthetic oligonucleotide
ugucuaagauaagcaaaga

SEQ ID NO: 960201 - RNA, 19 nt, Artificial Sequence
  Description of Artificial Sequence: Synthetic oligonucleotide
uuggguucaccgcuuugca

SEQ ID NO: 960202 - RNA, 19 nt, Artificial Sequence
  Description of Artificial Sequence: Synthetic oligonucleotide
ggucucuuugagcuuagag

SEQ ID NO: 960203 - RNA, 19 nt, Artificial Sequence
  Description of Artificial Sequence: Synthetic oligonucleotide
aaucucgagcuagucugag

SEQ ID NO: 960204 - RNA, 19 nt, Artificial Sequence
  Description of Artificial Sequence: Synthetic oligonucleotide
ccuaaucaugccuuccugg

SEQ ID NO: 960205 - RNA, 19 nt, Artificial Sequence
  Description of Artificial Sequence: Synthetic oligonucleotide
gcaauucuacuaaaagggg

SEQ ID NO: 960206 - RNA, 19 nt, Artificial Sequence
  Description of Artificial Sequence: Synthetic oligonucleotide
ucuggguaacacguggugu

SEQ ID NO: 960207 - RNA, 19 nt, Artificial Sequence
  Description of Artificial Sequence: Synthetic oligonucleotide
gagacauauacaucccuua

SEQ ID NO: 960208 - RNA, 19 nt, Artificial Sequence
  Description of Artificial Sequence: Synthetic oligonucleotide
uagccaauucccuccauua

SEQ ID NO: 960209 - RNA, 19 nt, Artificial Sequence
  Description of Artificial Sequence: Synthetic oligonucleotide
accuaaucaugccuuccug

SEQ ID NO: 960210 - RNA, 19 nt, Artificial Sequence
  Description of Artificial Sequence: Synthetic oligonucleotide
ugcaccgauaaaagcuugu

SEQ ID NO: 960211 - RNA, 19 nt, Artificial Sequence
  Description of Artificial Sequence: Synthetic oligonucleotide
uuuuggcauacuaggguuu

SEQ ID NO: 960212 - RNA, 19 nt, Artificial Sequence
  Description of Artificial Sequence: Synthetic oligonucleotide
agaguaugcaacguagaaa

SEQ ID NO: 960213 - RNA, 19 nt, Artificial Sequence
  Description of Artificial Sequence: Synthetic oligonucleotide
ucuuugagcuuagaggcua

SEQ ID NO: 960214 - RNA, 19 nt, Artificial Sequence
  Description of Artificial Sequence: Synthetic oligonucleotide
ggcuucacggaguugucgg

SEQ ID NO: 960215 - RNA, 19 nt, Artificial Sequence
  Description of Artificial Sequence: Synthetic oligonucleotide
cucgauggucaacagguuc

SEQ ID NO: 960216 - RNA, 19 nt, Artificial Sequence
  Description of Artificial Sequence: Synthetic oligonucleotide
augugaaccuauggcgggc

SEQ ID NO: 960217 - RNA, 19 nt, Artificial Sequence
  Description of Artificial Sequence: Synthetic oligonucleotide
cuuacggggacuucacuga

SEQ ID NO: 960218 - RNA, 19 nt, Artificial Sequence
  Description of Artificial Sequence: Synthetic oligonucleotide
gaugugugagcugcaguug

SEQ ID NO: 960219 - RNA, 19 nt, Artificial Sequence
  Description of Artificial Sequence: Synthetic oligonucleotide
uuccuaccugauuuuguac

SEQ ID NO: 960220 - RNA, 19 nt, Artificial Sequence
  Description of Artificial Sequence: Synthetic oligonucleotide
gaaaccccaugcuaggucu

SEQ ID NO: 960221 - RNA, 19 nt, Artificial Sequence
  Description of Artificial Sequence: Synthetic oligonucleotide
ucgagcuagucugagaguu

SEQ ID NO: 960222 - RNA, 19 nt, Artificial Sequence
  Description of Artificial Sequence: Synthetic oligonucleotide
gucgguguaaauacacagc

SEQ ID NO: 960223 - RNA, 19 nt, Artificial Sequence
  Description of Artificial Sequence: Synthetic oligonucleotide
cauauggacuaguucacaa

SEQ ID NO: 960224 - RNA, 19 nt, Artificial Sequence
  Description of Artificial Sequence: Synthetic oligonucleotide
gguaaggaagucccaacac

SEQ ID NO: 960225 - RNA, 19 nt, Artificial Sequence
  Description of Artificial Sequence: Synthetic oligonucleotide
auacaucccuuagauagca

SEQ ID NO: 960226 - RNA, 19 nt, Artificial Sequence
  Description of Artificial Sequence: Synthetic oligonucleotide
uggguaacacguggugugg

SEQ ID NO: 960227 - RNA, 19 nt, Artificial Sequence
  Description of Artificial Sequence: Synthetic oligonucleotide
ccgauaaaagcuugugugc

SEQ ID NO: 960228 - RNA, 19 nt, Artificial Sequence
  Description of Artificial Sequence: Synthetic oligonucleotide
gaagucagcugcuuacuua

SEQ ID NO: 960229 - RNA, 19 nt, Artificial Sequence
  Description of Artificial Sequence: Synthetic oligonucleotide
cagucacguggacaggugg

SEQ ID NO: 960230 - RNA, 19 nt, Artificial Sequence
  Description of Artificial Sequence: Synthetic oligonucleotide
acaaccacccagagucugc

SEQ ID NO: 960231 - RNA, 19 nt, Artificial Sequence
  Description of Artificial Sequence: Synthetic oligonucleotide
uaacaguaggguacgccua

SEQ ID NO: 960232 - RNA, 19 nt, Artificial Sequence
  Description of Artificial Sequence: Synthetic oligonucleotide
agauaacaguaggguacgc

SEQ ID NO: 960233 - RNA, 19 nt, Artificial Sequence
  Description of Artificial Sequence: Synthetic oligonucleotide
uagacucuagaaucaucaa

SEQ ID NO: 960234 - RNA, 19 nt, Artificial Sequence
  Description of Artificial Sequence: Synthetic oligonucleotide
ggccuuguugacuuacggg

SEQ ID NO: 960235 - RNA, 19 nt, Artificial Sequence
  Description of Artificial Sequence: Synthetic oligonucleotide
gcuaggucuggguaacacg

SEQ ID NO: 960236 - RNA, 19 nt, Artificial Sequence
  Description of Artificial Sequence: Synthetic oligonucleotide
uuacggggacuucacugac

SEQ ID NO: 960237 - RNA, 19 nt, Artificial Sequence
  Description of Artificial Sequence: Synthetic oligonucleotide
cuuugagcuuagaggcuag

SEQ ID NO: 960238 - RNA, 19 nt, Artificial Sequence
  Description of Artificial Sequence: Synthetic oligonucleotide
ugguaauuaagggacuguu

SEQ ID NO: 960239 - RNA, 19 nt, Artificial Sequence
  Description of Artificial Sequence: Synthetic oligonucleotide
gggacuguuaggaaucucc

SEQ ID NO: 960240 - RNA, 19 nt, Artificial Sequence
  Description of Artificial Sequence: Synthetic oligonucleotide
gaaucuccuaaugcuuagc

SEQ ID NO: 960241 - RNA, 19 nt, Artificial Sequence
  Description of Artificial Sequence: Synthetic oligonucleotide
uuuccuaauaagggauuaa

SEQ ID NO: 960242 - RNA, 19 nt, Artificial Sequence
  Description of Artificial Sequence: Synthetic oligonucleotide
caaggcgcuucuuacgauc

SEQ ID NO: 960243 - RNA, 19 nt, Artificial Sequence
  Description of Artificial Sequence: Synthetic oligonucleotide
ucggauucugcuugugguc

SEQ ID NO: 960244 - RNA, 19 nt, Artificial Sequence
  Description of Artificial Sequence: Synthetic oligonucleotide
aucuccuaaugcuuagcau

SEQ ID NO: 960245 - RNA, 19 nt, Artificial Sequence
  Description of Artificial Sequence: Synthetic oligonucleotide
ggguucaccgcuuugcaac

SEQ ID NO: 960246 - RNA, 19 nt, Artificial Sequence
  Description of Artificial Sequence: Synthetic oligonucleotide
aacacgugguguggcauca

SEQ ID NO: 960247 - RNA, 19 nt, Artificial Sequence
  Description of Artificial Sequence: Synthetic oligonucleotide
aaaggggcauauggacuag

SEQ ID NO: 960248 - RNA, 19 nt, Artificial Sequence
  Description of Artificial Sequence: Synthetic oligonucleotide
ccaaaauuuggcaggcuug

SEQ ID NO: 960249 - RNA, 19 nt, Artificial Sequence
  Description of Artificial Sequence: Synthetic oligonucleotide
ucuuggguucaccgcuuug

SEQ ID NO: 960250 - RNA, 19 nt, Artificial Sequence
  Description of Artificial Sequence: Synthetic oligonucleotide
cuuacgauccaaaaugguu

SEQ ID NO: 960251 - RNA, 19 nt, Artificial Sequence
  Description of Artificial Sequence: Synthetic oligonucleotide
auagccaauucccuccauu

SEQ ID NO: 960252 - RNA, 19 nt, Artificial Sequence
  Description of Artificial Sequence: Synthetic oligonucleotide
acguagaaaccccaugcua

SEQ ID NO: 960253 - RNA, 19 nt, Artificial Sequence
  Description of Artificial Sequence: Synthetic oligonucleotide
agcugcuuacuuaagacuu

SEQ ID NO: 960254 - RNA, 19 nt, Artificial Sequence
  Description of Artificial Sequence: Synthetic oligonucleotide
caagaguaugcaacguaga

SEQ ID NO: 960255 - RNA, 19 nt, Artificial Sequence
  Description of Artificial Sequence: Synthetic oligonucleotide
gugguaaggaagucccaac

SEQ ID NO: 960256 - RNA, 19 nt, Artificial Sequence
  Description of Artificial Sequence: Synthetic oligonucleotide
gaaccuauggcgggccuug

SEQ ID NO: 960257 - RNA, 19 nt, Artificial Sequence
  Description of Artificial Sequence: Synthetic oligonucleotide
ucuuaaagcuggagccaau

SEQ ID NO: 960258 - RNA, 19 nt, Artificial Sequence
  Description of Artificial Sequence: Synthetic oligonucleotide
ccauccugcgcauguaugg

SEQ ID NO: 960259 - RNA, 19 nt, Artificial Sequence
  Description of Artificial Sequence: Synthetic oligonucleotide
auaagggauuaaagaucac

SEQ ID NO: 960260 - RNA, 19 nt, Artificial Sequence
  Description of Artificial Sequence: Synthetic oligonucleotide
uagaggcuaggaacaugca

SEQ ID NO: 960261 - RNA, 19 nt, Artificial Sequence
  Description of Artificial Sequence: Synthetic oligonucleotide
acgugguguggcaucaagg

SEQ ID NO: 960262 - RNA, 19 nt, Artificial Sequence
  Description of Artificial Sequence: Synthetic oligonucleotide
caaccuaaucaugccuucc

SEQ ID NO: 960263 - RNA, 19 nt, Artificial Sequence
  Description of Artificial Sequence: Synthetic oligonucleotide
uaacacgugguguggcauc

SEQ ID NO: 960264 - RNA, 19 nt, Artificial Sequence
  Description of Artificial Sequence: Synthetic oligonucleotide
caugcuaggucuggguaac

SEQ ID NO: 960265 - RNA, 19 nt, Artificial Sequence
  Description of Artificial Sequence: Synthetic oligonucleotide
gguuugacugucuaagaua

SEQ ID NO: 960266 - RNA, 19 nt, Artificial Sequence
  Description of Artificial Sequence: Synthetic oligonucleotide
auggcugaauguccuucug

SEQ ID NO: 960267 - RNA, 19 nt, Artificial Sequence
  Description of Artificial Sequence: Synthetic oligonucleotide
ccuacaaugaaccagguuu

SEQ ID NO: 960268 - RNA, 19 nt, Artificial Sequence
  Description of Artificial Sequence: Synthetic oligonucleotide
gcauguauggcugaauguc

SEQ ID NO: 960269 - RNA, 19 nt, Artificial Sequence
  Description of Artificial Sequence: Synthetic oligonucleotide
ugcuaggucuggguaacac

SEQ ID NO: 960270 - RNA, 19 nt, Artificial Sequence
  Description of Artificial Sequence: Synthetic oligonucleotide
gaccggguccaccucgcag

SEQ ID NO: 960271 - RNA, 19 nt, Artificial Sequence
  Description of Artificial Sequence: Synthetic oligonucleotide
acggggacuucacugacuu

SEQ ID NO: 960272 - RNA, 19 nt, Artificial Sequence
  Description of Artificial Sequence: Synthetic oligonucleotide
cuuccuaccugauuuugua

SEQ ID NO: 960273 - RNA, 19 nt, Artificial Sequence
  Description of Artificial Sequence: Synthetic oligonucleotide
aucgucaaaccagcagcuc

SEQ ID NO: 960274 - RNA, 19 nt, Artificial Sequence
  Description of Artificial Sequence: Synthetic oligonucleotide
ccaaaaugguucagucacg

SEQ ID NO: 960275 - RNA, 19 nt, Artificial Sequence
  Description of Artificial Sequence: Synthetic oligonucleotide
cauauugcagguacacaua

SEQ ID NO: 960276 - RNA, 19 nt, Artificial Sequence
  Description of Artificial Sequence: Synthetic oligonucleotide
aguuuccgcaccaccucac

SEQ ID NO: 960277 - RNA, 19 nt, Artificial Sequence
  Description of Artificial Sequence: Synthetic oligonucleotide
cauccugcgcauguauggc

SEQ ID NO: 960278 - RNA, 19 nt, Artificial Sequence
  Description of Artificial Sequence: Synthetic oligonucleotide
uccuugcaauucuacuaaa

SEQ ID NO: 960279 - RNA, 19 nt, Artificial Sequence
  Description of Artificial Sequence: Synthetic oligonucleotide
auggacuaguucacaagca

SEQ ID NO: 960280 - RNA, 19 nt, Artificial Sequence
  Description of Artificial Sequence: Synthetic oligonucleotide
uacggggacuucacugacu

SEQ ID NO: 960281 - RNA, 19 nt, Artificial Sequence
  Description of Artificial Sequence: Synthetic oligonucleotide
auccugcgcauguauggcu

SEQ ID NO: 960282 - RNA, 19 nt, Artificial Sequence
  Description of Artificial Sequence: Synthetic oligonucleotide
ucaccgcuuugcaaccuaa

SEQ ID NO: 960283 - RNA, 19 nt, Artificial Sequence
  Description of Artificial Sequence: Synthetic oligonucleotide
uggagccaaucaugggucu

SEQ ID NO: 960284 - RNA, 19 nt, Artificial Sequence
  Description of Artificial Sequence: Synthetic oligonucleotide
cacgugguguggcaucaag

SEQ ID NO: 960285 - RNA, 19 nt, Artificial Sequence
  Description of Artificial Sequence: Synthetic oligonucleotide
cagguacacauaaucucga

SEQ ID NO: 960286 - RNA, 19 nt, Artificial Sequence
  Description of Artificial Sequence: Synthetic oligonucleotide
aguggcuacuguaagugua

SEQ ID NO: 960287 - RNA, 19 nt, Artificial Sequence
  Description of Artificial Sequence: Synthetic oligonucleotide
cuucacggaguugucggug

SEQ ID NO: 960288 - RNA, 19 nt, Artificial Sequence
  Description of Artificial Sequence: Synthetic oligonucleotide
ccuuagauagcagcuacug

SEQ ID NO: 960289 - RNA, 19 nt, Artificial Sequence
  Description of Artificial Sequence: Synthetic oligonucleotide
uucaccgcuuugcaaccua

SEQ ID NO: 960290 - RNA, 19 nt, Artificial Sequence
  Description of Artificial Sequence: Synthetic oligonucleotide
cuauggcgggccuuguuga

SEQ ID NO: 960291 - RNA, 19 nt, Artificial Sequence
  Description of Artificial Sequence: Synthetic oligonucleotide
uuguugacuuacggggacu

SEQ ID NO: 960292 - RNA, 19 nt, Artificial Sequence
  Description of Artificial Sequence: Synthetic oligonucleotide
uggguucaccgcuuugcaa

SEQ ID NO: 960293 - RNA, 19 nt, Artificial Sequence
  Description of Artificial Sequence: Synthetic oligonucleotide
gugguucugugcaaccgcc

SEQ ID NO: 960294 - RNA, 19 nt, Artificial Sequence
  Description of Artificial Sequence: Synthetic oligonucleotide
auucuacuaaaaggggcau

SEQ ID NO: 960295 - RNA, 19 nt, Artificial Sequence
  Description of Artificial Sequence: Synthetic oligonucleotide
uggcuagucggcgaccacu

SEQ ID NO: 960296 - RNA, 19 nt, Artificial Sequence
  Description of Artificial Sequence: Synthetic oligonucleotide
gcgcauguauggcugaaug

SEQ ID NO: 960297 - RNA, 19 nt, Artificial Sequence
  Description of Artificial Sequence: Synthetic oligonucleotide
auggcuagucggcgaccac

SEQ ID NO: 960298 - RNA, 19 nt, Artificial Sequence
  Description of Artificial Sequence: Synthetic oligonucleotide
guucucccguaucucacca

SEQ ID NO: 960299 - RNA, 19 nt, Artificial Sequence
  Description of Artificial Sequence: Synthetic oligonucleotide
gguucaccgcuuugcaacc

SEQ ID NO: 960300 - RNA, 19 nt, Artificial Sequence
  Description of Artificial Sequence: Synthetic oligonucleotide
uguugacuuacggggacuu

SEQ ID NO: 960301 - RNA, 19 nt, Artificial Sequence
  Description of Artificial Sequence: Synthetic oligonucleotide
uucuacuaaaaggggcaua

SEQ ID NO: 960302 - RNA, 19 nt, Artificial Sequence
  Description of Artificial Sequence: Synthetic oligonucleotide
ucaaggcgcuucuuacgau

SEQ ID NO: 960303 - RNA, 19 nt, Artificial Sequence
  Description of Artificial Sequence: Synthetic oligonucleotide
caucccuuagauagcagcu

SEQ ID NO: 960304 - RNA, 19 nt, Artificial Sequence
  Description of Artificial Sequence: Synthetic oligonucleotide
ggaccaaaauuuggcaggc

SEQ ID NO: 960305 - RNA, 19 nt, Artificial Sequence
  Description of Artificial Sequence: Synthetic oligonucleotide
cuccuaaugcuuagcaugu

SEQ ID NO: 960306 - RNA, 19 nt, Artificial Sequence
  Description of Artificial Sequence: Synthetic oligonucleotide
cugcuuguggucuccaucu

SEQ ID NO: 960307 - RNA, 19 nt, Artificial Sequence
  Description of Artificial Sequence: Synthetic oligonucleotide
gggucuuaggagucgggac

SEQ ID NO: 960308 - RNA, 19 nt, Artificial Sequence
  Description of Artificial Sequence: Synthetic oligonucleotide
ccuauggcgggccuuguug

SEQ ID NO: 960309 - RNA, 19 nt, Artificial Sequence
  Description of Artificial Sequence: Synthetic oligonucleotide
gcuccuugcaauucuacua

SEQ ID NO: 960310 - RNA, 19 nt, Artificial Sequence
  Description of Artificial Sequence: Synthetic oligonucleotide
gcucauagccaauucccuc

SEQ ID NO: 960311 - RNA, 19 nt, Artificial Sequence
  Description of Artificial Sequence: Synthetic oligonucleotide
accaaauaugagacuuaga

SEQ ID NO: 960312 - RNA, 19 nt, Artificial Sequence
  Description of Artificial Sequence: Synthetic oligonucleotide
gagucgggacuccagccaa

SEQ ID NO: 960313 - RNA, 19 nt, Artificial Sequence
  Description of Artificial Sequence: Synthetic oligonucleotide
ggugggucuuaggagucgg

SEQ ID NO: 960314 - RNA, 19 nt, Artificial Sequence
  Description of Artificial Sequence: Synthetic oligonucleotide
ucacguggacaggugguuc

SEQ ID NO: 960315 - RNA, 19 nt, Artificial Sequence
  Description of Artificial Sequence: Synthetic oligonucleotide
ggacuaguucacaagcaca

SEQ ID NO: 960316 - RNA, 19 nt, Artificial Sequence
  Description of Artificial Sequence: Synthetic oligonucleotide
gguaacacgugguguggca

SEQ ID NO: 960317 - RNA, 19 nt, Artificial Sequence
  Description of Artificial Sequence: Synthetic oligonucleotide
acgauccaaaaugguucag

SEQ ID NO: 960318 - RNA, 19 nt, Artificial Sequence
  Description of Artificial Sequence: Synthetic oligonucleotide
gugcaaccgccccagccug

SEQ ID NO: 960319 - RNA, 19 nt, Artificial Sequence
  Description of Artificial Sequence: Synthetic oligonucleotide
ccgcuuugcaaccuaauca

SEQ ID NO: 960320 - RNA, 19 nt, Artificial Sequence
  Description of Artificial Sequence: Synthetic oligonucleotide
ggggcauauggacuaguuc

SEQ ID NO: 960321 - RNA, 19 nt, Artificial Sequence
  Description of Artificial Sequence: Synthetic oligonucleotide
uguuccucgcagaccucua

SEQ ID NO: 960322 - RNA, 19 nt, Artificial Sequence
  Description of Artificial Sequence: Synthetic oligonucleotide
accauccugcgcauguaug

SEQ ID NO: 960323 - RNA, 19 nt, Artificial Sequence
  Description of Artificial Sequence: Synthetic oligonucleotide
cuauucccaagguuugacu

SEQ ID NO: 960324 - RNA, 19 nt, Artificial Sequence
  Description of Artificial Sequence: Synthetic oligonucleotide
agcuauucccaagguuuga

SEQ ID NO: 960325 - RNA, 19 nt, Artificial Sequence
  Description of Artificial Sequence: Synthetic oligonucleotide
ggucuuaggagucgggacu

SEQ ID NO: 960326 - RNA, 19 nt, Artificial Sequence
  Description of Artificial Sequence: Synthetic oligonucleotide
guuuccgcaccaccucaca

SEQ ID NO: 960327 - RNA, 19 nt, Artificial Sequence
  Description of Artificial Sequence: Synthetic oligonucleotide
cagggcucauagccaauuc

SEQ ID NO: 960328 - RNA, 19 nt, Artificial Sequence
  Description of Artificial Sequence: Synthetic oligonucleotide
gguaauuaagggacuguua

SEQ ID NO: 960329 - RNA, 19 nt, Artificial Sequence
  Description of Artificial Sequence: Synthetic oligonucleotide
cugcaggacgcggucuucc

SEQ ID NO: 960330 - RNA, 19 nt, Artificial Sequence
  Description of Artificial Sequence: Synthetic oligonucleotide
guacgccuacaaugaacca

SEQ ID NO: 960331 - RNA, 19 nt, Artificial Sequence
  Description of Artificial Sequence: Synthetic oligonucleotide
uguucccauauugcaggua

SEQ ID NO: 960332 - RNA, 19 nt, Artificial Sequence
  Description of Artificial Sequence: Synthetic oligonucleotide
gcuauucccaagguuugac

SEQ ID NO: 960333 - RNA, 19 nt, Artificial Sequence
  Description of Artificial Sequence: Synthetic oligonucleotide
gcaaccuaaucaugccuuc

SEQ ID NO: 960334 - RNA, 19 nt, Artificial Sequence
  Description of Artificial Sequence: Synthetic oligonucleotide
ugaaccuauggcgggccuu

SEQ ID NO: 960335 - RNA, 19 nt, Artificial Sequence
  Description of Artificial Sequence: Synthetic oligonucleotide
gcaccgauaaaagcuugug

SEQ ID NO: 960336 - RNA, 19 nt, Artificial Sequence
  Description of Artificial Sequence: Synthetic oligonucleotide
ggaugugugagcugcaguu

SEQ ID NO: 960337 - RNA, 19 nt, Artificial Sequence
  Description of Artificial Sequence: Synthetic oligonucleotide
aggguacgccuacaaugaa

SEQ ID NO: 960338 - RNA, 19 nt, Artificial Sequence
  Description of Artificial Sequence: Synthetic oligonucleotide
caccgauaaaagcuugugu

SEQ ID NO: 960339 - RNA, 19 nt, Artificial Sequence
  Description of Artificial Sequence: Synthetic oligonucleotide
uucucccguaucucaccau

SEQ ID NO: 960340 - RNA, 19 nt, Artificial Sequence
  Description of Artificial Sequence: Synthetic oligonucleotide
augcaacguagaaacccca

SEQ ID NO: 960341 - RNA, 19 nt, Artificial Sequence
  Description of Artificial Sequence: Synthetic oligonucleotide
acggaguugucgguguaaa

SEQ ID NO: 960342 - RNA, 19 nt, Artificial Sequence
  Description of Artificial Sequence: Synthetic oligonucleotide
caacuggcaagagacauau

SEQ ID NO: 960343 - RNA, 19 nt, Artificial Sequence
  Description of Artificial Sequence: Synthetic oligonucleotide
guccggcacagcccugcgg

SEQ ID NO: 960344 - RNA, 19 nt, Artificial Sequence
  Description of Artificial Sequence: Synthetic oligonucleotide
ugcaaccgccccagccugu

SEQ ID NO: 960345 - RNA, 19 nt, Artificial Sequence
  Description of Artificial Sequence: Synthetic oligonucleotide
cauggcuagucggcgacca

SEQ ID NO: 960346 - RNA, 19 nt, Artificial Sequence
  Description of Artificial Sequence: Synthetic oligonucleotide
ggguacgccuacaaugaac

SEQ ID NO: 960347 - RNA, 19 nt, Artificial Sequence
  Description of Artificial Sequence: Synthetic oligonucleotide
cuuaggagucgggacucca

SEQ ID NO: 960348 - RNA, 19 nt, Artificial Sequence
  Description of Artificial Sequence: Synthetic oligonucleotide
guuuagacucuagaaucau

SEQ ID NO: 960349 - RNA, 19 nt, Artificial Sequence
  Description of Artificial Sequence: Synthetic oligonucleotide
aggcgcuucuuacgaucca

SEQ ID NO: 960350 - RNA, 19 nt, Artificial Sequence
  Description of Artificial Sequence: Synthetic oligonucleotide
guugacuuacggggacuuc

SEQ ID NO: 960351 - RNA, 19 nt, Artificial Sequence
  Description of Artificial Sequence: Synthetic oligonucleotide
gacuuacggggacuucacu

SEQ ID NO: 960352 - RNA, 19 nt, Artificial Sequence
  Description of Artificial Sequence: Synthetic oligonucleotide
caguaggguacgccuacaa

SEQ ID NO: 960353 - RNA, 19 nt, Artificial Sequence
  Description of Artificial Sequence: Synthetic oligonucleotide
cacugcgggagguagcgcu

SEQ ID NO: 960354 - RNA, 19 nt, Artificial Sequence
  Description of Artificial Sequence: Synthetic oligonucleotide
cuguuaggaaucuccuaau

SEQ ID NO: 960355 - RNA, 19 nt, Artificial Sequence
  Description of Artificial Sequence: Synthetic oligonucleotide
ggagccaaucaugggucug

SEQ ID NO: 960356 - RNA, 19 nt, Artificial Sequence
  Description of Artificial Sequence: Synthetic oligonucleotide
uggcuacuguaaguguauu

SEQ ID NO: 960357 - RNA, 19 nt, Artificial Sequence
  Description of Artificial Sequence: Synthetic oligonucleotide
ccuaccugauuuuguacaa

SEQ ID NO: 960358 - RNA, 19 nt, Artificial Sequence
  Description of Artificial Sequence: Synthetic oligonucleotide
ggguaacacgugguguggc

SEQ ID NO: 960359 - RNA, 19 nt, Artificial Sequence
  Description of Artificial Sequence: Synthetic oligonucleotide
aggggcauauggacuaguu

SEQ ID NO: 960360 - RNA, 19 nt, Artificial Sequence
  Description of Artificial Sequence: Synthetic oligonucleotide
gucugagaguucucccgua

SEQ ID NO: 960361 - RNA, 19 nt, Artificial Sequence
  Description of Artificial Sequence: Synthetic oligonucleotide
caaccgccccagccugucc

SEQ ID NO: 960362 - RNA, 19 nt, Artificial Sequence
  Description of Artificial Sequence: Synthetic oligonucleotide
gguauucauuucccuuuua

SEQ ID NO: 960363 - RNA, 19 nt, Artificial Sequence
  Description of Artificial Sequence: Synthetic oligonucleotide
cugguaauuaagggacugu

SEQ ID NO: 960364 - RNA, 19 nt, Artificial Sequence
  Description of Artificial Sequence: Synthetic oligonucleotide
caagcgccucuucuguuua

SEQ ID NO: 960365 - RNA, 19 nt, Artificial Sequence
  Description of Artificial Sequence: Synthetic oligonucleotide
gcuagucggcgaccacucc

SEQ ID NO: 960366 - RNA, 19 nt, Artificial Sequence
  Description of Artificial Sequence: Synthetic oligonucleotide
accgccccagccugucccu

SEQ ID NO: 960367 - RNA, 19 nt, Artificial Sequence
  Description of Artificial Sequence: Synthetic oligonucleotide
gguccggcacagcccugcg

SEQ ID NO: 960368 - RNA, 19 nt, Artificial Sequence
  Description of Artificial Sequence: Synthetic oligonucleotide
guaacacgugguguggcau

SEQ ID NO: 960369 - RNA, 19 nt, Artificial Sequence
  Description of Artificial Sequence: Synthetic oligonucleotide
guggcuacuguaaguguau

SEQ ID NO: 960370 - RNA, 19 nt, Artificial Sequence
  Description of Artificial Sequence: Synthetic oligonucleotide
ggacuguuaggaaucuccu

SEQ ID NO: 960371 - RNA, 19 nt, Artificial Sequence
  Description of Artificial Sequence: Synthetic oligonucleotide
aggcaccuguugaaaugga

SEQ ID NO: 960372 - RNA, 19 nt, Artificial Sequence
  Description of Artificial Sequence: Synthetic oligonucleotide
ggcuagucggcgaccacuc

SEQ ID NO: 960373 - RNA, 19 nt, Artificial Sequence
  Description of Artificial Sequence: Synthetic oligonucleotide
caggcuuggggaacaacuu

SEQ ID NO: 960374 - RNA, 19 nt, Artificial Sequence
  Description of Artificial Sequence: Synthetic oligonucleotide
cucgagcuagucugagagu

SEQ ID NO: 960375 - RNA, 19 nt, Artificial Sequence
  Description of Artificial Sequence: Synthetic oligonucleotide
augcuaggucuggguaaca

SEQ ID NO: 960376 - RNA, 19 nt, Artificial Sequence
  Description of Artificial Sequence: Synthetic oligonucleotide
gaggaacccuuugggcuua

SEQ ID NO: 960377 - RNA, 19 nt, Artificial Sequence
  Description of Artificial Sequence: Synthetic oligonucleotide
aggaacccuuugggcuuag

SEQ ID NO: 960378 - RNA, 19 nt, Artificial Sequence
  Description of Artificial Sequence: Synthetic oligonucleotide
ggcgcuucuuacgauccaa

SEQ ID NO: 960379 - RNA, 19 nt, Artificial Sequence
  Description of Artificial Sequence: Synthetic oligonucleotide
cuucuuggguucaccgcuu

SEQ ID NO: 960380 - RNA, 19 nt, Artificial Sequence
  Description of Artificial Sequence: Synthetic oligonucleotide
agucgggacuccagccaaa

SEQ ID NO: 960381 - RNA, 19 nt, Artificial Sequence
  Description of Artificial Sequence: Synthetic oligonucleotide
cgggaccggguccaccucg

SEQ ID NO: 960382 - RNA, 19 nt, Artificial Sequence
  Description of Artificial Sequence: Synthetic oligonucleotide
cagcaagaguaugcaacgu

SEQ ID NO: 960383 - RNA, 19 nt, Artificial Sequence
  Description of Artificial Sequence: Synthetic oligonucleotide
cccaugcuaggucugggua

SEQ ID NO: 960384 - RNA, 19 nt, Artificial Sequence
  Description of Artificial Sequence: Synthetic oligonucleotide
ccauggcuccuugcaauuc

SEQ ID NO: 960385 - RNA, 19 nt, Artificial Sequence
  Description of Artificial Sequence: Synthetic oligonucleotide
cccaagguuugacugucua

SEQ ID NO: 960386 - RNA, 19 nt, Artificial Sequence
  Description of Artificial Sequence: Synthetic oligonucleotide
gcgggccuuguugacuuac

SEQ ID NO: 960387 - RNA, 19 nt, Artificial Sequence
  Description of Artificial Sequence: Synthetic oligonucleotide
gcuucacggaguugucggu

SEQ ID NO: 960388 - RNA, 19 nt, Artificial Sequence
  Description of Artificial Sequence: Synthetic oligonucleotide
acacgugguguggcaucaa

SEQ ID NO: 960389 - RNA, 19 nt, Artificial Sequence
  Description of Artificial Sequence: Synthetic oligonucleotide
gucacguggacaggugguu

SEQ ID NO: 960390 - RNA, 19 nt, Artificial Sequence
  Description of Artificial Sequence: Synthetic oligonucleotide
ccugcgcauguauggcuga

SEQ ID NO: 960391 - RNA, 19 nt, Artificial Sequence
  Description of Artificial Sequence: Synthetic oligonucleotide
cugcgcauguauggcugaa

SEQ ID NO: 960392 - RNA, 19 nt, Artificial Sequence
  Description of Artificial Sequence: Synthetic oligonucleotide
gccuacaaugaaccagguu

SEQ ID NO: 960393 - RNA, 19 nt, Artificial Sequence
  Description of Artificial Sequence: Synthetic oligonucleotide
gcaaccgccccagccuguc

SEQ ID NO: 960394 - RNA, 19 nt, Artificial Sequence
  Description of Artificial Sequence: Synthetic oligonucleotide
cccuuagauagcagcuacu

SEQ ID NO: 960395 - RNA, 19 nt, Artificial Sequence
  Description of Artificial Sequence: Synthetic oligonucleotide
gcgaccacuccggucccga

SEQ ID NO: 960396 - RNA, 19 nt, Artificial Sequence
  Description of Artificial Sequence: Synthetic oligonucleotide
ggccaccauccugcgcaug

SEQ ID NO: 960397 - RNA, 19 nt, Artificial Sequence
  Description of Artificial Sequence: Synthetic oligonucleotide
cggggacuucacugacuug

SEQ ID NO: 960398 - RNA, 19 nt, Artificial Sequence
  Description of Artificial Sequence: Synthetic oligonucleotide
ccggguccaccucgcagca

SEQ ID NO: 960399 - RNA, 19 nt, Artificial Sequence
  Description of Artificial Sequence: Synthetic oligonucleotide
gaguuuggucagggcucau

SEQ ID NO: 960400 - RNA, 19 nt, Artificial Sequence
  Description of Artificial Sequence: Synthetic oligonucleotide
gcgggaccggguccaccuc

SEQ ID NO: 960401 - RNA, 19 nt, Artificial Sequence
  Description of Artificial Sequence: Synthetic oligonucleotide
ccacuccggucccgacugu

SEQ ID NO: 960402 - RNA, 19 nt, Artificial Sequence
  Description of Artificial Sequence: Synthetic oligonucleotide
uuaauugcuauuaauaugg

SEQ ID NO: 960403 - RNA, 19 nt, Artificial Sequence
  Description of Artificial Sequence: Synthetic oligonucleotide
aagacagugaaauaagugg

SEQ ID NO: 960404 - RNA, 19 nt, Artificial Sequence
  Description of Artificial Sequence: Synthetic oligonucleotide
aucacaaauaaguugacac

SEQ ID NO: 960405 - RNA, 19 nt, Artificial Sequence
  Description of Artificial Sequence: Synthetic oligonucleotide
aauaaacugagucagcggu

SEQ ID NO: 960406 - RNA, 19 nt, Artificial Sequence
  Description of Artificial Sequence: Synthetic oligonucleotide
aacaagucaucuaagagag

SEQ ID NO: 960407 - RNA, 19 nt, Artificial Sequence
  Description of Artificial Sequence: Synthetic oligonucleotide
aauaacuuucaaaugacug

SEQ ID NO: 960408 - RNA, 19 nt, Artificial Sequence
  Description of Artificial Sequence: Synthetic oligonucleotide
uugucaauaaccauuggcu

SEQ ID NO: 960409 - RNA, 19 nt, Artificial Sequence
  Description of Artificial Sequence: Synthetic oligonucleotide
uguucuauuagcauucgcu

SEQ ID NO: 960410 - RNA, 19 nt, Artificial Sequence
  Description of Artificial Sequence: Synthetic oligonucleotide
ucauauuaaggucuagcag

SEQ ID NO: 960411 - RNA, 19 nt, Artificial Sequence
  Description of Artificial Sequence: Synthetic oligonucleotide
uauuuaguaaagcaaccug

SEQ ID NO: 960412 - RNA, 19 nt, Artificial Sequence
  Description of Artificial Sequence: Synthetic oligonucleotide
uucuuuaugcagaggaagg

SEQ ID NO: 960413 - RNA, 19 nt, Artificial Sequence
  Description of Artificial Sequence: Synthetic oligonucleotide
ucuugguauaucauaagca

SEQ ID NO: 960414 - RNA, 19 nt, Artificial Sequence
  Description of Artificial Sequence: Synthetic oligonucleotide
uauuucuuggcucaucaug

SEQ ID NO: 960415 - RNA, 19 nt, Artificial Sequence
  Description of Artificial Sequence: Synthetic oligonucleotide
ugaagauucuuucauauuu

SEQ ID NO: 960416 - RNA, 19 nt, Artificial Sequence
  Description of Artificial Sequence: Synthetic oligonucleotide
uuaggugcacccaucaucc

SEQ ID NO: 960417 - RNA, 19 nt, Artificial Sequence
  Description of Artificial Sequence: Synthetic oligonucleotide
uucauauuaaggucuagca

SEQ ID NO: 960418 - RNA, 19 nt, Artificial Sequence
  Description of Artificial Sequence: Synthetic oligonucleotide
uguacuagcuuucaaguaa

SEQ ID NO: 960419 - RNA, 19 nt, Artificial Sequence
  Description of Artificial Sequence: Synthetic oligonucleotide
gaucaaguucucuuagugg

SEQ ID NO: 960420 - RNA, 19 nt, Artificial Sequence
  Description of Artificial Sequence: Synthetic oligonucleotide
auuuaguaaagcaaccugg

SEQ ID NO: 960421 - RNA, 19 nt, Artificial Sequence
  Description of Artificial Sequence: Synthetic oligonucleotide
gauccgaugacucuaucag

SEQ ID NO: 960422 - RNA, 19 nt, Artificial Sequence
  Description of Artificial Sequence: Synthetic oligonucleotide
uuuaguaaagcaaccugga

SEQ ID NO: 960423 - RNA, 19 nt, Artificial Sequence
  Description of Artificial Sequence: Synthetic oligonucleotide
uguaacugaguccauacuc

SEQ ID NO: 960424 - RNA, 19 nt, Artificial Sequence
  Description of Artificial Sequence: Synthetic oligonucleotide
ugguauauucucuucagca

SEQ ID NO: 960425 - RNA, 19 nt, Artificial Sequence
  Description of Artificial Sequence: Synthetic oligonucleotide
acuguaacugaguccauac

SEQ ID NO: 960426 - RNA, 19 nt, Artificial Sequence
  Description of Artificial Sequence: Synthetic oligonucleotide
aaaauccaccaacagugag

SEQ ID NO: 960427 - RNA, 19 nt, Artificial Sequence
  Description of Artificial Sequence: Synthetic oligonucleotide
uuucgaaucucuuucauua

SEQ ID NO: 960428 - RNA, 19 nt, Artificial Sequence
  Description of Artificial Sequence: Synthetic oligonucleotide
uuuaaaagauuagaucuca

SEQ ID NO: 960429 - RNA, 19 nt, Artificial Sequence
  Description of Artificial Sequence: Synthetic oligonucleotide
uguguuuauuuugaggucc

SEQ ID NO: 960430 - RNA, 19 nt, Artificial Sequence
  Description of Artificial Sequence: Synthetic oligonucleotide
aucaaguucucuuagugga

SEQ ID NO: 960431 - RNA, 19 nt, Artificial Sequence
  Description of Artificial Sequence: Synthetic oligonucleotide
ugugacuguucacagcagg

SEQ ID NO: 960432 - RNA, 19 nt, Artificial Sequence
  Description of Artificial Sequence: Synthetic oligonucleotide
uuuguaaacugccuugcac

SEQ ID NO: 960433 - RNA, 19 nt, Artificial Sequence
  Description of Artificial Sequence: Synthetic oligonucleotide
aaauccaccaacagugagg

SEQ ID NO: 960434 - RNA, 19 nt, Artificial Sequence
  Description of Artificial Sequence: Synthetic oligonucleotide
aaugauccagaagauuccg

SEQ ID NO: 960435 - RNA, 19 nt, Artificial Sequence
  Description of Artificial Sequence: Synthetic oligonucleotide
uaauuguaaggcaucacaa

SEQ ID NO: 960436 - RNA, 19 nt, Artificial Sequence
  Description of Artificial Sequence: Synthetic oligonucleotide
uuuccuaugugccauugac

SEQ ID NO: 960437 - RNA, 19 nt, Artificial Sequence
  Description of Artificial Sequence: Synthetic oligonucleotide
aguggagaggcacaccggc

SEQ ID NO: 960438 - RNA, 19 nt, Artificial Sequence
  Description of Artificial Sequence: Synthetic oligonucleotide
uccuuauuuaguaaagcaa

SEQ ID NO: 960439 - RNA, 19 nt, Artificial Sequence
  Description of Artificial Sequence: Synthetic oligonucleotide
ucaaguaaccaaagggaug

SEQ ID NO: 960440 - RNA, 19 nt, Artificial Sequence
  Description of Artificial Sequence: Synthetic oligonucleotide
auauuaaggucuagcagcc

SEQ ID NO: 960441 - RNA, 19 nt, Artificial Sequence
  Description of Artificial Sequence: Synthetic oligonucleotide
uuugauuggcucuucgaug

SEQ ID NO: 960442 - RNA, 19 nt, Artificial Sequence
  Description of Artificial Sequence: Synthetic oligonucleotide
ugugcuauagguacacugu

SEQ ID NO: 960443 - RNA, 19 nt, Artificial Sequence
  Description of Artificial Sequence: Synthetic oligonucleotide
uugauuggcucuucgauga

SEQ ID NO: 960444 - RNA, 19 nt, Artificial Sequence
  Description of Artificial Sequence: Synthetic oligonucleotide
ucacaaauaaguugacaca

SEQ ID NO: 960445 - RNA, 19 nt, Artificial Sequence
  Description of Artificial Sequence: Synthetic oligonucleotide
uuaagaaauuugcgggugc

SEQ ID NO: 960446 - RNA, 19 nt, Artificial Sequence
  Description of Artificial Sequence: Synthetic oligonucleotide
aauaaccauuggcucacag

SEQ ID NO: 960447 - RNA, 19 nt, Artificial Sequence
  Description of Artificial Sequence: Synthetic oligonucleotide
uacacgaaaacuucacuac

SEQ ID NO: 960448 - RNA, 19 nt, Artificial Sequence
  Description of Artificial Sequence: Synthetic oligonucleotide
auuagccuuguuuguaaac

SEQ ID NO: 960449 - RNA, 19 nt, Artificial Sequence
  Description of Artificial Sequence: Synthetic oligonucleotide
auuaaggucuagcagccug

SEQ ID NO: 960450 - RNA, 19 nt, Artificial Sequence
  Description of Artificial Sequence: Synthetic oligonucleotide
uugccuacggauccgauga

SEQ ID NO: 960451 - RNA, 19 nt, Artificial Sequence
  Description of Artificial Sequence: Synthetic oligonucleotide
auccuuauuuaguaaagca

SEQ ID NO: 960452 - RNA, 19 nt, Artificial Sequence
  Description of Artificial Sequence: Synthetic oligonucleotide
acacgaaaacuucacuacg

SEQ ID NO: 960453 - RNA, 19 nt, Artificial Sequence
  Description of Artificial Sequence: Synthetic oligonucleotide
ugauuugauuggcucuucg

SEQ ID NO: 960454 - RNA, 19 nt, Artificial Sequence
  Description of Artificial Sequence: Synthetic oligonucleotide
cauccuaacagcuuucuuc

SEQ ID NO: 960455 - RNA, 19 nt, Artificial Sequence
  Description of Artificial Sequence: Synthetic oligonucleotide
uuuauccaguuuaaaggga

SEQ ID NO: 960456 - RNA, 19 nt, Artificial Sequence
  Description of Artificial Sequence: Synthetic oligonucleotide
uaugcaaccuucgaggcug

SEQ ID NO: 960457 - RNA, 19 nt, Artificial Sequence
  Description of Artificial Sequence: Synthetic oligonucleotide
cacgaaaacuucacuacgg

SEQ ID NO: 960458 - RNA, 19 nt, Artificial Sequence
  Description of Artificial Sequence: Synthetic oligonucleotide
gagguaugaaaugacacug

SEQ ID NO: 960459 - RNA, 19 nt, Artificial Sequence
  Description of Artificial Sequence: Synthetic oligonucleotide
aguuuaaagggauugccaa

SEQ ID NO: 960460 - RNA, 19 nt, Artificial Sequence
  Description of Artificial Sequence: Synthetic oligonucleotide
guaauuguaaggcaucaca

SEQ ID NO: 960461 - RNA, 19 nt, Artificial Sequence
  Description of Artificial Sequence: Synthetic oligonucleotide
auaguagggaggcauuguc

SEQ ID NO: 960462 - RNA, 19 nt, Artificial Sequence
  Description of Artificial Sequence: Synthetic oligonucleotide
acgaaaacuucacuacggg

SEQ ID NO: 960463 - RNA, 19 nt, Artificial Sequence
  Description of Artificial Sequence: Synthetic oligonucleotide
ucuguacacgaaaacuuca

SEQ ID NO: 960464 - RNA, 19 nt, Artificial Sequence
  Description of Artificial Sequence: Synthetic oligonucleotide
uugcuauuaauaugguuga

SEQ ID NO: 960465 - RNA, 19 nt, Artificial Sequence
  Description of Artificial Sequence: Synthetic oligonucleotide
auacuuugcacuauugcuc

SEQ ID NO: 960466 - RNA, 19 nt, Artificial Sequence
  Description of Artificial Sequence: Synthetic oligonucleotide
gaggaagggguuuaauaag

SEQ ID NO: 960467 - RNA, 19 nt, Artificial Sequence
  Description of Artificial Sequence: Synthetic oligonucleotide
uuuucaaccacaucaucua

SEQ ID NO: 960468 - RNA, 19 nt, Artificial Sequence
  Description of Artificial Sequence: Synthetic oligonucleotide
uuauccaguuuaaagggau

SEQ ID NO: 960469 - RNA, 19 nt, Artificial Sequence
  Description of Artificial Sequence: Synthetic oligonucleotide
aauugcuauuaauaugguu

SEQ ID NO: 960470 - RNA, 19 nt, Artificial Sequence
  Description of Artificial Sequence: Synthetic oligonucleotide
uacuuugcacuauugcuca

SEQ ID NO: 960471 - RNA, 19 nt, Artificial Sequence
  Description of Artificial Sequence: Synthetic oligonucleotide
uucgguacuuuaauuccag

SEQ ID NO: 960472 - RNA, 19 nt, Artificial Sequence
  Description of Artificial Sequence: Synthetic oligonucleotide
auuuucaaccacaucaucu

SEQ ID NO: 960473 - RNA, 19 nt, Artificial Sequence
  Description of Artificial Sequence: Synthetic oligonucleotide
ugucaugucugaugaaagc

SEQ ID NO: 960474 - RNA, 19 nt, Artificial Sequence
  Description of Artificial Sequence: Synthetic oligonucleotide
ucaucuaagagaggaagga

SEQ ID NO: 960475 - RNA, 19 nt, Artificial Sequence
  Description of Artificial Sequence: Synthetic oligonucleotide
augugaccgacuucgguac

SEQ ID NO: 960476 - RNA, 19 nt, Artificial Sequence
  Description of Artificial Sequence: Synthetic oligonucleotide
ucgaugaauuucauccaag

SEQ ID NO: 960477 - RNA, 19 nt, Artificial Sequence
  Description of Artificial Sequence: Synthetic oligonucleotide
ugucaauaaccauuggcuc

SEQ ID NO: 960478 - RNA, 19 nt, Artificial Sequence
  Description of Artificial Sequence: Synthetic oligonucleotide
agucaucuaagagaggaag

SEQ ID NO: 960479 - RNA, 19 nt, Artificial Sequence
  Description of Artificial Sequence: Synthetic oligonucleotide
uuagccuuguuuguaaacu

SEQ ID NO: 960480 - RNA, 19 nt, Artificial Sequence
  Description of Artificial Sequence: Synthetic oligonucleotide
ugguugaugguuccagaag

SEQ ID NO: 960481 - RNA, 19 nt, Artificial Sequence
  Description of Artificial Sequence: Synthetic oligonucleotide
uucacuacgggaugagaug

SEQ ID NO: 960482 - RNA, 19 nt, Artificial Sequence
  Description of Artificial Sequence: Synthetic oligonucleotide
cuuuaugcagaggaagggg

SEQ ID NO: 960483 - RNA, 19 nt, Artificial Sequence
  Description of Artificial Sequence: Synthetic oligonucleotide
ugcuauagguacacugugc

SEQ ID NO: 960484 - RNA, 19 nt, Artificial Sequence
  Description of Artificial Sequence: Synthetic oligonucleotide
uuggcucacagucuguaca

SEQ ID NO: 960485 - RNA, 19 nt, Artificial Sequence
  Description of Artificial Sequence: Synthetic oligonucleotide
gacucuaucagauucaauu

SEQ ID NO: 960486 - RNA, 19 nt, Artificial Sequence
  Description of Artificial Sequence: Synthetic oligonucleotide
uaaguugacacaguucagu

SEQ ID NO: 960487 - RNA, 19 nt, Artificial Sequence
  Description of Artificial Sequence: Synthetic oligonucleotide
uuaaagggauugccaaaug

SEQ ID NO: 960488 - RNA, 19 nt, Artificial Sequence
  Description of Artificial Sequence: Synthetic oligonucleotide
ugagcguuggcuuugcuuu

SEQ ID NO: 960489 - RNA, 19 nt, Artificial Sequence
  Description of Artificial Sequence: Synthetic oligonucleotide
aauauuagccuuguuugua

SEQ ID NO: 960490 - RNA, 19 nt, Artificial Sequence
  Description of Artificial Sequence: Synthetic oligonucleotide
ucacauauaccugccaaca

SEQ ID NO: 960491 - RNA, 19 nt, Artificial Sequence
  Description of Artificial Sequence: Synthetic oligonucleotide
aggacuggguaauuguaag

SEQ ID NO: 960492 - RNA, 19 nt, Artificial Sequence
  Description of Artificial Sequence: Synthetic oligonucleotide
ugaaagcuggucugcaaca

SEQ ID NO: 960493 - RNA, 19 nt, Artificial Sequence
  Description of Artificial Sequence: Synthetic oligonucleotide
ucuuaguggagaagguacu

SEQ ID NO: 960494 - RNA, 19 nt, Artificial Sequence
  Description of Artificial Sequence: Synthetic oligonucleotide
uuaguaaagcaaccuggaa

SEQ ID NO: 960495 - RNA, 19 nt, Artificial Sequence
  Description of Artificial Sequence: Synthetic oligonucleotide
auaaccauuggcucacagu

SEQ ID NO: 960496 - RNA, 19 nt, Artificial Sequence
  Description of Artificial Sequence: Synthetic oligonucleotide
acuacgggaugagaugugc

SEQ ID NO: 960497 - RNA, 19 nt, Artificial Sequence
  Description of Artificial Sequence: Synthetic oligonucleotide
uuaaaagauuagaucucau

SEQ ID NO: 960498 - RNA, 19 nt, Artificial Sequence
  Description of Artificial Sequence: Synthetic oligonucleotide
gauugguugaugguuccag

SEQ ID NO: 960499 - RNA, 19 nt, Artificial Sequence
  Description of Artificial Sequence: Synthetic oligonucleotide
ucaagaguggagaggcaca

SEQ ID NO: 960500 - RNA, 19 nt, Artificial Sequence
  Description of Artificial Sequence: Synthetic oligonucleotide
uggcuuucgaaucucuuuc

SEQ ID NO: 960501 - RNA, 19 nt, Artificial Sequence
  Description of Artificial Sequence: Synthetic oligonucleotide
uuaaggucuagcagccugu

SEQ ID NO: 960502 - RNA, 19 nt, Artificial Sequence
  Description of Artificial Sequence: Synthetic oligonucleotide
uuugccuacggauccgaug

SEQ ID NO: 960503 - RNA, 19 nt, Artificial Sequence
  Description of Artificial Sequence: Synthetic oligonucleotide
caaccuucgaggcugauca

SEQ ID NO: 960504 - RNA, 19 nt, Artificial Sequence
  Description of Artificial Sequence: Synthetic oligonucleotide
uaaacugagucagcgguga

SEQ ID NO: 960505 - RNA, 19 nt, Artificial Sequence
  Description of Artificial Sequence: Synthetic oligonucleotide
aaggucuagcagccugugg

SEQ ID NO: 960506 - RNA, 19 nt, Artificial Sequence
  Description of Artificial Sequence: Synthetic oligonucleotide
aaagggauugccaaaugua

SEQ ID NO: 960507 - RNA, 19 nt, Artificial Sequence
  Description of Artificial Sequence: Synthetic oligonucleotide
uuugcacuauugcucacau

SEQ ID NO: 960508 - RNA, 19 nt, Artificial Sequence
  Description of Artificial Sequence: Synthetic oligonucleotide
uaauugcuauuaauauggu

SEQ ID NO: 960509 - RNA, 19 nt, Artificial Sequence
  Description of Artificial Sequence: Synthetic oligonucleotide
aagauuaggugcacccauc

SEQ ID NO: 960510 - RNA, 19 nt, Artificial Sequence
  Description of Artificial Sequence: Synthetic oligonucleotide
uguaaacugccuugcacau

SEQ ID NO: 960511 - RNA, 19 nt, Artificial Sequence
  Description of Artificial Sequence: Synthetic oligonucleotide
ugguugauuugauuggcuc

SEQ ID NO: 960512 - RNA, 19 nt, Artificial Sequence
  Description of Artificial Sequence: Synthetic oligonucleotide
uagccuuguuuguaaacug

SEQ ID NO: 960513 - RNA, 19 nt, Artificial Sequence
  Description of Artificial Sequence: Synthetic oligonucleotide
uucgggauuccuugcaugu

SEQ ID NO: 960514 - RNA, 19 nt, Artificial Sequence
  Description of Artificial Sequence: Synthetic oligonucleotide
uaguagggaggcauugucu

SEQ ID NO: 960515 - RNA, 19 nt, Artificial Sequence
  Description of Artificial Sequence: Synthetic oligonucleotide
agaagauuccgucuuggua

SEQ ID NO: 960516 - RNA, 19 nt, Artificial Sequence
  Description of Artificial Sequence: Synthetic oligonucleotide
cucacauauaccugccaac

SEQ ID NO: 960517 - RNA, 19 nt, Artificial Sequence
  Description of Artificial Sequence: Synthetic oligonucleotide
uuguucuauuagcauucgc

SEQ ID NO: 960518 - RNA, 19 nt, Artificial Sequence
  Description of Artificial Sequence: Synthetic oligonucleotide
uacgggaugagaugugcga

SEQ ID NO: 960519 - RNA, 19 nt, Artificial Sequence
  Description of Artificial Sequence: Synthetic oligonucleotide
aagggauugccaaauguau

SEQ ID NO: 960520 - RNA, 19 nt, Artificial Sequence
  Description of Artificial Sequence: Synthetic oligonucleotide
acuggguaauuguaaggca

SEQ ID NO: 960521 - RNA, 19 nt, Artificial Sequence
  Description of Artificial Sequence: Synthetic oligonucleotide
cugccaacauguuugagga

SEQ ID NO: 960522 - RNA, 19 nt, Artificial Sequence
  Description of Artificial Sequence: Synthetic oligonucleotide
uccaguuuaaagggauugc

SEQ ID NO: 960523 - RNA, 19 nt, Artificial Sequence
  Description of Artificial Sequence: Synthetic oligonucleotide
aacccaguguacuccuuca

SEQ ID NO: 960524 - RNA, 19 nt, Artificial Sequence
  Description of Artificial Sequence: Synthetic oligonucleotide
ucacuacgggaugagaugu

SEQ ID NO: 960525 - RNA, 19 nt, Artificial Sequence
  Description of Artificial Sequence: Synthetic oligonucleotide
uuugcugagugaagaugcu

SEQ ID NO: 960526 - RNA, 19 nt, Artificial Sequence
  Description of Artificial Sequence: Synthetic oligonucleotide
ugucaaaaggcaguuuguc

SEQ ID NO: 960527 - RNA, 19 nt, Artificial Sequence
  Description of Artificial Sequence: Synthetic oligonucleotide
cuacgggaugagaugugcg

SEQ ID NO: 960528 - RNA, 19 nt, Artificial Sequence
  Description of Artificial Sequence: Synthetic oligonucleotide
ggcuucuuuaugcagagga

SEQ ID NO: 960529 - RNA, 19 nt, Artificial Sequence
  Description of Artificial Sequence: Synthetic oligonucleotide
uccgucuugguauaucaua

SEQ ID NO: 960530 - RNA, 19 nt, Artificial Sequence
  Description of Artificial Sequence: Synthetic oligonucleotide
agcggugaagguuccaacu

SEQ ID NO: 960531 - RNA, 19 nt, Artificial Sequence
  Description of Artificial Sequence: Synthetic oligonucleotide
uuugcgggugcucuuuaaa

SEQ ID NO: 960532 - RNA, 19 nt, Artificial Sequence
  Description of Artificial Sequence: Synthetic oligonucleotide
ucgaaucucuuucauuauu

SEQ ID NO: 960533 - RNA, 19 nt, Artificial Sequence
  Description of Artificial Sequence: Synthetic oligonucleotide
aggcauugucuucaaauaa

SEQ ID NO: 960534 - RNA, 19 nt, Artificial Sequence
  Description of Artificial Sequence: Synthetic oligonucleotide
gguugaugguuccagaaga

SEQ ID NO: 960535 - RNA, 19 nt, Artificial Sequence
  Description of Artificial Sequence: Synthetic oligonucleotide
uuugugcacuuugaacaag

SEQ ID NO: 960536 - RNA, 19 nt, Artificial Sequence
  Description of Artificial Sequence: Synthetic oligonucleotide
caucuaagagaggaaggag

SEQ ID NO: 960537 - RNA, 19 nt, Artificial Sequence
  Description of Artificial Sequence: Synthetic oligonucleotide
acauccuaauucccugcag

SEQ ID NO: 960538 - RNA, 19 nt, Artificial Sequence
  Description of Artificial Sequence: Synthetic oligonucleotide
auugguugaugguuccaga

SEQ ID NO: 960539 - RNA, 19 nt, Artificial Sequence
  Description of Artificial Sequence: Synthetic oligonucleotide
gauugguuggagauguuaa

SEQ ID NO: 960540 - RNA, 19 nt, Artificial Sequence
  Description of Artificial Sequence: Synthetic oligonucleotide
caagggcccaagauaguag

SEQ ID NO: 960541 - RNA, 19 nt, Artificial Sequence
  Description of Artificial Sequence: Synthetic oligonucleotide
uauuagccuuguuuguaaa

SEQ ID NO: 960542 - RNA, 19 nt, Artificial Sequence
  Description of Artificial Sequence: Synthetic oligonucleotide
aggaggacuggguaauugu

SEQ ID NO: 960543 - RNA, 19 nt, Artificial Sequence
  Description of Artificial Sequence: Synthetic oligonucleotide
ugucugcuauaagauuagg

SEQ ID NO: 960544 - RNA, 19 nt, Artificial Sequence
  Description of Artificial Sequence: Synthetic oligonucleotide
cacaugcuucaguaaagug

SEQ ID NO: 960545 - RNA, 19 nt, Artificial Sequence
  Description of Artificial Sequence: Synthetic oligonucleotide
gaugacucuaucagauuca

SEQ ID NO: 960546 - RNA, 19 nt, Artificial Sequence
  Description of Artificial Sequence: Synthetic oligonucleotide
gugcuauagguacacugug

SEQ ID NO: 960547 - RNA, 19 nt, Artificial Sequence
  Description of Artificial Sequence: Synthetic oligonucleotide
caguuuaaagggauugcca

SEQ ID NO: 960548 - RNA, 19 nt, Artificial Sequence
  Description of Artificial Sequence: Synthetic oligonucleotide
cagugaaauaaguggccac

SEQ ID NO: 960549 - RNA, 19 nt, Artificial Sequence
  Description of Artificial Sequence: Synthetic oligonucleotide
ucuuuacuuugcugaguga

SEQ ID NO: 960550 - RNA, 19 nt, Artificial Sequence
  Description of Artificial Sequence: Synthetic oligonucleotide
uggcucacagucuguacac

SEQ ID NO: 960551 - RNA, 19 nt, Artificial Sequence
  Description of Artificial Sequence: Synthetic oligonucleotide
caugauuuucaaccacauc

SEQ ID NO: 960552 - RNA, 19 nt, Artificial Sequence
  Description of Artificial Sequence: Synthetic oligonucleotide
agggccucgguaugauugg

SEQ ID NO: 960553 - RNA, 19 nt, Artificial Sequence
  Description of Artificial Sequence: Synthetic oligonucleotide
gagucagcggugaagguuc

SEQ ID NO: 960554 - RNA, 19 nt, Artificial Sequence
  Description of Artificial Sequence: Synthetic oligonucleotide
cauccuaauucccugcaga

SEQ ID NO: 960555 - RNA, 19 nt, Artificial Sequence
  Description of Artificial Sequence: Synthetic oligonucleotide
ucuaaaggucugaggcuuc

SEQ ID NO: 960556 - RNA, 19 nt, Artificial Sequence
  Description of Artificial Sequence: Synthetic oligonucleotide
agauuagaucucauucuug

SEQ ID NO: 960557 - RNA, 19 nt, Artificial Sequence
  Description of Artificial Sequence: Synthetic oligonucleotide
gacauccuaauucccugca

SEQ ID NO: 960558 - RNA, 19 nt, Artificial Sequence
  Description of Artificial Sequence: Synthetic oligonucleotide
auagguacacugugcacuu

SEQ ID NO: 960559 - RNA, 19 nt, Artificial Sequence
  Description of Artificial Sequence: Synthetic oligonucleotide
cuuuaagaaauuugcgggu

SEQ ID NO: 960560 - RNA, 19 nt, Artificial Sequence
  Description of Artificial Sequence: Synthetic oligonucleotide
uuauuucuuggcucaucau

SEQ ID NO: 960561 - RNA, 19 nt, Artificial Sequence
  Description of Artificial Sequence: Synthetic oligonucleotide
aggaagggguuuaauaaga

SEQ ID NO: 960562 - RNA, 19 nt, Artificial Sequence
  Description of Artificial Sequence: Synthetic oligonucleotide
auaaacugagucagcggug

SEQ ID NO: 960563 - RNA, 19 nt, Artificial Sequence
  Description of Artificial Sequence: Synthetic oligonucleotide
cuucgggauuccuugcaug

SEQ ID NO: 960564 - RNA, 19 nt, Artificial Sequence
  Description of Artificial Sequence: Synthetic oligonucleotide
ucaagggcccaagauagua

SEQ ID NO: 960565 - RNA, 19 nt, Artificial Sequence
  Description of Artificial Sequence: Synthetic oligonucleotide
agguacuugcuugagguau

SEQ ID NO: 960566 - RNA, 19 nt, Artificial Sequence
  Description of Artificial Sequence: Synthetic oligonucleotide
ucuucgggauuccuugcau

SEQ ID NO: 960567 - RNA, 19 nt, Artificial Sequence
  Description of Artificial Sequence: Synthetic oligonucleotide
auaaguugacacaguucag

SEQ ID NO: 960568 - RNA, 19 nt, Artificial Sequence
  Description of Artificial Sequence: Synthetic oligonucleotide
caugugaccgacuucggua

SEQ ID NO: 960569 - RNA, 19 nt, Artificial Sequence
  Description of Artificial Sequence: Synthetic oligonucleotide
uugagcguuggcuuugcuu

SEQ ID NO: 960570 - RNA, 19 nt, Artificial Sequence
  Description of Artificial Sequence: Synthetic oligonucleotide
ugagguccagccacaaauu

SEQ ID NO: 960571 - RNA, 19 nt, Artificial Sequence
  Description of Artificial Sequence: Synthetic oligonucleotide
cuucgguacuuuaauucca

SEQ ID NO: 960572 - RNA, 19 nt, Artificial Sequence
  Description of Artificial Sequence: Synthetic oligonucleotide
ugcaccggcuucuuuacuu

SEQ ID NO: 960573 - RNA, 19 nt, Artificial Sequence
  Description of Artificial Sequence: Synthetic oligonucleotide
guacuagcuuucaaguaac

SEQ ID NO: 960574 - RNA, 19 nt, Artificial Sequence
  Description of Artificial Sequence: Synthetic oligonucleotide
aaccuggaacccaguguac

SEQ ID NO: 960575 - RNA, 19 nt, Artificial Sequence
  Description of Artificial Sequence: Synthetic oligonucleotide
auccgaugacucuaucaga

SEQ ID NO: 960576 - RNA, 19 nt, Artificial Sequence
  Description of Artificial Sequence: Synthetic oligonucleotide
cuggaacccaguguacucc

SEQ ID NO: 960577 - RNA, 19 nt, Artificial Sequence
  Description of Artificial Sequence: Synthetic oligonucleotide
gggguuuaauaagaccugg

SEQ ID NO: 960578 - RNA, 19 nt, Artificial Sequence
  Description of Artificial Sequence: Synthetic oligonucleotide
uaauuccccauuugugcua

SEQ ID NO: 960579 - RNA, 19 nt, Artificial Sequence
  Description of Artificial Sequence: Synthetic oligonucleotide
gguuuaauaagaccuggcu

SEQ ID NO: 960580 - RNA, 19 nt, Artificial Sequence
  Description of Artificial Sequence: Synthetic oligonucleotide
uccuaauucccugcagaac

SEQ ID NO: 960581 - RNA, 19 nt, Artificial Sequence
  Description of Artificial Sequence: Synthetic oligonucleotide
agggauugccaaauguaug

SEQ ID NO: 960582 - RNA, 19 nt, Artificial Sequence
  Description of Artificial Sequence: Synthetic oligonucleotide
ugagucagcggugaagguu

SEQ ID NO: 960583 - RNA, 19 nt, Artificial Sequence
  Description of Artificial Sequence: Synthetic oligonucleotide
aaccuucgaggcugaucag

SEQ ID NO: 960584 - RNA, 19 nt, Artificial Sequence
  Description of Artificial Sequence: Synthetic oligonucleotide
aguauccauagcauuuggu

SEQ ID NO: 960585 - RNA, 19 nt, Artificial Sequence
  Description of Artificial Sequence: Synthetic oligonucleotide
uccauacugucugcuauaa

SEQ ID NO: 960586 - RNA, 19 nt, Artificial Sequence
  Description of Artificial Sequence: Synthetic oligonucleotide
acuugagcguuggcuuugc

SEQ ID NO: 960587 - RNA, 19 nt, Artificial Sequence
  Description of Artificial Sequence: Synthetic oligonucleotide
caguucagugcuguacuag

SEQ ID NO: 960588 - RNA, 19 nt, Artificial Sequence
  Description of Artificial Sequence: Synthetic oligonucleotide
aggccguuuguguuuauuu

SEQ ID NO: 960589 - RNA, 19 nt, Artificial Sequence
  Description of Artificial Sequence: Synthetic oligonucleotide
uaaggucuagcagccugug

SEQ ID NO: 960590 - RNA, 19 nt, Artificial Sequence
  Description of Artificial Sequence: Synthetic oligonucleotide
uucaagggcccaagauagu

SEQ ID NO: 960591 - RNA, 19 nt, Artificial Sequence
  Description of Artificial Sequence: Synthetic oligonucleotide
ucgguacuuuaauuccagu

SEQ ID NO: 960592 - RNA, 19 nt, Artificial Sequence
  Description of Artificial Sequence: Synthetic oligonucleotide
gggacauccuaauucccug

SEQ ID NO: 960593 - RNA, 19 nt, Artificial Sequence
  Description of Artificial Sequence: Synthetic oligonucleotide
ucauccuaacagcuuucuu

SEQ ID NO: 960594 - RNA, 19 nt, Artificial Sequence
  Description of Artificial Sequence: Synthetic oligonucleotide
caucauccuaacagcuuuc

SEQ ID NO: 960595 - RNA, 19 nt, Artificial Sequence
  Description of Artificial Sequence: Synthetic oligonucleotide
gugcucuuuaaaagauuag

SEQ ID NO: 960596 - RNA, 19 nt, Artificial Sequence
  Description of Artificial Sequence: Synthetic oligonucleotide
gacaaaccaugugaccgac

SEQ ID NO: 960597 - RNA, 19 nt, Artificial Sequence
  Description of Artificial Sequence: Synthetic oligonucleotide
gaguggagaggcacaccgg

SEQ ID NO: 960598 - RNA, 19 nt, Artificial Sequence
  Description of Artificial Sequence: Synthetic oligonucleotide
cagaagauugguuggagau

SEQ ID NO: 960599 - RNA, 19 nt, Artificial Sequence
  Description of Artificial Sequence: Synthetic oligonucleotide
ggauccgaugacucuauca

SEQ ID NO: 960600 - RNA, 19 nt, Artificial Sequence
  Description of Artificial Sequence: Synthetic oligonucleotide
ugauugguugaugguucca

SEQ ID NO: 960601 - RNA, 19 nt, Artificial Sequence
  Description of Artificial Sequence: Synthetic oligonucleotide
aucauccuaacagcuuucu

SEQ ID NO: 960602 - RNA, 19 nt, Artificial Sequence
  Description of Artificial Sequence: Synthetic oligonucleotide
uacggauccgaugacucua

SEQ ID NO: 960603 - RNA, 19 nt, Artificial Sequence
  Description of Artificial Sequence: Synthetic oligonucleotide
agauugguuggagauguua

SEQ ID NO: 960604 - RNA, 19 nt, Artificial Sequence
  Description of Artificial Sequence: Synthetic oligonucleotide
aaacugagucagcggugaa

SEQ ID NO: 960605 - RNA, 19 nt, Artificial Sequence
  Description of Artificial Sequence: Synthetic oligonucleotide
uuccgucuugguauaucau

SEQ ID NO: 960606 - RNA, 19 nt, Artificial Sequence
  Description of Artificial Sequence: Synthetic oligonucleotide
uauuaaggucuagcagccu

SEQ ID NO: 960607 - RNA, 19 nt, Artificial Sequence
  Description of Artificial Sequence: Synthetic oligonucleotide
gccucgguaugauugguug

SEQ ID NO: 960608 - RNA, 19 nt, Artificial Sequence
  Description of Artificial Sequence: Synthetic oligonucleotide
gaggacuggguaauuguaa

SEQ ID NO: 960609 - RNA, 19 nt, Artificial Sequence
  Description of Artificial Sequence: Synthetic oligonucleotide
uccuggcuuucgaaucucu

SEQ ID NO: 960610 - RNA, 19 nt, Artificial Sequence
  Description of Artificial Sequence: Synthetic oligonucleotide
uuuugccuacggauccgau

SEQ ID NO: 960611 - RNA, 19 nt, Artificial Sequence
  Description of Artificial Sequence: Synthetic oligonucleotide
ggcucuucgaugaauuuca

SEQ ID NO: 960612 - RNA, 19 nt, Artificial Sequence
  Description of Artificial Sequence: Synthetic oligonucleotide
ugguuccagaagauugguu

SEQ ID NO: 960613 - RNA, 19 nt, Artificial Sequence
  Description of Artificial Sequence: Synthetic oligonucleotide
ggagaagguacuugcuuga

SEQ ID NO: 960614 - RNA, 19 nt, Artificial Sequence
  Description of Artificial Sequence: Synthetic oligonucleotide
cuuguuuguaaacugccuu

SEQ ID NO: 960615 - RNA, 19 nt, Artificial Sequence
  Description of Artificial Sequence: Synthetic oligonucleotide
ggugcucuuuaaaagauua

SEQ ID NO: 960616 - RNA, 19 nt, Artificial Sequence
  Description of Artificial Sequence: Synthetic oligonucleotide
gcuguacuagcuuucaagu

SEQ ID NO: 960617 - RNA, 19 nt, Artificial Sequence
  Description of Artificial Sequence: Synthetic oligonucleotide
guaaacugccuugcacaug

SEQ ID NO: 960618 - RNA, 19 nt, Artificial Sequence
  Description of Artificial Sequence: Synthetic oligonucleotide
cgaugacucuaucagauuc

SEQ ID NO: 960619 - RNA, 19 nt, Artificial Sequence
  Description of Artificial Sequence: Synthetic oligonucleotide
gaccaagggccucgguaug

SEQ ID NO: 960620 - RNA, 19 nt, Artificial Sequence
  Description of Artificial Sequence: Synthetic oligonucleotide
cuuugcacuauugcucaca

SEQ ID NO: 960621 - RNA, 19 nt, Artificial Sequence
  Description of Artificial Sequence: Synthetic oligonucleotide
gguccuuucccuccgaugu

SEQ ID NO: 960622 - RNA, 19 nt, Artificial Sequence
  Description of Artificial Sequence: Synthetic oligonucleotide
cuggguaauuguaaggcau

SEQ ID NO: 960623 - RNA, 19 nt, Artificial Sequence
  Description of Artificial Sequence: Synthetic oligonucleotide
aggugcacccaucauccua

SEQ ID NO: 960624 - RNA, 19 nt, Artificial Sequence
  Description of Artificial Sequence: Synthetic oligonucleotide
gguugauuugauuggcucu

SEQ ID NO: 960625 - RNA, 19 nt, Artificial Sequence
  Description of Artificial Sequence: Synthetic oligonucleotide
ggguuuaauaagaccuggc

SEQ ID NO: 960626 - RNA, 19 nt, Artificial Sequence
  Description of Artificial Sequence: Synthetic oligonucleotide
ugcuauuaauaugguugau

SEQ ID NO: 960627 - RNA, 19 nt, Artificial Sequence
  Description of Artificial Sequence: Synthetic oligonucleotide
auuugcgggugcucuuuaa

SEQ ID NO: 960628 - RNA, 19 nt, Artificial Sequence
  Description of Artificial Sequence: Synthetic oligonucleotide
ccuacggauccgaugacuc

SEQ ID NO: 960629 - RNA, 19 nt, Artificial Sequence
  Description of Artificial Sequence: Synthetic oligonucleotide
cuguacuagcuuucaagua

SEQ ID NO: 960630 - RNA, 19 nt, Artificial Sequence
  Description of Artificial Sequence: Synthetic oligonucleotide
guuugaggagauuuccuuu

SEQ ID NO: 960631 - RNA, 19 nt, Artificial Sequence
  Description of Artificial Sequence: Synthetic oligonucleotide
cacuacgggaugagaugug

SEQ ID NO: 960632 - RNA, 19 nt, Artificial Sequence
  Description of Artificial Sequence: Synthetic oligonucleotide
gguaauuguaaggcaucac

SEQ ID NO: 960633 - RNA, 19 nt, Artificial Sequence
  Description of Artificial Sequence: Synthetic oligonucleotide
caaaccaugugaccgacuu

SEQ ID NO: 960634 - RNA, 19 nt, Artificial Sequence
  Description of Artificial Sequence: Synthetic oligonucleotide
uucccuccgaugugacugu

SEQ ID NO: 960635 - RNA, 19 nt, Artificial Sequence
  Description of Artificial Sequence: Synthetic oligonucleotide
ugccgccgaccucucaaga

SEQ ID NO: 960636 - RNA, 19 nt, Artificial Sequence
  Description of Artificial Sequence: Synthetic oligonucleotide
cuuuccuaugugccauuga

SEQ ID NO: 960637 - RNA, 19 nt, Artificial Sequence
  Description of Artificial Sequence: Synthetic oligonucleotide
gcgggugcucuuuaaaaga

SEQ ID NO: 960638 - RNA, 19 nt, Artificial Sequence
  Description of Artificial Sequence: Synthetic oligonucleotide
ugccuacggauccgaugac

SEQ ID NO: 960639 - RNA, 19 nt, Artificial Sequence
  Description of Artificial Sequence: Synthetic oligonucleotide
cuccgaugugacuguucac

SEQ ID NO: 960640 - RNA, 19 nt, Artificial Sequence
  Description of Artificial Sequence: Synthetic oligonucleotide
accgacuucgguacuuuaa

SEQ ID NO: 960641 - RNA, 19 nt, Artificial Sequence
  Description of Artificial Sequence: Synthetic oligonucleotide
ggguaauuguaaggcauca

SEQ ID NO: 960642 - RNA, 19 nt, Artificial Sequence
  Description of Artificial Sequence: Synthetic oligonucleotide
guaugcaaccuucgaggcu

SEQ ID NO: 960643 - RNA, 19 nt, Artificial Sequence
  Description of Artificial Sequence: Synthetic oligonucleotide
uaggugcacccaucauccu

SEQ ID NO: 960644 - RNA, 19 nt, Artificial Sequence
  Description of Artificial Sequence: Synthetic oligonucleotide
accggcgccucuucgggau

SEQ ID NO: 960645 - RNA, 19 nt, Artificial Sequence
  Description of Artificial Sequence: Synthetic oligonucleotide
cuuucgaaucucuuucauu

SEQ ID NO: 960646 - RNA, 19 nt, Artificial Sequence
  Description of Artificial Sequence: Synthetic oligonucleotide
ccguuuguguuuauuuuga

SEQ ID NO: 960647 - RNA, 19 nt, Artificial Sequence
  Description of Artificial Sequence: Synthetic oligonucleotide
ccucucaagaguggagagg

SEQ ID NO: 960648 - RNA, 19 nt, Artificial Sequence
  Description of Artificial Sequence: Synthetic oligonucleotide
augucugaugaaagcuggu

SEQ ID NO: 960649 - RNA, 19 nt, Artificial Sequence
  Description of Artificial Sequence: Synthetic oligonucleotide
accaagggccucgguauga

SEQ ID NO: 960650 - RNA, 19 nt, Artificial Sequence
  Description of Artificial Sequence: Synthetic oligonucleotide
cgaugaauuucauccaaga

SEQ ID NO: 960651 - RNA, 19 nt, Artificial Sequence
  Description of Artificial Sequence: Synthetic oligonucleotide
gccgccgaccucucaagag

SEQ ID NO: 960652 - RNA, 19 nt, Artificial Sequence
  Description of Artificial Sequence: Synthetic oligonucleotide
gugaagauucuuucauauu

SEQ ID NO: 960653 - RNA, 19 nt, Artificial Sequence
  Description of Artificial Sequence: Synthetic oligonucleotide
ccgucuugguauaucauaa

SEQ ID NO: 960654 - RNA, 19 nt, Artificial Sequence
  Description of Artificial Sequence: Synthetic oligonucleotide
augcaccggcuucuuuacu

SEQ ID NO: 960655 - RNA, 19 nt, Artificial Sequence
  Description of Artificial Sequence: Synthetic oligonucleotide
cgucuugguauaucauaag

SEQ ID NO: 960656 - RNA, 19 nt, Artificial Sequence
  Description of Artificial Sequence: Synthetic oligonucleotide
ggugcacccaucauccuaa

SEQ ID NO: 960657 - RNA, 19 nt, Artificial Sequence
  Description of Artificial Sequence: Synthetic oligonucleotide
ccuucgaggcugaucagga

SEQ ID NO: 960658 - RNA, 19 nt, Artificial Sequence
  Description of Artificial Sequence: Synthetic oligonucleotide
ugaccgacuucgguacuuu

SEQ ID NO: 960659 - RNA, 19 nt, Artificial Sequence
  Description of Artificial Sequence: Synthetic oligonucleotide
cuguaacugaguccauacu

SEQ ID NO: 960660 - RNA, 19 nt, Artificial Sequence
  Description of Artificial Sequence: Synthetic oligonucleotide
ccccauuugugcuauaggu

SEQ ID NO: 960661 - RNA, 19 nt, Artificial Sequence
  Description of Artificial Sequence: Synthetic oligonucleotide
gauuggcucuucgaugaau

SEQ ID NO: 960662 - RNA, 19 nt, Artificial Sequence
  Description of Artificial Sequence: Synthetic oligonucleotide
gugaaauaaguggccacau

SEQ ID NO: 960663 - RNA, 19 nt, Artificial Sequence
  Description of Artificial Sequence: Synthetic oligonucleotide
ucgggauuccuugcauguu

SEQ ID NO: 960664 - RNA, 19 nt, Artificial Sequence
  Description of Artificial Sequence: Synthetic oligonucleotide
ccucuucgggauuccuugc

SEQ ID NO: 960665 - RNA, 19 nt, Artificial Sequence
  Description of Artificial Sequence: Synthetic oligonucleotide
cauuggcucacagucugua

SEQ ID NO: 960666 - RNA, 19 nt, Artificial Sequence
  Description of Artificial Sequence: Synthetic oligonucleotide
aagauugguuggagauguu

SEQ ID NO: 960667 - RNA, 19 nt, Artificial Sequence
  Description of Artificial Sequence: Synthetic oligonucleotide
cuacggauccgaugacucu

SEQ ID NO: 960668 - RNA, 19 nt, Artificial Sequence
  Description of Artificial Sequence: Synthetic oligonucleotide
accuuuccuaugugccauu

SEQ ID NO: 960669 - RNA, 19 nt, Artificial Sequence
  Description of Artificial Sequence: Synthetic oligonucleotide
cacauauaccugccaacau

SEQ ID NO: 960670 - RNA, 19 nt, Artificial Sequence
  Description of Artificial Sequence: Synthetic oligonucleotide
gaccgacuucgguacuuua

SEQ ID NO: 960671 - RNA, 19 nt, Artificial Sequence
  Description of Artificial Sequence: Synthetic oligonucleotide
cucgguaugauugguugau

SEQ ID NO: 960672 - RNA, 19 nt, Artificial Sequence
  Description of Artificial Sequence: Synthetic oligonucleotide
cacuguaacugaguccaua

SEQ ID NO: 960673 - RNA, 19 nt, Artificial Sequence
  Description of Artificial Sequence: Synthetic oligonucleotide
ggaggacuggguaauugua

SEQ ID NO: 960674 - RNA, 19 nt, Artificial Sequence
  Description of Artificial Sequence: Synthetic oligonucleotide
ggaugaccaaguucauuau

SEQ ID NO: 960675 - RNA, 19 nt, Artificial Sequence
  Description of Artificial Sequence: Synthetic oligonucleotide
cgaccucucaagaguggag

SEQ ID NO: 960676 - RNA, 19 nt, Artificial Sequence
  Description of Artificial Sequence: Synthetic oligonucleotide
gccgaccucucaagagugg

SEQ ID NO: 960677 - RNA, 19 nt, Artificial Sequence
  Description of Artificial Sequence: Synthetic oligonucleotide
cuuggcucaucaugauuuu

SEQ ID NO: 960678 - RNA, 19 nt, Artificial Sequence
  Description of Artificial Sequence: Synthetic oligonucleotide
caguaaagugaagauucuu

SEQ ID NO: 960679 - RNA, 19 nt, Artificial Sequence
  Description of Artificial Sequence: Synthetic oligonucleotide
caugggugcaggcgguccu

SEQ ID NO: 960680 - RNA, 19 nt, Artificial Sequence
  Description of Artificial Sequence: Synthetic oligonucleotide
gcguuggcuuugcuuugug

SEQ ID NO: 960681 - RNA, 19 nt, Artificial Sequence
  Description of Artificial Sequence: Synthetic oligonucleotide
caguguacuccuucauauu

SEQ ID NO: 960682 - RNA, 19 nt, Artificial Sequence
  Description of Artificial Sequence: Synthetic oligonucleotide
caucuacugcugaaucauu

SEQ ID NO: 960683 - RNA, 19 nt, Artificial Sequence
  Description of Artificial Sequence: Synthetic oligonucleotide
cgccgaccucucaagagug

SEQ ID NO: 960684 - RNA, 19 nt, Artificial Sequence
  Description of Artificial Sequence: Synthetic oligonucleotide
auuccccauuugugcuaua

SEQ ID NO: 960685 - RNA, 19 nt, Artificial Sequence
  Description of Artificial Sequence: Synthetic oligonucleotide
augcaaccuucgaggcuga

SEQ ID NO: 960686 - RNA, 19 nt, Artificial Sequence
  Description of Artificial Sequence: Synthetic oligonucleotide
gaaggaggacuggguaauu

SEQ ID NO: 960687 - RNA, 19 nt, Artificial Sequence
  Description of Artificial Sequence: Synthetic oligonucleotide
ccaacauguuugaggagau

SEQ ID NO: 960688 - RNA, 19 nt, Artificial Sequence
  Description of Artificial Sequence: Synthetic oligonucleotide
ucccuccgaugugacuguu

SEQ ID NO: 960689 - RNA, 19 nt, Artificial Sequence
  Description of Artificial Sequence: Synthetic oligonucleotide
cuugagcguuggcuuugcu

SEQ ID NO: 960690 - RNA, 19 nt, Artificial Sequence
  Description of Artificial Sequence: Synthetic oligonucleotide
ccgaccucucaagagugga

SEQ ID NO: 960691 - RNA, 19 nt, Artificial Sequence
  Description of Artificial Sequence: Synthetic oligonucleotide
ccgacuucgguacuuuaau

SEQ ID NO: 960692 - RNA, 19 nt, Artificial Sequence
  Description of Artificial Sequence: Synthetic oligonucleotide
gccuacggauccgaugacu

SEQ ID NO: 960693 - RNA, 19 nt, Artificial Sequence
  Description of Artificial Sequence: Synthetic oligonucleotide
caagggccucgguaugauu

SEQ ID NO: 960694 - RNA, 19 nt, Artificial Sequence
  Description of Artificial Sequence: Synthetic oligonucleotide
ccgccgaccucucaagagu

SEQ ID NO: 960695 - RNA, 19 nt, Artificial Sequence
  Description of Artificial Sequence: Synthetic oligonucleotide
gggugcucuuuaaaagauu

SEQ ID NO: 960696 - RNA, 19 nt, Artificial Sequence
  Description of Artificial Sequence: Synthetic oligonucleotide
caggccguuuguguuuauu

SEQ ID NO: 960697 - RNA, 19 nt, Artificial Sequence
  Description of Artificial Sequence: Synthetic oligonucleotide
gcaaugcaccggcuucuuu

SEQ ID NO: 960698 - RNA, 19 nt, Artificial Sequence
  Description of Artificial Sequence: Synthetic oligonucleotide
cgggauuccuugcauguuu

SEQ ID NO: 960699 - RNA, 19 nt, Artificial Sequence
  Description of Artificial Sequence: Synthetic oligonucleotide
gggccucgguaugauuggu

SEQ ID NO: 960700 - RNA, 19 nt, Artificial Sequence
  Description of Artificial Sequence: Synthetic oligonucleotide
ggccucgguaugauugguu

SEQ ID NO: 960701 - RNA, 19 nt, Artificial Sequence
  Description of Artificial Sequence: Synthetic oligonucleotide
cggcgccucuucgggauuc

SEQ ID NO: 960702 - RNA, 19 nt, Artificial Sequence
  Description of Artificial Sequence: Synthetic oligonucleotide
ccaagggccucgguaugau

SEQ ID NO: 960703 - RNA, 19 nt, Artificial Sequence
  Description of Artificial Sequence: Synthetic oligonucleotide
gcgccucuucgggauuccu

SEQ ID NO: 960704 - RNA, 19 nt, Artificial Sequence
  Description of Artificial Sequence: Synthetic oligonucleotide
cgccucuucgggauuccuu

SEQ ID NO: 960705 - RNA, 19 nt, Artificial Sequence
  Description of Artificial Sequence: Synthetic oligonucleotide
ccggcgccucuucgggauu

SEQ ID NO: 960706 - RNA, 19 nt, Artificial Sequence
  Description of Artificial Sequence: Synthetic oligonucleotide
uguaacaccagaaagaucu

SEQ ID NO: 960707 - RNA, 19 nt, Artificial Sequence
  Description of Artificial Sequence: Synthetic oligonucleotide
uuaguauuagccaaaagag

SEQ ID NO: 960708 - RNA, 19 nt, Artificial Sequence
  Description of Artificial Sequence: Synthetic oligonucleotide
aucacuauguuuuaaagac

SEQ ID NO: 960709 - RNA, 19 nt, Artificial Sequence
  Description of Artificial Sequence: Synthetic oligonucleotide
gacaaggacaguuaaaucg

SEQ ID NO: 960710 - RNA, 19 nt, Artificial Sequence
  Description of Artificial Sequence: Synthetic oligonucleotide
aaaucaugcaguuagguca

SEQ ID NO: 960711 - RNA, 19 nt, Artificial Sequence
  Description of Artificial Sequence: Synthetic oligonucleotide
ucugauuugagguaaaacc

SEQ ID NO: 960712 - RNA, 19 nt, Artificial Sequence
  Description of Artificial Sequence: Synthetic oligonucleotide
uuagagguagauaaaacag

SEQ ID NO: 960713 - RNA, 19 nt, Artificial Sequence
  Description of Artificial Sequence: Synthetic oligonucleotide
uuaaacacggcucacaaga

SEQ ID NO: 960714 - RNA, 19 nt, Artificial Sequence
  Description of Artificial Sequence: Synthetic oligonucleotide
ugagguaaaaccauuaaac

SEQ ID NO: 960715 - RNA, 19 nt, Artificial Sequence
  Description of Artificial Sequence: Synthetic oligonucleotide
uguguuaccauuuugaaua

SEQ ID NO: 960716 - RNA, 19 nt, Artificial Sequence
  Description of Artificial Sequence: Synthetic oligonucleotide
aauaccauagcuuuuggaa

SEQ ID NO: 960717 - RNA, 19 nt, Artificial Sequence
  Description of Artificial Sequence: Synthetic oligonucleotide
aagcucuacacuuugaaug

SEQ ID NO: 960718 - RNA, 19 nt, Artificial Sequence
  Description of Artificial Sequence: Synthetic oligonucleotide
aaucaaauugcaauucggc

SEQ ID NO: 960719 - RNA, 19 nt, Artificial Sequence
  Description of Artificial Sequence: Synthetic oligonucleotide
uauuaacugacccaaacac

SEQ ID NO: 960720 - RNA, 19 nt, Artificial Sequence
  Description of Artificial Sequence: Synthetic oligonucleotide
acuauuuaacuacaauuac

SEQ ID NO: 960721 - RNA, 19 nt, Artificial Sequence
  Description of Artificial Sequence: Synthetic oligonucleotide
aucgaaaaccuucagcucg

SEQ ID NO: 960722 - RNA, 19 nt, Artificial Sequence
  Description of Artificial Sequence: Synthetic oligonucleotide
uuugaaaccucacuaguug

SEQ ID NO: 960723 - RNA, 19 nt, Artificial Sequence
  Description of Artificial Sequence: Synthetic oligonucleotide
aaaacuagaaguugauccu

SEQ ID NO: 960724 - RNA, 19 nt, Artificial Sequence
  Description of Artificial Sequence: Synthetic oligonucleotide
uuauccaggcaaaaugugg

SEQ ID NO: 960725 - RNA, 19 nt, Artificial Sequence
  Description of Artificial Sequence: Synthetic oligonucleotide
uggucaaauaaccacauaa

SEQ ID NO: 960726 - RNA, 19 nt, Artificial Sequence
  Description of Artificial Sequence: Synthetic oligonucleotide
auaguuuguggaaauaccc

SEQ ID NO: 960727 - RNA, 19 nt, Artificial Sequence
  Description of Artificial Sequence: Synthetic oligonucleotide
aauagauaugcguccacug

SEQ ID NO: 960728 - RNA, 19 nt, Artificial Sequence
  Description of Artificial Sequence: Synthetic oligonucleotide
ugauacuugaaagugaacu

SEQ ID NO: 960729 - RNA, 19 nt, Artificial Sequence
  Description of Artificial Sequence: Synthetic oligonucleotide
aauaguuuguguuaccauu

SEQ ID NO: 960730 - RNA, 19 nt, Artificial Sequence
  Description of Artificial Sequence: Synthetic oligonucleotide
aauuuuaccagugucacua

SEQ ID NO: 960731 - RNA, 19 nt, Artificial Sequence
  Description of Artificial Sequence: Synthetic oligonucleotide
aaaucaaauugcaauucgg

SEQ ID NO: 960732 - RNA, 19 nt, Artificial Sequence
  Description of Artificial Sequence: Synthetic oligonucleotide
aacaccagaaagaucuacc

SEQ ID NO: 960733 - RNA, 19 nt, Artificial Sequence
  Description of Artificial Sequence: Synthetic oligonucleotide
ugaagugacuacaauuuug

SEQ ID NO: 960734 - RNA, 19 nt, Artificial Sequence
  Description of Artificial Sequence: Synthetic oligonucleotide
aguugauccuucuucacuc

SEQ ID NO: 960735 - RNA, 19 nt, Artificial Sequence
  Description of Artificial Sequence: Synthetic oligonucleotide
acucuuaguacauuuacca

SEQ ID NO: 960736 - RNA, 19 nt, Artificial Sequence
  Description of Artificial Sequence: Synthetic oligonucleotide
uggauuugugacacaaacg

SEQ ID NO: 960737 - RNA, 19 nt, Artificial Sequence
  Description of Artificial Sequence: Synthetic oligonucleotide
cuaguuguucauauaauac

SEQ ID NO: 960738 - RNA, 19 nt, Artificial Sequence
  Description of Artificial Sequence: Synthetic oligonucleotide
aagaccuagacacuugacu

SEQ ID NO: 960739 - RNA, 19 nt, Artificial Sequence
  Description of Artificial Sequence: Synthetic oligonucleotide
aguguuuucgcauucuuca

SEQ ID NO: 960740 - RNA, 19 nt, Artificial Sequence
  Description of Artificial Sequence: Synthetic oligonucleotide
uguuugucccaauuaagcc

SEQ ID NO: 960741 - RNA, 19 nt, Artificial Sequence
  Description of Artificial Sequence: Synthetic oligonucleotide
auaugcguccacugaaugc

SEQ ID NO: 960742 - RNA, 19 nt, Artificial Sequence
  Description of Artificial Sequence: Synthetic oligonucleotide
uuuaccagugucacuagug

SEQ ID NO: 960743 - RNA, 19 nt, Artificial Sequence
  Description of Artificial Sequence: Synthetic oligonucleotide
ugacuauuuaacuacaauu

SEQ ID NO: 960744 - RNA, 19 nt, Artificial Sequence
  Description of Artificial Sequence: Synthetic oligonucleotide
uuuguuacuggacuacucu

SEQ ID NO: 960745 - RNA, 19 nt, Artificial Sequence
  Description of Artificial Sequence: Synthetic oligonucleotide
aguauuauccaagaccuag

SEQ ID NO: 960746 - RNA, 19 nt, Artificial Sequence
  Description of Artificial Sequence: Synthetic oligonucleotide
guaucaugcauucuaagac

SEQ ID NO: 960747 - RNA, 19 nt, Artificial Sequence
  Description of Artificial Sequence: Synthetic oligonucleotide
uagagucuacuuaagcuag

SEQ ID NO: 960748 - RNA, 19 nt, Artificial Sequence
  Description of Artificial Sequence: Synthetic oligonucleotide
acaaacguaucaugcauuc

SEQ ID NO: 960749 - RNA, 19 nt, Artificial Sequence
  Description of Artificial Sequence: Synthetic oligonucleotide
ucuaaauauugaaaucacu

SEQ ID NO: 960750 - RNA, 19 nt, Artificial Sequence
  Description of Artificial Sequence: Synthetic oligonucleotide
ucacuagugauauuaauua

SEQ ID NO: 960751 - RNA, 19 nt, Artificial Sequence
  Description of Artificial Sequence: Synthetic oligonucleotide
cucgggaaaaucaaauugc

SEQ ID NO: 960752 - RNA, 19 nt, Artificial Sequence
  Description of Artificial Sequence: Synthetic oligonucleotide
aaacguaucaugcauucua

SEQ ID NO: 960753 - RNA, 19 nt, Artificial Sequence
  Description of Artificial Sequence: Synthetic oligonucleotide
uuuugaagugacuacaauu

SEQ ID NO: 960754 - RNA, 19 nt, Artificial Sequence
  Description of Artificial Sequence: Synthetic oligonucleotide
acucgaauguuacaaauga

SEQ ID NO: 960755 - RNA, 19 nt, Artificial Sequence
  Description of Artificial Sequence: Synthetic oligonucleotide
aauaaccacauaaccauug

SEQ ID NO: 960756 - RNA, 19 nt, Artificial Sequence
  Description of Artificial Sequence: Synthetic oligonucleotide
ugaaucaauaccauagcuu

SEQ ID NO: 960757 - RNA, 19 nt, Artificial Sequence
  Description of Artificial Sequence: Synthetic oligonucleotide
auugcaauucggcuuguuc

SEQ ID NO: 960758 - RNA, 19 nt, Artificial Sequence
  Description of Artificial Sequence: Synthetic oligonucleotide
uuaacaguugcauggcagc

SEQ ID NO: 960759 - RNA, 19 nt, Artificial Sequence
  Description of Artificial Sequence: Synthetic oligonucleotide
ucgaauguuacaaaugauu

SEQ ID NO: 960760 - RNA, 19 nt, Artificial Sequence
  Description of Artificial Sequence: Synthetic oligonucleotide
aaagaccccguauggcccc

SEQ ID NO: 960761 - RNA, 19 nt, Artificial Sequence
  Description of Artificial Sequence: Synthetic oligonucleotide
uaucaugcauucuaagaca

SEQ ID NO: 960762 - RNA, 19 nt, Artificial Sequence
  Description of Artificial Sequence: Synthetic oligonucleotide
aagucgcgccgcuugaggc

SEQ ID NO: 960763 - RNA, 19 nt, Artificial Sequence
  Description of Artificial Sequence: Synthetic oligonucleotide
gaguuugaaaccucacuag

SEQ ID NO: 960764 - RNA, 19 nt, Artificial Sequence
  Description of Artificial Sequence: Synthetic oligonucleotide
uguuacaaaugauuuugca

SEQ ID NO: 960765 - RNA, 19 nt, Artificial Sequence
  Description of Artificial Sequence: Synthetic oligonucleotide
uacaaugacuauuuaacua

SEQ ID NO: 960766 - RNA, 19 nt, Artificial Sequence
  Description of Artificial Sequence: Synthetic oligonucleotide
aaugcgcggguccuggacg

SEQ ID NO: 960767 - RNA, 19 nt, Artificial Sequence
  Description of Artificial Sequence: Synthetic oligonucleotide
uuaagcuagguuuaguauu

SEQ ID NO: 960768 - RNA, 19 nt, Artificial Sequence
  Description of Artificial Sequence: Synthetic oligonucleotide
ucuuaguacauuuaccauu

SEQ ID NO: 960769 - RNA, 19 nt, Artificial Sequence
  Description of Artificial Sequence: Synthetic oligonucleotide
aagacagacagacucgaau

SEQ ID NO: 960770 - RNA, 19 nt, Artificial Sequence
  Description of Artificial Sequence: Synthetic oligonucleotide
aaguugauccuucuucacu

SEQ ID NO: 960771 - RNA, 19 nt, Artificial Sequence
  Description of Artificial Sequence: Synthetic oligonucleotide
uugcaauucggcuuguucu

SEQ ID NO: 960772 - RNA, 19 nt, Artificial Sequence
  Description of Artificial Sequence: Synthetic oligonucleotide
uuugaauaguuuguguuac

SEQ ID NO: 960773 - RNA, 19 nt, Artificial Sequence
  Description of Artificial Sequence: Synthetic oligonucleotide
uugagguaaaaccauuaaa

SEQ ID NO: 960774 - RNA, 19 nt, Artificial Sequence
  Description of Artificial Sequence: Synthetic oligonucleotide
ucuaccuguuaccuuagga

SEQ ID NO: 960775 - RNA, 19 nt, Artificial Sequence
  Description of Artificial Sequence: Synthetic oligonucleotide
uuugagguaaaaccauuaa

SEQ ID NO: 960776 - RNA, 19 nt, Artificial Sequence
  Description of Artificial Sequence: Synthetic oligonucleotide
aaggacaguuaaaucggcc

SEQ ID NO: 960777 - RNA, 19 nt, Artificial Sequence
  Description of Artificial Sequence: Synthetic oligonucleotide
ucacucuuaguacauuuac

SEQ ID NO: 960778 - RNA, 19 nt, Artificial Sequence
  Description of Artificial Sequence: Synthetic oligonucleotide
ugcuguuuuagucccaacu

SEQ ID NO: 960779 - RNA, 19 nt, Artificial Sequence
  Description of Artificial Sequence: Synthetic oligonucleotide
cuaugugugagagaguuac

SEQ ID NO: 960780 - RNA, 19 nt, Artificial Sequence
  Description of Artificial Sequence: Synthetic oligonucleotide
uugaauguucagaugcugu

SEQ ID NO: 960781 - RNA, 19 nt, Artificial Sequence
  Description of Artificial Sequence: Synthetic oligonucleotide
aacacgggaaauguguuug

SEQ ID NO: 960782 - RNA, 19 nt, Artificial Sequence
  Description of Artificial Sequence: Synthetic oligonucleotide
cuuuagagguagauaaaac

SEQ ID NO: 960783 - RNA, 19 nt, Artificial Sequence
  Description of Artificial Sequence: Synthetic oligonucleotide
uuauacaacuguagagucu

SEQ ID NO: 960784 - RNA, 19 nt, Artificial Sequence
  Description of Artificial Sequence: Synthetic oligonucleotide
acaaggacaguuaaaucgg

SEQ ID NO: 960785 - RNA, 19 nt, Artificial Sequence
  Description of Artificial Sequence: Synthetic oligonucleotide
gagauucccagucacucag

SEQ ID NO: 960786 - RNA, 19 nt, Artificial Sequence
  Description of Artificial Sequence: Synthetic oligonucleotide
uguuuuagucccaacuguc

SEQ ID NO: 960787 - RNA, 19 nt, Artificial Sequence
  Description of Artificial Sequence: Synthetic oligonucleotide
uuaccagugucacuaguga

SEQ ID NO: 960788 - RNA, 19 nt, Artificial Sequence
  Description of Artificial Sequence: Synthetic oligonucleotide
ugacuacuacuuuugaagu

SEQ ID NO: 960789 - RNA, 19 nt, Artificial Sequence
  Description of Artificial Sequence: Synthetic oligonucleotide
aguauuagccaaaagagua

SEQ ID NO: 960790 - RNA, 19 nt, Artificial Sequence
  Description of Artificial Sequence: Synthetic oligonucleotide
aaucggcccagaaacacgg

SEQ ID NO: 960791 - RNA, 19 nt, Artificial Sequence
  Description of Artificial Sequence: Synthetic oligonucleotide
aauucggcuuguucuaacu

SEQ ID NO: 960792 - RNA, 19 nt, Artificial Sequence
  Description of Artificial Sequence: Synthetic oligonucleotide
uagguuuaguauuagccaa

SEQ ID NO: 960793 - RNA, 19 nt, Artificial Sequence
  Description of Artificial Sequence: Synthetic oligonucleotide
ucgaaaaccuucagcucgg

SEQ ID NO: 960794 - RNA, 19 nt, Artificial Sequence
  Description of Artificial Sequence: Synthetic oligonucleotide
uuucucgggaaaaucaaau

SEQ ID NO: 960795 - RNA, 19 nt, Artificial Sequence
  Description of Artificial Sequence: Synthetic oligonucleotide
aaagcucuacacuuugaau

SEQ ID NO: 960796 - RNA, 19 nt, Artificial Sequence
  Description of Artificial Sequence: Synthetic oligonucleotide
aaauagauaugcguccacu

SEQ ID NO: 960797 - RNA, 19 nt, Artificial Sequence
  Description of Artificial Sequence: Synthetic oligonucleotide
uguuuucgcauucuucaga

SEQ ID NO: 960798 - RNA, 19 nt, Artificial Sequence
  Description of Artificial Sequence: Synthetic oligonucleotide
aguuugaaaccucacuagu

SEQ ID NO: 960799 - RNA, 19 nt, Artificial Sequence
  Description of Artificial Sequence: Synthetic oligonucleotide
agagaguuacuguaugugu

SEQ ID NO: 960800 - RNA, 19 nt, Artificial Sequence
  Description of Artificial Sequence: Synthetic oligonucleotide
acuaguuguucauauaaua

SEQ ID NO: 960801 - RNA, 19 nt, Artificial Sequence
  Description of Artificial Sequence: Synthetic oligonucleotide
uuugaauaguuuguggaaa

SEQ ID NO: 960802 - RNA, 19 nt, Artificial Sequence
  Description of Artificial Sequence: Synthetic oligonucleotide
uaagcuagguuuaguauua

SEQ ID NO: 960803 - RNA, 19 nt, Artificial Sequence
  Description of Artificial Sequence: Synthetic oligonucleotide
cauaagaaugcgcgggucc

SEQ ID NO: 960804 - RNA, 19 nt, Artificial Sequence
  Description of Artificial Sequence: Synthetic oligonucleotide
aaaugaggaaaaugggcuu

SEQ ID NO: 960805 - RNA, 19 nt, Artificial Sequence
  Description of Artificial Sequence: Synthetic oligonucleotide
ucacuauguuuuaaagaca

SEQ ID NO: 960806 - RNA, 19 nt, Artificial Sequence
  Description of Artificial Sequence: Synthetic oligonucleotide
cuagguuuaguauuagcca

SEQ ID NO: 960807 - RNA, 19 nt, Artificial Sequence
  Description of Artificial Sequence: Synthetic oligonucleotide
auuaacaguugcauggcag

SEQ ID NO: 960808 - RNA, 19 nt, Artificial Sequence
  Description of Artificial Sequence: Synthetic oligonucleotide
cuaacuacagauagaagaa

SEQ ID NO: 960809 - RNA, 19 nt, Artificial Sequence
  Description of Artificial Sequence: Synthetic oligonucleotide
agcacacaccuauuccugc

SEQ ID NO: 960810 - RNA, 19 nt, Artificial Sequence
  Description of Artificial Sequence: Synthetic oligonucleotide
uuaaaucggcccagaaaca

SEQ ID NO: 960811 - RNA, 19 nt, Artificial Sequence
  Description of Artificial Sequence: Synthetic oligonucleotide
auuugugacacaaacguau

SEQ ID NO: 960812 - RNA, 19 nt, Artificial Sequence
  Description of Artificial Sequence: Synthetic oligonucleotide
uagauaugcguccacugaa

SEQ ID NO: 960813 - RNA, 19 nt, Artificial Sequence
  Description of Artificial Sequence: Synthetic oligonucleotide
agauuugcuuuagagguag

SEQ ID NO: 960814 - RNA, 19 nt, Artificial Sequence
  Description of Artificial Sequence: Synthetic oligonucleotide
gaaucaauaccauagcuuu

SEQ ID NO: 960815 - RNA, 19 nt, Artificial Sequence
  Description of Artificial Sequence: Synthetic oligonucleotide
gauaugcguccacugaaug

SEQ ID NO: 960816 - RNA, 19 nt, Artificial Sequence
  Description of Artificial Sequence: Synthetic oligonucleotide
gacuacuacuuuugaagug

SEQ ID NO: 960817 - RNA, 19 nt, Artificial Sequence
  Description of Artificial Sequence: Synthetic oligonucleotide
guuugucccaauuaagcca

SEQ ID NO: 960818 - RNA, 19 nt, Artificial Sequence
  Description of Artificial Sequence: Synthetic oligonucleotide
aacuacagauagaagaaaa

SEQ ID NO: 960819 - RNA, 19 nt, Artificial Sequence
  Description of Artificial Sequence: Synthetic oligonucleotide
agaucuaccuguuaccuua

SEQ ID NO: 960820 - RNA, 19 nt, Artificial Sequence
  Description of Artificial Sequence: Synthetic oligonucleotide
ucggcaagggugaagucgc

SEQ ID NO: 960821 - RNA, 19 nt, Artificial Sequence
  Description of Artificial Sequence: Synthetic oligonucleotide
auacccaagucuuuucucu

SEQ ID NO: 960822 - RNA, 19 nt, Artificial Sequence
  Description of Artificial Sequence: Synthetic oligonucleotide
acuuaagcuagguuuagua

SEQ ID NO: 960823 - RNA, 19 nt, Artificial Sequence
  Description of Artificial Sequence: Synthetic oligonucleotide
cacucuuaguacauuuacc

SEQ ID NO: 960824 - RNA, 19 nt, Artificial Sequence
  Description of Artificial Sequence: Synthetic oligonucleotide
aguuaaaucggcccagaaa

SEQ ID NO: 960825 - RNA, 19 nt, Artificial Sequence
  Description of Artificial Sequence: Synthetic oligonucleotide
ucuuucucgggaaaaucaa

SEQ ID NO: 960826 - RNA, 19 nt, Artificial Sequence
  Description of Artificial Sequence: Synthetic oligonucleotide
uuuuguuacuggacuacuc

SEQ ID NO: 960827 - RNA, 19 nt, Artificial Sequence
  Description of Artificial Sequence: Synthetic oligonucleotide
cuacaauuacaagaguuug

SEQ ID NO: 960828 - RNA, 19 nt, Artificial Sequence
  Description of Artificial Sequence: Synthetic oligonucleotide
uagugauauuaauuaacaa

SEQ ID NO: 960829 - RNA, 19 nt, Artificial Sequence
  Description of Artificial Sequence: Synthetic oligonucleotide
uguuaccuuaggaauguau

SEQ ID NO: 960830 - RNA, 19 nt, Artificial Sequence
  Description of Artificial Sequence: Synthetic oligonucleotide
acggcucacaagaaaauac

SEQ ID NO: 960831 - RNA, 19 nt, Artificial Sequence
  Description of Artificial Sequence: Synthetic oligonucleotide
aagaugcagaggccgagca

SEQ ID NO: 960832 - RNA, 19 nt, Artificial Sequence
  Description of Artificial Sequence: Synthetic oligonucleotide
uuugugacacaaacguauc

SEQ ID NO: 960833 - RNA, 19 nt, Artificial Sequence
  Description of Artificial Sequence: Synthetic oligonucleotide
ucgucguugucguugccgg

SEQ ID NO: 960834 - RNA, 19 nt, Artificial Sequence
  Description of Artificial Sequence: Synthetic oligonucleotide
uugugacacaaacguauca

SEQ ID NO: 960835 - RNA, 19 nt, Artificial Sequence
  Description of Artificial Sequence: Synthetic oligonucleotide
cuggacgccaucgaaaacc

SEQ ID NO: 960836 - RNA, 19 nt, Artificial Sequence
  Description of Artificial Sequence: Synthetic oligonucleotide
augacuauuuaacuacaau

SEQ ID NO: 960837 - RNA, 19 nt, Artificial Sequence
  Description of Artificial Sequence: Synthetic oligonucleotide
uuaccuuaggaauguauuu

SEQ ID NO: 960838 - RNA, 19 nt, Artificial Sequence
  Description of Artificial Sequence: Synthetic oligonucleotide
uaccuguuaccuuaggaau

SEQ ID NO: 960839 - RNA, 19 nt, Artificial Sequence
  Description of Artificial Sequence: Synthetic oligonucleotide
gaacuugcggccuuugguc

SEQ ID NO: 960840 - RNA, 19 nt, Artificial Sequence
  Description of Artificial Sequence: Synthetic oligonucleotide
ucgcauucuucagagauga

SEQ ID NO: 960841 - RNA, 19 nt, Artificial Sequence
  Description of Artificial Sequence: Synthetic oligonucleotide
uaaaucggcccagaaacac

SEQ ID NO: 960842 - RNA, 19 nt, Artificial Sequence
  Description of Artificial Sequence: Synthetic oligonucleotide
uacacagucggcuccuccc

SEQ ID NO: 960843 - RNA, 19 nt, Artificial Sequence
  Description of Artificial Sequence: Synthetic oligonucleotide
uacucucuugaaucaauac

SEQ ID NO: 960844 - RNA, 19 nt, Artificial Sequence
  Description of Artificial Sequence: Synthetic oligonucleotide
cucagcuaaugccauguag

SEQ ID NO: 960845 - RNA, 19 nt, Artificial Sequence
  Description of Artificial Sequence: Synthetic oligonucleotide
ucuggucaaauaaccacau

SEQ ID NO: 960846 - RNA, 19 nt, Artificial Sequence
  Description of Artificial Sequence: Synthetic oligonucleotide
aguuaggucaaaugaggaa

SEQ ID NO: 960847 - RNA, 19 nt, Artificial Sequence
  Description of Artificial Sequence: Synthetic oligonucleotide
uacuaugugugagagaguu

SEQ ID NO: 960848 - RNA, 19 nt, Artificial Sequence
  Description of Artificial Sequence: Synthetic oligonucleotide
caaagaccccguauggccc

SEQ ID NO: 960849 - RNA, 19 nt, Artificial Sequence
  Description of Artificial Sequence: Synthetic oligonucleotide
acgucgaacaccuugccau

SEQ ID NO: 960850 - RNA, 19 nt, Artificial Sequence
  Description of Artificial Sequence: Synthetic oligonucleotide
aacuugcggccuuugguca

SEQ ID NO: 960851 - RNA, 19 nt, Artificial Sequence
  Description of Artificial Sequence: Synthetic oligonucleotide
ugugacacaaacguaucau

SEQ ID NO: 960852 - RNA, 19 nt, Artificial Sequence
  Description of Artificial Sequence: Synthetic oligonucleotide
acacaaacguaucaugcau

SEQ ID NO: 960853 - RNA, 19 nt, Artificial Sequence
  Description of Artificial Sequence: Synthetic oligonucleotide
aagaaugcgcggguccugg

SEQ ID NO: 960854 - RNA, 19 nt, Artificial Sequence
  Description of Artificial Sequence: Synthetic oligonucleotide
ugccauguaguguuuucgc

SEQ ID NO: 960855 - RNA, 19 nt, Artificial Sequence
  Description of Artificial Sequence: Synthetic oligonucleotide
cagcuuacccacaugauga

SEQ ID NO: 960856 - RNA, 19 nt, Artificial Sequence
  Description of Artificial Sequence: Synthetic oligonucleotide
agaaaggucgucauacuca

SEQ ID NO: 960857 - RNA, 19 nt, Artificial Sequence
  Description of Artificial Sequence: Synthetic oligonucleotide
cauacucauccuucagugc

SEQ ID NO: 960858 - RNA, 19 nt, Artificial Sequence
  Description of Artificial Sequence: Synthetic oligonucleotide
aacacggcucacaagaaaa

SEQ ID NO: 960859 - RNA, 19 nt, Artificial Sequence
  Description of Artificial Sequence: Synthetic oligonucleotide
ucggcuuguucuaacuaca

SEQ ID NO: 960860 - RNA, 19 nt, Artificial Sequence
  Description of Artificial Sequence: Synthetic oligonucleotide
aaacacggcucacaagaaa

SEQ ID NO: 960861 - RNA, 19 nt, Artificial Sequence
  Description of Artificial Sequence: Synthetic oligonucleotide
uacuguauguguugagagu

SEQ ID NO: 960862 - RNA, 19 nt, Artificial Sequence
  Description of Artificial Sequence: Synthetic oligonucleotide
ggauuugugacacaaacgu

SEQ ID NO: 960863 - RNA, 19 nt, Artificial Sequence
  Description of Artificial Sequence: Synthetic oligonucleotide
uucugauuugagguaaaac

SEQ ID NO: 960864 - RNA, 19 nt, Artificial Sequence
  Description of Artificial Sequence: Synthetic oligonucleotide
gaagucgcgccgcuugagg

SEQ ID NO: 960865 - RNA, 19 nt, Artificial Sequence
  Description of Artificial Sequence: Synthetic oligonucleotide
acagacucgaauguuacaa

SEQ ID NO: 960866 - RNA, 19 nt, Artificial Sequence
  Description of Artificial Sequence: Synthetic oligonucleotide
auguaguguuuucgcauuc

SEQ ID NO: 960867 - RNA, 19 nt, Artificial Sequence
  Description of Artificial Sequence: Synthetic oligonucleotide
gaucucgugcaggaggccg

SEQ ID NO: 960868 - RNA, 19 nt, Artificial Sequence
  Description of Artificial Sequence: Synthetic oligonucleotide
cucggcaagggugaagucg

SEQ ID NO: 960869 - RNA, 19 nt, Artificial Sequence
  Description of Artificial Sequence: Synthetic oligonucleotide
uuguggaaauacccaaguc

SEQ ID NO: 960870 - RNA, 19 nt, Artificial Sequence
  Description of Artificial Sequence: Synthetic oligonucleotide
gacgccaucgaaaaccuuc

SEQ ID NO: 960871 - RNA, 19 nt, Artificial Sequence
  Description of Artificial Sequence: Synthetic oligonucleotide
uuguuacuggacuacucuc

SEQ ID NO: 960872 - RNA, 19 nt, Artificial Sequence
  Description of Artificial Sequence: Synthetic oligonucleotide
gcuguuuuagucccaacug

SEQ ID NO: 960873 - RNA, 19 nt, Artificial Sequence
  Description of Artificial Sequence: Synthetic oligonucleotide
cuaccuguuaccuuaggaa

SEQ ID NO: 960874 - RNA, 19 nt, Artificial Sequence
  Description of Artificial Sequence: Synthetic oligonucleotide
aaacacgggaaauguguuu

SEQ ID NO: 960875 - RNA, 19 nt, Artificial Sequence
  Description of Artificial Sequence: Synthetic oligonucleotide
aaugacuauuuaacuacaa

SEQ ID NO: 960876 - RNA, 19 nt, Artificial Sequence
  Description of Artificial Sequence: Synthetic oligonucleotide
gaccuagacacuugacuac

SEQ ID NO: 960877 - RNA, 19 nt, Artificial Sequence
  Description of Artificial Sequence: Synthetic oligonucleotide
cauuuuguuacuggacuac

SEQ ID NO: 960878 - RNA, 19 nt, Artificial Sequence
  Description of Artificial Sequence: Synthetic oligonucleotide
acuacaauuacaagaguuu

SEQ ID NO: 960879 - RNA, 19 nt, Artificial Sequence
  Description of Artificial Sequence: Synthetic oligonucleotide
uugaagugacuacaauuuu

SEQ ID NO: 960880 - RNA, 19 nt, Artificial Sequence
  Description of Artificial Sequence: Synthetic oligonucleotide
uaaaaccauuaaacacggc

SEQ ID NO: 960881 - RNA, 19 nt, Artificial Sequence
  Description of Artificial Sequence: Synthetic oligonucleotide
cucuacacuuugaauguuc

SEQ ID NO: 960882 - RNA, 19 nt, Artificial Sequence
  Description of Artificial Sequence: Synthetic oligonucleotide
acguaucaugcauucuaag

SEQ ID NO: 960883 - RNA, 19 nt, Artificial Sequence
  Description of Artificial Sequence: Synthetic oligonucleotide
gcaaagaccccguauggcc

SEQ ID NO: 960884 - RNA, 19 nt, Artificial Sequence
  Description of Artificial Sequence: Synthetic oligonucleotide
caaggacaguuaaaucggc

SEQ ID NO: 960885 - RNA, 19 nt, Artificial Sequence
  Description of Artificial Sequence: Synthetic oligonucleotide
agacuuucugaaaagcaca

SEQ ID NO: 960886 - RNA, 19 nt, Artificial Sequence
  Description of Artificial Sequence: Synthetic oligonucleotide
cagcuaaugccauguagug

SEQ ID NO: 960887 - RNA, 19 nt, Artificial Sequence
  Description of Artificial Sequence: Synthetic oligonucleotide
uaaacacggcucacaagaa

SEQ ID NO: 960888 - RNA, 19 nt, Artificial Sequence
  Description of Artificial Sequence: Synthetic oligonucleotide
ugacuacaauuuuguaaca

SEQ ID NO: 960889 - RNA, 19 nt, Artificial Sequence
  Description of Artificial Sequence: Synthetic oligonucleotide
caugaugauacuugaaagu

SEQ ID NO: 960890 - RNA, 19 nt, Artificial Sequence
  Description of Artificial Sequence: Synthetic oligonucleotide
agcgcuccggaacacuccg

SEQ ID NO: 960891 - RNA, 19 nt, Artificial Sequence
  Description of Artificial Sequence: Synthetic oligonucleotide
aagaucuaccuguuaccuu

SEQ ID NO: 960892 - RNA, 19 nt, Artificial Sequence
  Description of Artificial Sequence: Synthetic oligonucleotide
gcaaaauguggcaaggccc

SEQ ID NO: 960893 - RNA, 19 nt, Artificial Sequence
  Description of Artificial Sequence: Synthetic oligonucleotide
ugcuuuagagguagauaaa

SEQ ID NO: 960894 - RNA, 19 nt, Artificial Sequence
  Description of Artificial Sequence: Synthetic oligonucleotide
ugucguugccggcuccggg

SEQ ID NO: 960895 - RNA, 19 nt, Artificial Sequence
  Description of Artificial Sequence: Synthetic oligonucleotide
ugcaauucggcuuguucua

SEQ ID NO: 960896 - RNA, 19 nt, Artificial Sequence
  Description of Artificial Sequence: Synthetic oligonucleotide
gauggccauaagaaugcgc

SEQ ID NO: 960897 - RNA, 19 nt, Artificial Sequence
  Description of Artificial Sequence: Synthetic oligonucleotide
cuacuacuuuugaagugac

SEQ ID NO: 960898 - RNA, 19 nt, Artificial Sequence
  Description of Artificial Sequence: Synthetic oligonucleotide
uccuggacgccaucgaaaa

SEQ ID NO: 960899 - RNA, 19 nt, Artificial Sequence
  Description of Artificial Sequence: Synthetic oligonucleotide
uaacuacagauagaagaaa

SEQ ID NO: 960900 - RNA, 19 nt, Artificial Sequence
  Description of Artificial Sequence: Synthetic oligonucleotide
acuugacuacuacuuuuga

SEQ ID NO: 960901 - RNA, 19 nt, Artificial Sequence
  Description of Artificial Sequence: Synthetic oligonucleotide
acggaggagacuuucugaa

SEQ ID NO: 960902 - RNA, 19 nt, Artificial Sequence
  Description of Artificial Sequence: Synthetic oligonucleotide
aacguaucaugcauucuaa

SEQ ID NO: 960903 - RNA, 19 nt, Artificial Sequence
  Description of Artificial Sequence: Synthetic oligonucleotide
ucggcccagaaacacggga

SEQ ID NO: 960904 - RNA, 19 nt, Artificial Sequence
  Description of Artificial Sequence: Synthetic oligonucleotide
uguaguguuuucgcauucu

SEQ ID NO: 960905 - RNA, 19 nt, Artificial Sequence
  Description of Artificial Sequence: Synthetic oligonucleotide
auuuuguuacuggacuacu

SEQ ID NO: 960906 - RNA, 19 nt, Artificial Sequence
  Description of Artificial Sequence: Synthetic oligonucleotide
uguauguguugagaguguc

SEQ ID NO: 960907 - RNA, 19 nt, Artificial Sequence
  Description of Artificial Sequence: Synthetic oligonucleotide
uucuuuauccaggcaaaau

SEQ ID NO: 960908 - RNA, 19 nt, Artificial Sequence
  Description of Artificial Sequence: Synthetic oligonucleotide
caucgaaaaccuucagcuc

SEQ ID NO: 960909 - RNA, 19 nt, Artificial Sequence
  Description of Artificial Sequence: Synthetic oligonucleotide
uuguaacaccagaaagauc

SEQ ID NO: 960910 - RNA, 19 nt, Artificial Sequence
  Description of Artificial Sequence: Synthetic oligonucleotide
cuugacuacuacuuuugaa

SEQ ID NO: 960911 - RNA, 19 nt, Artificial Sequence
  Description of Artificial Sequence: Synthetic oligonucleotide
uaccuuaggaauguauuuu

SEQ ID NO: 960912 - RNA, 19 nt, Artificial Sequence
  Description of Artificial Sequence: Synthetic oligonucleotide
caaugacuauuuaacuaca

SEQ ID NO: 960913 - RNA, 19 nt, Artificial Sequence
  Description of Artificial Sequence: Synthetic oligonucleotide
auaagaaugcgcggguccu

SEQ ID NO: 960914 - RNA, 19 nt, Artificial Sequence
  Description of Artificial Sequence: Synthetic oligonucleotide
aaauaaccacauaaccauu

SEQ ID NO: 960915 - RNA, 19 nt, Artificial Sequence
  Description of Artificial Sequence: Synthetic oligonucleotide
cuuguucuaacuacagaua

SEQ ID NO: 960916 - RNA, 19 nt, Artificial Sequence
  Description of Artificial Sequence: Synthetic oligonucleotide
gcagcuuacccacaugaug

SEQ ID NO: 960917 - RNA, 19 nt, Artificial Sequence
  Description of Artificial Sequence: Synthetic oligonucleotide
ucccaacugucaauuacua

SEQ ID NO: 960918 - RNA, 19 nt, Artificial Sequence
  Description of Artificial Sequence: Synthetic oligonucleotide
uuuucgcauucuucagaga

SEQ ID NO: 960919 - RNA, 19 nt, Artificial Sequence
  Description of Artificial Sequence: Synthetic oligonucleotide
gucacgucgaacaccuugc

SEQ ID NO: 960920 - RNA, 19 nt, Artificial Sequence
  Description of Artificial Sequence: Synthetic oligonucleotide
ggccauaagaaugcgcggg

SEQ ID NO: 960921 - RNA, 19 nt, Artificial Sequence
  Description of Artificial Sequence: Synthetic oligonucleotide
guuuuagucccaacuguca

SEQ ID NO: 960922 - RNA, 19 nt, Artificial Sequence
  Description of Artificial Sequence: Synthetic oligonucleotide
aucuaccuguuaccuuagg

SEQ ID NO: 960923 - RNA, 19 nt, Artificial Sequence
  Description of Artificial Sequence: Synthetic oligonucleotide
gaugacggaggagacuuuc

SEQ ID NO: 960924 - RNA, 19 nt, Artificial Sequence
  Description of Artificial Sequence: Synthetic oligonucleotide
auccaggcaaaauguggca

SEQ ID NO: 960925 - RNA, 19 nt, Artificial Sequence
  Description of Artificial Sequence: Synthetic oligonucleotide
gcggccuuuggucacgucg

SEQ ID NO: 960926 - RNA, 19 nt, Artificial Sequence
  Description of Artificial Sequence: Synthetic oligonucleotide
uaccagugucacuagugau

SEQ ID NO: 960927 - RNA, 19 nt, Artificial Sequence
  Description of Artificial Sequence: Synthetic oligonucleotide
aucaugcauucuaagacaa

SEQ ID NO: 960928 - RNA, 19 nt, Artificial Sequence
  Description of Artificial Sequence: Synthetic oligonucleotide
gaaaggucgucauacucau

SEQ ID NO: 960929 - RNA, 19 nt, Artificial Sequence
  Description of Artificial Sequence: Synthetic oligonucleotide
aggggcgacgugaagaucu

SEQ ID NO: 960930 - RNA, 19 nt, Artificial Sequence
  Description of Artificial Sequence: Synthetic oligonucleotide
ggugaagucgcgccgcuug

SEQ ID NO: 960931 - RNA, 19 nt, Artificial Sequence
  Description of Artificial Sequence: Synthetic oligonucleotide
ggcccguagaacuugcggc

SEQ ID NO: 960932 - RNA, 19 nt, Artificial Sequence
  Description of Artificial Sequence: Synthetic oligonucleotide
gaauaguuuguguuaccau

SEQ ID NO: 960933 - RNA, 19 nt, Artificial Sequence
  Description of Artificial Sequence: Synthetic oligonucleotide
caauucggcuuguucuaac

SEQ ID NO: 960934 - RNA, 19 nt, Artificial Sequence
  Description of Artificial Sequence: Synthetic oligonucleotide
uaaccauugcccugauaua

SEQ ID NO: 960935 - RNA, 19 nt, Artificial Sequence
  Description of Artificial Sequence: Synthetic oligonucleotide
uccggcaaagaccccguau

SEQ ID NO: 960936 - RNA, 19 nt, Artificial Sequence
  Description of Artificial Sequence: Synthetic oligonucleotide
acacaccuauuccugcccu

SEQ ID NO: 960937 - RNA, 19 nt, Artificial Sequence
  Description of Artificial Sequence: Synthetic oligonucleotide
uacuuaagcuagguuuagu

SEQ ID NO: 960938 - RNA, 19 nt, Artificial Sequence
  Description of Artificial Sequence: Synthetic oligonucleotide
guauuauccaagaccuaga

SEQ ID NO: 960939 - RNA, 19 nt, Artificial Sequence
  Description of Artificial Sequence: Synthetic oligonucleotide
agcuaaugccauguagugu

SEQ ID NO: 960940 - RNA, 19 nt, Artificial Sequence
  Description of Artificial Sequence: Synthetic oligonucleotide
gucguugccggcuccgggc

SEQ ID NO: 960941 - RNA, 19 nt, Artificial Sequence
  Description of Artificial Sequence: Synthetic oligonucleotide
ucgugcaggaggccgccgc

SEQ ID NO: 960942 - RNA, 19 nt, Artificial Sequence
  Description of Artificial Sequence: Synthetic oligonucleotide
cuuaagcuagguuuaguau

SEQ ID NO: 960943 - RNA, 19 nt, Artificial Sequence
  Description of Artificial Sequence: Synthetic oligonucleotide
gaucuaccuguuaccuuag

SEQ ID NO: 960944 - RNA, 19 nt, Artificial Sequence
  Description of Artificial Sequence: Synthetic oligonucleotide
aucucgugcaggaggccgc

SEQ ID NO: 960945 - RNA, 19 nt, Artificial Sequence
  Description of Artificial Sequence: Synthetic oligonucleotide
agucuacuuaagcuagguu

SEQ ID NO: 960946 - RNA, 19 nt, Artificial Sequence
  Description of Artificial Sequence: Synthetic oligonucleotide
uggaugcaucucuuccggc

SEQ ID NO: 960947 - RNA, 19 nt, Artificial Sequence
  Description of Artificial Sequence: Synthetic oligonucleotide
accuagacacuugacuacu

SEQ ID NO: 960948 - RNA, 19 nt, Artificial Sequence
  Description of Artificial Sequence: Synthetic oligonucleotide
accuauuccugcccuguau

SEQ ID NO: 960949 - RNA, 19 nt, Artificial Sequence
  Description of Artificial Sequence: Synthetic oligonucleotide
accauugcccugauauaag

SEQ ID NO: 960950 - RNA, 19 nt, Artificial Sequence
  Description of Artificial Sequence: Synthetic oligonucleotide
cccgcguacaaucuuguag

SEQ ID NO: 960951 - RNA, 19 nt, Artificial Sequence
  Description of Artificial Sequence: Synthetic oligonucleotide
cuccggaacacuccgcguc

SEQ ID NO: 960952 - RNA, 19 nt, Artificial Sequence
  Description of Artificial Sequence: Synthetic oligonucleotide
gauuugugacacaaacgua

SEQ ID NO: 960953 - RNA, 19 nt, Artificial Sequence
  Description of Artificial Sequence: Synthetic oligonucleotide
agcaaaacuagaaguugau

SEQ ID NO: 960954 - RNA, 19 nt, Artificial Sequence
  Description of Artificial Sequence: Synthetic oligonucleotide
guacacagucggcuccucc

SEQ ID NO: 960955 - RNA, 19 nt, Artificial Sequence
  Description of Artificial Sequence: Synthetic oligonucleotide
guugucguugccggcuccg

SEQ ID NO: 960956 - RNA, 19 nt, Artificial Sequence
  Description of Artificial Sequence: Synthetic oligonucleotide
ugaagucgcgccgcuugag

SEQ ID NO: 960957 - RNA, 19 nt, Artificial Sequence
  Description of Artificial Sequence: Synthetic oligonucleotide
ggaugcaucucuuccggca

SEQ ID NO: 960958 - RNA, 19 nt, Artificial Sequence
  Description of Artificial Sequence: Synthetic oligonucleotide
gcuaaugccauguaguguu

SEQ ID NO: 960959 - RNA, 19 nt, Artificial Sequence
  Description of Artificial Sequence: Synthetic oligonucleotide
ccaauuaagccagacauaa

SEQ ID NO: 960960 - RNA, 19 nt, Artificial Sequence
  Description of Artificial Sequence: Synthetic oligonucleotide
cuuugaauguucagaugcu

SEQ ID NO: 960961 - RNA, 19 nt, Artificial Sequence
  Description of Artificial Sequence: Synthetic oligonucleotide
uacccaagucuuuucucuu

SEQ ID NO: 960962 - RNA, 19 nt, Artificial Sequence
  Description of Artificial Sequence: Synthetic oligonucleotide
guuaccuuaggaauguauu

SEQ ID NO: 960963 - RNA, 19 nt, Artificial Sequence
  Description of Artificial Sequence: Synthetic oligonucleotide
gagaugacggaggagacuu

SEQ ID NO: 960964 - RNA, 19 nt, Artificial Sequence
  Description of Artificial Sequence: Synthetic oligonucleotide
uauuccugcccuguauguu

SEQ ID NO: 960965 - RNA, 19 nt, Artificial Sequence
  Description of Artificial Sequence: Synthetic oligonucleotide
aaauugcaauucggcuugu

SEQ ID NO: 960966 - RNA, 19 nt, Artificial Sequence
  Description of Artificial Sequence: Synthetic oligonucleotide
gcuuuagagguagauaaaa

SEQ ID NO: 960967 - RNA, 19 nt, Artificial Sequence
  Description of Artificial Sequence: Synthetic oligonucleotide
uccggcccguagaacuugc

SEQ ID NO: 960968 - RNA, 19 nt, Artificial Sequence
  Description of Artificial Sequence: Synthetic oligonucleotide
agcuuacccacaugaugau

SEQ ID NO: 960969 - RNA, 19 nt, Artificial Sequence
  Description of Artificial Sequence: Synthetic oligonucleotide
acaguuaaaucggcccaga

SEQ ID NO: 960970 - RNA, 19 nt, Artificial Sequence
  Description of Artificial Sequence: Synthetic oligonucleotide
acaccuauuccugcccugu

SEQ ID NO: 960971 - RNA, 19 nt, Artificial Sequence
  Description of Artificial Sequence: Synthetic oligonucleotide
gcauuaacaguugcauggc

SEQ ID NO: 960972 - RNA, 19 nt, Artificial Sequence
  Description of Artificial Sequence: Synthetic oligonucleotide
ccuauuccugcccuguaug

SEQ ID NO: 960973 - RNA, 19 nt, Artificial Sequence
  Description of Artificial Sequence: Synthetic oligonucleotide
uugucguugccggcuccgg

SEQ ID NO: 960974 - RNA, 19 nt, Artificial Sequence
  Description of Artificial Sequence: Synthetic oligonucleotide
ucguugccggcuccgggcu

SEQ ID NO: 960975 - RNA, 19 nt, Artificial Sequence
  Description of Artificial Sequence: Synthetic oligonucleotide
cguaucaugcauucuaaga

SEQ ID NO: 960976 - RNA, 19 nt, Artificial Sequence
  Description of Artificial Sequence: Synthetic oligonucleotide
agauaugcguccacugaau

SEQ ID NO: 960977 - RNA, 19 nt, Artificial Sequence
  Description of Artificial Sequence: Synthetic oligonucleotide
cucgggucggcgcccgucg

SEQ ID NO: 960978 - RNA, 19 nt, Artificial Sequence
  Description of Artificial Sequence: Synthetic oligonucleotide
ggacuacucucuugaauca

SEQ ID NO: 960979 - RNA, 19 nt, Artificial Sequence
  Description of Artificial Sequence: Synthetic oligonucleotide
cacaccuauuccugcccug

SEQ ID NO: 960980 - RNA, 19 nt, Artificial Sequence
  Description of Artificial Sequence: Synthetic oligonucleotide
uccccgcguacaaucuugu

SEQ ID NO: 960981 - RNA, 19 nt, Artificial Sequence
  Description of Artificial Sequence: Synthetic oligonucleotide
auccaagaccuagacacuu

SEQ ID NO: 960982 - RNA, 19 nt, Artificial Sequence
  Description of Artificial Sequence: Synthetic oligonucleotide
ccaaaagaguauuauccaa

SEQ ID NO: 960983 - RNA, 19 nt, Artificial Sequence
  Description of Artificial Sequence: Synthetic oligonucleotide
acuggacuacucucuugaa

SEQ ID NO: 960984 - RNA, 19 nt, Artificial Sequence
  Description of Artificial Sequence: Synthetic oligonucleotide
ugcguccacugaaugcuuu

SEQ ID NO: 960985 - RNA, 19 nt, Artificial Sequence
  Description of Artificial Sequence: Synthetic oligonucleotide
agguuuaguauuagccaaa

SEQ ID NO: 960986 - RNA, 19 nt, Artificial Sequence
  Description of Artificial Sequence: Synthetic oligonucleotide
aauugcaauucggcuuguu

SEQ ID NO: 960987 - RNA, 19 nt, Artificial Sequence
  Description of Artificial Sequence: Synthetic oligonucleotide
ucguugucguugccggcuc

SEQ ID NO: 960988 - RNA, 19 nt, Artificial Sequence
  Description of Artificial Sequence: Synthetic oligonucleotide
accccguauggccccuccg

SEQ ID NO: 960989 - RNA, 19 nt, Artificial Sequence
  Description of Artificial Sequence: Synthetic oligonucleotide
cagacucgaauguuacaaa

SEQ ID NO: 960990 - RNA, 19 nt, Artificial Sequence
  Description of Artificial Sequence: Synthetic oligonucleotide
ccggcaaagaccccguaug

SEQ ID NO: 960991 - RNA, 19 nt, Artificial Sequence
  Description of Artificial Sequence: Synthetic oligonucleotide
gacuacucucuugaaucaa

SEQ ID NO: 960992 - RNA, 19 nt, Artificial Sequence
  Description of Artificial Sequence: Synthetic oligonucleotide
ccgcguacaaucuuguaga

SEQ ID NO: 960993 - RNA, 19 nt, Artificial Sequence
  Description of Artificial Sequence: Synthetic oligonucleotide
guauggccccuccggcccg

SEQ ID NO: 960994 - RNA, 19 nt, Artificial Sequence
  Description of Artificial Sequence: Synthetic oligonucleotide
gagucuacuuaagcuaggu

SEQ ID NO: 960995 - RNA, 19 nt, Artificial Sequence
  Description of Artificial Sequence: Synthetic oligonucleotide
cucacuaguuguucauaua

SEQ ID NO: 960996 - RNA, 19 nt, Artificial Sequence
  Description of Artificial Sequence: Synthetic oligonucleotide
acgccaucgaaaaccuuca

SEQ ID NO: 960997 - RNA, 19 nt, Artificial Sequence
  Description of Artificial Sequence: Synthetic oligonucleotide
cucuuaguacauuuaccau

SEQ ID NO: 960998 - RNA, 19 nt, Artificial Sequence
  Description of Artificial Sequence: Synthetic oligonucleotide
guuugaaaccucacuaguu

SEQ ID NO: 960999 - RNA, 19 nt, Artificial Sequence
  Description of Artificial Sequence: Synthetic oligonucleotide
cacgggaaauguguuuguc

SEQ ID NO: 961000 - RNA, 19 nt, Artificial Sequence
  Description of Artificial Sequence: Synthetic oligonucleotide
gaauguucagaugcuguuu

SEQ ID NO: 961001 - RNA, 19 nt, Artificial Sequence
  Description of Artificial Sequence: Synthetic oligonucleotide
cacgucgaacaccuugcca

SEQ ID NO: 961002 - RNA, 19 nt, Artificial Sequence
  Description of Artificial Sequence: Synthetic oligonucleotide
gcgacgugaagaucucgug

SEQ ID NO: 961003 - RNA, 19 nt, Artificial Sequence
  Description of Artificial Sequence: Synthetic oligonucleotide
gguuuaguauuagccaaaa

SEQ ID NO: 961004 - RNA, 19 nt, Artificial Sequence
  Description of Artificial Sequence: Synthetic oligonucleotide
gcauucuaagacaauuuua

SEQ ID NO: 961005 - RNA, 19 nt, Artificial Sequence
  Description of Artificial Sequence: Synthetic oligonucleotide
ccucucaaauuucacaucu

SEQ ID NO: 961006 - RNA, 19 nt, Artificial Sequence
  Description of Artificial Sequence: Synthetic oligonucleotide
cacuaguuguucauauaau

SEQ ID NO: 961007 - RNA, 19 nt, Artificial Sequence
  Description of Artificial Sequence: Synthetic oligonucleotide
cucgaauguuacaaaugau

SEQ ID NO: 961008 - RNA, 19 nt, Artificial Sequence
  Description of Artificial Sequence: Synthetic oligonucleotide
agggugaagucgcgccgcu

SEQ ID NO: 961009 - RNA, 19 nt, Artificial Sequence
  Description of Artificial Sequence: Synthetic oligonucleotide
gcguacaaucuuguagagc

SEQ ID NO: 961010 - RNA, 19 nt, Artificial Sequence
  Description of Artificial Sequence: Synthetic oligonucleotide
gugaagucgcgccgcuuga

SEQ ID NO: 961011 - RNA, 19 nt, Artificial Sequence
  Description of Artificial Sequence: Synthetic oligonucleotide
acacggcucacaagaaaau

SEQ ID NO: 961012 - RNA, 19 nt, Artificial Sequence
  Description of Artificial Sequence: Synthetic oligonucleotide
caguuaaaucggcccagaa

SEQ ID NO: 961013 - RNA, 19 nt, Artificial Sequence
  Description of Artificial Sequence: Synthetic oligonucleotide
acauaaccauugcccugau

SEQ ID NO: 961014 - RNA, 19 nt, Artificial Sequence
  Description of Artificial Sequence: Synthetic oligonucleotide
cuucuuuauccaggcaaaa

SEQ ID NO: 961015 - RNA, 19 nt, Artificial Sequence
  Description of Artificial Sequence: Synthetic oligonucleotide
gaguauuauccaagaccua

SEQ ID NO: 961016 - RNA, 19 nt, Artificial Sequence
  Description of Artificial Sequence: Synthetic oligonucleotide
aucggcccagaaacacggg

SEQ ID NO: 961017 - RNA, 19 nt, Artificial Sequence
  Description of Artificial Sequence: Synthetic oligonucleotide
acuaugugugagagaguua

SEQ ID NO: 961018 - RNA, 19 nt, Artificial Sequence
  Description of Artificial Sequence: Synthetic oligonucleotide
ucgggucggcgcccgucgc

SEQ ID NO: 961019 - RNA, 19 nt, Artificial Sequence
  Description of Artificial Sequence: Synthetic oligonucleotide
ccccguauggccccuccgg

SEQ ID NO: 961020 - RNA, 19 nt, Artificial Sequence
  Description of Artificial Sequence: Synthetic oligonucleotide
cuggacuacucucuugaau

SEQ ID NO: 961021 - RNA, 19 nt, Artificial Sequence
  Description of Artificial Sequence: Synthetic oligonucleotide
cacggcucacaagaaaaua

SEQ ID NO: 961022 - RNA, 19 nt, Artificial Sequence
  Description of Artificial Sequence: Synthetic oligonucleotide
aagaccccguauggccccu

SEQ ID NO: 961023 - RNA, 19 nt, Artificial Sequence
  Description of Artificial Sequence: Synthetic oligonucleotide
uuccggcaaagaccccgua

SEQ ID NO: 961024 - RNA, 19 nt, Artificial Sequence
  Description of Artificial Sequence: Synthetic oligonucleotide
ccguauggccccuccggcc

SEQ ID NO: 961025 - RNA, 19 nt, Artificial Sequence
  Description of Artificial Sequence: Synthetic oligonucleotide
cgcuccggaacacuccgcg

SEQ ID NO: 961026 - RNA, 19 nt, Artificial Sequence
  Description of Artificial Sequence: Synthetic oligonucleotide
gucguugucguugccggcu

SEQ ID NO: 961027 - RNA, 19 nt, Artificial Sequence
  Description of Artificial Sequence: Synthetic oligonucleotide
ucagcucggcaagggugaa

SEQ ID NO: 961028 - RNA, 19 nt, Artificial Sequence
  Description of Artificial Sequence: Synthetic oligonucleotide
gguccuggacgccaucgaa

SEQ ID NO: 961029 - RNA, 19 nt, Artificial Sequence
  Description of Artificial Sequence: Synthetic oligonucleotide
cccguauggccccuccggc

SEQ ID NO: 961030 - RNA, 19 nt, Artificial Sequence
  Description of Artificial Sequence: Synthetic oligonucleotide
cgcguacaaucuuguagag

SEQ ID NO: 961031 - RNA, 19 nt, Artificial Sequence
  Description of Artificial Sequence: Synthetic oligonucleotide
cggcucacaagaaaauaca

SEQ ID NO: 961032 - RNA, 19 nt, Artificial Sequence
  Description of Artificial Sequence: Synthetic oligonucleotide
gcucgcucgggucggcgcc

SEQ ID NO: 961033 - RNA, 19 nt, Artificial Sequence
  Description of Artificial Sequence: Synthetic oligonucleotide
cuccggcccguagaacuug

SEQ ID NO: 961034 - RNA, 19 nt, Artificial Sequence
  Description of Artificial Sequence: Synthetic oligonucleotide
ccauaagaaugcgcggguc

SEQ ID NO: 961035 - RNA, 19 nt, Artificial Sequence
  Description of Artificial Sequence: Synthetic oligonucleotide
caaacguaucaugcauucu

SEQ ID NO: 961036 - RNA, 19 nt, Artificial Sequence
  Description of Artificial Sequence: Synthetic oligonucleotide
gcaaagcucuacacuuuga

SEQ ID NO: 961037 - RNA, 19 nt, Artificial Sequence
  Description of Artificial Sequence: Synthetic oligonucleotide
gucggcgcccgucgccacc

SEQ ID NO: 961038 - RNA, 19 nt, Artificial Sequence
  Description of Artificial Sequence: Synthetic oligonucleotide
cggcccguagaacuugcgg

SEQ ID NO: 961039 - RNA, 19 nt, Artificial Sequence
  Description of Artificial Sequence: Synthetic oligonucleotide
gggcgacgugaagaucucg

SEQ ID NO: 961040 - RNA, 19 nt, Artificial Sequence
  Description of Artificial Sequence: Synthetic oligonucleotide
gaggggcgacgugaagauc

SEQ ID NO: 961041 - RNA, 19 nt, Artificial Sequence
  Description of Artificial Sequence: Synthetic oligonucleotide
cucgcucgggucggcgccc

SEQ ID NO: 961042 - RNA, 19 nt, Artificial Sequence
  Description of Artificial Sequence: Synthetic oligonucleotide
cgucgccaccacaucuucg

SEQ ID NO: 961043 - RNA, 19 nt, Artificial Sequence
  Description of Artificial Sequence: Synthetic oligonucleotide
gccgcuugaggcggggcag

SEQ ID NO: 961044 - RNA, 19 nt, Artificial Sequence
  Description of Artificial Sequence: Synthetic oligonucleotide
uugcggccuuuggucacgu

SEQ ID NO: 961045 - RNA, 19 nt, Artificial Sequence
  Description of Artificial Sequence: Synthetic oligonucleotide
ugcgcggguccuggacgcc

SEQ ID NO: 961046 - RNA, 19 nt, Artificial Sequence
  Description of Artificial Sequence: Synthetic oligonucleotide
ccuggacgccaucgaaaac

SEQ ID NO: 961047 - RNA, 19 nt, Artificial Sequence
  Description of Artificial Sequence: Synthetic oligonucleotide
uauggccccuccggcccgu

SEQ ID NO: 961048 - RNA, 19 nt, Artificial Sequence
  Description of Artificial Sequence: Synthetic oligonucleotide
ggcgacgugaagaucucgu

SEQ ID NO: 961049 - RNA, 19 nt, Artificial Sequence
  Description of Artificial Sequence: Synthetic oligonucleotide
agaccccguauggccccuc

SEQ ID NO: 961050 - RNA, 19 nt, Artificial Sequence
  Description of Artificial Sequence: Synthetic oligonucleotide
ccucacuaguuguucauau

SEQ ID NO: 961051 - RNA, 19 nt, Artificial Sequence
  Description of Artificial Sequence: Synthetic oligonucleotide
gcaauucggcuuguucuaa

SEQ ID NO: 961052 - RNA, 19 nt, Artificial Sequence
  Description of Artificial Sequence: Synthetic oligonucleotide
ugcggccuuuggucacguc

SEQ ID NO: 961053 - RNA, 19 nt, Artificial Sequence
  Description of Artificial Sequence: Synthetic oligonucleotide
ggccccuggaugcaucucu

SEQ ID NO: 961054 - RNA, 19 nt, Artificial Sequence
  Description of Artificial Sequence: Synthetic oligonucleotide
gcccuguauguuccucuca

SEQ ID NO: 961055 - RNA, 19 nt, Artificial Sequence
  Description of Artificial Sequence: Synthetic oligonucleotide
agaugacggaggagacuuu

SEQ ID NO: 961056 - RNA, 19 nt, Artificial Sequence
  Description of Artificial Sequence: Synthetic oligonucleotide
cccggcuaggcagcgcucc

SEQ ID NO: 961057 - RNA, 19 nt, Artificial Sequence
  Description of Artificial Sequence: Synthetic oligonucleotide
gcaaagguugggcccggcu

SEQ ID NO: 961058 - RNA, 19 nt, Artificial Sequence
  Description of Artificial Sequence: Synthetic oligonucleotide
ccggcccguagaacuugcg

SEQ ID NO: 961059 - RNA, 19 nt, Artificial Sequence
  Description of Artificial Sequence: Synthetic oligonucleotide
caccuauuccugcccugua

SEQ ID NO: 961060 - RNA, 19 nt, Artificial Sequence
  Description of Artificial Sequence: Synthetic oligonucleotide
ccggcuaggcagcgcuccg

SEQ ID NO: 961061 - RNA, 19 nt, Artificial Sequence
  Description of Artificial Sequence: Synthetic oligonucleotide
gcguccacugaaugcuuua

SEQ ID NO: 961062 - RNA, 19 nt, Artificial Sequence
  Description of Artificial Sequence: Synthetic oligonucleotide
gcuuacccacaugaugaua

SEQ ID NO: 961063 - RNA, 19 nt, Artificial Sequence
  Description of Artificial Sequence: Synthetic oligonucleotide
cgucguugucguugccggc

SEQ ID NO: 961064 - RNA, 19 nt, Artificial Sequence
  Description of Artificial Sequence: Synthetic oligonucleotide
cacagucggcuccuccccu

SEQ ID NO: 961065 - RNA, 19 nt, Artificial Sequence
  Description of Artificial Sequence: Synthetic oligonucleotide
cguugucguugccggcucc

SEQ ID NO: 961066 - RNA, 19 nt, Artificial Sequence
  Description of Artificial Sequence: Synthetic oligonucleotide
ccgucgccaccacaucuuc

SEQ ID NO: 961067 - RNA, 19 nt, Artificial Sequence
  Description of Artificial Sequence: Synthetic oligonucleotide
gcccgucgccaccacaucu

SEQ ID NO: 961068 - RNA, 19 nt, Artificial Sequence
  Description of Artificial Sequence: Synthetic oligonucleotide
ggggcgacgugaagaucuc

SEQ ID NO: 961069 - RNA, 19 nt, Artificial Sequence
  Description of Artificial Sequence: Synthetic oligonucleotide
ccgagcauucucaucuuuu

SEQ ID NO: 961070 - RNA, 19 nt, Artificial Sequence
  Description of Artificial Sequence: Synthetic oligonucleotide
cccaacugucaauuacuau

SEQ ID NO: 961071 - RNA, 19 nt, Artificial Sequence
  Description of Artificial Sequence: Synthetic oligonucleotide
gggucggcgcccgucgcca

SEQ ID NO: 961072 - RNA, 19 nt, Artificial Sequence
  Description of Artificial Sequence: Synthetic oligonucleotide
gggcugguccccgcguaca

SEQ ID NO: 961073 - RNA, 19 nt, Artificial Sequence
  Description of Artificial Sequence: Synthetic oligonucleotide
gcuccggaacacuccgcgu

SEQ ID NO: 961074 - RNA, 19 nt, Artificial Sequence
  Description of Artificial Sequence: Synthetic oligonucleotide
caacaaggacaaggacagu

SEQ ID NO: 961075 - RNA, 19 nt, Artificial Sequence
  Description of Artificial Sequence: Synthetic oligonucleotide
gccccuccggcccguagaa

SEQ ID NO: 961076 - RNA, 19 nt, Artificial Sequence
  Description of Artificial Sequence: Synthetic oligonucleotide
gcgcuccggaacacuccgc

SEQ ID NO: 961077 - RNA, 19 nt, Artificial Sequence
  Description of Artificial Sequence: Synthetic oligonucleotide
gguccccgcguacaaucuu

SEQ ID NO: 961078 - RNA, 19 nt, Artificial Sequence
  Description of Artificial Sequence: Synthetic oligonucleotide
cgucgucguugucguugcc

SEQ ID NO: 961079 - RNA, 19 nt, Artificial Sequence
  Description of Artificial Sequence: Synthetic oligonucleotide
gcgcggguccuggacgcca

SEQ ID NO: 961080 - RNA, 19 nt, Artificial Sequence
  Description of Artificial Sequence: Synthetic oligonucleotide
ccagcucgcucgggucggc

SEQ ID NO: 961081 - RNA, 19 nt, Artificial Sequence
  Description of Artificial Sequence: Synthetic oligonucleotide
gcgccgcuugaggcggggc

SEQ ID NO: 961082 - RNA, 19 nt, Artificial Sequence
  Description of Artificial Sequence: Synthetic oligonucleotide
ccccgcguacaaucuugua

SEQ ID NO: 961083 - RNA, 19 nt, Artificial Sequence
  Description of Artificial Sequence: Synthetic oligonucleotide
ccccuccggcccguagaac

SEQ ID NO: 961084 - RNA, 19 nt, Artificial Sequence
  Description of Artificial Sequence: Synthetic oligonucleotide
cgcccgucgccaccacauc

SEQ ID NO: 961085 - RNA, 19 nt, Artificial Sequence
  Description of Artificial Sequence: Synthetic oligonucleotide
cgcgccgcuugaggcgggg

SEQ ID NO: 961086 - RNA, 19 nt, Artificial Sequence
  Description of Artificial Sequence: Synthetic oligonucleotide
gcccggcuaggcagcgcuc

SEQ ID NO: 961087 - RNA, 19 nt, Artificial Sequence
  Description of Artificial Sequence: Synthetic oligonucleotide
ccgggcugguccccgcgua

SEQ ID NO: 961088 - RNA, 19 nt, Artificial Sequence
  Description of Artificial Sequence: Synthetic oligonucleotide
gagagaauaaauuugcagg

SEQ ID NO: 961089 - RNA, 19 nt, Artificial Sequence
  Description of Artificial Sequence: Synthetic oligonucleotide
gaaacuaacugcuaguagg

SEQ ID NO: 961090 - RNA, 19 nt, Artificial Sequence
  Description of Artificial Sequence: Synthetic oligonucleotide
ugaguuuauaaauagggag

SEQ ID NO: 961091 - RNA, 19 nt, Artificial Sequence
  Description of Artificial Sequence: Synthetic oligonucleotide
uuuguuaggaaguaaaacu

SEQ ID NO: 961092 - RNA, 19 nt, Artificial Sequence
  Description of Artificial Sequence: Synthetic oligonucleotide
uguaauguggucaucaugu

SEQ ID NO: 961093 - RNA, 19 nt, Artificial Sequence
  Description of Artificial Sequence: Synthetic oligonucleotide
aauguggucaucauguggc

SEQ ID NO: 961094 - RNA, 19 nt, Artificial Sequence
  Description of Artificial Sequence: Synthetic oligonucleotide
uguguuaagagcaaacccc

SEQ ID NO: 961095 - RNA, 19 nt, Artificial Sequence
  Description of Artificial Sequence: Synthetic oligonucleotide
uuuuagucucuuuagacag

SEQ ID NO: 961096 - RNA, 19 nt, Artificial Sequence
  Description of Artificial Sequence: Synthetic oligonucleotide
uuugaauauacaauggccu

SEQ ID NO: 961097 - RNA, 19 nt, Artificial Sequence
  Description of Artificial Sequence: Synthetic oligonucleotide
ugauaucuaaauuauauaa

SEQ ID NO: 961098 - RNA, 19 nt, Artificial Sequence
  Description of Artificial Sequence: Synthetic oligonucleotide
aauaaauuugcaggugacc

SEQ ID NO: 961099 - RNA, 19 nt, Artificial Sequence
  Description of Artificial Sequence: Synthetic oligonucleotide
acuaaauguuaauaaacuc

SEQ ID NO: 961100 - RNA, 19 nt, Artificial Sequence
  Description of Artificial Sequence: Synthetic oligonucleotide
acuuuuagucucuuuagac

SEQ ID NO: 961101 - RNA, 19 nt, Artificial Sequence
  Description of Artificial Sequence: Synthetic oligonucleotide
uuuguauauaucagaauca

SEQ ID NO: 961102 - RNA, 19 nt, Artificial Sequence
  Description of Artificial Sequence: Synthetic oligonucleotide
cuaacauucaguuuugcac

SEQ ID NO: 961103 - RNA, 19 nt, Artificial Sequence
  Description of Artificial Sequence: Synthetic oligonucleotide
agugaguuuauaaauaggg

SEQ ID NO: 961104 - RNA, 19 nt, Artificial Sequence
  Description of Artificial Sequence: Synthetic oligonucleotide
uccauucaaaacuagagcu

SEQ ID NO: 961105 - RNA, 19 nt, Artificial Sequence
  Description of Artificial Sequence: Synthetic oligonucleotide
cuugaauaaccgcagaugc

SEQ ID NO: 961106 - RNA, 19 nt, Artificial Sequence
  Description of Artificial Sequence: Synthetic oligonucleotide
uuguuaggaaguaaaacug

SEQ ID NO: 961107 - RNA, 19 nt, Artificial Sequence
  Description of Artificial Sequence: Synthetic oligonucleotide
uuuucugcauuauugaaac

SEQ ID NO: 961108 - RNA, 19 nt, Artificial Sequence
  Description of Artificial Sequence: Synthetic oligonucleotide
ugauguauaacaucuuccc

SEQ ID NO: 961109 - RNA, 19 nt, Artificial Sequence
  Description of Artificial Sequence: Synthetic oligonucleotide
aaaacgcuaacauucaguu

SEQ ID NO: 961110 - RNA, 19 nt, Artificial Sequence
  Description of Artificial Sequence: Synthetic oligonucleotide
uacuaguucaaucugaauu

SEQ ID NO: 961111 - RNA, 19 nt, Artificial Sequence
  Description of Artificial Sequence: Synthetic oligonucleotide
uggggugugaagcagcucg

SEQ ID NO: 961112 - RNA, 19 nt, Artificial Sequence
  Description of Artificial Sequence: Synthetic oligonucleotide
uuaaccuugaauccugcug

SEQ ID NO: 961113 - RNA, 19 nt, Artificial Sequence
  Description of Artificial Sequence: Synthetic oligonucleotide
aacauguuaaucuuccaaa

SEQ ID NO: 961114 - RNA, 19 nt, Artificial Sequence
  Description of Artificial Sequence: Synthetic oligonucleotide
acuuggaacauguuaaucu

SEQ ID NO: 961115 - RNA, 19 nt, Artificial Sequence
  Description of Artificial Sequence: Synthetic oligonucleotide
ucuacaagcacacacucuc

SEQ ID NO: 961116 - RNA, 19 nt, Artificial Sequence
  Description of Artificial Sequence: Synthetic oligonucleotide
gugguaacuacccacaaag

SEQ ID NO: 961117 - RNA, 19 nt, Artificial Sequence
  Description of Artificial Sequence: Synthetic oligonucleotide
uuugaaguggccaucucug

SEQ ID NO: 961118 - RNA, 19 nt, Artificial Sequence
  Description of Artificial Sequence: Synthetic oligonucleotide
uuguguuaagagcaaaccc

SEQ ID NO: 961119 - RNA, 19 nt, Artificial Sequence
  Description of Artificial Sequence: Synthetic oligonucleotide
gaaucaucugcuaacaccc

SEQ ID NO: 961120 - RNA, 19 nt, Artificial Sequence
  Description of Artificial Sequence: Synthetic oligonucleotide
ucuacuuuucggaacuucc

SEQ ID NO: 961121 - RNA, 19 nt, Artificial Sequence
  Description of Artificial Sequence: Synthetic oligonucleotide
cuugggucgaccaucaagc

SEQ ID NO: 961122 - RNA, 19 nt, Artificial Sequence
  Description of Artificial Sequence: Synthetic oligonucleotide
gaguuuauaaauagggagc

SEQ ID NO: 961123 - RNA, 19 nt, Artificial Sequence
  Description of Artificial Sequence: Synthetic oligonucleotide
aaacuaacugcuaguaggg

SEQ ID NO: 961124 - RNA, 19 nt, Artificial Sequence
  Description of Artificial Sequence: Synthetic oligonucleotide
agaaaaugggguugucggc

SEQ ID NO: 961125 - RNA, 19 nt, Artificial Sequence
  Description of Artificial Sequence: Synthetic oligonucleotide
uuuguguuaagagcaaacc

SEQ ID NO: 961126 - RNA, 19 nt, Artificial Sequence
  Description of Artificial Sequence: Synthetic oligonucleotide
acuaacugcuaguagggag

SEQ ID NO: 961127 - RNA, 19 nt, Artificial Sequence
  Description of Artificial Sequence: Synthetic oligonucleotide
gaauauacaauggccuugg

SEQ ID NO: 961128 - RNA, 19 nt, Artificial Sequence
  Description of Artificial Sequence: Synthetic oligonucleotide
uuucacuaggccuugaaua

SEQ ID NO: 961129 - RNA, 19 nt, Artificial Sequence
  Description of Artificial Sequence: Synthetic oligonucleotide
aauauacaauggccuuggc

SEQ ID NO: 961130 - RNA, 19 nt, Artificial Sequence
  Description of Artificial Sequence: Synthetic oligonucleotide
gauguauaacaucuucccc

SEQ ID NO: 961131 - RNA, 19 nt, Artificial Sequence
  Description of Artificial Sequence: Synthetic oligonucleotide
cauugaacagcugagcagg

SEQ ID NO: 961132 - RNA, 19 nt, Artificial Sequence
  Description of Artificial Sequence: Synthetic oligonucleotide
auaaauuugcaggugacca

SEQ ID NO: 961133 - RNA, 19 nt, Artificial Sequence
  Description of Artificial Sequence: Synthetic oligonucleotide
guaaaagccagauccauca

SEQ ID NO: 961134 - RNA, 19 nt, Artificial Sequence
  Description of Artificial Sequence: Synthetic oligonucleotide
aggcuuuccauucaaaacu

SEQ ID NO: 961135 - RNA, 19 nt, Artificial Sequence
  Description of Artificial Sequence: Synthetic oligonucleotide
uuuacuaguucaaucugaa

SEQ ID NO: 961136 - RNA, 19 nt, Artificial Sequence
  Description of Artificial Sequence: Synthetic oligonucleotide
uuauuuucccagcucguug

SEQ ID NO: 961137 - RNA, 19 nt, Artificial Sequence
  Description of Artificial Sequence: Synthetic oligonucleotide
ugcuguaugauaucuaaau

SEQ ID NO: 961138 - RNA, 19 nt, Artificial Sequence
  Description of Artificial Sequence: Synthetic oligonucleotide
ucugaaucccauauuguaa

SEQ ID NO: 961139 - RNA, 19 nt, Artificial Sequence
  Description of Artificial Sequence: Synthetic oligonucleotide
ucgaccaucaagccaguag

SEQ ID NO: 961140 - RNA, 19 nt, Artificial Sequence
  Description of Artificial Sequence: Synthetic oligonucleotide
agauuuugacagcugaugu

SEQ ID NO: 961141 - RNA, 19 nt, Artificial Sequence
  Description of Artificial Sequence: Synthetic oligonucleotide
ucguacuaaauguuaauaa

SEQ ID NO: 961142 - RNA, 19 nt, Artificial Sequence
  Description of Artificial Sequence: Synthetic oligonucleotide
acuaguucaaucugaauua

SEQ ID NO: 961143 - RNA, 19 nt, Artificial Sequence
  Description of Artificial Sequence: Synthetic oligonucleotide
uaaauuugcaggugaccag

SEQ ID NO: 961144 - RNA, 19 nt, Artificial Sequence
  Description of Artificial Sequence: Synthetic oligonucleotide
cauguuaaucuuccaaagc

SEQ ID NO: 961145 - RNA, 19 nt, Artificial Sequence
  Description of Artificial Sequence: Synthetic oligonucleotide
ugaauaaccgcagaugcgu

SEQ ID NO: 961146 - RNA, 19 nt, Artificial Sequence
  Description of Artificial Sequence: Synthetic oligonucleotide
acagauccgagccuuccgc

SEQ ID NO: 961147 - RNA, 19 nt, Artificial Sequence
  Description of Artificial Sequence: Synthetic oligonucleotide
gguugcuugauacuugugg

SEQ ID NO: 961148 - RNA, 19 nt, Artificial Sequence
  Description of Artificial Sequence: Synthetic oligonucleotide
uuucggaacuuccucagcu

SEQ ID NO: 961149 - RNA, 19 nt, Artificial Sequence
  Description of Artificial Sequence: Synthetic oligonucleotide
aauaaccgcagaugcguug

SEQ ID NO: 961150 - RNA, 19 nt, Artificial Sequence
  Description of Artificial Sequence: Synthetic oligonucleotide
uauaaauagggagcacagg

SEQ ID NO: 961151 - RNA, 19 nt, Artificial Sequence
  Description of Artificial Sequence: Synthetic oligonucleotide
aaacacuccccacuggacu

SEQ ID NO: 961152 - RNA, 19 nt, Artificial Sequence
  Description of Artificial Sequence: Synthetic oligonucleotide
auuuuaguucccauguuuc

SEQ ID NO: 961153 - RNA, 19 nt, Artificial Sequence
  Description of Artificial Sequence: Synthetic oligonucleotide
aucaguucauucucugacg

SEQ ID NO: 961154 - RNA, 19 nt, Artificial Sequence
  Description of Artificial Sequence: Synthetic oligonucleotide
aacagauccgagccuuccg

SEQ ID NO: 961155 - RNA, 19 nt, Artificial Sequence
  Description of Artificial Sequence: Synthetic oligonucleotide
ugcuuaucacccuggagag

SEQ ID NO: 961156 - RNA, 19 nt, Artificial Sequence
  Description of Artificial Sequence: Synthetic oligonucleotide
ggagagaauaaauuugcag

SEQ ID NO: 961157 - RNA, 19 nt, Artificial Sequence
  Description of Artificial Sequence: Synthetic oligonucleotide
auauacaauggccuuggcu

SEQ ID NO: 961158 - RNA, 19 nt, Artificial Sequence
  Description of Artificial Sequence: Synthetic oligonucleotide
acucuacaagcacacacuc

SEQ ID NO: 961159 - RNA, 19 nt, Artificial Sequence
  Description of Artificial Sequence: Synthetic oligonucleotide
ucaacuguugccagccaag

SEQ ID NO: 961160 - RNA, 19 nt, Artificial Sequence
  Description of Artificial Sequence: Synthetic oligonucleotide
ucucgagggacaaacacuc

SEQ ID NO: 961161 - RNA, 19 nt, Artificial Sequence
  Description of Artificial Sequence: Synthetic oligonucleotide
aaaaugggguugucggcag

SEQ ID NO: 961162 - RNA, 19 nt, Artificial Sequence
  Description of Artificial Sequence: Synthetic oligonucleotide
ugacguuucauuuaaccuu

SEQ ID NO: 961163 - RNA, 19 nt, Artificial Sequence
  Description of Artificial Sequence: Synthetic oligonucleotide
agauauacuccuaucuuuc

SEQ ID NO: 961164 - RNA, 19 nt, Artificial Sequence
  Description of Artificial Sequence: Synthetic oligonucleotide
acauguauauguguauuuc

SEQ ID NO: 961165 - RNA, 19 nt, Artificial Sequence
  Description of Artificial Sequence: Synthetic oligonucleotide
cuucgaaacuaacugcuag

SEQ ID NO: 961166 - RNA, 19 nt, Artificial Sequence
  Description of Artificial Sequence: Synthetic oligonucleotide
uagucuacuuuucggaacu

SEQ ID NO: 961167 - RNA, 19 nt, Artificial Sequence
  Description of Artificial Sequence: Synthetic oligonucleotide
ugaauauacaauggccuug

SEQ ID NO: 961168 - RNA, 19 nt, Artificial Sequence
  Description of Artificial Sequence: Synthetic oligonucleotide
ucgagggacaaacacuccc

SEQ ID NO: 961169 - RNA, 19 nt, Artificial Sequence
  Description of Artificial Sequence: Synthetic oligonucleotide
uucacuaggccuugaauaa

SEQ ID NO: 961170 - RNA, 19 nt, Artificial Sequence
  Description of Artificial Sequence: Synthetic oligonucleotide
gguauguucucuguuaagg

SEQ ID NO: 961171 - RNA, 19 nt, Artificial Sequence
  Description of Artificial Sequence: Synthetic oligonucleotide
uguauauaucagaaucauc

SEQ ID NO: 961172 - RNA, 19 nt, Artificial Sequence
  Description of Artificial Sequence: Synthetic oligonucleotide
cugaauuagaccgucauca

SEQ ID NO: 961173 - RNA, 19 nt, Artificial Sequence
  Description of Artificial Sequence: Synthetic oligonucleotide
aucaagccaguagauauac

SEQ ID NO: 961174 - RNA, 19 nt, Artificial Sequence
  Description of Artificial Sequence: Synthetic oligonucleotide
uguauauguguauuucuua

SEQ ID NO: 961175 - RNA, 19 nt, Artificial Sequence
  Description of Artificial Sequence: Synthetic oligonucleotide
ucauuuaaccuugaauccu

SEQ ID NO: 961176 - RNA, 19 nt, Artificial Sequence
  Description of Artificial Sequence: Synthetic oligonucleotide
caucaccauaucauggugc

SEQ ID NO: 961177 - RNA, 19 nt, Artificial Sequence
  Description of Artificial Sequence: Synthetic oligonucleotide
guuaaggggaguuguauca

SEQ ID NO: 961178 - RNA, 19 nt, Artificial Sequence
  Description of Artificial Sequence: Synthetic oligonucleotide
uaacuauuucuucgaaacu

SEQ ID NO: 961179 - RNA, 19 nt, Artificial Sequence
  Description of Artificial Sequence: Synthetic oligonucleotide
uccaaaggcggauuuugcc

SEQ ID NO: 961180 - RNA, 19 nt, Artificial Sequence
  Description of Artificial Sequence: Synthetic oligonucleotide
uagauauacuccuaucuuu

SEQ ID NO: 961181 - RNA, 19 nt, Artificial Sequence
  Description of Artificial Sequence: Synthetic oligonucleotide
ucaaaacuagagcuuuggu

SEQ ID NO: 961182 - RNA, 19 nt, Artificial Sequence
  Description of Artificial Sequence: Synthetic oligonucleotide
uuuagucucuuuagacagc

SEQ ID NO: 961183 - RNA, 19 nt, Artificial Sequence
  Description of Artificial Sequence: Synthetic oligonucleotide
uucugaaucccauauugua

SEQ ID NO: 961184 - RNA, 19 nt, Artificial Sequence
  Description of Artificial Sequence: Synthetic oligonucleotide
cuucaguacuuuuagucuc

SEQ ID NO: 961185 - RNA, 19 nt, Artificial Sequence
  Description of Artificial Sequence: Synthetic oligonucleotide
ggagacuucguacuaaaug

SEQ ID NO: 961186 - RNA, 19 nt, Artificial Sequence
  Description of Artificial Sequence: Synthetic oligonucleotide
uucgagcucaguuucauuu

SEQ ID NO: 961187 - RNA, 19 nt, Artificial Sequence
  Description of Artificial Sequence: Synthetic oligonucleotide
uguagucuacuuuucggaa

SEQ ID NO: 961188 - RNA, 19 nt, Artificial Sequence
  Description of Artificial Sequence: Synthetic oligonucleotide
cugcuuaucacccuggaga

SEQ ID NO: 961189 - RNA, 19 nt, Artificial Sequence
  Description of Artificial Sequence: Synthetic oligonucleotide
uucgaaacuaacugcuagu

SEQ ID NO: 961190 - RNA, 19 nt, Artificial Sequence
  Description of Artificial Sequence: Synthetic oligonucleotide
uguuaaggggaguuguauc

SEQ ID NO: 961191 - RNA, 19 nt, Artificial Sequence
  Description of Artificial Sequence: Synthetic oligonucleotide
uuguauauaucagaaucau

SEQ ID NO: 961192 - RNA, 19 nt, Artificial Sequence
  Description of Artificial Sequence: Synthetic oligonucleotide
aucuuguuaucagagugag

SEQ ID NO: 961193 - RNA, 19 nt, Artificial Sequence
  Description of Artificial Sequence: Synthetic oligonucleotide
uccuaucuuucacuaggcc

SEQ ID NO: 961194 - RNA, 19 nt, Artificial Sequence
  Description of Artificial Sequence: Synthetic oligonucleotide
uacuuuucggaacuuccuc

SEQ ID NO: 961195 - RNA, 19 nt, Artificial Sequence
  Description of Artificial Sequence: Synthetic oligonucleotide
gagaauaaauuugcaggug

SEQ ID NO: 961196 - RNA, 19 nt, Artificial Sequence
  Description of Artificial Sequence: Synthetic oligonucleotide
aggugagacggagaugugc

SEQ ID NO: 961197 - RNA, 19 nt, Artificial Sequence
  Description of Artificial Sequence: Synthetic oligonucleotide
gagaaguacagaacaaauc

SEQ ID NO: 961198 - RNA, 19 nt, Artificial Sequence
  Description of Artificial Sequence: Synthetic oligonucleotide
uuguuaucagagugagaag

SEQ ID NO: 961199 - RNA, 19 nt, Artificial Sequence
  Description of Artificial Sequence: Synthetic oligonucleotide
uucggugaauaacuguuau

SEQ ID NO: 961200 - RNA, 19 nt, Artificial Sequence
  Description of Artificial Sequence: Synthetic oligonucleotide
aaaggcggauuuugccauc

SEQ ID NO: 961201 - RNA, 19 nt, Artificial Sequence
  Description of Artificial Sequence: Synthetic oligonucleotide
agaaugccauugucggucg

SEQ ID NO: 961202 - RNA, 19 nt, Artificial Sequence
  Description of Artificial Sequence: Synthetic oligonucleotide
gaaaaugggguugucggca

SEQ ID NO: 961203 - RNA, 19 nt, Artificial Sequence
  Description of Artificial Sequence: Synthetic oligonucleotide
uuaaggggaguuguaucag

SEQ ID NO: 961204 - RNA, 19 nt, Artificial Sequence
  Description of Artificial Sequence: Synthetic oligonucleotide
gaugcguugagauuucggu

SEQ ID NO: 961205 - RNA, 19 nt, Artificial Sequence
  Description of Artificial Sequence: Synthetic oligonucleotide
uucguacuaaauguuaaua

SEQ ID NO: 961206 - RNA, 19 nt, Artificial Sequence
  Description of Artificial Sequence: Synthetic oligonucleotide
cuacaagcacacacucucg

SEQ ID NO: 961207 - RNA, 19 nt, Artificial Sequence
  Description of Artificial Sequence: Synthetic oligonucleotide
caucucgagggacaaacac

SEQ ID NO: 961208 - RNA, 19 nt, Artificial Sequence
  Description of Artificial Sequence: Synthetic oligonucleotide
guagucuacuuuucggaac

SEQ ID NO: 961209 - RNA, 19 nt, Artificial Sequence
  Description of Artificial Sequence: Synthetic oligonucleotide
augcguugagauuucggug

SEQ ID NO: 961210 - RNA, 19 nt, Artificial Sequence
  Description of Artificial Sequence: Synthetic oligonucleotide
ugugguaacuacccacaaa

SEQ ID NO: 961211 - RNA, 19 nt, Artificial Sequence
  Description of Artificial Sequence: Synthetic oligonucleotide
cuuccgcagacugagaaac

SEQ ID NO: 961212 - RNA, 19 nt, Artificial Sequence
  Description of Artificial Sequence: Synthetic oligonucleotide
ucucugcuagcugugacca

SEQ ID NO: 961213 - RNA, 19 nt, Artificial Sequence
  Description of Artificial Sequence: Synthetic oligonucleotide
cacugguaagcuucugagg

SEQ ID NO: 961214 - RNA, 19 nt, Artificial Sequence
  Description of Artificial Sequence: Synthetic oligonucleotide
ucguuaauugcagguaugu

SEQ ID NO: 961215 - RNA, 19 nt, Artificial Sequence
  Description of Artificial Sequence: Synthetic oligonucleotide
ugagacggagaugugcuca

SEQ ID NO: 961216 - RNA, 19 nt, Artificial Sequence
  Description of Artificial Sequence: Synthetic oligonucleotide
agguacuuggaacauguua

SEQ ID NO: 961217 - RNA, 19 nt, Artificial Sequence
  Description of Artificial Sequence: Synthetic oligonucleotide
cuaggccuugaauaaccgc

SEQ ID NO: 961218 - RNA, 19 nt, Artificial Sequence
  Description of Artificial Sequence: Synthetic oligonucleotide
cuaguucaaucugaauuag

SEQ ID NO: 961219 - RNA, 19 nt, Artificial Sequence
  Description of Artificial Sequence: Synthetic oligonucleotide
acagaacaaaucuccugca

SEQ ID NO: 961220 - RNA, 19 nt, Artificial Sequence
  Description of Artificial Sequence: Synthetic oligonucleotide
uuguaacuauuucuucgaa

SEQ ID NO: 961221 - RNA, 19 nt, Artificial Sequence
  Description of Artificial Sequence: Synthetic oligonucleotide
auacaauggccuuggcuca

SEQ ID NO: 961222 - RNA, 19 nt, Artificial Sequence
  Description of Artificial Sequence: Synthetic oligonucleotide
cuugugguaacuacccaca

SEQ ID NO: 961223 - RNA, 19 nt, Artificial Sequence
  Description of Artificial Sequence: Synthetic oligonucleotide
gagauuucggugaauaacu

SEQ ID NO: 961224 - RNA, 19 nt, Artificial Sequence
  Description of Artificial Sequence: Synthetic oligonucleotide
ugcaguucgagcucaguuu

SEQ ID NO: 961225 - RNA, 19 nt, Artificial Sequence
  Description of Artificial Sequence: Synthetic oligonucleotide
uugguucuugggucgacca

SEQ ID NO: 961226 - RNA, 19 nt, Artificial Sequence
  Description of Artificial Sequence: Synthetic oligonucleotide
gagagcuguaaugugguca

SEQ ID NO: 961227 - RNA, 19 nt, Artificial Sequence
  Description of Artificial Sequence: Synthetic oligonucleotide
auuucggugaauaacuguu

SEQ ID NO: 961228 - RNA, 19 nt, Artificial Sequence
  Description of Artificial Sequence: Synthetic oligonucleotide
ugggucgaccaucaagcca

SEQ ID NO: 961229 - RNA, 19 nt, Artificial Sequence
  Description of Artificial Sequence: Synthetic oligonucleotide
cagacuuuccucugccagc

SEQ ID NO: 961230 - RNA, 19 nt, Artificial Sequence
  Description of Artificial Sequence: Synthetic oligonucleotide
agagcaaaccccuggguuu

SEQ ID NO: 961231 - RNA, 19 nt, Artificial Sequence
  Description of Artificial Sequence: Synthetic oligonucleotide
uuucggugaauaacuguua

SEQ ID NO: 961232 - RNA, 19 nt, Artificial Sequence
  Description of Artificial Sequence: Synthetic oligonucleotide
ugaauuagaccgucaucau

SEQ ID NO: 961233 - RNA, 19 nt, Artificial Sequence
  Description of Artificial Sequence: Synthetic oligonucleotide
gcgaucuuuguguuaagag

SEQ ID NO: 961234 - RNA, 19 nt, Artificial Sequence
  Description of Artificial Sequence: Synthetic oligonucleotide
cuguaauguggucaucaug

SEQ ID NO: 961235 - RNA, 19 nt, Artificial Sequence
  Description of Artificial Sequence: Synthetic oligonucleotide
agcacaggaaagaagcuga

SEQ ID NO: 961236 - RNA, 19 nt, Artificial Sequence
  Description of Artificial Sequence: Synthetic oligonucleotide
uugucggucgugccgagaa

SEQ ID NO: 961237 - RNA, 19 nt, Artificial Sequence
  Description of Artificial Sequence: Synthetic oligonucleotide
accgcagaugcguugagau

SEQ ID NO: 961238 - RNA, 19 nt, Artificial Sequence
  Description of Artificial Sequence: Synthetic oligonucleotide
ugugaagcagcucguuaau

SEQ ID NO: 961239 - RNA, 19 nt, Artificial Sequence
  Description of Artificial Sequence: Synthetic oligonucleotide
aaacgcuaacauucaguuu

SEQ ID NO: 961240 - RNA, 19 nt, Artificial Sequence
  Description of Artificial Sequence: Synthetic oligonucleotide
cuguagucuacuuuucgga

SEQ ID NO: 961241 - RNA, 19 nt, Artificial Sequence
  Description of Artificial Sequence: Synthetic oligonucleotide
uccgcagacugagaaacug

SEQ ID NO: 961242 - RNA, 19 nt, Artificial Sequence
  Description of Artificial Sequence: Synthetic oligonucleotide
guaauguggucaucaugug

SEQ ID NO: 961243 - RNA, 19 nt, Artificial Sequence
  Description of Artificial Sequence: Synthetic oligonucleotide
acuccacugcauugaacag

SEQ ID NO: 961244 - RNA, 19 nt, Artificial Sequence
  Description of Artificial Sequence: Synthetic oligonucleotide
aauuccuccaaaggcggau

SEQ ID NO: 961245 - RNA, 19 nt, Artificial Sequence
  Description of Artificial Sequence: Synthetic oligonucleotide
cuuaucacccuggagagaa

SEQ ID NO: 961246 - RNA, 19 nt, Artificial Sequence
  Description of Artificial Sequence: Synthetic oligonucleotide
uaaggggaguuguaucagu

SEQ ID NO: 961247 - RNA, 19 nt, Artificial Sequence
  Description of Artificial Sequence: Synthetic oligonucleotide
cucguuaauugcagguaug

SEQ ID NO: 961248 - RNA, 19 nt, Artificial Sequence
  Description of Artificial Sequence: Synthetic oligonucleotide
uuugguucuugggucgacc

SEQ ID NO: 961249 - RNA, 19 nt, Artificial Sequence
  Description of Artificial Sequence: Synthetic oligonucleotide
ucuucgaaacuaacugcua

SEQ ID NO: 961250 - RNA, 19 nt, Artificial Sequence
  Description of Artificial Sequence: Synthetic oligonucleotide
ucgaaacuaacugcuagua

SEQ ID NO: 961251 - RNA, 19 nt, Artificial Sequence
  Description of Artificial Sequence: Synthetic oligonucleotide
gugaguuuauaaauaggga

SEQ ID NO: 961252 - RNA, 19 nt, Artificial Sequence
  Description of Artificial Sequence: Synthetic oligonucleotide
cgaucuuuguguuaagagc

SEQ ID NO: 961253 - RNA, 19 nt, Artificial Sequence
  Description of Artificial Sequence: Synthetic oligonucleotide
agauccgagccuuccgcag

SEQ ID NO: 961254 - RNA, 19 nt, Artificial Sequence
  Description of Artificial Sequence: Synthetic oligonucleotide
uugcuguaugauaucuaaa

SEQ ID NO: 961255 - RNA, 19 nt, Artificial Sequence
  Description of Artificial Sequence: Synthetic oligonucleotide
auuagaccgucaucauuga

SEQ ID NO: 961256 - RNA, 19 nt, Artificial Sequence
  Description of Artificial Sequence: Synthetic oligonucleotide
gauuucggugaauaacugu

SEQ ID NO: 961257 - RNA, 19 nt, Artificial Sequence
  Description of Artificial Sequence: Synthetic oligonucleotide
uguacucuugcuguaugau

SEQ ID NO: 961258 - RNA, 19 nt, Artificial Sequence
  Description of Artificial Sequence: Synthetic oligonucleotide
caaacacuccccacuggac

SEQ ID NO: 961259 - RNA, 19 nt, Artificial Sequence
  Description of Artificial Sequence: Synthetic oligonucleotide
gggucgaccaucaagccag

SEQ ID NO: 961260 - RNA, 19 nt, Artificial Sequence
  Description of Artificial Sequence: Synthetic oligonucleotide
gcugauguauaacaucuuc

SEQ ID NO: 961261 - RNA, 19 nt, Artificial Sequence
  Description of Artificial Sequence: Synthetic oligonucleotide
aggggucggguuccaaaac

SEQ ID NO: 961262 - RNA, 19 nt, Artificial Sequence
  Description of Artificial Sequence: Synthetic oligonucleotide
aacuaacugcuaguaggga

SEQ ID NO: 961263 - RNA, 19 nt, Artificial Sequence
  Description of Artificial Sequence: Synthetic oligonucleotide
ucggugaauaacuguuauc

SEQ ID NO: 961264 - RNA, 19 nt, Artificial Sequence
  Description of Artificial Sequence: Synthetic oligonucleotide
gucggucgugccgagaagg

SEQ ID NO: 961265 - RNA, 19 nt, Artificial Sequence
  Description of Artificial Sequence: Synthetic oligonucleotide
agagaaugccauugucggu

SEQ ID NO: 961266 - RNA, 19 nt, Artificial Sequence
  Description of Artificial Sequence: Synthetic oligonucleotide
acuaggccuugaauaaccg

SEQ ID NO: 961267 - RNA, 19 nt, Artificial Sequence
  Description of Artificial Sequence: Synthetic oligonucleotide
ccuugaauccugcuguugc

SEQ ID NO: 961268 - RNA, 19 nt, Artificial Sequence
  Description of Artificial Sequence: Synthetic oligonucleotide
uuacuaguucaaucugaau

SEQ ID NO: 961269 - RNA, 19 nt, Artificial Sequence
  Description of Artificial Sequence: Synthetic oligonucleotide
auaaccgcagaugcguuga

SEQ ID NO: 961270 - RNA, 19 nt, Artificial Sequence
  Description of Artificial Sequence: Synthetic oligonucleotide
uugggucgaccaucaagcc

SEQ ID NO: 961271 - RNA, 19 nt, Artificial Sequence
  Description of Artificial Sequence: Synthetic oligonucleotide
agaugcguugagauuucgg

SEQ ID NO: 961272 - RNA, 19 nt, Artificial Sequence
  Description of Artificial Sequence: Synthetic oligonucleotide
acugcuaguagggagccau

SEQ ID NO: 961273 - RNA, 19 nt, Artificial Sequence
  Description of Artificial Sequence: Synthetic oligonucleotide
ugaguaggggucggguucc

SEQ ID NO: 961274 - RNA, 19 nt, Artificial Sequence
  Description of Artificial Sequence: Synthetic oligonucleotide
aaucugaauuagaccguca

SEQ ID NO: 961275 - RNA, 19 nt, Artificial Sequence
  Description of Artificial Sequence: Synthetic oligonucleotide
ugccuuauuuucccagcuc

SEQ ID NO: 961276 - RNA, 19 nt, Artificial Sequence
  Description of Artificial Sequence: Synthetic oligonucleotide
ugcuauagguccacagcuu

SEQ ID NO: 961277 - RNA, 19 nt, Artificial Sequence
  Description of Artificial Sequence: Synthetic oligonucleotide
ggggucggguuccaaaacg

SEQ ID NO: 961278 - RNA, 19 nt, Artificial Sequence
  Description of Artificial Sequence: Synthetic oligonucleotide
uaggggucggguuccaaaa

SEQ ID NO: 961279 - RNA, 19 nt, Artificial Sequence
  Description of Artificial Sequence: Synthetic oligonucleotide
guugguugcuugauacuug

SEQ ID NO: 961280 - RNA, 19 nt, Artificial Sequence
  Description of Artificial Sequence: Synthetic oligonucleotide
ucaagccaguagauauacu

SEQ ID NO: 961281 - RNA, 19 nt, Artificial Sequence
  Description of Artificial Sequence: Synthetic oligonucleotide
acuucguacuaaauguuaa

SEQ ID NO: 961282 - RNA, 19 nt, Artificial Sequence
  Description of Artificial Sequence: Synthetic oligonucleotide
ucucgccacucuacaagca

SEQ ID NO: 961283 - RNA, 19 nt, Artificial Sequence
  Description of Artificial Sequence: Synthetic oligonucleotide
ucucgcccaccacucagca

SEQ ID NO: 961284 - RNA, 19 nt, Artificial Sequence
  Description of Artificial Sequence: Synthetic oligonucleotide
aagcgagggagaaacuccu

SEQ ID NO: 961285 - RNA, 19 nt, Artificial Sequence
  Description of Artificial Sequence: Synthetic oligonucleotide
agauuucggugaauaacug

SEQ ID NO: 961286 - RNA, 19 nt, Artificial Sequence
  Description of Artificial Sequence: Synthetic oligonucleotide
cucgccacucuacaagcac

SEQ ID NO: 961287 - RNA, 19 nt, Artificial Sequence
  Description of Artificial Sequence: Synthetic oligonucleotide
caaaacgcuaacauucagu

SEQ ID NO: 961288 - RNA, 19 nt, Artificial Sequence
  Description of Artificial Sequence: Synthetic oligonucleotide
guuuauaaauagggagcac

SEQ ID NO: 961289 - RNA, 19 nt, Artificial Sequence
  Description of Artificial Sequence: Synthetic oligonucleotide
uuagaccgucaucauugau

SEQ ID NO: 961290 - RNA, 19 nt, Artificial Sequence
  Description of Artificial Sequence: Synthetic oligonucleotide
cagcuagccagcuguaguc

SEQ ID NO: 961291 - RNA, 19 nt, Artificial Sequence
  Description of Artificial Sequence: Synthetic oligonucleotide
ucccaauaucaaagaaaau

SEQ ID NO: 961292 - RNA, 19 nt, Artificial Sequence
  Description of Artificial Sequence: Synthetic oligonucleotide
cugcauugaacagcugagc

SEQ ID NO: 961293 - RNA, 19 nt, Artificial Sequence
  Description of Artificial Sequence: Synthetic oligonucleotide
aucucgagggacaaacacu

SEQ ID NO: 961294 - RNA, 19 nt, Artificial Sequence
  Description of Artificial Sequence: Synthetic oligonucleotide
guagauauacuccuaucuu

SEQ ID NO: 961295 - RNA, 19 nt, Artificial Sequence
  Description of Artificial Sequence: Synthetic oligonucleotide
ggugccuuauuuucccagc

SEQ ID NO: 961296 - RNA, 19 nt, Artificial Sequence
  Description of Artificial Sequence: Synthetic oligonucleotide
ugggguugucggcagacuu

SEQ ID NO: 961297 - RNA, 19 nt, Artificial Sequence
  Description of Artificial Sequence: Synthetic oligonucleotide
aguacgugggcuggggugu

SEQ ID NO: 961298 - RNA, 19 nt, Artificial Sequence
  Description of Artificial Sequence: Synthetic oligonucleotide
uugauacuugugguaacua

SEQ ID NO: 961299 - RNA, 19 nt, Artificial Sequence
  Description of Artificial Sequence: Synthetic oligonucleotide
aaucaucugcuaacaccca

SEQ ID NO: 961300 - RNA, 19 nt, Artificial Sequence
  Description of Artificial Sequence: Synthetic oligonucleotide
aaccuugaauccugcuguu

SEQ ID NO: 961301 - RNA, 19 nt, Artificial Sequence
  Description of Artificial Sequence: Synthetic oligonucleotide
ugucggucgugccgagaag

SEQ ID NO: 961302 - RNA, 19 nt, Artificial Sequence
  Description of Artificial Sequence: Synthetic oligonucleotide
cuauagguccacagcuuca

SEQ ID NO: 961303 - RNA, 19 nt, Artificial Sequence
  Description of Artificial Sequence: Synthetic oligonucleotide
uaaccgcagaugcguugag

SEQ ID NO: 961304 - RNA, 19 nt, Artificial Sequence
  Description of Artificial Sequence: Synthetic oligonucleotide
ggagaugugcucaauagua

SEQ ID NO: 961305 - RNA, 19 nt, Artificial Sequence
  Description of Artificial Sequence: Synthetic oligonucleotide
gaaugacccagggacaucu

SEQ ID NO: 961306 - RNA, 19 nt, Artificial Sequence
  Description of Artificial Sequence: Synthetic oligonucleotide
ucgagcucaguuucauuuu

SEQ ID NO: 961307 - RNA, 19 nt, Artificial Sequence
  Description of Artificial Sequence: Synthetic oligonucleotide
gguuccaaaacgcuaacau

SEQ ID NO: 961308 - RNA, 19 nt, Artificial Sequence
  Description of Artificial Sequence: Synthetic oligonucleotide
cucgagggacaaacacucc

SEQ ID NO: 961309 - RNA, 19 nt, Artificial Sequence
  Description of Artificial Sequence: Synthetic oligonucleotide
cagauccaucaccauauca

SEQ ID NO: 961310 - RNA, 19 nt, Artificial Sequence
  Description of Artificial Sequence: Synthetic oligonucleotide
ucggucgugccgagaaggu

SEQ ID NO: 961311 - RNA, 19 nt, Artificial Sequence
  Description of Artificial Sequence: Synthetic oligonucleotide
uuccgcagacugagaaacu

SEQ ID NO: 961312 - RNA, 19 nt, Artificial Sequence
  Description of Artificial Sequence: Synthetic oligonucleotide
gcagcucguuaauugcagg

SEQ ID NO: 961313 - RNA, 19 nt, Artificial Sequence
  Description of Artificial Sequence: Synthetic oligonucleotide
uaauugcagguauguucuc

SEQ ID NO: 961314 - RNA, 19 nt, Artificial Sequence
  Description of Artificial Sequence: Synthetic oligonucleotide
aaagcacaggugccuuauu

SEQ ID NO: 961315 - RNA, 19 nt, Artificial Sequence
  Description of Artificial Sequence: Synthetic oligonucleotide
cucucgcccaccacucagc

SEQ ID NO: 961316 - RNA, 19 nt, Artificial Sequence
  Description of Artificial Sequence: Synthetic oligonucleotide
gcaguucgagcucaguuuc

SEQ ID NO: 961317 - RNA, 19 nt, Artificial Sequence
  Description of Artificial Sequence: Synthetic oligonucleotide
guuaucagagugagaagua

SEQ ID NO: 961318 - RNA, 19 nt, Artificial Sequence
  Description of Artificial Sequence: Synthetic oligonucleotide
ccauauuguaacuauuucu

SEQ ID NO: 961319 - RNA, 19 nt, Artificial Sequence
  Description of Artificial Sequence: Synthetic oligonucleotide
ccguuguucaacuguugcc

SEQ ID NO: 961320 - RNA, 19 nt, Artificial Sequence
  Description of Artificial Sequence: Synthetic oligonucleotide
ugauggcaguacgugggcu

SEQ ID NO: 961321 - RNA, 19 nt, Artificial Sequence
  Description of Artificial Sequence: Synthetic oligonucleotide
guagaucccaagcgaggga

SEQ ID NO: 961322 - RNA, 19 nt, Artificial Sequence
  Description of Artificial Sequence: Synthetic oligonucleotide
uguggucaucauguggcau

SEQ ID NO: 961323 - RNA, 19 nt, Artificial Sequence
  Description of Artificial Sequence: Synthetic oligonucleotide
ggucgugccgagaagguac

SEQ ID NO: 961324 - RNA, 19 nt, Artificial Sequence
  Description of Artificial Sequence: Synthetic oligonucleotide
gcacaggugccuuauuuuc

SEQ ID NO: 961325 - RNA, 19 nt, Artificial Sequence
  Description of Artificial Sequence: Synthetic oligonucleotide
aguucgagcucaguuucau

SEQ ID NO: 961326 - RNA, 19 nt, Artificial Sequence
  Description of Artificial Sequence: Synthetic oligonucleotide
guguuaagagcaaaccccu

SEQ ID NO: 961327 - RNA, 19 nt, Artificial Sequence
  Description of Artificial Sequence: Synthetic oligonucleotide
cuacuuuucggaacuuccu

SEQ ID NO: 961328 - RNA, 19 nt, Artificial Sequence
  Description of Artificial Sequence: Synthetic oligonucleotide
gucggcagacuuuccucug

SEQ ID NO: 961329 - RNA, 19 nt, Artificial Sequence
  Description of Artificial Sequence: Synthetic oligonucleotide
gucuacuuuucggaacuuc

SEQ ID NO: 961330 - RNA, 19 nt, Artificial Sequence
  Description of Artificial Sequence: Synthetic oligonucleotide
ggcauggcgaucuuugugu

SEQ ID NO: 961331 - RNA, 19 nt, Artificial Sequence
  Description of Artificial Sequence: Synthetic oligonucleotide
ccaaaacgcuaacauucag

SEQ ID NO: 961332 - RNA, 19 nt, Artificial Sequence
  Description of Artificial Sequence: Synthetic oligonucleotide
gaucccaagcgagggagaa

SEQ ID NO: 961333 - RNA, 19 nt, Artificial Sequence
  Description of Artificial Sequence: Synthetic oligonucleotide
cucugacguuucauuuaac

SEQ ID NO: 961334 - RNA, 19 nt, Artificial Sequence
  Description of Artificial Sequence: Synthetic oligonucleotide
agcuagccagcuguagucu

SEQ ID NO: 961335 - RNA, 19 nt, Artificial Sequence
  Description of Artificial Sequence: Synthetic oligonucleotide
agcucguuaauugcaggua

SEQ ID NO: 961336 - RNA, 19 nt, Artificial Sequence
  Description of Artificial Sequence: Synthetic oligonucleotide
caucaagccaguagauaua

SEQ ID NO: 961337 - RNA, 19 nt, Artificial Sequence
  Description of Artificial Sequence: Synthetic oligonucleotide
cauuugcaguucgagcuca

SEQ ID NO: 961338 - RNA, 19 nt, Artificial Sequence
  Description of Artificial Sequence: Synthetic oligonucleotide
uuaucacccuggagagaau

SEQ ID NO: 961339 - RNA, 19 nt, Artificial Sequence
  Description of Artificial Sequence: Synthetic oligonucleotide
cagaugcguugagauuucg

SEQ ID NO: 961340 - RNA, 19 nt, Artificial Sequence
  Description of Artificial Sequence: Synthetic oligonucleotide
caaagaaaaugggguuguc

SEQ ID NO: 961341 - RNA, 19 nt, Artificial Sequence
  Description of Artificial Sequence: Synthetic oligonucleotide
ggcucacuagguuuaaaua

SEQ ID NO: 961342 - RNA, 19 nt, Artificial Sequence
  Description of Artificial Sequence: Synthetic oligonucleotide
agacuucguacuaaauguu

SEQ ID NO: 961343 - RNA, 19 nt, Artificial Sequence
  Description of Artificial Sequence: Synthetic oligonucleotide
uggcgaucuuuguguuaag

SEQ ID NO: 961344 - RNA, 19 nt, Artificial Sequence
  Description of Artificial Sequence: Synthetic oligonucleotide
ugccuguguuuucccaaua

SEQ ID NO: 961345 - RNA, 19 nt, Artificial Sequence
  Description of Artificial Sequence: Synthetic oligonucleotide
cuucguacuaaauguuaau

SEQ ID NO: 961346 - RNA, 19 nt, Artificial Sequence
  Description of Artificial Sequence: Synthetic oligonucleotide
auuugcaguucgagcucag

SEQ ID NO: 961347 - RNA, 19 nt, Artificial Sequence
  Description of Artificial Sequence: Synthetic oligonucleotide
acgcuaacauucaguuuug

SEQ ID NO: 961348 - RNA, 19 nt, Artificial Sequence
  Description of Artificial Sequence: Synthetic oligonucleotide
accccuggguuuucuugcu

SEQ ID NO: 961349 - RNA, 19 nt, Artificial Sequence
  Description of Artificial Sequence: Synthetic oligonucleotide
gaauaacuguuaucuuguu

SEQ ID NO: 961350 - RNA, 19 nt, Artificial Sequence
  Description of Artificial Sequence: Synthetic oligonucleotide
caucauguggcauggcgau

SEQ ID NO: 961351 - RNA, 19 nt, Artificial Sequence
  Description of Artificial Sequence: Synthetic oligonucleotide
gcucguuggcaaaauguac

SEQ ID NO: 961352 - RNA, 19 nt, Artificial Sequence
  Description of Artificial Sequence: Synthetic oligonucleotide
cagauccgagccuuccgca

SEQ ID NO: 961353 - RNA, 19 nt, Artificial Sequence
  Description of Artificial Sequence: Synthetic oligonucleotide
ccgcagacugagaaacugc

SEQ ID NO: 961354 - RNA, 19 nt, Artificial Sequence
  Description of Artificial Sequence: Synthetic oligonucleotide
guacuuggaacauguuaau

SEQ ID NO: 961355 - RNA, 19 nt, Artificial Sequence
  Description of Artificial Sequence: Synthetic oligonucleotide
cuuucacuaggccuugaau

SEQ ID NO: 961356 - RNA, 19 nt, Artificial Sequence
  Description of Artificial Sequence: Synthetic oligonucleotide
ccaucaagccaguagauau

SEQ ID NO: 961357 - RNA, 19 nt, Artificial Sequence
  Description of Artificial Sequence: Synthetic oligonucleotide
cucgcccaccacucagcag

SEQ ID NO: 961358 - RNA, 19 nt, Artificial Sequence
  Description of Artificial Sequence: Synthetic oligonucleotide
cagcucguuaauugcaggu

SEQ ID NO: 961359 - RNA, 19 nt, Artificial Sequence
  Description of Artificial Sequence: Synthetic oligonucleotide
ggugugaagcagcucguua

SEQ ID NO: 961360 - RNA, 19 nt, Artificial Sequence
  Description of Artificial Sequence: Synthetic oligonucleotide
cucuguuaaggggaguugu

SEQ ID NO: 961361 - RNA, 19 nt, Artificial Sequence
  Description of Artificial Sequence: Synthetic oligonucleotide
aacuacccacaaagucaca

SEQ ID NO: 961362 - RNA, 19 nt, Artificial Sequence
  Description of Artificial Sequence: Synthetic oligonucleotide
gucggguuccaaaacgcua

SEQ ID NO: 961363 - RNA, 19 nt, Artificial Sequence
  Description of Artificial Sequence: Synthetic oligonucleotide
cacccuggagagaauaaau

SEQ ID NO: 961364 - RNA, 19 nt, Artificial Sequence
  Description of Artificial Sequence: Synthetic oligonucleotide
agcaaaccccuggguuuuc

SEQ ID NO: 961365 - RNA, 19 nt, Artificial Sequence
  Description of Artificial Sequence: Synthetic oligonucleotide
aggcggauuuugccaucca

SEQ ID NO: 961366 - RNA, 19 nt, Artificial Sequence
  Description of Artificial Sequence: Synthetic oligonucleotide
gugaaugacccagggacau

SEQ ID NO: 961367 - RNA, 19 nt, Artificial Sequence
  Description of Artificial Sequence: Synthetic oligonucleotide
agaucccaagcgagggaga

SEQ ID NO: 961368 - RNA, 19 nt, Artificial Sequence
  Description of Artificial Sequence: Synthetic oligonucleotide
gccuuccgcagacugagaa

SEQ ID NO: 961369 - RNA, 19 nt, Artificial Sequence
  Description of Artificial Sequence: Synthetic oligonucleotide
cggugaauaacuguuaucu

SEQ ID NO: 961370 - RNA, 19 nt, Artificial Sequence
  Description of Artificial Sequence: Synthetic oligonucleotide
gcucguuaauugcagguau

SEQ ID NO: 961371 - RNA, 19 nt, Artificial Sequence
  Description of Artificial Sequence: Synthetic oligonucleotide
gccaagugccagagcaucc

SEQ ID NO: 961372 - RNA, 19 nt, Artificial Sequence
  Description of Artificial Sequence: Synthetic oligonucleotide
gcagcuagccagcuguagu

SEQ ID NO: 961373 - RNA, 19 nt, Artificial Sequence
  Description of Artificial Sequence: Synthetic oligonucleotide
caguugguugcuugauacu

SEQ ID NO: 961374 - RNA, 19 nt, Artificial Sequence
  Description of Artificial Sequence: Synthetic oligonucleotide
agucuacuuuucggaacuu

SEQ ID NO: 961375 - RNA, 19 nt, Artificial Sequence
  Description of Artificial Sequence: Synthetic oligonucleotide
cgcagacugagaaacugca

SEQ ID NO: 961376 - RNA, 19 nt, Artificial Sequence
  Description of Artificial Sequence: Synthetic oligonucleotide
gaauaaccgcagaugcguu

SEQ ID NO: 961377 - RNA, 19 nt, Artificial Sequence
  Description of Artificial Sequence: Synthetic oligonucleotide
gaccaucaagccaguagau

SEQ ID NO: 961378 - RNA, 19 nt, Artificial Sequence
  Description of Artificial Sequence: Synthetic oligonucleotide
acguuucauuuaaccuuga

SEQ ID NO: 961379 - RNA, 19 nt, Artificial Sequence
  Description of Artificial Sequence: Synthetic oligonucleotide
gccuugaauaaccgcagau

SEQ ID NO: 961380 - RNA, 19 nt, Artificial Sequence
  Description of Artificial Sequence: Synthetic oligonucleotide
cgccacucuacaagcacac

SEQ ID NO: 961381 - RNA, 19 nt, Artificial Sequence
  Description of Artificial Sequence: Synthetic oligonucleotide
gaaugccauugucggucgu

SEQ ID NO: 961382 - RNA, 19 nt, Artificial Sequence
  Description of Artificial Sequence: Synthetic oligonucleotide
gucugaguaggggucgggu

SEQ ID NO: 961383 - RNA, 19 nt, Artificial Sequence
  Description of Artificial Sequence: Synthetic oligonucleotide
cuuggcucacuagguuuaa

SEQ ID NO: 961384 - RNA, 19 nt, Artificial Sequence
  Description of Artificial Sequence: Synthetic oligonucleotide
guacgugggcuggggugug

SEQ ID NO: 961385 - RNA, 19 nt, Artificial Sequence
  Description of Artificial Sequence: Synthetic oligonucleotide
gagcaaaccccuggguuuu

SEQ ID NO: 961386 - RNA, 19 nt, Artificial Sequence
  Description of Artificial Sequence: Synthetic oligonucleotide
ccaguagauauacuccuau

SEQ ID NO: 961387 - RNA, 19 nt, Artificial Sequence
  Description of Artificial Sequence: Synthetic oligonucleotide
ccauugucggucgugccga

SEQ ID NO: 961388 - RNA, 19 nt, Artificial Sequence
  Description of Artificial Sequence: Synthetic oligonucleotide
cacucucgcccaccacuca

SEQ ID NO: 961389 - RNA, 19 nt, Artificial Sequence
  Description of Artificial Sequence: Synthetic oligonucleotide
ccaaauccgugguauuugu

SEQ ID NO: 961390 - RNA, 19 nt, Artificial Sequence
  Description of Artificial Sequence: Synthetic oligonucleotide
gcagaugcguugagauuuc

SEQ ID NO: 961391 - RNA, 19 nt, Artificial Sequence
  Description of Artificial Sequence: Synthetic oligonucleotide
ggaguuguaucaguucauu

SEQ ID NO: 961392 - RNA, 19 nt, Artificial Sequence
  Description of Artificial Sequence: Synthetic oligonucleotide
caauggccuuggcucacua

SEQ ID NO: 961393 - RNA, 19 nt, Artificial Sequence
  Description of Artificial Sequence: Synthetic oligonucleotide
gcguugagauuucggugaa

SEQ ID NO: 961394 - RNA, 19 nt, Artificial Sequence
  Description of Artificial Sequence: Synthetic oligonucleotide
guucgagcucaguuucauu

SEQ ID NO: 961395 - RNA, 19 nt, Artificial Sequence
  Description of Artificial Sequence: Synthetic oligonucleotide
agcgagggagaaacuccuu

SEQ ID NO: 961396 - RNA, 19 nt, Artificial Sequence
  Description of Artificial Sequence: Synthetic oligonucleotide
ccuuccgcagacugagaaa

SEQ ID NO: 961397 - RNA, 19 nt, Artificial Sequence
  Description of Artificial Sequence: Synthetic oligonucleotide
gaguaggggucggguucca

SEQ ID NO: 961398 - RNA, 19 nt, Artificial Sequence
  Description of Artificial Sequence: Synthetic oligonucleotide
ucgugccgagaagguacuu

SEQ ID NO: 961399 - RNA, 19 nt, Artificial Sequence
  Description of Artificial Sequence: Synthetic oligonucleotide
ggucggguuccaaaacgcu

SEQ ID NO: 961400 - RNA, 19 nt, Artificial Sequence
  Description of Artificial Sequence: Synthetic oligonucleotide
cgcuaacauucaguuuugc

SEQ ID NO: 961401 - RNA, 19 nt, Artificial Sequence
  Description of Artificial Sequence: Synthetic oligonucleotide
gucgugccgagaagguacu

SEQ ID NO: 961402 - RNA, 19 nt, Artificial Sequence
  Description of Artificial Sequence: Synthetic oligonucleotide
gggaguuguaucaguucau

SEQ ID NO: 961403 - RNA, 19 nt, Artificial Sequence
  Description of Artificial Sequence: Synthetic oligonucleotide
gcaguacgugggcuggggu

SEQ ID NO: 961404 - RNA, 19 nt, Artificial Sequence
  Description of Artificial Sequence: Synthetic oligonucleotide
cgcagaugcguugagauuu

SEQ ID NO: 961405 - RNA, 19 nt, Artificial Sequence
  Description of Artificial Sequence: Synthetic oligonucleotide
gucgaccaucaagccagua

SEQ ID NO: 961406 - RNA, 19 nt, Artificial Sequence
  Description of Artificial Sequence: Synthetic oligonucleotide
ggacaucucgagggacaaa

SEQ ID NO: 961407 - RNA, 19 nt, Artificial Sequence
  Description of Artificial Sequence: Synthetic oligonucleotide
cauguggcauggcgaucuu

SEQ ID NO: 961408 - RNA, 19 nt, Artificial Sequence
  Description of Artificial Sequence: Synthetic oligonucleotide
cguuaauugcagguauguu

SEQ ID NO: 961409 - RNA, 19 nt, Artificial Sequence
  Description of Artificial Sequence: Synthetic oligonucleotide
ggucgaccaucaagccagu

SEQ ID NO: 961410 - RNA, 19 nt, Artificial Sequence
  Description of Artificial Sequence: Synthetic oligonucleotide
ccgcagaugcguugagauu

SEQ ID NO: 961411 - RNA, 19 nt, Artificial Sequence
  Description of Artificial Sequence: Synthetic oligonucleotide
aaauuuaguaagcgaagcc

SEQ ID NO: 961412 - RNA, 19 nt, Artificial Sequence
  Description of Artificial Sequence: Synthetic oligonucleotide
aucagcuuaaauuccaugc

SEQ ID NO: 961413 - RNA, 19 nt, Artificial Sequence
  Description of Artificial Sequence: Synthetic oligonucleotide
gagacugaugccuauaggg

SEQ ID NO: 961414 - RNA, 19 nt, Artificial Sequence
  Description of Artificial Sequence: Synthetic oligonucleotide
uacaaugcuaauuaaggcc

SEQ ID NO: 961415 - RNA, 19 nt, Artificial Sequence
  Description of Artificial Sequence: Synthetic oligonucleotide
auugucauacacugggucc

SEQ ID NO: 961416 - RNA, 19 nt, Artificial Sequence
  Description of Artificial Sequence: Synthetic oligonucleotide
uguaaaggcauuuaguagu

SEQ ID NO: 961417 - RNA, 19 nt, Artificial Sequence
  Description of Artificial Sequence: Synthetic oligonucleotide
uuuaggaacagccaagaac

SEQ ID NO: 961418 - RNA, 19 nt, Artificial Sequence
  Description of Artificial Sequence: Synthetic oligonucleotide
ucuauguaaaggcauuuag

SEQ ID NO: 961419 - RNA, 19 nt, Artificial Sequence
  Description of Artificial Sequence: Synthetic oligonucleotide
uuguuaaauggacaugacg

SEQ ID NO: 961420 - RNA, 19 nt, Artificial Sequence
  Description of Artificial Sequence: Synthetic oligonucleotide
uaguccaugaucaacgcag

SEQ ID NO: 961421 - RNA, 19 nt, Artificial Sequence
  Description of Artificial Sequence: Synthetic oligonucleotide
aaaauucgcaucuauguau

SEQ ID NO: 961422 - RNA, 19 nt, Artificial Sequence
  Description of Artificial Sequence: Synthetic oligonucleotide
cauuaugcaggguugaagg

SEQ ID NO: 961423 - RNA, 19 nt, Artificial Sequence
  Description of Artificial Sequence: Synthetic oligonucleotide
aacgcagauugucauacac

SEQ ID NO: 961424 - RNA, 19 nt, Artificial Sequence
  Description of Artificial Sequence: Synthetic oligonucleotide
uacgcaauggguaacagcu

SEQ ID NO: 961425 - RNA, 19 nt, Artificial Sequence
  Description of Artificial Sequence: Synthetic oligonucleotide
uucaaacugagcuacagga

SEQ ID NO: 961426 - RNA, 19 nt, Artificial Sequence
  Description of Artificial Sequence: Synthetic oligonucleotide
  modified_base (7)..(7): a, c, u, g, unknown or other
  modified_base (11)..(11): a, c, u, g, unknown or other
aguauanaganagagggga

SEQ ID NO: 961427 - RNA, 19 nt, Artificial Sequence
  Description of Artificial Sequence: Synthetic oligonucleotide
ccagauaauacucagaggg

SEQ ID NO: 961428 - RNA, 19 nt, Artificial Sequence
  Description of Artificial Sequence: Synthetic oligonucleotide
uauguguagauuagaaagc

SEQ ID NO: 961429 - RNA, 19 nt, Artificial Sequence
  Description of Artificial Sequence: Synthetic oligonucleotide
uauguaaaggcauuuagua

SEQ ID NO: 961430 - RNA, 19 nt, Artificial Sequence
  Description of Artificial Sequence: Synthetic oligonucleotide
  modified_base (5)..(5): a, c, u, g, unknown or other
  modified_base (9)..(9): a, c, u, g, unknown or other
uauanaganagaggggagg

SEQ ID NO: 961431 - RNA, 19 nt, Artificial Sequence
  Description of Artificial Sequence: Synthetic oligonucleotide
  modified_base (9)..(9): a, c, u, g, unknown or other
  modified_base (13)..(13): a, c, u, g, unknown or other
ccaguauanaganagaggg

SEQ ID NO: 961432 - RNA, 19 nt, Artificial Sequence
  Description of Artificial Sequence: Synthetic oligonucleotide
aauuuaguaagcgaagccu

SEQ ID NO: 961433 - RNA, 19 nt, Artificial Sequence
  Description of Artificial Sequence: Synthetic oligonucleotide
uucuaaagaauugugcaag

SEQ ID NO: 961434 - RNA, 19 nt, Artificial Sequence
  Description of Artificial Sequence: Synthetic oligonucleotide
uguuaauugcuuuucuucu

SEQ ID NO: 961435 - RNA, 19 nt, Artificial Sequence
  Description of Artificial Sequence: Synthetic oligonucleotide
aagggugucaauccaaaga

SEQ ID NO: 961436 - RNA, 19 nt, Artificial Sequence
  Description of Artificial Sequence: Synthetic oligonucleotide
ugacguguacuuuaaauac

SEQ ID NO: 961437 - RNA, 19 nt, Artificial Sequence
  Description of Artificial Sequence: Synthetic oligonucleotide
uucgcaucuauguauagac

SEQ ID NO: 961438 - RNA, 19 nt, Artificial Sequence
  Description of Artificial Sequence: Synthetic oligonucleotide
caaauuuguagacguaccg

SEQ ID NO: 961439 - RNA, 19 nt, Artificial Sequence
  Description of Artificial Sequence: Synthetic oligonucleotide
uuuguagacguaccguucc

SEQ ID NO: 961440 - RNA, 19 nt, Artificial Sequence
  Description of Artificial Sequence: Synthetic oligonucleotide
  modified_base (2)..(2): a, c, u, g, unknown or other
  modified_base (6)..(6): a, c, u, g, unknown or other
anaganagaggggaggaca

SEQ ID NO: 961441 - RNA, 19 nt, Artificial Sequence
  Description of Artificial Sequence: Synthetic oligonucleotide
aaauggacaugacguguac

SEQ ID NO: 961442 - RNA, 19 nt, Artificial Sequence
  Description of Artificial Sequence: Synthetic oligonucleotide
auggguauguguuucuuuc

SEQ ID NO: 961443 - RNA, 19 nt, Artificial Sequence
  Description of Artificial Sequence: Synthetic oligonucleotide
ugcuaauuaaggcccaagc

SEQ ID NO: 961444 - RNA, 19 nt, Artificial Sequence
  Description of Artificial Sequence: Synthetic oligonucleotide
auguaaaggcauuuaguag

SEQ ID NO: 961445 - RNA, 19 nt, Artificial Sequence
  Description of Artificial Sequence: Synthetic oligonucleotide
uagacuauguguagauuag

SEQ ID NO: 961446 - RNA, 19 nt, Artificial Sequence
  Description of Artificial Sequence: Synthetic oligonucleotide
uaugcaggguugaaggucc

SEQ ID NO: 961447 - RNA, 19 nt, Artificial Sequence
  Description of Artificial Sequence: Synthetic oligonucleotide
aguucuuucaguagaguac

SEQ ID NO: 961448 - RNA, 19 nt, Artificial Sequence
  Description of Artificial Sequence: Synthetic oligonucleotide
uuuccuauggguauguguu

SEQ ID NO: 961449 - RNA, 19 nt, Artificial Sequence
  Description of Artificial Sequence: Synthetic oligonucleotide
aguaagcgaagccuucagc

SEQ ID NO: 961450 - RNA, 19 nt, Artificial Sequence
  Description of Artificial Sequence: Synthetic oligonucleotide
ucaaacugagcuacaggag

SEQ ID NO: 961451 - RNA, 19 nt, Artificial Sequence
  Description of Artificial Sequence: Synthetic oligonucleotide
aguaguccaugaucaacgc

SEQ ID NO: 961452 - RNA, 19 nt, Artificial Sequence
  Description of Artificial Sequence: Synthetic oligonucleotide
auagacuauguguagauua

SEQ ID NO: 961453 - RNA, 19 nt, Artificial Sequence
  Description of Artificial Sequence: Synthetic oligonucleotide
guauuugucuuuaagggug

SEQ ID NO: 961454 - RNA, 19 nt, Artificial Sequence
  Description of Artificial Sequence: Synthetic oligonucleotide
auucccaauauaauacagc

SEQ ID NO: 961455 - RNA, 19 nt, Artificial Sequence
  Description of Artificial Sequence: Synthetic oligonucleotide
  modified_base (8)..(8): a, c, u, g, unknown or other
  modified_base (12)..(12): a, c, u, g, unknown or other
caguauanaganagagggg

SEQ ID NO: 961456 - RNA, 19 nt, Artificial Sequence
  Description of Artificial Sequence: Synthetic oligonucleotide
uagauuagaaagcuauaaa

SEQ ID NO: 961457 - RNA, 19 nt, Artificial Sequence
  Description of Artificial Sequence: Synthetic oligonucleotide
aaucuauacagcauuuaca

SEQ ID NO: 961458 - RNA, 19 nt, Artificial Sequence
  Description of Artificial Sequence: Synthetic oligonucleotide
ucauuugccugaaugggga

SEQ ID NO: 961459 - RNA, 19 nt, Artificial Sequence
  Description of Artificial Sequence: Synthetic oligonucleotide
cuaaaaugaaagccauccg

SEQ ID NO: 961460 - RNA, 19 nt, Artificial Sequence
  Description of Artificial Sequence: Synthetic oligonucleotide
aagugagucaguggcaggg

SEQ ID NO: 961461 - RNA, 19 nt, Artificial Sequence
  Description of Artificial Sequence: Synthetic oligonucleotide
guacaaugcuaauuaaggc

SEQ ID NO: 961462 - RNA, 19 nt, Artificial Sequence
  Description of Artificial Sequence: Synthetic oligonucleotide
uaaaauucgcaucuaugua

SEQ ID NO: 961463 - RNA, 19 nt, Artificial Sequence
  Description of Artificial Sequence: Synthetic oligonucleotide
ugaucaacgcagauuguca

SEQ ID NO: 961464 - RNA, 19 nt, Artificial Sequence
  Description of Artificial Sequence: Synthetic oligonucleotide
uuaguuugguuguuuaaaa

SEQ ID NO: 961465 - RNA, 19 nt, Artificial Sequence
  Description of Artificial Sequence: Synthetic oligonucleotide
guuaaauggacaugacgug

SEQ ID NO: 961466 - RNA, 19 nt, Artificial Sequence
  Description of Artificial Sequence: Synthetic oligonucleotide
uuuaguuugguuguuuaaa

SEQ ID NO: 961467 - RNA, 19 nt, Artificial Sequence
  Description of Artificial Sequence: Synthetic oligonucleotide
cauuuaguaguccaugauc

SEQ ID NO: 961468 - RNA, 19 nt, Artificial Sequence
  Description of Artificial Sequence: Synthetic oligonucleotide
uuaaauggacaugacgugu

SEQ ID NO: 961469 - RNA, 19 nt, Artificial Sequence
  Description of Artificial Sequence: Synthetic oligonucleotide
  modified_base (6)..(6): a, c, u, g, unknown or other
  modified_base (10)..(10): a, c, u, g, unknown or other
guauanaganagaggggag

SEQ ID NO: 961470 - RNA, 19 nt, Artificial Sequence
  Description of Artificial Sequence: Synthetic oligonucleotide
uuuuccuauggguaugugu

SEQ ID NO: 961471 - RNA, 19 nt, Artificial Sequence
  Description of Artificial Sequence: Synthetic oligonucleotide
gaguacaaugcuaauuaag

SEQ ID NO: 961472 - RNA, 19 nt, Artificial Sequence
  Description of Artificial Sequence: Synthetic oligonucleotide
aguuucaaaccccagggaa

SEQ ID NO: 961473 - RNA, 19 nt, Artificial Sequence
  Description of Artificial Sequence: Synthetic oligonucleotide
agccuucgugaucugagcc

SEQ ID NO: 961474 - RNA, 19 nt, Artificial Sequence
  Description of Artificial Sequence: Synthetic oligonucleotide
agagccucgacgcugauaa

SEQ ID NO: 961475 - RNA, 19 nt, Artificial Sequence
  Description of Artificial Sequence: Synthetic oligonucleotide
uucuccagauaauacucag

SEQ ID NO: 961476 - RNA, 19 nt, Artificial Sequence
  Description of Artificial Sequence: Synthetic oligonucleotide
aauucgcaucuauguauag

SEQ ID NO: 961477 - RNA, 19 nt, Artificial Sequence
  Description of Artificial Sequence: Synthetic oligonucleotide
cagaaauuuaguaagcgaa

SEQ ID NO: 961478 - RNA, 19 nt, Artificial Sequence
  Description of Artificial Sequence: Synthetic oligonucleotide
augccuauaggguucccac

SEQ ID NO: 961479 - RNA, 19 nt, Artificial Sequence
  Description of Artificial Sequence: Synthetic oligonucleotide
uguauagacuauguguaga

SEQ ID NO: 961480 - RNA, 19 nt, Artificial Sequence
  Description of Artificial Sequence: Synthetic oligonucleotide
agaaauuuaguaagcgaag

SEQ ID NO: 961481 - RNA, 19 nt, Artificial Sequence
  Description of Artificial Sequence: Synthetic oligonucleotide
aagcgacugucuuuaaugu

SEQ ID NO: 961482 - RNA, 19 nt, Artificial Sequence
  Description of Artificial Sequence: Synthetic oligonucleotide
agacguaccguuccccagc

SEQ ID NO: 961483 - RNA, 19 nt, Artificial Sequence
  Description of Artificial Sequence: Synthetic oligonucleotide
guaagcgaagccuucagca

SEQ ID NO: 961484 - RNA, 19 nt, Artificial Sequence
  Description of Artificial Sequence: Synthetic oligonucleotide
ugagcuacaggaguuuugc

SEQ ID NO: 961485 - RNA, 19 nt, Artificial Sequence
  Description of Artificial Sequence: Synthetic oligonucleotide
gauugucauacacuggguc

SEQ ID NO: 961486 - RNA, 19 nt, Artificial Sequence
  Description of Artificial Sequence: Synthetic oligonucleotide
ucuaaagaauugugcaagu

SEQ ID NO: 961487 - RNA, 19 nt, Artificial Sequence
  Description of Artificial Sequence: Synthetic oligonucleotide
augaucaacgcagauuguc

SEQ ID NO: 961488 - RNA, 19 nt, Artificial Sequence
  Description of Artificial Sequence: Synthetic oligonucleotide
  modified_base (4)..(4): a, c, u, g, unknown or other
  modified_base (8)..(8): a, c, u, g, unknown or other
auanaganagaggggagga

SEQ ID NO: 961489 - RNA, 19 nt, Artificial Sequence
  Description of Artificial Sequence: Synthetic oligonucleotide
augacguguacuuuaaaua

SEQ ID NO: 961490 - RNA, 19 nt, Artificial Sequence
  Description of Artificial Sequence: Synthetic oligonucleotide
cagauaauacucagagggc

SEQ ID NO: 961491 - RNA, 19 nt, Artificial Sequence
  Description of Artificial Sequence: Synthetic oligonucleotide
agcaaucagaauaaaauaa

SEQ ID NO: 961492 - RNA, 19 nt, Artificial Sequence
  Description of Artificial Sequence: Synthetic oligonucleotide
uccgcacucagccauguga

SEQ ID NO: 961493 - RNA, 19 nt, Artificial Sequence
  Description of Artificial Sequence: Synthetic oligonucleotide
agaacuacgcaauggguaa

SEQ ID NO: 961494 - RNA, 19 nt, Artificial Sequence
  Description of Artificial Sequence: Synthetic oligonucleotide
uauaggguucccaccaggu

SEQ ID NO: 961495 - RNA, 19 nt, Artificial Sequence
  Description of Artificial Sequence: Synthetic oligonucleotide
uuuaguaagcgaagccuuc

SEQ ID NO: 961496 - RNA, 19 nt, Artificial Sequence
  Description of Artificial Sequence: Synthetic oligonucleotide
agccaugugacugggaggg

SEQ ID NO: 961497 - RNA, 19 nt, Artificial Sequence
  Description of Artificial Sequence: Synthetic oligonucleotide
ucaacgcagauugucauac

SEQ ID NO: 961498 - RNA, 19 nt, Artificial Sequence
  Description of Artificial Sequence: Synthetic oligonucleotide
uggacuuaggggaaacacu

SEQ ID NO: 961499 - RNA, 19 nt, Artificial Sequence
  Description of Artificial Sequence: Synthetic oligonucleotide
agagacugaugccuauagg

SEQ ID NO: 961500 - RNA, 19 nt, Artificial Sequence
  Description of Artificial Sequence: Synthetic oligonucleotide
acaccuuuaguuugguugu

SEQ ID NO: 961501 - RNA, 19 nt, Artificial Sequence
  Description of Artificial Sequence: Synthetic oligonucleotide
caagguauugcucugcaca

SEQ ID NO: 961502 - RNA, 19 nt, Artificial Sequence
  Description of Artificial Sequence: Synthetic oligonucleotide
uuaguaguccaugaucaac

SEQ ID NO: 961503 - RNA, 19 nt, Artificial Sequence
  Description of Artificial Sequence: Synthetic oligonucleotide
uaaauggacaugacgugua

SEQ ID NO: 961504 - RNA, 19 nt, Artificial Sequence
  Description of Artificial Sequence: Synthetic oligonucleotide
uaguaauagcgcagggagc

SEQ ID NO: 961505 - RNA, 19 nt, Artificial Sequence
  Description of Artificial Sequence: Synthetic oligonucleotide
ccaugaucaacgcagauug

SEQ ID NO: 961506 - RNA, 19 nt, Artificial Sequence
  Description of Artificial Sequence: Synthetic oligonucleotide
  modified_base (11)..(11): a, c, u, g, unknown or other
  modified_base (15)..(15): a, c, u, g, unknown or other
caccaguauanaganagag

SEQ ID NO: 961507 - RNA, 19 nt, Artificial Sequence
  Description of Artificial Sequence: Synthetic oligonucleotide
ugcaaauuucaagccuucg

SEQ ID NO: 961508 - RNA, 19 nt, Artificial Sequence
  Description of Artificial Sequence: Synthetic oligonucleotide
uucgugggcgcuaaccuga

SEQ ID NO: 961509 - RNA, 19 nt, Artificial Sequence
  Description of Artificial Sequence: Synthetic oligonucleotide
  modified_base (3)..(3): a, c, u, g, unknown or other
  modified_base (7)..(7): a, c, u, g, unknown or other
uanaganagaggggaggac

SEQ ID NO: 961510 - RNA, 19 nt, Artificial Sequence
  Description of Artificial Sequence: Synthetic oligonucleotide
uaguaagcgaagccuucag

SEQ ID NO: 961511 - RNA, 19 nt, Artificial Sequence
  Description of Artificial Sequence: Synthetic oligonucleotide
aaaagcgcauccgggucac

SEQ ID NO: 961512 - RNA, 19 nt, Artificial Sequence
  Description of Artificial Sequence: Synthetic oligonucleotide
gacguguacuuuaaauacc

SEQ ID NO: 961513 - RNA, 19 nt, Artificial Sequence
  Description of Artificial Sequence: Synthetic oligonucleotide
  modified_base (2)..(2): a, c, u, g, unknown or other
anagaggggaggacacaac

SEQ ID NO: 961514 - RNA, 19 nt, Artificial Sequence
  Description of Artificial Sequence: Synthetic oligonucleotide
ucuacuuggugaccacucu

SEQ ID NO: 961515 - RNA, 19 nt, Artificial Sequence
  Description of Artificial Sequence: Synthetic oligonucleotide
uggccgauucuucuggaug

SEQ ID NO: 961516 - RNA, 19 nt, Artificial Sequence
  Description of Artificial Sequence: Synthetic oligonucleotide
auuaugcaggguugaaggu

SEQ ID NO: 961517 - RNA, 19 nt, Artificial Sequence
  Description of Artificial Sequence: Synthetic oligonucleotide
uccaaagauggcuuggguu

SEQ ID NO: 961518 - RNA, 19 nt, Artificial Sequence
  Description of Artificial Sequence: Synthetic oligonucleotide
auguguagauuagaaagcu

SEQ ID NO: 961519 - RNA, 19 nt, Artificial Sequence
  Description of Artificial Sequence: Synthetic oligonucleotide
gcugcagcgauccaugucc

SEQ ID NO: 961520 - RNA, 19 nt, Artificial Sequence
  Description of Artificial Sequence: Synthetic oligonucleotide
guagauuagaaagcuauaa

SEQ ID NO: 961521 - RNA, 19 nt, Artificial Sequence
  Description of Artificial Sequence: Synthetic oligonucleotide
auaauacucagagggcaag

SEQ ID NO: 961522 - RNA, 19 nt, Artificial Sequence
  Description of Artificial Sequence: Synthetic oligonucleotide
ggcaacaagguacuggcgc

SEQ ID NO: 961523 - RNA, 19 nt, Artificial Sequence
  Description of Artificial Sequence: Synthetic oligonucleotide
uuaguaagcgaagccuuca

SEQ ID NO: 961524 - RNA, 19 nt, Artificial Sequence
  Description of Artificial Sequence: Synthetic oligonucleotide
acugaugccuauaggguuc

SEQ ID NO: 961525 - RNA, 19 nt, Artificial Sequence
  Description of Artificial Sequence: Synthetic oligonucleotide
uuuaguaguccaugaucaa

SEQ ID NO: 961526 - RNA, 19 nt, Artificial Sequence
  Description of Artificial Sequence: Synthetic oligonucleotide
cuauaggguucccaccagg

SEQ ID NO: 961527 - RNA, 19 nt, Artificial Sequence
  Description of Artificial Sequence: Synthetic oligonucleotide
guaacagcuguccugaccu

SEQ ID NO: 961528 - RNA, 19 nt, Artificial Sequence
  Description of Artificial Sequence: Synthetic oligonucleotide
gaguucuuucaguagagua

SEQ ID NO: 961529 - RNA, 19 nt, Artificial Sequence
  Description of Artificial Sequence: Synthetic oligonucleotide
ugucaaguguuaauugcuu

SEQ ID NO: 961530 - RNA, 19 nt, Artificial Sequence
  Description of Artificial Sequence: Synthetic oligonucleotide
uuaugcaggguugaagguc

SEQ ID NO: 961531 - RNA, 19 nt, Artificial Sequence
  Description of Artificial Sequence: Synthetic oligonucleotide
cuacgcaauggguaacagc

SEQ ID NO: 961532 - RNA, 19 nt, Artificial Sequence
  Description of Artificial Sequence: Synthetic oligonucleotide
agccucgacgcugauaagg

SEQ ID NO: 961533 - RNA, 19 nt, Artificial Sequence
  Description of Artificial Sequence: Synthetic oligonucleotide
ucccaauauaauacagcaa

SEQ ID NO: 961534 - RNA, 19 nt, Artificial Sequence
  Description of Artificial Sequence: Synthetic oligonucleotide
aauggacaugacguguacu

SEQ ID NO: 961535 - RNA, 19 nt, Artificial Sequence
  Description of Artificial Sequence: Synthetic oligonucleotide
uuucgugggcgcuaaccug

SEQ ID NO: 961536 - RNA, 19 nt, Artificial Sequence
  Description of Artificial Sequence: Synthetic oligonucleotide
aaauucgcaucuauguaua

SEQ ID NO: 961537 - RNA, 19 nt, Artificial Sequence
  Description of Artificial Sequence: Synthetic oligonucleotide
uuguagacguaccguuccc

SEQ ID NO: 961538 - RNA, 19 nt, Artificial Sequence
  Description of Artificial Sequence: Synthetic oligonucleotide
ggcgcuaaccugaacaagg

SEQ ID NO: 961539 - RNA, 19 nt, Artificial Sequence
  Description of Artificial Sequence: Synthetic oligonucleotide
uaaugcccuuuucauagua

SEQ ID NO: 961540 - RNA, 19 nt, Artificial Sequence
  Description of Artificial Sequence: Synthetic oligonucleotide
acguguacuuuaaauacca

SEQ ID NO: 961541 - RNA, 19 nt, Artificial Sequence
  Description of Artificial Sequence: Synthetic oligonucleotide
cacucagccaugugacugg

SEQ ID NO: 961542 - RNA, 19 nt, Artificial Sequence
  Description of Artificial Sequence: Synthetic oligonucleotide
agggaaccauuaugcaggg

SEQ ID NO: 961543 - RNA, 19 nt, Artificial Sequence
  Description of Artificial Sequence: Synthetic oligonucleotide
aacuacgcaauggguaaca

SEQ ID NO: 961544 - RNA, 19 nt, Artificial Sequence
  Description of Artificial Sequence: Synthetic oligonucleotide
auaggguucccaccaggug

SEQ ID NO: 961545 - RNA, 19 nt, Artificial Sequence
  Description of Artificial Sequence: Synthetic oligonucleotide
uguagacguaccguucccc

SEQ ID NO: 961546 - RNA, 19 nt, Artificial Sequence
  Description of Artificial Sequence: Synthetic oligonucleotide
caguagaguacaaugcuaa

SEQ ID NO: 961547 - RNA, 19 nt, Artificial Sequence
  Description of Artificial Sequence: Synthetic oligonucleotide
gugggcgcuaaccugaaca

SEQ ID NO: 961548 - RNA, 19 nt, Artificial Sequence
  Description of Artificial Sequence: Synthetic oligonucleotide
uagacguaccguuccccag

SEQ ID NO: 961549 - RNA, 19 nt, Artificial Sequence
  Description of Artificial Sequence: Synthetic oligonucleotide
gcuauaaauaugcuucaga

SEQ ID NO: 961550 - RNA, 19 nt, Artificial Sequence
  Description of Artificial Sequence: Synthetic oligonucleotide
gaccaguuguuaaauggac

SEQ ID NO: 961551 - RNA, 19 nt, Artificial Sequence
  Description of Artificial Sequence: Synthetic oligonucleotide
agcuauaaauaugcuucag

SEQ ID NO: 961552 - RNA, 19 nt, Artificial Sequence
  Description of Artificial Sequence: Synthetic oligonucleotide
ucgcaucuauguauagacu

SEQ ID NO: 961553 - RNA, 19 nt, Artificial Sequence
  Description of Artificial Sequence: Synthetic oligonucleotide
cuaauuaaggcccaagcuu

SEQ ID NO: 961554 - RNA, 19 nt, Artificial Sequence
  Description of Artificial Sequence: Synthetic oligonucleotide
auacugucaaguguuaauu

SEQ ID NO: 961555 - RNA, 19 nt, Artificial Sequence
  Description of Artificial Sequence: Synthetic oligonucleotide
gagaacuacgcaaugggua

SEQ ID NO: 961556 - RNA, 19 nt, Artificial Sequence
  Description of Artificial Sequence: Synthetic oligonucleotide
aagcgcauccgggucacag

SEQ ID NO: 961557 - RNA, 19 nt, Artificial Sequence
  Description of Artificial Sequence: Synthetic oligonucleotide
aaccauuaugcaggguuga

SEQ ID NO: 961558 - RNA, 19 nt, Artificial Sequence
  Description of Artificial Sequence: Synthetic oligonucleotide
uccgguucuaucagcuuaa

SEQ ID NO: 961559 - RNA, 19 nt, Artificial Sequence
  Description of Artificial Sequence: Synthetic oligonucleotide
  modified_base (3)..(3): a, c, u, g, unknown or other
ganagaggggaggacacaa

SEQ ID NO: 961560 - RNA, 19 nt, Artificial Sequence
  Description of Artificial Sequence: Synthetic oligonucleotide
aguagaguacaaugcuaau

SEQ ID NO: 961561 - RNA, 19 nt, Artificial Sequence
  Description of Artificial Sequence: Synthetic oligonucleotide
auuuaguaagcgaagccuu

SEQ ID NO: 961562 - RNA, 19 nt, Artificial Sequence
  Description of Artificial Sequence: Synthetic oligonucleotide
ugccuauaggguucccacc

SEQ ID NO: 961563 - RNA, 19 nt, Artificial Sequence
  Description of Artificial Sequence: Synthetic oligonucleotide
gauaauacucagagggcaa

SEQ ID NO: 961564 - RNA, 19 nt, Artificial Sequence
  Description of Artificial Sequence: Synthetic oligonucleotide
ugcuagcuagcacuguuuu

SEQ ID NO: 961565 - RNA, 19 nt, Artificial Sequence
  Description of Artificial Sequence: Synthetic oligonucleotide
agcuuuaggaacagccaag

SEQ ID NO: 961566 - RNA, 19 nt, Artificial Sequence
  Description of Artificial Sequence: Synthetic oligonucleotide
uuuacccaucagugacagg

SEQ ID NO: 961567 - RNA, 19 nt, Artificial Sequence
  Description of Artificial Sequence: Synthetic oligonucleotide
acugcuagcucuagggugu

SEQ ID NO: 961568 - RNA, 19 nt, Artificial Sequence
  Description of Artificial Sequence: Synthetic oligonucleotide
agacugaugccuauagggu

SEQ ID NO: 961569 - RNA, 19 nt, Artificial Sequence
  Description of Artificial Sequence: Synthetic oligonucleotide
auucgcaucuauguauaga

SEQ ID NO: 961570 - RNA, 19 nt, Artificial Sequence
  Description of Artificial Sequence: Synthetic oligonucleotide
uucuauguaaaggcauuua

SEQ ID NO: 961571 - RNA, 19 nt, Artificial Sequence
  Description of Artificial Sequence: Synthetic oligonucleotide
aaugcuaauuaaggcccaa

SEQ ID NO: 961572 - RNA, 19 nt, Artificial Sequence
  Description of Artificial Sequence: Synthetic oligonucleotide
guaaaggcauuuaguaguc

SEQ ID NO: 961573 - RNA, 19 nt, Artificial Sequence
  Description of Artificial Sequence: Synthetic oligonucleotide
gagguaagcaggguuaucu

SEQ ID NO: 961574 - RNA, 19 nt, Artificial Sequence
  Description of Artificial Sequence: Synthetic oligonucleotide
cuggguaaaauucgcaucu

SEQ ID NO: 961575 - RNA, 19 nt, Artificial Sequence
  Description of Artificial Sequence: Synthetic oligonucleotide
aggcauuuaguaguccaug

SEQ ID NO: 961576 - RNA, 19 nt, Artificial Sequence
  Description of Artificial Sequence: Synthetic oligonucleotide
aaggcauuuaguaguccau

SEQ ID NO: 961577 - RNA, 19 nt, Artificial Sequence
  Description of Artificial Sequence: Synthetic oligonucleotide
auccaaagauggcuugggu

SEQ ID NO: 961578 - RNA, 19 nt, Artificial Sequence
  Description of Artificial Sequence: Synthetic oligonucleotide
ugggcgcuaaccugaacaa

SEQ ID NO: 961579 - RNA, 19 nt, Artificial Sequence
  Description of Artificial Sequence: Synthetic oligonucleotide
gacguaccguuccccagcc

SEQ ID NO: 961580 - RNA, 19 nt, Artificial Sequence
  Description of Artificial Sequence: Synthetic oligonucleotide
gguaagcaggguuaucuuc

SEQ ID NO: 961581 - RNA, 19 nt, Artificial Sequence
  Description of Artificial Sequence: Synthetic oligonucleotide
aggaaagcgacugucuuua

SEQ ID NO: 961582 - RNA, 19 nt, Artificial Sequence
  Description of Artificial Sequence: Synthetic oligonucleotide
cuugaucuacuuggugacc

SEQ ID NO: 961583 - RNA, 19 nt, Artificial Sequence
  Description of Artificial Sequence: Synthetic oligonucleotide
ugcacauguuguccaugcu

SEQ ID NO: 961584 - RNA, 19 nt, Artificial Sequence
  Description of Artificial Sequence: Synthetic oligonucleotide
guagacguaccguucccca

SEQ ID NO: 961585 - RNA, 19 nt, Artificial Sequence
  Description of Artificial Sequence: Synthetic oligonucleotide
uauagacuauguguagauu

SEQ ID NO: 961586 - RNA, 19 nt, Artificial Sequence
  Description of Artificial Sequence: Synthetic oligonucleotide
caugacguguacuuuaaau

SEQ ID NO: 961587 - RNA, 19 nt, Artificial Sequence
  Description of Artificial Sequence: Synthetic oligonucleotide
ggguuaucuucaaagugag

SEQ ID NO: 961588 - RNA, 19 nt, Artificial Sequence
  Description of Artificial Sequence: Synthetic oligonucleotide
ucccuagccaagguauuug

SEQ ID NO: 961589 - RNA, 19 nt, Artificial Sequence
  Description of Artificial Sequence: Synthetic oligonucleotide
guauagacuauguguagau

SEQ ID NO: 961590 - RNA, 19 nt, Artificial Sequence
  Description of Artificial Sequence: Synthetic oligonucleotide
ccccagggaaccauuaugc

SEQ ID NO: 961591 - RNA, 19 nt, Artificial Sequence
  Description of Artificial Sequence: Synthetic oligonucleotide
augcuaauuaaggcccaag

SEQ ID NO: 961592 - RNA, 19 nt, Artificial Sequence
  Description of Artificial Sequence: Synthetic oligonucleotide
aggguucccaccaggugac

SEQ ID NO: 961593 - RNA, 19 nt, Artificial Sequence
  Description of Artificial Sequence: Synthetic oligonucleotide
ggcauuuaguaguccauga

SEQ ID NO: 961594 - RNA, 19 nt, Artificial Sequence
  Description of Artificial Sequence: Synthetic oligonucleotide
gacaaggaacugccacagc

SEQ ID NO: 961595 - RNA, 19 nt, Artificial Sequence
  Description of Artificial Sequence: Synthetic oligonucleotide
gaugccuauaggguuccca

SEQ ID NO: 961596 - RNA, 19 nt, Artificial Sequence
  Description of Artificial Sequence: Synthetic oligonucleotide
acuacgcaauggguaacag

SEQ ID NO: 961597 - RNA, 19 nt, Artificial Sequence
  Description of Artificial Sequence: Synthetic oligonucleotide
guaguccaugaucaacgca

SEQ ID NO: 961598 - RNA, 19 nt, Artificial Sequence
  Description of Artificial Sequence: Synthetic oligonucleotide
guggucagagaacuacgca

SEQ ID NO: 961599 - RNA, 19 nt, Artificial Sequence
  Description of Artificial Sequence: Synthetic oligonucleotide
guugaagguccaaaauaga

SEQ ID NO: 961600 - RNA, 19 nt, Artificial Sequence
  Description of Artificial Sequence: Synthetic oligonucleotide
agccauucagaaauuuagu

SEQ ID NO: 961601 - RNA, 19 nt, Artificial Sequence
  Description of Artificial Sequence: Synthetic oligonucleotide
agacuauguguagauuaga

SEQ ID NO: 961602 - RNA, 19 nt, Artificial Sequence
  Description of Artificial Sequence: Synthetic oligonucleotide
gcuaauuaaggcccaagcu

SEQ ID NO: 961603 - RNA, 19 nt, Artificial Sequence
  Description of Artificial Sequence: Synthetic oligonucleotide
aauagcgcagggagcggcu

SEQ ID NO: 961604 - RNA, 19 nt, Artificial Sequence
  Description of Artificial Sequence: Synthetic oligonucleotide
cuggguccccuuucguggg

SEQ ID NO: 961605 - RNA, 19 nt, Artificial Sequence
  Description of Artificial Sequence: Synthetic oligonucleotide
gaucaacgcagauugucau

SEQ ID NO: 961606 - RNA, 19 nt, Artificial Sequence
  Description of Artificial Sequence: Synthetic oligonucleotide
ggaaccauuaugcaggguu

SEQ ID NO: 961607 - RNA, 19 nt, Artificial Sequence
  Description of Artificial Sequence: Synthetic oligonucleotide
cugucaaguguuaauugcu

SEQ ID NO: 961608 - RNA, 19 nt, Artificial Sequence
  Description of Artificial Sequence: Synthetic oligonucleotide
gugacagguaaguuucaaa

SEQ ID NO: 961609 - RNA, 19 nt, Artificial Sequence
  Description of Artificial Sequence: Synthetic oligonucleotide
uggugacuuuuccuccacu

SEQ ID NO: 961610 - RNA, 19 nt, Artificial Sequence
  Description of Artificial Sequence: Synthetic oligonucleotide
aucaacgcagauugucaua

SEQ ID NO: 961611 - RNA, 19 nt, Artificial Sequence
  Description of Artificial Sequence: Synthetic oligonucleotide
ggguugaagguccaaaaua

SEQ ID NO: 961612 - RNA, 19 nt, Artificial Sequence
  Description of Artificial Sequence: Synthetic oligonucleotide
gguauugcucugcacaugu

SEQ ID NO: 961613 - RNA, 19 nt, Artificial Sequence
  Description of Artificial Sequence: Synthetic oligonucleotide
  modified_base (4)..(4): a, c, u, g, unknown or other
aganagaggggaggacaca

SEQ ID NO: 961614 - RNA, 19 nt, Artificial Sequence
  Description of Artificial Sequence: Synthetic oligonucleotide
cccaauauaauacagcaau

SEQ ID NO: 961615 - RNA, 19 nt, Artificial Sequence
  Description of Artificial Sequence: Synthetic oligonucleotide
agcgacugucuuuaaugua

SEQ ID NO: 961616 - RNA, 19 nt, Artificial Sequence
  Description of Artificial Sequence: Synthetic oligonucleotide
gagccuccccaaccuagcc

SEQ ID NO: 961617 - RNA, 19 nt, Artificial Sequence
  Description of Artificial Sequence: Synthetic oligonucleotide
agguaagcaggguuaucuu

SEQ ID NO: 961618 - RNA, 19 nt, Artificial Sequence
  Description of Artificial Sequence: Synthetic oligonucleotide
agauugucauacacugggu

SEQ ID NO: 961619 - RNA, 19 nt, Artificial Sequence
  Description of Artificial Sequence: Synthetic oligonucleotide
gaacuacgcaauggguaac

SEQ ID NO: 961620 - RNA, 19 nt, Artificial Sequence
  Description of Artificial Sequence: Synthetic oligonucleotide
acgcagauugucauacacu

SEQ ID NO: 961621 - RNA, 19 nt, Artificial Sequence
  Description of Artificial Sequence: Synthetic oligonucleotide
gacaugacguguacuuuaa

SEQ ID NO: 961622 - RNA, 19 nt, Artificial Sequence
  Description of Artificial Sequence: Synthetic oligonucleotide
gccuauaggguucccacca

SEQ ID NO: 961623 - RNA, 19 nt, Artificial Sequence
  Description of Artificial Sequence: Synthetic oligonucleotide
gccucgacgcugauaaggg

SEQ ID NO: 961624 - RNA, 19 nt, Artificial Sequence
  Description of Artificial Sequence: Synthetic oligonucleotide
cuuucgugggcgcuaaccu

SEQ ID NO: 961625 - RNA, 19 nt, Artificial Sequence
  Description of Artificial Sequence: Synthetic oligonucleotide
agcgcauccgggucacaga

SEQ ID NO: 961626 - RNA, 19 nt, Artificial Sequence
  Description of Artificial Sequence: Synthetic oligonucleotide
acaugacguguacuuuaaa

SEQ ID NO: 961627 - RNA, 19 nt, Artificial Sequence
  Description of Artificial Sequence: Synthetic oligonucleotide
gcacucagccaugugacug

SEQ ID NO: 961628 - RNA, 19 nt, Artificial Sequence
  Description of Artificial Sequence: Synthetic oligonucleotide
uaccguuccccagccaccu

SEQ ID NO: 961629 - RNA, 19 nt, Artificial Sequence
  Description of Artificial Sequence: Synthetic oligonucleotide
caaagcccuucuauguaaa

SEQ ID NO: 961630 - RNA, 19 nt, Artificial Sequence
  Description of Artificial Sequence: Synthetic oligonucleotide
ggacaugacguguacuuua

SEQ ID NO: 961631 - RNA, 19 nt, Artificial Sequence
  Description of Artificial Sequence: Synthetic oligonucleotide
gcuagcucuaggguguggc

SEQ ID NO: 961632 - RNA, 19 nt, Artificial Sequence
  Description of Artificial Sequence: Synthetic oligonucleotide
uggacaugacguguacuuu

SEQ ID NO: 961633 - RNA, 19 nt, Artificial Sequence
  Description of Artificial Sequence: Synthetic oligonucleotide
guagaguacaaugcuaauu

SEQ ID NO: 961634 - RNA, 19 nt, Artificial Sequence
  Description of Artificial Sequence: Synthetic oligonucleotide
gcuaaccugaacaagguau

SEQ ID NO: 961635 - RNA, 19 nt, Artificial Sequence
  Description of Artificial Sequence: Synthetic oligonucleotide
aggcaacaagguacuggcg

SEQ ID NO: 961636 - RNA, 19 nt, Artificial Sequence
  Description of Artificial Sequence: Synthetic oligonucleotide
ccauuaugcaggguugaag

SEQ ID NO: 961637 - RNA, 19 nt, Artificial Sequence
  Description of Artificial Sequence: Synthetic oligonucleotide
cuaaccugaacaagguauu

SEQ ID NO: 961638 - RNA, 19 nt, Artificial Sequence
  Description of Artificial Sequence: Synthetic oligonucleotide
gcgacugucuuuaauguaa

SEQ ID NO: 961639 - RNA, 19 nt, Artificial Sequence
  Description of Artificial Sequence: Synthetic oligonucleotide
cuccgguucuaucagcuua

SEQ ID NO: 961640 - RNA, 19 nt, Artificial Sequence
  Description of Artificial Sequence: Synthetic oligonucleotide
uaacagcuguccugaccuc

SEQ ID NO: 961641 - RNA, 19 nt, Artificial Sequence
  Description of Artificial Sequence: Synthetic oligonucleotide
gcauccgggucacagacaa

SEQ ID NO: 961642 - RNA, 19 nt, Artificial Sequence
  Description of Artificial Sequence: Synthetic oligonucleotide
uggguaaaauucgcaucua

SEQ ID NO: 961643 - RNA, 19 nt, Artificial Sequence
  Description of Artificial Sequence: Synthetic oligonucleotide
cagcuggguaaaauucgca

SEQ ID NO: 961644 - RNA, 19 nt, Artificial Sequence
  Description of Artificial Sequence: Synthetic oligonucleotide
guaccguuccccagccacc

SEQ ID NO: 961645 - RNA, 19 nt, Artificial Sequence
  Description of Artificial Sequence: Synthetic oligonucleotide
ccuuucgugggcgcuaacc

SEQ ID NO: 961646 - RNA, 19 nt, Artificial Sequence
  Description of Artificial Sequence: Synthetic oligonucleotide
cacucccuagccaagguau

SEQ ID NO: 961647 - RNA, 19 nt, Artificial Sequence
  Description of Artificial Sequence: Synthetic oligonucleotide
aggagguaagcaggguuau

SEQ ID NO: 961648 - RNA, 19 nt, Artificial Sequence
  Description of Artificial Sequence: Synthetic oligonucleotide
ccgcacucagccaugugac

SEQ ID NO: 961649 - RNA, 19 nt, Artificial Sequence
  Description of Artificial Sequence: Synthetic oligonucleotide
agccauccgcacucagcca

SEQ ID NO: 961650 - RNA, 19 nt, Artificial Sequence
  Description of Artificial Sequence: Synthetic oligonucleotide
cuaucagcuuaaauuccau

SEQ ID NO: 961651 - RNA, 19 nt, Artificial Sequence
  Description of Artificial Sequence: Synthetic oligonucleotide
gcgcauccgggucacagac

SEQ ID NO: 961652 - RNA, 19 nt, Artificial Sequence
  Description of Artificial Sequence: Synthetic oligonucleotide
gagccucgacgcugauaag

SEQ ID NO: 961653 - RNA, 19 nt, Artificial Sequence
  Description of Artificial Sequence: Synthetic oligonucleotide
cgcaucuauguauagacua

SEQ ID NO: 961654 - RNA, 19 nt, Artificial Sequence
  Description of Artificial Sequence: Synthetic oligonucleotide
gaaugggcgcugauugucu

SEQ ID NO: 961655 - RNA, 19 nt, Artificial Sequence
  Description of Artificial Sequence: Synthetic oligonucleotide
ccucgacgcugauaagggg

SEQ ID NO: 961656 - RNA, 19 nt, Artificial Sequence
  Description of Artificial Sequence: Synthetic oligonucleotide
ccuauaggguucccaccag

SEQ ID NO: 961657 - RNA, 19 nt, Artificial Sequence
  Description of Artificial Sequence: Synthetic oligonucleotide
ggcgcugauugucugggaa

SEQ ID NO: 961658 - RNA, 19 nt, Artificial Sequence
  Description of Artificial Sequence: Synthetic oligonucleotide
ucgugggcgcuaaccugaa

SEQ ID NO: 961659 - RNA, 19 nt, Artificial Sequence
  Description of Artificial Sequence: Synthetic oligonucleotide
auccgcacucagccaugug

SEQ ID NO: 961660 - RNA, 19 nt, Artificial Sequence
  Description of Artificial Sequence: Synthetic oligonucleotide
caacgcagauugucauaca

SEQ ID NO: 961661 - RNA, 19 nt, Artificial Sequence
  Description of Artificial Sequence: Synthetic oligonucleotide
ugaugccuauaggguuccc

SEQ ID NO: 961662 - RNA, 19 nt, Artificial Sequence
  Description of Artificial Sequence: Synthetic oligonucleotide
cagugacagguaaguuuca

SEQ ID NO: 961663 - RNA, 19 nt, Artificial Sequence
  Description of Artificial Sequence: Synthetic oligonucleotide
augcuagcuagcacuguuu

SEQ ID NO: 961664 - RNA, 19 nt, Artificial Sequence
  Description of Artificial Sequence: Synthetic oligonucleotide
ggcauucagacucugccuu

SEQ ID NO: 961665 - RNA, 19 nt, Artificial Sequence
  Description of Artificial Sequence: Synthetic oligonucleotide
ggguaaaauucgcaucuau

SEQ ID NO: 961666 - RNA, 19 nt, Artificial Sequence
  Description of Artificial Sequence: Synthetic oligonucleotide
gcauuuaguaguccaugau

SEQ ID NO: 961667 - RNA, 19 nt, Artificial Sequence
  Description of Artificial Sequence: Synthetic oligonucleotide
caugaucaacgcagauugu

SEQ ID NO: 961668 - RNA, 19 nt, Artificial Sequence
  Description of Artificial Sequence: Synthetic oligonucleotide
gggcgcuaaccugaacaag

SEQ ID NO: 961669 - RNA, 19 nt, Artificial Sequence
  Description of Artificial Sequence: Synthetic oligonucleotide
aaagcgcauccgggucaca

SEQ ID NO: 961670 - RNA, 19 nt, Artificial Sequence
  Description of Artificial Sequence: Synthetic oligonucleotide
caccucugugggcugacua

SEQ ID NO: 961671 - RNA, 19 nt, Artificial Sequence
  Description of Artificial Sequence: Synthetic oligonucleotide
acguaccguuccccagcca

SEQ ID NO: 961672 - RNA, 19 nt, Artificial Sequence
  Description of Artificial Sequence: Synthetic oligonucleotide
gcccuucuauguaaaggca

SEQ ID NO: 961673 - RNA, 19 nt, Artificial Sequence
  Description of Artificial Sequence: Synthetic oligonucleotide
acucccuagccaagguauu

SEQ ID NO: 961674 - RNA, 19 nt, Artificial Sequence
  Description of Artificial Sequence: Synthetic oligonucleotide
gccuucgugaucugagccu

SEQ ID NO: 961675 - RNA, 19 nt, Artificial Sequence
  Description of Artificial Sequence: Synthetic oligonucleotide
gauccauguccaggaggua

SEQ ID NO: 961676 - RNA, 19 nt, Artificial Sequence
  Description of Artificial Sequence: Synthetic oligonucleotide
gccaagguauuugucuuua

SEQ ID NO: 961677 - RNA, 19 nt, Artificial Sequence
  Description of Artificial Sequence: Synthetic oligonucleotide
ccguuccccagccaccuuc

SEQ ID NO: 961678 - RNA, 19 nt, Artificial Sequence
  Description of Artificial Sequence: Synthetic oligonucleotide
acaccucugugggcugacu

SEQ ID NO: 961679 - RNA, 19 nt, Artificial Sequence
  Description of Artificial Sequence: Synthetic oligonucleotide
  modified_base (18)..(18): a, c, u, g, unknown or other
gccaccacaccaguauana

SEQ ID NO: 961680 - RNA, 19 nt, Artificial Sequence
  Description of Artificial Sequence: Synthetic oligonucleotide
ggagguaagcaggguuauc

SEQ ID NO: 961681 - RNA, 19 nt, Artificial Sequence
  Description of Artificial Sequence: Synthetic oligonucleotide
ccaugugacugggagggga

SEQ ID NO: 961682 - RNA, 19 nt, Artificial Sequence
  Description of Artificial Sequence: Synthetic oligonucleotide
ggaaagcgacugucuuuaa

SEQ ID NO: 961683 - RNA, 19 nt, Artificial Sequence
  Description of Artificial Sequence: Synthetic oligonucleotide
cuauggguauguguuucuu

SEQ ID NO: 961684 - RNA, 19 nt, Artificial Sequence
  Description of Artificial Sequence: Synthetic oligonucleotide
gguuaucuucaaagugagu

SEQ ID NO: 961685 - RNA, 19 nt, Artificial Sequence
  Description of Artificial Sequence: Synthetic oligonucleotide
cuggccgauucuucuggau

SEQ ID NO: 961686 - RNA, 19 nt, Artificial Sequence
  Description of Artificial Sequence: Synthetic oligonucleotide
ccaaccuagccuuucuauu

SEQ ID NO: 961687 - RNA, 19 nt, Artificial Sequence
  Description of Artificial Sequence: Synthetic oligonucleotide
ccaccaggugaccaguugu

SEQ ID NO: 961688 - RNA, 19 nt, Artificial Sequence
  Description of Artificial Sequence: Synthetic oligonucleotide
accguuccccagccaccuu

SEQ ID NO: 961689 - RNA, 19 nt, Artificial Sequence
  Description of Artificial Sequence: Synthetic oligonucleotide
cgacugucuuuaauguaaa

SEQ ID NO: 961690 - RNA, 19 nt, Artificial Sequence
  Description of Artificial Sequence: Synthetic oligonucleotide
cccaaccuagccuuucuau

SEQ ID NO: 961691 - RNA, 19 nt, Artificial Sequence
  Description of Artificial Sequence: Synthetic oligonucleotide
gucauacacuggguccccu

SEQ ID NO: 961692 - RNA, 19 nt, Artificial Sequence
  Description of Artificial Sequence: Synthetic oligonucleotide
cccuagccaagguauuugu

SEQ ID NO: 961693 - RNA, 19 nt, Artificial Sequence
  Description of Artificial Sequence: Synthetic oligonucleotide
gcgcuaaccugaacaaggu

SEQ ID NO: 961694 - RNA, 19 nt, Artificial Sequence
  Description of Artificial Sequence: Synthetic oligonucleotide
cucccuagccaagguauuu

SEQ ID NO: 961695 - RNA, 19 nt, Artificial Sequence
  Description of Artificial Sequence: Synthetic oligonucleotide
guauugcucugcacauguu

SEQ ID NO: 961696 - RNA, 19 nt, Artificial Sequence
  Description of Artificial Sequence: Synthetic oligonucleotide
ggguucccaccaggugacc

SEQ ID NO: 961697 - RNA, 19 nt, Artificial Sequence
  Description of Artificial Sequence: Synthetic oligonucleotide
caacgccgagccaccuccu

SEQ ID NO: 961698 - RNA, 19 nt, Artificial Sequence
  Description of Artificial Sequence: Synthetic oligonucleotide
cgcuaaccugaacaaggua

SEQ ID NO: 961699 - RNA, 19 nt, Artificial Sequence
  Description of Artificial Sequence: Synthetic oligonucleotide
ccccaaccuagccuuucua

SEQ ID NO: 961700 - RNA, 19 nt, Artificial Sequence
  Description of Artificial Sequence: Synthetic oligonucleotide
cgugggcgcuaaccugaac

SEQ ID NO: 961701 - RNA, 19 nt, Artificial Sequence
  Description of Artificial Sequence: Synthetic oligonucleotide
cccuuucgugggcgcuaac

SEQ ID NO: 961702 - RNA, 19 nt, Artificial Sequence
  Description of Artificial Sequence: Synthetic oligonucleotide
gggaaccauuaugcagggu

SEQ ID NO: 961703 - RNA, 19 nt, Artificial Sequence
  Description of Artificial Sequence: Synthetic oligonucleotide
cgguucuaucagcuuaaau

SEQ ID NO: 961704 - RNA, 19 nt, Artificial Sequence
  Description of Artificial Sequence: Synthetic oligonucleotide
ccgguucuaucagcuuaaa

SEQ ID NO: 961705 - RNA, 19 nt, Artificial Sequence
  Description of Artificial Sequence: Synthetic oligonucleotide
ccuccgguucuaucagcuu

SEQ ID NO: 961706 - RNA, 19 nt, Artificial Sequence
  Description of Artificial Sequence: Synthetic oligonucleotide
  modified_base (1)..(1): a, c, u, g, unknown or other
  modified_base (5)..(5): a, c, u, g, unknown or other
naganagaggggaggacac

SEQ ID NO: 961707 - RNA, 19 nt, Artificial Sequence
  Description of Artificial Sequence: Synthetic oligonucleotide
aaggacauugcccagaagc

SEQ ID NO: 961708 - RNA, 19 nt, Artificial Sequence
  Description of Artificial Sequence: Synthetic oligonucleotide
uuacaugugaauaauaugc

SEQ ID NO: 961709 - RNA, 19 nt, Artificial Sequence
  Description of Artificial Sequence: Synthetic oligonucleotide
auuucaacgagucaacucc

SEQ ID NO: 961710 - RNA, 19 nt, Artificial Sequence
  Description of Artificial Sequence: Synthetic oligonucleotide
uauauuagagcugagagag

SEQ ID NO: 961711 - RNA, 19 nt, Artificial Sequence
  Description of Artificial Sequence: Synthetic oligonucleotide
gaauaauaugcuuauacug

SEQ ID NO: 961712 - RNA, 19 nt, Artificial Sequence
  Description of Artificial Sequence: Synthetic oligonucleotide
aacaauccuucuuugcucc

SEQ ID NO: 961713 - RNA, 19 nt, Artificial Sequence
  Description of Artificial Sequence: Synthetic oligonucleotide
uuuagaacaagcuguuugg

SEQ ID NO: 961714 - RNA, 19 nt, Artificial Sequence
  Description of Artificial Sequence: Synthetic oligonucleotide
aauuucaacgagucaacuc

SEQ ID NO: 961715 - RNA, 19 nt, Artificial Sequence
  Description of Artificial Sequence: Synthetic oligonucleotide
ugaacaucacaucuggccg

SEQ ID NO: 961716 - RNA, 19 nt, Artificial Sequence
  Description of Artificial Sequence: Synthetic oligonucleotide
aaucaguuuauugacacag

SEQ ID NO: 961717 - RNA, 19 nt, Artificial Sequence
  Description of Artificial Sequence: Synthetic oligonucleotide
gaggcaagaacucuggugg

SEQ ID NO: 961718 - RNA, 19 nt, Artificial Sequence
  Description of Artificial Sequence: Synthetic oligonucleotide
aagaaagcgaggucagacc

SEQ ID NO: 961719 - RNA, 19 nt, Artificial Sequence
  Description of Artificial Sequence: Synthetic oligonucleotide
uccucuaugaccauuaguc

SEQ ID NO: 961720 - RNA, 19 nt, Artificial Sequence
  Description of Artificial Sequence: Synthetic oligonucleotide
aauaauaugcuuauacugu

SEQ ID NO: 961721 - RNA, 19 nt, Artificial Sequence
  Description of Artificial Sequence: Synthetic oligonucleotide
aaugccccuauuuaaaaug

SEQ ID NO: 961722 - RNA, 19 nt, Artificial Sequence
  Description of Artificial Sequence: Synthetic oligonucleotide
aaagaaagcgaggucagac

SEQ ID NO: 961723 - RNA, 19 nt, Artificial Sequence
  Description of Artificial Sequence: Synthetic oligonucleotide
aauaugcuuauacuguucu

SEQ ID NO: 961724 - RNA, 19 nt, Artificial Sequence
  Description of Artificial Sequence: Synthetic oligonucleotide
uggacguacaaucucaaag

SEQ ID NO: 961725 - RNA, 19 nt, Artificial Sequence
  Description of Artificial Sequence: Synthetic oligonucleotide
agauuaagccagcuuaacc

SEQ ID NO: 961726 - RNA, 19 nt, Artificial Sequence
  Description of Artificial Sequence: Synthetic oligonucleotide
aaacacucucaucuguccc

SEQ ID NO: 961727 - RNA, 19 nt, Artificial Sequence
  Description of Artificial Sequence: Synthetic oligonucleotide
uguaaagaaagcgagguca

SEQ ID NO: 961728 - RNA, 19 nt, Artificial Sequence
  Description of Artificial Sequence: Synthetic oligonucleotide
uuucuuaaggcccaggcac

SEQ ID NO: 961729 - RNA, 19 nt, Artificial Sequence
  Description of Artificial Sequence: Synthetic oligonucleotide
agucccuaagaacagauuc

SEQ ID NO: 961730 - RNA, 19 nt, Artificial Sequence
  Description of Artificial Sequence: Synthetic oligonucleotide
gauuaagccagcuuaacca

SEQ ID NO: 961731 - RNA, 19 nt, Artificial Sequence
  Description of Artificial Sequence: Synthetic oligonucleotide
aacaauuucaacgagucaa

SEQ ID NO: 961732 - RNA, 19 nt, Artificial Sequence
  Description of Artificial Sequence: Synthetic oligonucleotide
uucuuuauggaaaacaauu

SEQ ID NO: 961733 - RNA, 19 nt, Artificial Sequence
  Description of Artificial Sequence: Synthetic oligonucleotide
acuauuggugauuacaugu

SEQ ID NO: 961734 - RNA, 19 nt, Artificial Sequence
  Description of Artificial Sequence: Synthetic oligonucleotide
uguuuaucauccucggugg

SEQ ID NO: 961735 - RNA, 19 nt, Artificial Sequence
  Description of Artificial Sequence: Synthetic oligonucleotide
aaauaccuaagucuuaaaa

SEQ ID NO: 961736 - RNA, 19 nt, Artificial Sequence
  Description of Artificial Sequence: Synthetic oligonucleotide
ugaccauuaguccucauca

SEQ ID NO: 961737 - RNA, 19 nt, Artificial Sequence
  Description of Artificial Sequence: Synthetic oligonucleotide
uuuaaaaugcacugguaac

SEQ ID NO: 961738 - RNA, 19 nt, Artificial Sequence
  Description of Artificial Sequence: Synthetic oligonucleotide
aagccuauacucaggagcc

SEQ ID NO: 961739 - RNA, 19 nt, Artificial Sequence
  Description of Artificial Sequence: Synthetic oligonucleotide
uggguguuuaucauccucg

SEQ ID NO: 961740 - RNA, 19 nt, Artificial Sequence
  Description of Artificial Sequence: Synthetic oligonucleotide
aacacaaugggcaacccuc

SEQ ID NO: 961741 - RNA, 19 nt, Artificial Sequence
  Description of Artificial Sequence: Synthetic oligonucleotide
ugagauguaguuuggcuag

SEQ ID NO: 961742 - RNA, 19 nt, Artificial Sequence
  Description of Artificial Sequence: Synthetic oligonucleotide
uggaaauggacgaugugag

SEQ ID NO: 961743 - RNA, 19 nt, Artificial Sequence
  Description of Artificial Sequence: Synthetic oligonucleotide
uaacauuaaacagauuaag

SEQ ID NO: 961744 - RNA, 19 nt, Artificial Sequence
  Description of Artificial Sequence: Synthetic oligonucleotide
ucuagcagugcuaacaauc

SEQ ID NO: 961745 - RNA, 19 nt, Artificial Sequence
  Description of Artificial Sequence: Synthetic oligonucleotide
ucguccuuauauauuagag

SEQ ID NO: 961746 - RNA, 19 nt, Artificial Sequence
  Description of Artificial Sequence: Synthetic oligonucleotide
gaugugagguuucccaucg

SEQ ID NO: 961747 - RNA, 19 nt, Artificial Sequence
  Description of Artificial Sequence: Synthetic oligonucleotide
uauugacacaguaacacaa

SEQ ID NO: 961748 - RNA, 19 nt, Artificial Sequence
  Description of Artificial Sequence: Synthetic oligonucleotide
agccagcuuaaccaaaugc

SEQ ID NO: 961749 - RNA, 19 nt, Artificial Sequence
  Description of Artificial Sequence: Synthetic oligonucleotide
aaagcgaggucagaccugc

SEQ ID NO: 961750 - RNA, 19 nt, Artificial Sequence
  Description of Artificial Sequence: Synthetic oligonucleotide
gguaacauuaaacagauua

SEQ ID NO: 961751 - RNA, 19 nt, Artificial Sequence
  Description of Artificial Sequence: Synthetic oligonucleotide
acacuugccucccugacac

SEQ ID NO: 961752 - RNA, 19 nt, Artificial Sequence
  Description of Artificial Sequence: Synthetic oligonucleotide
cacaaaaugccaagaagcc

SEQ ID NO: 961753 - RNA, 19 nt, Artificial Sequence
  Description of Artificial Sequence: Synthetic oligonucleotide
agagagaaggaucccugcc

SEQ ID NO: 961754 - RNA, 19 nt, Artificial Sequence
  Description of Artificial Sequence: Synthetic oligonucleotide
ucagcuaauaauccaucug

SEQ ID NO: 961755 - RNA, 19 nt, Artificial Sequence
  Description of Artificial Sequence: Synthetic oligonucleotide
aauuucaaugccccuauuu

SEQ ID NO: 961756 - RNA, 19 nt, Artificial Sequence
  Description of Artificial Sequence: Synthetic oligonucleotide
agagaaggaucccugccgc

SEQ ID NO: 961757 - RNA, 19 nt, Artificial Sequence
  Description of Artificial Sequence: Synthetic oligonucleotide
uuggcuaguuucuuaaggc

SEQ ID NO: 961758 - RNA, 19 nt, Artificial Sequence
  Description of Artificial Sequence: Synthetic oligonucleotide
uuauauauuagagcugaga

SEQ ID NO: 961759 - RNA, 19 nt, Artificial Sequence
  Description of Artificial Sequence: Synthetic oligonucleotide
auauauuagagcugagaga

SEQ ID NO: 961760 - RNA, 19 nt, Artificial Sequence
  Description of Artificial Sequence: Synthetic oligonucleotide
gagagaaggaucccugccg

SEQ ID NO: 961761 - RNA, 19 nt, Artificial Sequence
  Description of Artificial Sequence: Synthetic oligonucleotide
uuacuauuggugauuacau

SEQ ID NO: 961762 - RNA, 19 nt, Artificial Sequence
  Description of Artificial Sequence: Synthetic oligonucleotide
uacaugugaauaauaugcu

SEQ ID NO: 961763 - RNA, 19 nt, Artificial Sequence
  Description of Artificial Sequence: Synthetic oligonucleotide
ucuuuauggaaaacaauuu

SEQ ID NO: 961764 - RNA, 19 nt, Artificial Sequence
  Description of Artificial Sequence: Synthetic oligonucleotide
caaaaugccaagaagccca

SEQ ID NO: 961765 - RNA, 19 nt, Artificial Sequence
  Description of Artificial Sequence: Synthetic oligonucleotide
cuagcagugcuaacaaucc

SEQ ID NO: 961766 - RNA, 19 nt, Artificial Sequence
  Description of Artificial Sequence: Synthetic oligonucleotide
cuuacaccaggccagacac

SEQ ID NO: 961767 - RNA, 19 nt, Artificial Sequence
  Description of Artificial Sequence: Synthetic oligonucleotide
cucaaaggcaaaauacuac

SEQ ID NO: 961768 - RNA, 19 nt, Artificial Sequence
  Description of Artificial Sequence: Synthetic oligonucleotide
gggacaguuacucaaaggc

SEQ ID NO: 961769 - RNA, 19 nt, Artificial Sequence
  Description of Artificial Sequence: Synthetic oligonucleotide
ucuaaugccaguucauaaa

SEQ ID NO: 961770 - RNA, 19 nt, Artificial Sequence
  Description of Artificial Sequence: Synthetic oligonucleotide
gaagacguaguucacuuuc

SEQ ID NO: 961771 - RNA, 19 nt, Artificial Sequence
  Description of Artificial Sequence: Synthetic oligonucleotide
aaaagccuauacucaggag

SEQ ID NO: 961772 - RNA, 19 nt, Artificial Sequence
  Description of Artificial Sequence: Synthetic oligonucleotide
gagaccuucaccucgguga

SEQ ID NO: 961773 - RNA, 19 nt, Artificial Sequence
  Description of Artificial Sequence: Synthetic oligonucleotide
cuucauuuacuauugguga

SEQ ID NO: 961774 - RNA, 19 nt, Artificial Sequence
  Description of Artificial Sequence: Synthetic oligonucleotide
aagcuguaaagaaagcgag

SEQ ID NO: 961775 - RNA, 19 nt, Artificial Sequence
  Description of Artificial Sequence: Synthetic oligonucleotide
augaccauuaguccucauc

SEQ ID NO: 961776 - RNA, 19 nt, Artificial Sequence
  Description of Artificial Sequence: Synthetic oligonucleotide
acacaacacacuugccucc

SEQ ID NO: 961777 - RNA, 19 nt, Artificial Sequence
  Description of Artificial Sequence: Synthetic oligonucleotide
acugguaacauuaaacaga

SEQ ID NO: 961778 - RNA, 19 nt, Artificial Sequence
  Description of Artificial Sequence: Synthetic oligonucleotide
ucuaugaccauuaguccuc

SEQ ID NO: 961779 - RNA, 19 nt, Artificial Sequence
  Description of Artificial Sequence: Synthetic oligonucleotide
aucguucacagggaggucc

SEQ ID NO: 961780 - RNA, 19 nt, Artificial Sequence
  Description of Artificial Sequence: Synthetic oligonucleotide
agaaagcgaggucagaccu

SEQ ID NO: 961781 - RNA, 19 nt, Artificial Sequence
  Description of Artificial Sequence: Synthetic oligonucleotide
cuaaugccaguucauaaac

SEQ ID NO: 961782 - RNA, 19 nt, Artificial Sequence
  Description of Artificial Sequence: Synthetic oligonucleotide
aaaucaguuuauugacaca

SEQ ID NO: 961783 - RNA, 19 nt, Artificial Sequence
  Description of Artificial Sequence: Synthetic oligonucleotide
guagagcagacacuacucg

SEQ ID NO: 961784 - RNA, 19 nt, Artificial Sequence
  Description of Artificial Sequence: Synthetic oligonucleotide
cacugguaacauuaaacag

SEQ ID NO: 961785 - RNA, 19 nt, Artificial Sequence
  Description of Artificial Sequence: Synthetic oligonucleotide
aaaugcacugguaacauua

SEQ ID NO: 961786 - RNA, 19 nt, Artificial Sequence
  Description of Artificial Sequence: Synthetic oligonucleotide
uguagagcagacacuacuc

SEQ ID NO: 961787 - RNA, 19 nt, Artificial Sequence
  Description of Artificial Sequence: Synthetic oligonucleotide
guccuuauauauuagagcu

SEQ ID NO: 961788 - RNA, 19 nt, Artificial Sequence
  Description of Artificial Sequence: Synthetic oligonucleotide
cauccagucccuaagaaca

SEQ ID NO: 961789 - RNA, 19 nt, Artificial Sequence
  Description of Artificial Sequence: Synthetic oligonucleotide
aaauacuacuguccugggu

SEQ ID NO: 961790 - RNA, 19 nt, Artificial Sequence
  Description of Artificial Sequence: Synthetic oligonucleotide
uuucaaugccccuauuuaa

SEQ ID NO: 961791 - RNA, 19 nt, Artificial Sequence
  Description of Artificial Sequence: Synthetic oligonucleotide
uuauacuguucuuuaugga

SEQ ID NO: 961792 - RNA, 19 nt, Artificial Sequence
  Description of Artificial Sequence: Synthetic oligonucleotide
auuaguccucaucagacaa

SEQ ID NO: 961793 - RNA, 19 nt, Artificial Sequence
  Description of Artificial Sequence: Synthetic oligonucleotide
uucaaugccccuauuuaaa

SEQ ID NO: 961794 - RNA, 19 nt, Artificial Sequence
  Description of Artificial Sequence: Synthetic oligonucleotide
ugaauuucaaugccccuau

SEQ ID NO: 961795 - RNA, 19 nt, Artificial Sequence
  Description of Artificial Sequence: Synthetic oligonucleotide
ucaacgagucaacuccaag

SEQ ID NO: 961796 - RNA, 19 nt, Artificial Sequence
  Description of Artificial Sequence: Synthetic oligonucleotide
ggugaaagcaguaaagagc

SEQ ID NO: 961797 - RNA, 19 nt, Artificial Sequence
  Description of Artificial Sequence: Synthetic oligonucleotide
acaaugggcaacccucaac

SEQ ID NO: 961798 - RNA, 19 nt, Artificial Sequence
  Description of Artificial Sequence: Synthetic oligonucleotide
cucccaucagcuaauaauc

SEQ ID NO: 961799 - RNA, 19 nt, Artificial Sequence
  Description of Artificial Sequence: Synthetic oligonucleotide
gaaccuguuagggaggcag

SEQ ID NO: 961800 - RNA, 19 nt, Artificial Sequence
  Description of Artificial Sequence: Synthetic oligonucleotide
ccaaaugccagaauaacac

SEQ ID NO: 961801 - RNA, 19 nt, Artificial Sequence
  Description of Artificial Sequence: Synthetic oligonucleotide
acaaucucaaagcccaaga

SEQ ID NO: 961802 - RNA, 19 nt, Artificial Sequence
  Description of Artificial Sequence: Synthetic oligonucleotide
uuggugaaagcaguaaaga

SEQ ID NO: 961803 - RNA, 19 nt, Artificial Sequence
  Description of Artificial Sequence: Synthetic oligonucleotide
ggaacaaugugccugcagc

SEQ ID NO: 961804 - RNA, 19 nt, Artificial Sequence
  Description of Artificial Sequence: Synthetic oligonucleotide
uuugcuaggcuuccucucu

SEQ ID NO: 961805 - RNA, 19 nt, Artificial Sequence
  Description of Artificial Sequence: Synthetic oligonucleotide
uaaugccaguucauaaaca

SEQ ID NO: 961806 - RNA, 19 nt, Artificial Sequence
  Description of Artificial Sequence: Synthetic oligonucleotide
uacuccuaggcccuguaga

SEQ ID NO: 961807 - RNA, 19 nt, Artificial Sequence
  Description of Artificial Sequence: Synthetic oligonucleotide
gucucugcgggcuaagucc

SEQ ID NO: 961808 - RNA, 19 nt, Artificial Sequence
  Description of Artificial Sequence: Synthetic oligonucleotide
uaauaugcuuauacuguuc

SEQ ID NO: 961809 - RNA, 19 nt, Artificial Sequence
  Description of Artificial Sequence: Synthetic oligonucleotide
cuugcuaggaaagagaucu

SEQ ID NO: 961810 - RNA, 19 nt, Artificial Sequence
  Description of Artificial Sequence: Synthetic oligonucleotide
ucgacagugggugaggggc

SEQ ID NO: 961811 - RNA, 19 nt, Artificial Sequence
  Description of Artificial Sequence: Synthetic oligonucleotide
aaagcuucuaaugccaguu

SEQ ID NO: 961812 - RNA, 19 nt, Artificial Sequence
  Description of Artificial Sequence: Synthetic oligonucleotide
uccucgguggcucugcuca

SEQ ID NO: 961813 - RNA, 19 nt, Artificial Sequence
  Description of Artificial Sequence: Synthetic oligonucleotide
aacccucaaccugagcccc

SEQ ID NO: 961814 - RNA, 19 nt, Artificial Sequence
  Description of Artificial Sequence: Synthetic oligonucleotide
ucaguacugugcuuggcca

SEQ ID NO: 961815 - RNA, 19 nt, Artificial Sequence
  Description of Artificial Sequence: Synthetic oligonucleotide
uaacaauccuucuuugcuc

SEQ ID NO: 961816 - RNA, 19 nt, Artificial Sequence
  Description of Artificial Sequence: Synthetic oligonucleotide
ugggcaacccucaaccuga

SEQ ID NO: 961817 - RNA, 19 nt, Artificial Sequence
  Description of Artificial Sequence: Synthetic oligonucleotide
ucccaucagcuaauaaucc

SEQ ID NO: 961818 - RNA, 19 nt, Artificial Sequence
  Description of Artificial Sequence: Synthetic oligonucleotide
uacucggaaccuguuaggg

SEQ ID NO: 961819 - RNA, 19 nt, Artificial Sequence
  Description of Artificial Sequence: Synthetic oligonucleotide
aucagcuaauaauccaucu

SEQ ID NO: 961820 - RNA, 19 nt, Artificial Sequence
  Description of Artificial Sequence: Synthetic oligonucleotide
ucuacuguccagccuacuc

SEQ ID NO: 961821 - RNA, 19 nt, Artificial Sequence
  Description of Artificial Sequence: Synthetic oligonucleotide
agaaggaucccugccgccc

SEQ ID NO: 961822 - RNA, 19 nt, Artificial Sequence
  Description of Artificial Sequence: Synthetic oligonucleotide
acguacaaucucaaagccc

SEQ ID NO: 961823 - RNA, 19 nt, Artificial Sequence
  Description of Artificial Sequence: Synthetic oligonucleotide
uuucaacgagucaacucca

SEQ ID NO: 961824 - RNA, 19 nt, Artificial Sequence
  Description of Artificial Sequence: Synthetic oligonucleotide
gacgaugugagguuuccca

SEQ ID NO: 961825 - RNA, 19 nt, Artificial Sequence
  Description of Artificial Sequence: Synthetic oligonucleotide
gaaaauaccuaagucuuaa

SEQ ID NO: 961826 - RNA, 19 nt, Artificial Sequence
  Description of Artificial Sequence: Synthetic oligonucleotide
aauaauccaucugggauuu

SEQ ID NO: 961827 - RNA, 19 nt, Artificial Sequence
  Description of Artificial Sequence: Synthetic oligonucleotide
uucuuaaggcccaggcacc

SEQ ID NO: 961828 - RNA, 19 nt, Artificial Sequence
  Description of Artificial Sequence: Synthetic oligonucleotide
auuaagccagcuuaaccaa

SEQ ID NO: 961829 - RNA, 19 nt, Artificial Sequence
  Description of Artificial Sequence: Synthetic oligonucleotide
aaaauaccuaagucuuaaa

SEQ ID NO: 961830 - RNA, 19 nt, Artificial Sequence
  Description of Artificial Sequence: Synthetic oligonucleotide
agugcuaacaauccuucuu

SEQ ID NO: 961831 - RNA, 19 nt, Artificial Sequence
  Description of Artificial Sequence: Synthetic oligonucleotide
cagcuuaaccaaaugccag

SEQ ID NO: 961832 - RNA, 19 nt, Artificial Sequence
  Description of Artificial Sequence: Synthetic oligonucleotide
ucccuaagaacagauuccc

SEQ ID NO: 961833 - RNA, 19 nt, Artificial Sequence
  Description of Artificial Sequence: Synthetic oligonucleotide
agaaacacucucaucuguc

SEQ ID NO: 961834 - RNA, 19 nt, Artificial Sequence
  Description of Artificial Sequence: Synthetic oligonucleotide
caucacaucuggccgagag

SEQ ID NO: 961835 - RNA, 19 nt, Artificial Sequence
  Description of Artificial Sequence: Synthetic oligonucleotide
gaagagaccuucaccucgg

SEQ ID NO: 961836 - RNA, 19 nt, Artificial Sequence
  Description of Artificial Sequence: Synthetic oligonucleotide
uaauccaucugggauuucu

SEQ ID NO: 961837 - RNA, 19 nt, Artificial Sequence
  Description of Artificial Sequence: Synthetic oligonucleotide
uggugguaacuugagaugu

SEQ ID NO: 961838 - RNA, 19 nt, Artificial Sequence
  Description of Artificial Sequence: Synthetic oligonucleotide
acaauccuucuuugcuccc

SEQ ID NO: 961839 - RNA, 19 nt, Artificial Sequence
  Description of Artificial Sequence: Synthetic oligonucleotide
uuggugauuacaugugaau

SEQ ID NO: 961840 - RNA, 19 nt, Artificial Sequence
  Description of Artificial Sequence: Synthetic oligonucleotide
aaugccagaauaacacuaa

SEQ ID NO: 961841 - RNA, 19 nt, Artificial Sequence
  Description of Artificial Sequence: Synthetic oligonucleotide
ucaaugccccuauuuaaaa

SEQ ID NO: 961842 - RNA, 19 nt, Artificial Sequence
  Description of Artificial Sequence: Synthetic oligonucleotide
agcuuaaccaaaugccaga

SEQ ID NO: 961843 - RNA, 19 nt, Artificial Sequence
  Description of Artificial Sequence: Synthetic oligonucleotide
cuuauauauuagagcugag

SEQ ID NO: 961844 - RNA, 19 nt, Artificial Sequence
  Description of Artificial Sequence: Synthetic oligonucleotide
agccccucaauguccuucc

SEQ ID NO: 961845 - RNA, 19 nt, Artificial Sequence
  Description of Artificial Sequence: Synthetic oligonucleotide
ucuugccucagcgagcgcc

SEQ ID NO: 961846 - RNA, 19 nt, Artificial Sequence
  Description of Artificial Sequence: Synthetic oligonucleotide
gaaauggacgaugugaggu

SEQ ID NO: 961847 - RNA, 19 nt, Artificial Sequence
  Description of Artificial Sequence: Synthetic oligonucleotide
guagguggacgauugggug

SEQ ID NO: 961848 - RNA, 19 nt, Artificial Sequence
  Description of Artificial Sequence: Synthetic oligonucleotide
ugcuaacaauccuucuuug

SEQ ID NO: 961849 - RNA, 19 nt, Artificial Sequence
  Description of Artificial Sequence: Synthetic oligonucleotide
ggaaagagaucuuggggcc

SEQ ID NO: 961850 - RNA, 19 nt, Artificial Sequence
  Description of Artificial Sequence: Synthetic oligonucleotide
gaccauuaguccucaucag

SEQ ID NO: 961851 - RNA, 19 nt, Artificial Sequence
  Description of Artificial Sequence: Synthetic oligonucleotide
ugaccuggacguacaaucu

SEQ ID NO: 961852 - RNA, 19 nt, Artificial Sequence
  Description of Artificial Sequence: Synthetic oligonucleotide
cuggguuacagugagcuuc

SEQ ID NO: 961853 - RNA, 19 nt, Artificial Sequence
  Description of Artificial Sequence: Synthetic oligonucleotide
cuaauaauccaucugggau

SEQ ID NO: 961854 - RNA, 19 nt, Artificial Sequence
  Description of Artificial Sequence: Synthetic oligonucleotide
aaagagaucuuggggccug

SEQ ID NO: 961855 - RNA, 19 nt, Artificial Sequence
  Description of Artificial Sequence: Synthetic oligonucleotide
ugaaugucuucaggagugg

SEQ ID NO: 961856 - RNA, 19 nt, Artificial Sequence
  Description of Artificial Sequence: Synthetic oligonucleotide
uguccagccuacuccuagg

SEQ ID NO: 961857 - RNA, 19 nt, Artificial Sequence
  Description of Artificial Sequence: Synthetic oligonucleotide
ggguaaaccaugaacauca

SEQ ID NO: 961858 - RNA, 19 nt, Artificial Sequence
  Description of Artificial Sequence: Synthetic oligonucleotide
uggugauuacaugugaaua

SEQ ID NO: 961859 - RNA, 19 nt, Artificial Sequence
  Description of Artificial Sequence: Synthetic oligonucleotide
aacucuggugguaacuuga

SEQ ID NO: 961860 - RNA, 19 nt, Artificial Sequence
  Description of Artificial Sequence: Synthetic oligonucleotide
gaccaggcagucucuaccc

SEQ ID NO: 961861 - RNA, 19 nt, Artificial Sequence
  Description of Artificial Sequence: Synthetic oligonucleotide
ggaucuucgacagugggug

SEQ ID NO: 961862 - RNA, 19 nt, Artificial Sequence
  Description of Artificial Sequence: Synthetic oligonucleotide
aagaacucuggugguaacu

SEQ ID NO: 961863 - RNA, 19 nt, Artificial Sequence
  Description of Artificial Sequence: Synthetic oligonucleotide
uuaagccagcuuaaccaaa

SEQ ID NO: 961864 - RNA, 19 nt, Artificial Sequence
  Description of Artificial Sequence: Synthetic oligonucleotide
ccuauuuaaaaugcacugg

SEQ ID NO: 961865 - RNA, 19 nt, Artificial Sequence
  Description of Artificial Sequence: Synthetic oligonucleotide
aauuuccuccccaggcuag

SEQ ID NO: 961866 - RNA, 19 nt, Artificial Sequence
  Description of Artificial Sequence: Synthetic oligonucleotide
uuagaacaagcuguuuggu

SEQ ID NO: 961867 - RNA, 19 nt, Artificial Sequence
  Description of Artificial Sequence: Synthetic oligonucleotide
gaacucuggugguaacuug

SEQ ID NO: 961868 - RNA, 19 nt, Artificial Sequence
  Description of Artificial Sequence: Synthetic oligonucleotide
ugguaacuugagauguagu

SEQ ID NO: 961869 - RNA, 19 nt, Artificial Sequence
  Description of Artificial Sequence: Synthetic oligonucleotide
cuaacaauccuucuuugcu

SEQ ID NO: 961870 - RNA, 19 nt, Artificial Sequence
  Description of Artificial Sequence: Synthetic oligonucleotide
uggacgauugggugggugu

SEQ ID NO: 961871 - RNA, 19 nt, Artificial Sequence
  Description of Artificial Sequence: Synthetic oligonucleotide
uucgacagugggugagggg

SEQ ID NO: 961872 - RNA, 19 nt, Artificial Sequence
  Description of Artificial Sequence: Synthetic oligonucleotide
ucccaucguucacagggag

SEQ ID NO: 961873 - RNA, 19 nt, Artificial Sequence
  Description of Artificial Sequence: Synthetic oligonucleotide
acaagcuguuuggugaaag

SEQ ID NO: 961874 - RNA, 19 nt, Artificial Sequence
  Description of Artificial Sequence: Synthetic oligonucleotide
agcuguaaagaaagcgagg

SEQ ID NO: 961875 - RNA, 19 nt, Artificial Sequence
  Description of Artificial Sequence: Synthetic oligonucleotide
uggguuacagugagcuucu

SEQ ID NO: 961876 - RNA, 19 nt, Artificial Sequence
  Description of Artificial Sequence: Synthetic oligonucleotide
gaacaucacaucuggccga

SEQ ID NO: 961877 - RNA, 19 nt, Artificial Sequence
  Description of Artificial Sequence: Synthetic oligonucleotide
accaaaugccagaauaaca

SEQ ID NO: 961878 - RNA, 19 nt, Artificial Sequence
  Description of Artificial Sequence: Synthetic oligonucleotide
gugguaacuugagauguag

SEQ ID NO: 961879 - RNA, 19 nt, Artificial Sequence
  Description of Artificial Sequence: Synthetic oligonucleotide
ucuucgacagugggugagg

SEQ ID NO: 961880 - RNA, 19 nt, Artificial Sequence
  Description of Artificial Sequence: Synthetic oligonucleotide
uuugcucccaucagcuaau

SEQ ID NO: 961881 - RNA, 19 nt, Artificial Sequence
  Description of Artificial Sequence: Synthetic oligonucleotide
ucuugcuaggaaagagauc

SEQ ID NO: 961882 - RNA, 19 nt, Artificial Sequence
  Description of Artificial Sequence: Synthetic oligonucleotide
ggaaauggacgaugugagg

SEQ ID NO: 961883 - RNA, 19 nt, Artificial Sequence
  Description of Artificial Sequence: Synthetic oligonucleotide
gucccuaagaacagauucc

SEQ ID NO: 961884 - RNA, 19 nt, Artificial Sequence
  Description of Artificial Sequence: Synthetic oligonucleotide
ucauuuacuauuggugauu

SEQ ID NO: 961885 - RNA, 19 nt, Artificial Sequence
  Description of Artificial Sequence: Synthetic oligonucleotide
gacugcaucccaggaagag

SEQ ID NO: 961886 - RNA, 19 nt, Artificial Sequence
  Description of Artificial Sequence: Synthetic oligonucleotide
ugccccuauuuaaaaugca

SEQ ID NO: 961887 - RNA, 19 nt, Artificial Sequence
  Description of Artificial Sequence: Synthetic oligonucleotide
ccagaauaacacuaagcug

SEQ ID NO: 961888 - RNA, 19 nt, Artificial Sequence
  Description of Artificial Sequence: Synthetic oligonucleotide
uggcucuugggcaaagcau

SEQ ID NO: 961889 - RNA, 19 nt, Artificial Sequence
  Description of Artificial Sequence: Synthetic oligonucleotide
agccagaaacacucucauc

SEQ ID NO: 961890 - RNA, 19 nt, Artificial Sequence
  Description of Artificial Sequence: Synthetic oligonucleotide
ucucuaccccuccaggcaa

SEQ ID NO: 961891 - RNA, 19 nt, Artificial Sequence
  Description of Artificial Sequence: Synthetic oligonucleotide
uuacagugagcuucucguc

SEQ ID NO: 961892 - RNA, 19 nt, Artificial Sequence
  Description of Artificial Sequence: Synthetic oligonucleotide
gccagcuuaaccaaaugcc

SEQ ID NO: 961893 - RNA, 19 nt, Artificial Sequence
  Description of Artificial Sequence: Synthetic oligonucleotide
auccucuaugaccauuagu

SEQ ID NO: 961894 - RNA, 19 nt, Artificial Sequence
  Description of Artificial Sequence: Synthetic oligonucleotide
ccagccuacuccuaggccc

SEQ ID NO: 961895 - RNA, 19 nt, Artificial Sequence
  Description of Artificial Sequence: Synthetic oligonucleotide
uagcagugcuaacaauccu

SEQ ID NO: 961896 - RNA, 19 nt, Artificial Sequence
  Description of Artificial Sequence: Synthetic oligonucleotide
uggguagguggacgauugg

SEQ ID NO: 961897 - RNA, 19 nt, Artificial Sequence
  Description of Artificial Sequence: Synthetic oligonucleotide
ugcuuauacuguucuuuau

SEQ ID NO: 961898 - RNA, 19 nt, Artificial Sequence
  Description of Artificial Sequence: Synthetic oligonucleotide
aagacguaguucacuuuca

SEQ ID NO: 961899 - RNA, 19 nt, Artificial Sequence
  Description of Artificial Sequence: Synthetic oligonucleotide
ugaccucauacuggaaaug

SEQ ID NO: 961900 - RNA, 19 nt, Artificial Sequence
  Description of Artificial Sequence: Synthetic oligonucleotide
aauggacgaugugagguuu

SEQ ID NO: 961901 - RNA, 19 nt, Artificial Sequence
  Description of Artificial Sequence: Synthetic oligonucleotide
uucaacgagucaacuccaa

SEQ ID NO: 961902 - RNA, 19 nt, Artificial Sequence
  Description of Artificial Sequence: Synthetic oligonucleotide
gaguuugcuaggcuuccuc

SEQ ID NO: 961903 - RNA, 19 nt, Artificial Sequence
  Description of Artificial Sequence: Synthetic oligonucleotide
auggagcacaucacagcgc

SEQ ID NO: 961904 - RNA, 19 nt, Artificial Sequence
  Description of Artificial Sequence: Synthetic oligonucleotide
agagaccuucaccucggug

SEQ ID NO: 961905 - RNA, 19 nt, Artificial Sequence
  Description of Artificial Sequence: Synthetic oligonucleotide
aaugcacugguaacauuaa

SEQ ID NO: 961906 - RNA, 19 nt, Artificial Sequence
  Description of Artificial Sequence: Synthetic oligonucleotide
cucuaugaccauuaguccu

SEQ ID NO: 961907 - RNA, 19 nt, Artificial Sequence
  Description of Artificial Sequence: Synthetic oligonucleotide
cguccuuauauauuagagc

SEQ ID NO: 961908 - RNA, 19 nt, Artificial Sequence
  Description of Artificial Sequence: Synthetic oligonucleotide
acucggaaccuguuaggga

SEQ ID NO: 961909 - RNA, 19 nt, Artificial Sequence
  Description of Artificial Sequence: Synthetic oligonucleotide
ggcccuguagagcagacac

SEQ ID NO: 961910 - RNA, 19 nt, Artificial Sequence
  Description of Artificial Sequence: Synthetic oligonucleotide
gcuaauaauccaucuggga

SEQ ID NO: 961911 - RNA, 19 nt, Artificial Sequence
  Description of Artificial Sequence: Synthetic oligonucleotide
gacgauugggugggugugg

SEQ ID NO: 961912 - RNA, 19 nt, Artificial Sequence
  Description of Artificial Sequence: Synthetic oligonucleotide
ggucagaccugcuuacacc

SEQ ID NO: 961913 - RNA, 19 nt, Artificial Sequence
  Description of Artificial Sequence: Synthetic oligonucleotide
uguuagggaggcagucagu

SEQ ID NO: 961914 - RNA, 19 nt, Artificial Sequence
  Description of Artificial Sequence: Synthetic oligonucleotide
gaacaagcuguuuggugaa

SEQ ID NO: 961915 - RNA, 19 nt, Artificial Sequence
  Description of Artificial Sequence: Synthetic oligonucleotide
ggguguuuaucauccucgg

SEQ ID NO: 961916 - RNA, 19 nt, Artificial Sequence
  Description of Artificial Sequence: Synthetic oligonucleotide
augccaguucauaaacauc

SEQ ID NO: 961917 - RNA, 19 nt, Artificial Sequence
  Description of Artificial Sequence: Synthetic oligonucleotide
cugguaacauuaaacagau

SEQ ID NO: 961918 - RNA, 19 nt, Artificial Sequence
  Description of Artificial Sequence: Synthetic oligonucleotide
auuggugauuacaugugaa

SEQ ID NO: 961919 - RNA, 19 nt, Artificial Sequence
  Description of Artificial Sequence: Synthetic oligonucleotide
auccaucugggauuucuau

SEQ ID NO: 961920 - RNA, 19 nt, Artificial Sequence
  Description of Artificial Sequence: Synthetic oligonucleotide
guuugcuaggcuuccucuc

SEQ ID NO: 961921 - RNA, 19 nt, Artificial Sequence
  Description of Artificial Sequence: Synthetic oligonucleotide
cucguccuuauauauuaga

SEQ ID NO: 961922 - RNA, 19 nt, Artificial Sequence
  Description of Artificial Sequence: Synthetic oligonucleotide
aucuucgacagugggugag

SEQ ID NO: 961923 - RNA, 19 nt, Artificial Sequence
  Description of Artificial Sequence: Synthetic oligonucleotide
ccucuaugaccauuagucc

SEQ ID NO: 961924 - RNA, 19 nt, Artificial Sequence
  Description of Artificial Sequence: Synthetic oligonucleotide
auuagagcugagagagaag

SEQ ID NO: 961925 - RNA, 19 nt, Artificial Sequence
  Description of Artificial Sequence: Synthetic oligonucleotide
ccuaacuuccccucuuccc

SEQ ID NO: 961926 - RNA, 19 nt, Artificial Sequence
  Description of Artificial Sequence: Synthetic oligonucleotide
ugcuaggcuuccucucugc

SEQ ID NO: 961927 - RNA, 19 nt, Artificial Sequence
  Description of Artificial Sequence: Synthetic oligonucleotide
ccuuauauauuagagcuga

SEQ ID NO: 961928 - RNA, 19 nt, Artificial Sequence
  Description of Artificial Sequence: Synthetic oligonucleotide
acgaugugagguuucccau

SEQ ID NO: 961929 - RNA, 19 nt, Artificial Sequence
  Description of Artificial Sequence: Synthetic oligonucleotide
uggacgaugugagguuucc

SEQ ID NO: 961930 - RNA, 19 nt, Artificial Sequence
  Description of Artificial Sequence: Synthetic oligonucleotide
aggcagucucuaccccucc

SEQ ID NO: 961931 - RNA, 19 nt, Artificial Sequence
  Description of Artificial Sequence: Synthetic oligonucleotide
ucguucacagggagguccu

SEQ ID NO: 961932 - RNA, 19 nt, Artificial Sequence
  Description of Artificial Sequence: Synthetic oligonucleotide
ggcuaagucccugucaggc

SEQ ID NO: 961933 - RNA, 19 nt, Artificial Sequence
  Description of Artificial Sequence: Synthetic oligonucleotide
aaaugccaagaagcccaag

SEQ ID NO: 961934 - RNA, 19 nt, Artificial Sequence
  Description of Artificial Sequence: Synthetic oligonucleotide
agacguaguucacuuucau

SEQ ID NO: 961935 - RNA, 19 nt, Artificial Sequence
  Description of Artificial Sequence: Synthetic oligonucleotide
gaaagcgaggucagaccug

SEQ ID NO: 961936 - RNA, 19 nt, Artificial Sequence
  Description of Artificial Sequence: Synthetic oligonucleotide
ugcaucccaggaagagacc

SEQ ID NO: 961937 - RNA, 19 nt, Artificial Sequence
  Description of Artificial Sequence: Synthetic oligonucleotide
gggugaauuucaaugcccc

SEQ ID NO: 961938 - RNA, 19 nt, Artificial Sequence
  Description of Artificial Sequence: Synthetic oligonucleotide
auaugcuuauacuguucuu

SEQ ID NO: 961939 - RNA, 19 nt, Artificial Sequence
  Description of Artificial Sequence: Synthetic oligonucleotide
cuucgacagugggugaggg

SEQ ID NO: 961940 - RNA, 19 nt, Artificial Sequence
  Description of Artificial Sequence: Synthetic oligonucleotide
gaccuggacguacaaucuc

SEQ ID NO: 961941 - RNA, 19 nt, Artificial Sequence
  Description of Artificial Sequence: Synthetic oligonucleotide
cugaguuugcuaggcuucc

SEQ ID NO: 961942 - RNA, 19 nt, Artificial Sequence
  Description of Artificial Sequence: Synthetic oligonucleotide
caaacucuagcagugcuaa

SEQ ID NO: 961943 - RNA, 19 nt, Artificial Sequence
  Description of Artificial Sequence: Synthetic oligonucleotide
uuacaccaggccagacaca

SEQ ID NO: 961944 - RNA, 19 nt, Artificial Sequence
  Description of Artificial Sequence: Synthetic oligonucleotide
agccuauacucaggagccc

SEQ ID NO: 961945 - RNA, 19 nt, Artificial Sequence
  Description of Artificial Sequence: Synthetic oligonucleotide
acgauuggguggguguggg

SEQ ID NO: 961946 - RNA, 19 nt, Artificial Sequence
  Description of Artificial Sequence: Synthetic oligonucleotide
acagauuaagccagcuuaa

SEQ ID NO: 961947 - RNA, 19 nt, Artificial Sequence
  Description of Artificial Sequence: Synthetic oligonucleotide
gucucuaccccuccaggca

SEQ ID NO: 961948 - RNA, 19 nt, Artificial Sequence
  Description of Artificial Sequence: Synthetic oligonucleotide
caagaacucuggugguaac

SEQ ID NO: 961949 - RNA, 19 nt, Artificial Sequence
  Description of Artificial Sequence: Synthetic oligonucleotide
cagauuaagccagcuuaac

SEQ ID NO: 961950 - RNA, 19 nt, Artificial Sequence
  Description of Artificial Sequence: Synthetic oligonucleotide
guuucccaucguucacagg

SEQ ID NO: 961951 - RNA, 19 nt, Artificial Sequence
  Description of Artificial Sequence: Synthetic oligonucleotide
caccucggugaccucauac

SEQ ID NO: 961952 - RNA, 19 nt, Artificial Sequence
  Description of Artificial Sequence: Synthetic oligonucleotide
caccggggaucuucgacag

SEQ ID NO: 961953 - RNA, 19 nt, Artificial Sequence
  Description of Artificial Sequence: Synthetic oligonucleotide
cauccucuaugaccauuag

SEQ ID NO: 961954 - RNA, 19 nt, Artificial Sequence
  Description of Artificial Sequence: Synthetic oligonucleotide
ggguagguggacgauuggg

SEQ ID NO: 961955 - RNA, 19 nt, Artificial Sequence
  Description of Artificial Sequence: Synthetic oligonucleotide
aagagaccuucaccucggu

SEQ ID NO: 961956 - RNA, 19 nt, Artificial Sequence
  Description of Artificial Sequence: Synthetic oligonucleotide
agcagugcuaacaauccuu

SEQ ID NO: 961957 - RNA, 19 nt, Artificial Sequence
  Description of Artificial Sequence: Synthetic oligonucleotide
gguaacuugagauguaguu

SEQ ID NO: 961958 - RNA, 19 nt, Artificial Sequence
  Description of Artificial Sequence: Synthetic oligonucleotide
gaacacaaugggcaacccu

SEQ ID NO: 961959 - RNA, 19 nt, Artificial Sequence
  Description of Artificial Sequence: Synthetic oligonucleotide
ugccuaacuuccccucuuc

SEQ ID NO: 961960 - RNA, 19 nt, Artificial Sequence
  Description of Artificial Sequence: Synthetic oligonucleotide
uucaccucggugaccucau

SEQ ID NO: 961961 - RNA, 19 nt, Artificial Sequence
  Description of Artificial Sequence: Synthetic oligonucleotide
accuggacguacaaucuca

SEQ ID NO: 961962 - RNA, 19 nt, Artificial Sequence
  Description of Artificial Sequence: Synthetic oligonucleotide
aguaaagagcaggccacau

SEQ ID NO: 961963 - RNA, 19 nt, Artificial Sequence
  Description of Artificial Sequence: Synthetic oligonucleotide
cagaggcccuggaacaaug

SEQ ID NO: 961964 - RNA, 19 nt, Artificial Sequence
  Description of Artificial Sequence: Synthetic oligonucleotide
caucuacuguccagccuac

SEQ ID NO: 961965 - RNA, 19 nt, Artificial Sequence
  Description of Artificial Sequence: Synthetic oligonucleotide
aucaguuuauugacacagu

SEQ ID NO: 961966 - RNA, 19 nt, Artificial Sequence
  Description of Artificial Sequence: Synthetic oligonucleotide
ccaacugcaaggaaaccca

SEQ ID NO: 961967 - RNA, 19 nt, Artificial Sequence
  Description of Artificial Sequence: Synthetic oligonucleotide
agacacuacucggaaccug

SEQ ID NO: 961968 - RNA, 19 nt, Artificial Sequence
  Description of Artificial Sequence: Synthetic oligonucleotide
acucuggugguaacuugag

SEQ ID NO: 961969 - RNA, 19 nt, Artificial Sequence
  Description of Artificial Sequence: Synthetic oligonucleotide
gcaguaaagagcaggccac

SEQ ID NO: 961970 - RNA, 19 nt, Artificial Sequence
  Description of Artificial Sequence: Synthetic oligonucleotide
ggggugaauuucaaugccc

SEQ ID NO: 961971 - RNA, 19 nt, Artificial Sequence
  Description of Artificial Sequence: Synthetic oligonucleotide
cauuuacuauuggugauua

SEQ ID NO: 961972 - RNA, 19 nt, Artificial Sequence
  Description of Artificial Sequence: Synthetic oligonucleotide
ccagcuuaaccaaaugcca

SEQ ID NO: 961973 - RNA, 19 nt, Artificial Sequence
  Description of Artificial Sequence: Synthetic oligonucleotide
gcuaagucccugucaggcc

SEQ ID NO: 961974 - RNA, 19 nt, Artificial Sequence
  Description of Artificial Sequence: Synthetic oligonucleotide
guaacuugagauguaguuu

SEQ ID NO: 961975 - RNA, 19 nt, Artificial Sequence
  Description of Artificial Sequence: Synthetic oligonucleotide
ccugaguuugcuaggcuuc

SEQ ID NO: 961976 - RNA, 19 nt, Artificial Sequence
  Description of Artificial Sequence: Synthetic oligonucleotide
gaucuucgacaguggguga

SEQ ID NO: 961977 - RNA, 19 nt, Artificial Sequence
  Description of Artificial Sequence: Synthetic oligonucleotide
agaauaacacuaagcugua

SEQ ID NO: 961978 - RNA, 19 nt, Artificial Sequence
  Description of Artificial Sequence: Synthetic oligonucleotide
gacacuacucggaaccugu

SEQ ID NO: 961979 - RNA, 19 nt, Artificial Sequence
  Description of Artificial Sequence: Synthetic oligonucleotide
auggacgaugugagguuuc

SEQ ID NO: 961980 - RNA, 19 nt, Artificial Sequence
  Description of Artificial Sequence: Synthetic oligonucleotide
cuagacagccagaaacacu

SEQ ID NO: 961981 - RNA, 19 nt, Artificial Sequence
  Description of Artificial Sequence: Synthetic oligonucleotide
aagucccugucaggccgcg

SEQ ID NO: 961982 - RNA, 19 nt, Artificial Sequence
  Description of Artificial Sequence: Synthetic oligonucleotide
aacaagcuguuuggugaaa

SEQ ID NO: 961983 - RNA, 19 nt, Artificial Sequence
  Description of Artificial Sequence: Synthetic oligonucleotide
acacaaugggcaacccuca

SEQ ID NO: 961984 - RNA, 19 nt, Artificial Sequence
  Description of Artificial Sequence: Synthetic oligonucleotide
ugcgggcuaagucccuguc

SEQ ID NO: 961985 - RNA, 19 nt, Artificial Sequence
  Description of Artificial Sequence: Synthetic oligonucleotide
gcuuacaccaggccagaca

SEQ ID NO: 961986 - RNA, 19 nt, Artificial Sequence
  Description of Artificial Sequence: Synthetic oligonucleotide
guagaucucucucccuucu

SEQ ID NO: 961987 - RNA, 19 nt, Artificial Sequence
  Description of Artificial Sequence: Synthetic oligonucleotide
auauuagagcugagagaga

SEQ ID NO: 961988 - RNA, 19 nt, Artificial Sequence
  Description of Artificial Sequence: Synthetic oligonucleotide
cuucuaaugccaguucaua

SEQ ID NO: 961989 - RNA, 19 nt, Artificial Sequence
  Description of Artificial Sequence: Synthetic oligonucleotide
gcucccaucagcuaauaau

SEQ ID NO: 961990 - RNA, 19 nt, Artificial Sequence
  Description of Artificial Sequence: Synthetic oligonucleotide
ccucuugccucagcgagcg

SEQ ID NO: 961991 - RNA, 19 nt, Artificial Sequence
  Description of Artificial Sequence: Synthetic oligonucleotide
cacacuugccucccugaca

SEQ ID NO: 961992 - RNA, 19 nt, Artificial Sequence
  Description of Artificial Sequence: Synthetic oligonucleotide
gccccuauuuaaaaugcac

SEQ ID NO: 961993 - RNA, 19 nt, Artificial Sequence
  Description of Artificial Sequence: Synthetic oligonucleotide
aaagagcaggccacaucua

SEQ ID NO: 961994 - RNA, 19 nt, Artificial Sequence
  Description of Artificial Sequence: Synthetic oligonucleotide
aucuuggggccugggccac

SEQ ID NO: 961995 - RNA, 19 nt, Artificial Sequence
  Description of Artificial Sequence: Synthetic oligonucleotide
gcuagauggagcacaucac

SEQ ID NO: 961996 - RNA, 19 nt, Artificial Sequence
  Description of Artificial Sequence: Synthetic oligonucleotide
ggucucugcgggcuaaguc

SEQ ID NO: 961997 - RNA, 19 nt, Artificial Sequence
  Description of Artificial Sequence: Synthetic oligonucleotide
ugguaacauuaaacagauu

SEQ ID NO: 961998 - RNA, 19 nt, Artificial Sequence
  Description of Artificial Sequence: Synthetic oligonucleotide
cccuaagaacagauucccc

SEQ ID NO: 961999 - RNA, 19 nt, Artificial Sequence
  Description of Artificial Sequence: Synthetic oligonucleotide
agauguaguuuggcuaguu

SEQ ID NO: 962000 - RNA, 19 nt, Artificial Sequence
  Description of Artificial Sequence: Synthetic oligonucleotide
ccucggugaccucauacug

SEQ ID NO: 962001 - RNA, 19 nt, Artificial Sequence
  Description of Artificial Sequence: Synthetic oligonucleotide
auaauccaucugggauuuc

SEQ ID NO: 962002 - RNA, 19 nt, Artificial Sequence
  Description of Artificial Sequence: Synthetic oligonucleotide
gggguaaaccaugaacauc

SEQ ID NO: 962003 - RNA, 19 nt, Artificial Sequence
  Description of Artificial Sequence: Synthetic oligonucleotide
gaaagagaucuuggggccu

SEQ ID NO: 962004 - RNA, 19 nt, Artificial Sequence
  Description of Artificial Sequence: Synthetic oligonucleotide
cucuggugguaacuugaga

SEQ ID NO: 962005 - RNA, 19 nt, Artificial Sequence
  Description of Artificial Sequence: Synthetic oligonucleotide
gcagugcuaacaauccuuc

SEQ ID NO: 962006 - RNA, 19 nt, Artificial Sequence
  Description of Artificial Sequence: Synthetic oligonucleotide
ccuagacagccagaaacac

SEQ ID NO: 962007 - RNA, 19 nt, Artificial Sequence
  Description of Artificial Sequence: Synthetic oligonucleotide
caauccuucuuugcuccca

SEQ ID NO: 962008 - RNA, 19 nt, Artificial Sequence
  Description of Artificial Sequence: Synthetic oligonucleotide
gcucuugcuaggaaagaga

SEQ ID NO: 962009 - RNA, 19 nt, Artificial Sequence
  Description of Artificial Sequence: Synthetic oligonucleotide
cccuagacagccagaaaca

SEQ ID NO: 962010 - RNA, 19 nt, Artificial Sequence
  Description of Artificial Sequence: Synthetic oligonucleotide
guggacgauugggugggug

SEQ ID NO: 962011 - RNA, 19 nt, Artificial Sequence
  Description of Artificial Sequence: Synthetic oligonucleotide
ccggggaucuucgacagug

SEQ ID NO: 962012 - RNA, 19 nt, Artificial Sequence
  Description of Artificial Sequence: Synthetic oligonucleotide
caaugccccuauuuaaaau

SEQ ID NO: 962013 - RNA, 19 nt, Artificial Sequence
  Description of Artificial Sequence: Synthetic oligonucleotide
cuaugaccauuaguccuca

SEQ ID NO: 962014 - RNA, 19 nt, Artificial Sequence
  Description of Artificial Sequence: Synthetic oligonucleotide
cuggacguacaaucucaaa

SEQ ID NO: 962015 - RNA, 19 nt, Artificial Sequence
  Description of Artificial Sequence: Synthetic oligonucleotide
ugcuuacaccaggccagac

SEQ ID NO: 962016 - RNA, 19 nt, Artificial Sequence
  Description of Artificial Sequence: Synthetic oligonucleotide
ugucaggccgcgggccgag

SEQ ID NO: 962017 - RNA, 19 nt, Artificial Sequence
  Description of Artificial Sequence: Synthetic oligonucleotide
cacuguggcucuugggcaa

SEQ ID NO: 962018 - RNA, 19 nt, Artificial Sequence
  Description of Artificial Sequence: Synthetic oligonucleotide
agcauccucuaugaccauu

SEQ ID NO: 962019 - RNA, 19 nt, Artificial Sequence
  Description of Artificial Sequence: Synthetic oligonucleotide
ggacgauugggugggugug

SEQ ID NO: 962020 - RNA, 19 nt, Artificial Sequence
  Description of Artificial Sequence: Synthetic oligonucleotide
aggcuagauggagcacauc

SEQ ID NO: 962021 - RNA, 19 nt, Artificial Sequence
  Description of Artificial Sequence: Synthetic oligonucleotide
ucuggccgagaggggacac

SEQ ID NO: 962022 - RNA, 19 nt, Artificial Sequence
  Description of Artificial Sequence: Synthetic oligonucleotide
ggcauccagucccuaagaa

SEQ ID NO: 962023 - RNA, 19 nt, Artificial Sequence
  Description of Artificial Sequence: Synthetic oligonucleotide
cacuacucggaaccuguua

SEQ ID NO: 962024 - RNA, 19 nt, Artificial Sequence
  Description of Artificial Sequence: Synthetic oligonucleotide
gcaagaacucuggugguaa

SEQ ID NO: 962025 - RNA, 19 nt, Artificial Sequence
  Description of Artificial Sequence: Synthetic oligonucleotide
cacuugccucccugacacc

SEQ ID NO: 962026 - RNA, 19 nt, Artificial Sequence
  Description of Artificial Sequence: Synthetic oligonucleotide
ccacacccaauguagaucu

SEQ ID NO: 962027 - RNA, 19 nt, Artificial Sequence
  Description of Artificial Sequence: Synthetic oligonucleotide
cacacccaauguagaucuc

SEQ ID NO: 962028 - RNA, 19 nt, Artificial Sequence
  Description of Artificial Sequence: Synthetic oligonucleotide
gguaaaccaugaacaucac

SEQ ID NO: 962029 - RNA, 19 nt, Artificial Sequence
  Description of Artificial Sequence: Synthetic oligonucleotide
cuucucguccuuauauauu

SEQ ID NO: 962030 - RNA, 19 nt, Artificial Sequence
  Description of Artificial Sequence: Synthetic oligonucleotide
gguagguggacgauugggu

SEQ ID NO: 962031 - RNA, 19 nt, Artificial Sequence
  Description of Artificial Sequence: Synthetic oligonucleotide
cuaggcccuguagagcaga

SEQ ID NO: 962032 - RNA, 19 nt, Artificial Sequence
  Description of Artificial Sequence: Synthetic oligonucleotide
ccccuauuuaaaaugcacu

SEQ ID NO: 962033 - RNA, 19 nt, Artificial Sequence
  Description of Artificial Sequence: Synthetic oligonucleotide
gcgaggucagaccugcuua

SEQ ID NO: 962034 - RNA, 19 nt, Artificial Sequence
  Description of Artificial Sequence: Synthetic oligonucleotide
aucuacuguccagccuacu

SEQ ID NO: 962035 - RNA, 19 nt, Artificial Sequence
  Description of Artificial Sequence: Synthetic oligonucleotide
cauacuggaaauggacgau

SEQ ID NO: 962036 - RNA, 19 nt, Artificial Sequence
  Description of Artificial Sequence: Synthetic oligonucleotide
gguguuuaucauccucggu

SEQ ID NO: 962037 - RNA, 19 nt, Artificial Sequence
  Description of Artificial Sequence: Synthetic oligonucleotide
gccgagagcccuccucuug

SEQ ID NO: 962038 - RNA, 19 nt, Artificial Sequence
  Description of Artificial Sequence: Synthetic oligonucleotide
ggguguggggucgcgcgcg

SEQ ID NO: 962039 - RNA, 19 nt, Artificial Sequence
  Description of Artificial Sequence: Synthetic oligonucleotide
ucuaccccuccaggcaauu

SEQ ID NO: 962040 - RNA, 19 nt, Artificial Sequence
  Description of Artificial Sequence: Synthetic oligonucleotide
ggacgaugugagguuuccc

SEQ ID NO: 962041 - RNA, 19 nt, Artificial Sequence
  Description of Artificial Sequence: Synthetic oligonucleotide
agucccugucaggccgcgg

SEQ ID NO: 962042 - RNA, 19 nt, Artificial Sequence
  Description of Artificial Sequence: Synthetic oligonucleotide
guggggucgcgcgcgcggg

SEQ ID NO: 962043 - RNA, 19 nt, Artificial Sequence
  Description of Artificial Sequence: Synthetic oligonucleotide
ucaccucggugaccucaua

SEQ ID NO: 962044 - RNA, 19 nt, Artificial Sequence
  Description of Artificial Sequence: Synthetic oligonucleotide
ccaccggggaucuucgaca

SEQ ID NO: 962045 - RNA, 19 nt, Artificial Sequence
  Description of Artificial Sequence: Synthetic oligonucleotide
caucguucacagggagguc

SEQ ID NO: 962046 - RNA, 19 nt, Artificial Sequence
  Description of Artificial Sequence: Synthetic oligonucleotide
cgaugugagguuucccauc

SEQ ID NO: 962047 - RNA, 19 nt, Artificial Sequence
  Description of Artificial Sequence: Synthetic oligonucleotide
ccaggcuagauggagcaca

SEQ ID NO: 962048 - RNA, 19 nt, Artificial Sequence
  Description of Artificial Sequence: Synthetic oligonucleotide
accggggaucuucgacagu

SEQ ID NO: 962049 - RNA, 19 nt, Artificial Sequence
  Description of Artificial Sequence: Synthetic oligonucleotide
cccaccggggaucuucgac

SEQ ID NO: 962050 - RNA, 19 nt, Artificial Sequence
  Description of Artificial Sequence: Synthetic oligonucleotide
cagggagguccuggguuac

SEQ ID NO: 962051 - RNA, 19 nt, Artificial Sequence
  Description of Artificial Sequence: Synthetic oligonucleotide
ggacauugcccagaagcua

SEQ ID NO: 962052 - RNA, 19 nt, Artificial Sequence
  Description of Artificial Sequence: Synthetic oligonucleotide
cagugcuaacaauccuucu

SEQ ID NO: 962053 - RNA, 19 nt, Artificial Sequence
  Description of Artificial Sequence: Synthetic oligonucleotide
gcaaacucuagcagugcua

SEQ ID NO: 962054 - RNA, 19 nt, Artificial Sequence
  Description of Artificial Sequence: Synthetic oligonucleotide
gcgggcuaagucccuguca

SEQ ID NO: 962055 - RNA, 19 nt, Artificial Sequence
  Description of Artificial Sequence: Synthetic oligonucleotide
ccaucguucacagggaggu

SEQ ID NO: 962056 - RNA, 19 nt, Artificial Sequence
  Description of Artificial Sequence: Synthetic oligonucleotide
cagccuacuccuaggcccu

SEQ ID NO: 962057 - RNA, 19 nt, Artificial Sequence
  Description of Artificial Sequence: Synthetic oligonucleotide
guguggggucgcgcgcgcg

SEQ ID NO: 962058 - RNA, 19 nt, Artificial Sequence
  Description of Artificial Sequence: Synthetic oligonucleotide
ugagccccucaauguccuu

SEQ ID NO: 962059 - RNA, 19 nt, Artificial Sequence
  Description of Artificial Sequence: Synthetic oligonucleotide
ucuuggggccugggccaca

SEQ ID NO: 962060 - RNA, 19 nt, Artificial Sequence
  Description of Artificial Sequence: Synthetic oligonucleotide
cccuguagagcagacacua

SEQ ID NO: 962061 - RNA, 19 nt, Artificial Sequence
  Description of Artificial Sequence: Synthetic oligonucleotide
guccuggguuacagugagc

SEQ ID NO: 962062 - RNA, 19 nt, Artificial Sequence
  Description of Artificial Sequence: Synthetic oligonucleotide
cucuugccucagcgagcgc

SEQ ID NO: 962063 - RNA, 19 nt, Artificial Sequence
  Description of Artificial Sequence: Synthetic oligonucleotide
caggcuagauggagcacau

SEQ ID NO: 962064 - RNA, 19 nt, Artificial Sequence
  Description of Artificial Sequence: Synthetic oligonucleotide
acacuacucggaaccuguu

SEQ ID NO: 962065 - RNA, 19 nt, Artificial Sequence
  Description of Artificial Sequence: Synthetic oligonucleotide
cugcuuacaccaggccaga

SEQ ID NO: 962066 - RNA, 19 nt, Artificial Sequence
  Description of Artificial Sequence: Synthetic oligonucleotide
gguguggggucgcgcgcgc

SEQ ID NO: 962067 - RNA, 19 nt, Artificial Sequence
  Description of Artificial Sequence: Synthetic oligonucleotide
ggugguaacuugagaugua

SEQ ID NO: 962068 - RNA, 19 nt, Artificial Sequence
  Description of Artificial Sequence: Synthetic oligonucleotide
ccuggacguacaaucucaa

SEQ ID NO: 962069 - RNA, 19 nt, Artificial Sequence
  Description of Artificial Sequence: Synthetic oligonucleotide
cugucccagggcugccuaa

SEQ ID NO: 962070 - RNA, 19 nt, Artificial Sequence
  Description of Artificial Sequence: Synthetic oligonucleotide
gggugacaggaagcaaaga

SEQ ID NO: 962071 - RNA, 19 nt, Artificial Sequence
  Description of Artificial Sequence: Synthetic oligonucleotide
ggacugcaucccaggaaga

SEQ ID NO: 962072 - RNA, 19 nt, Artificial Sequence
  Description of Artificial Sequence: Synthetic oligonucleotide
acccucaaccugagccccu

SEQ ID NO: 962073 - RNA, 19 nt, Artificial Sequence
  Description of Artificial Sequence: Synthetic oligonucleotide
gccccucaauguccuuccc

SEQ ID NO: 962074 - RNA, 19 nt, Artificial Sequence
  Description of Artificial Sequence: Synthetic oligonucleotide
ccuucccuagacagccaga

SEQ ID NO: 962075 - RNA, 19 nt, Artificial Sequence
  Description of Artificial Sequence: Synthetic oligonucleotide
gggcaacccucaaccugag

SEQ ID NO: 962076 - RNA, 19 nt, Artificial Sequence
  Description of Artificial Sequence: Synthetic oligonucleotide
ggaaccuguuagggaggca

SEQ ID NO: 962077 - RNA, 19 nt, Artificial Sequence
  Description of Artificial Sequence: Synthetic oligonucleotide
ggucgcgcgcgcgggccgg

SEQ ID NO: 962078 - RNA, 19 nt, Artificial Sequence
  Description of Artificial Sequence: Synthetic oligonucleotide
cugucaggccgcgggccga

SEQ ID NO: 962079 - RNA, 19 nt, Artificial Sequence
  Description of Artificial Sequence: Synthetic oligonucleotide
cucuaccccuccaggcaau

SEQ ID NO: 962080 - RNA, 19 nt, Artificial Sequence
  Description of Artificial Sequence: Synthetic oligonucleotide
cucugcgggcuaagucccu

SEQ ID NO: 962081 - RNA, 19 nt, Artificial Sequence
  Description of Artificial Sequence: Synthetic oligonucleotide
ccucaaccugagccccuca

SEQ ID NO: 962082 - RNA, 19 nt, Artificial Sequence
  Description of Artificial Sequence: Synthetic oligonucleotide
cggcgcggggaguggguag

SEQ ID NO: 962083 - RNA, 19 nt, Artificial Sequence
  Description of Artificial Sequence: Synthetic oligonucleotide
cccggcccuuccugaagca

SEQ ID NO: 962084 - RNA, 19 nt, Artificial Sequence
  Description of Artificial Sequence: Synthetic oligonucleotide
ccggucucugcgggcuaag

SEQ ID NO: 962085 - RNA, 19 nt, Artificial Sequence
  Description of Artificial Sequence: Synthetic oligonucleotide
cuaccccuccaggcaauuu

SEQ ID NO: 962086 - RNA, 19 nt, Artificial Sequence
  Description of Artificial Sequence: Synthetic oligonucleotide
gcccaccggggaucuucga

SEQ ID NO: 962087 - RNA, 19 nt, Artificial Sequence
  Description of Artificial Sequence: Synthetic oligonucleotide
cgcgggccgagagcccucc

SEQ ID NO: 962088 - RNA, 19 nt, Artificial Sequence
  Description of Artificial Sequence: Synthetic oligonucleotide
ggccggucucugcgggcua

SEQ ID NO: 962089 - RNA, 19 nt, Artificial Sequence
  Description of Artificial Sequence: Synthetic oligonucleotide
ccgcgggccgagagcccuc

SEQ ID NO: 962090 - RNA, 19 nt, Artificial Sequence
  Description of Artificial Sequence: Synthetic oligonucleotide
gcggcgcggggagugggua

SEQ ID NO: 962091 - RNA, 19 nt, Artificial Sequence
  Description of Artificial Sequence: Synthetic oligonucleotide
gcgcgcgggccggucucug

SEQ ID NO: 962092 - RNA, 19 nt, Artificial Sequence
  Description of Artificial Sequence: Synthetic oligonucleotide
gucgcgcgcgcgggccggu

SEQ ID NO: 962093 - RNA, 19 nt, Artificial Sequence
  Description of Artificial Sequence: Synthetic oligonucleotide
gcgcggggaguggguaggu

SEQ ID NO: 962094 - RNA, 19 nt, Artificial Sequence
  Description of Artificial Sequence: Synthetic oligonucleotide
gcgggccgagagcccuccu

SEQ ID NO: 962095 - RNA, 19 nt, Artificial Sequence
  Description of Artificial Sequence: Synthetic oligonucleotide
aauauaguggaacugccag

SEQ ID NO: 962096 - RNA, 19 nt, Artificial Sequence
  Description of Artificial Sequence: Synthetic oligonucleotide
cugguuaucaauauagugg

SEQ ID NO: 962097 - RNA, 19 nt, Artificial Sequence
  Description of Artificial Sequence: Synthetic oligonucleotide
aucaauauaguggaacugc

SEQ ID NO: 962098 - RNA, 19 nt, Artificial Sequence
  Description of Artificial Sequence: Synthetic oligonucleotide
gaauagacgaugcaggcgc

SEQ ID NO: 962099 - RNA, 19 nt, Artificial Sequence
  Description of Artificial Sequence: Synthetic oligonucleotide
uggaguguagcucuucucg

SEQ ID NO: 962100 - RNA, 19 nt, Artificial Sequence
  Description of Artificial Sequence: Synthetic oligonucleotide
aacccagccuguuugcucc

SEQ ID NO: 962101 - RNA, 19 nt, Artificial Sequence
  Description of Artificial Sequence: Synthetic oligonucleotide
uuugcuccgacgaaggaag

SEQ ID NO: 962102 - RNA, 19 nt, Artificial Sequence
  Description of Artificial Sequence: Synthetic oligonucleotide
ugauuugaaaucacacuag

SEQ ID NO: 962103 - RNA, 19 nt, Artificial Sequence
  Description of Artificial Sequence: Synthetic oligonucleotide
uauaguggaacugccaggg

SEQ ID NO: 962104 - RNA, 19 nt, Artificial Sequence
  Description of Artificial Sequence: Synthetic oligonucleotide
auuuccacuuuucuacagc

SEQ ID NO: 962105 - RNA, 19 nt, Artificial Sequence
  Description of Artificial Sequence: Synthetic oligonucleotide
aaucacacuagggaucccc

SEQ ID NO: 962106 - RNA, 19 nt, Artificial Sequence
  Description of Artificial Sequence: Synthetic oligonucleotide
ugauaugcuggcgugaggg

SEQ ID NO: 962107 - RNA, 19 nt, Artificial Sequence
  Description of Artificial Sequence: Synthetic oligonucleotide
uugcagaacaugcuguagg

SEQ ID NO: 962108 - RNA, 19 nt, Artificial Sequence
  Description of Artificial Sequence: Synthetic oligonucleotide
uucacuuacagagagggca

SEQ ID NO: 962109 - RNA, 19 nt, Artificial Sequence
  Description of Artificial Sequence: Synthetic oligonucleotide
uccaaugagaacugggugc

SEQ ID NO: 962110 - RNA, 19 nt, Artificial Sequence
  Description of Artificial Sequence: Synthetic oligonucleotide
ucauccaaugagaacuggg

SEQ ID NO: 962111 - RNA, 19 nt, Artificial Sequence
  Description of Artificial Sequence: Synthetic oligonucleotide
uugcauuguacagaaaggg

SEQ ID NO: 962112 - RNA, 19 nt, Artificial Sequence
  Description of Artificial Sequence: Synthetic oligonucleotide
aguguagcucuucucgucc

SEQ ID NO: 962113 - RNA, 19 nt, Artificial Sequence
  Description of Artificial Sequence: Synthetic oligonucleotide
agguccgaggcuuaucucc

SEQ ID NO: 962114 - RNA, 19 nt, Artificial Sequence
  Description of Artificial Sequence: Synthetic oligonucleotide
cagaacaugcuguagggcc

SEQ ID NO: 962115 - RNA, 19 nt, Artificial Sequence
  Description of Artificial Sequence: Synthetic oligonucleotide
uugaaaucacacuagggau

SEQ ID NO: 962116 - RNA, 19 nt, Artificial Sequence
  Description of Artificial Sequence: Synthetic oligonucleotide
ugcauuguacagaaagggc

SEQ ID NO: 962117 - RNA, 19 nt, Artificial Sequence
  Description of Artificial Sequence: Synthetic oligonucleotide
ugcagaacaugcuguaggg

SEQ ID NO: 962118 - RNA, 19 nt, Artificial Sequence
  Description of Artificial Sequence: Synthetic oligonucleotide
uuugcguaacacguggugg

SEQ ID NO: 962119 - RNA, 19 nt, Artificial Sequence
  Description of Artificial Sequence: Synthetic oligonucleotide
ugguauguccacuccauag

SEQ ID NO: 962120 - RNA, 19 nt, Artificial Sequence
  Description of Artificial Sequence: Synthetic oligonucleotide
ugagacaccugcccguugg

SEQ ID NO: 962121 - RNA, 19 nt, Artificial Sequence
  Description of Artificial Sequence: Synthetic oligonucleotide
guagcuuccaaucugcuga

SEQ ID NO: 962122 - RNA, 19 nt, Artificial Sequence
  Description of Artificial Sequence: Synthetic oligonucleotide
ugaaaucacacuagggauc

SEQ ID NO: 962123 - RNA, 19 nt, Artificial Sequence
  Description of Artificial Sequence: Synthetic oligonucleotide
guuaucaauauaguggaac

SEQ ID NO: 962124 - RNA, 19 nt, Artificial Sequence
  Description of Artificial Sequence: Synthetic oligonucleotide
gaaaucacacuagggaucc

SEQ ID NO: 962125 - RNA, 19 nt, Artificial Sequence
  Description of Artificial Sequence: Synthetic oligonucleotide
uaaaccagcgcaguucccg

SEQ ID NO: 962126 - RNA, 19 nt, Artificial Sequence
  Description of Artificial Sequence: Synthetic oligonucleotide
agcacuugcucauuuccac

SEQ ID NO: 962127 - RNA, 19 nt, Artificial Sequence
  Description of Artificial Sequence: Synthetic oligonucleotide
aaaaccgagggaacuuccc

SEQ ID NO: 962128 - RNA, 19 nt, Artificial Sequence
  Description of Artificial Sequence: Synthetic oligonucleotide
aagggcacaguuuucugcu

SEQ ID NO: 962129 - RNA, 19 nt, Artificial Sequence
  Description of Artificial Sequence: Synthetic oligonucleotide
cauggaauagacgaugcag

SEQ ID NO: 962130 - RNA, 19 nt, Artificial Sequence
  Description of Artificial Sequence: Synthetic oligonucleotide
gacgaaggaagucccagag

SEQ ID NO: 962131 - RNA, 19 nt, Artificial Sequence
  Description of Artificial Sequence: Synthetic oligonucleotide
cacaccgccacucaggggc

SEQ ID NO: 962132 - RNA, 19 nt, Artificial Sequence
  Description of Artificial Sequence: Synthetic oligonucleotide
uccgagaugagaucucugc

SEQ ID NO: 962133 - RNA, 19 nt, Artificial Sequence
  Description of Artificial Sequence: Synthetic oligonucleotide
auuugaaaucacacuaggg

SEQ ID NO: 962134 - RNA, 19 nt, Artificial Sequence
  Description of Artificial Sequence: Synthetic oligonucleotide
uucugcucgagcuuuagaa

SEQ ID NO: 962135 - RNA, 19 nt, Artificial Sequence
  Description of Artificial Sequence: Synthetic oligonucleotide
auggaauagacgaugcagg

SEQ ID NO: 962136 - RNA, 19 nt, Artificial Sequence
  Description of Artificial Sequence: Synthetic oligonucleotide
guagaugccaccauucuug

SEQ ID NO: 962137 - RNA, 19 nt, Artificial Sequence
  Description of Artificial Sequence: Synthetic oligonucleotide
aaaguucugaguaugucau

SEQ ID NO: 962138 - RNA, 19 nt, Artificial Sequence
  Description of Artificial Sequence: Synthetic oligonucleotide
acucaguugagcaaacagg

SEQ ID NO: 962139 - RNA, 19 nt, Artificial Sequence
  Description of Artificial Sequence: Synthetic oligonucleotide
aagcgcucgacgcacaacu

SEQ ID NO: 962140 - RNA, 19 nt, Artificial Sequence
  Description of Artificial Sequence: Synthetic oligonucleotide
auaguagaggcggucaccg

SEQ ID NO: 962141 - RNA, 19 nt, Artificial Sequence
  Description of Artificial Sequence: Synthetic oligonucleotide
uuggcuaagggcuccagcu

SEQ ID NO: 962142 - RNA, 19 nt, Artificial Sequence
  Description of Artificial Sequence: Synthetic oligonucleotide
aaccgagggaacuucccag

SEQ ID NO: 962143 - RNA, 19 nt, Artificial Sequence
  Description of Artificial Sequence: Synthetic oligonucleotide
uauauguaaggggucgucc

SEQ ID NO: 962144 - RNA, 19 nt, Artificial Sequence
  Description of Artificial Sequence: Synthetic oligonucleotide
ucugaguaugucaucccca

SEQ ID NO: 962145 - RNA, 19 nt, Artificial Sequence
  Description of Artificial Sequence: Synthetic oligonucleotide
uguaacauccgagggagga

SEQ ID NO: 962146 - RNA, 19 nt, Artificial Sequence
  Description of Artificial Sequence: Synthetic oligonucleotide
cuagaucccgccuucuggg

SEQ ID NO: 962147 - RNA, 19 nt, Artificial Sequence
  Description of Artificial Sequence: Synthetic oligonucleotide
ugcacuauccacaccgcca

SEQ ID NO: 962148 - RNA, 19 nt, Artificial Sequence
  Description of Artificial Sequence: Synthetic oligonucleotide
cugcucgagcuuuagaacc

SEQ ID NO: 962149 - RNA, 19 nt, Artificial Sequence
  Description of Artificial Sequence: Synthetic oligonucleotide
acuagggauccccagggag

SEQ ID NO: 962150 - RNA, 19 nt, Artificial Sequence
  Description of Artificial Sequence: Synthetic oligonucleotide
ugucuugguguacagcugu

SEQ ID NO: 962151 - RNA, 19 nt, Artificial Sequence
  Description of Artificial Sequence: Synthetic oligonucleotide
aacacgugguggcugccgg

SEQ ID NO: 962152 - RNA, 19 nt, Artificial Sequence
  Description of Artificial Sequence: Synthetic oligonucleotide
gaggaauucucacuggcca

SEQ ID NO: 962153 - RNA, 19 nt, Artificial Sequence
  Description of Artificial Sequence: Synthetic oligonucleotide
ugcccguuggcuaagggcu

SEQ ID NO: 962154 - RNA, 19 nt, Artificial Sequence
  Description of Artificial Sequence: Synthetic oligonucleotide
ggcugcacuauccacaccg

SEQ ID NO: 962155 - RNA, 19 nt, Artificial Sequence
  Description of Artificial Sequence: Synthetic oligonucleotide
gcugaugccgccuaugggg

SEQ ID NO: 962156 - RNA, 19 nt, Artificial Sequence
  Description of Artificial Sequence: Synthetic oligonucleotide
cuagggauccccagggagg

SEQ ID NO: 962157 - RNA, 19 nt, Artificial Sequence
  Description of Artificial Sequence: Synthetic oligonucleotide
uccuguaacauccgaggga

SEQ ID NO: 962158 - RNA, 19 nt, Artificial Sequence
  Description of Artificial Sequence: Synthetic oligonucleotide
cacauguugagcaguuugc

SEQ ID NO: 962159 - RNA, 19 nt, Artificial Sequence
  Description of Artificial Sequence: Synthetic oligonucleotide
aaguucugaguaugucauc

SEQ ID NO: 962160 - RNA, 19 nt, Artificial Sequence
  Description of Artificial Sequence: Synthetic oligonucleotide
agcuuuagaaccugguuau

SEQ ID NO: 962161 - RNA, 19 nt, Artificial Sequence
  Description of Artificial Sequence: Synthetic oligonucleotide
gguauguccacuccauagg

SEQ ID NO: 962162 - RNA, 19 nt, Artificial Sequence
  Description of Artificial Sequence: Synthetic oligonucleotide
uacgggcucacccugcuug

SEQ ID NO: 962163 - RNA, 19 nt, Artificial Sequence
  Description of Artificial Sequence: Synthetic oligonucleotide
uugcguaacacgugguggc

SEQ ID NO: 962164 - RNA, 19 nt, Artificial Sequence
  Description of Artificial Sequence: Synthetic oligonucleotide
ugcucauuuccacuuuucu

SEQ ID NO: 962165 - RNA, 19 nt, Artificial Sequence
  Description of Artificial Sequence: Synthetic oligonucleotide
agaucccgccuucugggcc

SEQ ID NO: 962166 - RNA, 19 nt, Artificial Sequence
  Description of Artificial Sequence: Synthetic oligonucleotide
ugaugucugcacuggagca

SEQ ID NO: 962167 - RNA, 19 nt, Artificial Sequence
  Description of Artificial Sequence: Synthetic oligonucleotide
uauuccucaguuugccggc

SEQ ID NO: 962168 - RNA, 19 nt, Artificial Sequence
  Description of Artificial Sequence: Synthetic oligonucleotide
cacauuggcggauccaagc

SEQ ID NO: 962169 - RNA, 19 nt, Artificial Sequence
  Description of Artificial Sequence: Synthetic oligonucleotide
gguccuguaacauccgagg

SEQ ID NO: 962170 - RNA, 19 nt, Artificial Sequence
  Description of Artificial Sequence: Synthetic oligonucleotide
acaccccgggaccagagac

SEQ ID NO: 962171 - RNA, 19 nt, Artificial Sequence
  Description of Artificial Sequence: Synthetic oligonucleotide
ggugcuuccauauauguaa

SEQ ID NO: 962172 - RNA, 19 nt, Artificial Sequence
  Description of Artificial Sequence: Synthetic oligonucleotide
gaguaugucauccccaugu

SEQ ID NO: 962173 - RNA, 19 nt, Artificial Sequence
  Description of Artificial Sequence: Synthetic oligonucleotide
cuuaucuccuccucaggac

SEQ ID NO: 962174 - RNA, 19 nt, Artificial Sequence
  Description of Artificial Sequence: Synthetic oligonucleotide
gagcuuuagaaccugguua

SEQ ID NO: 962175 - RNA, 19 nt, Artificial Sequence
  Description of Artificial Sequence: Synthetic oligonucleotide
ucugcucgagcuuuagaac

SEQ ID NO: 962176 - RNA, 19 nt, Artificial Sequence
  Description of Artificial Sequence: Synthetic oligonucleotide
uuugccggcuucuggacca

SEQ ID NO: 962177 - RNA, 19 nt, Artificial Sequence
  Description of Artificial Sequence: Synthetic oligonucleotide
agaggaccauccuuauccg

SEQ ID NO: 962178 - RNA, 19 nt, Artificial Sequence
  Description of Artificial Sequence: Synthetic oligonucleotide
ugcacuggagcagucauac

SEQ ID NO: 962179 - RNA, 19 nt, Artificial Sequence
  Description of Artificial Sequence: Synthetic oligonucleotide
uguggaguguagcucuucu

SEQ ID NO: 962180 - RNA, 19 nt, Artificial Sequence
  Description of Artificial Sequence: Synthetic oligonucleotide
uccauauauguaagggguc

SEQ ID NO: 962181 - RNA, 19 nt, Artificial Sequence
  Description of Artificial Sequence: Synthetic oligonucleotide
ugugccgaaaaccgaggga

SEQ ID NO: 962182 - RNA, 19 nt, Artificial Sequence
  Description of Artificial Sequence: Synthetic oligonucleotide
auaguggaacugccagggc

SEQ ID NO: 962183 - RNA, 19 nt, Artificial Sequence
  Description of Artificial Sequence: Synthetic oligonucleotide
ugugguauguccacuccau

SEQ ID NO: 962184 - RNA, 19 nt, Artificial Sequence
  Description of Artificial Sequence: Synthetic oligonucleotide
augugccgaaaaccgaggg

SEQ ID NO: 962185 - RNA, 19 nt, Artificial Sequence
  Description of Artificial Sequence: Synthetic oligonucleotide
auauauguaaggggucguc

SEQ ID NO: 962186 - RNA, 19 nt, Artificial Sequence
  Description of Artificial Sequence: Synthetic oligonucleotide
cuguuugcuccgacgaagg

SEQ ID NO: 962187 - RNA, 19 nt, Artificial Sequence
  Description of Artificial Sequence: Synthetic oligonucleotide
ucauaguagaggcggucac

SEQ ID NO: 962188 - RNA, 19 nt, Artificial Sequence
  Description of Artificial Sequence: Synthetic oligonucleotide
gguaaaccagcgcaguucc

SEQ ID NO: 962189 - RNA, 19 nt, Artificial Sequence
  Description of Artificial Sequence: Synthetic oligonucleotide
uguagcaaguggugagcag

SEQ ID NO: 962190 - RNA, 19 nt, Artificial Sequence
  Description of Artificial Sequence: Synthetic oligonucleotide
cucgacgcacaacuggacg

SEQ ID NO: 962191 - RNA, 19 nt, Artificial Sequence
  Description of Artificial Sequence: Synthetic oligonucleotide
ucgacgcacaacuggacga

SEQ ID NO: 962192 - RNA, 19 nt, Artificial Sequence
  Description of Artificial Sequence: Synthetic oligonucleotide
uuagaaccugguuaucaau

SEQ ID NO: 962193 - RNA, 19 nt, Artificial Sequence
  Description of Artificial Sequence: Synthetic oligonucleotide
gagcagucauacuugguca

SEQ ID NO: 962194 - RNA, 19 nt, Artificial Sequence
  Description of Artificial Sequence: Synthetic oligonucleotide
cucuucucguccacuaggc

SEQ ID NO: 962195 - RNA, 19 nt, Artificial Sequence
  Description of Artificial Sequence: Synthetic oligonucleotide
ucacuuacagagagggcaa

SEQ ID NO: 962196 - RNA, 19 nt, Artificial Sequence
  Description of Artificial Sequence: Synthetic oligonucleotide
agauuccgagaugagaucu

SEQ ID NO: 962197 - RNA, 19 nt, Artificial Sequence
  Description of Artificial Sequence: Synthetic oligonucleotide
aacugcuccuagaucccgc

SEQ ID NO: 962198 - RNA, 19 nt, Artificial Sequence
  Description of Artificial Sequence: Synthetic oligonucleotide
uguaaggggucguccaacu

SEQ ID NO: 962199 - RNA, 19 nt, Artificial Sequence
  Description of Artificial Sequence: Synthetic oligonucleotide
auggaaaguucugaguaug

SEQ ID NO: 962200 - RNA, 19 nt, Artificial Sequence
  Description of Artificial Sequence: Synthetic oligonucleotide
cuuugcguaacacguggug

SEQ ID NO: 962201 - RNA, 19 nt, Artificial Sequence
  Description of Artificial Sequence: Synthetic oligonucleotide
aggcuuaucuccuccucag

SEQ ID NO: 962202 - RNA, 19 nt, Artificial Sequence
  Description of Artificial Sequence: Synthetic oligonucleotide
uauguaaggggucguccaa

SEQ ID NO: 962203 - RNA, 19 nt, Artificial Sequence
  Description of Artificial Sequence: Synthetic oligonucleotide
acauuggcggauccaagca

SEQ ID NO: 962204 - RNA, 19 nt, Artificial Sequence
  Description of Artificial Sequence: Synthetic oligonucleotide
accgucgcagcccuucugg

SEQ ID NO: 962205 - RNA, 19 nt, Artificial Sequence
  Description of Artificial Sequence: Synthetic oligonucleotide
caguaccacaucuccaaag

SEQ ID NO: 962206 - RNA, 19 nt, Artificial Sequence
  Description of Artificial Sequence: Synthetic oligonucleotide
uguacagaaagggccucag

SEQ ID NO: 962207 - RNA, 19 nt, Artificial Sequence
  Description of Artificial Sequence: Synthetic oligonucleotide
aggaggugcuuccauauau

SEQ ID NO: 962208 - RNA, 19 nt, Artificial Sequence
  Description of Artificial Sequence: Synthetic oligonucleotide
caugugccgaaaaccgagg

SEQ ID NO: 962209 - RNA, 19 nt, Artificial Sequence
  Description of Artificial Sequence: Synthetic oligonucleotide
aucuuguggaguguagcuc

SEQ ID NO: 962210 - RNA, 19 nt, Artificial Sequence
  Description of Artificial Sequence: Synthetic oligonucleotide
uagacgaugcaggcgcugg

SEQ ID NO: 962211 - RNA, 19 nt, Artificial Sequence
  Description of Artificial Sequence: Synthetic oligonucleotide
uggauauccgccagcacuu

SEQ ID NO: 962212 - RNA, 19 nt, Artificial Sequence
  Description of Artificial Sequence: Synthetic oligonucleotide
ggcuuugcguaacacgugg

SEQ ID NO: 962213 - RNA, 19 nt, Artificial Sequence
  Description of Artificial Sequence: Synthetic oligonucleotide
uccaugugccgaaaaccga

SEQ ID NO: 962214 - RNA, 19 nt, Artificial Sequence
  Description of Artificial Sequence: Synthetic oligonucleotide
uugagcaaacagguaggag

SEQ ID NO: 962215 - RNA, 19 nt, Artificial Sequence
  Description of Artificial Sequence: Synthetic oligonucleotide
ucgagcuuuagaaccuggu

SEQ ID NO: 962216 - RNA, 19 nt, Artificial Sequence
  Description of Artificial Sequence: Synthetic oligonucleotide
gauauccgccagcacuugc

SEQ ID NO: 962217 - RNA, 19 nt, Artificial Sequence
  Description of Artificial Sequence: Synthetic oligonucleotide
ccugguuaucaauauagug

SEQ ID NO: 962218 - RNA, 19 nt, Artificial Sequence
  Description of Artificial Sequence: Synthetic oligonucleotide
uccgaggcuuaucuccucc

SEQ ID NO: 962219 - RNA, 19 nt, Artificial Sequence
  Description of Artificial Sequence: Synthetic oligonucleotide
cuagcagguagaugccacc

SEQ ID NO: 962220 - RNA, 19 nt, Artificial Sequence
  Description of Artificial Sequence: Synthetic oligonucleotide
cucaguugagcaaacaggu

SEQ ID NO: 962221 - RNA, 19 nt, Artificial Sequence
  Description of Artificial Sequence: Synthetic oligonucleotide
cuuuagaaccugguuauca

SEQ ID NO: 962222 - RNA, 19 nt, Artificial Sequence
  Description of Artificial Sequence: Synthetic oligonucleotide
aaaucacacuagggauccc

SEQ ID NO: 962223 - RNA, 19 nt, Artificial Sequence
  Description of Artificial Sequence: Synthetic oligonucleotide
ugaguaugucauccccaug

SEQ ID NO: 962224 - RNA, 19 nt, Artificial Sequence
  Description of Artificial Sequence: Synthetic oligonucleotide
cuggggaucuuguggagug

SEQ ID NO: 962225 - RNA, 19 nt, Artificial Sequence
  Description of Artificial Sequence: Synthetic oligonucleotide
caaguggugagcaggcguc

SEQ ID NO: 962226 - RNA, 19 nt, Artificial Sequence
  Description of Artificial Sequence: Synthetic oligonucleotide
gaccauccuuauccgagcc

SEQ ID NO: 962227 - RNA, 19 nt, Artificial Sequence
  Description of Artificial Sequence: Synthetic oligonucleotide
aguuugcagaacaugcugu

SEQ ID NO: 962228 - RNA, 19 nt, Artificial Sequence
  Description of Artificial Sequence: Synthetic oligonucleotide
gcuuccaaucugcugagcc

SEQ ID NO: 962229 - RNA, 19 nt, Artificial Sequence
  Description of Artificial Sequence: Synthetic oligonucleotide
ugcuguagggcccugccuu

SEQ ID NO: 962230 - RNA, 19 nt, Artificial Sequence
  Description of Artificial Sequence: Synthetic oligonucleotide
cauguagcaaguggugagc

SEQ ID NO: 962231 - RNA, 19 nt, Artificial Sequence
  Description of Artificial Sequence: Synthetic oligonucleotide
ugguguacagcugucuuuc

SEQ ID NO: 962232 - RNA, 19 nt, Artificial Sequence
  Description of Artificial Sequence: Synthetic oligonucleotide
augauaugcuggcgugagg

SEQ ID NO: 962233 - RNA, 19 nt, Artificial Sequence
  Description of Artificial Sequence: Synthetic oligonucleotide
gacgaaggcucucaggucu

SEQ ID NO: 962234 - RNA, 19 nt, Artificial Sequence
  Description of Artificial Sequence: Synthetic oligonucleotide
uuuggauauccgccagcac

SEQ ID NO: 962235 - RNA, 19 nt, Artificial Sequence
  Description of Artificial Sequence: Synthetic oligonucleotide
cuucacuuacagagagggc

SEQ ID NO: 962236 - RNA, 19 nt, Artificial Sequence
  Description of Artificial Sequence: Synthetic oligonucleotide
aggucaaaccuguugucau

SEQ ID NO: 962237 - RNA, 19 nt, Artificial Sequence
  Description of Artificial Sequence: Synthetic oligonucleotide
cagagcgggaagcuggaag

SEQ ID NO: 962238 - RNA, 19 nt, Artificial Sequence
  Description of Artificial Sequence: Synthetic oligonucleotide
uguuugcuccgacgaagga

SEQ ID NO: 962239 - RNA, 19 nt, Artificial Sequence
  Description of Artificial Sequence: Synthetic oligonucleotide
cugcccguuggcuaagggc

SEQ ID NO: 962240 - RNA, 19 nt, Artificial Sequence
  Description of Artificial Sequence: Synthetic oligonucleotide
ucacagaccucgcucccga

SEQ ID NO: 962241 - RNA, 19 nt, Artificial Sequence
  Description of Artificial Sequence: Synthetic oligonucleotide
ugccgcucccuccaugugc

SEQ ID NO: 962242 - RNA, 19 nt, Artificial Sequence
  Description of Artificial Sequence: Synthetic oligonucleotide
ggaauagacgaugcaggcg

SEQ ID NO: 962243 - RNA, 19 nt, Artificial Sequence
  Description of Artificial Sequence: Synthetic oligonucleotide
gacugugguauguccacuc

SEQ ID NO: 962244 - RNA, 19 nt, Artificial Sequence
  Description of Artificial Sequence: Synthetic oligonucleotide
cauaguagaggcggucacc

SEQ ID NO: 962245 - RNA, 19 nt, Artificial Sequence
  Description of Artificial Sequence: Synthetic oligonucleotide
caugcuguagggcccugcc

SEQ ID NO: 962246 - RNA, 19 nt, Artificial Sequence
  Description of Artificial Sequence: Synthetic oligonucleotide
ccauauauguaaggggucg

SEQ ID NO: 962247 - RNA, 19 nt, Artificial Sequence
  Description of Artificial Sequence: Synthetic oligonucleotide
cucgagcuuuagaaccugg

SEQ ID NO: 962248 - RNA, 19 nt, Artificial Sequence
  Description of Artificial Sequence: Synthetic oligonucleotide
guaagucuucacuuacaga

SEQ ID NO: 962249 - RNA, 19 nt, Artificial Sequence
  Description of Artificial Sequence: Synthetic oligonucleotide
uccuagaucccgccuucug

SEQ ID NO: 962250 - RNA, 19 nt, Artificial Sequence
  Description of Artificial Sequence: Synthetic oligonucleotide
ugugccuguucauggagua

SEQ ID NO: 962251 - RNA, 19 nt, Artificial Sequence
  Description of Artificial Sequence: Synthetic oligonucleotide
uagcuuccaaucugcugag

SEQ ID NO: 962252 - RNA, 19 nt, Artificial Sequence
  Description of Artificial Sequence: Synthetic oligonucleotide
gaucccgccuucugggccc

SEQ ID NO: 962253 - RNA, 19 nt, Artificial Sequence
  Description of Artificial Sequence: Synthetic oligonucleotide
uccacauuggcggauccaa

SEQ ID NO: 962254 - RNA, 19 nt, Artificial Sequence
  Description of Artificial Sequence: Synthetic oligonucleotide
uuccgaagucugccgaaga

SEQ ID NO: 962255 - RNA, 19 nt, Artificial Sequence
  Description of Artificial Sequence: Synthetic oligonucleotide
uugcucauuuccacuuuuc

SEQ ID NO: 962256 - RNA, 19 nt, Artificial Sequence
  Description of Artificial Sequence: Synthetic oligonucleotide
ugccgaagauggaaaguuc

SEQ ID NO: 962257 - RNA, 19 nt, Artificial Sequence
  Description of Artificial Sequence: Synthetic oligonucleotide
cacuaggcuuuggauaucc

SEQ ID NO: 962258 - RNA, 19 nt, Artificial Sequence
  Description of Artificial Sequence: Synthetic oligonucleotide
uuccgagaugagaucucug

SEQ ID NO: 962259 - RNA, 19 nt, Artificial Sequence
  Description of Artificial Sequence: Synthetic oligonucleotide
aacuggacgaaggcucuca

SEQ ID NO: 962260 - RNA, 19 nt, Artificial Sequence
  Description of Artificial Sequence: Synthetic oligonucleotide
ucugccgaagauggaaagu

SEQ ID NO: 962261 - RNA, 19 nt, Artificial Sequence
  Description of Artificial Sequence: Synthetic oligonucleotide
agcgggaagcuggaagcgc

SEQ ID NO: 962262 - RNA, 19 nt, Artificial Sequence
  Description of Artificial Sequence: Synthetic oligonucleotide
uccuuauccgagccugcac

SEQ ID NO: 962263 - RNA, 19 nt, Artificial Sequence
  Description of Artificial Sequence: Synthetic oligonucleotide
gaggacauauuccucaguu

SEQ ID NO: 962264 - RNA, 19 nt, Artificial Sequence
  Description of Artificial Sequence: Synthetic oligonucleotide
accugucuugguguacagc

SEQ ID NO: 962265 - RNA, 19 nt, Artificial Sequence
  Description of Artificial Sequence: Synthetic oligonucleotide
cuuccaaucugcugagcca

SEQ ID NO: 962266 - RNA, 19 nt, Artificial Sequence
  Description of Artificial Sequence: Synthetic oligonucleotide
cuccgacgaaggaaguccc

SEQ ID NO: 962267 - RNA, 19 nt, Artificial Sequence
  Description of Artificial Sequence: Synthetic oligonucleotide
uugguguacagcugucuuu

SEQ ID NO: 962268 - RNA, 19 nt, Artificial Sequence
  Description of Artificial Sequence: Synthetic oligonucleotide
gucaaaccuguugucauca

SEQ ID NO: 962269 - RNA, 19 nt, Artificial Sequence
  Description of Artificial Sequence: Synthetic oligonucleotide
ggcggauccaagcacaaga

SEQ ID NO: 962270 - RNA, 19 nt, Artificial Sequence
  Description of Artificial Sequence: Synthetic oligonucleotide
uucuggaccagggguaaac

SEQ ID NO: 962271 - RNA, 19 nt, Artificial Sequence
  Description of Artificial Sequence: Synthetic oligonucleotide
cuuuggauauccgccagca

SEQ ID NO: 962272 - RNA, 19 nt, Artificial Sequence
  Description of Artificial Sequence: Synthetic oligonucleotide
guuugccggcuucuggacc

SEQ ID NO: 962273 - RNA, 19 nt, Artificial Sequence
  Description of Artificial Sequence: Synthetic oligonucleotide
cacuuuucuacagccucgc

SEQ ID NO: 962274 - RNA, 19 nt, Artificial Sequence
  Description of Artificial Sequence: Synthetic oligonucleotide
uagccgaggagacucucau

SEQ ID NO: 962275 - RNA, 19 nt, Artificial Sequence
  Description of Artificial Sequence: Synthetic oligonucleotide
gauggaaaguucugaguau

SEQ ID NO: 962276 - RNA, 19 nt, Artificial Sequence
  Description of Artificial Sequence: Synthetic oligonucleotide
ugcuccuagaucccgccuu

SEQ ID NO: 962277 - RNA, 19 nt, Artificial Sequence
  Description of Artificial Sequence: Synthetic oligonucleotide
aggacauauuccucaguuu

SEQ ID NO: 962278 - RNA, 19 nt, Artificial Sequence
  Description of Artificial Sequence: Synthetic oligonucleotide
uuccacauguugagcaguu

SEQ ID NO: 962279 - RNA, 19 nt, Artificial Sequence
  Description of Artificial Sequence: Synthetic oligonucleotide
aggcccaugucgauguggg

SEQ ID NO: 962280 - RNA, 19 nt, Artificial Sequence
  Description of Artificial Sequence: Synthetic oligonucleotide
uccaaagggcacaguuuuc

SEQ ID NO: 962281 - RNA, 19 nt, Artificial Sequence
  Description of Artificial Sequence: Synthetic oligonucleotide
auuccgagaugagaucucu

SEQ ID NO: 962282 - RNA, 19 nt, Artificial Sequence
  Description of Artificial Sequence: Synthetic oligonucleotide
gaugccgccuaugggguug

SEQ ID NO: 962283 - RNA, 19 nt, Artificial Sequence
  Description of Artificial Sequence: Synthetic oligonucleotide
augagaacugggugcccug

SEQ ID NO: 962284 - RNA, 19 nt, Artificial Sequence
  Description of Artificial Sequence: Synthetic oligonucleotide
cagccuguuugcuccgacg

SEQ ID NO: 962285 - RNA, 19 nt, Artificial Sequence
  Description of Artificial Sequence: Synthetic oligonucleotide
agacucucauccacauugg

SEQ ID NO: 962286 - RNA, 19 nt, Artificial Sequence
  Description of Artificial Sequence: Synthetic oligonucleotide
cauccaaugagaacugggu

SEQ ID NO: 962287 - RNA, 19 nt, Artificial Sequence
  Description of Artificial Sequence: Synthetic oligonucleotide
gaggugcuuccauauaugu

SEQ ID NO: 962288 - RNA, 19 nt, Artificial Sequence
  Description of Artificial Sequence: Synthetic oligonucleotide
auacuuggucagguagccg

SEQ ID NO: 962289 - RNA, 19 nt, Artificial Sequence
  Description of Artificial Sequence: Synthetic oligonucleotide
guaaggggucguccaacug

SEQ ID NO: 962290 - RNA, 19 nt, Artificial Sequence
  Description of Artificial Sequence: Synthetic oligonucleotide
ugccgaaaaccgagggaac

SEQ ID NO: 962291 - RNA, 19 nt, Artificial Sequence
  Description of Artificial Sequence: Synthetic oligonucleotide
uagaucccgccuucugggc

SEQ ID NO: 962292 - RNA, 19 nt, Artificial Sequence
  Description of Artificial Sequence: Synthetic oligonucleotide
cauccuuauccgagccugc

SEQ ID NO: 962293 - RNA, 19 nt, Artificial Sequence
  Description of Artificial Sequence: Synthetic oligonucleotide
accgagggaacuucccagu

SEQ ID NO: 962294 - RNA, 19 nt, Artificial Sequence
  Description of Artificial Sequence: Synthetic oligonucleotide
caccuuccgaagucugccg

SEQ ID NO: 962295 - RNA, 19 nt, Artificial Sequence
  Description of Artificial Sequence: Synthetic oligonucleotide
cugucuugcugaugccgcc

SEQ ID NO: 962296 - RNA, 19 nt, Artificial Sequence
  Description of Artificial Sequence: Synthetic oligonucleotide
aauagacgaugcaggcgcu

SEQ ID NO: 962297 - RNA, 19 nt, Artificial Sequence
  Description of Artificial Sequence: Synthetic oligonucleotide
aacaccccgggaccagaga

SEQ ID NO: 962298 - RNA, 19 nt, Artificial Sequence
  Description of Artificial Sequence: Synthetic oligonucleotide
uacagccucgcagaccaga

SEQ ID NO: 962299 - RNA, 19 nt, Artificial Sequence
  Description of Artificial Sequence: Synthetic oligonucleotide
uccgacgaaggaaguccca

SEQ ID NO: 962300 - RNA, 19 nt, Artificial Sequence
  Description of Artificial Sequence: Synthetic oligonucleotide
gugccgaaaaccgagggaa

SEQ ID NO: 962301 - RNA, 19 nt, Artificial Sequence
  Description of Artificial Sequence: Synthetic oligonucleotide
ccacauguugagcaguuug

SEQ ID NO: 962302 - RNA, 19 nt, Artificial Sequence
  Description of Artificial Sequence: Synthetic oligonucleotide
guauguccacuccauaggu

SEQ ID NO: 962303 - RNA, 19 nt, Artificial Sequence
  Description of Artificial Sequence: Synthetic oligonucleotide
aguggcgggugcugacagg

SEQ ID NO: 962304 - RNA, 19 nt, Artificial Sequence
  Description of Artificial Sequence: Synthetic oligonucleotide
cuguaacauccgagggagg

SEQ ID NO: 962305 - RNA, 19 nt, Artificial Sequence
  Description of Artificial Sequence: Synthetic oligonucleotide
auauccgccagcacuugcu

SEQ ID NO: 962306 - RNA, 19 nt, Artificial Sequence
  Description of Artificial Sequence: Synthetic oligonucleotide
uuggcggauccaagcacaa

SEQ ID NO: 962307 - RNA, 19 nt, Artificial Sequence
  Description of Artificial Sequence: Synthetic oligonucleotide
gcacauggaauagacgaug

SEQ ID NO: 962308 - RNA, 19 nt, Artificial Sequence
  Description of Artificial Sequence: Synthetic oligonucleotide
guugagcaaacagguagga

SEQ ID NO: 962309 - RNA, 19 nt, Artificial Sequence
  Description of Artificial Sequence: Synthetic oligonucleotide
ggaggaauucucacuggcc

SEQ ID NO: 962310 - RNA, 19 nt, Artificial Sequence
  Description of Artificial Sequence: Synthetic oligonucleotide
gaggaccauccuuauccga

SEQ ID NO: 962311 - RNA, 19 nt, Artificial Sequence
  Description of Artificial Sequence: Synthetic oligonucleotide
acuaggcuuuggauauccg

SEQ ID NO: 962312 - RNA, 19 nt, Artificial Sequence
  Description of Artificial Sequence: Synthetic oligonucleotide
cuaugggguugaugucugc

SEQ ID NO: 962313 - RNA, 19 nt, Artificial Sequence
  Description of Artificial Sequence: Synthetic oligonucleotide
auggaugugguagcuucca

SEQ ID NO: 962314 - RNA, 19 nt, Artificial Sequence
  Description of Artificial Sequence: Synthetic oligonucleotide
uugaacaccccgggaccag

SEQ ID NO: 962315 - RNA, 19 nt, Artificial Sequence
  Description of Artificial Sequence: Synthetic oligonucleotide
gcaaucauggcacagccau

SEQ ID NO: 962316 - RNA, 19 nt, Artificial Sequence
  Description of Artificial Sequence: Synthetic oligonucleotide
gcuccgacgaaggaagucc

SEQ ID NO: 962317 - RNA, 19 nt, Artificial Sequence
  Description of Artificial Sequence: Synthetic oligonucleotide
guaacauccgagggaggac

SEQ ID NO: 962318 - RNA, 19 nt, Artificial Sequence
  Description of Artificial Sequence: Synthetic oligonucleotide
ugccaccauucuuggaagu

SEQ ID NO: 962319 - RNA, 19 nt, Artificial Sequence
  Description of Artificial Sequence: Synthetic oligonucleotide
cuccagauuccgagaugag

SEQ ID NO: 962320 - RNA, 19 nt, Artificial Sequence
  Description of Artificial Sequence: Synthetic oligonucleotide
ggaauucucacuggccaug

SEQ ID NO: 962321 - RNA, 19 nt, Artificial Sequence
  Description of Artificial Sequence: Synthetic oligonucleotide
ccagagacucaguugagca

SEQ ID NO: 962322 - RNA, 19 nt, Artificial Sequence
  Description of Artificial Sequence: Synthetic oligonucleotide
accugguuaucaauauagu

SEQ ID NO: 962323 - RNA, 19 nt, Artificial Sequence
  Description of Artificial Sequence: Synthetic oligonucleotide
cccugggcaaagaugcucc

SEQ ID NO: 962324 - RNA, 19 nt, Artificial Sequence
  Description of Artificial Sequence: Synthetic oligonucleotide
gcacuauccacaccgccac

SEQ ID NO: 962325 - RNA, 19 nt, Artificial Sequence
  Description of Artificial Sequence: Synthetic oligonucleotide
gacgcacaacuggacgaag

SEQ ID NO: 962326 - RNA, 19 nt, Artificial Sequence
  Description of Artificial Sequence: Synthetic oligonucleotide
guagggcccugccuuggcc

SEQ ID NO: 962327 - RNA, 19 nt, Artificial Sequence
  Description of Artificial Sequence: Synthetic oligonucleotide
guuggcuagcagguagaug

SEQ ID NO: 962328 - RNA, 19 nt, Artificial Sequence
  Description of Artificial Sequence: Synthetic oligonucleotide
ugcguaacacgugguggcu

SEQ ID NO: 962329 - RNA, 19 nt, Artificial Sequence
  Description of Artificial Sequence: Synthetic oligonucleotide
auaugcuggcgugaggguu

SEQ ID NO: 962330 - RNA, 19 nt, Artificial Sequence
  Description of Artificial Sequence: Synthetic oligonucleotide
ccgagaugagaucucugcc

SEQ ID NO: 962331 - RNA, 19 nt, Artificial Sequence
  Description of Artificial Sequence: Synthetic oligonucleotide
caggucaaaccuguuguca

SEQ ID NO: 962332 - RNA, 19 nt, Artificial Sequence
  Description of Artificial Sequence: Synthetic oligonucleotide
caggcccaugucgaugugg

SEQ ID NO: 962333 - RNA, 19 nt, Artificial Sequence
  Description of Artificial Sequence: Synthetic oligonucleotide
gagacucaguugagcaaac

SEQ ID NO: 962334 - RNA, 19 nt, Artificial Sequence
  Description of Artificial Sequence: Synthetic oligonucleotide
agcacauggaauagacgau

SEQ ID NO: 962335 - RNA, 19 nt, Artificial Sequence
  Description of Artificial Sequence: Synthetic oligonucleotide
gaccagagacucaguugag

SEQ ID NO: 962336 - RNA, 19 nt, Artificial Sequence
  Description of Artificial Sequence: Synthetic oligonucleotide
caguggcgggugcugacag

SEQ ID NO: 962337 - RNA, 19 nt, Artificial Sequence
  Description of Artificial Sequence: Synthetic oligonucleotide
uggugugggcuuugcguaa

SEQ ID NO: 962338 - RNA, 19 nt, Artificial Sequence
  Description of Artificial Sequence: Synthetic oligonucleotide
ggcuuuggauauccgccag

SEQ ID NO: 962339 - RNA, 19 nt, Artificial Sequence
  Description of Artificial Sequence: Synthetic oligonucleotide
ccaccauucuuggaagugg

SEQ ID NO: 962340 - RNA, 19 nt, Artificial Sequence
  Description of Artificial Sequence: Synthetic oligonucleotide
gcgcucgacgcacaacugg

SEQ ID NO: 962341 - RNA, 19 nt, Artificial Sequence
  Description of Artificial Sequence: Synthetic oligonucleotide
uccacuccauagguucuga

SEQ ID NO: 962342 - RNA, 19 nt, Artificial Sequence
  Description of Artificial Sequence: Synthetic oligonucleotide
ugaacaccccgggaccaga

SEQ ID NO: 962343 - RNA, 19 nt, Artificial Sequence
  Description of Artificial Sequence: Synthetic oligonucleotide
gcuccggacguccuccagg

SEQ ID NO: 962344 - RNA, 19 nt, Artificial Sequence
  Description of Artificial Sequence: Synthetic oligonucleotide
gauaugcuggcgugagggu

SEQ ID NO: 962345 - RNA, 19 nt, Artificial Sequence
  Description of Artificial Sequence: Synthetic oligonucleotide
agacagcacauggaauaga

SEQ ID NO: 962346 - RNA, 19 nt, Artificial Sequence
  Description of Artificial Sequence: Synthetic oligonucleotide
ccuguuugcuccgacgaag

SEQ ID NO: 962347 - RNA, 19 nt, Artificial Sequence
  Description of Artificial Sequence: Synthetic oligonucleotide
aucacacuagggaucccca

SEQ ID NO: 962348 - RNA, 19 nt, Artificial Sequence
  Description of Artificial Sequence: Synthetic oligonucleotide
gauccacccuggugugggc

SEQ ID NO: 962349 - RNA, 19 nt, Artificial Sequence
  Description of Artificial Sequence: Synthetic oligonucleotide
agggguaaaccagcgcagu

SEQ ID NO: 962350 - RNA, 19 nt, Artificial Sequence
  Description of Artificial Sequence: Synthetic oligonucleotide
ucaccgucgcagcccuucu

SEQ ID NO: 962351 - RNA, 19 nt, Artificial Sequence
  Description of Artificial Sequence: Synthetic oligonucleotide
agacucaguugagcaaaca

SEQ ID NO: 962352 - RNA, 19 nt, Artificial Sequence
  Description of Artificial Sequence: Synthetic oligonucleotide
gcuuuggauauccgccagc

SEQ ID NO: 962353 - RNA, 19 nt, Artificial Sequence
  Description of Artificial Sequence: Synthetic oligonucleotide
aacauccgagggaggacau

SEQ ID NO: 962354 - RNA, 19 nt, Artificial Sequence
  Description of Artificial Sequence: Synthetic oligonucleotide
ugcuccgacgaaggaaguc

SEQ ID NO: 962355 - RNA, 19 nt, Artificial Sequence
  Description of Artificial Sequence: Synthetic oligonucleotide
caccugucuugguguacag

SEQ ID NO: 962356 - RNA, 19 nt, Artificial Sequence
  Description of Artificial Sequence: Synthetic oligonucleotide
uugcuccgacgaaggaagu

SEQ ID NO: 962357 - RNA, 19 nt, Artificial Sequence
  Description of Artificial Sequence: Synthetic oligonucleotide
cauccgucugagacaccug

SEQ ID NO: 962358 - RNA, 19 nt, Artificial Sequence
  Description of Artificial Sequence: Synthetic oligonucleotide
ccauccuuauccgagccug

SEQ ID NO: 962359 - RNA, 19 nt, Artificial Sequence
  Description of Artificial Sequence: Synthetic oligonucleotide
gucguccaacugcuccuag

SEQ ID NO: 962360 - RNA, 19 nt, Artificial Sequence
  Description of Artificial Sequence: Synthetic oligonucleotide
cauggaguacuucgagaaa

SEQ ID NO: 962361 - RNA, 19 nt, Artificial Sequence
  Description of Artificial Sequence: Synthetic oligonucleotide
ggguaaaccagcgcaguuc

SEQ ID NO: 962362 - RNA, 19 nt, Artificial Sequence
  Description of Artificial Sequence: Synthetic oligonucleotide
uggcggauccaagcacaag

SEQ ID NO: 962363 - RNA, 19 nt, Artificial Sequence
  Description of Artificial Sequence: Synthetic oligonucleotide
ucccgaugcaggugucccu

SEQ ID NO: 962364 - RNA, 19 nt, Artificial Sequence
  Description of Artificial Sequence: Synthetic oligonucleotide
ccuaugggguugaugucug

SEQ ID NO: 962365 - RNA, 19 nt, Artificial Sequence
  Description of Artificial Sequence: Synthetic oligonucleotide
cguaacacgugguggcugc

SEQ ID NO: 962366 - RNA, 19 nt, Artificial Sequence
  Description of Artificial Sequence: Synthetic oligonucleotide
guaaaccagcgcaguuccc

SEQ ID NO: 962367 - RNA, 19 nt, Artificial Sequence
  Description of Artificial Sequence: Synthetic oligonucleotide
ccuuauccgagccugcaca

SEQ ID NO: 962368 - RNA, 19 nt, Artificial Sequence
  Description of Artificial Sequence: Synthetic oligonucleotide
gaagcgcucgacgcacaac

SEQ ID NO: 962369 - RNA, 19 nt, Artificial Sequence
  Description of Artificial Sequence: Synthetic oligonucleotide
guggcgggugcugacagga

SEQ ID NO: 962370 - RNA, 19 nt, Artificial Sequence
  Description of Artificial Sequence: Synthetic oligonucleotide
gaauucucacuggccaugu

SEQ ID NO: 962371 - RNA, 19 nt, Artificial Sequence
  Description of Artificial Sequence: Synthetic oligonucleotide
ccagauuccgagaugagau

SEQ ID NO: 962372 - RNA, 19 nt, Artificial Sequence
  Description of Artificial Sequence: Synthetic oligonucleotide
guggugagcaggcguccac

SEQ ID NO: 962373 - RNA, 19 nt, Artificial Sequence
  Description of Artificial Sequence: Synthetic oligonucleotide
aucauggcacagccaucau

SEQ ID NO: 962374 - RNA, 19 nt, Artificial Sequence
  Description of Artificial Sequence: Synthetic oligonucleotide
acacgugguggcugccgga

SEQ ID NO: 962375 - RNA, 19 nt, Artificial Sequence
  Description of Artificial Sequence: Synthetic oligonucleotide
agaaagggccucaggucaa

SEQ ID NO: 962376 - RNA, 19 nt, Artificial Sequence
  Description of Artificial Sequence: Synthetic oligonucleotide
gucugagacaccugcccgu

SEQ ID NO: 962377 - RNA, 19 nt, Artificial Sequence
  Description of Artificial Sequence: Synthetic oligonucleotide
ccaccuuccgaagucugcc

SEQ ID NO: 962378 - RNA, 19 nt, Artificial Sequence
  Description of Artificial Sequence: Synthetic oligonucleotide
gucaccgucgcagcccuuc

SEQ ID NO: 962379 - RNA, 19 nt, Artificial Sequence
  Description of Artificial Sequence: Synthetic oligonucleotide
guagccgaggagacucuca

SEQ ID NO: 962380 - RNA, 19 nt, Artificial Sequence
  Description of Artificial Sequence: Synthetic oligonucleotide
cugagacaccugcccguug

SEQ ID NO: 962381 - RNA, 19 nt, Artificial Sequence
  Description of Artificial Sequence: Synthetic oligonucleotide
ccacauuggcggauccaag

SEQ ID NO: 962382 - RNA, 19 nt, Artificial Sequence
  Description of Artificial Sequence: Synthetic oligonucleotide
gcuguagggcccugccuug

SEQ ID NO: 962383 - RNA, 19 nt, Artificial Sequence
  Description of Artificial Sequence: Synthetic oligonucleotide
uccacauguugagcaguuu

SEQ ID NO: 962384 - RNA, 19 nt, Artificial Sequence
  Description of Artificial Sequence: Synthetic oligonucleotide
gccauguagcaagugguga

SEQ ID NO: 962385 - RNA, 19 nt, Artificial Sequence
  Description of Artificial Sequence: Synthetic oligonucleotide
cauauauguaaggggucgu

SEQ ID NO: 962386 - RNA, 19 nt, Artificial Sequence
  Description of Artificial Sequence: Synthetic oligonucleotide
cagguccuguaacauccga

SEQ ID NO: 962387 - RNA, 19 nt, Artificial Sequence
  Description of Artificial Sequence: Synthetic oligonucleotide
gggguacgggcucacccug

SEQ ID NO: 962388 - RNA, 19 nt, Artificial Sequence
  Description of Artificial Sequence: Synthetic oligonucleotide
ccgaagucugccgaagaug

SEQ ID NO: 962389 - RNA, 19 nt, Artificial Sequence
  Description of Artificial Sequence: Synthetic oligonucleotide
cgaggagacucucauccac

SEQ ID NO: 962390 - RNA, 19 nt, Artificial Sequence
  Description of Artificial Sequence: Synthetic oligonucleotide
ccgccuaugggguugaugu

SEQ ID NO: 962391 - RNA, 19 nt, Artificial Sequence
  Description of Artificial Sequence: Synthetic oligonucleotide
gcugccggaggcauuggug

SEQ ID NO: 962392 - RNA, 19 nt, Artificial Sequence
  Description of Artificial Sequence: Synthetic oligonucleotide
gugguauguccacuccaua

SEQ ID NO: 962393 - RNA, 19 nt, Artificial Sequence
  Description of Artificial Sequence: Synthetic oligonucleotide
cugaugccgccuauggggu

SEQ ID NO: 962394 - RNA, 19 nt, Artificial Sequence
  Description of Artificial Sequence: Synthetic oligonucleotide
gcaaguggugagcaggcgu

SEQ ID NO: 962395 - RNA, 19 nt, Artificial Sequence
  Description of Artificial Sequence: Synthetic oligonucleotide
ggcuaagggcuccagcucu

SEQ ID NO: 962396 - RNA, 19 nt, Artificial Sequence
  Description of Artificial Sequence: Synthetic oligonucleotide
gcagguccgaggcuuaucu

SEQ ID NO: 962397 - RNA, 19 nt, Artificial Sequence
  Description of Artificial Sequence: Synthetic oligonucleotide
ugaugccgccuaugggguu

SEQ ID NO: 962398 - RNA, 19 nt, Artificial Sequence
  Description of Artificial Sequence: Synthetic oligonucleotide
gaacaugcuguagggcccu

SEQ ID NO: 962399 - RNA, 19 nt, Artificial Sequence
  Description of Artificial Sequence: Synthetic oligonucleotide
ccgagccugcacauucugc

SEQ ID NO: 962400 - RNA, 19 nt, Artificial Sequence
  Description of Artificial Sequence: Synthetic oligonucleotide
gacgaugcaggcgcuggcu

SEQ ID NO: 962401 - RNA, 19 nt, Artificial Sequence
  Description of Artificial Sequence: Synthetic oligonucleotide
cucauccgucugagacacc

SEQ ID NO: 962402 - RNA, 19 nt, Artificial Sequence
  Description of Artificial Sequence: Synthetic oligonucleotide
ggaagcuggaagcgcucga

SEQ ID NO: 962403 - RNA, 19 nt, Artificial Sequence
  Description of Artificial Sequence: Synthetic oligonucleotide
ggaggaggugcuuccauau

SEQ ID NO: 962404 - RNA, 19 nt, Artificial Sequence
  Description of Artificial Sequence: Synthetic oligonucleotide
ggcgugaggguugucaucu

SEQ ID NO: 962405 - RNA, 19 nt, Artificial Sequence
  Description of Artificial Sequence: Synthetic oligonucleotide
cagcccuucugguuggcua

SEQ ID NO: 962406 - RNA, 19 nt, Artificial Sequence
  Description of Artificial Sequence: Synthetic oligonucleotide
agcgcucgacgcacaacug

SEQ ID NO: 962407 - RNA, 19 nt, Artificial Sequence
  Description of Artificial Sequence: Synthetic oligonucleotide
gguagaugccaccauucuu

SEQ ID NO: 962408 - RNA, 19 nt, Artificial Sequence
  Description of Artificial Sequence: Synthetic oligonucleotide
ugccggcuucuggaccagg

SEQ ID NO: 962409 - RNA, 19 nt, Artificial Sequence
  Description of Artificial Sequence: Synthetic oligonucleotide
cauccgagggaggacauau

SEQ ID NO: 962410 - RNA, 19 nt, Artificial Sequence
  Description of Artificial Sequence: Synthetic oligonucleotide
gccggcuucuggaccaggg

SEQ ID NO: 962411 - RNA, 19 nt, Artificial Sequence
  Description of Artificial Sequence: Synthetic oligonucleotide
agccaccugucuuggugua

SEQ ID NO: 962412 - RNA, 19 nt, Artificial Sequence
  Description of Artificial Sequence: Synthetic oligonucleotide
cacuagggauccccaggga

SEQ ID NO: 962413 - RNA, 19 nt, Artificial Sequence
  Description of Artificial Sequence: Synthetic oligonucleotide
gcuccuagaucccgccuuc

SEQ ID NO: 962414 - RNA, 19 nt, Artificial Sequence
  Description of Artificial Sequence: Synthetic oligonucleotide
gugugggcuuugcguaaca

SEQ ID NO: 962415 - RNA, 19 nt, Artificial Sequence
  Description of Artificial Sequence: Synthetic oligonucleotide
accugcccguuggcuaagg

SEQ ID NO: 962416 - RNA, 19 nt, Artificial Sequence
  Description of Artificial Sequence: Synthetic oligonucleotide
cgaagauggaaaguucuga

SEQ ID NO: 962417 - RNA, 19 nt, Artificial Sequence
  Description of Artificial Sequence: Synthetic oligonucleotide
caccgucgcagcccuucug

SEQ ID NO: 962418 - RNA, 19 nt, Artificial Sequence
  Description of Artificial Sequence: Synthetic oligonucleotide
gggucaaugcucagaugga

SEQ ID NO: 962419 - RNA, 19 nt, Artificial Sequence
  Description of Artificial Sequence: Synthetic oligonucleotide
cugccgaagauggaaaguu

SEQ ID NO: 962420 - RNA, 19 nt, Artificial Sequence
  Description of Artificial Sequence: Synthetic oligonucleotide
gcugcacuauccacaccgc

SEQ ID NO: 962421 - RNA, 19 nt, Artificial Sequence
  Description of Artificial Sequence: Synthetic oligonucleotide
ggauauccgccagcacuug

SEQ ID NO: 962422 - RNA, 19 nt, Artificial Sequence
  Description of Artificial Sequence: Synthetic oligonucleotide
cagccaccugucuuggugu

SEQ ID NO: 962423 - RNA, 19 nt, Artificial Sequence
  Description of Artificial Sequence: Synthetic oligonucleotide
gcaugauaugcuggcguga

SEQ ID NO: 962424 - RNA, 19 nt, Artificial Sequence
  Description of Artificial Sequence: Synthetic oligonucleotide
guccgaggcuuaucuccuc

SEQ ID NO: 962425 - RNA, 19 nt, Artificial Sequence
  Description of Artificial Sequence: Synthetic oligonucleotide
caggucugucuugcugaug

SEQ ID NO: 962426 - RNA, 19 nt, Artificial Sequence
  Description of Artificial Sequence: Synthetic oligonucleotide
caacuggacgaaggcucuc

SEQ ID NO: 962427 - RNA, 19 nt, Artificial Sequence
  Description of Artificial Sequence: Synthetic oligonucleotide
ccugcccguuggcuaaggg

SEQ ID NO: 962428 - RNA, 19 nt, Artificial Sequence
  Description of Artificial Sequence: Synthetic oligonucleotide
ggugugggcuuugcguaac

SEQ ID NO: 962429 - RNA, 19 nt, Artificial Sequence
  Description of Artificial Sequence: Synthetic oligonucleotide
gggcuuugcguaacacgug

SEQ ID NO: 962430 - RNA, 19 nt, Artificial Sequence
  Description of Artificial Sequence: Synthetic oligonucleotide
gcucgagcuuuagaaccug

SEQ ID NO: 962431 - RNA, 19 nt, Artificial Sequence
  Description of Artificial Sequence: Synthetic oligonucleotide
gcguaacacgugguggcug

SEQ ID NO: 962432 - RNA, 19 nt, Artificial Sequence
  Description of Artificial Sequence: Synthetic oligonucleotide
gccuaugggguugaugucu

SEQ ID NO: 962433 - RNA, 19 nt, Artificial Sequence
  Description of Artificial Sequence: Synthetic oligonucleotide
cugcacuggagcagucaua

SEQ ID NO: 962434 - RNA, 19 nt, Artificial Sequence
  Description of Artificial Sequence: Synthetic oligonucleotide
ggcaaucauggcacagcca

SEQ ID NO: 962435 - RNA, 19 nt, Artificial Sequence
  Description of Artificial Sequence: Synthetic oligonucleotide
ggcuagcagguagaugcca

SEQ ID NO: 962436 - RNA, 19 nt, Artificial Sequence
  Description of Artificial Sequence: Synthetic oligonucleotide
cccuggugugggcuuugcg

SEQ ID NO: 962437 - RNA, 19 nt, Artificial Sequence
  Description of Artificial Sequence: Synthetic oligonucleotide
gcggauccaagcacaagaa

SEQ ID NO: 962438 - RNA, 19 nt, Artificial Sequence
  Description of Artificial Sequence: Synthetic oligonucleotide
cuggcgugaggguugucau

SEQ ID NO: 962439 - RNA, 19 nt, Artificial Sequence
  Description of Artificial Sequence: Synthetic oligonucleotide
ccgagggaacuucccaguc

SEQ ID NO: 962440 - RNA, 19 nt, Artificial Sequence
  Description of Artificial Sequence: Synthetic oligonucleotide
agguagccgaggagacucu

SEQ ID NO: 962441 - RNA, 19 nt, Artificial Sequence
  Description of Artificial Sequence: Synthetic oligonucleotide
gcggucaccgucgcagccc

SEQ ID NO: 962442 - RNA, 19 nt, Artificial Sequence
  Description of Artificial Sequence: Synthetic oligonucleotide
ccucgcagaccagacagca

SEQ ID NO: 962443 - RNA, 19 nt, Artificial Sequence
  Description of Artificial Sequence: Synthetic oligonucleotide
augcuggcgugaggguugu

SEQ ID NO: 962444 - RNA, 19 nt, Artificial Sequence
  Description of Artificial Sequence: Synthetic oligonucleotide
gguagccgaggagacucuc

SEQ ID NO: 962445 - RNA, 19 nt, Artificial Sequence
  Description of Artificial Sequence: Synthetic oligonucleotide
ggguugucaucuugugccu

SEQ ID NO: 962446 - RNA, 19 nt, Artificial Sequence
  Description of Artificial Sequence: Synthetic oligonucleotide
ccacaccgccacucagggg

SEQ ID NO: 962447 - RNA, 19 nt, Artificial Sequence
  Description of Artificial Sequence: Synthetic oligonucleotide
acaccgccacucaggggca

SEQ ID NO: 962448 - RNA, 19 nt, Artificial Sequence
  Description of Artificial Sequence: Synthetic oligonucleotide
gcucgacgcacaacuggac

SEQ ID NO: 962449 - RNA, 19 nt, Artificial Sequence
  Description of Artificial Sequence: Synthetic oligonucleotide
cccguuggcuaagggcucc

SEQ ID NO: 962450 - RNA, 19 nt, Artificial Sequence
  Description of Artificial Sequence: Synthetic oligonucleotide
ggguacgggcucacccugc

SEQ ID NO: 962451 - RNA, 19 nt, Artificial Sequence
  Description of Artificial Sequence: Synthetic oligonucleotide
cgcucgacgcacaacugga

SEQ ID NO: 962452 - RNA, 19 nt, Artificial Sequence
  Description of Artificial Sequence: Synthetic oligonucleotide
cgaggcuuaucuccuccuc

SEQ ID NO: 962453 - RNA, 19 nt, Artificial Sequence
  Description of Artificial Sequence: Synthetic oligonucleotide
gccgccuaugggguugaug

SEQ ID NO: 962454 - RNA, 19 nt, Artificial Sequence
  Description of Artificial Sequence: Synthetic oligonucleotide
cuuguggaguguagcucuu

SEQ ID NO: 962455 - RNA, 19 nt, Artificial Sequence
  Description of Artificial Sequence: Synthetic oligonucleotide
gguacgggcucacccugcu

SEQ ID NO: 962456 - RNA, 19 nt, Artificial Sequence
  Description of Artificial Sequence: Synthetic oligonucleotide
augccgccuaugggguuga

SEQ ID NO: 962457 - RNA, 19 nt, Artificial Sequence
  Description of Artificial Sequence: Synthetic oligonucleotide
cgagggaacuucccaguca

SEQ ID NO: 962458 - RNA, 19 nt, Artificial Sequence
  Description of Artificial Sequence: Synthetic oligonucleotide
caccccgggaccagagacu

SEQ ID NO: 962459 - RNA, 19 nt, Artificial Sequence
  Description of Artificial Sequence: Synthetic oligonucleotide
gcaguggcgggugcugaca

SEQ ID NO: 962460 - RNA, 19 nt, Artificial Sequence
  Description of Artificial Sequence: Synthetic oligonucleotide
ggccucaggucaaaccugu

SEQ ID NO: 962461 - RNA, 19 nt, Artificial Sequence
  Description of Artificial Sequence: Synthetic oligonucleotide
caccgccacucaggggcag

SEQ ID NO: 962462 - RNA, 19 nt, Artificial Sequence
  Description of Artificial Sequence: Synthetic oligonucleotide
cuucuggaccagggguaaa

SEQ ID NO: 962463 - RNA, 19 nt, Artificial Sequence
  Description of Artificial Sequence: Synthetic oligonucleotide
ggcagguccgaggcuuauc

SEQ ID NO: 962464 - RNA, 19 nt, Artificial Sequence
  Description of Artificial Sequence: Synthetic oligonucleotide
cacuauccacaccgccacu

SEQ ID NO: 962465 - RNA, 19 nt, Artificial Sequence
  Description of Artificial Sequence: Synthetic oligonucleotide
gcuccgcgguguccagagc

SEQ ID NO: 962466 - RNA, 19 nt, Artificial Sequence
  Description of Artificial Sequence: Synthetic oligonucleotide
gcgggaagcuggaagcgcu

SEQ ID NO: 962467 - RNA, 19 nt, Artificial Sequence
  Description of Artificial Sequence: Synthetic oligonucleotide
ggacugugguauguccacu

SEQ ID NO: 962468 - RNA, 19 nt, Artificial Sequence
  Description of Artificial Sequence: Synthetic oligonucleotide
gcuuugcguaacacguggu

SEQ ID NO: 962469 - RNA, 19 nt, Artificial Sequence
  Description of Artificial Sequence: Synthetic oligonucleotide
gguuggcuagcagguagau

SEQ ID NO: 962470 - RNA, 19 nt, Artificial Sequence
  Description of Artificial Sequence: Synthetic oligonucleotide
cgccuaugggguugauguc

SEQ ID NO: 962471 - RNA, 19 nt, Artificial Sequence
  Description of Artificial Sequence: Synthetic oligonucleotide
gaacugccagggccacauu

SEQ ID NO: 962472 - RNA, 19 nt, Artificial Sequence
  Description of Artificial Sequence: Synthetic oligonucleotide
cuccuagaucccgccuucu

SEQ ID NO: 962473 - RNA, 19 nt, Artificial Sequence
  Description of Artificial Sequence: Synthetic oligonucleotide
gcccguuggcuaagggcuc

SEQ ID NO: 962474 - RNA, 19 nt, Artificial Sequence
  Description of Artificial Sequence: Synthetic oligonucleotide
cguuggcuaagggcuccag

SEQ ID NO: 962475 - RNA, 19 nt, Artificial Sequence
  Description of Artificial Sequence: Synthetic oligonucleotide
ccgcucccuccaugugccg

SEQ ID NO: 962476 - RNA, 19 nt, Artificial Sequence
  Description of Artificial Sequence: Synthetic oligonucleotide
ccacuaggcuuuggauauc

SEQ ID NO: 962477 - RNA, 19 nt, Artificial Sequence
  Description of Artificial Sequence: Synthetic oligonucleotide
guacgggcucacccugcuu

SEQ ID NO: 962478 - RNA, 19 nt, Artificial Sequence
  Description of Artificial Sequence: Synthetic oligonucleotide
cacagaccucgcucccgau

SEQ ID NO: 962479 - RNA, 19 nt, Artificial Sequence
  Description of Artificial Sequence: Synthetic oligonucleotide
ccgaggcuuaucuccuccu

SEQ ID NO: 962480 - RNA, 19 nt, Artificial Sequence
  Description of Artificial Sequence: Synthetic oligonucleotide
ucccgccuucugggcccug

SEQ ID NO: 962481 - RNA, 19 nt, Artificial Sequence
  Description of Artificial Sequence: Synthetic oligonucleotide
ugccgccuaugggguugau

SEQ ID NO: 962482 - RNA, 19 nt, Artificial Sequence
  Description of Artificial Sequence: Synthetic oligonucleotide
ccgaaaaccgagggaacuu

SEQ ID NO: 962483 - RNA, 19 nt, Artificial Sequence
  Description of Artificial Sequence: Synthetic oligonucleotide
cgacgcacaacuggacgaa

SEQ ID NO: 962484 - RNA, 19 nt, Artificial Sequence
  Description of Artificial Sequence: Synthetic oligonucleotide
ccgccacucaggggcagga

SEQ ID NO: 962485 - RNA, 19 nt, Artificial Sequence
  Description of Artificial Sequence: Synthetic oligonucleotide
cgcucccgaugcagguguc

SEQ ID NO: 962486 - RNA, 19 nt, Artificial Sequence
  Description of Artificial Sequence: Synthetic oligonucleotide
ggugucccugguggccagu

SEQ ID NO: 962487 - RNA, 19 nt, Artificial Sequence
  Description of Artificial Sequence: Synthetic oligonucleotide
cccagccuguuugcuccga

SEQ ID NO: 962488 - RNA, 19 nt, Artificial Sequence
  Description of Artificial Sequence: Synthetic oligonucleotide
gcgugaggguugucaucuu

SEQ ID NO: 962489 - RNA, 19 nt, Artificial Sequence
  Description of Artificial Sequence: Synthetic oligonucleotide
cgcgguguccagagcuccu

SEQ ID NO: 962490 - RNA, 19 nt, Artificial Sequence
  Description of Artificial Sequence: Synthetic oligonucleotide
ccgggaccagagacucagu

SEQ ID NO: 962491 - RNA, 19 nt, Artificial Sequence
  Description of Artificial Sequence: Synthetic oligonucleotide
ccgccuucugggcccugcu

SEQ ID NO: 962492 - RNA, 19 nt, Artificial Sequence
  Description of Artificial Sequence: Synthetic oligonucleotide
ggucaccgucgcagcccuu

SEQ ID NO: 962493 - RNA, 19 nt, Artificial Sequence
  Description of Artificial Sequence: Synthetic oligonucleotide
uguaguaggacacagaugg

SEQ ID NO: 962494 - RNA, 19 nt, Artificial Sequence
  Description of Artificial Sequence: Synthetic oligonucleotide
guuaacacgauuuauuucc

SEQ ID NO: 962495 - RNA, 19 nt, Artificial Sequence
  Description of Artificial Sequence: Synthetic oligonucleotide
acuuagaagucucaauucc

SEQ ID NO: 962496 - RNA, 19 nt, Artificial Sequence
  Description of Artificial Sequence: Synthetic oligonucleotide
uguaugugagaauagaccu

SEQ ID NO: 962497 - RNA, 19 nt, Artificial Sequence
  Description of Artificial Sequence: Synthetic oligonucleotide
gugagaauagaccuugucg

SEQ ID NO: 962498 - RNA, 19 nt, Artificial Sequence
  Description of Artificial Sequence: Synthetic oligonucleotide
ugagaauagaccuugucgu

SEQ ID NO: 962499 - RNA, 19 nt, Artificial Sequence
  Description of Artificial Sequence: Synthetic oligonucleotide
aauuagugcuacccgcuac

SEQ ID NO: 962500 - RNA, 19 nt, Artificial Sequence
  Description of Artificial Sequence: Synthetic oligonucleotide
cuagcagaccuuuaggacg

SEQ ID NO: 962501 - RNA, 19 nt, Artificial Sequence
  Description of Artificial Sequence: Synthetic oligonucleotide
acacgauuuauuuccacac

SEQ ID NO: 962502 - RNA, 19 nt, Artificial Sequence
  Description of Artificial Sequence: Synthetic oligonucleotide
aaggggugcauggagaggc

SEQ ID NO: 962503 - RNA, 19 nt, Artificial Sequence
  Description of Artificial Sequence: Synthetic oligonucleotide
gucgaugacaccuuucugg

SEQ ID NO: 962504 - RNA, 19 nt, Artificial Sequence
  Description of Artificial Sequence: Synthetic oligonucleotide
cuguaugugagaauagacc

SEQ ID NO: 962505 - RNA, 19 nt, Artificial Sequence
  Description of Artificial Sequence: Synthetic oligonucleotide
acuagcagaccuuuaggac

SEQ ID NO: 962506 - RNA, 19 nt, Artificial Sequence
  Description of Artificial Sequence: Synthetic oligonucleotide
aacuagcagaccuuuagga

SEQ ID NO: 962507 - RNA, 19 nt, Artificial Sequence
  Description of Artificial Sequence: Synthetic oligonucleotide
agugcuacccgcuacaaca

SEQ ID NO: 962508 - RNA, 19 nt, Artificial Sequence
  Description of Artificial Sequence: Synthetic oligonucleotide
aaggcugccaagucgauga

SEQ ID NO: 962509 - RNA, 19 nt, Artificial Sequence
  Description of Artificial Sequence: Synthetic oligonucleotide
aguuaacacgauuuauuuc

SEQ ID NO: 962510 - RNA, 19 nt, Artificial Sequence
  Description of Artificial Sequence: Synthetic oligonucleotide
uguaauucggaaaguggug

SEQ ID NO: 962511 - RNA, 19 nt, Artificial Sequence
  Description of Artificial Sequence: Synthetic oligonucleotide
agaagucucaauuccaaga

SEQ ID NO: 962512 - RNA, 19 nt, Artificial Sequence
  Description of Artificial Sequence: Synthetic oligonucleotide
caagaauagacugugcccc

SEQ ID NO: 962513 - RNA, 19 nt, Artificial Sequence
  Description of Artificial Sequence: Synthetic oligonucleotide
ugugcuacuuccgaaaucu

SEQ ID NO: 962514 - RNA, 19 nt, Artificial Sequence
  Description of Artificial Sequence: Synthetic oligonucleotide
uagacugugccccagaguu

SEQ ID NO: 962515 - RNA, 19 nt, Artificial Sequence
  Description of Artificial Sequence: Synthetic oligonucleotide
uacaacauaggaccgcucu

SEQ ID NO: 962516 - RNA, 19 nt, Artificial Sequence
  Description of Artificial Sequence: Synthetic oligonucleotide
uucaccguagcauaggcaa

SEQ ID NO: 962517 - RNA, 19 nt, Artificial Sequence
  Description of Artificial Sequence: Synthetic oligonucleotide
ugaagaugugcaacuagca

SEQ ID NO: 962518 - RNA, 19 nt, Artificial Sequence
  Description of Artificial Sequence: Synthetic oligonucleotide
guaauucggaaaguggugg

SEQ ID NO: 962519 - RNA, 19 nt, Artificial Sequence
  Description of Artificial Sequence: Synthetic oligonucleotide
agaaccuuauuuucauguc

SEQ ID NO: 962520 - RNA, 19 nt, Artificial Sequence
  Description of Artificial Sequence: Synthetic oligonucleotide
ugccaaaaguuuaucuucc

SEQ ID NO: 962521 - RNA, 19 nt, Artificial Sequence
  Description of Artificial Sequence: Synthetic oligonucleotide
aagugaugcaugucuacca

SEQ ID NO: 962522 - RNA, 19 nt, Artificial Sequence
  Description of Artificial Sequence: Synthetic oligonucleotide
acgauuuauuuccacaccu

SEQ ID NO: 962523 - RNA, 19 nt, Artificial Sequence
  Description of Artificial Sequence: Synthetic oligonucleotide
uucacaaucccgucucuag

SEQ ID NO: 962524 - RNA, 19 nt, Artificial Sequence
  Description of Artificial Sequence: Synthetic oligonucleotide
uaaaaccugaaucgcuggc

SEQ ID NO: 962525 - RNA, 19 nt, Artificial Sequence
  Description of Artificial Sequence: Synthetic oligonucleotide
uaaguggacggcaggacug

SEQ ID NO: 962526 - RNA, 19 nt, Artificial Sequence
  Description of Artificial Sequence: Synthetic oligonucleotide
agaauagaccuugucgugg

SEQ ID NO: 962527 - RNA, 19 nt, Artificial Sequence
  Description of Artificial Sequence: Synthetic oligonucleotide
aucaacuugucucccagug

SEQ ID NO: 962528 - RNA, 19 nt, Artificial Sequence
  Description of Artificial Sequence: Synthetic oligonucleotide
ugugcugcuuaaaaccuga

SEQ ID NO: 962529 - RNA, 19 nt, Artificial Sequence
  Description of Artificial Sequence: Synthetic oligonucleotide
gaaguugacaaagggacac

SEQ ID NO: 962530 - RNA, 19 nt, Artificial Sequence
  Description of Artificial Sequence: Synthetic oligonucleotide
uguagaggauggauuuuag

SEQ ID NO: 962531 - RNA, 19 nt, Artificial Sequence
  Description of Artificial Sequence: Synthetic oligonucleotide
augucuaccacacauccau

SEQ ID NO: 962532 - RNA, 19 nt, Artificial Sequence
  Description of Artificial Sequence: Synthetic oligonucleotide
gacuuggguaacuuagaag

SEQ ID NO: 962533 - RNA, 19 nt, Artificial Sequence
  Description of Artificial Sequence: Synthetic oligonucleotide
agugucuugacucgcccuc

SEQ ID NO: 962534 - RNA, 19 nt, Artificial Sequence
  Description of Artificial Sequence: Synthetic oligonucleotide
ugcauugcacugcucacgc

SEQ ID NO: 962535 - RNA, 19 nt, Artificial Sequence
  Description of Artificial Sequence: Synthetic oligonucleotide
cagauuugugcucaugaag

SEQ ID NO: 962536 - RNA, 19 nt, Artificial Sequence
  Description of Artificial Sequence: Synthetic oligonucleotide
ucugguaaguggacggcag

SEQ ID NO: 962537 - RNA, 19 nt, Artificial Sequence
  Description of Artificial Sequence: Synthetic oligonucleotide
ugacucgcccuccaauucg

SEQ ID NO: 962538 - RNA, 19 nt, Artificial Sequence
  Description of Artificial Sequence: Synthetic oligonucleotide
aaccuuauuuucaugucug

SEQ ID NO: 962539 - RNA, 19 nt, Artificial Sequence
  Description of Artificial Sequence: Synthetic oligonucleotide
agauuugugcucaugaaga

SEQ ID NO: 962540 - RNA, 19 nt, Artificial Sequence
  Description of Artificial Sequence: Synthetic oligonucleotide
acccuaauucgguugacag

SEQ ID NO: 962541 - RNA, 19 nt, Artificial Sequence
  Description of Artificial Sequence: Synthetic oligonucleotide
agaccuuuaggacgccacc

SEQ ID NO: 962542 - RNA, 19 nt, Artificial Sequence
  Description of Artificial Sequence: Synthetic oligonucleotide
guagaggauggauuuuagg

SEQ ID NO: 962543 - RNA, 19 nt, Artificial Sequence
  Description of Artificial Sequence: Synthetic oligonucleotide
ucgaugacaccuuucuggc

SEQ ID NO: 962544 - RNA, 19 nt, Artificial Sequence
  Description of Artificial Sequence: Synthetic oligonucleotide
cugaauauucggugguucc

SEQ ID NO: 962545 - RNA, 19 nt, Artificial Sequence
  Description of Artificial Sequence: Synthetic oligonucleotide
uccccagucugaauauucg

SEQ ID NO: 962546 - RNA, 19 nt, Artificial Sequence
  Description of Artificial Sequence: Synthetic oligonucleotide
cccgcuacaacauaggacc

SEQ ID NO: 962547 - RNA, 19 nt, Artificial Sequence
  Description of Artificial Sequence: Synthetic oligonucleotide
augugcaacuagcagaccu

SEQ ID NO: 962548 - RNA, 19 nt, Artificial Sequence
  Description of Artificial Sequence: Synthetic oligonucleotide
uuaacacgauuuauuucca

SEQ ID NO: 962549 - RNA, 19 nt, Artificial Sequence
  Description of Artificial Sequence: Synthetic oligonucleotide
agagccauuucgcuucuuc

SEQ ID NO: 962550 - RNA, 19 nt, Artificial Sequence
  Description of Artificial Sequence: Synthetic oligonucleotide
cuagaagcagucacgauga

SEQ ID NO: 962551 - RNA, 19 nt, Artificial Sequence
  Description of Artificial Sequence: Synthetic oligonucleotide
caugcauugcuugaagacc

SEQ ID NO: 962552 - RNA, 19 nt, Artificial Sequence
  Description of Artificial Sequence: Synthetic oligonucleotide
agaucaacuugucucccag

SEQ ID NO: 962553 - RNA, 19 nt, Artificial Sequence
  Description of Artificial Sequence: Synthetic oligonucleotide
uaacaagaucaacuugucu

SEQ ID NO: 962554 - RNA, 19 nt, Artificial Sequence
  Description of Artificial Sequence: Synthetic oligonucleotide
uagcagaccuuuaggacgc

SEQ ID NO: 962555 - RNA, 19 nt, Artificial Sequence
  Description of Artificial Sequence: Synthetic oligonucleotide
uccggaucugguaagugga

SEQ ID NO: 962556 - RNA, 19 nt, Artificial Sequence
  Description of Artificial Sequence: Synthetic oligonucleotide
aaaaccugaaucgcuggcu

SEQ ID NO: 962557 - RNA, 19 nt, Artificial Sequence
  Description of Artificial Sequence: Synthetic oligonucleotide
ucagagacccuaauucggu

SEQ ID NO: 962558 - RNA, 19 nt, Artificial Sequence
  Description of Artificial Sequence: Synthetic oligonucleotide
gagaauagaccuugucgug

SEQ ID NO: 962559 - RNA, 19 nt, Artificial Sequence
  Description of Artificial Sequence: Synthetic oligonucleotide
uccaauucggcuguaugug

SEQ ID NO: 962560 - RNA, 19 nt, Artificial Sequence
  Description of Artificial Sequence: Synthetic oligonucleotide
ugcuuaaaaccugaaucgc

SEQ ID NO: 962561 - RNA, 19 nt, Artificial Sequence
  Description of Artificial Sequence: Synthetic oligonucleotide
ggcaagaauagacugugcc

SEQ ID NO: 962562 - RNA, 19 nt, Artificial Sequence
  Description of Artificial Sequence: Synthetic oligonucleotide
ugugagaauagaccuuguc

SEQ ID NO: 962563 - RNA, 19 nt, Artificial Sequence
  Description of Artificial Sequence: Synthetic oligonucleotide
gaauauucggugguuccag

SEQ ID NO: 962564 - RNA, 19 nt, Artificial Sequence
  Description of Artificial Sequence: Synthetic oligonucleotide
caggucaugcuuuaguguc

SEQ ID NO: 962565 - RNA, 19 nt, Artificial Sequence
  Description of Artificial Sequence: Synthetic oligonucleotide
auagaccuugucguggugg

SEQ ID NO: 962566 - RNA, 19 nt, Artificial Sequence
  Description of Artificial Sequence: Synthetic oligonucleotide
uucgguugacagcagauuu

SEQ ID NO: 962567 - RNA, 19 nt, Artificial Sequence
  Description of Artificial Sequence: Synthetic oligonucleotide
aauauucggugguuccagu

SEQ ID NO: 962568 - RNA, 19 nt, Artificial Sequence
  Description of Artificial Sequence: Synthetic oligonucleotide
ugaaucgcuggcuuccuac

SEQ ID NO: 962569 - RNA, 19 nt, Artificial Sequence
  Description of Artificial Sequence: Synthetic oligonucleotide
accucaugucccaacacgc

SEQ ID NO: 962570 - RNA, 19 nt, Artificial Sequence
  Description of Artificial Sequence: Synthetic oligonucleotide
caacuagcagaccuuuagg

SEQ ID NO: 962571 - RNA, 19 nt, Artificial Sequence
  Description of Artificial Sequence: Synthetic oligonucleotide
uaauucgguugacagcaga

SEQ ID NO: 962572 - RNA, 19 nt, Artificial Sequence
  Description of Artificial Sequence: Synthetic oligonucleotide
cauuauugcccugaacagc

SEQ ID NO: 962573 - RNA, 19 nt, Artificial Sequence
  Description of Artificial Sequence: Synthetic oligonucleotide
agagacccuaauucgguug

SEQ ID NO: 962574 - RNA, 19 nt, Artificial Sequence
  Description of Artificial Sequence: Synthetic oligonucleotide
caaucccgucucuagaagc

SEQ ID NO: 962575 - RNA, 19 nt, Artificial Sequence
  Description of Artificial Sequence: Synthetic oligonucleotide
ucucuagaagcagucacga

SEQ ID NO: 962576 - RNA, 19 nt, Artificial Sequence
  Description of Artificial Sequence: Synthetic oligonucleotide
gagugucaucacuuggucc

SEQ ID NO: 962577 - RNA, 19 nt, Artificial Sequence
  Description of Artificial Sequence: Synthetic oligonucleotide
uuauacaaguuaacacgau

SEQ ID NO: 962578 - RNA, 19 nt, Artificial Sequence
  Description of Artificial Sequence: Synthetic oligonucleotide
cauugcuugaagaccugag

SEQ ID NO: 962579 - RNA, 19 nt, Artificial Sequence
  Description of Artificial Sequence: Synthetic oligonucleotide
aaucgcuggcuuccuacug

SEQ ID NO: 962580 - RNA, 19 nt, Artificial Sequence
  Description of Artificial Sequence: Synthetic oligonucleotide
auauucggugguuccagug

SEQ ID NO: 962581 - RNA, 19 nt, Artificial Sequence
  Description of Artificial Sequence: Synthetic oligonucleotide
uuuaggacgccacccugga

SEQ ID NO: 962582 - RNA, 19 nt, Artificial Sequence
  Description of Artificial Sequence: Synthetic oligonucleotide
uggucuacugcauuggcuu

SEQ ID NO: 962583 - RNA, 19 nt, Artificial Sequence
  Description of Artificial Sequence: Synthetic oligonucleotide
aguguccaugcauugcuug

SEQ ID NO: 962584 - RNA, 19 nt, Artificial Sequence
  Description of Artificial Sequence: Synthetic oligonucleotide
caauucggcuguaugugag

SEQ ID NO: 962585 - RNA, 19 nt, Artificial Sequence
  Description of Artificial Sequence: Synthetic oligonucleotide
uguuugguuuuaacaagau

SEQ ID NO: 962586 - RNA, 19 nt, Artificial Sequence
  Description of Artificial Sequence: Synthetic oligonucleotide
aaaccugaaucgcuggcuu

SEQ ID NO: 962587 - RNA, 19 nt, Artificial Sequence
  Description of Artificial Sequence: Synthetic oligonucleotide
cuaugcagagccagcacug

SEQ ID NO: 962588 - RNA, 19 nt, Artificial Sequence
  Description of Artificial Sequence: Synthetic oligonucleotide
cuuuaguguccaugcauug

SEQ ID NO: 962589 - RNA, 19 nt, Artificial Sequence
  Description of Artificial Sequence: Synthetic oligonucleotide
ugaauauucggugguucca

SEQ ID NO: 962590 - RNA, 19 nt, Artificial Sequence
  Description of Artificial Sequence: Synthetic oligonucleotide
cacgauuuauuuccacacc

SEQ ID NO: 962591 - RNA, 19 nt, Artificial Sequence
  Description of Artificial Sequence: Synthetic oligonucleotide
cauuucgcuucuucugccg

SEQ ID NO: 962592 - RNA, 19 nt, Artificial Sequence
  Description of Artificial Sequence: Synthetic oligonucleotide
augucaugaugucccacag

SEQ ID NO: 962593 - RNA, 19 nt, Artificial Sequence
  Description of Artificial Sequence: Synthetic oligonucleotide
gaggcgaaggcuguaauuc

SEQ ID NO: 962594 - RNA, 19 nt, Artificial Sequence
  Description of Artificial Sequence: Synthetic oligonucleotide
acaacauaggaccgcucug

SEQ ID NO: 962595 - RNA, 19 nt, Artificial Sequence
  Description of Artificial Sequence: Synthetic oligonucleotide
uucgaggagugucaucacu

SEQ ID NO: 962596 - RNA, 19 nt, Artificial Sequence
  Description of Artificial Sequence: Synthetic oligonucleotide
ucccaacacgccaugguac

SEQ ID NO: 962597 - RNA, 19 nt, Artificial Sequence
  Description of Artificial Sequence: Synthetic oligonucleotide
aauagaccuugucguggug

SEQ ID NO: 962598 - RNA, 19 nt, Artificial Sequence
  Description of Artificial Sequence: Synthetic oligonucleotide
cuguuugauuucaucauga

SEQ ID NO: 962599 - RNA, 19 nt, Artificial Sequence
  Description of Artificial Sequence: Synthetic oligonucleotide
ucugagccagcuguuaaca

SEQ ID NO: 962600 - RNA, 19 nt, Artificial Sequence
  Description of Artificial Sequence: Synthetic oligonucleotide
uuucaugucugagccagcu

SEQ ID NO: 962601 - RNA, 19 nt, Artificial Sequence
  Description of Artificial Sequence: Synthetic oligonucleotide
guacaaggggugcauggag

SEQ ID NO: 962602 - RNA, 19 nt, Artificial Sequence
  Description of Artificial Sequence: Synthetic oligonucleotide
uggcaaaaugucagugucu

SEQ ID NO: 962603 - RNA, 19 nt, Artificial Sequence
  Description of Artificial Sequence: Synthetic oligonucleotide
ucuggcccgcuuuucaucu

SEQ ID NO: 962604 - RNA, 19 nt, Artificial Sequence
  Description of Artificial Sequence: Synthetic oligonucleotide
gagacuucauuauugcccu

SEQ ID NO: 962605 - RNA, 19 nt, Artificial Sequence
  Description of Artificial Sequence: Synthetic oligonucleotide
aaauagcagcagaggacuc

SEQ ID NO: 962606 - RNA, 19 nt, Artificial Sequence
  Description of Artificial Sequence: Synthetic oligonucleotide
ugcucucccacucagcguu

SEQ ID NO: 962607 - RNA, 19 nt, Artificial Sequence
  Description of Artificial Sequence: Synthetic oligonucleotide
accauuaucagaggcuaug

SEQ ID NO: 962608 - RNA, 19 nt, Artificial Sequence
  Description of Artificial Sequence: Synthetic oligonucleotide
aaucccgucucuagaagca

SEQ ID NO: 962609 - RNA, 19 nt, Artificial Sequence
  Description of Artificial Sequence: Synthetic oligonucleotide
agaguugaagugaugcaug

SEQ ID NO: 962610 - RNA, 19 nt, Artificial Sequence
  Description of Artificial Sequence: Synthetic oligonucleotide
ugugugcuacuuccgaaau

SEQ ID NO: 962611 - RNA, 19 nt, Artificial Sequence
  Description of Artificial Sequence: Synthetic oligonucleotide
gcuguaauucggaaagugg

SEQ ID NO: 962612 - RNA, 19 nt, Artificial Sequence
  Description of Artificial Sequence: Synthetic oligonucleotide
aauucgguugacagcagau

SEQ ID NO: 962613 - RNA, 19 nt, Artificial Sequence
  Description of Artificial Sequence: Synthetic oligonucleotide
ucgaggagugucaucacuu

SEQ ID NO: 962614 - RNA, 19 nt, Artificial Sequence
  Description of Artificial Sequence: Synthetic oligonucleotide
cuuggguaacuuagaaguc

SEQ ID NO: 962615 - RNA, 19 nt, Artificial Sequence
  Description of Artificial Sequence: Synthetic oligonucleotide
ucuugcacguggugauccg

SEQ ID NO: 962616 - RNA, 19 nt, Artificial Sequence
  Description of Artificial Sequence: Synthetic oligonucleotide
aggauggauuuuaggagac

SEQ ID NO: 962617 - RNA, 19 nt, Artificial Sequence
  Description of Artificial Sequence: Synthetic oligonucleotide
cuacccgcuacaacauagg

SEQ ID NO: 962618 - RNA, 19 nt, Artificial Sequence
  Description of Artificial Sequence: Synthetic oligonucleotide
ucaccguagcauaggcaag

SEQ ID NO: 962619 - RNA, 19 nt, Artificial Sequence
  Description of Artificial Sequence: Synthetic oligonucleotide
uacccgcuacaacauagga

SEQ ID NO: 962620 - RNA, 19 nt, Artificial Sequence
  Description of Artificial Sequence: Synthetic oligonucleotide
ucgcccuccaauucggcug

SEQ ID NO: 962621 - RNA, 19 nt, Artificial Sequence
  Description of Artificial Sequence: Synthetic oligonucleotide
acgaugaagcccugaguug

SEQ ID NO: 962622 - RNA, 19 nt, Artificial Sequence
  Description of Artificial Sequence: Synthetic oligonucleotide
uccgaaaucuguggagaag

SEQ ID NO: 962623 - RNA, 19 nt, Artificial Sequence
  Description of Artificial Sequence: Synthetic oligonucleotide
ggggaugugugcuacuucc

SEQ ID NO: 962624 - RNA, 19 nt, Artificial Sequence
  Description of Artificial Sequence: Synthetic oligonucleotide
ugucugagccagcuguuaa

SEQ ID NO: 962625 - RNA, 19 nt, Artificial Sequence
  Description of Artificial Sequence: Synthetic oligonucleotide
ucuugacucgcccuccaau

SEQ ID NO: 962626 - RNA, 19 nt, Artificial Sequence
  Description of Artificial Sequence: Synthetic oligonucleotide
gacucugggccccuucgag

SEQ ID NO: 962627 - RNA, 19 nt, Artificial Sequence
  Description of Artificial Sequence: Synthetic oligonucleotide
aaaccaagucccagaaccu

SEQ ID NO: 962628 - RNA, 19 nt, Artificial Sequence
  Description of Artificial Sequence: Synthetic oligonucleotide
uggagaucggcaacuggaa

SEQ ID NO: 962629 - RNA, 19 nt, Artificial Sequence
  Description of Artificial Sequence: Synthetic oligonucleotide
agaauuagugcuacccgcu

SEQ ID NO: 962630 - RNA, 19 nt, Artificial Sequence
  Description of Artificial Sequence: Synthetic oligonucleotide
acccgcuacaacauaggac

SEQ ID NO: 962631 - RNA, 19 nt, Artificial Sequence
  Description of Artificial Sequence: Synthetic oligonucleotide
gagacccuaauucgguuga

SEQ ID NO: 962632 - RNA, 19 nt, Artificial Sequence
  Description of Artificial Sequence: Synthetic oligonucleotide
gaugcgagcucuggagggg

SEQ ID NO: 962633 - RNA, 19 nt, Artificial Sequence
  Description of Artificial Sequence: Synthetic oligonucleotide
gaccuuuaggacgccaccc

SEQ ID NO: 962634 - RNA, 19 nt, Artificial Sequence
  Description of Artificial Sequence: Synthetic oligonucleotide
aggucaugcuuuagugucc

SEQ ID NO: 962635 - RNA, 19 nt, Artificial Sequence
  Description of Artificial Sequence: Synthetic oligonucleotide
uugacucgcccuccaauuc

SEQ ID NO: 962636 - RNA, 19 nt, Artificial Sequence
  Description of Artificial Sequence: Synthetic oligonucleotide
cuuguaguaggacacagau

SEQ ID NO: 962637 - RNA, 19 nt, Artificial Sequence
  Description of Artificial Sequence: Synthetic oligonucleotide
uuuaggagacuuggguaac

SEQ ID NO: 962638 - RNA, 19 nt, Artificial Sequence
  Description of Artificial Sequence: Synthetic oligonucleotide
gaugugugcuacuuccgaa

SEQ ID NO: 962639 - RNA, 19 nt, Artificial Sequence
  Description of Artificial Sequence: Synthetic oligonucleotide
uucggaaagugguggugca

SEQ ID NO: 962640 - RNA, 19 nt, Artificial Sequence
  Description of Artificial Sequence: Synthetic oligonucleotide
ccagaauccugcuuuguag

SEQ ID NO: 962641 - RNA, 19 nt, Artificial Sequence
  Description of Artificial Sequence: Synthetic oligonucleotide
aacacgccaugguaccgcu

SEQ ID NO: 962642 - RNA, 19 nt, Artificial Sequence
  Description of Artificial Sequence: Synthetic oligonucleotide
ucuggaggggugacaguga

SEQ ID NO: 962643 - RNA, 19 nt, Artificial Sequence
  Description of Artificial Sequence: Synthetic oligonucleotide
auagacugugccccagagu

SEQ ID NO: 962644 - RNA, 19 nt, Artificial Sequence
  Description of Artificial Sequence: Synthetic oligonucleotide
ugguaaguggacggcagga

SEQ ID NO: 962645 - RNA, 19 nt, Artificial Sequence
  Description of Artificial Sequence: Synthetic oligonucleotide
acugugcugcuuaaaaccu

SEQ ID NO: 962646 - RNA, 19 nt, Artificial Sequence
  Description of Artificial Sequence: Synthetic oligonucleotide
cugguaaguggacggcagg

SEQ ID NO: 962647 - RNA, 19 nt, Artificial Sequence
  Description of Artificial Sequence: Synthetic oligonucleotide
gaaagugguggugcacugc

SEQ ID NO: 962648 - RNA, 19 nt, Artificial Sequence
  Description of Artificial Sequence: Synthetic oligonucleotide
uuccgaaaucuguggagaa

SEQ ID NO: 962649 - RNA, 19 nt, Artificial Sequence
  Description of Artificial Sequence: Synthetic oligonucleotide
aaguugacaaagggacaca

SEQ ID NO: 962650 - RNA, 19 nt, Artificial Sequence
  Description of Artificial Sequence: Synthetic oligonucleotide
agagacucugggccccuuc

SEQ ID NO: 962651 - RNA, 19 nt, Artificial Sequence
  Description of Artificial Sequence: Synthetic oligonucleotide
gcuacuuccgaaaucugug

SEQ ID NO: 962652 - RNA, 19 nt, Artificial Sequence
  Description of Artificial Sequence: Synthetic oligonucleotide
uuaggacgccacccuggag

SEQ ID NO: 962653 - RNA, 19 nt, Artificial Sequence
  Description of Artificial Sequence: Synthetic oligonucleotide
ccuaauucgguugacagca

SEQ ID NO: 962654 - RNA, 19 nt, Artificial Sequence
  Description of Artificial Sequence: Synthetic oligonucleotide
auggauuuuaggagacuug

SEQ ID NO: 962655 - RNA, 19 nt, Artificial Sequence
  Description of Artificial Sequence: Synthetic oligonucleotide
uccuaccuucugcuuauuc

SEQ ID NO: 962656 - RNA, 19 nt, Artificial Sequence
  Description of Artificial Sequence: Synthetic oligonucleotide
cuaauucgguugacagcag

SEQ ID NO: 962657 - RNA, 19 nt, Artificial Sequence
  Description of Artificial Sequence: Synthetic oligonucleotide
gugauccggaucugguaag

SEQ ID NO: 962658 - RNA, 19 nt, Artificial Sequence
  Description of Artificial Sequence: Synthetic oligonucleotide
ugacuggagaucggcaacu

SEQ ID NO: 962659 - RNA, 19 nt, Artificial Sequence
  Description of Artificial Sequence: Synthetic oligonucleotide
caaguuaacacgauuuauu

SEQ ID NO: 962660 - RNA, 19 nt, Artificial Sequence
  Description of Artificial Sequence: Synthetic oligonucleotide
uggcuaugcgcucugcauu

SEQ ID NO: 962661 - RNA, 19 nt, Artificial Sequence
  Description of Artificial Sequence: Synthetic oligonucleotide
agaauagacugugccccag

SEQ ID NO: 962662 - RNA, 19 nt, Artificial Sequence
  Description of Artificial Sequence: Synthetic oligonucleotide
uggaaccucaugucccaac

SEQ ID NO: 962663 - RNA, 19 nt, Artificial Sequence
  Description of Artificial Sequence: Synthetic oligonucleotide
ugccuaugcagagccagca

SEQ ID NO: 962664 - RNA, 19 nt, Artificial Sequence
  Description of Artificial Sequence: Synthetic oligonucleotide
gaauagaccuugucguggu

SEQ ID NO: 962665 - RNA, 19 nt, Artificial Sequence
  Description of Artificial Sequence: Synthetic oligonucleotide
gccaugguaccgcugcucg

SEQ ID NO: 962666 - RNA, 19 nt, Artificial Sequence
  Description of Artificial Sequence: Synthetic oligonucleotide
ugucagugucuugacucgc

SEQ ID NO: 962667 - RNA, 19 nt, Artificial Sequence
  Description of Artificial Sequence: Synthetic oligonucleotide
agccauucaccguagcaua

SEQ ID NO: 962668 - RNA, 19 nt, Artificial Sequence
  Description of Artificial Sequence: Synthetic oligonucleotide
gugacuggagaucggcaac

SEQ ID NO: 962669 - RNA, 19 nt, Artificial Sequence
  Description of Artificial Sequence: Synthetic oligonucleotide
ugaggcgaaggcuguaauu

SEQ ID NO: 962670 - RNA, 19 nt, Artificial Sequence
  Description of Artificial Sequence: Synthetic oligonucleotide
ugucuaccacacauccauc

SEQ ID NO: 962671 - RNA, 19 nt, Artificial Sequence
  Description of Artificial Sequence: Synthetic oligonucleotide
gcuguaugugagaauagac

SEQ ID NO: 962672 - RNA, 19 nt, Artificial Sequence
  Description of Artificial Sequence: Synthetic oligonucleotide
gaugcaugucuaccacaca

SEQ ID NO: 962673 - RNA, 19 nt, Artificial Sequence
  Description of Artificial Sequence: Synthetic oligonucleotide
gaaguucagucuugcacgu

SEQ ID NO: 962674 - RNA, 19 nt, Artificial Sequence
  Description of Artificial Sequence: Synthetic oligonucleotide
gaauuagugcuacccgcua

SEQ ID NO: 962675 - RNA, 19 nt, Artificial Sequence
  Description of Artificial Sequence: Synthetic oligonucleotide
gaggacucagagcgaggug

SEQ ID NO: 962676 - RNA, 19 nt, Artificial Sequence
  Description of Artificial Sequence: Synthetic oligonucleotide
ggcuaugcgcucugcauug

SEQ ID NO: 962677 - RNA, 19 nt, Artificial Sequence
  Description of Artificial Sequence: Synthetic oligonucleotide
ggugauccggaucugguaa

SEQ ID NO: 962678 - RNA, 19 nt, Artificial Sequence
  Description of Artificial Sequence: Synthetic oligonucleotide
gcuacccgcuacaacauag

SEQ ID NO: 962679 - RNA, 19 nt, Artificial Sequence
  Description of Artificial Sequence: Synthetic oligonucleotide
aaguucagucuugcacgug

SEQ ID NO: 962680 - RNA, 19 nt, Artificial Sequence
  Description of Artificial Sequence: Synthetic oligonucleotide
guaaguggacggcaggacu

SEQ ID NO: 962681 - RNA, 19 nt, Artificial Sequence
  Description of Artificial Sequence: Synthetic oligonucleotide
ugcaacuagcagaccuuua

SEQ ID NO: 962682 - RNA, 19 nt, Artificial Sequence
  Description of Artificial Sequence: Synthetic oligonucleotide
caacacgccaugguaccgc

SEQ ID NO: 962683 - RNA, 19 nt, Artificial Sequence
  Description of Artificial Sequence: Synthetic oligonucleotide
ccauuaucagaggcuaugg

SEQ ID NO: 962684 - RNA, 19 nt, Artificial Sequence
  Description of Artificial Sequence: Synthetic oligonucleotide
aucugguaaguggacggca

SEQ ID NO: 962685 - RNA, 19 nt, Artificial Sequence
  Description of Artificial Sequence: Synthetic oligonucleotide
auucggcuguaugugagaa

SEQ ID NO: 962686 - RNA, 19 nt, Artificial Sequence
  Description of Artificial Sequence: Synthetic oligonucleotide
cuuucgcucuguuugauuu

SEQ ID NO: 962687 - RNA, 19 nt, Artificial Sequence
  Description of Artificial Sequence: Synthetic oligonucleotide
cuccaauucggcuguaugu

SEQ ID NO: 962688 - RNA, 19 nt, Artificial Sequence
  Description of Artificial Sequence: Synthetic oligonucleotide
ggcgaaggcuguaauucgg

SEQ ID NO: 962689 - RNA, 19 nt, Artificial Sequence
  Description of Artificial Sequence: Synthetic oligonucleotide
uucuucggucauucccugu

SEQ ID NO: 962690 - RNA, 19 nt, Artificial Sequence
  Description of Artificial Sequence: Synthetic oligonucleotide
cacgaugaagcccugaguu

SEQ ID NO: 962691 - RNA, 19 nt, Artificial Sequence
  Description of Artificial Sequence: Synthetic oligonucleotide
ggaaagugguggugcacug

SEQ ID NO: 962692 - RNA, 19 nt, Artificial Sequence
  Description of Artificial Sequence: Synthetic oligonucleotide
cacguggugauccggaucu

SEQ ID NO: 962693 - RNA, 19 nt, Artificial Sequence
  Description of Artificial Sequence: Synthetic oligonucleotide
augucccaacacgccaugg

SEQ ID NO: 962694 - RNA, 19 nt, Artificial Sequence
  Description of Artificial Sequence: Synthetic oligonucleotide
agacccuaauucgguugac

SEQ ID NO: 962695 - RNA, 19 nt, Artificial Sequence
  Description of Artificial Sequence: Synthetic oligonucleotide
cuucgaggagugucaucac

SEQ ID NO: 962696 - RNA, 19 nt, Artificial Sequence
  Description of Artificial Sequence: Synthetic oligonucleotide
auucaccguagcauaggca

SEQ ID NO: 962697 - RNA, 19 nt, Artificial Sequence
  Description of Artificial Sequence: Synthetic oligonucleotide
gacuggagaucggcaacug

SEQ ID NO: 962698 - RNA, 19 nt, Artificial Sequence
  Description of Artificial Sequence: Synthetic oligonucleotide
ggaugugugcuacuuccga

SEQ ID NO: 962699 - RNA, 19 nt, Artificial Sequence
  Description of Artificial Sequence: Synthetic oligonucleotide
gugugcuacuuccgaaauc

SEQ ID NO: 962700 - RNA, 19 nt, Artificial Sequence
  Description of Artificial Sequence: Synthetic oligonucleotide
agauggagaauuagugcua

SEQ ID NO: 962701 - RNA, 19 nt, Artificial Sequence
  Description of Artificial Sequence: Synthetic oligonucleotide
auaggaccgcucuggggaa

SEQ ID NO: 962702 - RNA, 19 nt, Artificial Sequence
  Description of Artificial Sequence: Synthetic oligonucleotide
cccgcuuuucaucugguuc

SEQ ID NO: 962703 - RNA, 19 nt, Artificial Sequence
  Description of Artificial Sequence: Synthetic oligonucleotide
auucgguugacagcagauu

SEQ ID NO: 962704 - RNA, 19 nt, Artificial Sequence
  Description of Artificial Sequence: Synthetic oligonucleotide
gacgacuucagugccuucu

SEQ ID NO: 962705 - RNA, 19 nt, Artificial Sequence
  Description of Artificial Sequence: Synthetic oligonucleotide
cccaacacgccaugguacc

SEQ ID NO: 962706 - RNA, 19 nt, Artificial Sequence
  Description of Artificial Sequence: Synthetic oligonucleotide
gaaucgcuggcuuccuacu

SEQ ID NO: 962707 - RNA, 19 nt, Artificial Sequence
  Description of Artificial Sequence: Synthetic oligonucleotide
uggacgacuucagugccuu

SEQ ID NO: 962708 - RNA, 19 nt, Artificial Sequence
  Description of Artificial Sequence: Synthetic oligonucleotide
ccuucgaggagugucauca

SEQ ID NO: 962709 - RNA, 19 nt, Artificial Sequence
  Description of Artificial Sequence: Synthetic oligonucleotide
ggggaaaccaagucccaga

SEQ ID NO: 962710 - RNA, 19 nt, Artificial Sequence
  Description of Artificial Sequence: Synthetic oligonucleotide
ucggaaagugguggugcac

SEQ ID NO: 962711 - RNA, 19 nt, Artificial Sequence
  Description of Artificial Sequence: Synthetic oligonucleotide
ccauuucgcuucuucugcc

SEQ ID NO: 962712 - RNA, 19 nt, Artificial Sequence
  Description of Artificial Sequence: Synthetic oligonucleotide
cagugccaaaaguuuaucu

SEQ ID NO: 962713 - RNA, 19 nt, Artificial Sequence
  Description of Artificial Sequence: Synthetic oligonucleotide
ugcuacccgcuacaacaua

SEQ ID NO: 962714 - RNA, 19 nt, Artificial Sequence
  Description of Artificial Sequence: Synthetic oligonucleotide
gagccagcacugguggaug

SEQ ID NO: 962715 - RNA, 19 nt, Artificial Sequence
  Description of Artificial Sequence: Synthetic oligonucleotide
ccggaugcgagcucuggag

SEQ ID NO: 962716 - RNA, 19 nt, Artificial Sequence
  Description of Artificial Sequence: Synthetic oligonucleotide
acgacuucagugccuucua

SEQ ID NO: 962717 - RNA, 19 nt, Artificial Sequence
  Description of Artificial Sequence: Synthetic oligonucleotide
ugggccccuucgaggagug

SEQ ID NO: 962718 - RNA, 19 nt, Artificial Sequence
  Description of Artificial Sequence: Synthetic oligonucleotide
gggaugugugcuacuuccg

SEQ ID NO: 962719 - RNA, 19 nt, Artificial Sequence
  Description of Artificial Sequence: Synthetic oligonucleotide
gggaaaccaagucccagaa

SEQ ID NO: 962720 - RNA, 19 nt, Artificial Sequence
  Description of Artificial Sequence: Synthetic oligonucleotide
cauucacauuggagucuug

SEQ ID NO: 962721 - RNA, 19 nt, Artificial Sequence
  Description of Artificial Sequence: Synthetic oligonucleotide
guggacggcaggacugugc

SEQ ID NO: 962722 - RNA, 19 nt, Artificial Sequence
  Description of Artificial Sequence: Synthetic oligonucleotide
ggcuguaugugagaauaga

SEQ ID NO: 962723 - RNA, 19 nt, Artificial Sequence
  Description of Artificial Sequence: Synthetic oligonucleotide
gguaaguggacggcaggac

SEQ ID NO: 962724 - RNA, 19 nt, Artificial Sequence
  Description of Artificial Sequence: Synthetic oligonucleotide
cuaugcgcucugcauugca

SEQ ID NO: 962725 - RNA, 19 nt, Artificial Sequence
  Description of Artificial Sequence: Synthetic oligonucleotide
caccguagcauaggcaaga

SEQ ID NO: 962726 - RNA, 19 nt, Artificial Sequence
  Description of Artificial Sequence: Synthetic oligonucleotide
cauugcacugcucacgcuu

SEQ ID NO: 962727 - RNA, 19 nt, Artificial Sequence
  Description of Artificial Sequence: Synthetic oligonucleotide
cagaguugaagugaugcau

SEQ ID NO: 962728 - RNA, 19 nt, Artificial Sequence
  Description of Artificial Sequence: Synthetic oligonucleotide
gcuguuaacaggauaggau

SEQ ID NO: 962729 - RNA, 19 nt, Artificial Sequence
  Description of Artificial Sequence: Synthetic oligonucleotide
cugguacaaggggugcaug

SEQ ID NO: 962730 - RNA, 19 nt, Artificial Sequence
  Description of Artificial Sequence: Synthetic oligonucleotide
cuugacucgcccuccaauu

SEQ ID NO: 962731 - RNA, 19 nt, Artificial Sequence
  Description of Artificial Sequence: Synthetic oligonucleotide
cugaggucccagccaacca

SEQ ID NO: 962732 - RNA, 19 nt, Artificial Sequence
  Description of Artificial Sequence: Synthetic oligonucleotide
gccauucaccguagcauag

SEQ ID NO: 962733 - RNA, 19 nt, Artificial Sequence
  Description of Artificial Sequence: Synthetic oligonucleotide
gugccuaugcagagccagc

SEQ ID NO: 962734 - RNA, 19 nt, Artificial Sequence
  Description of Artificial Sequence: Synthetic oligonucleotide
ccgcuacaacauaggaccg

SEQ ID NO: 962735 - RNA, 19 nt, Artificial Sequence
  Description of Artificial Sequence: Synthetic oligonucleotide
gcugugcuauggcaggguc

SEQ ID NO: 962736 - RNA, 19 nt, Artificial Sequence
  Description of Artificial Sequence: Synthetic oligonucleotide
gcagucaagaagagagcca

SEQ ID NO: 962737 - RNA, 19 nt, Artificial Sequence
  Description of Artificial Sequence: Synthetic oligonucleotide
gugcuacuuccgaaaucug

SEQ ID NO: 962738 - RNA, 19 nt, Artificial Sequence
  Description of Artificial Sequence: Synthetic oligonucleotide
augcgagcucuggaggggu

SEQ ID NO: 962739 - RNA, 19 nt, Artificial Sequence
  Description of Artificial Sequence: Synthetic oligonucleotide
cgugccuaugcagagccag

SEQ ID NO: 962740 - RNA, 19 nt, Artificial Sequence
  Description of Artificial Sequence: Synthetic oligonucleotide
ggacucagagcgagguggc

SEQ ID NO: 962741 - RNA, 19 nt, Artificial Sequence
  Description of Artificial Sequence: Synthetic oligonucleotide
accguagcauaggcaagaa

SEQ ID NO: 962742 - RNA, 19 nt, Artificial Sequence
  Description of Artificial Sequence: Synthetic oligonucleotide
cggaugcgagcucuggagg

SEQ ID NO: 962743 - RNA, 19 nt, Artificial Sequence
  Description of Artificial Sequence: Synthetic oligonucleotide
cagucuugcacguggugau

SEQ ID NO: 962744 - RNA, 19 nt, Artificial Sequence
  Description of Artificial Sequence: Synthetic oligonucleotide
gccuaugcagagccagcac

SEQ ID NO: 962745 - RNA, 19 nt, Artificial Sequence
  Description of Artificial Sequence: Synthetic oligonucleotide
cccuggcaaaaugucagug

SEQ ID NO: 962746 - RNA, 19 nt, Artificial Sequence
  Description of Artificial Sequence: Synthetic oligonucleotide
ccaacacgccaugguaccg

SEQ ID NO: 962747 - RNA, 19 nt, Artificial Sequence
  Description of Artificial Sequence: Synthetic oligonucleotide
gucuugacucgcccuccaa

SEQ ID NO: 962748 - RNA, 19 nt, Artificial Sequence
  Description of Artificial Sequence: Synthetic oligonucleotide
gucccacauggagacuuca

SEQ ID NO: 962749 - RNA, 19 nt, Artificial Sequence
  Description of Artificial Sequence: Synthetic oligonucleotide
cucgcccuccaauucggcu

SEQ ID NO: 962750 - RNA, 19 nt, Artificial Sequence
  Description of Artificial Sequence: Synthetic oligonucleotide
uaccgcugcucgugccuau

SEQ ID NO: 962751 - RNA, 19 nt, Artificial Sequence
  Description of Artificial Sequence: Synthetic oligonucleotide
gccaaccagagagccauuc

SEQ ID NO: 962752 - RNA, 19 nt, Artificial Sequence
  Description of Artificial Sequence: Synthetic oligonucleotide
accgcugcucgugccuaug

SEQ ID NO: 962753 - RNA, 19 nt, Artificial Sequence
  Description of Artificial Sequence: Synthetic oligonucleotide
gguccuaccuucugcuuau

SEQ ID NO: 962754 - RNA, 19 nt, Artificial Sequence
  Description of Artificial Sequence: Synthetic oligonucleotide
gcgaaggcuguaauucgga

SEQ ID NO: 962755 - RNA, 19 nt, Artificial Sequence
  Description of Artificial Sequence: Synthetic oligonucleotide
cauucccugugagagcagu

SEQ ID NO: 962756 - RNA, 19 nt, Artificial Sequence
  Description of Artificial Sequence: Synthetic oligonucleotide
ccgaaaucuguggagaagu

SEQ ID NO: 962757 - RNA, 19 nt, Artificial Sequence
  Description of Artificial Sequence: Synthetic oligonucleotide
cuggacgacuucagugccu

SEQ ID NO: 962758 - RNA, 19 nt, Artificial Sequence
  Description of Artificial Sequence: Synthetic oligonucleotide
cucuagaagcagucacgau

SEQ ID NO: 962759 - RNA, 19 nt, Artificial Sequence
  Description of Artificial Sequence: Synthetic oligonucleotide
gcuaugcgcucugcauugc

SEQ ID NO: 962760 - RNA, 19 nt, Artificial Sequence
  Description of Artificial Sequence: Synthetic oligonucleotide
gugaggcgaaggcuguaau

SEQ ID NO: 962761 - RNA, 19 nt, Artificial Sequence
  Description of Artificial Sequence: Synthetic oligonucleotide
acguggugauccggaucug

SEQ ID NO: 962762 - RNA, 19 nt, Artificial Sequence
  Description of Artificial Sequence: Synthetic oligonucleotide
gagauggcucuggucuacu

SEQ ID NO: 962763 - RNA, 19 nt, Artificial Sequence
  Description of Artificial Sequence: Synthetic oligonucleotide
cggcuguaugugagaauag

SEQ ID NO: 962764 - RNA, 19 nt, Artificial Sequence
  Description of Artificial Sequence: Synthetic oligonucleotide
cugaaucgcuggcuuccua

SEQ ID NO: 962765 - RNA, 19 nt, Artificial Sequence
  Description of Artificial Sequence: Synthetic oligonucleotide
ccuacuggggaugugugcu

SEQ ID NO: 962766 - RNA, 19 nt, Artificial Sequence
  Description of Artificial Sequence: Synthetic oligonucleotide
acacgccaugguaccgcug

SEQ ID NO: 962767 - RNA, 19 nt, Artificial Sequence
  Description of Artificial Sequence: Synthetic oligonucleotide
cagagacccuaauucgguu

SEQ ID NO: 962768 - RNA, 19 nt, Artificial Sequence
  Description of Artificial Sequence: Synthetic oligonucleotide
gacucagagcgagguggcu

SEQ ID NO: 962769 - RNA, 19 nt, Artificial Sequence
  Description of Artificial Sequence: Synthetic oligonucleotide
caccauuaucagaggcuau

SEQ ID NO: 962770 - RNA, 19 nt, Artificial Sequence
  Description of Artificial Sequence: Synthetic oligonucleotide
ccgcugcucgugccuaugc

SEQ ID NO: 962771 - RNA, 19 nt, Artificial Sequence
  Description of Artificial Sequence: Synthetic oligonucleotide
ggauggauuuuaggagacu

SEQ ID NO: 962772 - RNA, 19 nt, Artificial Sequence
  Description of Artificial Sequence: Synthetic oligonucleotide
gugcuacccgcuacaacau

SEQ ID NO: 962773 - RNA, 19 nt, Artificial Sequence
  Description of Artificial Sequence: Synthetic oligonucleotide
ccucagguggagggcaguc

SEQ ID NO: 962774 - RNA, 19 nt, Artificial Sequence
  Description of Artificial Sequence: Synthetic oligonucleotide
ggaccgcucuggggaaacc

SEQ ID NO: 962775 - RNA, 19 nt, Artificial Sequence
  Description of Artificial Sequence: Synthetic oligonucleotide
cgaugaagcccugaguugu

SEQ ID NO: 962776 - RNA, 19 nt, Artificial Sequence
  Description of Artificial Sequence: Synthetic oligonucleotide
ggacgacuucagugccuuc

SEQ ID NO: 962777 - RNA, 19 nt, Artificial Sequence
  Description of Artificial Sequence: Synthetic oligonucleotide
cccuucgaggagugucauc

SEQ ID NO: 962778 - RNA, 19 nt, Artificial Sequence
  Description of Artificial Sequence: Synthetic oligonucleotide
cugggccccuucgaggagu

SEQ ID NO: 962779 - RNA, 19 nt, Artificial Sequence
  Description of Artificial Sequence: Synthetic oligonucleotide
ggcgccggaugcgagcucu

SEQ ID NO: 962780 - RNA, 19 nt, Artificial Sequence
  Description of Artificial Sequence: Synthetic oligonucleotide
ggcuuccuacuggggaugu

SEQ ID NO: 962781 - RNA, 19 nt, Artificial Sequence
  Description of Artificial Sequence: Synthetic oligonucleotide
gccccagaguugaagugau

SEQ ID NO: 962782 - RNA, 19 nt, Artificial Sequence
  Description of Artificial Sequence: Synthetic oligonucleotide
ggcuuucgcucuguuugau

SEQ ID NO: 962783 - RNA, 19 nt, Artificial Sequence
  Description of Artificial Sequence: Synthetic oligonucleotide
gcccgcuuuucaucugguu

SEQ ID NO: 962784 - RNA, 19 nt, Artificial Sequence
  Description of Artificial Sequence: Synthetic oligonucleotide
gcgccggaugcgagcucug

SEQ ID NO: 962785 - RNA, 19 nt, Artificial Sequence
  Description of Artificial Sequence: Synthetic oligonucleotide
guccuaccuucugcuuauu

SEQ ID NO: 962786 - RNA, 19 nt, Artificial Sequence
  Description of Artificial Sequence: Synthetic oligonucleotide
cgcccuccaauucggcugu

SEQ ID NO: 962787 - RNA, 19 nt, Artificial Sequence
  Description of Artificial Sequence: Synthetic oligonucleotide
cccuccaauucggcuguau

SEQ ID NO: 962788 - RNA, 19 nt, Artificial Sequence
  Description of Artificial Sequence: Synthetic oligonucleotide
ccccuucgaggagugucau

SEQ ID NO: 962789 - RNA, 19 nt, Artificial Sequence
  Description of Artificial Sequence: Synthetic oligonucleotide
aauauuauauuucagcuga

SEQ ID NO: 962790 - RNA, 19 nt, Artificial Sequence
  Description of Artificial Sequence: Synthetic oligonucleotide
uaugagaauauucuuauag

SEQ ID NO: 962791 - RNA, 19 nt, Artificial Sequence
  Description of Artificial Sequence: Synthetic oligonucleotide
agaauauucuuauagcuac

SEQ ID NO: 962792 - RNA, 19 nt, Artificial Sequence
  Description of Artificial Sequence: Synthetic oligonucleotide
agucaaaacaaucuugccc

SEQ ID NO: 962793 - RNA, 19 nt, Artificial Sequence
  Description of Artificial Sequence: Synthetic oligonucleotide
auaggaaauuuccaguucc

SEQ ID NO: 962794 - RNA, 19 nt, Artificial Sequence
  Description of Artificial Sequence: Synthetic oligonucleotide
aauauuucagguaaagcuc

SEQ ID NO: 962795 - RNA, 19 nt, Artificial Sequence
  Description of Artificial Sequence: Synthetic oligonucleotide
aaaagaucgguuuacacau

SEQ ID NO: 962796 - RNA, 19 nt, Artificial Sequence
  Description of Artificial Sequence: Synthetic oligonucleotide
aaauuagccauuauugugg

SEQ ID NO: 962797 - RNA, 19 nt, Artificial Sequence
  Description of Artificial Sequence: Synthetic oligonucleotide
ugaacuacgaaauaauuuc

SEQ ID NO: 962798 - RNA, 19 nt, Artificial Sequence
  Description of Artificial Sequence: Synthetic oligonucleotide
uuuuagaauacuaccacca

SEQ ID NO: 962799 - RNA, 19 nt, Artificial Sequence
  Description of Artificial Sequence: Synthetic oligonucleotide
uauaguauaccacuuuuca

SEQ ID NO: 962800 - RNA, 19 nt, Artificial Sequence
  Description of Artificial Sequence: Synthetic oligonucleotide
uaggaaauaggaaauuucc

SEQ ID NO: 962801 - RNA, 19 nt, Artificial Sequence
  Description of Artificial Sequence: Synthetic oligonucleotide
agugauacaauuuuggaaa

SEQ ID NO: 962802 - RNA, 19 nt, Artificial Sequence
  Description of Artificial Sequence: Synthetic oligonucleotide
uggagcuacucacagaugg

SEQ ID NO: 962803 - RNA, 19 nt, Artificial Sequence
  Description of Artificial Sequence: Synthetic oligonucleotide
gauauguuauagcaaaggc

SEQ ID NO: 962804 - RNA, 19 nt, Artificial Sequence
  Description of Artificial Sequence: Synthetic oligonucleotide
aauaggaaauuuccaguuc

SEQ ID NO: 962805 - RNA, 19 nt, Artificial Sequence
  Description of Artificial Sequence: Synthetic oligonucleotide
uuauauuucagcugagcag

SEQ ID NO: 962806 - RNA, 19 nt, Artificial Sequence
  Description of Artificial Sequence: Synthetic oligonucleotide
aauuaaacgccaguguuuc

SEQ ID NO: 962807 - RNA, 19 nt, Artificial Sequence
  Description of Artificial Sequence: Synthetic oligonucleotide
aacauucuggucuaggaca

SEQ ID NO: 962808 - RNA, 19 nt, Artificial Sequence
  Description of Artificial Sequence: Synthetic oligonucleotide
cuuaguauugcuuugaaaa

SEQ ID NO: 962809 - RNA, 19 nt, Artificial Sequence
  Description of Artificial Sequence: Synthetic oligonucleotide
aaaugcgagaaucugcuca

SEQ ID NO: 962810 - RNA, 19 nt, Artificial Sequence
  Description of Artificial Sequence: Synthetic oligonucleotide
accaauauuaauuguagcu

SEQ ID NO: 962811 - RNA, 19 nt, Artificial Sequence
  Description of Artificial Sequence: Synthetic oligonucleotide
auuguaccaauauuaauug

SEQ ID NO: 962812 - RNA, 19 nt, Artificial Sequence
  Description of Artificial Sequence: Synthetic oligonucleotide
aauaccaggucucacuucu

SEQ ID NO: 962813 - RNA, 19 nt, Artificial Sequence
  Description of Artificial Sequence: Synthetic oligonucleotide
uccuauguugaccauaagc

SEQ ID NO: 962814 - RNA, 19 nt, Artificial Sequence
  Description of Artificial Sequence: Synthetic oligonucleotide
agaaguaaagucucugggg

SEQ ID NO: 962815 - RNA, 19 nt, Artificial Sequence
  Description of Artificial Sequence: Synthetic oligonucleotide
uuuaacacuccuuuuagaa

SEQ ID NO: 962816 - RNA, 19 nt, Artificial Sequence
  Description of Artificial Sequence: Synthetic oligonucleotide
auuauauuucagcugagca

SEQ ID NO: 962817 - RNA, 19 nt, Artificial Sequence
  Description of Artificial Sequence: Synthetic oligonucleotide
uaguauauaguauaccacu

SEQ ID NO: 962818 - RNA, 19 nt, Artificial Sequence
  Description of Artificial Sequence: Synthetic oligonucleotide
ugauauguuauagcaaagg

SEQ ID NO: 962819 - RNA, 19 nt, Artificial Sequence
  Description of Artificial Sequence: Synthetic oligonucleotide
aagaucauuauguuccgca

SEQ ID NO: 962820 - RNA, 19 nt, Artificial Sequence
  Description of Artificial Sequence: Synthetic oligonucleotide
uauauuucagcugagcaga

SEQ ID NO: 962821 - RNA, 19 nt, Artificial Sequence
  Description of Artificial Sequence: Synthetic oligonucleotide
gaaaagaucgguuuacaca

SEQ ID NO: 962822 - RNA, 19 nt, Artificial Sequence
  Description of Artificial Sequence: Synthetic oligonucleotide
auaguauaccacuuuucac

SEQ ID NO: 962823 - RNA, 19 nt, Artificial Sequence
  Description of Artificial Sequence: Synthetic oligonucleotide
uauguugaccauaagcacu

SEQ ID NO: 962824 - RNA, 19 nt, Artificial Sequence
  Description of Artificial Sequence: Synthetic oligonucleotide
uguggaaugcuuaacuucu

SEQ ID NO: 962825 - RNA, 19 nt, Artificial Sequence
  Description of Artificial Sequence: Synthetic oligonucleotide
uguaccaauauuaauugua

SEQ ID NO: 962826 - RNA, 19 nt, Artificial Sequence
  Description of Artificial Sequence: Synthetic oligonucleotide
uccuuuuagaauacuacca

SEQ ID NO: 962827 - RNA, 19 nt, Artificial Sequence
  Description of Artificial Sequence: Synthetic oligonucleotide
uauaaaucuuagcauuagc

SEQ ID NO: 962828 - RNA, 19 nt, Artificial Sequence
  Description of Artificial Sequence: Synthetic oligonucleotide
ucagguaaagcuccaacug

SEQ ID NO: 962829 - RNA, 19 nt, Artificial Sequence
  Description of Artificial Sequence: Synthetic oligonucleotide
uuuagaauacuaccaccag

SEQ ID NO: 962830 - RNA, 19 nt, Artificial Sequence
  Description of Artificial Sequence: Synthetic oligonucleotide
uccaacuccaaugagacca

SEQ ID NO: 962831 - RNA, 19 nt, Artificial Sequence
  Description of Artificial Sequence: Synthetic oligonucleotide
uauuaauuguagcuugucu

SEQ ID NO: 962832 - RNA, 19 nt, Artificial Sequence
  Description of Artificial Sequence: Synthetic oligonucleotide
aaugucauguccaggacag

SEQ ID NO: 962833 - RNA, 19 nt, Artificial Sequence
  Description of Artificial Sequence: Synthetic oligonucleotide
aaugagacgggguucagaa

SEQ ID NO: 962834 - RNA, 19 nt, Artificial Sequence
  Description of Artificial Sequence: Synthetic oligonucleotide
cuacgaaauaauuucuuag

SEQ ID NO: 962835 - RNA, 19 nt, Artificial Sequence
  Description of Artificial Sequence: Synthetic oligonucleotide
ugauugguaaauuagccau

SEQ ID NO: 962836 - RNA, 19 nt, Artificial Sequence
  Description of Artificial Sequence: Synthetic oligonucleotide
uacuacuaaagcaaugaac

SEQ ID NO: 962837 - RNA, 19 nt, Artificial Sequence
  Description of Artificial Sequence: Synthetic oligonucleotide
ucuuaucugaccccaacca

SEQ ID NO: 962838 - RNA, 19 nt, Artificial Sequence
  Description of Artificial Sequence: Synthetic oligonucleotide
cuaaguaggaaauaggaaa

SEQ ID NO: 962839 - RNA, 19 nt, Artificial Sequence
  Description of Artificial Sequence: Synthetic oligonucleotide
ugguguacuacuuccacag

SEQ ID NO: 962840 - RNA, 19 nt, Artificial Sequence
  Description of Artificial Sequence: Synthetic oligonucleotide
gguaaauuagccauuauug

SEQ ID NO: 962841 - RNA, 19 nt, Artificial Sequence
  Description of Artificial Sequence: Synthetic oligonucleotide
uacaaaugcgagaaucugc

SEQ ID NO: 962842 - RNA, 19 nt, Artificial Sequence
  Description of Artificial Sequence: Synthetic oligonucleotide
uacgaaauaauuucuuagu

SEQ ID NO: 962843 - RNA, 19 nt, Artificial Sequence
  Description of Artificial Sequence: Synthetic oligonucleotide
uguuccaacuccaaugaga

SEQ ID NO: 962844 - RNA, 19 nt, Artificial Sequence
  Description of Artificial Sequence: Synthetic oligonucleotide
gacaacuugggucaucaag

SEQ ID NO: 962845 - RNA, 19 nt, Artificial Sequence
  Description of Artificial Sequence: Synthetic oligonucleotide
gaccugauaacaaugagac

SEQ ID NO: 962846 - RNA, 19 nt, Artificial Sequence
  Description of Artificial Sequence: Synthetic oligonucleotide
cuuuuagaauacuaccacc

SEQ ID NO: 962847 - RNA, 19 nt, Artificial Sequence
  Description of Artificial Sequence: Synthetic oligonucleotide
auauucuuauagcuacuac

SEQ ID NO: 962848 - RNA, 19 nt, Artificial Sequence
  Description of Artificial Sequence: Synthetic oligonucleotide
aauguggcgagauccuguc

SEQ ID NO: 962849 - RNA, 19 nt, Artificial Sequence
  Description of Artificial Sequence: Synthetic oligonucleotide
agcuacaccucccuuaagg

SEQ ID NO: 962850 - RNA, 19 nt, Artificial Sequence
  Description of Artificial Sequence: Synthetic oligonucleotide
acuaaagcaaugaacuacg

SEQ ID NO: 962851 - RNA, 19 nt, Artificial Sequence
  Description of Artificial Sequence: Synthetic oligonucleotide
uauauaguauaccacuuuu

SEQ ID NO: 962852 - RNA, 19 nt, Artificial Sequence
  Description of Artificial Sequence: Synthetic oligonucleotide
ugaccugauaacaaugaga

SEQ ID NO: 962853 - RNA, 19 nt, Artificial Sequence
  Description of Artificial Sequence: Synthetic oligonucleotide
gaaaguggugucaacuugg

SEQ ID NO: 962854 - RNA, 19 nt, Artificial Sequence
  Description of Artificial Sequence: Synthetic oligonucleotide
auaguauauaguauaccac

SEQ ID NO: 962855 - RNA, 19 nt, Artificial Sequence
  Description of Artificial Sequence: Synthetic oligonucleotide
uuagaaguagguuaagguu

SEQ ID NO: 962856 - RNA, 19 nt, Artificial Sequence
  Description of Artificial Sequence: Synthetic oligonucleotide
aguguuucucaacucuucg

SEQ ID NO: 962857 - RNA, 19 nt, Artificial Sequence
  Description of Artificial Sequence: Synthetic oligonucleotide
ucaacucuucggcuaaggg

SEQ ID NO: 962858 - RNA, 19 nt, Artificial Sequence
  Description of Artificial Sequence: Synthetic oligonucleotide
caauauuauauuucagcug

SEQ ID NO: 962859 - RNA, 19 nt, Artificial Sequence
  Description of Artificial Sequence: Synthetic oligonucleotide
uaauuugaaguucccuuug

SEQ ID NO: 962860 - RNA, 19 nt, Artificial Sequence
  Description of Artificial Sequence: Synthetic oligonucleotide
uuuugaaucugacggugug

SEQ ID NO: 962861 - RNA, 19 nt, Artificial Sequence
  Description of Artificial Sequence: Synthetic oligonucleotide
cuauauuagaaguagguua

SEQ ID NO: 962862 - RNA, 19 nt, Artificial Sequence
  Description of Artificial Sequence: Synthetic oligonucleotide
caaggcauuguuuaacuug

SEQ ID NO: 962863 - RNA, 19 nt, Artificial Sequence
  Description of Artificial Sequence: Synthetic oligonucleotide
acuaauuugaaguucccuu

SEQ ID NO: 962864 - RNA, 19 nt, Artificial Sequence
  Description of Artificial Sequence: Synthetic oligonucleotide
aagaucgguuuacacauga

SEQ ID NO: 962865 - RNA, 19 nt, Artificial Sequence
  Description of Artificial Sequence: Synthetic oligonucleotide
aaccaauuaaacgccagug

SEQ ID NO: 962866 - RNA, 19 nt, Artificial Sequence
  Description of Artificial Sequence: Synthetic oligonucleotide
uucuuagacagcuuuugga

SEQ ID NO: 962867 - RNA, 19 nt, Artificial Sequence
  Description of Artificial Sequence: Synthetic oligonucleotide
uuaaugguuacuccucuuc

SEQ ID NO: 962868 - RNA, 19 nt, Artificial Sequence
  Description of Artificial Sequence: Synthetic oligonucleotide
aaucuuagcauuagcauau

SEQ ID NO: 962869 - RNA, 19 nt, Artificial Sequence
  Description of Artificial Sequence: Synthetic oligonucleotide
auaacaaugagacgggguu

SEQ ID NO: 962870 - RNA, 19 nt, Artificial Sequence
  Description of Artificial Sequence: Synthetic oligonucleotide
auuggaauaauuggugcuc

SEQ ID NO: 962871 - RNA, 19 nt, Artificial Sequence
  Description of Artificial Sequence: Synthetic oligonucleotide
cuuagacagcuuuuggacc

SEQ ID NO: 962872 - RNA, 19 nt, Artificial Sequence
  Description of Artificial Sequence: Synthetic oligonucleotide
ucacagacgacuucaauau

SEQ ID NO: 962873 - RNA, 19 nt, Artificial Sequence
  Description of Artificial Sequence: Synthetic oligonucleotide
uauagcaaaggcugguugu

SEQ ID NO: 962874 - RNA, 19 nt, Artificial Sequence
  Description of Artificial Sequence: Synthetic oligonucleotide
caugauauguuauagcaaa

SEQ ID NO: 962875 - RNA, 19 nt, Artificial Sequence
  Description of Artificial Sequence: Synthetic oligonucleotide
agcaaaggcugguuguagc

SEQ ID NO: 962876 - RNA, 19 nt, Artificial Sequence
  Description of Artificial Sequence: Synthetic oligonucleotide
aauuagccauuauugugga

SEQ ID NO: 962877 - RNA, 19 nt, Artificial Sequence
  Description of Artificial Sequence: Synthetic oligonucleotide
auacugaagaucauuaugu

SEQ ID NO: 962878 - RNA, 19 nt, Artificial Sequence
  Description of Artificial Sequence: Synthetic oligonucleotide
caucaaaugaccugauaac

SEQ ID NO: 962879 - RNA, 19 nt, Artificial Sequence
  Description of Artificial Sequence: Synthetic oligonucleotide
uguacuacuuccacaggac

SEQ ID NO: 962880 - RNA, 19 nt, Artificial Sequence
  Description of Artificial Sequence: Synthetic oligonucleotide
ugguaaauuagccauuauu

SEQ ID NO: 962881 - RNA, 19 nt, Artificial Sequence
  Description of Artificial Sequence: Synthetic oligonucleotide
uaccccuagacuauuaaaa

SEQ ID NO: 962882 - RNA, 19 nt, Artificial Sequence
  Description of Artificial Sequence: Synthetic oligonucleotide
augauugguaaauuagcca

SEQ ID NO: 962883 - RNA, 19 nt, Artificial Sequence
  Description of Artificial Sequence: Synthetic oligonucleotide
uauuauauuucagcugagc

SEQ ID NO: 962884 - RNA, 19 nt, Artificial Sequence
  Description of Artificial Sequence: Synthetic oligonucleotide
uaacauucuggucuaggac

SEQ ID NO: 962885 - RNA, 19 nt, Artificial Sequence
  Description of Artificial Sequence: Synthetic oligonucleotide
agcauauccaagcuugaug

SEQ ID NO: 962886 - RNA, 19 nt, Artificial Sequence
  Description of Artificial Sequence: Synthetic oligonucleotide
uuaguauugcuuugaaaau

SEQ ID NO: 962887 - RNA, 19 nt, Artificial Sequence
  Description of Artificial Sequence: Synthetic oligonucleotide
uguaacauucuggucuagg

SEQ ID NO: 962888 - RNA, 19 nt, Artificial Sequence
  Description of Artificial Sequence: Synthetic oligonucleotide
caauauaguauauaguaua

SEQ ID NO: 962889 - RNA, 19 nt, Artificial Sequence
  Description of Artificial Sequence: Synthetic oligonucleotide
aaagauguggcugcccgag

SEQ ID NO: 962890 - RNA, 19 nt, Artificial Sequence
  Description of Artificial Sequence: Synthetic oligonucleotide
ucauauuguuccuuagccu

SEQ ID NO: 962891 - RNA, 19 nt, Artificial Sequence
  Description of Artificial Sequence: Synthetic oligonucleotide
aagucugagguugagggca

SEQ ID NO: 962892 - RNA, 19 nt, Artificial Sequence
  Description of Artificial Sequence: Synthetic oligonucleotide
caaucuugcccaaaucagc

SEQ ID NO: 962893 - RNA, 19 nt, Artificial Sequence
  Description of Artificial Sequence: Synthetic oligonucleotide
uaaugguuacuccucuucu

SEQ ID NO: 962894 - RNA, 19 nt, Artificial Sequence
  Description of Artificial Sequence: Synthetic oligonucleotide
ucaugauauguuauagcaa

SEQ ID NO: 962895 - RNA, 19 nt, Artificial Sequence
  Description of Artificial Sequence: Synthetic oligonucleotide
aauauuaauuguagcuugu

SEQ ID NO: 962896 - RNA, 19 nt, Artificial Sequence
  Description of Artificial Sequence: Synthetic oligonucleotide
uuggaaacaauaccagguc

SEQ ID NO: 962897 - RNA, 19 nt, Artificial Sequence
  Description of Artificial Sequence: Synthetic oligonucleotide
uugccagcuaucaacagaa

SEQ ID NO: 962898 - RNA, 19 nt, Artificial Sequence
  Description of Artificial Sequence: Synthetic oligonucleotide
auauguuauagcaaaggcu

SEQ ID NO: 962899 - RNA, 19 nt, Artificial Sequence
  Description of Artificial Sequence: Synthetic oligonucleotide
cuauguugaccauaagcac

SEQ ID NO: 962900 - RNA, 19 nt, Artificial Sequence
  Description of Artificial Sequence: Synthetic oligonucleotide
uauguacucacagacgacu

SEQ ID NO: 962901 - RNA, 19 nt, Artificial Sequence
  Description of Artificial Sequence: Synthetic oligonucleotide
ugaccaauuguaccaauau

SEQ ID NO: 962902 - RNA, 19 nt, Artificial Sequence
  Description of Artificial Sequence: Synthetic oligonucleotide
auuauuguggaaugcuuaa

SEQ ID NO: 962903 - RNA, 19 nt, Artificial Sequence
  Description of Artificial Sequence: Synthetic oligonucleotide
ucacauuuacuuguaggcc

SEQ ID NO: 962904 - RNA, 19 nt, Artificial Sequence
  Description of Artificial Sequence: Synthetic oligonucleotide
uaggcccuauauuagaagu

SEQ ID NO: 962905 - RNA, 19 nt, Artificial Sequence
  Description of Artificial Sequence: Synthetic oligonucleotide
accccuagacuauuaaaag

SEQ ID NO: 962906 - RNA, 19 nt, Artificial Sequence
  Description of Artificial Sequence: Synthetic oligonucleotide
aaacaauaccaggucucac

SEQ ID NO: 962907 - RNA, 19 nt, Artificial Sequence
  Description of Artificial Sequence: Synthetic oligonucleotide
aucauuauguuccgcaaaa

SEQ ID NO: 962908 - RNA, 19 nt, Artificial Sequence
  Description of Artificial Sequence: Synthetic oligonucleotide
aaauguagauuuaauccaa

SEQ ID NO: 962909 - RNA, 19 nt, Artificial Sequence
  Description of Artificial Sequence: Synthetic oligonucleotide
uuccacaggaccuguaaca

SEQ ID NO: 962910 - RNA, 19 nt, Artificial Sequence
  Description of Artificial Sequence: Synthetic oligonucleotide
auauaguauaccacuuuuc

SEQ ID NO: 962911 - RNA, 19 nt, Artificial Sequence
  Description of Artificial Sequence: Synthetic oligonucleotide
ccagcuaucaacagaagag

SEQ ID NO: 962912 - RNA, 19 nt, Artificial Sequence
  Description of Artificial Sequence: Synthetic oligonucleotide
uuguggaaugcuuaacuuc

SEQ ID NO: 962913 - RNA, 19 nt, Artificial Sequence
  Description of Artificial Sequence: Synthetic oligonucleotide
aguuccgugaauauuucag

SEQ ID NO: 962914 - RNA, 19 nt, Artificial Sequence
  Description of Artificial Sequence: Synthetic oligonucleotide
uugaccauaagcacuucau

SEQ ID NO: 962915 - RNA, 19 nt, Artificial Sequence
  Description of Artificial Sequence: Synthetic oligonucleotide
auauuaauuguagcuuguc

SEQ ID NO: 962916 - RNA, 19 nt, Artificial Sequence
  Description of Artificial Sequence: Synthetic oligonucleotide
accaauuaaacgccagugu

SEQ ID NO: 962917 - RNA, 19 nt, Artificial Sequence
  Description of Artificial Sequence: Synthetic oligonucleotide
aaugucuguaggaaacuca

SEQ ID NO: 962918 - RNA, 19 nt, Artificial Sequence
  Description of Artificial Sequence: Synthetic oligonucleotide
aacaaugagacgggguuca

SEQ ID NO: 962919 - RNA, 19 nt, Artificial Sequence
  Description of Artificial Sequence: Synthetic oligonucleotide
ugauacaauuuuggaaaag

SEQ ID NO: 962920 - RNA, 19 nt, Artificial Sequence
  Description of Artificial Sequence: Synthetic oligonucleotide
ucugcacaaaguggggucg

SEQ ID NO: 962921 - RNA, 19 nt, Artificial Sequence
  Description of Artificial Sequence: Synthetic oligonucleotide
guucagaagucugagguug

SEQ ID NO: 962922 - RNA, 19 nt, Artificial Sequence
  Description of Artificial Sequence: Synthetic oligonucleotide
gucuaggacaacuuggguc

SEQ ID NO: 962923 - RNA, 19 nt, Artificial Sequence
  Description of Artificial Sequence: Synthetic oligonucleotide
aaugaacuacgaaauaauu

SEQ ID NO: 962924 - RNA, 19 nt, Artificial Sequence
  Description of Artificial Sequence: Synthetic oligonucleotide
cacgggauuagucaaaaca

SEQ ID NO: 962925 - RNA, 19 nt, Artificial Sequence
  Description of Artificial Sequence: Synthetic oligonucleotide
agggauccuauguugacca

SEQ ID NO: 962926 - RNA, 19 nt, Artificial Sequence
  Description of Artificial Sequence: Synthetic oligonucleotide
ugauaacaaugagacgggg

SEQ ID NO: 962927 - RNA, 19 nt, Artificial Sequence
  Description of Artificial Sequence: Synthetic oligonucleotide
ucgggaaagauguggcugc

SEQ ID NO: 962928 - RNA, 19 nt, Artificial Sequence
  Description of Artificial Sequence: Synthetic oligonucleotide
uugaugguaauguuucuuu

SEQ ID NO: 962929 - RNA, 19 nt, Artificial Sequence
  Description of Artificial Sequence: Synthetic oligonucleotide
uguaggcccuauauuagaa

SEQ ID NO: 962930 - RNA, 19 nt, Artificial Sequence
  Description of Artificial Sequence: Synthetic oligonucleotide
uucuuauagcuacuacuaa

SEQ ID NO: 962931 - RNA, 19 nt, Artificial Sequence
  Description of Artificial Sequence: Synthetic oligonucleotide
aaugguuacuccucuucuu

SEQ ID NO: 962932 - RNA, 19 nt, Artificial Sequence
  Description of Artificial Sequence: Synthetic oligonucleotide
acgacuucaauauuauauu

SEQ ID NO: 962933 - RNA, 19 nt, Artificial Sequence
  Description of Artificial Sequence: Synthetic oligonucleotide
guaaagcuccaacugcacc

SEQ ID NO: 962934 - RNA, 19 nt, Artificial Sequence
  Description of Artificial Sequence: Synthetic oligonucleotide
ucgaucuuuguuccaacuc

SEQ ID NO: 962935 - RNA, 19 nt, Artificial Sequence
  Description of Artificial Sequence: Synthetic oligonucleotide
auaauuggugcuccuucug

SEQ ID NO: 962936 - RNA, 19 nt, Artificial Sequence
  Description of Artificial Sequence: Synthetic oligonucleotide
acaaaugcgagaaucugcu

SEQ ID NO: 962937 - RNA, 19 nt, Artificial Sequence
  Description of Artificial Sequence: Synthetic oligonucleotide
ccuauguugaccauaagca

SEQ ID NO: 962938 - RNA, 19 nt, Artificial Sequence
  Description of Artificial Sequence: Synthetic oligonucleotide
uuaaacgccaguguuucuc

SEQ ID NO: 962939 - RNA, 19 nt, Artificial Sequence
  Description of Artificial Sequence: Synthetic oligonucleotide
ugguaauguuucuuuccag

SEQ ID NO: 962940 - RNA, 19 nt, Artificial Sequence
  Description of Artificial Sequence: Synthetic oligonucleotide
uauaccccuagacuauuaa

SEQ ID NO: 962941 - RNA, 19 nt, Artificial Sequence
  Description of Artificial Sequence: Synthetic oligonucleotide
guuccaacuccaaugagac

SEQ ID NO: 962942 - RNA, 19 nt, Artificial Sequence
  Description of Artificial Sequence: Synthetic oligonucleotide
agcacuaacucuuccuccu

SEQ ID NO: 962943 - RNA, 19 nt, Artificial Sequence
  Description of Artificial Sequence: Synthetic oligonucleotide
uuagcauauccaagcuuga

SEQ ID NO: 962944 - RNA, 19 nt, Artificial Sequence
  Description of Artificial Sequence: Synthetic oligonucleotide
guagcgaaguuucacuuca

SEQ ID NO: 962945 - RNA, 19 nt, Artificial Sequence
  Description of Artificial Sequence: Synthetic oligonucleotide
aaaucagccuugacagcac

SEQ ID NO: 962946 - RNA, 19 nt, Artificial Sequence
  Description of Artificial Sequence: Synthetic oligonucleotide
ucggcuuaaugguuacucc

SEQ ID NO: 962947 - RNA, 19 nt, Artificial Sequence
  Description of Artificial Sequence: Synthetic oligonucleotide
gacgacuucaauauuauau

SEQ ID NO: 962948 - RNA, 19 nt, Artificial Sequence
  Description of Artificial Sequence: Synthetic oligonucleotide
ugaugguaauguuucuuuc

SEQ ID NO: 962949 - RNA, 19 nt, Artificial Sequence
  Description of Artificial Sequence: Synthetic oligonucleotide
aacuugcaaugauugguaa

SEQ ID NO: 962950 - RNA, 19 nt, Artificial Sequence
  Description of Artificial Sequence: Synthetic oligonucleotide
agguuaagguuaaauuuuc

SEQ ID NO: 962951 - RNA, 19 nt, Artificial Sequence
  Description of Artificial Sequence: Synthetic oligonucleotide
uuguaggcccuauauuaga

SEQ ID NO: 962952 - RNA, 19 nt, Artificial Sequence
  Description of Artificial Sequence: Synthetic oligonucleotide
cuccuguugacagggaucc

SEQ ID NO: 962953 - RNA, 19 nt, Artificial Sequence
  Description of Artificial Sequence: Synthetic oligonucleotide
ugugcacacgggauuaguc

SEQ ID NO: 962954 - RNA, 19 nt, Artificial Sequence
  Description of Artificial Sequence: Synthetic oligonucleotide
aggacagucaacaaaggaa

SEQ ID NO: 962955 - RNA, 19 nt, Artificial Sequence
  Description of Artificial Sequence: Synthetic oligonucleotide
ucuccuacuucugugcaca

SEQ ID NO: 962956 - RNA, 19 nt, Artificial Sequence
  Description of Artificial Sequence: Synthetic oligonucleotide
gaaucugacggugugaacu

SEQ ID NO: 962957 - RNA, 19 nt, Artificial Sequence
  Description of Artificial Sequence: Synthetic oligonucleotide
uguagcgaaguuucacuuc

SEQ ID NO: 962958 - RNA, 19 nt, Artificial Sequence
  Description of Artificial Sequence: Synthetic oligonucleotide
ugucaacuuggugacgucc

SEQ ID NO: 962959 - RNA, 19 nt, Artificial Sequence
  Description of Artificial Sequence: Synthetic oligonucleotide
ucggacgcccagaagacgu

SEQ ID NO: 962960 - RNA, 19 nt, Artificial Sequence
  Description of Artificial Sequence: Synthetic oligonucleotide
guacuacuuccacaggacc

SEQ ID NO: 962961 - RNA, 19 nt, Artificial Sequence
  Description of Artificial Sequence: Synthetic oligonucleotide
uguacucacagacgacuuc

SEQ ID NO: 962962 - RNA, 19 nt, Artificial Sequence
  Description of Artificial Sequence: Synthetic oligonucleotide
uuuacuuguaggcccuaua

SEQ ID NO: 962963 - RNA, 19 nt, Artificial Sequence
  Description of Artificial Sequence: Synthetic oligonucleotide
aaucagccuugacagcacu

SEQ ID NO: 962964 - RNA, 19 nt, Artificial Sequence
  Description of Artificial Sequence: Synthetic oligonucleotide
guguacuacuuccacagga

SEQ ID NO: 962965 - RNA, 19 nt, Artificial Sequence
  Description of Artificial Sequence: Synthetic oligonucleotide
guaggcccuauauuagaag

SEQ ID NO: 962966 - RNA, 19 nt, Artificial Sequence
  Description of Artificial Sequence: Synthetic oligonucleotide
uuugaaucugacgguguga

SEQ ID NO: 962967 - RNA, 19 nt, Artificial Sequence
  Description of Artificial Sequence: Synthetic oligonucleotide
cagcuaucaacagaagagc

SEQ ID NO: 962968 - RNA, 19 nt, Artificial Sequence
  Description of Artificial Sequence: Synthetic oligonucleotide
gaaacaauaccaggucuca

SEQ ID NO: 962969 - RNA, 19 nt, Artificial Sequence
  Description of Artificial Sequence: Synthetic oligonucleotide
aaacuugcaaugauuggua

SEQ ID NO: 962970 - RNA, 19 nt, Artificial Sequence
  Description of Artificial Sequence: Synthetic oligonucleotide
ucgguuuacacaugaguuu

SEQ ID NO: 962971 - RNA, 19 nt, Artificial Sequence
  Description of Artificial Sequence: Synthetic oligonucleotide
ugucauguccaggacaguc

SEQ ID NO: 962972 - RNA, 19 nt, Artificial Sequence
  Description of Artificial Sequence: Synthetic oligonucleotide
gaucgguuuacacaugagu

SEQ ID NO: 962973 - RNA, 19 nt, Artificial Sequence
  Description of Artificial Sequence: Synthetic oligonucleotide
gcuuuuggaccuuugcugc

SEQ ID NO: 962974 - RNA, 19 nt, Artificial Sequence
  Description of Artificial Sequence: Synthetic oligonucleotide
uccaauguggcgagauccu

SEQ ID NO: 962975 - RNA, 19 nt, Artificial Sequence
  Description of Artificial Sequence: Synthetic oligonucleotide
acaugaguuuuccuucacu

SEQ ID NO: 962976 - RNA, 19 nt, Artificial Sequence
  Description of Artificial Sequence: Synthetic oligonucleotide
gauuagucaaaacaaucuu

SEQ ID NO: 962977 - RNA, 19 nt, Artificial Sequence
  Description of Artificial Sequence: Synthetic oligonucleotide
ugcacacgggauuagucaa

SEQ ID NO: 962978 - RNA, 19 nt, Artificial Sequence
  Description of Artificial Sequence: Synthetic oligonucleotide
ugaccauaagcacuucauu

SEQ ID NO: 962979 - RNA, 19 nt, Artificial Sequence
  Description of Artificial Sequence: Synthetic oligonucleotide
uuauuguggaaugcuuaac

SEQ ID NO: 962980 - RNA, 19 nt, Artificial Sequence
  Description of Artificial Sequence: Synthetic oligonucleotide
ggaaaagaucgguuuacac

SEQ ID NO: 962981 - RNA, 19 nt, Artificial Sequence
  Description of Artificial Sequence: Synthetic oligonucleotide
auccugucgggaaagaugu

SEQ ID NO: 962982 - RNA, 19 nt, Artificial Sequence
  Description of Artificial Sequence: Synthetic oligonucleotide
aagcacuugucccaccauu

SEQ ID NO: 962983 - RNA, 19 nt, Artificial Sequence
  Description of Artificial Sequence: Synthetic oligonucleotide
ugaccccaaccaauuaaac

SEQ ID NO: 962984 - RNA, 19 nt, Artificial Sequence
  Description of Artificial Sequence: Synthetic oligonucleotide
ccuuuuagaauacuaccac

SEQ ID NO: 962985 - RNA, 19 nt, Artificial Sequence
  Description of Artificial Sequence: Synthetic oligonucleotide
cauuauuguggaaugcuua

SEQ ID NO: 962986 - RNA, 19 nt, Artificial Sequence
  Description of Artificial Sequence: Synthetic oligonucleotide
aaauaugcuugaguuucau

SEQ ID NO: 962987 - RNA, 19 nt, Artificial Sequence
  Description of Artificial Sequence: Synthetic oligonucleotide
guagcuugucugcugauaa

SEQ ID NO: 962988 - RNA, 19 nt, Artificial Sequence
  Description of Artificial Sequence: Synthetic oligonucleotide
gcuacucacagauggauca

SEQ ID NO: 962989 - RNA, 19 nt, Artificial Sequence
  Description of Artificial Sequence: Synthetic oligonucleotide
acgggauuagucaaaacaa

SEQ ID NO: 962990 - RNA, 19 nt, Artificial Sequence
  Description of Artificial Sequence: Synthetic oligonucleotide
uacugaagaucauuauguu

SEQ ID NO: 962991 - RNA, 19 nt, Artificial Sequence
  Description of Artificial Sequence: Synthetic oligonucleotide
gauccuauguugaccauaa

SEQ ID NO: 962992 - RNA, 19 nt, Artificial Sequence
  Description of Artificial Sequence: Synthetic oligonucleotide
augauauguuauagcaaag

SEQ ID NO: 962993 - RNA, 19 nt, Artificial Sequence
  Description of Artificial Sequence: Synthetic oligonucleotide
acaugccugacuaauuuga

SEQ ID NO: 962994 - RNA, 19 nt, Artificial Sequence
  Description of Artificial Sequence: Synthetic oligonucleotide
cuacaccucccuuaagguc

SEQ ID NO: 962995 - RNA, 19 nt, Artificial Sequence
  Description of Artificial Sequence: Synthetic oligonucleotide
aguauauaguauaccacuu

SEQ ID NO: 962996 - RNA, 19 nt, Artificial Sequence
  Description of Artificial Sequence: Synthetic oligonucleotide
cgagaaucugcucauauug

SEQ ID NO: 962997 - RNA, 19 nt, Artificial Sequence
  Description of Artificial Sequence: Synthetic oligonucleotide
aaguaggaaauaggaaauu

SEQ ID NO: 962998 - RNA, 19 nt, Artificial Sequence
  Description of Artificial Sequence: Synthetic oligonucleotide
ucaugagaaaagagaccau

SEQ ID NO: 962999 - RNA, 19 nt, Artificial Sequence
  Description of Artificial Sequence: Synthetic oligonucleotide
uccuacuucugugcacacg

SEQ ID NO: 963000 - RNA, 19 nt, Artificial Sequence
  Description of Artificial Sequence: Synthetic oligonucleotide
aggaaacucaucuggugua

SEQ ID NO: 963001 - RNA, 19 nt, Artificial Sequence
  Description of Artificial Sequence: Synthetic oligonucleotide
gcuacuacuaaagcaauga

SEQ ID NO: 963002 - RNA, 19 nt, Artificial Sequence
  Description of Artificial Sequence: Synthetic oligonucleotide
auaccccuagacuauuaaa

SEQ ID NO: 963003 - RNA, 19 nt, Artificial Sequence
  Description of Artificial Sequence: Synthetic oligonucleotide
ugacguccaauguggcgag

SEQ ID NO: 963004 - RNA, 19 nt, Artificial Sequence
  Description of Artificial Sequence: Synthetic oligonucleotide
guugaccauaagcacuuca

SEQ ID NO: 963005 - RNA, 19 nt, Artificial Sequence
  Description of Artificial Sequence: Synthetic oligonucleotide
aauauaccccuagacuauu

SEQ ID NO: 963006 - RNA, 19 nt, Artificial Sequence
  Description of Artificial Sequence: Synthetic oligonucleotide
uucugcuaaaauguagauu

SEQ ID NO: 963007 - RNA, 19 nt, Artificial Sequence
  Description of Artificial Sequence: Synthetic oligonucleotide
cuuccacaggaccuguaac

SEQ ID NO: 963008 - RNA, 19 nt, Artificial Sequence
  Description of Artificial Sequence: Synthetic oligonucleotide
agguucaugauauguuaua

SEQ ID NO: 963009 - RNA, 19 nt, Artificial Sequence
  Description of Artificial Sequence: Synthetic oligonucleotide
agcuaucaacagaagagcu

SEQ ID NO: 963010 - RNA, 19 nt, Artificial Sequence
  Description of Artificial Sequence: Synthetic oligonucleotide
ggugacguccaauguggcg

SEQ ID NO: 963011 - RNA, 19 nt, Artificial Sequence
  Description of Artificial Sequence: Synthetic oligonucleotide
auauuauauuucagcugag

SEQ ID NO: 963012 - RNA, 19 nt, Artificial Sequence
  Description of Artificial Sequence: Synthetic oligonucleotide
ucagaagucugagguugag

SEQ ID NO: 963013 - RNA, 19 nt, Artificial Sequence
  Description of Artificial Sequence: Synthetic oligonucleotide
gugacguccaauguggcga

SEQ ID NO: 963014 - RNA, 19 nt, Artificial Sequence
  Description of Artificial Sequence: Synthetic oligonucleotide
agguaaagcuccaacugca

SEQ ID NO: 963015 - RNA, 19 nt, Artificial Sequence
  Description of Artificial Sequence: Synthetic oligonucleotide
aggacaacuugggucauca

SEQ ID NO: 963016 - RNA, 19 nt, Artificial Sequence
  Description of Artificial Sequence: Synthetic oligonucleotide
agcuacucacagauggauc

SEQ ID NO: 963017 - RNA, 19 nt, Artificial Sequence
  Description of Artificial Sequence: Synthetic oligonucleotide
cuacuucugugcacacggg

SEQ ID NO: 963018 - RNA, 19 nt, Artificial Sequence
  Description of Artificial Sequence: Synthetic oligonucleotide
gugcacacgggauuaguca

SEQ ID NO: 963019 - RNA, 19 nt, Artificial Sequence
  Description of Artificial Sequence: Synthetic oligonucleotide
uaacaaugagacgggguuc

SEQ ID NO: 963020 - RNA, 19 nt, Artificial Sequence
  Description of Artificial Sequence: Synthetic oligonucleotide
caguguuucucaacucuuc

SEQ ID NO: 963021 - RNA, 19 nt, Artificial Sequence
  Description of Artificial Sequence: Synthetic oligonucleotide
aucugacggugugaacucc

SEQ ID NO: 963022 - RNA, 19 nt, Artificial Sequence
  Description of Artificial Sequence: Synthetic oligonucleotide
cuugcccaaaucagccuug

SEQ ID NO: 963023 - RNA, 19 nt, Artificial Sequence
  Description of Artificial Sequence: Synthetic oligonucleotide
gauaacaaugagacggggu

SEQ ID NO: 963024 - RNA, 19 nt, Artificial Sequence
  Description of Artificial Sequence: Synthetic oligonucleotide
uucugcuacuguuccuugu

SEQ ID NO: 963025 - RNA, 19 nt, Artificial Sequence
  Description of Artificial Sequence: Synthetic oligonucleotide
cgaucuuuguuccaacucc

SEQ ID NO: 963026 - RNA, 19 nt, Artificial Sequence
  Description of Artificial Sequence: Synthetic oligonucleotide
gaaagauguggcugcccga

SEQ ID NO: 963027 - RNA, 19 nt, Artificial Sequence
  Description of Artificial Sequence: Synthetic oligonucleotide
agcgaaguuucacuucaaa

SEQ ID NO: 963028 - RNA, 19 nt, Artificial Sequence
  Description of Artificial Sequence: Synthetic oligonucleotide
auuaaacgccaguguuucu

SEQ ID NO: 963029 - RNA, 19 nt, Artificial Sequence
  Description of Artificial Sequence: Synthetic oligonucleotide
uacagucggcuuaaugguu

SEQ ID NO: 963030 - RNA, 19 nt, Artificial Sequence
  Description of Artificial Sequence: Synthetic oligonucleotide
augagacgggguucagaag

SEQ ID NO: 963031 - RNA, 19 nt, Artificial Sequence
  Description of Artificial Sequence: Synthetic oligonucleotide
gggauuagucaaaacaauc

SEQ ID NO: 963032 - RNA, 19 nt, Artificial Sequence
  Description of Artificial Sequence: Synthetic oligonucleotide
gucggcuuaaugguuacuc

SEQ ID NO: 963033 - RNA, 19 nt, Artificial Sequence
  Description of Artificial Sequence: Synthetic oligonucleotide
ggaaacaauaccaggucuc

SEQ ID NO: 963034 - RNA, 19 nt, Artificial Sequence
  Description of Artificial Sequence: Synthetic oligonucleotide
cuaaagcaaugaacuacga

SEQ ID NO: 963035 - RNA, 19 nt, Artificial Sequence
  Description of Artificial Sequence: Synthetic oligonucleotide
uucggacgcccagaagacg

SEQ ID NO: 963036 - RNA, 19 nt, Artificial Sequence
  Description of Artificial Sequence: Synthetic oligonucleotide
cuucaguucggacgcccag

SEQ ID NO: 963037 - RNA, 19 nt, Artificial Sequence
  Description of Artificial Sequence: Synthetic oligonucleotide
gugauacaauuuuggaaaa

SEQ ID NO: 963038 - RNA, 19 nt, Artificial Sequence
  Description of Artificial Sequence: Synthetic oligonucleotide
gcaaugaacuacgaaauaa

SEQ ID NO: 963039 - RNA, 19 nt, Artificial Sequence
  Description of Artificial Sequence: Synthetic oligonucleotide
agagucacuccaaccucac

SEQ ID NO: 963040 - RNA, 19 nt, Artificial Sequence
  Description of Artificial Sequence: Synthetic oligonucleotide
gaagacgucuaaguaggaa

SEQ ID NO: 963041 - RNA, 19 nt, Artificial Sequence
  Description of Artificial Sequence: Synthetic oligonucleotide
cagggauccuauguugacc

SEQ ID NO: 963042 - RNA, 19 nt, Artificial Sequence
  Description of Artificial Sequence: Synthetic oligonucleotide
cuuaucugaccccaaccaa

SEQ ID NO: 963043 - RNA, 19 nt, Artificial Sequence
  Description of Artificial Sequence: Synthetic oligonucleotide
uucaguucggacgcccaga

SEQ ID NO: 963044 - RNA, 19 nt, Artificial Sequence
  Description of Artificial Sequence: Synthetic oligonucleotide
caaugaacuacgaaauaau

SEQ ID NO: 963045 - RNA, 19 nt, Artificial Sequence
  Description of Artificial Sequence: Synthetic oligonucleotide
gcaccguucagcaucguag

SEQ ID NO: 963046 - RNA, 19 nt, Artificial Sequence
  Description of Artificial Sequence: Synthetic oligonucleotide
gaacuacgaaauaauuucu

SEQ ID NO: 963047 - RNA, 19 nt, Artificial Sequence
  Description of Artificial Sequence: Synthetic oligonucleotide
ggauuagucaaaacaaucu

SEQ ID NO: 963048 - RNA, 19 nt, Artificial Sequence
  Description of Artificial Sequence: Synthetic oligonucleotide
uggugacguccaauguggc

SEQ ID NO: 963049 - RNA, 19 nt, Artificial Sequence
  Description of Artificial Sequence: Synthetic oligonucleotide
uggaccuuugcugcuuucu

SEQ ID NO: 963050 - RNA, 19 nt, Artificial Sequence
  Description of Artificial Sequence: Synthetic oligonucleotide
gcuaucaacagaagagcug

SEQ ID NO: 963051 - RNA, 19 nt, Artificial Sequence
  Description of Artificial Sequence: Synthetic oligonucleotide
guggcgagauccugucggg

SEQ ID NO: 963052 - RNA, 19 nt, Artificial Sequence
  Description of Artificial Sequence: Synthetic oligonucleotide
ucguagccaucaaaauguc

SEQ ID NO: 963053 - RNA, 19 nt, Artificial Sequence
  Description of Artificial Sequence: Synthetic oligonucleotide
aaacgccaguguuucucaa

SEQ ID NO: 963054 - RNA, 19 nt, Artificial Sequence
  Description of Artificial Sequence: Synthetic oligonucleotide
uguagcuugucugcugaua

SEQ ID NO: 963055 - RNA, 19 nt, Artificial Sequence
  Description of Artificial Sequence: Synthetic oligonucleotide
gggcaugauucauugccag

SEQ ID NO: 963056 - RNA, 19 nt, Artificial Sequence
  Description of Artificial Sequence: Synthetic oligonucleotide
cuacuacuaaagcaaugaa

SEQ ID NO: 963057 - RNA, 19 nt, Artificial Sequence
  Description of Artificial Sequence: Synthetic oligonucleotide
uuuggaccuuugcugcuuu

SEQ ID NO: 963058 - RNA, 19 nt, Artificial Sequence
  Description of Artificial Sequence: Synthetic oligonucleotide
agcuacuacuaaagcaaug

SEQ ID NO: 963059 - RNA, 19 nt, Artificial Sequence
  Description of Artificial Sequence: Synthetic oligonucleotide
gguguacuacuuccacagg

SEQ ID NO: 963060 - RNA, 19 nt, Artificial Sequence
  Description of Artificial Sequence: Synthetic oligonucleotide
uacucacagacgacuucaa

SEQ ID NO: 963061 - RNA, 19 nt, Artificial Sequence
  Description of Artificial Sequence: Synthetic oligonucleotide
cuucugcuacuguuccuug

SEQ ID NO: 963062 - RNA, 19 nt, Artificial Sequence
  Description of Artificial Sequence: Synthetic oligonucleotide
cuacagucggcuuaauggu

SEQ ID NO: 963063 - RNA, 19 nt, Artificial Sequence
  Description of Artificial Sequence: Synthetic oligonucleotide
agaauacuaccaccagcua

SEQ ID NO: 963064 - RNA, 19 nt, Artificial Sequence
  Description of Artificial Sequence: Synthetic oligonucleotide
gaccuguaacauucugguc

SEQ ID NO: 963065 - RNA, 19 nt, Artificial Sequence
  Description of Artificial Sequence: Synthetic oligonucleotide
cugaccccaaccaauuaaa

SEQ ID NO: 963066 - RNA, 19 nt, Artificial Sequence
  Description of Artificial Sequence: Synthetic oligonucleotide
ugcaccguucagcaucgua

SEQ ID NO: 963067 - RNA, 19 nt, Artificial Sequence
  Description of Artificial Sequence: Synthetic oligonucleotide
cuaccuuuaacacuccuuu

SEQ ID NO: 963068 - RNA, 19 nt, Artificial Sequence
  Description of Artificial Sequence: Synthetic oligonucleotide
guauauaguauaccacuuu

SEQ ID NO: 963069 - RNA, 19 nt, Artificial Sequence
  Description of Artificial Sequence: Synthetic oligonucleotide
acggugugaacuccagaaa

SEQ ID NO: 963070 - RNA, 19 nt, Artificial Sequence
  Description of Artificial Sequence: Synthetic oligonucleotide
caaaugcgagaaucugcuc

SEQ ID NO: 963071 - RNA, 19 nt, Artificial Sequence
  Description of Artificial Sequence: Synthetic oligonucleotide
cagguguucagaagucuga

SEQ ID NO: 963072 - RNA, 19 nt, Artificial Sequence
  Description of Artificial Sequence: Synthetic oligonucleotide
acuucugugcacacgggau

SEQ ID NO: 963073 - RNA, 19 nt, Artificial Sequence
  Description of Artificial Sequence: Synthetic oligonucleotide
ccaaccaauuaaacgccag

SEQ ID NO: 963074 - RNA, 19 nt, Artificial Sequence
  Description of Artificial Sequence: Synthetic oligonucleotide
agccuuuaccacaguggac

SEQ ID NO: 963075 - RNA, 19 nt, Artificial Sequence
  Description of Artificial Sequence: Synthetic oligonucleotide
ucugugcacacgggauuag

SEQ ID NO: 963076 - RNA, 19 nt, Artificial Sequence
  Description of Artificial Sequence: Synthetic oligonucleotide
ggcaugauucauugccagc

SEQ ID NO: 963077 - RNA, 19 nt, Artificial Sequence
  Description of Artificial Sequence: Synthetic oligonucleotide
agaucgguuuacacaugag

SEQ ID NO: 963078 - RNA, 19 nt, Artificial Sequence
  Description of Artificial Sequence: Synthetic oligonucleotide
auccuauguugaccauaag

SEQ ID NO: 963079 - RNA, 19 nt, Artificial Sequence
  Description of Artificial Sequence: Synthetic oligonucleotide
acauucuggucuaggacaa

SEQ ID NO: 963080 - RNA, 19 nt, Artificial Sequence
  Description of Artificial Sequence: Synthetic oligonucleotide
ccccaaccaauuaaacgcc

SEQ ID NO: 963081 - RNA, 19 nt, Artificial Sequence
  Description of Artificial Sequence: Synthetic oligonucleotide
caugccugacuaauuugaa

SEQ ID NO: 963082 - RNA, 19 nt, Artificial Sequence
  Description of Artificial Sequence: Synthetic oligonucleotide
agggcaugauucauugcca

SEQ ID NO: 963083 - RNA, 19 nt, Artificial Sequence
  Description of Artificial Sequence: Synthetic oligonucleotide
uggugucaacuuggugacg

SEQ ID NO: 963084 - RNA, 19 nt, Artificial Sequence
  Description of Artificial Sequence: Synthetic oligonucleotide
ccuggccuaccuuuaacac

SEQ ID NO: 963085 - RNA, 19 nt, Artificial Sequence
  Description of Artificial Sequence: Synthetic oligonucleotide
uccugucgggaaagaugug

SEQ ID NO: 963086 - RNA, 19 nt, Artificial Sequence
  Description of Artificial Sequence: Synthetic oligonucleotide
cagucggcuuaaugguuac

SEQ ID NO: 963087 - RNA, 19 nt, Artificial Sequence
  Description of Artificial Sequence: Synthetic oligonucleotide
guucggacgcccagaagac

SEQ ID NO: 963088 - RNA, 19 nt, Artificial Sequence
  Description of Artificial Sequence: Synthetic oligonucleotide
augaccaauuguaccaaua

SEQ ID NO: 963089 - RNA, 19 nt, Artificial Sequence
  Description of Artificial Sequence: Synthetic oligonucleotide
ccgugaauauuucagguaa

SEQ ID NO: 963090 - RNA, 19 nt, Artificial Sequence
  Description of Artificial Sequence: Synthetic oligonucleotide
caucaagauaugagaauau

SEQ ID NO: 963091 - RNA, 19 nt, Artificial Sequence
  Description of Artificial Sequence: Synthetic oligonucleotide
uucuaucuccuggccuacc

SEQ ID NO: 963092 - RNA, 19 nt, Artificial Sequence
  Description of Artificial Sequence: Synthetic oligonucleotide
cuuuggucccuggaauguc

SEQ ID NO: 963093 - RNA, 19 nt, Artificial Sequence
  Description of Artificial Sequence: Synthetic oligonucleotide
gcccuauauuagaaguagg

SEQ ID NO: 963094 - RNA, 19 nt, Artificial Sequence
  Description of Artificial Sequence: Synthetic oligonucleotide
ccugacuaauuugaaguuc

SEQ ID NO: 963095 - RNA, 19 nt, Artificial Sequence
  Description of Artificial Sequence: Synthetic oligonucleotide
acagucggcuuaaugguua

SEQ ID NO: 963096 - RNA, 19 nt, Artificial Sequence
  Description of Artificial Sequence: Synthetic oligonucleotide
ccaaaucagccuugacagc

SEQ ID NO: 963097 - RNA, 19 nt, Artificial Sequence
  Description of Artificial Sequence: Synthetic oligonucleotide
caguuccgugaauauuuca

SEQ ID NO: 963098 - RNA, 19 nt, Artificial Sequence
  Description of Artificial Sequence: Synthetic oligonucleotide
ucuucggcuaagggcaauu

SEQ ID NO: 963099 - RNA, 19 nt, Artificial Sequence
  Description of Artificial Sequence: Synthetic oligonucleotide
gcaccaagcacuuguccca

SEQ ID NO: 963100 - RNA, 19 nt, Artificial Sequence
  Description of Artificial Sequence: Synthetic oligonucleotide
gguaaagcuccaacugcac

SEQ ID NO: 963101 - RNA, 19 nt, Artificial Sequence
  Description of Artificial Sequence: Synthetic oligonucleotide
ggcuuaaugguuacuccuc

SEQ ID NO: 963102 - RNA, 19 nt, Artificial Sequence
  Description of Artificial Sequence: Synthetic oligonucleotide
caaccaauuaaacgccagu

SEQ ID NO: 963103 - RNA, 19 nt, Artificial Sequence
  Description of Artificial Sequence: Synthetic oligonucleotide
cuucuaucuccuggccuac

SEQ ID NO: 963104 - RNA, 19 nt, Artificial Sequence
  Description of Artificial Sequence: Synthetic oligonucleotide
ccccuagacuauuaaaaga

SEQ ID NO: 963105 - RNA, 19 nt, Artificial Sequence
  Description of Artificial Sequence: Synthetic oligonucleotide
caccauggagcuacucaca

SEQ ID NO: 963106 - RNA, 19 nt, Artificial Sequence
  Description of Artificial Sequence: Synthetic oligonucleotide
gacgucuaaguaggaaaua

SEQ ID NO: 963107 - RNA, 19 nt, Artificial Sequence
  Description of Artificial Sequence: Synthetic oligonucleotide
gcugcaccguucagcaucg

SEQ ID NO: 963108 - RNA, 19 nt, Artificial Sequence
  Description of Artificial Sequence: Synthetic oligonucleotide
caauguggcgagauccugu

SEQ ID NO: 963109 - RNA, 19 nt, Artificial Sequence
  Description of Artificial Sequence: Synthetic oligonucleotide
acguccaauguggcgagau

SEQ ID NO: 963110 - RNA, 19 nt, Artificial Sequence
  Description of Artificial Sequence: Synthetic oligonucleotide
cccuauauuagaaguaggu

SEQ ID NO: 963111 - RNA, 19 nt, Artificial Sequence
  Description of Artificial Sequence: Synthetic oligonucleotide
uuggaccuuugcugcuuuc

SEQ ID NO: 963112 - RNA, 19 nt, Artificial Sequence
  Description of Artificial Sequence: Synthetic oligonucleotide
ggucgaucuuuguuccaac

SEQ ID NO: 963113 - RNA, 19 nt, Artificial Sequence
  Description of Artificial Sequence: Synthetic oligonucleotide
gaaacucaucugguguacu

SEQ ID NO: 963114 - RNA, 19 nt, Artificial Sequence
  Description of Artificial Sequence: Synthetic oligonucleotide
acgcccagaagacgucuaa

SEQ ID NO: 963115 - RNA, 19 nt, Artificial Sequence
  Description of Artificial Sequence: Synthetic oligonucleotide
uggcgagauccugucggga

SEQ ID NO: 963116 - RNA, 19 nt, Artificial Sequence
  Description of Artificial Sequence: Synthetic oligonucleotide
ccaauauaguauauaguau

SEQ ID NO: 963117 - RNA, 19 nt, Artificial Sequence
  Description of Artificial Sequence: Synthetic oligonucleotide
acacuccuuuuagaauacu

SEQ ID NO: 963118 - RNA, 19 nt, Artificial Sequence
  Description of Artificial Sequence: Synthetic oligonucleotide
ggugucaacuuggugacgu

SEQ ID NO: 963119 - RNA, 19 nt, Artificial Sequence
  Description of Artificial Sequence: Synthetic oligonucleotide
gagcuacucacagauggau

SEQ ID NO: 963120 - RNA, 19 nt, Artificial Sequence
  Description of Artificial Sequence: Synthetic oligonucleotide
gcuuaaugguuacuccucu

SEQ ID NO: 963121 - RNA, 19 nt, Artificial Sequence
  Description of Artificial Sequence: Synthetic oligonucleotide
cuguaacauucuggucuag

SEQ ID NO: 963122 - RNA, 19 nt, Artificial Sequence
  Description of Artificial Sequence: Synthetic oligonucleotide
caaugagacgggguucaga

SEQ ID NO: 963123 - RNA, 19 nt, Artificial Sequence
  Description of Artificial Sequence: Synthetic oligonucleotide
auggagcuacucacagaug

SEQ ID NO: 963124 - RNA, 19 nt, Artificial Sequence
  Description of Artificial Sequence: Synthetic oligonucleotide
gcacugguauuuucuucac

SEQ ID NO: 963125 - RNA, 19 nt, Artificial Sequence
  Description of Artificial Sequence: Synthetic oligonucleotide
ccaacuccaaugagaccac

SEQ ID NO: 963126 - RNA, 19 nt, Artificial Sequence
  Description of Artificial Sequence: Synthetic oligonucleotide
ggcauuguuuaacuuggau

SEQ ID NO: 963127 - RNA, 19 nt, Artificial Sequence
  Description of Artificial Sequence: Synthetic oligonucleotide
ggcgagauccugucgggaa

SEQ ID NO: 963128 - RNA, 19 nt, Artificial Sequence
  Description of Artificial Sequence: Synthetic oligonucleotide
ccaguuccgugaauauuuc

SEQ ID NO: 963129 - RNA, 19 nt, Artificial Sequence
  Description of Artificial Sequence: Synthetic oligonucleotide
gguuuacacaugaguuuuc

SEQ ID NO: 963130 - RNA, 19 nt, Artificial Sequence
  Description of Artificial Sequence: Synthetic oligonucleotide
agucggcuuaaugguuacu

SEQ ID NO: 963131 - RNA, 19 nt, Artificial Sequence
  Description of Artificial Sequence: Synthetic oligonucleotide
agacgggguucagaaguaa

SEQ ID NO: 963132 - RNA, 19 nt, Artificial Sequence
  Description of Artificial Sequence: Synthetic oligonucleotide
gagacgggguucagaagua

SEQ ID NO: 963133 - RNA, 19 nt, Artificial Sequence
  Description of Artificial Sequence: Synthetic oligonucleotide
ggagcuacucacagaugga

SEQ ID NO: 963134 - RNA, 19 nt, Artificial Sequence
  Description of Artificial Sequence: Synthetic oligonucleotide
gggaaaguggugucaacuu

SEQ ID NO: 963135 - RNA, 19 nt, Artificial Sequence
  Description of Artificial Sequence: Synthetic oligonucleotide
ggauccuauguugaccaua

SEQ ID NO: 963136 - RNA, 19 nt, Artificial Sequence
  Description of Artificial Sequence: Synthetic oligonucleotide
ccuguaacauucuggucua

SEQ ID NO: 963137 - RNA, 19 nt, Artificial Sequence
  Description of Artificial Sequence: Synthetic oligonucleotide
cccaaccaauuaaacgcca

SEQ ID NO: 963138 - RNA, 19 nt, Artificial Sequence
  Description of Artificial Sequence: Synthetic oligonucleotide
ggucuaggacaacuugggu

SEQ ID NO: 963139 - RNA, 19 nt, Artificial Sequence
  Description of Artificial Sequence: Synthetic oligonucleotide
gggucgaucuuuguuccaa

SEQ ID NO: 963140 - RNA, 19 nt, Artificial Sequence
  Description of Artificial Sequence: Synthetic oligonucleotide
cgagauccugucgggaaag

SEQ ID NO: 963141 - RNA, 19 nt, Artificial Sequence
  Description of Artificial Sequence: Synthetic oligonucleotide
gcgagauccugucgggaaa

SEQ ID NO: 963142 - RNA, 19 nt, Artificial Sequence
  Description of Artificial Sequence: Synthetic oligonucleotide
cugcacaaaguggggucga

SEQ ID NO: 963143 - RNA, 19 nt, Artificial Sequence
  Description of Artificial Sequence: Synthetic oligonucleotide
guauaccacuuuucacauu

SEQ ID NO: 963144 - RNA, 19 nt, Artificial Sequence
  Description of Artificial Sequence: Synthetic oligonucleotide
ggucccuggaaugucugua

SEQ ID NO: 963145 - RNA, 19 nt, Artificial Sequence
  Description of Artificial Sequence: Synthetic oligonucleotide
gcacuugucccaccauucu

SEQ ID NO: 963146 - RNA, 19 nt, Artificial Sequence
  Description of Artificial Sequence: Synthetic oligonucleotide
ccaugagcuacaugaccaa

SEQ ID NO: 963147 - RNA, 19 nt, Artificial Sequence
  Description of Artificial Sequence: Synthetic oligonucleotide
gccugacuaauuugaaguu

SEQ ID NO: 963148 - RNA, 19 nt, Artificial Sequence
  Description of Artificial Sequence: Synthetic oligonucleotide
caugagcuacaugaccaau

SEQ ID NO: 963149 - RNA, 19 nt, Artificial Sequence
  Description of Artificial Sequence: Synthetic oligonucleotide
ccauuauuguggaaugcuu

SEQ ID NO: 963150 - RNA, 19 nt, Artificial Sequence
  Description of Artificial Sequence: Synthetic oligonucleotide
gacguccaauguggcgaga

SEQ ID NO: 963151 - RNA, 19 nt, Artificial Sequence
  Description of Artificial Sequence: Synthetic oligonucleotide
ccucccuuaaggucaucaa

SEQ ID NO: 963152 - RNA, 19 nt, Artificial Sequence
  Description of Artificial Sequence: Synthetic oligonucleotide
ggggucgaucuuuguucca

SEQ ID NO: 963153 - RNA, 19 nt, Artificial Sequence
  Description of Artificial Sequence: Synthetic oligonucleotide
ggacuucccaugagcuaca

SEQ ID NO: 963154 - RNA, 19 nt, Artificial Sequence
  Description of Artificial Sequence: Synthetic oligonucleotide
cuacucacagauggaucau

SEQ ID NO: 963155 - RNA, 19 nt, Artificial Sequence
  Description of Artificial Sequence: Synthetic oligonucleotide
cacagacgacuucaauauu

SEQ ID NO: 963156 - RNA, 19 nt, Artificial Sequence
  Description of Artificial Sequence: Synthetic oligonucleotide
cugugcacacgggauuagu

SEQ ID NO: 963157 - RNA, 19 nt, Artificial Sequence
  Description of Artificial Sequence: Synthetic oligonucleotide
cggcuuaaugguuacuccu

SEQ ID NO: 963158 - RNA, 19 nt, Artificial Sequence
  Description of Artificial Sequence: Synthetic oligonucleotide
ggccuaccuuuaacacucc

SEQ ID NO: 963159 - RNA, 19 nt, Artificial Sequence
  Description of Artificial Sequence: Synthetic oligonucleotide
ggggcacugguauuuucuu

SEQ ID NO: 963160 - RNA, 19 nt, Artificial Sequence
  Description of Artificial Sequence: Synthetic oligonucleotide
ccaguguuucucaacucuu

SEQ ID NO: 963161 - RNA, 19 nt, Artificial Sequence
  Description of Artificial Sequence: Synthetic oligonucleotide
gcacacgggauuagucaaa

SEQ ID NO: 963162 - RNA, 19 nt, Artificial Sequence
  Description of Artificial Sequence: Synthetic oligonucleotide
cgggauuagucaaaacaau

SEQ ID NO: 963163 - RNA, 19 nt, Artificial Sequence
  Description of Artificial Sequence: Synthetic oligonucleotide
cuucggcuaagggcaauuu

SEQ ID NO: 963164 - RNA, 19 nt, Artificial Sequence
  Description of Artificial Sequence: Synthetic oligonucleotide
ggacgcccagaagacgucu

SEQ ID NO: 963165 - RNA, 19 nt, Artificial Sequence
  Description of Artificial Sequence: Synthetic oligonucleotide
cuaggacaacuugggucau

SEQ ID NO: 963166 - RNA, 19 nt, Artificial Sequence
  Description of Artificial Sequence: Synthetic oligonucleotide
ccuuagccugacuuucuuu

SEQ ID NO: 963167 - RNA, 19 nt, Artificial Sequence
  Description of Artificial Sequence: Synthetic oligonucleotide
gggauccuauguugaccau

SEQ ID NO: 963168 - RNA, 19 nt, Artificial Sequence
  Description of Artificial Sequence: Synthetic oligonucleotide
cgguuuacacaugaguuuu

SEQ ID NO: 963169 - RNA, 19 nt, Artificial Sequence
  Description of Artificial Sequence: Synthetic oligonucleotide
cggacgcccagaagacguc

SEQ ID NO: 963170 - RNA, 19 nt, Artificial Sequence
  Description of Artificial Sequence: Synthetic oligonucleotide
cucuucggcuaagggcaau

SEQ ID NO: 963171 - RNA, 19 nt, Artificial Sequence
  Description of Artificial Sequence: Synthetic oligonucleotide
ccaucacugcugcaccguu

SEQ ID NO: 963172 - RNA, 19 nt, Artificial Sequence
  Description of Artificial Sequence: Synthetic oligonucleotide
cugcaccguucagcaucgu

SEQ ID NO: 963173 - RNA, 19 nt, Artificial Sequence
  Description of Artificial Sequence: Synthetic oligonucleotide
uuuauaauuaguuucauag

SEQ ID NO: 963174 - RNA, 19 nt, Artificial Sequence
  Description of Artificial Sequence: Synthetic oligonucleotide
uuuggcauauuuaaaaugg

SEQ ID NO: 963175 - RNA, 19 nt, Artificial Sequence
  Description of Artificial Sequence: Synthetic oligonucleotide
agaacuuucacuuugacca

SEQ ID NO: 963176 - RNA, 19 nt, Artificial Sequence
  Description of Artificial Sequence: Synthetic oligonucleotide
uuuaggaucuugaaaaggg

SEQ ID NO: 963177 - RNA, 19 nt, Artificial Sequence
  Description of Artificial Sequence: Synthetic oligonucleotide
guuaagaaccuuuugaagg

SEQ ID NO: 963178 - RNA, 19 nt, Artificial Sequence
  Description of Artificial Sequence: Synthetic oligonucleotide
auuauuccuaaauagcagc

SEQ ID NO: 963179 - RNA, 19 nt, Artificial Sequence
  Description of Artificial Sequence: Synthetic oligonucleotide
auaucaucaauuuuauagg

SEQ ID NO: 963180 - RNA, 19 nt, Artificial Sequence
  Description of Artificial Sequence: Synthetic oligonucleotide
aauuucucaccguagguag

SEQ ID NO: 963181 - RNA, 19 nt, Artificial Sequence
  Description of Artificial Sequence: Synthetic oligonucleotide
aagaugaauugagaaaugc

SEQ ID NO: 963182 - RNA, 19 nt, Artificial Sequence
  Description of Artificial Sequence: Synthetic oligonucleotide
uuagucacagucauguuag

SEQ ID NO: 963183 - RNA, 19 nt, Artificial Sequence
  Description of Artificial Sequence: Synthetic oligonucleotide
ucuaauauguauuuggcau

SEQ ID NO: 963184 - RNA, 19 nt, Artificial Sequence
  Description of Artificial Sequence: Synthetic oligonucleotide
uucauuauuccuaaauagc

SEQ ID NO: 963185 - RNA, 19 nt, Artificial Sequence
  Description of Artificial Sequence: Synthetic oligonucleotide
gaugauaggguccuggucc

SEQ ID NO: 963186 - RNA, 19 nt, Artificial Sequence
  Description of Artificial Sequence: Synthetic oligonucleotide
aauuuuauagggaaaguug

SEQ ID NO: 963187 - RNA, 19 nt, Artificial Sequence
  Description of Artificial Sequence: Synthetic oligonucleotide
uauaguuacuucacugucg

SEQ ID NO: 963188 - RNA, 19 nt, Artificial Sequence
  Description of Artificial Sequence: Synthetic oligonucleotide
uaucaucaauuuuauaggg

SEQ ID NO: 963189 - RNA, 19 nt, Artificial Sequence
  Description of Artificial Sequence: Synthetic oligonucleotide
agucuguauacacaguagc

SEQ ID NO: 963190 - RNA, 19 nt, Artificial Sequence
  Description of Artificial Sequence: Synthetic oligonucleotide
ugugcuucgaucuuuacac

SEQ ID NO: 963191 - RNA, 19 nt, Artificial Sequence
  Description of Artificial Sequence: Synthetic oligonucleotide
guaaugauuagucacaguc

SEQ ID NO: 963192 - RNA, 19 nt, Artificial Sequence
  Description of Artificial Sequence: Synthetic oligonucleotide
uauagcuuauuuaugacau

SEQ ID NO: 963193 - RNA, 19 nt, Artificial Sequence
  Description of Artificial Sequence: Synthetic oligonucleotide
uaaauagcagcucaaggga

SEQ ID NO: 963194 - RNA, 19 nt, Artificial Sequence
  Description of Artificial Sequence: Synthetic oligonucleotide
aaucaugguaucgucacac

SEQ ID NO: 963195 - RNA, 19 nt, Artificial Sequence
  Description of Artificial Sequence: Synthetic oligonucleotide
aaugauuagucacagucau

SEQ ID NO: 963196 - RNA, 19 nt, Artificial Sequence
  Description of Artificial Sequence: Synthetic oligonucleotide
uccuuuaggaucuugaaaa

SEQ ID NO: 963197 - RNA, 19 nt, Artificial Sequence
  Description of Artificial Sequence: Synthetic oligonucleotide
gauguuaagaaccuuuuga

SEQ ID NO: 963198 - RNA, 19 nt, Artificial Sequence
  Description of Artificial Sequence: Synthetic oligonucleotide
gggaaaucaauucugacgg

SEQ ID NO: 963199 - RNA, 19 nt, Artificial Sequence
  Description of Artificial Sequence: Synthetic oligonucleotide
uuauagggaaaguugaacu

SEQ ID NO: 963200 - RNA, 19 nt, Artificial Sequence
  Description of Artificial Sequence: Synthetic oligonucleotide
auaguuacuucacugucgg

SEQ ID NO: 963201 - RNA, 19 nt, Artificial Sequence
  Description of Artificial Sequence: Synthetic oligonucleotide
ugugauauucauuauuccu

SEQ ID NO: 963202 - RNA, 19 nt, Artificial Sequence
  Description of Artificial Sequence: Synthetic oligonucleotide
uuugcaauaauugggacac

SEQ ID NO: 963203 - RNA, 19 nt, Artificial Sequence
  Description of Artificial Sequence: Synthetic oligonucleotide
aaaacagugagcuccugcu

SEQ ID NO: 963204 - RNA, 19 nt, Artificial Sequence
  Description of Artificial Sequence: Synthetic oligonucleotide
aauaugcugcauuguuacc

SEQ ID NO: 963205 - RNA, 19 nt, Artificial Sequence
  Description of Artificial Sequence: Synthetic oligonucleotide
auaugcugcauuguuaccc

SEQ ID NO: 963206 - RNA, 19 nt, Artificial Sequence
  Description of Artificial Sequence: Synthetic oligonucleotide
uuaacagucuuaauccagc

SEQ ID NO: 963207 - RNA, 19 nt, Artificial Sequence
  Description of Artificial Sequence: Synthetic oligonucleotide
uguaucuugguaaagugau

SEQ ID NO: 963208 - RNA, 19 nt, Artificial Sequence
  Description of Artificial Sequence: Synthetic oligonucleotide
aguauagcuuauuuaugac

SEQ ID NO: 963209 - RNA, 19 nt, Artificial Sequence
  Description of Artificial Sequence: Synthetic oligonucleotide
auuaagggcauuguaaguc

SEQ ID NO: 963210 - RNA, 19 nt, Artificial Sequence
  Description of Artificial Sequence: Synthetic oligonucleotide
aagcccuucacuuuugaug

SEQ ID NO: 963211 - RNA, 19 nt, Artificial Sequence
  Description of Artificial Sequence: Synthetic oligonucleotide
aacagauugcaaauuacag

SEQ ID NO: 963212 - RNA, 19 nt, Artificial Sequence
  Description of Artificial Sequence: Synthetic oligonucleotide
ugauuagucacagucaugu

SEQ ID NO: 963213 - RNA, 19 nt, Artificial Sequence
  Description of Artificial Sequence: Synthetic oligonucleotide
auuuugauuaaaugaauau

SEQ ID NO: 963214 - RNA, 19 nt, Artificial Sequence
  Description of Artificial Sequence: Synthetic oligonucleotide
uuagucuuaacuccuuucu

SEQ ID NO: 963215 - RNA, 19 nt, Artificial Sequence
  Description of Artificial Sequence: Synthetic oligonucleotide
caacauuagucuuaacucc

SEQ ID NO: 963216 - RNA, 19 nt, Artificial Sequence
  Description of Artificial Sequence: Synthetic oligonucleotide
aucaauuuuauagggaaag

SEQ ID NO: 963217 - RNA, 19 nt, Artificial Sequence
  Description of Artificial Sequence: Synthetic oligonucleotide
auuguuacccagugugacc

SEQ ID NO: 963218 - RNA, 19 nt, Artificial Sequence
  Description of Artificial Sequence: Synthetic oligonucleotide
aacaucaacggcuauugau

SEQ ID NO: 963219 - RNA, 19 nt, Artificial Sequence
  Description of Artificial Sequence: Synthetic oligonucleotide
ucugcuuaaacauaacuuu

SEQ ID NO: 963220 - RNA, 19 nt, Artificial Sequence
  Description of Artificial Sequence: Synthetic oligonucleotide
uuaagaaccuuuugaaggu

SEQ ID NO: 963221 - RNA, 19 nt, Artificial Sequence
  Description of Artificial Sequence: Synthetic oligonucleotide
uacaccuggaucauuuucc

SEQ ID NO: 963222 - RNA, 19 nt, Artificial Sequence
  Description of Artificial Sequence: Synthetic oligonucleotide
gauauuagcaaaccugauc

SEQ ID NO: 963223 - RNA, 19 nt, Artificial Sequence
  Description of Artificial Sequence: Synthetic oligonucleotide
auuagucuuaacuccuuuc

SEQ ID NO: 963224 - RNA, 19 nt, Artificial Sequence
  Description of Artificial Sequence: Synthetic oligonucleotide
uuauaauuaguuucauagu

SEQ ID NO: 963225 - RNA, 19 nt, Artificial Sequence
  Description of Artificial Sequence: Synthetic oligonucleotide
cuguauacacaguagcagg

SEQ ID NO: 963226 - RNA, 19 nt, Artificial Sequence
  Description of Artificial Sequence: Synthetic oligonucleotide
cauuauuccuaaauagcag

SEQ ID NO: 963227 - RNA, 19 nt, Artificial Sequence
  Description of Artificial Sequence: Synthetic oligonucleotide
gacuuuacaacugaccagc

SEQ ID NO: 963228 - RNA, 19 nt, Artificial Sequence
  Description of Artificial Sequence: Synthetic oligonucleotide
ucuuuucccuaauaauagg

SEQ ID NO: 963229 - RNA, 19 nt, Artificial Sequence
  Description of Artificial Sequence: Synthetic oligonucleotide
agucauguuaguuaacagu

SEQ ID NO: 963230 - RNA, 19 nt, Artificial Sequence
  Description of Artificial Sequence: Synthetic oligonucleotide
uuuaacacauacuccagau

SEQ ID NO: 963231 - RNA, 19 nt, Artificial Sequence
  Description of Artificial Sequence: Synthetic oligonucleotide
cuugguaaagugauuuccc

SEQ ID NO: 963232 - RNA, 19 nt, Artificial Sequence
  Description of Artificial Sequence: Synthetic oligonucleotide
auuuaaaauggcucagucu

SEQ ID NO: 963233 - RNA, 19 nt, Artificial Sequence
  Description of Artificial Sequence: Synthetic oligonucleotide
uaauaauagggucucucgu

SEQ ID NO: 963234 - RNA, 19 nt, Artificial Sequence
  Description of Artificial Sequence: Synthetic oligonucleotide
aauucaguauuguuuggaa

SEQ ID NO: 963235 - RNA, 19 nt, Artificial Sequence
  Description of Artificial Sequence: Synthetic oligonucleotide
aucgucacacacuugacug

SEQ ID NO: 963236 - RNA, 19 nt, Artificial Sequence
  Description of Artificial Sequence: Synthetic oligonucleotide
aagcaaauuguucccacgu

SEQ ID NO: 963237 - RNA, 19 nt, Artificial Sequence
  Description of Artificial Sequence: Synthetic oligonucleotide
acagauugcaaauuacagu

SEQ ID NO: 963238 - RNA, 19 nt, Artificial Sequence
  Description of Artificial Sequence: Synthetic oligonucleotide
aaaucaauacaaaaguaua

SEQ ID NO: 963239 - RNA, 19 nt, Artificial Sequence
  Description of Artificial Sequence: Synthetic oligonucleotide
uucccuaauaauagggucu

SEQ ID NO: 963240 - RNA, 19 nt, Artificial Sequence
  Description of Artificial Sequence: Synthetic oligonucleotide
aauugagaaaugcugucuu

SEQ ID NO: 963241 - RNA, 19 nt, Artificial Sequence
  Description of Artificial Sequence: Synthetic oligonucleotide
gaagcaaauuguucccacg

SEQ ID NO: 963242 - RNA, 19 nt, Artificial Sequence
  Description of Artificial Sequence: Synthetic oligonucleotide
ugacauauaguuacuucac

SEQ ID NO: 963243 - RNA, 19 nt, Artificial Sequence
  Description of Artificial Sequence: Synthetic oligonucleotide
acguauggcauuuugauua

SEQ ID NO: 963244 - RNA, 19 nt, Artificial Sequence
  Description of Artificial Sequence: Synthetic oligonucleotide
ucuugaaaagggcuuuagc

SEQ ID NO: 963245 - RNA, 19 nt, Artificial Sequence
  Description of Artificial Sequence: Synthetic oligonucleotide
auuccuaaauagcagcuca

SEQ ID NO: 963246 - RNA, 19 nt, Artificial Sequence
  Description of Artificial Sequence: Synthetic oligonucleotide
aaucaauucugacgggacu

SEQ ID NO: 963247 - RNA, 19 nt, Artificial Sequence
  Description of Artificial Sequence: Synthetic oligonucleotide
uuauauuuucaaacagggu

SEQ ID NO: 963248 - RNA, 19 nt, Artificial Sequence
  Description of Artificial Sequence: Synthetic oligonucleotide
caaaucaugguaucgucac

SEQ ID NO: 963249 - RNA, 19 nt, Artificial Sequence
  Description of Artificial Sequence: Synthetic oligonucleotide
uuguaucuugguaaaguga

SEQ ID NO: 963250 - RNA, 19 nt, Artificial Sequence
  Description of Artificial Sequence: Synthetic oligonucleotide
uaugacauauaguuacuuc

SEQ ID NO: 963251 - RNA, 19 nt, Artificial Sequence
  Description of Artificial Sequence: Synthetic oligonucleotide
uuuggaacagauugcaaau

SEQ ID NO: 963252 - RNA, 19 nt, Artificial Sequence
  Description of Artificial Sequence: Synthetic oligonucleotide
uuuauagggaaaguugaac

SEQ ID NO: 963253 - RNA, 19 nt, Artificial Sequence
  Description of Artificial Sequence: Synthetic oligonucleotide
auaggaaagcaaguguugg

SEQ ID NO: 963254 - RNA, 19 nt, Artificial Sequence
  Description of Artificial Sequence: Synthetic oligonucleotide
gauguaaguuuuaaucuug

SEQ ID NO: 963255 - RNA, 19 nt, Artificial Sequence
  Description of Artificial Sequence: Synthetic oligonucleotide
auauguauuuggcauauuu

SEQ ID NO: 963256 - RNA, 19 nt, Artificial Sequence
  Description of Artificial Sequence: Synthetic oligonucleotide
uuuaugacauauaguuacu

SEQ ID NO: 963257 - RNA, 19 nt, Artificial Sequence
  Description of Artificial Sequence: Synthetic oligonucleotide
uauugauaaugugugauau

SEQ ID NO: 963258 - RNA, 19 nt, Artificial Sequence
  Description of Artificial Sequence: Synthetic oligonucleotide
uauugauaaagcacagcuc

SEQ ID NO: 963259 - RNA, 19 nt, Artificial Sequence
  Description of Artificial Sequence: Synthetic oligonucleotide
cuuacugcgauucuuucuc

SEQ ID NO: 963260 - RNA, 19 nt, Artificial Sequence
  Description of Artificial Sequence: Synthetic oligonucleotide
aaaguauagcuuauuuaug

SEQ ID NO: 963261 - RNA, 19 nt, Artificial Sequence
  Description of Artificial Sequence: Synthetic oligonucleotide
guuuagguaaacaauaaaa

SEQ ID NO: 963262 - RNA, 19 nt, Artificial Sequence
  Description of Artificial Sequence: Synthetic oligonucleotide
uccaagcgacaaaucaugg

SEQ ID NO: 963263 - RNA, 19 nt, Artificial Sequence
  Description of Artificial Sequence: Synthetic oligonucleotide
aaagaauaggaaagcaagu

SEQ ID NO: 963264 - RNA, 19 nt, Artificial Sequence
  Description of Artificial Sequence: Synthetic oligonucleotide
ugauaaugugugauauuca

SEQ ID NO: 963265 - RNA, 19 nt, Artificial Sequence
  Description of Artificial Sequence: Synthetic oligonucleotide
uuggcauauuuaaaauggc

SEQ ID NO: 963266 - RNA, 19 nt, Artificial Sequence
  Description of Artificial Sequence: Synthetic oligonucleotide
agcauaauggaaaccaaag

SEQ ID NO: 963267 - RNA, 19 nt, Artificial Sequence
  Description of Artificial Sequence: Synthetic oligonucleotide
acaaaaguauagcuuauuu

SEQ ID NO: 963268 - RNA, 19 nt, Artificial Sequence
  Description of Artificial Sequence: Synthetic oligonucleotide
uagggaaaguugaacuugc

SEQ ID NO: 963269 - RNA, 19 nt, Artificial Sequence
  Description of Artificial Sequence: Synthetic oligonucleotide
uguugguaaugauuaguca

SEQ ID NO: 963270 - RNA, 19 nt, Artificial Sequence
  Description of Artificial Sequence: Synthetic oligonucleotide
aauucugacgggacuuuac

SEQ ID NO: 963271 - RNA, 19 nt, Artificial Sequence
  Description of Artificial Sequence: Synthetic oligonucleotide
ucugacgggacuuuacaac

SEQ ID NO: 963272 - RNA, 19 nt, Artificial Sequence
  Description of Artificial Sequence: Synthetic oligonucleotide
cacucaaguuauuaagggc

SEQ ID NO: 963273 - RNA, 19 nt, Artificial Sequence
  Description of Artificial Sequence: Synthetic oligonucleotide
ugucgguuuagguaaacaa

SEQ ID NO: 963274 - RNA, 19 nt, Artificial Sequence
  Description of Artificial Sequence: Synthetic oligonucleotide
augauaggguccugguccc

SEQ ID NO: 963275 - RNA, 19 nt, Artificial Sequence
  Description of Artificial Sequence: Synthetic oligonucleotide
ugaguaaaagggucauuug

SEQ ID NO: 963276 - RNA, 19 nt, Artificial Sequence
  Description of Artificial Sequence: Synthetic oligonucleotide
ugaauugagaaaugcuguc

SEQ ID NO: 963277 - RNA, 19 nt, Artificial Sequence
  Description of Artificial Sequence: Synthetic oligonucleotide
uucacguauggcauuuuga

SEQ ID NO: 963278 - RNA, 19 nt, Artificial Sequence
  Description of Artificial Sequence: Synthetic oligonucleotide
ugauguaaguuuuaaucuu

SEQ ID NO: 963279 - RNA, 19 nt, Artificial Sequence
  Description of Artificial Sequence: Synthetic oligonucleotide
ugcuuaaacauaacuuuau

SEQ ID NO: 963280 - RNA, 19 nt, Artificial Sequence
  Description of Artificial Sequence: Synthetic oligonucleotide
aacauuagucuuaacuccu

SEQ ID NO: 963281 - RNA, 19 nt, Artificial Sequence
  Description of Artificial Sequence: Synthetic oligonucleotide
aggguaagaauguucagaa

SEQ ID NO: 963282 - RNA, 19 nt, Artificial Sequence
  Description of Artificial Sequence: Synthetic oligonucleotide
ucaugguaucgucacacac

SEQ ID NO: 963283 - RNA, 19 nt, Artificial Sequence
  Description of Artificial Sequence: Synthetic oligonucleotide
gucauguuaguuaacaguc

SEQ ID NO: 963284 - RNA, 19 nt, Artificial Sequence
  Description of Artificial Sequence: Synthetic oligonucleotide
guauagcuuauuuaugaca

SEQ ID NO: 963285 - RNA, 19 nt, Artificial Sequence
  Description of Artificial Sequence: Synthetic oligonucleotide
ugcaauaauugggacacca

SEQ ID NO: 963286 - RNA, 19 nt, Artificial Sequence
  Description of Artificial Sequence: Synthetic oligonucleotide
uugguaaagugauuuccca

SEQ ID NO: 963287 - RNA, 19 nt, Artificial Sequence
  Description of Artificial Sequence: Synthetic oligonucleotide
uauuaagggcauuguaagu

SEQ ID NO: 963288 - RNA, 19 nt, Artificial Sequence
  Description of Artificial Sequence: Synthetic oligonucleotide
uaucgucacacacuugacu

SEQ ID NO: 963289 - RNA, 19 nt, Artificial Sequence
  Description of Artificial Sequence: Synthetic oligonucleotide
uucagaagaaucucucuau

SEQ ID NO: 963290 - RNA, 19 nt, Artificial Sequence
  Description of Artificial Sequence: Synthetic oligonucleotide
aacggcuauugauaaugug

SEQ ID NO: 963291 - RNA, 19 nt, Artificial Sequence
  Description of Artificial Sequence: Synthetic oligonucleotide
aaugaauaugcugcauugu

SEQ ID NO: 963292 - RNA, 19 nt, Artificial Sequence
  Description of Artificial Sequence: Synthetic oligonucleotide
uauagggaaaguugaacuu

SEQ ID NO: 963293 - RNA, 19 nt, Artificial Sequence
  Description of Artificial Sequence: Synthetic oligonucleotide
uugugcaagcucuaauaug

SEQ ID NO: 963294 - RNA, 19 nt, Artificial Sequence
  Description of Artificial Sequence: Synthetic oligonucleotide
guuuggaacagauugcaaa

SEQ ID NO: 963295 - RNA, 19 nt, Artificial Sequence
  Description of Artificial Sequence: Synthetic oligonucleotide
caaguguugguaaugauua

SEQ ID NO: 963296 - RNA, 19 nt, Artificial Sequence
  Description of Artificial Sequence: Synthetic oligonucleotide
cucaguuuugucaucccac

SEQ ID NO: 963297 - RNA, 19 nt, Artificial Sequence
  Description of Artificial Sequence: Synthetic oligonucleotide
guuaacagucuuaauccag

SEQ ID NO: 963298 - RNA, 19 nt, Artificial Sequence
  Description of Artificial Sequence: Synthetic oligonucleotide
agauguuaagaaccuuuug

SEQ ID NO: 963299 - RNA, 19 nt, Artificial Sequence
  Description of Artificial Sequence: Synthetic oligonucleotide
aaauuucucaccguaggua

SEQ ID NO: 963300 - RNA, 19 nt, Artificial Sequence
  Description of Artificial Sequence: Synthetic oligonucleotide
uguucagaagaaucucucu

SEQ ID NO: 963301 - RNA, 19 nt, Artificial Sequence
  Description of Artificial Sequence: Synthetic oligonucleotide
auagggaaaguugaacuug

SEQ ID NO: 963302 - RNA, 19 nt, Artificial Sequence
  Description of Artificial Sequence: Synthetic oligonucleotide
gucuuaacuccuuucucag

SEQ ID NO: 963303 - RNA, 19 nt, Artificial Sequence
  Description of Artificial Sequence: Synthetic oligonucleotide
agcucaagggaucucuuug

SEQ ID NO: 963304 - RNA, 19 nt, Artificial Sequence
  Description of Artificial Sequence: Synthetic oligonucleotide
ucuuacugcgauucuuucu

SEQ ID NO: 963305 - RNA, 19 nt, Artificial Sequence
  Description of Artificial Sequence: Synthetic oligonucleotide
ugaagcaaauuguucccac

SEQ ID NO: 963306 - RNA, 19 nt, Artificial Sequence
  Description of Artificial Sequence: Synthetic oligonucleotide
aaaucaugguaucgucaca

SEQ ID NO: 963307 - RNA, 19 nt, Artificial Sequence
  Description of Artificial Sequence: Synthetic oligonucleotide
augaauugagaaaugcugu

SEQ ID NO: 963308 - RNA, 19 nt, Artificial Sequence
  Description of Artificial Sequence: Synthetic oligonucleotide
uuagcaaaccugaucccuc

SEQ ID NO: 963309 - RNA, 19 nt, Artificial Sequence
  Description of Artificial Sequence: Synthetic oligonucleotide
uugaacuugccccugcgua

SEQ ID NO: 963310 - RNA, 19 nt, Artificial Sequence
  Description of Artificial Sequence: Synthetic oligonucleotide
ugcuucgaucuuuacaccu

SEQ ID NO: 963311 - RNA, 19 nt, Artificial Sequence
  Description of Artificial Sequence: Synthetic oligonucleotide
agcgacaaaucaugguauc

SEQ ID NO: 963312 - RNA, 19 nt, Artificial Sequence
  Description of Artificial Sequence: Synthetic oligonucleotide
cagugaaguuuauaauuag

SEQ ID NO: 963313 - RNA, 19 nt, Artificial Sequence
  Description of Artificial Sequence: Synthetic oligonucleotide
gacaaaucaugguaucguc

SEQ ID NO: 963314 - RNA, 19 nt, Artificial Sequence
  Description of Artificial Sequence: Synthetic oligonucleotide
ugguaaugauuagucacag

SEQ ID NO: 963315 - RNA, 19 nt, Artificial Sequence
  Description of Artificial Sequence: Synthetic oligonucleotide
gguaucgucacacacuuga

SEQ ID NO: 963316 - RNA, 19 nt, Artificial Sequence
  Description of Artificial Sequence: Synthetic oligonucleotide
caaaucaauacaaaaguau

SEQ ID NO: 963317 - RNA, 19 nt, Artificial Sequence
  Description of Artificial Sequence: Synthetic oligonucleotide
ugaugcaagcccuucacuu

SEQ ID NO: 963318 - RNA, 19 nt, Artificial Sequence
  Description of Artificial Sequence: Synthetic oligonucleotide
ucaauuuuauagggaaagu

SEQ ID NO: 963319 - RNA, 19 nt, Artificial Sequence
  Description of Artificial Sequence: Synthetic oligonucleotide
aauuguucccacgugcaaa

SEQ ID NO: 963320 - RNA, 19 nt, Artificial Sequence
  Description of Artificial Sequence: Synthetic oligonucleotide
uuuaucaguuuugcaauaa

SEQ ID NO: 963321 - RNA, 19 nt, Artificial Sequence
  Description of Artificial Sequence: Synthetic oligonucleotide
aguuauuaagggcauugua

SEQ ID NO: 963322 - RNA, 19 nt, Artificial Sequence
  Description of Artificial Sequence: Synthetic oligonucleotide
auuagcaaaccugaucccu

SEQ ID NO: 963323 - RNA, 19 nt, Artificial Sequence
  Description of Artificial Sequence: Synthetic oligonucleotide
gaugaccaugccugcagcc

SEQ ID NO: 963324 - RNA, 19 nt, Artificial Sequence
  Description of Artificial Sequence: Synthetic oligonucleotide
ugaacuugccccugcguac

SEQ ID NO: 963325 - RNA, 19 nt, Artificial Sequence
  Description of Artificial Sequence: Synthetic oligonucleotide
auucacguauggcauuuug

SEQ ID NO: 963326 - RNA, 19 nt, Artificial Sequence
  Description of Artificial Sequence: Synthetic oligonucleotide
gaguaaaagggucauuugu

SEQ ID NO: 963327 - RNA, 19 nt, Artificial Sequence
  Description of Artificial Sequence: Synthetic oligonucleotide
auaauagggucucucguuu

SEQ ID NO: 963328 - RNA, 19 nt, Artificial Sequence
  Description of Artificial Sequence: Synthetic oligonucleotide
acugcgauucuuucucuug

SEQ ID NO: 963329 - RNA, 19 nt, Artificial Sequence
  Description of Artificial Sequence: Synthetic oligonucleotide
accaaggcuacuuccugag

SEQ ID NO: 963330 - RNA, 19 nt, Artificial Sequence
  Description of Artificial Sequence: Synthetic oligonucleotide
accguagguagcaagauga

SEQ ID NO: 963331 - RNA, 19 nt, Artificial Sequence
  Description of Artificial Sequence: Synthetic oligonucleotide
auuaaagagggaaaucaau

SEQ ID NO: 963332 - RNA, 19 nt, Artificial Sequence
  Description of Artificial Sequence: Synthetic oligonucleotide
cuuaauccagccaucugca

SEQ ID NO: 963333 - RNA, 19 nt, Artificial Sequence
  Description of Artificial Sequence: Synthetic oligonucleotide
auucugacgggacuuuaca

SEQ ID NO: 963334 - RNA, 19 nt, Artificial Sequence
  Description of Artificial Sequence: Synthetic oligonucleotide
cugcgauucuuucucuugg

SEQ ID NO: 963335 - RNA, 19 nt, Artificial Sequence
  Description of Artificial Sequence: Synthetic oligonucleotide
aaguuauuaagggcauugu

SEQ ID NO: 963336 - RNA, 19 nt, Artificial Sequence
  Description of Artificial Sequence: Synthetic oligonucleotide
acuugacugauguaaguuu

SEQ ID NO: 963337 - RNA, 19 nt, Artificial Sequence
  Description of Artificial Sequence: Synthetic oligonucleotide
agucuuuucccuaauaaua

SEQ ID NO: 963338 - RNA, 19 nt, Artificial Sequence
  Description of Artificial Sequence: Synthetic oligonucleotide
gggacuuuacaacugacca

SEQ ID NO: 963339 - RNA, 19 nt, Artificial Sequence
  Description of Artificial Sequence: Synthetic oligonucleotide
agcaaauuguucccacgug

SEQ ID NO: 963340 - RNA, 19 nt, Artificial Sequence
  Description of Artificial Sequence: Synthetic oligonucleotide
ucgaucuuuacaccuggau

SEQ ID NO: 963341 - RNA, 19 nt, Artificial Sequence
  Description of Artificial Sequence: Synthetic oligonucleotide
aguauuguuuggaacagau

SEQ ID NO: 963342 - RNA, 19 nt, Artificial Sequence
  Description of Artificial Sequence: Synthetic oligonucleotide
cucuaauauguauuuggca

SEQ ID NO: 963343 - RNA, 19 nt, Artificial Sequence
  Description of Artificial Sequence: Synthetic oligonucleotide
agaugaauugagaaaugcu

SEQ ID NO: 963344 - RNA, 19 nt, Artificial Sequence
  Description of Artificial Sequence: Synthetic oligonucleotide
aguguugguaaugauuagu

SEQ ID NO: 963345 - RNA, 19 nt, Artificial Sequence
  Description of Artificial Sequence: Synthetic oligonucleotide
aagcaaguguugguaauga

SEQ ID NO: 963346 - RNA, 19 nt, Artificial Sequence
  Description of Artificial Sequence: Synthetic oligonucleotide
agugaaguuuauaauuagu

SEQ ID NO: 963347 - RNA, 19 nt, Artificial Sequence
  Description of Artificial Sequence: Synthetic oligonucleotide
guuuugcaauaauugggac

SEQ ID NO: 963348 - RNA, 19 nt, Artificial Sequence
  Description of Artificial Sequence: Synthetic oligonucleotide
ugcaagcucuaauauguau

SEQ ID NO: 963349 - RNA, 19 nt, Artificial Sequence
  Description of Artificial Sequence: Synthetic oligonucleotide
cacacauccagcuucgcga

SEQ ID NO: 963350 - RNA, 19 nt, Artificial Sequence
  Description of Artificial Sequence: Synthetic oligonucleotide
guacaggccaugcuguggc

SEQ ID NO: 963351 - RNA, 19 nt, Artificial Sequence
  Description of Artificial Sequence: Synthetic oligonucleotide
ugcguacaggccaugcugu

SEQ ID NO: 963352 - RNA, 19 nt, Artificial Sequence
  Description of Artificial Sequence: Synthetic oligonucleotide
ucucaccguagguagcaag

SEQ ID NO: 963353 - RNA, 19 nt, Artificial Sequence
  Description of Artificial Sequence: Synthetic oligonucleotide
uuucucaccguagguagca

SEQ ID NO: 963354 - RNA, 19 nt, Artificial Sequence
  Description of Artificial Sequence: Synthetic oligonucleotide
uacccagugugaccaaggc

SEQ ID NO: 963355 - RNA, 19 nt, Artificial Sequence
  Description of Artificial Sequence: Synthetic oligonucleotide
caaauuguucccacgugca

SEQ ID NO: 963356 - RNA, 19 nt, Artificial Sequence
  Description of Artificial Sequence: Synthetic oligonucleotide
cuuaugauuugcuaacgcu

SEQ ID NO: 963357 - RNA, 19 nt, Artificial Sequence
  Description of Artificial Sequence: Synthetic oligonucleotide
ugauuugcuaacgcucuga

SEQ ID NO: 963358 - RNA, 19 nt, Artificial Sequence
  Description of Artificial Sequence: Synthetic oligonucleotide
caagcgacaaaucauggua

SEQ ID NO: 963359 - RNA, 19 nt, Artificial Sequence
  Description of Artificial Sequence: Synthetic oligonucleotide
ugacgggacuuuacaacug

SEQ ID NO: 963360 - RNA, 19 nt, Artificial Sequence
  Description of Artificial Sequence: Synthetic oligonucleotide
ugcgauucuuucucuuggc

SEQ ID NO: 963361 - RNA, 19 nt, Artificial Sequence
  Description of Artificial Sequence: Synthetic oligonucleotide
uguuuggaacagauugcaa

SEQ ID NO: 963362 - RNA, 19 nt, Artificial Sequence
  Description of Artificial Sequence: Synthetic oligonucleotide
aaauagcagcucaagggau

SEQ ID NO: 963363 - RNA, 19 nt, Artificial Sequence
  Description of Artificial Sequence: Synthetic oligonucleotide
gacaccacccaauucacgu

SEQ ID NO: 963364 - RNA, 19 nt, Artificial Sequence
  Description of Artificial Sequence: Synthetic oligonucleotide
acggcugaguccaagcgac

SEQ ID NO: 963365 - RNA, 19 nt, Artificial Sequence
  Description of Artificial Sequence: Synthetic oligonucleotide
ugcugaauucuuuccugga

SEQ ID NO: 963366 - RNA, 19 nt, Artificial Sequence
  Description of Artificial Sequence: Synthetic oligonucleotide
cauaguuuguaucuuggua

SEQ ID NO: 963367 - RNA, 19 nt, Artificial Sequence
  Description of Artificial Sequence: Synthetic oligonucleotide
auuucucaccguagguagc

SEQ ID NO: 963368 - RNA, 19 nt, Artificial Sequence
  Description of Artificial Sequence: Synthetic oligonucleotide
ucucaucuuuuccccaggu

SEQ ID NO: 963369 - RNA, 19 nt, Artificial Sequence
  Description of Artificial Sequence: Synthetic oligonucleotide
uuacaacugaccagcucuc

SEQ ID NO: 963370 - RNA, 19 nt, Artificial Sequence
  Description of Artificial Sequence: Synthetic oligonucleotide
gaacuuucacuuugaccac

SEQ ID NO: 963371 - RNA, 19 nt, Artificial Sequence
  Description of Artificial Sequence: Synthetic oligonucleotide
acaaaucaugguaucguca

SEQ ID NO: 963372 - RNA, 19 nt, Artificial Sequence
  Description of Artificial Sequence: Synthetic oligonucleotide
uucugacgggacuuuacaa

SEQ ID NO: 963373 - RNA, 19 nt, Artificial Sequence
  Description of Artificial Sequence: Synthetic oligonucleotide
uuccuaaauagcagcucaa

SEQ ID NO: 963374 - RNA, 19 nt, Artificial Sequence
  Description of Artificial Sequence: Synthetic oligonucleotide
agcuucgcgagugcggccc

SEQ ID NO: 963375 - RNA, 19 nt, Artificial Sequence
  Description of Artificial Sequence: Synthetic oligonucleotide
cuaauauguauuuggcaua

SEQ ID NO: 963376 - RNA, 19 nt, Artificial Sequence
  Description of Artificial Sequence: Synthetic oligonucleotide
uuaugacauauaguuacuu

SEQ ID NO: 963377 - RNA, 19 nt, Artificial Sequence
  Description of Artificial Sequence: Synthetic oligonucleotide
aacccgaugauaggguccu

SEQ ID NO: 963378 - RNA, 19 nt, Artificial Sequence
  Description of Artificial Sequence: Synthetic oligonucleotide
acacuugacugauguaagu

SEQ ID NO: 963379 - RNA, 19 nt, Artificial Sequence
  Description of Artificial Sequence: Synthetic oligonucleotide
ugaccaugccugcagccac

SEQ ID NO: 963380 - RNA, 19 nt, Artificial Sequence
  Description of Artificial Sequence: Synthetic oligonucleotide
cugcguacaggccaugcug

SEQ ID NO: 963381 - RNA, 19 nt, Artificial Sequence
  Description of Artificial Sequence: Synthetic oligonucleotide
guccaagcgacaaaucaug

SEQ ID NO: 963382 - RNA, 19 nt, Artificial Sequence
  Description of Artificial Sequence: Synthetic oligonucleotide
agucuuaauccagccaucu

SEQ ID NO: 963383 - RNA, 19 nt, Artificial Sequence
  Description of Artificial Sequence: Synthetic oligonucleotide
caaacccgaugauaggguc

SEQ ID NO: 963384 - RNA, 19 nt, Artificial Sequence
  Description of Artificial Sequence: Synthetic oligonucleotide
cuuuacaacugaccagcuc

SEQ ID NO: 963385 - RNA, 19 nt, Artificial Sequence
  Description of Artificial Sequence: Synthetic oligonucleotide
uguucccacgugcaaacuu

SEQ ID NO: 963386 - RNA, 19 nt, Artificial Sequence
  Description of Artificial Sequence: Synthetic oligonucleotide
aguuuguaucuugguaaag

SEQ ID NO: 963387 - RNA, 19 nt, Artificial Sequence
  Description of Artificial Sequence: Synthetic oligonucleotide
aagcgacaaaucaugguau

SEQ ID NO: 963388 - RNA, 19 nt, Artificial Sequence
  Description of Artificial Sequence: Synthetic oligonucleotide
uuaauccagccaucugcac

SEQ ID NO: 963389 - RNA, 19 nt, Artificial Sequence
  Description of Artificial Sequence: Synthetic oligonucleotide
ucgucacacacuugacuga

SEQ ID NO: 963390 - RNA, 19 nt, Artificial Sequence
  Description of Artificial Sequence: Synthetic oligonucleotide
acaucaacggcuauugaua

SEQ ID NO: 963391 - RNA, 19 nt, Artificial Sequence
  Description of Artificial Sequence: Synthetic oligonucleotide
uucgaucuuuacaccugga

SEQ ID NO: 963392 - RNA, 19 nt, Artificial Sequence
  Description of Artificial Sequence: Synthetic oligonucleotide
auugggacaccacccaauu

SEQ ID NO: 963393 - RNA, 19 nt, Artificial Sequence
  Description of Artificial Sequence: Synthetic oligonucleotide
gacgggacuuuacaacuga

SEQ ID NO: 963394 - RNA, 19 nt, Artificial Sequence
  Description of Artificial Sequence: Synthetic oligonucleotide
aagugauuucccaggaaua

SEQ ID NO: 963395 - RNA, 19 nt, Artificial Sequence
  Description of Artificial Sequence: Synthetic oligonucleotide
gauaggguccuggucccag

SEQ ID NO: 963396 - RNA, 19 nt, Artificial Sequence
  Description of Artificial Sequence: Synthetic oligonucleotide
gugugcuucgaucuuuaca

SEQ ID NO: 963397 - RNA, 19 nt, Artificial Sequence
  Description of Artificial Sequence: Synthetic oligonucleotide
ugaguccaagcgacaaauc

SEQ ID NO: 963398 - RNA, 19 nt, Artificial Sequence
  Description of Artificial Sequence: Synthetic oligonucleotide
cacaagcauaauggaaacc

SEQ ID NO: 963399 - RNA, 19 nt, Artificial Sequence
  Description of Artificial Sequence: Synthetic oligonucleotide
aucaugguaucgucacaca

SEQ ID NO: 963400 - RNA, 19 nt, Artificial Sequence
  Description of Artificial Sequence: Synthetic oligonucleotide
ccuuaugauuugcuaacgc

SEQ ID NO: 963401 - RNA, 19 nt, Artificial Sequence
  Description of Artificial Sequence: Synthetic oligonucleotide
uaagaaccuuuugaagguc

SEQ ID NO: 963402 - RNA, 19 nt, Artificial Sequence
  Description of Artificial Sequence: Synthetic oligonucleotide
aucaauucugacgggacuu

SEQ ID NO: 963403 - RNA, 19 nt, Artificial Sequence
  Description of Artificial Sequence: Synthetic oligonucleotide
ugaccagcucucuugucau

SEQ ID NO: 963404 - RNA, 19 nt, Artificial Sequence
  Description of Artificial Sequence: Synthetic oligonucleotide
uggcuggauuuucagugaa

SEQ ID NO: 963405 - RNA, 19 nt, Artificial Sequence
  Description of Artificial Sequence: Synthetic oligonucleotide
uuuacaccuggaucauuuu

SEQ ID NO: 963406 - RNA, 19 nt, Artificial Sequence
  Description of Artificial Sequence: Synthetic oligonucleotide
caucaacggcuauugauaa

SEQ ID NO: 963407 - RNA, 19 nt, Artificial Sequence
  Description of Artificial Sequence: Synthetic oligonucleotide
ugcaagcccuucacuuuug

SEQ ID NO: 963408 - RNA, 19 nt, Artificial Sequence
  Description of Artificial Sequence: Synthetic oligonucleotide
aguccaagcgacaaaucau

SEQ ID NO: 963409 - RNA, 19 nt, Artificial Sequence
  Description of Artificial Sequence: Synthetic oligonucleotide
agcagcucaagggaucucu

SEQ ID NO: 963410 - RNA, 19 nt, Artificial Sequence
  Description of Artificial Sequence: Synthetic oligonucleotide
caagauguuaagaaccuuu

SEQ ID NO: 963411 - RNA, 19 nt, Artificial Sequence
  Description of Artificial Sequence: Synthetic oligonucleotide
gguuuagguaaacaauaaa

SEQ ID NO: 963412 - RNA, 19 nt, Artificial Sequence
  Description of Artificial Sequence: Synthetic oligonucleotide
auagcuuauuuaugacaua

SEQ ID NO: 963413 - RNA, 19 nt, Artificial Sequence
  Description of Artificial Sequence: Synthetic oligonucleotide
cacgugcaaacuuaauuaa

SEQ ID NO: 963414 - RNA, 19 nt, Artificial Sequence
  Description of Artificial Sequence: Synthetic oligonucleotide
caggguaagaauguucaga

SEQ ID NO: 963415 - RNA, 19 nt, Artificial Sequence
  Description of Artificial Sequence: Synthetic oligonucleotide
caugguaucgucacacacu

SEQ ID NO: 963416 - RNA, 19 nt, Artificial Sequence
  Description of Artificial Sequence: Synthetic oligonucleotide
uaauagggucucucguuuu

SEQ ID NO: 963417 - RNA, 19 nt, Artificial Sequence
  Description of Artificial Sequence: Synthetic oligonucleotide
gcgacaaaucaugguaucg

SEQ ID NO: 963418 - RNA, 19 nt, Artificial Sequence
  Description of Artificial Sequence: Synthetic oligonucleotide
ucucuugucauggcuggau

SEQ ID NO: 963419 - RNA, 19 nt, Artificial Sequence
  Description of Artificial Sequence: Synthetic oligonucleotide
acugucgguuuagguaaac

SEQ ID NO: 963420 - RNA, 19 nt, Artificial Sequence
  Description of Artificial Sequence: Synthetic oligonucleotide
cacaccaacauuagucuua

SEQ ID NO: 963421 - RNA, 19 nt, Artificial Sequence
  Description of Artificial Sequence: Synthetic oligonucleotide
guuacccagugugaccaag

SEQ ID NO: 963422 - RNA, 19 nt, Artificial Sequence
  Description of Artificial Sequence: Synthetic oligonucleotide
uagcccuagcgccacuccu

SEQ ID NO: 963423 - RNA, 19 nt, Artificial Sequence
  Description of Artificial Sequence: Synthetic oligonucleotide
agcaaguguugguaaugau

SEQ ID NO: 963424 - RNA, 19 nt, Artificial Sequence
  Description of Artificial Sequence: Synthetic oligonucleotide
cacccaauucacguauggc

SEQ ID NO: 963425 - RNA, 19 nt, Artificial Sequence
  Description of Artificial Sequence: Synthetic oligonucleotide
uuggaacagauugcaaauu

SEQ ID NO: 963426 - RNA, 19 nt, Artificial Sequence
  Description of Artificial Sequence: Synthetic oligonucleotide
ucuuuuccccaggucaguc

SEQ ID NO: 963427 - RNA, 19 nt, Artificial Sequence
  Description of Artificial Sequence: Synthetic oligonucleotide
ugucuuugugcaagcucua

SEQ ID NO: 963428 - RNA, 19 nt, Artificial Sequence
  Description of Artificial Sequence: Synthetic oligonucleotide
aggggcacucagaauauca

SEQ ID NO: 963429 - RNA, 19 nt, Artificial Sequence
  Description of Artificial Sequence: Synthetic oligonucleotide
ccagagauauuagcaaacc

SEQ ID NO: 963430 - RNA, 19 nt, Artificial Sequence
  Description of Artificial Sequence: Synthetic oligonucleotide
caccguagguagcaagaug

SEQ ID NO: 963431 - RNA, 19 nt, Artificial Sequence
  Description of Artificial Sequence: Synthetic oligonucleotide
uuacaucagccuugggcuu

SEQ ID NO: 963432 - RNA, 19 nt, Artificial Sequence
  Description of Artificial Sequence: Synthetic oligonucleotide
caucugcacggcugagucc

SEQ ID NO: 963433 - RNA, 19 nt, Artificial Sequence
  Description of Artificial Sequence: Synthetic oligonucleotide
cuuuacaccuggaucauuu

SEQ ID NO: 963434 - RNA, 19 nt, Artificial Sequence
  Description of Artificial Sequence: Synthetic oligonucleotide
gugcuucgaucuuuacacc

SEQ ID NO: 963435 - RNA, 19 nt, Artificial Sequence
  Description of Artificial Sequence: Synthetic oligonucleotide
cccagagauauuagcaaac

SEQ ID NO: 963436 - RNA, 19 nt, Artificial Sequence
  Description of Artificial Sequence: Synthetic oligonucleotide
acgggacuuuacaacugac

SEQ ID NO: 963437 - RNA, 19 nt, Artificial Sequence
  Description of Artificial Sequence: Synthetic oligonucleotide
agccccgaugaccaugccu

SEQ ID NO: 963438 - RNA, 19 nt, Artificial Sequence
  Description of Artificial Sequence: Synthetic oligonucleotide
cuagcccuagcgccacucc

SEQ ID NO: 963439 - RNA, 19 nt, Artificial Sequence
  Description of Artificial Sequence: Synthetic oligonucleotide
cugacgggacuuuacaacu

SEQ ID NO: 963440 - RNA, 19 nt, Artificial Sequence
  Description of Artificial Sequence: Synthetic oligonucleotide
ucuaggccaccuucacccu

SEQ ID NO: 963441 - RNA, 19 nt, Artificial Sequence
  Description of Artificial Sequence: Synthetic oligonucleotide
augauuagucacagucaug

SEQ ID NO: 963442 - RNA, 19 nt, Artificial Sequence
  Description of Artificial Sequence: Synthetic oligonucleotide
aauauguauuuggcauauu

SEQ ID NO: 963443 - RNA, 19 nt, Artificial Sequence
  Description of Artificial Sequence: Synthetic oligonucleotide
cugcuccuagcccuagcgc

SEQ ID NO: 963444 - RNA, 19 nt, Artificial Sequence
  Description of Artificial Sequence: Synthetic oligonucleotide
ugguaucgucacacacuug

SEQ ID NO: 963445 - RNA, 19 nt, Artificial Sequence
  Description of Artificial Sequence: Synthetic oligonucleotide
uacaacugaccagcucucu

SEQ ID NO: 963446 - RNA, 19 nt, Artificial Sequence
  Description of Artificial Sequence: Synthetic oligonucleotide
agauauuagcaaaccugau

SEQ ID NO: 963447 - RNA, 19 nt, Artificial Sequence
  Description of Artificial Sequence: Synthetic oligonucleotide
ccuaauaauagggucucuc

SEQ ID NO: 963448 - RNA, 19 nt, Artificial Sequence
  Description of Artificial Sequence: Synthetic oligonucleotide
ucaauucugacgggacuuu

SEQ ID NO: 963449 - RNA, 19 nt, Artificial Sequence
  Description of Artificial Sequence: Synthetic oligonucleotide
ucaaguuauuaagggcauu

SEQ ID NO: 963450 - RNA, 19 nt, Artificial Sequence
  Description of Artificial Sequence: Synthetic oligonucleotide
guuacuucacugucgguuu

SEQ ID NO: 963451 - RNA, 19 nt, Artificial Sequence
  Description of Artificial Sequence: Synthetic oligonucleotide
gcacggcugaguccaagcg

SEQ ID NO: 963452 - RNA, 19 nt, Artificial Sequence
  Description of Artificial Sequence: Synthetic oligonucleotide
acaguuugguuaauacuuu

SEQ ID NO: 963453 - RNA, 19 nt, Artificial Sequence
  Description of Artificial Sequence: Synthetic oligonucleotide
ugcggcccaugguacaggu

SEQ ID NO: 963454 - RNA, 19 nt, Artificial Sequence
  Description of Artificial Sequence: Synthetic oligonucleotide
gaacuugccccugcguaca

SEQ ID NO: 963455 - RNA, 19 nt, Artificial Sequence
  Description of Artificial Sequence: Synthetic oligonucleotide
cagagauauuagcaaaccu

SEQ ID NO: 963456 - RNA, 19 nt, Artificial Sequence
  Description of Artificial Sequence: Synthetic oligonucleotide
uaguuacuucacugucggu

SEQ ID NO: 963457 - RNA, 19 nt, Artificial Sequence
  Description of Artificial Sequence: Synthetic oligonucleotide
cugaguaaaagggucauuu

SEQ ID NO: 963458 - RNA, 19 nt, Artificial Sequence
  Description of Artificial Sequence: Synthetic oligonucleotide
cuaucccauucuuuauuaa

SEQ ID NO: 963459 - RNA, 19 nt, Artificial Sequence
  Description of Artificial Sequence: Synthetic oligonucleotide
auguuaguuaacagucuua

SEQ ID NO: 963460 - RNA, 19 nt, Artificial Sequence
  Description of Artificial Sequence: Synthetic oligonucleotide
acgugcaaacuuaauuaau

SEQ ID NO: 963461 - RNA, 19 nt, Artificial Sequence
  Description of Artificial Sequence: Synthetic oligonucleotide
guaucgucacacacuugac

SEQ ID NO: 963462 - RNA, 19 nt, Artificial Sequence
  Description of Artificial Sequence: Synthetic oligonucleotide
gccccgaugaccaugccug

SEQ ID NO: 963463 - RNA, 19 nt, Artificial Sequence
  Description of Artificial Sequence: Synthetic oligonucleotide
gggcaaacccgaugauagg

SEQ ID NO: 963464 - RNA, 19 nt, Artificial Sequence
  Description of Artificial Sequence: Synthetic oligonucleotide
cauccagcuucgcgagugc

SEQ ID NO: 963465 - RNA, 19 nt, Artificial Sequence
  Description of Artificial Sequence: Synthetic oligonucleotide
uugcaauaauugggacacc

SEQ ID NO: 963466 - RNA, 19 nt, Artificial Sequence
  Description of Artificial Sequence: Synthetic oligonucleotide
uugccccugcguacaggcc

SEQ ID NO: 963467 - RNA, 19 nt, Artificial Sequence
  Description of Artificial Sequence: Synthetic oligonucleotide
aauucacguauggcauuuu

SEQ ID NO: 963468 - RNA, 19 nt, Artificial Sequence
  Description of Artificial Sequence: Synthetic oligonucleotide
agauugcaaauuacaguuu

SEQ ID NO: 963469 - RNA, 19 nt, Artificial Sequence
  Description of Artificial Sequence: Synthetic oligonucleotide
acuuuacaacugaccagcu

SEQ ID NO: 963470 - RNA, 19 nt, Artificial Sequence
  Description of Artificial Sequence: Synthetic oligonucleotide
agcuucuaggccaccuuca

SEQ ID NO: 963471 - RNA, 19 nt, Artificial Sequence
  Description of Artificial Sequence: Synthetic oligonucleotide
ggcuauugauaauguguga

SEQ ID NO: 963472 - RNA, 19 nt, Artificial Sequence
  Description of Artificial Sequence: Synthetic oligonucleotide
cacagcucuuagauggaaa

SEQ ID NO: 963473 - RNA, 19 nt, Artificial Sequence
  Description of Artificial Sequence: Synthetic oligonucleotide
aucuuuacaccuggaucau

SEQ ID NO: 963474 - RNA, 19 nt, Artificial Sequence
  Description of Artificial Sequence: Synthetic oligonucleotide
agucuaaagccaacaucaa

SEQ ID NO: 963475 - RNA, 19 nt, Artificial Sequence
  Description of Artificial Sequence: Synthetic oligonucleotide
uguuacccagugugaccaa

SEQ ID NO: 963476 - RNA, 19 nt, Artificial Sequence
  Description of Artificial Sequence: Synthetic oligonucleotide
gucgguuuagguaaacaau

SEQ ID NO: 963477 - RNA, 19 nt, Artificial Sequence
  Description of Artificial Sequence: Synthetic oligonucleotide
cacggcugaguccaagcga

SEQ ID NO: 963478 - RNA, 19 nt, Artificial Sequence
  Description of Artificial Sequence: Synthetic oligonucleotide
cgggacuuuacaacugacc

SEQ ID NO: 963479 - RNA, 19 nt, Artificial Sequence
  Description of Artificial Sequence: Synthetic oligonucleotide
gauucugggugugcuucga

SEQ ID NO: 963480 - RNA, 19 nt, Artificial Sequence
  Description of Artificial Sequence: Synthetic oligonucleotide
uuguucucuccaagauguu

SEQ ID NO: 963481 - RNA, 19 nt, Artificial Sequence
  Description of Artificial Sequence: Synthetic oligonucleotide
cucaaguuauuaagggcau

SEQ ID NO: 963482 - RNA, 19 nt, Artificial Sequence
  Description of Artificial Sequence: Synthetic oligonucleotide
uuguucccacgugcaaacu

SEQ ID NO: 963483 - RNA, 19 nt, Artificial Sequence
  Description of Artificial Sequence: Synthetic oligonucleotide
acauuagucuuaacuccuu

SEQ ID NO: 963484 - RNA, 19 nt, Artificial Sequence
  Description of Artificial Sequence: Synthetic oligonucleotide
cuucacugucgguuuaggu

SEQ ID NO: 963485 - RNA, 19 nt, Artificial Sequence
  Description of Artificial Sequence: Synthetic oligonucleotide
cugucgguuuagguaaaca

SEQ ID NO: 963486 - RNA, 19 nt, Artificial Sequence
  Description of Artificial Sequence: Synthetic oligonucleotide
ccagauccuuaugauuugc

SEQ ID NO: 963487 - RNA, 19 nt, Artificial Sequence
  Description of Artificial Sequence: Synthetic oligonucleotide
ugauaggguccugguccca

SEQ ID NO: 963488 - RNA, 19 nt, Artificial Sequence
  Description of Artificial Sequence: Synthetic oligonucleotide
cagauccuuaugauuugcu

SEQ ID NO: 963489 - RNA, 19 nt, Artificial Sequence
  Description of Artificial Sequence: Synthetic oligonucleotide
ggcuggauuuucagugaag

SEQ ID NO: 963490 - RNA, 19 nt, Artificial Sequence
  Description of Artificial Sequence: Synthetic oligonucleotide
uucucaccguagguagcaa

SEQ ID NO: 963491 - RNA, 19 nt, Artificial Sequence
  Description of Artificial Sequence: Synthetic oligonucleotide
caguauuguuuggaacaga

SEQ ID NO: 963492 - RNA, 19 nt, Artificial Sequence
  Description of Artificial Sequence: Synthetic oligonucleotide
gguaaugauuagucacagu

SEQ ID NO: 963493 - RNA, 19 nt, Artificial Sequence
  Description of Artificial Sequence: Synthetic oligonucleotide
ccagugugaccaaggcuac

SEQ ID NO: 963494 - RNA, 19 nt, Artificial Sequence
  Description of Artificial Sequence: Synthetic oligonucleotide
cagcuucgcgagugcggcc

SEQ ID NO: 963495 - RNA, 19 nt, Artificial Sequence
  Description of Artificial Sequence: Synthetic oligonucleotide
ggugugcuucgaucuuuac

SEQ ID NO: 963496 - RNA, 19 nt, Artificial Sequence
  Description of Artificial Sequence: Synthetic oligonucleotide
cauuagucuuaacuccuuu

SEQ ID NO: 963497 - RNA, 19 nt, Artificial Sequence
  Description of Artificial Sequence: Synthetic oligonucleotide
gcgagugcggcccauggua

SEQ ID NO: 963498 - RNA, 19 nt, Artificial Sequence
  Description of Artificial Sequence: Synthetic oligonucleotide
ccacuugcccugcuccuag

SEQ ID NO: 963499 - RNA, 19 nt, Artificial Sequence
  Description of Artificial Sequence: Synthetic oligonucleotide
cacguauggcauuuugauu

SEQ ID NO: 963500 - RNA, 19 nt, Artificial Sequence
  Description of Artificial Sequence: Synthetic oligonucleotide
caguuugguuaauacuuuu

SEQ ID NO: 963501 - RNA, 19 nt, Artificial Sequence
  Description of Artificial Sequence: Synthetic oligonucleotide
cacuugacugauguaaguu

SEQ ID NO: 963502 - RNA, 19 nt, Artificial Sequence
  Description of Artificial Sequence: Synthetic oligonucleotide
gugcggcccaugguacagg

SEQ ID NO: 963503 - RNA, 19 nt, Artificial Sequence
  Description of Artificial Sequence: Synthetic oligonucleotide
gcccuagcgccacuccugc

SEQ ID NO: 963504 - RNA, 19 nt, Artificial Sequence
  Description of Artificial Sequence: Synthetic oligonucleotide
gcaagcucuaauauguauu

SEQ ID NO: 963505 - RNA, 19 nt, Artificial Sequence
  Description of Artificial Sequence: Synthetic oligonucleotide
agccaacaucaacggcuau

SEQ ID NO: 963506 - RNA, 19 nt, Artificial Sequence
  Description of Artificial Sequence: Synthetic oligonucleotide
agguggggugaaucccuua

SEQ ID NO: 963507 - RNA, 19 nt, Artificial Sequence
  Description of Artificial Sequence: Synthetic oligonucleotide
cagggcaaacccgaugaua

SEQ ID NO: 963508 - RNA, 19 nt, Artificial Sequence
  Description of Artificial Sequence: Synthetic oligonucleotide
cuccuagcccuagcgccac

SEQ ID NO: 963509 - RNA, 19 nt, Artificial Sequence
  Description of Artificial Sequence: Synthetic oligonucleotide
uccuagcccuagcgccacu

SEQ ID NO: 963510 - RNA, 19 nt, Artificial Sequence
  Description of Artificial Sequence: Synthetic oligonucleotide
gcguacaggccaugcugug

SEQ ID NO: 963511 - RNA, 19 nt, Artificial Sequence
  Description of Artificial Sequence: Synthetic oligonucleotide
gcugaguccaagcgacaaa

SEQ ID NO: 963512 - RNA, 19 nt, Artificial Sequence
  Description of Artificial Sequence: Synthetic oligonucleotide
caauucacguauggcauuu

SEQ ID NO: 963513 - RNA, 19 nt, Artificial Sequence
  Description of Artificial Sequence: Synthetic oligonucleotide
gcaagcccuucacuuuuga

SEQ ID NO: 963514 - RNA, 19 nt, Artificial Sequence
  Description of Artificial Sequence: Synthetic oligonucleotide
caauucugacgggacuuua

SEQ ID NO: 963515 - RNA, 19 nt, Artificial Sequence
  Description of Artificial Sequence: Synthetic oligonucleotide
cgaugauaggguccugguc

SEQ ID NO: 963516 - RNA, 19 nt, Artificial Sequence
  Description of Artificial Sequence: Synthetic oligonucleotide
ggcugaguccaagcgacaa

SEQ ID NO: 963517 - RNA, 19 nt, Artificial Sequence
  Description of Artificial Sequence: Synthetic oligonucleotide
uagcaggcaccagccccga

SEQ ID NO: 963518 - RNA, 19 nt, Artificial Sequence
  Description of Artificial Sequence: Synthetic oligonucleotide
caaacaggguaagaauguu

SEQ ID NO: 963519 - RNA, 19 nt, Artificial Sequence
  Description of Artificial Sequence: Synthetic oligonucleotide
ugguacagguggggugaau

SEQ ID NO: 963520 - RNA, 19 nt, Artificial Sequence
  Description of Artificial Sequence: Synthetic oligonucleotide
uggagccuuggugcucuua

SEQ ID NO: 963521 - RNA, 19 nt, Artificial Sequence
  Description of Artificial Sequence: Synthetic oligonucleotide
cgagugcggcccaugguac

SEQ ID NO: 963522 - RNA, 19 nt, Artificial Sequence
  Description of Artificial Sequence: Synthetic oligonucleotide
cacugucgguuuagguaaa

SEQ ID NO: 963523 - RNA, 19 nt, Artificial Sequence
  Description of Artificial Sequence: Synthetic oligonucleotide
guaucuugguaaagugauu

SEQ ID NO: 963524 - RNA, 19 nt, Artificial Sequence
  Description of Artificial Sequence: Synthetic oligonucleotide
gugcaagcucuaauaugua

SEQ ID NO: 963525 - RNA, 19 nt, Artificial Sequence
  Description of Artificial Sequence: Synthetic oligonucleotide
ccaagcgacaaaucauggu

SEQ ID NO: 963526 - RNA, 19 nt, Artificial Sequence
  Description of Artificial Sequence: Synthetic oligonucleotide
gcaaacccgaugauagggu

SEQ ID NO: 963527 - RNA, 19 nt, Artificial Sequence
  Description of Artificial Sequence: Synthetic oligonucleotide
gggaucucuuugccacaca

SEQ ID NO: 963528 - RNA, 19 nt, Artificial Sequence
  Description of Artificial Sequence: Synthetic oligonucleotide
cccacgugcaaacuuaauu

SEQ ID NO: 963529 - RNA, 19 nt, Artificial Sequence
  Description of Artificial Sequence: Synthetic oligonucleotide
ccaccuuuacaucagccuu

SEQ ID NO: 963530 - RNA, 19 nt, Artificial Sequence
  Description of Artificial Sequence: Synthetic oligonucleotide
ccccgaugaccaugccugc

SEQ ID NO: 963531 - RNA, 19 nt, Artificial Sequence
  Description of Artificial Sequence: Synthetic oligonucleotide
cagccccgaugaccaugcc

SEQ ID NO: 963532 - RNA, 19 nt, Artificial Sequence
  Description of Artificial Sequence: Synthetic oligonucleotide
cguauggcauuuugauuaa

SEQ ID NO: 963533 - RNA, 19 nt, Artificial Sequence
  Description of Artificial Sequence: Synthetic oligonucleotide
ccuagcgccacuccugccu

SEQ ID NO: 963534 - RNA, 19 nt, Artificial Sequence
  Description of Artificial Sequence: Synthetic oligonucleotide
cccugcguacaggccaugc

SEQ ID NO: 963535 - RNA, 19 nt, Artificial Sequence
  Description of Artificial Sequence: Synthetic oligonucleotide
cagcucaagggaucucuuu

SEQ ID NO: 963536 - RNA, 19 nt, Artificial Sequence
  Description of Artificial Sequence: Synthetic oligonucleotide
ccuagcccuagcgccacuc

SEQ ID NO: 963537 - RNA, 19 nt, Artificial Sequence
  Description of Artificial Sequence: Synthetic oligonucleotide
gcccugauuuucagaauua

SEQ ID NO: 963538 - RNA, 19 nt, Artificial Sequence
  Description of Artificial Sequence: Synthetic oligonucleotide
ccguagguagcaagaugaa

SEQ ID NO: 963539 - RNA, 19 nt, Artificial Sequence
  Description of Artificial Sequence: Synthetic oligonucleotide
acccgaugauaggguccug

SEQ ID NO: 963540 - RNA, 19 nt, Artificial Sequence
  Description of Artificial Sequence: Synthetic oligonucleotide
cgacaaaucaugguaucgu

SEQ ID NO: 963541 - RNA, 19 nt, Artificial Sequence
  Description of Artificial Sequence: Synthetic oligonucleotide
cccuagcgccacuccugcc

SEQ ID NO: 963542 - RNA, 19 nt, Artificial Sequence
  Description of Artificial Sequence: Synthetic oligonucleotide
ccgaugauaggguccuggu

SEQ ID NO: 963543 - RNA, 19 nt, Artificial Sequence
  Description of Artificial Sequence: Synthetic oligonucleotide
ccuuagcuucuaggccacc

SEQ ID NO: 963544 - RNA, 19 nt, Artificial Sequence
  Description of Artificial Sequence: Synthetic oligonucleotide
gggugugcuucgaucuuua

SEQ ID NO: 963545 - RNA, 19 nt, Artificial Sequence
  Description of Artificial Sequence: Synthetic oligonucleotide
ccaauucacguauggcauu

SEQ ID NO: 963546 - RNA, 19 nt, Artificial Sequence
  Description of Artificial Sequence: Synthetic oligonucleotide
cugggugugcuucgaucuu

SEQ ID NO: 963547 - RNA, 19 nt, Artificial Sequence
  Description of Artificial Sequence: Synthetic oligonucleotide
gcuucgcgagugcggccca

SEQ ID NO: 963548 - RNA, 19 nt, Artificial Sequence
  Description of Artificial Sequence: Synthetic oligonucleotide
ccugcguacaggccaugcu

SEQ ID NO: 963549 - RNA, 19 nt, Artificial Sequence
  Description of Artificial Sequence: Synthetic oligonucleotide
cagugugaccaaggcuacu

SEQ ID NO: 963550 - RNA, 19 nt, Artificial Sequence
  Description of Artificial Sequence: Synthetic oligonucleotide
cugaucccucugccugccu

SEQ ID NO: 963551 - RNA, 19 nt, Artificial Sequence
  Description of Artificial Sequence: Synthetic oligonucleotide
cccuaauaauagggucucu

SEQ ID NO: 963552 - RNA, 19 nt, Artificial Sequence
  Description of Artificial Sequence: Synthetic oligonucleotide
ccugaguaaaagggucauu

SEQ ID NO: 963553 - RNA, 19 nt, Artificial Sequence
  Description of Artificial Sequence: Synthetic oligonucleotide
gcccuucacuuuugauguu

SEQ ID NO: 963554 - RNA, 19 nt, Artificial Sequence
  Description of Artificial Sequence: Synthetic oligonucleotide
cuucgcgagugcggcccau

SEQ ID NO: 963555 - RNA, 19 nt, Artificial Sequence
  Description of Artificial Sequence: Synthetic oligonucleotide
caccagccccgaugaccau

SEQ ID NO: 963556 - RNA, 19 nt, Artificial Sequence
  Description of Artificial Sequence: Synthetic oligonucleotide
gcgccacuccugccugggu

SEQ ID NO: 963557 - RNA, 19 nt, Artificial Sequence
  Description of Artificial Sequence: Synthetic oligonucleotide
cuggagccuuggugcucuu

SEQ ID NO: 963558 - RNA, 19 nt, Artificial Sequence
  Description of Artificial Sequence: Synthetic oligonucleotide
agaaauuucaauuccaaac

SEQ ID NO: 963559 - RNA, 19 nt, Artificial Sequence
  Description of Artificial Sequence: Synthetic oligonucleotide
agaucuacuaaauaaauag

SEQ ID NO: 963560 - RNA, 19 nt, Artificial Sequence
  Description of Artificial Sequence: Synthetic oligonucleotide
cagugaaacaguaagaucg

SEQ ID NO: 963561 - RNA, 19 nt, Artificial Sequence
  Description of Artificial Sequence: Synthetic oligonucleotide
gaagagauacuauaaacag

SEQ ID NO: 963562 - RNA, 19 nt, Artificial Sequence
  Description of Artificial Sequence: Synthetic oligonucleotide
uuuaaugggaaguucuggg

SEQ ID NO: 963563 - RNA, 19 nt, Artificial Sequence
  Description of Artificial Sequence: Synthetic oligonucleotide
gauauuggcaaacugugag

SEQ ID NO: 963564 - RNA, 19 nt, Artificial Sequence
  Description of Artificial Sequence: Synthetic oligonucleotide
aaaugccccuuccauaugc

SEQ ID NO: 963565 - RNA, 19 nt, Artificial Sequence
  Description of Artificial Sequence: Synthetic oligonucleotide
agaagaaugguccguaaac

SEQ ID NO: 963566 - RNA, 19 nt, Artificial Sequence
  Description of Artificial Sequence: Synthetic oligonucleotide
ugaaagggcccuaacacgg

SEQ ID NO: 963567 - RNA, 19 nt, Artificial Sequence
  Description of Artificial Sequence: Synthetic oligonucleotide
cagguuauggauauuaagc

SEQ ID NO: 963568 - RNA, 19 nt, Artificial Sequence
  Description of Artificial Sequence: Synthetic oligonucleotide
uaugaaagggcccuaacac

SEQ ID NO: 963569 - RNA, 19 nt, Artificial Sequence
  Description of Artificial Sequence: Synthetic oligonucleotide
aguaacaugaguaagauuu

SEQ ID NO: 963570 - RNA, 19 nt, Artificial Sequence
  Description of Artificial Sequence: Synthetic oligonucleotide
agauagauaccauaggcug

SEQ ID NO: 963571 - RNA, 19 nt, Artificial Sequence
  Description of Artificial Sequence: Synthetic oligonucleotide
ucuaauuauacauuacauc

SEQ ID NO: 963572 - RNA, 19 nt, Artificial Sequence
  Description of Artificial Sequence: Synthetic oligonucleotide
uguuuuaacaggaaagcaa

SEQ ID NO: 963573 - RNA, 19 nt, Artificial Sequence
  Description of Artificial Sequence: Synthetic oligonucleotide
guaaguaccagcuacagaa

SEQ ID NO: 963574 - RNA, 19 nt, Artificial Sequence
  Description of Artificial Sequence: Synthetic oligonucleotide
ucaaguucugauuaauagc

SEQ ID NO: 963575 - RNA, 19 nt, Artificial Sequence
  Description of Artificial Sequence: Synthetic oligonucleotide
acaaaaugcucauugggag

SEQ ID NO: 963576 - RNA, 19 nt, Artificial Sequence
  Description of Artificial Sequence: Synthetic oligonucleotide
aaauccguggaaugguagg

SEQ ID NO: 963577 - RNA, 19 nt, Artificial Sequence
  Description of Artificial Sequence: Synthetic oligonucleotide
aauuauggcagacuguuuu

SEQ ID NO: 963578 - RNA, 19 nt, Artificial Sequence
  Description of Artificial Sequence: Synthetic oligonucleotide
guaaaagaagagugcaucg

SEQ ID NO: 963579 - RNA, 19 nt, Artificial Sequence
  Description of Artificial Sequence: Synthetic oligonucleotide
uccacagacaaaaugcuca

SEQ ID NO: 963580 - RNA, 19 nt, Artificial Sequence
  Description of Artificial Sequence: Synthetic oligonucleotide
aaaacagagggcaguaugg

SEQ ID NO: 963581 - RNA, 19 nt, Artificial Sequence
  Description of Artificial Sequence: Synthetic oligonucleotide
uuaaugggaaguucugggg

SEQ ID NO: 963582 - RNA, 19 nt, Artificial Sequence
  Description of Artificial Sequence: Synthetic oligonucleotide
guaagaucgcagcagauag

SEQ ID NO: 963583 - RNA, 19 nt, Artificial Sequence
  Description of Artificial Sequence: Synthetic oligonucleotide
aauaccacugagauauugg

SEQ ID NO: 963584 - RNA, 19 nt, Artificial Sequence
  Description of Artificial Sequence: Synthetic oligonucleotide
uagguauagaaucuaauua

SEQ ID NO: 963585 - RNA, 19 nt, Artificial Sequence
  Description of Artificial Sequence: Synthetic oligonucleotide
uggagagcagcauuaaucc

SEQ ID NO: 963586 - RNA, 19 nt, Artificial Sequence
  Description of Artificial Sequence: Synthetic oligonucleotide
uaagauuuuaaugggaagu

SEQ ID NO: 963587 - RNA, 19 nt, Artificial Sequence
  Description of Artificial Sequence: Synthetic oligonucleotide
gaaguugccucauaauacc

SEQ ID NO: 963588 - RNA, 19 nt, Artificial Sequence
  Description of Artificial Sequence: Synthetic oligonucleotide
ucgguguacuucaaaaucc

SEQ ID NO: 963589 - RNA, 19 nt, Artificial Sequence
  Description of Artificial Sequence: Synthetic oligonucleotide
uuuuaaugggaaguucugg

SEQ ID NO: 963590 - RNA, 19 nt, Artificial Sequence
  Description of Artificial Sequence: Synthetic oligonucleotide
uugggaucaagaaauuuca

SEQ ID NO: 963591 - RNA, 19 nt, Artificial Sequence
  Description of Artificial Sequence: Synthetic oligonucleotide
ugucccaucggacagugcc

SEQ ID NO: 963592 - RNA, 19 nt, Artificial Sequence
  Description of Artificial Sequence: Synthetic oligonucleotide
ucagguuauggauauuaag

SEQ ID NO: 963593 - RNA, 19 nt, Artificial Sequence
  Description of Artificial Sequence: Synthetic oligonucleotide
uuauggauauuaagcaucu

SEQ ID NO: 963594 - RNA, 19 nt, Artificial Sequence
  Description of Artificial Sequence: Synthetic oligonucleotide
uuccaaaccaaugacagac

SEQ ID NO: 963595 - RNA, 19 nt, Artificial Sequence
  Description of Artificial Sequence: Synthetic oligonucleotide
uucucuguaaguucuuugc

SEQ ID NO: 963596 - RNA, 19 nt, Artificial Sequence
  Description of Artificial Sequence: Synthetic oligonucleotide
auaaccgugcaauggagag

SEQ ID NO: 963597 - RNA, 19 nt, Artificial Sequence
  Description of Artificial Sequence: Synthetic oligonucleotide
uucaaggcuaugaaagggc

SEQ ID NO: 963598 - RNA, 19 nt, Artificial Sequence
  Description of Artificial Sequence: Synthetic oligonucleotide
agguuauggauauuaagca

SEQ ID NO: 963599 - RNA, 19 nt, Artificial Sequence
  Description of Artificial Sequence: Synthetic oligonucleotide
agauaccauaggcuggugc

SEQ ID NO: 963600 - RNA, 19 nt, Artificial Sequence
  Description of Artificial Sequence: Synthetic oligonucleotide
agguauagaaucuaauuau

SEQ ID NO: 963601 - RNA, 19 nt, Artificial Sequence
  Description of Artificial Sequence: Synthetic oligonucleotide
aacucaaggcacaaagaac

SEQ ID NO: 963602 - RNA, 19 nt, Artificial Sequence
  Description of Artificial Sequence: Synthetic oligonucleotide
uacauccuaacaaugguaa

SEQ ID NO: 963603 - RNA, 19 nt, Artificial Sequence
  Description of Artificial Sequence: Synthetic oligonucleotide
ugaacaguaacaugaguaa

SEQ ID NO: 963604 - RNA, 19 nt, Artificial Sequence
  Description of Artificial Sequence: Synthetic oligonucleotide
aacaguaagaucgcagcag

SEQ ID NO: 963605 - RNA, 19 nt, Artificial Sequence
  Description of Artificial Sequence: Synthetic oligonucleotide
auaggcuggugcuacauag

SEQ ID NO: 963606 - RNA, 19 nt, Artificial Sequence
  Description of Artificial Sequence: Synthetic oligonucleotide
guagaugugcuugaaaugc

SEQ ID NO: 963607 - RNA, 19 nt, Artificial Sequence
  Description of Artificial Sequence: Synthetic oligonucleotide
aguaauagcaagccaauuu

SEQ ID NO: 963608 - RNA, 19 nt, Artificial Sequence
  Description of Artificial Sequence: Synthetic oligonucleotide
aaguauuuggcaauaugug

SEQ ID NO: 963609 - RNA, 19 nt, Artificial Sequence
  Description of Artificial Sequence: Synthetic oligonucleotide
aguguagaagaaugguccg

SEQ ID NO: 963610 - RNA, 19 nt, Artificial Sequence
  Description of Artificial Sequence: Synthetic oligonucleotide
ucgggaaaagacuuguggc

SEQ ID NO: 963611 - RNA, 19 nt, Artificial Sequence
  Description of Artificial Sequence: Synthetic oligonucleotide
gauagauaccauaggcugg

SEQ ID NO: 963612 - RNA, 19 nt, Artificial Sequence
  Description of Artificial Sequence: Synthetic oligonucleotide
aggccgaggagguagaccg

SEQ ID NO: 963613 - RNA, 19 nt, Artificial Sequence
  Description of Artificial Sequence: Synthetic oligonucleotide
agauacuauaaacagugaa

SEQ ID NO: 963614 - RNA, 19 nt, Artificial Sequence
  Description of Artificial Sequence: Synthetic oligonucleotide
uauuaagcaucucuugauc

SEQ ID NO: 963615 - RNA, 19 nt, Artificial Sequence
  Description of Artificial Sequence: Synthetic oligonucleotide
gauagggcguauucaaacc

SEQ ID NO: 963616 - RNA, 19 nt, Artificial Sequence
  Description of Artificial Sequence: Synthetic oligonucleotide
ucaaggcuaugaaagggcc

SEQ ID NO: 963617 - RNA, 19 nt, Artificial Sequence
  Description of Artificial Sequence: Synthetic oligonucleotide
gucgggaaaagacuugugg

SEQ ID NO: 963618 - RNA, 19 nt, Artificial Sequence
  Description of Artificial Sequence: Synthetic oligonucleotide
agaauugcaaggaguaugg

SEQ ID NO: 963619 - RNA, 19 nt, Artificial Sequence
  Description of Artificial Sequence: Synthetic oligonucleotide
ugagggaaggaccguaugc

SEQ ID NO: 963620 - RNA, 19 nt, Artificial Sequence
  Description of Artificial Sequence: Synthetic oligonucleotide
guaagauuuuaaugggaag

SEQ ID NO: 963621 - RNA, 19 nt, Artificial Sequence
  Description of Artificial Sequence: Synthetic oligonucleotide
acagcguaaaagaagagug

SEQ ID NO: 963622 - RNA, 19 nt, Artificial Sequence
  Description of Artificial Sequence: Synthetic oligonucleotide
aacagcguaaaagaagagu

SEQ ID NO: 963623 - RNA, 19 nt, Artificial Sequence
  Description of Artificial Sequence: Synthetic oligonucleotide
aaugcauuuacagcacuca

SEQ ID NO: 963624 - RNA, 19 nt, Artificial Sequence
  Description of Artificial Sequence: Synthetic oligonucleotide
uugaaaggaaagagucggg

SEQ ID NO: 963625 - RNA, 19 nt, Artificial Sequence
  Description of Artificial Sequence: Synthetic oligonucleotide
ugauagggcguauucaaac

SEQ ID NO: 963626 - RNA, 19 nt, Artificial Sequence
  Description of Artificial Sequence: Synthetic oligonucleotide
gagaauugcaaggaguaug

SEQ ID NO: 963627 - RNA, 19 nt, Artificial Sequence
  Description of Artificial Sequence: Synthetic oligonucleotide
ugaauauggucuacaauua

SEQ ID NO: 963628 - RNA, 19 nt, Artificial Sequence
  Description of Artificial Sequence: Synthetic oligonucleotide
ugugauagggcguauucaa

SEQ ID NO: 963629 - RNA, 19 nt, Artificial Sequence
  Description of Artificial Sequence: Synthetic oligonucleotide
uagcaagccaauuucggug

SEQ ID NO: 963630 - RNA, 19 nt, Artificial Sequence
  Description of Artificial Sequence: Synthetic oligonucleotide
uggugcuacauagagguag

SEQ ID NO: 963631 - RNA, 19 nt, Artificial Sequence
  Description of Artificial Sequence: Synthetic oligonucleotide
cauuugaggagagucaccc

SEQ ID NO: 963632 - RNA, 19 nt, Artificial Sequence
  Description of Artificial Sequence: Synthetic oligonucleotide
uaugugauagggcguauuc

SEQ ID NO: 963633 - RNA, 19 nt, Artificial Sequence
  Description of Artificial Sequence: Synthetic oligonucleotide
accguuuccauccaguuaa

SEQ ID NO: 963634 - RNA, 19 nt, Artificial Sequence
  Description of Artificial Sequence: Synthetic oligonucleotide
ugugaguaauagcaagcca

SEQ ID NO: 963635 - RNA, 19 nt, Artificial Sequence
  Description of Artificial Sequence: Synthetic oligonucleotide
gcagcauuaauccagauaa

SEQ ID NO: 963636 - RNA, 19 nt, Artificial Sequence
  Description of Artificial Sequence: Synthetic oligonucleotide
aaggaccguaugcuggaac

SEQ ID NO: 963637 - RNA, 19 nt, Artificial Sequence
  Description of Artificial Sequence: Synthetic oligonucleotide
gggaaauaugaauucacag

SEQ ID NO: 963638 - RNA, 19 nt, Artificial Sequence
  Description of Artificial Sequence: Synthetic oligonucleotide
auuucgguguacuucaaaa

SEQ ID NO: 963639 - RNA, 19 nt, Artificial Sequence
  Description of Artificial Sequence: Synthetic oligonucleotide
auauuaagcaucucuugau

SEQ ID NO: 963640 - RNA, 19 nt, Artificial Sequence
  Description of Artificial Sequence: Synthetic oligonucleotide
caaaccacuugucauggag

SEQ ID NO: 963641 - RNA, 19 nt, Artificial Sequence
  Description of Artificial Sequence: Synthetic oligonucleotide
agugaaacaguaagaucgc

SEQ ID NO: 963642 - RNA, 19 nt, Artificial Sequence
  Description of Artificial Sequence: Synthetic oligonucleotide
augacagaaaaccucugga

SEQ ID NO: 963643 - RNA, 19 nt, Artificial Sequence
  Description of Artificial Sequence: Synthetic oligonucleotide
uccguggaaugguaggugg

SEQ ID NO: 963644 - RNA, 19 nt, Artificial Sequence
  Description of Artificial Sequence: Synthetic oligonucleotide
uuugucuugcugacaaaac

SEQ ID NO: 963645 - RNA, 19 nt, Artificial Sequence
  Description of Artificial Sequence: Synthetic oligonucleotide
aaacagugaacaguaacau

SEQ ID NO: 963646 - RNA, 19 nt, Artificial Sequence
  Description of Artificial Sequence: Synthetic oligonucleotide
caaguguagaagaaugguc

SEQ ID NO: 963647 - RNA, 19 nt, Artificial Sequence
  Description of Artificial Sequence: Synthetic oligonucleotide
aagcauuguacaaagccca

SEQ ID NO: 963648 - RNA, 19 nt, Artificial Sequence
  Description of Artificial Sequence: Synthetic oligonucleotide
aacaacccaaaguuccaca

SEQ ID NO: 963649 - RNA, 19 nt, Artificial Sequence
  Description of Artificial Sequence: Synthetic oligonucleotide
aaugacagacagugcuuug

SEQ ID NO: 963650 - RNA, 19 nt, Artificial Sequence
  Description of Artificial Sequence: Synthetic oligonucleotide
uccguaaacagaucuacua

SEQ ID NO: 963651 - RNA, 19 nt, Artificial Sequence
  Description of Artificial Sequence: Synthetic oligonucleotide
aagagauacuauaaacagu

SEQ ID NO: 963652 - RNA, 19 nt, Artificial Sequence
  Description of Artificial Sequence: Synthetic oligonucleotide
ugacagaaaaccucuggaa

SEQ ID NO: 963653 - RNA, 19 nt, Artificial Sequence
  Description of Artificial Sequence: Synthetic oligonucleotide
augaacagcguaaaagaag

SEQ ID NO: 963654 - RNA, 19 nt, Artificial Sequence
  Description of Artificial Sequence: Synthetic oligonucleotide
gauuaauagcccaugaagu

SEQ ID NO: 963655 - RNA, 19 nt, Artificial Sequence
  Description of Artificial Sequence: Synthetic oligonucleotide
gagguaaggggaaauauga

SEQ ID NO: 963656 - RNA, 19 nt, Artificial Sequence
  Description of Artificial Sequence: Synthetic oligonucleotide
gaacaguaacaugaguaag

SEQ ID NO: 963657 - RNA, 19 nt, Artificial Sequence
  Description of Artificial Sequence: Synthetic oligonucleotide
cuaacacggacaaagcuga

SEQ ID NO: 963658 - RNA, 19 nt, Artificial Sequence
  Description of Artificial Sequence: Synthetic oligonucleotide
uaauagcccaugaaguaau

SEQ ID NO: 963659 - RNA, 19 nt, Artificial Sequence
  Description of Artificial Sequence: Synthetic oligonucleotide
aagaucgcagcagauagau

SEQ ID NO: 963660 - RNA, 19 nt, Artificial Sequence
  Description of Artificial Sequence: Synthetic oligonucleotide
augguccguaaacagaucu

SEQ ID NO: 963661 - RNA, 19 nt, Artificial Sequence
  Description of Artificial Sequence: Synthetic oligonucleotide
aguaagauuuuaaugggaa

SEQ ID NO: 963662 - RNA, 19 nt, Artificial Sequence
  Description of Artificial Sequence: Synthetic oligonucleotide
uaauaccacugagauauug

SEQ ID NO: 963663 - RNA, 19 nt, Artificial Sequence
  Description of Artificial Sequence: Synthetic oligonucleotide
aacacggacaaagcugaag

SEQ ID NO: 963664 - RNA, 19 nt, Artificial Sequence
  Description of Artificial Sequence: Synthetic oligonucleotide
aguauggcuaucaguguac

SEQ ID NO: 963665 - RNA, 19 nt, Artificial Sequence
  Description of Artificial Sequence: Synthetic oligonucleotide
auagggcguauucaaacca

SEQ ID NO: 963666 - RNA, 19 nt, Artificial Sequence
  Description of Artificial Sequence: Synthetic oligonucleotide
aaugccccuuccauaugcc

SEQ ID NO: 963667 - RNA, 19 nt, Artificial Sequence
  Description of Artificial Sequence: Synthetic oligonucleotide
gaucuacuaaauaaauaga

SEQ ID NO: 963668 - RNA, 19 nt, Artificial Sequence
  Description of Artificial Sequence: Synthetic oligonucleotide
gaaucuaauuauacauuac

SEQ ID NO: 963669 - RNA, 19 nt, Artificial Sequence
  Description of Artificial Sequence: Synthetic oligonucleotide
ugccucauaauaccacuga

SEQ ID NO: 963670 - RNA, 19 nt, Artificial Sequence
  Description of Artificial Sequence: Synthetic oligonucleotide
auauuggcaaacugugagu

SEQ ID NO: 963671 - RNA, 19 nt, Artificial Sequence
  Description of Artificial Sequence: Synthetic oligonucleotide
uaccacugagauauuggca

SEQ ID NO: 963672 - RNA, 19 nt, Artificial Sequence
  Description of Artificial Sequence: Synthetic oligonucleotide
aagaaccaggcaucggaga

SEQ ID NO: 963673 - RNA, 19 nt, Artificial Sequence
  Description of Artificial Sequence: Synthetic oligonucleotide
uacacggaggucagcaaca

SEQ ID NO: 963674 - RNA, 19 nt, Artificial Sequence
  Description of Artificial Sequence: Synthetic oligonucleotide
aauaaccgugcaauggaga

SEQ ID NO: 963675 - RNA, 19 nt, Artificial Sequence
  Description of Artificial Sequence: Synthetic oligonucleotide
auggcuaucaguguacaga

SEQ ID NO: 963676 - RNA, 19 nt, Artificial Sequence
  Description of Artificial Sequence: Synthetic oligonucleotide
agcguaaaagaagagugca

SEQ ID NO: 963677 - RNA, 19 nt, Artificial Sequence
  Description of Artificial Sequence: Synthetic oligonucleotide
uagaugugcuugaaaugca

SEQ ID NO: 963678 - RNA, 19 nt, Artificial Sequence
  Description of Artificial Sequence: Synthetic oligonucleotide
uccaaacgcuucuuuauuc

SEQ ID NO: 963679 - RNA, 19 nt, Artificial Sequence
  Description of Artificial Sequence: Synthetic oligonucleotide
cagcguaaaagaagagugc

SEQ ID NO: 963680 - RNA, 19 nt, Artificial Sequence
  Description of Artificial Sequence: Synthetic oligonucleotide
caaagaaccaggcaucgga

SEQ ID NO: 963681 - RNA, 19 nt, Artificial Sequence
  Description of Artificial Sequence: Synthetic oligonucleotide
gauaccauaggcuggugcu

SEQ ID NO: 963682 - RNA, 19 nt, Artificial Sequence
  Description of Artificial Sequence: Synthetic oligonucleotide
caccccgagagccaaagcc

SEQ ID NO: 963683 - RNA, 19 nt, Artificial Sequence
  Description of Artificial Sequence: Synthetic oligonucleotide
uggcaauaugugauagggc

SEQ ID NO: 963684 - RNA, 19 nt, Artificial Sequence
  Description of Artificial Sequence: Synthetic oligonucleotide
cugaaauaaccgugcaaug

SEQ ID NO: 963685 - RNA, 19 nt, Artificial Sequence
  Description of Artificial Sequence: Synthetic oligonucleotide
aggcuggugcuacauagag

SEQ ID NO: 963686 - RNA, 19 nt, Artificial Sequence
  Description of Artificial Sequence: Synthetic oligonucleotide
agcaagccaauuucggugu

SEQ ID NO: 963687 - RNA, 19 nt, Artificial Sequence
  Description of Artificial Sequence: Synthetic oligonucleotide
acauccuaacaaugguaag

SEQ ID NO: 963688 - RNA, 19 nt, Artificial Sequence
  Description of Artificial Sequence: Synthetic oligonucleotide
aguuuggagcccaguaggc

SEQ ID NO: 963689 - RNA, 19 nt, Artificial Sequence
  Description of Artificial Sequence: Synthetic oligonucleotide
agggaguaauguccugucg

SEQ ID NO: 963690 - RNA, 19 nt, Artificial Sequence
  Description of Artificial Sequence: Synthetic oligonucleotide
aauacacggaggucagcaa

SEQ ID NO: 963691 - RNA, 19 nt, Artificial Sequence
  Description of Artificial Sequence: Synthetic oligonucleotide
augccacccaaacaugaag

SEQ ID NO: 963692 - RNA, 19 nt, Artificial Sequence
  Description of Artificial Sequence: Synthetic oligonucleotide
aggcauaugugaugcccac

SEQ ID NO: 963693 - RNA, 19 nt, Artificial Sequence
  Description of Artificial Sequence: Synthetic oligonucleotide
uggcuaucaguguacagau

SEQ ID NO: 963694 - RNA, 19 nt, Artificial Sequence
  Description of Artificial Sequence: Synthetic oligonucleotide
uaagaucgcagcagauaga

SEQ ID NO: 963695 - RNA, 19 nt, Artificial Sequence
  Description of Artificial Sequence: Synthetic oligonucleotide
auagauaccauaggcuggu

SEQ ID NO: 963696 - RNA, 19 nt, Artificial Sequence
  Description of Artificial Sequence: Synthetic oligonucleotide
agaaccaggcaucggagaa

SEQ ID NO: 963697 - RNA, 19 nt, Artificial Sequence
  Description of Artificial Sequence: Synthetic oligonucleotide
ccuaacacggacaaagcug

SEQ ID NO: 963698 - RNA, 19 nt, Artificial Sequence
  Description of Artificial Sequence: Synthetic oligonucleotide
cuacauagagguagaugug

SEQ ID NO: 963699 - RNA, 19 nt, Artificial Sequence
  Description of Artificial Sequence: Synthetic oligonucleotide
gaauauggucuacaauuaa

SEQ ID NO: 963700 - RNA, 19 nt, Artificial Sequence
  Description of Artificial Sequence: Synthetic oligonucleotide
agguccacucugaaguugc

SEQ ID NO: 963701 - RNA, 19 nt, Artificial Sequence
  Description of Artificial Sequence: Synthetic oligonucleotide
cuaugaaagggcccuaaca

SEQ ID NO: 963702 - RNA, 19 nt, Artificial Sequence
  Description of Artificial Sequence: Synthetic oligonucleotide
gugaguaauagcaagccaa

SEQ ID NO: 963703 - RNA, 19 nt, Artificial Sequence
  Description of Artificial Sequence: Synthetic oligonucleotide
aggaccguaugcuggaacu

SEQ ID NO: 963704 - RNA, 19 nt, Artificial Sequence
  Description of Artificial Sequence: Synthetic oligonucleotide
ugguaaguaccagcuacag

SEQ ID NO: 963705 - RNA, 19 nt, Artificial Sequence
  Description of Artificial Sequence: Synthetic oligonucleotide
uggcaaagaccccucuuga

SEQ ID NO: 963706 - RNA, 19 nt, Artificial Sequence
  Description of Artificial Sequence: Synthetic oligonucleotide
uguagaagaaugguccgua

SEQ ID NO: 963707 - RNA, 19 nt, Artificial Sequence
  Description of Artificial Sequence: Synthetic oligonucleotide
uaaguaccagcuacagaaa

SEQ ID NO: 963708 - RNA, 19 nt, Artificial Sequence
  Description of Artificial Sequence: Synthetic oligonucleotide
gaggagguagaccguuucc

SEQ ID NO: 963709 - RNA, 19 nt, Artificial Sequence
  Description of Artificial Sequence: Synthetic oligonucleotide
acaguaacaugaguaagau

SEQ ID NO: 963710 - RNA, 19 nt, Artificial Sequence
  Description of Artificial Sequence: Synthetic oligonucleotide
gcuacuggcaacuuucuuc

SEQ ID NO: 963711 - RNA, 19 nt, Artificial Sequence
  Description of Artificial Sequence: Synthetic oligonucleotide
aagccgagaaccagugguc

SEQ ID NO: 963712 - RNA, 19 nt, Artificial Sequence
  Description of Artificial Sequence: Synthetic oligonucleotide
gaaguucuggggcagugaa

SEQ ID NO: 963713 - RNA, 19 nt, Artificial Sequence
  Description of Artificial Sequence: Synthetic oligonucleotide
aagccaauuucgguguacu

SEQ ID NO: 963714 - RNA, 19 nt, Artificial Sequence
  Description of Artificial Sequence: Synthetic oligonucleotide
aagagggaguaauguccug

SEQ ID NO: 963715 - RNA, 19 nt, Artificial Sequence
  Description of Artificial Sequence: Synthetic oligonucleotide
aaugcucauugggagaauu

SEQ ID NO: 963716 - RNA, 19 nt, Artificial Sequence
  Description of Artificial Sequence: Synthetic oligonucleotide
ggcccuaacacggacaaag

SEQ ID NO: 963717 - RNA, 19 nt, Artificial Sequence
  Description of Artificial Sequence: Synthetic oligonucleotide
ugcuuagagagggcaagug

SEQ ID NO: 963718 - RNA, 19 nt, Artificial Sequence
  Description of Artificial Sequence: Synthetic oligonucleotide
auagcccaugaaguaauug

SEQ ID NO: 963719 - RNA, 19 nt, Artificial Sequence
  Description of Artificial Sequence: Synthetic oligonucleotide
agggaaggaccguaugcug

SEQ ID NO: 963720 - RNA, 19 nt, Artificial Sequence
  Description of Artificial Sequence: Synthetic oligonucleotide
aagaccccucuugaaagga

SEQ ID NO: 963721 - RNA, 19 nt, Artificial Sequence
  Description of Artificial Sequence: Synthetic oligonucleotide
uagggcguauucaaaccau

SEQ ID NO: 963722 - RNA, 19 nt, Artificial Sequence
  Description of Artificial Sequence: Synthetic oligonucleotide
gaccguaugcuggaacugc

SEQ ID NO: 963723 - RNA, 19 nt, Artificial Sequence
  Description of Artificial Sequence: Synthetic oligonucleotide
gagguagaccguuuccauc

SEQ ID NO: 963724 - RNA, 19 nt, Artificial Sequence
  Description of Artificial Sequence: Synthetic oligonucleotide
gagggaguaauguccuguc

SEQ ID NO: 963725 - RNA, 19 nt, Artificial Sequence
  Description of Artificial Sequence: Synthetic oligonucleotide
guuugcuugcagugaaaca

SEQ ID NO: 963726 - RNA, 19 nt, Artificial Sequence
  Description of Artificial Sequence: Synthetic oligonucleotide
ccaaaccaaugacagacag

SEQ ID NO: 963727 - RNA, 19 nt, Artificial Sequence
  Description of Artificial Sequence: Synthetic oligonucleotide
caaguggcuucucaccaug

SEQ ID NO: 963728 - RNA, 19 nt, Artificial Sequence
  Description of Artificial Sequence: Synthetic oligonucleotide
acaauacacggaggucagc

SEQ ID NO: 963729 - RNA, 19 nt, Artificial Sequence
  Description of Artificial Sequence: Synthetic oligonucleotide
cagaucuacuaaauaaaua

SEQ ID NO: 963730 - RNA, 19 nt, Artificial Sequence
  Description of Artificial Sequence: Synthetic oligonucleotide
caauacacggaggucagca

SEQ ID NO: 963731 - RNA, 19 nt, Artificial Sequence
  Description of Artificial Sequence: Synthetic oligonucleotide
cagauagauaccauaggcu

SEQ ID NO: 963732 - RNA, 19 nt, Artificial Sequence
  Description of Artificial Sequence: Synthetic oligonucleotide
accacuugucauggaggcc

SEQ ID NO: 963733 - RNA, 19 nt, Artificial Sequence
  Description of Artificial Sequence: Synthetic oligonucleotide
gaaugguccguaaacagau

SEQ ID NO: 963734 - RNA, 19 nt, Artificial Sequence
  Description of Artificial Sequence: Synthetic oligonucleotide
uaaccgugcaauggagagc

SEQ ID NO: 963735 - RNA, 19 nt, Artificial Sequence
  Description of Artificial Sequence: Synthetic oligonucleotide
gucguggucagaaucagaa

SEQ ID NO: 963736 - RNA, 19 nt, Artificial Sequence
  Description of Artificial Sequence: Synthetic oligonucleotide
ggcacaaagaaccaggcau

SEQ ID NO: 963737 - RNA, 19 nt, Artificial Sequence
  Description of Artificial Sequence: Synthetic oligonucleotide
cccaugaaguaauugcuug

SEQ ID NO: 963738 - RNA, 19 nt, Artificial Sequence
  Description of Artificial Sequence: Synthetic oligonucleotide
guacagaugaggguugcca

SEQ ID NO: 963739 - RNA, 19 nt, Artificial Sequence
  Description of Artificial Sequence: Synthetic oligonucleotide
agccauuguacuggaaaug

SEQ ID NO: 963740 - RNA, 19 nt, Artificial Sequence
  Description of Artificial Sequence: Synthetic oligonucleotide
gaaaugccccuuccauaug

SEQ ID NO: 963741 - RNA, 19 nt, Artificial Sequence
  Description of Artificial Sequence: Synthetic oligonucleotide
gaaugguagguggggauga

SEQ ID NO: 963742 - RNA, 19 nt, Artificial Sequence
  Description of Artificial Sequence: Synthetic oligonucleotide
aaacgcuucuuuauucauu

SEQ ID NO: 963743 - RNA, 19 nt, Artificial Sequence
  Description of Artificial Sequence: Synthetic oligonucleotide
uguacagaugaggguugcc

SEQ ID NO: 963744 - RNA, 19 nt, Artificial Sequence
  Description of Artificial Sequence: Synthetic oligonucleotide
acauagagguagaugugcu

SEQ ID NO: 963745 - RNA, 19 nt, Artificial Sequence
  Description of Artificial Sequence: Synthetic oligonucleotide
agcacucaugaacagcgua

SEQ ID NO: 963746 - RNA, 19 nt, Artificial Sequence
  Description of Artificial Sequence: Synthetic oligonucleotide
cauuguacuggaaaugaau

SEQ ID NO: 963747 - RNA, 19 nt, Artificial Sequence
  Description of Artificial Sequence: Synthetic oligonucleotide
augugauagggcguauuca

SEQ ID NO: 963748 - RNA, 19 nt, Artificial Sequence
  Description of Artificial Sequence: Synthetic oligonucleotide
ggcaaacugugaguaauag

SEQ ID NO: 963749 - RNA, 19 nt, Artificial Sequence
  Description of Artificial Sequence: Synthetic oligonucleotide
ugguccguaaacagaucua

SEQ ID NO: 963750 - RNA, 19 nt, Artificial Sequence
  Description of Artificial Sequence: Synthetic oligonucleotide
uaccauaggcuggugcuac

SEQ ID NO: 963751 - RNA, 19 nt, Artificial Sequence
  Description of Artificial Sequence: Synthetic oligonucleotide
gccucauaauaccacugag

SEQ ID NO: 963752 - RNA, 19 nt, Artificial Sequence
  Description of Artificial Sequence: Synthetic oligonucleotide
aauaugugauagggcguau

SEQ ID NO: 963753 - RNA, 19 nt, Artificial Sequence
  Description of Artificial Sequence: Synthetic oligonucleotide
ccaauuucgguguacuuca

SEQ ID NO: 963754 - RNA, 19 nt, Artificial Sequence
  Description of Artificial Sequence: Synthetic oligonucleotide
gcguauucaaaccaugcaa

SEQ ID NO: 963755 - RNA, 19 nt, Artificial Sequence
  Description of Artificial Sequence: Synthetic oligonucleotide
gagcccaguaggcauggca

SEQ ID NO: 963756 - RNA, 19 nt, Artificial Sequence
  Description of Artificial Sequence: Synthetic oligonucleotide
ccacuugucauggaggccc

SEQ ID NO: 963757 - RNA, 19 nt, Artificial Sequence
  Description of Artificial Sequence: Synthetic oligonucleotide
guaauguccugucgugguc

SEQ ID NO: 963758 - RNA, 19 nt, Artificial Sequence
  Description of Artificial Sequence: Synthetic oligonucleotide
guagaccguuuccauccag

SEQ ID NO: 963759 - RNA, 19 nt, Artificial Sequence
  Description of Artificial Sequence: Synthetic oligonucleotide
gcacaauacacggagguca

SEQ ID NO: 963760 - RNA, 19 nt, Artificial Sequence
  Description of Artificial Sequence: Synthetic oligonucleotide
gaugcccacugcacaauac

SEQ ID NO: 963761 - RNA, 19 nt, Artificial Sequence
  Description of Artificial Sequence: Synthetic oligonucleotide
agggcccuaacacggacaa

SEQ ID NO: 963762 - RNA, 19 nt, Artificial Sequence
  Description of Artificial Sequence: Synthetic oligonucleotide
agcauuguacaaagcccag

SEQ ID NO: 963763 - RNA, 19 nt, Artificial Sequence
  Description of Artificial Sequence: Synthetic oligonucleotide
gguccguaaacagaucuac

SEQ ID NO: 963764 - RNA, 19 nt, Artificial Sequence
  Description of Artificial Sequence: Synthetic oligonucleotide
ugcaucggucaagaugaca

SEQ ID NO: 963765 - RNA, 19 nt, Artificial Sequence
  Description of Artificial Sequence: Synthetic oligonucleotide
agaccguuuccauccaguu

SEQ ID NO: 963766 - RNA, 19 nt, Artificial Sequence
  Description of Artificial Sequence: Synthetic oligonucleotide
cccucuugaaaggaaagag

SEQ ID NO: 963767 - RNA, 19 nt, Artificial Sequence
  Description of Artificial Sequence: Synthetic oligonucleotide
ggcguauucaaaccaugca

SEQ ID NO: 963768 - RNA, 19 nt, Artificial Sequence
  Description of Artificial Sequence: Synthetic oligonucleotide
ggcauuugaggagagucac

SEQ ID NO: 963769 - RNA, 19 nt, Artificial Sequence
  Description of Artificial Sequence: Synthetic oligonucleotide
auguguuuugcugcuuaga

SEQ ID NO: 963770 - RNA, 19 nt, Artificial Sequence
  Description of Artificial Sequence: Synthetic oligonucleotide
cugagggaaggaccguaug

SEQ ID NO: 963771 - RNA, 19 nt, Artificial Sequence
  Description of Artificial Sequence: Synthetic oligonucleotide
uucucaccauggaaacaau

SEQ ID NO: 963772 - RNA, 19 nt, Artificial Sequence
  Description of Artificial Sequence: Synthetic oligonucleotide
cauccuaacaaugguaagu

SEQ ID NO: 963773 - RNA, 19 nt, Artificial Sequence
  Description of Artificial Sequence: Synthetic oligonucleotide
guagaagaaugguccguaa

SEQ ID NO: 963774 - RNA, 19 nt, Artificial Sequence
  Description of Artificial Sequence: Synthetic oligonucleotide
agagucgggaaaagacuug

SEQ ID NO: 963775 - RNA, 19 nt, Artificial Sequence
  Description of Artificial Sequence: Synthetic oligonucleotide
uauggauauuaagcaucuc

SEQ ID NO: 963776 - RNA, 19 nt, Artificial Sequence
  Description of Artificial Sequence: Synthetic oligonucleotide
augcucauugggagaauug

SEQ ID NO: 963777 - RNA, 19 nt, Artificial Sequence
  Description of Artificial Sequence: Synthetic oligonucleotide
ucaccccgagagccaaagc

SEQ ID NO: 963778 - RNA, 19 nt, Artificial Sequence
  Description of Artificial Sequence: Synthetic oligonucleotide
gguaaguaccagcuacaga

SEQ ID NO: 963779 - RNA, 19 nt, Artificial Sequence
  Description of Artificial Sequence: Synthetic oligonucleotide
guaugcuggaacugcugaa

SEQ ID NO: 963780 - RNA, 19 nt, Artificial Sequence
  Description of Artificial Sequence: Synthetic oligonucleotide
caauaugugauagggcgua

SEQ ID NO: 963781 - RNA, 19 nt, Artificial Sequence
  Description of Artificial Sequence: Synthetic oligonucleotide
gccaauuucgguguacuuc

SEQ ID NO: 963782 - RNA, 19 nt, Artificial Sequence
  Description of Artificial Sequence: Synthetic oligonucleotide
gagggaaggaccguaugcu

SEQ ID NO: 963783 - RNA, 19 nt, Artificial Sequence
  Description of Artificial Sequence: Synthetic oligonucleotide
ggggaaauaugaauucaca

SEQ ID NO: 963784 - RNA, 19 nt, Artificial Sequence
  Description of Artificial Sequence: Synthetic oligonucleotide
cugucguggucagaaucag

SEQ ID NO: 963785 - RNA, 19 nt, Artificial Sequence
  Description of Artificial Sequence: Synthetic oligonucleotide
gucaccccgagagccaaag

SEQ ID NO: 963786 - RNA, 19 nt, Artificial Sequence
  Description of Artificial Sequence: Synthetic oligonucleotide
cagacuguuuuaacaggaa

SEQ ID NO: 963787 - RNA, 19 nt, Artificial Sequence
  Description of Artificial Sequence: Synthetic oligonucleotide
agggcguauucaaaccaug

SEQ ID NO: 963788 - RNA, 19 nt, Artificial Sequence
  Description of Artificial Sequence: Synthetic oligonucleotide
gggcccuugggguuuaaac

SEQ ID NO: 963789 - RNA, 19 nt, Artificial Sequence
  Description of Artificial Sequence: Synthetic oligonucleotide
ggaaagagucgggaaaaga

SEQ ID NO: 963790 - RNA, 19 nt, Artificial Sequence
  Description of Artificial Sequence: Synthetic oligonucleotide
agccgagaaccagugguca

SEQ ID NO: 963791 - RNA, 19 nt, Artificial Sequence
  Description of Artificial Sequence: Synthetic oligonucleotide
guguacagaugaggguugc

SEQ ID NO: 963792 - RNA, 19 nt, Artificial Sequence
  Description of Artificial Sequence: Synthetic oligonucleotide
caucggucaagaugacaga

SEQ ID NO: 963793 - RNA, 19 nt, Artificial Sequence
  Description of Artificial Sequence: Synthetic oligonucleotide
aaaugcucauugggagaau

SEQ ID NO: 963794 - RNA, 19 nt, Artificial Sequence
  Description of Artificial Sequence: Synthetic oligonucleotide
auaugugauagggcguauu

SEQ ID NO: 963795 - RNA, 19 nt, Artificial Sequence
  Description of Artificial Sequence: Synthetic oligonucleotide
caucggacagugccaucug

SEQ ID NO: 963796 - RNA, 19 nt, Artificial Sequence
  Description of Artificial Sequence: Synthetic oligonucleotide
gcuaugaaagggcccuaac

SEQ ID NO: 963797 - RNA, 19 nt, Artificial Sequence
  Description of Artificial Sequence: Synthetic oligonucleotide
ccaaacgcuucuuuauuca

SEQ ID NO: 963798 - RNA, 19 nt, Artificial Sequence
  Description of Artificial Sequence: Synthetic oligonucleotide
agguaaggggaaauaugaa

SEQ ID NO: 963799 - RNA, 19 nt, Artificial Sequence
  Description of Artificial Sequence: Synthetic oligonucleotide
cauaugccuuuucugaaau

SEQ ID NO: 963800 - RNA, 19 nt, Artificial Sequence
  Description of Artificial Sequence: Synthetic oligonucleotide
ggcaaggccaaguguagaa

SEQ ID NO: 963801 - RNA, 19 nt, Artificial Sequence
  Description of Artificial Sequence: Synthetic oligonucleotide
gagucgggaaaagacuugu

SEQ ID NO: 963802 - RNA, 19 nt, Artificial Sequence
  Description of Artificial Sequence: Synthetic oligonucleotide
agucgggaaaagacuugug

SEQ ID NO: 963803 - RNA, 19 nt, Artificial Sequence
  Description of Artificial Sequence: Synthetic oligonucleotide
ccugucguggucagaauca

SEQ ID NO: 963804 - RNA, 19 nt, Artificial Sequence
  Description of Artificial Sequence: Synthetic oligonucleotide
ggucuacaauuaacaaccc

SEQ ID NO: 963805 - RNA, 19 nt, Artificial Sequence
  Description of Artificial Sequence: Synthetic oligonucleotide
uagauaccauaggcuggug

SEQ ID NO: 963806 - RNA, 19 nt, Artificial Sequence
  Description of Artificial Sequence: Synthetic oligonucleotide
gcacaaagaaccaggcauc

SEQ ID NO: 963807 - RNA, 19 nt, Artificial Sequence
  Description of Artificial Sequence: Synthetic oligonucleotide
gcccaggcauaugugaugc

SEQ ID NO: 963808 - RNA, 19 nt, Artificial Sequence
  Description of Artificial Sequence: Synthetic oligonucleotide
cguaaacagaucuacuaaa

SEQ ID NO: 963809 - RNA, 19 nt, Artificial Sequence
  Description of Artificial Sequence: Synthetic oligonucleotide
accguaugcuggaacugcu

SEQ ID NO: 963810 - RNA, 19 nt, Artificial Sequence
  Description of Artificial Sequence: Synthetic oligonucleotide
ccguggaaugguagguggg

SEQ ID NO: 963811 - RNA, 19 nt, Artificial Sequence
  Description of Artificial Sequence: Synthetic oligonucleotide
auaccauaggcuggugcua

SEQ ID NO: 963812 - RNA, 19 nt, Artificial Sequence
  Description of Artificial Sequence: Synthetic oligonucleotide
guaauugcuuggcuuucau

SEQ ID NO: 963813 - RNA, 19 nt, Artificial Sequence
  Description of Artificial Sequence: Synthetic oligonucleotide
uacuggcaacuuucuucaa

SEQ ID NO: 963814 - RNA, 19 nt, Artificial Sequence
  Description of Artificial Sequence: Synthetic oligonucleotide
cacucaugaacagcguaaa

SEQ ID NO: 963815 - RNA, 19 nt, Artificial Sequence
  Description of Artificial Sequence: Synthetic oligonucleotide
ggugcuacauagagguaga

SEQ ID NO: 963816 - RNA, 19 nt, Artificial Sequence
  Description of Artificial Sequence: Synthetic oligonucleotide
ccguaaacagaucuacuaa

SEQ ID NO: 963817 - RNA, 19 nt, Artificial Sequence
  Description of Artificial Sequence: Synthetic oligonucleotide
caaacgcuucuuuauucau

SEQ ID NO: 963818 - RNA, 19 nt, Artificial Sequence
  Description of Artificial Sequence: Synthetic oligonucleotide
gugauagggcguauucaaa

SEQ ID NO: 963819 - RNA, 19 nt, Artificial Sequence
  Description of Artificial Sequence: Synthetic oligonucleotide
cagcauuaauccagauaaa

SEQ ID NO: 963820 - RNA, 19 nt, Artificial Sequence
  Description of Artificial Sequence: Synthetic oligonucleotide
uggggaugaggaggcauuu

SEQ ID NO: 963821 - RNA, 19 nt, Artificial Sequence
  Description of Artificial Sequence: Synthetic oligonucleotide
cgugcaauggagagcagca

SEQ ID NO: 963822 - RNA, 19 nt, Artificial Sequence
  Description of Artificial Sequence: Synthetic oligonucleotide
gcauuugaggagagucacc

SEQ ID NO: 963823 - RNA, 19 nt, Artificial Sequence
  Description of Artificial Sequence: Synthetic oligonucleotide
ccgagaaccaguggucacc

SEQ ID NO: 963824 - RNA, 19 nt, Artificial Sequence
  Description of Artificial Sequence: Synthetic oligonucleotide
ggucagcaacaaaggaaug

SEQ ID NO: 963825 - RNA, 19 nt, Artificial Sequence
  Description of Artificial Sequence: Synthetic oligonucleotide
ggaccguaugcuggaacug

SEQ ID NO: 963826 - RNA, 19 nt, Artificial Sequence
  Description of Artificial Sequence: Synthetic oligonucleotide
caauggagagcagcauuaa

SEQ ID NO: 963827 - RNA, 19 nt, Artificial Sequence
  Description of Artificial Sequence: Synthetic oligonucleotide
cauaggcuggugcuacaua

SEQ ID NO: 963828 - RNA, 19 nt, Artificial Sequence
  Description of Artificial Sequence: Synthetic oligonucleotide
ccgugcaauggagagcagc

SEQ ID NO: 963829 - RNA, 19 nt, Artificial Sequence
  Description of Artificial Sequence: Synthetic oligonucleotide
guguagaagaaugguccgu

SEQ ID NO: 963830 - RNA, 19 nt, Artificial Sequence
  Description of Artificial Sequence: Synthetic oligonucleotide
ccucuugaaaggaaagagu

SEQ ID NO: 963831 - RNA, 19 nt, Artificial Sequence
  Description of Artificial Sequence: Synthetic oligonucleotide
gguagaccguuuccaucca

SEQ ID NO: 963832 - RNA, 19 nt, Artificial Sequence
  Description of Artificial Sequence: Synthetic oligonucleotide
gcauuguacaaagcccaga

SEQ ID NO: 963833 - RNA, 19 nt, Artificial Sequence
  Description of Artificial Sequence: Synthetic oligonucleotide
cggucaagaugacagaaaa

SEQ ID NO: 963834 - RNA, 19 nt, Artificial Sequence
  Description of Artificial Sequence: Synthetic oligonucleotide
cguaugcuggaacugcuga

SEQ ID NO: 963835 - RNA, 19 nt, Artificial Sequence
  Description of Artificial Sequence: Synthetic oligonucleotide
ccguaugcuggaacugcug

SEQ ID NO: 963836 - RNA, 19 nt, Artificial Sequence
  Description of Artificial Sequence: Synthetic oligonucleotide
gaaggaccguaugcuggaa

SEQ ID NO: 963837 - RNA, 19 nt, Artificial Sequence
  Description of Artificial Sequence: Synthetic oligonucleotide
gccgagaaccaguggucac

SEQ ID NO: 963838 - RNA, 19 nt, Artificial Sequence
  Description of Artificial Sequence: Synthetic oligonucleotide
ggcuaucaguguacagaug

SEQ ID NO: 963839 - RNA, 19 nt, Artificial Sequence
  Description of Artificial Sequence: Synthetic oligonucleotide
guccguaaacagaucuacu

SEQ ID NO: 963840 - RNA, 19 nt, Artificial Sequence
  Description of Artificial Sequence: Synthetic oligonucleotide
ccauuguacuggaaaugaa

SEQ ID NO: 963841 - RNA, 19 nt, Artificial Sequence
  Description of Artificial Sequence: Synthetic oligonucleotide
ggagguagaccguuuccau

SEQ ID NO: 963842 - RNA, 19 nt, Artificial Sequence
  Description of Artificial Sequence: Synthetic oligonucleotide
gcaauaugugauagggcgu

SEQ ID NO: 963843 - RNA, 19 nt, Artificial Sequence
  Description of Artificial Sequence: Synthetic oligonucleotide
ccaaguguagaagaauggu

SEQ ID NO: 963844 - RNA, 19 nt, Artificial Sequence
  Description of Artificial Sequence: Synthetic oligonucleotide
caguaagaucgcagcagau

SEQ ID NO: 963845 - RNA, 19 nt, Artificial Sequence
  Description of Artificial Sequence: Synthetic oligonucleotide
ggguugccaaaggggaaac

SEQ ID NO: 963846 - RNA, 19 nt, Artificial Sequence
  Description of Artificial Sequence: Synthetic oligonucleotide
agaucgcagcagauagaua

SEQ ID NO: 963847 - RNA, 19 nt, Artificial Sequence
  Description of Artificial Sequence: Synthetic oligonucleotide
cgaggagguagaccguuuc

SEQ ID NO: 963848 - RNA, 19 nt, Artificial Sequence
  Description of Artificial Sequence: Synthetic oligonucleotide
ggcuaugaaagggcccuaa

SEQ ID NO: 963849 - RNA, 19 nt, Artificial Sequence
  Description of Artificial Sequence: Synthetic oligonucleotide
cuggugcuacauagaggua

SEQ ID NO: 963850 - RNA, 19 nt, Artificial Sequence
  Description of Artificial Sequence: Synthetic oligonucleotide
cccuaacacggacaaagcu

SEQ ID NO: 963851 - RNA, 19 nt, Artificial Sequence
  Description of Artificial Sequence: Synthetic oligonucleotide
ggagaauugcaaggaguau

SEQ ID NO: 963852 - RNA, 19 nt, Artificial Sequence
  Description of Artificial Sequence: Synthetic oligonucleotide
gcccagaaguuuggagccc

SEQ ID NO: 963853 - RNA, 19 nt, Artificial Sequence
  Description of Artificial Sequence: Synthetic oligonucleotide
cugcuuagagagggcaagu

SEQ ID NO: 963854 - RNA, 19 nt, Artificial Sequence
  Description of Artificial Sequence: Synthetic oligonucleotide
ccccgagagccaaagccga

SEQ ID NO: 963855 - RNA, 19 nt, Artificial Sequence
  Description of Artificial Sequence: Synthetic oligonucleotide
gcaaagagaaaugccccuu

SEQ ID NO: 963856 - RNA, 19 nt, Artificial Sequence
  Description of Artificial Sequence: Synthetic oligonucleotide
gcguaaaagaagagugcau

SEQ ID NO: 963857 - RNA, 19 nt, Artificial Sequence
  Description of Artificial Sequence: Synthetic oligonucleotide
cccuugggguuuaaaccaa

SEQ ID NO: 963858 - RNA, 19 nt, Artificial Sequence
  Description of Artificial Sequence: Synthetic oligonucleotide
ggcauaugugaugcccacu

SEQ ID NO: 963859 - RNA, 19 nt, Artificial Sequence
  Description of Artificial Sequence: Synthetic oligonucleotide
gugaugcccacugcacaau

SEQ ID NO: 963860 - RNA, 19 nt, Artificial Sequence
  Description of Artificial Sequence: Synthetic oligonucleotide
gguugccaaaggggaaacu

SEQ ID NO: 963861 - RNA, 19 nt, Artificial Sequence
  Description of Artificial Sequence: Synthetic oligonucleotide
guccugucguggucagaau

SEQ ID NO: 963862 - RNA, 19 nt, Artificial Sequence
  Description of Artificial Sequence: Synthetic oligonucleotide
cccaucggacagugccauc

SEQ ID NO: 963863 - RNA, 19 nt, Artificial Sequence
  Description of Artificial Sequence: Synthetic oligonucleotide
ccauaggcuggugcuacau

SEQ ID NO: 963864 - RNA, 19 nt, Artificial Sequence
  Description of Artificial Sequence: Synthetic oligonucleotide
gggcccuaacacggacaaa

SEQ ID NO: 963865 - RNA, 19 nt, Artificial Sequence
  Description of Artificial Sequence: Synthetic oligonucleotide
cugggcccuugggguuuaa

SEQ ID NO: 963866 - RNA, 19 nt, Artificial Sequence
  Description of Artificial Sequence: Synthetic oligonucleotide
auaauugauaaucacaugg

SEQ ID NO: 963867 - RNA, 19 nt, Artificial Sequence
  Description of Artificial Sequence: Synthetic oligonucleotide
ucaaauuucauacucaggc

SEQ ID NO: 963868 - RNA, 19 nt, Artificial Sequence
  Description of Artificial Sequence: Synthetic oligonucleotide
uuuuauauuauauagcgca

SEQ ID NO: 963869 - RNA, 19 nt, Artificial Sequence
  Description of Artificial Sequence: Synthetic oligonucleotide
aaugauauagacagcaugc

SEQ ID NO: 963870 - RNA, 19 nt, Artificial Sequence
  Description of Artificial Sequence: Synthetic oligonucleotide
acucauaucaauauaaugc

SEQ ID NO: 963871 - RNA, 19 nt, Artificial Sequence
  Description of Artificial Sequence: Synthetic oligonucleotide
aaacguaucaaauuuauaa

SEQ ID NO: 963872 - RNA, 19 nt, Artificial Sequence
  Description of Artificial Sequence: Synthetic oligonucleotide
aaauauagcguauuuagga

SEQ ID NO: 963873 - RNA, 19 nt, Artificial Sequence
  Description of Artificial Sequence: Synthetic oligonucleotide
aaacagagcaaccagugac

SEQ ID NO: 963874 - RNA, 19 nt, Artificial Sequence
  Description of Artificial Sequence: Synthetic oligonucleotide
aacucuauaggcucuaaac

SEQ ID NO: 963875 - RNA, 19 nt, Artificial Sequence
  Description of Artificial Sequence: Synthetic oligonucleotide
uaucucaugaauaaaagga

SEQ ID NO: 963876 - RNA, 19 nt, Artificial Sequence
  Description of Artificial Sequence: Synthetic oligonucleotide
agaaauauagcguauuuag

SEQ ID NO: 963877 - RNA, 19 nt, Artificial Sequence
  Description of Artificial Sequence: Synthetic oligonucleotide
uauauucucaaauauguug

SEQ ID NO: 963878 - RNA, 19 nt, Artificial Sequence
  Description of Artificial Sequence: Synthetic oligonucleotide
ucaaauauguugaugauau

SEQ ID NO: 963879 - RNA, 19 nt, Artificial Sequence
  Description of Artificial Sequence: Synthetic oligonucleotide
agaauauacagcuauucag

SEQ ID NO: 963880 - RNA, 19 nt, Artificial Sequence
  Description of Artificial Sequence: Synthetic oligonucleotide
aauauacagcuauucagag

SEQ ID NO: 963881 - RNA, 19 nt, Artificial Sequence
  Description of Artificial Sequence: Synthetic oligonucleotide
uucucaaauauguugauga

SEQ ID NO: 963882 - RNA, 19 nt, Artificial Sequence
  Description of Artificial Sequence: Synthetic oligonucleotide
aauacgaaaauacacucau

SEQ ID NO: 963883 - RNA, 19 nt, Artificial Sequence
  Description of Artificial Sequence: Synthetic oligonucleotide
uuuaggaugaauaggcuca

SEQ ID NO: 963884 - RNA, 19 nt, Artificial Sequence
  Description of Artificial Sequence: Synthetic oligonucleotide
acaauacuagccuuguccc

SEQ ID NO: 963885 - RNA, 19 nt, Artificial Sequence
  Description of Artificial Sequence: Synthetic oligonucleotide
aguaauaccaacaucauga

SEQ ID NO: 963886 - RNA, 19 nt, Artificial Sequence
  Description of Artificial Sequence: Synthetic oligonucleotide
gacaauacuagccuugucc

SEQ ID NO: 963887 - RNA, 19 nt, Artificial Sequence
  Description of Artificial Sequence: Synthetic oligonucleotide
gaucuauuaagucuuggag

SEQ ID NO: 963888 - RNA, 19 nt, Artificial Sequence
  Description of Artificial Sequence: Synthetic oligonucleotide
aaccggauaauuuuaucuc

SEQ ID NO: 963889 - RNA, 19 nt, Artificial Sequence
  Description of Artificial Sequence: Synthetic oligonucleotide
gaugaauaggcucaguaug

SEQ ID NO: 963890 - RNA, 19 nt, Artificial Sequence
  Description of Artificial Sequence: Synthetic oligonucleotide
gaaaugucgaacauaauug

SEQ ID NO: 963891 - RNA, 19 nt, Artificial Sequence
  Description of Artificial Sequence: Synthetic oligonucleotide
aagucuuggaguuucaggu

SEQ ID NO: 963892 - RNA, 19 nt, Artificial Sequence
  Description of Artificial Sequence: Synthetic oligonucleotide
uuuagcauuuggauuauug

SEQ ID NO: 963893 - RNA, 19 nt, Artificial Sequence
  Description of Artificial Sequence: Synthetic oligonucleotide
uuuaagguugcaaccagag

SEQ ID NO: 963894 - RNA, 19 nt, Artificial Sequence
  Description of Artificial Sequence: Synthetic oligonucleotide
uucaauuuaagguugcaac

SEQ ID NO: 963895 - RNA, 19 nt, Artificial Sequence
  Description of Artificial Sequence: Synthetic oligonucleotide
agguacgcgauuuacaacg

SEQ ID NO: 963896 - RNA, 19 nt, Artificial Sequence
  Description of Artificial Sequence: Synthetic oligonucleotide
ugaaaugucgaacauaauu

SEQ ID NO: 963897 - RNA, 19 nt, Artificial Sequence
  Description of Artificial Sequence: Synthetic oligonucleotide
ucaauuuaagguugcaacc

SEQ ID NO: 963898 - RNA, 19 nt, Artificial Sequence
  Description of Artificial Sequence: Synthetic oligonucleotide
acuaggacaauaaaccugc

SEQ ID NO: 963899 - RNA, 19 nt, Artificial Sequence
  Description of Artificial Sequence: Synthetic oligonucleotide
uggucgaauacccagagga

SEQ ID NO: 963900 - RNA, 19 nt, Artificial Sequence
  Description of Artificial Sequence: Synthetic oligonucleotide
uuugccucuuggaauaugg

SEQ ID NO: 963901 - RNA, 19 nt, Artificial Sequence
  Description of Artificial Sequence: Synthetic oligonucleotide
aaucuuucaagaugacuag

SEQ ID NO: 963902 - RNA, 19 nt, Artificial Sequence
  Description of Artificial Sequence: Synthetic oligonucleotide
agaguaugucccuacaaac

SEQ ID NO: 963903 - RNA, 19 nt, Artificial Sequence
  Description of Artificial Sequence: Synthetic oligonucleotide
gucccuacaaacuuuaucc

SEQ ID NO: 963904 - RNA, 19 nt, Artificial Sequence
  Description of Artificial Sequence: Synthetic oligonucleotide
aauaaaccugccccuugcc

SEQ ID NO: 963905 - RNA, 19 nt, Artificial Sequence
  Description of Artificial Sequence: Synthetic oligonucleotide
ugaaguaauuuucuccucc

SEQ ID NO: 963906 - RNA, 19 nt, Artificial Sequence
  Description of Artificial Sequence: Synthetic oligonucleotide
gaauuggaaguuuauauuc

SEQ ID NO: 963907 - RNA, 19 nt, Artificial Sequence
  Description of Artificial Sequence: Synthetic oligonucleotide
uggaauacgaaaauacacu

SEQ ID NO: 963908 - RNA, 19 nt, Artificial Sequence
  Description of Artificial Sequence: Synthetic oligonucleotide
uggaauauggaaauaaguu

SEQ ID NO: 963909 - RNA, 19 nt, Artificial Sequence
  Description of Artificial Sequence: Synthetic oligonucleotide
uuaaguagggcaacaagcu

SEQ ID NO: 963910 - RNA, 19 nt, Artificial Sequence
  Description of Artificial Sequence: Synthetic oligonucleotide
ugugaaacagagcaaccag

SEQ ID NO: 963911 - RNA, 19 nt, Artificial Sequence
  Description of Artificial Sequence: Synthetic oligonucleotide
guauuuaggaugaauaggc

SEQ ID NO: 963912 - RNA, 19 nt, Artificial Sequence
  Description of Artificial Sequence: Synthetic oligonucleotide
cuaucucaugaauaaaagg

SEQ ID NO: 963913 - RNA, 19 nt, Artificial Sequence
  Description of Artificial Sequence: Synthetic oligonucleotide
aauauagcguauuuaggau

SEQ ID NO: 963914 - RNA, 19 nt, Artificial Sequence
  Description of Artificial Sequence: Synthetic oligonucleotide
cuaguuaacuuaaguaggg

SEQ ID NO: 963915 - RNA, 19 nt, Artificial Sequence
  Description of Artificial Sequence: Synthetic oligonucleotide
uauagcguauuuaggauga

SEQ ID NO: 963916 - RNA, 19 nt, Artificial Sequence
  Description of Artificial Sequence: Synthetic oligonucleotide
cuuugugagaauauacagc

SEQ ID NO: 963917 - RNA, 19 nt, Artificial Sequence
  Description of Artificial Sequence: Synthetic oligonucleotide
ucgaacauaauugauaauc

SEQ ID NO: 963918 - RNA, 19 nt, Artificial Sequence
  Description of Artificial Sequence: Synthetic oligonucleotide
uaugggauuacauuacaga

SEQ ID NO: 963919 - RNA, 19 nt, Artificial Sequence
  Description of Artificial Sequence: Synthetic oligonucleotide
ucaauggucgaauacccag

SEQ ID NO: 963920 - RNA, 19 nt, Artificial Sequence
  Description of Artificial Sequence: Synthetic oligonucleotide
guacagagcaauucaaagg

SEQ ID NO: 963921 - RNA, 19 nt, Artificial Sequence
  Description of Artificial Sequence: Synthetic oligonucleotide
aauuucauacucaggcucg

SEQ ID NO: 963922 - RNA, 19 nt, Artificial Sequence
  Description of Artificial Sequence: Synthetic oligonucleotide
uugaguaaauggauaagca

SEQ ID NO: 963923 - RNA, 19 nt, Artificial Sequence
  Description of Artificial Sequence: Synthetic oligonucleotide
ucuuucaagaugacuagca

SEQ ID NO: 963924 - RNA, 19 nt, Artificial Sequence
  Description of Artificial Sequence: Synthetic oligonucleotide
aaagcaaacguaucaaauu

SEQ ID NO: 963925 - RNA, 19 nt, Artificial Sequence
  Description of Artificial Sequence: Synthetic oligonucleotide
acuugaguuugacacuucc

SEQ ID NO: 963926 - RNA, 19 nt, Artificial Sequence
  Description of Artificial Sequence: Synthetic oligonucleotide
uaauugauaaucacauggu

SEQ ID NO: 963927 - RNA, 19 nt, Artificial Sequence
  Description of Artificial Sequence: Synthetic oligonucleotide
uuggaauauggaaauaagu

SEQ ID NO: 963928 - RNA, 19 nt, Artificial Sequence
  Description of Artificial Sequence: Synthetic oligonucleotide
uaggcucuaaacuaaaggu

SEQ ID NO: 963929 - RNA, 19 nt, Artificial Sequence
  Description of Artificial Sequence: Synthetic oligonucleotide
gauaugcagaacauuagcc

SEQ ID NO: 963930 - RNA, 19 nt, Artificial Sequence
  Description of Artificial Sequence: Synthetic oligonucleotide
aguaaagucaaaauugucu

SEQ ID NO: 963931 - RNA, 19 nt, Artificial Sequence
  Description of Artificial Sequence: Synthetic oligonucleotide
acaacgacaaauggaauac

SEQ ID NO: 963932 - RNA, 19 nt, Artificial Sequence
  Description of Artificial Sequence: Synthetic oligonucleotide
aucuauuaagucuuggagu

SEQ ID NO: 963933 - RNA, 19 nt, Artificial Sequence
  Description of Artificial Sequence: Synthetic oligonucleotide
uaaccggauaauuuuaucu

SEQ ID NO: 963934 - RNA, 19 nt, Artificial Sequence
  Description of Artificial Sequence: Synthetic oligonucleotide
aauggucgaauacccagag

SEQ ID NO: 963935 - RNA, 19 nt, Artificial Sequence
  Description of Artificial Sequence: Synthetic oligonucleotide
ugucgaacauaauugauaa

SEQ ID NO: 963936 - RNA, 19 nt, Artificial Sequence
  Description of Artificial Sequence: Synthetic oligonucleotide
ucuauuaagucuuggaguu

SEQ ID NO: 963937 - RNA, 19 nt, Artificial Sequence
  Description of Artificial Sequence: Synthetic oligonucleotide
ggaagguaaagauugcucg

SEQ ID NO: 963938 - RNA, 19 nt, Artificial Sequence
  Description of Artificial Sequence: Synthetic oligonucleotide
uuauacuggaaagacagga

SEQ ID NO: 963939 - RNA, 19 nt, Artificial Sequence
  Description of Artificial Sequence: Synthetic oligonucleotide
uagggcaacaagcuuauca

SEQ ID NO: 963940 - RNA, 19 nt, Artificial Sequence
  Description of Artificial Sequence: Synthetic oligonucleotide
ucaacugggacuaggacaa

SEQ ID NO: 963941 - RNA, 19 nt, Artificial Sequence
  Description of Artificial Sequence: Synthetic oligonucleotide
ucaguaugggauuacauua

SEQ ID NO: 963942 - RNA, 19 nt, Artificial Sequence
  Description of Artificial Sequence: Synthetic oligonucleotide
uaaacuaaagguacgcgau

SEQ ID NO: 963943 - RNA, 19 nt, Artificial Sequence
  Description of Artificial Sequence: Synthetic oligonucleotide
ucaugaacgauaucuugag

SEQ ID NO: 963944 - RNA, 19 nt, Artificial Sequence
  Description of Artificial Sequence: Synthetic oligonucleotide
aguuaacuuaaguagggca

SEQ ID NO: 963945 - RNA, 19 nt, Artificial Sequence
  Description of Artificial Sequence: Synthetic oligonucleotide
aacaacgacaaauggaaua

SEQ ID NO: 963946 - RNA, 19 nt, Artificial Sequence
  Description of Artificial Sequence: Synthetic oligonucleotide
aaguuuauauucucaaaua

SEQ ID NO: 963947 - RNA, 19 nt, Artificial Sequence
  Description of Artificial Sequence: Synthetic oligonucleotide
guugaugacaauacuagcc

SEQ ID NO: 963948 - RNA, 19 nt, Artificial Sequence
  Description of Artificial Sequence: Synthetic oligonucleotide
uauaaaguccaguagucau

SEQ ID NO: 963949 - RNA, 19 nt, Artificial Sequence
  Description of Artificial Sequence: Synthetic oligonucleotide
aagcaaacguaucaaauuu

SEQ ID NO: 963950 - RNA, 19 nt, Artificial Sequence
  Description of Artificial Sequence: Synthetic oligonucleotide
augacuagcauuccuaaga

SEQ ID NO: 963951 - RNA, 19 nt, Artificial Sequence
  Description of Artificial Sequence: Synthetic oligonucleotide
ugguaaacagcuuugcccu

SEQ ID NO: 963952 - RNA, 19 nt, Artificial Sequence
  Description of Artificial Sequence: Synthetic oligonucleotide
uuuauauuauauagcgcaa

SEQ ID NO: 963953 - RNA, 19 nt, Artificial Sequence
  Description of Artificial Sequence: Synthetic oligonucleotide
ugggacuaggacaauaaac

SEQ ID NO: 963954 - RNA, 19 nt, Artificial Sequence
  Description of Artificial Sequence: Synthetic oligonucleotide
aaaaggaucccuaguuaac

SEQ ID NO: 963955 - RNA, 19 nt, Artificial Sequence
  Description of Artificial Sequence: Synthetic oligonucleotide
aggauaguugugcuugggc

SEQ ID NO: 963956 - RNA, 19 nt, Artificial Sequence
  Description of Artificial Sequence: Synthetic oligonucleotide
auauagcguauuuaggaug

SEQ ID NO: 963957 - RNA, 19 nt, Artificial Sequence
  Description of Artificial Sequence: Synthetic oligonucleotide
ugaucuauuaagucuugga

SEQ ID NO: 963958 - RNA, 19 nt, Artificial Sequence
  Description of Artificial Sequence: Synthetic oligonucleotide
cucgaauuccucaacuggg

SEQ ID NO: 963959 - RNA, 19 nt, Artificial Sequence
  Description of Artificial Sequence: Synthetic oligonucleotide
gauaguugugcuugggcgc

SEQ ID NO: 963960 - RNA, 19 nt, Artificial Sequence
  Description of Artificial Sequence: Synthetic oligonucleotide
ucuauaggcucuaaacuaa

SEQ ID NO: 963961 - RNA, 19 nt, Artificial Sequence
  Description of Artificial Sequence: Synthetic oligonucleotide
acucuauaggcucuaaacu

SEQ ID NO: 963962 - RNA, 19 nt, Artificial Sequence
  Description of Artificial Sequence: Synthetic oligonucleotide
augaacgauaucuugagua

SEQ ID NO: 963963 - RNA, 19 nt, Artificial Sequence
  Description of Artificial Sequence: Synthetic oligonucleotide
cauauaaaguccaguaguc

SEQ ID NO: 963964 - RNA, 19 nt, Artificial Sequence
  Description of Artificial Sequence: Synthetic oligonucleotide
ucuuugguaaacagcuuug

SEQ ID NO: 963965 - RNA, 19 nt, Artificial Sequence
  Description of Artificial Sequence: Synthetic oligonucleotide
ugcacagaaauauagcgua

SEQ ID NO: 963966 - RNA, 19 nt, Artificial Sequence
  Description of Artificial Sequence: Synthetic oligonucleotide
uagcaugcaaacuuuauua

SEQ ID NO: 963967 - RNA, 19 nt, Artificial Sequence
  Description of Artificial Sequence: Synthetic oligonucleotide
acgaaaauacacucauauc

SEQ ID NO: 963968 - RNA, 19 nt, Artificial Sequence
  Description of Artificial Sequence: Synthetic oligonucleotide
uauaggcucuaaacuaaag

SEQ ID NO: 963969 - RNA, 19 nt, Artificial Sequence
  Description of Artificial Sequence: Synthetic oligonucleotide
gaaguaagguccuucaaaa

SEQ ID NO: 963970 - RNA, 19 nt, Artificial Sequence
  Description of Artificial Sequence: Synthetic oligonucleotide
uaaagguacgcgauuuaca

SEQ ID NO: 963971 - RNA, 19 nt, Artificial Sequence
  Description of Artificial Sequence: Synthetic oligonucleotide
gaguuugacacuuccuuug

SEQ ID NO: 963972 - RNA, 19 nt, Artificial Sequence
  Description of Artificial Sequence: Synthetic oligonucleotide
agaaggauaguugugcuug

SEQ ID NO: 963973 - RNA, 19 nt, Artificial Sequence
  Description of Artificial Sequence: Synthetic oligonucleotide
caaucauaacaguaauacc

SEQ ID NO: 963974 - RNA, 19 nt, Artificial Sequence
  Description of Artificial Sequence: Synthetic oligonucleotide
ucuuuaggccagaaccagg

SEQ ID NO: 963975 - RNA, 19 nt, Artificial Sequence
  Description of Artificial Sequence: Synthetic oligonucleotide
aacagagcaaccagugacg

SEQ ID NO: 963976 - RNA, 19 nt, Artificial Sequence
  Description of Artificial Sequence: Synthetic oligonucleotide
agaaccaggacccuacacu

SEQ ID NO: 963977 - RNA, 19 nt, Artificial Sequence
  Description of Artificial Sequence: Synthetic oligonucleotide
ggauaagcaggacugaugc

SEQ ID NO: 963978 - RNA, 19 nt, Artificial Sequence
  Description of Artificial Sequence: Synthetic oligonucleotide
uacgcgauuuacaacggca

SEQ ID NO: 963979 - RNA, 19 nt, Artificial Sequence
  Description of Artificial Sequence: Synthetic oligonucleotide
ggauaguugugcuugggcg

SEQ ID NO: 963980 - RNA, 19 nt, Artificial Sequence
  Description of Artificial Sequence: Synthetic oligonucleotide
augggauuacauuacagaa

SEQ ID NO: 963981 - RNA, 19 nt, Artificial Sequence
  Description of Artificial Sequence: Synthetic oligonucleotide
aaaauugucuguggguuca

SEQ ID NO: 963982 - RNA, 19 nt, Artificial Sequence
  Description of Artificial Sequence: Synthetic oligonucleotide
aauuggaaguuuauauucu

SEQ ID NO: 963983 - RNA, 19 nt, Artificial Sequence
  Description of Artificial Sequence: Synthetic oligonucleotide
ugugcuugggcgcaggccu

SEQ ID NO: 963984 - RNA, 19 nt, Artificial Sequence
  Description of Artificial Sequence: Synthetic oligonucleotide
cuaaacuaaagguacgcga

SEQ ID NO: 963985 - RNA, 19 nt, Artificial Sequence
  Description of Artificial Sequence: Synthetic oligonucleotide
ugaacgauaucuugaguaa

SEQ ID NO: 963986 - RNA, 19 nt, Artificial Sequence
  Description of Artificial Sequence: Synthetic oligonucleotide
uuugcuuaacaaugugaug

SEQ ID NO: 963987 - RNA, 19 nt, Artificial Sequence
  Description of Artificial Sequence: Synthetic oligonucleotide
ccuaguuaacuuaaguagg

SEQ ID NO: 963988 - RNA, 19 nt, Artificial Sequence
  Description of Artificial Sequence: Synthetic oligonucleotide
uggaaguuuauauucucaa

SEQ ID NO: 963989 - RNA, 19 nt, Artificial Sequence
  Description of Artificial Sequence: Synthetic oligonucleotide
ugcccauuaucauuguagc

SEQ ID NO: 963990 - RNA, 19 nt, Artificial Sequence
  Description of Artificial Sequence: Synthetic oligonucleotide
ugggauuacauuacagaaa

SEQ ID NO: 963991 - RNA, 19 nt, Artificial Sequence
  Description of Artificial Sequence: Synthetic oligonucleotide
gugacgacaauacuucagc

SEQ ID NO: 963992 - RNA, 19 nt, Artificial Sequence
  Description of Artificial Sequence: Synthetic oligonucleotide
uuagcaugcaaacuuuauu

SEQ ID NO: 963993 - RNA, 19 nt, Artificial Sequence
  Description of Artificial Sequence: Synthetic oligonucleotide
augaauaggcucaguaugg

SEQ ID NO: 963994 - RNA, 19 nt, Artificial Sequence
  Description of Artificial Sequence: Synthetic oligonucleotide
acugaaguuggaccugcac

SEQ ID NO: 963995 - RNA, 19 nt, Artificial Sequence
  Description of Artificial Sequence: Synthetic oligonucleotide
aaucacauggugauucuca

SEQ ID NO: 963996 - RNA, 19 nt, Artificial Sequence
  Description of Artificial Sequence: Synthetic oligonucleotide
acguaucaaauuuauaaua

SEQ ID NO: 963997 - RNA, 19 nt, Artificial Sequence
  Description of Artificial Sequence: Synthetic oligonucleotide
gacgacaauacuucagcac

SEQ ID NO: 963998 - RNA, 19 nt, Artificial Sequence
  Description of Artificial Sequence: Synthetic oligonucleotide
uuuagcaugcaaacuuuau

SEQ ID NO: 963999 - RNA, 19 nt, Artificial Sequence
  Description of Artificial Sequence: Synthetic oligonucleotide
auugcucgaauuccucaac

SEQ ID NO: 964000 - RNA, 19 nt, Artificial Sequence
  Description of Artificial Sequence: Synthetic oligonucleotide
uggucaauggucgaauacc

SEQ ID NO: 964001 - RNA, 19 nt, Artificial Sequence
  Description of Artificial Sequence: Synthetic oligonucleotide
gaugacuagcauuccuaag

SEQ ID NO: 964002 - RNA, 19 nt, Artificial Sequence
  Description of Artificial Sequence: Synthetic oligonucleotide
ugcuucuucagaaguguca

SEQ ID NO: 964003 - RNA, 19 nt, Artificial Sequence
  Description of Artificial Sequence: Synthetic oligonucleotide
agagcaaccagugacgaca

SEQ ID NO: 964004 - RNA, 19 nt, Artificial Sequence
  Description of Artificial Sequence: Synthetic oligonucleotide
caaccagugacgacaauac

SEQ ID NO: 964005 - RNA, 19 nt, Artificial Sequence
  Description of Artificial Sequence: Synthetic oligonucleotide
cuacacuaggcucuucucc

SEQ ID NO: 964006 - RNA, 19 nt, Artificial Sequence
  Description of Artificial Sequence: Synthetic oligonucleotide
gacuaggacaauaaaccug

SEQ ID NO: 964007 - RNA, 19 nt, Artificial Sequence
  Description of Artificial Sequence: Synthetic oligonucleotide
uauuaagucuuggaguuuc

SEQ ID NO: 964008 - RNA, 19 nt, Artificial Sequence
  Description of Artificial Sequence: Synthetic oligonucleotide
gcacacauauucuucaucc

SEQ ID NO: 964009 - RNA, 19 nt, Artificial Sequence
  Description of Artificial Sequence: Synthetic oligonucleotide
aacgacaaauggaauacga

SEQ ID NO: 964010 - RNA, 19 nt, Artificial Sequence
  Description of Artificial Sequence: Synthetic oligonucleotide
uuaucauuguagcuaucuc

SEQ ID NO: 964011 - RNA, 19 nt, Artificial Sequence
  Description of Artificial Sequence: Synthetic oligonucleotide
ucccuaguuaacuuaagua

SEQ ID NO: 964012 - RNA, 19 nt, Artificial Sequence
  Description of Artificial Sequence: Synthetic oligonucleotide
cauuccuaagauugucucc

SEQ ID NO: 964013 - RNA, 19 nt, Artificial Sequence
  Description of Artificial Sequence: Synthetic oligonucleotide
cccuaguuaacuuaaguag

SEQ ID NO: 964014 - RNA, 19 nt, Artificial Sequence
  Description of Artificial Sequence: Synthetic oligonucleotide
gcuuugugagaauauacag

SEQ ID NO: 964015 - RNA, 19 nt, Artificial Sequence
  Description of Artificial Sequence: Synthetic oligonucleotide
caauacuucagcacugauc

SEQ ID NO: 964016 - RNA, 19 nt, Artificial Sequence
  Description of Artificial Sequence: Synthetic oligonucleotide
ugacucauucuugugaaac

SEQ ID NO: 964017 - RNA, 19 nt, Artificial Sequence
  Description of Artificial Sequence: Synthetic oligonucleotide
aaagauugcucgaauuccu

SEQ ID NO: 964018 - RNA, 19 nt, Artificial Sequence
  Description of Artificial Sequence: Synthetic oligonucleotide
cauaauugauaaucacaug

SEQ ID NO: 964019 - RNA, 19 nt, Artificial Sequence
  Description of Artificial Sequence: Synthetic oligonucleotide
agcacacauauucuucauc

SEQ ID NO: 964020 - RNA, 19 nt, Artificial Sequence
  Description of Artificial Sequence: Synthetic oligonucleotide
gaucugacaaaguuggugu

SEQ ID NO: 964021 - RNA, 19 nt, Artificial Sequence
  Description of Artificial Sequence: Synthetic oligonucleotide
aguaugucccuacaaacuu

SEQ ID NO: 964022 - RNA, 19 nt, Artificial Sequence
  Description of Artificial Sequence: Synthetic oligonucleotide
aucuuucaagaugacuagc

SEQ ID NO: 964023 - RNA, 19 nt, Artificial Sequence
  Description of Artificial Sequence: Synthetic oligonucleotide
uugaugauaugcagaacau

SEQ ID NO: 964024 - RNA, 19 nt, Artificial Sequence
  Description of Artificial Sequence: Synthetic oligonucleotide
agaucugacaaaguuggug

SEQ ID NO: 964025 - RNA, 19 nt, Artificial Sequence
  Description of Artificial Sequence: Synthetic oligonucleotide
gcuuaucaaacucuauagg

SEQ ID NO: 964026 - RNA, 19 nt, Artificial Sequence
  Description of Artificial Sequence: Synthetic oligonucleotide
uggauuugguccauuacuu

SEQ ID NO: 964027 - RNA, 19 nt, Artificial Sequence
  Description of Artificial Sequence: Synthetic oligonucleotide
aggacccuacacuaggcuc

SEQ ID NO: 964028 - RNA, 19 nt, Artificial Sequence
  Description of Artificial Sequence: Synthetic oligonucleotide
gaaggauaguugugcuugg

SEQ ID NO: 964029 - RNA, 19 nt, Artificial Sequence
  Description of Artificial Sequence: Synthetic oligonucleotide
ugucccuacaaacuuuauc

SEQ ID NO: 964030 - RNA, 19 nt, Artificial Sequence
  Description of Artificial Sequence: Synthetic oligonucleotide
uuaacuuaaguagggcaac

SEQ ID NO: 964031 - RNA, 19 nt, Artificial Sequence
  Description of Artificial Sequence: Synthetic oligonucleotide
accaggacccuacacuagg

SEQ ID NO: 964032 - RNA, 19 nt, Artificial Sequence
  Description of Artificial Sequence: Synthetic oligonucleotide
gaagguaaagauugcucga

SEQ ID NO: 964033 - RNA, 19 nt, Artificial Sequence
  Description of Artificial Sequence: Synthetic oligonucleotide
uuauauuauauagcgcaau

SEQ ID NO: 964034 - RNA, 19 nt, Artificial Sequence
  Description of Artificial Sequence: Synthetic oligonucleotide
auaaaaggaucccuaguua

SEQ ID NO: 964035 - RNA, 19 nt, Artificial Sequence
  Description of Artificial Sequence: Synthetic oligonucleotide
agcuauucagaguuugagu

SEQ ID NO: 964036 - RNA, 19 nt, Artificial Sequence
  Description of Artificial Sequence: Synthetic oligonucleotide
uuaagguugcaaccagagu

SEQ ID NO: 964037 - RNA, 19 nt, Artificial Sequence
  Description of Artificial Sequence: Synthetic oligonucleotide
agcauuuggauuauugaca

SEQ ID NO: 964038 - RNA, 19 nt, Artificial Sequence
  Description of Artificial Sequence: Synthetic oligonucleotide
ggaauacgaaaauacacuc

SEQ ID NO: 964039 - RNA, 19 nt, Artificial Sequence
  Description of Artificial Sequence: Synthetic oligonucleotide
accggauaauuuuaucucu

SEQ ID NO: 964040 - RNA, 19 nt, Artificial Sequence
  Description of Artificial Sequence: Synthetic oligonucleotide
gggcugauaaacuugaaga

SEQ ID NO: 964041 - RNA, 19 nt, Artificial Sequence
  Description of Artificial Sequence: Synthetic oligonucleotide
uuucaauuuaagguugcaa

SEQ ID NO: 964042 - RNA, 19 nt, Artificial Sequence
  Description of Artificial Sequence: Synthetic oligonucleotide
aaacuugaagagggguuuc

SEQ ID NO: 964043 - RNA, 19 nt, Artificial Sequence
  Description of Artificial Sequence: Synthetic oligonucleotide
gcaaccagaguccaguucc

SEQ ID NO: 964044 - RNA, 19 nt, Artificial Sequence
  Description of Artificial Sequence: Synthetic oligonucleotide
cgaaaauacacucauauca

SEQ ID NO: 964045 - RNA, 19 nt, Artificial Sequence
  Description of Artificial Sequence: Synthetic oligonucleotide
ugacuagcauuccuaagau

SEQ ID NO: 964046 - RNA, 19 nt, Artificial Sequence
  Description of Artificial Sequence: Synthetic oligonucleotide
ugcacugaugugaaguaau

SEQ ID NO: 964047 - RNA, 19 nt, Artificial Sequence
  Description of Artificial Sequence: Synthetic oligonucleotide
uucuuuaggccagaaccag

SEQ ID NO: 964048 - RNA, 19 nt, Artificial Sequence
  Description of Artificial Sequence: Synthetic oligonucleotide
ucauaacaguaauaccaac

SEQ ID NO: 964049 - RNA, 19 nt, Artificial Sequence
  Description of Artificial Sequence: Synthetic oligonucleotide
cucaacugggacuaggaca

SEQ ID NO: 964050 - RNA, 19 nt, Artificial Sequence
  Description of Artificial Sequence: Synthetic oligonucleotide
ugugaucuauuaagucuug

SEQ ID NO: 964051 - RNA, 19 nt, Artificial Sequence
  Description of Artificial Sequence: Synthetic oligonucleotide
caauaaaccugccccuugc

SEQ ID NO: 964052 - RNA, 19 nt, Artificial Sequence
  Description of Artificial Sequence: Synthetic oligonucleotide
aguaugggauuacauuaca

SEQ ID NO: 964053 - RNA, 19 nt, Artificial Sequence
  Description of Artificial Sequence: Synthetic oligonucleotide
gagggguuucuucuuuagg

SEQ ID NO: 964054 - RNA, 19 nt, Artificial Sequence
  Description of Artificial Sequence: Synthetic oligonucleotide
ccccuuuuauauuauauag

SEQ ID NO: 964055 - RNA, 19 nt, Artificial Sequence
  Description of Artificial Sequence: Synthetic oligonucleotide
auauuccccuuuuauauua

SEQ ID NO: 964056 - RNA, 19 nt, Artificial Sequence
  Description of Artificial Sequence: Synthetic oligonucleotide
aaacucuauaggcucuaaa

SEQ ID NO: 964057 - RNA, 19 nt, Artificial Sequence
  Description of Artificial Sequence: Synthetic oligonucleotide
aagauugcucgaauuccuc

SEQ ID NO: 964058 - RNA, 19 nt, Artificial Sequence
  Description of Artificial Sequence: Synthetic oligonucleotide
uuaaccggauaauuuuauc

SEQ ID NO: 964059 - RNA, 19 nt, Artificial Sequence
  Description of Artificial Sequence: Synthetic oligonucleotide
ugcucgaauuccucaacug

SEQ ID NO: 964060 - RNA, 19 nt, Artificial Sequence
  Description of Artificial Sequence: Synthetic oligonucleotide
gagaguaugucccuacaaa

SEQ ID NO: 964061 - RNA, 19 nt, Artificial Sequence
  Description of Artificial Sequence: Synthetic oligonucleotide
ugacgacaauacuucagca

SEQ ID NO: 964062 - RNA, 19 nt, Artificial Sequence
  Description of Artificial Sequence: Synthetic oligonucleotide
aaacuaaagguacgcgauu

SEQ ID NO: 964063 - RNA, 19 nt, Artificial Sequence
  Description of Artificial Sequence: Synthetic oligonucleotide
acaauaaaccugccccuug

SEQ ID NO: 964064 - RNA, 19 nt, Artificial Sequence
  Description of Artificial Sequence: Synthetic oligonucleotide
cuuaacaaugugaugaaau

SEQ ID NO: 964065 - RNA, 19 nt, Artificial Sequence
  Description of Artificial Sequence: Synthetic oligonucleotide
auauaaaguccaguaguca

SEQ ID NO: 964066 - RNA, 19 nt, Artificial Sequence
  Description of Artificial Sequence: Synthetic oligonucleotide
caauucaaaggacaagaga

SEQ ID NO: 964067 - RNA, 19 nt, Artificial Sequence
  Description of Artificial Sequence: Synthetic oligonucleotide
aacuaaagguacgcgauuu

SEQ ID NO: 964068 - RNA, 19 nt, Artificial Sequence
  Description of Artificial Sequence: Synthetic oligonucleotide
aaggauaguugugcuuggg

SEQ ID NO: 964069 - RNA, 19 nt, Artificial Sequence
  Description of Artificial Sequence: Synthetic oligonucleotide
auuguagcuaucucaugaa

SEQ ID NO: 964070 - RNA, 19 nt, Artificial Sequence
  Description of Artificial Sequence: Synthetic oligonucleotide
agauugcucgaauuccuca

SEQ ID NO: 964071 - RNA, 19 nt, Artificial Sequence
  Description of Artificial Sequence: Synthetic oligonucleotide
aaugucgaacauaauugau

SEQ ID NO: 964072 - RNA, 19 nt, Artificial Sequence
  Description of Artificial Sequence: Synthetic oligonucleotide
cuaaagguacgcgauuuac

SEQ ID NO: 964073 - RNA, 19 nt, Artificial Sequence
  Description of Artificial Sequence: Synthetic oligonucleotide
aucccuaguuaacuuaagu

SEQ ID NO: 964074 - RNA, 19 nt, Artificial Sequence
  Description of Artificial Sequence: Synthetic oligonucleotide
uaguuaacuuaaguagggc

SEQ ID NO: 964075 - RNA, 19 nt, Artificial Sequence
  Description of Artificial Sequence: Synthetic oligonucleotide
aacgauaucuugaguaaau

SEQ ID NO: 964076 - RNA, 19 nt, Artificial Sequence
  Description of Artificial Sequence: Synthetic oligonucleotide
aagaaggauaguugugcuu

SEQ ID NO: 964077 - RNA, 19 nt, Artificial Sequence
  Description of Artificial Sequence: Synthetic oligonucleotide
caguaugggauuacauuac

SEQ ID NO: 964078 - RNA, 19 nt, Artificial Sequence
  Description of Artificial Sequence: Synthetic oligonucleotide
aggaugaauaggcucagua

SEQ ID NO: 964079 - RNA, 19 nt, Artificial Sequence
  Description of Artificial Sequence: Synthetic oligonucleotide
gcguauuuaggaugaauag

SEQ ID NO: 964080 - RNA, 19 nt, Artificial Sequence
  Description of Artificial Sequence: Synthetic oligonucleotide
uccccuuuuauauuauaua

SEQ ID NO: 964081 - RNA, 19 nt, Artificial Sequence
  Description of Artificial Sequence: Synthetic oligonucleotide
uccacuuguacagagcaau

SEQ ID NO: 964082 - RNA, 19 nt, Artificial Sequence
  Description of Artificial Sequence: Synthetic oligonucleotide
ugccucuuggaauauggaa

SEQ ID NO: 964083 - RNA, 19 nt, Artificial Sequence
  Description of Artificial Sequence: Synthetic oligonucleotide
cuuuaggccagaaccagga

SEQ ID NO: 964084 - RNA, 19 nt, Artificial Sequence
  Description of Artificial Sequence: Synthetic oligonucleotide
uugcucgaauuccucaacu

SEQ ID NO: 964085 - RNA, 19 nt, Artificial Sequence
  Description of Artificial Sequence: Synthetic oligonucleotide
agcaugcaaacuuuauuaa

SEQ ID NO: 964086 - RNA, 19 nt, Artificial Sequence
  Description of Artificial Sequence: Synthetic oligonucleotide
aauggauaagcaggacuga

SEQ ID NO: 964087 - RNA, 19 nt, Artificial Sequence
  Description of Artificial Sequence: Synthetic oligonucleotide
gcucgaauuccucaacugg

SEQ ID NO: 964088 - RNA, 19 nt, Artificial Sequence
  Description of Artificial Sequence: Synthetic oligonucleotide
aagguaaagauugcucgaa

SEQ ID NO: 964089 - RNA, 19 nt, Artificial Sequence
  Description of Artificial Sequence: Synthetic oligonucleotide
uucugccaaugauauagac

SEQ ID NO: 964090 - RNA, 19 nt, Artificial Sequence
  Description of Artificial Sequence: Synthetic oligonucleotide
auucucaaauauguugaug

SEQ ID NO: 964091 - RNA, 19 nt, Artificial Sequence
  Description of Artificial Sequence: Synthetic oligonucleotide
cucuauaggcucuaaacua

SEQ ID NO: 964092 - RNA, 19 nt, Artificial Sequence
  Description of Artificial Sequence: Synthetic oligonucleotide
caguaauaccaacaucaug

SEQ ID NO: 964093 - RNA, 19 nt, Artificial Sequence
  Description of Artificial Sequence: Synthetic oligonucleotide
uucauacucaggcucgcua

SEQ ID NO: 964094 - RNA, 19 nt, Artificial Sequence
  Description of Artificial Sequence: Synthetic oligonucleotide
caauacuagccuugucccc

SEQ ID NO: 964095 - RNA, 19 nt, Artificial Sequence
  Description of Artificial Sequence: Synthetic oligonucleotide
uaagauugucucccucaac

SEQ ID NO: 964096 - RNA, 19 nt, Artificial Sequence
  Description of Artificial Sequence: Synthetic oligonucleotide
caagagaguaugucccuac

SEQ ID NO: 964097 - RNA, 19 nt, Artificial Sequence
  Description of Artificial Sequence: Synthetic oligonucleotide
aaccagugacgacaauacu

SEQ ID NO: 964098 - RNA, 19 nt, Artificial Sequence
  Description of Artificial Sequence: Synthetic oligonucleotide
caaaauugucuguggguuc

SEQ ID NO: 964099 - RNA, 19 nt, Artificial Sequence
  Description of Artificial Sequence: Synthetic oligonucleotide
caaugugaugaaaugucga

SEQ ID NO: 964100 - RNA, 19 nt, Artificial Sequence
  Description of Artificial Sequence: Synthetic oligonucleotide
ugcuuaacaaugugaugaa

SEQ ID NO: 964101 - RNA, 19 nt, Artificial Sequence
  Description of Artificial Sequence: Synthetic oligonucleotide
cgauaucuugaguaaaugg

SEQ ID NO: 964102 - RNA, 19 nt, Artificial Sequence
  Description of Artificial Sequence: Synthetic oligonucleotide
agugacgacaauacuucag

SEQ ID NO: 964103 - RNA, 19 nt, Artificial Sequence
  Description of Artificial Sequence: Synthetic oligonucleotide
uauucagaguuugaguauu

SEQ ID NO: 964104 - RNA, 19 nt, Artificial Sequence
  Description of Artificial Sequence: Synthetic oligonucleotide
uuguagcuaucucaugaau

SEQ ID NO: 964105 - RNA, 19 nt, Artificial Sequence
  Description of Artificial Sequence: Synthetic oligonucleotide
gaauaggcucaguauggga

SEQ ID NO: 964106 - RNA, 19 nt, Artificial Sequence
  Description of Artificial Sequence: Synthetic oligonucleotide
gauugcucgaauuccucaa

SEQ ID NO: 964107 - RNA, 19 nt, Artificial Sequence
  Description of Artificial Sequence: Synthetic oligonucleotide
aucauuguagcuaucucau

SEQ ID NO: 964108 - RNA, 19 nt, Artificial Sequence
  Description of Artificial Sequence: Synthetic oligonucleotide
ugaguauuaaccggauaau

SEQ ID NO: 964109 - RNA, 19 nt, Artificial Sequence
  Description of Artificial Sequence: Synthetic oligonucleotide
agagaguaugucccuacaa

SEQ ID NO: 964110 - RNA, 19 nt, Artificial Sequence
  Description of Artificial Sequence: Synthetic oligonucleotide
gauaaacuugaagaggggu

SEQ ID NO: 964111 - RNA, 19 nt, Artificial Sequence
  Description of Artificial Sequence: Synthetic oligonucleotide
agcuaucucaugaauaaaa

SEQ ID NO: 964112 - RNA, 19 nt, Artificial Sequence
  Description of Artificial Sequence: Synthetic oligonucleotide
ucgcuaacaguuucaguuc

SEQ ID NO: 964113 - RNA, 19 nt, Artificial Sequence
  Description of Artificial Sequence: Synthetic oligonucleotide
uaacuuaaguagggcaaca

SEQ ID NO: 964114 - RNA, 19 nt, Artificial Sequence
  Description of Artificial Sequence: Synthetic oligonucleotide
accaacaucaugaacgaua

SEQ ID NO: 964115 - RNA, 19 nt, Artificial Sequence
  Description of Artificial Sequence: Synthetic oligonucleotide
agcguauuuaggaugaaua

SEQ ID NO: 964116 - RNA, 19 nt, Artificial Sequence
  Description of Artificial Sequence: Synthetic oligonucleotide
ggcucuaaacuaaagguac

SEQ ID NO: 964117 - RNA, 19 nt, Artificial Sequence
  Description of Artificial Sequence: Synthetic oligonucleotide
cucgcuaacaguuucaguu

SEQ ID NO: 964118 - RNA, 19 nt, Artificial Sequence
  Description of Artificial Sequence: Synthetic oligonucleotide
uuuaggccagaaccaggac

SEQ ID NO: 964119 - RNA, 19 nt, Artificial Sequence
  Description of Artificial Sequence: Synthetic oligonucleotide
auggucgaauacccagagg

SEQ ID NO: 964120 - RNA, 19 nt, Artificial Sequence
  Description of Artificial Sequence: Synthetic oligonucleotide
agacagcaugcugaggagg

SEQ ID NO: 964121 - RNA, 19 nt, Artificial Sequence
  Description of Artificial Sequence: Synthetic oligonucleotide
acgauaucuugaguaaaug

SEQ ID NO: 964122 - RNA, 19 nt, Artificial Sequence
  Description of Artificial Sequence: Synthetic oligonucleotide
gaaccaggacccuacacua

SEQ ID NO: 964123 - RNA, 19 nt, Artificial Sequence
  Description of Artificial Sequence: Synthetic oligonucleotide
ggcaauaaguccugcagca

SEQ ID NO: 964124 - RNA, 19 nt, Artificial Sequence
  Description of Artificial Sequence: Synthetic oligonucleotide
ugaugacaauacuagccuu

SEQ ID NO: 964125 - RNA, 19 nt, Artificial Sequence
  Description of Artificial Sequence: Synthetic oligonucleotide
cuuguacagagcaauucaa

SEQ ID NO: 964126 - RNA, 19 nt, Artificial Sequence
  Description of Artificial Sequence: Synthetic oligonucleotide
gugguguugaugacaauac

SEQ ID NO: 964127 - RNA, 19 nt, Artificial Sequence
  Description of Artificial Sequence: Synthetic oligonucleotide
ucuggaaguaagguccuuc

SEQ ID NO: 964128 - RNA, 19 nt, Artificial Sequence
  Description of Artificial Sequence: Synthetic oligonucleotide
aaauaaguucagacuuagu

SEQ ID NO: 964129 - RNA, 19 nt, Artificial Sequence
  Description of Artificial Sequence: Synthetic oligonucleotide
agagcaauucaaaggacaa

SEQ ID NO: 964130 - RNA, 19 nt, Artificial Sequence
  Description of Artificial Sequence: Synthetic oligonucleotide
ucaaggcuuugugagaaua

SEQ ID NO: 964131 - RNA, 19 nt, Artificial Sequence
  Description of Artificial Sequence: Synthetic oligonucleotide
accagugacgacaauacuu

SEQ ID NO: 964132 - RNA, 19 nt, Artificial Sequence
  Description of Artificial Sequence: Synthetic oligonucleotide
ggaaguaagguccuucaaa

SEQ ID NO: 964133 - RNA, 19 nt, Artificial Sequence
  Description of Artificial Sequence: Synthetic oligonucleotide
cagacuuagugaacauuuc

SEQ ID NO: 964134 - RNA, 19 nt, Artificial Sequence
  Description of Artificial Sequence: Synthetic oligonucleotide
aagagggguuucuucuuua

SEQ ID NO: 964135 - RNA, 19 nt, Artificial Sequence
  Description of Artificial Sequence: Synthetic oligonucleotide
gggauuacauuacagaaau

SEQ ID NO: 964136 - RNA, 19 nt, Artificial Sequence
  Description of Artificial Sequence: Synthetic oligonucleotide
aacuacaguuucugccaau

SEQ ID NO: 964137 - RNA, 19 nt, Artificial Sequence
  Description of Artificial Sequence: Synthetic oligonucleotide
ugcagaacauuagccuuug

SEQ ID NO: 964138 - RNA, 19 nt, Artificial Sequence
  Description of Artificial Sequence: Synthetic oligonucleotide
ugccaaugauauagacagc

SEQ ID NO: 964139 - RNA, 19 nt, Artificial Sequence
  Description of Artificial Sequence: Synthetic oligonucleotide
caacgacaaauggaauacg

SEQ ID NO: 964140 - RNA, 19 nt, Artificial Sequence
  Description of Artificial Sequence: Synthetic oligonucleotide
aauacccagaggaguuuca

SEQ ID NO: 964141 - RNA, 19 nt, Artificial Sequence
  Description of Artificial Sequence: Synthetic oligonucleotide
augacaauacuagccuugu

SEQ ID NO: 964142 - RNA, 19 nt, Artificial Sequence
  Description of Artificial Sequence: Synthetic oligonucleotide
ggaguuucaauuuaagguu

SEQ ID NO: 964143 - RNA, 19 nt, Artificial Sequence
  Description of Artificial Sequence: Synthetic oligonucleotide
augucgaacauaauugaua

SEQ ID NO: 964144 - RNA, 19 nt, Artificial Sequence
  Description of Artificial Sequence: Synthetic oligonucleotide
auuuaagguugcaaccaga

SEQ ID NO: 964145 - RNA, 19 nt, Artificial Sequence
  Description of Artificial Sequence: Synthetic oligonucleotide
guaagguccuucaaaaggu

SEQ ID NO: 964146 - RNA, 19 nt, Artificial Sequence
  Description of Artificial Sequence: Synthetic oligonucleotide
gcauuuggauuauugacaa

SEQ ID NO: 964147 - RNA, 19 nt, Artificial Sequence
  Description of Artificial Sequence: Synthetic oligonucleotide
cuggaaguaagguccuuca

SEQ ID NO: 964148 - RNA, 19 nt, Artificial Sequence
  Description of Artificial Sequence: Synthetic oligonucleotide
cacuuguacagagcaauuc

SEQ ID NO: 964149 - RNA, 19 nt, Artificial Sequence
  Description of Artificial Sequence: Synthetic oligonucleotide
gcacugaucagcucucuug

SEQ ID NO: 964150 - RNA, 19 nt, Artificial Sequence
  Description of Artificial Sequence: Synthetic oligonucleotide
gaucccuaguuaacuuaag

SEQ ID NO: 964151 - RNA, 19 nt, Artificial Sequence
  Description of Artificial Sequence: Synthetic oligonucleotide
aggaucccuaguuaacuua

SEQ ID NO: 964152 - RNA, 19 nt, Artificial Sequence
  Description of Artificial Sequence: Synthetic oligonucleotide
ugaagagggguuucuucuu

SEQ ID NO: 964153 - RNA, 19 nt, Artificial Sequence
  Description of Artificial Sequence: Synthetic oligonucleotide
auacuagccuuguccccag

SEQ ID NO: 964154 - RNA, 19 nt, Artificial Sequence
  Description of Artificial Sequence: Synthetic oligonucleotide
auaguugugcuugggcgca

SEQ ID NO: 964155 - RNA, 19 nt, Artificial Sequence
  Description of Artificial Sequence: Synthetic oligonucleotide
uguugaugauaugcagaac

SEQ ID NO: 964156 - RNA, 19 nt, Artificial Sequence
  Description of Artificial Sequence: Synthetic oligonucleotide
acgcgauuuacaacggcag

SEQ ID NO: 964157 - RNA, 19 nt, Artificial Sequence
  Description of Artificial Sequence: Synthetic oligonucleotide
ugacaauacuagccuuguc

SEQ ID NO: 964158 - RNA, 19 nt, Artificial Sequence
  Description of Artificial Sequence: Synthetic oligonucleotide
agcauuccuaagauugucu

SEQ ID NO: 964159 - RNA, 19 nt, Artificial Sequence
  Description of Artificial Sequence: Synthetic oligonucleotide
auacuucagcacugaucag

SEQ ID NO: 964160 - RNA, 19 nt, Artificial Sequence
  Description of Artificial Sequence: Synthetic oligonucleotide
caauggucgaauacccaga

SEQ ID NO: 964161 - RNA, 19 nt, Artificial Sequence
  Description of Artificial Sequence: Synthetic oligonucleotide
auuuuggucaauggucgaa

SEQ ID NO: 964162 - RNA, 19 nt, Artificial Sequence
  Description of Artificial Sequence: Synthetic oligonucleotide
guaaauggauaagcaggac

SEQ ID NO: 964163 - RNA, 19 nt, Artificial Sequence
  Description of Artificial Sequence: Synthetic oligonucleotide
caaccagaguccaguuccc

SEQ ID NO: 964164 - RNA, 19 nt, Artificial Sequence
  Description of Artificial Sequence: Synthetic oligonucleotide
guucaaggcuuugugagaa

SEQ ID NO: 964165 - RNA, 19 nt, Artificial Sequence
  Description of Artificial Sequence: Synthetic oligonucleotide
uaaucacauggugauucuc

SEQ ID NO: 964166 - RNA, 19 nt, Artificial Sequence
  Description of Artificial Sequence: Synthetic oligonucleotide
gaguaugucccuacaaacu

SEQ ID NO: 964167 - RNA, 19 nt, Artificial Sequence
  Description of Artificial Sequence: Synthetic oligonucleotide
guacgcgauuuacaacggc

SEQ ID NO: 964168 - RNA, 19 nt, Artificial Sequence
  Description of Artificial Sequence: Synthetic oligonucleotide
aaccaggacccuacacuag

SEQ ID NO: 964169 - RNA, 19 nt, Artificial Sequence
  Description of Artificial Sequence: Synthetic oligonucleotide
acaagcuuaucaaacucua

SEQ ID NO: 964170 - RNA, 19 nt, Artificial Sequence
  Description of Artificial Sequence: Synthetic oligonucleotide
acucaggcucgcuaacagu

SEQ ID NO: 964171 - RNA, 19 nt, Artificial Sequence
  Description of Artificial Sequence: Synthetic oligonucleotide
gcucuaaacuaaagguacg

SEQ ID NO: 964172 - RNA, 19 nt, Artificial Sequence
  Description of Artificial Sequence: Synthetic oligonucleotide
gaacgauaucuugaguaaa

SEQ ID NO: 964173 - RNA, 19 nt, Artificial Sequence
  Description of Artificial Sequence: Synthetic oligonucleotide
uugacucauucuugugaaa

SEQ ID NO: 964174 - RNA, 19 nt, Artificial Sequence
  Description of Artificial Sequence: Synthetic oligonucleotide
cagaaccaggacccuacac

SEQ ID NO: 964175 - RNA, 19 nt, Artificial Sequence
  Description of Artificial Sequence: Synthetic oligonucleotide
aacugggacuaggacaaua

SEQ ID NO: 964176 - RNA, 19 nt, Artificial Sequence
  Description of Artificial Sequence: Synthetic oligonucleotide
cucccucaacacagaaagc

SEQ ID NO: 964177 - RNA, 19 nt, Artificial Sequence
  Description of Artificial Sequence: Synthetic oligonucleotide
gguguugaugacaauacua

SEQ ID NO: 964178 - RNA, 19 nt, Artificial Sequence
  Description of Artificial Sequence: Synthetic oligonucleotide
acaguaauaccaacaucau

SEQ ID NO: 964179 - RNA, 19 nt, Artificial Sequence
  Description of Artificial Sequence: Synthetic oligonucleotide
acgacaaauggaauacgaa

SEQ ID NO: 964180 - RNA, 19 nt, Artificial Sequence
  Description of Artificial Sequence: Synthetic oligonucleotide
auggauaagcaggacugau

SEQ ID NO: 964181 - RNA, 19 nt, Artificial Sequence
  Description of Artificial Sequence: Synthetic oligonucleotide
gacaagagaguaugucccu

SEQ ID NO: 964182 - RNA, 19 nt, Artificial Sequence
  Description of Artificial Sequence: Synthetic oligonucleotide
caaacguaucaaauuuaua

SEQ ID NO: 964183 - RNA, 19 nt, Artificial Sequence
  Description of Artificial Sequence: Synthetic oligonucleotide
aaccagaguccaguucccu

SEQ ID NO: 964184 - RNA, 19 nt, Artificial Sequence
  Description of Artificial Sequence: Synthetic oligonucleotide
auacucaggcucgcuaaca

SEQ ID NO: 964185 - RNA, 19 nt, Artificial Sequence
  Description of Artificial Sequence: Synthetic oligonucleotide
uuucccggauuuugguuuu

SEQ ID NO: 964186 - RNA, 19 nt, Artificial Sequence
  Description of Artificial Sequence: Synthetic oligonucleotide
aguagggcaacaagcuuau

SEQ ID NO: 964187 - RNA, 19 nt, Artificial Sequence
  Description of Artificial Sequence: Synthetic oligonucleotide
cagaaagcaaacguaucaa

SEQ ID NO: 964188 - RNA, 19 nt, Artificial Sequence
  Description of Artificial Sequence: Synthetic oligonucleotide
gcucucuuguauuggcuug

SEQ ID NO: 964189 - RNA, 19 nt, Artificial Sequence
  Description of Artificial Sequence: Synthetic oligonucleotide
ugaugcccauuaucauugu

SEQ ID NO: 964190 - RNA, 19 nt, Artificial Sequence
  Description of Artificial Sequence: Synthetic oligonucleotide
uagcuaucucaugaauaaa

SEQ ID NO: 964191 - RNA, 19 nt, Artificial Sequence
  Description of Artificial Sequence: Synthetic oligonucleotide
gguacgcgauuuacaacgg

SEQ ID NO: 964192 - RNA, 19 nt, Artificial Sequence
  Description of Artificial Sequence: Synthetic oligonucleotide
gaugcccauuaucauugua

SEQ ID NO: 964193 - RNA, 19 nt, Artificial Sequence
  Description of Artificial Sequence: Synthetic oligonucleotide
ggucgaauacccagaggag

SEQ ID NO: 964194 - RNA, 19 nt, Artificial Sequence
  Description of Artificial Sequence: Synthetic oligonucleotide
cacuggcacucacauuuac

SEQ ID NO: 964195 - RNA, 19 nt, Artificial Sequence
  Description of Artificial Sequence: Synthetic oligonucleotide
cagagcaaccagugacgac

SEQ ID NO: 964196 - RNA, 19 nt, Artificial Sequence
  Description of Artificial Sequence: Synthetic oligonucleotide
gucgaauacccagaggagu

SEQ ID NO: 964197 - RNA, 19 nt, Artificial Sequence
  Description of Artificial Sequence: Synthetic oligonucleotide
cuuucccggauuuugguuu

SEQ ID NO: 964198 - RNA, 19 nt, Artificial Sequence
  Description of Artificial Sequence: Synthetic oligonucleotide
ggaugaauaggcucaguau

SEQ ID NO: 964199 - RNA, 19 nt, Artificial Sequence
  Description of Artificial Sequence: Synthetic oligonucleotide
agaguccaguucccuucug

SEQ ID NO: 964200 - RNA, 19 nt, Artificial Sequence
  Description of Artificial Sequence: Synthetic oligonucleotide
gcaauaaguccugcagcag

SEQ ID NO: 964201 - RNA, 19 nt, Artificial Sequence
  Description of Artificial Sequence: Synthetic oligonucleotide
cgacaaauggaauacgaaa

SEQ ID NO: 964202 - RNA, 19 nt, Artificial Sequence
  Description of Artificial Sequence: Synthetic oligonucleotide
agucuggaaguaagguccu

SEQ ID NO: 964203 - RNA, 19 nt, Artificial Sequence
  Description of Artificial Sequence: Synthetic oligonucleotide
cucaggcucgcuaacaguu

SEQ ID NO: 964204 - RNA, 19 nt, Artificial Sequence
  Description of Artificial Sequence: Synthetic oligonucleotide
cagugacgacaauacuuca

SEQ ID NO: 964205 - RNA, 19 nt, Artificial Sequence
  Description of Artificial Sequence: Synthetic oligonucleotide
guuugacacuuccuuugcu

SEQ ID NO: 964206 - RNA, 19 nt, Artificial Sequence
  Description of Artificial Sequence: Synthetic oligonucleotide
auacgaaaauacacucaua

SEQ ID NO: 964207 - RNA, 19 nt, Artificial Sequence
  Description of Artificial Sequence: Synthetic oligonucleotide
gucaaacuguuuugccucu

SEQ ID NO: 964208 - RNA, 19 nt, Artificial Sequence
  Description of Artificial Sequence: Synthetic oligonucleotide
ggacaauaaaccugccccu

SEQ ID NO: 964209 - RNA, 19 nt, Artificial Sequence
  Description of Artificial Sequence: Synthetic oligonucleotide
ggucacugugaucuauuaa

SEQ ID NO: 964210 - RNA, 19 nt, Artificial Sequence
  Description of Artificial Sequence: Synthetic oligonucleotide
cacacauauucuucauccu

SEQ ID NO: 964211 - RNA, 19 nt, Artificial Sequence
  Description of Artificial Sequence: Synthetic oligonucleotide
gcaaccagugacgacaaua

SEQ ID NO: 964212 - RNA, 19 nt, Artificial Sequence
  Description of Artificial Sequence: Synthetic oligonucleotide
caacuacaguuucugccaa

SEQ ID NO: 964213 - RNA, 19 nt, Artificial Sequence
  Description of Artificial Sequence: Synthetic oligonucleotide
cugggacuaggacaauaaa

SEQ ID NO: 964214 - RNA, 19 nt, Artificial Sequence
  Description of Artificial Sequence: Synthetic oligonucleotide
ggaucccuaguuaacuuaa

SEQ ID NO: 964215 - RNA, 19 nt, Artificial Sequence
  Description of Artificial Sequence: Synthetic oligonucleotide
cgcgauuuacaacggcagg

SEQ ID NO: 964216 - RNA, 19 nt, Artificial Sequence
  Description of Artificial Sequence: Synthetic oligonucleotide
ccaaguguucaaucuuuca

SEQ ID NO: 964217 - RNA, 19 nt, Artificial Sequence
  Description of Artificial Sequence: Synthetic oligonucleotide
caugaacgauaucuugagu

SEQ ID NO: 964218 - RNA, 19 nt, Artificial Sequence
  Description of Artificial Sequence: Synthetic oligonucleotide
caaggcuuugugagaauau

SEQ ID NO: 964219 - RNA, 19 nt, Artificial Sequence
  Description of Artificial Sequence: Synthetic oligonucleotide
ccuacacuaggcucuucuc

SEQ ID NO: 964220 - RNA, 19 nt, Artificial Sequence
  Description of Artificial Sequence: Synthetic oligonucleotide
gacaauaaaccugccccuu

SEQ ID NO: 964221 - RNA, 19 nt, Artificial Sequence
  Description of Artificial Sequence: Synthetic oligonucleotide
gcaaacguaucaaauuuau

SEQ ID NO: 964222 - RNA, 19 nt, Artificial Sequence
  Description of Artificial Sequence: Synthetic oligonucleotide
cuccacuuguacagagcaa

SEQ ID NO: 964223 - RNA, 19 nt, Artificial Sequence
  Description of Artificial Sequence: Synthetic oligonucleotide
auagcguauuuaggaugaa

SEQ ID NO: 964224 - RNA, 19 nt, Artificial Sequence
  Description of Artificial Sequence: Synthetic oligonucleotide
ggaauguucaaggcuuugu

SEQ ID NO: 964225 - RNA, 19 nt, Artificial Sequence
  Description of Artificial Sequence: Synthetic oligonucleotide
acucacauuuacaguucua

SEQ ID NO: 964226 - RNA, 19 nt, Artificial Sequence
  Description of Artificial Sequence: Synthetic oligonucleotide
gguugcaaccagaguccag

SEQ ID NO: 964227 - RNA, 19 nt, Artificial Sequence
  Description of Artificial Sequence: Synthetic oligonucleotide
gcgauuuacaacggcaggu

SEQ ID NO: 964228 - RNA, 19 nt, Artificial Sequence
  Description of Artificial Sequence: Synthetic oligonucleotide
gucgaacauaauugauaau

SEQ ID NO: 964229 - RNA, 19 nt, Artificial Sequence
  Description of Artificial Sequence: Synthetic oligonucleotide
cacugaaguuggaccugca

SEQ ID NO: 964230 - RNA, 19 nt, Artificial Sequence
  Description of Artificial Sequence: Synthetic oligonucleotide
gcacucacauuuacaguuc

SEQ ID NO: 964231 - RNA, 19 nt, Artificial Sequence
  Description of Artificial Sequence: Synthetic oligonucleotide
gccacuccaaggccaccag

SEQ ID NO: 964232 - RNA, 19 nt, Artificial Sequence
  Description of Artificial Sequence: Synthetic oligonucleotide
cugacaaaguugguguuuu

SEQ ID NO: 964233 - RNA, 19 nt, Artificial Sequence
  Description of Artificial Sequence: Synthetic oligonucleotide
gcuuaacaaugugaugaaa

SEQ ID NO: 964234 - RNA, 19 nt, Artificial Sequence
  Description of Artificial Sequence: Synthetic oligonucleotide
gccaaguguucaaucuuuc

SEQ ID NO: 964235 - RNA, 19 nt, Artificial Sequence
  Description of Artificial Sequence: Synthetic oligonucleotide
caaacucuauaggcucuaa

SEQ ID NO: 964236 - RNA, 19 nt, Artificial Sequence
  Description of Artificial Sequence: Synthetic oligonucleotide
cagcuaaagucuggaagua

SEQ ID NO: 964237 - RNA, 19 nt, Artificial Sequence
  Description of Artificial Sequence: Synthetic oligonucleotide
ggcucaguaugggauuaca

SEQ ID NO: 964238 - RNA, 19 nt, Artificial Sequence
  Description of Artificial Sequence: Synthetic oligonucleotide
ggacccuacacuaggcucu

SEQ ID NO: 964239 - RNA, 19 nt, Artificial Sequence
  Description of Artificial Sequence: Synthetic oligonucleotide
guaaacagcuuugcccuuu

SEQ ID NO: 964240 - RNA, 19 nt, Artificial Sequence
  Description of Artificial Sequence: Synthetic oligonucleotide
ggugauucucaaauuucau

SEQ ID NO: 964241 - RNA, 19 nt, Artificial Sequence
  Description of Artificial Sequence: Synthetic oligonucleotide
augucccuacaaacuuuau

SEQ ID NO: 964242 - RNA, 19 nt, Artificial Sequence
  Description of Artificial Sequence: Synthetic oligonucleotide
ggaccugcacugaugugaa

SEQ ID NO: 964243 - RNA, 19 nt, Artificial Sequence
  Description of Artificial Sequence: Synthetic oligonucleotide
acccuacacuaggcucuuc

SEQ ID NO: 964244 - RNA, 19 nt, Artificial Sequence
  Description of Artificial Sequence: Synthetic oligonucleotide
cuauuaagucuuggaguuu

SEQ ID NO: 964245 - RNA, 19 nt, Artificial Sequence
  Description of Artificial Sequence: Synthetic oligonucleotide
guagggcaacaagcuuauc

SEQ ID NO: 964246 - RNA, 19 nt, Artificial Sequence
  Description of Artificial Sequence: Synthetic oligonucleotide
cccuacacuaggcucuucu

SEQ ID NO: 964247 - RNA, 19 nt, Artificial Sequence
  Description of Artificial Sequence: Synthetic oligonucleotide
gcucaguaugggauuacau

SEQ ID NO: 964248 - RNA, 19 nt, Artificial Sequence
  Description of Artificial Sequence: Synthetic oligonucleotide
gacccuacacuaggcucuu

SEQ ID NO: 964249 - RNA, 19 nt, Artificial Sequence
  Description of Artificial Sequence: Synthetic oligonucleotide
gcuugggcgcaggccugug

SEQ ID NO: 964250 - RNA, 19 nt, Artificial Sequence
  Description of Artificial Sequence: Synthetic oligonucleotide
ccacuuguacagagcaauu

SEQ ID NO: 964251 - RNA, 19 nt, Artificial Sequence
  Description of Artificial Sequence: Synthetic oligonucleotide
cgauuuacaacggcagguu

SEQ ID NO: 964252 - RNA, 19 nt, Artificial Sequence
  Description of Artificial Sequence: Synthetic oligonucleotide
cgaauacccagaggaguuu

SEQ ID NO: 964253 - RNA, 19 nt, Artificial Sequence
  Description of Artificial Sequence: Synthetic oligonucleotide
aaaguaugaaaauacaguc

SEQ ID NO: 964254 - RNA, 19 nt, Artificial Sequence
  Description of Artificial Sequence: Synthetic oligonucleotide
uuuacaucauacaacaggg

SEQ ID NO: 964255 - RNA, 19 nt, Artificial Sequence
  Description of Artificial Sequence: Synthetic oligonucleotide
aauacaguccuuuaaaugu

SEQ ID NO: 964256 - RNA, 19 nt, Artificial Sequence
  Description of Artificial Sequence: Synthetic oligonucleotide
aguacuuauacucauaaag

SEQ ID NO: 964257 - RNA, 19 nt, Artificial Sequence
  Description of Artificial Sequence: Synthetic oligonucleotide
aacacaacuauuuuguaag

SEQ ID NO: 964258 - RNA, 19 nt, Artificial Sequence
  Description of Artificial Sequence: Synthetic oligonucleotide
aaaauuaaccccucucggc

SEQ ID NO: 964259 - RNA, 19 nt, Artificial Sequence
  Description of Artificial Sequence: Synthetic oligonucleotide
aaaagugagacugagcugg

SEQ ID NO: 964260 - RNA, 19 nt, Artificial Sequence
  Description of Artificial Sequence: Synthetic oligonucleotide
aaucauucagcauaggcug

SEQ ID NO: 964261 - RNA, 19 nt, Artificial Sequence
  Description of Artificial Sequence: Synthetic oligonucleotide
aucaguacaguacuuauac

SEQ ID NO: 964262 - RNA, 19 nt, Artificial Sequence
  Description of Artificial Sequence: Synthetic oligonucleotide
auaucuaccauguggaggg

SEQ ID NO: 964263 - RNA, 19 nt, Artificial Sequence
  Description of Artificial Sequence: Synthetic oligonucleotide
ugauaaaccggucaguaag

SEQ ID NO: 964264 - RNA, 19 nt, Artificial Sequence
  Description of Artificial Sequence: Synthetic oligonucleotide
aacaugggcauaucaauac

SEQ ID NO: 964265 - RNA, 19 nt, Artificial Sequence
  Description of Artificial Sequence: Synthetic oligonucleotide
auuaaguccacaucaguac

SEQ ID NO: 964266 - RNA, 19 nt, Artificial Sequence
  Description of Artificial Sequence: Synthetic oligonucleotide
aaguuuaacacacuguuau

SEQ ID NO: 964267 - RNA, 19 nt, Artificial Sequence
  Description of Artificial Sequence: Synthetic oligonucleotide
ugagaagucauagagaucu

SEQ ID NO: 964268 - RNA, 19 nt, Artificial Sequence
  Description of Artificial Sequence: Synthetic oligonucleotide
ucugcuuauggaaucaucc

SEQ ID NO: 964269 - RNA, 19 nt, Artificial Sequence
  Description of Artificial Sequence: Synthetic oligonucleotide
aauaucuaccauguggagg

SEQ ID NO: 964270 - RNA, 19 nt, Artificial Sequence
  Description of Artificial Sequence: Synthetic oligonucleotide
aaagguaguguaacaaggc

SEQ ID NO: 964271 - RNA, 19 nt, Artificial Sequence
  Description of Artificial Sequence: Synthetic oligonucleotide
aaauuaaccccucucggca

SEQ ID NO: 964272 - RNA, 19 nt, Artificial Sequence
  Description of Artificial Sequence: Synthetic oligonucleotide
uggaauacaugagagaugc

SEQ ID NO: 964273 - RNA, 19 nt, Artificial Sequence
  Description of Artificial Sequence: Synthetic oligonucleotide
acaacauccaagcguaucg

SEQ ID NO: 964274 - RNA, 19 nt, Artificial Sequence
  Description of Artificial Sequence: Synthetic oligonucleotide
aaaucauucagcauaggcu

SEQ ID NO: 964275 - RNA, 19 nt, Artificial Sequence
  Description of Artificial Sequence: Synthetic oligonucleotide
gaugcuucacaucucaggc

SEQ ID NO: 964276 - RNA, 19 nt, Artificial Sequence
  Description of Artificial Sequence: Synthetic oligonucleotide
aaaacaugggcauaucaau

SEQ ID NO: 964277 - RNA, 19 nt, Artificial Sequence
  Description of Artificial Sequence: Synthetic oligonucleotide
uuagugugcaacccaaugc

SEQ ID NO: 964278 - RNA, 19 nt, Artificial Sequence
  Description of Artificial Sequence: Synthetic oligonucleotide
gaaagucugaccucugggg

SEQ ID NO: 964279 - RNA, 19 nt, Artificial Sequence
  Description of Artificial Sequence: Synthetic oligonucleotide
aucaucccuuuccagaucc

SEQ ID NO: 964280 - RNA, 19 nt, Artificial Sequence
  Description of Artificial Sequence: Synthetic oligonucleotide
guacuuauacucauaaagg

SEQ ID NO: 964281 - RNA, 19 nt, Artificial Sequence
  Description of Artificial Sequence: Synthetic oligonucleotide
ugcacguggaaacugguag

SEQ ID NO: 964282 - RNA, 19 nt, Artificial Sequence
  Description of Artificial Sequence: Synthetic oligonucleotide
uacuuauacucauaaaggu

SEQ ID NO: 964283 - RNA, 19 nt, Artificial Sequence
  Description of Artificial Sequence: Synthetic oligonucleotide
ugcucaacaacauccaagc

SEQ ID NO: 964284 - RNA, 19 nt, Artificial Sequence
  Description of Artificial Sequence: Synthetic oligonucleotide
ugguacacacaaaagagac

SEQ ID NO: 964285 - RNA, 19 nt, Artificial Sequence
  Description of Artificial Sequence: Synthetic oligonucleotide
aaaagagacggaugcagca

SEQ ID NO: 964286 - RNA, 19 nt, Artificial Sequence
  Description of Artificial Sequence: Synthetic oligonucleotide
caaaauuaaccccucucgg

SEQ ID NO: 964287 - RNA, 19 nt, Artificial Sequence
  Description of Artificial Sequence: Synthetic oligonucleotide
aagucaaguccguuucuac

SEQ ID NO: 964288 - RNA, 19 nt, Artificial Sequence
  Description of Artificial Sequence: Synthetic oligonucleotide
uuuaacaccuggcauucug

SEQ ID NO: 964289 - RNA, 19 nt, Artificial Sequence
  Description of Artificial Sequence: Synthetic oligonucleotide
uggcaauaaaguuuaacac

SEQ ID NO: 964290 - RNA, 19 nt, Artificial Sequence
  Description of Artificial Sequence: Synthetic oligonucleotide
uacaucauacaacagggau

SEQ ID NO: 964291 - RNA, 19 nt, Artificial Sequence
  Description of Artificial Sequence: Synthetic oligonucleotide
cuaaagguaguguaacaag

SEQ ID NO: 964292 - RNA, 19 nt, Artificial Sequence
  Description of Artificial Sequence: Synthetic oligonucleotide
aauuagucaucuguaaaga

SEQ ID NO: 964293 - RNA, 19 nt, Artificial Sequence
  Description of Artificial Sequence: Synthetic oligonucleotide
uauuauugcugcugaggcg

SEQ ID NO: 964294 - RNA, 19 nt, Artificial Sequence
  Description of Artificial Sequence: Synthetic oligonucleotide
uguuggugcaaucgggagg

SEQ ID NO: 964295 - RNA, 19 nt, Artificial Sequence
  Description of Artificial Sequence: Synthetic oligonucleotide
uguggaauacaugagagau

SEQ ID NO: 964296 - RNA, 19 nt, Artificial Sequence
  Description of Artificial Sequence: Synthetic oligonucleotide
uuuuguugaggaagucugg

SEQ ID NO: 964297 - RNA, 19 nt, Artificial Sequence
  Description of Artificial Sequence: Synthetic oligonucleotide
aaaacacguuucuugaaau

SEQ ID NO: 964298 - RNA, 19 nt, Artificial Sequence
  Description of Artificial Sequence: Synthetic oligonucleotide
guggcaauaaaguuuaaca

SEQ ID NO: 964299 - RNA, 19 nt, Artificial Sequence
  Description of Artificial Sequence: Synthetic oligonucleotide
caagagcggacuuucaucc

SEQ ID NO: 964300 - RNA, 19 nt, Artificial Sequence
  Description of Artificial Sequence: Synthetic oligonucleotide
uccacaucaguacaguacu

SEQ ID NO: 964301 - RNA, 19 nt, Artificial Sequence
  Description of Artificial Sequence: Synthetic oligonucleotide
guaaggccgacuuuaagcc

SEQ ID NO: 964302 - RNA, 19 nt, Artificial Sequence
  Description of Artificial Sequence: Synthetic oligonucleotide
uucaaaauuaaccccucuc

SEQ ID NO: 964303 - RNA, 19 nt, Artificial Sequence
  Description of Artificial Sequence: Synthetic oligonucleotide
aagguaguguaacaaggca

SEQ ID NO: 964304 - RNA, 19 nt, Artificial Sequence
  Description of Artificial Sequence: Synthetic oligonucleotide
ucugucagucuucuacugg

SEQ ID NO: 964305 - RNA, 19 nt, Artificial Sequence
  Description of Artificial Sequence: Synthetic oligonucleotide
caguacaguacuuauacuc

SEQ ID NO: 964306 - RNA, 19 nt, Artificial Sequence
  Description of Artificial Sequence: Synthetic oligonucleotide
aaaccggucaguaaguugu

SEQ ID NO: 964307 - RNA, 19 nt, Artificial Sequence
  Description of Artificial Sequence: Synthetic oligonucleotide
uagugugcaacccaaugca

SEQ ID NO: 964308 - RNA, 19 nt, Artificial Sequence
  Description of Artificial Sequence: Synthetic oligonucleotide
ucagauauuauugcugcug

SEQ ID NO: 964309 - RNA, 19 nt, Artificial Sequence
  Description of Artificial Sequence: Synthetic oligonucleotide
uucguagcugacuaaaggu

SEQ ID NO: 964310 - RNA, 19 nt, Artificial Sequence
  Description of Artificial Sequence: Synthetic oligonucleotide
acaugggcauaucaauacc

SEQ ID NO: 964311 - RNA, 19 nt, Artificial Sequence
  Description of Artificial Sequence: Synthetic oligonucleotide
caaggcagaaaacaugggc

SEQ ID NO: 964312 - RNA, 19 nt, Artificial Sequence
  Description of Artificial Sequence: Synthetic oligonucleotide
agagcggacuuucaucccc

SEQ ID NO: 964313 - RNA, 19 nt, Artificial Sequence
  Description of Artificial Sequence: Synthetic oligonucleotide
aacacgacaucucccaggu

SEQ ID NO: 964314 - RNA, 19 nt, Artificial Sequence
  Description of Artificial Sequence: Synthetic oligonucleotide
aguucgugcccuuacauga

SEQ ID NO: 964315 - RNA, 19 nt, Artificial Sequence
  Description of Artificial Sequence: Synthetic oligonucleotide
aaagccgccagcuugcuuu

SEQ ID NO: 964316 - RNA, 19 nt, Artificial Sequence
  Description of Artificial Sequence: Synthetic oligonucleotide
ugccauguauaaauaaaac

SEQ ID NO: 964317 - RNA, 19 nt, Artificial Sequence
  Description of Artificial Sequence: Synthetic oligonucleotide
ugcuuauggaaucaucccu

SEQ ID NO: 964318 - RNA, 19 nt, Artificial Sequence
  Description of Artificial Sequence: Synthetic oligonucleotide
uacaucuuagugugcaacc

SEQ ID NO: 964319 - RNA, 19 nt, Artificial Sequence
  Description of Artificial Sequence: Synthetic oligonucleotide
ccuuacaugagcuggaccg

SEQ ID NO: 964320 - RNA, 19 nt, Artificial Sequence
  Description of Artificial Sequence: Synthetic oligonucleotide
auacaugagagaugcuggg

SEQ ID NO: 964321 - RNA, 19 nt, Artificial Sequence
  Description of Artificial Sequence: Synthetic oligonucleotide
uguuaacacgacaucuccc

SEQ ID NO: 964322 - RNA, 19 nt, Artificial Sequence
  Description of Artificial Sequence: Synthetic oligonucleotide
auaucaauaccagcuguac

SEQ ID NO: 964323 - RNA, 19 nt, Artificial Sequence
  Description of Artificial Sequence: Synthetic oligonucleotide
ugccaaaauggcacgauga

SEQ ID NO: 964324 - RNA, 19 nt, Artificial Sequence
  Description of Artificial Sequence: Synthetic oligonucleotide
ugggccaaaauaucuacca

SEQ ID NO: 964325 - RNA, 19 nt, Artificial Sequence
  Description of Artificial Sequence: Synthetic oligonucleotide
acugguagaugauagguaa

SEQ ID NO: 964326 - RNA, 19 nt, Artificial Sequence
  Description of Artificial Sequence: Synthetic oligonucleotide
agcauuugagaagucauag

SEQ ID NO: 964327 - RNA, 19 nt, Artificial Sequence
  Description of Artificial Sequence: Synthetic oligonucleotide
uaacacgacaucucccagg

SEQ ID NO: 964328 - RNA, 19 nt, Artificial Sequence
  Description of Artificial Sequence: Synthetic oligonucleotide
agaaaacaugggcauauca

SEQ ID NO: 964329 - RNA, 19 nt, Artificial Sequence
  Description of Artificial Sequence: Synthetic oligonucleotide
uuuuaggagaggucugacc

SEQ ID NO: 964330 - RNA, 19 nt, Artificial Sequence
  Description of Artificial Sequence: Synthetic oligonucleotide
uuaacaccuggcauucugc

SEQ ID NO: 964331 - RNA, 19 nt, Artificial Sequence
  Description of Artificial Sequence: Synthetic oligonucleotide
uucuacugcaguucgugcc

SEQ ID NO: 964332 - RNA, 19 nt, Artificial Sequence
  Description of Artificial Sequence: Synthetic oligonucleotide
gguaaggccgacuuuaagc

SEQ ID NO: 964333 - RNA, 19 nt, Artificial Sequence
  Description of Artificial Sequence: Synthetic oligonucleotide
cacgacaucucccagguug

SEQ ID NO: 964334 - RNA, 19 nt, Artificial Sequence
  Description of Artificial Sequence: Synthetic oligonucleotide
acaucuuagugugcaaccc

SEQ ID NO: 964335 - RNA, 19 nt, Artificial Sequence
  Description of Artificial Sequence: Synthetic oligonucleotide
aggaaaacacguuucuuga

SEQ ID NO: 964336 - RNA, 19 nt, Artificial Sequence
  Description of Artificial Sequence: Synthetic oligonucleotide
gaaggagugcgucugccag

SEQ ID NO: 964337 - RNA, 19 nt, Artificial Sequence
  Description of Artificial Sequence: Synthetic oligonucleotide
auacaucuuagugugcaac

SEQ ID NO: 964338 - RNA, 19 nt, Artificial Sequence
  Description of Artificial Sequence: Synthetic oligonucleotide
uaucggcucacucuucugc

SEQ ID NO: 964339 - RNA, 19 nt, Artificial Sequence
  Description of Artificial Sequence: Synthetic oligonucleotide
uaucaauaccagcuguacu

SEQ ID NO: 964340 - RNA, 19 nt, Artificial Sequence
  Description of Artificial Sequence: Synthetic oligonucleotide
uaagacgcuucccacacaa

SEQ ID NO: 964341 - RNA, 19 nt, Artificial Sequence
  Description of Artificial Sequence: Synthetic oligonucleotide
caaaagagacggaugcagc

SEQ ID NO: 964342 - RNA, 19 nt, Artificial Sequence
  Description of Artificial Sequence: Synthetic oligonucleotide
guuaacacgacaucuccca

SEQ ID NO: 964343 - RNA, 19 nt, Artificial Sequence
  Description of Artificial Sequence: Synthetic oligonucleotide
gaacuugugaggauucugc

SEQ ID NO: 964344 - RNA, 19 nt, Artificial Sequence
  Description of Artificial Sequence: Synthetic oligonucleotide
aaggagguacuguuaggug

SEQ ID NO: 964345 - RNA, 19 nt, Artificial Sequence
  Description of Artificial Sequence: Synthetic oligonucleotide
ugguguuggugcaaucggg

SEQ ID NO: 964346 - RNA, 19 nt, Artificial Sequence
  Description of Artificial Sequence: Synthetic oligonucleotide
aaaagucaaguccguuucu

SEQ ID NO: 964347 - RNA, 19 nt, Artificial Sequence
  Description of Artificial Sequence: Synthetic oligonucleotide
aagcguaucggcucacucu

SEQ ID NO: 964348 - RNA, 19 nt, Artificial Sequence
  Description of Artificial Sequence: Synthetic oligonucleotide
aacuugugaggauucugca

SEQ ID NO: 964349 - RNA, 19 nt, Artificial Sequence
  Description of Artificial Sequence: Synthetic oligonucleotide
aggagguacuguuaggugu

SEQ ID NO: 964350 - RNA, 19 nt, Artificial Sequence
  Description of Artificial Sequence: Synthetic oligonucleotide
gaagaagaaagccgccagc

SEQ ID NO: 964351 - RNA, 19 nt, Artificial Sequence
  Description of Artificial Sequence: Synthetic oligonucleotide
uggauuucguagcugacua

SEQ ID NO: 964352 - RNA, 19 nt, Artificial Sequence
  Description of Artificial Sequence: Synthetic oligonucleotide
uuaacacgacaucucccag

SEQ ID NO: 964353 - RNA, 19 nt, Artificial Sequence
  Description of Artificial Sequence: Synthetic oligonucleotide
cuuagugugcaacccaaug

SEQ ID NO: 964354 - RNA, 19 nt, Artificial Sequence
  Description of Artificial Sequence: Synthetic oligonucleotide
ucuuuaagacgcuucccac

SEQ ID NO: 964355 - RNA, 19 nt, Artificial Sequence
  Description of Artificial Sequence: Synthetic oligonucleotide
gucaaguccguuucuacug

SEQ ID NO: 964356 - RNA, 19 nt, Artificial Sequence
  Description of Artificial Sequence: Synthetic oligonucleotide
agcccaaaagucaaguccg

SEQ ID NO: 964357 - RNA, 19 nt, Artificial Sequence
  Description of Artificial Sequence: Synthetic oligonucleotide
caaugcacguggaaacugg

SEQ ID NO: 964358 - RNA, 19 nt, Artificial Sequence
  Description of Artificial Sequence: Synthetic oligonucleotide
uauuaucucugccccauau

SEQ ID NO: 964359 - RNA, 19 nt, Artificial Sequence
  Description of Artificial Sequence: Synthetic oligonucleotide
auccguguuucucugagcu

SEQ ID NO: 964360 - RNA, 19 nt, Artificial Sequence
  Description of Artificial Sequence: Synthetic oligonucleotide
ugugcaacccaaugcacgu

SEQ ID NO: 964361 - RNA, 19 nt, Artificial Sequence
  Description of Artificial Sequence: Synthetic oligonucleotide
ccgacuuuaagccauuugg

SEQ ID NO: 964362 - RNA, 19 nt, Artificial Sequence
  Description of Artificial Sequence: Synthetic oligonucleotide
ggaggugcuacuuuaacac

SEQ ID NO: 964363 - RNA, 19 nt, Artificial Sequence
  Description of Artificial Sequence: Synthetic oligonucleotide
cugcucaacaacauccaag

SEQ ID NO: 964364 - RNA, 19 nt, Artificial Sequence
  Description of Artificial Sequence: Synthetic oligonucleotide
ucuacuggaucgcucuucu

SEQ ID NO: 964365 - RNA, 19 nt, Artificial Sequence
  Description of Artificial Sequence: Synthetic oligonucleotide
ggcauuaaaaucauucagc

SEQ ID NO: 964366 - RNA, 19 nt, Artificial Sequence
  Description of Artificial Sequence: Synthetic oligonucleotide
uucaggugaggaagaaagc

SEQ ID NO: 964367 - RNA, 19 nt, Artificial Sequence
  Description of Artificial Sequence: Synthetic oligonucleotide
uuacaucauacaacaggga

SEQ ID NO: 964368 - RNA, 19 nt, Artificial Sequence
  Description of Artificial Sequence: Synthetic oligonucleotide
aggaaagucugaccucugg

SEQ ID NO: 964369 - RNA, 19 nt, Artificial Sequence
  Description of Artificial Sequence: Synthetic oligonucleotide
ucugggccaaaauaucuac

SEQ ID NO: 964370 - RNA, 19 nt, Artificial Sequence
  Description of Artificial Sequence: Synthetic oligonucleotide
ugcuguuaacacgacaucu

SEQ ID NO: 964371 - RNA, 19 nt, Artificial Sequence
  Description of Artificial Sequence: Synthetic oligonucleotide
agauccguguuucucugag

SEQ ID NO: 964372 - RNA, 19 nt, Artificial Sequence
  Description of Artificial Sequence: Synthetic oligonucleotide
gaaaacaugggcauaucaa

SEQ ID NO: 964373 - RNA, 19 nt, Artificial Sequence
  Description of Artificial Sequence: Synthetic oligonucleotide
auccccgaaacguucauca

SEQ ID NO: 964374 - RNA, 19 nt, Artificial Sequence
  Description of Artificial Sequence: Synthetic oligonucleotide
ucaagagcggacuuucauc

SEQ ID NO: 964375 - RNA, 19 nt, Artificial Sequence
  Description of Artificial Sequence: Synthetic oligonucleotide
agauauuauugcugcugag

SEQ ID NO: 964376 - RNA, 19 nt, Artificial Sequence
  Description of Artificial Sequence: Synthetic oligonucleotide
gaugauagguaaaaugcaa

SEQ ID NO: 964377 - RNA, 19 nt, Artificial Sequence
  Description of Artificial Sequence: Synthetic oligonucleotide
cugcuuauggaaucauccc

SEQ ID NO: 964378 - RNA, 19 nt, Artificial Sequence
  Description of Artificial Sequence: Synthetic oligonucleotide
uacaugagagaugcugggg

SEQ ID NO: 964379 - RNA, 19 nt, Artificial Sequence
  Description of Artificial Sequence: Synthetic oligonucleotide
uuuuccgagacgugugugu

SEQ ID NO: 964380 - RNA, 19 nt, Artificial Sequence
  Description of Artificial Sequence: Synthetic oligonucleotide
acuaaagguaguguaacaa

SEQ ID NO: 964381 - RNA, 19 nt, Artificial Sequence
  Description of Artificial Sequence: Synthetic oligonucleotide
guaggagugcuguuaacac

SEQ ID NO: 964382 - RNA, 19 nt, Artificial Sequence
  Description of Artificial Sequence: Synthetic oligonucleotide
aauuaaccccucucggcau

SEQ ID NO: 964383 - RNA, 19 nt, Artificial Sequence
  Description of Artificial Sequence: Synthetic oligonucleotide
guacuguuaggugucagcc

SEQ ID NO: 964384 - RNA, 19 nt, Artificial Sequence
  Description of Artificial Sequence: Synthetic oligonucleotide
agucaaguccguuucuacu

SEQ ID NO: 964385 - RNA, 19 nt, Artificial Sequence
  Description of Artificial Sequence: Synthetic oligonucleotide
aggaaagaacuugugagga

SEQ ID NO: 964386 - RNA, 19 nt, Artificial Sequence
  Description of Artificial Sequence: Synthetic oligonucleotide
uguggcaauaaaguuuaac

SEQ ID NO: 964387 - RNA, 19 nt, Artificial Sequence
  Description of Artificial Sequence: Synthetic oligonucleotide
agguaguguaacaaggcag

SEQ ID NO: 964388 - RNA, 19 nt, Artificial Sequence
  Description of Artificial Sequence: Synthetic oligonucleotide
agugcuguuaacacgacau

SEQ ID NO: 964389 - RNA, 19 nt, Artificial Sequence
  Description of Artificial Sequence: Synthetic oligonucleotide
ugucugucagucuucuacu

SEQ ID NO: 964390 - RNA, 19 nt, Artificial Sequence
  Description of Artificial Sequence: Synthetic oligonucleotide
acaucauacaacagggaug

SEQ ID NO: 964391 - RNA, 19 nt, Artificial Sequence
  Description of Artificial Sequence: Synthetic oligonucleotide
ucguagcugacuaaaggua

SEQ ID NO: 964392 - RNA, 19 nt, Artificial Sequence
  Description of Artificial Sequence: Synthetic oligonucleotide
caugagagaugcuggggag

SEQ ID NO: 964393 - RNA, 19 nt, Artificial Sequence
  Description of Artificial Sequence: Synthetic oligonucleotide
uuucauccccgaaacguuc

SEQ ID NO: 964394 - RNA, 19 nt, Artificial Sequence
  Description of Artificial Sequence: Synthetic oligonucleotide
uuaagccauuuggugaugc

SEQ ID NO: 964395 - RNA, 19 nt, Artificial Sequence
  Description of Artificial Sequence: Synthetic oligonucleotide
uacuguuaggugucagccc

SEQ ID NO: 964396 - RNA, 19 nt, Artificial Sequence
  Description of Artificial Sequence: Synthetic oligonucleotide
ggaauuucuauaauuaaaa

SEQ ID NO: 964397 - RNA, 19 nt, Artificial Sequence
  Description of Artificial Sequence: Synthetic oligonucleotide
auugauaaaccggucagua

SEQ ID NO: 964398 - RNA, 19 nt, Artificial Sequence
  Description of Artificial Sequence: Synthetic oligonucleotide
uugaaauauuaaguccaca

SEQ ID NO: 964399 - RNA, 19 nt, Artificial Sequence
  Description of Artificial Sequence: Synthetic oligonucleotide
gaggugcuacuuuaacacc

SEQ ID NO: 964400 - RNA, 19 nt, Artificial Sequence
  Description of Artificial Sequence: Synthetic oligonucleotide
uugauaaaccggucaguaa

SEQ ID NO: 964401 - RNA, 19 nt, Artificial Sequence
  Description of Artificial Sequence: Synthetic oligonucleotide
agaugauagguaaaaugca

SEQ ID NO: 964402 - RNA, 19 nt, Artificial Sequence
  Description of Artificial Sequence: Synthetic oligonucleotide
aagccauuuggugaugccu

SEQ ID NO: 964403 - RNA, 19 nt, Artificial Sequence
  Description of Artificial Sequence: Synthetic oligonucleotide
ugguagaugauagguaaaa

SEQ ID NO: 964404 - RNA, 19 nt, Artificial Sequence
  Description of Artificial Sequence: Synthetic oligonucleotide
uggaucgcucuucuagagc

SEQ ID NO: 964405 - RNA, 19 nt, Artificial Sequence
  Description of Artificial Sequence: Synthetic oligonucleotide
auuugagaagucauagaga

SEQ ID NO: 964406 - RNA, 19 nt, Artificial Sequence
  Description of Artificial Sequence: Synthetic oligonucleotide
ugugaggauucugcaagag

SEQ ID NO: 964407 - RNA, 19 nt, Artificial Sequence
  Description of Artificial Sequence: Synthetic oligonucleotide
caugggcauaucaauacca

SEQ ID NO: 964408 - RNA, 19 nt, Artificial Sequence
  Description of Artificial Sequence: Synthetic oligonucleotide
gacuaaagguaguguaaca

SEQ ID NO: 964409 - RNA, 19 nt, Artificial Sequence
  Description of Artificial Sequence: Synthetic oligonucleotide
uucauccccgaaacguuca

SEQ ID NO: 964410 - RNA, 19 nt, Artificial Sequence
  Description of Artificial Sequence: Synthetic oligonucleotide
ucauugucaagagcggacu

SEQ ID NO: 964411 - RNA, 19 nt, Artificial Sequence
  Description of Artificial Sequence: Synthetic oligonucleotide
aacccaaugcacguggaaa

SEQ ID NO: 964412 - RNA, 19 nt, Artificial Sequence
  Description of Artificial Sequence: Synthetic oligonucleotide
cucuuuaagacgcuuccca

SEQ ID NO: 964413 - RNA, 19 nt, Artificial Sequence
  Description of Artificial Sequence: Synthetic oligonucleotide
aaacaugggcauaucaaua

SEQ ID NO: 964414 - RNA, 19 nt, Artificial Sequence
  Description of Artificial Sequence: Synthetic oligonucleotide
gugugcaacccaaugcacg

SEQ ID NO: 964415 - RNA, 19 nt, Artificial Sequence
  Description of Artificial Sequence: Synthetic oligonucleotide
cacuguuauaaaaucaaua

SEQ ID NO: 964416 - RNA, 19 nt, Artificial Sequence
  Description of Artificial Sequence: Synthetic oligonucleotide
ucccuuuccagauccgugu

SEQ ID NO: 964417 - RNA, 19 nt, Artificial Sequence
  Description of Artificial Sequence: Synthetic oligonucleotide
ggaaucaucccuuuccaga

SEQ ID NO: 964418 - RNA, 19 nt, Artificial Sequence
  Description of Artificial Sequence: Synthetic oligonucleotide
aaacguucaucaggaaaga

SEQ ID NO: 964419 - RNA, 19 nt, Artificial Sequence
  Description of Artificial Sequence: Synthetic oligonucleotide
aagagacggaugcagcauu

SEQ ID NO: 964420 - RNA, 19 nt, Artificial Sequence
  Description of Artificial Sequence: Synthetic oligonucleotide
uucagauauuauugcugcu

SEQ ID NO: 964421 - RNA, 19 nt, Artificial Sequence
  Description of Artificial Sequence: Synthetic oligonucleotide
aaagagacggaugcagcau

SEQ ID NO: 964422 - RNA, 19 nt, Artificial Sequence
  Description of Artificial Sequence: Synthetic oligonucleotide
aggagugcuguuaacacga

SEQ ID NO: 964423 - RNA, 19 nt, Artificial Sequence
  Description of Artificial Sequence: Synthetic oligonucleotide
uguaugucucuguggaaua

SEQ ID NO: 964424 - RNA, 19 nt, Artificial Sequence
  Description of Artificial Sequence: Synthetic oligonucleotide
caggagaaaguggauauuc

SEQ ID NO: 964425 - RNA, 19 nt, Artificial Sequence
  Description of Artificial Sequence: Synthetic oligonucleotide
aaagucaaguccguuucua

SEQ ID NO: 964426 - RNA, 19 nt, Artificial Sequence
  Description of Artificial Sequence: Synthetic oligonucleotide
uucgugcccuuacaugagc

SEQ ID NO: 964427 - RNA, 19 nt, Artificial Sequence
  Description of Artificial Sequence: Synthetic oligonucleotide
gagaaaguggauauucucu

SEQ ID NO: 964428 - RNA, 19 nt, Artificial Sequence
  Description of Artificial Sequence: Synthetic oligonucleotide
uugagugacaguguagauu

SEQ ID NO: 964429 - RNA, 19 nt, Artificial Sequence
  Description of Artificial Sequence: Synthetic oligonucleotide
gugcccuuacaugagcugg

SEQ ID NO: 964430 - RNA, 19 nt, Artificial Sequence
  Description of Artificial Sequence: Synthetic oligonucleotide
uaaggccgacuuuaagcca

SEQ ID NO: 964431 - RNA, 19 nt, Artificial Sequence
  Description of Artificial Sequence: Synthetic oligonucleotide
aaguggauauucucuccua

SEQ ID NO: 964432 - RNA, 19 nt, Artificial Sequence
  Description of Artificial Sequence: Synthetic oligonucleotide
agcacucggaucuggauuu

SEQ ID NO: 964433 - RNA, 19 nt, Artificial Sequence
  Description of Artificial Sequence: Synthetic oligonucleotide
ucaucccuuuccagauccg

SEQ ID NO: 964434 - RNA, 19 nt, Artificial Sequence
  Description of Artificial Sequence: Synthetic oligonucleotide
agugugcaacccaaugcac

SEQ ID NO: 964435 - RNA, 19 nt, Artificial Sequence
  Description of Artificial Sequence: Synthetic oligonucleotide
auuaaccccucucggcaug

SEQ ID NO: 964436 - RNA, 19 nt, Artificial Sequence
  Description of Artificial Sequence: Synthetic oligonucleotide
aguccguuucuacugcagu

SEQ ID NO: 964437 - RNA, 19 nt, Artificial Sequence
  Description of Artificial Sequence: Synthetic oligonucleotide
ggaguggaaggucugcaag

SEQ ID NO: 964438 - RNA, 19 nt, Artificial Sequence
  Description of Artificial Sequence: Synthetic oligonucleotide
gguacuguuaggugucagc

SEQ ID NO: 964439 - RNA, 19 nt, Artificial Sequence
  Description of Artificial Sequence: Synthetic oligonucleotide
ugcaguucgugcccuuaca

SEQ ID NO: 964440 - RNA, 19 nt, Artificial Sequence
  Description of Artificial Sequence: Synthetic oligonucleotide
uccgagacguguguguaug

SEQ ID NO: 964441 - RNA, 19 nt, Artificial Sequence
  Description of Artificial Sequence: Synthetic oligonucleotide
caacauccaagcguaucgg

SEQ ID NO: 964442 - RNA, 19 nt, Artificial Sequence
  Description of Artificial Sequence: Synthetic oligonucleotide
augggcauaucaauaccag

SEQ ID NO: 964443 - RNA, 19 nt, Artificial Sequence
  Description of Artificial Sequence: Synthetic oligonucleotide
aucgcucuucuagagcuuc

SEQ ID NO: 964444 - RNA, 19 nt, Artificial Sequence
  Description of Artificial Sequence: Synthetic oligonucleotide
guacugauguccauuauua

SEQ ID NO: 964445 - RNA, 19 nt, Artificial Sequence
  Description of Artificial Sequence: Synthetic oligonucleotide
uagcugacuaaagguagug

SEQ ID NO: 964446 - RNA, 19 nt, Artificial Sequence
  Description of Artificial Sequence: Synthetic oligonucleotide
agguaaggccgacuuuaag

SEQ ID NO: 964447 - RNA, 19 nt, Artificial Sequence
  Description of Artificial Sequence: Synthetic oligonucleotide
uugucaagagcggacuuuc

SEQ ID NO: 964448 - RNA, 19 nt, Artificial Sequence
  Description of Artificial Sequence: Synthetic oligonucleotide
uuucagagggcagacuuuu

SEQ ID NO: 964449 - RNA, 19 nt, Artificial Sequence
  Description of Artificial Sequence: Synthetic oligonucleotide
ucgugcccuuacaugagcu

SEQ ID NO: 964450 - RNA, 19 nt, Artificial Sequence
  Description of Artificial Sequence: Synthetic oligonucleotide
gaaggaaagucugaccucu

SEQ ID NO: 964451 - RNA, 19 nt, Artificial Sequence
  Description of Artificial Sequence: Synthetic oligonucleotide
uuaagacgcuucccacaca

SEQ ID NO: 964452 - RNA, 19 nt, Artificial Sequence
  Description of Artificial Sequence: Synthetic oligonucleotide
aggugcuacuuuaacaccu

SEQ ID NO: 964453 - RNA, 19 nt, Artificial Sequence
  Description of Artificial Sequence: Synthetic oligonucleotide
gauccguguuucucugagc

SEQ ID NO: 964454 - RNA, 19 nt, Artificial Sequence
  Description of Artificial Sequence: Synthetic oligonucleotide
aaugcacguggaaacuggu

SEQ ID NO: 964455 - RNA, 19 nt, Artificial Sequence
  Description of Artificial Sequence: Synthetic oligonucleotide
ugucaagagcggacuuuca

SEQ ID NO: 964456 - RNA, 19 nt, Artificial Sequence
  Description of Artificial Sequence: Synthetic oligonucleotide
ugcccuuacaugagcugga

SEQ ID NO: 964457 - RNA, 19 nt, Artificial Sequence
  Description of Artificial Sequence: Synthetic oligonucleotide
agcguaucggcucacucuu

SEQ ID NO: 964458 - RNA, 19 nt, Artificial Sequence
  Description of Artificial Sequence: Synthetic oligonucleotide
uaguguaacaaggcagaaa

SEQ ID NO: 964459 - RNA, 19 nt, Artificial Sequence
  Description of Artificial Sequence: Synthetic oligonucleotide
caguucgugcccuuacaug

SEQ ID NO: 964460 - RNA, 19 nt, Artificial Sequence
  Description of Artificial Sequence: Synthetic oligonucleotide
aagccgccagcuugcuuuc

SEQ ID NO: 964461 - RNA, 19 nt, Artificial Sequence
  Description of Artificial Sequence: Synthetic oligonucleotide
aaucgggaggugcuacuuu

SEQ ID NO: 964462 - RNA, 19 nt, Artificial Sequence
  Description of Artificial Sequence: Synthetic oligonucleotide
caaacucucugagcacucg

SEQ ID NO: 964463 - RNA, 19 nt, Artificial Sequence
  Description of Artificial Sequence: Synthetic oligonucleotide
aacugguagaugauaggua

SEQ ID NO: 964464 - RNA, 19 nt, Artificial Sequence
  Description of Artificial Sequence: Synthetic oligonucleotide
aaggccgacuuuaagccau

SEQ ID NO: 964465 - RNA, 19 nt, Artificial Sequence
  Description of Artificial Sequence: Synthetic oligonucleotide
gucugucagucuucuacug

SEQ ID NO: 964466 - RNA, 19 nt, Artificial Sequence
  Description of Artificial Sequence: Synthetic oligonucleotide
uuccucugcuuauggaauc

SEQ ID NO: 964467 - RNA, 19 nt, Artificial Sequence
  Description of Artificial Sequence: Synthetic oligonucleotide
ccggucaguaaguuguugg

SEQ ID NO: 964468 - RNA, 19 nt, Artificial Sequence
  Description of Artificial Sequence: Synthetic oligonucleotide
gguaguguaacaaggcaga

SEQ ID NO: 964469 - RNA, 19 nt, Artificial Sequence
  Description of Artificial Sequence: Synthetic oligonucleotide
cagguugucucauugucaa

SEQ ID NO: 964470 - RNA, 19 nt, Artificial Sequence
  Description of Artificial Sequence: Synthetic oligonucleotide
cuuguguagauggccauca

SEQ ID NO: 964471 - RNA, 19 nt, Artificial Sequence
  Description of Artificial Sequence: Synthetic oligonucleotide
acauccaagcguaucggcu

SEQ ID NO: 964472 - RNA, 19 nt, Artificial Sequence
  Description of Artificial Sequence: Synthetic oligonucleotide
cucugcuuauggaaucauc

SEQ ID NO: 964473 - RNA, 19 nt, Artificial Sequence
  Description of Artificial Sequence: Synthetic oligonucleotide
agagacggaugcagcauuc

SEQ ID NO: 964474 - RNA, 19 nt, Artificial Sequence
  Description of Artificial Sequence: Synthetic oligonucleotide
cugccaaaauggcacgaug

SEQ ID NO: 964475 - RNA, 19 nt, Artificial Sequence
  Description of Artificial Sequence: Synthetic oligonucleotide
guggaauacaugagagaug

SEQ ID NO: 964476 - RNA, 19 nt, Artificial Sequence
  Description of Artificial Sequence: Synthetic oligonucleotide
gucauagagaucuggguau

SEQ ID NO: 964477 - RNA, 19 nt, Artificial Sequence
  Description of Artificial Sequence: Synthetic oligonucleotide
cuggcauucugcuguagga

SEQ ID NO: 964478 - RNA, 19 nt, Artificial Sequence
  Description of Artificial Sequence: Synthetic oligonucleotide
cuuuaagccauuuggugau

SEQ ID NO: 964479 - RNA, 19 nt, Artificial Sequence
  Description of Artificial Sequence: Synthetic oligonucleotide
aacguucaucaggaaagaa

SEQ ID NO: 964480 - RNA, 19 nt, Artificial Sequence
  Description of Artificial Sequence: Synthetic oligonucleotide
cguagcugacuaaagguag

SEQ ID NO: 964481 - RNA, 19 nt, Artificial Sequence
  Description of Artificial Sequence: Synthetic oligonucleotide
aagacgcuucccacacaac

SEQ ID NO: 964482 - RNA, 19 nt, Artificial Sequence
  Description of Artificial Sequence: Synthetic oligonucleotide
ugagcacucggaucuggau

SEQ ID NO: 964483 - RNA, 19 nt, Artificial Sequence
  Description of Artificial Sequence: Synthetic oligonucleotide
ucagggacucacugucugu

SEQ ID NO: 964484 - RNA, 19 nt, Artificial Sequence
  Description of Artificial Sequence: Synthetic oligonucleotide
caucuuagugugcaaccca

SEQ ID NO: 964485 - RNA, 19 nt, Artificial Sequence
  Description of Artificial Sequence: Synthetic oligonucleotide
gaaagaacuugugaggauu

SEQ ID NO: 964486 - RNA, 19 nt, Artificial Sequence
  Description of Artificial Sequence: Synthetic oligonucleotide
aaccccucucggcaugcca

SEQ ID NO: 964487 - RNA, 19 nt, Artificial Sequence
  Description of Artificial Sequence: Synthetic oligonucleotide
uggcuggcauaauucugug

SEQ ID NO: 964488 - RNA, 19 nt, Artificial Sequence
  Description of Artificial Sequence: Synthetic oligonucleotide
auacaacagggaugcuuca

SEQ ID NO: 964489 - RNA, 19 nt, Artificial Sequence
  Description of Artificial Sequence: Synthetic oligonucleotide
uuuccagauccguguuucu

SEQ ID NO: 964490 - RNA, 19 nt, Artificial Sequence
  Description of Artificial Sequence: Synthetic oligonucleotide
auccaagcguaucggcuca

SEQ ID NO: 964491 - RNA, 19 nt, Artificial Sequence
  Description of Artificial Sequence: Synthetic oligonucleotide
uuauuaucucugccccaua

SEQ ID NO: 964492 - RNA, 19 nt, Artificial Sequence
  Description of Artificial Sequence: Synthetic oligonucleotide
aucgggaggugcuacuuua

SEQ ID NO: 964493 - RNA, 19 nt, Artificial Sequence
  Description of Artificial Sequence: Synthetic oligonucleotide
gcucaacaacauccaagcg

SEQ ID NO: 964494 - RNA, 19 nt, Artificial Sequence
  Description of Artificial Sequence: Synthetic oligonucleotide
caagcguaucggcucacuc

SEQ ID NO: 964495 - RNA, 19 nt, Artificial Sequence
  Description of Artificial Sequence: Synthetic oligonucleotide
uucuacuggaucgcucuuc

SEQ ID NO: 964496 - RNA, 19 nt, Artificial Sequence
  Description of Artificial Sequence: Synthetic oligonucleotide
gauaaaccggucaguaagu

SEQ ID NO: 964497 - RNA, 19 nt, Artificial Sequence
  Description of Artificial Sequence: Synthetic oligonucleotide
ugcaaucgggaggugcuac

SEQ ID NO: 964498 - RNA, 19 nt, Artificial Sequence
  Description of Artificial Sequence: Synthetic oligonucleotide
uaucuaccauguggagggg

SEQ ID NO: 964499 - RNA, 19 nt, Artificial Sequence
  Description of Artificial Sequence: Synthetic oligonucleotide
ugccuuauuguggcuguac

SEQ ID NO: 964500 - RNA, 19 nt, Artificial Sequence
  Description of Artificial Sequence: Synthetic oligonucleotide
cguggaaacugguagauga

SEQ ID NO: 964501 - RNA, 19 nt, Artificial Sequence
  Description of Artificial Sequence: Synthetic oligonucleotide
cucggcaugccauguauaa

SEQ ID NO: 964502 - RNA, 19 nt, Artificial Sequence
  Description of Artificial Sequence: Synthetic oligonucleotide
uuuccgagacgugugugua

SEQ ID NO: 964503 - RNA, 19 nt, Artificial Sequence
  Description of Artificial Sequence: Synthetic oligonucleotide
guaugucucuguggaauac

SEQ ID NO: 964504 - RNA, 19 nt, Artificial Sequence
  Description of Artificial Sequence: Synthetic oligonucleotide
gaccguugccagcauuuuc

SEQ ID NO: 964505 - RNA, 19 nt, Artificial Sequence
  Description of Artificial Sequence: Synthetic oligonucleotide
ggcauaauucugugucagc

SEQ ID NO: 964506 - RNA, 19 nt, Artificial Sequence
  Description of Artificial Sequence: Synthetic oligonucleotide
agcaagcucugggagccuc

SEQ ID NO: 964507 - RNA, 19 nt, Artificial Sequence
  Description of Artificial Sequence: Synthetic oligonucleotide
ggaucgcucuucuagagcu

SEQ ID NO: 964508 - RNA, 19 nt, Artificial Sequence
  Description of Artificial Sequence: Synthetic oligonucleotide
guuggugcaaucgggaggu

SEQ ID NO: 964509 - RNA, 19 nt, Artificial Sequence
  Description of Artificial Sequence: Synthetic oligonucleotide
gucaguaaguuguuggguu

SEQ ID NO: 964510 - RNA, 19 nt, Artificial Sequence
  Description of Artificial Sequence: Synthetic oligonucleotide
aucuuagugugcaacccaa

SEQ ID NO: 964511 - RNA, 19 nt, Artificial Sequence
  Description of Artificial Sequence: Synthetic oligonucleotide
guaucggcucacucuucug

SEQ ID NO: 964512 - RNA, 19 nt, Artificial Sequence
  Description of Artificial Sequence: Synthetic oligonucleotide
ucgggaggugcuacuuuaa

SEQ ID NO: 964513 - RNA, 19 nt, Artificial Sequence
  Description of Artificial Sequence: Synthetic oligonucleotide
uuucugcucuagugcgugu

SEQ ID NO: 964514 - RNA, 19 nt, Artificial Sequence
  Description of Artificial Sequence: Synthetic oligonucleotide
ucgcucuucuagagcuuca

SEQ ID NO: 964515 - RNA, 19 nt, Artificial Sequence
  Description of Artificial Sequence: Synthetic oligonucleotide
gcagcaagcucugggagcc

SEQ ID NO: 964516 - RNA, 19 nt, Artificial Sequence
  Description of Artificial Sequence: Synthetic oligonucleotide
auaaaccggucaguaaguu

SEQ ID NO: 964517 - RNA, 19 nt, Artificial Sequence
  Description of Artificial Sequence: Synthetic oligonucleotide
guucgugcccuuacaugag

SEQ ID NO: 964518 - RNA, 19 nt, Artificial Sequence
  Description of Artificial Sequence: Synthetic oligonucleotide
uggggaggcugcucaacaa

SEQ ID NO: 964519 - RNA, 19 nt, Artificial Sequence
  Description of Artificial Sequence: Synthetic oligonucleotide
uguuaggugucagcccaaa

SEQ ID NO: 964520 - RNA, 19 nt, Artificial Sequence
  Description of Artificial Sequence: Synthetic oligonucleotide
uccguguuucucugagcuc

SEQ ID NO: 964521 - RNA, 19 nt, Artificial Sequence
  Description of Artificial Sequence: Synthetic oligonucleotide
ccguuucuacugcaguucg

SEQ ID NO: 964522 - RNA, 19 nt, Artificial Sequence
  Description of Artificial Sequence: Synthetic oligonucleotide
cucggugaccuccuuccuc

SEQ ID NO: 964523 - RNA, 19 nt, Artificial Sequence
  Description of Artificial Sequence: Synthetic oligonucleotide
ucauccccgaaacguucau

SEQ ID NO: 964524 - RNA, 19 nt, Artificial Sequence
  Description of Artificial Sequence: Synthetic oligonucleotide
gcugccgaaggaaagucug

SEQ ID NO: 964525 - RNA, 19 nt, Artificial Sequence
  Description of Artificial Sequence: Synthetic oligonucleotide
ugcugccaaaauggcacga

SEQ ID NO: 964526 - RNA, 19 nt, Artificial Sequence
  Description of Artificial Sequence: Synthetic oligonucleotide
cccgaaacguucaucagga

SEQ ID NO: 964527 - RNA, 19 nt, Artificial Sequence
  Description of Artificial Sequence: Synthetic oligonucleotide
uuacaugagcuggaccguu

SEQ ID NO: 964528 - RNA, 19 nt, Artificial Sequence
  Description of Artificial Sequence: Synthetic oligonucleotide
caucaggagaaaguggaua

SEQ ID NO: 964529 - RNA, 19 nt, Artificial Sequence
  Description of Artificial Sequence: Synthetic oligonucleotide
cuaccauguggaggggaag

SEQ ID NO: 964530 - RNA, 19 nt, Artificial Sequence
  Description of Artificial Sequence: Synthetic oligonucleotide
cugcaguucgugcccuuac

SEQ ID NO: 964531 - RNA, 19 nt, Artificial Sequence
  Description of Artificial Sequence: Synthetic oligonucleotide
caguacuuauacucauaaa

SEQ ID NO: 964532 - RNA, 19 nt, Artificial Sequence
  Description of Artificial Sequence: Synthetic oligonucleotide
ucggcaugccauguauaaa

SEQ ID NO: 964533 - RNA, 19 nt, Artificial Sequence
  Description of Artificial Sequence: Synthetic oligonucleotide
guccuugagugacagugua

SEQ ID NO: 964534 - RNA, 19 nt, Artificial Sequence
  Description of Artificial Sequence: Synthetic oligonucleotide
aucuaccauguggagggga

SEQ ID NO: 964535 - RNA, 19 nt, Artificial Sequence
  Description of Artificial Sequence: Synthetic oligonucleotide
acacguuucuugaaauauu

SEQ ID NO: 964536 - RNA, 19 nt, Artificial Sequence
  Description of Artificial Sequence: Synthetic oligonucleotide
cggucaguaaguuguuggg

SEQ ID NO: 964537 - RNA, 19 nt, Artificial Sequence
  Description of Artificial Sequence: Synthetic oligonucleotide
cacaucaguacaguacuua

SEQ ID NO: 964538 - RNA, 19 nt, Artificial Sequence
  Description of Artificial Sequence: Synthetic oligonucleotide
uucugcucuagugcguguu

SEQ ID NO: 964539 - RNA, 19 nt, Artificial Sequence
  Description of Artificial Sequence: Synthetic oligonucleotide
acguggaaacugguagaug

SEQ ID NO: 964540 - RNA, 19 nt, Artificial Sequence
  Description of Artificial Sequence: Synthetic oligonucleotide
guuaggugucagcccaaaa

SEQ ID NO: 964541 - RNA, 19 nt, Artificial Sequence
  Description of Artificial Sequence: Synthetic oligonucleotide
acgacaucucccagguugu

SEQ ID NO: 964542 - RNA, 19 nt, Artificial Sequence
  Description of Artificial Sequence: Synthetic oligonucleotide
gucaagagcggacuuucau

SEQ ID NO: 964543 - RNA, 19 nt, Artificial Sequence
  Description of Artificial Sequence: Synthetic oligonucleotide
gagcacucggaucuggauu

SEQ ID NO: 964544 - RNA, 19 nt, Artificial Sequence
  Description of Artificial Sequence: Synthetic oligonucleotide
gagacggaugcagcauuca

SEQ ID NO: 964545 - RNA, 19 nt, Artificial Sequence
  Description of Artificial Sequence: Synthetic oligonucleotide
accggucaguaaguuguug

SEQ ID NO: 964546 - RNA, 19 nt, Artificial Sequence
  Description of Artificial Sequence: Synthetic oligonucleotide
ggggaggcugcucaacaac

SEQ ID NO: 964547 - RNA, 19 nt, Artificial Sequence
  Description of Artificial Sequence: Synthetic oligonucleotide
cagaaaacaugggcauauc

SEQ ID NO: 964548 - RNA, 19 nt, Artificial Sequence
  Description of Artificial Sequence: Synthetic oligonucleotide
gcauaucaauaccagcugu

SEQ ID NO: 964549 - RNA, 19 nt, Artificial Sequence
  Description of Artificial Sequence: Synthetic oligonucleotide
guaguguaacaaggcagaa

SEQ ID NO: 964550 - RNA, 19 nt, Artificial Sequence
  Description of Artificial Sequence: Synthetic oligonucleotide
ggaaggucugcaagcagca

SEQ ID NO: 964551 - RNA, 19 nt, Artificial Sequence
  Description of Artificial Sequence: Synthetic oligonucleotide
ugaggaagucuggcuugcu

SEQ ID NO: 964552 - RNA, 19 nt, Artificial Sequence
  Description of Artificial Sequence: Synthetic oligonucleotide
ccgaaggaaagucugaccu

SEQ ID NO: 964553 - RNA, 19 nt, Artificial Sequence
  Description of Artificial Sequence: Synthetic oligonucleotide
cuuucauccccgaaacguu

SEQ ID NO: 964554 - RNA, 19 nt, Artificial Sequence
  Description of Artificial Sequence: Synthetic oligonucleotide
ggaaggagugcgucugcca

SEQ ID NO: 964555 - RNA, 19 nt, Artificial Sequence
  Description of Artificial Sequence: Synthetic oligonucleotide
cugccgaaggaaagucuga

SEQ ID NO: 964556 - RNA, 19 nt, Artificial Sequence
  Description of Artificial Sequence: Synthetic oligonucleotide
guccuuuaaauguggcaau

SEQ ID NO: 964557 - RNA, 19 nt, Artificial Sequence
  Description of Artificial Sequence: Synthetic oligonucleotide
ugcgucugccaggggcagg

SEQ ID NO: 964558 - RNA, 19 nt, Artificial Sequence
  Description of Artificial Sequence: Synthetic oligonucleotide
gcacguggaaacugguaga

SEQ ID NO: 964559 - RNA, 19 nt, Artificial Sequence
  Description of Artificial Sequence: Synthetic oligonucleotide
gcagguaaggccgacuuua

SEQ ID NO: 964560 - RNA, 19 nt, Artificial Sequence
  Description of Artificial Sequence: Synthetic oligonucleotide
gacguguguguaugucucu

SEQ ID NO: 964561 - RNA, 19 nt, Artificial Sequence
  Description of Artificial Sequence: Synthetic oligonucleotide
agcggacuuucauccccga

SEQ ID NO: 964562 - RNA, 19 nt, Artificial Sequence
  Description of Artificial Sequence: Synthetic oligonucleotide
cuuauggaaucaucccuuu

SEQ ID NO: 964563 - RNA, 19 nt, Artificial Sequence
  Description of Artificial Sequence: Synthetic oligonucleotide
ggauauucucuccuagcau

SEQ ID NO: 964564 - RNA, 19 nt, Artificial Sequence
  Description of Artificial Sequence: Synthetic oligonucleotide
gucugggccaaaauaucua

SEQ ID NO: 964565 - RNA, 19 nt, Artificial Sequence
  Description of Artificial Sequence: Synthetic oligonucleotide
cauugauaaaccggucagu

SEQ ID NO: 964566 - RNA, 19 nt, Artificial Sequence
  Description of Artificial Sequence: Synthetic oligonucleotide
guacaagucugggccaaaa

SEQ ID NO: 964567 - RNA, 19 nt, Artificial Sequence
  Description of Artificial Sequence: Synthetic oligonucleotide
gagugacaguguagauuac

SEQ ID NO: 964568 - RNA, 19 nt, Artificial Sequence
  Description of Artificial Sequence: Synthetic oligonucleotide
cauccccgaaacguucauc

SEQ ID NO: 964569 - RNA, 19 nt, Artificial Sequence
  Description of Artificial Sequence: Synthetic oligonucleotide
cccuuacaugagcuggacc

SEQ ID NO: 964570 - RNA, 19 nt, Artificial Sequence
  Description of Artificial Sequence: Synthetic oligonucleotide
cgaaacguucaucaggaaa

SEQ ID NO: 964571 - RNA, 19 nt, Artificial Sequence
  Description of Artificial Sequence: Synthetic oligonucleotide
gaggcugccgaaggaaagu

SEQ ID NO: 964572 - RNA, 19 nt, Artificial Sequence
  Description of Artificial Sequence: Synthetic oligonucleotide
cuggauuucguagcugacu

SEQ ID NO: 964573 - RNA, 19 nt, Artificial Sequence
  Description of Artificial Sequence: Synthetic oligonucleotide
cagguaaggccgacuuuaa

SEQ ID NO: 964574 - RNA, 19 nt, Artificial Sequence
  Description of Artificial Sequence: Synthetic oligonucleotide
uaaccccucucggcaugcc

SEQ ID NO: 964575 - RNA, 19 nt, Artificial Sequence
  Description of Artificial Sequence: Synthetic oligonucleotide
cucugagcuccguggcuca

SEQ ID NO: 964576 - RNA, 19 nt, Artificial Sequence
  Description of Artificial Sequence: Synthetic oligonucleotide
cccauauucaggugaggaa

SEQ ID NO: 964577 - RNA, 19 nt, Artificial Sequence
  Description of Artificial Sequence: Synthetic oligonucleotide
uccaagcguaucggcucac

SEQ ID NO: 964578 - RNA, 19 nt, Artificial Sequence
  Description of Artificial Sequence: Synthetic oligonucleotide
cgaaggaaagucugaccuc

SEQ ID NO: 964579 - RNA, 19 nt, Artificial Sequence
  Description of Artificial Sequence: Synthetic oligonucleotide
caguaaguuguuggguuua

SEQ ID NO: 964580 - RNA, 19 nt, Artificial Sequence
  Description of Artificial Sequence: Synthetic oligonucleotide
cuuacaugagcuggaccgu

SEQ ID NO: 964581 - RNA, 19 nt, Artificial Sequence
  Description of Artificial Sequence: Synthetic oligonucleotide
aaccggucaguaaguuguu

SEQ ID NO: 964582 - RNA, 19 nt, Artificial Sequence
  Description of Artificial Sequence: Synthetic oligonucleotide
acugcaguucgugcccuua

SEQ ID NO: 964583 - RNA, 19 nt, Artificial Sequence
  Description of Artificial Sequence: Synthetic oligonucleotide
gugagacugagcuggcauu

SEQ ID NO: 964584 - RNA, 19 nt, Artificial Sequence
  Description of Artificial Sequence: Synthetic oligonucleotide
cuguacaagucugggccaa

SEQ ID NO: 964585 - RNA, 19 nt, Artificial Sequence
  Description of Artificial Sequence: Synthetic oligonucleotide
gguagaugauagguaaaau

SEQ ID NO: 964586 - RNA, 19 nt, Artificial Sequence
  Description of Artificial Sequence: Synthetic oligonucleotide
cuagagcuucagagcugca

SEQ ID NO: 964587 - RNA, 19 nt, Artificial Sequence
  Description of Artificial Sequence: Synthetic oligonucleotide
cauggcgauaucuggcauu

SEQ ID NO: 964588 - RNA, 19 nt, Artificial Sequence
  Description of Artificial Sequence: Synthetic oligonucleotide
ggugcaaucgggaggugcu

SEQ ID NO: 964589 - RNA, 19 nt, Artificial Sequence
  Description of Artificial Sequence: Synthetic oligonucleotide
ggucaguaaguuguugggu

SEQ ID NO: 964590 - RNA, 19 nt, Artificial Sequence
  Description of Artificial Sequence: Synthetic oligonucleotide
augcacguggaaacuggua

SEQ ID NO: 964591 - RNA, 19 nt, Artificial Sequence
  Description of Artificial Sequence: Synthetic oligonucleotide
uacugcaguucgugcccuu

SEQ ID NO: 964592 - RNA, 19 nt, Artificial Sequence
  Description of Artificial Sequence: Synthetic oligonucleotide
ccccauauucaggugagga

SEQ ID NO: 964593 - RNA, 19 nt, Artificial Sequence
  Description of Artificial Sequence: Synthetic oligonucleotide
gcuuguguagauggccauc

SEQ ID NO: 964594 - RNA, 19 nt, Artificial Sequence
  Description of Artificial Sequence: Synthetic oligonucleotide
cucucggcaugccauguau

SEQ ID NO: 964595 - RNA, 19 nt, Artificial Sequence
  Description of Artificial Sequence: Synthetic oligonucleotide
cgauaucuggcauuaaaau

SEQ ID NO: 964596 - RNA, 19 nt, Artificial Sequence
  Description of Artificial Sequence: Synthetic oligonucleotide
ccguugccagcauuuucug

SEQ ID NO: 964597 - RNA, 19 nt, Artificial Sequence
  Description of Artificial Sequence: Synthetic oligonucleotide
cauugucaagagcggacuu

SEQ ID NO: 964598 - RNA, 19 nt, Artificial Sequence
  Description of Artificial Sequence: Synthetic oligonucleotide
gugcgucugccaggggcag

SEQ ID NO: 964599 - RNA, 19 nt, Artificial Sequence
  Description of Artificial Sequence: Synthetic oligonucleotide
cacguggaaacugguagau

SEQ ID NO: 964600 - RNA, 19 nt, Artificial Sequence
  Description of Artificial Sequence: Synthetic oligonucleotide
gcaagcucugggagccucc

SEQ ID NO: 964601 - RNA, 19 nt, Artificial Sequence
  Description of Artificial Sequence: Synthetic oligonucleotide
aucuggcauuaaaaucauu

SEQ ID NO: 964602 - RNA, 19 nt, Artificial Sequence
  Description of Artificial Sequence: Synthetic oligonucleotide
caucccuuuccagauccgu

SEQ ID NO: 964603 - RNA, 19 nt, Artificial Sequence
  Description of Artificial Sequence: Synthetic oligonucleotide
gagcuccguggcucaggga

SEQ ID NO: 964604 - RNA, 19 nt, Artificial Sequence
  Description of Artificial Sequence: Synthetic oligonucleotide
gcaguucgugcccuuacau

SEQ ID NO: 964605 - RNA, 19 nt, Artificial Sequence
  Description of Artificial Sequence: Synthetic oligonucleotide
gugaugccuuauuguggcu

SEQ ID NO: 964606 - RNA, 19 nt, Artificial Sequence
  Description of Artificial Sequence: Synthetic oligonucleotide
ggagugcuguuaacacgac

SEQ ID NO: 964607 - RNA, 19 nt, Artificial Sequence
  Description of Artificial Sequence: Synthetic oligonucleotide
ggagugcgucugccagggg

SEQ ID NO: 964608 - RNA, 19 nt, Artificial Sequence
  Description of Artificial Sequence: Synthetic oligonucleotide
cuacuggaucgcucuucua

SEQ ID NO: 964609 - RNA, 19 nt, Artificial Sequence
  Description of Artificial Sequence: Synthetic oligonucleotide
cgacuuuaagccauuuggu

SEQ ID NO: 964610 - RNA, 19 nt, Artificial Sequence
  Description of Artificial Sequence: Synthetic oligonucleotide
ggucugcaagcagcauuug

SEQ ID NO: 964611 - RNA, 19 nt, Artificial Sequence
  Description of Artificial Sequence: Synthetic oligonucleotide
uccguggcucagggacuca

SEQ ID NO: 964612 - RNA, 19 nt, Artificial Sequence
  Description of Artificial Sequence: Synthetic oligonucleotide
gccccauauucaggugagg

SEQ ID NO: 964613 - RNA, 19 nt, Artificial Sequence
  Description of Artificial Sequence: Synthetic oligonucleotide
gcccuuacaugagcuggac

SEQ ID NO: 964614 - RNA, 19 nt, Artificial Sequence
  Description of Artificial Sequence: Synthetic oligonucleotide
gcaaucgggaggugcuacu

SEQ ID NO: 964615 - RNA, 19 nt, Artificial Sequence
  Description of Artificial Sequence: Synthetic oligonucleotide
cggcaugccauguauaaau

SEQ ID NO: 964616 - RNA, 19 nt, Artificial Sequence
  Description of Artificial Sequence: Synthetic oligonucleotide
gcggacuuucauccccgaa

SEQ ID NO: 964617 - RNA, 19 nt, Artificial Sequence
  Description of Artificial Sequence: Synthetic oligonucleotide
gugcaaucgggaggugcua

SEQ ID NO: 964618 - RNA, 19 nt, Artificial Sequence
  Description of Artificial Sequence: Synthetic oligonucleotide
ccccucucggcaugccaug

SEQ ID NO: 964619 - RNA, 19 nt, Artificial Sequence
  Description of Artificial Sequence: Synthetic oligonucleotide
cuggguauuccugcugauu

SEQ ID NO: 964620 - RNA, 19 nt, Artificial Sequence
  Description of Artificial Sequence: Synthetic oligonucleotide
caagcucugggagccuccu

SEQ ID NO: 964621 - RNA, 19 nt, Artificial Sequence
  Description of Artificial Sequence: Synthetic oligonucleotide
caaucgggaggugcuacuu

SEQ ID NO: 964622 - RNA, 19 nt, Artificial Sequence
  Description of Artificial Sequence: Synthetic oligonucleotide
ggaauacaugagagaugcu

SEQ ID NO: 964623 - RNA, 19 nt, Artificial Sequence
  Description of Artificial Sequence: Synthetic oligonucleotide
cugcucuagugcguguuuu

SEQ ID NO: 964624 - RNA, 19 nt, Artificial Sequence
  Description of Artificial Sequence: Synthetic oligonucleotide
cguaucggcucacucuucu

SEQ ID NO: 964625 - RNA, 19 nt, Artificial Sequence
  Description of Artificial Sequence: Synthetic oligonucleotide
aggccgacuuuaagccauu

SEQ ID NO: 964626 - RNA, 19 nt, Artificial Sequence
  Description of Artificial Sequence: Synthetic oligonucleotide
ggcagguaaggccgacuuu

SEQ ID NO: 964627 - RNA, 19 nt, Artificial Sequence
  Description of Artificial Sequence: Synthetic oligonucleotide
ccaucaggagaaaguggau

SEQ ID NO: 964628 - RNA, 19 nt, Artificial Sequence
  Description of Artificial Sequence: Synthetic oligonucleotide
ccgaaacguucaucaggaa

SEQ ID NO: 964629 - RNA, 19 nt, Artificial Sequence
  Description of Artificial Sequence: Synthetic oligonucleotide
cccaaugcacguggaaacu

SEQ ID NO: 964630 - RNA, 19 nt, Artificial Sequence
  Description of Artificial Sequence: Synthetic oligonucleotide
gcguaucggcucacucuuc

SEQ ID NO: 964631 - RNA, 19 nt, Artificial Sequence
  Description of Artificial Sequence: Synthetic oligonucleotide
gcccaaaagucaaguccgu

SEQ ID NO: 964632 - RNA, 19 nt, Artificial Sequence
  Description of Artificial Sequence: Synthetic oligonucleotide
cguuucuacugcaguucgu

SEQ ID NO: 964633 - RNA, 19 nt, Artificial Sequence
  Description of Artificial Sequence: Synthetic oligonucleotide
ccacaucaguacaguacuu

SEQ ID NO: 964634 - RNA, 19 nt, Artificial Sequence
  Description of Artificial Sequence: Synthetic oligonucleotide
ccauggcgauaucuggcau

SEQ ID NO: 964635 - RNA, 19 nt, Artificial Sequence
  Description of Artificial Sequence: Synthetic oligonucleotide
cccaaaagucaaguccguu

SEQ ID NO: 964636 - RNA, 19 nt, Artificial Sequence
  Description of Artificial Sequence: Synthetic oligonucleotide
ccuguccuugagugacagu

SEQ ID NO: 964637 - RNA, 19 nt, Artificial Sequence
  Description of Artificial Sequence: Synthetic oligonucleotide
cccuuuccagauccguguu

SEQ ID NO: 964638 - RNA, 19 nt, Artificial Sequence
  Description of Artificial Sequence: Synthetic oligonucleotide
ccaagcguaucggcucacu

SEQ ID NO: 964639 - RNA, 19 nt, Artificial Sequence
  Description of Artificial Sequence: Synthetic oligonucleotide
cccucucggcaugccaugu

SEQ ID NO: 964640 - RNA, 19 nt, Artificial Sequence
  Description of Artificial Sequence: Synthetic oligonucleotide
uuagaaucaagcaacaucc

SEQ ID NO: 964641 - RNA, 19 nt, Artificial Sequence
  Description of Artificial Sequence: Synthetic oligonucleotide
aaagcaauggcauacuuag

SEQ ID NO: 964642 - RNA, 19 nt, Artificial Sequence
  Description of Artificial Sequence: Synthetic oligonucleotide
aauaaucugagauuucuuc

SEQ ID NO: 964643 - RNA, 19 nt, Artificial Sequence
  Description of Artificial Sequence: Synthetic oligonucleotide
aauaugcucauuuaaaacu

SEQ ID NO: 964644 - RNA, 19 nt, Artificial Sequence
  Description of Artificial Sequence: Synthetic oligonucleotide
uguagaaugaguaacuuga

SEQ ID NO: 964645 - RNA, 19 nt, Artificial Sequence
  Description of Artificial Sequence: Synthetic oligonucleotide
auacaggucaucuauaaac

SEQ ID NO: 964646 - RNA, 19 nt, Artificial Sequence
  Description of Artificial Sequence: Synthetic oligonucleotide
uucuuauauauacacaucc

SEQ ID NO: 964647 - RNA, 19 nt, Artificial Sequence
  Description of Artificial Sequence: Synthetic oligonucleotide
auuagaaucaagcaacauc

SEQ ID NO: 964648 - RNA, 19 nt, Artificial Sequence
  Description of Artificial Sequence: Synthetic oligonucleotide
uaugcagugagccauaucu

SEQ ID NO: 964649 - RNA, 19 nt, Artificial Sequence
  Description of Artificial Sequence: Synthetic oligonucleotide
aauuguaggaauaggcugc

SEQ ID NO: 964650 - RNA, 19 nt, Artificial Sequence
  Description of Artificial Sequence: Synthetic oligonucleotide
uucuauuuaaccaacguaa

SEQ ID NO: 964651 - RNA, 19 nt, Artificial Sequence
  Description of Artificial Sequence: Synthetic oligonucleotide
uguauugagguaauaaugu

SEQ ID NO: 964652 - RNA, 19 nt, Artificial Sequence
  Description of Artificial Sequence: Synthetic oligonucleotide
aacacuuagagccauuucu

SEQ ID NO: 964653 - RNA, 19 nt, Artificial Sequence
  Description of Artificial Sequence: Synthetic oligonucleotide
uuaacuugaauaaaauagu

SEQ ID NO: 964654 - RNA, 19 nt, Artificial Sequence
  Description of Artificial Sequence: Synthetic oligonucleotide
ugcauuagaaucaagcaac

SEQ ID NO: 964655 - RNA, 19 nt, Artificial Sequence
  Description of Artificial Sequence: Synthetic oligonucleotide
ucuaugacugcuaucaaca

SEQ ID NO: 964656 - RNA, 19 nt, Artificial Sequence
  Description of Artificial Sequence: Synthetic oligonucleotide
aauguaacuacucggauuu

SEQ ID NO: 964657 - RNA, 19 nt, Artificial Sequence
  Description of Artificial Sequence: Synthetic oligonucleotide
auaucuaaaauugaugcuc

SEQ ID NO: 964658 - RNA, 19 nt, Artificial Sequence
  Description of Artificial Sequence: Synthetic oligonucleotide
uuuaaccaacguaauaugc

SEQ ID NO: 964659 - RNA, 19 nt, Artificial Sequence
  Description of Artificial Sequence: Synthetic oligonucleotide
uuuuccguuaacaacuuug

SEQ ID NO: 964660 - RNA, 19 nt, Artificial Sequence
  Description of Artificial Sequence: Synthetic oligonucleotide
aagugaguugcacacacag

SEQ ID NO: 964661 - RNA, 19 nt, Artificial Sequence
  Description of Artificial Sequence: Synthetic oligonucleotide
acgacaaagaguuucaugu

SEQ ID NO: 964662 - RNA, 19 nt, Artificial Sequence
  Description of Artificial Sequence: Synthetic oligonucleotide
aauacaacagcuuguguau

SEQ ID NO: 964663 - RNA, 19 nt, Artificial Sequence
  Description of Artificial Sequence: Synthetic oligonucleotide
gaauauaccagcuccuacc

SEQ ID NO: 964664 - RNA, 19 nt, Artificial Sequence
  Description of Artificial Sequence: Synthetic oligonucleotide
uucuugacgacaaagaguu

SEQ ID NO: 964665 - RNA, 19 nt, Artificial Sequence
  Description of Artificial Sequence: Synthetic oligonucleotide
uguaagauuucuuaggaua

SEQ ID NO: 964666 - RNA, 19 nt, Artificial Sequence
  Description of Artificial Sequence: Synthetic oligonucleotide
uauuuaaccaacguaauau

SEQ ID NO: 964667 - RNA, 19 nt, Artificial Sequence
  Description of Artificial Sequence: Synthetic oligonucleotide
aggaauaggcugcauaaac

SEQ ID NO: 964668 - RNA, 19 nt, Artificial Sequence
  Description of Artificial Sequence: Synthetic oligonucleotide
uuaaccaacguaauaugcu

SEQ ID NO: 964669 - RNA, 19 nt, Artificial Sequence
  Description of Artificial Sequence: Synthetic oligonucleotide
aauauaccgaugcaacgug

SEQ ID NO: 964670 - RNA, 19 nt, Artificial Sequence
  Description of Artificial Sequence: Synthetic oligonucleotide
auuuaaaacugccacagaa

SEQ ID NO: 964671 - RNA, 19 nt, Artificial Sequence
  Description of Artificial Sequence: Synthetic oligonucleotide
ugggacaagagaaugguca

SEQ ID NO: 964672 - RNA, 19 nt, Artificial Sequence
  Description of Artificial Sequence: Synthetic oligonucleotide
accaauauguccauucugc

SEQ ID NO: 964673 - RNA, 19 nt, Artificial Sequence
  Description of Artificial Sequence: Synthetic oligonucleotide
uaauaugcucauuuaaaac

SEQ ID NO: 964674 - RNA, 19 nt, Artificial Sequence
  Description of Artificial Sequence: Synthetic oligonucleotide
ugcaauauaccgaugcaac

SEQ ID NO: 964675 - RNA, 19 nt, Artificial Sequence
  Description of Artificial Sequence: Synthetic oligonucleotide
uauuaacuaucauauuuga

SEQ ID NO: 964676 - RNA, 19 nt, Artificial Sequence
  Description of Artificial Sequence: Synthetic oligonucleotide
cuaaugucuuuguagaaug

SEQ ID NO: 964677 - RNA, 19 nt, Artificial Sequence
  Description of Artificial Sequence: Synthetic oligonucleotide
ugaauaaaauaguaguuuu

SEQ ID NO: 964678 - RNA, 19 nt, Artificial Sequence
  Description of Artificial Sequence: Synthetic oligonucleotide
uuaggauacauuacaugca

SEQ ID NO: 964679 - RNA, 19 nt, Artificial Sequence
  Description of Artificial Sequence: Synthetic oligonucleotide
ccauaucuaaaauugaugc

SEQ ID NO: 964680 - RNA, 19 nt, Artificial Sequence
  Description of Artificial Sequence: Synthetic oligonucleotide
uuuccguuaacaacuuugc

SEQ ID NO: 964681 - RNA, 19 nt, Artificial Sequence
  Description of Artificial Sequence: Synthetic oligonucleotide
acaugagugggcuaguuug

SEQ ID NO: 964682 - RNA, 19 nt, Artificial Sequence
  Description of Artificial Sequence: Synthetic oligonucleotide
ugagauguaagauuucuua

SEQ ID NO: 964683 - RNA, 19 nt, Artificial Sequence
  Description of Artificial Sequence: Synthetic oligonucleotide
uuaacaacuuugcaaguuc

SEQ ID NO: 964684 - RNA, 19 nt, Artificial Sequence
  Description of Artificial Sequence: Synthetic oligonucleotide
ugucuuuguagaaugagua

SEQ ID NO: 964685 - RNA, 19 nt, Artificial Sequence
  Description of Artificial Sequence: Synthetic oligonucleotide
uuucuauuuaaccaacgua

SEQ ID NO: 964686 - RNA, 19 nt, Artificial Sequence
  Description of Artificial Sequence: Synthetic oligonucleotide
ugcaguguuucuaauaauc

SEQ ID NO: 964687 - RNA, 19 nt, Artificial Sequence
  Description of Artificial Sequence: Synthetic oligonucleotide
uccguuaacaacuuugcaa

SEQ ID NO: 964688 - RNA, 19 nt, Artificial Sequence
  Description of Artificial Sequence: Synthetic oligonucleotide
auccuaauguaacuacucg

SEQ ID NO: 964689 - RNA, 19 nt, Artificial Sequence
  Description of Artificial Sequence: Synthetic oligonucleotide
caauuguaggaauaggcug

SEQ ID NO: 964690 - RNA, 19 nt, Artificial Sequence
  Description of Artificial Sequence: Synthetic oligonucleotide
ucuuaggauacauuacaug

SEQ ID NO: 964691 - RNA, 19 nt, Artificial Sequence
  Description of Artificial Sequence: Synthetic oligonucleotide
auuucuauuuaaccaacgu

SEQ ID NO: 964692 - RNA, 19 nt, Artificial Sequence
  Description of Artificial Sequence: Synthetic oligonucleotide
uuuguaaaagugacuggga

SEQ ID NO: 964693 - RNA, 19 nt, Artificial Sequence
  Description of Artificial Sequence: Synthetic oligonucleotide
ucuuaauuugugcuuucca

SEQ ID NO: 964694 - RNA, 19 nt, Artificial Sequence
  Description of Artificial Sequence: Synthetic oligonucleotide
uauaccgaugcaacgugag

SEQ ID NO: 964695 - RNA, 19 nt, Artificial Sequence
  Description of Artificial Sequence: Synthetic oligonucleotide
uauugagguaauaauguuu

SEQ ID NO: 964696 - RNA, 19 nt, Artificial Sequence
  Description of Artificial Sequence: Synthetic oligonucleotide
uucguagagccccauacca

SEQ ID NO: 964697 - RNA, 19 nt, Artificial Sequence
  Description of Artificial Sequence: Synthetic oligonucleotide
aagucuuuucacaauggag

SEQ ID NO: 964698 - RNA, 19 nt, Artificial Sequence
  Description of Artificial Sequence: Synthetic oligonucleotide
caucuaauccuaauguaac

SEQ ID NO: 964699 - RNA, 19 nt, Artificial Sequence
  Description of Artificial Sequence: Synthetic oligonucleotide
aauugaugcucggaucugg

SEQ ID NO: 964700 - RNA, 19 nt, Artificial Sequence
  Description of Artificial Sequence: Synthetic oligonucleotide
uccauuuuggguccaauau

SEQ ID NO: 964701 - RNA, 19 nt, Artificial Sequence
  Description of Artificial Sequence: Synthetic oligonucleotide
ucugguuagcuucugguuc

SEQ ID NO: 964702 - RNA, 19 nt, Artificial Sequence
  Description of Artificial Sequence: Synthetic oligonucleotide
cuauaaacugaaagucucc

SEQ ID NO: 964703 - RNA, 19 nt, Artificial Sequence
  Description of Artificial Sequence: Synthetic oligonucleotide
ucuaugacuacuccucccu

SEQ ID NO: 964704 - RNA, 19 nt, Artificial Sequence
  Description of Artificial Sequence: Synthetic oligonucleotide
uagaaugaguaacuugaga

SEQ ID NO: 964705 - RNA, 19 nt, Artificial Sequence
  Description of Artificial Sequence: Synthetic oligonucleotide
uucaaugugcugaacaauu

SEQ ID NO: 964706 - RNA, 19 nt, Artificial Sequence
  Description of Artificial Sequence: Synthetic oligonucleotide
uuugcaaguucgcugugug

SEQ ID NO: 964707 - RNA, 19 nt, Artificial Sequence
  Description of Artificial Sequence: Synthetic oligonucleotide
auauuugagauguaagauu

SEQ ID NO: 964708 - RNA, 19 nt, Artificial Sequence
  Description of Artificial Sequence: Synthetic oligonucleotide
uaggauacauuacaugcaa

SEQ ID NO: 964709 - RNA, 19 nt, Artificial Sequence
  Description of Artificial Sequence: Synthetic oligonucleotide
ggucauauccucuuguugc

SEQ ID NO: 964710 - RNA, 19 nt, Artificial Sequence
  Description of Artificial Sequence: Synthetic oligonucleotide
uaaaauugaugcucggauc

SEQ ID NO: 964711 - RNA, 19 nt, Artificial Sequence
  Description of Artificial Sequence: Synthetic oligonucleotide
auacuuaguucucagucca

SEQ ID NO: 964712 - RNA, 19 nt, Artificial Sequence
  Description of Artificial Sequence: Synthetic oligonucleotide
cugagcacaagugaguugc

SEQ ID NO: 964713 - RNA, 19 nt, Artificial Sequence
  Description of Artificial Sequence: Synthetic oligonucleotide
uuguaaaagugacugggau

SEQ ID NO: 964714 - RNA, 19 nt, Artificial Sequence
  Description of Artificial Sequence: Synthetic oligonucleotide
ugaugcucucuccagauau

SEQ ID NO: 964715 - RNA, 19 nt, Artificial Sequence
  Description of Artificial Sequence: Synthetic oligonucleotide
ugaauauaccagcuccuac

SEQ ID NO: 964716 - RNA, 19 nt, Artificial Sequence
  Description of Artificial Sequence: Synthetic oligonucleotide
cagugcaauauaccgaugc

SEQ ID NO: 964717 - RNA, 19 nt, Artificial Sequence
  Description of Artificial Sequence: Synthetic oligonucleotide
uccucccuaauauacaggu

SEQ ID NO: 964718 - RNA, 19 nt, Artificial Sequence
  Description of Artificial Sequence: Synthetic oligonucleotide
uuuucaauccccagaccac

SEQ ID NO: 964719 - RNA, 19 nt, Artificial Sequence
  Description of Artificial Sequence: Synthetic oligonucleotide
ucggauuuccauuuugggu

SEQ ID NO: 964720 - RNA, 19 nt, Artificial Sequence
  Description of Artificial Sequence: Synthetic oligonucleotide
uaguuuauggagacugaga

SEQ ID NO: 964721 - RNA, 19 nt, Artificial Sequence
  Description of Artificial Sequence: Synthetic oligonucleotide
ucuaaaauugaugcucgga

SEQ ID NO: 964722 - RNA, 19 nt, Artificial Sequence
  Description of Artificial Sequence: Synthetic oligonucleotide
agucuccuaggucuguuac

SEQ ID NO: 964723 - RNA, 19 nt, Artificial Sequence
  Description of Artificial Sequence: Synthetic oligonucleotide
uguaacuacucggauuucc

SEQ ID NO: 964724 - RNA, 19 nt, Artificial Sequence
  Description of Artificial Sequence: Synthetic oligonucleotide
guguauugagguaauaaug

SEQ ID NO: 964725 - RNA, 19 nt, Artificial Sequence
  Description of Artificial Sequence: Synthetic oligonucleotide
ugagguuuaucagcuagag

SEQ ID NO: 964726 - RNA, 19 nt, Artificial Sequence
  Description of Artificial Sequence: Synthetic oligonucleotide
uaaccaacguaauaugcuc

SEQ ID NO: 964727 - RNA, 19 nt, Artificial Sequence
  Description of Artificial Sequence: Synthetic oligonucleotide
gaugcucggaucugguuag

SEQ ID NO: 964728 - RNA, 19 nt, Artificial Sequence
  Description of Artificial Sequence: Synthetic oligonucleotide
aagcucggacacaugaucg

SEQ ID NO: 964729 - RNA, 19 nt, Artificial Sequence
  Description of Artificial Sequence: Synthetic oligonucleotide
uguaaaagugacugggaua

SEQ ID NO: 964730 - RNA, 19 nt, Artificial Sequence
  Description of Artificial Sequence: Synthetic oligonucleotide
uucagugaagguccguaug

SEQ ID NO: 964731 - RNA, 19 nt, Artificial Sequence
  Description of Artificial Sequence: Synthetic oligonucleotide
auaccgaugcaacgugagc

SEQ ID NO: 964732 - RNA, 19 nt, Artificial Sequence
  Description of Artificial Sequence: Synthetic oligonucleotide
uugacgacaaagaguuuca

SEQ ID NO: 964733 - RNA, 19 nt, Artificial Sequence
  Description of Artificial Sequence: Synthetic oligonucleotide
ugaucgggcauucucugca

SEQ ID NO: 964734 - RNA, 19 nt, Artificial Sequence
  Description of Artificial Sequence: Synthetic oligonucleotide
uaccuguucucuaugacua

SEQ ID NO: 964735 - RNA, 19 nt, Artificial Sequence
  Description of Artificial Sequence: Synthetic oligonucleotide
uaagcucggacacaugauc

SEQ ID NO: 964736 - RNA, 19 nt, Artificial Sequence
  Description of Artificial Sequence: Synthetic oligonucleotide
cuuggugcuuuccauauuc

SEQ ID NO: 964737 - RNA, 19 nt, Artificial Sequence
  Description of Artificial Sequence: Synthetic oligonucleotide
cauccuauauuaacuauca

SEQ ID NO: 964738 - RNA, 19 nt, Artificial Sequence
  Description of Artificial Sequence: Synthetic oligonucleotide
auauccucuuguugcugcc

SEQ ID NO: 964739 - RNA, 19 nt, Artificial Sequence
  Description of Artificial Sequence: Synthetic oligonucleotide
guaagauuucuuaggauac

SEQ ID NO: 964740 - RNA, 19 nt, Artificial Sequence
  Description of Artificial Sequence: Synthetic oligonucleotide
auuaacuaucauauuugag

SEQ ID NO: 964741 - RNA, 19 nt, Artificial Sequence
  Description of Artificial Sequence: Synthetic oligonucleotide
cuugacgacaaagaguuuc

SEQ ID NO: 964742 - RNA, 19 nt, Artificial Sequence
  Description of Artificial Sequence: Synthetic oligonucleotide
cucccuaauauacagguca

SEQ ID NO: 964743 - RNA, 19 nt, Artificial Sequence
  Description of Artificial Sequence: Synthetic oligonucleotide
uugacaaccuucuuccaaa

SEQ ID NO: 964744 - RNA, 19 nt, Artificial Sequence
  Description of Artificial Sequence: Synthetic oligonucleotide
uaauguaacuacucggauu

SEQ ID NO: 964745 - RNA, 19 nt, Artificial Sequence
  Description of Artificial Sequence: Synthetic oligonucleotide
aacguaauaugcucauuua

SEQ ID NO: 964746 - RNA, 19 nt, Artificial Sequence
  Description of Artificial Sequence: Synthetic oligonucleotide
ucuaauccuaauguaacua

SEQ ID NO: 964747 - RNA, 19 nt, Artificial Sequence
  Description of Artificial Sequence: Synthetic oligonucleotide
cucggauuuccauuuuggg

SEQ ID NO: 964748 - RNA, 19 nt, Artificial Sequence
  Description of Artificial Sequence: Synthetic oligonucleotide
uucuuaggauacauuacau

SEQ ID NO: 964749 - RNA, 19 nt, Artificial Sequence
  Description of Artificial Sequence: Synthetic oligonucleotide
uccaacccuucguagagcc

SEQ ID NO: 964750 - RNA, 19 nt, Artificial Sequence
  Description of Artificial Sequence: Synthetic oligonucleotide
aguccaacccuucguagag

SEQ ID NO: 964751 - RNA, 19 nt, Artificial Sequence
  Description of Artificial Sequence: Synthetic oligonucleotide
ugcaaguucgcugugugcu

SEQ ID NO: 964752 - RNA, 19 nt, Artificial Sequence
  Description of Artificial Sequence: Synthetic oligonucleotide
aucuaauccuaauguaacu

SEQ ID NO: 964753 - RNA, 19 nt, Artificial Sequence
  Description of Artificial Sequence: Synthetic oligonucleotide
aacuacucggauuuccauu

SEQ ID NO: 964754 - RNA, 19 nt, Artificial Sequence
  Description of Artificial Sequence: Synthetic oligonucleotide
ugccacagaauaauuuuaa

SEQ ID NO: 964755 - RNA, 19 nt, Artificial Sequence
  Description of Artificial Sequence: Synthetic oligonucleotide
cucuaugacugcuaucaac

SEQ ID NO: 964756 - RNA, 19 nt, Artificial Sequence
  Description of Artificial Sequence: Synthetic oligonucleotide
augaucgggcauucucugc

SEQ ID NO: 964757 - RNA, 19 nt, Artificial Sequence
  Description of Artificial Sequence: Synthetic oligonucleotide
guaggaauaggcugcauaa

SEQ ID NO: 964758 - RNA, 19 nt, Artificial Sequence
  Description of Artificial Sequence: Synthetic oligonucleotide
aucacagcggaugaugcuc

SEQ ID NO: 964759 - RNA, 19 nt, Artificial Sequence
  Description of Artificial Sequence: Synthetic oligonucleotide
aaguugccgggacagccag

SEQ ID NO: 964760 - RNA, 19 nt, Artificial Sequence
  Description of Artificial Sequence: Synthetic oligonucleotide
gagacaggcuguugaaacc

SEQ ID NO: 964761 - RNA, 19 nt, Artificial Sequence
  Description of Artificial Sequence: Synthetic oligonucleotide
ccguuaacaacuuugcaag

SEQ ID NO: 964762 - RNA, 19 nt, Artificial Sequence
  Description of Artificial Sequence: Synthetic oligonucleotide
uaccgaugcaacgugagcu

SEQ ID NO: 964763 - RNA, 19 nt, Artificial Sequence
  Description of Artificial Sequence: Synthetic oligonucleotide
aguaacuugagaacacucu

SEQ ID NO: 964764 - RNA, 19 nt, Artificial Sequence
  Description of Artificial Sequence: Synthetic oligonucleotide
agugcaauauaccgaugca

SEQ ID NO: 964765 - RNA, 19 nt, Artificial Sequence
  Description of Artificial Sequence: Synthetic oligonucleotide
agcagccacaaguugccgg

SEQ ID NO: 964766 - RNA, 19 nt, Artificial Sequence
  Description of Artificial Sequence: Synthetic oligonucleotide
acguaauaugcucauuuaa

SEQ ID NO: 964767 - RNA, 19 nt, Artificial Sequence
  Description of Artificial Sequence: Synthetic oligonucleotide
gagugggcuaguuugacaa

SEQ ID NO: 964768 - RNA, 19 nt, Artificial Sequence
  Description of Artificial Sequence: Synthetic oligonucleotide
cuccaguaccuaauguacc

SEQ ID NO: 964769 - RNA, 19 nt, Artificial Sequence
  Description of Artificial Sequence: Synthetic oligonucleotide
ugacaaccuucuuccaaag

SEQ ID NO: 964770 - RNA, 19 nt, Artificial Sequence
  Description of Artificial Sequence: Synthetic oligonucleotide
guacugaaugcuugugacc

SEQ ID NO: 964771 - RNA, 19 nt, Artificial Sequence
  Description of Artificial Sequence: Synthetic oligonucleotide
uugagaacacucugagcac

SEQ ID NO: 964772 - RNA, 19 nt, Artificial Sequence
  Description of Artificial Sequence: Synthetic oligonucleotide
agcucggacacaugaucgg

SEQ ID NO: 964773 - RNA, 19 nt, Artificial Sequence
  Description of Artificial Sequence: Synthetic oligonucleotide
uccacuauuuguucuccuc

SEQ ID NO: 964774 - RNA, 19 nt, Artificial Sequence
  Description of Artificial Sequence: Synthetic oligonucleotide
cucuaugacuacuccuccc

SEQ ID NO: 964775 - RNA, 19 nt, Artificial Sequence
  Description of Artificial Sequence: Synthetic oligonucleotide
gacaaccuucuuccaaagc

SEQ ID NO: 964776 - RNA, 19 nt, Artificial Sequence
  Description of Artificial Sequence: Synthetic oligonucleotide
acaacuuugcaaguucgcu

SEQ ID NO: 964777 - RNA, 19 nt, Artificial Sequence
  Description of Artificial Sequence: Synthetic oligonucleotide
cuucguagagccccauacc

SEQ ID NO: 964778 - RNA, 19 nt, Artificial Sequence
  Description of Artificial Sequence: Synthetic oligonucleotide
uacuuaguucucaguccag

SEQ ID NO: 964779 - RNA, 19 nt, Artificial Sequence
  Description of Artificial Sequence: Synthetic oligonucleotide
gagcaucaacaacacuuag

SEQ ID NO: 964780 - RNA, 19 nt, Artificial Sequence
  Description of Artificial Sequence: Synthetic oligonucleotide
caacccuucguagagcccc

SEQ ID NO: 964781 - RNA, 19 nt, Artificial Sequence
  Description of Artificial Sequence: Synthetic oligonucleotide
agugggcuaguuugacaac

SEQ ID NO: 964782 - RNA, 19 nt, Artificial Sequence
  Description of Artificial Sequence: Synthetic oligonucleotide
uccaacuaauuuucuggaa

SEQ ID NO: 964783 - RNA, 19 nt, Artificial Sequence
  Description of Artificial Sequence: Synthetic oligonucleotide
ccuauauuaacuaucauau

SEQ ID NO: 964784 - RNA, 19 nt, Artificial Sequence
  Description of Artificial Sequence: Synthetic oligonucleotide
uugccaagacaacucugca

SEQ ID NO: 964785 - RNA, 19 nt, Artificial Sequence
  Description of Artificial Sequence: Synthetic oligonucleotide
aaccaacguaauaugcuca

SEQ ID NO: 964786 - RNA, 19 nt, Artificial Sequence
  Description of Artificial Sequence: Synthetic oligonucleotide
uccccagaccaccugaguc

SEQ ID NO: 964787 - RNA, 19 nt, Artificial Sequence
  Description of Artificial Sequence: Synthetic oligonucleotide
cauaaacucaucuuguuuu

SEQ ID NO: 964788 - RNA, 19 nt, Artificial Sequence
  Description of Artificial Sequence: Synthetic oligonucleotide
auguaagauuucuuaggau

SEQ ID NO: 964789 - RNA, 19 nt, Artificial Sequence
  Description of Artificial Sequence: Synthetic oligonucleotide
guagaaugaguaacuugag

SEQ ID NO: 964790 - RNA, 19 nt, Artificial Sequence
  Description of Artificial Sequence: Synthetic oligonucleotide
uuuucucgaacaugagcau

SEQ ID NO: 964791 - RNA, 19 nt, Artificial Sequence
  Description of Artificial Sequence: Synthetic oligonucleotide
cacaugaucgggcauucuc

SEQ ID NO: 964792 - RNA, 19 nt, Artificial Sequence
  Description of Artificial Sequence: Synthetic oligonucleotide
cugauagggcuccagcaac

SEQ ID NO: 964793 - RNA, 19 nt, Artificial Sequence
  Description of Artificial Sequence: Synthetic oligonucleotide
caugaucgggcauucucug

SEQ ID NO: 964794 - RNA, 19 nt, Artificial Sequence
  Description of Artificial Sequence: Synthetic oligonucleotide
cugcauuagaaucaagcaa

SEQ ID NO: 964795 - RNA, 19 nt, Artificial Sequence
  Description of Artificial Sequence: Synthetic oligonucleotide
cuaaaauugaugcucggau

SEQ ID NO: 964796 - RNA, 19 nt, Artificial Sequence
  Description of Artificial Sequence: Synthetic oligonucleotide
agugagccauaucuaaaau

SEQ ID NO: 964797 - RNA, 19 nt, Artificial Sequence
  Description of Artificial Sequence: Synthetic oligonucleotide
accaucuaauccuaaugua

SEQ ID NO: 964798 - RNA, 19 nt, Artificial Sequence
  Description of Artificial Sequence: Synthetic oligonucleotide
agccccauaccacuucgag

SEQ ID NO: 964799 - RNA, 19 nt, Artificial Sequence
  Description of Artificial Sequence: Synthetic oligonucleotide
uggaauaaucugagauuuc

SEQ ID NO: 964800 - RNA, 19 nt, Artificial Sequence
  Description of Artificial Sequence: Synthetic oligonucleotide
ucguagagccccauaccac

SEQ ID NO: 964801 - RNA, 19 nt, Artificial Sequence
  Description of Artificial Sequence: Synthetic oligonucleotide
ugagugggcuaguuugaca

SEQ ID NO: 964802 - RNA, 19 nt, Artificial Sequence
  Description of Artificial Sequence: Synthetic oligonucleotide
ucacagcggaugaugcucu

SEQ ID NO: 964803 - RNA, 19 nt, Artificial Sequence
  Description of Artificial Sequence: Synthetic oligonucleotide
uccguaugcagugagccau

SEQ ID NO: 964804 - RNA, 19 nt, Artificial Sequence
  Description of Artificial Sequence: Synthetic oligonucleotide
cacuuagagccauuucuuc

SEQ ID NO: 964805 - RNA, 19 nt, Artificial Sequence
  Description of Artificial Sequence: Synthetic oligonucleotide
gaguaacuugagaacacuc

SEQ ID NO: 964806 - RNA, 19 nt, Artificial Sequence
  Description of Artificial Sequence: Synthetic oligonucleotide
accaacguaauaugcucau

SEQ ID NO: 964807 - RNA, 19 nt, Artificial Sequence
  Description of Artificial Sequence: Synthetic oligonucleotide
cacaacccugaauauacca

SEQ ID NO: 964808 - RNA, 19 nt, Artificial Sequence
  Description of Artificial Sequence: Synthetic oligonucleotide
uaacuacucggauuuccau

SEQ ID NO: 964809 - RNA, 19 nt, Artificial Sequence
  Description of Artificial Sequence: Synthetic oligonucleotide
cagauaucccaauggcuuc

SEQ ID NO: 964810 - RNA, 19 nt, Artificial Sequence
  Description of Artificial Sequence: Synthetic oligonucleotide
agcaucaacaacacuuaga

SEQ ID NO: 964811 - RNA, 19 nt, Artificial Sequence
  Description of Artificial Sequence: Synthetic oligonucleotide
aggucuguuacuugucgau

SEQ ID NO: 964812 - RNA, 19 nt, Artificial Sequence
  Description of Artificial Sequence: Synthetic oligonucleotide
gugggcuaguuugacaacc

SEQ ID NO: 964813 - RNA, 19 nt, Artificial Sequence
  Description of Artificial Sequence: Synthetic oligonucleotide
uugcaaguucgcugugugc

SEQ ID NO: 964814 - RNA, 19 nt, Artificial Sequence
  Description of Artificial Sequence: Synthetic oligonucleotide
gaucgggcauucucugcag

SEQ ID NO: 964815 - RNA, 19 nt, Artificial Sequence
  Description of Artificial Sequence: Synthetic oligonucleotide
uucucuuaccuguucucua

SEQ ID NO: 964816 - RNA, 19 nt, Artificial Sequence
  Description of Artificial Sequence: Synthetic oligonucleotide
acuuaguucucaguccaga

SEQ ID NO: 964817 - RNA, 19 nt, Artificial Sequence
  Description of Artificial Sequence: Synthetic oligonucleotide
guaccugggacauguucug

SEQ ID NO: 964818 - RNA, 19 nt, Artificial Sequence
  Description of Artificial Sequence: Synthetic oligonucleotide
cuauuuaaccaacguaaua

SEQ ID NO: 964819 - RNA, 19 nt, Artificial Sequence
  Description of Artificial Sequence: Synthetic oligonucleotide
ccuaauguaacuacucgga

SEQ ID NO: 964820 - RNA, 19 nt, Artificial Sequence
  Description of Artificial Sequence: Synthetic oligonucleotide
acaugaucgggcauucucu

SEQ ID NO: 964821 - RNA, 19 nt, Artificial Sequence
  Description of Artificial Sequence: Synthetic oligonucleotide
agccauaucuaaaauugau

SEQ ID NO: 964822 - RNA, 19 nt, Artificial Sequence
  Description of Artificial Sequence: Synthetic oligonucleotide
aauccccagaccaccugag

SEQ ID NO: 964823 - RNA, 19 nt, Artificial Sequence
  Description of Artificial Sequence: Synthetic oligonucleotide
gacuacuccucccuaauau

SEQ ID NO: 964824 - RNA, 19 nt, Artificial Sequence
  Description of Artificial Sequence: Synthetic oligonucleotide
ccuuuguaaaagugacugg

SEQ ID NO: 964825 - RNA, 19 nt, Artificial Sequence
  Description of Artificial Sequence: Synthetic oligonucleotide
acuacuccucccuaauaua

SEQ ID NO: 964826 - RNA, 19 nt, Artificial Sequence
  Description of Artificial Sequence: Synthetic oligonucleotide
gccauaucuaaaauugaug

SEQ ID NO: 964827 - RNA, 19 nt, Artificial Sequence
  Description of Artificial Sequence: Synthetic oligonucleotide
ucucuaugacugcuaucaa

SEQ ID NO: 964828 - RNA, 19 nt, Artificial Sequence
  Description of Artificial Sequence: Synthetic oligonucleotide
aguccagaauucuuauaua

SEQ ID NO: 964829 - RNA, 19 nt, Artificial Sequence
  Description of Artificial Sequence: Synthetic oligonucleotide
cuuaguucucaguccagaa

SEQ ID NO: 964830 - RNA, 19 nt, Artificial Sequence
  Description of Artificial Sequence: Synthetic oligonucleotide
augacuacuccucccuaau

SEQ ID NO: 964831 - RNA, 19 nt, Artificial Sequence
  Description of Artificial Sequence: Synthetic oligonucleotide
ccacuauuuguucuccucc

SEQ ID NO: 964832 - RNA, 19 nt, Artificial Sequence
  Description of Artificial Sequence: Synthetic oligonucleotide
ugagccauuccaaguccau

SEQ ID NO: 964833 - RNA, 19 nt, Artificial Sequence
  Description of Artificial Sequence: Synthetic oligonucleotide
gucuauauccaagaaauuu

SEQ ID NO: 964834 - RNA, 19 nt, Artificial Sequence
  Description of Artificial Sequence: Synthetic oligonucleotide
cauauuugagauguaagau

SEQ ID NO: 964835 - RNA, 19 nt, Artificial Sequence
  Description of Artificial Sequence: Synthetic oligonucleotide
guaacuacucggauuucca

SEQ ID NO: 964836 - RNA, 19 nt, Artificial Sequence
  Description of Artificial Sequence: Synthetic oligonucleotide
uguugaaaccugggacaag

SEQ ID NO: 964837 - RNA, 19 nt, Artificial Sequence
  Description of Artificial Sequence: Synthetic oligonucleotide
uugaaacaacugcugcauu

SEQ ID NO: 964838 - RNA, 19 nt, Artificial Sequence
  Description of Artificial Sequence: Synthetic oligonucleotide
uaucagcuagaggcacucg

SEQ ID NO: 964839 - RNA, 19 nt, Artificial Sequence
  Description of Artificial Sequence: Synthetic oligonucleotide
gguccguaugcagugagcc

SEQ ID NO: 964840 - RNA, 19 nt, Artificial Sequence
  Description of Artificial Sequence: Synthetic oligonucleotide
ccccauaccacuucgagca

SEQ ID NO: 964841 - RNA, 19 nt, Artificial Sequence
  Description of Artificial Sequence: Synthetic oligonucleotide
aaauaagcucggacacaug

SEQ ID NO: 964842 - RNA, 19 nt, Artificial Sequence
  Description of Artificial Sequence: Synthetic oligonucleotide
ugacuacuccucccuaaua

SEQ ID NO: 964843 - RNA, 19 nt, Artificial Sequence
  Description of Artificial Sequence: Synthetic oligonucleotide
ugagcacaagugaguugca

SEQ ID NO: 964844 - RNA, 19 nt, Artificial Sequence
  Description of Artificial Sequence: Synthetic oligonucleotide
auaccagcuccuaccacag

SEQ ID NO: 964845 - RNA, 19 nt, Artificial Sequence
  Description of Artificial Sequence: Synthetic oligonucleotide
caguccagaauucuuauau

SEQ ID NO: 964846 - RNA, 19 nt, Artificial Sequence
  Description of Artificial Sequence: Synthetic oligonucleotide
uggugcuuuccauauucuu

SEQ ID NO: 964847 - RNA, 19 nt, Artificial Sequence
  Description of Artificial Sequence: Synthetic oligonucleotide
ccuaccacagcauaguuua

SEQ ID NO: 964848 - RNA, 19 nt, Artificial Sequence
  Description of Artificial Sequence: Synthetic oligonucleotide
ccuucguagagccccauac

SEQ ID NO: 964849 - RNA, 19 nt, Artificial Sequence
  Description of Artificial Sequence: Synthetic oligonucleotide
caacacuuagagccauuuc

SEQ ID NO: 964850 - RNA, 19 nt, Artificial Sequence
  Description of Artificial Sequence: Synthetic oligonucleotide
agcuccuaccacagcauag

SEQ ID NO: 964851 - RNA, 19 nt, Artificial Sequence
  Description of Artificial Sequence: Synthetic oligonucleotide
cucuuaccuguucucuaug

SEQ ID NO: 964852 - RNA, 19 nt, Artificial Sequence
  Description of Artificial Sequence: Synthetic oligonucleotide
cacagugcaauauaccgau

SEQ ID NO: 964853 - RNA, 19 nt, Artificial Sequence
  Description of Artificial Sequence: Synthetic oligonucleotide
agguccguaugcagugagc

SEQ ID NO: 964854 - RNA, 19 nt, Artificial Sequence
  Description of Artificial Sequence: Synthetic oligonucleotide
ucgccuaugcuuugcuaau

SEQ ID NO: 964855 - RNA, 19 nt, Artificial Sequence
  Description of Artificial Sequence: Synthetic oligonucleotide
auauaccgaugcaacguga

SEQ ID NO: 964856 - RNA, 19 nt, Artificial Sequence
  Description of Artificial Sequence: Synthetic oligonucleotide
aaacgcucuagcagcucca

SEQ ID NO: 964857 - RNA, 19 nt, Artificial Sequence
  Description of Artificial Sequence: Synthetic oligonucleotide
caacguaauaugcucauuu

SEQ ID NO: 964858 - RNA, 19 nt, Artificial Sequence
  Description of Artificial Sequence: Synthetic oligonucleotide
gacugcuaucaacaacaaa

SEQ ID NO: 964859 - RNA, 19 nt, Artificial Sequence
  Description of Artificial Sequence: Synthetic oligonucleotide
acacuuagagccauuucuu

SEQ ID NO: 964860 - RNA, 19 nt, Artificial Sequence
  Description of Artificial Sequence: Synthetic oligonucleotide
caguccaacccuucguaga

SEQ ID NO: 964861 - RNA, 19 nt, Artificial Sequence
  Description of Artificial Sequence: Synthetic oligonucleotide
cagcggaugaugcucucuc

SEQ ID NO: 964862 - RNA, 19 nt, Artificial Sequence
  Description of Artificial Sequence: Synthetic oligonucleotide
cuggaauaaucugagauuu

SEQ ID NO: 964863 - RNA, 19 nt, Artificial Sequence
  Description of Artificial Sequence: Synthetic oligonucleotide
gacacaugaucgggcauuc

SEQ ID NO: 964864 - RNA, 19 nt, Artificial Sequence
  Description of Artificial Sequence: Synthetic oligonucleotide
agugaguugcacacacagu

SEQ ID NO: 964865 - RNA, 19 nt, Artificial Sequence
  Description of Artificial Sequence: Synthetic oligonucleotide
cuaugacugcuaucaacaa

SEQ ID NO: 964866 - RNA, 19 nt, Artificial Sequence
  Description of Artificial Sequence: Synthetic oligonucleotide
accgaugcaacgugagcuu

SEQ ID NO: 964867 - RNA, 19 nt, Artificial Sequence
  Description of Artificial Sequence: Synthetic oligonucleotide
cucggcagcuccauacuga

SEQ ID NO: 964868 - RNA, 19 nt, Artificial Sequence
  Description of Artificial Sequence: Synthetic oligonucleotide
guauugagguaauaauguu

SEQ ID NO: 964869 - RNA, 19 nt, Artificial Sequence
  Description of Artificial Sequence: Synthetic oligonucleotide
uacugaccaauauguccau

SEQ ID NO: 964870 - RNA, 19 nt, Artificial Sequence
  Description of Artificial Sequence: Synthetic oligonucleotide
cugaacaauuccaacuaau

SEQ ID NO: 964871 - RNA, 19 nt, Artificial Sequence
  Description of Artificial Sequence: Synthetic oligonucleotide
gcacaugguuuucucauga

SEQ ID NO: 964872 - RNA, 19 nt, Artificial Sequence
  Description of Artificial Sequence: Synthetic oligonucleotide
ucgcugugugcuucacuga

SEQ ID NO: 964873 - RNA, 19 nt, Artificial Sequence
  Description of Artificial Sequence: Synthetic oligonucleotide
ggguccaauaugaacucug

SEQ ID NO: 964874 - RNA, 19 nt, Artificial Sequence
  Description of Artificial Sequence: Synthetic oligonucleotide
guugccgggacagccaguc

SEQ ID NO: 964875 - RNA, 19 nt, Artificial Sequence
  Description of Artificial Sequence: Synthetic oligonucleotide
ggcuaguuugacaaccuuc

SEQ ID NO: 964876 - RNA, 19 nt, Artificial Sequence
  Description of Artificial Sequence: Synthetic oligonucleotide
cugccacagaauaauuuua

SEQ ID NO: 964877 - RNA, 19 nt, Artificial Sequence
  Description of Artificial Sequence: Synthetic oligonucleotide
guuaacaacuuugcaaguu

SEQ ID NO: 964878 - RNA, 19 nt, Artificial Sequence
  Description of Artificial Sequence: Synthetic oligonucleotide
aguucgcugugugcuucac

SEQ ID NO: 964879 - RNA, 19 nt, Artificial Sequence
  Description of Artificial Sequence: Synthetic oligonucleotide
aguaccuaauguaccuuuu

SEQ ID NO: 964880 - RNA, 19 nt, Artificial Sequence
  Description of Artificial Sequence: Synthetic oligonucleotide
ugacgacaaagaguuucau

SEQ ID NO: 964881 - RNA, 19 nt, Artificial Sequence
  Description of Artificial Sequence: Synthetic oligonucleotide
gcucggacacaugaucggg

SEQ ID NO: 964882 - RNA, 19 nt, Artificial Sequence
  Description of Artificial Sequence: Synthetic oligonucleotide
ucuugacgacaaagaguuu

SEQ ID NO: 964883 - RNA, 19 nt, Artificial Sequence
  Description of Artificial Sequence: Synthetic oligonucleotide
auuuuggguccaauaugaa

SEQ ID NO: 964884 - RNA, 19 nt, Artificial Sequence
  Description of Artificial Sequence: Synthetic oligonucleotide
gccccauaccacuucgagc

SEQ ID NO: 964885 - RNA, 19 nt, Artificial Sequence
  Description of Artificial Sequence: Synthetic oligonucleotide
guccguaugcagugagcca

SEQ ID NO: 964886 - RNA, 19 nt, Artificial Sequence
  Description of Artificial Sequence: Synthetic oligonucleotide
agucuauauccaagaaauu

SEQ ID NO: 964887 - RNA, 19 nt, Artificial Sequence
  Description of Artificial Sequence: Synthetic oligonucleotide
ccauacugaccaauauguc

SEQ ID NO: 964888 - RNA, 19 nt, Artificial Sequence
  Description of Artificial Sequence: Synthetic oligonucleotide
auaccacuucgagcaucac

SEQ ID NO: 964889 - RNA, 19 nt, Artificial Sequence
  Description of Artificial Sequence: Synthetic oligonucleotide
aggauacauuacaugcaaa

SEQ ID NO: 964890 - RNA, 19 nt, Artificial Sequence
  Description of Artificial Sequence: Synthetic oligonucleotide
ccuaugcuuugcuaauguc

SEQ ID NO: 964891 - RNA, 19 nt, Artificial Sequence
  Description of Artificial Sequence: Synthetic oligonucleotide
cuguugaaaccugggacaa

SEQ ID NO: 964892 - RNA, 19 nt, Artificial Sequence
  Description of Artificial Sequence: Synthetic oligonucleotide
caccugagucuccuagguc

SEQ ID NO: 964893 - RNA, 19 nt, Artificial Sequence
  Description of Artificial Sequence: Synthetic oligonucleotide
gaagguccguaugcaguga

SEQ ID NO: 964894 - RNA, 19 nt, Artificial Sequence
  Description of Artificial Sequence: Synthetic oligonucleotide
acagcggaugaugcucucu

SEQ ID NO: 964895 - RNA, 19 nt, Artificial Sequence
  Description of Artificial Sequence: Synthetic oligonucleotide
cacaaguugccgggacagc

SEQ ID NO: 964896 - RNA, 19 nt, Artificial Sequence
  Description of Artificial Sequence: Synthetic oligonucleotide
cugaauauaccagcuccua

SEQ ID NO: 964897 - RNA, 19 nt, Artificial Sequence
  Description of Artificial Sequence: Synthetic oligonucleotide
gagucuccuaggucuguua

SEQ ID NO: 964898 - RNA, 19 nt, Artificial Sequence
  Description of Artificial Sequence: Synthetic oligonucleotide
acucgccuaugcuuugcua

SEQ ID NO: 964899 - RNA, 19 nt, Artificial Sequence
  Description of Artificial Sequence: Synthetic oligonucleotide
acagugcaauauaccgaug

SEQ ID NO: 964900 - RNA, 19 nt, Artificial Sequence
  Description of Artificial Sequence: Synthetic oligonucleotide
gcggaugaugcucucucca

SEQ ID NO: 964901 - RNA, 19 nt, Artificial Sequence
  Description of Artificial Sequence: Synthetic oligonucleotide
aacccuucguagagcccca

SEQ ID NO: 964902 - RNA, 19 nt, Artificial Sequence
  Description of Artificial Sequence: Synthetic oligonucleotide
ggucuguuacuugucgauc

SEQ ID NO: 964903 - RNA, 19 nt, Artificial Sequence
  Description of Artificial Sequence: Synthetic oligonucleotide
ccuaggucuguuacuuguc

SEQ ID NO: 964904 - RNA, 19 nt, Artificial Sequence
  Description of Artificial Sequence: Synthetic oligonucleotide
cuucgagcaucacaacccu

SEQ ID NO: 964905 - RNA, 19 nt, Artificial Sequence
  Description of Artificial Sequence: Synthetic oligonucleotide
acgugagcuucaucuucau

SEQ ID NO: 964906 - RNA, 19 nt, Artificial Sequence
  Description of Artificial Sequence: Synthetic oligonucleotide
guccaacccuucguagagc

SEQ ID NO: 964907 - RNA, 19 nt, Artificial Sequence
  Description of Artificial Sequence: Synthetic oligonucleotide
cuaugacuacuccucccua

SEQ ID NO: 964908 - RNA, 19 nt, Artificial Sequence
  Description of Artificial Sequence: Synthetic oligonucleotide
gcuaaugucuuuguagaau

SEQ ID NO: 964909 - RNA, 19 nt, Artificial Sequence
  Description of Artificial Sequence: Synthetic oligonucleotide
gucuccuaggucuguuacu

SEQ ID NO: 964910 - RNA, 19 nt, Artificial Sequence
  Description of Artificial Sequence: Synthetic oligonucleotide
cuucagugaagguccguau

SEQ ID NO: 964911 - RNA, 19 nt, Artificial Sequence
  Description of Artificial Sequence: Synthetic oligonucleotide
gauaucccaauggcuuccu

SEQ ID NO: 964912 - RNA, 19 nt, Artificial Sequence
  Description of Artificial Sequence: Synthetic oligonucleotide
cacagcggaugaugcucuc

SEQ ID NO: 964913 - RNA, 19 nt, Artificial Sequence
  Description of Artificial Sequence: Synthetic oligonucleotide
gaugcaacgugagcuucau

SEQ ID NO: 964914 - RNA, 19 nt, Artificial Sequence
  Description of Artificial Sequence: Synthetic oligonucleotide
cauuagaaucaagcaacau

SEQ ID NO: 964915 - RNA, 19 nt, Artificial Sequence
  Description of Artificial Sequence: Synthetic oligonucleotide
acacaugaucgggcauucu

SEQ ID NO: 964916 - RNA, 19 nt, Artificial Sequence
  Description of Artificial Sequence: Synthetic oligonucleotide
ccucccuaauauacagguc

SEQ ID NO: 964917 - RNA, 19 nt, Artificial Sequence
  Description of Artificial Sequence: Synthetic oligonucleotide
ggcauacuuaguucucagu

SEQ ID NO: 964918 - RNA, 19 nt, Artificial Sequence
  Description of Artificial Sequence: Synthetic oligonucleotide
gauagggcuccagcaacau

SEQ ID NO: 964919 - RNA, 19 nt, Artificial Sequence
  Description of Artificial Sequence: Synthetic oligonucleotide
cuuguguauugagguaaua

SEQ ID NO: 964920 - RNA, 19 nt, Artificial Sequence
  Description of Artificial Sequence: Synthetic oligonucleotide
cuuugcaaguucgcugugu

SEQ ID NO: 964921 - RNA, 19 nt, Artificial Sequence
  Description of Artificial Sequence: Synthetic oligonucleotide
cauguucugugugagccau

SEQ ID NO: 964922 - RNA, 19 nt, Artificial Sequence
  Description of Artificial Sequence: Synthetic oligonucleotide
ggcacucgccuaugcuuug

SEQ ID NO: 964923 - RNA, 19 nt, Artificial Sequence
  Description of Artificial Sequence: Synthetic oligonucleotide
ccaacccuucguagagccc

SEQ ID NO: 964924 - RNA, 19 nt, Artificial Sequence
  Description of Artificial Sequence: Synthetic oligonucleotide
gguuagcuucugguuccag

SEQ ID NO: 964925 - RNA, 19 nt, Artificial Sequence
  Description of Artificial Sequence: Synthetic oligonucleotide
guugcugccugagccaaau

SEQ ID NO: 964926 - RNA, 19 nt, Artificial Sequence
  Description of Artificial Sequence: Synthetic oligonucleotide
gcagugagccauaucuaaa

SEQ ID NO: 964927 - RNA, 19 nt, Artificial Sequence
  Description of Artificial Sequence: Synthetic oligonucleotide
guucgcugugugcuucacu

SEQ ID NO: 964928 - RNA, 19 nt, Artificial Sequence
  Description of Artificial Sequence: Synthetic oligonucleotide
ccucggcagcuccauacug

SEQ ID NO: 964929 - RNA, 19 nt, Artificial Sequence
  Description of Artificial Sequence: Synthetic oligonucleotide
ggcauccaacugaauguga

SEQ ID NO: 964930 - RNA, 19 nt, Artificial Sequence
  Description of Artificial Sequence: Synthetic oligonucleotide
gcuagaggcacucgccuau

SEQ ID NO: 964931 - RNA, 19 nt, Artificial Sequence
  Description of Artificial Sequence: Synthetic oligonucleotide
cuaguuugacaaccuucuu

SEQ ID NO: 964932 - RNA, 19 nt, Artificial Sequence
  Description of Artificial Sequence: Synthetic oligonucleotide
ccacuucgagcaucacaac

SEQ ID NO: 964933 - RNA, 19 nt, Artificial Sequence
  Description of Artificial Sequence: Synthetic oligonucleotide
cccuaauauacaggucauc

SEQ ID NO: 964934 - RNA, 19 nt, Artificial Sequence
  Description of Artificial Sequence: Synthetic oligonucleotide
cagcuccuaccacagcaua

SEQ ID NO: 964935 - RNA, 19 nt, Artificial Sequence
  Description of Artificial Sequence: Synthetic oligonucleotide
ggagacugagaaguucagu

SEQ ID NO: 964936 - RNA, 19 nt, Artificial Sequence
  Description of Artificial Sequence: Synthetic oligonucleotide
gcacucgccuaugcuuugc

SEQ ID NO: 964937 - RNA, 19 nt, Artificial Sequence
  Description of Artificial Sequence: Synthetic oligonucleotide
aguugccgggacagccagu

SEQ ID NO: 964938 - RNA, 19 nt, Artificial Sequence
  Description of Artificial Sequence: Synthetic oligonucleotide
ccgaugcaacgugagcuuc

SEQ ID NO: 964939 - RNA, 19 nt, Artificial Sequence
  Description of Artificial Sequence: Synthetic oligonucleotide
cacucgccuaugcuuugcu

SEQ ID NO: 964940 - RNA, 19 nt, Artificial Sequence
  Description of Artificial Sequence: Synthetic oligonucleotide
cuaccacagcauaguuuau

SEQ ID NO: 964941 - RNA, 19 nt, Artificial Sequence
  Description of Artificial Sequence: Synthetic oligonucleotide
guagagccccauaccacuu

SEQ ID NO: 964942 - RNA, 19 nt, Artificial Sequence
  Description of Artificial Sequence: Synthetic oligonucleotide
cuucaucacagcggaugau

SEQ ID NO: 964943 - RNA, 19 nt, Artificial Sequence
  Description of Artificial Sequence: Synthetic oligonucleotide
gcaaguucgcugugugcuu

SEQ ID NO: 964944 - RNA, 19 nt, Artificial Sequence
  Description of Artificial Sequence: Synthetic oligonucleotide
cgccuaugcuuugcuaaug

SEQ ID NO: 964945 - RNA, 19 nt, Artificial Sequence
  Description of Artificial Sequence: Synthetic oligonucleotide
ccgggacagccaguccaac

SEQ ID NO: 964946 - RNA, 19 nt, Artificial Sequence
  Description of Artificial Sequence: Synthetic oligonucleotide
gcugugugcuucacugauu

SEQ ID NO: 964947 - RNA, 19 nt, Artificial Sequence
  Description of Artificial Sequence: Synthetic oligonucleotide
gcacaugagugggcuaguu

SEQ ID NO: 964948 - RNA, 19 nt, Artificial Sequence
  Description of Artificial Sequence: Synthetic oligonucleotide
ccaguaccuaauguaccuu

SEQ ID NO: 964949 - RNA, 19 nt, Artificial Sequence
  Description of Artificial Sequence: Synthetic oligonucleotide
ccaacguaauaugcucauu

SEQ ID NO: 964950 - RNA, 19 nt, Artificial Sequence
  Description of Artificial Sequence: Synthetic oligonucleotide
cccauaccacuucgagcau

SEQ ID NO: 964951 - RNA, 19 nt, Artificial Sequence
  Description of Artificial Sequence: Synthetic oligonucleotide
cggacacaugaucgggcau

SEQ ID NO: 964952 - RNA, 19 nt, Artificial Sequence
  Description of Artificial Sequence: Synthetic oligonucleotide
aaagauauagccagcaucc

SEQ ID NO: 964953 - RNA, 19 nt, Artificial Sequence
  Description of Artificial Sequence: Synthetic oligonucleotide
ucaguuaacuucuugagca

SEQ ID NO: 964954 - RNA, 19 nt, Artificial Sequence
  Description of Artificial Sequence: Synthetic oligonucleotide
aauuuaugacucuucaucu

SEQ ID NO: 964955 - RNA, 19 nt, Artificial Sequence
  Description of Artificial Sequence: Synthetic oligonucleotide
aaaggaucuguauuagaac

SEQ ID NO: 964956 - RNA, 19 nt, Artificial Sequence
  Description of Artificial Sequence: Synthetic oligonucleotide
uguuucuaggacaagaugu

SEQ ID NO: 964957 - RNA, 19 nt, Artificial Sequence
  Description of Artificial Sequence: Synthetic oligonucleotide
uaauuuaugacucuucauc

SEQ ID NO: 964958 - RNA, 19 nt, Artificial Sequence
  Description of Artificial Sequence: Synthetic oligonucleotide
ucuuuagccacucaaauuc

SEQ ID NO: 964959 - RNA, 19 nt, Artificial Sequence
  Description of Artificial Sequence: Synthetic oligonucleotide
aaaacuggaaaagagccuc

SEQ ID NO: 964960 - RNA, 19 nt, Artificial Sequence
  Description of Artificial Sequence: Synthetic oligonucleotide
acuucagauuucuuuagcc

SEQ ID NO: 964961 - RNA, 19 nt, Artificial Sequence
  Description of Artificial Sequence: Synthetic oligonucleotide
aauagaagcgguaggauuc

SEQ ID NO: 964962 - RNA, 19 nt, Artificial Sequence
  Description of Artificial Sequence: Synthetic oligonucleotide
aaauaagacucugagcacg

SEQ ID NO: 964963 - RNA, 19 nt, Artificial Sequence
  Description of Artificial Sequence: Synthetic oligonucleotide
agcaagauaaauuuguacu

SEQ ID NO: 964964 - RNA, 19 nt, Artificial Sequence
  Description of Artificial Sequence: Synthetic oligonucleotide
uacuuguucaugaacauga

SEQ ID NO: 964965 - RNA, 19 nt, Artificial Sequence
  Description of Artificial Sequence: Synthetic oligonucleotide
ucuguuacaaugucuauca

SEQ ID NO: 964966 - RNA, 19 nt, Artificial Sequence
  Description of Artificial Sequence: Synthetic oligonucleotide
guuauaguguuuaagcugg

SEQ ID NO: 964967 - RNA, 19 nt, Artificial Sequence
  Description of Artificial Sequence: Synthetic oligonucleotide
uuuguacugguuucgaugc

SEQ ID NO: 964968 - RNA, 19 nt, Artificial Sequence
  Description of Artificial Sequence: Synthetic oligonucleotide
aguauaagacuucagauuu

SEQ ID NO: 964969 - RNA, 19 nt, Artificial Sequence
  Description of Artificial Sequence: Synthetic oligonucleotide
uguugaugacauuucaugc

SEQ ID NO: 964970 - RNA, 19 nt, Artificial Sequence
  Description of Artificial Sequence: Synthetic oligonucleotide
auagcgggaagucagguuc

SEQ ID NO: 964971 - RNA, 19 nt, Artificial Sequence
  Description of Artificial Sequence: Synthetic oligonucleotide
uggaauguugaagaaauag

SEQ ID NO: 964972 - RNA, 19 nt, Artificial Sequence
  Description of Artificial Sequence: Synthetic oligonucleotide
aaugacugcagaugugcuc

SEQ ID NO: 964973 - RNA, 19 nt, Artificial Sequence
  Description of Artificial Sequence: Synthetic oligonucleotide
ugacauuucaugcuccaag

SEQ ID NO: 964974 - RNA, 19 nt, Artificial Sequence
  Description of Artificial Sequence: Synthetic oligonucleotide
acaugagcugcccaguacc

SEQ ID NO: 964975 - RNA, 19 nt, Artificial Sequence
  Description of Artificial Sequence: Synthetic oligonucleotide
agcaaauacaaugacauga

SEQ ID NO: 964976 - RNA, 19 nt, Artificial Sequence
  Description of Artificial Sequence: Synthetic oligonucleotide
gucugaauugucuacaaug

SEQ ID NO: 964977 - RNA, 19 nt, Artificial Sequence
  Description of Artificial Sequence: Synthetic oligonucleotide
uuugcguucuccuucauuc

SEQ ID NO: 964978 - RNA, 19 nt, Artificial Sequence
  Description of Artificial Sequence: Synthetic oligonucleotide
aggaggacgcccuuggugc

SEQ ID NO: 964979 - RNA, 19 nt, Artificial Sequence
  Description of Artificial Sequence: Synthetic oligonucleotide
auuuguacugguuucgaug

SEQ ID NO: 964980 - RNA, 19 nt, Artificial Sequence
  Description of Artificial Sequence: Synthetic oligonucleotide
auuugcgcaucucagcugg

SEQ ID NO: 964981 - RNA, 19 nt, Artificial Sequence
  Description of Artificial Sequence: Synthetic oligonucleotide
aagauaaauuuguacuggu

SEQ ID NO: 964982 - RNA, 19 nt, Artificial Sequence
  Description of Artificial Sequence: Synthetic oligonucleotide
uccuuagucucuauguugc

SEQ ID NO: 964983 - RNA, 19 nt, Artificial Sequence
  Description of Artificial Sequence: Synthetic oligonucleotide
auguugaagaaauaguuaa

SEQ ID NO: 964984 - RNA, 19 nt, Artificial Sequence
  Description of Artificial Sequence: Synthetic oligonucleotide
gaaaagagccuccuugaag

SEQ ID NO: 964985 - RNA, 19 nt, Artificial Sequence
  Description of Artificial Sequence: Synthetic oligonucleotide
uacaaugacaugagguuug

SEQ ID NO: 964986 - RNA, 19 nt, Artificial Sequence
  Description of Artificial Sequence: Synthetic oligonucleotide
uguuccuuagucucuaugu

SEQ ID NO: 964987 - RNA, 19 nt, Artificial Sequence
  Description of Artificial Sequence: Synthetic oligonucleotide
acuagaguagucagcaagc

SEQ ID NO: 964988 - RNA, 19 nt, Artificial Sequence
  Description of Artificial Sequence: Synthetic oligonucleotide
caaggcaccucauagcggg

SEQ ID NO: 964989 - RNA, 19 nt, Artificial Sequence
  Description of Artificial Sequence: Synthetic oligonucleotide
ucuauguugccagaggccc

SEQ ID NO: 964990 - RNA, 19 nt, Artificial Sequence
  Description of Artificial Sequence: Synthetic oligonucleotide
aagcugggaacuuauauuu

SEQ ID NO: 964991 - RNA, 19 nt, Artificial Sequence
  Description of Artificial Sequence: Synthetic oligonucleotide
ucgccauacagccugcagg

SEQ ID NO: 964992 - RNA, 19 nt, Artificial Sequence
  Description of Artificial Sequence: Synthetic oligonucleotide
uuuucuacacuguaguaua

SEQ ID NO: 964993 - RNA, 19 nt, Artificial Sequence
  Description of Artificial Sequence: Synthetic oligonucleotide
acugaugcucccucgguac

SEQ ID NO: 964994 - RNA, 19 nt, Artificial Sequence
  Description of Artificial Sequence: Synthetic oligonucleotide
cuugaauagaagcgguagg

SEQ ID NO: 964995 - RNA, 19 nt, Artificial Sequence
  Description of Artificial Sequence: Synthetic oligonucleotide
aauaagacucugagcacgg

SEQ ID NO: 964996 - RNA, 19 nt, Artificial Sequence
  Description of Artificial Sequence: Synthetic oligonucleotide
cuacacuguaguauaagac

SEQ ID NO: 964997 - RNA, 19 nt, Artificial Sequence
  Description of Artificial Sequence: Synthetic oligonucleotide
ugaauuugcgcaucucagc

SEQ ID NO: 964998 - RNA, 19 nt, Artificial Sequence
  Description of Artificial Sequence: Synthetic oligonucleotide
cugcaugccacacacacgc

SEQ ID NO: 964999 - RNA, 19 nt, Artificial Sequence
  Description of Artificial Sequence: Synthetic oligonucleotide
uaguguuuaagcugggaac

SEQ ID NO: 965000 - RNA, 19 nt, Artificial Sequence
  Description of Artificial Sequence: Synthetic oligonucleotide
auaaaugaccagcagggaa

SEQ ID NO: 965001 - RNA, 19 nt, Artificial Sequence
  Description of Artificial Sequence: Synthetic oligonucleotide
aacccaauccuuaggacuc

SEQ ID NO: 965002 - RNA, 19 nt, Artificial Sequence
  Description of Artificial Sequence: Synthetic oligonucleotide
aaucggagaacgcaugaau

SEQ ID NO: 965003 - RNA, 19 nt, Artificial Sequence
  Description of Artificial Sequence: Synthetic oligonucleotide
uugaauagaagcgguagga

SEQ ID NO: 965004 - RNA, 19 nt, Artificial Sequence
  Description of Artificial Sequence: Synthetic oligonucleotide
ucggagaacgcaugaaugc

SEQ ID NO: 965005 - RNA, 19 nt, Artificial Sequence
  Description of Artificial Sequence: Synthetic oligonucleotide
acugguuucgaugcuuugc

SEQ ID NO: 965006 - RNA, 19 nt, Artificial Sequence
  Description of Artificial Sequence: Synthetic oligonucleotide
uuagaacauuuacacucag

SEQ ID NO: 965007 - RNA, 19 nt, Artificial Sequence
  Description of Artificial Sequence: Synthetic oligonucleotide
uaguauaagacuucagauu

SEQ ID NO: 965008 - RNA, 19 nt, Artificial Sequence
  Description of Artificial Sequence: Synthetic oligonucleotide
ucagguacuagaguaguca

SEQ ID NO: 965009 - RNA, 19 nt, Artificial Sequence
  Description of Artificial Sequence: Synthetic oligonucleotide
acuugaauagaagcgguag

SEQ ID NO: 965010 - RNA, 19 nt, Artificial Sequence
  Description of Artificial Sequence: Synthetic oligonucleotide
uuuguacaggccaggacac

SEQ ID NO: 965011 - RNA, 19 nt, Artificial Sequence
  Description of Artificial Sequence: Synthetic oligonucleotide
caaauacaaugacaugagg

SEQ ID NO: 965012 - RNA, 19 nt, Artificial Sequence
  Description of Artificial Sequence: Synthetic oligonucleotide
uauuggggagugaauuugc

SEQ ID NO: 965013 - RNA, 19 nt, Artificial Sequence
  Description of Artificial Sequence: Synthetic oligonucleotide
uauuaaacacaaguuccug

SEQ ID NO: 965014 - RNA, 19 nt, Artificial Sequence
  Description of Artificial Sequence: Synthetic oligonucleotide
agaacugaugcucccucgg

SEQ ID NO: 965015 - RNA, 19 nt, Artificial Sequence
  Description of Artificial Sequence: Synthetic oligonucleotide
uguugaagaaauaguuaaa

SEQ ID NO: 965016 - RNA, 19 nt, Artificial Sequence
  Description of Artificial Sequence: Synthetic oligonucleotide
aagagguaucugcaucauc

SEQ ID NO: 965017 - RNA, 19 nt, Artificial Sequence
  Description of Artificial Sequence: Synthetic oligonucleotide
agcucaguuaacuucuuga

SEQ ID NO: 965018 - RNA, 19 nt, Artificial Sequence
  Description of Artificial Sequence: Synthetic oligonucleotide
aauguugaagaaauaguua

SEQ ID NO: 965019 - RNA, 19 nt, Artificial Sequence
  Description of Artificial Sequence: Synthetic oligonucleotide
cuacaauguccacaguucc

SEQ ID NO: 965020 - RNA, 19 nt, Artificial Sequence
  Description of Artificial Sequence: Synthetic oligonucleotide
cucaguuaacuucuugagc

SEQ ID NO: 965021 - RNA, 19 nt, Artificial Sequence
  Description of Artificial Sequence: Synthetic oligonucleotide
ugcaccgaaagcuuccgcc

SEQ ID NO: 965022 - RNA, 19 nt, Artificial Sequence
  Description of Artificial Sequence: Synthetic oligonucleotide
cucguugaaucggagaacg

SEQ ID NO: 965023 - RNA, 19 nt, Artificial Sequence
  Description of Artificial Sequence: Synthetic oligonucleotide
ucaaauguggaauguugaa

SEQ ID NO: 965024 - RNA, 19 nt, Artificial Sequence
  Description of Artificial Sequence: Synthetic oligonucleotide
ugaaucggagaacgcauga

SEQ ID NO: 965025 - RNA, 19 nt, Artificial Sequence
  Description of Artificial Sequence: Synthetic oligonucleotide
uggaaaagagccuccuuga

SEQ ID NO: 965026 - RNA, 19 nt, Artificial Sequence
  Description of Artificial Sequence: Synthetic oligonucleotide
ucaucagccgacuccucgg

SEQ ID NO: 965027 - RNA, 19 nt, Artificial Sequence
  Description of Artificial Sequence: Synthetic oligonucleotide
aauuuguacugguuucgau

SEQ ID NO: 965028 - RNA, 19 nt, Artificial Sequence
  Description of Artificial Sequence: Synthetic oligonucleotide
gcaagauaaauuuguacug

SEQ ID NO: 965029 - RNA, 19 nt, Artificial Sequence
  Description of Artificial Sequence: Synthetic oligonucleotide
uuauaguguuuaagcuggg

SEQ ID NO: 965030 - RNA, 19 nt, Artificial Sequence
  Description of Artificial Sequence: Synthetic oligonucleotide
ucaaagcgcaccgacacca

SEQ ID NO: 965031 - RNA, 19 nt, Artificial Sequence
  Description of Artificial Sequence: Synthetic oligonucleotide
uccguuuacugucuguccu

SEQ ID NO: 965032 - RNA, 19 nt, Artificial Sequence
  Description of Artificial Sequence: Synthetic oligonucleotide
uuugcucucugcuccuagg

SEQ ID NO: 965033 - RNA, 19 nt, Artificial Sequence
  Description of Artificial Sequence: Synthetic oligonucleotide
uuuccggugcugacgaacc

SEQ ID NO: 965034 - RNA, 19 nt, Artificial Sequence
  Description of Artificial Sequence: Synthetic oligonucleotide
uuuguuuguccaucuuagc

SEQ ID NO: 965035 - RNA, 19 nt, Artificial Sequence
  Description of Artificial Sequence: Synthetic oligonucleotide
ucagcaagcucacucccca

SEQ ID NO: 965036 - RNA, 19 nt, Artificial Sequence
  Description of Artificial Sequence: Synthetic oligonucleotide
uugaaucggagaacgcaug

SEQ ID NO: 965037 - RNA, 19 nt, Artificial Sequence
  Description of Artificial Sequence: Synthetic oligonucleotide
ucucguagaacugaugcuc

SEQ ID NO: 965038 - RNA, 19 nt, Artificial Sequence
  Description of Artificial Sequence: Synthetic oligonucleotide
cuagguuuguacaggccag

SEQ ID NO: 965039 - RNA, 19 nt, Artificial Sequence
  Description of Artificial Sequence: Synthetic oligonucleotide
cuuacgucugucuguuugc

SEQ ID NO: 965040 - RNA, 19 nt, Artificial Sequence
  Description of Artificial Sequence: Synthetic oligonucleotide
ggagaggucuucuaagucc

SEQ ID NO: 965041 - RNA, 19 nt, Artificial Sequence
  Description of Artificial Sequence: Synthetic oligonucleotide
uuuaauggauaugcuauua

SEQ ID NO: 965042 - RNA, 19 nt, Artificial Sequence
  Description of Artificial Sequence: Synthetic oligonucleotide
ugacgugugcccaucuuga

SEQ ID NO: 965043 - RNA, 19 nt, Artificial Sequence
  Description of Artificial Sequence: Synthetic oligonucleotide
cucuauguugccagaggcc

SEQ ID NO: 965044 - RNA, 19 nt, Artificial Sequence
  Description of Artificial Sequence: Synthetic oligonucleotide
aaauuuguacugguuucga

SEQ ID NO: 965045 - RNA, 19 nt, Artificial Sequence
  Description of Artificial Sequence: Synthetic oligonucleotide
acgaacccaauccuuagga

SEQ ID NO: 965046 - RNA, 19 nt, Artificial Sequence
  Description of Artificial Sequence: Synthetic oligonucleotide
acguccacugagcuggcac

SEQ ID NO: 965047 - RNA, 19 nt, Artificial Sequence
  Description of Artificial Sequence: Synthetic oligonucleotide
ugacgaacccaauccuuag

SEQ ID NO: 965048 - RNA, 19 nt, Artificial Sequence
  Description of Artificial Sequence: Synthetic oligonucleotide
gaauuugcgcaucucagcu

SEQ ID NO: 965049 - RNA, 19 nt, Artificial Sequence
  Description of Artificial Sequence: Synthetic oligonucleotide
uuuguauuggggagugaau

SEQ ID NO: 965050 - RNA, 19 nt, Artificial Sequence
  Description of Artificial Sequence: Synthetic oligonucleotide
guaguauaagacuucagau

SEQ ID NO: 965051 - RNA, 19 nt, Artificial Sequence
  Description of Artificial Sequence: Synthetic oligonucleotide
gugaauuugcgcaucucag

SEQ ID NO: 965052 - RNA, 19 nt, Artificial Sequence
  Description of Artificial Sequence: Synthetic oligonucleotide
aagcgcaccgacaccacac

SEQ ID NO: 965053 - RNA, 19 nt, Artificial Sequence
  Description of Artificial Sequence: Synthetic oligonucleotide
aagcuuccgcccaugguac

SEQ ID NO: 965054 - RNA, 19 nt, Artificial Sequence
  Description of Artificial Sequence: Synthetic oligonucleotide
acgugugcccaucuugagg

SEQ ID NO: 965055 - RNA, 19 nt, Artificial Sequence
  Description of Artificial Sequence: Synthetic oligonucleotide
cagguacuagaguagucag

SEQ ID NO: 965056 - RNA, 19 nt, Artificial Sequence
  Description of Artificial Sequence: Synthetic oligonucleotide
uccugucgcuccaacacug

SEQ ID NO: 965057 - RNA, 19 nt, Artificial Sequence
  Description of Artificial Sequence: Synthetic oligonucleotide
caugcuccaaggguuauag

SEQ ID NO: 965058 - RNA, 19 nt, Artificial Sequence
  Description of Artificial Sequence: Synthetic oligonucleotide
ugucucguugaaucggaga

SEQ ID NO: 965059 - RNA, 19 nt, Artificial Sequence
  Description of Artificial Sequence: Synthetic oligonucleotide
ugacauuuucggaucuggu

SEQ ID NO: 965060 - RNA, 19 nt, Artificial Sequence
  Description of Artificial Sequence: Synthetic oligonucleotide
accuacaccuuuguauugg

SEQ ID NO: 965061 - RNA, 19 nt, Artificial Sequence
  Description of Artificial Sequence: Synthetic oligonucleotide
uggaaguagccugggaacc

SEQ ID NO: 965062 - RNA, 19 nt, Artificial Sequence
  Description of Artificial Sequence: Synthetic oligonucleotide
uguccuuacgucugucugu

SEQ ID NO: 965063 - RNA, 19 nt, Artificial Sequence
  Description of Artificial Sequence: Synthetic oligonucleotide
uagaguagucagcaagcuc

SEQ ID NO: 965064 - RNA, 19 nt, Artificial Sequence
  Description of Artificial Sequence: Synthetic oligonucleotide
uucaaagcgcaccgacacc

SEQ ID NO: 965065 - RNA, 19 nt, Artificial Sequence
  Description of Artificial Sequence: Synthetic oligonucleotide
cuggagcccaaagauauag

SEQ ID NO: 965066 - RNA, 19 nt, Artificial Sequence
  Description of Artificial Sequence: Synthetic oligonucleotide
cuugcacaggguugucucg

SEQ ID NO: 965067 - RNA, 19 nt, Artificial Sequence
  Description of Artificial Sequence: Synthetic oligonucleotide
ugucgcuccaacacugccu

SEQ ID NO: 965068 - RNA, 19 nt, Artificial Sequence
  Description of Artificial Sequence: Synthetic oligonucleotide
auuuaugacucuucaucuu

SEQ ID NO: 965069 - RNA, 19 nt, Artificial Sequence
  Description of Artificial Sequence: Synthetic oligonucleotide
agguacuagaguagucagc

SEQ ID NO: 965070 - RNA, 19 nt, Artificial Sequence
  Description of Artificial Sequence: Synthetic oligonucleotide
ggaaccgccuuucagucag

SEQ ID NO: 965071 - RNA, 19 nt, Artificial Sequence
  Description of Artificial Sequence: Synthetic oligonucleotide
guuucgaugcuuugcguuc

SEQ ID NO: 965072 - RNA, 19 nt, Artificial Sequence
  Description of Artificial Sequence: Synthetic oligonucleotide
gagaacgcaugaaugcccc

SEQ ID NO: 965073 - RNA, 19 nt, Artificial Sequence
  Description of Artificial Sequence: Synthetic oligonucleotide
gucucguugaaucggagaa

SEQ ID NO: 965074 - RNA, 19 nt, Artificial Sequence
  Description of Artificial Sequence: Synthetic oligonucleotide
gguacuagaguagucagca

SEQ ID NO: 965075 - RNA, 19 nt, Artificial Sequence
  Description of Artificial Sequence: Synthetic oligonucleotide
aguaccugccugguacacc

SEQ ID NO: 965076 - RNA, 19 nt, Artificial Sequence
  Description of Artificial Sequence: Synthetic oligonucleotide
ugcaaaccuacaccuuugu

SEQ ID NO: 965077 - RNA, 19 nt, Artificial Sequence
  Description of Artificial Sequence: Synthetic oligonucleotide
caaaccuacaccuuuguau

SEQ ID NO: 965078 - RNA, 19 nt, Artificial Sequence
  Description of Artificial Sequence: Synthetic oligonucleotide
ugcugacgaacccaauccu

SEQ ID NO: 965079 - RNA, 19 nt, Artificial Sequence
  Description of Artificial Sequence: Synthetic oligonucleotide
guaccaggggcuugcacag

SEQ ID NO: 965080 - RNA, 19 nt, Artificial Sequence
  Description of Artificial Sequence: Synthetic oligonucleotide
cuccuagguuuguacaggc

SEQ ID NO: 965081 - RNA, 19 nt, Artificial Sequence
  Description of Artificial Sequence: Synthetic oligonucleotide
uguccaucuuagcagcuua

SEQ ID NO: 965082 - RNA, 19 nt, Artificial Sequence
  Description of Artificial Sequence: Synthetic oligonucleotide
aacugaugcucccucggua

SEQ ID NO: 965083 - RNA, 19 nt, Artificial Sequence
  Description of Artificial Sequence: Synthetic oligonucleotide
uggagcccaaagauauagc

SEQ ID NO: 965084 - RNA, 19 nt, Artificial Sequence
  Description of Artificial Sequence: Synthetic oligonucleotide
ucagccgacuccucggaga

SEQ ID NO: 965085 - RNA, 19 nt, Artificial Sequence
  Description of Artificial Sequence: Synthetic oligonucleotide
aucggagaacgcaugaaug

SEQ ID NO: 965086 - RNA, 19 nt, Artificial Sequence
  Description of Artificial Sequence: Synthetic oligonucleotide
acaaugacaugagguuugg

SEQ ID NO: 965087 - RNA, 19 nt, Artificial Sequence
  Description of Artificial Sequence: Synthetic oligonucleotide
uuuagccacucaaauucuu

SEQ ID NO: 965088 - RNA, 19 nt, Artificial Sequence
  Description of Artificial Sequence: Synthetic oligonucleotide
agcugggagggucucguag

SEQ ID NO: 965089 - RNA, 19 nt, Artificial Sequence
  Description of Artificial Sequence: Synthetic oligonucleotide
acacgcacaccaaugacug

SEQ ID NO: 965090 - RNA, 19 nt, Artificial Sequence
  Description of Artificial Sequence: Synthetic oligonucleotide
acaaugucuaucaggcucu

SEQ ID NO: 965091 - RNA, 19 nt, Artificial Sequence
  Description of Artificial Sequence: Synthetic oligonucleotide
aaaggggaggcagcggugu

SEQ ID NO: 965092 - RNA, 19 nt, Artificial Sequence
  Description of Artificial Sequence: Synthetic oligonucleotide
aucaucaaauguggaaugu

SEQ ID NO: 965093 - RNA, 19 nt, Artificial Sequence
  Description of Artificial Sequence: Synthetic oligonucleotide
uugucucguugaaucggag

SEQ ID NO: 965094 - RNA, 19 nt, Artificial Sequence
  Description of Artificial Sequence: Synthetic oligonucleotide
guccucgccauacagccug

SEQ ID NO: 965095 - RNA, 19 nt, Artificial Sequence
  Description of Artificial Sequence: Synthetic oligonucleotide
cuauuaaacacaaguuccu

SEQ ID NO: 965096 - RNA, 19 nt, Artificial Sequence
  Description of Artificial Sequence: Synthetic oligonucleotide
cugucuguuugcucucugc

SEQ ID NO: 965097 - RNA, 19 nt, Artificial Sequence
  Description of Artificial Sequence: Synthetic oligonucleotide
aacuggaaaagagccuccu

SEQ ID NO: 965098 - RNA, 19 nt, Artificial Sequence
  Description of Artificial Sequence: Synthetic oligonucleotide
cugacgugugcccaucuug

SEQ ID NO: 965099 - RNA, 19 nt, Artificial Sequence
  Description of Artificial Sequence: Synthetic oligonucleotide
cuguccuuacgucugucug

SEQ ID NO: 965100 - RNA, 19 nt, Artificial Sequence
  Description of Artificial Sequence: Synthetic oligonucleotide
ggcaccaauggguuuguag

SEQ ID NO: 965101 - RNA, 19 nt, Artificial Sequence
  Description of Artificial Sequence: Synthetic oligonucleotide
aagauauagccagcauccu

SEQ ID NO: 965102 - RNA, 19 nt, Artificial Sequence
  Description of Artificial Sequence: Synthetic oligonucleotide
aucaugcgcacguccacug

SEQ ID NO: 965103 - RNA, 19 nt, Artificial Sequence
  Description of Artificial Sequence: Synthetic oligonucleotide
uauguugccagaggcccca

SEQ ID NO: 965104 - RNA, 19 nt, Artificial Sequence
  Description of Artificial Sequence: Synthetic oligonucleotide
cuauguugccagaggcccc

SEQ ID NO: 965105 - RNA, 19 nt, Artificial Sequence
  Description of Artificial Sequence: Synthetic oligonucleotide
ugggaaccgccuuucaguc

SEQ ID NO: 965106 - RNA, 19 nt, Artificial Sequence
  Description of Artificial Sequence: Synthetic oligonucleotide
ucguugaaucggagaacgc

SEQ ID NO: 965107 - RNA, 19 nt, Artificial Sequence
  Description of Artificial Sequence: Synthetic oligonucleotide
gaagcccugcaccgaaagc

SEQ ID NO: 965108 - RNA, 19 nt, Artificial Sequence
  Description of Artificial Sequence: Synthetic oligonucleotide
guagaacugaugcucccuc

SEQ ID NO: 965109 - RNA, 19 nt, Artificial Sequence
  Description of Artificial Sequence: Synthetic oligonucleotide
uuccugucgcuccaacacu

SEQ ID NO: 965110 - RNA, 19 nt, Artificial Sequence
  Description of Artificial Sequence: Synthetic oligonucleotide
ugcgcacguccacugagcu

SEQ ID NO: 965111 - RNA, 19 nt, Artificial Sequence
  Description of Artificial Sequence: Synthetic oligonucleotide
uuugcgcaucucagcuggg

SEQ ID NO: 965112 - RNA, 19 nt, Artificial Sequence
  Description of Artificial Sequence: Synthetic oligonucleotide
agguuuggaaguagccugg

SEQ ID NO: 965113 - RNA, 19 nt, Artificial Sequence
  Description of Artificial Sequence: Synthetic oligonucleotide
gguugucucguugaaucgg

SEQ ID NO: 965114 - RNA, 19 nt, Artificial Sequence
  Description of Artificial Sequence: Synthetic oligonucleotide
cugcaaaccuacaccuuug

SEQ ID NO: 965115 - RNA, 19 nt, Artificial Sequence
  Description of Artificial Sequence: Synthetic oligonucleotide
uacugucuguccuuacguc

SEQ ID NO: 965116 - RNA, 19 nt, Artificial Sequence
  Description of Artificial Sequence: Synthetic oligonucleotide
gcucugcugacauuuucgg

SEQ ID NO: 965117 - RNA, 19 nt, Artificial Sequence
  Description of Artificial Sequence: Synthetic oligonucleotide
uuaggacucuuuucuguuu

SEQ ID NO: 965118 - RNA, 19 nt, Artificial Sequence
  Description of Artificial Sequence: Synthetic oligonucleotide
ggugcggggcuccacaucc

SEQ ID NO: 965119 - RNA, 19 nt, Artificial Sequence
  Description of Artificial Sequence: Synthetic oligonucleotide
cuuuguauuggggagugaa

SEQ ID NO: 965120 - RNA, 19 nt, Artificial Sequence
  Description of Artificial Sequence: Synthetic oligonucleotide
gaaguagccugggaaccgc

SEQ ID NO: 965121 - RNA, 19 nt, Artificial Sequence
  Description of Artificial Sequence: Synthetic oligonucleotide
gacgugugcccaucuugag

SEQ ID NO: 965122 - RNA, 19 nt, Artificial Sequence
  Description of Artificial Sequence: Synthetic oligonucleotide
aaccgccuuucagucaguc

SEQ ID NO: 965123 - RNA, 19 nt, Artificial Sequence
  Description of Artificial Sequence: Synthetic oligonucleotide
acgcacaccaaugacugca

SEQ ID NO: 965124 - RNA, 19 nt, Artificial Sequence
  Description of Artificial Sequence: Synthetic oligonucleotide
uccucacuuaucucuguua

SEQ ID NO: 965125 - RNA, 19 nt, Artificial Sequence
  Description of Artificial Sequence: Synthetic oligonucleotide
ucugagcacggcuggggcu

SEQ ID NO: 965126 - RNA, 19 nt, Artificial Sequence
  Description of Artificial Sequence: Synthetic oligonucleotide
cacuggcggaagcaaauac

SEQ ID NO: 965127 - RNA, 19 nt, Artificial Sequence
  Description of Artificial Sequence: Synthetic oligonucleotide
cauuucaugcuccaagggu

SEQ ID NO: 965128 - RNA, 19 nt, Artificial Sequence
  Description of Artificial Sequence: Synthetic oligonucleotide
uggccauuccuugccauca

SEQ ID NO: 965129 - RNA, 19 nt, Artificial Sequence
  Description of Artificial Sequence: Synthetic oligonucleotide
caggaggacgcccuuggug

SEQ ID NO: 965130 - RNA, 19 nt, Artificial Sequence
  Description of Artificial Sequence: Synthetic oligonucleotide
acuggcggaagcaaauaca

SEQ ID NO: 965131 - RNA, 19 nt, Artificial Sequence
  Description of Artificial Sequence: Synthetic oligonucleotide
ucucguugaaucggagaac

SEQ ID NO: 965132 - RNA, 19 nt, Artificial Sequence
  Description of Artificial Sequence: Synthetic oligonucleotide
uuguacugguuucgaugcu

SEQ ID NO: 965133 - RNA, 19 nt, Artificial Sequence
  Description of Artificial Sequence: Synthetic oligonucleotide
caaguuccugucuucaucu

SEQ ID NO: 965134 - RNA, 19 nt, Artificial Sequence
  Description of Artificial Sequence: Synthetic oligonucleotide
gacauuuucggaucugguu

SEQ ID NO: 965135 - RNA, 19 nt, Artificial Sequence
  Description of Artificial Sequence: Synthetic oligonucleotide
uugcguucuccuucauucu

SEQ ID NO: 965136 - RNA, 19 nt, Artificial Sequence
  Description of Artificial Sequence: Synthetic oligonucleotide
aacuugaauagaagcggua

SEQ ID NO: 965137 - RNA, 19 nt, Artificial Sequence
  Description of Artificial Sequence: Synthetic oligonucleotide
ccucacuuaucucuguuac

SEQ ID NO: 965138 - RNA, 19 nt, Artificial Sequence
  Description of Artificial Sequence: Synthetic oligonucleotide
accuuuguauuggggagug

SEQ ID NO: 965139 - RNA, 19 nt, Artificial Sequence
  Description of Artificial Sequence: Synthetic oligonucleotide
agauaaauuuguacugguu

SEQ ID NO: 965140 - RNA, 19 nt, Artificial Sequence
  Description of Artificial Sequence: Synthetic oligonucleotide
ucaugcgcacguccacuga

SEQ ID NO: 965141 - RNA, 19 nt, Artificial Sequence
  Description of Artificial Sequence: Synthetic oligonucleotide
acaaggcaccucauagcgg

SEQ ID NO: 965142 - RNA, 19 nt, Artificial Sequence
  Description of Artificial Sequence: Synthetic oligonucleotide
agcugggaacuuauauuuc

SEQ ID NO: 965143 - RNA, 19 nt, Artificial Sequence
  Description of Artificial Sequence: Synthetic oligonucleotide
cugccuugagcucaguuaa

SEQ ID NO: 965144 - RNA, 19 nt, Artificial Sequence
  Description of Artificial Sequence: Synthetic oligonucleotide
ugguuucgaugcuuugcgu

SEQ ID NO: 965145 - RNA, 19 nt, Artificial Sequence
  Description of Artificial Sequence: Synthetic oligonucleotide
ccuuacgucugucuguuug

SEQ ID NO: 965146 - RNA, 19 nt, Artificial Sequence
  Description of Artificial Sequence: Synthetic oligonucleotide
uagcgggaagucagguucu

SEQ ID NO: 965147 - RNA, 19 nt, Artificial Sequence
  Description of Artificial Sequence: Synthetic oligonucleotide
gaggccccaaacucaucug

SEQ ID NO: 965148 - RNA, 19 nt, Artificial Sequence
  Description of Artificial Sequence: Synthetic oligonucleotide
ggaaguagccugggaaccg

SEQ ID NO: 965149 - RNA, 19 nt, Artificial Sequence
  Description of Artificial Sequence: Synthetic oligonucleotide
uuccggugcugacgaaccc

SEQ ID NO: 965150 - RNA, 19 nt, Artificial Sequence
  Description of Artificial Sequence: Synthetic oligonucleotide
auaugcuauuaaacacaag

SEQ ID NO: 965151 - RNA, 19 nt, Artificial Sequence
  Description of Artificial Sequence: Synthetic oligonucleotide
cccaguaccugccugguac

SEQ ID NO: 965152 - RNA, 19 nt, Artificial Sequence
  Description of Artificial Sequence: Synthetic oligonucleotide
ucacggcgcagguaccgcc

SEQ ID NO: 965153 - RNA, 19 nt, Artificial Sequence
  Description of Artificial Sequence: Synthetic oligonucleotide
aucagccgacuccucggag

SEQ ID NO: 965154 - RNA, 19 nt, Artificial Sequence
  Description of Artificial Sequence: Synthetic oligonucleotide
ggagaacgcaugaaugccc

SEQ ID NO: 965155 - RNA, 19 nt, Artificial Sequence
  Description of Artificial Sequence: Synthetic oligonucleotide
guauaagacuucagauuuc

SEQ ID NO: 965156 - RNA, 19 nt, Artificial Sequence
  Description of Artificial Sequence: Synthetic oligonucleotide
ucccucgguaccaggggcu

SEQ ID NO: 965157 - RNA, 19 nt, Artificial Sequence
  Description of Artificial Sequence: Synthetic oligonucleotide
cucccucgguaccaggggc

SEQ ID NO: 965158 - RNA, 19 nt, Artificial Sequence
  Description of Artificial Sequence: Synthetic oligonucleotide
uccggugcugacgaaccca

SEQ ID NO: 965159 - RNA, 19 nt, Artificial Sequence
  Description of Artificial Sequence: Synthetic oligonucleotide
cagccgacuccucggagag

SEQ ID NO: 965160 - RNA, 19 nt, Artificial Sequence
  Description of Artificial Sequence: Synthetic oligonucleotide
augcgcacguccacugagc

SEQ ID NO: 965161 - RNA, 19 nt, Artificial Sequence
  Description of Artificial Sequence: Synthetic oligonucleotide
cuaauuuaugacucuucau

SEQ ID NO: 965162 - RNA, 19 nt, Artificial Sequence
  Description of Artificial Sequence: Synthetic oligonucleotide
accgacaccacacccuguu

SEQ ID NO: 965163 - RNA, 19 nt, Artificial Sequence
  Description of Artificial Sequence: Synthetic oligonucleotide
ccuagguuuguacaggcca

SEQ ID NO: 965164 - RNA, 19 nt, Artificial Sequence
  Description of Artificial Sequence: Synthetic oligonucleotide
cugacgaacccaauccuua

SEQ ID NO: 965165 - RNA, 19 nt, Artificial Sequence
  Description of Artificial Sequence: Synthetic oligonucleotide
guaccugccugguacaccu

SEQ ID NO: 965166 - RNA, 19 nt, Artificial Sequence
  Description of Artificial Sequence: Synthetic oligonucleotide
ggaauguugaagaaauagu

SEQ ID NO: 965167 - RNA, 19 nt, Artificial Sequence
  Description of Artificial Sequence: Synthetic oligonucleotide
ggguuauaguguuuaagcu

SEQ ID NO: 965168 - RNA, 19 nt, Artificial Sequence
  Description of Artificial Sequence: Synthetic oligonucleotide
guugucucguugaaucgga

SEQ ID NO: 965169 - RNA, 19 nt, Artificial Sequence
  Description of Artificial Sequence: Synthetic oligonucleotide
ccuacaccuuuguauuggg

SEQ ID NO: 965170 - RNA, 19 nt, Artificial Sequence
  Description of Artificial Sequence: Synthetic oligonucleotide
ucgaugcuuugcguucucc

SEQ ID NO: 965171 - RNA, 19 nt, Artificial Sequence
  Description of Artificial Sequence: Synthetic oligonucleotide
gcaccgaaagcuuccgccc

SEQ ID NO: 965172 - RNA, 19 nt, Artificial Sequence
  Description of Artificial Sequence: Synthetic oligonucleotide
ugccuugagcucaguuaac

SEQ ID NO: 965173 - RNA, 19 nt, Artificial Sequence
  Description of Artificial Sequence: Synthetic oligonucleotide
ccagcagacucaucagccg

SEQ ID NO: 965174 - RNA, 19 nt, Artificial Sequence
  Description of Artificial Sequence: Synthetic oligonucleotide
cauuccuugccaucauaaa

SEQ ID NO: 965175 - RNA, 19 nt, Artificial Sequence
  Description of Artificial Sequence: Synthetic oligonucleotide
ggcauaggcaccagcagac

SEQ ID NO: 965176 - RNA, 19 nt, Artificial Sequence
  Description of Artificial Sequence: Synthetic oligonucleotide
acaggguugucucguugaa

SEQ ID NO: 965177 - RNA, 19 nt, Artificial Sequence
  Description of Artificial Sequence: Synthetic oligonucleotide
guaccgcccauugugaaaa

SEQ ID NO: 965178 - RNA, 19 nt, Artificial Sequence
  Description of Artificial Sequence: Synthetic oligonucleotide
gcuccuagguuuguacagg

SEQ ID NO: 965179 - RNA, 19 nt, Artificial Sequence
  Description of Artificial Sequence: Synthetic oligonucleotide
cacacgcacaccaaugacu

SEQ ID NO: 965180 - RNA, 19 nt, Artificial Sequence
  Description of Artificial Sequence: Synthetic oligonucleotide
accucauagcgggaaguca

SEQ ID NO: 965181 - RNA, 19 nt, Artificial Sequence
  Description of Artificial Sequence: Synthetic oligonucleotide
gucagcaagcucacucccc

SEQ ID NO: 965182 - RNA, 19 nt, Artificial Sequence
  Description of Artificial Sequence: Synthetic oligonucleotide
gaaucggagaacgcaugaa

SEQ ID NO: 965183 - RNA, 19 nt, Artificial Sequence
  Description of Artificial Sequence: Synthetic oligonucleotide
gaaagcuuccgcccauggu

SEQ ID NO: 965184 - RNA, 19 nt, Artificial Sequence
  Description of Artificial Sequence: Synthetic oligonucleotide
uugaagcccugcaccgaaa

SEQ ID NO: 965185 - RNA, 19 nt, Artificial Sequence
  Description of Artificial Sequence: Synthetic oligonucleotide
gacugcagaugugcucugc

SEQ ID NO: 965186 - RNA, 19 nt, Artificial Sequence
  Description of Artificial Sequence: Synthetic oligonucleotide
gcggaagcaaauacaauga

SEQ ID NO: 965187 - RNA, 19 nt, Artificial Sequence
  Description of Artificial Sequence: Synthetic oligonucleotide
cucugcugacauuuucgga

SEQ ID NO: 965188 - RNA, 19 nt, Artificial Sequence
  Description of Artificial Sequence: Synthetic oligonucleotide
caaagcgcaccgacaccac

SEQ ID NO: 965189 - RNA, 19 nt, Artificial Sequence
  Description of Artificial Sequence: Synthetic oligonucleotide
gggagggucucguagaacu

SEQ ID NO: 965190 - RNA, 19 nt, Artificial Sequence
  Description of Artificial Sequence: Synthetic oligonucleotide
gguaggauuccugucgcuc

SEQ ID NO: 965191 - RNA, 19 nt, Artificial Sequence
  Description of Artificial Sequence: Synthetic oligonucleotide
guugaaucggagaacgcau

SEQ ID NO: 965192 - RNA, 19 nt, Artificial Sequence
  Description of Artificial Sequence: Synthetic oligonucleotide
gggaagaaagagguaucug

SEQ ID NO: 965193 - RNA, 19 nt, Artificial Sequence
  Description of Artificial Sequence: Synthetic oligonucleotide
agucgaucaugcgcacguc

SEQ ID NO: 965194 - RNA, 19 nt, Artificial Sequence
  Description of Artificial Sequence: Synthetic oligonucleotide
cagcagacucaucagccga

SEQ ID NO: 965195 - RNA, 19 nt, Artificial Sequence
  Description of Artificial Sequence: Synthetic oligonucleotide
ggcagcgguguccagcggc

SEQ ID NO: 965196 - RNA, 19 nt, Artificial Sequence
  Description of Artificial Sequence: Synthetic oligonucleotide
cacgcacaccaaugacugc

SEQ ID NO: 965197 - RNA, 19 nt, Artificial Sequence
  Description of Artificial Sequence: Synthetic oligonucleotide
gguuuggaaguagccuggg

SEQ ID NO: 965198 - RNA, 19 nt, Artificial Sequence
  Description of Artificial Sequence: Synthetic oligonucleotide
caccaaugacugcagaugu

SEQ ID NO: 965199 - RNA, 19 nt, Artificial Sequence
  Description of Artificial Sequence: Synthetic oligonucleotide
cagggcucauccuccggac

SEQ ID NO: 965200 - RNA, 19 nt, Artificial Sequence
  Description of Artificial Sequence: Synthetic oligonucleotide
gaucuguauuagaacauuu

SEQ ID NO: 965201 - RNA, 19 nt, Artificial Sequence
  Description of Artificial Sequence: Synthetic oligonucleotide
gaacugaugcucccucggu

SEQ ID NO: 965202 - RNA, 19 nt, Artificial Sequence
  Description of Artificial Sequence: Synthetic oligonucleotide
agggcucauccuccggaca

SEQ ID NO: 965203 - RNA, 19 nt, Artificial Sequence
  Description of Artificial Sequence: Synthetic oligonucleotide
cagacucaucagccgacuc

SEQ ID NO: 965204 - RNA, 19 nt, Artificial Sequence
  Description of Artificial Sequence: Synthetic oligonucleotide
uuguccaucuuagcagcuu

SEQ ID NO: 965205 - RNA, 19 nt, Artificial Sequence
  Description of Artificial Sequence: Synthetic oligonucleotide
gagugaauuugcgcaucuc

SEQ ID NO: 965206 - RNA, 19 nt, Artificial Sequence
  Description of Artificial Sequence: Synthetic oligonucleotide
agguaccgcccauugugaa

SEQ ID NO: 965207 - RNA, 19 nt, Artificial Sequence
  Description of Artificial Sequence: Synthetic oligonucleotide
augacauuucaugcuccaa

SEQ ID NO: 965208 - RNA, 19 nt, Artificial Sequence
  Description of Artificial Sequence: Synthetic oligonucleotide
uccucgccauacagccugc

SEQ ID NO: 965209 - RNA, 19 nt, Artificial Sequence
  Description of Artificial Sequence: Synthetic oligonucleotide
ggaaaagagccuccuugaa

SEQ ID NO: 965210 - RNA, 19 nt, Artificial Sequence
  Description of Artificial Sequence: Synthetic oligonucleotide
ugcggggcuccacauccau

SEQ ID NO: 965211 - RNA, 19 nt, Artificial Sequence
  Description of Artificial Sequence: Synthetic oligonucleotide
gggcucauccuccggacac

SEQ ID NO: 965212 - RNA, 19 nt, Artificial Sequence
  Description of Artificial Sequence: Synthetic oligonucleotide
guuccuuagucucuauguu

SEQ ID NO: 965213 - RNA, 19 nt, Artificial Sequence
  Description of Artificial Sequence: Synthetic oligonucleotide
uccucggagaggucuucua

SEQ ID NO: 965214 - RNA, 19 nt, Artificial Sequence
  Description of Artificial Sequence: Synthetic oligonucleotide
uuguacaggccaggacacu

SEQ ID NO: 965215 - RNA, 19 nt, Artificial Sequence
  Description of Artificial Sequence: Synthetic oligonucleotide
gcucccucgguaccagggg

SEQ ID NO: 965216 - RNA, 19 nt, Artificial Sequence
  Description of Artificial Sequence: Synthetic oligonucleotide
accgaaagcuuccgcccau

SEQ ID NO: 965217 - RNA, 19 nt, Artificial Sequence
  Description of Artificial Sequence: Synthetic oligonucleotide
cacaccaaugacugcagau

SEQ ID NO: 965218 - RNA, 19 nt, Artificial Sequence
  Description of Artificial Sequence: Synthetic oligonucleotide
cugaguccagggucacuuc

SEQ ID NO: 965219 - RNA, 19 nt, Artificial Sequence
  Description of Artificial Sequence: Synthetic oligonucleotide
caccucauagcgggaaguc

SEQ ID NO: 965220 - RNA, 19 nt, Artificial Sequence
  Description of Artificial Sequence: Synthetic oligonucleotide
augcuccaaggguuauagu

SEQ ID NO: 965221 - RNA, 19 nt, Artificial Sequence
  Description of Artificial Sequence: Synthetic oligonucleotide
cauacagccugcagguggu

SEQ ID NO: 965222 - RNA, 19 nt, Artificial Sequence
  Description of Artificial Sequence: Synthetic oligonucleotide
aggacacuggcggaagcaa

SEQ ID NO: 965223 - RNA, 19 nt, Artificial Sequence
  Description of Artificial Sequence: Synthetic oligonucleotide
agcgcguccuccguuuacu

SEQ ID NO: 965224 - RNA, 19 nt, Artificial Sequence
  Description of Artificial Sequence: Synthetic oligonucleotide
guacuagaguagucagcaa

SEQ ID NO: 965225 - RNA, 19 nt, Artificial Sequence
  Description of Artificial Sequence: Synthetic oligonucleotide
cauccuccggacacaggca

SEQ ID NO: 965226 - RNA, 19 nt, Artificial Sequence
  Description of Artificial Sequence: Synthetic oligonucleotide
agcgggaagucagguucuc

SEQ ID NO: 965227 - RNA, 19 nt, Artificial Sequence
  Description of Artificial Sequence: Synthetic oligonucleotide
ucaugcuccaaggguuaua

SEQ ID NO: 965228 - RNA, 19 nt, Artificial Sequence
  Description of Artificial Sequence: Synthetic oligonucleotide
uuccgcccaugguacuugu

SEQ ID NO: 965229 - RNA, 19 nt, Artificial Sequence
  Description of Artificial Sequence: Synthetic oligonucleotide
aaugaccagcagggaacuu

SEQ ID NO: 965230 - RNA, 19 nt, Artificial Sequence
  Description of Artificial Sequence: Synthetic oligonucleotide
gcaagcucacuccccacuc

SEQ ID NO: 965231 - RNA, 19 nt, Artificial Sequence
  Description of Artificial Sequence: Synthetic oligonucleotide
uaccugccugguacaccug

SEQ ID NO: 965232 - RNA, 19 nt, Artificial Sequence
  Description of Artificial Sequence: Synthetic oligonucleotide
caaugacugcagaugugcu

SEQ ID NO: 965233 - RNA, 19 nt, Artificial Sequence
  Description of Artificial Sequence: Synthetic oligonucleotide
cuagaguagucagcaagcu

SEQ ID NO: 965234 - RNA, 19 nt, Artificial Sequence
  Description of Artificial Sequence: Synthetic oligonucleotide
caccgaaagcuuccgccca

SEQ ID NO: 965235 - RNA, 19 nt, Artificial Sequence
  Description of Artificial Sequence: Synthetic oligonucleotide
gguuucgaugcuuugcguu

SEQ ID NO: 965236 - RNA, 19 nt, Artificial Sequence
  Description of Artificial Sequence: Synthetic oligonucleotide
caucagccgacuccucgga

SEQ ID NO: 965237 - RNA, 19 nt, Artificial Sequence
  Description of Artificial Sequence: Synthetic oligonucleotide
caguaccugccugguacac

SEQ ID NO: 965238 - RNA, 19 nt, Artificial Sequence
  Description of Artificial Sequence: Synthetic oligonucleotide
gguaccgcccauugugaaa

SEQ ID NO: 965239 - RNA, 19 nt, Artificial Sequence
  Description of Artificial Sequence: Synthetic oligonucleotide
cgaacccaauccuuaggac

SEQ ID NO: 965240 - RNA, 19 nt, Artificial Sequence
  Description of Artificial Sequence: Synthetic oligonucleotide
ccgcccaugguacuuguuc

SEQ ID NO: 965241 - RNA, 19 nt, Artificial Sequence
  Description of Artificial Sequence: Synthetic oligonucleotide
cggagaacgcaugaaugcc

SEQ ID NO: 965242 - RNA, 19 nt, Artificial Sequence
  Description of Artificial Sequence: Synthetic oligonucleotide
gucgcuccaacacugccuu

SEQ ID NO: 965243 - RNA, 19 nt, Artificial Sequence
  Description of Artificial Sequence: Synthetic oligonucleotide
ccuccguuuacugucuguc

SEQ ID NO: 965244 - RNA, 19 nt, Artificial Sequence
  Description of Artificial Sequence: Synthetic oligonucleotide
agggucucguagaacugau

SEQ ID NO: 965245 - RNA, 19 nt, Artificial Sequence
  Description of Artificial Sequence: Synthetic oligonucleotide
cgaaagcuuccgcccaugg

SEQ ID NO: 965246 - RNA, 19 nt, Artificial Sequence
  Description of Artificial Sequence: Synthetic oligonucleotide
acacuggcggaagcaaaua

SEQ ID NO: 965247 - RNA, 19 nt, Artificial Sequence
  Description of Artificial Sequence: Synthetic oligonucleotide
ccggcagcacagcuguggg

SEQ ID NO: 965248 - RNA, 19 nt, Artificial Sequence
  Description of Artificial Sequence: Synthetic oligonucleotide
ggagugaauuugcgcaucu

SEQ ID NO: 965249 - RNA, 19 nt, Artificial Sequence
  Description of Artificial Sequence: Synthetic oligonucleotide
aggcaccucauagcgggaa

SEQ ID NO: 965250 - RNA, 19 nt, Artificial Sequence
  Description of Artificial Sequence: Synthetic oligonucleotide
cccggcagcacagcugugg

SEQ ID NO: 965251 - RNA, 19 nt, Artificial Sequence
  Description of Artificial Sequence: Synthetic oligonucleotide
gcaaaccuacaccuuugua

SEQ ID NO: 965252 - RNA, 19 nt, Artificial Sequence
  Description of Artificial Sequence: Synthetic oligonucleotide
ccugcaccgaaagcuuccg

SEQ ID NO: 965253 - RNA, 19 nt, Artificial Sequence
  Description of Artificial Sequence: Synthetic oligonucleotide
cagcgcguccuccguuuac

SEQ ID NO: 965254 - RNA, 19 nt, Artificial Sequence
  Description of Artificial Sequence: Synthetic oligonucleotide
ccaaggguuauaguguuua

SEQ ID NO: 965255 - RNA, 19 nt, Artificial Sequence
  Description of Artificial Sequence: Synthetic oligonucleotide
caaugacaugagguuugga

SEQ ID NO: 965256 - RNA, 19 nt, Artificial Sequence
  Description of Artificial Sequence: Synthetic oligonucleotide
uccgcccaugguacuuguu

SEQ ID NO: 965257 - RNA, 19 nt, Artificial Sequence
  Description of Artificial Sequence: Synthetic oligonucleotide
agccgacuccucggagagg

SEQ ID NO: 965258 - RNA, 19 nt, Artificial Sequence
  Description of Artificial Sequence: Synthetic oligonucleotide
cauagcgggaagucagguu

SEQ ID NO: 965259 - RNA, 19 nt, Artificial Sequence
  Description of Artificial Sequence: Synthetic oligonucleotide
gugugcccaucuugagguc

SEQ ID NO: 965260 - RNA, 19 nt, Artificial Sequence
  Description of Artificial Sequence: Synthetic oligonucleotide
gcgcaccgacaccacaccc

SEQ ID NO: 965261 - RNA, 19 nt, Artificial Sequence
  Description of Artificial Sequence: Synthetic oligonucleotide
gcgcagguaccgcccauug

SEQ ID NO: 965262 - RNA, 19 nt, Artificial Sequence
  Description of Artificial Sequence: Synthetic oligonucleotide
cgugugcccaucuugaggu

SEQ ID NO: 965263 - RNA, 19 nt, Artificial Sequence
  Description of Artificial Sequence: Synthetic oligonucleotide
uccuuacgucugucuguuu

SEQ ID NO: 965264 - RNA, 19 nt, Artificial Sequence
  Description of Artificial Sequence: Synthetic oligonucleotide
cacuuaucucuguuacaau

SEQ ID NO: 965265 - RNA, 19 nt, Artificial Sequence
  Description of Artificial Sequence: Synthetic oligonucleotide
gcagcgguguccagcggcc

SEQ ID NO: 965266 - RNA, 19 nt, Artificial Sequence
  Description of Artificial Sequence: Synthetic oligonucleotide
cuaucagcuccaggcugca

SEQ ID NO: 965267 - RNA, 19 nt, Artificial Sequence
  Description of Artificial Sequence: Synthetic oligonucleotide
aggacacaaggcaccucau

SEQ ID NO: 965268 - RNA, 19 nt, Artificial Sequence
  Description of Artificial Sequence: Synthetic oligonucleotide
caagcucacuccccacucu

SEQ ID NO: 965269 - RNA, 19 nt, Artificial Sequence
  Description of Artificial Sequence: Synthetic oligonucleotide
ggccccaaacucaucugca

SEQ ID NO: 965270 - RNA, 19 nt, Artificial Sequence
  Description of Artificial Sequence: Synthetic oligonucleotide
ggaucuguauuagaacauu

SEQ ID NO: 965271 - RNA, 19 nt, Artificial Sequence
  Description of Artificial Sequence: Synthetic oligonucleotide
gggucucguagaacugaug

SEQ ID NO: 965272 - RNA, 19 nt, Artificial Sequence
  Description of Artificial Sequence: Synthetic oligonucleotide
caccuuuguauuggggagu

SEQ ID NO: 965273 - RNA, 19 nt, Artificial Sequence
  Description of Artificial Sequence: Synthetic oligonucleotide
gcgcacguccacugagcug

SEQ ID NO: 965274 - RNA, 19 nt, Artificial Sequence
  Description of Artificial Sequence: Synthetic oligonucleotide
gcgcguccuccguuuacug

SEQ ID NO: 965275 - RNA, 19 nt, Artificial Sequence
  Description of Artificial Sequence: Synthetic oligonucleotide
guccuuacgucugucuguu

SEQ ID NO: 965276 - RNA, 19 nt, Artificial Sequence
  Description of Artificial Sequence: Synthetic oligonucleotide
gcgggaagucagguucucc

SEQ ID NO: 965277 - RNA, 19 nt, Artificial Sequence
  Description of Artificial Sequence: Synthetic oligonucleotide
ggggagugaauuugcgcau

SEQ ID NO: 965278 - RNA, 19 nt, Artificial Sequence
  Description of Artificial Sequence: Synthetic oligonucleotide
ccaguaccugccugguaca

SEQ ID NO: 965279 - RNA, 19 nt, Artificial Sequence
  Description of Artificial Sequence: Synthetic oligonucleotide
ccucggagaggucuucuaa

SEQ ID NO: 965280 - RNA, 19 nt, Artificial Sequence
  Description of Artificial Sequence: Synthetic oligonucleotide
cgcccaugguacuuguuca

SEQ ID NO: 965281 - RNA, 19 nt, Artificial Sequence
  Description of Artificial Sequence: Synthetic oligonucleotide
ggggcuugcacaggguugu

SEQ ID NO: 965282 - RNA, 19 nt, Artificial Sequence
  Description of Artificial Sequence: Synthetic oligonucleotide
ccaucuuagcagcuuacuu

SEQ ID NO: 965283 - RNA, 19 nt, Artificial Sequence
  Description of Artificial Sequence: Synthetic oligonucleotide
gcgguguccagcggccagc

SEQ ID NO: 965284 - RNA, 19 nt, Artificial Sequence
  Description of Artificial Sequence: Synthetic oligonucleotide
cugccugguacaccugcau

SEQ ID NO: 965285 - RNA, 19 nt, Artificial Sequence
  Description of Artificial Sequence: Synthetic oligonucleotide
ccgacaccacacccuguuc

SEQ ID NO: 965286 - RNA, 19 nt, Artificial Sequence
  Description of Artificial Sequence: Synthetic oligonucleotide
ccggugcugacgaacccaa

SEQ ID NO: 965287 - RNA, 19 nt, Artificial Sequence
  Description of Artificial Sequence: Synthetic oligonucleotide
ccgaaagcuuccgcccaug

SEQ ID NO: 965288 - RNA, 19 nt, Artificial Sequence
  Description of Artificial Sequence: Synthetic oligonucleotide
ccagaggccccaaacucau

SEQ ID NO: 965289 - RNA, 19 nt, Artificial Sequence
  Description of Artificial Sequence: Synthetic oligonucleotide
gcccugcaccgaaagcuuc

SEQ ID NO: 965290 - RNA, 19 nt, Artificial Sequence
  Description of Artificial Sequence: Synthetic oligonucleotide
caggguugucucguugaau

SEQ ID NO: 965291 - RNA, 19 nt, Artificial Sequence
  Description of Artificial Sequence: Synthetic oligonucleotide
gaaccgccuuucagucagu

SEQ ID NO: 965292 - RNA, 19 nt, Artificial Sequence
  Description of Artificial Sequence: Synthetic oligonucleotide
caccgacaccacacccugu

SEQ ID NO: 965293 - RNA, 19 nt, Artificial Sequence
  Description of Artificial Sequence: Synthetic oligonucleotide
cguuuacugucuguccuua

SEQ ID NO: 965294 - RNA, 19 nt, Artificial Sequence
  Description of Artificial Sequence: Synthetic oligonucleotide
ccuuuguauuggggaguga

SEQ ID NO: 965295 - RNA, 19 nt, Artificial Sequence
  Description of Artificial Sequence: Synthetic oligonucleotide
ccuuggugcggggcuccac

SEQ ID NO: 965296 - RNA, 19 nt, Artificial Sequence
  Description of Artificial Sequence: Synthetic oligonucleotide
cguagaacugaugcucccu

SEQ ID NO: 965297 - RNA, 19 nt, Artificial Sequence
  Description of Artificial Sequence: Synthetic oligonucleotide
gcacguccacugagcuggc

SEQ ID NO: 965298 - RNA, 19 nt, Artificial Sequence
  Description of Artificial Sequence: Synthetic oligonucleotide
ccguuuacugucuguccuu

SEQ ID NO: 965299 - RNA, 19 nt, Artificial Sequence
  Description of Artificial Sequence: Synthetic oligonucleotide
gcuuccgcccaugguacuu

SEQ ID NO: 965300 - RNA, 19 nt, Artificial Sequence
  Description of Artificial Sequence: Synthetic oligonucleotide
cguccuccguuuacugucu

SEQ ID NO: 965301 - RNA, 19 nt, Artificial Sequence
  Description of Artificial Sequence: Synthetic oligonucleotide
gcuuugcguucuccuucau

SEQ ID NO: 965302 - RNA, 19 nt, Artificial Sequence
  Description of Artificial Sequence: Synthetic oligonucleotide
ccuguuccuuagucucuau

SEQ ID NO: 965303 - RNA, 19 nt, Artificial Sequence
  Description of Artificial Sequence: Synthetic oligonucleotide
cgcguccuccguuuacugu

SEQ ID NO: 965304 - RNA, 19 nt, Artificial Sequence
  Description of Artificial Sequence: Synthetic oligonucleotide
ccccggcagcacagcugug

SEQ ID NO: 965305 - RNA, 19 nt, Artificial Sequence
  Description of Artificial Sequence: Synthetic oligonucleotide
ggcgcagguaccgcccauu

SEQ ID NO: 965306 - RNA, 19 nt, Artificial Sequence
  Description of Artificial Sequence: Synthetic oligonucleotide
ccagcgcguccuccguuua

SEQ ID NO: 965307 - RNA, 19 nt, Artificial Sequence
  Description of Artificial Sequence: Synthetic oligonucleotide
cgguaggauuccugucgcu

SEQ ID NO: 965308 - RNA, 19 nt, Artificial Sequence
  Description of Artificial Sequence: Synthetic oligonucleotide
cccaauccuuaggacucuu

SEQ ID NO: 965309 - RNA, 19 nt, Artificial Sequence
  Description of Artificial Sequence: Synthetic oligonucleotide
cccucgguaccaggggcuu

SEQ ID NO: 965310 - RNA, 19 nt, Artificial Sequence
  Description of Artificial Sequence: Synthetic oligonucleotide
cggugcugacgaacccaau

SEQ ID NO: 965311 - RNA, 19 nt, Artificial Sequence
  Description of Artificial Sequence: Synthetic oligonucleotide
cggcgcagguaccgcccau

SEQ ID NO: 965312 - RNA, 19 nt, Artificial Sequence
  Description of Artificial Sequence: Synthetic oligonucleotide
aggaauuuaugcuugaacc

SEQ ID NO: 965313 - RNA, 19 nt, Artificial Sequence
  Description of Artificial Sequence: Synthetic oligonucleotide
aguucuuucugucugagcc

SEQ ID NO: 965314 - RNA, 19 nt, Artificial Sequence
  Description of Artificial Sequence: Synthetic oligonucleotide
aaagugguuaugcagaguc

SEQ ID NO: 965315 - RNA, 19 nt, Artificial Sequence
  Description of Artificial Sequence: Synthetic oligonucleotide
guaauauucauacugcucg

SEQ ID NO: 965316 - RNA, 19 nt, Artificial Sequence
  Description of Artificial Sequence: Synthetic oligonucleotide
ucuaauagaggccagguga

SEQ ID NO: 965317 - RNA, 19 nt, Artificial Sequence
  Description of Artificial Sequence: Synthetic oligonucleotide
aagaggaugucucuccucc

SEQ ID NO: 965318 - RNA, 19 nt, Artificial Sequence
  Description of Artificial Sequence: Synthetic oligonucleotide
auacacaaaagacuugagc

SEQ ID NO: 965319 - RNA, 19 nt, Artificial Sequence
  Description of Artificial Sequence: Synthetic oligonucleotide
uuuaugaggaugaaauagc

SEQ ID NO: 965320 - RNA, 19 nt, Artificial Sequence
  Description of Artificial Sequence: Synthetic oligonucleotide
agcaauagagaaaagggcc

SEQ ID NO: 965321 - RNA, 19 nt, Artificial Sequence
  Description of Artificial Sequence: Synthetic oligonucleotide
acacgcauguccuucaucc

SEQ ID NO: 965322 - RNA, 19 nt, Artificial Sequence
  Description of Artificial Sequence: Synthetic oligonucleotide
ucauacucaaaggagaucc

SEQ ID NO: 965323 - RNA, 19 nt, Artificial Sequence
  Description of Artificial Sequence: Synthetic oligonucleotide
uugucgaauacacaaaaga

SEQ ID NO: 965324 - RNA, 19 nt, Artificial Sequence
  Description of Artificial Sequence: Synthetic oligonucleotide
uguuugaugagcaacuuaa

SEQ ID NO: 965325 - RNA, 19 nt, Artificial Sequence
  Description of Artificial Sequence: Synthetic oligonucleotide
ugucgaauacacaaaagac

SEQ ID NO: 965326 - RNA, 19 nt, Artificial Sequence
  Description of Artificial Sequence: Synthetic oligonucleotide
agaacaguguaacaucugg

SEQ ID NO: 965327 - RNA, 19 nt, Artificial Sequence
  Description of Artificial Sequence: Synthetic oligonucleotide
ugaaagaucuucaucuucu

SEQ ID NO: 965328 - RNA, 19 nt, Artificial Sequence
  Description of Artificial Sequence: Synthetic oligonucleotide
cugauuguggaccagcucg

SEQ ID NO: 965329 - RNA, 19 nt, Artificial Sequence
  Description of Artificial Sequence: Synthetic oligonucleotide
uucaaggagacguccaugg

SEQ ID NO: 965330 - RNA, 19 nt, Artificial Sequence
  Description of Artificial Sequence: Synthetic oligonucleotide
ucccguaauauucauacug

SEQ ID NO: 965331 - RNA, 19 nt, Artificial Sequence
  Description of Artificial Sequence: Synthetic oligonucleotide
auuugcagauucuucaauc

SEQ ID NO: 965332 - RNA, 19 nt, Artificial Sequence
  Description of Artificial Sequence: Synthetic oligonucleotide
uuacugagaggucaaagug

SEQ ID NO: 965333 - RNA, 19 nt, Artificial Sequence
  Description of Artificial Sequence: Synthetic oligonucleotide
ugaugagcaacuuaaucug

SEQ ID NO: 965334 - RNA, 19 nt, Artificial Sequence
  Description of Artificial Sequence: Synthetic oligonucleotide
ucgaauacacaaaagacuu

SEQ ID NO: 965335 - RNA, 19 nt, Artificial Sequence
  Description of Artificial Sequence: Synthetic oligonucleotide
gaagugaccagguuagugc

SEQ ID NO: 965336 - RNA, 19 nt, Artificial Sequence
  Description of Artificial Sequence: Synthetic oligonucleotide
uucuuugucgaauacacaa

SEQ ID NO: 965337 - RNA, 19 nt, Artificial Sequence
  Description of Artificial Sequence: Synthetic oligonucleotide
uuaaauguaucuugcaauc

SEQ ID NO: 965338 - RNA, 19 nt, Artificial Sequence
  Description of Artificial Sequence: Synthetic oligonucleotide
acggaccacagcuugaacc

SEQ ID NO: 965339 - RNA, 19 nt, Artificial Sequence
  Description of Artificial Sequence: Synthetic oligonucleotide
ugucccguaauauucauac

SEQ ID NO: 965340 - RNA, 19 nt, Artificial Sequence
  Description of Artificial Sequence: Synthetic oligonucleotide
uaaucaaagaggaugucuc

SEQ ID NO: 965341 - RNA, 19 nt, Artificial Sequence
  Description of Artificial Sequence: Synthetic oligonucleotide
aguaggucuacguuggcuc

SEQ ID NO: 965342 - RNA, 19 nt, Artificial Sequence
  Description of Artificial Sequence: Synthetic oligonucleotide
auucauacugcucguaauc

SEQ ID NO: 965343 - RNA, 19 nt, Artificial Sequence
  Description of Artificial Sequence: Synthetic oligonucleotide
agcucaauuacugagaggu

SEQ ID NO: 965344 - RNA, 19 nt, Artificial Sequence
  Description of Artificial Sequence: Synthetic oligonucleotide
uuugaugagcaacuuaauc

SEQ ID NO: 965345 - RNA, 19 nt, Artificial Sequence
  Description of Artificial Sequence: Synthetic oligonucleotide
aaagucugcacacgcaugu

SEQ ID NO: 965346 - RNA, 19 nt, Artificial Sequence
  Description of Artificial Sequence: Synthetic oligonucleotide
ucuugcaaucuaauagagg

SEQ ID NO: 965347 - RNA, 19 nt, Artificial Sequence
  Description of Artificial Sequence: Synthetic oligonucleotide
cuuaaucugagugucauug

SEQ ID NO: 965348 - RNA, 19 nt, Artificial Sequence
  Description of Artificial Sequence: Synthetic oligonucleotide
gagaaggacccucugauug

SEQ ID NO: 965349 - RNA, 19 nt, Artificial Sequence
  Description of Artificial Sequence: Synthetic oligonucleotide
ucuuguuugaugagcaacu

SEQ ID NO: 965350 - RNA, 19 nt, Artificial Sequence
  Description of Artificial Sequence: Synthetic oligonucleotide
ugcucguaaucaaagagga

SEQ ID NO: 965351 - RNA, 19 nt, Artificial Sequence
  Description of Artificial Sequence: Synthetic oligonucleotide
aguuggugcuuucugcugc

SEQ ID NO: 965352 - RNA, 19 nt, Artificial Sequence
  Description of Artificial Sequence: Synthetic oligonucleotide
uuugucgaauacacaaaag

SEQ ID NO: 965353 - RNA, 19 nt, Artificial Sequence
  Description of Artificial Sequence: Synthetic oligonucleotide
gauucuuugucgaauacac

SEQ ID NO: 965354 - RNA, 19 nt, Artificial Sequence
  Description of Artificial Sequence: Synthetic oligonucleotide
acugcucguaaucaaagag

SEQ ID NO: 965355 - RNA, 19 nt, Artificial Sequence
  Description of Artificial Sequence: Synthetic oligonucleotide
auuacugagaggucaaagu

SEQ ID NO: 965356 - RNA, 19 nt, Artificial Sequence
  Description of Artificial Sequence: Synthetic oligonucleotide
aauuacugagaggucaaag

SEQ ID NO: 965357 - RNA, 19 nt, Artificial Sequence
  Description of Artificial Sequence: Synthetic oligonucleotide
uccuuggacaucauccacg

SEQ ID NO: 965358 - RNA, 19 nt, Artificial Sequence
  Description of Artificial Sequence: Synthetic oligonucleotide
aaaugaaugcugaaagucu

SEQ ID NO: 965359 - RNA, 19 nt, Artificial Sequence
  Description of Artificial Sequence: Synthetic oligonucleotide
cucguaaucaaagaggaug

SEQ ID NO: 965360 - RNA, 19 nt, Artificial Sequence
  Description of Artificial Sequence: Synthetic oligonucleotide
uauagugccaggcggaggu

SEQ ID NO: 965361 - RNA, 19 nt, Artificial Sequence
  Description of Artificial Sequence: Synthetic oligonucleotide
ucguaaucaaagaggaugu

SEQ ID NO: 965362 - RNA, 19 nt, Artificial Sequence
  Description of Artificial Sequence: Synthetic oligonucleotide
aaauguaucuugcaaucua

SEQ ID NO: 965363 - RNA, 19 nt, Artificial Sequence
  Description of Artificial Sequence: Synthetic oligonucleotide
uaugccgggucacaugacg

SEQ ID NO: 965364 - RNA, 19 nt, Artificial Sequence
  Description of Artificial Sequence: Synthetic oligonucleotide
aaguucuuucugucugagc

SEQ ID NO: 965365 - RNA, 19 nt, Artificial Sequence
  Description of Artificial Sequence: Synthetic oligonucleotide
aacauugacuggccugugg

SEQ ID NO: 965366 - RNA, 19 nt, Artificial Sequence
  Description of Artificial Sequence: Synthetic oligonucleotide
aggucaaacaucaccaugg

SEQ ID NO: 965367 - RNA, 19 nt, Artificial Sequence
  Description of Artificial Sequence: Synthetic oligonucleotide
cugcucguaaucaaagagg

SEQ ID NO: 965368 - RNA, 19 nt, Artificial Sequence
  Description of Artificial Sequence: Synthetic oligonucleotide
cuucauuugagugaucuug

SEQ ID NO: 965369 - RNA, 19 nt, Artificial Sequence
  Description of Artificial Sequence: Synthetic oligonucleotide
gccaacaucagucacauac

SEQ ID NO: 965370 - RNA, 19 nt, Artificial Sequence
  Description of Artificial Sequence: Synthetic oligonucleotide
aaauucuccuucaaggaga

SEQ ID NO: 965371 - RNA, 19 nt, Artificial Sequence
  Description of Artificial Sequence: Synthetic oligonucleotide
uucaucccaaauuuauuug

SEQ ID NO: 965372 - RNA, 19 nt, Artificial Sequence
  Description of Artificial Sequence: Synthetic oligonucleotide
agugguuaugcagaguccg

SEQ ID NO: 965373 - RNA, 19 nt, Artificial Sequence
  Description of Artificial Sequence: Synthetic oligonucleotide
ugugguucgugccacaauc

SEQ ID NO: 965374 - RNA, 19 nt, Artificial Sequence
  Description of Artificial Sequence: Synthetic oligonucleotide
agucacauacuucauuuga

SEQ ID NO: 965375 - RNA, 19 nt, Artificial Sequence
  Description of Artificial Sequence: Synthetic oligonucleotide
uuucaugaagggaccagug

SEQ ID NO: 965376 - RNA, 19 nt, Artificial Sequence
  Description of Artificial Sequence: Synthetic oligonucleotide
uucaugaagggaccagugc

SEQ ID NO: 965377 - RNA, 19 nt, Artificial Sequence
  Description of Artificial Sequence: Synthetic oligonucleotide
ugaggaugaaauagcagaa

SEQ ID NO: 965378 - RNA, 19 nt, Artificial Sequence
  Description of Artificial Sequence: Synthetic oligonucleotide
cuugccacccagaaacugg

SEQ ID NO: 965379 - RNA, 19 nt, Artificial Sequence
  Description of Artificial Sequence: Synthetic oligonucleotide
agcaacuuaaucugagugu

SEQ ID NO: 965380 - RNA, 19 nt, Artificial Sequence
  Description of Artificial Sequence: Synthetic oligonucleotide
agaguccgagaguuggugc

SEQ ID NO: 965381 - RNA, 19 nt, Artificial Sequence
  Description of Artificial Sequence: Synthetic oligonucleotide
uucagcucaauuacugaga

SEQ ID NO: 965382 - RNA, 19 nt, Artificial Sequence
  Description of Artificial Sequence: Synthetic oligonucleotide
cuugcaagcacacaaggca

SEQ ID NO: 965383 - RNA, 19 nt, Artificial Sequence
  Description of Artificial Sequence: Synthetic oligonucleotide
ggaauuuaugcuugaaccc

SEQ ID NO: 965384 - RNA, 19 nt, Artificial Sequence
  Description of Artificial Sequence: Synthetic oligonucleotide
aucgucuuguuugaugagc

SEQ ID NO: 965385 - RNA, 19 nt, Artificial Sequence
  Description of Artificial Sequence: Synthetic oligonucleotide
ucuuuauguucaagaaaug

SEQ ID NO: 965386 - RNA, 19 nt, Artificial Sequence
  Description of Artificial Sequence: Synthetic oligonucleotide
aaucuaauagaggccaggu

SEQ ID NO: 965387 - RNA, 19 nt, Artificial Sequence
  Description of Artificial Sequence: Synthetic oligonucleotide
aacuccuugcggaaaacuc

SEQ ID NO: 965388 - RNA, 19 nt, Artificial Sequence
  Description of Artificial Sequence: Synthetic oligonucleotide
uggaguacccuccaugagu

SEQ ID NO: 965389 - RNA, 19 nt, Artificial Sequence
  Description of Artificial Sequence: Synthetic oligonucleotide
cacgagagcauccaggaac

SEQ ID NO: 965390 - RNA, 19 nt, Artificial Sequence
  Description of Artificial Sequence: Synthetic oligonucleotide
uugcggaaaacucggacac

SEQ ID NO: 965391 - RNA, 19 nt, Artificial Sequence
  Description of Artificial Sequence: Synthetic oligonucleotide
gaauuuaugcuugaaccca

SEQ ID NO: 965392 - RNA, 19 nt, Artificial Sequence
  Description of Artificial Sequence: Synthetic oligonucleotide
ugaggcguccuucucagga

SEQ ID NO: 965393 - RNA, 19 nt, Artificial Sequence
  Description of Artificial Sequence: Synthetic oligonucleotide
uugcaaucuaauagaggcc

SEQ ID NO: 965394 - RNA, 19 nt, Artificial Sequence
  Description of Artificial Sequence: Synthetic oligonucleotide
cugguauagugccaggcgg

SEQ ID NO: 965395 - RNA, 19 nt, Artificial Sequence
  Description of Artificial Sequence: Synthetic oligonucleotide
aaccagcguauacugcacg

SEQ ID NO: 965396 - RNA, 19 nt, Artificial Sequence
  Description of Artificial Sequence: Synthetic oligonucleotide
uccgucagucccacaaugg

SEQ ID NO: 965397 - RNA, 19 nt, Artificial Sequence
  Description of Artificial Sequence: Synthetic oligonucleotide
aaccguguacgcuucucag

SEQ ID NO: 965398 - RNA, 19 nt, Artificial Sequence
  Description of Artificial Sequence: Synthetic oligonucleotide
ucgucuuguuugaugagca

SEQ ID NO: 965399 - RNA, 19 nt, Artificial Sequence
  Description of Artificial Sequence: Synthetic oligonucleotide
ucguagaacuccuugcgga

SEQ ID NO: 965400 - RNA, 19 nt, Artificial Sequence
  Description of Artificial Sequence: Synthetic oligonucleotide
uccagguuacuccuggaga

SEQ ID NO: 965401 - RNA, 19 nt, Artificial Sequence
  Description of Artificial Sequence: Synthetic oligonucleotide
aauagaggccaggugauau

SEQ ID NO: 965402 - RNA, 19 nt, Artificial Sequence
  Description of Artificial Sequence: Synthetic oligonucleotide
gacuugagcaaaugucugc

SEQ ID NO: 965403 - RNA, 19 nt, Artificial Sequence
  Description of Artificial Sequence: Synthetic oligonucleotide
ucaugcacccacugguccg

SEQ ID NO: 965404 - RNA, 19 nt, Artificial Sequence
  Description of Artificial Sequence: Synthetic oligonucleotide
aagugguuaugcagagucc

SEQ ID NO: 965405 - RNA, 19 nt, Artificial Sequence
  Description of Artificial Sequence: Synthetic oligonucleotide
ucuacguuggcuccacagu

SEQ ID NO: 965406 - RNA, 19 nt, Artificial Sequence
  Description of Artificial Sequence: Synthetic oligonucleotide
aggugauauaaauaaggaa

SEQ ID NO: 965407 - RNA, 19 nt, Artificial Sequence
  Description of Artificial Sequence: Synthetic oligonucleotide
aguguaacaucuggaguac

SEQ ID NO: 965408 - RNA, 19 nt, Artificial Sequence
  Description of Artificial Sequence: Synthetic oligonucleotide
ugagugagcaauagagaaa

SEQ ID NO: 965409 - RNA, 19 nt, Artificial Sequence
  Description of Artificial Sequence: Synthetic oligonucleotide
uaaucugagugucauugua

SEQ ID NO: 965410 - RNA, 19 nt, Artificial Sequence
  Description of Artificial Sequence: Synthetic oligonucleotide
uggucgcacugaaacaggg

SEQ ID NO: 965411 - RNA, 19 nt, Artificial Sequence
  Description of Artificial Sequence: Synthetic oligonucleotide
ucuuugucgaauacacaaa

SEQ ID NO: 965412 - RNA, 19 nt, Artificial Sequence
  Description of Artificial Sequence: Synthetic oligonucleotide
aaucuccucuucuaaccgu

SEQ ID NO: 965413 - RNA, 19 nt, Artificial Sequence
  Description of Artificial Sequence: Synthetic oligonucleotide
acgaugucccguaauauuc

SEQ ID NO: 965414 - RNA, 19 nt, Artificial Sequence
  Description of Artificial Sequence: Synthetic oligonucleotide
cacguggucgcacugaaac

SEQ ID NO: 965415 - RNA, 19 nt, Artificial Sequence
  Description of Artificial Sequence: Synthetic oligonucleotide
agcaaaugucugcugagca

SEQ ID NO: 965416 - RNA, 19 nt, Artificial Sequence
  Description of Artificial Sequence: Synthetic oligonucleotide
aacuuaaucugagugucau

SEQ ID NO: 965417 - RNA, 19 nt, Artificial Sequence
  Description of Artificial Sequence: Synthetic oligonucleotide
auauucauacugcucguaa

SEQ ID NO: 965418 - RNA, 19 nt, Artificial Sequence
  Description of Artificial Sequence: Synthetic oligonucleotide
uaauauucauacugcucgu

SEQ ID NO: 965419 - RNA, 19 nt, Artificial Sequence
  Description of Artificial Sequence: Synthetic oligonucleotide
cagguugaaggauauccag

SEQ ID NO: 965420 - RNA, 19 nt, Artificial Sequence
  Description of Artificial Sequence: Synthetic oligonucleotide
uaugcagaguccgagaguu

SEQ ID NO: 965421 - RNA, 19 nt, Artificial Sequence
  Description of Artificial Sequence: Synthetic oligonucleotide
cauccgaggccacaaagag

SEQ ID NO: 965422 - RNA, 19 nt, Artificial Sequence
  Description of Artificial Sequence: Synthetic oligonucleotide
cuaucgagagccuggauga

SEQ ID NO: 965423 - RNA, 19 nt, Artificial Sequence
  Description of Artificial Sequence: Synthetic oligonucleotide
cauacucaaaggagauccg

SEQ ID NO: 965424 - RNA, 19 nt, Artificial Sequence
  Description of Artificial Sequence: Synthetic oligonucleotide
ugcuugaacccaaaaugaa

SEQ ID NO: 965425 - RNA, 19 nt, Artificial Sequence
  Description of Artificial Sequence: Synthetic oligonucleotide
cuccuugcggaaaacucgg

SEQ ID NO: 965426 - RNA, 19 nt, Artificial Sequence
  Description of Artificial Sequence: Synthetic oligonucleotide
uuaaucugagugucauugu

SEQ ID NO: 965427 - RNA, 19 nt, Artificial Sequence
  Description of Artificial Sequence: Synthetic oligonucleotide
caaggagacguccauggac

SEQ ID NO: 965428 - RNA, 19 nt, Artificial Sequence
  Description of Artificial Sequence: Synthetic oligonucleotide
gacacgagagcauccagga

SEQ ID NO: 965429 - RNA, 19 nt, Artificial Sequence
  Description of Artificial Sequence: Synthetic oligonucleotide
uccucuucuaaccguguac

SEQ ID NO: 965430 - RNA, 19 nt, Artificial Sequence
  Description of Artificial Sequence: Synthetic oligonucleotide
guuaugccgggucacauga

SEQ ID NO: 965431 - RNA, 19 nt, Artificial Sequence
  Description of Artificial Sequence: Synthetic oligonucleotide
acuccuugcggaaaacucg

SEQ ID NO: 965432 - RNA, 19 nt, Artificial Sequence
  Description of Artificial Sequence: Synthetic oligonucleotide
uuugagugaucuugucaug

SEQ ID NO: 965433 - RNA, 19 nt, Artificial Sequence
  Description of Artificial Sequence: Synthetic oligonucleotide
uccgcaaggaauuccugga

SEQ ID NO: 965434 - RNA, 19 nt, Artificial Sequence
  Description of Artificial Sequence: Synthetic oligonucleotide
cagcguauacugcacgugg

SEQ ID NO: 965435 - RNA, 19 nt, Artificial Sequence
  Description of Artificial Sequence: Synthetic oligonucleotide
auguucaagaaaugcaguu

SEQ ID NO: 965436 - RNA, 19 nt, Artificial Sequence
  Description of Artificial Sequence: Synthetic oligonucleotide
uccaugagugagcaauaga

SEQ ID NO: 965437 - RNA, 19 nt, Artificial Sequence
  Description of Artificial Sequence: Synthetic oligonucleotide
uguacgcuucucagaaggc

SEQ ID NO: 965438 - RNA, 19 nt, Artificial Sequence
  Description of Artificial Sequence: Synthetic oligonucleotide
ucuucuaaccguguacgcu

SEQ ID NO: 965439 - RNA, 19 nt, Artificial Sequence
  Description of Artificial Sequence: Synthetic oligonucleotide
uaaccguguacgcuucuca

SEQ ID NO: 965440 - RNA, 19 nt, Artificial Sequence
  Description of Artificial Sequence: Synthetic oligonucleotide
acacgaacauagccacugc

SEQ ID NO: 965441 - RNA, 19 nt, Artificial Sequence
  Description of Artificial Sequence: Synthetic oligonucleotide
ugguauagugccaggcgga

SEQ ID NO: 965442 - RNA, 19 nt, Artificial Sequence
  Description of Artificial Sequence: Synthetic oligonucleotide
ugagcaacuuaaucugagu

SEQ ID NO: 965443 - RNA, 19 nt, Artificial Sequence
  Description of Artificial Sequence: Synthetic oligonucleotide
guauacugcacguggucgc

SEQ ID NO: 965444 - RNA, 19 nt, Artificial Sequence
  Description of Artificial Sequence: Synthetic oligonucleotide
ugagugaucuugucaugca

SEQ ID NO: 965445 - RNA, 19 nt, Artificial Sequence
  Description of Artificial Sequence: Synthetic oligonucleotide
cacgaacauagccacugcg

SEQ ID NO: 965446 - RNA, 19 nt, Artificial Sequence
  Description of Artificial Sequence: Synthetic oligonucleotide
guuccggugguuaugccgg

SEQ ID NO: 965447 - RNA, 19 nt, Artificial Sequence
  Description of Artificial Sequence: Synthetic oligonucleotide
uucacuugcuucaggggaa

SEQ ID NO: 965448 - RNA, 19 nt, Artificial Sequence
  Description of Artificial Sequence: Synthetic oligonucleotide
caaucuaauagaggccagg

SEQ ID NO: 965449 - RNA, 19 nt, Artificial Sequence
  Description of Artificial Sequence: Synthetic oligonucleotide
gaggcuaucgagagccugg

SEQ ID NO: 965450 - RNA, 19 nt, Artificial Sequence
  Description of Artificial Sequence: Synthetic oligonucleotide
cucguagaacuccuugcgg

SEQ ID NO: 965451 - RNA, 19 nt, Artificial Sequence
  Description of Artificial Sequence: Synthetic oligonucleotide
uacgcuucucagaaggcuc

SEQ ID NO: 965452 - RNA, 19 nt, Artificial Sequence
  Description of Artificial Sequence: Synthetic oligonucleotide
cuugcggaaaacucggaca

SEQ ID NO: 965453 - RNA, 19 nt, Artificial Sequence
  Description of Artificial Sequence: Synthetic oligonucleotide
gaaugcugaaagucugcac

SEQ ID NO: 965454 - RNA, 19 nt, Artificial Sequence
  Description of Artificial Sequence: Synthetic oligonucleotide
gacccucugauuguggacc

SEQ ID NO: 965455 - RNA, 19 nt, Artificial Sequence
  Description of Artificial Sequence: Synthetic oligonucleotide
gcuaucgagagccuggaug

SEQ ID NO: 965456 - RNA, 19 nt, Artificial Sequence
  Description of Artificial Sequence: Synthetic oligonucleotide
gucuacguuggcuccacag

SEQ ID NO: 965457 - RNA, 19 nt, Artificial Sequence
  Description of Artificial Sequence: Synthetic oligonucleotide
ucugagugucauuguacac

SEQ ID NO: 965458 - RNA, 19 nt, Artificial Sequence
  Description of Artificial Sequence: Synthetic oligonucleotide
ucugcuucguuccgguggu

SEQ ID NO: 965459 - RNA, 19 nt, Artificial Sequence
  Description of Artificial Sequence: Synthetic oligonucleotide
cauuugagugaucuuguca

SEQ ID NO: 965460 - RNA, 19 nt, Artificial Sequence
  Description of Artificial Sequence: Synthetic oligonucleotide
ucgauucuuugucgaauac

SEQ ID NO: 965461 - RNA, 19 nt, Artificial Sequence
  Description of Artificial Sequence: Synthetic oligonucleotide
ugguccgucagucccacaa

SEQ ID NO: 965462 - RNA, 19 nt, Artificial Sequence
  Description of Artificial Sequence: Synthetic oligonucleotide
ugauuguggaccagcucgu

SEQ ID NO: 965463 - RNA, 19 nt, Artificial Sequence
  Description of Artificial Sequence: Synthetic oligonucleotide
cucaaaggagauccgggug

SEQ ID NO: 965464 - RNA, 19 nt, Artificial Sequence
  Description of Artificial Sequence: Synthetic oligonucleotide
caaggaauuccuggagucg

SEQ ID NO: 965465 - RNA, 19 nt, Artificial Sequence
  Description of Artificial Sequence: Synthetic oligonucleotide
cuuugucgaauacacaaaa

SEQ ID NO: 965466 - RNA, 19 nt, Artificial Sequence
  Description of Artificial Sequence: Synthetic oligonucleotide
aggaugucucuccuccggg

SEQ ID NO: 965467 - RNA, 19 nt, Artificial Sequence
  Description of Artificial Sequence: Synthetic oligonucleotide
uacugcucguaaucaaaga

SEQ ID NO: 965468 - RNA, 19 nt, Artificial Sequence
  Description of Artificial Sequence: Synthetic oligonucleotide
auggacugaaauuucuguu

SEQ ID NO: 965469 - RNA, 19 nt, Artificial Sequence
  Description of Artificial Sequence: Synthetic oligonucleotide
cauucacaacauugacugg

SEQ ID NO: 965470 - RNA, 19 nt, Artificial Sequence
  Description of Artificial Sequence: Synthetic oligonucleotide
acuugagcaaaugucugcu

SEQ ID NO: 965471 - RNA, 19 nt, Artificial Sequence
  Description of Artificial Sequence: Synthetic oligonucleotide
uguacggaccacagcuuga

SEQ ID NO: 965472 - RNA, 19 nt, Artificial Sequence
  Description of Artificial Sequence: Synthetic oligonucleotide
agacacgagagcauccagg

SEQ ID NO: 965473 - RNA, 19 nt, Artificial Sequence
  Description of Artificial Sequence: Synthetic oligonucleotide
ggaugaaguggucuguccc

SEQ ID NO: 965474 - RNA, 19 nt, Artificial Sequence
  Description of Artificial Sequence: Synthetic oligonucleotide
cacgccaggucaaacauca

SEQ ID NO: 965475 - RNA, 19 nt, Artificial Sequence
  Description of Artificial Sequence: Synthetic oligonucleotide
aauauucauacugcucgua

SEQ ID NO: 965476 - RNA, 19 nt, Artificial Sequence
  Description of Artificial Sequence: Synthetic oligonucleotide
uggaaccagcguauacugc

SEQ ID NO: 965477 - RNA, 19 nt, Artificial Sequence
  Description of Artificial Sequence: Synthetic oligonucleotide
ugcugaaagucugcacacg

SEQ ID NO: 965478 - RNA, 19 nt, Artificial Sequence
  Description of Artificial Sequence: Synthetic oligonucleotide
ucugauuguggaccagcuc

SEQ ID NO: 965479 - RNA, 19 nt, Artificial Sequence
  Description of Artificial Sequence: Synthetic oligonucleotide
ucaaggagacguccaugga

SEQ ID NO: 965480 - RNA, 19 nt, Artificial Sequence
  Description of Artificial Sequence: Synthetic oligonucleotide
uccgggugcagucuacaga

SEQ ID NO: 965481 - RNA, 19 nt, Artificial Sequence
  Description of Artificial Sequence: Synthetic oligonucleotide
accgugcccugcucuaugc

SEQ ID NO: 965482 - RNA, 19 nt, Artificial Sequence
  Description of Artificial Sequence: Synthetic oligonucleotide
ggaaaacucggacacgaac

SEQ ID NO: 965483 - RNA, 19 nt, Artificial Sequence
  Description of Artificial Sequence: Synthetic oligonucleotide
uccacgccaggucaaacau

SEQ ID NO: 965484 - RNA, 19 nt, Artificial Sequence
  Description of Artificial Sequence: Synthetic oligonucleotide
cacaaggcauccacauccg

SEQ ID NO: 965485 - RNA, 19 nt, Artificial Sequence
  Description of Artificial Sequence: Synthetic oligonucleotide
uucguuccggugguuaugc

SEQ ID NO: 965486 - RNA, 19 nt, Artificial Sequence
  Description of Artificial Sequence: Synthetic oligonucleotide
aggucaaagugguuaugca

SEQ ID NO: 965487 - RNA, 19 nt, Artificial Sequence
  Description of Artificial Sequence: Synthetic oligonucleotide
ggaaccagcguauacugca

SEQ ID NO: 965488 - RNA, 19 nt, Artificial Sequence
  Description of Artificial Sequence: Synthetic oligonucleotide
caggucaaacaucaccaug

SEQ ID NO: 965489 - RNA, 19 nt, Artificial Sequence
  Description of Artificial Sequence: Synthetic oligonucleotide
agucccacaauggcccacc

SEQ ID NO: 965490 - RNA, 19 nt, Artificial Sequence
  Description of Artificial Sequence: Synthetic oligonucleotide
cucuucuaaccguguacgc

SEQ ID NO: 965491 - RNA, 19 nt, Artificial Sequence
  Description of Artificial Sequence: Synthetic oligonucleotide
aaggagauccgggugcagu

SEQ ID NO: 965492 - RNA, 19 nt, Artificial Sequence
  Description of Artificial Sequence: Synthetic oligonucleotide
ucacaacauugacuggccu

SEQ ID NO: 965493 - RNA, 19 nt, Artificial Sequence
  Description of Artificial Sequence: Synthetic oligonucleotide
cccguaauauucauacugc

SEQ ID NO: 965494 - RNA, 19 nt, Artificial Sequence
  Description of Artificial Sequence: Synthetic oligonucleotide
gucuuguuugaugagcaac

SEQ ID NO: 965495 - RNA, 19 nt, Artificial Sequence
  Description of Artificial Sequence: Synthetic oligonucleotide
cuugaaccuggcugcagug

SEQ ID NO: 965496 - RNA, 19 nt, Artificial Sequence
  Description of Artificial Sequence: Synthetic oligonucleotide
gaguuggugcuuucugcug

SEQ ID NO: 965497 - RNA, 19 nt, Artificial Sequence
  Description of Artificial Sequence: Synthetic oligonucleotide
ggccaggugauauaaauaa

SEQ ID NO: 965498 - RNA, 19 nt, Artificial Sequence
  Description of Artificial Sequence: Synthetic oligonucleotide
aggggaagccccauguccg

SEQ ID NO: 965499 - RNA, 19 nt, Artificial Sequence
  Description of Artificial Sequence: Synthetic oligonucleotide
cuugagcaaaugucugcug

SEQ ID NO: 965500 - RNA, 19 nt, Artificial Sequence
  Description of Artificial Sequence: Synthetic oligonucleotide
agcgucgauucuuugucga

SEQ ID NO: 965501 - RNA, 19 nt, Artificial Sequence
  Description of Artificial Sequence: Synthetic oligonucleotide
gaacaguguaacaucugga

SEQ ID NO: 965502 - RNA, 19 nt, Artificial Sequence
  Description of Artificial Sequence: Synthetic oligonucleotide
gcaauagagaaaagggccc

SEQ ID NO: 965503 - RNA, 19 nt, Artificial Sequence
  Description of Artificial Sequence: Synthetic oligonucleotide
cucagaaggcucugacccc

SEQ ID NO: 965504 - RNA, 19 nt, Artificial Sequence
  Description of Artificial Sequence: Synthetic oligonucleotide
auagcagaacuguucuuua

SEQ ID NO: 965505 - RNA, 19 nt, Artificial Sequence
  Description of Artificial Sequence: Synthetic oligonucleotide
cuucguugccuccucuuug

SEQ ID NO: 965506 - RNA, 19 nt, Artificial Sequence
  Description of Artificial Sequence: Synthetic oligonucleotide
cagcuugcagcgucgauuc

SEQ ID NO: 965507 - RNA, 19 nt, Artificial Sequence
  Description of Artificial Sequence: Synthetic oligonucleotide
auccacgccaggucaaaca

SEQ ID NO: 965508 - RNA, 19 nt, Artificial Sequence
  Description of Artificial Sequence: Synthetic oligonucleotide
accagcguauacugcacgu

SEQ ID NO: 965509 - RNA, 19 nt, Artificial Sequence
  Description of Artificial Sequence: Synthetic oligonucleotide
ucuucguugccuccucuuu

SEQ ID NO: 965510 - RNA, 19 nt, Artificial Sequence
  Description of Artificial Sequence: Synthetic oligonucleotide
gagaacaguguaacaucug

SEQ ID NO: 965511 - RNA, 19 nt, Artificial Sequence
  Description of Artificial Sequence: Synthetic oligonucleotide
uauacugcacguggucgca

SEQ ID NO: 965512 - RNA, 19 nt, Artificial Sequence
  Description of Artificial Sequence: Synthetic oligonucleotide
gguugaaggauauccagua

SEQ ID NO: 965513 - RNA, 19 nt, Artificial Sequence
  Description of Artificial Sequence: Synthetic oligonucleotide
gcaacuuaaucugaguguc

SEQ ID NO: 965514 - RNA, 19 nt, Artificial Sequence
  Description of Artificial Sequence: Synthetic oligonucleotide
ucgcuucugcccguguacg

SEQ ID NO: 965515 - RNA, 19 nt, Artificial Sequence
  Description of Artificial Sequence: Synthetic oligonucleotide
uucuaaccguguacgcuuc

SEQ ID NO: 965516 - RNA, 19 nt, Artificial Sequence
  Description of Artificial Sequence: Synthetic oligonucleotide
ugcggaaaacucggacacg

SEQ ID NO: 965517 - RNA, 19 nt, Artificial Sequence
  Description of Artificial Sequence: Synthetic oligonucleotide
acaucuggaguacccucca

SEQ ID NO: 965518 - RNA, 19 nt, Artificial Sequence
  Description of Artificial Sequence: Synthetic oligonucleotide
cagcucaauuacugagagg

SEQ ID NO: 965519 - RNA, 19 nt, Artificial Sequence
  Description of Artificial Sequence: Synthetic oligonucleotide
aguucuugccacccagaaa

SEQ ID NO: 965520 - RNA, 19 nt, Artificial Sequence
  Description of Artificial Sequence: Synthetic oligonucleotide
cagcgucgauucuuugucg

SEQ ID NO: 965521 - RNA, 19 nt, Artificial Sequence
  Description of Artificial Sequence: Synthetic oligonucleotide
ccgggugcagucuacagag

SEQ ID NO: 965522 - RNA, 19 nt, Artificial Sequence
  Description of Artificial Sequence: Synthetic oligonucleotide
caaggaugccggcuuggag

SEQ ID NO: 965523 - RNA, 19 nt, Artificial Sequence
  Description of Artificial Sequence: Synthetic oligonucleotide
guccgucagucccacaaug

SEQ ID NO: 965524 - RNA, 19 nt, Artificial Sequence
  Description of Artificial Sequence: Synthetic oligonucleotide
caucgucuuguuugaugag

SEQ ID NO: 965525 - RNA, 19 nt, Artificial Sequence
  Description of Artificial Sequence: Synthetic oligonucleotide
accguguacgcuucucaga

SEQ ID NO: 965526 - RNA, 19 nt, Artificial Sequence
  Description of Artificial Sequence: Synthetic oligonucleotide
cauggacugaaauuucugu

SEQ ID NO: 965527 - RNA, 19 nt, Artificial Sequence
  Description of Artificial Sequence: Synthetic oligonucleotide
ucuaaccguguacgcuucu

SEQ ID NO: 965528 - RNA, 19 nt, Artificial Sequence
  Description of Artificial Sequence: Synthetic oligonucleotide
acucaaggaugccggcuug

SEQ ID NO: 965529 - RNA, 19 nt, Artificial Sequence
  Description of Artificial Sequence: Synthetic oligonucleotide
uacccuccaugagugagca

SEQ ID NO: 965530 - RNA, 19 nt, Artificial Sequence
  Description of Artificial Sequence: Synthetic oligonucleotide
aggaugccggcuuggagaa

SEQ ID NO: 965531 - RNA, 19 nt, Artificial Sequence
  Description of Artificial Sequence: Synthetic oligonucleotide
cuucugcccguguacggac

SEQ ID NO: 965532 - RNA, 19 nt, Artificial Sequence
  Description of Artificial Sequence: Synthetic oligonucleotide
ugacgaugucccguaauau

SEQ ID NO: 965533 - RNA, 19 nt, Artificial Sequence
  Description of Artificial Sequence: Synthetic oligonucleotide
uucugcccguguacggacc

SEQ ID NO: 965534 - RNA, 19 nt, Artificial Sequence
  Description of Artificial Sequence: Synthetic oligonucleotide
ggaagugaccagguuagug

SEQ ID NO: 965535 - RNA, 19 nt, Artificial Sequence
  Description of Artificial Sequence: Synthetic oligonucleotide
cacgcauguccuucauccc

SEQ ID NO: 965536 - RNA, 19 nt, Artificial Sequence
  Description of Artificial Sequence: Synthetic oligonucleotide
gacgcugcaggaugccaac

SEQ ID NO: 965537 - RNA, 19 nt, Artificial Sequence
  Description of Artificial Sequence: Synthetic oligonucleotide
gaaccuggcugcaguguag

SEQ ID NO: 965538 - RNA, 19 nt, Artificial Sequence
  Description of Artificial Sequence: Synthetic oligonucleotide
guauagugccaggcggagg

SEQ ID NO: 965539 - RNA, 19 nt, Artificial Sequence
  Description of Artificial Sequence: Synthetic oligonucleotide
auccgggugcagucuacag

SEQ ID NO: 965540 - RNA, 19 nt, Artificial Sequence
  Description of Artificial Sequence: Synthetic oligonucleotide
aaaggagauccgggugcag

SEQ ID NO: 965541 - RNA, 19 nt, Artificial Sequence
  Description of Artificial Sequence: Synthetic oligonucleotide
gggccucccacucucuucg

SEQ ID NO: 965542 - RNA, 19 nt, Artificial Sequence
  Description of Artificial Sequence: Synthetic oligonucleotide
cuccaugagugagcaauag

SEQ ID NO: 965543 - RNA, 19 nt, Artificial Sequence
  Description of Artificial Sequence: Synthetic oligonucleotide
cguaauauucauacugcuc

SEQ ID NO: 965544 - RNA, 19 nt, Artificial Sequence
  Description of Artificial Sequence: Synthetic oligonucleotide
uacugcacguggucgcacu

SEQ ID NO: 965545 - RNA, 19 nt, Artificial Sequence
  Description of Artificial Sequence: Synthetic oligonucleotide
gucgcuucugcccguguac

SEQ ID NO: 965546 - RNA, 19 nt, Artificial Sequence
  Description of Artificial Sequence: Synthetic oligonucleotide
cagacucaaggaugccggc

SEQ ID NO: 965547 - RNA, 19 nt, Artificial Sequence
  Description of Artificial Sequence: Synthetic oligonucleotide
guuagugcagaggcagcug

SEQ ID NO: 965548 - RNA, 19 nt, Artificial Sequence
  Description of Artificial Sequence: Synthetic oligonucleotide
gucgauucuuugucgaaua

SEQ ID NO: 965549 - RNA, 19 nt, Artificial Sequence
  Description of Artificial Sequence: Synthetic oligonucleotide
cagguuacuccuggagagg

SEQ ID NO: 965550 - RNA, 19 nt, Artificial Sequence
  Description of Artificial Sequence: Synthetic oligonucleotide
ucuccuccgggccucccac

SEQ ID NO: 965551 - RNA, 19 nt, Artificial Sequence
  Description of Artificial Sequence: Synthetic oligonucleotide
aggagacguccauggacug

SEQ ID NO: 965552 - RNA, 19 nt, Artificial Sequence
  Description of Artificial Sequence: Synthetic oligonucleotide
aaugcaguuucaaguucuu

SEQ ID NO: 965553 - RNA, 19 nt, Artificial Sequence
  Description of Artificial Sequence: Synthetic oligonucleotide
gagacguccauggacugaa

SEQ ID NO: 965554 - RNA, 19 nt, Artificial Sequence
  Description of Artificial Sequence: Synthetic oligonucleotide
accacagcuugaaccuggc

SEQ ID NO: 965555 - RNA, 19 nt, Artificial Sequence
  Description of Artificial Sequence: Synthetic oligonucleotide
acaaaagacuugagcaaau

SEQ ID NO: 965556 - RNA, 19 nt, Artificial Sequence
  Description of Artificial Sequence: Synthetic oligonucleotide
acguggucgcacugaaaca

SEQ ID NO: 965557 - RNA, 19 nt, Artificial Sequence
  Description of Artificial Sequence: Synthetic oligonucleotide
auagaggccaggugauaua

SEQ ID NO: 965558 - RNA, 19 nt, Artificial Sequence
  Description of Artificial Sequence: Synthetic oligonucleotide
cauacuucauuugagugau

SEQ ID NO: 965559 - RNA, 19 nt, Artificial Sequence
  Description of Artificial Sequence: Synthetic oligonucleotide
acugguccgucagucccac

SEQ ID NO: 965560 - RNA, 19 nt, Artificial Sequence
  Description of Artificial Sequence: Synthetic oligonucleotide
caacuuaaucugaguguca

SEQ ID NO: 965561 - RNA, 19 nt, Artificial Sequence
  Description of Artificial Sequence: Synthetic oligonucleotide
acugcacguggucgcacug

SEQ ID NO: 965562 - RNA, 19 nt, Artificial Sequence
  Description of Artificial Sequence: Synthetic oligonucleotide
auggcugacgaugucccgu

SEQ ID NO: 965563 - RNA, 19 nt, Artificial Sequence
  Description of Artificial Sequence: Synthetic oligonucleotide
gaaccagcguauacugcac

SEQ ID NO: 965564 - RNA, 19 nt, Artificial Sequence
  Description of Artificial Sequence: Synthetic oligonucleotide
augaaauagcagaacuguu

SEQ ID NO: 965565 - RNA, 19 nt, Artificial Sequence
  Description of Artificial Sequence: Synthetic oligonucleotide
acccaaaaugaaugcugaa

SEQ ID NO: 965566 - RNA, 19 nt, Artificial Sequence
  Description of Artificial Sequence: Synthetic oligonucleotide
gguuaugccgggucacaug

SEQ ID NO: 965567 - RNA, 19 nt, Artificial Sequence
  Description of Artificial Sequence: Synthetic oligonucleotide
uccuugcggaaaacucgga

SEQ ID NO: 965568 - RNA, 19 nt, Artificial Sequence
  Description of Artificial Sequence: Synthetic oligonucleotide
auguccgcaaggaauuccu

SEQ ID NO: 965569 - RNA, 19 nt, Artificial Sequence
  Description of Artificial Sequence: Synthetic oligonucleotide
gcagcgucgauucuuuguc

SEQ ID NO: 965570 - RNA, 19 nt, Artificial Sequence
  Description of Artificial Sequence: Synthetic oligonucleotide
cuuggacaucauccacgcc

SEQ ID NO: 965571 - RNA, 19 nt, Artificial Sequence
  Description of Artificial Sequence: Synthetic oligonucleotide
agacucaaggaugccggcu

SEQ ID NO: 965572 - RNA, 19 nt, Artificial Sequence
  Description of Artificial Sequence: Synthetic oligonucleotide
cagaguccgagaguuggug

SEQ ID NO: 965573 - RNA, 19 nt, Artificial Sequence
  Description of Artificial Sequence: Synthetic oligonucleotide
gacgaugucccguaauauu

SEQ ID NO: 965574 - RNA, 19 nt, Artificial Sequence
  Description of Artificial Sequence: Synthetic oligonucleotide
ggugcuuucugcugccuuc

SEQ ID NO: 965575 - RNA, 19 nt, Artificial Sequence
  Description of Artificial Sequence: Synthetic oligonucleotide
gaguccgagaguuggugcu

SEQ ID NO: 965576 - RNA, 19 nt, Artificial Sequence
  Description of Artificial Sequence: Synthetic oligonucleotide
caaaaucccucaggacagc

SEQ ID NO: 965577 - RNA, 19 nt, Artificial Sequence
  Description of Artificial Sequence: Synthetic oligonucleotide
cuaauagaggccaggugau

SEQ ID NO: 965578 - RNA, 19 nt, Artificial Sequence
  Description of Artificial Sequence: Synthetic oligonucleotide
acguuggcuccacaguuua

SEQ ID NO: 965579 - RNA, 19 nt, Artificial Sequence
  Description of Artificial Sequence: Synthetic oligonucleotide
cugacgaugucccguaaua

SEQ ID NO: 965580 - RNA, 19 nt, Artificial Sequence
  Description of Artificial Sequence: Synthetic oligonucleotide
gguauagugccaggcggag

SEQ ID NO: 965581 - RNA, 19 nt, Artificial Sequence
  Description of Artificial Sequence: Synthetic oligonucleotide
caaguucuugccacccaga

SEQ ID NO: 965582 - RNA, 19 nt, Artificial Sequence
  Description of Artificial Sequence: Synthetic oligonucleotide
cuucaucccuaaagauguc

SEQ ID NO: 965583 - RNA, 19 nt, Artificial Sequence
  Description of Artificial Sequence: Synthetic oligonucleotide
cguuccggugguuaugccg

SEQ ID NO: 965584 - RNA, 19 nt, Artificial Sequence
  Description of Artificial Sequence: Synthetic oligonucleotide
uaauagaggccaggugaua

SEQ ID NO: 965585 - RNA, 19 nt, Artificial Sequence
  Description of Artificial Sequence: Synthetic oligonucleotide
guuacuccuggagaggcua

SEQ ID NO: 965586 - RNA, 19 nt, Artificial Sequence
  Description of Artificial Sequence: Synthetic oligonucleotide
uggugcuuucugcugccuu

SEQ ID NO: 965587 - RNA, 19 nt, Artificial Sequence
  Description of Artificial Sequence: Synthetic oligonucleotide
ugcccugcucuaugcucag

SEQ ID NO: 965588 - RNA, 19 nt, Artificial Sequence
  Description of Artificial Sequence: Synthetic oligonucleotide
guucgugccacaaucuccu

SEQ ID NO: 965589 - RNA, 19 nt, Artificial Sequence
  Description of Artificial Sequence: Synthetic oligonucleotide
gugcugguauagugccagg

SEQ ID NO: 965590 - RNA, 19 nt, Artificial Sequence
  Description of Artificial Sequence: Synthetic oligonucleotide
ccacugguccgucaguccc

SEQ ID NO: 965591 - RNA, 19 nt, Artificial Sequence
  Description of Artificial Sequence: Synthetic oligonucleotide
ugguguuguacaggcuuuc

SEQ ID NO: 965592 - RNA, 19 nt, Artificial Sequence
  Description of Artificial Sequence: Synthetic oligonucleotide
ccuugcggaaaacucggac

SEQ ID NO: 965593 - RNA, 19 nt, Artificial Sequence
  Description of Artificial Sequence: Synthetic oligonucleotide
cgucagucccacaauggcc

SEQ ID NO: 965594 - RNA, 19 nt, Artificial Sequence
  Description of Artificial Sequence: Synthetic oligonucleotide
ugguuaugccgggucacau

SEQ ID NO: 965595 - RNA, 19 nt, Artificial Sequence
  Description of Artificial Sequence: Synthetic oligonucleotide
cuucguuccggugguuaug

SEQ ID NO: 965596 - RNA, 19 nt, Artificial Sequence
  Description of Artificial Sequence: Synthetic oligonucleotide
gccaggugauauaaauaag

SEQ ID NO: 965597 - RNA, 19 nt, Artificial Sequence
  Description of Artificial Sequence: Synthetic oligonucleotide
gaugucccguaauauucau

SEQ ID NO: 965598 - RNA, 19 nt, Artificial Sequence
  Description of Artificial Sequence: Synthetic oligonucleotide
gccggcuuggagaacagug

SEQ ID NO: 965599 - RNA, 19 nt, Artificial Sequence
  Description of Artificial Sequence: Synthetic oligonucleotide
ugcagucuacagagagcau

SEQ ID NO: 965600 - RNA, 19 nt, Artificial Sequence
  Description of Artificial Sequence: Synthetic oligonucleotide
aggucacuucuggagaaau

SEQ ID NO: 965601 - RNA, 19 nt, Artificial Sequence
  Description of Artificial Sequence: Synthetic oligonucleotide
uggcugacgaugucccgua

SEQ ID NO: 965602 - RNA, 19 nt, Artificial Sequence
  Description of Artificial Sequence: Synthetic oligonucleotide
agucgcuucugcccgugua

SEQ ID NO: 965603 - RNA, 19 nt, Artificial Sequence
  Description of Artificial Sequence: Synthetic oligonucleotide
ugcuucguuccggugguua

SEQ ID NO: 965604 - RNA, 19 nt, Artificial Sequence
  Description of Artificial Sequence: Synthetic oligonucleotide
gacucaaggaugccggcuu

SEQ ID NO: 965605 - RNA, 19 nt, Artificial Sequence
  Description of Artificial Sequence: Synthetic oligonucleotide
ugcccguguacggaccaca

SEQ ID NO: 965606 - RNA, 19 nt, Artificial Sequence
  Description of Artificial Sequence: Synthetic oligonucleotide
ucguuccggugguuaugcc

SEQ ID NO: 965607 - RNA, 19 nt, Artificial Sequence
  Description of Artificial Sequence: Synthetic oligonucleotide
agggcccugggaagugacc

SEQ ID NO: 965608 - RNA, 19 nt, Artificial Sequence
  Description of Artificial Sequence: Synthetic oligonucleotide
cguggucgcacugaaacag

SEQ ID NO: 965609 - RNA, 19 nt, Artificial Sequence
  Description of Artificial Sequence: Synthetic oligonucleotide
ggagaacaguguaacaucu

SEQ ID NO: 965610 - RNA, 19 nt, Artificial Sequence
  Description of Artificial Sequence: Synthetic oligonucleotide
cugaggcguccuucucagg

SEQ ID NO: 965611 - RNA, 19 nt, Artificial Sequence
  Description of Artificial Sequence: Synthetic oligonucleotide
gcaaucuaauagaggccag

SEQ ID NO: 965612 - RNA, 19 nt, Artificial Sequence
  Description of Artificial Sequence: Synthetic oligonucleotide
caaaggagauccgggugca

SEQ ID NO: 965613 - RNA, 19 nt, Artificial Sequence
  Description of Artificial Sequence: Synthetic oligonucleotide
gauccgggugcagucuaca

SEQ ID NO: 965614 - RNA, 19 nt, Artificial Sequence
  Description of Artificial Sequence: Synthetic oligonucleotide
guagaacuccuugcggaaa

SEQ ID NO: 965615 - RNA, 19 nt, Artificial Sequence
  Description of Artificial Sequence: Synthetic oligonucleotide
gcggaaaacucggacacga

SEQ ID NO: 965616 - RNA, 19 nt, Artificial Sequence
  Description of Artificial Sequence: Synthetic oligonucleotide
uaucgagagccuggaugaa

SEQ ID NO: 965617 - RNA, 19 nt, Artificial Sequence
  Description of Artificial Sequence: Synthetic oligonucleotide
aggccaggugauauaaaua

SEQ ID NO: 965618 - RNA, 19 nt, Artificial Sequence
  Description of Artificial Sequence: Synthetic oligonucleotide
guacgcuucucagaaggcu

SEQ ID NO: 965619 - RNA, 19 nt, Artificial Sequence
  Description of Artificial Sequence: Synthetic oligonucleotide
ggacccucugauuguggac

SEQ ID NO: 965620 - RNA, 19 nt, Artificial Sequence
  Description of Artificial Sequence: Synthetic oligonucleotide
gugguuaugcagaguccga

SEQ ID NO: 965621 - RNA, 19 nt, Artificial Sequence
  Description of Artificial Sequence: Synthetic oligonucleotide
ggugguuaugccgggucac

SEQ ID NO: 965622 - RNA, 19 nt, Artificial Sequence
  Description of Artificial Sequence: Synthetic oligonucleotide
uggagucgcuucugcccgu

SEQ ID NO: 965623 - RNA, 19 nt, Artificial Sequence
  Description of Artificial Sequence: Synthetic oligonucleotide
ggccugaaggaucuugcaa

SEQ ID NO: 965624 - RNA, 19 nt, Artificial Sequence
  Description of Artificial Sequence: Synthetic oligonucleotide
gcguauacugcacgugguc

SEQ ID NO: 965625 - RNA, 19 nt, Artificial Sequence
  Description of Artificial Sequence: Synthetic oligonucleotide
guguuguacaggcuuucau

SEQ ID NO: 965626 - RNA, 19 nt, Artificial Sequence
  Description of Artificial Sequence: Synthetic oligonucleotide
cuacguuggcuccacaguu

SEQ ID NO: 965627 - RNA, 19 nt, Artificial Sequence
  Description of Artificial Sequence: Synthetic oligonucleotide
cauccacgccaggucaaac

SEQ ID NO: 965628 - RNA, 19 nt, Artificial Sequence
  Description of Artificial Sequence: Synthetic oligonucleotide
ggucgcacugaaacagggc

SEQ ID NO: 965629 - RNA, 19 nt, Artificial Sequence
  Description of Artificial Sequence: Synthetic oligonucleotide
uucgugccacaaucuccuc

SEQ ID NO: 965630 - RNA, 19 nt, Artificial Sequence
  Description of Artificial Sequence: Synthetic oligonucleotide
caccgugcccugcucuaug

SEQ ID NO: 965631 - RNA, 19 nt, Artificial Sequence
  Description of Artificial Sequence: Synthetic oligonucleotide
cacagucaccgugcccugc

SEQ ID NO: 965632 - RNA, 19 nt, Artificial Sequence
  Description of Artificial Sequence: Synthetic oligonucleotide
ccgcaaggaauuccuggag

SEQ ID NO: 965633 - RNA, 19 nt, Artificial Sequence
  Description of Artificial Sequence: Synthetic oligonucleotide
cacugguccgucaguccca

SEQ ID NO: 965634 - RNA, 19 nt, Artificial Sequence
  Description of Artificial Sequence: Synthetic oligonucleotide
gugguuaugccgggucaca

SEQ ID NO: 965635 - RNA, 19 nt, Artificial Sequence
  Description of Artificial Sequence: Synthetic oligonucleotide
agcuugcagcgucgauucu

SEQ ID NO: 965636 - RNA, 19 nt, Artificial Sequence
  Description of Artificial Sequence: Synthetic oligonucleotide
ccguguacggaccacagcu

SEQ ID NO: 965637 - RNA, 19 nt, Artificial Sequence
  Description of Artificial Sequence: Synthetic oligonucleotide
gguguuguacaggcuuuca

SEQ ID NO: 965638 - RNA, 19 nt, Artificial Sequence
  Description of Artificial Sequence: Synthetic oligonucleotide
gauuguggaccagcucgua

SEQ ID NO: 965639 - RNA, 19 nt, Artificial Sequence
  Description of Artificial Sequence: Synthetic oligonucleotide
caauuacugagaggucaaa

SEQ ID NO: 965640 - RNA, 19 nt, Artificial Sequence
  Description of Artificial Sequence: Synthetic oligonucleotide
ccguguacgcuucucagaa

SEQ ID NO: 965641 - RNA, 19 nt, Artificial Sequence
  Description of Artificial Sequence: Synthetic oligonucleotide
uccggugguuaugccgggu

SEQ ID NO: 965642 - RNA, 19 nt, Artificial Sequence
  Description of Artificial Sequence: Synthetic oligonucleotide
ggauauccaguaggucuac

SEQ ID NO: 965643 - RNA, 19 nt, Artificial Sequence
  Description of Artificial Sequence: Synthetic oligonucleotide
gcuugaacccaaaaugaau

SEQ ID NO: 965644 - RNA, 19 nt, Artificial Sequence
  Description of Artificial Sequence: Synthetic oligonucleotide
gucaccgugcccugcucua

SEQ ID NO: 965645 - RNA, 19 nt, Artificial Sequence
  Description of Artificial Sequence: Synthetic oligonucleotide
gccaggaauuuaugcuuga

SEQ ID NO: 965646 - RNA, 19 nt, Artificial Sequence
  Description of Artificial Sequence: Synthetic oligonucleotide
augucccguaauauucaua

SEQ ID NO: 965647 - RNA, 19 nt, Artificial Sequence
  Description of Artificial Sequence: Synthetic oligonucleotide
gucccguaauauucauacu

SEQ ID NO: 965648 - RNA, 19 nt, Artificial Sequence
  Description of Artificial Sequence: Synthetic oligonucleotide
aggccaagguacagcuugu

SEQ ID NO: 965649 - RNA, 19 nt, Artificial Sequence
  Description of Artificial Sequence: Synthetic oligonucleotide
agucuacagagagcauguu

SEQ ID NO: 965650 - RNA, 19 nt, Artificial Sequence
  Description of Artificial Sequence: Synthetic oligonucleotide
acgccaggucaaacaucac

SEQ ID NO: 965651 - RNA, 19 nt, Artificial Sequence
  Description of Artificial Sequence: Synthetic oligonucleotide
gugccacaaucuccucuuc

SEQ ID NO: 965652 - RNA, 19 nt, Artificial Sequence
  Description of Artificial Sequence: Synthetic oligonucleotide
ccagcguauacugcacgug

SEQ ID NO: 965653 - RNA, 19 nt, Artificial Sequence
  Description of Artificial Sequence: Synthetic oligonucleotide
caguaggucuacguuggcu

SEQ ID NO: 965654 - RNA, 19 nt, Artificial Sequence
  Description of Artificial Sequence: Synthetic oligonucleotide
gugguucgugccacaaucu

SEQ ID NO: 965655 - RNA, 19 nt, Artificial Sequence
  Description of Artificial Sequence: Synthetic oligonucleotide
cagucccacaauggcccac

SEQ ID NO: 965656 - RNA, 19 nt, Artificial Sequence
  Description of Artificial Sequence: Synthetic oligonucleotide
gcuucugcccguguacgga

SEQ ID NO: 965657 - RNA, 19 nt, Artificial Sequence
  Description of Artificial Sequence: Synthetic oligonucleotide
cuuguuugaugagcaacuu

SEQ ID NO: 965658 - RNA, 19 nt, Artificial Sequence
  Description of Artificial Sequence: Synthetic oligonucleotide
ccguaauauucauacugcu

SEQ ID NO: 965659 - RNA, 19 nt, Artificial Sequence
  Description of Artificial Sequence: Synthetic oligonucleotide
ccagguuagugcagaggca

SEQ ID NO: 965660 - RNA, 19 nt, Artificial Sequence
  Description of Artificial Sequence: Synthetic oligonucleotide
ggaagccccauguccgcaa

SEQ ID NO: 965661 - RNA, 19 nt, Artificial Sequence
  Description of Artificial Sequence: Synthetic oligonucleotide
gcucaauuacugagagguc

SEQ ID NO: 965662 - RNA, 19 nt, Artificial Sequence
  Description of Artificial Sequence: Synthetic oligonucleotide
cgaugucccguaauauuca

SEQ ID NO: 965663 - RNA, 19 nt, Artificial Sequence
  Description of Artificial Sequence: Synthetic oligonucleotide
ggagacguccauggacuga

SEQ ID NO: 965664 - RNA, 19 nt, Artificial Sequence
  Description of Artificial Sequence: Synthetic oligonucleotide
cccguguacggaccacagc

SEQ ID NO: 965665 - RNA, 19 nt, Artificial Sequence
  Description of Artificial Sequence: Synthetic oligonucleotide
gucccacaauggcccacca

SEQ ID NO: 965666 - RNA, 19 nt, Artificial Sequence
  Description of Artificial Sequence: Synthetic oligonucleotide
cgauucuuugucgaauaca

SEQ ID NO: 965667 - RNA, 19 nt, Artificial Sequence
  Description of Artificial Sequence: Synthetic oligonucleotide
ccaguaggucuacguuggc

SEQ ID NO: 965668 - RNA, 19 nt, Artificial Sequence
  Description of Artificial Sequence: Synthetic oligonucleotide
cguguacgcuucucagaag

SEQ ID NO: 965669 - RNA, 19 nt, Artificial Sequence
  Description of Artificial Sequence: Synthetic oligonucleotide
uggcgagcuccaggccaag

SEQ ID NO: 965670 - RNA, 19 nt, Artificial Sequence
  Description of Artificial Sequence: Synthetic oligonucleotide
ccggugguuaugccggguc

SEQ ID NO: 965671 - RNA, 19 nt, Artificial Sequence
  Description of Artificial Sequence: Synthetic oligonucleotide
ugccaacaucagucacaua

SEQ ID NO: 965672 - RNA, 19 nt, Artificial Sequence
  Description of Artificial Sequence: Synthetic oligonucleotide
ccacgccaggucaaacauc

SEQ ID NO: 965673 - RNA, 19 nt, Artificial Sequence
  Description of Artificial Sequence: Synthetic oligonucleotide
gcccguguacggaccacag

SEQ ID NO: 965674 - RNA, 19 nt, Artificial Sequence
  Description of Artificial Sequence: Synthetic oligonucleotide
cguagaacuccuugcggaa

SEQ ID NO: 965675 - RNA, 19 nt, Artificial Sequence
  Description of Artificial Sequence: Synthetic oligonucleotide
gcgucgauucuuugucgaa

SEQ ID NO: 965676 - RNA, 19 nt, Artificial Sequence
  Description of Artificial Sequence: Synthetic oligonucleotide
ggagucgcuucugcccgug

SEQ ID NO: 965677 - RNA, 19 nt, Artificial Sequence
  Description of Artificial Sequence: Synthetic oligonucleotide
cugcccguguacggaccac

SEQ ID NO: 965678 - RNA, 19 nt, Artificial Sequence
  Description of Artificial Sequence: Synthetic oligonucleotide
gcugacgaugucccguaau

SEQ ID NO: 965679 - RNA, 19 nt, Artificial Sequence
  Description of Artificial Sequence: Synthetic oligonucleotide
caugcacccacugguccgu

SEQ ID NO: 965680 - RNA, 19 nt, Artificial Sequence
  Description of Artificial Sequence: Synthetic oligonucleotide
acccuccaugagugagcaa

SEQ ID NO: 965681 - RNA, 19 nt, Artificial Sequence
  Description of Artificial Sequence: Synthetic oligonucleotide
gcuucguuccggugguuau

SEQ ID NO: 965682 - RNA, 19 nt, Artificial Sequence
  Description of Artificial Sequence: Synthetic oligonucleotide
gagaggcuaucgagagccu

SEQ ID NO: 965683 - RNA, 19 nt, Artificial Sequence
  Description of Artificial Sequence: Synthetic oligonucleotide
ccaggaauuuaugcuugaa

SEQ ID NO: 965684 - RNA, 19 nt, Artificial Sequence
  Description of Artificial Sequence: Synthetic oligonucleotide
ccggcuuggagaacagugu

SEQ ID NO: 965685 - RNA, 19 nt, Artificial Sequence
  Description of Artificial Sequence: Synthetic oligonucleotide
ggucuacguuggcuccaca

SEQ ID NO: 965686 - RNA, 19 nt, Artificial Sequence
  Description of Artificial Sequence: Synthetic oligonucleotide
cguccauggacugaaauuu

SEQ ID NO: 965687 - RNA, 19 nt, Artificial Sequence
  Description of Artificial Sequence: Synthetic oligonucleotide
ggucugucccugaggcguc

SEQ ID NO: 965688 - RNA, 19 nt, Artificial Sequence
  Description of Artificial Sequence: Synthetic oligonucleotide
caucuggaguacccuccau

SEQ ID NO: 965689 - RNA, 19 nt, Artificial Sequence
  Description of Artificial Sequence: Synthetic oligonucleotide
cugagaggucaaagugguu

SEQ ID NO: 965690 - RNA, 19 nt, Artificial Sequence
  Description of Artificial Sequence: Synthetic oligonucleotide
gguccgucagucccacaau

SEQ ID NO: 965691 - RNA, 19 nt, Artificial Sequence
  Description of Artificial Sequence: Synthetic oligonucleotide
ggaccagugcugguauagu

SEQ ID NO: 965692 - RNA, 19 nt, Artificial Sequence
  Description of Artificial Sequence: Synthetic oligonucleotide
cccucugauuguggaccag

SEQ ID NO: 965693 - RNA, 19 nt, Artificial Sequence
  Description of Artificial Sequence: Synthetic oligonucleotide
ggcugacgaugucccguaa

SEQ ID NO: 965694 - RNA, 19 nt, Artificial Sequence
  Description of Artificial Sequence: Synthetic oligonucleotide
cgucuuguuugaugagcaa

SEQ ID NO: 965695 - RNA, 19 nt, Artificial Sequence
  Description of Artificial Sequence: Synthetic oligonucleotide
caucaccauggcugacgau

SEQ ID NO: 965696 - RNA, 19 nt, Artificial Sequence
  Description of Artificial Sequence: Synthetic oligonucleotide
cggugguuaugccggguca

SEQ ID NO: 965697 - RNA, 19 nt, Artificial Sequence
  Description of Artificial Sequence: Synthetic oligonucleotide
cgugccacaaucuccucuu

SEQ ID NO: 965698 - RNA, 19 nt, Artificial Sequence
  Description of Artificial Sequence: Synthetic oligonucleotide
ggaugccggcuuggagaac

SEQ ID NO: 965699 - RNA, 19 nt, Artificial Sequence
  Description of Artificial Sequence: Synthetic oligonucleotide
caucgcuggccaggaauuu

SEQ ID NO: 965700 - RNA, 19 nt, Artificial Sequence
  Description of Artificial Sequence: Synthetic oligonucleotide
ccacauagucccacacuuu

SEQ ID NO: 965701 - RNA, 19 nt, Artificial Sequence
  Description of Artificial Sequence: Synthetic oligonucleotide
cuccuccgggccucccacu

SEQ ID NO: 965702 - RNA, 19 nt, Artificial Sequence
  Description of Artificial Sequence: Synthetic oligonucleotide
gcacguggucgcacugaaa

SEQ ID NO: 965703 - RNA, 19 nt, Artificial Sequence
  Description of Artificial Sequence: Synthetic oligonucleotide
ccgagaguuggugcuuucu

SEQ ID NO: 965704 - RNA, 19 nt, Artificial Sequence
  Description of Artificial Sequence: Synthetic oligonucleotide
cgucgauucuuugucgaau

SEQ ID NO: 965705 - RNA, 19 nt, Artificial Sequence
  Description of Artificial Sequence: Synthetic oligonucleotide
ccacagcuugaaccuggcu

SEQ ID NO: 965706 - RNA, 19 nt, Artificial Sequence
  Description of Artificial Sequence: Synthetic oligonucleotide
ccacaucgcuggccaggaa

SEQ ID NO: 965707 - RNA, 19 nt, Artificial Sequence
  Description of Artificial Sequence: Synthetic oligonucleotide
ccgugcccugcucuaugcu

SEQ ID NO: 965708 - RNA, 19 nt, Artificial Sequence
  Description of Artificial Sequence: Synthetic oligonucleotide
cguuggcuccacaguuuau

SEQ ID NO: 965709 - RNA, 19 nt, Artificial Sequence
  Description of Artificial Sequence: Synthetic oligonucleotide
cugcuucguuccggugguu

SEQ ID NO: 965710 - RNA, 19 nt, Artificial Sequence
  Description of Artificial Sequence: Synthetic oligonucleotide
ggguggcuugcaggugcuu

SEQ ID NO: 965711 - RNA, 19 nt, Artificial Sequence
  Description of Artificial Sequence: Synthetic oligonucleotide
cgagagcauccaggaacuu

SEQ ID NO: 965712 - RNA, 19 nt, Artificial Sequence
  Description of Artificial Sequence: Synthetic oligonucleotide
ugaacaagaaguacaaaag

SEQ ID NO: 965713 - RNA, 19 nt, Artificial Sequence
  Description of Artificial Sequence: Synthetic oligonucleotide
agguaugugaagaagaacc

SEQ ID NO: 965714 - RNA, 19 nt, Artificial Sequence
  Description of Artificial Sequence: Synthetic oligonucleotide
uuaacaguuuugcauauug

SEQ ID NO: 965715 - RNA, 19 nt, Artificial Sequence
  Description of Artificial Sequence: Synthetic oligonucleotide
uguccugguagcaauaggg

SEQ ID NO: 965716 - RNA, 19 nt, Artificial Sequence
  Description of Artificial Sequence: Synthetic oligonucleotide
ucucaaaccaugaaugcag

SEQ ID NO: 965717 - RNA, 19 nt, Artificial Sequence
  Description of Artificial Sequence: Synthetic oligonucleotide
acauauguggucuugccgg

SEQ ID NO: 965718 - RNA, 19 nt, Artificial Sequence
  Description of Artificial Sequence: Synthetic oligonucleotide
aacucgaggauacagucag

SEQ ID NO: 965719 - RNA, 19 nt, Artificial Sequence
  Description of Artificial Sequence: Synthetic oligonucleotide
uccacuagcacaaacugcc

SEQ ID NO: 965720 - RNA, 19 nt, Artificial Sequence
  Description of Artificial Sequence: Synthetic oligonucleotide
ugauaugcaagucacuccc

SEQ ID NO: 965721 - RNA, 19 nt, Artificial Sequence
  Description of Artificial Sequence: Synthetic oligonucleotide
cuagucucggcucauaugg

SEQ ID NO: 965722 - RNA, 19 nt, Artificial Sequence
  Description of Artificial Sequence: Synthetic oligonucleotide
ucaagaugcauucagcccu

SEQ ID NO: 965723 - RNA, 19 nt, Artificial Sequence
  Description of Artificial Sequence: Synthetic oligonucleotide
uuuuggaccauccaucgca

SEQ ID NO: 965724 - RNA, 19 nt, Artificial Sequence
  Description of Artificial Sequence: Synthetic oligonucleotide
ugugugaugguacugucug

SEQ ID NO: 965725 - RNA, 19 nt, Artificial Sequence
  Description of Artificial Sequence: Synthetic oligonucleotide
caguuuugcauauugcacg

SEQ ID NO: 965726 - RNA, 19 nt, Artificial Sequence
  Description of Artificial Sequence: Synthetic oligonucleotide
ucucaagaugcauucagcc

SEQ ID NO: 965727 - RNA, 19 nt, Artificial Sequence
  Description of Artificial Sequence: Synthetic oligonucleotide
ugagcccacguacugagcg

SEQ ID NO: 965728 - RNA, 19 nt, Artificial Sequence
  Description of Artificial Sequence: Synthetic oligonucleotide
aacucgcgcacgcagcugc

SEQ ID NO: 965729 - RNA, 19 nt, Artificial Sequence
  Description of Artificial Sequence: Synthetic oligonucleotide
ugcuuuaagcgccaccgcg

SEQ ID NO: 965730 - RNA, 19 nt, Artificial Sequence
  Description of Artificial Sequence: Synthetic oligonucleotide
cugauuguccccaagcagc

SEQ ID NO: 965731 - RNA, 19 nt, Artificial Sequence
  Description of Artificial Sequence: Synthetic oligonucleotide
gauacagucagcaacacua

SEQ ID NO: 965732 - RNA, 19 nt, Artificial Sequence
  Description of Artificial Sequence: Synthetic oligonucleotide
acugcuuuaagcgccaccg

SEQ ID NO: 965733 - RNA, 19 nt, Artificial Sequence
  Description of Artificial Sequence: Synthetic oligonucleotide
ugggauguuagcuuugucu

SEQ ID NO: 965734 - RNA, 19 nt, Artificial Sequence
  Description of Artificial Sequence: Synthetic oligonucleotide
agcacauggcguuuccucc

SEQ ID NO: 965735 - RNA, 19 nt, Artificial Sequence
  Description of Artificial Sequence: Synthetic oligonucleotide
cugaaagcaaaugaggcag

SEQ ID NO: 965736 - RNA, 19 nt, Artificial Sequence
  Description of Artificial Sequence: Synthetic oligonucleotide
cacucucaaaccaugaaug

SEQ ID NO: 965737 - RNA, 19 nt, Artificial Sequence
  Description of Artificial Sequence: Synthetic oligonucleotide
aguccacugcuuuaagcgc

SEQ ID NO: 965738 - RNA, 19 nt, Artificial Sequence
  Description of Artificial Sequence: Synthetic oligonucleotide
aacacuagcacauggcguu

SEQ ID NO: 965739 - RNA, 19 nt, Artificial Sequence
  Description of Artificial Sequence: Synthetic oligonucleotide
gacaucuacugccucagcc

SEQ ID NO: 965740 - RNA, 19 nt, Artificial Sequence
  Description of Artificial Sequence: Synthetic oligonucleotide
uggaucauuuccacagggg

SEQ ID NO: 965741 - RNA, 19 nt, Artificial Sequence
  Description of Artificial Sequence: Synthetic oligonucleotide
aauaggggccgucaggcga

SEQ ID NO: 965742 - RNA, 19 nt, Artificial Sequence
  Description of Artificial Sequence: Synthetic oligonucleotide
ucaaaccaugaaugcagcg

SEQ ID NO: 965743 - RNA, 19 nt, Artificial Sequence
  Description of Artificial Sequence: Synthetic oligonucleotide
uuuagcugagcugagcuga

SEQ ID NO: 965744 - RNA, 19 nt, Artificial Sequence
  Description of Artificial Sequence: Synthetic oligonucleotide
uuugcauauugcacguuug

SEQ ID NO: 965745 - RNA, 19 nt, Artificial Sequence
  Description of Artificial Sequence: Synthetic oligonucleotide
uaccguuucacucaacauc

SEQ ID NO: 965746 - RNA, 19 nt, Artificial Sequence
  Description of Artificial Sequence: Synthetic oligonucleotide
cuaggagcaaccucugggg

SEQ ID NO: 965747 - RNA, 19 nt, Artificial Sequence
  Description of Artificial Sequence: Synthetic oligonucleotide
acuagcacaaacugccgag

SEQ ID NO: 965748 - RNA, 19 nt, Artificial Sequence
  Description of Artificial Sequence: Synthetic oligonucleotide
ugcguugguacucagcacu

SEQ ID NO: 965749 - RNA, 19 nt, Artificial Sequence
  Description of Artificial Sequence: Synthetic oligonucleotide
agguccgugaccuucagcu

SEQ ID NO: 965750 - RNA, 19 nt, Artificial Sequence
  Description of Artificial Sequence: Synthetic oligonucleotide
caggguagagugaaguucc

SEQ ID NO: 965751 - RNA, 19 nt, Artificial Sequence
  Description of Artificial Sequence: Synthetic oligonucleotide
uauugcacguuuguccugg

SEQ ID NO: 965752 - RNA, 19 nt, Artificial Sequence
  Description of Artificial Sequence: Synthetic oligonucleotide
cucaagaugcauucagccc

SEQ ID NO: 965753 - RNA, 19 nt, Artificial Sequence
  Description of Artificial Sequence: Synthetic oligonucleotide
uggggagugggcuagguga

SEQ ID NO: 965754 - RNA, 19 nt, Artificial Sequence
  Description of Artificial Sequence: Synthetic oligonucleotide
gaaggaggggcacuauggg

SEQ ID NO: 965755 - RNA, 19 nt, Artificial Sequence
  Description of Artificial Sequence: Synthetic oligonucleotide
augcauucagcccucaaca

SEQ ID NO: 965756 - RNA, 19 nt, Artificial Sequence
  Description of Artificial Sequence: Synthetic oligonucleotide
acaggguagagugaaguuc

SEQ ID NO: 965757 - RNA, 19 nt, Artificial Sequence
  Description of Artificial Sequence: Synthetic oligonucleotide
uuuggaccauccaucgcag

SEQ ID NO: 965758 - RNA, 19 nt, Artificial Sequence
  Description of Artificial Sequence: Synthetic oligonucleotide
agcgauaauccucuugugu

SEQ ID NO: 965759 - RNA, 19 nt, Artificial Sequence
  Description of Artificial Sequence: Synthetic oligonucleotide
gcauauugcacguuugucc

SEQ ID NO: 965760 - RNA, 19 nt, Artificial Sequence
  Description of Artificial Sequence: Synthetic oligonucleotide
agguugaacacagacagga

SEQ ID NO: 965761 - RNA, 19 nt, Artificial Sequence
  Description of Artificial Sequence: Synthetic oligonucleotide
cacauauguggucuugccg

SEQ ID NO: 965762 - RNA, 19 nt, Artificial Sequence
  Description of Artificial Sequence: Synthetic oligonucleotide
agucucagaccuaagcugg

SEQ ID NO: 965763 - RNA, 19 nt, Artificial Sequence
  Description of Artificial Sequence: Synthetic oligonucleotide
gacgaugguauccagcaga

SEQ ID NO: 965764 - RNA, 19 nt, Artificial Sequence
  Description of Artificial Sequence: Synthetic oligonucleotide
acuagcacauggcguuucc

SEQ ID NO: 965765 - RNA, 19 nt, Artificial Sequence
  Description of Artificial Sequence: Synthetic oligonucleotide
uuccgaccuguccaggugg

SEQ ID NO: 965766 - RNA, 19 nt, Artificial Sequence
  Description of Artificial Sequence: Synthetic oligonucleotide
ucccaguuaagacuagccu

SEQ ID NO: 965767 - RNA, 19 nt, Artificial Sequence
  Description of Artificial Sequence: Synthetic oligonucleotide
ucuggaaugcguugguacu

SEQ ID NO: 965768 - RNA, 19 nt, Artificial Sequence
  Description of Artificial Sequence: Synthetic oligonucleotide
gaugcagcaccaucucuag

SEQ ID NO: 965769 - RNA, 19 nt, Artificial Sequence
  Description of Artificial Sequence: Synthetic oligonucleotide
ucacauauguggucuugcc

SEQ ID NO: 965770 - RNA, 19 nt, Artificial Sequence
  Description of Artificial Sequence: Synthetic oligonucleotide
cuggaucauuuccacaggg

SEQ ID NO: 965771 - RNA, 19 nt, Artificial Sequence
  Description of Artificial Sequence: Synthetic oligonucleotide
uggaccauccaucgcagcu

SEQ ID NO: 965772 - RNA, 19 nt, Artificial Sequence
  Description of Artificial Sequence: Synthetic oligonucleotide
cauccacuagcacaaacug

SEQ ID NO: 965773 - RNA, 19 nt, Artificial Sequence
  Description of Artificial Sequence: Synthetic oligonucleotide
ggaucauuuccacaggggc

SEQ ID NO: 965774 - RNA, 19 nt, Artificial Sequence
  Description of Artificial Sequence: Synthetic oligonucleotide
agcaauaggggccgucagg

SEQ ID NO: 965775 - RNA, 19 nt, Artificial Sequence
  Description of Artificial Sequence: Synthetic oligonucleotide
guagagugaaguuccuggc

SEQ ID NO: 965776 - RNA, 19 nt, Artificial Sequence
  Description of Artificial Sequence: Synthetic oligonucleotide
gugauaugcaagucacucc

SEQ ID NO: 965777 - RNA, 19 nt, Artificial Sequence
  Description of Artificial Sequence: Synthetic oligonucleotide
ugcauucagcccucaacag

SEQ ID NO: 965778 - RNA, 19 nt, Artificial Sequence
  Description of Artificial Sequence: Synthetic oligonucleotide
ugguggcuuucacugaaag

SEQ ID NO: 965779 - RNA, 19 nt, Artificial Sequence
  Description of Artificial Sequence: Synthetic oligonucleotide
ucuugugugaugguacugu

SEQ ID NO: 965780 - RNA, 19 nt, Artificial Sequence
  Description of Artificial Sequence: Synthetic oligonucleotide
uauggaugugugcaccacu

SEQ ID NO: 965781 - RNA, 19 nt, Artificial Sequence
  Description of Artificial Sequence: Synthetic oligonucleotide
cugagcugagagaacauuc

SEQ ID NO: 965782 - RNA, 19 nt, Artificial Sequence
  Description of Artificial Sequence: Synthetic oligonucleotide
ugaggcagauucggaaucg

SEQ ID NO: 965783 - RNA, 19 nt, Artificial Sequence
  Description of Artificial Sequence: Synthetic oligonucleotide
ugaugguacugucuggaau

SEQ ID NO: 965784 - RNA, 19 nt, Artificial Sequence
  Description of Artificial Sequence: Synthetic oligonucleotide
gagggcggaagucaagcag

SEQ ID NO: 965785 - RNA, 19 nt, Artificial Sequence
  Description of Artificial Sequence: Synthetic oligonucleotide
cagucucagaccuaagcug

SEQ ID NO: 965786 - RNA, 19 nt, Artificial Sequence
  Description of Artificial Sequence: Synthetic oligonucleotide
acacucucaaaccaugaau

SEQ ID NO: 965787 - RNA, 19 nt, Artificial Sequence
  Description of Artificial Sequence: Synthetic oligonucleotide
ugauuguccccaagcagcu

SEQ ID NO: 965788 - RNA, 19 nt, Artificial Sequence
  Description of Artificial Sequence: Synthetic oligonucleotide
gguaggauggccagcagcg

SEQ ID NO: 965789 - RNA, 19 nt, Artificial Sequence
  Description of Artificial Sequence: Synthetic oligonucleotide
uggucuugccggcauuggg

SEQ ID NO: 965790 - RNA, 19 nt, Artificial Sequence
  Description of Artificial Sequence: Synthetic oligonucleotide
ugcuuguggaguucugcag

SEQ ID NO: 965791 - RNA, 19 nt, Artificial Sequence
  Description of Artificial Sequence: Synthetic oligonucleotide
aggcuuccgacccuacccc

SEQ ID NO: 965792 - RNA, 19 nt, Artificial Sequence
  Description of Artificial Sequence: Synthetic oligonucleotide
uuaagcgccaccgcggcgc

SEQ ID NO: 965793 - RNA, 19 nt, Artificial Sequence
  Description of Artificial Sequence: Synthetic oligonucleotide
uguucuggcuacacucuca

SEQ ID NO: 965794 - RNA, 19 nt, Artificial Sequence
  Description of Artificial Sequence: Synthetic oligonucleotide
auccacuagcacaaacugc

SEQ ID NO: 965795 - RNA, 19 nt, Artificial Sequence
  Description of Artificial Sequence: Synthetic oligonucleotide
cauggcguuuccuccaccc

SEQ ID NO: 965796 - RNA, 19 nt, Artificial Sequence
  Description of Artificial Sequence: Synthetic oligonucleotide
ugggcuaggugauggagga

SEQ ID NO: 965797 - RNA, 19 nt, Artificial Sequence
  Description of Artificial Sequence: Synthetic oligonucleotide
gcuuuuggaccauccaucg

SEQ ID NO: 965798 - RNA, 19 nt, Artificial Sequence
  Description of Artificial Sequence: Synthetic oligonucleotide
auaugcaagucacucccga

SEQ ID NO: 965799 - RNA, 19 nt, Artificial Sequence
  Description of Artificial Sequence: Synthetic oligonucleotide
gcgauaauccucuugugug

SEQ ID NO: 965800 - RNA, 19 nt, Artificial Sequence
  Description of Artificial Sequence: Synthetic oligonucleotide
cugcccauggaacuguccc

SEQ ID NO: 965801 - RNA, 19 nt, Artificial Sequence
  Description of Artificial Sequence: Synthetic oligonucleotide
gcagauucggaaucggucc

SEQ ID NO: 965802 - RNA, 19 nt, Artificial Sequence
  Description of Artificial Sequence: Synthetic oligonucleotide
uuuaagcgccaccgcggcg

SEQ ID NO: 965803 - RNA, 19 nt, Artificial Sequence
  Description of Artificial Sequence: Synthetic oligonucleotide
accguuucacucaacaucu

SEQ ID NO: 965804 - RNA, 19 nt, Artificial Sequence
  Description of Artificial Sequence: Synthetic oligonucleotide
aacaggguagagugaaguu

SEQ ID NO: 965805 - RNA, 19 nt, Artificial Sequence
  Description of Artificial Sequence: Synthetic oligonucleotide
acgacacugagcauggcuc

SEQ ID NO: 965806 - RNA, 19 nt, Artificial Sequence
  Description of Artificial Sequence: Synthetic oligonucleotide
gaggauacagucagcaaca

SEQ ID NO: 965807 - RNA, 19 nt, Artificial Sequence
  Description of Artificial Sequence: Synthetic oligonucleotide
cugagcgccagacacguug

SEQ ID NO: 965808 - RNA, 19 nt, Artificial Sequence
  Description of Artificial Sequence: Synthetic oligonucleotide
gucagcugagcccacgacc

SEQ ID NO: 965809 - RNA, 19 nt, Artificial Sequence
  Description of Artificial Sequence: Synthetic oligonucleotide
agagugacugagcccagug

SEQ ID NO: 965810 - RNA, 19 nt, Artificial Sequence
  Description of Artificial Sequence: Synthetic oligonucleotide
gcaaacucacauuuuaaca

SEQ ID NO: 965811 - RNA, 19 nt, Artificial Sequence
  Description of Artificial Sequence: Synthetic oligonucleotide
ggucacaucaguuggucug

SEQ ID NO: 965812 - RNA, 19 nt, Artificial Sequence
  Description of Artificial Sequence: Synthetic oligonucleotide
agaucguggccgcugaagu

SEQ ID NO: 965813 - RNA, 19 nt, Artificial Sequence
  Description of Artificial Sequence: Synthetic oligonucleotide
cuuuaagcgccaccgcggc

SEQ ID NO: 965814 - RNA, 19 nt, Artificial Sequence
  Description of Artificial Sequence: Synthetic oligonucleotide
gcuuguggaguucugcagg

SEQ ID NO: 965815 - RNA, 19 nt, Artificial Sequence
  Description of Artificial Sequence: Synthetic oligonucleotide
cucauauggaugugugcac

SEQ ID NO: 965816 - RNA, 19 nt, Artificial Sequence
  Description of Artificial Sequence: Synthetic oligonucleotide
cauauguggucuugccggc

SEQ ID NO: 965817 - RNA, 19 nt, Artificial Sequence
  Description of Artificial Sequence: Synthetic oligonucleotide
cagguacucgcccacuccg

SEQ ID NO: 965818 - RNA, 19 nt, Artificial Sequence
  Description of Artificial Sequence: Synthetic oligonucleotide
ggcgauagcagccccuucg

SEQ ID NO: 965819 - RNA, 19 nt, Artificial Sequence
  Description of Artificial Sequence: Synthetic oligonucleotide
guccgugaccuucagcucc

SEQ ID NO: 965820 - RNA, 19 nt, Artificial Sequence
  Description of Artificial Sequence: Synthetic oligonucleotide
auauggaugugugcaccac

SEQ ID NO: 965821 - RNA, 19 nt, Artificial Sequence
  Description of Artificial Sequence: Synthetic oligonucleotide
gguuggugaccacaaaggc

SEQ ID NO: 965822 - RNA, 19 nt, Artificial Sequence
  Description of Artificial Sequence: Synthetic oligonucleotide
agacacguugcggagcgcg

SEQ ID NO: 965823 - RNA, 19 nt, Artificial Sequence
  Description of Artificial Sequence: Synthetic oligonucleotide
acaauuuaaugaacaagaa

SEQ ID NO: 965824 - RNA, 19 nt, Artificial Sequence
  Description of Artificial Sequence: Synthetic oligonucleotide
uagcaauaggggccgucag

SEQ ID NO: 965825 - RNA, 19 nt, Artificial Sequence
  Description of Artificial Sequence: Synthetic oligonucleotide
gaccuaagcuggcaaacuc

SEQ ID NO: 965826 - RNA, 19 nt, Artificial Sequence
  Description of Artificial Sequence: Synthetic oligonucleotide
ggugauaugcaagucacuc

SEQ ID NO: 965827 - RNA, 19 nt, Artificial Sequence
  Description of Artificial Sequence: Synthetic oligonucleotide
aagacuagccugagccccg

SEQ ID NO: 965828 - RNA, 19 nt, Artificial Sequence
  Description of Artificial Sequence: Synthetic oligonucleotide
ggaaggaggggcacuaugg

SEQ ID NO: 965829 - RNA, 19 nt, Artificial Sequence
  Description of Artificial Sequence: Synthetic oligonucleotide
ucagaccuaagcuggcaaa

SEQ ID NO: 965830 - RNA, 19 nt, Artificial Sequence
  Description of Artificial Sequence: Synthetic oligonucleotide
agcagcgauaauccucuug

SEQ ID NO: 965831 - RNA, 19 nt, Artificial Sequence
  Description of Artificial Sequence: Synthetic oligonucleotide
cuagcacaaacugccgagg

SEQ ID NO: 965832 - RNA, 19 nt, Artificial Sequence
  Description of Artificial Sequence: Synthetic oligonucleotide
guuguagagguuccuuuuc

SEQ ID NO: 965833 - RNA, 19 nt, Artificial Sequence
  Description of Artificial Sequence: Synthetic oligonucleotide
gcugagagaacauucugca

SEQ ID NO: 965834 - RNA, 19 nt, Artificial Sequence
  Description of Artificial Sequence: Synthetic oligonucleotide
caaaccaugaaugcagcga

SEQ ID NO: 965835 - RNA, 19 nt, Artificial Sequence
  Description of Artificial Sequence: Synthetic oligonucleotide
uaugcaagucacucccgaa

SEQ ID NO: 965836 - RNA, 19 nt, Artificial Sequence
  Description of Artificial Sequence: Synthetic oligonucleotide
augcguugguacucagcac

SEQ ID NO: 965837 - RNA, 19 nt, Artificial Sequence
  Description of Artificial Sequence: Synthetic oligonucleotide
uguccuggucacaucaguu

SEQ ID NO: 965838 - RNA, 19 nt, Artificial Sequence
  Description of Artificial Sequence: Synthetic oligonucleotide
cauauugcacguuuguccu

SEQ ID NO: 965839 - RNA, 19 nt, Artificial Sequence
  Description of Artificial Sequence: Synthetic oligonucleotide
agcccacguacugagcgcc

SEQ ID NO: 965840 - RNA, 19 nt, Artificial Sequence
  Description of Artificial Sequence: Synthetic oligonucleotide
auggcguuuccuccacccg

SEQ ID NO: 965841 - RNA, 19 nt, Artificial Sequence
  Description of Artificial Sequence: Synthetic oligonucleotide
cuugugugaugguacuguc

SEQ ID NO: 965842 - RNA, 19 nt, Artificial Sequence
  Description of Artificial Sequence: Synthetic oligonucleotide
aggcggacccgguacacag

SEQ ID NO: 965843 - RNA, 19 nt, Artificial Sequence
  Description of Artificial Sequence: Synthetic oligonucleotide
accaggggccuucacauau

SEQ ID NO: 965844 - RNA, 19 nt, Artificial Sequence
  Description of Artificial Sequence: Synthetic oligonucleotide
uacugagcgccagacacgu

SEQ ID NO: 965845 - RNA, 19 nt, Artificial Sequence
  Description of Artificial Sequence: Synthetic oligonucleotide
uccuccacccuagucucgg

SEQ ID NO: 965846 - RNA, 19 nt, Artificial Sequence
  Description of Artificial Sequence: Synthetic oligonucleotide
aggcacgacacugagcaug

SEQ ID NO: 965847 - RNA, 19 nt, Artificial Sequence
  Description of Artificial Sequence: Synthetic oligonucleotide
cacaaacugccgagggcgg

SEQ ID NO: 965848 - RNA, 19 nt, Artificial Sequence
  Description of Artificial Sequence: Synthetic oligonucleotide
uggcuggucagcugagccc

SEQ ID NO: 965849 - RNA, 19 nt, Artificial Sequence
  Description of Artificial Sequence: Synthetic oligonucleotide
acgaccagucaaccagggg

SEQ ID NO: 965850 - RNA, 19 nt, Artificial Sequence
  Description of Artificial Sequence: Synthetic oligonucleotide
uccgugaccuucagcuccc

SEQ ID NO: 965851 - RNA, 19 nt, Artificial Sequence
  Description of Artificial Sequence: Synthetic oligonucleotide
auauugcacguuuguccug

SEQ ID NO: 965852 - RNA, 19 nt, Artificial Sequence
  Description of Artificial Sequence: Synthetic oligonucleotide
acuccggaacagaugcagc

SEQ ID NO: 965853 - RNA, 19 nt, Artificial Sequence
  Description of Artificial Sequence: Synthetic oligonucleotide
gaaugcguugguacucagc

SEQ ID NO: 965854 - RNA, 19 nt, Artificial Sequence
  Description of Artificial Sequence: Synthetic oligonucleotide
caauaggggccgucaggcg

SEQ ID NO: 965855 - RNA, 19 nt, Artificial Sequence
  Description of Artificial Sequence: Synthetic oligonucleotide
uggugaccacaaaggcacg

SEQ ID NO: 965856 - RNA, 19 nt, Artificial Sequence
  Description of Artificial Sequence: Synthetic oligonucleotide
ugucccaguuaagacuagc

SEQ ID NO: 965857 - RNA, 19 nt, Artificial Sequence
  Description of Artificial Sequence: Synthetic oligonucleotide
uggaaugcguugguacuca

SEQ ID NO: 965858 - RNA, 19 nt, Artificial Sequence
  Description of Artificial Sequence: Synthetic oligonucleotide
gucccaguuaagacuagcc

SEQ ID NO: 965859 - RNA, 19 nt, Artificial Sequence
  Description of Artificial Sequence: Synthetic oligonucleotide
agucucggcucauauggau

SEQ ID NO: 965860 - RNA, 19 nt, Artificial Sequence
  Description of Artificial Sequence: Synthetic oligonucleotide
cuguccugguagcaauagg

SEQ ID NO: 965861 - RNA, 19 nt, Artificial Sequence
  Description of Artificial Sequence: Synthetic oligonucleotide
cacgaccagucaaccaggg

SEQ ID NO: 965862 - RNA, 19 nt, Artificial Sequence
  Description of Artificial Sequence: Synthetic oligonucleotide
cgaccagucaaccaggggc

SEQ ID NO: 965863 - RNA, 19 nt, Artificial Sequence
  Description of Artificial Sequence: Synthetic oligonucleotide
caacuuccgaccuguccag

SEQ ID NO: 965864 - RNA, 19 nt, Artificial Sequence
  Description of Artificial Sequence: Synthetic oligonucleotide
gaggcagauucggaaucgg

SEQ ID NO: 965865 - RNA, 19 nt, Artificial Sequence
  Description of Artificial Sequence: Synthetic oligonucleotide
uggucugggauguuagcuu
